United States Patent Application Publication US 2008/0034453 A1 - sequence listing, part 26

SEQ ID NO: 217137 - DNA, 590 bp, Glycine max
ccctcattgagaaatttcaatttttgatgtttgattataaaattgtggtgacttgagggggtgcatttcctaaatttggaaccccatatgttttaaaaccacttgctcatgaagatgcaatgaccctattccgacaccatgctctcttggaaaaaagcagttcaagtattcctgacgaagaacttgtccaaaaggttgtgagatattgcaagggtttacccctcgccattaaagtgattggtagatcactcagtcatcggcctattgagatgtggcaaaagatggtggaggaattttcacaaggtcattctatacttgattccaatattgaattacttacatgcttccaaaaactcttgcatgtattggaagataatcccaacatcaaggagtgcttcatggacttagggttgtttcctgaagaccaaaaaattcctcttcctgttctcattgatatatgggcagtgttatatggatatgatgatgacggcatagaaacaacggacatgaataataaataagactccatgaatctagttaatgtctttggtgcaaggaaaaattcaagtgactcagacaattactactac

SEQ ID NO: 217138 - DNA, 490 bp, Glycine max
aaaaattcatcctctcttctagggtttcttccgctcccaaaacaatctcgcctccaacctctctctctctctctctctctctctcttcaattttcgttgcattcgcagggcacttctccgctcgcaatgccgtttccggcgaaaccaacgcgggatttcgacgagtcggcgagtccgtcgaacaacctgtgggtggggaatctggcggcggacgtcaccgacgctgatctgatggagctcttcgccaaatacggcgcactcgacagcgtgacttcctattccgctcgcagttacgctttcgtgttcttcaaacgcgtcgaagacgccaaagccgccaagaacgctctccaaggaacctctctccgcggcagttccttgaagattgagtttgccagaccggcaaaggcatgtaaacaactttgggtgggtggtattagtcaggctgttacaaaggaagatttggaagctgaatttcagaaatttggtaaaa

SEQ ID NO: 217139 - DNA, 469 bp, Glycine max
agagctaaaaaaaactagtattccagtaagaacgacatcagatgaaaattgttatgtacattaaacagtaacaacaattaaaaaaaaaaaaagccaaccttacacctttgtattgtagtgagcaaagatgttaaaaagaaagaataagttggtgataaaagaactagtttctttaaataaaaatagttgtcgaagaatcgccgtcacatttgtcgcatacgaacatgcatctccctaggcacggtcattacagaaaacagttctcattgtcctggcccatgtcctcctggggcttgttgctgttgctgttgtagttggagaagaaggttggcagcaaattgtaacgttgactggtatctctggttcttatcagcctccacctctgtttgtccttgactgactccaaacataggaagttgctgattgggggtgtccgagtttacctggtccactgtatacagcatggcag

SEQ ID NO: 217140 - DNA, 563 bp, Glycine max
ttcttcttctactttttgccggtttcgattcttctagatcagtgttatcattggggatgaagtatcttggacaattgcctcaagtttatgaacatgtcttggaagaacaacttgaaattagtcaagggaaagaggcagggcagttgttgcaatgggaagatgttcagaaaatgaaatactcttggaatgttgcatctgaagtcatgaggctgtccccacctgtgagtggtgcttacagagaagctataaaggatttcacctatgctgattataacatccctaaagggtggaagctgcattggaacactggttcatcacacaaggacccaacgctcttctcgaatccggaaacttttgatgcttcaaggtttgaaggggcagggcctacacccttttcatatgttccatttggaggtggcccccgaatgtgtttggggctagagtttgctagactagagattcttgtgttcatgcataataatcggaaacggttcaagtgggatttggtggatcctgatgagatgttcaagtttgatcccatgctagaacccaataaaagactt

SEQ ID NO: 217141 - DNA, 491 bp, Glycine max
agctccttaacagaataatcaaagttttattgaaaccgatacttcatagaactcatggaagcagtacaaaaagctggggctaatcaatgtagcattaagttttttttctaatactaatctagcaatataagatgactacttagaaaacttctaaacaatgtattatgcgtatgatgaaggtgtttgactagaaatgggaaggatgaagtcgaattgcaagtccttttattggttctagcatgggatcatacttgaacatctcatcaggaatcaccaaatcccacttgaaccgtttcacgatattatgcatgaacacaagaatctctagtctagcaaactctagccccaaacacattcgggggccacctccaaatggaacatatgaaaagggtgtaggccctgcccctttaaaccttgaagcatcaaaagtttccggattcgagagagcgttgggtccttgtgtgataaccagtgttccaatgcagcttcca

SEQ ID NO: 217142 - DNA, 428 bp, Glycine max
ggaaagcgcatcatagcttgtggttctctttttgttgctgacaccaatcgattgggactacgtagcttgcaccattccttacagactcccctccgataaccctcgcaagcccactcccaccgaaatctcttggattgatctctttctcaactcaatcccctctttcaagaagcgtgcagagagtgatacttctgttcctgatgctgaagctaaagctgaaaaatttgctcaaagatatgctgatatacttgaagatttgaagaaagatcctgaaagtcatggtgggccttctgattgcattcttctatgcagactttgtgaacttgtgcttacagaattgggattcaaatatatcttcaaaaaagcaaaggatgaaaaaattgcaaaaaccatctacctgtttgagaatgttgttcatcttactgatg

SEQ ID NO: 217143 - DNA, 479 bp, Glycine max
  unsure (1)..(479): unsure at all n locations
gggtnngcagagggagcgatttagattaaacaaagatggagactcctcctcgccaacgaggcgttgtgaagaagaaggagacaaggggccgaaaacccaaaccaaaggacgaacacgggaagggtttgaaggaaggtaggaaaacacaacaacaacaacaacatcatcatcagcagcagcaacagcaacaagatcaaccttcggtggacgagaaatacacgcagtggaagtcccttgttcctgtcctctacgactggctcgccaaccacaacctcgtctggccctctctctcttgcaggtggggcccccagcttgaacaagccacttacaagaatcgccagagactctacctttctgagcagactgatggtagtgtgccgaatactctggtgattgcgaattgcgaggttgtgaagcctagggttgctgctgctgagcacatttcgcagtttaatgaagaggcgcggtccccttttgtg

SEQ ID NO: 217144 - DNA, 441 bp, Glycine max
tctttctcctttggaattttgagttttggtttgaagaagagacctctagatcttgatagtattaatgctgctagaaaggcaagagaaggtctaagatctgtaagaccaatgatgggtgcacatgatcagtttattggtaagtcaaaaggtgaagatatagtacctttgaagaattatttggacgctcaatattttggtgagattggaattggcacacccccacagcccttcactgtagtgtttgacactgggagttccaacctttgggttccatcatcaaagtgctactttactcttgcttgctatacccataattggtgcacggctaagaaattaaagacacatgtcaaaaatggaacttcatgtaaaataaactatggaactggatcaatatttggtttcttcaatcaagataatgttaaagttggcagtggctgtgtc

SEQ ID NO: 217145 - DNA, 422 bp, Glycine max
aaaacacggaatgaaatggggatggttttttcatataaaaagcacacaacacttgcaagggggatacttctacgttttaaatggataaatacattcggggtttcaaaaagtaaccagagctacaattataacagtttatttacaacacccttaacaaatttacaaaaaaaatcctccaaaaagcgtaattaaactgcttcggcaaagccaacttggagatttccatagtcaaaaacggggtgatatgcccttatgaaaacatccccaagaatccacaatggaccctttggaggaggaacatcaaaagcaataaaccccctaaggcagacttctgtaatgccttctccagttcttaaaatatactgctctggggtgaggacaaaaggtttatttccaattgcgaacctaatgtttggcttttt

SEQ ID NO: 217146 - DNA, 525 bp, Glycine max
cattttagaagaatacctttctcttcgctgcatcagaggagttgtaagtgaaggggatggcttcacaagctcttgtctcatcatcttctcttaccttctcagcggaggctgcaagacaaagtcttggaccaagatcactccaatctccatttggcttctccagaaaagcctcctttcttgttaaggcagctgctaccccccctgtcaagcaaggatcagacagacctttgaggtttgcatcaaagcaaagtctttcttacttggatggcagccttccgggtgactatggatttgaccctctgggactttcagaccctgaaggaacaggagggttcattgagccgaaatggctagcatatggtgagataatcaatggtcgttatgcaatgttggctgcagatggtgcaatagcacctgaaattttaggcaaggctggtctgatccctcaggagacagcccttccatggttcaaaacggttgtgtccccacctgaggacctaccctactgtgcagacttctacacac

SEQ ID NO: 217147 - DNA, 491 bp, Glycine max
gttccacaagattacaggcatatggtttgttttggagttaacacatatacgctgatgagacaaggctgggaaagcagtgtatgtgaaatttcactggaagaccactagtggtataaagtgtctattggaggaagaggccattaaggtgggaggagccaaccacagccatgccactcaagacctccatgattcaattgctgctggtaactatcctgagtggaaactgtttgttcagacaatagatcctgagcacgaagacaaatttgactttgaccctcttgatgttactaagacttggcctgaggacattatacccttgcagactgttggtcgcttggtcctgaataagaacatagataatttctttgctgagaatgaacaacttgcattttgccctgtcattgtggttcctggtgtatactactcagatgataagatgcttcaaaccatgataattctcttatgctgattcacaaaggcacagacttgga

SEQ ID NO: 217148 - DNA, 525 bp, Glycine max
aaatactaacttatacaaacggcatttattgagatagctcaacgagttgcatgcatggagttatgggtacacaactaaaattgcaagaaatggataagttctttcaaattgatcgaaaatcacatccttatcgtactctttgcacgtctgcaactctaacaatcattctggggttggcaacaacattaaatatttggcctcatgctcagacgagatgctatcttttggcctagagaacggtcagcctgagaccagtaagatatccagacactgcggatttcatgggtgacccgtgggtcagataaagcatcaacccatcggcgattaaatctatcttgcctgtcaggtgcccaagatcggtatctctctccgggctgcttaaagttgttctccttctcaattccacacttttcacgccttccactgcagatagcaggaggtatggggaacgtttctgcatgacgaacaggatcataccttgaagggaagtaattaacctcctcatccctgtgaatgaaattcatg

SEQ ID NO: 217149 - DNA, 520 bp, Glycine max
gtaatagtaatatacatatttattataaccaatggaagcgcgtgcaggagccgggcagcgtattgcaagaatctctgctcatcttcagcctccaaatttccaggaagggagtgatgttcttcttaagagtgctgagtgcagagcaaagggtggggcacctggattcaaagttgcaattttgggggctgctgggggaattggtcaacccctttctttgctgatgaagatgaacccattggtttcagttcttcatctttatgatgttgtcaacacccctggtgtcactgctgatgttagccacatggacactggtgctgtggttcgtggctttctggggcagcaacaacttgagagtgcactcactggcatggacttggtaatcatacctgctggggtaccaaggaaacctgtgatgacaagagatgatttatttaaaaatatatgctggaaattgtgaggaccctttgtgaaggaattgccaagagctgccccaatgcaattgtcaacttgattagtaatc

SEQ ID NO: 217150 - DNA, 389 bp, Glycine max
atagaacaataggctgatattttagcatctttctgagattgtgaagcagttccactgatgtcaaatccgctatcatcagcaattacggatgacaccaaaaatttagagtactattcttaagaagaagaaaaaaatctatgaacaaagagaagcattacacatggtccttatatataagagacaaaaactagtttttccttatcacatttattttctgatgaactctacacccttctggatgcttcctgctaactctctctttgccttttacaaaccaatcctttaatactcattcaggggacccagttgattaacctattttgctccaggacgacctagacgtaccttggttgcaaagaagggaagttccgtatcctgagaatcaacaa

SEQ ID NO: 217151 - DNA, 486 bp, Glycine max
ctcgagccgttcgttttgccactttagttttcgtttctgggtattctttttcaagtgttggtaaggatgaaattcctacagacgaatatgctttggaacttaatggcgttaccataaaagaaacagcaaaattaggccctcgcccagagaagcctattgaaatatatgaatttgagagctgtccattttgccgaaaggttagagaaattgctgccattttggatcttgatgttcttttctatccttgtccaagaaatggcccaaatttccgtcaaaaggttctagagatgggtggcaaactgcagttcccctacatggttgacccaaacacaggcgcttcaatgtatgaatcagatgacataattcggtatttgggtgacaaatatggcgatggaaacggtcctttatctttatcacttggatttttaacgacactaacggctggtcttggtatgcttagtcgtatttcaaaggggactacttata

SEQ ID NO: 217152 - DNA, 458 bp, Glycine max
caccgttcatggatccagtaagtttgtggtgtaacacgcccttggcgacggtgggtcccgagatccatgacctcatcgagaaggagaagcgccgtcaatgccgcggaatcgagctcatcgcctccgagaacttcacctccttcgccgtcatcgaggccctcggcagcgctctcacgaacaaatactccgagggcatgccgggcaaccgctactacggcggcaatgaatacatcgaccagatcgaaaacctctgccgctcacgcgccctccaagccttccacctcgacgcccaatcctggggcgttaacgtccagccctactccggctccccggccaacttcgacgcctacaccgtcgtcctcaacccccacgaccgcatcatggggctagatctcccctccggcggccacctcacccacggctactacacctccggcggaaagaagatcttcgccacc

SEQ ID NO: 217153 - DNA, 485 bp, Glycine max
caattgctaaataaaaaaaaaaatatggggtcaatcaggctaacaaaattaaacatgaaatcaaagacaaagaaacttcaaacttttgaattgaaacaccatggcgataaaccctatcactcccaggaaaggaagacacatatttcctttttctccatttctgcactttgtgtcgaacttgagtgacacaatttagtaaaaagtggtatggttgaacctaatccttgtacttcatttcaaataccaggaagccaggcatgtcaaacaaggcagagaacttctcaacatcagctttgagatcttcaatagccttgttgttgacgagacccttgttgaaatccttgagaagtttgccatgctccttctggaactccagggtgagagtcacagcacggtgaaggaactcaccaatctgctcaaagtttttttcaaccaaacccctataagtcatggcaggggcaccaatttgcactccaccaggggcc

SEQ ID NO: 217154 - DNA, 556 bp, Glycine max
caggtcctaaaacttgtactagcttcacattaaccaaccatttttcccatcaaaggtactggcaacttctcaaatttttctaattttcttgctccctttcttttctggtgtgtgcacttcgtcactttttgtgccattcaaaggtgcagcataagaagtaagaggaagttgcctagtgtttgagatgtctggtgttcttctttgggtgagttgtggacccaaggagaaccccatctccattgttggtcttgctggaagaggtggcagaagccagaggaggtttggactgtgcaatgggatcagttttgcaagcttttcaccagcagtggcagacccttcaagatcctcagaggagagggtatatgaggtggtgttgaagcaagcagcactggtcaaggagaagaataagggcaccaagagagcactgaatttagacacaccaacagttgaaggtgatttaacccatggggatctgttgagtgctgcttatgataggtgtggtgaagtctgtgctgaatatgccaagacaatttattcttgcacacaattgatgacc

SEQ ID NO: 217155 - DNA, 499 bp, Glycine max
ggccaagaacaaaatatttacttccaaactgaatattaaatggatttctgttgaatattttttacttgagatgtatactattaaaacttgaaaaaaaatatacactttatagctttctgatttctagtgaacagaatttacaagctcaaacaatttgatgctcattggaacaacttttacatacttctcgtaaccattttggtcaacttttggggacctagaagtgctcttccatatgcagcaggtagtgatagcagcttcttaactttacctacataagctcttttagtgaagttattgtagtcattggcttcaatagaatctaagatttgcctatacaacaacaaagatgcccatactggccacctgcttgcagagttgagctctgaaactcccttctctgcctcatcaaaaaacatccttgctctctgtatttggcccttcatgaaattgcgccacttgtcggtaactttccctctaaaaatgtcatcatctgata

SEQ ID NO: 217156 - DNA, 564 bp, Glycine max
  unsure (1)..(564): unsure at all n locations
gagacaagcagatgtgaactcacttatgctgttgttgggattgttgtgctacttgcttccaatgctgttcaaatacagtggtgcctcagctgctctcactgtagacccttcactacacttgtcaagagcttctagcattgtgatgttgattgcatatgttgtctacattgtctttcaactgtggacacacagggagttatttgaagaagaagatgtaaggtttcttgaattatgaaaatggttaattaagttggttagcaattaatctaatccttgccaatatcgtagaagtaattaattaattaattaacaccatgaattgttcaggacggtaaagatggcgaggatggttcagaagaacaagctgtgattggattatggagtggcattgcttggttggttggaatgactgtattcattgctgtgttgtctgaatatgtggtggatacaattgaggtaataattgacataaaatgtttttttttcttcaanaatgaagtccatttagttttgactataataaatattgatggtaattaatattgtcaaacataacaggatgca

SEQ ID NO: 217157 - DNA, 468 bp, Glycine max
cccacgagacctagggcaatatatagtaacacaataaatacaagagattctgcaaactgaaaaagggattcttactaaagcaaactcaaacaagaacaacttccactcatttggcatctaccgtagtaacacaagatcaaaagcagcttctctgatagaacacacgtacgtatgattcaacatctttcacagtagtggttcatttctaacagctagctattgcaacttaaaataattgcaatgcttctgcaaagtgctaactttttttcccccccttctttatggatatgacaatgtgatcagaatgaaacaataaccaatccattgaatttgaatctgattttgggtttggatcgataccaccattcttcatctcaggaaaggacaagaaataggccaaagcctgcaaaccaacttcccacattaatttaactttatatcaaattttatgtgatttcacaagaagga

SEQ ID NO: 217158 - DNA, 503 bp, Glycine max
ttttattactactactactactattattattattcaactcattaaaatggaatgggggacttatttttcccattcttactggagaactcgtgaagcaagcaggaaaaaattccagtagaggaagtgtttgagtcgctgaaatgttcaagagcaggtttaacatcagacgaaggagccagccggcttcaagtttttggaccaaacaaattggaagagaaaaaggagagcaaacttttgaagtttctgggtttcatgtggaaccccttatcatgggtcatggaagctgctgctataatggccattgctttggctaatggtggaggaaggcctccggattggcaagattttgttggtatcattgctctattgttcattaactccacaatcagtttcatagaagaaaacaatgctggtaatgctgctgctgcactcatggcttggtttggctcccaagaccaaggttttagagatgggagatggactgagccagatgctgcattttg

SEQ ID NO: 217159 - DNA, 462 bp, Glycine max
catcagaaaaaaaaaatatttatgtggggccttaaagggacctaaatatcattaacattctcaaaacaagacgaaaagtaaatcctatcaaccacgttatttggtatggaataaaagagtaaaccattcagattttgactgacaaaaggaccttcatcctaatctaaagacggattaacttaggtcttcattacatttggggttcttgttcttggataagcaccaaagtgtgttctgcttgaaggttgcccaaattccttaaactgtataatgctgttggattgtatcaatgtcaagccccttcagcttcactactgattcaacatgtcctttcaaagtatgaagctccctgagccttgcaacctcggcacgtctcttagcttgctcagcaatctctgaaagctccctgtaactgttcttgtcattgaaaaggttggttgtttcaggtggctgaagaccatg

SEQ ID NO: 217160 - DNA, 460 bp, Glycine max
gtagagttgatctacctttaatgtatggagcatcgtggaatagtagtggttgtggggcaccgtttctgagcaagacctacgacatggttgatgatccttccaccgacttagtggtgtcgtggggcgaaaacaacaactcctttgttgtttggaacgttccccaattcgccacagacatcttgcccaatcattttaagcacaacaacttctccagcttcgtcagatagttgaatacttatggttttagaaaggttgacccagatcgatgggaatttgcaaatgaaggatttttaagaggtgaaaaacaacttttaaaaagtatcagtaggcggaaatctgctcatgtaaatggtagtcaacaagcatctcaagtgcataaatcaactgctggagcatgtgttgaagtggggaaatttggccttgaggaagaggtggaaagaactgaaagggataagaatgt

SEQ ID NO: 217161 - DNA, 427 bp, Glycine max
cagcactgactggtggcagtgctttcttatttccaagtaaagcagcaaaaaagtgggcactgactggtggcagtgggaaggttgtggacagtggtcctgatgatcatatatttgtatactatactgaccatggaggtcctggggtgctcgggatgcctgctggtccttacttatacgcggatgatctgattgaagtcttgaagaaaaagcatgcttctggaacatataaaaacctagtattttatctggaggcatgtgaatctgggagtatctttgaaggtcttcttcctgaagatatcaatatttatgcaaccactgcttccaatgcagaagaaagtagttggggaacatattgccccggggagtatcctagtcctccccaaaatatacaacctgtttgggtgacttgtacaatgttgcttggatg

SEQ ID NO: 217162 - DNA, 513 bp, Glycine max
acaaaaataaatacaagttgtcattaatattaaacaataattttggcatcataaattcttccggaataattatacaaaagtgaccagggaaaacccgatctgccagttgcccactgaataaaaacacacatcatattactatgtgttgtcatacatgcattgtaatgagtggatattccaaagcaattggtccctttatccctccttaatccttatgccgtaaatggcaccatcccttgtaaattgtaattgcttcttcagaaatagaattatacaaaggtagttgcaatatctatttgccaaactataaatgtaaagacccttcttcccaatcctagtagtgtcccaattgtatttacaaaggtgggacaagatatgtatatacaagtacaaccatgtaacataatgtaacaataatcatactttggtctttactagtgcacattacagggagttattatgcactgaaacccctttgcagagaactccagggattggaaggaatactgacac

SEQ ID NO: 217163 - DNA, 474 bp, Glycine max
cttgattcgaaaaggaatgaactttagacttgtttctctcagagatggggttgcgtaaggttgatttcgaggttggaactgatggggttgctgtcatcactatgtgcaacccaaccgtcaatgctttggccattccaattatcatggggttgaagaacagatttgatgaggcagctaggaggaatgatgtgaaagctatagttttgactggcaaaggtggcagattttctggtggctttgatatcagtgttatgcagaaggttcaccagactggggattcctcgcatctccctgatgtgtccgtggaactagtagtcaattcaattgaagattcgaagaaacctgttgttgcaacagtagaggggcttgctcttggaggtggcttacaactggcgatgggatgccatgcgcgtgttgcagctccaagagctcaactgggtctacacaaactgactcttggtattattcccggat

SEQ ID NO: 217164 - DNA, 486 bp, Glycine max
agctcataataatttaagttctgaaaccgttttgttacgctgagaatgtagtttcatgctaagcaaacatgttaaataaagtaaaattaaaacacataccaaacttgaaggaaattacttgattaaagtagcatactgaggccttactagtcacccccaagaaacaattcttttccttaaatttttctctttgtgaaaccaactttaatttattatttaatctaggaaggaagcaaacattagttgttacatttttttattgtagaacatccaacatgctgaacaattggctttctcatagacgcgccattgactttggagtagatgaagcaggtgcactcagaggaattcctttgagtgctctttcttccaaataccttgagggtttatagaagttaccatataattgtgcccatttttttaggctggtaaatatatgattagccccaaccaaatctgcccagaaaacaatgccaccccggtaat

SEQ ID NO: 217165 - DNA, 400 bp, Glycine max
attgaatctcagaattctttaaattagatctttttctgctctttgaagggagaagggtctttgcttgattttggagatgtctctgctctcagatctcatcaaccttaacctctccgataccaccgagaaggtgatcgcagagtacatatggatcggtggatcaggaatggacctgaggagcaaagcaaggactctcccaggaccagttagcgacccttcagagcttcccaagtggaactatgatggttccagcacaggtcaagctcctggtgaagacagtgaagtgattttatacccacaagccattttcagggatccattcagaaggggtaacaatatcttggttatctgtgatgcctacactcctgctggagaacctattcccactaacaagaggcac

SEQ ID NO: 217166 - DNA, 489 bp, Glycine max
aaccattaaattattgtcattgtaacaatcggaaaacgagggaaaggaatagaagaaaacaatgaacaacccttgccagttagttgcaccaaccaacaaggcaccaaccatagtaccaatcaaaaggtaaaaagagagagagaccaaatcctactaagaaaagcataactgttcctttccatccaaagggagaaaacatgcaggttttgctcatggcttccacagaatggttgtgtctgcaatcatggaagtaaccacgtatgggtccatgttggaagctggccttctgtcctcaaaatatcccttccctgctttctctgtgtctctcccaaccctaacagaagctccacggtttgcaactccccataagaaggtgttgatgtcagcggtttcgtggcgtcctgtcaaacgacgttcgttgccttctccataagcagcaatgtgctccttgtgcttctttcccaacttgtcaattgctgctttgatcac

SEQ ID NO: 217167 - DNA, 490 bp, Glycine max
gaaaattcctcagcactgaattctatcttgaggggaccaccagtaagtgttgagggccgaaaggagaaaagacaaaagattgatcggaaagggtctatgcagtgtgctacaatacttaagagtttaatgtctcactcatatagttgggtgtttcttaagccagtggaccctgtagcattgagtattccagattattttacaatcatatctcatccaatggatttgggcacaattaaatctaagctggagagaaacatttattctggcactgaggagtttgcagatgatgtcagactgaccttctcaaatgcaatgaaatataatcctcccggtaatgatgttcatatgatggcgaaggaactcatctaaatatttgacagaaaatggaaagactttggtaggaaatggaagtttgaagatgagcatgataaaagcgaaactgtaacaatttaggaaactgggagaaaaagtctttgtgcaatgctttccc

SEQ ID NO: 217168 - DNA, 503 bp, Glycine max
cactagttttttttctacacatacatatatcccaagaaaaattaagcaacgattcaagaggaaaatgggttctgaacttgaagctcccattcacgtcctcatggtgtcctatccagcacaaggacacataaaccctttgctcagactaggtaagtgccttgctgcaaagggcttatttgtaaccttcaccacctcagagaccgctggtaaaaacatgcgaaccgccaataacatcactgacaaatcagtgattcctgtcggcgatggttttctcaagttcgatttctttgaagatggcatggcagatgatgatgatggtcccaagaagataaatctcggtgatttcagtgcacagcttgagcttttcgggaagcaatacgtttcccaaatggtcaagaagcatgctgaagaaaaccacccaatttcttgcatcataaacaacccttttgtcccatgggtttgtgacgtaactgctgaacatggtatttcttctgccatgttat

SEQ ID NO: 217169 - DNA, 544 bp, Glycine max
  unsure (1)..(544): unsure at all n locations
gtcaagagacacgtggttttctttctagagtgccattctgtggtttcttggtgggtttctttctgcatcacatcacaatttgcattgcctcgtgtcctttttcttctttgctctccaaaaatctcacacacacaggtatctagcaaatgggttctcaccaacaagaaccatggctattggagaatgggaaaccaagggttttgaccaaggagaccaggcatggccgttctgcacacagaatgtcctccacctctttgcgcaagaaatctagccgaactcttgtctcaaaggttccatgtgccactctcagaaactntctttcaaatttgcaagaggttattcttggcaccaagctttccattctcatccctgctattccagctgccatcgttgctgagtgctttggctttggaagaccttggatttttatattaagcttacttggacttcaccacttgctgaacgtgtgagcttcattacagaacaagttccttttacacttgtcccacagttggaggacttctgaagctacatgtggaaatgt

SEQ ID NO: 217170 - DNA, 454 bp, Glycine max
aaaattaaaatttataaaaattttatttcccacgagacctagtgcggtatatagtaacacaataaatacaagagattctgccaactgaaaaagggattcttactaaagcaaactcagacaagaacaacttgcactcatttggcatctaccgttgtaacacaagatcaaaagcagcttctctgatagaacacacgtgcgtatgattcaacatctgtaacagtagaggttcatttctaacaggtagctattgcaacttaaaatagttgcaatgcttctgcgaagagctaactttttttcccccccttctttatggatatgacaatgtgatcagaatgaaacagtaaccaatccattgaatttgaatctgagactgggttgggatcgataccaccattcttcatctcaggaaaggacaagaaataggccagagcctactcattaagcgcttaaaact

SEQ ID NO: 217171 - DNA, 546 bp, Glycine max
ccttagccttccctacaactccaaacacatttacatcatcatccatggctgcctgcgtctgcactgtcggagctgtcaacagagctcttttgaacctgaatggttctggagctggagcttcagctcccagttcagccttctttgggaccagcttgaagaatgttattgcctcaagggtccccaacagcaaggtttccggtggaagcttcaagattgttgctgtagaagagaagaaagagattgaagagacccagcagaccgacaaggacagatggaagggtcttgcctatgatatctcagacgaccaacaagacatcacaagaggaaagggtttggttgactcccttttccaagctccacaggatgctggaactcactatgcagacatgagctcctacgagtacctcagcactggacttcgccagtacttggacaacaaaatggatggattctacattgctccagcttttatggacaagcttgttgttcacatcttcaagaactttatgaccctgcccacatcaaggtcctctctttcttggatct

SEQ ID NO: 217172 - DNA, 400 bp, Glycine max
aaagaggaaaacggcccaatatgaaaaatttataaaaaacatttcaaacttacctttttttttttgcccctaaaacattgaaaatgccaaaaatgttccccccaaggtccctcccaacttctaacacttggattagcacaacaaccttcacaaacaaaaatatttacttgccaagtttgctttgcctccaattcaaaactggaaaaaaggccccctttgaataccatccttggtagcatttccaaaaacagccttgttcaagtacttgacagccaattggacccttttgacatttttttgtttttggacaaacttgttcccctacagaaagagcttttccaaagttatcttgggctgctcaaaggtgggagggccatttttggaattcacaagctttttc

SEQ ID NO: 217173 - DNA, 517 bp, Glycine max
gaggagttgaagagtacttcccatatgatgtaattcgtattagaagtaatgagaggctagggaatgaagatatgcagcatctactccgtatttttaacatgggaggccaaccacatcccacctttaatgctcaggatgatggataccctagttcatctacatacatttctgcaaaccccatgggctacaattttgatgatgaaccaaaccgctcctcaggcaaagctgttgtgggctggctcaagctgaaggcagctttaagatggggtatttttattcgaaagcaggctgctgagagacgggcacaacttggtgaattggatgacccatagagatcttggggtgcattactgatctttagtgatctgaacaataatgtttctggttatagcatccaaggcttcttagtcttttctgacattcagaattggtgtcatgctgaaatctcgtaacaggagcaaggatatgaaatctggactgaatctatttggtgcgaacctaactcaaagaatcaact

SEQ ID NO: 217174 - DNA, 522 bp, Glycine max
ggggacttctgctgagtcagtgccgcgactcgggcgtgtcgtgccgcgccgtgaactgcaccgggacgcggtggtccaacggcacgtcggcgattatggaaacctttctagactcggatttctgcttgcagccgagaggggacagcttcacgcgccgctccatttttgactgcatggtggccggttcgattccggtttttttctggcggcgaaccgcgtatttgcagtacgagtggttcttgccggtcgaaccggagagttattcggttttcatagaccggaacgcggtgaagaatggaaccttaaccgtgaaaaacgtgctcgagaagttcacgaaagaggaggtgaggaagatgagggagaaagtaattgagtacattccgaggttggtttacgcaaacacgaaacaagggttagatggtgtggaggacgctttcgatgttgccatcgaaggagtgttcaaaggattaagggacaggaacaaccgcagtttcatatgtggaaattacggcgatgcaatgc

SEQ ID NO: 217175 - DNA, 553 bp, Glycine max
aatgaagcatgcggtgccagctattctggttgtcggttcctcgtcaataatcgggtttcggtgcctcatgccatcatccagtggttagggtcggagagcttgccctcacttttctcttccatcttcactctcagtctcactcactcaccattcaccattgccctttgcgtcgctctaagcaacacgtccttttcgatccacatattccagtgtgtatataagtcatcatgctgttgtgacagttaaagatagtgtggtgtggagaaggagccttgtgattagttgtttgagaccaccaaggacgtaaacaagaggatgtcaaacagtacgaacactcattggtgttatagctgcaggaggccagttcggctggggcggcgagatgtggattgtcctagctgcaatttgggatttgttcatgaacttaatgatattggccatgttaatccttgtgacctctttggaacggacgacaatgaagaacgagatcaaaggcttggactaatggacacattctctgctttatgaggcatcaaatggcagatatggggcg

SEQ ID NO: 217176 - DNA, 427 bp, Glycine max
aaaaagcaaatccagactggggggcttaaatctcaaaccggtttcaccccaagcaagcagcattagtacataaaatttttaaatcaacctgagccttttaataaacaaaaaaaaatgttatactcaccccaagtcattcaaatggccacccaaaatacccagcttgatgatgatggctattttcagggatagttggggttggggggctgcttcctgttgcttcataattactggtaaaatgaaaaaaacgaaaaggccccaaaaaggaaaaaggatttttccttccatgggtctccctaccactactacttacccttgcacttttacttttaccattggcgccaccggtactactacttaatccttggggcggcagttcttggcggaaaacggggcaggagttttgctgccccaaccatggaacaat

SEQ ID NO: 217177 - DNA, 356 bp, Glycine max
cgacacccttaacactttttatattaaaatgttgcgccccacctccaaggaacaggtggtggggtggccgccggtgagggcaagcaggaaaaatgctatgaagatgagttgcaagtcggtgaaggtggcggtggatggagctccttatctaagaaaagtggatcttgaaatgtacgaaacttatgagcatttgatgagggaattagagaccatgttttgtggtttagccattcgtaatcatttgatgaatgataggaaactgatggtttctggaaatgggattgaatacattcccacctatgaagacatatatggtgcactgtatgttggtcgtagatttaccctggaacatgttt

SEQ ID NO: 217178 - DNA, 537 bp, Glycine max
cttcttgtgaagccagtgaagattcagatgatggggaagagcaagggattgagagttgcatgccaagccaccagcatttccgctgatagagtccctgacatgggcaaaagacagctcatgaatcttcttcttcttggtgccatttcactccccactgctggaatgcttattccctacacctacttctttgtccctccaggttcaggttcttcagctggcggtactgttgccaaggatgccgttggaaatgatgtaattgccgagaattggctcaaggcacatggacctggtgaccgaacccttacacaaggattgaagggagatcctacctatcttgttgtggagaaagacagaacccttgcaacatttgcaattaatgccgtgtgcactcatcttggatgtgtcgtgccatggaatcaagcggagaacaagttcatctgcccttgccatggatctcagtacaatgaccaaggaagagttgtgagaggacctgcttcattgtctctggcattagcacattgtgatatagatgatggg

SEQ ID NO: 217179 - DNA, 340 bp, Glycine max
acccggaaaaaaggggcctgttcaggttctttttcattttagcttcagttcacaaaatatcaatttgtttacaaaatttatttatgccttaatacaaaacagaatgtttgaatttcatgtttaaatttatattatgaccacagaggttttaaggagtttaagcccaccatggagcatcacctgttctgaaatctgtttcaacccaaggaacaaacacgaccttcccatcatttatatcacaatgtgctaatgccaaaaacaatggagcaggtcctttcacaacttttccttggtcattgtactgaaaaccatggcaagggcaaatgaacttgttctcccc

SEQ ID NO: 217180 - DNA, 532 bp, Glycine max
  unsure (1)..(532): unsure at all n locations
ccaaccaccaaattaattcatatatagagagagttaggaaaacaatggaggccatttctcctaagcatcttatgacatcccttgtaataattatagcttctagtttgaccgcacactgtggctgtgccaagagagggggtgaaagaccatacaaagaagccaacacactgttcataagaacatcttgcagctccacaacatatccaagactctgctacagctccttagtgaagcatgcagacttgatccaaacaaatcgtgtggttctgacaggcgcagccctgaatgtgactcttgcgtcagtgaaatcgacatcggcaatgatgtcaacgctggcaaagaagcaggggctgaagccaagagaggttgcagcgatgcangactgtgtggagcaactgagtgacactgtggatgaactgagaaggtctattgcagaaaatagtgatctaagagctttcaattttgagatgataatgagtgatgtacaaacatgggtgagtgccgctttgacggatgaaaccacctgcaacga

SEQ ID NO: 217181 - DNA, 459 bp, Glycine max
tctttttttttttttttttttttttttttttttttttttttttttttttttttttttggggtttttttttttttttttaaaaaaaggtttattgggccatatcaactccccttataaaaaaggagcccccgaataatttccccccacgaaaaagaaacaaaagagactttcccccttttagggggcaaacccacccccctaaaattcgcccccccccttgtggccccaaaacattaacccttcccgggggggcccccccccccacccaatggaaaattcccttttaacaaatttttaaaccaccccgcgggcgggggtcccaaattttaggggggggaaacccccccttaaaaggggaacaaaaaaaactaaaccccgggggggagggaaaccccccaaaaaaaaaagggggggagtttgaaaaaaaaaaaaattggctctccttttttaaaaaaccaa

SEQ ID NO: 217182 - DNA, 451 bp, Glycine max
atgggtctggacctggtttttcttttcccagttcatccttctctgcaagcagcggaagaacgttattggctccctgggtccccaacacaaatatttcctctggaagcttcaagattgttgctgtagaagagaagaaagagattgaagagacccatcctaccgacatggacagatggaagggtcttgcctatgatatctcagacgaccaacaggacatcacaagaggaaagggtttggatgacttcctttttcaagctccacaggatgctggaactcactatgctgaaatgagctcctaccactaccttagcactggacttcgcctgttcttggacaacaacatggatggatattacatcgctccatcttttatggacatgcttgttgctcacattaccaagaacttcgtggccctgcccacatcaaggttctttttttttggatgcgggga

SEQ ID NO: 217183 - DNA, 430 bp, Glycine max
ccaattaaaggggccgctttaactcaaaattatagaggaagacagtccaatatgaaaaatatagtaaaatcatttcaaacttggcattttttttttgcccctaaaacattgaaaattctaagaatgttacacgcaagtcccatcacaacttttagcacttggatcagcacaaccttcaggaacagaaatatttacttgccaagtttgctttgcctccaattcaaaattggaaaaaagttcccctgttaatagcatcctcgttagcatttccaagggcagcctcgttcaagtccttgtcagccaattggacttttttgacattctcttgttcttggacaagcatgttaccatacgtaaagagcttttccagagtcatcttgggctgctcaaaggttggaggcccatcttttgagttcacaagctttttccc

SEQ ID NO: 217184 - DNA, 323 bp, Glycine max
  unsure (1)..(323): unsure at all n locations
atccgattggaaggcctttatcattatttgtgggactagagagtacagatgtgacggtggcacacttttctccaggaaggacagcttcataacgcatagagctttttgtgacgctttggctgaagaaagtgcgagggtaacaacagttccagcagctttaagcaacttgagaaacgatcatcatcatcatttgaccaatgctcaagcttcgaggatccctcagattaanttttcagggttccactcatcaaatcaattattcggtggggggatcatcaaaagcatttattggcgaatcattatcatcataaacaacaaaagct

SEQ ID NO: 217185 - DNA, 389 bp, Glycine max
ttttttttttttttatttttttttttttttttttttttttatttttttttttttttgggttttttttttttttttttttcatatttaaaccacatttattcaaaataataattttttttttttatacaaaaaaaaaacctccccccttaaccaaaaaaaaaattcccaaaaaatattttttttaaaaaaaattaaaaataaccctaaaaattttccccacccccctaaacccaaaaaaaaaaatatttctctctttttttaaaaaaaaaaaaaagctaacccaacccccataaaaccacccaaatttgtaaaaaaaaaaaaacccccaaatttctcgcccacaaaaaaaaaaaaaaatttatatttttaaaaaaaaaaaaacttttttt

SEQ ID NO: 217186 - DNA, 498 bp, Glycine max
gaacaagtagttgagaactaagattgagaagcaaatggcttcctcaatgatctcgtccccagctgttaccactgtcaaccgtgccggtgccggcatggttgctccattcactggcctcaagtccatggctggcttccccaccagaaagaccaacaatgacattacctccattgctagcaacggtggaagagtgcaatgcatgcaggtgtggccaccagttggcaagaagaagtttgagactctttcctacctgccagaccttgatgatgcacaattggcaaaggaagtagaataccttcttaggaagggatggattccttgcttggaattcgagttggagcacggtttcgtgtaccgtgagcacaacaggtcaccaggatactacgatggacgctactggaccatgtggaagctgcctatgtttggttgcactgatgcttctcaagtgttgaaggagctttaagagcttagactgcatacccaacggcttcattcgta

SEQ ID NO: 217187 - DNA, 497 bp, Glycine max
cattagttctcatccattaatttccattgaagtccgaaaacagaaaccaaaaatacaggatgatgaaatctcaaaaagcaaaaacaaatgggaatgtagtttaagtacaaacaaacaaagtggggtggcggctacaaatgctttgcaaatttttcacacttagaagcctgggggcttgtaggcgatgaagctgatgcactgcacttggcgaacgttgtcgaatccgatgatacggatgaagccgttggggtatgcagtcttagcctcttgaagctccttcaacacctgagaagcatcagtgcaaccaaacataggcagcttccacatggtccagtagcgtccatcgtagtatcctggtgacctgttgtgctcacggtacacgaaaccgtgctccaactcgaattccaagcaaggaatccatcccttcctaagaaggtattctacttcctttgccaattgtgcatcatcaaggtctggcaggtaggaaagagtctcaa

SEQ ID NO: 217188 - DNA, 550 bp, Glycine max
  unsure (1)..(550): unsure at all n locations
gttgttctctgtttcgattcagcggaaacaaacatgtcgtggtgttacggcgctgagcctatgactttgcagttgccgttgcaatcaagagcagcatcatcgttccattcccacgttggaggagtaacagtaacattctcaacactgtctcttcgaccctcttctcctcttgttctgacccacaacctccacttccaacccaaactcaaacgcgcttccacaaccattcgctgctcctctgcgttgactcctcaattgaagtctaccttggatcaagttattgcttcaaataaagtagttgtgtttatgaagggaactaaagactttccacagtgtggattctcaaacacagtggtgcaaaatattgaagttcttaaatgtgccttttgaaaccataaatgtgcttgaaaatgacttgttgcgccaagggctgaaagagtacttcagttggcctaccttttctcaagtctacatagaaggagagtnttttgggggtgtgatatcactggtgaagcattataaaagggggaattgctggagctgttggaaa

SEQ ID NO: 217189 - DNA, 441 bp, Glycine max
actcaaataccgggatattgggtttgcagtaatcataataggcaattggggacacaaaatgcatcatacaatttatttggcccattggcactggaccccagtataactttagggggaagattacaaattgcaaacttgggaaggcctcatattccttccatagcttaaggacaacaatggcttttccaacaaatcctgtaattcccccttctgatatgcatcaacagtgatatcacacccaccaaaaaacttttcttttatgtagacttgaggaaaggtatgccaactggagtacttttttagcccttggcgcaacaagttatttttaaacacatttgtggtttcaaaaggcacatttagagactttaatttttgcaccactgtttttgagaaatccacactgtggaaagtttttttttcctttataacaccacttctttt

SEQ ID NO: 217190 - DNA, 408 bp, Glycine max
cgagatcttccagctgctgccgcatgacacgcaggtcaacctgctctcggccacgatggcgaccgacgtgctcgaggtgacgaataagttcatgcgcgaccccgtgcgcatcctcgttaagcgcgacgagctcacgctcgagggcatcaagcagttctacattgccgtcgacaaggaggagtggaagctcgacacgctctgcgacctgtacgagacggtcaccatcacgcaggccgttatctttctgcaacacgcgccgcaaggtcgactggcttaccgacaagctgcacgcgcgcgagttcaccgtgtcggccatgcacggcgacatggagccaggccagcgcgaggtcatcatgcgcgagttccgctcgggcttgtctcgcgtcctcatcaccacggacctgtttg

SEQ ID NO: 217191 - DNA, 511 bp, Glycine max
gtgttgaccacgttctatcatgtcttttgcagcgctctcaatcccatatgcagctgggctaggcgcatgcgcttttctctactttgttgtatatccggtcatcgaatattttcgcgatgttaacggtcttcgacgctatccgaacatgcacccgctctcgggtatctcttcgataccgttcatggtgcttgcacacggcggggcacggtccacatacttagagaagttacatcgaaagcatccagtcatccgtgttggccccaacttcctgtcatacggcgaccttcgagctgtaaaggatatctatggccataacacgccctgcaccaaggacggatcgtacgtgattactgcgggctctcattaccatcttgccgatgtgatagacaagcacgatcatgcccgaaagaggaaattgatgagctccgcgtatgctatcaagaacctggagggctgggaacacaaagtagccgacaagacgcagaagctactgaagcacttcgacgagtgc

SEQ ID NO: 217192 - DNA, 485 bp, Glycine max
ccacgtctatcaatttgagctatgtgcgcagatctatgaagcacccaaacacctctgttatgcaacaaaaagccttctccttactcctgctgggccgattttcgctttcgccgccagatcttcactggcatctgacccagaatccagttcatcgtctccaaccgttgcagctcccagtttggactgctcagcgcaaagtcatagcgtcgcaacacgctcgcgagcaccacagtttgctcaagatatgagatgttgcgaccaatgcagcctcttgcgcctgccgagaaagccagaaagcagggttgcaacgccttgcccttttcacccagccagcgcttaggaatgaacttatcgggttgtggaaacatggactcctggcgatgcgcaacgtatgcaaacatagcgacagagacaccacctgggatgtagacaccgaggatgttcgcgccttctgttggcgtttgtcccggcacccctgaggggtc

SEQ ID NO: 217193 - DNA, 327 bp, Glycine max
attttaatcacgcgcacattatctcaacacaacaattcactaagctaaagggacgggatcatggcttcctcgtgtgcttcctctgccattgcagctggtgccatctccacaccaagttcccagaagaatggatcactcttgggaagcacaaaagcttcttttcttagtgggaggaaactgaaggtgaacaactttacaccagttggagcacgatccagcactacaggttgcgcagttgctgagcctgataggccctttggggttcccaggcagcaccccttccttcatgggctaaatggcagttttgccaggaaaaattttgggctt

SEQ ID NO: 217194 - DNA, 494 bp, Glycine max
gtgattacttcctgaatttacattaaatgcatctaaaccttaaataggtatttgtacattgaatcttcaatctatgcatgacaatagaagtagccattttacaagctttcaccaacataaacactcccacctaaaaccatttaagcgttacaacttagttaaaaaggtttgccaatgtttctccaaggcttgcaatcatagagttgttccaacacttctcacttgggagtgaaagcagcaaaaatagtagcatggccaggatctgcaaggtgagcaaagaggttgtcaataggaccagtgccagtgtaaatgtgctggaaccatgcccccatcacagccaacatggccaacctcccattcttgatctcctttgttctcaactccttgatcttctcaggagaaccacttccccagccaagtgggtcaaaccaaagcccacctgggtacccaacatcagttcctgtgagcttgttgttgggaaagatggggtcagt

SEQ ID NO: 217195 - DNA, 586 bp, Glycine max
gcaaccaccacaccacacagcacttcccttttcctcctccaccatgtcattgccaccgccggcgctggtaacggcggcgactccgacggagcttccgatccggcagattccgggaagctacgggttcccgttgctgggccccatctcggatcggcttgactacttctggttccagaagccagagagcttcttcagaaagcgagtggagaaatacaagagcaccgtgttccgcaccaatgttcctccctccttccccttcttcgttaacgttaatcccaacgtaatcgcggttctcgacgtgaaatcattctcccacctcttcgacatggacctcgtcgacaagaaggatgttctcgtcggagactttgtccccagcgtcgccttcaccggaaacatgagagtcggcgtttaccaggacactaccgaacctcaacattccaaggtgaagaactacatcatggatattctgaaaagaagctcaagcatatgggtatcagaactagaatcaaacctagacacactgtgggacaacattcgaacatcactctcgaatcctcatcagtttcgaaccttttccgtacaacag

SEQ ID NO: 217196 - DNA, 510 bp, Glycine max
atgaaagagttgcataaacctgcctcttctatataaatagatcatcattctcaagtaaataatataccttagataaaatacaagctccacaatgaaaatacacatttacccttctttcacttggtcttttgaagggcagtgatggaactgccatccccttggatggaatcatacctgcgaaaaaggtacgccacaatcaaagccgcggtgagtgtgacaacgtccttacccgcgcactgtttattggacacactgggcgacccggtctgaggcccattggaccaatacaagtagttcaacaactgggcccctttctcttgggtgaaccggtccggcttgaaccggtccggttcgtcgaatataacggagtccctcatgacgagcttctgaaagccgcacagcaactcgcccttcttgacgtggaagaccgagtcgtgcgaactcaaccggaagtcctttcgggctcgaccgtactggagtggaaccggagggttcatgcgcagcgtttcg

SEQ ID NO: 217197 - DNA, 519 bp, Glycine max
cataaagatgctcatttatggaccaatattaaggaaatgagcgcacgtgaaatggcagttgcagcacgtgagggttctagacagcttcagatcctcaaatctgaagataggaggaaaatattgctggcaattgctgatgcattggagaaaaatgaaagtatgataaggcatgagaatgaggctgatgttgctgatgctgtggtagctggatatgaaaaatccttgatatcacgtttaaccctgaagcaagagaagatctctagtcttgcaaagtctgtgcgcttgctggcagatatggaagaaccaattggtcaaattttaaaaaggaccgagctagtagataaactcatcctggagaagacatcatgtcctttgggtgtccttctggttatatttgagtctcgacctgatgcccttgttcaaatagctgcattggcaattcgaagtgggaatggtctactgcttaaaggtggaaaggaagcccgacgatcaaatgcaatcttacacaaggtcattact

SEQ ID NO: 217198 - DNA, 463 bp, Glycine max
ctgttaaacaacttcccacacaagggaatatagttcatacaattattgagtaattgaattctccctaccattaagtgtacacaatgttgttcaaagttgatcatacatcattctgttcaacagtttgaatcctccaaaactgagatattaaatgctgaaactgacctgagatagaccgtaaccaatatagaagccgccaacttttcacagacagtaactaacataaaagaagcctacttcgcacgtaaaagtgacttgatgatagtatcactcataccatcagcatgagcaaaaatgtgaccagaaccttggagttcatgatagttaatccatggaaggttttgtgctatgtatcgttgcagtgtaactggaaccatcatatccttatctccttgccaaagatggacagagccttcgttatttggaaatgggttttcaagatcaaggggactatattcccagt

SEQ ID NO: 217199 - DNA, 449 bp, Glycine max
caaagggaagatacgacatcatgttgaactacatgcctaaagttggctctcttgggcttgacatgatgttcaggacatgcactgtgcaggtcaatctggactttagttctgaagctgacatgatcaagaaatttcgtgcaggccttgctttgcagccgatagcaacggctctttttgcaaattcaccctttaaagagggaaagccaaatggttttgtcagtatgagaagccatatttggactgatactgataaggaccgcacaggcatgctgccttttgtttttgatgactcttttgggtttgagcaatatgttgattatgctcttgatgttcctatgtattttgtctatcggaaaaacagatatatcgactgcactggaaagaccttcagggactttttggctggaagacttccttgtatccctggtgaattaccaactctcaatgat

SEQ ID NO: 217200 - DNA, 500 bp, Glycine max
aaagaaaaatttgtgtttattcaagcaacatttgcgcctagggcctaccacaaacatttaatctattgacactcttattaaaatgattatattgatggattttcaaatttgtgacattgaatgtcagcttgatcagatcatgttttccaagaaaggtatatgagaagcctcaaggcaaaaattacatttatattatttcctatatctaaatgaagctcaaatgagagataaccagaactataaccaaaggattacacaattaatcttccacagacatttgaaagacaatactaccttaataaagcaattcctcaaacacatgatctacggattgctcccactttccatgatacaattccaaaagcctctcagctggagtgacacctgttctaaccacctcggcaacctcattcaaaaatcccgattccttgaagcctcttctctccaagccatcctttgccaactttagaacatcttcagcaacatgcttcagcaaaccg

SEQ ID NO: 217201 - DNA, 327 bp, Glycine max
tttcacaccatttttctattgacttcatcacaatataaaagatcattagtgtcggtattatcaccaccatattcttttggacttcctctgctatttctaggtttcgttttatttggctttgattttcttctgcaaccttatctactgcaaagctttgattactgagtctaacttaccctgccacagtttgccttgtttacctgagctctgtttttaactggtctttgatcaaggatggccataaaggcaattgagttgttgaaaggaagcggaaaccatgaagagatatttgaagttcttgcagcagtggctgcatctttgggggat

SEQ ID NO: 217202 - DNA, 365 bp, Glycine max
gcggggaaataaaccatttattggaaatcacaaaacattaacaaactaggaattctcacttccattcctcaacttatcacaaaaggggggattactaacatacctggtgtaaaaattctcaaatcccccatttttagttatatattatttacaaattttatgcatcacatcatgcctttctattttttagtcaacacataccaagttgaacatgctaaaaacataaaaagcatccatgtcaatgggtcacaccattggcaatcccattttgggaaaccattcttggtgagtccaataaaggaggctttttcaaccaatattggtgaaatttttgcctcgcatactccttgtagtcaaaaacaatt

SEQ ID NO: 217203 - DNA, 515 bp, Glycine max
ggctcgagcaagattcttagagctcggcaaccttattgggacctcaacttctacagtaatctttccaccagacatcagcttccatgattttctgcactctattctgaggtgaccaattctgttcttcttttctcgcataataaagtaatcaataagcacataaaccttcgaggacatggcatcagccttgtccacgaccagtgtgctttgctggaggaatcctcagcacatgcatattatctcaccctcttcacagacacttcaaaatggaactctaagaactgtagctgcttcagcctcaaaagatatcagcatagaaagtgacaagtgttcctctttgttggtgaacagaagaacaattttggcttctggggtttccttgttgtctttcccgggtgagagtttggctgtggtgaaacaaggccttctagcaaggagaattcctggcctgtccgagccagatgaacaaggttggaggacctatcgcaagccggatgagaagtcaggaggacatg

SEQ ID NO: 217204 - DNA, 495 bp, Glycine max
cgacaacagtgacccagacaatcgctttctgattccccgggaaatctatcacaatgccgtccaacagactcacctacaggcgtcgcgccccctacaacaccaagagccagaaggtccgcgtcatcaagacgcccggtggtgagctccgttacctgcacatcaagaagaagggcactgcccccaagtgcggtgactgcggttccaagcttcagggtgtcccagccctccgcccccgcgagtacgcccaggtttcccgccccaagaagaccgtccagcgcgcctacggtggatcgcgatgcgccggctgcgtccaggaccgtatcgaccgtgctttcctgatcgaggagcagaaggtcgtcaagaaggtccttcaggagtcccagcaaaagaagcgttaagcggatgcattgagtgaaggggtttagcatgtcaaaactgggtcttcggtgttcatgtgcattatgggcagtctcctgggtcggtcggcttttacga

SEQ ID NO: 217205 - DNA, 445 bp, Glycine max
ccggggagctgggggatgtattcgggaccctactcagctacatcctgggggagggacgtaaaaatcgctttgatatcgtaaaagccgaccgaaccaggaaactgcccataatgcacatgaaccccgaaaacccagttttgacatgctaaaccccttcactcaatgcaaccgcttaacgctttttttgctgggactccttgaggacctttttgacgaccttttgctcctcgatcaggaaagcacggacaatacggtcctggacccagccggcgcattgggatccaccgtaggccccctggacggtcttcttggggcgggaaacctgggcgtactcgcgggggcggagggctgggacaccctgaagcttggaaccgcagtccccgcacttgggggcagtgcccttttttttgatgggcaggtaacggagcttaccaccgggcgtttt

SEQ ID NO: 217206 - DNA, 452 bp, Glycine max
ggctaatgatgcttgggtgggtgcttttcttcggtagcctaacggtgggagtgggagcgatgtctgagtccccaaagtggcttgtgatgaggggtcgtttgggaaaagcaaaaaaagggctttacaaaaccttaaaccgtaaggaagaggcccaaatatggctagtcgaaatcaaacaagccgcagggatccccgagagttgcaaccacaaccgttttcctggaacccacacaaacacatgttatagcgtatggaaagaactttttctttatacaacgcccccaaattgtcacattgtaatcgctgtccttgggattcacttttttcaacaagcgttcggcgttcactcccgttttttgttccgccccatgatctttaagaaggctgggatcaaagaccacacgcattaactttttgcaaccccgggcggttgatttcttaaaaccggtttt

SEQ ID NO: 217207 - DNA, 518 bp, Glycine max
  unsure (1)..(518): unsure at all n locations
accctgcgcccgcagcctcaacgggattttctcagaactataaacccacgtgatgggacccgcaccaatggagaacgtggccacgtaagccaacaccatggctatgctcaatgcaacggcccacattagtttcctctcggagtgaccaatgatcgtgaggctgatagcgagcgtgaggagagagagcaccatgcccccgacactagacaacaacaacggacgacgacccacgcggtccaacgtaaaagtagccgccaagatgaaaacggttttgacgaatccaacggccacggttgcaagaagtttatgcgtgtcgtctttgatcccagccttctcgaagatcctggggctgtacaaaacgacggcgtctacgcccgacgcttgttggaagaagtgaatcccaagggcagcgattacgatgtgacgaattggnggcgttggatagaggaagagttctttccatacgccttcacctgtgcttcgtttggttacctgaacgacgtcgtcgatgcaactct

SEQ ID NO: 217208 - DNA, 559 bp, Glycine max
cttctttgcacagcgggcgatatttaaggtgcctggtgtaactgatatcggccttgagccaagaaatgtgaaaaaagctgctgttattggaggaggtctaatgggttctggcattgctacagctcttatactaggcaacattcgtgttatactcaaggaaatcaattctgaatttcttctgaagggaataaaaacaatagaagcaaatgttaatggcttagtaagaagaggaaagttgacgaaacagaaggcagatgctgcactgtcactgcttaaaggtgttctggattactcagaatttaaagatgtggacttggtcattgaggctgtaattgaaaatatcagtctcaaacaaactatatttggtgatcttgagaagatttgtcctccacactgcattttagcatcaaacacatcaactattgaccttgatgttggtggtaaaacgaccagctctcaagatcgcattgcgggtgcccattttttcagtcctgcccacattatgccacttttggagattatacgaactgataaacttctgcacaagtgattgttgatc

SEQ ID NO: 217209 - DNA, 487 bp, Glycine max
gaaggaaattacttgattaaagtagcatactgaggccttactagtcacccccaagaaacaattcttttccttaaatttttctctttgtgaaaccaactttaatttattatttaatctaggaaggaagcaaacattagttgttacatttttttattgtagaacatccaacatgctgaacaattggctttctcatagacgcgccattgactttggagtagatgaagcaggtgcactcagaggaattcctttgagtgctctttcttccaaataccttgagggtttatagaagttaccatataattgtgcccatttttttaggctggtaaatatatgattagccccaaccaaatctgcccagaaaacaatgccaccccggtaatttgggaagctcattccaagaacagatgcaatgtcaaggtctgatgctcgtataacaactccatcttctagaacacggcatgcctcattaactactgggaatagtatc

SEQ ID NO: 217210 - DNA, 600 bp, Glycine max
atccccccagaccagcaacgtcttatcttttccggaaagcaacttgaggacgggggcacgctcgccgactacaacatccagaaggaatcaacccttcacctcgtcctccgtctccgtggtggcatgcagatcttcgttaagaccctcaccggcaagactataaccctagaagtcgagagctccgacaccatcgacaacgtcaaggctaagatccaggacaaggagggtatccccccagaccagcagaggctgatcttcgccggcaagcagctcgaggacggacgtacccttgctgactacaacatccagaaggagtcaactctccacttggtgttgcgtcttcgtggtggtatgcagatcttcgtcaagacccttacgggtaagactattaccctcgaggtggagagctccgacaccattgacaatgtgaaggcgaagatccaggacaaggaaggaatcccaccggaccagcagaggcttatttttgctggcaacagctagaggatggaaggaccctctctgactacaacatccaagaggagtcaactctgcacttggtgttgcgtcttcgtggggggttttaagctggagctgatttct

SEQ ID NO: 217211 - DNA, 489 bp, Glycine max
ggattgagaacaaaattcaaacacaatgggccagcatacagttgataattatatatcagctccacaaattgataacaaacagtagtaacattaatgggacaatagagttcaacacaaaccaaacttattttcaaaggtcattacagacccattacacatcacatttcttcttaaaatgtttgggaaaatccaacatcgaacatcacacagaaatcagctccagcttaaaaccccccacgaagacgcaacaccaagtgcagagttgactccttctggatgttgtagtcagcgagggtccttccatcctctagctgtttgccagcaaaaataagcctctgctggtccggtgggattccttccttgtcctggatcttcgccttcacattgtcaatggtgtcggagctctccacctcgagggtaatagtcttacccgtaagggtcttgacgaagatctgcataccaccacgaagacgcaacaccaagtggaga

SEQ ID NO: 217212 - DNA, 531 bp, Glycine max
  unsure (1)..(531): unsure at all n locations
cttgcaattgaagttgaagtctttcccttctctcttcaactccaaacacaagacgtcatcatccatggctgcctccgtctccactgtcggagctgtcaacagagctcttttgaacctgaatgggtctggacctggggtttcagctcccagttcatccttctttgggagcagcttgaagaaggttattggctcaagggtccccaacacaaagatttcctctggaagcttcaagattgttgctgtagaagagaagaaagagattgaagagacccagcagaccgacaaggacagatggaagggtcttgcctatgatatctcagacgaccaacaggacatcacaagaggaaagggtttggttgactcccttttccaagctccacaggatgctggaactcactatgctgtcatgagctcctacgagtaccttagcactggacttcgccagtacttggacaacaacatggatnggatttacattgctccagcttttatggacaaactttgtgttcacattaccaagaacttcatgac

SEQ ID NO: 217213 - DNA, 494 bp, Glycine max
aggacaaaaggaaaaggcaccaaattcaatttaagtggacactttaactcaaaattatagaggaagacagtccaatatgaaaaatatagtaaaatcatctcaaacttggcatcttctctttgcacctaagacattgagaattctaagaatgttacacgcaagtcccatcacaacttctagcacttggatcagcacaaccttcaggaacagaaatatttacttgccaagtttgctttgcctccaattcaagattggaagaaagttcccctgttaatagcatcctcgttagcatttccaagtgcagcctcgttcaagtacttgtcagccaattggactctcttgacattctcttgttcttggacaagcatgttaccatacgtcaagagcttctccagagtcatcttgggctgctcaaaggttggaggtccatcttttgagttcacaagcttcttcccaatgccgtcaacaccaacaccagaaatccacttcctcac

SEQ ID NO: 217214 - DNA, 507 bp, Glycine max
gcctttcttgcctagtgtttctttcaagcactctccaccttccatttctccatcgtttggcttgaggagtctgaaatcaagctctttatttggagaatcgctaagagtggcctccaaatcaacaataaaggtttcaaagacaaagaatacttcactcgtgaccagatgtgaaattggtgacagtctcgaagaattcctcacaaaagcaacaccagataaggggttgatcaggttgttggtgtccatgggagaagcattgagaacaatttccttcaaagtgaagacggcttcatgtggtggaacacaatgtgttaatacttttggggatgagcagcttgcagtggatttgctagctaatcagcttctttttgaggccttaaattactctcatttctgcaagtatgcttgctctgaagaaaatcctgagctcttggacatgggaggtccagttgaaggtggatttagtgttgcatttgatccccttgatggctccagcattgtggacac

SEQ ID NO: 217215 - DNA, 474 bp, Glycine max
ggctgaagatatagcatatatctttttttctaaaagcagataaaatagacaatgaattgcaggtttaacagattaagcagctgctccaacagctacaccatccttgagcctggatttaccatacagggtttcttcaaaccggatgatctcattcttggatccataagcaacttgagttctctcatcaatgttagtgatgactttgtctagcacagactgatgaccatcactgctgtaacctccggctttttcaatcaagaaccccaacggagctacctcaaacaacagtctcagcttggctttggctgatggtgatgtcacattggtgaagatgcctttttcttttacaataatctggttgacatctggcaccattcctcccgtgtatctcaatgtgtacttttcattgacatagtaatcgatcaacttagcctaatcgggggtgtcagatgtggctcttaaatttcctgggga

SEQ ID NO: 217216 - DNA, 480 bp, Glycine max
gaagcatctaagtgagatacacatttgttaggtagcaagcataagtgtctaaccggagaaacatatctgctacatatcgtgtgcattttggaattgtgccactaaaattctattcatctatggctgcctcatcttatgctatgcaatcaatccttgcaaaccctatgatccgcatttccagcgggtctagggagaaccattttggtgttcctgcttatcacatgagaaggaatgttggcctgagagttaggtccatggctgaggaagagcaaccaagtcagcctgcgaccccagttacaccaccaccagcagaacccaaaccacagccagtctctactccttcaccaaaggtgagcaccaagttttctgatgtgttggcgttcagtgggccagcacctgagaggatcaatggaaggttggccatgattgggtttgtgggtgcaatggcagtggaagtagccaaagggcaaggtgtgtttg

SEQ ID NO: 217217 - DNA, 466 bp, Glycine max
gaaaaaaaaaaatggggattttatatgctgattaaataaaggccccaagtacaaaaagagattggtctttctaaccacgaatgacttaagaccattttggggggcattcatgactgaattacaccaagggaccacccttaacatactcagtaaaagccagagcaaccaaacccaacatagcaaatttcccattccacagttctgcatctgaggacatgaaccctttggacttaaactccacgctgatcccttggaagagtggaatcaaggaagcaagggtaaggaccacacttgttcccaagaaccatgggataccaccattggatatttgttcaaacacaccttgccctttggctacttccactgccattgcacccacaaacccaatcatggccaaccttccattgatcctctcaggggctggcccactgaacgccaacacattaaaaaacttggggctcacctt

SEQ ID NO: 217218 - DNA, 483 bp, Glycine max
atcaggttccagtcccagaatactgttattctcgaataactgaattgtgtttctagggtatcttctctgaattgcaattgcaaatgaatgatcgttgaaaaactatgaagaaggtgaggagaaagatcggcaagtatgaggtgggtcgaacaattggcgaaggcaccttcgccaaggttaagttcgcaagaaactcggagacaggggatagcgtggctattaaaatcatggctaagaccaccattctccagcacagaatggttgaacagattaaaagagagatatccattatgaagattgtcaggaatcctaatatagttagattacacgaggttttggctagccagaccaggatctacataatccttgaatttgtaatgggaggggaactatatgataaaattgttcagcagggaaagctttctgaaaatgaatctaggcgctactttcaacaacttatagacacagttgatcattgtcata

SEQ ID NO: 217219 - DNA, 549 bp, Glycine max
gcgaaattcgttggatttaagattttccgtttcaaattgtagtcagtgcaaagcggaaggcgagaaatgtaaatggaagaacaacagaggtgacatcgaatgtttcgactgcaaggacaagcgaaaaactattcatgttcccaaatcttttatttactctgcaccaggttcgattcttttggggttcgtggttattgtcgtttttaagatcatataccattttagacagaaacaagaagaccaagcaagggtggagaagttcttagaggaatacagggcagaaaagcctgcaagatttacttatgctgatgtgaaaagaatcactggtggttttaaagagaagctaggggaaggagctcatggggctgtattcagaagaaaactttcaaatgagattctggtggctgtgaaaatcctcaataatacagagggagaagggaaagagttcatcaatgaagtggaaattatgggcaaaatccaccacatcaatgtggttcgtttgcttggctattgtgctgaaagaatccatcgtgctctggtctacaattt

SEQ ID NO: 217220 - DNA, 454 bp, Glycine max
aattataattataatttattttattttcatacatttaatggaaacacaacaatttttacttctgaggagaaaacaaaatatgtgtaaacactaatcatctcccgttgtaaataaatcaataagttaatttctcattcttgaattacttccaattccaaaggtagtcttgccgaagtgaatccactaggaatggtggaagtagatgagtgaaatggattaggaggaacagttaataggtcttcctctttactttccaacatttgtatgacagattttatggatggccggttcaatggctgccactgaatgcaccaaagtccaacaattgctagttttcttgcaattttaacatcaccttcatcctcaacatggatatgtacatctccatgaactaggtcatgcatccaatctgggtacaacacatggaaatcttctgcagaagacgggtctacat

SEQ ID NO: 217221 - DNA, 459 bp, Glycine max
catggctttcgcagcagctcctcttatccatgttgtattatacggaaatcccaaggttttggttttgaggagtactgctcgttgcacggtccacgcctctcgcagaccaccaccccctgggcctggagttgacaccagaatccattgggaaaacgaagatgaaggttggattggagctaccaataccaaacaccaacagacccacaaacccaataacaacatgttacaggctgatgactttcctgatttcctcaccgcttctttaggttctcattacgaattcttgggtgtatcaccagatgcggatgtagaagaaattaaagttgcttatcggaaattgtcaaaggagtatcatcccgacacaacttccctgcctctcaaaactgcctcagaaaaattcatgaaattaagagaggtttacaacgttcttagcaatgaagagagtcgaaagttttatga

SEQ ID NO: 217222 - DNA, 287 bp, Glycine max
tttttttttttttttttttttttttttttttttttttttttttttttcctattttggggggttttttttttttttaatattaataaatttttgtttaataataaaaagggtgaaaaaatttggataaccaccccacactcaaacccccaaggggggaaaaaaagaaattcactatataaaaacaacaatgggcaaaaaaaaaaaaagggagaaaaaaggggaaaaccaaaaaaaaactgaaaaaaaaggtttttaaaaaaaaaaaaaaggctttaaaacaccatggg

SEQ ID NO: 217223 - DNA, 421 bp, Glycine max
cactaatactatatcagtttaatttaggtgttttacaattctcaaatttattaagggtatggtattaaatgttaggataaataacatgtgttctgtctgtgtaaacatcttctaagattgtatctaattataaattgttatatttagctagttgtattttcttaattttttaataataataattttaaatttttattaagaatgatgtctaattgattgacaatacatgtatattaaaatttaaatattatgagtcattaattatttatttgatttatattataaattttaaatgtcaatttatagtctgtaattcaagactttaagtttacgattctttacctgtgaaattggtggcaatggataaattaaatattctaactagaacattttgattatccatatcataataatatatttt

SEQ ID NO: 217224 - DNA, 435 bp, Glycine max
aaaagatggacctccaacctttgttcagcctaagatgactctggagaagctcttggcgtggggtaacatgcttgtccaagaacaagagaatgtcaagagagtccaattggctgacaagtacttgaacgaggctgcacttggaaatgctaacgaggatgctattaacaggggaactttcttccaatcttgaattggaggcaaagcaaacttggcaagtaaatatttctgttcctgaaggttgtgctgatccaagtgctagaagttgtgatgggacttgcgtgtaacattcttagaattctcaatgtcttaggtgcaaagagaagatgccaagtttgagatgattttactatatttttcatattggactgtcttcctctataattttgagttaaagtgtccacttaaattgaatttggtgccttttccttttgtcct

SEQ ID NO: 217225 - DNA, 438 bp, Glycine max
aggacaaaaggaaaaggcaccaaattcaatttaagtggacactttaactcaaaattatagaggaagacagtccaatatgaaaaatatagtaaaatcatctcaaacttggcatcttctctttgcacctaagacattgagaattctaagaatgttacacgcaagtcccatcacaacttctagcacttggatcagcacaaccttcaggaacagaaatatttacttgccaagtttgctttgcctccaattcaagattggaagaaagttcccctgttaatagcatcctcgttagcatttccaagtgcagcctcgttcaagtacttgtcagccaattggactctcttgacattctcttgttcttggacaagcatgttaccatacgtcaagagcttctccagagtcatcttgggctgctcaaaggttggaggtccatcttttctt

SEQ ID NO: 217226 - DNA, 515 bp, Glycine max
gaggtctcgcttcagtgttccatttgatatcagcggagaatggtttgagcagaggcagaagccaaagacatctattgaatctttgccagatgaatgcctctttgagatccttagaaggctgcctgcaggccaagataggagtgtctgtgcttctgtatccaagcgctggcttatgcttctgagcagtatttgcaagactgaaatccacagctacggaagtactggaaatgaaaaccaggaaattagtgacgaaggatacctatcccgaagcttggagggaaagaaggcaacagatgttagacttgctgccattgccgttgggacagcctctcgaggagggttggggaagcttacaattcgtggatgcaattcagatcgtggggtgactaatgtaggtctcaaggcaattgctcatgggtgtccttctctaaggtttgctcttctatgggatgtcgctcctgttggtgatgtacgcctgaatgagattgctagtgggtgccattagttagagaagc

SEQ ID NO: 217227 - DNA, 497 bp, Glycine max
aaattaggcattacgtggaacatcataaaatccatccagggaagaaacttgacatctacacaacaaatctaacgcttcaaggagagagtccatagcagaaccgaaccagctaactaataaccgggtaacatttgatagccattctcacaaaaaacataggccactctaaaacactctttctagcctaaagatcacacaacagaaaaaccggatactcctaaggaggagcactatttctacaacttaatgctacattgcaggatgtagcataaactctctgaccgattttgtacaattcctcaaagatcacttctgtccagacctagatggtcgctgcaaaaacttgacggcacaatcgagagctgcagccgcccagtccattcctcgcccggcttcaagttcacaggtttctctattactgccccatcaacacaaagcatttgtttatactcctcatcaccaaagtctgacattgattttgatttcttctcccatgg

SEQ ID NO: 217228 - DNA, 565 bp, Glycine max
agcgagtggatgtggtgttccggtataagttggaatggcagcggttagtgttagggttactgtgagagtgaggtggtgcactctaaaaccacccactccaactccaaccagattcagcgttaatgctctgtttggtgattggggatttgggaatagaacaaggaactcccttcagcagcaattcacgttcactcttgctgatagtaaagtgataagcgtgtcggttgtttcttcgatctcagatgttgcatcgagcgaatgggacgcttgtgctttggatgcgactggccctgacaacttcaatccattcctttcgcatgcctttttgtcgaccttagagcactctgcttccgctgtcagggaaactggttggatcccacaccacatcgttgccaaagccaacaacaacagcaacaacaacgttgtagcccgtgtcccactctatcttaaaacccactcctacggcgaatttgtttttgatcattcttgggctaatgcttaccattcttatggctacaattattaccccaagttacaatctttgtgtccctttacacctgtaact

SEQ ID NO: 217229 - DNA, 515 bp, Glycine max
gggatgcaaggacttgctacaccacttgtggaaaacagacttgctgatggaactgaaggtgaaatggaagtgataccaatgggtgtcaatagtcgggacatctctaacacgtttaggattgcctctccatttgttgttgatgaaactatgcttgaaaaagtgcttgggcccccaagatttgatggcagagaagctgcagaacgtgtggctacccctggggtcactgttgggctagtttggactgcttttggtggagaagttcagtttgtggaggctacagctatggttgggaagggtgaactgcatctcactggacaacttggtgatgtaataaaagaatcagctcagattgcactaacatgggtaagggcaaggacaactgatcttatgcttggtgcttcagagggatctcatattttggggggccgtgatgtacacatacatttttctgcaggcgctgtacctaaagatgggccctcagctggtgtgactttggacacagcattggtatcact

SEQ ID NO: 217230 - DNA, 489 bp, Glycine max
gttttcggcactcgatgcaaaacatgcctgaacctggcaatttcacgcattaagctggtgcaaaacaagagagatatgcaactgaaacaaatgtgcaaggagattagccaattcttgcaggctggccaagaggcaattgctagaatcagggtggagcatatcatacgggaacaaaatacatgggctgcatatgaaattttggagttgttctgtgaatatgttcttgcacgtgtacctataattgagaatcagagggagtgccccacggaattgcgagaagccattgcaagtataatttccgctgctcctagatgctcagatgtaccagacttattgcacatcaagaacttgtttaccactaaatatgggaaagaatttgtctctgcagtatctgaacttcgccctgattcgggcgtgaaccgcacgaatcatgaaaagctttcagttagtgctccatctggagaggtaaaactcaaggtcttgagggag

SEQ ID NO: 217231 - DNA, 493 bp, Glycine max
gttcctttcaaggagaaggggtttctatggttcaaggagcttccagaggaattgggctggaattttttcttccatctacaggtaaaacagcttttagagaacgatgataaagagcatgttattgctacatgccgtgatcctagtgcatcaactgggcttatccatctgaaagataaatttgcagaccgccttaaaattttgccggtggatttgactgttgagaattcaatcgaggcatctgcattggcaataagagagacatatggccgtctaaaccttctcattaatgcgtctgggattctttcaatacctgaagtaatacatccagcacatgtggcctcttctaaaagtaggaggcggccactggactggaagaagtgctgcagcggtggctagtttgagcgcaagggttgcatctattggggacaatcgagttgggggctggcactcatatcgatctatagaggctgctcttaatcaattatcaaagact

SEQ ID NO: 217232 - DNA, 459 bp, Glycine max
gcaaatataatacaaactcttttcttaagtacctgagggcgaattcctatccacgtcagtacagcaaacattttttagtatctgtttctccaatattccataaacatcaatgaatcaaagaattttatgaaaaacaatttttgctcttgagagcagctgtgaaacttattattgatatatttcttacctgttatgacagggttaccaaggaatttcttttccatcccaggcaaagaacttgccattgtcatggatcttgacattggtaatgatgcttagtagcttctgaactgagaactctttggtgaagagcttgtctgggggaacatttctttgaaatggcttagagagatctgtgtcaactggaccaggatgccgtaaaaatgcatacaattggatcctttctttcttgcaaatccagggagaccgcttttgataattgattaagagcaacctttg

SEQ ID NO: 217233 - DNA, 508 bp, Glycine max
ctcataacacaaagcacaaagcatagctcatccttgagttaaaaaatggcagcagcttcttccatggctctctcatccccatccttggctggcaaggccgtgaagctgggcccatcagccccagaagtgggaagggtgagcatgaggaagaccgtcaccaagcaggtcttctcaggaagcccatggtacggcccagaccgagtcaagtacttgggcccattctctggcgagcccccgtcctacctaaccggtgagttcccacgcgactacggctgggacactgctgggctttccgcagacccagaaaccttcgccaagaaccgtgaactcgaagtgatccactccaggtgggccatgctcggagccttgggctgcgtcttccctgagttgctgtcccgcaacggggtgaagttccgagaagccgtgtggttcaaggccgggtcccatatcttcagagagggtgggcttgactacttgggcaacccaagcctgatccacgcccagagca

SEQ ID NO: 217234 - DNA, 449 bp, Glycine max
  unsure (1)..(449): unsure at all n locations
gagagaacaaattgacacttgagttttgtaaaaagcaagtaacattaagttggattcggatacacaagataattcacattatctgaagtacttcaccaaacacaaatctaaaaactctcaaaagtcatttcgttctttgacgctcactttccggggacgaagttggtggcataggcccaggcgttgttgttgacagggtcagcaaggtgatcggcgaggttctccaatggaccctttccggtgacaatggcctgaacaaagaagccaaacatagagaacatggccaatcgtccgttcttgagttccttcaccttaagctcagcaaaagcctctgggtcatcagcaaggcccaatgggtcgaagctgccacctgngtagattgggtcagtgacctcaccgagggggccaccagcaatacggtaaccttcaacggcacccattaggataac

SEQ ID NO: 217235 - DNA, 480 bp, Glycine max
agcatttaagtgagatacacagttgttaggtagcaagcataagtgtctaaccttagaaacatatctgctacatatggtgcgcattttggaatggcgccactaaaattctattcatttatggctgccttatcttatgcttttcaatgaacactggcataccctatgatccgaatgtgcagggggtatacggagaaccatattggcgttcctgcttatcacatgagaaggaatgttggcctgagagcaggtccatggctgatgaagagcacccaagtcagtccgcgaccccagttacaccaccaccagcagaacccaaaccacagccagtctctactccttcaccaaaggtgagcaccaagttttacgatgtgtgggcgttcagtgggccaacacctgagaggatcaatggaaggtgggccatgatcgggtttgagggaccatggctgaggaggttgccaagggcattgtgtgttaaaacaa

SEQ ID NO: 217236 - DNA, 262 bp, Glycine max
ggggaaaaaaaaagggaatttttttttgggggttaaaaaaagggcccccgctccaaaaggggttgggttttttcacccccaatgacttaagaccctttggggggggcttcattagggaattacccccgggggccccccttaaaatttcttggggaaggcggggccccccaaccccacatgggcaattttccttttcccatttttttattggggggcaagaaccctttggggttaaactccccgccggccccttgggagaggg

SEQ ID NO: 217237 - DNA, 605 bp, Glycine max
  unsure (1)..(605): unsure at all n locations
cttaccgaaaactagaggccagggtctcggagtgtttgggtttgtttatcttaaacaccacaaacacagaacagaggtgtagagaagaaagctcaaaaatatggcggcagagtcatcactgagggtggcgactcccactctttgcaacctcaatgggtctcagagacgaccaaccaccaccactctctctccgcttcgcttcatgggttttcgtcctcgaccctcctctcactctctcacctcctcttccctttcacacttcttcgggagcacaagaattcactccaattcttcttcttcttattcttccatttcacgccaacatgctccgagaagaaacttctctgttttcgccatgtctgctgatgacgcaaagcgcagtgttccattgaaggattatcgcaacatcggtatcatggctcacatagatgctggaaagactactacaacagaacgaattttgttctatactggnaggaactacaaaattggagaggtgcatgagggaacagcaaccatggactgtatggaacaagaacaagagagggggattaccattacttctgctgcaaccactacattttggaacaagcaccggatcaaca

SEQ ID NO: 217238 - DNA, 444 bp, Glycine max
  unsure (1)..(444): unsure at all n locations
gggaagaaaaatcgtttcctatttttcttcagaatttttttttgttggctaaccttgtatagtacaaggaaaattacaataaaaaaaataccaaaaacaaacccaactatttgacaatggacataatacaactatcaaaggtaaaaagttccttgttaggagaccaagcaagtacattaagcggcaacttcttgctctttggtggcaagttggttctgaatgtgctgaggcaccacatcaaacatggctaattgcattgtgtaggatgcacggtcctttgtcatccctctgagtgtgctgacatactggaacatctcagcaagaggtaccagggaatcaaccaccttaaggccaccaggtttgtcaccaaaactgtngatctgtcctctttttgagttgagatccccaattacatcacctagatgttcttcaggagtaacaact

SEQ ID NO: 217239 - DNA, 586 bp, Glycine max
actccttcctctttattttcagagactgattttgctggttggactttcaaatgtgaagaaacccccaaaatgatcaatgacaacaatgacagcactaaggatttatcgtaacatgaatggtgttctgtgaaatgacacaacagagtgctcgccatcttggaaatatgtctgcttgttcttgtttgatttgtttatttttactcgaggaaacaaatcatataggaagagggttttgggttggggggagcgccaggggacatgctcgagatcccttgtggctcactattggaacataagcttaaattaaattgaagttttaaattaatggtttggatagaagtatgatacttgatagaacattatggcggaagttgatccatgtaaccgaccccacctagtgggataatgcgttgttgttgttgctgttgtatatgtaacagtaagaagataagttttgccactttttttatactgcagcagattaatatgttccccactctaaatgggaactaaatatttggaatgaaagtttcgcccttccaagaaaaaaacccaacttgttggtaagcatgggtttataaaattt

SEQ ID NO: 217240 - DNA, 527 bp, Glycine max
aaacttaagagcagtggattatcatcattgtcacatatgatgaagcaatattcaacaagtgcaagaactgtatgaataggaataagagtttatgtacaacgggaaatgaaaatagttgtcatttgaacacattatgctgtggcagctgcttgttcttcaacagcctgtgatgctgggagaagggtgcaaatgaggttgcggtcaccgtacacattatcaacacgtcctgtggtaggccagaactttgcagtacggagccaaggagctgggaaggctgcatattccctggagtatggttttgtccatgcatcagccatgagcagtgatggtggatgaggggcgcccttaagtacattgttgttaatgtcaacctttcctttctcaatctcagcaatttcttgtctaatggaaataagagcatcacagaacctgtctaactcggccttgctttcactctcagtaggctcaatcatgagtgtgccaggcacaggccatgacattgttggtgcatgaaaaccgagttcatg

SEQ ID NO: 217241 - DNA, 458 bp, Glycine max
gatatctgcagtctagctattattggagccactgccctatcgctagaatgagagcacaagctacattgactatgaccagacggccaatgagagtacactctgactgctcacaaatgatcgaagatcgagcataccgcttatgccacgctctatgatgatgaacccgaggacaaggttcgcgatctacatgaacttatactataggcagatgttgaacacatcagtggatcaattacagctggtgtcgtgctataaactttcgattcttctgaagtaccacctaccacatctgacaggtcactagaaggaccctgtggagctctgatataatacaggaaccgggatggcgaaatggacaaccagggtaaagaggtatcgtatgagtacgaaaacttgaccgaccaggctgttggccctggaatgcaaggtgttcctcaacaccacactattactggttt

SEQ ID NO: 217242 - DNA, 555 bp, Glycine max
ataaaggttactctattccatggtcgtggaggcagtattggtcgtggtggtggcccaacatatctggctattcagtcccaaccccctggctctgtgatgggaacgcttcggtctactgagcagggagagatggtagaggctaagtttgggttgccacagatagctgttagacaacttgagatatacacagcagctgtactacttgcaacccttcgtgcacctatcccaccccgagaagaaaaatggcgtaatgtcatggaagagatctcaaacatcagttgtcagtgttaccgcaatgtagtgtatgaaaatccagaattcctggcctacttccatgaagccacaccagaggcagaacttggcttacttaacataggtagccgccctacaagaaggaagagctcagtaggaatcggacaccttcgtgcaattgcctggatatttgcatggacacaaacaagattcgatcttccagcttggcttggagtccgagcatgtttaaaaagagctagcgagaaaggctacacccgagagctaaaagccatgtacaaagaa

SEQ ID NO: 217243 - DNA, 452 bp, Glycine max
gataacaaacagtagtaacattaatgggacaatagagtttcaacacaaaccaaacttatttttcaaaggtcattacagacccattacacatcacattttttcttaaaatgtttgggaaaatccaacatcgaacatcacacagaaatcagctccagcttaaaaccccccacgaagacgcaacaccaagtgcagagttgactccttctggatgttgtagaaagcgagggtccttccatcctctagctgtttgccagcaaaaataagcctctgctggtccggagggattccttccttgtcctggatcttcgccttcacattgtcaatggtgacggagctctccacctagagggtaatagtcttacccgaaagggtcttgacgaagatctgcataccaccacgaagacgcaacaccaagtggagagttgactccttctggatgttgcagtcagcaa

SEQ ID NO: 217244 - DNA, 572 bp, Glycine max
gagagatagagagagagagaaagatattaagaaaaaatggcagcctgcactgtctactcaacacaatctctgagcacaaattgctccatctcaaccccatcaaagacacagctgagtttcttccaccaaaagcaggttgttttctggaggaacagcaacaggggcaacagcagcagcagaagaagctatgtgataacatgtgcagcaggtgactcacagacagtggggattggtcttgctgcagactcagggtgtgggaagagcaccttcatgaggaggctgacaagtgtgtttggaggagcagcagagccaccgaagggtggcaaccctgactcaaacacactcatcagtgacaccaccactgtcatatgcttggatgattaccactctttggatagaactggcagaaaggagaagggtgtcactgcccttgaccctagagccaatgattttgatctcatgtatgaacaagttaaagctcttaaggatggaattgcttgtgaaaaaccaatctacaaccatgtctctggtctcctggatccccctgagctcattaaacccgccaaaatctt

SEQ ID NO: 217245 - DNA, 513 bp, Glycine max
gtctcaatcttgtatcaacataactgaatctcagcctcacttttttttctcggataagtacatacatacatacatatgtgtttttttcattaattatgatgcagaacagcctaataacaatagacaaaataacatgaaacacagtgaaattgtggaaaacatgaaagaagaaagaaaatgatgattttgatgagaactaatgcaatttgactgcgtcgctcggtcgatatgtatatatattattatggcaggttcaattcaattcctaagcttttgcagccactggagtctcagccttggtggctattagctgctcatataaatctcttatcttcaaaccaactatggtttggaagagacctgttccattgttgctgccggggaaatcagcatgcttcaacatctgttgagtaacctctccatagaactttgtagagaggttgcttaggtggctctcaacgtatattagttcatctagtctgtcaaattgtccatccatttctacaagtgaca

SEQ ID NO: 217246 - DNA, 497 bp, Glycine max
cgataagctcgttgtgatagatttctcggcgtcgtggtgcggtccttgcaaattcatagagccagcgattcacgccatggccgacaagttcaacgacgttgacttcgtcaagatcgacgtcgacgaattacctgatgtggcgcaagagtttcaggtgcaggcgatgccgactttcgtgttgtggaagaaagggaaggaagtcgacaaggttgtgggcgcaaagaaggacgagctcgagaagaagattgagaaacatcgatcgtgatcttagctctgtaatcctattcattcagctatttatctttctgtgcgaggtgaaaagaatattaaaacagagtttaaatttgttatatttggctgtagtgttatgatgatgatgatgatgatggatggggatgtaaaactctaaactggttggggtgtttcttcaggaagatggtgtcttgttcatattctaggcagattgatatatagaaattgaagactctcgctcactc

SEQ ID NO: 217247 - DNA, 497 bp, Glycine max
gagtgagacagtattttcaatttctatataacaattttgctaaaatatgaaacagacaccatcttcctgaagaaacaacccaaccagtttaaaattttacaaccccatccatcatcatcatcatcatcataacactacagccaaatataacaaatttaaactctgttttaatattcttttcaccttggaaagaaagataaatagctgaatgaataggattacagagctaagatcacgatcgatgtttctcaatcttcttctcgagctcgtccttctttgcgcccacaaccttgtcgacttccttccctttcttccacaacacgaaagtcggcatcgcctgcacctgaaactcctgcgccacatcaggtaattcgtcgacgtcgatcttgacgaagtcaacgtcgttgaacttgtcggccatggcgtgaatcgctggctctatgaatttgcaaggaccgcaccacgacgccgagaaatctatcacaacgagcttatcg

SEQ ID NO: 217248 - DNA, 369 bp, Glycine max
gtggaacccagtctgatggaggactaagaacatacagtggcttggagaccatcataacttacaagatctgacttacacatcggggtgagatctccggacccgagaatcaacacgatatgttaattttagagatgatgttgtgccctgaacttaatggctcgactgtaatgctgttcagactatggcgtatgcaaaaacattcttaacatacaagctgaggagaccaagtatcaaatcttgtgctcgctcttacatgcagatgaggcacatcagacgatcttaagtctttgatagacagagcccatgaactgtgtctggtcggtctagagagatattgtacacagtcgtgcatgaaatcatacagtggat

SEQ ID NO: 217249 - DNA, 489 bp, Glycine max
gttcccacctgcaggaacctacatctactgggcagactcctacacactgttcgtgtttgagatggcactgatgggatttgcagagcacagaagattccaagactgggccaaaccaggctctatgggcaaacaatacttcctaggactagagaagggtcttggaggttctggtgagccagcttatccaggaggacctttcttcaacccactaggctttggtaaggatgagaagtccttgaaggatttgaagctcaaggaagtgaagaatggaaggttggctatgttggcaatcttgggttactttgttcaagctcttgtcacaggtgttggcccataccaaaacctcctagatcatttggctgaccccgtgcacaacaacatcttgaccagtctcaagttccactgaatgtattatatgttattttacatattctttacgttgccaaaactcaactacctttctacctttctatatcatgtggacatttt

SEQ ID NO: 217250 - DNA, 368 bp, Glycine max
acgtgttattttttacagggccacaccaaggaacaaaatgtccacatgatataaaaagggaaaaaggcaaaggagaaaaggcaacgtaaaaaatatgggaaataacatataatacattcaagggaacttgagactggtcaaaaagttgttgtgcacaggggcagccaaatgatctaggagggtttggtatgggccaacacctgggacaagagcttgaacaaagtaacccaagatggccaacatagccaaccttccattcttcacttccttgagcattaaatccttcaaggacttctcattcttaccaaaccctagtgggttgaagaaagggccccctggataagcgggctcaccagaacctccaaaaa

SEQ ID NO: 217251 - DNA, 520 bp, Glycine max
ggacaagatcaccattctcttttccagcagtcaaatagtataaacatctctgaacttcaagaagcatatagagacgttggacgagatcttttaaggcttcttaattttggggaaatgaatgctattggtttgagaaagatcttgaagaagtttgataaacggttcggctataaattcacagactattatgtcaagacacgtgcaaatcatccttattcccaattaaggcaggttttcaggcatgtgggcattggggctgttgttggagtcttatctcatggtctggctgaccttcaggatttacaacaatctctaggaagctacatttgtatatatgaccagccttcttatactcatcaggatcctattcttgattccatcaaagaagctgtagccagattgtcaaactcaacaaactttcttcagtttttgggaagacatgcttttatcatgaaagaggagctgccatttccaagtgaagatcatattgttgatgaaagatatcatttcatgtcgcttc

SEQ ID NO: 217252 - DNA, 301 bp, Glycine max
aaaaaaaaaaaaaaaaaaaaaaaaaaaaagaaaaaaaaaaaaaaaaaaaaaaaaaaaaaaaaaaaaaggaaaaaaaaaaaaggggaaaaaaaaaaaaaaggaaccactaaaaacggataaaaaaaaattttaaaaacccaacaatccacataaaatttttatagaaaagggaaaatacttcaattaaaaaaaaaaaaggaagggtagtatcaagaaagaaaaaaaaaaaaaaaccccattaagaggggaaaaaaaaaggggggattaaaaaataaacttacaaggaaaaaagggaaatttt

SEQ ID NO: 217253 - DNA, 561 bp, Glycine max
cgagcctctctgtgaccccacaagcccttgccgctgataacgtcacccctccccctgtaattgaagcccaacagagccaattaaacccctccaactcatcctcccctttctcacagaacctcctcctcacagctccaaagccacaagcctcctccgacctccccgaaggcaccaactggcgctacagcgagttcttgaacgccgtcaagaagggtaaagtcgagcgagtcaggttcagcaaagacggttccgccctccagctaaccgccattgacggccgtcgcgcctccgttattgtccccaatgacccggacctcatcgacatcctcgccatgaacggcgtcgacatttccgtcgccgagggcgaatcccccaacagcttgttcaacatcataggcaacttgctcttccccttactcgcattcgcgggcctgttcttcctcttccgcagagcccaaggcgggcccggcgggcctggcgggctgggagggcccatgggacttcggcggaacatgtccaagtttcaggaagttcccgagaccggcgtgagctttgctgacg

SEQ ID NO: 217254 - DNA, 550 bp, Glycine max
tataatatcagtataatagaataaaaaaattatgaaaagatctttggttctgtatagtctttttatactatatttaaagagttacttgtaacgtaatacaaataaactcgagtatggatattgtcaggaagactatttgactttgatttttcaaccccccaataaattcgaatattatggttatgacactgactttttcagatttcattattctataatagagagttctattatagaaatttcgattgtaaaatacaataaaattggattcgatactaaacataaaatagatatctatatagatagataatttgaaacaaaatcaattaaaatatggaaaaggtactctaggggggatattttgtcttttgctagagtccgattcctattccttcttgtttgtgtcgaaatagaaatattctaaaaatatcaataaaataatcttttttaaccccttcctgaaaaatcctatatcttagtttctattttttccaacttagaatatttctgccatataatatcttatcgcatataatacgtagtgaacaat

SEQ ID NO: 217255 - DNA, 374 bp, Glycine max
accaaagcaaacaagaaaacaacaaaaaaaaagaaaaacaaaaaaaaaaagaaaaaaaaaaaaaaagaaaaaaagaaagaaaaagaaacgcaaagaagacaaaaaagggcgacagtagcaaaacagagaaagacgaagaatgcacgacgacgtaagcaaggaaaaggcaagagcaaaaaaaataaagaggatagggaataagcgcagcaaaacaagaaaaaggaagaggggaaaagaaaaggataacaacagaaaagaggacaaaggccatgaagaccaagggaaaaaaactaacaaaggacaccagaagaacaagcaaagaaagaaaagacaagaagagaaacagagaggacaaaagaaaggaagcaagcaga

SEQ ID NO: 217256 - DNA, 509 bp, Glycine max
atcacaacaagacgaaaagcacgcctcgcaaccatcgcaccacttggaacactctcgcgacctttgcgctagtgatcaccgtctgttcctagccgaattgttccatccggccccggcgcatcgacgcgacgcgatattcaccgggcattggccttacatttcacaatcacaacacgctttggatctttgtcgcgtacctcagaaatcgttgtaacgacaagtgcgcattgaaaaagagcagtgcgcatatccggaagccatggcgcgaacacaagcaagttctgctgctcaaagagggcgaccaagcacaggcggcaaaggcaggcccagcgacgctggaaagagcagacctagcgagtctggcaaggaagtcacaaaagcgccgcgaaggagtagtggtggcaagacacctgcaagtcccggaactcgcaaaaagccgcgctacaagccaggcacggtggcattgcgcgaaattaggagataccagaagtcgacggatctcctactac

SEQ ID NO: 217257 - DNA, 518 bp, Glycine max
cagcattacgtccaaggatcatattcaaaactctgcattcgcaaacaagttcgattacaagccatggccggagactcgttgctcaatgaacaatgttagtcagccacaatgaaaaaggcataacaaaatccagaagtacaaggaaaaacacctccaactccaccgctaaaatcagacgatagcacagtcgtcaagaacgaccgccaaaaccttgcccaataaccgtgccagtttgacacgattccctcctcttccacgttttcatagagctccccgtagtcgtctagcgagctgaatgtctttttgcatgatggtaacgcgtttcgcatgcagggcgcagaggtttgtgtcttcgaaaagatgcacgaggaaagcctcggcggcctcttggagcgcttggatggcttgagactgccatcgatggccttctaacgatgcaggcgctacgttatatgcgacttcgcggaccaaacgcgagaaaggcaatttgagtagtaggagatccgtcgacttctggt

SEQ ID NO: 217258 - DNA, 404 bp, Glycine max
tgcactgagggcattaacggacagcgtcctactgagctaaacactctggaggctgcgcaaccctggcactggcttgaaaaccgaccagttctgttgtactgccggtgggtgtgggcccactgattattccagattctttaagccaagagagcccagatgctcatcgctacccgaaggatgatccaactcgcaccttcacttgtaatggtgggactgactatagggatgagttttgtccttgaacccaatcaccttacataatatataatatatgcactaaaataaagagcaatacaattacatgcggcgtgtgcactttgcgtgcccctgctaagatatgatgtgggtacttttattctgaatgaaatggggtacttatgaagaatatagttaactctatggcc

SEQ ID NO: 217259 - DNA, 538 bp, Glycine max
cagcattacgtccaaggatcatattcaaaactctgcattcgcaaacaagttcgattacaagccatggccggagactcgttgctcaatgaacaatgttagtcagccacaatgaaaaaggcataacaaaatccagaagtacaaggaaaaacacctccaactccaccgctaaaatcagacgatagcacagtcgtcaagaacgaccgccaaaaccttgcccaataaccgtgccagtttgacacgattccctcctcttccacgttttcatagagctccccgtagtcgtctagcgagctgaatgtctttttgcatgatggtaacgcgtttcgcatgcagggcgcagaggtttgtgtcttcgaaaagatgcacgaggaaagcctcggcggcctcttggagcgcttggatggcttgagactgccatcgatggccttctaacgatgcaggcgctacgttatatgcgacttcgcggaccaaacgcgagaaaggcaatttgagtagtaggagatccgtcgacttctggtatctcctaatttcgcgcaat

SEQ ID NO: 217260 - DNA, 615 bp, Glycine max
ccttcttcaagtaagaagagacttccttcacgatttcatctctggttttgagggtgacaacatgattgagaggtccaccaaccttgactggtacaagggaccaactctccttgaggctcttgaccaaatcaatgagcccaagaggccctccgacaagcctataaagctttcattgcaggatgtctacaagattggcggtattggtactgtgccagtgggacgtgtagagactggggttgtgaagcctggtatggtggtgacttttggtcccactgggctgacaactgaggttaagtctgttgagatgcaccatgaggctctcacagaggctcttccaagtgacaatgatggatttaatgtgaagaatgttgcagtcaaggatctcaagcgtggttttgttgcatacaactccaaggacgaccctgacaaggaagctggcaacttcacatcccaagttattatcatgaaccatcctggccagattggtaatggatacgcaccagttcttgactgccacactatttacattgctgagaagttttctgaaatttgaccaatatcgaatgcgatctgtaaagagcttgagaagagcccaaattttgaagatgggatgct

SEQ ID NO: 217261 - DNA, 470 bp, Glycine max
ggcttgggaatttgaaaatctcagacttttaccatcaaaacaaaaaacagttctcatcaaaaacaaacagcaacgaaaatgttaccgccgatcaagaacccagttttgaaggctacggctacatgaaatcggcggacacttcaaaatataactggtaaaacaaacacctaagactctgcaaagataaactactgtaaaggaacaagtttttttgaaaccacgttgatgatcacatgtgctagcaaaattgccaaaatgcaatcacttttttttgggggcagcctttgggaccttggctccgggggggtcttttttctcaacactcttgatgactccaacagctacggtctgacgcatgtcccttacagcaaaacgaccaaggggaggatactcagagaaagtttcaaccaccatgggcttggttggaaccatcttaaccataccagcatcaccattcttcaaaaatttgg

SEQ ID NO: 217262 - DNA, 495 bp, Glycine max
ctttgttcactcttcttctcttgcggctagggttttagcgcagcttcttctagatttaaggaagatgggtaaggaaaaggttcacatcagtattgtggtcattggccatgtcgactctgggaaatccactaccactggtcacctgatttacaagcttggaggcattgacaagcgtgttattgagaggtttgagaaggaagctgctgagatgaacaagaggtctttcaagtatgcctgggtgctggacaaacttaaggctgagcgtgaaagaggaatcaccattgatattgctttgtggaagcttgaaacaacaaagtattattgcacagttattgatgcgcctggacatagggatttcattaagaatatgattactgggacatcccaagctgactgtgctgttcttatcattgattcgaccactggtggttttgaagctggtatttccaaggatggacagactcgtgaacatgctctgctttcattcacccttgg

SEQ ID NO: 217263 - DNA, 444 bp, Glycine max
  unsure (1)..(444): unsure at all n locations
gaacactacaaatagaaagttgacatttaataaaccaaagcaacacaacgcagcaaagtcctgaaactcgctgcgcttaacaaaaatgtaatcaggggttccgacaaacacaacacattaaaacacagataaataaaagcaattttgccaccgtcgatcaagaacccagttctgggaacaacagttgcgagatgatggtggagacttcaaactttgtccgaaaaacaagctacctagaaaagaagacacaagagtacagaaaagaaaccaacatttattgtaaccaacatcccctgatgaaccagcccgcacgattcacttcttcttctgggcagccttggtgaccttggctccggtaggatccttcttctcaacgttcttgatgactcccacagcaacagtttgacgcatgtccctaacagcanacctaccaagtggaggata

SEQ ID NO: 217264 - DNA, 573 bp, Glycine max
  unsure (1)..(573): unsure at all n locations
gaaaaaccgaagatgagcttgttgaatgaggagagaaaaccgcacgctgtggttactccatatccagttcaaggacatgtgaaccctttgtttaaactagcgaagctgcttcatctcagaggctttcacataacctttgttcacactgagtacaactacaagcgtttgctcaagtcaaggggtcctaatgcccttgatggcctaccagattttagatttgagagcatcccagatggtcttccgccattggatgatgataatgttactcagcacgttccctctctctgtgactctatcagaaaaaacttcctcaaacccttttgcaaacttgttcatagacttaaccactcttctgccactgagggtctcatacccccagttacttgtttggtctctgacggttgcatgccttttactatacaagctgctcaagagcttggactccctaactttatcttttggcctgctagngcctgttctttcttgtctatcatcaactttcccactctggttgagaaaggtcttacaccactcaaagatgagagttatctgacaaatgggttttggactcca

SEQ ID NO: 217265 - DNA, 594 bp, Glycine max
agataattagtctattcataagaggagatgagatcatatgaaaaatataaccgattctttcctttgtttgggctactggccatccgccggaagtttcgggtttaataccgatattttagcaacaaatctaataaatcttagtgtagtgttaggtgtattggttttataaggaaagggagtgtgtgcgagttgtttatttcaaagaatagattggatccaaccaaactgcactttttagttataactaagaaaatgtgcataatcccgcgaattacttctgaaaattacttctgaattaatgaaattttttcaataatttaagaaaaaatatttaagaactatagcatttcgcgatttattggtaatccactttgattctatattaaccaataattttggactattaccatggctaaagtgaatagtttgaagtctagacgcagcgtagtgctctgtctaccactatgttaatacagaaatgaaatggttgtcgataaattattagattcttttttagatatacaacacttatgtcgataaaatggcttgaatcctattacgtacgcaagaaatagaaaaccggttaatttaacc

SEQ ID NO: 217266 - DNA, 455 bp, Glycine max
cttcggaagcggaatcgatcaatccctcacctcattgctgagatctgcaaactggctatggactacgaaccctacgacagtagcggaactgatgatgaccttccaccaaccgatcaaaatataattttcaggggaggaggaggacgtctggctgggaatgggagatctgctgttgcttcaattccttacccaaggatgtacggtgaaattgatatggagacccagattcatcagcttgagcaagaagcatacagttcagttctaagagcttttaaagctcaagccgatgccattactagggagaaagaaagtttgattacagagctgagaaaagaactgagattgtcaaatgaggagcacagagaacttctaggtcgggttaatgcatatgatgtgatacggaggataagggaatggagacaggctggtggccatcagcctggtgtacttagtac

SEQ ID NO: 217267 - DNA, 559 bp, Glycine max
aacaagtgactgtcccaactttgctagctgtttgttacaaaaatatctaacaccatggtttttttttctcatacgtaagaatcgaagacacaggcatgacatgagaggatttataacaattcacgctatctatattgaattgatctctggtacacaccatggttaacattattcaccaaattcaattcacatgcccctagccaacatttcatggaaccttctatcagactcttgcttctccaacttgaacttctcgtggcaattcgctatgaacatttcagccaacatatcaatctcgttcatctcatttccacaagcctttttatcatcatcatcatcttgaaccttctcttcaagccactgtaggtatcccgcaagctgagaatcatcatcatggcaatcctcatacaaatattgttcatcatgatgatggatcatgtcaccagcttttggcaacccttcaaagacacgagcgggaacagggataacatgagaagattttgaggagcaccagttgtagtggagcctgaacgagccaaagatgattttcttagtcatc

SEQ ID NO: 217268 - DNA, 458 bp, Glycine max
  unsure (1)..(458): unsure at all n locations
ttagggtctactcccttttccaagctcctcaggattctggatcttactatgctgtcctgagcggccttcgagttccttatctcatggaccttcttccgtatcttggtcaacaacatggatggattttacattgttccagcttttatggacaaaccttgttgtttacattaccaagaacttcatgaccctgcccaaacatcaaggttcctttcattctggtatctggggaggcaagggacaaggaaaatccttccaatgtgagcttgtctttgccaagatgggaatcaaccccatcatgatgagtgctgggcagtcggaaagtggaaattgcttgagagccatcaaaactgatcaggcatagataccgtgaagccgcagacttgatcaataagggaaagatgtgtgctccttttatcaacgatcttgatgcacgagctggtcgtnttggtggtaccacc

SEQ ID NO: 217269 - DNA, 488 bp, Glycine max
cttttcttttaggtttccactctcacacactctccctcttctctttctctgcaataatctctcttctcttcttcactctctcaactcctgccaaacccccatttccgcagttcttaaatttggagtctgatgtctccgccattgctggttaccgaagatgaagggcagtgccatgcctcgatggtagcatctgcatcttcaccatccctgaactgtttctccctaaatgaggccggatttaaagaatgcaattacctgggattgtcagattgctcttcggtggacagttctactgtcccgaatttgtctgatgagaaaaaggagaatctgaatttgaaggctactgagttgaggcttggccttccgggatcccagtcacctgaaagggagacagaacttttctcgttgagctcaacaaaacttgatgagaaaccactgttccctttgcttcctacaaaggatggaatctgctcattgtctcaaaaact

SEQ ID NO: 217270 - DNA, 517 bp, Glycine max
gattcttagagctcggcaaccttattgggacctcaacttctacattaatgctttccaccatacatcagcttccatgattctctgcactctattctgaggtgaccaattctgttcttcttttctcgcataatacagtaatcaataagcacataaaccttcgaggacatggcatcagccttgtccacgaccagtgtgctttgctggaggaatcctcagcacatgcatattatctcacccttttcacagacacttcaaaatggaactctaagaactgtagctgcttcagcctcaaaagatatcagcatagaaagtgacaagtgttcctctttggaggtgaacagaagaacaattttggcttctggggactgcttgacgcctttcccgggtgagagtttggctgaggcgaaacagggccttctaacacggagaattcctggactgtccgagccagatgaacaagggatgaggacctatcgcatgccggatgagacgtcatgaggacatggtgttggatgga

SEQ ID NO: 217271 - DNA, 534 bp, Glycine max
acgccgtcaaatccgaaagcggcgttacctacaacaacaacaacaacaacaacaacgtttctgtttctcccatgtcgagaaagcgttcccgagataataacaacaattacggttacaacaacaacaacaacgattcattttcgtttctcggccaagacgtttctctccagatccagcagcagcaactcgacatcgagcatttaatcatgcaacgcatggagaaggtgagaatggagattgatgagaagaggaagaggcaagcgaggaggatcattgaagcgattgaggttggagtgatgaagaagctgaagacgaaggaagaggagatagagaaaatcggaaaactgaattgggcgttggaagagaaagtgaagcatctctgcatggagaatcaggtgtggcgtaacatagcggaaaccaacgaagccacagcgaatgctctgcggtgtaatttagagcaggttctcgcgcagcgcggcggaatggcggcggaggaagacgtctgcggacgcgccaccgtgtgcggcggcgcgg

SEQ ID NO: 217272 - DNA, 592 bp, Glycine max
attctccctttcctctccgaaccctcgatcactctcacgcgctcctatattcgctcctccaccgtcgctctctcgaacaaccacaacaccatcttcatcacatggcaaacgcagcatctggtatggcagtccatgatgactgcaagttgaggtttttggagctgaaggcaaaaaggacacaccgtttcatagtttttaagattgaggagcagcagaagcaggtcattgtggagaagcttggtgagcctgcccagggctatgaagatttcactgccagccttcctgctgacgagtgccgttatgctgtttatgattttgagtatctgactgaagggaatgtccctaaaagcagaatttttttcattgcgtggtcccctgacacatcaagggtgaggagcaagatgatttatgcaagctccaaagacagattcaagagggagctggatggaattcaagtagagttgcaagcaactgatcctactgagatgggtcttgatgtggtcaaaagccgcgccaactaagatgattatataaaatagttggctttctggtgggagcagcacccctgaagccttagttactcatatggaaa

SEQ ID NO: 217273 - DNA, 462 bp, Glycine max
aaatcacaaatcataataaaacacactggaacaagcaaagcttgtcaaaaggtgcaatagaattttatgccacaacttggaaaattgagagtttgggaccataactacccaagttgaccatcccacaaactaggatattttccatatgagtaactaaggcttcaggggtgctgctcccaccagaaagcctactattttatataatcattttagttggcacggcttttgaacacatcaagacccatctcagtaggatcagttgcttgcaactctacttgaattccatccagctccctcttgaatctgtctttggagcttgcataaatcatcttgctcctcacccttgatgtgtcaggggaccacgcaatgaaaaaaattctgcttttagggacattcccttcagtcagatactcaaaatcataaacagcataacggcactcgtcagcaggaaggctggcagtg

SEQ ID NO: 217274 - DNA, 554 bp, Glycine max
gaaaacagcatcgaacccgtcgtagcagaaaaacttgtcaccatggtttcttccgacaaggatccacgagaggatgtccttcaagcctggtacatggatgatagtgatgaagatcaaagactcccccaccacaaagaacccaaggagtttgtctcgttggaccaacttgctgaacttggagtccttagctggaaactagatgctgataaccatgaaaatgatccagagctgaagaagattcgtgaagagcgtggttacacctacatggatgtttgtgaggtctgcccagaaaagttgccaaattatgaacagaaaatcaaaagcttctttgaagagcatcttcacactgatgaggagatccgcttttgtgctgctggaagtggctattttgatgttagggatcgcaatgaagcttggattcgtgtgtgggtcaagaaaggaggaatgatcatcttacctgccggaatttatcatcgctttacgctagatgagagcaactacattaaggctttgcgtttttttgttggtgagccagtttggactccatacaatcg

SEQ ID NO: 217275 - DNA, 488 bp, Glycine max
cccgcttcaattttatctcgtaaaatttaaatacagcccaagcatacataaatatacatcagcatactaacatatgcttatgtttattctgtacccaattctaataataatacaatgcaatctttatacagggacaggcaacaaaaacactggcgagggtacatcaaggcataacaagccaggaccctttatttaaagacaccattattttctttttttcaaaccttactttagcaacaaagtcttggtccttttcatgtggtactatgattaggcagaaccagatcttacgcggcggcatcaacagcatggttgctaacatccttttccacaaaatccttgacatattgttgtcttgcagggagatggtcatttggacgattgtatggagtccaaactggctcaccaacaaaaaaacgcaaagccttaatgtagttgctctcatctagcgtaaagcgatgataaattccggcaggtaagatgatcat

SEQ ID NO: 217276 - DNA, 462 bp, Glycine max
tctttatgttgatggctatcttcttcttgattgtgcttgatcgaataatatacctctgctcatttgccacggggaaagtggttttctatattttcaacctcattctcttcacatattcagttacagagtatgattggcaattgaagccatcccaacgtatagctcagtttgctctccgtgccatatttcttgcaaaggcagtttctctgggacttcaggctatacaaatccaatatggcattcctcacaagagcacattgtatcggcaatttttgacaagtgaagtttcaagaatcaattatttaggatatagactttatcgtgctctgcctttcctttatgaattaagatgtgttcttgactggtcatgcacaactacgtccctcaccatgtatgactggctaaagctggaggacataaatgcaagtttgtaccttgtcaaatgtgattcagtcttaaata

SEQ ID NO: 217277 - DNA, 504 bp, Glycine max
aaacactcataacacaaagcacaaagcaaagctcatccttgagttaaaaaatggcagcagcttcttccatggctctctcatccccatccttggctggcaaggccgtgaagctgggcccatcagccccagaagtgggaagggtgagcatgaggaagaccgtcaccaagcaggtctcctcaggaagcccatggtacggcccagaccgagtcaagtacttgggcccattctctggcgagcccccgtactacctaaccggtgagttcccaggcgactacggctgggacactgctgggctttccgcagacccagaaaccttcgccaagaaccgtgaactcgaagagatccactccaggtgggccatgctcggagccttgggctgcgtcttcccggagttgctgtcccgcaacggggtgaagttcggagaagccgtgtggttcaaggccgggtcccacatctttaacgagggtgggctcgactacttgggcaacccaagcctgatccacg

SEQ ID NO: 217278 - DNA, 364 bp, Glycine max
ggaaaaagcaagtaacattaagttggattcggatacacaagataattcacattatctgaagtacttcaccaaacacaaatctaaaaactctcaaaagtcatttcgttctttgacgctcactttccggggacgaagttggtggcataggcccaggcgttgttgttgacagggtcagcaaggtgatcggcgaggttctccaatggaccctttccggtgacaatggcctgaacaaagaagccaaacatagagaacatggccaatcgtccgttcttgagttccttcaccttaagctcagcaaaagcctttgggtcatcagcaaggcccaatgggtcgaagctgccacctgggtagattgggtcagtga

SEQ ID NO: 217279 - DNA, 566 bp, Glycine max
  unsure (1)..(566): unsure at all n locations
ctccgcgcgtgcggcggcacgtaccaaacctgcatctgcgcccttcccttcctcgcccgtaaacagtgcctcgtcaccgtcacgtgcgaccccaaaaacctcgagcacatcctcaagctccgcttcgacaactaccccaaaggccccacgtggcagtccgcgttccacgatttgctcggcgaaggcatcttcaactccgacggcgacacgtggctgttccaacgtaaaaccgccgcactggaattcaccacgcgcactctgcgccaagccatggcgcgttgggtgaaccgagccataaagcacaggttctgccccatcctagccacggctcagaaagaaaacaaatcagtggatcttcaagacctcttgcttcggctcacttttgacaacatatgcggcttggctttcggccaagacccgcaaaccctagccgtggggctcccaaataacgctttcgctctctgcttcgatcgagccaccgaggccactctacaacgctttattttacccgagatcttgtggaagctgaagcgatggctcangctcggaatggaagtgagcctgag

SEQ ID NO: 217280 - DNA, 472 bp, Glycine max
gtgagtaaagggaaatttcatctatacagacaacgtaaattaaactaacacagatgaaatgatacatcatcgtcaatattctatattaagtaatatataaatttcttataattaatattatttctttatttaaaccgatgatgtatctatctgtttaattaaccaaatcaaaatcacttttgaccaacagtaatagcaccctcggtggtggttaacttttccagcaccggtttgagatcccttgggtacacattcaccctgagaccgtacttcatgaacagtgtgagtgacatcttttgctcgacacggtgacccggcgcgacggcgaggcggtggcgcaagagcaccgcagcggcgattgacttcatctgcaagtaagccaagtccttccccaaacaaagcctaggtcccgcattgaacgaaacaaacttgtaggagtcttgcacctgaattttgtccccttccggagaga

SEQ ID NO: 217281 - DNA, 543 bp, Glycine max
aaaaaagaataattcattatgatataaaaccagagaatgttcttcttgacatcaacttggaaccaaaggtagcagactttggcatggcaaagctttgcagcagggaaaacaatgtttcagtcaatacacactttaaaggaacaaggggatatgctgcaccggaaatgtggaagccttatccggtgactgagaagtgcgatgtttatagttttggtattcttctctttgaaatagtagggaggagaaggcattttgatgatgcctacagtgaatcacaagaatggtttccaaaatggacatggaatatgtttgagaataatgaattatttgtaatgctttcacattgtggaattgaaaacaaggacagggagatagctgagagaatgtcaaaggtggctctgtggtgtgttcagtattcaccagatgatagacctctcatgagtaatgtggtgaagatgttagagggtgaaattgaaatttctccacctccatttcccttccaaaacctgatgaatgataagccaaaatcgactccaaatggag

SEQ ID NO: 217282 - DNA, 486 bp, Glycine max
gatatccaaaggttttattagatttttaggtgccggtaagcattatcaataatggtcgccctgactatgaaaacactccattttaaacaaattttatttccactgtagtagttcttgacgcctacattaactgttggtgtttgctgcctaacaagtttctatttcgctgcaaacatcttatctggaatcgatgttgacgagcagctcctcttcggattgctcatattcaccgttaccagtgtactttccaagctgctcgagtgactttaacctgtcacggaaagcgagtgcatcttgtgctgtctacacgttctatgggcggccttcccaggcggttaaggctatgtattggagggctctggcatacgagaatgacacgtgccacgggtttggagattggcgcatggcattcaaagggagggtagcttcaacctcagactgtccaccagacaaaaacataattgcagggacagcaggaggaattct

SEQ ID NO: 217283 - DNA, 503 bp, Glycine max
ttcacttgttcttgacaagtctgagtgggtgaagggacaaacccttcgccaaccttctgcatcagttgtgagatgcaaccccaccaccccatcaggcctcaccatcagagctggttcctatgctgatgagctcgttaagaccgcgaaaacagtggcttcaccagggaggggtattttggccatggatgagtccaatgctacctgtgggaagcgtttggcttcaattgggctagagaacactgaagctaaccgccaggcataccgtaccctcctcgtgacagttccaggccttggtcagtacatctctggtgccattctctttgaggaaacactctaccaatccacaactgatggcaggaagattgttgacgtgctgcttgagcaaaacattgttcctggtattaaagtcgacaagggtttggtgccccttgcaagttccaacgacgagtcatggtgccaaggtttggatggtctagcctctcgctcagctgcatactacgagc

SEQ ID NO: 217284 - DNA, 482 bp, Glycine max
ctgtgattggtggttctccttctgctcctcaaattgcttccttttctagccgtggaccgaaccatcttacatcgcagattctgaaacctgatgttattgctcctggtgttaacattttagcagggtggactgggcgtgtgggtcccacggatttggacattgatcctaggagggtcgagtttaacataatttcggggacttctatgtcgtgccctcatgcgagtggcattgctgcattgcttaggaaggcttatccagagtggtcacctgcggcgattaagtctgcattgatgaccactgcttataatgtggataattctggtgggaacattaaggatcttggaagtgggaaggagtcaaatccgtttattcatggtgctggacatgttgatcctaatagggcacttaaccctggtttggtttatgatttggactctaatgactatttggcgttcttgtgttctggtgtgtatgatgctaat

SEQ ID NO: 217285 - DNA, 567 bp, Glycine max
gatcttccttgaactcaccaacaatcttctcctactaccaataacaatgattgttctcctaatagccaaaactgttggagacagtttcaacccaagcatctatgagattatactgcacttgaaaggccttcctttcattgatgcaaatcctgagccatggatgagaaatctcactgtgggtgagcttgttgatgtaaagccaccagtggttaccctccatggagtagaaaaagtagccaaaatagtagatgtcttgaaaaacacaacacataatgctttccctgttatggacaatggggtagtaccaccagtagtaggacaggccaatgggggaacagaacttcatggactgattctaagagcacatctcatccaggcaataaagaagaagtggttccttaaagaaagaaggagaacagaggaatgggaagtgagagagaaatttacctgggtagagctggctgaaagagaatgaagtattgaagaggtggctgtgaccagtgaggaaatggaaatgtttgtgatctacatcttttacaatacaactcccttacagtgtagagagca

SEQ ID NO: 217286 - DNA, 526 bp, Glycine max
tttggattgatcagcagcaacgcctgaaattcaatgttgatgttgtagagagtgaatggggccagggtgctaagcttgatgttctggaatcaaagattgcttcagatacttcacacactattaaggcaatttgcattgtccacaatgagactgcaactggggtcaccaatgacttggccaaagtgagacaaattctcgattcctaccggcatccagccctgcttattgttgatggagggtcttctattcgtgctcttgatttccgcatggatgaatggggagttgatgtggcaataactggctctcagaaggccctttcccttcccactgggataggtattgtggatgcaggacctacagctattgaggcctcaaaacatgctaaatcacttcgagttttctttgactggaaagactacctgaaattctaccagctaggaacgtattggccatacactccttccatacatttgctgtatggtctgagagctgctcttgatctgattttggaggaaggacttgaaat

SEQ ID NO: 217287 - DNA, 421 bp, Glycine max
gggccataacacaggggcaaaaaagatcattagaggcaatggtttttggtttaccggacaaaaaaaaaagcaatgccttaaagctgaaaggagagggtttgttcattttcaaagggggggaaaagaggggaattttttttttacagaatttcccaaagggcagaaaaaagggagtggagccaaaaatggcttgggactcaaatccgggaagggaccataggaaaaggggcccggtagtattcgctggcagcatgaactcccctttcaaggttttcaggaaagcccacattttttagaataagttccacaccaggttgacatcccaacaggtggaacttattcaaggtggcaagaggcccaattttgaaaacctctcccccaactttttgtaaggcaagacctaaccttaaattgtgttttt

SEQ ID NO: 217288 - DNA, 571 bp, Glycine max
aattgagggcttggaggagcagattgttaatcatgaaggtgacattgagcctactatttctgtgcttaatgggttggtggctatgactagatattgcaggtttttgctctttggctttgaggaggatgagcttggttttgagagtggaagtcagaagaagcctaagaggaggttgattactcaggaaattgctgaaacgtttttgactgttcctaaggacttttgctgtccaatttcgttggatttgatgagagaccctgtgattatttccactggtcaaacctatgatcggagttcaatttcgaggtggatggaagaagggcatactacttgccccaaaacaggtcaaatgcttgctcacactcgtcttgttccaaaccgggctctgaggaatttgattgtgaagtggtgcactgcacatggagttcctcttgagccaccagaggtcatggatgcgatgggtgaagttttcccgtcggcctgtcccaccaaagctgcccttgaagccaacagagccacagcgacgcttctcattcaacagctcgcgggtgggtctcaagctgggaagact

SEQ ID NO: 217289 - DNA, 528 bp, Glycine max
tttccctgttcttaggtatctgattgatttctctctttctttttttttttatcagttttgaggaattagggttcgtgatctgatttgtttctttaaaatttccccggttcttaattaggctctgcgatttaatttcttttatcatatttgaagaatcatggttctttcttggtttgatttattgcgcactcagtttctgatatgcaaaatctttccctgttttaattaaggtttagggtttgcgagttgtcattttggaaaatagggtttgtggtttattgattgtgtaatccgtttggttgtaagcagaaacttctctgttttaaatcattgcttgtgatttagctctattttttatggttctgtttgtgattgaacagatgcagatcttcgtgaaaactttgaccggtaagaccatcacccttgaggtggagtcctccgacaccatcgataacgtgaaagctaagattcaagacaaggaagggatcccacctgaccagcagagacttatctttgcgggtaaacagc

SEQ ID NO: 217290 - DNA, 476 bp, Glycine max
aaaaacataaacaacatactttcgctgaaacgagttcaatacatcattttaaaacataataaacagcagcacttaaaccagagatgcaaagcacaagttcaagggagacactgaacaaacagataagacatatgagaacacttcataaaagggattccccttagcaaccaccacgaaggcgaaggacaagatgcaaagtggattccttctgaatattgtaatctgccaaggtacgaccatcttccaattgcttcccagcaaaaatgagcctctgctgatctggagggataccttccttgtcctgaatcttagctttcacattgtcaatagtatcagagctttccacctccaaggtaatggtcttccctgtcagagtcttcacaaatatctgcatacctccacgaagcctcaacaccaaatgcagagtggactccttctggatattataatcagcaagagtacgaccatctttcagc

SEQ ID NO: 217291 - DNA, 578 bp, Glycine max
  unsure (1)..(578): unsure at all n locations
ccccagttcaaagaaacttgacaccgattagattaggggcttcgaacaaggagccccgaaacccaaaccctaatctgattcgctttcgattatggcgtctgagagcgcttctcgatcgagttccgcggccgattcgtacattgggagcttgataagcttgacctctaagagtgagatcagatacgaaggtattctctacaacatcaacaccgaagagtccagtattggcctcagaaacgtgcggtcttttggaacagaaggaaggaaaaaggatggcccacaaatccctcccagtgacaaggtttatgagtatatacttttccgtgggactgacatcaaggatttacaggttaaatcttctccacctgtccagcctactccacaagtcaacaatgacccagctattattcagtctcactatcctttcccggtgaccacattctacagtttgccttctgctgtaagtgggtctttgactgatcctagctctcataccacacaaactggacttnccgggtcaaattttcaagggcccttacctttgtatcaacctggagggaacataagatcgtggggag

SEQ ID NO: 217292 - DNA, 516 bp, Glycine max
cagaccacaggggcatatctcaaatttttttacaaagtggataatataatataaattgaataactgagggtttggtacttaagtttaatttagttaaagttgtttgtgtctggaattggtgtttgaaaatggctctctttgctgcattttccatttgtaaagttgccaaggatgcagctggagttgcaggaaatgtctttgcttttgggttgtttgtgtctcccatacccacatttaggaggattatcagaaatgggtcaacagagatgttctcagggttgccatatatttattcccttctaaactgcttgatctgcatgtggtatggcacacctctgatatctgctgataatttgttggttacaactgttaattcaattggagctgtctttcaatttgtgtacataatcatcttcctgatgtatgctgagaaagcaacaaaggtgagaatgattggattatcgctggcagctcttggcatatttgccatcatattagttggaagcttgaaataga

SEQ ID NO: 217293 - DNA, 324 bp, Glycine max
aaagccgacatgggccagttcagctttgaaactcatcccttcctcacttgaacgatggagcaatgtgtatggaagctgaactggcccatcgttcaagtgaggaagggatgagtttcaaaggaattcccaacagtatctccatctaaaatgtgtgtgtggtttgcttatctattgtgcttttgaataaaatagacaatacttgtctatggttattattggctgtatgtctgtatttggatgctctcgatcggtttgcaagtaataagagtgttttcactgtcaaaaaaagaatacaccagaaaaaaatgatactgatgataactt

SEQ ID NO: 217294 - DNA, 459 bp, Glycine max
gacgaatattgggtggcgtctggcgatgtcaccaaatcgccggtgacaagtgcgtttgaccttgaatctgtggcagtgcacgagatcgggcacttgctcggattaggccactcgtcggacctaagagccatcatgtatccttctataccacctcgaactaggaaggtgaatctagcgcaagatgatatagacgggattcgaaagctctatggtatcaacccctaattattatagctaggtgttgtttgtactagaactagagttttatttcggtaatttgcattaaaggattttgaaagttatcgaggtgaaattattctaattcaagaacaacaaagatcgcatgtaagatattgtattttagttttctcttaattaagaataaaccagctgatactaggtgatgcatatatgataatgaataaatgtgacaaatttaccttaatttatctaatctat

SEQ ID NO: 217295 - DNA, 546 bp, Glycine max
tttggattgatcagcagcaacgcctgaaattcaatgttgatgttgtagagagtgaatggggccagggtgctaagcttgatgttctggaatcaaagattgcttcagatacttcacacactattaaggcaatttgcattgtccacaatgagactgcaactggggtcaccaatgacttggccaaagtgagacaaattctcgattcctaccggcatccagccctccttattgttgatggagtgtcttctatttgtgctcttgatttccgcatggatgaatggggagttgatgtggcaataactggctctcagaaggccctttcccttcccactgggataggtattgtggttgcaggacctagagctattgaggcctcaaaacatgctaaatcacttcgagttttctttgactggaaagactacctgaaattctaccagctaagaacgtattggccatacactccttccatacatttgctgtatggtctgagagctgctcttgatctgattttcgaggaaggacttgaaaatgtgattgcaagacacagtc

SEQ ID NO: 217296 - DNA, 520 bp, Glycine max
gcggaaaactgcctcgtgggtaaggaagtgtgtattgcagcttggtccaactttcattaaacttggtcagttatcatcaacaaggtcagatctatttccacgtgaatctgtggatgagctcccaaaattacaggacatggttcctgccttctctcctaagaaagcaagataattcatcgagagtgagattgggagctcccatttacatattatttgaggagtttgaagatcgggcaattgctgctgctcctctcggtcaggttcatcgcgctattctgcataatggggaaaaagtagtcatcaaagttcaaaggcctggcctgaagaagcttttctgcattgatttgaaaaacttagagttgattgcagagtattttcagagaagtgaaacttttggtggtccacttagagattggattggaatatatgaagaatgtcaaactattttcgctcaagaaattgactatgtaaatgaaggaaagaatgctgacagattccgccgagattttacaaacataaa

SEQ ID NO: 217297 - DNA, 614 bp, Glycine max
cttgatcaagtattctgccaccaacatcccaatccctcctccataaccatattgaagaataagataaatacaacaaaacctagagatggaagaagcacaggtgcaggtatgggaagggtatgtagattggaggaacaggccaaccataaaaggacgtcatggtggcatgcttgctgcctcctttgttttggccgctgaggtattggagaacctagcatttcttgccaatgcaagcaaccttgttttatatctgtccaagtttatgcacttttcaccatccacctctgccaacattgtcactaacttcatgggaactgccttcctccttgctattcttggtggatttctagctgatgcgtttatcaccacttactccctctatctcataagtgccggaatagaattcatgggtttattaatgctcacaatacaagctcacaagccgtcactcacaccaccaaactgcgtaattggaaacaccgacagtccatgcgataaaattcatggtgcggacgccgctatgctatttgcaggcctctatcttgtggttctgggcgtaggaggtataaaaggttcacttccttcttatggagctgagcagtttgatgagaata

SEQ ID NO: 217298 - DNA, 361 bp, Glycine max
aagaacaagagaatgtcaagagagtccaattggctgacaagtacttgaacgaggctgctcttggaaatgctaacgaggatgctattcagaggggaactttcttccagtcttgaattggaggcaaagcaaacttggcaagtaaatatttctgttcgtgaaggttgttgtactaatccaagtgctagaagttgtgatggaacttgcgtgtaacattcttagcattctcaatgtcttaggtgcaaagagaagatgctaagtttgagatgatcttactatatttttcatattggaccgtcttcctctataattttgagttacagtgtccacttaaattgaatttggtgccttttccttttgtcct

SEQ ID NO: 217299 - DNA, 361 bp, Glycine max
aggacaaaaggaaaaggcaccaaattcaatttaagtggacactgtaactcaaaattatagaggaagacggtccaatatgaaaaatatagtaagatcatctcaaacttagcatcttctctttgcacctaagacattgagaatgctaagaatgttacacgcaagttccatcacaacttctagcacttggattagtacaacaaccttcacgaacagaaatatttacttgccaagtttgctttgcctccaattcaagactggaagaaagttcccctctgaatagcatcctcgttagcatttccaagagcagcctcgttcaagtacttgtcagccaattggactctcttgacattctcttgttctt

SEQ ID NO: 217300 - DNA, 405 bp, Glycine max
tgcactgcggacattaacggacagtgccctagtgagctaaagactcaaggaggttgcaacaacccttgcactgtcttcaaaaccgaccagttctgttgcaattccggtagctgtgggcccactgattattccagattcttcaagcaaaggtgccccgatgcttatagttaccccaaggatgatccaactagcaccttcacttgtaatggtgggactgactatagggttgtcttttgtccttgaacccaataaccttacataatatataatatatgcactaaaataaagatcaataaaattacataaggcgtgtgcactttgcgtgccccttctagtatatgatgtgtgtacttctattctaaatgaaatggggtacttatgaataatatattaaactctttgggc

SEQ ID NO: 217301 - DNA, 406 bp, Glycine max
gcccaaagagtttaatatattattcataagtaccccatttcatttagaatagaagtacacacatcatagacgaggaggggcacgcaaagtgcacacgccttatgtaattttattgatctttattttagtgcatatattatatattatgtaaggttattgggttcaaggacaaaagacaaccctatagtcagtcccaccattacaagtgaaggtgctagttggatcatccttggggtaactataagcattggggcacctttgcttgaagaatctggaataatgagtgggcccacagctaccggaattgcaacatgtactggtcggttttgaagacagtgcaagggttgttgcaacctccttgagtctttagctcactacggcactgtgcgttaatgttcgcagtgca

SEQ ID NO: 217302 - DNA, 504 bp, Glycine max
gaagaattgtacggtccagttctgtatgtaatgaaatttcagactctagaagaagcaattgccttgaacaattctgtacctcaaggattaagtagttcaatctttacccatagacctgaaactatattcaaatggatcgggccacgaggtaatgattggggtatattgaatgcaaacatacctacaaatggcgctgaaactggtggtgcctttggtggagaaaaggcgacaggtggtggccgtgaagcgggaagtgactcatggaagcaatacatgctgagttctacatgtaccatcaattatggaagtgaactaccattagctcaggggataaactttggctagaaagctatcctagcacatgaggctgcacaaaataatgcgattttgcagtctgaagagagttctatatataccgagatgttagtctggctgacatgggttcaaagtgttgacttaacacgacatgcttgctgttaggatggcaccttgatatgacagttt

SEQ ID NO: 217303 - DNA, 380 bp, Glycine max
gaccgggaaaagaattctcaggttattcatttaacatttatttaaaatatcttatacattgaaactgtcatataaaggtgccatccttacagcaagcatgttttgttaagacaacactttgaacccttgtcaaccacactaacaacttgggatatatagaactcttttgacaccgtaaaattggattattttgagcaacctcatgtgctaggatagctttttagccaaagtttatcccctgagctaatggtagttcacttccatcactgatggtccatgtagaacgccccatgtattgcttccatgagacacttcccgctttacggccaccaccggtcgccttttcttaccaaaggcaccaccaatttcaggtccatttg

SEQ ID NO: 217304 - DNA, 534 bp, Glycine max
  unsure (1)..(534): unsure at all n locations
gacgtcatcatgctcgtcctacgcaactgcccgcagttcgccctcgccttcctcggcgccacccaccgtggcgccgtcgtcaccacagccaaccccttctacacgccggcggagcttgcgaagcaagcgacggccacgaaaaccaggctcgtcataacgcaatccgcgtacgttgagaaaatcaagagtttcgcggacagcagcagcgatgtcatggtgatgtgcattgatgatgatttttcttatgaaaacgacggcgttttgcatttctcaacgctcagtaacgccgacgaaacggaagcccctgccgttaagattaaccctgacgagctcgttgcgcttccgttttcttctggcacgtctgggctccccaagggcgttatgttatcgcataaaaacttggtcaccacgatagcgcagttagttgacggcgaaaacccgcaccaatacactcacagcgaggatgtgctactctgtgtgttgcctatggttcatatctatgcgctcaattncattttgctctgcgggattcgt

SEQ ID NO: 217305 - DNA, 504 bp, Glycine max
cgccgaaaccaaaacgtcgtcgttcacccacgctctcttcgtcagcgccggcattgaccccttcgccaccattcaccacgccttccgtgcagttaggaaccacctcaacacgttccgactccgccacgagaagaaactccctggcatcgtcgactgcttcggctggtgcacctgggatgccttctaccaggaagttactcaggaaggagtcgaggccggaatcaaatccctagccggcggaggcacgccgccgaagttcgtcatcatcgacgacggatggcagtccgtcggcggtgacgacgacaaacaaaactcaaactcgttgcagaggctgacgggaataaaagagaacggcaagttccagaagaaggaggaaccggaattggggataaagaacatggtggaggtagcgaagaagaagcattcagtggagcatgtgtacgtgtggcacgcgataacgggctactggggcggggttcgtccaggggtgaaggaaaatggaga

SEQ ID NO: 217306 - DNA, 528 bp, Glycine max
ctcttccataaacgggtggtgcctctcttccatctccccagccaaaacctctctcaggaaggccacattacgcccttccgtcttcgcaacccttaacactccttcttctccttcctcttcatcttccttcccctctctcattcaagacaggcctgtttttgctgcccctgcccccatcatcaccccaactgtgagagaggatatggcaaaggaatacgagaaagctattgaagaacttcagaaattgttgagggagaagagtgaactcaaagcgacagctgctgaaaaagtggagcagataacagcttctctagggacatcatcatctgatggcatcccatcatcagaagcctcagacaggatcaaagctggtttcattcacttcaagaaggagaaatacgacaagaatccagctttgtatggtgaacttgccaaaggccagagccccaagttcatggtgtttgcttgctcagactcaagggtgtgcccatctcatgtgctagatttccaaccaggagaggcctttgt

SEQ ID NO: 217307 - DNA, 591 bp, Glycine max
gcgagcgcgggtaccggtggttcccctgcgtcgtgttgtgtgagatcaaaccctagtttttagacactgcaacagtagcagcagcaaccatggcgagtaggaggtgcctgcgagcgttaactcaaacgagaccgtttctcttccgaaaagcatcctctcttcgctcactcgccgtgcttccatttcccaactccaacgcttctccacacgctttcaccgcacgcgcctctgtttttgcgcaatgcccgcacctccgttgtttctcttccgacaaaaaagacgaccacagcgacgaagaagatgatagtgacgaggattacgatgaagaagaggattatgttgacgatgatgacgtcactgtgtcaagagggaaaaaagtatacacggcggaggagaaggaagcggaagcggcggctattgggtacagagtggtgggtcctcttcaaaaggaggaagatagcgtttttaagccttacgagcctgttttcgctgttgttcagattggctcgcaccagtttaaagtaagcaacagagacagcattttcactgaaagattgagttttgcgaagtgaatgacaagttgattttgac

SEQ ID NO: 217308 - DNA, 521 bp, Glycine max
ggttgactcccttttccaagctccacaggatgctggaactcactatgctgtcatgagctcctacgagtaccttagcactggacttcgccagtacttggacaacaacatggatggattttacattgctccagcttttatggacaaacttgttgttcacattaccaagaacttcatgaccctgcccaacatcaaggttcctctcattcttggtatctggggaggcaagggacaaggaaaatctttccaatgtgagcttgtctttgccaagatgggaatcaaccccatcatgatgagtgctggagagttggaaagtggaaatgcaggagagccagcaaaactgatcaggcagagataccgtgaagccgcagacttgatcaagaagggaaagatgtgtgctctcttcatcaacgatcttgatgcaagagctggtcgtcttggtggaaccacccaatacactgtcaacaaccagatggtgaatgccaccctcatgaacattgctgataaccccaccaatgtgcagc

SEQ ID NO: 217309 - DNA, 479 bp, Glycine max
aagtggacactttaactcaaaattatagaggaagacagtccaatatgaaaaatatagtaaaatcatctcaaacttggcatcttctctttgcacctaagacattgagaattctaagaatgttacacgcaagtcccatcacaacttctagcacttggatcagcacaaccttcaggaacagaaatatttacttgccaagtttgctttgcctccaattcaagattggaagaaagttcccctgttaatagcatcctcgttagcatttccaagtgcagcctcgttcaagtacttgtcagccaattggactctcttgacattctcttgttcttggacaagcatgttaccatacgtcaagagcttctccagagtcatcttgggctgctcaaaggttggaggtccatcttttgagttcacaagcttcttcccaatgccgtcaacaccaacaccagaaatccacttcctcacttcgtcatcatatactc

SEQ ID NO: 217310 - DNA, 478 bp, Glycine max
gcaggatagcagatatgttccggttaagttggcaccatcaggatttgtgcttctcagagacttgcatcctactgagccagaagtgcttgctctaactgacacgccctcatctaccagttctgctgctggtgggtcagcaacaggattgcagagttcttcatcagccatggctgtggatgaggaacctcaacctcctcaaccatttgaatacacctcatgagtttggacctgattccactaagttcaaatattcgatattcgtcatggtgcttatgaaaattggttcttctgaggagagtagctacctacgtgtgaatggatcaactctactgctctgttacccacttgaaatcgagttctggggcttggtttttcatttttcctgaacgcactgtgctgtggtatttgctccaatatgtagttaatatgtgtgctggttcatactatatatttttaaagtggggtgccgaagcagcgt

SEQ ID NO: 217311 - DNA, 504 bp, Glycine max
aaatatattaattttgagatagccaaatgaaaatgggcatcgaccaaagactgtgttctagttggagtaacgttttcagattgggcaacaggaacagttacagttcttttaataaatctgttgatcccacaaacccatcatgttccagttcttccttcctcacgcatggaatccacgtgtttcaatgccccgatgcggttggaattgtagccaatctatcggattgcattgcgttgtcgggggggcaacattctctctgctgatgtttttggacctcaaaataaacgagtcttctactccagaaatgtttttgtttttgatcctgtcatgtggcctacaatgcagatggaggaggatttactaaggatctctataacattcaatgccatgagatctgttataagggtgccagctctggatcctaaatatgcgattgctattctcgtagaacagcatgaccactgtctgattgatttggtacatggataggacgatggaagactc

SEQ ID NO: 217312 - DNA, 490 bp, Glycine max
aaagtaattattgataagtttatccaaatataagcatagcgtgggcttttgaagtaaataatcatatgcacttatagagatatacccccatttggcagagtgtataattgttgtttgtcctcaaaatacgacagtattctttttttcatatggcaacactcgaagctcacaataagacctgatagcgcttgtgaggcattgtttctcaaggttctctgatttctgcacatagctctgcaagttatctctatgggaaactctttcaaccatttgttcaataataggtccagcatcaagtccctcagtcacaaagtgacttgttgcaccaattaatttcacacctgcatcaacggcctgtttagatggattgctaccgctaaatgatggtaacaggccatggtggatgttaattatatccttcccataactccttaaaaagaagctggatagtatccgcatagacctcgcagtactaaaaaatcagtatttt

SEQ ID NO: 217313 - DNA, 489 bp, Glycine max
  unsure (1)..(489): unsure at all n locations
aatgtcactaccttgtgtacgagttcatgaaaaatggaagcttgcaagacactctgagcaaggtcgagaggggcgagagcgagttggattggttgtcaaggcacaagatctccctcggtgtggctgctgggcttgaataccttcacatgaatcacaacccacgaatcattcatagagatctcaagcctgctaatatccttcttgacgatgacatggaggcaagaattgctgattttggactcgccaaggctatgcccgattacaagactcacataacaacctccaatgtggctggcactgtgggctatattgctcctgagtatcatcagatactcaagttcactgatgagtgtgatatttacagttatggagtgattcttggtgtattggtcattggtaagcttccttctgatgatttctctcagcacactgaagagatgagtttggtcaagtggatgaggaagacttntagctccgagaatcccaagg

SEQ ID NO: 217314 - DNA, 601 bp, Glycine max
ggaacgtgtagctgaatccgagcgaactctgtacccatacgtgactggatcctctgtagtcgctatcaaatacaaagatgggattctaatggccgctgacatgggaggttcgtatggatctaccctgcggtacaagagtgttgagcgtatcaagcctattggaaagcattctcttcttggtgctagcggggagataagtgactttcaggagattctgcgttaccttgatgagcttatcctatatgacaacatgtgggatgatgggaattctctagggccgaaggaggtgcataattatttaacccgtgtgatgtataatagacgtaacaagttcaacccattgtggaatgcacttgtacttggtggggtgaaaaacgggcagaagtaccttggcatggttaacatgattggcattaattttgaggacaaccatgtagcaaccgggcttggaaatcatctcgctaggccaattctccgtgatgagtggcatgaaaacttgacctttgaagagggcgtcaagttactggaaaaatgcatgcgtgtgctcttataccgtgataggtctgctgtcaacaaaatccagatttcttaattacagatg

SEQ ID NO: 217315 - DNA, 470 bp, Glycine max
gaatgtcataatgaaaggaaactggaatagaaattctaatgaaaatatcaatttggaccatcataggaatctttaaaaaaaatataaaaacaccaagtctaatttaatatccattaacaccttaaagagttctattggaatccatttcatatccatttaaaattctgtttcatttcacaatgagtcagttaccatgaaccttcagcgcccacagttggattcttgaaggcagagaactcccagtacgttttcaatgagaatggtgggaaaacagtggcaccttcatctgtaattttagatatctggattttgttgacagcagacctatcacggtataaaagcacacgcatgcattttttcagtaacttgacgccctcttcaaaggtcaagttttcatgccactcatcacggagaattggcctagcgagatgatttccaaagcccggtgctacatggttggcctcaaaata

SEQ ID NO: 217316 - DNA, 558 bp, Glycine max
aggagagccagcaaaactgatcaggcagagataccgtgaagccgcagacttgatcaagaagggaaagatgtgtgctctcttcatcaacgatcttgatgcaggagctggtcgtcttggtggaaccacccaatacactgtcaacaaccagatggtgaatgccaccctcatgaacattgctgataaccccaccaatgtgcagcttcctggtatgtataacaaggaagagaatccccgtgtgcccatcatcgtcaccggtaacgatttctccacactctatgcgcctatcatccgtgatgggcgtatggagaagttctactgggcaccaacaagggatgaccgcattggtgtctgcactggaatttttcgcaccgattcaattcctgaacaggacgttgtcaagattgttgacaccttccctggccaatccattgatttctttggtgcactgagggccagagtatatgatgacgaagtgaggaagtggatttctggtgttgggcgttgacggcattgggaagaagcttgtgaactcaaaagatggaccgtcaacctttgagc

SEQ ID NO: 217317 - DNA, 480 bp, Glycine max
aagtggacactttaactcaaaattatagaggaagacagtccaatatgaaaaatatagtaaaatcatctcaaacttggcatcttctctttgcacctaagacattgagaattctaagaatgttacacgcaagtcccatcacaacttctagcacttggatcagcacaaccttcaggaacagaaatatttacttgccaagtttgctttgcctccaattcaagattggaagaaagttcccctgttaatagcatcctcgttagcatttccaagtgcagcctcgttcaagtacttgtcagccaattggactctcttgacattctcttgttcttggacaagcatgttaccatacgtcaagagcttctccagagtcatcttgggctgctcaaaggttggaggtccatcttttgagttcacaagcttcttcccaatgccgtcaacaccaacaccagaaatccacttcctcacttcgtcatcatatactct

SEQ ID NO: 217318 - DNA, 467 bp, Glycine max
gccctgcatgcatgcgccggggagcctcccctcgcattcctcgactctcttcttcttggagagtgggaagatcgcatgcagagaggactttttcgctatgatgttaccgcctgtgaaaccaaggtgattcctggtgaatatggtttcgttgcccagcttaacgagggtcgtcacctcaagaagaggccaactgagttccgagttgataaggtccttcaaccctttgatgaaaacaaattcaactttaccaaagtcggtcaagaagaggtcctcttccaatttgaagctagcgaggatggacaagtccagttctatccaaatgctccagttgatgttgacaattctcccagctttgttgccatcaatgacagtcctattgagtatgggcatgttctgctgattccgcgcatatttgagtgtttgcctccacggattgaccgatagagcttcctacttgcacttcaaat

SEQ ID NO: 217319 - DNA, 277 bp, Glycine max
cgagggcagagtgaggacaggcgaacccgatgcatggccaacaaagagaaggaggaaccgtgagctagaactaggtacgagggggatgcagatctacagcagactttaacagggaaaacgatgaccggagagggcaaagctaagaaccaaagaaacggcaaggccgagatcgagagacaaggagggaagccaatcagaccagcaacgtctcacgatgaggcggaaagcaactagaggacaggcgcacccgcggcaaagacatcaaagagaaggaatg

SEQ ID NO: 217320 - DNA, 526 bp, Glycine max
  unsure (1)..(526): unsure at all n locations
aggaggcgtacggcggcggcgtagcggtggaggagaaaccgacgaagtcggagacggagacggagaagctgaagaaggccttggtggattcgttttatggcaccgatcgtggactgaaagcaacgagcgaaacgagagcggagatcgttgaactcatcacacagctcgaggccaagaaccctaaccctgttcccaccgacgccttgactcttctcaacggaaaatggattctcgcgtatacatcctttgcaggtttattcccattgttgtcaagtggaacactaccattggtcaaggtagaggaaatatcccagattattgactcgctgaattttaccgtccaaaactctgttcagttcgctggtcctttggccaccacctcaattagtactaatgccaaatttgatgttcgaagtccanaacgtgtgcagataaagtttgaggaaggcataattggcacttcacagcttacggactcattagagataccggaaatgtggaattctgggtcaaagattgccttaca

SEQ ID NO: 217321 - DNA, 527 bp, Glycine max
  unsure (1)..(527): unsure at all n locations
gcaattgaagttaaaagccttagccttccctacaactccaaacacaaagacatcatcatccatggctgcctccgtctccactgtcggagctgtcaacagagctcttttgaacctgaatggttctggagctggagcttcagctcccagttcagccttctttgggaccagcttgaagaaggttattgcctcaagggtccccaacagcaaggtttccggtggaagcttcaagattgttgctgtagaagagaagaaagagattgaagagacccagcagaccgacaaggacagatggaagggtcttgcctatgatatctcagacgaccaacaagacatcacaagaggaaagggtttggttgactcccttttccaagctccacaggatgctggaactcactatgcagtcatgagctcctacgagtacctcagcactggacttcgccagtacttggacaacaaaatggatggattctacattgctccagcttttatggacaagcttgttgttcacatctncaagaacttcatga

SEQ ID NO: 217322 - DNA, 483 bp, Glycine max
aagtggacactgtaactcaaaattatagaggaagacggtccaatatgaaaaatatagtaagatcatctcaaacttagcatcttctctttgcacctaagacattgagaatgctaagaatgttacacgcaagttccatcacaacttctagcacttggattagtacaacaaccttcacgaacagaaatatttacttgccaagtttgctttgcctccaattcaagactggaagaaagttcccctctgaatagcatcctcgttagcatttccaagagcagcctcgttcaagtacttgtcagccaattggactctcttgacattctcttgttcttggacaagcatgttaccatacagcaagagcttctccagagtcatcttgggctgctcaaaggttggaggtccatcttttgagttcacaagcttcttcccaacactgtcaacaccaacaccagaaatccacttcctcacttcatcatcatatactct

SEQ ID NO: 217323 - DNA, 525 bp, Glycine max
gtccatgtacgagcagtggctagtaaagcacggcaaggtgtacaacgcgctcggagagaaggagaagaggttccagatcttcaaggacaacctgcgattcatcgacgaccacaactcccaagaggaccgaactcccaagaggaccgaacctacaagctcggactgaaccggttcgcggatctcaccaacgaggagtacagggccaagtacttgggaaccaagatcgatcccaaccggaggctcggcaagaccccgagcaaccgatacgcgccacgtgtcggcgacaaactacctgaatcggttgattggaggaaggaaggtgctgttcctccagtcaaagaccaaggaggctgtgggagctgttgggcattctcagcaatcggtgcagtggaaggaataaataagatagtgacaggtgaactgatttcgttatcagaacaagaattggtggattgtgatacaggatataacgaaggatgcaatggaggacttatggactatgcatttgagttcattatcaacaat

SEQ ID NO: 217324 - DNA, 460 bp, Glycine max
cgaagatttgactgatgatgatattcgcacagccatacagaatgcaactggacctaaatcagcactgtttgttcctgaagtcccgtttgaagtgcttgtacgcaggcagatatctcgactattggatccaagtcttcagtgcgctaggtttatatatgacgagttaatgaaaatcagccatcactgtatggtcactgaattgcagcggttccctttcttgagaaagcgcatggatgaagttattgggaactttttacgagaaggcctagaaccctcggagactatgataacacacgtcatagaaatggagatggactacatcaacacttcccacccaaattttattggtggaagtaaggcaatagaagctgcagtgcaacaaaccaggtcttctaaagttggtttaccagtttctagggtgaaggatgcactggaatctgataagggaccagctactgag

SEQ ID NO: 217325 - DNA, 465 bp, Glycine max
ctatctttaacatgtaccaaactgagcatgagttgcttaggtacttgtataagctacaatcaaaagatctctcactatgccacagtatgattccacttggatcttggacaatgaagctgaatgcaacaactgaaatgatgcctgtgacatggcccagctttactgatattcacccttttgcaccagttgaccaggctcaaggttatcaggaaatgttcaataatttgggtgaactgttgtgcaccatcactgggtttgactccttcttcttgcaaccaaatgctggtgctgctggagaatatgccggacttatggttattcgtgcatatcatttggcaaggggagaccaccaccgcaatgtttgcattatacctgtctcagcacatggtacaaatcctgctagtgctgttatgtgtggaatgaaaattgtctctgttggaactgacgccaagggtaacattaata

SEQ ID NO: 217326 - DNA, 396 bp, Glycine max
aatgctgaatgtttttctttttttctttttatacaattcgtttacatgaatcaaattcattttttcacattattgtgacagataggcctaaaatacattcctaaaataaaatagcagcagcaattatacgaattacttttttttgtttcctgtggttggatgaaacttaagagcagtggattatcatcattatcacatatgatgaagcaatattcaagaggtgcaagaactgtatgaataggaataagagtttatgtacaacgggaaatgaaaatagtcgtcatttgaacacactatgctgtggcagcagcttgttcttcaacagcctgtgatgctggcagaagggtgcaaatcaagttgcggtcaccgtacacattatcaacacgtcctgtggta

SEQ ID NO: 217327 - DNA, 582 bp, Glycine max
cacacacaaaaaaaagctttagtttaggatgacccaagtgaggaacaagcaagtggttctaagagattatgtcaccggattccctaaagaatccgacatgaacattgttgaaggcaccataatattgaaggttccagaaggttccaatgatgtccttctaaaaaatctctacttgtcatgtgatccatacatgcgactcctcatggccaaggaccgttctttcggagatggctccttcacccttgcctctccattgaaaggatatggtgtgtctcaagtgctggaatctggacgtccagattacaagaaaggtgatttagtgtgggggattactaaatgggaagagtatagcttggtcccctcatctctcatacatttcaaaattgagcacactgatgtcccactttcctactacactggaattcttggtatgccaggaatgactgcttatgctggtttctttgaggtaggttctcccaaaaaaggagacactgttttcgtttcagctgcctctggtgctgttggtcaactcgttggccaatttgctaagttgactgtttttatgttggtggaagtgctgga

SEQ ID NO: 217328 - DNA, 509 bp, Glycine max
agcatatattagaggttttatttatcacaaaatgtcactaatgtagtaatttctatcaacaaaatagaagaatgactgcataaaccataaaagcaaggttcaatatccaacagaaaattgaaaattcggaattaaagcttagagaataacaatatatttatataattttactcgtgagtaacaacaaccacttgtttaccaacattgcgaccggtatagaggccaaccaaggctgcagggcccttctcaaggccctcagcaatgtcttccacatacacaaccttcccttctctgatatgaggcaggacaaactccaagaattttggatataaatgatagaaatcagttgcaataaaaccttccattttaacccgcttaaatatgagatttgccaaatttgttacaccatcgaactgagtaagattgtactgcgagatcattccacagacaggtatgcggccatgaaatttcatgtttgggagtactgcatcaagtgtcttgcccccaac

SEQ ID NO: 217329 - DNA, 467 bp, Glycine max
  unsure (1)..(467): unsure at all n locations
cttactttctggcctgaagacttgtatggaaatatctagttacatgcattctggaggagtgtcaatgccccatggatctattgttgctcctagttcaatcatggaagacaagggaaaatttgatgcagagtgcacagaccaggagatgccatctaggtcacggttgctgaggaaaaggggtaaaacaaggaaatttaaatattcttggaaatctgctggccacccatcaatatggaaaagaattgctgatgggaaaaaccaatcttgcaagcagtatacaccatgtggatgtcagtcaatgtgtggaaaggaatgtacttgtgttaatggtggaacttgctgtgagaaatattgcggttgttctaaaagctgcaaaaatcggtttagaggatgccattgtgccaagagtcagtgtagaagtcgacaatgcccatgctttgctgcaggacggnaatgtgacccagatg

SEQ ID NO: 217330 - DNA, 471 bp, Glycine max
cttactttgtggcctgaagacttgtatggaaatatctagttacatgcattctggaggagtgtcaatgccccatggatctattgttgctcctagttcaatcatggaagacaagggaaaatttgatgcagagtgcacagaccaggagatgccatctaggtcacggttgctgaggaaaaggggtaaagcaaggaaatgtaactattcttggaaatctgctggccacccatcaatatggaaaagaattgctgatgggaaaaaccaatcttgcaagcagtatacaccatgtggatgtcagtcaatgtgtggaaaggaatgtacttgtgttaatggaggaacttgctgtgagaaatattgcggttgttctaaaagctgcagaaatcggattagaggatgccattgtgccaagagtcagtgtagaagtcgacaatgcccatgctatgctgcatgacgggaatgtgacccagatgtctg

SEQ ID NO: 217331 - DNA, 538 bp, Glycine max
  unsure (1)..(538): unsure at all n locations
tggagggaatagagcacaggacagttgaagtaaatggcataaaaatgcacattgcagagaaaggagaaggccctgtggtgttgtttctccacggcttccccgaactctggcactgttggcacaaccagattgtggctcttggttccctcggataccatgcggaggcaccagatctccgaggctacggtgacaccgatgcaccaccttcaatagacagctacacatgctttcatatagtggctgatctcgttgcgcttattgattctcttggtgcagagcaagtgttccttgtggctcatgactggggagccatcataggttggtacctctgcatgtttcgccctgacaaagtgaaggcctatgtctgcctcagtgttcctttcatccgcagaaaccccaacgtcagaaccgtcgatggcatgcgcgctatgtatggagaagactactatatctgcagatttcagaaaccaggggaaatggaggctcagatggctcacngtggcacagagtatgttctcaaaaacatccttacaattcg

SEQ ID NO: 217332 - DNA, 569 bp, Glycine max
gggcgtcagaaaaagaccgtggggccggttcgctgccgaaatcagagaccctttgaagaaagccagggtttggctcggaacctttgacaccgccgaggaggcggtgcgtgcctacgacacggtggcgagaacccttcggggaccaaaggcgaagaccaatttccctctttctccgccgttctaccatcccgatccattttccgatcaccggcactttgccaacaccggcgaagatttccacgatcaccggcgaccaacatccagtggcatgagcagcaccgtatagtccttcagcggcccccgtgctgccgtgccggcgacagcgccggtggccaccggtcggagatatccccggacgccacccgttatccccgaggactgccgcagcgactgcgattcgtcgtcctccgtcgttgacgactgtgactgcgacaacgtggcgtcttcgttcccgcgagaaccgttgtcgtatgatctagacgcgttgccgttagacgatgctgacgtggcaacgatgatctgttctgcaccgttctttgctttgatgaggaaaaatgaaaaaccggacg

SEQ ID NO: 217333 - DNA, 418 bp, Glycine max
ctgaaaaccaaattagactcttgcaccgcaataatggcaataaaatactagcataatttatttgtgagtctcaaaaccttagcacactatatatacactgcatagccttggggtcttcaaaatcatcaattcaatggcttccctcatgagcaccatcctcatgcaaaggtcttcttctacttcacttgctgctgggaggttgttctccacaacaacagcaaccattattgattccccttcacttgctcagagaatcagagatttgcctaaggacctccctggaaccaacatcaagaaacatgtttctcagctcattgggaggactccacttgattatcttaacaaagtcactgaaggatgtggagcttatgatgctgtcaagcacgagatgatgcaacctactgccagcatcaaagac

SEQ ID NO: 217334 - DNA, 504 bp, Glycine max
tgttggcctgagagttaggtccatggctgaggaagagcaaccaagtcagcctgcgaccccagttacaccaccaccagcagaacccaaaccacagccagtctctactccttcaccaaaggtgagcaccaagttttctgatgtgttggcgttcagtgggccagcacctgagaggatcaatggaaggttggccatgattgggtttgtgggtgcaatggcagtggaagtagccaaagggcaaggtgtgtttgaacaaatatccaatggtggtatcccatggttcttgggaacaagtgtggtccttacccttgcttccttgattccactcttacaagggatcagcgtggagtctaagtccaaagggttcatgtcctcagatgcagaactgaggaatgggagatttgctatgatgagatctggttgctctggcttttactgagtatgataaaggtggtacctaggtgtaattcagtcatgaatgcacaccaaaatggtcttaagtcattc

SEQ ID NO: 217335 - DNA, 424 bp, Glycine max
cggctcgaggtgattatagactatctttatataataatataaataagaataaaaaaaaaaaaaaaaaaaagaatctatataaatataaaaataatatatataaggtacaaatagtaaatcgaggtacccattttatgataaactttccttccatttttgttcctctagtaggcctagtatttccggcaattgcaatggcttctttatttctttatgttcaaaaaaacaagattttttagatacagaaaacaaagtaaaattctggggtttattattccccaattataatgctaaatacaaaaaaaggagagtactgagtataatctttcgctcagacgatgtactgatatattctatggcggaggttcaaagaacaagcaatttatatagagccgttttcactgtgataggtacattggggtta

SEQ ID NO: 217336 - DNA, 512 bp, Glycine max
ggaattatgggacaaaaaataaatccgcttggtttcagacttggtacaactcaaagtcatgattctatttggttagctcaaccaacaaattattccgagaatatacaagaagataaaaaaatacgagattgtatcaaaaattatatacaaaaaaatataagaatatcctctggtgttgagggaattggacagataaagattcaaaaaagaattgatcttattcaagttataatatatatgggatttccaaagtttttaatagagggtaagtctcaaaaaatcgaagaattacagacgaatatgcaaaaaaaactgaattgtgtgaatcgaaaactaaacattgctattgtaaaagttgcaaatgcttataaacaccctaatattattgcagaatttatagctggacaattaaagaatagagtttcgtttcgtaaagcaatgaataaagctattgaattaactgaacaggcgggtacaaaagggagtcacgtacaaattgcaggacgtatcga

SEQ ID NO: 217337 - DNA, 484 bp, Glycine max
  unsure (1)..(484): unsure at all n locations
ctccgccacttctgaatctattgaatcaacaatcatgtcggacgaagagcaccatttcgagtccaaggccgacgccggagcctccaaaacctaccctcagcaagccggtaccatccgcaagaacggctacatcgtcatcaaaggccgcccctgcaaggttgtggaagtttcgacttccaaaactggaaagcacggtcacgctaagtgtcactttgttggaattgatattttcactgccaagaaacttgaggatattgtgccctcttctcacaactgtgatgttcctcatgtgaatcgtactgattaccagctcattgatattgctgaggatggatttttgagtctgcttactgaaaatggtaacactaaggatgacctcaagcttcccactgatgagagtctgctcactcagataaaggatggatttgctgaaggcaaggatctntgtgagtctgacatgtctgctatgggtgaggaacagatt

SEQ ID NO: 217338 - DNA, 534 bp, Glycine max
tcgtttccaactaccaaaaagacgacgctgcagactctcctcgtcccgtcggaggttgtggtcggaattgcctcaaagcttgttgccttccagatgcaaagctgcctttgtatgctttcaagaaggctaatggaaaggatttggccctgcatgcatgcgccggggagcctcccctcacattcctcgactcacttcttcttggagagtgggaagatcgcatgcagagaggactttttcgctatgatgttaccgcctgtgaaaccaaggtgattcctggtgaatatggtttcgttgcccagcttaatgagggtcgtcacctcaagaagagaccaactgagttccgagttgacaaggtccttcaaccctttgatgaaaacaaattcaactttaccaaagttgggcaagaagaggtcctcttccaatttgaagctagcgaggatggacaagtccagttctttccaaatgctccagttgatgttgacaattctcccagcttttgtgccatcaatgtcagtcctattgagtatgggcatg

SEQ ID NO: 217339 - DNA, 496 bp, Glycine max
gtgggccgtatcctaagggagtacggggaagaaagtaattggcgaactctgcaaaagaaaattgtcaatgcccgattacatggtggattgcattcgactagtgacttgctcgatcttattcggcgcgtggctcctccaatgagaggtggacggcaaggttggataaagacggcaacccgggtgtttcaagctctgagaatcgctgctaatgatgaactgaagacacttgaggattctctctattattgttatgattgccttgcacctgggggtaggcttgctgtcatatcttttcatagtctagaggacagaattgtgaaacagacatttcttaacataatcaaagggagcaaagatgtggaagaaagggagagcctcaacagtgatttgaggaagactagtgatgaaatcaaagaaaaagacgcatggataaagcacgtaatatatggatcaaatggaacaattctcactaaaagaccaatcacgccatcaggag

SEQ ID NO: 217340 - DNA, 419 bp, Glycine max
gggaacccactacctcgacgcagggcaacgacggtgccagtattgctgaaaaatggcagcagcttcttccatggctctctcatccccatccttggctggcaaggccgtgaagctgggcccatcagccccagaagtgggaagggtgagcatgaggaagaccgtcaccaagcaggtctcctcaggaagcccatggtacggcccagaccgagtcaagtacttgggcccattctctggcgagcccccgtcctacctaaccggtgagttcccaggcgactacggctgggacactgcttggcttttcgcagacccagaaccttcgccagaaccgtgaacctcaagtgatccacttcaggtgggccatgctcggagccttgggctgagtcttcccggagttgctgtcccgcaacggggtgatgttc

SEQ ID NO: 217341 - DNA, 499 bp, Glycine max
gtaaaaagcaagtaacattaagttggattcggatacacaagataattcacattatctgaagtacttcaccaaacacaaatctaaaaactctcaaaagtcatttcgttctttgacgctcactttccggggacgaagttggtggcataggcccaggcgttgttgttgacagggtcagcaaggtgatcggcgaggttctccaatggaccctttccggtgacaatggcctgaacaaagaagccaaacatagagaacatggccaatcgtccgttcttgagttccttcaccttaagctcagcaaaagcctctgggtcatcagcaaggcccaatgggtcgaagctgccacctgggtagattgggtcagtgacctcaccgagggggccaccagcaatacggtaaccttcaacggcacccattaggataacttgtgtggcccaaatggcgaggatgctctgggcgtggatcaggcttgggttgcccaagtagtcgagcccaccctcgc

SEQ ID NO: 217342 - DNA, 525 bp, Glycine max
gagaaaagggttttgtgcctagtactagtacttttgtgatcattgtttgtagtctcgcaatggagcgaaggttggaggatgcgatcgagcttttgtttgatatgttggggcagtctaggtcccctgatcatctcacttacaagactgtcttggaagggctgtgtcgcgagggaagggtcgatgaagcgtttgagctgcttgatgaatgcaagaagagggatgtttccatgggtgagaagacgtacaagagtttgttgaatgacttgtatgttatatgccgcgagtagatgctgttgagctaaactgctaatgcatttgcttgaagatgcaccatacgtttcttttgtatgagtggaactctgttattctcctgctttgcagagcctgatattagaaggcatattcttctgaatgacagctaaatgcagattagtgagcattttgcatggagaattgctctcgaacttcttttgatagataaatatgggggattcctgagtctattatacatatgatatactatat

SEQ ID NO: 217343 - DNA, 562 bp, Glycine max
  unsure (1)..(562): unsure at all n locations
gagtactcctccagttgttgagcgcgtttcagaatgcttcatcaagccgcagcactccaaccatgaatcaaaccaaatctgctacttaacaccttgggatattgctatgttgtctgctcactatatccaaaagggccttctcttcaagaagccctcatcaccacttgttagtcacaataatttcatagagaacctgttgcagaagctcaagcactctctttctctcaccctcttccatttctatcctttggctggtcgccttgtcacccaccaaacccatgaccctcccttctatgctgttttcgttgattgcaacaacagtgatggagccagattcatccatgcaactttagatatgaccatatctgatatcctctctcccgttgacgttccacccattgatcaatcattggttgaccaccacaaagctgtcaaccatgacggtcacacaatgccgtatgtgtccgtccaagtcactgaatttgtggatggtgttatcataggttgntccatgaaccacactcttggtgatggcacttcttaatggaatttcttcaacaca

SEQ ID NO: 217344 - DNA, 557 bp, Glycine max
ccttgttaaggttcttcctggtctacttggtggcagtgcagatcttgcctcttccaacatgaccttgttgaaatcatacggagatttccaaaagaatactcccgaagagcgcaatgttagatttggtgttagagaacatggaatgggagcaatctgtaatggtattgctcttcatagccccggattcattccatactgtgcaactttctttgtcttcactgactacatgagagctgccataaggatttctgcactgtgtgaagctggagttatttatgtgatgactcatgattcgattggacttggagaggatggaccaactcatcagccaatagagcacttggcaagcttcagggcaatgccaaacactatgatgcttcgtccagctgatggtaatgaaactgctggatcatacaaagttgctgtggttaacaggaagagaccctcaattcttgcactttctaggcaaaagttgacccaccttcaggaacttctattgagggaagtgaaagggtggctacattatttcagacaactcgtcaggtacaagcctgatg

SEQ ID NO: 217345 - DNA, 479 bp, Glycine max
tgatgctgtgcaaaaggtaacactagttcctcgcggtcaagctcgtggacttacatggttcattcctaacgatgacccaactctgatctccaaacaacaactctttgcaagaattgttggaggactaggtgggagggctgcagaagaaattattttcggtgagcctgaagttacaactggagcagctggtgatttgcagcaaatcaccagtttggcaaaacagatggtgaccacatttggaatgtctgatattggtccttggtcacttatggaaccatcagcacaaggtggggatgtcatcatgagaatgatggcaaggaactcaatgtcagagaggcttgcagaagacattgatgctgccatcaagaggatctcagatgaagcatatgaaattgcactggagcatataacgaacaaccgtgaggccattgacaagattgtggaattcttctggagaatgagactctgagcggagatga

SEQ ID NO: 217346 - DNA, 465 bp, Glycine max
ttgttgttttttttttttttttttttttttttttttttttttgtttttttttttttacttttttgcctgatttatttttttttttttttgggctgctcatacgctttttatatcatacacaaattgggagggatatggctccgcaacattaaacgaatttcattgtatacaatgagatgccatccataatgggcaatatagtgagtgtttggttagacctttacggcttcagacatccataaacgtgtcccaaattggcaaacgttaaagtaactatacagctggattggaaaattggtgggaaaccatgaaccctaacttataccaaagactgaaagcatacgctccacgttacgaatacttcaacagagtgtgattcatgaggcgtcaactgatacaagacaagccttcagttgaacgtgttgattaccctcattgactgggtgaacaatgaccgtagcatgc

SEQ ID NO: 217347 - DNA, 432 bp, Glycine max
gattgatgatgggtgctattccagaggccaacggaaatgtcgccgacgaagaaaacgggagcagcgttggtggatccatcgatttcggcacggcggaggccgttcaatacgtccgttccctcaccgacgttggcgccatgacgcgcctacttcacgaatgcatcgctcaccagagagcggtggacgttgaactcgacgagcttctgtcgcagcgcaccgacctcgaccgtcatctactccagctacagcgctcctctgacgtcctcgacatcgtcaactgcgacgcagactatatgctctacaacgtcggctacaccttcgacctcgccgaccaggtcagccgcaaggtccgtgagcttgacctcgcccagtcgcgcgtacgcaacacgctgctacgtatcgacgccatcgtggaacgcgccaactccctcg

SEQ ID NO: 217348 - DNA, 515 bp, Glycine max
aataacccaataaaaagaaaaatgtgaagagaccatataaacggatattacaacttcagagcagctattgcttctgatttaaaatcaactcgcagacccaatacacgcctaacctctgctggagttaatctccaggtcataggtccagagttttcaccccagaaatctagaatctcagaaaccttttctaaatttagaattgttgccatttgagtaagacgtgcaaacttggctctaacagttctctgggtcatggcactgaaatggcttaccaaagctctagcatctcggtcaagctgaagaccacctagctgactaaatcttttctgcatcataatgacttctagccttttcacaatgaagtcaataatcaaatgaacaaacgtgtcataattgttagcagtcattagtggctgcagccatgccacatttgactcaacggcatggagaagtctttgaacccatgggtcattcacctcaatatctgcatactcagcctttgaaagctcatagct

SEQ ID NO: 217349 - DNA, 433 bp, Glycine max
aattcggctcgagctcatatcggaaggatgtcttacgttgctcacaacgttaatcagccacatatctgctacatatcgtgtgcattttggaattgtgccactaaaattctattcatctatggctgcctcatcttatgctatgcaatcaatccttgcagaccctatgatccgcatttccagcgggtctagggagaaccattttggtgttcctgcttatcacatgagaaggaatgttggcctgagagttaggtccatggctgaggaagagcaaccaagtcagcctgcgaccccagttacaccaccaccagcagaacccaaaccacagccagtctctactccttcaccaaaggtgagcaccaagttttctgatgtgttggcgttcagtgggccagcacctgacaggatcaatggaaggttggccatgattgggttt

SEQ ID NO: 217350 - DNA, 384 bp, Glycine max
gggaaaaaaaaaaagaaaatttaatgggggggaaaaaaaaaggccccaaggacaaaaagaaatggggttttttaacccccaagggcttaaaaccatttgggggggcattcagggggggattacccccggggacccccctaaaaacacccagtaaaagcccaagcgaccaaccccagagaagtaaaacacccgtgcaccggtttggaatttggggacgaaaacccttgggccttaaacctgacctggccccttaggaaaaggggattcaaaggcaccaggggaaggcccacccttgttcccaaaaaccatgggaaaccacccggggacaattgtgaaaaaccacatggcccttggggcatcttcccggggatggccccccaaaac

SEQ ID NO: 217351 - DNA, 353 bp, Glycine max
aactttcatcaatcaactgcttgtggaacttgatggatttgagaaacaagatggggttgttttgatggctactactagaaatctcaagcaaattgatgaggccttgcagaggccaggtcgcatggatagaatatttcatcttcaaagaccgacacaagctgagagagaaaaaatattgcacttgtctgcaaaagaaaccatggatgatcagtttattgattacgttgactggaaaaaggttgctgagaagacagctcttttacgacctatcgaattaaaaattgttccaatggctttggaaggaagtgccttccggagcaaagtactgtacacagatgaattgatggactact

SEQ ID NO: 217352 - DNA, 540 bp, Glycine max
ggctcgagctcgagccgctcgagcggctcgaggctggttgccacactacaccgatatttccaccaaacccgtttgcgttgttgtttgcgaataaatggcaactaagaggagcgtgggaacgttgaaggagggtgatttgaaggggaagagggtattcgtgagggtcgatctgaacgtgcctttggatgacaaccttaacatcaccgatgacactagagtccgtgctgctgttcccaccatcaagtacttgactggttatggtgctaaagtgatcctttctagccatttgggacgtccaaaaggtgtaacacctaaatacagtttgaagcctcttgtgccaaggctgtctcaacttcttggaattgaagttacgatggccaatgactctattggggaagaagttgaaaagttggttacacaacttccagaaggtggtgttatgcttctagagaatgtgaggttctacaaggaggaagagaagaatgatccttgatttgcaaagaagttgcttctctagctgatctctatgtgaatgatgca

SEQ ID NO: 217353 - DNA, 511 bp, Glycine max
  unsure (1)..(511): unsure at all n locations
ggaagagttgaaaaaacaggaaggagacaacgggaaggaagagttgaaagaactggaaggagagaaaggaaaggaagagttgaaagaactggaaggagaaaaaggtgaggaagagttgacagaactggaaggagagaaaggaaatgttgaattgaaagaacagaaaggagacaaaggaaaggaaaagttgaaagagcaggagccagagaaagcaaagggagaggaaacaaacctttttggacatgaagagaactctgagtcttttggtgtagaaggtgaagcccagttgcaaaaagaagatgctaatcctattaaagatggcggtgaaggaccaaagattggtgaaaattcagatcttggagaacaagggaaggtggagcttgttgaagatccagaagaaaaccctgaagaagatccagaggaaccttcagaagaaacttcggcattggaggaggagcatagggaattggaggctattgcanatcagcgaaagatttaaaaagaacatgag

SEQ ID NO: 217354 - DNA, 522 bp, Glycine max
  unsure (1)..(522): unsure at all n locations
ttattcaccctagtcttagccttccctacaactccaaacacaaagacatcatcatccatggctgcctccgtctccactgtcggagctgtcaacagagctcttttgaacctgaatggttctggagctggagcttcagctcccagttcagccttctttgggaccagcttgaagaaggttattgcctcaagggtccccaacagcaaggtttccggtggaagcttcaagattgttgctgtagaagagaagaaagagattgaagagacccagcagaccgacaaggacagatggaagggtcttgcctatgatatctcagacgaccaacaagacatcacaagaggaaagggtttggttgactcccttttccaagctccacaggatgctggaactcactatgcagtcatgagctcctacgagtacctcagcactggacttcgccagtacttggacaacaaaatggatggattctacattgctccagcttttatggacaagctnnngtgtcacatctncaagaacttcatg

SEQ ID NO: 217355 - DNA, 514 bp, Glycine max; identical to SEQ ID NO: 211076

SEQ ID NO: 217356 - DNA, 471 bp, Glycine max
acggaaccttctagaaccaccataacatcattctccgttccctcgcgtttcaacaccgataacccgcaaaaatacccattgatctgcgcctcctcttccatggctccaccgtcgccggtggaacacaacggcgactccgccgctaccgcctccgcctccgcctgcgcggagtctcagagatcaattcccacgccctttctcaccaaaacctatcaactcgtcgacgaccaatccatcgacgacgttatttcctggaacgacgacgggtcaacgtttatcgtctggaaccctaccgttttcgccagagacttgcttcctaaatttttcaaacacaataatttctctagcttcgttcgccaactcaacacttacggattcaggaaagttgtgcctgatcggtgggagttctcgaacgattatttccgccgaggcgagaagcggcttctttgcgaaattcagcggcggaagatc

SEQ ID NO: 217357 - DNA, 474 bp, Glycine max
acggaaccttctagaaccaccataacatcattctccgttccctcgcgtttcaacaccgataacccgcaaaaatacccattgatctgcgcctcctcttccatggctccaccgccgccggtggaacacaacggcgactccgccgctaccgcctccgcctccgcctgcgcggagtctcagagatcaattcccacgccctttctcaccaaaacctatcaactcgtcgacgaccaatccatcgacgacgttatttcctggaacgacgacgggtcaacgtttatcgtctggaaccctaccgttttcgccagagacttgcttcctaaatttttcaaacacaataatttctctagcttcgttcgccaactcaacacttacggattcaggaaagttgtgcctgatcggtgggagttctcgaacgattatttccgccgaggcgagaagcggcttctttgcgaaattcagcggcggaagatctca

SEQ ID NO: 217358 - DNA, 434 bp, Glycine max
attttagaagaatacccccgtaactcgttcttcttcttttgttgttctgtgtttgtgtttgttttttctctcacctgaaaatgtcttgctgcggtggtaactgtggttgcggaagctcctgcaagtgcggcaacggctgcggaggctgcaagatgtacccagacttgagctacactgagtcaaccaccaccgagaccttggtcatgggagtggcacctgttaaggctcaatttgagggtgctgaaatgggtgtgcccgctgagaacgatggctgcaaatgtggaccaaactgctcctgcaacccctgcacttgcaagtgaggtgttgggagagcaagcttcaagcagagatagcccttaattaggaataatgataaactattaatgtgtagctaaaaacttatgtattatgtctgagatggttttcgtgcactc

SEQ ID NO: 217359 - DNA, 363 bp, Glycine max
aggcaaaaaaaggaaaaaaaaaaaaaccggagaaaacaacataagaaacacgcgactgaaaaagaaaaaggagaaacaggcgaaagcaaaaaaaaaaaaaaaaaaaggaacgggggaacaaaaaagccaagagaaagaacaaaaaaacagaacacaggaaaaggggaaaaacaaccaaactaaacaagggggggggaaaaaacaaaaaaaacaaggggggcaaaaaaagaacaaaggaaaagaaaaaaggatataaccgccaaaaaagggaaccaaaaaacatcaaaaaaaggggcgaccctaggaaaaaaagggcgcccaaaaaaacctgatatggaaaaggcggggaaaaaaaagagctat

SEQ ID NO: 217360 - DNA, 362 bp, Glycine max
ctctcacgttttccgatagaaagaatcccaggcgaggagaaagatggaggggaaggagcaggatgtgtcgttgggagcgaacaagttccccgagagacaggcgattgggacggcggcgcagagccaagacgacggcaaggactaccaggagccggcgccggcgccgatggttgacccgacggaggttacgtcatggtcgttttacagagcagggatagcagagtttgtggccacttttgtggttctctacatcaccgtcttaaccgttatgggagtcgccggtgctaagtctaagtgtagtaccgttgggattcaaggaatcgcttgggccttcagtggcatgatcttcggcctcgattact

SEQ ID NO: 217361 - DNA, 548 bp, Glycine max
aaagagatgcatatatatgactctggtgttatttttgattttgcaaattaaattacacaatcacagccgtacatcacacatgagttgggcctcttccaacttaaaagcagaggataacattggcccatgacgcgacacatgcaccacctaataatcataattttacatctttacatacaaaatacaaagactttaaattttaaaaagaagaaaagagataaacagatcatcttaatgaaatgaaaccaaaacccacaaacattggcttgatttttgttgttgttgttgttcccaacttgattaagcatgaaccgtttgattgaatcacttggacttgaagggaatggccctgattacgacctggtggtagagtgctgcaagagctgcaccgatgaatggtcccacccagaagatccagtgttcatcccaaccaaggtccttgttgaagatgatagcagcaccaagactacgagcagggttgataccagttcccgtgattgggatggtttgcaagtgaaccaagaacacagcgaacccaattggcaagg

SEQ ID NO: 217362 - DNA, 474 bp, Glycine max
ggctcgagaaaatgtcctccatggcttcctccaccgctttcttcacacccctccatgatttcactcaagccagaacaaccccatcaccccctttgcctttcatcaaatcctcctttgcttcctccaagtcaaccttttttcaccctgccctttccctacaaacctcttccaactttcccaggctttttggaaagcctaagtttttctctgttcatgcaagggctgccacagaaaaaaccatttatgattttactgtcaaggatattgacagaaaggatgtttctcttagcaagtttaaggggaaggttctattgattgtcaatgttgcttcacgatgtggtttgacatcatcaaattactcggagctgtcacgcttgtatgaaaaatataagaatcaaggtttggagattttagctttcccctgcaatcaaattggtatgcaggaacctggatcaaatgaagatattaagcaat

SEQ ID NO: 217363 - DNA, 499 bp, Glycine max
aatggatcacagtgccgatgctcaacgcacggacttgatgaccatcacccgcttcgtgctgaaccaacaatccaaccaccctgagtctcgtggcgatttctcaatcttgctcagtcacattgttctcggttgcaagttcctctgctctgctgttaacaaggcgggtcttgctaagcttattggacttgcaggagagacaaatgttcaggcaagtggttgataaataaatcttagtaacctgcatcatgcatacaaattccagcatggtaactttctaaataatgtatgatgatttgatcctccttgattagtttttcttatttcggtgttcatttttattcaatttgtttcttaactggaataaagggcgaagagcaaaagaaactggatgtcctttccaatgatgtctttatcaaggctttggtcagcagtggacgaacagtaagtcatcaatatgtgatttggtgtgtcttgaaaactaaggggttatttttttttt

SEQ ID NO: 217364 - DNA, 538 bp, Glycine max
ctcttcttctcttgcggctagggttttagcgcagcttcttctagatttaaggaagatgggtaaggaaaaggttcacatcagtattgtggtcattggccatgtcgactctgggaaatccactaccactggtcacctgatttacaagcttggaggcattgacaagcgtgttattgagaggtttgagaaggaagctgctgagatgaacaagaggtctttcaagtatgcctgggtgctggacaaacttaaggctgagcgtgaaagaggaatcaccattgatattgctttgtggaagtttgaaacaacaaagtattattgcacagttattgatgcgcctggacatagggatttcattaagaatatgattactgggacatcccaagctgactgtgctgatcttatcattgattcgaccactggtggttttgaagctggtatttccaaggatggacagactcgtgaacatgctctgctttcattcacccttggtgtgaaacagatgatttgctgctgtaacaaaatggatgctactacacccaag

SEQ ID NO: 217365 - DNA, 480 bp, Glycine max
gaacgatttaggacaataactagtagctactatcgtggagcacatggaatcattattgtttatgacgtgacagatgaagatagcttcaataatgtgaagcaatggctcagtgaaattgaccgctatgccagtgataatgttaacaaacttttggttggaaacaagagtgatctgacagcaaatagagttgtctcatatgacacagctaaggaattcgcagatcaaattggcatacctttcatggaaacaagtgcaaaagatgctacaaatgtggaagatgctttcatggccatgtctgctgccatcaagaatagaatggctagtcagccttcagcaaacaatgcaaggcctccaacagtgcagatcagagggcaacctgttggacaaaaaagtggttgctgctcttcctaaccaggtggtgctgcttggtctacacttaccttttgcatgtaaggggcatatgctatttcactaaatagt

SEQ ID NO: 217366 - DNA, 447 bp, Glycine max
  unsure (1)..(447): unsure at all n locations
aagaaagctacctagagcttgcacctattggtatcttctacaatatcctctcatagtgctcttcttcttcttcattttcattatcaagatgtctttgctttcggatctcatcaacctcaatctctcagaatccacagaaaagatcgttgctgagtacatatgggttggtggatctggtatggacctcagaagcaaagccaggactcttcctgggccagtgagtgaccctgcaaagcttccaaagtggaactacgatggctctagcacagaccaagctccaggggatgacagtgaagtcatcctatacccacaagctattttcaaggacccctttaggagaggcaacaatattcttgtgatttgtgatgtttacacccncgctggtgagccacttccaaccaacatgaggtatgatgctgccaaaatttcagccaccctgacgttgct

SEQ ID NO: 217367 - DNA, 518 bp, Glycine max
ctccaagttcctctgctgtcattttcagctttggaccctaccctttcttcacttcaattcccattcttcattagaacttgtcacagtgatctttatcaaatgactgcaatagcagaccttgttaactaccatgattggaaagatgttattgctgtctaccttgatgatgataatgggagaaatggaataggcgcattaggcgataagcttgctgagaggcgttgcaggatatcatataaagcacctttgagccctgatgcatctatggaagagattactaatgtgcttgttcaggtagctctggcagaatcacgggtaatagttgttcatgcaaatactcaatttggccccaagttgtttagtgttgcaaagaatcttgggatgatgggaactgggtatgtctggatagccactgctttcctctctgctctccttgatatcaacagtcccctctctccagattcattggatgacattcaaggagttcttacaccgcgtatgtacataccggattcaca

SEQ ID NO: 217368 - DNA, 577 bp, Glycine max
  unsure (1)..(577): unsure at all n locations
gtataaagaccgtgttaaaaataagtgttacatatagctaacaaaagttctaaagtatccaacatatatatttacttgaaaagaaggaagtactagtagcccagtagttgcagcatgaatgaagagcgttggtgttgtagctagcataagaggctagaaaatgatgtagaaatattgatcatacttcgctagcacattcacttctgcgtgaagcatatccctggttggagctgatggataagcttccttcactgtttctgtatgagatcctctccattttccttctcttggaccggctcttaaaggtctcttctttttcatctacaaatgaaaggaaagtcttgagatgtgaagattttgatcctatgttttggccgtcagtagaatgaagttcctctgagacgtagtgcttatggtattgcctccaaatctgtataagatatatgaagagtgcaagcaagcaggcaagcccacagatcatatagaggccccaaaagcttttaagttggagtctttccacttcaaactttgcaccttgtgataagcaagcgctactcaaaagccattngtcatggat

SEQ ID NO: 217369 - DNA, 498 bp, Glycine max
  unsure (1)..(498): unsure at all n locations
gatccaaccccaggagacttatcatggattattgtgcttcatccctatcctgaaatttacatgatgagtggaacaaagaagcaccacagacttggaccgtggaacggcttgcgtttcagcggcatgcccgagatgaagcctaatcctgttttcaattacaagtttgtctccaacaaggacgaggttacctacatgtggacattgcagactagcttgatcacaaaagtggttctcaaccaaacctcgcaacagcgtcctcgctacgtgtggtccgaggccactagatcgtggaacttctactcaaccatgccaggagagtactgtgactattatggcgtttgcggngccaattcattttgcagctccactgcatcgccattgtgtgactgcttaaaagggttcaagccgaagtctccggagaaatggaactcaatgtattggacagaaggatgtcgcctgaaaagtccactgacttgcgggtttgatggatntgctcat

SEQ ID NO: 217370 - DNA, 647 bp, Glycine max
  unsure (1)..(647): unsure at all n locations
gcaacaactgatgatttacattttggtacttctcgtgcaaaatatccttcataccattcagcaatttcctttacaacaatatccacctatctcgttgattatcagcgagcagttaataaggttatggacatcgcattggttgaactacatgagcttgaatttgcttcaatagattccttcttcacaaaatgccctggctctttaggttcatccaattgcacctcatcactccccaacaagagaaccactgaggtcattgtaggcctatcctctgggtattgttgcacgcacaagagcccaatatggatgcaacgtaacacttcagacgcaatgcatgaatcctccatgtttgggtcaactatttgtaaagccatatcttttttccacaatgtccacacatgatcaacaaggtgaacaatttgcttcccactagaacatctacttttcttcccacatataatctccaacagtaaaacaccaaagctgaagacgtcagattttatagaaaattgcccatcgatagcatattctgggtgcatgtacccatatgttccaacaattctattgggattccttcaaattctcttctnccaaagtttagccactcaaaatctgaaattttggaatcaagtatcattagtaaacat

SEQ ID NO: 217371 - DNA, 501 bp, Glycine max
gtataagctttactggtggtgatactggcattgcaatttcaaagaaggcaggcatgattcctctgcaaatggagttgggaggaaaagatgcctgcattgtacttgaagatgctgacctggatttggttgctgcaaacattataaagggaggtttttcatacagtggtcagagatgcactgctgttaaggttgtcctggtaatggagtccgctgctgatgctttggttgagaaagtgaaggctaaggtggcaaaactaactgttggaccaccagaggatgactgtgatatcaccccggttgtgtcagaatcatgcgccaatttcattgaaggcctggtcttggatgctaaggagaaaggagcaacattctgtcaggagtacaaaagagaaggcaatctcatttggcctttgctactggacaatgttaggccagacatgagaattgcatgggaagagccatttggaccggttttaaccagtattaggatcaattcagttgaag

SEQ ID NO: 217372 - DNA, 529 bp, Glycine max
gaagccaatgtttttccccctcatttcattgatttgacattcaatttaattggaacacaatgatattccttaatgataaggcacaagataaaattcagtttcatatcatcctaaatacgagtacaacaagtagtcacatatgaagtagctatgcgacatatcaatcaaactcgttattcatctctgtgattcccagctgcaaaagacaatgcaatgctgaactcacacggttgtacgttcactatgatttatggaacatgctatataatgatgttcccccatgcatgtgtgtattacactactagcccatagtataggaagggctgggtaagttgatcacagtcgttttgaccttggtcatcatgtttatgctgttggtaatcccttgagatccaatgccactgtcctttataccctgaaagggaaaatgatctggcccacgagctggggcagaatttatctgaactgttcccgtttccattgcatcactgatcattattgctctgatgacatcctttgtgaagacaca

SEQ ID NO: 217373 - DNA, 503 bp, Glycine max
  unsure (1)..(503): unsure at all n locations
cttgcaaactagttctgtttttggaacatatcgcattacattacattagattggtggcaaagcaatggcatcgtcactacaagcagcagctactttcatgcaacccaccaagtttttgcagctaaagtctactcaggccatatctaaggcttttggtttggaacctgctggagttaataaggtcacatgctcccttcaggctgatcttaaggactaggctcacaagtgtgttgatgctaccaaaattgcaggctttgcccttgccacctctgctctcgttgtttctgatttgttctatgaaggatcttctggttcgtaagtggtaaccgtcaatctgattaaggatgccaatgacatatgttgtattagaattatcaaatgatactaatatcattaatcaaatnttgtcttataacatcccactaacaaaaactagcaactaatatttgtgaataaaacatacattggcttatgacaatattcagcatacgagctttatgatc

SEQ ID NO: 217374 - DNA, 449 bp, Glycine max
aaaccttgaaattttaagcattgtaattgggggcccctaatggtcaaccatatgaccggactcctatggggctaagaaagttgggtcaggggatgatgatgcggcaacagcatggggttacaagaaaacaaaggcttgaaaaaaaaaaaacctaaaaaaaaccctttatgactcaagctgaacatcccagatgccctggattttggcatcctttggagcctttgctcccaaaatagtggcggacggttgaaaactttggaacacgccgataacctccccggtcttaggctggggcttggggaccctgtaggggaatccccccttggaggatgcggcccttttggggcgtcctttggcaagtgcccccccatatcgttttgcaccaacaggtgaaggcactgcttgtgaataacctgtgaaggcaccttttcccttggggtccaagaaag

SEQ ID NO: 217375 - DNA, 523 bp, Glycine max
gtgcataggcacattgagacactccaagtctcggccacgatcccgaatttagctctccccacctagtcatccttcttcctcaacaccgcaaatatggatcaagcaaagttggcgcgcatgcaagcgtcagtgcgcattggcggcaagggtactccccgcaggaaggtcaagaaggtccacagggccgctggtaccgacgacaagaagctccagaccgcgttgaagaagctcaacgtccagcccatccaggccattgaggaggtcaacatgttcaagagcgacggaaacgtcatccacttctcggcacctaaggtccacgcctcagtacctgccaacaccttcgccatctacggacacggtgaggacaaggagctaacagagctcgtccccggcatcctcaaccagctcggcccagattcgctcgcatcgctacgcaaacttgccgagtcctaccagagcatgcagaaggagaagggtgaggactgcgagaagaaggacgacgacgacgaggacgatgatgaca

SEQ ID NO: 217376 - DNA, 465 bp, Glycine max
ggggagcgtgctagaagattttcattcatatctggtccgagacataacgccggtccggtatctgaatgcaagacccaccgcgactgctgaccgtcacggtcgttgcatccatgaagtcctccatatcaatatacatgcggtaggctgtcattgcacatgactcctccctggctctttccagtcgttgtcaagctactttttgtgtaacttcttactcgacctcagccttggactcgaagttctcaccagcgacaagttcggggatgtcatcatcgtcctcgtcgtcgtcgaccttcttctcgccgtcctcacccttctccttctgcatgctctggtaggactcggcaagtttgcgtagcgatgcgagcgaatctgggccgagctggttgaggatgccggggacgagctctgttagctccttgtcctcaccgtgttcgtagatggcgaaggtgttggcaggtactg

SEQ ID NO: 217377 - DNA, 507 bp, Glycine max
  unsure (1)..(507): unsure at all n locations
atcggatgcaagttggaggagctggaatccgagttcgctccacaggaactcgtccttcgcttgctgctccgccgagacaacgccgcatgttcagcacctcgcaacctccaccttctcgattgaccagactaattttggtggcgagaggttgaagctgttttcggggtcatgttacctaccacatccggataaggaggacacaggtggagaggatgcacattttatttgcacagatgaacaagcaattggtgttgcagatggtgtaggtggctgggcagatgttggtgttaatgctggactctttgctcgagaactcatgtctcattctgctagagcaattgaagaggaacccaaaaattctattaatccggctagggttttagagaaggctcactcatgtacaaaggccaagggttcatcaacagcttgtatcattacccttactgacacnggactacatgccattaatttgggtgacagtgggatcatcgtggttagaagatgatg

SEQ ID NO: 217378 - DNA, 479 bp, Glycine max
aggtcgtggagaactaagaagaaggaaatggcttcctcaatgatctcctccccagctgttaccaccgtcaaccgtgctggtgccggcatggttgctccattcaccggcctcaaatccatggctggcttccccacgaggaagaccaacaatgacattacctccattgctagcaacggtggaagagtacaatgcatgcaggtgtggccaccaattggcaagaagaagttcgagactctttcctacttgccagacctcgatgatgcccaattggcaaaggaagtcgaataccttctaaggaaaggatggattccttgcttggaattcgagttggagcacggtttcgtgtaccgtgagcacaacaggtcacctggatactatgatggacgctactggaccatgtggaagctgcctatgtttggctgcactgatgcttctcaagtgttgaaggagcttcagaggctaagactgcataccccaat

SEQ ID NO: 217379 - DNA, 403 bp, Glycine max
aaccataaatacacaacccaaaaattccaaaggggcccgaaaaacgaaaccaaaaagccagggggaaaaaactcttaaaagcaaaaaaaaaggggaaaggaagaaaagccccacaaaaaaaggggggggggaaacaaagctttgaaaaaatttcaaagatcaaaaaacccggggggttggaggccaaaaaacttaacccccgaacttggaaaacggggaaaaacccaagggaacggaaaaaacccttgggggttgccgatttaccccctgggaacccctttaccccccggaaaggattagggcccccaaaaataggggggtaccacaagggtcaagaccccccaccattgtatccaagagaacctttggggaaaggggacccaaaaacgggccccaaaccgaa

SEQ ID NO: 217380 - DNA, 468 bp, Glycine max
  unsure (1)..(468): unsure at all n locations
nnnnnngnnnnnnnnngggccnnngcttagaaagttgaagctttttttgttgaggtgaaagtgaaatggttggcaaggataatctgagggctgaggatttgaacttgtgctttaagaagcttatgatggtggccgggagtgggaacagtgagaaaggggtgaacttgaaggttggggtgatcaccgagtggaaggatattcctgtggagcttctgatgcaaattctgtcccttgtggatgatcagacggtgatcatagcttctggagtttgtcgtggatggagagatgctatttactttggccttgctcgtttatcactctcatggtgtagcaagaacatgaataacttggtcctatctcttgttcctaaattcgcaaaactgcaaactctaatcctacgtcaagacaagcctcaactagaggataatgcntgtgagactattgcaaaatgctgtcatgaactgcaga

SEQ ID NO: 217381 - DNA, 427 bp, Glycine max
aaactcaaaatagcttactaggaacaagccagttttagcatccaaaatgtctcgagcttacacaattcggggattaaagcaaaccgagtttaagacataaagttgaagaaaagatgtacataatcagctagattcaagtcttttttatgcaggcatacatttacaagggggggggatttcacttttttcacttttttgagcccttttaaggggcacattctcgaagggggttcaacatcaaaagcatgagctttttaatgggcaggataagggaaaggggtgaatgcacggggcgcatggacaggacaggcacaatgcactgatgtcaagttgaggcagccactcatgatgagtgagtgcctccctgagcatgtgtggagagaagggaatgagtcacaaacagcttgaacagcaaatggggtgagtg

SEQ ID NO: 217382 - DNA, 433 bp, Glycine max
  unsure (1)..(433): unsure at all n locations
cgctttttcactgccgtattgnnnnnttncnnggnnnnnnncnnnnnnnnnnnnnnnnnnnnnnnnnnnnnnnnnnnnnnnnnnnnnnnnnttttnnnnnnnnnnnnnnnnnnnnnnnnnnnnnnnnntngnnnncanattntggtgcttctggttggaacagctactcctctttaaccggaggagctagaggtccaatcctgcctgaggattatcatatcgtgtacaagctagcatactttgacacgggcacgtgtgccataacgtgttgtgcatgcctggtgagctagcgcaaagggttcctatgaggacacacatgacatatctcacctgacatgttcagatttacttcgagcccctggagtacagacgcctgtcagtgctcgttcctcaactgtcattcatgatcgtcgtagccctgagaccttgtagg

SEQ ID NO: 217383 - DNA, 461 bp, Glycine max
  unsure (1)..(461): unsure at all n locations
gtgagtggcgggccagagtatatgatgatgaagtgaggaagtggatttctggtgttggtgttgacagtgttgggaagaagcttgtgaactcaaaagatggacctccaacctttgagcagcccaagatgactctggagaagctcttgctgtatggtaacatgcttgtccaagaacaagagaatgtcaagagagtccaattggctgacaagtacttgaacgaggctgctcttggaaatgctaacgaggatgctattcagaggggaactttcttccagtcttgaattggaggcaaagcaaacttggcaagtaaatatttctgttcgtgaaggttgttgtactaatccaagtgctagaagttgtgatggaacttgcgtgtaacattcttagcattctcaatgtcttaggtgcanagagaagatgctaagttngagatgatcttactatatttttcatattggacc

SEQ ID NO: 217384 - DNA, 537 bp, Glycine max
  unsure (1)..(537): unsure at all n locations
caaaaaccaaaaccaaaaccaaaccaaaactttatccatccatcccaaaaagtttgctttggttaatgcccctaacaaatttccatttttattttccctgtttgtgactagagagttgggttcccatgccggttgatttggacaacgcttccacagcttcaggggaagccgccagcgtctcttcctccggccaccaaacaaaacccgtcgtcccaaagaaaaaacgaaacctcccgggcatgccagatcccgaggcagaggtgattgctctatcgccgacggcgctcttggcaacaaaccgtttcgtgtgcgagatatgcaacaagggattccagagggaccagaatctgcagcttcaccggcggggccacaacctgccgtggaagctgcggcagaggtcaagcaaggaggtgcgaaagagagtgtacgtgtgccccgagcccacgtgcgtgcaccacgaccctgccagagctttaggggacttgacngngatcaagaagcacttctgcaggaagcacggcgagaagaatggaaatg

SEQ ID NO: 217385 - DNA, 507 bp, Glycine max
gggtagtagtgaatatcagactctgcacattttcttctttcccttcttggctcatggccacatgataccaaccgtggacatggccaaattatttgccgaaaagggtgtgaaggccactataatcaccacacccctcaacgaacctttcatctacaacgccattggaaaatccaaaactaatggcaacaaaatccacatccaaaccatagagtttccttctgcagaggctggtttacttgatggctgtgaaaataccgagtcagtcccttccccagaattgttgaatccgttttttatggccacccatttcctccaagagccacttgagcagctactgcaaaagcaacttccagattgcattgttgctgatatgttcttcccatgggcaactgattccgccgccaaatttggaattcctaggctcgtcttccatgggactagtttcttctccttgtgtgttaccacgtgtatgccattctatgagcctcatgacaaatatgcttcttc

SEQ ID NO: 217386 - DNA, 544 bp, Glycine max
  unsure (1)..(544): unsure at all n locations
gaaaaattactgcgccaggctaaagctccaagtatgtttttacaatccttcaaaaattttgtttctttgtgtgtgtatggtgatgataacttaattagtgttcatgaatatgtcaagccttactttagtggttctaaattgaaaagctttctagctggtcataatatcaccattactgatggtattgacaaaactagtgcaactttgcaatttagaaagttagcagattgtgattttctcaagagaaactttaagcagatgtctaatgttttgtgggtggctcctgaggataaggcgagtttatggtcacaacttcattatgtttcgtgtaataatctggaaatgcaagaagcttatcttgtcaatctcgtaaatgtgttacgagaattgtatttgcacagtccagaggaagctcgccaattgagaaggaaagctctctctcgtattgaatggctgcaaaaagctgatgtgcctaccatagcacagattgaagagttccattcgatgcataggatgatgaatgctncttgatcanatgataata

SEQ ID NO: 217387 - DNA, 502 bp, Glycine max
gcatgtccaatcaaggacgtggtaaatgacacaattgccattgtttgagctatatctgatgtagtttgagcagaaggcaaatgaagtggtggcaatgctcccttgggtcaagaatgtaaaagttacaatgtctgcacaaccagctagacccatatatgccgagcaacttccagcaggtctacagacaatttcaaatattgtggctgtgtccagttgcaaggggggcgtgggaaaatcaactgtagcagtaaaccttgcttacactttggctgatatgggtgctagagttggtatatttgatgctgatgtttatggtccaagcttaccaactatggtctctcctgaaaaccgactgttagtaatgaatccagagaagaagaccataattccaactgaatacttgggagtgaagttgatctcttttggatttgctggacaaggacgtgcaataatgcgtggccccatggtttctggagtcattgatcaacttctgactactact

SEQ ID NO: 217388 - DNA, 475 bp, Glycine max
agagagcaaggcaggaagtcagtgtttataaaacgacagtaggagcctggtctggtcggtgtggcactcaaacattgtttgttgtaggaagaggaatcttgagaaatggcaggggacagcaagagcaagattctgttcatcggagggactggttacatcggaaaattcatcgtggaagccagcgccaaagctggccacccaactttccttttggtgagggagtccactctctccaaccccgcaaaatcacccctcatcgacaatttcaaaggcctcggtgtcaatcttgttttaggagatctatacgatcaccaaagtttggtgagtgctataaagcaggtcgatgtggtaatttctactgtaggacacctgcagctagctgatcaagataagatcatttctgcaattaaagaagcaggaaatgttaagaagttctatccatctgagtttggaaatgatgtggaccggactcatg

SEQ ID NO: 217389 - DNA, 500 bp, Glycine max
ccaccatctcgcatacctcccccccatcgaatcccgggacaagcacgccgtatccccagtcttgtctccccgacccgccaccatggcgcccagcaaggacaccatgttccgctcggcggacatgtccttgacccagctgtacattgccaacgagattggccgtgaggtcgtttctggccttggagagcttggtgtcatggacttcagagatcttaatgccgacacgaccgccttccaacgtacttttacacaggagattcgccgcctcgataatgtggaacgacagctccgttactttcgcgcccagatggagaaatcggacattgcgatgcgctccatctacgacttcaacaaccccttcactgcgccatccgcttccgagatcgacgaactcgccgacaagagccagagcttggaacagagaatctcttcgttgaacgagagctacgagacgttgaagaagcgcgaggtggagctcacagagtggcaatgggttctga

SEQ ID NO: 217390 - DNA, 440 bp, Glycine max
ggcgagggaacaatggccatttttatatacaaactggaccattttactcggagggaactttagcaaacttatttatttttacaccagcccccattttttaaagcccccccaaaagaaaccccaggaaaacggtttttttcctcaaaggaacctacttaaaagggtccttcttaaaaaaccccttgaaactaaatgggtaaaacgccccaccattaccaaagaaaagcttactcattggcttcacccaggggaatcgaaaactgggcaaaatggggcttgaacccttcataacacacaaaaccgccccagtcaacgggaaccaaaagtaaaagaccaaccccttgatgaaagccccgggtacgcctttaaaagggaacgcatttttaataggcatttcccccaagacaagggacaaacctttatgggcgaatgacaagggc

SEQ ID NO: 217391 - DNA, 410 bp, Glycine max
  unsure (1)..(410): unsure at all n locations
attgttnnntnnntnnnnnnnnnnnnnnnnnnnnnnnnnnnnnnnnnnnnnnnnnnnnnnnnnnnnnnnnnnnnnnnnnnnnnnnnnnnnnnnnnnnnnnnnnnnnnnnnntttnnnnnnnnnnantgnnngagctgtcaacagagctcttttgaacctgaatgggtctggacctggggttttagctcccagttcatccttctttgggagcagcttgaagaaggttattggctcaagggtccccaacacatagatttcctctggaagctttaagattgttgctgtagaagagaagattgagattgaagagacccagcagaccgacatggacagatggaagggtcttgcctatgatatctcagacgaccaacaggacatcacaagaggaaagggtttggttgactcccttt

SEQ ID NO: 217392 - DNA, 543 bp, Glycine max
aggacaaaaggaaaaggcaccaaattcaatttaagtggacactttaactcaaaattatagaggaagacagtccaatatgaaaaatatagtaaaatcatctcaaacttggcatcttctctttgcacctaagacattgagaattctaagaatgttacacgcaagtcccatcacaacttctagcacttggatcagcacaaccttcaggaacagaaatatttacttgccaagtttgctttgcctccaattcaagattggaagaaagttcccctgttaatagcatcctcgttagcatttccaagtgcagcctcgttcaagtacttgtcagccaattggactctcttgacattctcttgttcttggacaagcatgttaccatacgtcaagagcttctccagagtcatcttgggctgctcaaaggttggaggtccatcttttgagttcacaagcttcttcccaatgccgtcaacaccaacaccagaaatccacttcctcacttcgtcatcatatactctggctctcagtgcaccaaagaaatcaatggat

SEQ ID NO: 217393 - DNA, 525 bp, Glycine max
  unsure (1)..(525): unsure at all n locations
ttttcttttcttctatttttttttttttttttttttattatttcttttttttatttcttttattttttttattttttttttttttttttctatcttattttttctgtatccnnnnnnttnnnnnnnnncnnnnnnnnnnnnnnnnnnnnnntnntntttntntttgttcctaacacacttnaacttcactcatttccttttagtgtctcttgagtcttgaagttccttattagataagatttatgcaaatcccttcataaaatctccaatatccaataattgctccaaacccatatccatttcacttcatattccttcaacatctcgtcacctgaaccgaaccatgagagattctcataactacatcgttgcaacagaattctcaacgacaacaaactactaggatgttccgtcctgcgtcgttttgttcgtgaagtactagttgcgaatgttgctgggaatttgcgcattctctaaggtgtaccactctactaacgtttacgacactcaccatatcgtttcgtt

SEQ ID NO: 217394 - DNA, 567 bp, Glycine max
atgaaaaagagtccaaaagtatctttaaattctagtagtattaaacatgttcatttctttactatatacttatataagttccttaaaacattacctaaaccttcaccaatccataaaaacaatggtttacggttgttacccaaaacaaaaaacatagataccaaattatattctatagaaatcaccgagagaccggctcttccaattcacttgccaattcaagaagcagtggccgcagtttatctttccaaaactgccccccaaacccccctcccttttcacttcttttcatttcaaccaccaccagctcatcggttaattggtaaaccacaacaataccaatcaaattaccatcctgcccttctagctttgctccaccaccattcttctcccttctcaccaccacccttccctcctccgtcattgcctccactctctccataattttctctggcaccactgtcgaaacaacccgttcaaccgaattcgatccggtcgggtcctcgaaaagacccgacatatccaacccggtcgagaaagaaataagtcgaaagcattcaaagactt

SEQ ID NO: 217395 - DNA, 540 bp, Glycine max
cctagggctcgagcttccaccttaacccttctggccgttttgtcattggtggccctcatggtgatgctggtctcactggaagaaagatcatcattgatacctatggtgggtggggtgctcatggtggaggtgccttttcagggaaggaccctaccaaggttgacagaagtggtgcctatatcgtgaggcaggctgcaaagagtgttgtggcaaatggccttgccagaaggtgcattgtccaagtttcctatgccattggtgtccctgagcccttgtcagtgtttgtggacacttatggaactgggaagattcctgacaaggagattcttcaaattgtgaaggagaatttcgacttcagacctggaatgatcaccattaacttggaccttaagaggggtggccataggttcctcaagacagctgcttatggacactttggaagggatgaccctgacttcacctgggaagttgtgaagccactcaagtctgagaagcctcaagcttaagaatgttgtgaagtaatcactcccttcaatggat

SEQ ID NO: 217396 - DNA, 487 bp, Glycine max
caaggatgcttctatttcagctcttccagttgatgagttgattgagaaggctgatggatttgcaggagtatttcctgaacacaaatatgaaattgttaagaggctgcaagagaggaaacatatatgtggaatgacgggagatggtgtaaacgatgcccctgcattaaagaaagcagatattggaattgctgttgctgatgctacagatgctgctagaagtgcttctgatattgtcctcactgaacctggtctgagtgtcattattagtgcagtgctcaccagcagggcaattttccagaggatgaagaactatactatctatgctgtctcgatcaccattcgtattgtgtttggtttcttgtttattgcgttgatctggaagtttgattttgcacccttcatggttttgattattgccatactcaatgatggtaccattatgactatatccaaggatagagtgaaaccatcttcacttcctgatagc

SEQ ID NO: 217397 - DNA, 510 bp, Glycine max
  unsure (1)..(510): unsure at all n locations
ctcgagccgaatcggctcgagtgctccctcagaagcgaagaagaagccacagagaaccagtctcctactctctctcacccacaagaaaaatggcatctcacatcgttggatacccccgcatgggtcccaagagagagctcaagttcgctctcgagtctttctgggatggcaagagcagcgccgaggatttgcagaaggtggctgctgatctcaggtcatccatctggaagcagatggctggtgctgggatcaagtacatccccagcaacactttctcgttctatgaccagctgctcgacgccaccgccaccctcggtgccgtcccccccaggtacggctggaccggcggcgagattggattcgacacctacttctccatggccagaggtaatgctaccgtgcctgctatggagatgaccaagtggttcgacaccaactaccactttattgaccctgaatngggccctgatgtgaacttcacctatgcttctcacaaggcttgtgatgaat

SEQ ID NO: 217398 - DNA, 458 bp, Glycine max
caccgttgatctctctttcaacaacttaaccggcgaagttcctgactccgctgtattcacgaatcagaattcgaagtctttctctggcaacgttaatctgtgtggagaaatgacaaagaacccatgtcctattccttcttcgccgtcgtcggaaccgaaagcttccgctcctatttctcctcctgcaatcgccgcaatcccgaagaatttagacgattctccgctggcgccgacggggcataaacagagtggtctcaaacaaggaacgatcataggaatcgtggtgggagacgtcgtcggcgtcggaatcttggccgtgctgcttgtctacgtgtaccggttgaagaaaaagaaagaggaggagggttcaaagacgaacaacgaagcggctataacaaggagcagaagcgagagttcttcgtcgacaacctcggagtcaagaggcttcacgaggtggt

SEQ ID NO: 217399 - DNA, 552 bp, Glycine max
gacgaggagaagaggaacaagttgataaggtggatgattcagtcgttggagaagagcgtgagaagccttgacttctctccgacaggcatatcgacaatagtgcaggtgaacgaccttaagaactctcctgggcttggcaagagggagctgaggcaggccaccaatcaggtccttcaattgtttcaggataactaccctgagtttgtggccaagcagatattcatcaatgttccctggtggtaccttgccttttctaggatgatcagccccttcttcacacagaggaccaagagcaaatttctctttgctggcccatccaaatctgctcacacccttttccaatatatagctccggagctggtgccggttcaatatggtggacttagccgagaggctgaacaggaattcaccacttctgatcctgtcactgaagttacaatcaaacccgcgactaagcatgctgttgagttccctgtttctgagaaaagtcatgctgattgggaaatccgagtggtgggcttggatgtcaactacggtgctgaatttgttccc

SEQ ID NO: 217400 - DNA, 519 bp, Glycine max
aaagaagaaaacatccattcaaccttattctaggaacaatacacataacactttacaaaaatttggctttctaatcaccttaagatacaacaattggaccatgatgaggggctcatttttccaactcagatgaatattttagtccttacaacatgggtgaagaataggcatacttgggatgcaggcaactaaaagagctgaccgtgcaaccttcctgatcaagtattgcgttggccatttaatggggatagttaacgactgaaaaagccaggtccagctcgagaaagaagctcctcttcaggatccttacccatctttatcatatgttcgaaagcatatgaaccaattctggaagtttcgagcacgcgggttccatcaggggaagcaactaatcctttaaacaagcaattgccatcctggtttttggtagcataacctgcaataggagtgccgcaagatccttctaacttttcaaggaaggctcttttacaggaaactgctagccttgttcttcatgat

SEQ ID NO: 217401 - DNA, 443 bp, Glycine max
  unsure (1)..(443): unsure at all n locations
ggaaccctcataacacaaagcacaaagcaaagctcatcatcgttaatcagccccaagagaaagatttgttggagggaaatttttcctttgatattaaatctcgctctagattggaaaaagtttcctctacaaaagcacaatttgttagtggaaaaaccttcagatatgatataattggtgctggttcacattcttcagaagaatttcctgacaaggaagatcaangaaaacccnaaaagatggataccagattgagacaaagaatagatcctcaatcaatgaagttcaggctcagatgggaacannnattgttaaaatggctcttgatgatgttgaactcctaaaggttncatgttgggatcttaaatttctcaatctaaaattgcacttnccaaaaacacagttggaggaaccattctgcgtagtgatctattggcaaattt

SEQ ID NO: 217402 - DNA, 543 bp, Glycine max
aaaataacacacacttcacacatcattacgacaattaaaagaggtgtggaaattttcaaatagacagagcatactcaacaagagggtcatgtctaatttcctttattgaattaaacaaacgaacaaacgaaagaaaacacaaattccagatcatgcagaggattccgcattttcagaagatctggcagtagcctgtggaacagaaaaagctggcataagagtattaccagcaatttcaaaatcttgagaaattcccaagagaatatcaaaaactgtagactgtttgggattgtcaataaggaaactcaagtgccatgaagtttgatttgcccactcagaactccacatttcaaaaccattattaggaccacatacctctattgggaagatcaattcccaggaatgtggttccgattttgtccacttacatgcatcgaaatgctctgtactggtgctgtttgttaaaaacacttgtaccaatgaggcccaatcactccttttgactgctgcattcccagacatcacaattttaaccattaaaca

SEQ ID NO: 217403 - DNA, 479 bp, Glycine max
aaaaatacttgctctacctctgccactttctgagtacaatacaacactgccatggctgcctcagtctccactattggagctgtcaacagagctccactgagcttgaacagctctgaagctggagattcggttcccagttcagccttctttggcacaagcttgaagaaggttactgcctcaagggtccctaacgtcaagatttcttctggaagtttcaaaatcgttgcggcggagaaagagattgatgagcaacaacagacaaacaaggacagatggaaaggtcttgcctatgatatttcagatgaccagcaagacatcacaagaggaaagggtatggttgattccctcttccaagctccacaggagactggaactcactatgcagtcatgagctcttttgagtaccttagcactggacttaaacagtataacttggataacaacatggacggtttttacattgctcctgcttttatgga

SEQ ID NO: 217404 - DNA, 479 bp, Glycine max
gtagtaaaacaccttctattatttgaagccacaaagttcagcagaaccacaatgaacaccaggaaatattaattgattatctcaagtgttttttttagtagtgagacaatgtaactcaaaattataaaggataacaatccaatatgaacaagataaattatttgattatatcaagtcatagcttctcttcaagtggagaatgcttaggttctcagggtgtgtataagcaggttccatcatcacttcttgcagttgggtcgaagtttgaggcatttggatcagtacaaccttcaggaacgggaatttttacttgctgggctgctttgccatagaaagttcctcttttgatggcatcctgattagcatcaccaagagcagcctcgttcaagtacttgtctgccagttgtactctcttcacattctcttgttcttggacaagcatgttaccatactccaagagcttgctcaaagtcatcttc

SEQ ID NO: 217405 - DNA, 503 bp, Glycine max
  unsure (1)..(503): unsure at all n locations
attcgttgtttactttcttcctnnnnnnnntnnnnnnnnnnnnncnnnnnnnnnnnnnnnnnnnnnnnnnnnnnnnnnnnnnnnnnnnnnnnnnnnnnnnnnnnnnnnnnnnnnnnnnnnnngggannnngnnatncnctggcatgggccacctaatcccaatgatcgagttcgcaaagcgagtggtgtgctaccataacctggcggtgagcttcgtgatccccactgactgcccaccttcaaaagcccaaaaggcagttctggaggcccttccggactcaatttcccacaccttcctccctccggtcaatctctccgacttcccgccggacaccaaaatcgaaaccctgatctcccacaccgtcctccgctcccttccttccctccgccaagcattccactccctctccgccacaaacaccctctccgccgtcgtcgtagacctcttcttcaccgacgccttcgacgtcgccgccgaattcaatgccttcccctacgtcttc

SEQ ID NO: 217406 - DNA, 494 bp, Glycine max
acgtacacttacccaattattttattaatgtcatgtatgccaagtgacatttgataagttaagtgcagataattgaaaggaagaagctactagttgaatttgtgggtccacttgagagccaaattggagatgttggtggtggaggaaccatgttgagcgagagccttagccgcagcctccttgatatccttgattcggtaacgaagcttcttcccttgttcaccttccatgaggcacttgactaggctggctatctcctgtctctccaccaagccactctctgcaacgttgggcctcagcgccaccttgacgtcatgcgtgagcataaaggcgttggtcctctgctccgcgaacagaggccaggctatgaaaggcacaccgttcaccacgctctccagaatagagttccagccgcagtgggtcaagaacccacccgtggatggatggcccaatacctgaggctgcggagcccaagactgaaccaaaaaccctct

SEQ ID NO: 217407 - DNA, 519 bp, Glycine max
  unsure (1)..(519): unsure at all n locations
atccaaccccaggagacttattggcatcgtcactacaagcagcagctactttcatgcaacccaccaagtttttgcagctaaagtctactcaggccatatctaaggcttttggtttggaacctgctggagttaataaggtcacatgctcccttcaggctgatcttaaggacttggctcacaagtgtgttgatgctaccaaaattgcaggctttgcccttgccacctctgctctcgttgtttctggggcaagtgctgaaggagtaccaaagcggctaacctttgacgaaatccagagcaagacctacttggaagtgaaggggacaggaacagcaaaccagtgtccaacaattgatggtggattggagtcatttgccttcaagcaagggaaatacaatgccaagaagttctgccttgagccaacttcattcacagtgaaggcagagggtgtggccaagaacgctccccctgagttccaaaacacaaagctcatgacacgtttgacctacactctngatgaga

SEQ ID NO: 217408 - DNA, 385 bp, Glycine max
gtcattaataatttaaacctagaaagataaaaacgaagaactggaagcccaagaaatccaacaagaaggaagagcgcaaaaggtggagcgaacgtaaggagctagaaaaagatggcaaaggaaggaagggggggggagaaaaagaaacaaaagagaaaagaatagcacgggaaggagctgagggatgagagggattgaaggcaacggaaggcgaggctaagacaaaagaagccggggaccagaaaaaaaaggacgcaagcggaccatttaggaaaaaaaggaaagtcccgacaggcgaagacttggaaccgatgaggcggacggcagtaaaacgaagggccgatgagaccaaaagcgtgaggacccggctacaaatgggcacaag

SEQ ID NO: 217409 - DNA, 439 bp, Glycine max
caagttcatggtgtttgcttgctcagactcaagggtgtgcccatctcatgtgctagatttccaaccaggagaggcctttgtggtcagaaatgttgccaacattgtcccaccatatgaccagtcaaaatacgctggaactggggctgcagttgagtatgctgttttgcatcttaaggtgtcggagattgtggtcattggacacagtgcttgtggtggtattaaggggcttctgtctttcccatatgatggaacctactctactgattttattgaggagtgggtcaaaattggcttgcctgcaaaggcaaaggtgaagacacagcatggggatgccccttttgctgagttgggctcacactgtgagaaggaatctgtgaatgtttcccttggaaacctgctaacttacccatttgttagagatggcttggttgacaaaaca

SEQ ID NO: 217410 - DNA, 480 bp, Glycine max
cttagtgggaagccttgctaccttgctttgatttttgttgttaattaacgatcttcaacaatcttttatgtaaacataaaatcaccaccagctatacctcttgaaattttttgttatggtatagattctaatcattctggggcgatcagtgtggtcgtgtaatacatgtactcacctcacataatgagataaggctttcttgttgatgttgtacagattcttgtcacatatgaaagcttataactataggtgtcctgtctctctctctctctctctctctcttttggggtttctcaggacaatattggacttattgagagagtagtcatggaggggatggctcccaattcatgtgcaaggccagttctagagaaaaaaacaaggccacaagagcaactgaattgtccaaggtgcaattcaaccaacacagagttctgttattacaacaactacagtctcacacagccaagatacttctgc

SEQ ID NO: 217411 - DNA, 578 bp, Glycine max
  unsure (1)..(578): unsure at all n locations
ctcgtcggagactttctccggctgccctccgaaactgataacgacgacaacttcaagggcacccggtgggccgtcctcctcgccggttccaatggttactggaattacagacatcaggctgatgtttgtcacgcctatcaaatattgaggaaaggtggtctgaaagaagaaaatattattgtttttatgtatgatgacattgcattcaatggggaaaacccaaggcctggagtcatcattaacaaaccagatggaggtgatgtttataaaggagttccaaaggattacaccggcgaagatgttactgttgataacttttttgctgctttacttggaaataagtcagcactgactggtggcagtgggaaggttgtggacagtggtcctgatgatcatatatttgtatactatactgaccatggaggtcctggggtgctcgggatgcctgctggtccttacttatacgcggatgatctgattgaagtcttgaagaataagcatgcttctggaacatantaaaacctagtattttatctgggagcatgtgaatctggagtatctttgagggctttcttctg

SEQ ID NO: 217412 - DNA, 529 bp, Glycine max
tcggctcgagcgcaagcaaaaagaaagattgctgcatcagaggagttgtaaattaagagcatggctgcacaagctcttgtatcatcatcttctcttaccttctcagcggaggctgcaagacaaagtcttggaccaagatcactccaatctccatttggcttctccagaaaagcctcctttcttgttaaggcagctgctaccccccctgtcaagcaaggatcagacagacctttgtggtttgcatcaaagcaaagtctttcttacttggatggcagccttccgggtgactatggatttgaccctctgggactttcagaccctgaaggaacaggagggttcattgagccgaaatggctagcatatggtgagataatcaatggtcgttatgcaatgttgggtgcagttggtgcaatagcacctgaaattctaggcaaggctggtctgatccctcaggagacagcactcccatggttcagaacgggtgtgttcccacctgcaggaaacctacactactggggcagactctaca

SEQ ID NO: 217413 - DNA, 553 bp, Glycine max
gtcgaatgtttctagttgttttacatgtcatttcttacagcgccacaccaaggaacaaaatgtccacatgatatagaaaggtagaaaggtagttgagttttggcaacgtaaagaatatgtgaaataacatataatacattcagtggaacttgagactggtcaagatgttgttgtgcacggggtcagccaaatgatctaggaggttttggtatgggccaacacctgtgacaagagcttgaacaaagtaacccaagattgccaacatagccaaccttccattcttcacttccttgagcttcaaatccttcaaggacttctcatccttaccaaagcctagtggattgaagaaaggtcctcctggataagctggctcaccagaaccttcaagacccttctctagtcctaggaagtattgtttgcccatagagcctggtttggcccagtcttggaatcttctgtgctctgcaaatcccatcagtgccatctcaaacacgaacagtgtgtaagagtctgcccagtagttgtaggttcctgcaagtgggaacacacccgt

SEQ ID NO: 217414 - DNA, 482 bp, Glycine max
  unsure (1)..(482): unsure at all n locations
cgttttccgcttcagttttctcgggaaaatcatggtgaaaggtccaggcctctactctgacattggcaagagagctcgcgatcttctgttcaaggattatcagaatgaccacaagttcaccatcaccacttacacttccaccggagtggaaatcacttcaactggagtcaggaaaggtgagatatatttggccgatgtcagcactaaggtgaagaacaagaacatcacaactgatgtcaaagtggacactaactcaaatctgcgtacaatcattactgtggatgaacctgcccctggactcaagacaatttttagctttaattntccagatcagaaatctggcaaggtagaactccagtaccagcatgagtatgctggaatcagcaccagcattggattgacagcaaatcctgttggtaacttctctggtgtggttggaaataatttggttgcccgtgggacagatctttcatttgatacta

SEQ ID NO: 217415 - DNA, 502 bp, Glycine max
aaatcaaagcttcgatatacaccctaaaacaaccaaattgctgggcaatcaccttccatgctcaaaaagcttactcaaagatgcacctaaatcaatggctttcgggtggatctgttgaataagtacaaattcaaattctttttgtgcttattgattttacactcaagtccaccaagatatgaagaaattgatatagctccaaaatgaagcactagatgttcattgggaaagtgaaagtctacaacaacttattatcctccaccacgagaagcatcccatatatcactcacaaaacgacttggtctatggtttcaaggccacagcaagaccaacctttgcactcttttcgatggccccagtatccacctcaccaacaagcgaaaatcgagttcttggagtccagtcgtgctggatcagagcacttgcacgaccatagttgttcacccgagctttcaacagcgttagcgggtccagagcatgctgtgtaccaaaggtgagtata

SEQ ID NO: 217416 - DNA, 558 bp, Glycine max
aaagctcttaaggatggaattgctgttgaaaaaccaatctacaaccatgtcactggtctcctggatccccctgagctcattaaaccccccaaaatcttagtcattgaaggcttgcacccaatgtatgattctcgggtcagagatctcttggactttagcatctacctagacattagcaatgaggtcaaattcgcttggaaaattcagagagacatggcagagcgtggacacagtcttgaaagcatcaaggctagcattgaagcaaggaagcctgattttgaagcatatattgatccacaaaagcaatacgcagatgcagtgatagaagtgttgccaacccaactcattccagatgacaacgagggtaagattttgagagtgaggttgatacagaaagaaggggttaagtactttagcccagtttacttatttgatgatggctctaccatttcatggataccatgtggaaggaagcttacatgctcctaccctggcatcaaattcttctatggaccagagacttactacggaaatgaggtgtcacttgtagaaatggat

SEQ ID NO: 217417 - DNA, 548 bp, Glycine max
gtcgaggcacaatggactaccttctacttcttccactaataatcaccatagtatggataaacattcatgtattcatctctagcttcaaaccactcaaatcctctaaaaatcccccgggtcctcgcccttttccaatcataggaaacatcttggagcttggcaaccagcctcaccaagcacttgccaagctttctcaaatttatggtcctataatgagtctcaagcttggtaagactaccaccattgtcatttcctctacacaagttgccaaagaagtgctacaaaaacatgatcaaatttttgctaataggacagtccctgatactctccgagcacttgatcatcacatactttctgtggtgtggatgccacctttagcacactggaggacccttaggcgagtttgtgctaccaaagtgttctcttctcagcagctggattctacacaggtttttcgtcaaaggaaggttcacgatcctatggattatgtgaaggaaagatgtgagacaggtgaagctttggatatgggtgaggcttcctttacaact

SEQ ID NO: 217418 - DNA, 522 bp, Glycine max
gcatgcaaatgattaaaggttttattaagaattttttttattcataagaatcgaactcaggtacagtttacgacaacttattaagaatttgattgcatgcatgcaatcttccttggtaatatgcttggatgggaatgactaggagaggttgtgccttatgcaaagtaatcccatatttctcagacatatccatgtcttctggcttttgtccatccgtgagcttccaattatagttgtatagaagagaggccaacacaatgtgcacagttctagaagccaatggcaacccaggacaaatccttcttccagctccaaagggtattagctcaaaatcttggcctttaaaatcaatgtcactttccaagaatctttcaggtgtaaattgatttgggtttgtccaaatacttgaatctcttcctgtggcccatacattgactagaatttgggcacttttaggcaccatgaagccacatagttcaacatcaacttctgacttgtgtggcactaacattgggatgggtg

SEQ ID NO: 217419 - DNA, 461 bp, Glycine max
ggaaaagatggaggtgattagaaatagaggcattcctgctgatgttcttgcaaagcgagctcatgaatttgaaaaacatgttgctcatgaaagcctcaaggatcaaattcctgctgttgacaagttgtattctactaaggttaataagtttgcaaaaattatgaaccttagacaaagtgttgttggtgatcttaaacttcttactgatgggaagttatatgaaggtaagcatattcctgtatctaatattagtgcaagggaaaatcatgtagttcaaatacccctaatggcacaggaggaaattctgtcttctagtgcaagtgatttcagaactgcaatggtgagtaaaaatagcaagcctcaagctactgcaatgcatgtgggagctatagaaattatcattgatagtttcgcaagtcctgactgaacatagatggtgcaatgcttttggttgatactta

SEQ ID NO: 217420 - DNA, 438 bp, Glycine max
aaaataacccacacttcacacattattaccacaattaaaagagggggggaaattttcaaatagacagagcatactcaacaagagggtcatgtctaatttcctttattgaattaaacaaacgaacaaacgaaagaaaacccaaattccagatcatgcagaggattccgcattttcaaaaaatctggcagtagcctggggaacaaaaaaagctggcataagagttttacccgcaatttcaaaatcttgagaaattcccaagagaatttcaaaaactgtaaactgtttgggattggcaataaggaaacttaagggccatgaagtttgatttgcccacttaaaactccacatttcaaaaccctttttaggaccacatacctttattgggaagatcaattcccaggaatgggggtcccattttggccacttacatgcattgaa

SEQ ID NO: 217421 - DNA, 511 bp, Glycine max
cttgatccaatcaaggcataaagttcaatttatacgtatgttttcttgtaacttcatttaatttaaatcaaatctaacatgatgttttagctcaagtttattttcgtatatagaaatatatcactagtttattttcgtgtatagaaatatatctacattactgtagtaaaaaatcaaatagaaataaaggataaattttattacatcaaacttctattataaagtgttggtattgaaagtttgcaaataaaaattcgactatttaatatctacttggtcgaattgatatcaggtgtgaaaaaaaaattcatattaaatttgatcaacatatttaaattaaaatgtaatattttttttatgatatctataatttgatatattcaaaatttattaaataatgtgtagttgtatacgaacgatacaattatttaaaataaaattcatatttaagttagttaaaaacatattatcttattcaatatattctttagcacatcaattaacctatttt

SEQ ID NO: 217422 - DNA, 580 bp, Glycine max
  unsure (1)..(580): unsure at all n locations
tcttctatctgttttttttatctcttatgttatgtcttattattctatcacttatctaatttgttatatatttattcttatatttatttttcttatattgtattttttattttatttaattattctatttatattttatttattttatatttttattttttttatcctgtattatttnttnnnntnnnnnnnccnnnnnnnnnnnnnnnnnnnnnnnnnnnnnnnnnnnnnnnnnnnnnnnnntttnnnnnnnnnnnnnnnnnnnnnnnnnnnngnnnggnnnntacatttttttttgttggacagatatggaaatgctattgcttgtttggatgttttgcatataactcatgctgcaatttctctggttgaaagtagtcctggagcatctaatgatgctgcaaacacagttatgcaaaaattttgggactcagcttttgctctatagctgtcgtctgaagattttgacacccatagtgaagcctatggacggttgacttttgatggggcatatactacaaagtctacatattaatctgtaggttttggaaattcatttgctttttaatttgatgatcac

SEQ ID NO: 217423 - DNA, 514 bp, Glycine max
  unsure (1)..(514): unsure at all n locations
tgtttttatcctgcatgctgnnntnnnttnnnnnnnnnnnnnnnnnnnnnnnnnnnnnnnnnnnnnnnnnnnnnnnnnnnnnnnnnnttnnnnnnnnnnnnnnnnnnnnnnnnnnnnnnnnnngnnnnnnnnnnnnnnntnntgttattgttttggctgccactaacagaccggatgttcttgattcggcgttgttgaggcctggccggttcgacaggcaagttactgtggatagacctgatgttgccggcagagttaaaattcttcaggtgcattctagaggaaaagcacttgcaaaggatgttgactttgaaaaaattgcaaggagaacccctggattcactgaggctgatctgcagaatctgatgaatgaagcggctattcttgcagccaggcgtgacctcaaggaaataagtaaagatgagatatctgatgcgcttgaaaggatcatagctggacctgagaagaaagatgctgtgtctcagatgagaagaagaattagtagcctatcatg

SEQ ID NO: 217424 - DNA, 556 bp, Glycine max
ctccttgaatttgataaaataattattgattcttacagtgtacaagtcagagcgtattttatagtacaaacataattctgtgacttgcgtgtatgattatgcaacatataattcggcttttccatcaatgaatagactcatgaactcttcaccatccacagtttctttttctatgagaagttgagcaagcttgtgaaggatatcaatgtgagttgagataatatgtgttgccctagaatatgctctctctaccagttccctcacttccgcatccactacatccgcagttgccatggagtaatccttttgcgatgacatctgttgacccaagaatggatttccaccaggtccaccaatggcaacttgtccaatttttttgctgaatccaaatctctcaaccatctgccttgccactcgtgaaacttgcatgaagtcgtttgatgctccggtggtgacattttcctggccaaaaataacctcttcggcaacccttccacccagggcaacagccatctgattttcaaggaacttctactgtacaatccagactcgagcc

SEQ ID NO: 217425 - DNA, 569 bp, Glycine max
  unsure (1)..(569): unsure at all n locations
attcgatcctctcttctcttctttcaattccgctccctcgcacgaaaatgacagggtttcctcaacctcgccgcgatcacgcttcttcttcctcctcctcctcctcgcacaattccaacagcaggggtagcaatgtatttaatttgcttgcaaggagggagatctcgccccgatcaagatatgtggcaaaaaggcattggggagaacccggagaagcttcaaaatcaaagtctagtccttattctcatcctaaaaatgaagttgtgagagatgcaagacgtggtctcctctcatgggttgaggctgagtcattgcggcatttgtctgctaagtattgtcctttgttgcctcctccaaggtctactattgcagcagcatttagcccagatgggaaagttcttgcctccacacacggtgaccacacagtaaagataattgattgtgaaactggaagttgcttaaaggtattagttggtcataggagaacaccttgggtggttagattccatccattgcatacacatatactngctagtgggagcttggatcaagaagttcgtttatgggat

SEQ ID NO: 217426 - DNA, 569 bp, Glycine max
aaccactaaaagttacacatgtagaaagagaagcccacttatgggttggagggggaggggtaaataagaaaacatgttaacaaaggaaaatgttagtacatattcatacgtggataatacaaaaatatacattttgctattgcagtgagtgaagttccaccatcggttgcatgggctcagcatttatgtttgtgcagatcatcagcagagacagcatatgagttgtacagtaagtaatgtgaagcagatgtttgaattacatgtccaatcattcgtctaaaccttgctcactgactgacaccaacgatggtctcctcaggaaagtaacttggtccagtgccattcactgcatgagcaccgtcatactggaggaccctaagctttccttcctttgttccataaactagtcctcccccagcaaaaggatgaaagcatgccacattgacctcgtcttctgcactaggaagcaccctaacaagttccatatctgacactttgtatacctctaacactgtatatataaggcaatgtgttctccatcgataacatacttttaagaagagaccatg

SEQ ID NO: 217427 - DNA, 397 bp, Glycine max
ggtattaattttattgttcattgatattgttttttattttgatggtttttgttttttatacaagttttataatgaaaaatgaaacaacaagagtaagaagaggaaaaagaagaaacagtaagcagacaaaacaacaaaggcatggcacaaacaaacacaggcgaataaccaaaacaaaaaaagaaggaaaaaaaaacacaaagaggcaacaacgaaaaccaaaaccacaacccttggggagaagccccacacagagaaaaaccaagcaatgacctcaaccaaggagaaaacaagaccaagggcaacaaggagagcacgaaagaggacacatcagagcacccgacgccaacagacacaaagaggctcagcacacacagagaggattgccaaggagccc

SEQ ID NO: 217428 - DNA, 375 bp, Glycine max
caaacacaaattttatgtgattagtcgcggtatttaaaataaaaaatgaaagtcgacaaataacaaaggaaaggagatgttcgaataaaaatagttccctttcaagttcttattttttgcgaggacaggacattgtgagtgttatattatgctctatcaacacattaaaaagattatatgatttatctgctgcggaagactgtaacatttttattggcaaatagggagttcccaagtccatgcccaagtacttattacttcttggagctgaatggatatcttattgtgctccgccattctaattattggaaatctgcaaaccattctcgctttgggacacaatgtatgtgcatatgttaataaattgattcgaga

SEQ ID NO: 217429 - DNA, 496 bp, Glycine max
gtcggttcttccttctcaaatattcttgagatccccattttctccgaagcaaagccatggctaagggtcctggtctctactctgacatcggcaagaaagctagggatctgctgttcaaggactaccacagtgaccagaagttcaccatcaccacctactcaccgactggagtggctattacagcatcaggaaccaggaaaagtgaactgtttctggctgatgtcaacacccagttgaagaacaaaaacatcactactgatatcaaagttgatacagattctaatctcttcacaactatcactgacaatgaacctgctcctggtctgaaggctatttttagcttcaaagctcctgaccaaaggtctggaaaggtggaagttcagtacttgcatgactatgctggaataagcaccagtgttgggttgacagcaaacccaattgtcaacttctgtggtgatataggaactaatgttcttgctctgggtgctgatctttc

SEQ ID NO: 217430 - DNA, 408 bp, Glycine max
  unsure (1)..(408): unsure at all n locations
gcttcattactgcagtagtttcttcatgtcnnnnnnnnnnnnnnnnnnnnnnnnnnnnnnnnnnnnnnnnnnnnnnnnnnnnnnntttntnntnttttttttttntttttnttttttgttttgagagttcaattggctgacaagtacttgaacgaggctgctcttggaaatgctaacgaggatgctattcagaggggaactttcttccagtcttgaattggaggcaaagcaaacttggcaagtaaatatttctgttcgtgaaggttgttgtactaatccaagtgctagaagttgtgatggaacttgcgtgtaacattcttagcattctcaatgtcttaggtgcaaagagaagatgctaagtttgagatgatcttactatatttttcatattggaccgtcttcctctat

SEQ ID NO: 217431 - DNA, 351 bp, Glycine max
atagaggaagacgggccaatttgaaaaattttgtaagatcatttaaaacttagcatcttttttttgcacctaaaacattgagaatgctaaaaatgttacccgcaagttccatcacaacttttagcccttggattagtacaacaacctttacgaacagaaatatttacttgccaagtttgctttgcctccaatttaagactggaagaaagttcccctctgaaaagcatcctcgttagcatttccaagagcagccttgttcaagtacttgtcagccaattggacttttttgacattctcttggtcttggacaagcatgttaccatacaggaagagctttttcagagtcatttt

SEQ ID NO: 217432 - DNA, 542 bp, Glycine max
  unsure (1)..(542): unsure at all n locations
tccttatttctttccctatttctttttctttattttcttcctttactcttttttttgcttttttgtcctctgttatttgctttattgtgtcttctctatcttttctttctcttctgttttcctctgcggtgtttnntnnnntnnnnnnnnnnnncnnnnnnnnnnnnnnnnnnnnnnnnnnnnnnnnnnnnnnnnnnnnnttnnnnnnnnnnnnnnnnnnnnngnnnccnnannntattaaggctggagctgatatagtcagtgttcattgtgaacaatcttccaccatccatttgcatcgtactgttaatcaagtgaaaagtctgggagctaaagctggagttgtcttaaaccctgctacccccttaagtgcaatagaatatgtccttgatgtggtggatttggtcttaattatgtccgtaaaccctggctttggtggccagagttttattgagagtcaagtaaagaaaatttctgacttggagagagtgtgcgcggaaaagggagtgaatccatggattgaagtagatggtggagtttgt

SEQ ID NO: 217433 - DNA, 516 bp, Glycine max
gatcatcattcctcttagcttgaaagctgatgtagaaacacaaggtgattttgtcatgtccttggcagctgaagttcgagcagcctccttctcagatattaatgacttggtggcctttgtgaactggctagatgaggaactttccttcttggttgacgaacgagccgtcctcaagcactttgactggcctgaaggaaaagcacatgcactaagggaggcagcttttgaatatcaggatttgatgaaattggagaaccgagtctccactttcgttgatgatcccaatctcccatgtgaagctgcactgaagaaaatgtattcattgcttgaaaaagtggagcaaagcgtatatgctctcctgcggacaagagatatggccatttcacggtacaaggaatttggaatcccagtgaactggctaatggattcaggggttgtaggcaagatcaagctttcttctgtacaactggcaaagaagtatatgaaacgtgttgcatctgaacttgatgaactatc

SEQ ID NO: 217434 - DNA, 457 bp, Glycine max
gagagtattgaatactgttcagttgaatttcttattatagggaaaaacaaggcagaggtagggatcatgttggagtacaaagttacaattacaatatgattctcgtatcatcgggtagcatgcaatatgtataggctattcaaattgaagcaaaatgaaatttacagctgaaaaggcaacatatttttgagagacacagcttcaaagggaaaaaaagaagagaaaaacttctgatgggatagcctaagtttctgatttgctattttcaccagcttgagaggtttggatgcggctccttagttcttcaaaagccttcatgctctctgcatcaaagcctcctgcaaactgatggacacggaaagcgaaacgcacaccttgtagaaccaaaaactttctaactggttctttatcaggaccagatagttcatcaagttcagatgcaacacgtttcatatac

SEQ ID NO: 217435 - DNA, 517 bp, Glycine max
cgagagatatattcatcaatttcgattctttttcgatcgagatgtatggattcatgggtctatgtgtctatatagatcctgttcatggattaacgaaaatgtgcaaaagctctatttgcctctgccattctatgagtctcttcctttttgcgtatggcatcgccactacctttggcagcatccactaattcggaacttaatttgaaagccatatttcgacccggacgttttcgggatgcccccaataaccaacgaatggcaagtgcttttccttgtgtggatcctatttcaacgggaacttgatgagttgatccgcctacgcgtcttgcttttactgctatatcgggagttactccacgtattgcttgacgtaaaacagatagtggatttgtttctgtcttttgttgaatctttttcatagctcgatagataatttgataagccaatgatttttttccgtgtttcagaatacggttaaccaacatgttaactaatcgattacgataaaatggatcgg

SEQ ID NO: 217436 - DNA, 370 bp, Glycine max
cattgtattgctaagtgacgcttatggggctgaaggtgaactgggtgtggttttatctgacaagttcattgaacatgatgcttactgtatgtttgatgctttaatgaatggggcacgtggttcaattgcaatggctgatttcttctcttattctcctttgcctgggtcccatactggcttgcctcctgtaattgaagcttctgctgcattgtatcatttgttgtctcatgtggattcatctttgcatggccatctcgttgatctctgggttgaaccccattactttgctctccgctggttgcgagttatatttggacggcgaattttcactcggcaacctgttgataatctgagatgaaatctcttcatc

SEQ ID NO: 217437 - DNA, 473 bp, Glycine max
gaaatgaatcatcataatttatttcatgataaatcgaatatttgtatttacacattcatctctgcaaaactatggtattcatgacatgaggtatggaagtgaagccgaagaaactcattttattgccactaaagaattgtaattacaaaatatatacaggacacatcaatgtaagatttggctcacatctcagacaaaagattgctaattttgcggagctccttgagagctgacatggcattaacctgcgctttaccaaccacaacagttttagacatgttatctaatgatgcttattggcccctgtcttgttggaaagcacactcaatcacctggatatgctcaagcattgactgcccaatattcctcatactgcccataacagtctgatctgtagattcccctttgaactaacagaactacaatgtccattggctgtagaagagggtattatgtacctttgattattacaa

SEQ ID NO: 217438 - DNA, 426 bp, Glycine max
gtgcttcgtgtccgtgctaattatgtcttcttctctttcaattccgattccatttccgatcgcattggattctgcgtcgtctttgacggagacacagatagcgcttttcaaacctctgaagcagaagcatcatttcgtcagaggcagagtcagtgttattagaccacttcatcgccgcctcaactccgtttcgtctccgaggtgctcttccgccggtgacgacgccgtcattactctccatgttgaaggaatgatgtgcgagggatgtacaaatagcgctaaaaaaattctataaagccgaccgcaagtgatatctgctcatgtaaatatgtcatgcgagacagccaccgattccctagtgcctgaacaaaaaactgcaccaaatggcctaaagcaatagggggaggaacttgcacaaaatttaac

SEQ ID NO: 217439 - DNA, 401 bp, Glycine max
aaagattatattgaggttttttaatatacagatcatactcaacatgagggtcatgtctaatttcctttattgaattaaacaaacgaacaaacgaaagaaaacacaaattccacaacatgcagaggattccgcattttcagaataactggcagtagccagtggaacataaaaagctggcataaaaatattaccatcaataccaaaatcttaacaaattcccactacaatatcacatactgataacagtagagtagcgtcactggagccactacatggtatggacactttagcttaataaaatcagaactacacattataaaaccattattcaggaccacatacctttataggtaagatcaattaccaagaatagtagttccgattttgtccacttacatgca

SEQ ID NO: 217440 - DNA, 555 bp, Glycine max
  unsure (1)..(555): unsure at all n locations
cttgaactatcgtgtcttcttggctttctctgttcaggatcaacatggatattgtatcacgagctttgctatttccgttggctatacttgtgctcatattaagcacaccttgctcaggtgcttttgggaagagtggaactaatgtgaaaacagctatttttctgtcccccaagtttgaacttggaccaggatcggtagccaataaatatgattatgacgctgattttccaagaggtcatatagcacttaagagtttcaatgctgaagtagttgatgaagcagggaaccctgtgcctcttcatgaaacttatctccaccactgggttgttgtaagatactatcaacctaaatatgtgacgacacacacaaactatgatggacataggatacttcacaactctgaccatatatttgtgaggaacagcggcttatgccagagagatactctaggacaatactatggccttggatctgaaacacgaggaacagctacggatgttcctgatccttttgggatagttgtaggtgatcctgcanaaattccagagggatatg

SEQ ID NO: 217441 - DNA, 516 bp, Glycine max
atataagaccactttatttacaacaaacatgatatatatagtattacatatcacacaaccataataagcaagactggtttaagacaaacattacaaaccctcaccaatacaaataattgataatcacattactacaatccttaaacttgaaaatatgctctttgccggttcttgcgtgtgttgtcctattgctgccgaatatgagaagtatatgttccatcgatatgtatttctgtatttcttttaaccgtgatacatactgtgataccatcgatatgacactcaacttatatttgcatctcacaacttatctatcaatgaattatactatttatattcataaaaaatgaagaacgagaagaatatctgaagtgttggtgtggaagctgttctgccaccaataggtagaaaagccccattactccagtgtggccacggctgctgctgtagttagactctagagttatagtttcaccattcaatatctttacagaacctggttgaggatacatgtgc

SEQ ID NO: 217442 - DNA, 517 bp, Glycine max
gtgtgctctcttcatcaacgatcttgatgcaggagctggtcgtcttggtggaaccacccaatacactgtcaacaaccagatggtgaatgccaccctcatgaacattgctgataaccccaccaatgtgcagcttcctggtatgtataacaaggaagagaatccccgtgtgcccatcatcgacaccggtaacgatttctccacacctctatgacgcctctcatacggatgttgaagtggttcaggtatcgtcaacatcatctcctgagccatctgtgccagtttctgctgaaactcaaccaccaatactgccattgtcagcaacttcacggcccaattacagacccggtgtagctcctatccaaattcatcatggctataattatagaggacgtggaagaggaaggggaactgggggtttgcacccagtcacaaaattcactgaggattttgatttcacagcaatgaatgagaagttcacaaaggatgaagtatggtgtcatcctggtaaaagtaagtc

SEQ ID NO: 217443 - DNA, 394 bp, Glycine max
acgtcaaacaaaaaattttaatttaaagcattaaaaatcaaaaattttggacaaaaggaaaaggccccaaattcaatttaaggggaccctttaactcaaaatttttgaggaagaccgtcccatttgaaaaattttgtaaaatccttttcaaacttggcattttctttttgcacctaaaacattgggaattctaagaatgttacacccaagtcccattacaacttttagcccttggatcagcacaacctttaggaacagaaatttttacttgccaagtttgctttgcctccaattcaagattggaagaaagttcccctgttaatagcatcctcggtagcatttccaagggcacccttgttcaagtacttgtcagccaattggacttttttgacat

SEQ ID NO: 217444 - DNA, 447 bp, Glycine max
  unsure (1)..(447): unsure at all n locations
atttaattatcaagtgggaggaaatgttgtcttctgatggatcatgtgaaattgacgtatggcctttccttcaaaatttatctagtgatgctattgctcgaacagcatttggaagtagttatgaagaaggaagaaaaatatttcaacttctaaaagagcaagcagaacttgcaatgaaagctataatgaaactttacatccctggatggagatttctacctactgctaaccataggaggatgaaggaaattgatagagaaataaaagcttcacttacagatatgattagcaacagagagaaagcactaaaggcgggtgaggctaccgagaatgacttgttaggtatacttttggagtcaaatcacaaggaaactgaagaacatggaaacagtaagaatgttggaatgagtctngaagatgtaatcgaggaatgcaagctattctact

SEQ ID NO: 217445 - DNA, 564 bp, Glycine max
tcgcgatctagaactccctttttttttttttttgctttataaaatttgcaattctgaaatgcaaatcaaacaaggcttgttactattattttttatatttcaactttacgtaaaatgacatgagcaccatattggggctgaagagtaaatactgtaacaggagcatgagcataagctggagaaagttcaaatgagaaatgttgtaaaatcgttgacaaagccatctttgcctccaacaaggaaaagttttgtccaatgcatattctaggaccccatccaaatggaaaaaatgaaactctgccatttgtggccttcagaactccttcagaaaatctctcaggtttgaattcattcacatcatcaccccagagttcgcggtcatggtgaaccatagttgttggtaaggaaacttgcactccagcaggtaatgataggtttccgagtttcatatctctgtcaacatttctattaaggccaactgctggtgggtatagcctaagaacctcattcaaaatcatgctgacaatcttaagtgacttagcccatcaaaatttggtttttgtt

SEQ ID NO: 217446 - DNA, 482 bp, Glycine max
caaaaaacaatgggagcccaattcataacctgaatctcggattttacattgaaaagtattgcgattacagaatagacccattcaaaagtagaaactatgaatcctttggtgaggggattgaaatgaaaattacacagacatattaagcagtgggaagaaccttattaacaatctcctggctaagggctgcgatctgggaatcaagggacttgatggtttcttcctttggattctccaaggcagccagagcctcctgcagctcagcctccactttcttcctcccctcagcaatcttttgttccacctcagcctgcgtctccttcttcatcgtgttcagcgccgccgctatctcggcccgagaagccgccatgacagcattggccttctcctccagctgcttcacctcctccgacgtgtccttcacgctgctcagcttctccctgatcgccgcgtccctctcgtccatgaatttcccaagcggg

SEQ ID NO: 217447 - DNA, 533 bp, Glycine max
aaaaataaacatctttttaataatattccgatctgctaacatggttattttatttacatatgtcctgatcggggttccctgcgatgactatactgaggcaatgtcaatttatagctgatacatcatcactcccagtccgtgtcaaagaaacctgcatctttcatctcggaataatacacattttccaaatggaaattttcctcctgaaaaaagtctgctaggaatgttgtatacaaaaaaggaagataaaatgcatggtagaagacaaccgtgacacgatacagccagaaagcaaacgcagcaccagttccagcaaggccacaagcaagtgtcgcaatcgcattaaaaatgaacataattgcaacatacttgtaaaaggcaatttttgctgcatgaaagaagaggaaattaggtaatcacaaacatcgtgtaataatcccgtcaattaactcaccaggcaacgtttctttccatccggaatggtatataaacattatgaagccataaacagcagtgagcaacagcttgtggac

SEQ ID NO: 217448 - DNA, 555 bp, Glycine max
  unsure (1)..(555): unsure at all n locations
gagaacttccggatgccaacttggtaagagaccagaagatttgtgggcaattcattcccaacccgtctttccacgacctcacaagaaggaaaatccttcttggatagcgatacaaaaggtagctgcaagaggtgaaaaaattggcctgcaacattttgtgcccataaggccgttgggttgtggagacactggcagtgttcatttggtggaactcaaaggtactggtgaactatatgcaatgaaggcaatggaaaagtctgtgatgctaaatcgtaataaggttcaccgctcatgcattgagagagagattatatcattattggatcatccttttcttccaacactatacacctcatttcagactcctacacatgtatgtttgattactgacttctttcctggaggagagttgtttgcattgcttgacaagcaaccaatgaagattttcaaagaagaatcagcgagattctatgcggcagaggttgtcattggtttggaatatctccactgtttaggtataatttaccgngacttaaaagcctgaaatatcttact

SEQ ID NO: 217449 - DNA, 516 bp, Glycine max
aatcaaaataactagtaatatgtatgatattttaataagccatatacaaaagtgtattattgatgtatcgtcgatgagcatataactaggatgcttgtttctatcggaaaatgactttattcaatgtacattctacttttctgctaatcctacataacttagaatttgtttgaagttgtctattggcagatcacatgatggtagtattggaccataaccaaatcaacagacactattacacttgaatgacttagaccccgtgatcgttgcagcatgaaatcagataagatgctgaccaaagatcctgagtgaacagtgcaaaccgtcaaaaaatatccatatcaatagagctaactagcactccatcatcttcccactttatatcctttgccacgggatcgtttcctatcaatttaagaggaacatctaatgggggtggagtcatgttgcggataagaggccaattgattccacggtaaaaaggatgttgcttgatttcattggcaccagtggttg

SEQ ID NO: 217450 - DNA, 463 bp, Glycine max
  unsure (1)..(463): unsure at all n locations
ctcatgcatgatcgcaccttcaactctcttcttcttcaccatggctttacttcaaggttttggcgctgtggagttcgttttgtagcatcaccttatcatcagcttctgcttgctttcaccacaacggcctcactatttggtgtgttccatgtcacaaaaaacgaaaggagatattccttttacccactcctcgtcagggaagatctgaagcagcgctagctagcagcacacgtcctctaatggacgccgactcctctggagaagaagtgcttattaaaacaagaaagccatatactatcacaaagcaaagagaacgatggacagaggaggaacataacagatttctagaagccttgaagctatacgggcgagcatggcagcgcatagaagagcatataggaacaaagactgctgtgcaaatcaggagtcatgctcagaaattctttacanagttggagaaaga

SEQ ID NO: 217451 - DNA, 509 bp, Glycine max
gaaagtaaaaagagtgtaatgtaataatttaatatggtacacacacctacacgacaagtttcgtgagctgcagaattagaaaataagcaatacagacaatgaacaaggaaactaagaaataatatatgcaaaactagagattttctttgtgtggttgcatggatatatcaagcatcaagttgaagcctccccattcaagcgtattctcttaggacctttttcttcaccttggttgcaggctgttccgatcctgttttcattggcctctaccgaacatcttttgtaaggtttaaaccctgttggacgagtctttagctttcctggtccaagacctatgattagcagtccctcctcctcattgttatctttgacaaatagcagatttttctgcaccccatcacaattagaactgcatttcttgctttcaaggtcttcatctttgtagtctgtgttttggtcgttatccttgatgctgtctatctgattatcctcatttatcaaatcatgag

SEQ ID NO: 217452 - DNA, 455 bp, Glycine max
  unsure (1)..(455): unsure at all n locations
tggagttctatgcaattctgaaaatgggtgtgaggattttccttgcttttgcttctgggtttgaggctgtgttctttggatttgatttgtttggggtttgttagggtacagctgctacaaaagtcaaaatggcacagaaagtggctcagggggttgctgacaaaagaagaggaagaaggggtccgggcagtgttattggatccagcgctgctggttgcatttgtgctttcctcacaatttttggtgttggaggagaggcattttctcggctatggagacttgggtttgttgccagtttctgtaccaagttgagtgacactgtctcaagtgagatcgggaaggcatatagaaaaacaacgtgagtggtgaattcaggtgtgaatattggttgcgttatgcnagatgacaacatctgtgtatgaagcattcatggttctttacttgttagctattct

SEQ ID NO: 217453 - DNA, 376 bp, Glycine max
caaactcatactgtgaaaagcagtacacatggaaaattacccaagcctgatacggcaccctccaaggattttgaattaaatttgtttgaggataaagatcgtgtaggtgagagtacaactaactttcaaaaccaggcttttaacacttttgttgctgaattcgatgccactaagctcaaccctggacttaataacaaacccgaaagggaacaagcattagaggctgcggtggagatactcaaagagaagctgaaggaagctaatttggaaaaagctgaaatcacatcaaagtacgaaaagctttctgctatctgccgatcacagaggcaagaattgcaggatctcaagcaagcactcgcagctaggactccttacc

SEQ ID NO: 217454 - DNA, 537 bp, Glycine max
gtacattgtaatgtatagttctgattcgtacatatattccgacggtttatattttaattatatgaaccatataatgatacataactattattacaaaaagataaagcaccccaaaagacgagaaaacaaattaatgtgaacacaataccacattactctattctgtaggctagaaaaggatgatgcaaattggttgactatttagacgcactcattacagatcagtgtttgataatcggcttcttcacgatcatcacagtgcagtgagcatgatgagcacaatagtcactgacactacctaaaaccggcctttttatagccccataagcatgactacccacaaccgacattgcagcacggtacttatctacagcatgacaaagaacatttctaggatcaccttccaccacttatgctgtcacatcatttacggaattgttgatgcaaagttgtttagcggtttcgaggacttctgcgccaatctttcttaaatcggaaactacaataggcaagacctgagtggctcctgcaacacag

SEQ ID NO: 217455 - DNA, 582 bp, Glycine max
  unsure (1)..(582): unsure at all n locations
aatcaaattagttcattctctttgcgcagttccctacctctcctttcaagatgcagatcttcgtcaagaccctcaccggaaagaccatcacccttgaggtggaaagctctgacaccatcgacaacgtcaaggccaagatccaggacaaggaaggaattcccccggatcagcaacgtctcatcttcgccggaaagcagctcgaggacggccgtaccctcgccgactacaacatccagaaggagtcaacccttcaccttgtccttcgtctccgtggtggcatgcagatcttcgtcaagactctcactggcaaaaccataaccctagaggtcgaaagctctgacaccattgacaacgtcaaggccaagatccaggacaaggagggaatccccccagaccagcaacgtctcatcttcgccggaaagcaacttgaggacgggcgcaccctcgccgactacaacatccagaaggaatcaacccttcacctcgtcctccgtctccgtggtggcatgcagatcttcgttaagaccctcaccggcaagactantaccctagaagtcgagagctccgacaccatcgacaacg

SEQ ID NO: 217456 - DNA, 493 bp, Glycine max
  unsure (1)..(493): unsure at all n locations
gataattatatatcagctccacaaattgataacaaacagtagtaacattaatgggacaatagagttcaacacaaaccaaacttattttcaaaggtcattacagacccattacacatcacatttcttcttaaaatgtttgggaaaatccaacatcgaacatcacacagaaatcagctccagcttaaaaccccccacgaagacgcaacaccaagtgcagagttgactccttctggatgttgtagtcagcgagggtccttccatcctctagctgtttgccagcaaaaataagcctctgctggtccggtgggattccttccttgtcctggatcttcgccttcacattgtcaatggtgtcggagctctccacctcgagggtaatagtcttacccgtaagggtcttgacgaagatctgcataccaccacgaagacgcaacaccaagtggagagttgactccttctggatgtngtagtcagcaagggtacgtccgtcctc

SEQ ID NO: 217457 - DNA, 465 bp, Glycine max
cgcaaccagcaatccaagagtgccgtgtatggtcttgaccaattctcagatttgagtgatgaggagttcagaaccaccatcctcatgaagaacaccttgcccattgacaacagcgcccccgtcccctttgttggctcaccctctgccccagctacctttgactggagatcctctggtgcggtcacagctgtaaaagatcaagagcaatgcggaagttgctgggccttctccgcaactgaagccatcgagtctgcttggatccttgccaagaaggcaactaacaactcagttgacctcgctcctcaacagatcgtcgattgtgacagacaagacggtggatgcaatggtggatggcccagcagcgccatggagtacgttcacagcgctggtggtcaagaggatgagagccactacccatacaccgctaagaccgaaactgcgcgttcaacttcgttacgtcaagcg

SEQ ID NO: 217458 - DNA, 485 bp, Glycine max
agccgtaatcgaattctattatattttaaattacacaaataaatcgttacgtaacatcacgtgtaaaagatacatttaaaatttaattataaaaatattataactttaatataattataaaaatactaaattatctttataatgtgggccaagttgctttggcagtaagagcgcaggtatcacctcccatagcaaggtagatgtatccaccatatccccaaccatttccccatgagtttctcacaatccagtaaggagtagacgcggccgagttgtatccaacaagttgaacacaatggtctaattggcaggaagtgcagcattctctagaggtcaaaactccaccttggtatccattccagctggaagcatcaacacagatggagagaggtcccaaagcgagcaagccagcttgaagagagttctcgtccttaggggtggcagccactttgtaagcattaatcttcgctttgacgtaagcggag

SEQ ID NO: 217459 - DNA, 540 bp, Glycine max
ccgattgcaagcaatggactccttcaattccttcttcgattcaacaaaccgatggaattacgatactctcaaaaacttccgtcaaatttctccggtcgttcagaatcacctcaagcaggtttattttactctgtgtttcgccgtggttgctgcggctgttggggcttaccttcatgtcctcttgaacattgggggttttcttactacagtggcatgcgtgggaagcagtgtttggttactctcgacacctccttttgaagagaggaaaagagtgactttgttgatggccgcatcactgtttcagggtgcctctattggacccttgatagatttggctattcaaatcgatccaagccttatctttagtgcatttgtgggaacatccttggcctttgcatgcttctcaggagcagctttggttgctaggcgtagggagtacctgtaccttggtggcttggtttcttctggattgtccatccttctctggttgcactttgcttcttccattcttggaggttcaacagctctctttaagttgag

SEQ ID NO: 217460 - DNA, 570 bp, Glycine max
tttaacaagtgtcaacactgtatagacagctgttttaagtattacagtccaagggagttgaagtgttaactgagcagattggtaagaaaatcaatctctcctcttctttttcttctcattcctctcagccgaattcttcaacataataacaagaatccggacaaaaactgcaaccaaatcggtaaacaaggtcaaggcatgctttacatagtccagatcgcccaagtgtgccctctcaactatttcttgggtgtctactacaatgtaacctacaaacaccaaaagcccaaagtacaactcaaacttaaagagagctgttgaacctccaaagatggaagaagcaaagtgcaaccagagaaggatggacaatccagaagaaaccaagccaccaaggtacaggtactccctacgcctagcaaccaaagctgctcctgagaagcatgcaaaggccaaggatgttcccacaaatgcactaaagataaggcttggatcgatttgaatagccaaatctatcaagggtccaatagaggcaccctgaaacagtgatgcggccatcaacaaagtcactct

SEQ ID NO: 217461 - DNA, 550 bp, Glycine max
ctcgagccgatcatctctatattattttttaaaatatccaacatttgtaatatatgaaaacttattggctctttagaactaaaatttgaatatttcaaaaatataaagaccaaaacttacgattctgaaattcgtaagatatgaaaactaatgattgaactaaaagcaaataggatccatttttaagagactataaaataatgcttttaaaaataaaactaatgattgaactactgaagacactaattaaatttatatttttaaatattatctaacttttttttcgggcacgtcttgtgcttgaaaatggccatcttcaataagaatattcactttccttaaaaaaataataatattatctaacatttgaagtaatgaaataatataaaatcgtaataagaaaccaagatataaaaaatgtaaattaatataaatgattaaattgtgtgttttataaattaaaaattaaaattaattgataaaataatttatacctgtgtaacctttaagatgtgtttttatttttcttaaaaatatttaagattaaatt

SEQ ID NO: 217462 - DNA, 577 bp, Glycine max
caatatgtcggtagcaatcatgtttgaaatacatttataattatatttaaatcataaatcaccaattatgacgttgataactaaattatatcttctcatattagcattttgattattgtgttacataatggttctgcaatccggatttcaattccacgctttctcttaataaatatacccatatggtcatatcaataaactctagttctttttaatttcataaattgataagtcatcggacatccgttatattttacaaaacaactattaattaccaaaaataatcggccactttagttatgatggcccaaaaatttagttatgatgttattataatctatttaattaaaccttatactaaaaaaactctatataattaaatctttcctaaataatataatactaatgtttttttttaattctgttttcaaatgtaaatgtccaacccttttttagaaaataagttttgaaattaaataaactgaaaaagaaaagttgaggcagatgcaatctctcaatctattaagcttaattaaaaaaatatcgtacggattaatcatattttaacataatttta

SEQ ID NO: 217463 - DNA, 542 bp, Glycine max
  unsure (1)..(542): unsure at all n locations
tgatgataagattgtgggtgctgtatcgaaatctgttttcacggttgatgagaaagagcgtgagaagaatgttgaagaaacatatgaggctcttcagtttcttgagaatgagctgaaggacaagaagttttttggaggagaggaatttgggttggtagatattgctgctgtcttcatagcattttggatcccaatttttcaggaaatagcagggttgcagttattcaccagtgagaaatttcctatactctacaaatggagccaagaattccttaaccacccttttgtgcacgaagtccttcctcctagagacccactttttgcctacttcaaagcccgctatgaaagtctttctgcttcaaaatagacttatttaaggatatttgttgaacaacttgtgtcttgttgagttattgctgtttgaatttcatgtaaaatgatactagctatatgtaaatcccagaaaaaaaaaaaaaagaatctctaggatcttgtttcgttctggccatttcagttaataaagaaattatttntctcgattt

SEQ ID NO: 217464 - DNA, 554 bp, Glycine max
atatcgaaaaatataatttctttattaactgaaatggccaaaacgaaaacaagatcctaggattcttttttttttttttctgggatttacatatagctagtatcattttacatgaaattcaaacagcaataactcaacaagacacaagttgttcaacaaatatccttaaataagtctattttgaagcagaaagactttcatagcgggctttgaagtaggcaaaaagtgggtctctaggaggaaggacttcgtgcacaaaagggtggttaaggaattcttggctccatttgtagagtataggaaatttctcactggtgaataactgcaaccctgctatttcctgaaaaattgggatccaaaatgctatgaagacagcagcaatatctaccaacccaaattcctctgctccaaaaaacttcttgtccttcagctcattctcaagaaactgaagagcctcatatgtttcttcaacattcttctcacgctctttctcatcaaccgtgaaaacagatttcgatacagtacccacaatcttatcatcactcgagccgaat

SEQ ID NO: 217465 - DNA, 493 bp, Glycine max
ataactcgtagtcacaatggcaaacgacgctctccaggtcaacttggacaacaactcccagttgggtatcacccaacatggctctgactggctctgggcagtcttcgccgtcatgctcttcaccgacttgattgtcattggatggcacttcaccgtccctcgaggacaacgattgttccaccagctcggtgcgattatcttgaccactgccgctatcgcctacttctcgatggcctccggtctcggttacactcccattgccactgagttcgcttacttgggctaccccgttggcactctccgacagatctgggtgagtgcgcttgaaatcgacagtgaacatctttgctgatggcggtagtacgtccgatacatcgactgggtgatcactacccctgctcttttgctagagttgtgccttgcctccggtcttcctttgtccgacattgtcactctgatcttcttcgacttggtcatgaatatcactggtctc

SEQ ID NO: 217466 - DNA, 536 bp, Glycine max
  unsure (1)..(536): unsure at all n locations
atggaatgcaagagttttatgtgcacttccatggacccaatgagagtccttatcatggaggtgtatggaaagtaagagttgagctgccagatgcttatccttataaatctccttccataggctttatcaataagatctatcacccaaatgttgatgagatgtcaggatcagtttgtcttgatgttatcaatcaaacctggagtcccatgtttgatcttgtcaatgtgtttgaggtgtttctaccacaacttcttctgtatcccaatccatcagaccccttgaacggagaagctgcagctttaatgatgcgtgatcgagccacttatgaacaaagggttaaagagtactgtgagaagtatgctaaacctgaagacataggagctgccacagaagagaactccagtgatgaagagctaagtgaagatgaatatgattctagtgatgaacaggttgctggtaaggcagacccctagccttgcatgcatgttcctgttcttctcattctatcttaacttgngcatgatgttctagtcatg

SEQ ID NO: 217467 - DNA, 401 bp, Glycine max
aaaaaacaggaagggaaattttcccctttccacaaccaagtccatttcatttaaggggggaaattaacatgactagaacattatgcccaagttaagattgaatgggaaaaacaggaacatgctttcaagggttggggtctgccttaccaaaaacctgttcattactagaatcattttcattttcacttagcttttaataactggagttcttttttgggggagctcctatgtcttcaggtttagcatacttttaacaggactttttaaccctttgttcaaaagggggtcgatcaccccttattaaagctgcagcttttccgttcaaggggtctgatggattgggatacaaaaaaagttggggtaaaaacaccttaaacacattgacaagatcaaacatggga

SEQ ID NO: 217468 - DNA, 425 bp, Glycine max
  unsure (1)..(425): unsure at all n locations
aatcaaattagttcattctctttgcgcagttccctacctctcctttcaagatgcagatcttcgtcaagaccctcaccggaaagaccatcacccttgaggtggaaagctctgacaccatcgacaacgtcaaggccaagatccaggacaaggaaggaattcccccggatcagcaacgtctcatcttcgccggaaagcagctagaggacggccgtaccctcgccgactacaacatccagaaggagtcaacccttcaccttgtccttcgtctccgaggtggcatgcagatcttcgtcaagactctcactggcaaaaccataaccctagaggtcgaaagctctgacaccattgacaacgtcaaggccaagatccaggacanggagggaatccccccagaccagcaacgtctcatcttccgcggaaagcaa

SEQ ID NO: 217469 - DNA, 474 bp, Glycine max
gataattatatatcagctccacaaattgataacaaacagtagtaacattaatgggacaatagagttcaacacaaaccaaacttattttcaaaggtcattacagacccattacacatcacatttcttcttaaaatgtttgggaaaatccaacatcgaacatcacacagaaatcagctccagcttaaaaccccccacgaagacgcaacaccaagtgcagagttgactccttctggatgttgtagtcagcgagggtccttccatcctctagctgtttgccagcaaaaataagcctctgctggtccggtgggattccttccttgtcctggatcttcgccttcacattgtcaatggtgtcggagctctccacctcgagggtaatagtcttacccgtaagggtcttgacgaagatctgcataccaccacgaagacgcatcaccaagtggagagttgactccttctggatgtagtagtcag

SEQ ID NO: 217470 - DNA, 610 bp, Glycine max
  unsure (1)..(610): unsure at all n locations
atgaaattcgaacaatgattttttcattttctttttaatacttttttggtttagactccctaagaatctgtcgatatttccaattaaatcttcttgttcctgtgaaggtcctataaaaaaaagggctatgccctttctttactcagaagggccttattccaagttccaccaaacaagtttttattcatttgaaacatctttttttccgaatacaagaaaaaattcatttcaatttcaattatttctataagataaaatcgatatagatagattttatcttatagaaataattgaaaaatacattcaattatgtcttcgcgtatcaaatattttcttttcatatcgatgcgtacgatatttttccagcaattaatgtatgtgagacagaaactttcacttacagttttttctttttaatattgtatttcattttttttaataattaataaaataataataataatgaataaaaaaatcaaataataattaataaaaagaanaaagtgtaaatcaaatagaaatttataaaatctatgatcctagagagttccctagacaaaatagaagtagttcacaaacaagattcaagaataagattctctgatgaaag

SEQ ID NO: 217471 - DNA, 458 bp, Glycine max
cgaataaaaaataatttatgagtctattgatatctagggcaaatcgatgaactcaatgtagttattcctttctattcttaaaaatcctccaagtcataaatcataaaatctcctatgactcaaaaatccgatagaaaatttttttaaaagaactgttcaagaaacaaatgatcccctctttcactccttatacccagcggatcctcagacatatttctctcctttcatcagagaatcttattcttgaatcttgtttgtgaacttacttctattttgtctagggaactactctaggatcatagattttataaatttctatttgatttacacttttttctttttattaattattatttgatttttttattcattattattattattttattaattattaaaaaaaatgaaataccatattaaaaagaaaaaactgtaagtgaaaagttctgtctcacata

SEQ ID NO: 217472 - DNA, 560 bp, Glycine max
  unsure (1)..(560): unsure at all n locations
ggagttgtgttgcttgaactattgtccggtagacgagccgttgacagatcaaaagccggtgtagagcagaatctagtagaatgggcaaaaccatatttgggtgacaaaagaagactatttcggatcatggacaccaaattgggaggccaatacccacaaaaaggagcctatatggcggccactcttgctctaaaatgccttaatcgtgaagccaagggaaggcctccgattacagaggttttacaaactcttgaacagattgcagcctcaaaaactgcaggaagaaactcccaattagaacaaaagagagtccatgctcctgtcagaaagtctagtgtgcaaaaggggtcccatttgaatcatactcctactgcattcccataatctgcttgtgtactctgaattttgaacatctgtatatacattccttatttttataaggttggttntgacaaggagaaatgctagggaacacactcttagacatactcttttgaacacatnctctcttgtagttgaaattattgaaaatgacanattttgtgagtcttacatatgtt

SEQ ID NO: 217473 - DNA, 581 bp, Glycine max
ctttcgcttctgaatcttcaacaatggtgctcgaggcgacgatgatctgtatcgacaattctgaatggatgcgtaacggtgattactctccttctcgatttcaagctcaagcagacgctgtgaatctcatttgcggtgctaaaacgcagtctaatccagaaaatacagtgggagttctcacaatggcagggaaaggcgttcgtgttttggtcacccctaccagtgatctgggcaagatcttagcctgcatgcatgggctagatataggtggtgagatgaacctagctgctggcattcaggttgcacaactggctcttaagcatcggcaaaataaaaaacaacagcagaggattattggctttgctggaagccctgtcaagcatgaaaagaagatgttggagatgataggaagaaagttgaaaaagaatagtgttgcacttgatattgctaatcttggtgaagaagatgaggggaagacagagaagctggaagcactcctcgcagctgttaacaataatgataccagccacattgttcatgttccatcttgtcctaatgccctatctgatgtacttataagt

SEQ ID NO: 217474 - DNA, 576 bp, Glycine max
aaaagccctcgtcacatgataagcaccaaccaagaacaaggcatgataatcaagaacattttaagttaaaaatcatccaatattcaatcgagagacatgcattggttccaattaaagtgcagagagacacattgaaacatgcgtaaatagttcccccgattagtaacagccgcgaagaatgctaccaagaaaataaaaccatacagggcaaagtggttctcaaagattacttcttctcctcctcgtttgatggcttgtcgtcattcttctgttgaggctcagactgattttgcatggaagccagcaaatccttgacagaagggtcatttgggtcaaccccaggaagcgatgcaaggatagaagatacaaaggattgatcggccaacaatttgctcatgtctgactggctgccttgatcctttgtactatctgctattgacaattggagtgccagagccaagtcaggatcacttgcagaagcttctgacatatctgtatcttttacatcatggctaatggcaggatcatccatagacattgcaagcgcctgctgtagtaaggcattctcatcatcca

SEQ ID NO: 217475 - DNA, 449 bp, Glycine max
  unsure (1)..(449): unsure at all n locations
cgggatgttcagcctccacaaaagcatgcatatacggcatccagtacggtgacagttcgttctccgttggctacttcagccgcgagcggctctccgtgaccgccaccgacatcgtcgacaacttcctcttcggttgcggccaaaacaaccagggcctctttggtggctccgccggcctcatcggcctcggccgccaccccatctccttcgtccaacaaaccgccgccgtatatcgtaaaatcttctcctactgcctccccgccacctccagctccaccggccgcctctccttcggcaccaccaccacttcctacgtcaagtacacccccttctccaccatctcccgcggctcctccttctacggcctcgacatcaccggcatctccgtgggcggcgccaaactcccagtctnctnctncaccttctccaccggcggtgcaatcatcgac

SEQ ID NO: 217476 - DNA, 402 bp, Glycine max
ttttttttttttttttttttttttttttttttttttttattttttatttattttttttattatatttatttttaaataattaaaattttataaaaaaaaaaaaaaataagaagaaaaaaaaaaaaaagagagaaaaaaaaaaaaacatacataagggaggaaaagaaaaaaaaaaaaaaaaaaaaaagggggaaaaaaaaaaaaaattaaaacccaaaagaaaaagaaaaaaaaaaaaaacaagggagggaggaggaaaaaaaaaaaacccccaaagaaaaaaaagaaagaaaaaaaaaaaaaaaaaaaaaaacaaaagaaaagacaaaataatttgcaaggaccaggggaaaacacaaatgtaaaaaaaaaaggaaaaaaaaaaaaaaaaaagggccaacg

SEQ ID NO: 217477 - DNA, 615 bp, Glycine max
cgaaactgtcatatcgaatcaattccgattattcccggactggtcggcggccgccctttttttttttttttttgatcactcaattgcaaaaccagaggttctagaggggattttttacagacccatattagtattcaaccaagaaaacatatacacaggtaaaatccaaaccaaacccactaaataattgcaatcctaaatttgtaagtggcagtccaaatataaatctccctactggcctactcttcttttgcctaatggataaacagattccaacaacacatacacagacaccaccctacagctaatccttgttgacacaatcagtgttacagtcagctgtaatttaatactacacgaaacctaaaaagaacaaagttcatgaatcaccaccagcctcagcgacaggatgatcatgttgacgtacaaactgccccttcacccgaggccgctgctctgccagtcttttccggctttgatatcgaacctttttctcgaagcatctctctttccgcttcagtcgaaacttcactagcactgcttctctttgactggagcgatgaggatctgtcactctaaatccatcataattatgacaaccactatcactgaaac

SEQ ID NO: 217478 - DNA, 377 bp, Glycine max
gaggcggccgccctttttttttttttttttttttttttttttttttttttttttttttttttttttttttttttttttttttttttttttttaaccaggaaaaaagcaaaagcccttaaaaacttggggcaggggcacggttatctaaaccaaaaaacgggggttgacataataagaacgggctttaaaaaacccggtgttcaaaaaatagggtaactttaaaaccgggaaagggggtaataaccaatggggggttatccaaaaaaagggggaaaaaaacccaatctagcggaaggcgggggcttaaaaaaagcctgggattaggggttttaaaccatttccccaaaaaattctaagagcccagaaatttttcccaa

SEQ ID NO: 217479 - DNA, 467 bp, Glycine max
gaactcgcacataatcttcttcttccttctcgattttcctcttcttcgaccttttctagggtttcgattcgttcaccaaagcgcgtctgtggtttctcttctcttcacgattttggggtcgaagcttggagtttagttttgccggcatgtccatgagtgagcgcaagactattgacctagatcaaggatgggattttatgcagaagggcattttgaagctgaagaacattctagaagggcttcccgagcctcagttcagctcggaggactatatgatgctctacacgaccatatacaatatgtgcactcagaagcctcctcatgactattcccaacaactgtatgacaagtacagggaatcatttgaagagtacatcgtatcaacggtattaccatctttgagagagaagcatgatgaatttatgttaagagaacttgtaaaaaggtgggcaaaccataaaattatg

SEQ ID NO: 217480 - DNA, 472 bp, Glycine max
atttaaagggctgacgagaaaatgagtgctggaggtaaaaaaagaaacactttgaaattcactaccacttgcgccgtagctgctggtagatctatgatcatagatgcttcatatgctggtgaaagggatcttcactatggagggaagattctcaagaggaagaatcagaagccactctatgaagccctgcaaaaaattaaagaagagttgatgctattgggctttatttctctgctactgacaataacacaaaatgggataatcagaatttgtgttccagagggttggactcaccatatgcttccttgcagtctaaaggatcatggaaaggaagaattaacaaaaaccacatcacattttcagacttttttctctttctctgatatttctggcactgctaggcgccttttagctgagagtgagagtgagaatgaggatcaccaaccagcaacaggagaaaaacttggacact

SEQ ID NO: 217481 - DNA, 509 bp, Glycine max
  unsure (1)..(509): unsure at all n locations
gcgctgcgccatcccctactcatacgtcaaggagcgcgcgggtcctctgaagcccggtgtcgacaccgtggaggaggccgtgaagaccgtcgtggctccggtctacgataggttccaccttgtccccggcgaggtcctcaaatacgcggatcggaaggttgccgagttagacagccacgttccctccaacgtgaagaaggtctcctcccaggcctgctccgtcgtctctgaagtccgccgcgatggcgtctccgcctacgccaagaccgtttactccaagtacgagcctacggcggagcagtgcgcagtgtctgcatggcggaagctcaaccagcttccgctcttccctcaggtggccaatgttgtgttgcccaaggctgcctattgcaccgagaagtacaacgaggcggttgtttcctctgctgagaaaggttacagggtttctgcttatctttctttggtgcctactgagaagatcgncaaagtcttcngtgggaactgatctcgat

SEQ ID NO: 217482 - DNA, 396 bp, Glycine max
gagtaacattattctatattattatatagtaattaacaaaacagaacattcacatcatcatatatccaatccaactcacacactaacagtagcaactagcaacaacactttgtaaagaaagtaaaaacaataagaaattcaaaaccgcaatagatcgagatcagtttccaccgaagactttggcgatcttctcagtaggcaccaaaggaagataagcagaaaccctgtaacctttctaagcagaggaaacaaccgcctggtggaacttctgggggcaataggcagccttgggcaacacaacattggccacctgagggaagagcgaaagctggtagagcttccgccatgcagacactgcgcactgttccgccgtaggctcgtactgggagtaaacgg

SEQ ID NO: 217483 - DNA, 469 bp, Glycine max
cgcactctgtgttttcagcgccgtctccgatctccgacaatggcgacccaaatgagcaagaagagaaagttcgtagctgatggagtgttcttcgctgaactgaacgaggttctgacaagagagttggccgaggacggttactccggcgtggaagttagggttacgccgatgcgcaccgaaatcataattagagccaccagaacccaagctgttctcggtgagaagggaaggagaataagggaacttacctctgtggttcagaagaggttcaagtttcccgagaacagtgtcgaactttatgctgaaaaggtcaacaataggggtctttgcgctattgctcaggctgagtctcttcgatacaagctccttggtggactcgctgtgcgcagggcctgctatggtgtttagaggtttgtatggagagtggtgctaagggatgcgaggtcattgtgagtgaaaaatgagagcc

SEQ ID NO: 217484 - DNA, 412 bp, Glycine max
gataaatattattcaaatgacttaaaatacttgtaactgagtataacaatttcttcaaaattttgaacatgtcttcaacaacaaacattgcattcaagaaaaactaggcactaagctaatatgaattactcctccagcgtataacttttcaagcaacagggacctcaatatcattagcggccaaaactggagcaggctggatgtattcttcttcctcctttggagaatggattgcgacaagatcaggaaggggagttttaggaccctgtttccccttaggatcccaatcaagcctgatctttaccttaatgccaagaacaccctgtctcaggagcacatgtctcactgcagagtccatgttatctttgacaggttgcccagaagaaatcatgtgcccatccttaaacttcat

SEQ ID NO: 217485 - DNA, 435 bp, Glycine max
aattcaatgaagatttggttcatcctacacgtacacgtcatgggcatcctgcttttctatgttatatagatttgtatgttactattgaaagtggtgatattatacataatgtgactattccaccaaaaagttttctattagttcaaaacaatcaatatgtaaaatcagaacaagtaattgccgagattcgcgcaggaacatacacttttaatttaaaagaaaaagttcgaaaacatgtctattctgacttagaaggagaaatgcattggagtaccgatgtgtaccatgcatcagaatttagatatagtaatgtccatatcttaccaaaaacaagtcatttatggattttatcaggaaaatcatacaggtcccggttcagtctttttttcaatccgaaaagatcaagatcaaatgaacattcattatctttctact

SEQ ID NO: 217486 - DNA, 468 bp, Glycine max
  unsure (1)..(468): unsure at all n locations
ctcactagtcggcggccgccctttttttttttttttttttttttttttttttttttaccgttcttggtggtatcaacacggcactgtgtcgggatatcttatccatttctccgggaaaatagatatccccggaaaatatttttaattcaatctttttttttttcttctccaatcggaccaatccccttactcgacttcttatatttaaagggattagtgtatctacttcaacgatactattgttccgtaccattatggaagaagattctggtaaaatatgcacttcctcgggaatgaaaaaaaattgatctactttaatttggtattttggcttaaattctttaactccttgatactcaattaaaaaatcctcttttttaaaaatggaatttatacctatagtcctatatntagtaattcccgagctctgtgttcggtattgaggatcatcgaaataagcaagaatgc

SEQ ID NO: 217487 - DNA, 517 bp, Glycine max
cttcctctcccttctcttcttcctctatctctacatccagttcctcgctagaaaaaaaccccgcaacaacaaagccttcaaagactaccctctcatcggaaccctaccggagttcctcaaaaaccgccaccgtttcctcgagtggaccacccaagtcctccgcgactcccccaccaacaccggcgtcttctctcgcccctacaaactccacggtatcttaacggccaaccctgacaacgtggaacacgtgctcaaaaccaaattcgacaactaccccaagggagaacgcttcatccacctcctccaagattttttgggtaacggaatcttcaactccgacggcgacctctggaaggtgcagcgtaaaacagccagctacgagttcagcaccaaatcgctccgaaacttcgtcgtcgacgccgtcaccttcgaactccaaacgaggcttcttccaattctctccaaagcctctgaaacaaacaaggttctcgatttgcaagacttgttggagcgcttc

SEQ ID NO: 217488 - DNA, 458 bp, Glycine max
attctaactaatgatttcattaaaacagcagaaattacaattattttgcagagtggtggaagacaggtacatgtggagagaatattcctgaccctagcattcattcattccttactcttacactcacaggcaaccctcctttgatcctcatcgtcaaagacaaaacatgctccggacacgtgtccttatccaaagcctcaatctcaaacctctccaataacgaagctgcaattgacttcatctgaatataagccatttccttccccagacacattcgtggacccgcgtgaaacaccggataccgaaacggactctcggctcgattctccaaccacctttcgggcttaaattcggtacagtccttcccccacacgctctccatcctccccatcgcgtacgtgtggtacgtcacgaaccaccccttcccaaccctagttccgtcccgcaatacgtcgtcg

SEQ ID NO: 217489 - DNA, 543 bp, Glycine max
  unsure (1)..(543): unsure at all n locations
gttgaatataacatttacaggaagtgctgggcagtcatttgcatgctttctgactcctggaatgaacattcgccttgttgaagaggccattaaggtgggaggagccaaccacagccatgccactcaagaccttcatgattcaattgctgctggtaactatcctgagtggaaactgttcgttcagacaatagatcctgagcatgaagacaaatttgactttgaccctcttgatgttactaagacttggcctgaggacattatacccttgcagcctgttggtcgcttggtcctgaataaaaacatagataatttctttgctgagaatgaacaacttgcattttgccctgccattgtggttcctggtgtatactactcagatgataagatgcttcagaccaggatattctcttatgctgattcacaaaggcacagacttggaccaaactatctgcaacttcctgctaatgctcccaagtgtgctcaccacaataatcatcatgaaggtttcatgaatntcattcacagggatgaggaggtcaatta

SEQ ID NO: 217490 - DNA, 510 bp, Glycine max
gcgacccgtgtccgtgcgagtcaattccggaattaattcccggactagccggcggccgcccttttttttttttttttttttttttttttttttttttttttttttttttttttttttttttttttttttttttttttttttaaaactaacaaaaacaaacgggattttttggaaaagggcaacggggtgcattcatggggttttggggcccccccacattattttgcaagaaaagggtttgttctttcagggaatccaaaatcccattcttaatggcccctttgcccgtttgcaactttaacaattattttggggggggcaacaaccttaaatatttggccccgggctgaaaaaaaaagcttttttttggcccaaaaaacgggcagcctgaaacccgtttgatatcccaaccctggggatctcaggggggaccccgggggcaaaaaaagcctcaacccatgggggagcaaaattattttgcctggaaggggcccaaaaccgggatttttt

SEQ ID NO: 217491 - DNA, 521 bp, Glycine max
attcatcttcggtcattttattttgtataataaaagaaagataataaagagaataatcatattaaatattaaatagaaaaaatggcccgatcatttatcaaaggccaatcttcggtagaagagaaggttcctttggaacacttatttctatttcagtataccgggtctctttctttcatttcaaaaaatttatagaatttcgattttgaaatgaaagaaaagtgtggggataaatataaatgacaaaaagatattggaacataatcttggaagagatgatggaagcaggagttcattttggccacggtactagaaaatggaatcctaaaatgtcaccttatatatctgcaaagcgtaagggtattcatattataaatcttattagaactgctcggtttttatcagaagcttgtgatttagtttttgatgcagcaagtgagggaaaacaattcttaattgttggtacaaaaaaaaaagcagcggatttagtagcacgggctgcaataagagctcggtgtcat

SEQ ID NO: 217492 - DNA, 521 bp, Glycine max
aaataccgcgactaatcacataaaatttgtgtttgttctttttatatttatattatttatatttttattttttgtacaatttattactagtatagtaatcgattccctaaatctatgaacccctccaactaaatccaataatttttttattttattattaatcaagaatttcgtatatagctagaacggccctcacaaattgcaaatactaatttgttaagaattaatcgaattgaggctatagcatcatcattagctggaattgaaatatcggcgaggtccgggtcacaatttgtatcgattaaacaaattgttggaatttccaaagttatacattctcgaagagccgtatattcttcttgttgatcgacgattattacaatatcaggtaaccccgtcatatatttaatgccgccaagatatgtttccaaatgagctaaatgtctcttcaatatagcggcatctctttttggaaaactattgagtctccccgtcttttggtgcattctcaagtccctgaa

SEQ ID NO: 217493 - DNA, 458 bp, Glycine max
gctgagttgagttgagttgagttgagaagcctctcacaccaaaccaaaccttattcaattctctctctctctctctcatatcgagaatccaacagcaacatggcggaatcgtttgagcttccgaatcggttagcaatccttcctttcaggaacaaagtccttttgcctggcgccatcatccgaattcgctgcacttcccccatcagtgtaaagttggtggaacaagaactttggcagcgagaagagaaggggttgattggcatcttaccagtacgtgatgctgctgctgaaattcagcccgcgggtccagttatatctcacggcaaaggtaccgattctctagaccaaaactcaaaagttcaagggtggttcatcagattctcaaaagcttgatgtgaaaaatcagcatgatgttgttcattggcataacaggggggtagctgctcgagcactacact

SEQ ID NO: 217494 - DNA, 493 bp, Glycine max
cttgtactcactcaatccgagaccaaaacggcgccatgcctaccgtcagtgtggggcgggatcgcctgtttgcggctctaggaaagacttacacgcaagaggaattcgaagacttgtgcttcagtttcgggatcgagcttgacgacgtcacgacggagaaggcaattgtgagaaaagagaagcatttggaggaagaagaagctgatgaggacgaagaagttatctacaaaatcgaagttcctgccaacagatatgacctcctgtgccttgaagggcttgctcaagccctccgagttttctgtgagttccaggagattcccacttacaaactgtccaagatcagtaaggatgcaatgctgaaaatgcacgtgaagccggagacttctctgattcgtccatatgttgtatgtgctgtattaagaggtataacttttgataaagcaagatacaacagctttatcgatctccaagacaagcttcaccaaaacatatg

SEQ ID NO: 217495 - DNA, 479 bp, Glycine max
gaaagaaagagagaaaaaaaatcaatgatatagaattctaatatgtaaaggtctatgggttatctcataaaaggtagtgtaataaagcatcaatctaaatcaattcatatctatttatatatgaattaatttataacgtaaacaaattaagagctctgaatcaataaaaactgagaatattgattcacgaaaaaacaaatcaatattcgaaaaaaaaaaagattattaattttaagatatgagaaaggctccattgtcgaattcagacctaaccattaatcgagaagtgatgggaacgacgaaacctgcaaatacttaagattttattaaaaacaaatcttaatgattcattaggtgggatggcggaagaaaccaaaaagcaatcctttttttagggagttgcgccctacattacatctgaatttgattgataataaaagagtaaatattcgcccgcgataattttgattttattgaat

SEQ ID NO: 217496 - DNA, 521 bp, Glycine max
  unsure (1)..(521): unsure at all n locations
acgttctattatatatatatctatctatattctatatatagatatattgtttaggttatcaagtattaatctgaaataaataagaattgctgcttctaatacttataataattactacaaattctaataattactacaaaagggatatatgttagataaaatagattaattaatctatttcacaaaaaaataatgtatccatagcacagtttcgtcttataatacctcgggtgctaatgaaactattttagtgaaatttaactgtctcaattcccgggcgattgcacaaaagattcgagttccttttggatttccttcttgatcaatgacaactgcagcattatcatcatactgaattattataccgttgctacgtttgagttctttacaagtacgtacaattacagctctgatcacttctgatctttctaagttcgtatttggtactgcttgttngattacagcaacaacaatgtcaccaatataagcatatcgtcgattactagctcctaggattcgaa

SEQ ID NO: 217497 - DNA, 509 bp, Glycine max
attttatccaattgaaattttaaaaatgactgggataaacttaagaattcaattattgaaattgaataagtaaacaatttaattggattggtcgaatggtatcaaaaaaatggagtactaactcccatttcttatttattattgaattaaccgatcaacttgctttgttatcgaacatttctttttgatttcaaaaattttccggaaaaaatttgaatctatttttatatgcgaatcaatcctactacttctggtcctgaggtttctgcgcttgaaaaaaaaaaatctgggacgtatcgcccaaataattggtccggtactagatgtagcttttcccccaggtaagatgcctaatatttacaacgctctgatagttaagggtcgagatactgttggtcaacaaattaatgtgacttgtgaagtacagcaattattaggaaataatcgaattagagctgtagctatgagtgcgacagaaggtctaatgagaggaatggaagtgattgaca

SEQ ID NO: 217498 - DNA, 287 bp, Glycine max
agttattccgaatttcggacccctaaactgggtatgaaaacccattggaggcctttactgggggcctaactgggttaaaacctaaattggcccaaatgggtgggcttttgccttccgccttattaaaaatagctttgggtttttaaaaaattggctgggctttttggggaacaagggcacaacccttttccggataatttactaaaacggggaccccattttgggttattttagaaaaaccgcccatcaaggcctttgttaaccattgggttttaaaaaaacgtttt

SEQ ID NO: 217499 - DNA, 505 bp, Glycine max
  unsure (1)..(505): unsure at all n locations
cccatggcttcgatacggacgacggccagctcttatggtcgcctggtgtgtcgcgcgtgccgacggcctgcggtcgtacagtcatacgcgaagccagcagcatggcgggctctgtctaccgaagggcagcaaaagctgctctctgccaacctggaacaggccgatccctcagtgtttgacattatccgcaaggagtagagacgacagaagcacttcatcaatctcatcccctcggagaacttcacgagccaggctgtgttggatgcgctggggagtgtgatgcanaacaaatactcagagggatatcccggggcacgatactacggcggcaatgagtttatcgatgaagcagagatcctctgccagaatcgagcattggagacnattccgggtgcagaaggacacatgnngagtaaaacgtacagccgctgtctggctcgcctgccaatctgtacgcttactcggcggtgctcaacacccacgaccgcattatgggcctcgatct

SEQ ID NO: 217500 - DNA, 418 bp, Glycine max
agtggtagagcgtcagtcagcttcaccgacattaagtcggaacagacaatcgtgttacacagctacttgccaattcacacgctcgagaagtgctactacgaagactcggtccatggcaaggagaatgtgccgacccagtcctcgacctctcgccgcagctcgatgatctcaaccacttcctcgccctccttcacgtactccttgaacgccgctacgctccctgggttcttgcggccgttcttctcggctgtctccttagccttggcgtccagggtcttggtgatgttgacagctctgtccacgatgtccgcgacgcgcttgaagtcgccagtctggaagccacgcgttgtcattgctggcgtgcccatgcgcaggccacctggcttcaaggcgctcttatcgccaggcactgtattct

SEQ ID NO: 217501 - DNA, 519 bp, Glycine max
tggtggtgccttatcgctgtggttatcatcttcttcttgctctttcttagatctcttctttctctacgccgtacgccgaaaccatggccggaaaaggagagggtcctgctatcggaatcgatctcggaaccacctactcttgcgttggcgtgtggcaacctggccgcctttaaatgattggccacgaccaaggggacctaaccactccgtcttacgttcgatttactgaccccgagcgtctcattggtgatgccgccaagaatcaagttgccatgaaccccattaacaccgttttcgatgccaaaaagttgattggtcgttgattcagaggttcctctggtcatagagatatcaaatagtggtctttcaaggtcattcctggagctgctgacaagccaatgatcgtggttaactacaagggtgaagagaagcaatgtgccgcataagaaatctcttcatggtgctcatcaagatgcgtgagattgctgacgcttacctaggctctacagtgaagaatgc

SEQ ID NO: 217502 - DNA, 580 bp, Glycine max
caagcattaaaaacttgaattatcgtgtatacttaaagagaataacttgccaataaaacatacacatatgatgactaaagacaagatatgtcatttaacaagacagaataattcctacaggtaaagtgcataacaattgagtataccatctaataatgaaaataacgcaaataacataatgcttaaagcaacgttcatatcagaagggaaaaatagtttgaatcccatccaacaaaaatcatgcgattaaaatccaattaaaaaaagcataaagtaaaataagtgtttaaaacaggtatctggaggaaagcaactacatttagtccacttcctcaatcttggggccagcaccactttcaccagaaggaggagcagcatactcatgctctgctgcaccagcaccacccacgtctggaccagcaccaccttggtacatcttggcaatgattggattgcagatgctttccaattacttcattttgtcctcaaactgatctgcttctgcaagctggttgctgtctaaccactggattgcttgctcaattgcatcctcaatcttcttcttgtcactcgggtcaag

SEQ ID NO: 217503 - DNA, 467 bp, Glycine max
  unsure (1)..(467): unsure at all n locations
gtctacctcctgcccgtgtttnnnnntntnnnnnnnnnnnnnccnnnnnnnnnnnnnnnnnntnnagctgcgnnggnactgaatnccttaatcgagtccagtattcataatctttgagttgatatgggcaactggagcagtgaacgtcatcaaaccactcaacaaagtgatctcggtgcagttttgcgtgatggaaaagaagtacttcttcaagcattcaactgggagtccaacaaatacaactggtggaataatttagaaggcaaagtttctgacatagctaaagcaggatttacttcagtctggttgccaccaccaacccactccttctcacctgaaggttatactccgcagaacctttactctcttaatagtaaatatggttctgagcgtcagttaaaagctttacttcaaaagatgaagcaatacatagtaagagcaatggctgacatagttattaatcatcg

SEQ ID NO: 217504 - DNA, 551 bp, Glycine max
aggtactaatagaaattttattattaatttattttacatatatgacatagacaaagctgcttatttttattgttatgtattacataaacaaagcagctactgtaaattagttatagttacatactgtttatttaactgggtagcacgtaagttgaaaggaaattaaagagctttccaaagcctgcgagattaaggaaatagcttcaattttatcaagcttaagactccagaagcatataagcacgtaattcctttctcttctctgtgattccagtggagaagggtcatgacatgccaacagaacactacttgtgccacacagcataattgtgaccagaagttgatagtgtccattccctcccagttgggcaccatgaaccatttccaatcttcatgcacaccttctctccgattactgcagagtaaaggtcgtgcttggcctccagaattctcacagatgatctactttgaataccttgacgcttgcgaacatcaatcaacttcacaatctgctcccgaattgaatcaccccagtcatagaagtggtcata

SEQ ID NO: 217505 - DNA, 458 bp, Glycine max
ctcagtgaaagagaatccgaggcgaagagaagagaaaaattaagatggaggggaaggagcaggatgtgtcgctgggagcgaacaagttcccggagagacagccgattgggacggcggcgcagagccaagacgacggcaaggactaccaggagccggcgccggcgccactggttgacccgacggagtttacgtcatggtccttttacagagcagggatagcagagtttgtggccacttttctgtttctatacatcactgtcttaaccgtcatgggagtcgccggggctaagtctaagtgcagtaccgttgggattcaaggaatcgcttgggccttcggtggcatgatcttcgccctcgtttactgcaccgctggcatctcagggggacacataaacccggcggtgacatttgggctgtttttggcgaggaaagtgtcgttgcccagggcgattttctac

SEQ ID NO: 217506 - DNA, 429 bp, Glycine max
aaaataaaataaaaagatgcatatttgactcgggggttatttttgattttgcaaattacacaatcacagccgtacattacacgtgagctgggccttttccaacttaaaagccgaggataacattggcccatgacgcaacacatgccccacctaataatcataattttacatttttacatacaaaatacaaagactttaaattaaaattaaaaaaaaaaagattaaccgatcattttgatgaaatgaaaccgaaacccaaaaacattggtttgattttttttggtggtcccaacttgattaagcatgaacggtttgattgaatcacttggacttgaagggaatggccctgattaccacctggtggtaaagtgcttcaagtgcaccaccaatgaaaggtcccacccagaagatccagtgatcatcccaacc

SEQ ID NO: 217507 - DNA, 532 bp, Glycine max
cagcttggtcaactcaggtgcgtcctgcaacaactctgttggctgatgggtgtccatatttgtatgctatggtgcatgatagttcagtgtctacaataccaggtgattttgtcattggtgttaagttgacaaccataaacaatatgtgtgcatatgggctcaatcctggtatttcaggttctcgtcttttgggcaccattcctcagtctatttcacagcaaactgtttggaatcaaatggcaacagtgagaacaccattgaattttgattctagcaagcagagcttttgtcaattttctattgaccttctcggtggaggaattttagtggacaaaactggagattggatcacacttatacaaaattctccaattagtaacttgttgagagttgctgcttggaagaaaggctgtttaatggttaaaattgtgatgtctgggaatgcagcagtcacaaggagtgattgggcctcattggacaagtgtttttaacaaacagcaacagtacagagcatttcgatgcatgtaagtgg

SEQ ID NO: 217508 - DNA, 543 bp, Glycine max; identical to SEQ ID NO: 217402

SEQ ID NO: 217509 - DNA, 583 bp, Glycine max
aaaaagaaaagaaaagatgattagtgcacaataatttctattatttagatgaatttggtcctcaggagggtcatgggcatggccatggatgctttccagcaccaaactctcatttccatcattctggccatgttagtaggcgtgttgatttatggcttaaagagaacacatagtggccatggcaagatctgtagtgcacctcaagcaggaggagcatggccaattattggccatttacacctctttgggggtcatcaacatactcacaaaacacttgggataatggcagagaaacatggaccaattttcacaataaagcttggatcatacaaagttcttgtattgagtagctgggagatggccaaggagtgtttcactgtccatgacaaagcattttctaccagaccctgtgttgcagcctcaaagctaatgggctacaactatgccatgtttggcttcactccttatggtccttattggcgtgagataaggaaattaactactattcagcttctatctaaccaccggctggaactgctgaaagacacaagaacatctgagtcagaagttgcaataagagatc

SEQ ID NO: 217510 - DNA, 528 bp, Glycine max
aatacactgaagctccattaaaaagtgaaccatgagtacataatcattatactacattgcagctgcattaaacatgttattgttattaaccgatttcaggacctagaggaccccttcccttatttttgagaaaactagcttaatataatctagttctcataaagtttggtgtctagacgtggagttaggagaatttcaagcggggttgcttttaaatttgtgagtccaatgctctctgtcatgtccacaacttgatttgaaggagaagcaacattgaaagaatgtaacagtctagccatggtcaagtgcaccacacgcagagccagcgaggctccagggcatgctctccttccagaaccaaaagggacgagctcatagttctgacccttcacatcaacatctttgtggcttgtcaagaaccttccaggcttgaaatcatgaggatcactccaaacacgaccatcccggtggatctttcaagcattcaccattaaacgtgtaccagcaggaatgtgatagccacctgag

SEQ ID NO: 217511 - DNA, 560 bp, Glycine max
  unsure (1)..(560): unsure at all n locations
gtttttcaaagggatacaccttcaagacttggatgcagcagcatatgaagagcaaacagctctaccattcaacctcgcaacacactcagagtttggagctggtgcttctcaagttggagaaggtgaaatcctagatgaagttattactagaagccgtggcgagtttaggcacactagcagtcccaagatcacaagctccaccccaacaccaagaactgatactaacagccatctaagcccacgcctctcatttagttctcgcatgggtgagttcaaaactgagcagagtcctcggtctggtgcaagaggtcccctcagtccaaaggcaggagaagtgagattatcacatctgggaagaagtcctcttaatccagattcaaaacaacatgaccacaactaataattaaacctagaagattgcagtcgtatgccttagaaggactacttaggaggcttatttgtagctacatttccattctagtttgttccttaattntgcttgtcatggntgtaactnttaaagtcctttcccttgtcccatatacgacagatatgagcta

SEQ ID NO: 217512 - DNA, 448 bp, Glycine max
ctatgtatctatataatcgaattgaaattacgattctatcaaatctttttatttactttttttttttttaagaaaaaagaaagttctaattattaataaattatatctatatatatatatatacagatagatattctatatcttttatcttaattaatatttgacccctccttataatgtgttatagttttctttatttttaggaacttatccattccttttttaatgtgcccgacaatccgaaagaattctgggggaggggtcatttcgtttttgatctagaataaatagagcttcaagaaatgagagaattaagaatacccacgagaaacactaatccaatccataatgatgtaccggaaaatacaacattttcggtattcgaccaaccttcaggagaagcaaattcaacaggtacactaatcaagtaaatccatgaaatagcaat

SEQ ID NO: 217513 - DNA, 374 bp, Glycine max
tgactaggtctgcggccgccctttttttttttttttctatgtatttatataatcgaattgaaattacgatgctatcaaatgttcaaatttactatatgattttttaagaaaaaagaaagtgctaattattaataaatgatatctatgtatatatatatacagatggatatcctatatctgatagcttaattaatattcgaccccttcttataatgtgttatagggcgctctatgtttaggaacttatccattgctttcttaatgtgcccgacaatccgaaagaattctgggggaggggtcatttaggaaccgatctataacaaatcgagcttcaagaaatgacagaattgagaatacccacgagaaacactaat

SEQ ID NO: 217514 - DNA, 481 bp, Glycine max
gagagaaagagatcacatagcagaatggcttctactcaatgtttcttgcaccaccatgctcttaccacccctgccagatccccatcacaacgcatcatggttagcaccaagcctaaccagcttgtttgcaaggcacagaagcaagaggatattgatgtcagcccaatctctcgccggttagctctaaccgtgctcattggtgctgctgctgttggctccaaagtccaacctgctgatgcagcttatggggaagctgccaatgtgtttggaaagccaaagacagacacagattttctgccatacaatggagatggattcaaactatcgattccctcaaagtggaacctaagcaaagaggttgagtacacaggtcaggttgttagatatgaggataactttgattcaaccaccaacgtggttgtcaccatcactccgactgataagaagtctatcactgactatggttcacccgaagagttcc

SEQ ID NO: 217515 - DNA, 528 bp, Glycine max
tactagtcggcggccgcccttttttttttttttttagacaacttcaaacatagatagcacttaaggtagatttacacatagcagatatatataaccagctattattgaagatttttaagcaacactgaaagaacttgctgcactctccacaaatcttcttgctcccttgaaccacctcttgtctccagcttgagccttgcaaatgaacagttttccatcttttacagttgctctaattatgtggtgcttgccaccttcatctccatcagcagtccttgtcaacacagacagaaaatagtacggcttcccatcaatcacaggtgttgccgtctctaagatgttagccgtggccaccgcatttggatcaaaaccaccctcggcttgtgtttcgccgaagaaggcctgttttcctagtaaataatccaccttagagaggaactcttcgggtgaaccatagtcagtgatagacttcttatcagtcggagtgatggtgacaaccacgttggtggttgaatcaaagttattcta

SEQ ID NO: 217516 - DNA, 444 bp, Glycine max
ctagttctaagatcgcgagcggccgcccttttttttttttttttaatattcaatttgcttgatatagatagatatagtaaacaagtataattatacatgatatgtttcaacaattgtgatacaaggttttgaatctatcactttttgtaatttacaaggtttgaatctaccacttgtaatgtcttgaaccctataaatatcaacagtaacacactcttgatggttcgtacttaattgcacatgaaatatatagtagtaacaaagtatagcaattatgcattggggtaagaagccaacattgctatgccacacaagccttctttagcagtaacatctctttgcatcctaatgtatcctttatcaccccactttactctccatgaattcttaaccaaccaatacttagttacatcatgacttactgcataccccacagcagtgaca

SEQ ID NO: 217517 - DNA, 606 bp, Glycine max
tcgcgatctagaacgggcaatgctcgcactctcgaagatgctccaatgcgtgagaggcatgagcagtggatggctatacatggaaaagtctacacgcactcttatgagaaagagcagaaataccagacattcaaagaaaacgtgcaacgtatagaagcctttaaccatgcgggaaacaaaccttacaagctaggcatcaaccattttgctgatctcacaaacgaggaattcaaagccataaatagattcaagggtcatgtgtgctccaaaataacacggacacccacatttaggtatgaaaatatgacagcagtgccagctacattggattggagacaggaaggagctgtcacacccatcaaggaccaaggccaatgtggatgttgctgggcattttctgctgtggcagcaacagaaggaatcaccaagctgagtactggcaaattgatttctttatcagaacacgagcttgttgattgtgacacatagggtgtggaccaaggttgtgaagggggtcttatggacgatgccttcaaattcatcttgcaaaacaaaggactcgccgcagagccaattactcttatgaggtgttgatggacatgcaat

SEQ ID NO: 217518 - DNA, 291 bp, Glycine max
gctcgagctcagtgaaagagaatccgaggcgaagagaagagaaaaattaagatggaggggaaggagcaggatgtgtcgctgggagcgaacaagttcccggagagacagccgattgggacggcggcgcagagccaagacgacgggaaggactaccaatagccggcgccggcgccactggttgacccgacggggcttacgacatgggacttgtacagagcaaggatagcataacttggggcccattttctggttataatacatgactgtttaaccgtcatgggagtcgacggg

SEQ ID NO: 217519 - DNA, 386 bp, Glycine max
  unsure (1)..(386): unsure at all n locations
gtttctcccggctctattcttganntcnccnnnnnnnccnnnnnnnnnnnnnnnnnnnnagctnnnnnnnnnctgantnnctnattttagtccagtattcataatctgtgagttgatatgggcgactggatcagtgaacgtcatcaaaccactcaacaaagtgatctcggtgcagttttgcgtgatggaaaagacgtacttgtttaagcattcaactgggagtccaacatatacaactggtggaataattcagaatgcaaagtttatgacatagctatagcaggatttacttcagtctggatgccaccaccaacccactccttctcacctgaaggttatactgcgcataacctttactctcttaatagtaaatatggatctgaacg

SEQ ID NO: 217520 - DNA, 550 bp, Glycine max
aggtacttatagaaattttattattaatttattttacatatatgacatagacaaagctgcttatttttattggtatgtattacataaacaaagcagctactgtaaattagttatagttacatactgtttatttaactgggtagcacgtaagttgaaaggaaattaaagagctttccaaagcctgcgagattaaggaaatagcttcaattttatcaagcttaagactccagaagcatataagcacgtaatgcctttctcttctctgtgattccagtggagaagggtcatgacatgccaacagaacactacttgtgccacacagcataattgcgaccagaagttgatagtgtccattccctcccagttgggcaccatgaaccatttccaatcttcatgcacaccttctctgcgattactgcagagtaaaggtcgtgcttggcctccagaattctcacagatgatctactttgaataccttgacgcttgcgaacatcaatcaacttcacaatctgctcccgaattgaatcaccccagtcatagaagtggtcat

SEQ ID NO: 217521 - DNA, 535 bp, Glycine max
gactaaagagagttgtggtgtggtggtggttgtcgtttttgaaatggcagcgtcgtcgtcagagaagcaagtggtggtgataggcatagacgacagcgagcagagcacgtacgcgttgaattgggctctggataactttttcccgagcccaattttcaagctcgttctcatccactccaggcccaccgccacctgcgctgtgggcttcgccggccctgtgtttgcaggagccgctgaggtcttgcctattgtagattccgatttgagaaagattggcgccagagtcctcgaaaccgctaaacaactttgcatcaacaaatccgtaaatgatgtgacagcagaagtggtggaaggcgatcctagaaatgttctttgtgatgctgtagataagtaccgcgctgcaatgttggttgtgggtagtcatggttatggggctataaaaagggcggttttaggtagagtcagtgactattgtgctcatcatgctcactgctctgtgatgatcgcgaacaagccaaaaatcaaacactgatct

SEQ ID NO: 217522 - DNA, 489 bp, Glycine max
aatggaattgaactcatcagttcaagaacttttcgtgtacaatgtaaggtaaagtcctgatacgtacatattttctgatggttccatctttaaaaataaactgtgcctcaacgtatcaaaccataaagtcaataagccatatccatacaacaagcatagttacgaatttctgtgaacattattctctttctctcttctttggctgaaaggattatgtttattgttgtactatatagacgcagccattacagatcagtgtttgatttttggcttcttcacgatcatcacagtgcagtgagcatgatgagcacaatagtcactgacactacctaaaaccggcctttttatagccccataaccatgactacccacaaccaacattgcagcacggtacttatctacagcatcacaaagaacatttctaggatcaccttccaccacttctgctgtcacatcatttacggatttgttgatgcaaagttgtttagc

SEQ ID NO: 217523 - DNA, 507 bp, Glycine max
ttattgagaagtattattaagacattttcagtacatcttttctaactgtttttttcttcttcttcttctcttggtatttctagaaaaagttgtagaatatatccatgaatagaaatagaattttgggtgcacgcagttttatttgaactgcatgcagagaatcatggatcctgttccgcgtgacgggtgttgctcatgtacacaggtacctgtagcttccctagtgggtaaaacaattggactctacttctcagcggaatggtgcgtcccatgcgccaagttcactcccaagctgatttccgtttacgagaagataaagcacgagctacgccaaaaagggagaggaggacttcgaagttgtgctaatatccagcgaccgcgaccaagcatcctttgactcctactacagcaccatgccttggttggccttgcctttcggtgacccagagatcaagaacctcgttagacactacaacgtgcaagggaatcctttgttggtgattatag

SEQ ID NO: 217524 - DNA, 516 bp, Glycine max
  unsure (1)..(516): unsure at all n locations
cgttcatacacttcttctgcaatacaaaaaaaattcccgcattagggtttcctttctccggcgacaatggaggtagctgcgaacgcgcggaaccccgccgttaagcgaaaattcgacgacgccgtttctaacggcgtcgccgcccccgccgacgtcgatctctccctcctcgaagccatcgagaagtcgcagaacgcggtcgaagccctcgatctccgagccctaaagaagcacgtgctctccttcgagcgtcgcctgaaggataacatcgaagcgcgccttaaataccctaaccaaccggaccgtttcgtcgattccgaagtagaactccacgaagagcttcagaagctgaaggtcctcgccggcgcgccggagctctacccggacctcgtcaacctcaacgtggttccctgcatcgtggaccttctcaaccacgacaacaccgacatcgncatcgacgtngtgcaattgctgcatgacctcaccgacgaggacgttctcgacgacaacgacgac

SEQ ID NO: 217525 - DNA, 543 bp, Glycine max
  unsure (1)..(543): unsure at all n locations
gatgctcaggagcagcacgctaacacagagtgttacagtcacctgtgttcatcacagtcacagacaatggttccaatcaattcccgtaaattatagattctgtgacgctgctcggaactctctatcatccaactccgccatcttcaagtggaaaagaacggttaattataatcgtaaccgttctggaatgggaaccttcaccacgcgcgcgttggcgcagccgctccagaacgccgacgaactcatcgattccgtcgagacatttattttcgattgtgacggagttatatggaaaggtgacaaattaatagaaggggtgcctgaaacgcttgacatgcttcggtcaaagggcaaaagattagtttttgtcaccaataactcaacaaagtctaggaagcaatatggaaagaagtttgaaacacttggcctgaatgtcagcgaggaggagatttttgcatcatcctttgcagctgctgcatatctgaagtccattgatttcccaaaagatnaaaaggtttatgtcattggagaagatggtatctt

SEQ ID NO: 217526 - DNA, 545 bp, Glycine max
gttgcctactttcagtcctcttaggaactagtattgattaataaaaataaataaggaatgaacaaaattcaatttacttcttaaatacatgacttttcccaccaccatttggggatactgtataaatattatagtcatacagctgcagctttcagggaaagaaaatctgaaattttgttggtatagaagtccggctgtatggagttgttagggctctgaagcatggccagtgtggtgacgcctgagagcacaagaagagttttgcaaccaccattttgtccaaacaagatatcagtgtctaatctgtccccaaccatacatatctgtgacttcgaaatgccaaatttgtttgccaagtaatccatcataaacgttgagggttttccaacaactaatggttcacgttgagtagatccactgatagcgccaaccattgagcccccacctgcccattcttgagcatctgtgagatgagtaacagcatctccgtttgtagcaatgaaaagacatccagggttttcacgtatacagagtgtcccatactg

SEQ ID NO: 217527 - DNA, 392 bp, Glycine max
tgagaggaagagggagtgagagagagtgttcttcgtttgctaccttctcccagaaatggttacgttcaggtttcaccagtaccaggtggtcgggagggctctcccaacggaagcagatcagcatccgaagatctaccgaatgaagctctgggccaccaacgaggttcgcgccaagtctaagttctggtattttttgaggaagctgaagaaggtgaagaagagcaatggtcaagttcttgctatcaacgagatttttgagaagaacccaaccaagattaacaactacgggatatggttgcgggatcagagtaggactggttaccacaacatgtacaaggggtaccgcgataccactctaaacggctcaagttgacgcaaagaacaatgagatg

SEQ ID NO: 217528 - DNA, 486 bp, Glycine max
gtaactttttgattcctaaattctctaaaattcgaaattctaatttcgttaggggaaagagattgtttgtgtgtgagtgagtatggctggaaaaggcgagggtcctgctatcggaatcgatttgggaacgacgtactcttgcgtcggcgtgtggcaacacgatcgtgttgaaatcatagccaacgatcagggtaacagaactaccccatcctacgtggctttcaccgacacagaacggttgatcggcgatgcggcgaagaaccaggtcgctatgaacccaaccaacaccgtttttgatgctacgcgtctgattggaaggcgtttttccgatgcatcagtacacggtgacatgaaattgtggcccgtcaaggtgattcctggccctgctgagaaacctatgattgtggtgaactacaagggggaggagaaacagttttccgcggaagagatatcctccctggttcttatgaaaatgaacgacattgc

SEQ ID NO: 217529 - DNA, 429 bp, Glycine max
gagcaaaaacttatatcattggtcaagtagaaacggggaaaagtacattaaaaaaaaaagagaaaaataaaatcgcaataaaaacataatgacacgctgatatctaaacttcaaaaggggctttgacaaaatcaagaacaacccatgagaatgttctgcttaatcgacttcctcaattttgggtccagcaccgcttacactgacagctgcaggaccatactcatccatggctgcacccgtatcaccaccagcaccctggtacatctttgctatgatgggattacaaatgctctccaactgcttcatcttatcctcaaattcgtcagcctcagcaagtcggtcttcatgtagccattggatagcctgctcaatcgcatcttcaattctgttcttatcatcagacgacagctcggaaagcaatcttgtcat

SEQ ID NO: 217530 - DNA, 489 bp, Glycine max
tcattttcagaagcctctttgggaatcaaatccgaagcatgatgcattgtgcgagcattgtctcggctccgtcctacgcgttcccttttctctctggctccgcttccactactccaactgcgatctcgctcactaagcgcagttggaagccacctccgagcatggcaaaaggcccagtcagagccaccgtttctatagagaaagagaccccggaggccaatcgtcccgaaacgtttctcagaggagtggacgaggcccagtcttccacttcggttcgggcccgcttcgagaagatgataagggaggcccaggacaccgtgtgcagtgccctcgaggccgctgatggtggggcccagttcaaggaggacgtttggtccaggcccggtggcggcggtggcattagcagggtccttcaagacggtgccgtttgggagaaggctggggttaatgtctctgttggttacggtgtcatgccacctgacgcatatc

SEQ ID NO: 217531 - DNA, 470 bp, Glycine max
acgcggatgactctagcaaaatacgtgatttacaatccacctagtacaacaagctaacattctgactcatcataacaagcacttgatatacaccgaaaaaagaaacaagctcccttattattaaattaaaaagctgacaaattggggggtcaactgatgaattagatccattccttggggttgatgcatgcgtccaagagtttccattcttcgcttccttcttccggtttatgatcgtattcccaccgagcagtcagtgggagagaaacaagtatactctctattctccctccagttttcagtccaaatgttgtacccctatcatataccaaattgaattcaacatatcgtccccttcgcaattgttgccatgctttctgatgatcattgaagggcatatccttccttttctctatgataggtaaataagcaggaataacagaatttcacattcagtagcaaagggaaag

SEQ ID NO: 217532 - DNA, 404 bp, Glycine max
  unsure (1)..(404): unsure at all n locations
caaaaaggtaaacttctgcaacaaccatggttgcaatggcagcagcaacagcatcctcccagttgattttctcaaagcctcgttcaccctcgcgtctctgccccttccaactatgtgtctttgacaccaaacaagtgctgtcaagttcaagtggcaggagaaggcatgtggggggttctggagttaggtgcatggcggtgggagaagctgcaaccactgagactaagaagagaagtggatatgagcttcaaacactcactaactggttgctgaagcaggagcaagctggggtgattgatgcacaactcactattgtgctgtctagcatttccatggcgtgcaaacagattgcttctttggtgcanagagccaacattttccaccttactggggttcaaggagct

SEQ ID NO: 217533 - DNA, 446 bp, Glycine max
ctatttctaagatcgcgagcgttccgcccttttgtttttttttttaatactcaatcgcgctgatataaaccgttataataaacaaggataacgatacatgatatttaccaacactagcgatccagggttgatgagtctatcagttattggaagttgcagggaatgcaactaccacttgtaatctctccacacctatgaatatcagcaatgacacacttttgatggttcgaactggagtgcacatgaaatatgtagccgcaacagagtatagcaattatgcatgggggtaagaagccagcactgctatgccacacaggccttctttagcagcatcatctgtttgcatcctaatgaatcctttagcaccccactgtactcccgatgaattcgaagccaaccaagacttatttacattatcgcttgctacattccctacggcagcgaca

SEQ ID NO: 217534 - DNA, 354 bp, Glycine max
tctcgatctataacgggcaatgctttgtctctggaagatgctccaatgcgtgagatgcatgagcagtggatggctatacatggaaaagtctacacgcactcttatgagaaagagcactagttccagacattcctagaaaacgtgcaacgtatagaatcctgtagccatgcggttaacactccttacatgctaggcatcaaccatgttgctgatctcacatactaggaattcaaagccatatatagatacaagggtcatgtgtgctccaagataacacggtctcccacattcacgtatgcaaatatgacagcagcgccagcttcattggattggacacaggaacgagcttgtaca

SEQ ID NO: 217535 - DNA, 570 bp, Glycine max
cgcaaatacgagaaggaacataacaccgcggaagcaaccatggccgaagcagaacacaacgatcccacctcgccggagcgcgaggtccaaaccaagagcaacaagaagaaactccgcaagagggacaggcctcacacgaccgagcagaaacgagatgaggacatgaacgatgctaacattgatagtgcccaaacacgaaccgccgatgaagaagaagaacataaagaagaagacacacacaacttctcatccggaatcatgagcaccgagtctttctcctctctgggcttgtccgaacccacttccaaagccattgcggacatgggcttccaccgtatgactcaaattcaagcgaaggcaattccgccgcttctgaccaggaaggacgttctgggcgcaccgagaacgggtgcgggaaaaaccctagcgtttatagttccggcggtggagttgctgtacagcattcagttcacgcctcggaacgggacgggtgtatgtgtgatatgcccgacgagggagctggcgattcatacgcacgccgtggcgaaggagctgcatgagatcactcgc

SEQ ID NO: 217536 - DNA, 532 bp, Glycine max
gtaggtagctcagttcagtgttactattgcttttcacaagtgcttgaaaattcatgatataattttcaacaacaaaagaataagcttacaaattcgaacatgggatgggacaccggtcgtcatgtggaatattacggttcaaaaatgcgcataacacattctaatttaaattttctgatgcttctaataaccaaggttgtttgataaagttacaaatccatctctttatataaaattggggtgcctaccaaaactttatggggtggtgtggtgtgggtgggagaatgtggggatcacaccactgcacgggcgtgagaaaatgccttttatcatcttctctttccttctactttgcgtatttccttcctatgctttgaagcactgctatctatgttcagattcaccttcggtgggttagaaaaacagaatgaagcagctacagcctgtaaatcaaggcggtgaacattgaatatatctttcatggagtgtgaattatatgctaatatatatgaccctattgcatctttagcca

SEQ ID NO: 217537 - DNA, 479 bp, Glycine max
gctgcgcagaagagagagaacgaacgaacgaacgagcataacaccctttaataatctgtggcagtgagtagtgatatgcagcaaggtgatccaacggtcctaagctcgaggcctgctggtggtcgtggcggcggaagcaggcttttaggacactcctccttctatctctgcggcgatctccctctctgccgacctgatgcctatttctctctcaagaccagagattcacggtttgagggtcatgagcgtgtgcgatatagcagagatcagcttttacagctttgagaggctgctgaggtccctgatgatatactaaagattaagcaagatatagaagctgagattttgggtgaaaatccaagttggggccgtgctgaaagcaatcttacttatcaatcacaaaatcggtattctgagccagataaccgtgactggcgtggtcattctggacaacttgctgctgattcagatgagaggtc

SEQ ID NO: 217538 - DNA, 529 bp, Glycine max
gctaaagctccaagtatgatcttacaatccttcaaaaattctgtttctttgtgtgtgtatggtgaggataacttaattagtgatcatgaatatgtcacgccttactttactggctctaaattgcacagctttctagctggtcataatatcaccattactgatggcattgacaacactagcgcaactttgctatttacaaagttggcatattgtgatcttctcaagagaaactttaagcagatgtctaatgttatgcgggtggctcctgcggataacgcgagtctatggccacaacttcattatgtcccgtgtcataatctggacatgcaagaagcttatcttgactatctcgtaaatgtgttacgagaattgtatttgcacagtccagaggaagctcgccaattgagaaggaaagctctctctcgtattgcatggctgcaaaaagctgatgtgcctaccatagcacagattgaagagttccattcgatgcagaggatgatgaatgctcctgcatcaaatgataatattg

SEQ ID NO: 217539 - DNA, 513 bp, Glycine max
aaacacactcattgcacatagtaatgcgctttatttaagtgaataaaatattacatactagttcacaaatgcaaaaggacactcatcaaccagatatttgagactcttacagttctcaagaagtcgcgtcagcatagggttagtggcgttagaactcagaatttcattcttaacgccaaaaagaacagccagtaaagctactggaaaaggatcaactctagtaagaaaaacaattctcttacctctcccaagtgctgagcgaatccttttgttgatatctgaggagcgattgttaactgcagaactaatccaagcagtggtgggtaaaccaccacgtacactaccacatgtaacatttacaacgacagcttctgaaggtaattgacttacaggataaagacaattcacaaaaattggtgaccaagaatccactggaaaatttccatcacagaattcttgcgtgttagccaacacaagcttatcatcaaaaacaatcttgtttggaaaagcttt

SEQ ID NO: 217540 - DNA, 580 bp, Glycine max
  unsure (1)..(580): unsure at all n locations
gggaagggctcaaagtctggggcttcaatgacctgtgctggttgccagggtactggcatgaaggtgtctattaggcaccttggtccttctatgattcagcagatgcagcatccttgcaatgagtgtaagggtactggagagacaatcaatgacagagacaggtgccaacagtgcaaaggagagaaagttgttcaggagaagaaagtacttgaagttgttgtggagaagggaatgcagaatggacagaagattacattccctggtgaagctgatgaagcacctgatacagtcactggggatattgtctttgtcctacagcagaaggaacacccaaagttcaaacgaaaggccgatgacctttttgtagaacacacattgtctcttactgaggcactgtgtggcttccagtttgtgctggctcacttggatggccggcagcttcttatcaaatctaaccctggggaggttgttaagcctgattcatacaaggcaataaatgatgagggaatgccaaactaccagaggcacttnctgaagggacagctctacattcatttctcagtgcattttctgataccct

SEQ ID NO: 217541 - DNA, 516 bp, Glycine max
cagcaacacaactccacttaccccctggattccgattccaccccaccgatgaagaactcgtcgttcactatctctgccgcaaatgcgcttcgcaagaaatcgcagttccaataatcgccgaaatcgatctctacaagtacgacccatgggaccttccaggaatggctttgtacggagagaaagagtggtattttttcacgccgagggaccgcaagtacccgaacggttcgcggccgaaccggtccgcggggaccggatactggaaggcaaccggagcggataaaccggttggcaaaccgaaacctgttgggatcaagaaagcattggttttttacgccggaaaagcgcccaagggagtgaaaactaactggatcatgcacgagtatcgtctcgccgacgtggatcgttcggttcgcaaaaagaacagcttaaggctggatgactgggtgctgtgtcgaatttacaacaagaaaggtgcaattgagaagcagcaaccagcaccgtcaccaccgagtg

SEQ ID NO: 217542 - DNA, 536 bp, Glycine max
  unsure (1)..(536): unsure at all n locations
ccacacaatttatttaatatcaaactattaattgcgactagatcatgtaaacagttggattcatcatgttcatatatgaatgcttctcttttttgtttttttgtttttttataataataatcatctacgcgcaccagcacggacacactcacggacattcactcagtctcgtgcttccatgcaatgcagcaggcacgtcaaaaatgcatcatgcacacacaaagcaaagaacgacgtcgtgccgtctcgtgcgtgttgatttcagaagggcctggagaggtacatgaagatatcctggagcggcgacatctgattattcccgagagtggcatccatgtaattatacgaaaactcgctgttgccctgcctcttccgctcgctctgcacctcgctcgcaaactccgncgacaccacctgctccgaacagctcgactccgtcgtgtgcagccgcggcaccgagtctgaagcctcgaagtacaggcaatccgccgccgtatactccggcttcacgtcttccatttcgtaacattcaattt

SEQ ID NO: 217543 - DNA, 495 bp, Glycine max
ttagattggtgaccaaattgttgaatgaatggggttggtgttagaagcagttttccatgtgggttttgattttcatgtgctgaagacttcataactcactgtaattgatagtggtaaactgtgaactcagttggttataacttgctaacaggcagaaagttgttgaagtccctcaattgtgcttccctgcatcctttcccaaagtctctgtctggtgcaatggtttatataactgagtgggacaagtttgtggagcaatccattgagctgttccgtgcagatcctgattctacacggtacgtcatgaagtacaggcactgtgatggaaagttggtactcaaggtcactgataaccaacagtgtctaaagtataagacagaccaagcacaagaggctaagaaaatggagaaactgaataatatgttctttgctttgatggctcgtggtcctgatgttgatctatcagaagtcactggaaaagagcaaatggatgct

SEQ ID NO: 217544 - DNA, 578 bp, Glycine max
gttccaaacttcttcttggaatgtcccttcctaaataaccctcaaacaaaagccaccttaacatctcttctctgaaaattctctttagagagatagagagatagagagagagagaaagaaattaagaaaaaatggcagcctgcactgtctactcaacacaatctctgagcacaaattgctccatctcaaccccatcaaagacacagctgagtttcttccaccaaaagcaggtagttttctggaggaacagcaacaggggcaacagcagcagcagaagaagctatgtgataacatgtgcagcaggtgactcacagacagtggtgattggtcttgctgcagactcagggtgtgggaagagcaccttcatgaggaggctgacaagtgtgtttggaggagcagcagagccaccgaagggtggcaaccctgactcaaacacactcatcagtgacaccaccactgtcatatgcttggatgattaccactctttggatagaactggcagaaaggagaagggtgtcactgccctagaccctagagcccatgattctgatctcatgtatgaacaagttaaagctctt

SEQ ID NO: 217545 - DNA, 419 bp, Glycine max
atcaacataactgaatctcagcctcacttttttttctcggataagtacatacatacatacatatgtgtttttttcattaattatgatgcagaacagcctaataacaatagacaaaataacatgaaacacagtgaaattgtggaaaacatgaaagaagaaagaaaatgatgattttgatgagaactaatgcaatttgactgcgtcgctcggtcgatatgtatatatattattatggcaggttcaattcaattcctaagcttttgcagccactggagtctcagccttggtggctattagctgctcatataaatctcttatcttcaaaccaactatggtttggaagagacctgttccattgttgctgccggggaaatcagcatgcttcaacatctgttgagtaacctctccatagaactttg

SEQ ID NO: 217546 - DNA, 550 bp, Glycine max
  unsure (1)..(550): unsure at all n locations
cacctttgttcactcttcttctcttgcggctagggttttagcgcagcttcttctagatttaaggaagatgggtaaggaaaaggttcacatcagtattgtggtcattggccatgtcgactctgggaaatccactaccactggtcacctgatttacaagcttggaggcattgacaagcgtgttattgagaggtttgagaaggaagctgctgagatgaacaagaggtctttcaagtatgcctgggtgctggacaaacttaaggctgagcgtgaaagaggaatcaccattgatattgctttgtggaagtttgaaacaacaaagtattattgcacagttattgatgcgcctggacatagggatttcattaagaatatgattactgggacatcccaagctgactgtgctgttcttatcattgattcgaccactggtggttttgaagctggtatttccaaggatggacagactcgtgaacatgctctgctttcattcacccttggtgtgaaacagatgatttgctgcttgtacanaatggatgctactacacccaag

SEQ ID NO: 217547 - DNA, 357 bp, Glycine max
ggaaccctacaaaaagaaaggggacatttaaaaaaccaaaggaacacaacgcaaaaaagtcctgaaactcggtgggcttaaaaaaaatggaatcgggggttccgacaaacacaacccattaaaacccagataaataaaagcaattttgcccccggggatcaaaaacccagttttgggaacaacagttgccaaaagatgggggggacttaaaactttgtccgaaaaacaagcttccttgaaaagaagaccccagggtcccgaaaagaaacccacctttattggacccaaaattccctgatgaaccagcccggaggattcacttttttttttgggcaaccttggggaccctggttccgg

SEQ ID NO: 217548 - DNA, 515 bp, Glycine max
ggatctgaattgtgttgagcaggtgatactgtcacgttgtttgcatcaagcagagaggcagttcctgtaaagatactttgcaaacctgtactggaagtagagacaccagaagtaacattctttatgccagaggaaggaggcagagatcctttgactgatcctagcttaattgtatctgaggcaggtgatgcagaaatctgggggctattgtcagttacaggagttggagaagcaatccatggccctcgaaggggggtttgggacatccaaggtgtgttatgtccaagaaaattcctcacaggagtagtttgataaggatgtaatggagtaattgcctgtggataatccacgacagaacctcttgcaatggcactagattgcagggaatcactacctagacctagagttgatagactccaaagtggagatgaaagaggtattaaggggtttacaattggtggagtagccttgctgctgagtcgaccaagtggcgaagagataccttttccttgagc

SEQ ID NO: 217549 - DNA, 540 bp, Glycine max
  unsure (1)..(540): unsure at all n locations
ctcgagccgattcggctcgagcaaacacaacaacactctctcttctcgctcttggcttttcgctcttcactcactctcattcattcatttccaccgttcatggatccagtaagcgtgtggggtaacacgcccttggcgacggtggatcccgagatccatgacctcatcgagaaggagaagcgccgtcaatgccgcggaatcgagctcatcgcctccgagaacttcacctccttcgccgtcatcgaggccctcggcagcgctctcacgaacaaatactccgagggcatgccgggcaaccgctactacggcggcaatgaatacatcgaccagatcgaaaacctgtgccgctcacgcgcccttcaagccttacacctcgacgcccaatcctggggcgtcaacgtccagccctactccggctccccggccaacttcgccgnctacaccgncgtcctcaacccccacgaccgcatcatggngctagatctcccctccggcggccacctnacccacggctactacacctccggcggaaagaagatc

SEQ ID NO: 217550 - DNA, 592 bp, Glycine max
tggtgatcatcttgctactggtgatcgaggtggtcgagtggttctctttgagagaacagatacaaaagatcatggtggatcacgaagggatctggagaggatggactattctattggtcggcatcctgagtctcgctcaaaacagagagtcagagtcatgagccagagctcgactatgttaagagttctggagactgaacagaccatcaacagaatcatatggagccaaacagctaatgacgccctgatccttatttgtacatatgataaaacgatcaacttttggaaggttcaagaatagaatgtcaagaagatttctgagatgaatgctgacccttcaaaatctatggggaatggatctattgctagttcatgcaattcaagtaagtctaggccatatcttgtaaatggaggatctccagatagatacaattatataagcaatgacttttcatttccaccaggaggcctaccatcactaagattacccatggtagtaagtagccatgaaaccagtttagttgctcgatgtcgtagagtgtatgcacacgctcatgattatcacatcatttctatttcaaataacagcgat

SEQ ID NO: 217551 - DNA, 586 bp, Glycine max
ctgagctgctgcttggacagcctctgttccctggtgagagtggagctgatcaacttgttgagatcatcaaggttctgggcactccaacaaggtaagagattaagtgcatgaaccctaattatacagaattgaaattcccacagattaaagcacatccatggcacaagatcttccataagcgcatgcctccagaggctgtagatttgttatcaggactactacaatactcccgtaacttgcggtgcacagcttttgatgccttgacgcatactttcttcgacgagcttcgtgatccaaatactctcttgccaaatggccgattccttacaccactatttaatttcaaatcccatgaactgaaaggcgtcccatctgagattttggtgaaattggttccagagcatgcaaggaagcaatgcccgtttctaggctcgtgaagtgttgtttccatatgagaatgctgcgctttccttctctatttaatatgatacttttgctggtatctatattggataccgctgccctgtaatagcagatttagagatacatgctactcattatcacccaacccccgatggttatgtag

SEQ ID NO: 217552 - DNA, 535 bp, Glycine max
gattataatataacatcgatcactttcacttaaggagtttaatatttgtccagacaagcaccaagacttcgtcccaagtcgtcctaaagagtggaaaaataaacatatgcccagacaaggccattacaacttccaaccaccacgctaagcataactaaattaaacaacaacccatcattgtctcaacaaatacaaatattgatgcaacatttagataattgcagacattttgtcctctattgtatgttacaatctgctgtgatacaggaaacagggtattctacataaccatcgggggttgggtgataatgagtagcatgtatctctaaatctgcttttacagggcaaccgaatacaataaagataccaacaaaaatatcatattaaatagaaaaggaaagcgcagcattctcatatggaaacaacacttcacgagcctagaaacgggcattgcttccttgcatgctctggaaccaatttcaccaaaatctcagatgggactcctttcagttcatgggatttgaaattaaatagt

SEQ ID NO: 217553 - DNA, 490 bp, Glycine max
gaaaaacaataaaaattcctttcttttccaactaaaaacaccacaagtacattgcttttcatttgaaagctaacatttcaccaaaacaatactacattgtaattgtaaaaaaatccaatcaaaagataaaagcagagactaccttaatatagttaattccatattttgaagaagatgcatgcacttaaagccagtgtagtagatttaatagtatgagagcttggcaatctgcccttgtccttccttaagaaaaggccttggtatattgggaaattgatgagaaccaaaaacccacacaatagaacttgcaatgccattttctcaccagtcaaagcaactttgcaaaggactaactgtttataacggctagtaagcaaaacaaatggagtaatgcaagtgttgctagtacagtgaaaaatggagaagaggttccaaactccatgacctcgttcttggtacgttgggaaacatcatcatcttctacaatctt

SEQ ID NO: 217554 - DNA, 520 bp, Glycine max
caatttcagaggcttgatggcagtacaaaagctgagcttcgacaacaagcaatggatcatttcaatgcacctggtagtgatgatttttgcttccttctttcaacacgggcaggaggtctgggtatcaaccttgctacagcagacactgttataatatttgattctgattggaatcctcaaaatgacctgcaggcaatgagtagagctcatagaattggacaacaagaagttgttaacatatatagatttgttacaagcaaaagtgttgaggaagatattctggaacgtgctaagaaggaaatggttctggaccacttggtgattcaaaaactaaatgcagagggtagactggagaagaaagaagccaaaaaaggaggaagttattttgacaaaaatgagctgtctgcaatcttacgatttggagcagaggagctctttaaggaagaaagaaatgatgaagaaagcaagaaacaactcttaagtatgaatatagatgagattcttgaagagcagataaaaa

SEQ ID NO: 217555 - DNA, 502 bp, Glycine max
  unsure (1)..(502): unsure at all n locations
caagaatctcatctatattcatacttaagagttgtttcttgctttcttcatcatttctttcttccttaaagagctcctctgctccaaatcgtaagattgcagacagctcatttttgtcaaaataacttcctccttttttggcttctttcttctccagtctaccctctgcatttagtttttgaatcaccaagtggtccagaaccatttccttcttagcacgttccagaatatcttcctcaacacttttgcttgtaacaaatctatatatgtcaacaacttcttgttgtccaattctatgagctctactcattgcctgcaggtcattttgaggattccaatcagaatcaaatattataacagtgtctgctgtagcaaggttgatacccagacctcctgcccgcgttgaaagaaggaagcaaaaatcatcactaccaggtgcattgaaatgatccattgcttgntgtcgaagctcagcttttgtactgccatcaagcctctgaaa

SEQ ID NO: 217556 - DNA, 538 bp, Glycine max
ctacacttcattagtttcacttaacatctcttgcttaaaccatgaggtgagtttatctgcattagagcgtctgcttgggaggtgtcggaacctgcggaccctccgtctcaatcgtgccgtgccccttgatagactacccaacctacttctccggtgtcctcagctggttgagttaggcacaggagtctattcaactgagatgcgaccggaggtcttctcaaacctggaagcagcattttctggttgcaagcagttgaagagcttgtctggcttttgggatgtgcttccatcctaccttccagctgtctaccccatctgctccaggctaacatcgctaaacttgagttatgctattattcaaagctctgatcttattaagcttatcagtcaatgcccaaatttgttgcgattatgggtgctggattacatagaagatgctggtctttatgcccttgctgcatcatgtaaggatctaagggagttaagggtgtttccgtctgagccgtttggtttagaaccaaatgtttcattgacagaa

SEQ ID NO: 217557 - DNA, 524 bp, Glycine max
cacctttgttcactcttcttctcttgcggctagggttttagcgcagcttcttctagatttaaggaagatgggtaaggaaaaggttcacatcagtattgtggtcattggccatgtcgactctgggaaatccactaccactggtcacctgatttacaagcttggaggcattgacaagcgtgttattgagaggtttgagaaggaagctgctgagatgaacaagaggtctttcaagtatgcctgggtgctggacaaacttaaggctgagcgtgaaagaggaatcaccattgatattgctttgtggaagtttgaaacaacaaagtattattgcacagttattgatgcgcctggacatagggatttcattaagaatatgattactgggacatcccaagctgactgtgctgttcttatcattgattcgaccactggtggttttgaagctggtatttccaaggatggacagactcgtgaacatgctctgctttcattcacccttggtgtgaaacagatgatttgctgctgta

SEQ ID NO: 217558 - DNA, 412 bp, Glycine max
gggaaccccacaaaagaaaaggggacattaaaaaaaccaaagcaacaaaaggcaacaaaggcctgaaactcgcgggggttaacaaaaaggtaaacgggggttcccacaaacacgacacattaaaccccagataaataaaagcaattttgcccccggggataaaaaacccagtttggggaacaaccgttggaaaaagagggggggaacctcaaactttggccgaaaaacaagctgcctagaaaagaaaaccccaggggcccgaaaagaaccccccctttatgggaaccaaagtcccctggggaaccagcccgcacgagcaactttttctttggggccaccttggggaccctgggtccggggggaacctttttatcacacgtgttggcgacccccacagaaacaggttgaccca

SEQ ID NO: 217559 - DNA, 542 bp, Glycine max
caacatccgctgttccaatggttccaagttttccgttcagattggcctcgattccaccgtcagatccttcaaggaggcggttgctcacaattgtgatatatcctctgatcaacagcgcctgatttacaagggtcggatcctcaaggatgatcaacccctccaaagctacggtttggaggctgatcacactgtccatttggttcgtggtttttctccttctaacaccactggtgggactaatagtggtggtggcgttggtggaaataccacaactgccaacacgagaggtgctggtgctaatgagggtgggggtttaggagggccaggatttggagcttcaccgtttcctggacttggtggtaacaatgggatggagggcggtggcctcaatggcttatttggagcgggctatccggatcttgaacaaatgcagcaaccatttttgtcatatcccaatttaatgagagatataatgaacacacctgctatgcagaatttaataaataatccagacatagtgcggaaatcttatatgaataacc

SEQ ID NO: 217560 - DNA, 489 bp, Glycine max
atctatgaacccaatccttgcaaacaggcaagttagaattacatgtatatggtacaaaaggctttgtactttcttgtagctgaaggtataattaatcattggatatttgagcattggatataatactaaactctggatatcatgtaaaatgaaaaaaaaatcaatagatttgtttgaacataactccatgacgaaaatcaaagctaaatggacaaatatctcacaccagattctagtgtttgggatttaattgctagtcttgtgtccctaccacctgctactgtccggggttccccaaaagccgctcaactgctgcatgtacgttccctgatgtagcaataagagcccttatgttctcttgcgtgtcaaagaaccccatctcttgaagctgagaaagttgggtggcatacaattgctccggtggctcatttgatctgttaggaacagccaggctaccagcttcaagtccaccaaacatgcttgataaca

SEQ ID NO: 217561 - DNA, 479 bp, Glycine max
caccaccgagaccttggtcatgggagtggcacctgttaaggctcaatttgagggtgctgaaatgggtgtgcccgctgagaacgatggctgcaaatgtggaccaaactgctcctgcaacccctgcacttgcaagtgaggtgttgggagagcaagcttcaagcagagatagcccttaattaggaataatgataaactattaatgtgtagctaaaaacttatgtattatgtctgagatggttttcgtgcactctggtgttttgtgttaaacaaacatccttagaataaagtggtcatgtcttgcctttcagcaagttcaagtgttttggacttgtgatgggtgtgttaagctcatggttgcttatttttttctttattgtaatgtccggaaactggtcgcttctggataaagttcggctaatctgaattatgaatctctgcttataatattaaatactattactggaaaaaaatgctgggcc

SEQ ID NO: 217562 - DNA, 413 bp, Glycine max
ttttatatattttttttttttttttttttttttttttttttgattttttttttttggtttattaattattttttttatgtttaattttataacaatatagattaatttacaaataaaattaaaaaaaagaaaaataaaatataaaaaaaaagaaaaaaaaaagacaaaaaaagaaaaaaaataaaataaaaaaaaaaaataaataaaaataaataaaaggcaaaacaaaaaaataaggagaaaaataaagaacacaataaaaaaaaaaagaaggaagaagattaataaagaagaagaataaaacgaaacagaagtattaaagagagaaacaaaataagccaaaataggaaggatcaaaaaacaaaacaaccctcaaaacaaaaagaaaggaaaaaaaaacgacagaaacagaa

SEQ ID NO: 217563 - DNA, 530 bp, Glycine max
tcggctcgagaacagaatgggcgtcgtggtgatcgacggcagcaccgtgcgcgacttcgtgaacgacgaaaccgccttcaccaagagcgtggacgagcagttctcggcgctggacctcaacaacgacggcgtcctctcgcgctcggagctccgcacggccttcgagtccatgcgcctcatcgagacgcacttcggcatcgacgtttccacgccgtcggagcagctcgcgaagctctacgactccatcttcgacaagttcgacggcgaccggagcggcgccgtcgaccgccgcgagttccgcgacgagatgaggaagatcatgctcgccatcgacgacggactcggatcgttccccataaggatggtcctcgaggacgatcccaatagtcttcttcagaaagccgcggatcttgaagcctccaagacctgaaatccaaacggtgacgttttgagttcggttcggtaatagtaattgattgtgctatcgggcgtacactttgctattcttttcttaaataaaaggggttatg

SEQ ID NO: 217564 - DNA, 582 bp, Glycine max
  unsure (1)..(582): unsure at all n locations
gataagttaataacagtgtcccttacattatacacagaacggaacctcagtttcgaaacacggtctctacataaacccttttatttaagaaaagaaaaacaaagtgaacgcacgaaagcacaatcaattactattaccgaaccgaactcaaaacgtcgccgtttggatttcaggtcttggaggcttcaagatccgcggctttctgaagaagactattgggatcgtcctcgaggaccatccttatggggaacgatccgaggccgtcggcgatggcgagcatgatcttcctcatctcgtcgcggaactcgcggcggtcgacggcgccgctccggtcgccgtcgaacttgtcgaagatggagtcgtagagcttcgcgagctgctccggcggcgtggaaacgtcgatgccgaagtgcgtctcgatgaggcgcatggactcgaaggccgtgcggagctccgagcgcgagaggacgccgtcgttgttgaggtccagcgccgagaactgctcgtccacgctcttggtgaaggcggtttcgtccgtcacgaagtcgcgcacggtgcttgncgcgatcaccacgacgccca

SEQ ID NO: 217565 - DNA, 554 bp, Glycine max
gtcgcccctcgcccgaatccacacgtcacgatggtcgctgtagatagtgcaaccctgggttttccccgcatgggtcccaatcgcgagcttaaatttgctcttgcaagattttggcgcaaccagattagcgaagatgagcttttccaggtggcacatgccgtggaagaagccaattggcgcaaacaaatcgacgcgggagtgagtcgtgtgggagtgggtctcttttcgctctacgaccacgtgctggactggacttattacctgggcctcgcccctgagcggtttgccaaggtacccatgggtctgtcgcaatatttcgcgatggctcgtggcgtcgaaggcatccccgcccttgacatgaccaagtggtttgactggaactaccactatgaagtacccgagcttagtgccaagtccacgcctaaggctaatttcagctcatatttgagcaacatgaagcgagctctggctatagttggcaccaataaggcagctcctattatactcggccctcttacatacttggctctgagcatgtatgacggtgcttctct

SEQ ID NO: 217566 - DNA, 588 bp, Glycine max
aacaacacggaaaaccacacctttattattcagattatccaaggtggcgagacatcctgctactaaggtctcggcaccttggccatgcctctacgacatgtcaagtgagcgaagctactgtagcaacttggcgcaaaattcgtcgataaaatctagtgagcttcccgtcttctcacggaaaatggcgaccatcaagcttacaacgtagcacggacttcgagggtagcatccaccatgttgcggagagcagcaatggtctcaggccacttgcgcgtcttaagaccgcagtccgggttgaccacgacttgctcggcaggcaggaggtttaagaaactcttgagcttcttgacaatctcctccttgggcggcaccacaggcgagtgaatatcgtacgtgccggggccaaggtcgcgcttgtagccgatagacttgaactcacgaatagtctcgtcatccgaacgagcgttctcgatcgagttcacgtcggcatcgatagcgtcgatggcgtgcatacagtccgcgaactcgcaatagcacatgtgcgtgtgaaatgagggctcgtttttgcaacaccagtcgacagacgga

SEQ ID NO: 217567 - DNA, 570 bp, Glycine max
caagattccttttgttcctatctctggttttgagggagacaacatgattgagaggtccacaaaccttgactggtacaagggtccaactctgcttgatgcacttgaccagattagtgagcccaagaggccctctgacaagcccctcaggcttccccttcaggatgtgtacaagattggaggtattggaactgtgccagtgggacgtgttgagaccggtgtcttgaagcctggaatggtggtgacttttgcaccaactggactgacaactgaagtcaagtctgtggagatgcaccatgaatctcttacagaggcacatcctggtgacaatgtgggattcaatgttaagaatgttgctgttaaggatttgaagcgtggttatgttgcctcaaactcaaaggatgaccctgcaaaggaggctgctaacttcacagcccaagtcatcatcatgaaccaccctggtcagattggacatggctatgcccctgtcctcgactgccacacttctcacattgctgtcaagtttgctgaactcatgaccaagattgacaggcgatccggcaagaacttgag

SEQ ID NO: 217568 - DNA, 530 bp, Glycine max
gaacactacaaatagaaagttgacatttaataaaccaaagcaacacaacgcagcaaagtcctgaaactcgctgcgcttaacaaaaatgtaatcaggggttccgacaaacacaacacattaaaacacagataaataaaagcaattttgccaccgtcgatcaagaacccagttctgggaacaacagttgcgagatgatggtggagacttcaaactttgtccgaaaaacaagctacctagaaaagaagacacaagagtacagaaaagaaaccaacatttattgtaaccaacatcccctgatgaaccagcccgcacgattcacttcttcttctgggcagccttggtgaccttggctccggtaggatcctacttatgaacgtacttgatgactcccacagtagcagttagacgcatgtgcctaacagcaaacctaccaagtggaggatactcggagaaagtttcaacaaccatgggtttggttggaatcatcttaacaaaaccagcatcaccgttcttcataaacttgggctcct

SEQ ID NO: 217569 - DNA, 548 bp, Glycine max
ggcgggtataagattaaagattcaacaatggcctctgcttctgctactcttctcaagtcatctcctgttcttgacaagtgcgagtgggtcaaaggccagacccttcgccaacctctcgtgagatgtaacccttgctcagcatcagctctcaccatcaaagctgcttcctatgctgacgagctcgtcaaaaccgccaaaacagtggcctcaccggggcgtggtattttggcgatggatgagtcaaatgcaacctgcgggaagcgtttggcatctattgggttagagaacacagaagctaatcggcaggcataccgtaccctacttgtgacagtacctggtcttggtgaatacatctctggtgccattctctttgaggaaactctctaccaatccactgtcgatggaaggaagatcgtcgacgtacttgttgaccaaaacattggtcccggtatcaaggtcgacacgggtttggtgcccctagctggttcgaacgatgagtcatggcgccaaggtctcgatggacttgcgactcgctcagctgcatacta

SEQ ID NO: 217570 - DNA, 510 bp, Glycine max
gaagtccaagattcgtaattgattggctagaagttcattaagtagaaaaggtacaagtaataatcatcattaaaaatagtgtccaagactatataaaccacaaacacaatttagacaaattaatgttggatccttgggttactgtagcatgtgtggcaagatgatcttagtaggagtaacctttgacgaacattccccgagtggcttcctcagattcaccctcggcagtgtactttccaagctgagcgagtgagttggacttggcacggaaaaggagtgcatcttgagcagccttcacgttctcagggagtccaccccatgtcttcaagcaggtgttttggagagctctggcgtaggagaaggacacgtgccatgggttaggagactaggtcatagcattcaagttcaaggttgcttcaacctcagatagtccgacagacagaaacatgattccagggacagcaggtgggattctcctgtgaaggagctcgagggtgtaatcagcaactt

SEQ ID NO: 217571 - DNA, 560 bp, Glycine max
atcgtcttctagggtaaccacagcgccactcgaacaagtgcggccattcccaacgcttctcttcctttctaaggggagtctgaatcccgtgagttttcaatatgacgtcgttcttgaagcctgagaatgctctgaaaagggcggaagaattaatcaatgttgggcagaagcaggatgctttgcagactctccatgatctcatcacctcaaagcgatacagagcgtggcagaagacacttgaaaggattatgttcaagtatgtggagctttgcgtcgacatgcgaaaaggccgttttgcaaaagatggtcttattcagtatagaattatatgtcaacaagtgaacgttagttcactggaggaggtcataaagcattttatgcagctttctaccgagaaagctgaacaagcccgtagccaggcgcaggcactagaagaagcccttgatgctgatgatttagaggccgatacaaggccagaggacctgatgttgagctatgtcagtggcgagaaaggaaagacagactgatcgggagactgtgacccatggttaagtttcttt

SEQ ID NO: 217572 - DNA, 531 bp, Glycine max
cagcttcctggagtaatgcttgtgcttcttcattttctctctcctctatctccctgaggatcctctgatttttcctctgctcaaactcagtggcaagccttctttgttccgcttcttcagttattttcagcagtcttagcctcttcgactcctcctcccgttccatttcaagaagctgtcgttcttgttcttctttccttttctcaataattgattttcgagcaagaagcctcttgtgttctttggccacaacctctgtcaaagagggaagtaaagctccaagttttgatgatctcctatcaggaggataaatcatctgtcttgctttatttaattgttcagcaaaattggccaagtgatcccttaagccatcagactcaagactctttttgcaaaaaatcacagcatttttcatgtggtcaactctcatcgatacaaacttctgcttaacagcatctaccgaaaccttttccacttgagagaaatcaaagaaggggatcatccccgataggtttcaatcttcatagattg

SEQ ID NO: 217573 - DNA, 506 bp, Glycine max
cagataacactcaacaataatcgaaatcgtgttttcctatgatacaagggagcgacgaggtgcacggaattggatccctgagcgcaacaataagaaaatccccaaaaggaaccctaggtggcggaaattcaagtagcatagttatagcaagagtaataatactaaaaaaagactcaataatcgtcatcactcaaacatcgatttagaaagaaagaaaagaaaagacaaaaaaaggagatagaaatagatccttcctagcacaagaaagaaaacaccaagtttatatccgagggattgattaaccgacttatctgcaagggtgaaatctcaatcgcgattcttcaagcgttcgagacgctggttcaagtggtcgatcctgacgacgaggttggagacggagtagaggagccagtagaagaggagtgcggcggcgatgaggagggcgttgcgttggctcttcatgatagatttctggtggcgaaagtgctcggaaggggtgcaggaat

SEQ ID NO: 217574 - DNA, 549 bp, Glycine max
agaggccataatggttattctcctcaccatcccgggcctggaagctctccgaaagggtctgatcgcggtgacccggaaccttctgaagccgttcctctcggtggtgcctttctgcctgttccttttcatggacatatattggaagtacgaaaccaggcctagctgtgagggagattcctgcaccccttccgagcaccttcgccaccagaaatctatcatgaagagccaacgcaacgccctcctcatcgccgccgcactcctcttctactggctcctctactccgtcaccaacctcgtcgtcaggatcgaccacttgaaccagcgtctcgaacgcttgaagaatcgcgattgagatttcacccttgcagataagtcggttaatcaatccctcggatataaacttggtgttttctttcttgtgctaggaaagatctatttctatctcctttttttgtcttttcttttctttctttctaaaatcgatgttgagtgatgacgattattgagtccttttttagtattattactcttgctataactatgctactt

SEQ ID NO: 217575 - DNA, 406 bp, Glycine max
gaggatacctgatgacactctgactgggaagggcgctatcggcgtgtatatgcttgaatgagccgacatgcctcgttgagacgtggataaactatcttcgatacatgcctgaactgggtggtgaatcactggcaggcatgagagcaaccaggagaactgccatcatgtattagccattgtaaatgaatgcgacagtgatggcagcagtggcttggagcatcatgggagcaagctataccgtgagaacagtgttggattagagccatgcctgtggcttgctgattagctaagcatgcatgaatggtgtaccctagaaggcgagagatcagtgtacctgagcattactcgcttactgtctgacccgagaatcacggagcacggtgatttccgcgtgcatcattatgga

SEQ ID NO: 217576 - DNA, 454 bp, Glycine max
acatgcaacaatttaagcaaatcgataagaccagtctatcaaatgtgcatgagcactcgatcagtgagcaagaacgcactatgtcaagggtggcaagaaataatgtaactatatagtatagtatacggatcgataccttatatatcacagagcggtcattaaggggccttagctgatgatgcgggctagttccctttagacgaaggaacttatccatcattgtcttactgggcgagcttgaccctaggaattctgagggcagaggtagtattgagagtgatgcctagaaaagggaccgttctcacgggccagactgaagcaatgcttaaagaaacgctgtttacacaacatgctgaggctccacgaaatttcgcgagaacgagattgcactcgccttgaggggaatcaaacccctcagcgccactcatccgttgattctatgacatcagacgga

SEQ ID NO: 217577 - DNA, 498 bp, Glycine max
gtttcttacaaggctctactctactgcttcaccttctgctctagaaaattcagtggtgatacatggcttcggctactctctctgtagccaaaccagcccttcaggcaaatgggaaaggcttctctgaattctctggcctccgcagctcatcaggcttccttcccttttctagaaaatcttcagaggatttccattctgtcattgccttccagacctatgcagttggaagcagtggaggatacaagaagggtgtgacagaagcaaaactgaaggttgccataaacggatttggaaggattggaaggaacttcttgaggtgctggcacggtcgcaaagactcccctcttgatgtcattgccatcaacgacaccggtggcgtgaaacaagcctctcaccttctcaagtacgattcgatcctcggaaccttcgatgctgatgtcaagcctgttggcagcgacatcatctctgtcgatggaaaggaaatcaaagttgtctctg

SEQ ID NO: 217578 - DNA, 484 bp, Glycine max
  unsure (1)..(484): unsure at all n locations
caaggtaagaattttattgcacaatgagaaggcagagaaaattgatggttctgtttctcagtacaagttttagaatgaaaaatgaagcaccaagtgtttgtagtggtagtagtagtagtagtaagcatacaaaactacaatggcatggtacatacatataataattgaattaccaattcagaatttgatggctctcacttccacttgttggcaacaatgtcagccaaatccacaaccctttgggagtagccccactcattgtcataccaagcaatcaccttaaccatgtcatctcccatgaccatggtcaacgatgagtcaacggttgaggacacatcagtgcacctgaagtcaacagacacaagtggctcatcacacacagagaggattccctggagctcattgnctgcactctctctgaatgctgcattcacttcttctgcaaaggtcttctttgagacctgaacaacgaggtccaccactg

SEQ ID NO: 217579 - DNA, 576 bp, Glycine max
gaagactctccgcaggcttgctcagaaccgtgaagctgccagaaaaagccgcttgcgaaagaaagcgtatgtccaacagttggaaagtagtcgtttgaagctgacccaactagagcaagagcttcagcgagctaggcagcatgggattttcatatctagctcgggtgatcaagcacatacattgagtggaaatggggcaatgcaatttgatgcagaatatgcaaggtggctggaagagcagaatcgacaaattaatgagctgaaagctgctgtaaactctcatgcaagtgacactgaacttcgcatgatcgctgatggtatattggcacattatgatgagatttttaggctgaaaggtgttgcagctaaggctgatgttttccatttgttgtctggtatgtggaaaacacctgctgagaggtgttttttgtggcttggtggttttcggtcatctgaactcctcaagctgctggttagtcaattggagcctctcacagagcagcagctgatgggtattaccaacttgcagcaatccttccaacaagcagaagatgcattatctcagggcatggaagc

SEQ ID NO: 217580 - DNA, 494 bp, Glycine max
ctcgactatactacggagatggaaacgttgaggccatgttcgccacgcttgatcctttacacgatatgctggagcgcggtccggaaactctgcgagaaatagctttccaacagtcctttggcagagatctgcaagacgcccgcgagtcatgtcgacgcttccagcagtatggcgaactgaacgacctgaatcaagcttgggatctgtactatcagatattcaagcggatagcgcggatattaccgttcttcttcatcctcgagctgcagcaagtttcgccgaagctgcttgctgcaagagacctagaactggctgtcccaggcacctatcactctggcaagcccatcatccgaatcagcaagtttgcagagtctctagacgtgctcacatcgaaacaacggccgtggaagctcaaagtagcaggcagcgacggcaaagaccatgccttcttgctcaaaggacacgaagatctacgacaagatgaaagagtcatg

SEQ ID NO: 217581 - DNA, 437 bp, Glycine max
gggaaagaaggacccaaagctttttcgggatttatgacttatacactttgggttttaaaaacaagtttgggggccgcatgatgtaaccaccgacaatttataattggaaattggaagtttttggacatttcttaagcaagccccattttgggtttgacacgaccaaatttgttaccagaaaggccaccattcaataaaagtttgacacaaatttttcaccggcgttgactgaaaaatgagcttttgcacttggtcgctgacatccaaaacttgtgtaggcttgaaatcccttcctggcaatttttggtggactcgatctacgacttggagaaccccttgattgagggccttattcgtttttggatccaaaggattacttttattcacgcccacttgttttgatgtaccaagcttattgggccccggtccaccttttt

SEQ ID NO: 217582 - DNA, 531 bp, Glycine max
tgaattttgattctagcaagcagagcttttgtcaattttctattgaccttctcggtggaggaattttagtggacaaaactggagattggatcacacttatacaaaattctccaattagtaacttgttgagagttgctgcttggaagaaaggctgtttaatggttaaaattgtgatgtctgggaatgcagcagtcaaaaggagtgattgggcctcattggtacaagtgtttttaacaaacagcaacagtacagagcatttcgatgcatgtaagtggacaaaatcggaaccacattcctgggaattgatcttcccaatagaggtatgtggtcctaataatggttttgaaatgtggagttctgagtgggcaaatcaaacttcatggcacttgagtttccttattgacaatcccaaacagtctacagtttttgatattctcttgggaatttctcaagattttgaaattgctggtaatactcttatgccagctttctctgttccacaggctactgccagatcttctgaaaatgcgg

SEQ ID NO: 217583 - DNA, 529 bp, Glycine max
aaaataacacacacttcacacatcattacgacaattaaaagaggtgtggaaattttcaaatagacagagcatactcaaagagggtcatgtctaatttcctttattgaattaaacaaacgaacaaacgaaagaaaacacaaattccagatcatgcagaggattccgcattttcagaagatctggcagtagcctgtggaacagaaaaagctggcataagagtattaccagcaatttcaaaatcttgagaaattcccaagagaatatcaaaaactgtagactgtttgggattgtcaataaggaaactcaagtgccatgaagtttgatttgcccactcagaactccacatttcaaaaccattattaggaccacatacctctattgggaagatcaattcccaggaatgtggttccgattttgtccacttacatgcatcgaaatgctctgtactgttgctgtttgttaaaaacacttgtaccaatgaggcccaatcactccttttgactgctgcattcccagacatcacaatttt

SEQ ID NO: 217584 - DNA, 536 bp, Glycine max
tggagccattatcaaaggagtttcgaatcactcacatggaaatgataaaaggaatcaaggggcatggctattatgatgaacttgttgtccccataattgagaatacggcctacgagtatcagctcacggaatcttttgctaaagctattgaagactacccaaaagcaacagcagtgcttgttcgcaaccatggggtatttgtctggggagactcatggatcagtgctaaaacacagtctgagtgttaccattacctctttgatgctgctctcaaacttcatcaaatgggattggattggtcaactccaaatcacggtccaatacaaagtgcaagacggggtctaagtattgctggggagtcaaatgtgtcagttaaagcaaggaaatctaatggtgacagtgatccattgccacgttgcgttgatcttgacattgaaggaactactactcccatatcatttgtttccgaggttctcttcccatatgcccgtgataatgttgggaggcatctatctctaacatatgatacccccgag

SEQ ID NO: 217585 - DNA, 555 bp, Glycine max
aactcaacgcaaaatacattacattacattattttaattttttttaattacattattttaattaagaagtgaacgttacactattcttagtaatgataacacatttaatgtcattccagaagactgcaattggtcttagatctccgagaaggatttgattgtcttgaagccatgattgtcagggaggggtccatttccaggtcgaatagaaattatcacctccaaacctgcagccgttgcagctgtggcttcttgatatacatcagtgacaaataaaatatctgatggtttttcaacaccgagtgactcagaaatttcaacataactgcgtgtctctcttttgttccccactgtagtgtcaaaaaacccagataaatattttcttaggtccccatggttggtttttccaaatattagcctttgagccaatctgctaccactagaatatatgtatacctttatacccaaggcgtgccacttttctagagcttctggtacatcatcataaactattcccttcaattcattattctcatagccaggtttgcatatatg

SEQ ID NO: 217586 - DNA, 597 bp, Glycine max
  unsure (1)..(597): unsure at all n locations
ctgaaaactggcattgttgggagaacaggaagtggtaaatccactctcatacaaacacttttccgaattgttcagcctacttccggccaaattatgattgacagcatcaacatctcttcaattggacttcatgatttgaggtctagactaagcattattcctcaggatccaacaatgtttgaagggactgtgagaaataatctggaccccctggaagaatacagtgatgaacaaatttgggaggccttggataagtgtcaacttggagatgaagttagaaagaaagaaggaaagctcgactccaaagttaccgagaatggtgagaattggagtatgggtcagaggcagttggtctgccttggcagggtgctgcttaagaaaagcacggttttggtgcttgatgaagccactgcatcagttgatacagctacggataatttgattcagcaaactcttaggcaacaattctctggctctacagtaattactattgcacatcgaataacttctgttctacacagtgatatggttctgcttctcagtcaaggactcatttgngagtatgcccaccccacaaggatgatagagaataagtca

SEQ ID NO: 217587 - DNA, 517 bp, Glycine max
cggctcgagattaaatgtacagtctctttcttcatagcatttggaaatttggctgatgacaccatcaattttgaggcttttccccacaagctggtgcagtttggagagattcaggaaaaagttgtattgaaattttcacaagaggaatttcttacagcttggtcaactcaggtgcgtcctgcaacaactctgttggctgatgggtgtccatatttgtatgctatggtgcatgatagttcagtgtctacaataccaggtgattttgtcattggtgttaagttgacaaccataaacaatatgtgtgcatatgggctcaatcctggtatttcaggttctcgtcttttgggcaccattcctcagtctatttcacagcaaactgtttggaatcaaatggcaacagtgagaacaccattgaattttgattctagcaagcagagcttttgtcaattttctattgaccttctcggtggaagaaatttagtggacaaaactggagatgggatcacacttatacaaa

SEQ ID NO: 217588 - DNA, 559 bp, Glycine max
  unsure (1)..(559): unsure at all n locations
cgacactagatgaatataggaagcacattgaaaaggatccagctctggagaggcgattccagccagttaaagtgccagagccaactgtcgatgaaaccatacaaatactgaaaggacttagagaacgctatgaaattcaccacaagctccgttatacagatgatgctctcgtagccgctgctcagctgtcacaccaatatattagtgatcgatttttgcccgacaaagctatagatttaattgatgaagcaggttctcgagtccggcttcaacatgcccagttacctgaagaagcaagagagcttgacaaggaggtcaggcagattgtgaaggagaaagaagaatttgttcgcaatcaagactttgaaaaggctggagagctaagagacagagaaatggatcttaaggcccagatatctgcacttatagaaaaaggcaaggagatgagtaaggcagaaagcgaggcaagagatgaaggtcccatggtgactgaagttgacatacaacatattgtctactnctggactggtattcctgtggagaaagtctcaactgatga

SEQ ID NO: 217589 - DNA, 505 bp, Glycine max
acaaaacaacttgctttcaataaattaaaattgttcacaatgcaacatatcaagggtaggaccaacagaaataatgtcattttttcattccacccaaaccttgctgtgttcattatgttatgggcaaacgtggctgaggccatcagcattcaattaaaagcttgatgtctattggcaacttaaacaaactattgctatgttttcttttaacaaataaaagagagaaaaaaatacaactcaactaactaagacaaccacgttacacaggaagagcttcttctaatgaatctggggcaccactactaccgttgagcacaatcacattaccatcggagtcagcatcaactataactgagtcaccctctttaatctctctagcaagcatcttctcagccatgctgtcctccaaaagtcgcattatagctcttcttagaggcctagccccataactcggattatatccttcgtcaaccaccctctccctaaatctttctggtactgagag

SEQ ID NO: 217590 - DNA, 502 bp, Glycine max
ggctcgagtttgaccccagcaaacagcaagagagaaatggaagcagcatcggccacaattctgctactgatactaattcttgctctgatatgctcatggaaggttctgaactggctatggctgagaccaaagagactagaaaaactgctaagagagcaaggttttcgtggcaatccatacacccttttctttggagactccaaggagtttctcaagatgagaaaggaagccgtatccaaacccatgaccctctctgatgacatagtgccacgtgtctctgcctatgtccaacatagtgttaacaagcatggtaagaattcttttatctggtttggaccaatgccaaaggtgaccatcttagatccggagcaaatcaaagatgtatttaacaagaactatgacttcccaaagcctaatttgaatccacttgtcaagttactagcaactggccttgcaagctatgaaggagaaaagtggagcaagcacagaagaataatcaacc

SEQ ID NO: 217591 - DNA, 529 bp, Glycine max
  unsure (1)..(529): unsure at all n locations
aaaagccttagccttccctacaactccaaacacaaagacatcatcatccatggctgcctccgtctccactgtcggagctgtcaacagagctcttttgaacctgaatggttctggagctggagcttcagctcccagttcagccttctttgggaccagcttgaagaaggttattgcctcaagggtccccaacagcaaggtttccggtggaagcttcaagattgttgctgtagaagagaagaaagagattgaagagacccagcagaccgacaaggacagatggaagggtcttgcctatgatatctcagacgaccaacaagacatcacaagaggaaagggtttggttgactcccttttccaagctccacaggatgctggaactcactatgcagtcatgagctcctacgagtacctcagcactggacttcgccagtacttggacaacaaaatggatggattctacattgctccagcttttatggacaagcttgntgttcacatctccaagaacttcatgaccctgcccaacatc

SEQ ID NO: 217592 - DNA, 540 bp, Glycine max
aaaggaaaaggcaccaaattcaatttaagtggacactgtaactcaaaattatagaggaagacggtccaatatgaaaaatatagtaagatcatctcaaacttagcatcttctctttgcacctaagacattgagaatgctaagaatgttacacgcaagttccatcacaacttctagcacttggattagtacaacaaccttcacgaacagaaatatttacttgccaagtttgctttgcctccaattcaagactggaagaaagttcccctctgaatagcatcctcgttagcatttccaagagcagcctcgttcaagtacttgtcagccaattggactctcttgacattctcttgttcttggacaagcatattaccatacagcaagagcttctccagagtcatcttgggctgctcaaaggttggaggtccatcttttgagttcacaagcttcttcccaacactgtcaacaccaacaccagaaatccacttcctcacttcatcatcatatactctggccctcagtgcaccaaagaaatcaatggat

SEQ ID NO: 217593 - DNA, 573 bp, Glycine max
tcatggggttcttctagttggttatggtgaaggtgcatatgctcccattcgttttaagaacaaaccttactggatcattaagaattcatggggcgagagctggggagagaatggatattacaagatctgcagaggtcgaaatgtgtgtggagtagattccatggtctcaactgtagctgctatatatccatccagccattaaatacaaagatatgcctgattgtggttgtgatgtgatactggactaaggggagtttgtataaatatttatgttgcgaactttatcatttggtactggtaaaattatctccgtataggatcaggaaactgctaagaccatgttgtttatgtagtatgtaatttctgtatgtatgcttgacatatacaagtgggaaatccaaggaaatgtgtggtcctaaaaatggtgcacgataagcaactctctatggagattggcggtgtgggctgtttcaaactgcaacaggagaatacttgccactgattatgtctcagttattgcataattaaactaatatacgtgccactgtcaatgttgcttcttatggatgtgta

SEQ ID NO: 217594 - DNA, 569 bp, Glycine max
  unsure (1)..(569): unsure at all n locations
agggatcccgcaattttggcattttgaagtcctaagtccatagaaatttttatacatgcacaaactcaaaggtaaacgaatcaaaggtacagaagcaacttaaacattttggtatccttttgggtatggcactaccacatccataagaaccaacattgacagtggcacgtatattagtttaattatgcaataactgagacataatcagtggcaagtattcccctgttgcagtttgaaacaaccccaccccgccaatctccatagagagttgcttatcttgcaccatttttaggaccacacatttccttggatttcccacttgtatatgtcaagcatacatacagaaattacatactacataaacaacatggtcttagcagtttcctgatcctatacggagataattttaccagtaccaaatgataaagttcacaacataaatatttatacaaactccccttagtccagtatcacatcacaaccacaatcaggcatatctttgtatntaatggctggatggatatatagcagctacagttgagaccatggaatctactccacacacattt

SEQ ID NO: 217595 - DNA, 593 bp, Glycine max
ggtatgatgaaattgtgaaggaagtctcttcctacttgaagaaagtaggatacaaccctgacaagattccttttgttcctatctctggttttgagggagacaacatgattgagaggtccacaaaccttgactggtacaagggtccaactctgcttgatgcacttgaccagattagtgagcccaagaggccctctgacaagcccctcaggcttccccttcaggatgtgtacaagattggaggtattggaactgtgccagtgggacgtgttgagaccggtgtcttgaagcctggaatggtggtgacttttgcaccaactggactgacaactgaagtcaagtctgtggagatgcaccatgaatctcttacagaggcacatcctggtgacaatgtgggattcaatgttaagaatgttgctgttaaggatttgaagcgtggttatgttgcctcaaactcaaaggatgaccctgcaaaggaggctgctaacttcacagcccatgtcatcatcatgaaccaccctggtcagaatggaaatggctatgcccctgtcctcgactggcacacttctcacattgctgtcagtttgctgaactca

SEQ ID NO: 217596 - DNA, 440 bp, Glycine max
ggaaccctacaaaaagaaaggggacatttaaaaaaccaaagcaacccaacgcaaaaaaggcctgaaactcgctgggcttaaaaaaaatggaatcggggggtccgacaaacccaacccattaaaaccccgataaaaaaaagcaattttgcccccggcgatcaaaaacccagttttgggaacaacagttgcaaaaagaggggggagacttaaaactttggccgaaaaacaaggtacctaaaaaagaagaccccagagtcccgaaaagaaacccacatttattggaaccaacatccccgggggaacccgcccggacgagaaacttttttttgggggcaaccttggggaccttgggtccggggggatcctttttttaaacggtcttgaggacccccacaggaaccgtttgacccctgtgcctaacaggaaacctaccaaggggg

SEQ ID NO: 217597 - DNA, 542 bp, Glycine max
caaaatcaccttagcaaatgcactgaagctcggaaagtcaaagattggaaagttatattaaaggaatcacaggctgcaatatccttgggtgctgattcagctccactggtctattgtttacatactgaagccttgctgaagctcctaagacatcaagaggcacacgctacctacgagaaaatgccaaaatttgaccttgattattctaacaaattatttggcccggttcgtagtgcttacctattgatgataggcacacacatttacttggcaaccggcaggtttgaggatgcagtgatagcatctcagcaagcatctaagttagatccaagtagctttgaggtgaatgcagtggtaaggagggccagagcagtggcatcagccagaatgagtggtaacttactcttcaaggcatcaaaattcacggaagcatatgctgtatacaatgaaggactagagcatgatccatacaactcagttctgctatgcaatagagcagcatgtcgttctaagctaggtcaattcgagacagcaattgaaga

SEQ ID NO: 217598 - DNA, 544 bp, Glycine max
  unsure (1)..(544): unsure at all n locations
catgaaagacgcaggtgccctgggaggcaagacagcacgagcctgcgatagctgcgtaagcagaagggcaaggtggttctgtgcagcagatgatgctttcctctgccatgcttgcgacactttggttcattccgcgaaccagttagcaagcagacacgaaagggttcggcttcaaactgcatcctctaaggcaaccacaaccactacgcacgcatggcacagtggattcacacgcaaggcaagaaccccgcgtcacaacaacagcaagcactttgcgctgcaacagcgtctcaaacacgaagttctcttcaacaacaccagtgttcttcccctcgtgccggagctcggaggggaagaacaagaaccggtggttgtggacaacgatgaaacggaggaacagatgctgtgtcgcgtgcccgtgttcgacccttttgatgtgagaaccgatgacttggatagcttttctgacatggatttttctgaatttgctgctgatgttgaaggccggcttgacanagaagacgatgaaataagtgcgtatgtg

SEQ ID NO: 217599 - DNA, 559 bp, Glycine max
  unsure (1)..(559): unsure at all n locations
aacagcatcagcattgaacaattgaatttctaatgagaaacaatgaaaaggcttccaaaattggattacaaaaggcttaaacctgccgagaaagatgatcattaattagtactaattactaaacctgctagagatatatatagacagaaatatcccaagcaacaattctagtaaaattaacctgacccagtaatattatttactagtattaatataatgcaggctatatatacatacatatagccaaaccaagtattaacccaaatttgtagaaaaagcaaagatggatccgttaactgatgattgatatcagtggtaagcaggaaaagcattggctccaacaaagcatgtcctcttcacaaaacgacctttcattctaggccttttctctgcgttcaacttccttacttcatatcttatcttctttgcaaacaaacgagtccttctcttctctctatacctcgacactcttgcttctcttccaccatctaggtgtccccttaagcttcttccttctncatctacaccactcanacccaaggagaagtcataatcagag

SEQ ID NO: 217600 - DNA, 586 bp, Glycine max
  unsure (1)..(586): unsure at all n locations
ggacaatcaaggtatcagctgttactgatcaatctggaatgcaagaatttggaggaaatactggtgattttgatgatgatgaaggaggtggcatgtccttgaatgcatgttctcgagcaatgctcatgcagaagttggatcgtagtggtactgcatcaagcatggttggttccctcggtaattctgttgtcaacaacacaggtcttaatctaccagcgacaggaaacatactcgcagctgcgcctgttggtgaattggcaggtggaggtctccaaatacccacggctacaattccttctattgatacaatcggtgttgcaagtgaatgcttaatgttaaagaatatgtttgatcccaaagatgagattgaaccagattttgatttggatattaaagaagatgttgaagcagaatgctctaagcttggaacgttaaaacacatatatgttgacaagaagagtgctggttttgtctacttacgatttgaagatacccaatctgcaataagtgcacagcaggcctcgcacggaagatggtttgctgggaaatgatcactgcangcttcatggtgcctcaatcatatgag

SEQ ID NO: 217601 - DNA, 612 bp, Glycine max
  unsure (1)..(612): unsure at all n locations
cgactcacaaagaaagatggtcccatcattgatcatacatcaaaactttgtgattgccatcagccaaagtttgaattacatcgatgtttctaggcatcacaaaacccttgttccaatcaataacactgccaaaccacaacagtaataccataataggacgcttaaatcaaaccaacacccccgaaaattttatgaaagtagtaactgcagcttttacaaataagcaccttttaacttcccaagacaaatgtgcatagctacatctatctcaaaagaagccgttatataattctaaggatgactatttctgccacgagattcctgatttagcataaaccggggatttatctgctgtctgggaatttatcctcatatgattgaggcaccatgaagcttgcagtgatcatcttcccagcaaaccatcttccgtgcaaggcctgctgtgcacttattgcagattgggtatcttcaaatcgtaagtagacaaaaccagcactctttttgtcaacatatatgtgtcntaacgttccaagcttagagcattctgcttcaaacatctctttaatatccaaatcaaaatctggttcaatctcatctttggggatcaacata

SEQ ID NO: 217602 - DNA, 555 bp, Glycine max
gcaagatgcattaaatgatgcattaaaagaagaaattcagcatttgaaagcactgactggacaagttatgccaaatggaggaccggtaaattttgcttcatttggtggggggcaacaattctatcccaacaatcaggctatgcacactcttttagctgcacaaaagtttcaacaactccaaattcattcccaaaagcagcatcaacttcagcagcaacagcaatttcagcaacaacagcaatttcagcagctgcaacagctgcaactgcagcagcaacaacaactgcaactgcagcagcagcaacaacagcagcagcagcaacaacagcagcagcagcagcagcagcagcagcagcagcaactgcaactgcagcagcagcagcagcaacaggaacagttatatcaacaaatgggggacatgaatagggaggggacacacctcatcaaatgtacttcagcggcagaggattttagagactacaaattgctttctcttcatcactttacccttgtgtttagagtttgttaggtcacagtcattatatttctattcat

SEQ ID NO: 217603 - DNA, 508 bp, Glycine max
gcaagatgcattaaatgatgcattaaaagaagaaattcagcatttgaaagcactgactggacaagttatgccaaatggaggaccggtaaattttgcttcatttggtggggggcaacaattctatcccaacaatcaggctatgcacactcttttagctgcacaaaagtttcaacaactccaaattcattcccaaaagcagcatcaacttcagcagcaacagcaatttcagcaacaacagcaatttcagcagctgcaacagctgcaactgcagcagcaacaacaactgcaactgcagcagcagcaacaacagcagcagcagcaacaacagcagcagcagcagcagcagcagcagcagcagcaactgcaactgcagcagcagcagcagcaacaggaacagtaatatcaacaaatgggggacatgaatagggaggggacacacctcatcaaatgtacttcagcggcagaggattttagagactacaaattgctttctcttcatcactttacc

SEQ ID NO: 217604 - DNA, 542 bp, Glycine max
ggctcgaggctagttttgatggtttgattaccaagcaagttatgagcaagatggcagaaatgataaacagtctttgtggtggtgatgaaaaattgatgcgtgaaaggacacacctgctgttggcttgttgttcaagaatggcaatttgtaagaaagatgtttggagatttgaatgtggaatcccttctggatttccgctcacagttatttgtaatagcatttttaatgcgatgctcattagatatagctatgaaaaattactgcgccaggctaaagctccaagtatgtttttacaatccttcaaaaattttgtttctttgtgtgtgtatggcgatgataacttaattagtgttcatgaatatgtcaagccttactttagtggttctaaattgaaaagccttctagctggtcataatatcaccattactgatggtattgacaaaactagtgcaactgtgcaatttagaaagctagcagattgcgattctctcaagagaaactttaagcagatgtctaatggtttgcgggtggctcctgaggat

SEQ ID NO: 217605 - DNA, 568 bp, Glycine max
  unsure (1)..(568): unsure at all n locations
aaacacactcattgcacatagtaatgcgctttatttaagtgaataaaatattacatactagttcacaaatgcaaaaggacactcatcaaccagatatttgagactcttacagttctcaagaagtcgcgtcagcatagggttagtggcgttagaactcagaatttcattcttaacgccaaaaagaacagccagtaaagctactggaaaaggatcaactctagtaagaaaaacaattttcttacctctcccaagtgctgtgcgaatccttttgttgatatctgaggagcgattgttaactgcagaactaatccaagcagtggtgggtaaaccaccacgtccactaccacatgtaacatttacaacgacagcttctgaaggtaattgacttacaggataaagacaattcacaaaaattggtaaccaagaatccactggaaaatttccatcaaagaattcttgtgtgttagccaacacangcttatcatcaaaaacaatcttgtttggaaaagctttacctgctccttgtaaacccaacaaatcaatgctcaacagtagatcaatattatca

SEQ ID NO: 217606 - DNA, 557 bp, Glycine max
  unsure (1)..(557): unsure at all n locations
agatttaccgctatgctttccacaatattgttaccacttgttctatgtcttactctccttgtgcttctcttgttcttcatccgcaatctcagaaccttcaagaacccaccccttcctccaggtcctaaaggccttccaataataggaaatttacatcaatttgatagttccattctttatctgcagctatggcaactctcaaagaaatatggccctatattttctcttcaattagggttaaggccagccatagttgtttcctctcctaaactagccaaagaggtactgaaaaaccatgacctagagtttagtggacgacctaaattacttggccaacagaaattgtcctataatgggtcagagattgcattttccccatacaatgaatattggagacaaattagaaaaatttgtgttgtccatatctttagctccaagcgtgtctctagcttttcctctataagacattgtgaggtgaagcaaatgataaaaaaaatatctgggcatgcctcttcttcgggtgttacaaactngaatgagtcactcatgtctctctc

SEQ ID NO: 217607 - DNA, 492 bp, Glycine max
ataacaacactaaccaaaaagtcaagtatagcacattaaaatttcttgatagaacattataacatgcattattttattattttgatcacaaagtccatctagtagttatatatggctcctagtcttggcacaaagacaaagatcgttcttcttgtgttgggtgagtcctggcaatacttgaacatcaatgtcttcctttatcatcccttgtggcaattcccaatcaaaggaatgaagaagattagcaagaacaagttctaatatcacaactgccataggtaaacctgggcaacttctgcgacctgatccaaaaggaattagttggaaatcttgtccacgaaaatctacgtcgctatccaagaatctttcgggaataaactcttgaggatttttccaagattcgggatctctatgaataacccaagcattcacgtataatattgtcttagctggaattcgatagccatgtataatgcactcttcatttgattc

SEQ ID NO: 217608 - DNA, 528 bp, Glycine max
gtcggttccctcccaggcacttgccgcttttatgttgcctcaggcaaacatttccagcttgagactaagattcatgtcaatggaaagaagagtacatctggcaacaagattacaggcattcagttttctcagaaaaaccatcagagagttatgattacatctgaagattcccgagttagaatattggaaggcactgaatttgttcagacatataaaggccttccaagatccggaagtcagatgtctggttcatttacctctggtggagaacatatagtttcagttggaggggactcgcgtgtgtatatttggaacttcaatgacttgggaaacgcttcttccaaacagacaaaatccaaatattcctgtgagcacttcggctctgaaggggttactggtgcattaccttggtcttgcatgagtgcagaagaacaaagtggctcttgcaatgatcttgcccaccattcatcgtcacaacaccaactagaggcatctcatggcgttagggagtctgaacgattttctttc

SEQ ID NO: 217609 - DNA, 580 bp, Glycine max
  unsure (1)..(580): unsure at all n locations
gatatttgacaggttcatcatcataaccttcaatgaaaagaaatggctgaggcaagcattggcagcaaaagcagcagatggtctttacagggaatgacagctctcgtcaccggtggatccaaaggaatcggatatgctatcgtggaggagttggcacagcttggagccactgtgcacacttgcgctcggaacgaagctgaactcaatgaatccttaaatgaatggaacacaaaaggatacagagtaactggttccgtctgtgacgtggcgtctcgtgcagaaagacaagacctcatagctagagtctccaatgagtttaatggcaaactcaatatccttgtaaacaacgtgggaacaaacgtaccgaaacatacccttgatgttacggaggaagacttctcatttctgataaatacaaatcttgaatctgcttaccacctaagccagcttgcacatcctctcctgaaagcttcagaggctgcaaacatcatttttataatcctcattgctggtgtgctatcaataggtataggatcccactatggtgcaacanaaggagcaatgaacccactgactaaaa

SEQ ID NO: 217610 - DNA, 504 bp, Glycine max
gaaaataaaataatactttattattaaaattaaaattgattacatgatgattggatcgtggacatacaaatttattcccaacaaattccccctcccaaatgatatagattgaaccaagggactttcagctatttattctcaatactaatataaaaactagcaacgtatgcatcagaccttgctcttaacatagtttatataaaaatgctaacaacacattatcttatacactcttttcaatacattttttttattgcttgaaattttttagatatcacaaaaatatatgggtcctagatcttattttcatgattttgtaattttttattatttgtaacttatggtagaatatgtgtcaagagaagtgtgttagagagtgtgttggtagtacttctctaatttatatagagaccattcactgttaatccaccatcaacacaaatggtctgtcctgttatgtaagaggctgcaggtaagcagaggaatgccaccaatgaagacact

SEQ ID NO: 217611 - DNA, 546 bp, Glycine max
  unsure (1)..(546): unsure at all n locations
ctcgagccgaatcggctcgagctcaaatgcgaaatggacaagcaggaatacacggtggccgaaatagatggctggacaaggcacatactctgacctttgagacgaacggtcgagccgtcctggctggagaacacagcccgatcgatgcgcttatacctaccatggtcatggattatgcttcacaggtccctgttgatcgatctgtatatgacgaagaggaaggttcgggatggtctagagtcgattttgtagtcgacgaggcgttgaagagggagattgtcgattgcgaggggaggaacaaggcgatcatcgaggacagcgatgcgaaagagctatggtttggagagtacggcgcggagtggatcaagaagaacgccaaagtcgcgcccgacgcgtatattcagcaagtcttacagctggcctggtaccgagatcaagggtatgcgaccgcaacatacgaaaccgcatctacgagattgatgcagcacggacgtacagatgtgattcgaacactgagtcangagagtcgaggctttgtcagggcat

SEQ ID NO: 217612 - DNA, 564 bp, Glycine max
ggcaccagcttgaagaaggttattgcctcaagggtccctaacgtcaagatttcttctggaagtttcaaaatcgttgccgcggaaaaagagattgatgagaaacaacagacagacaaggacagatggaaaggtcttgcctatgatgtttcagacgaccagcaagacatcacaagagggaagggtttggttgattccctcttccaagctccacaggatactggaactcactatgcaatcatgagctcttatgagtaccttagcactggacttaaacagtacaacttggataacaacatggacggtttttacattgctcctgcttttatggacaagcttgttgttcacatcagcaagaacttcatgaccctgcccaacatcaaggttcctctcattcttggtatctggggaggcaaaggtcaaggaaaatccttccaatgcgagcttgtctttgccaagatgggaatcaaccctatcatgatgagtgcttgaaagttggaaagtgtgaatgcaggagagccaagcaaactgatcagacagagataccgtgaagccgcagacatgatc

SEQ ID NO: 217613 - DNA, 516 bp, Glycine max
  unsure (1)..(516): unsure at all n locations
gttgcctcccaccctgactgaagaaaaatttcgccagtactttgagtcttatgggaatgtaactgatgtagtagtcatgtatgaccagaatactggacggccacggggatttgggtttatttcatttgatactgaggatgcggttgatagggttttgcacaaatcatttcatgatttaaatggtaaacaagttgaggtaaagcgtgcacttcccaaggatgccaatcctggggcaagtggtcgtatgatgggtggtgctggaggtggtgggtatcaagggtatggggcatctggtggcaaccaaaatgcatatgatggtcgtatggattctagtaggtatatgcagcctcaaagcgctgcaggtggattccctccttatggttcttctgcctacagtgctcctgggtatgggtatggtccagctagtaatggcattggttatggtgcatatgggagttatggtggtgccactgctgngtatngtggacctgctgctgcacatatgggaatcctaat

SEQ ID NO: 217614 - DNA, 523 bp, Glycine max
gtgacttcacctcaacgtctatgcattgtgacagagtttctcccgcgtggaagcttgtgccgcttgttacacagaaacacatctaaacttgactggagacggcgagttcatatggccttggatattgcacgaggtgtaaattatcttcatcattgtaacccacctatcatccacagagatttgaagtcatcaaatcttctagttgataagaactggactgtgaaggttggagattttggtctttcacgtcttaagcatgaaacatatctcacaactaagacaggaaggggcacgcctcaatggatggcaccggaagttcttcgtaatgaaccctctgatgagaaatctgacgtttacagctttggagtaatattatgggaaattgcaactgaaaagataccttgggataatctcaactcaatgcaggtgattggagctgtaagattcatgaattaacggctagagattccaaataatgttgatccacggagggctactataattgagagctgctggcatagtg

SEQ ID NO: 217615 - DNA, 590 bp, Glycine max
cctcaactcatgaaaataatgcgagctactctttatactcataatgagtggtttaaacttcaaatgtggaaagatcgttttgaaggtcttttgaggcttgattccttgaaggaagccaacactcccttccttgcaccagtcactacatccaaatcgtatgctgatagctgcacaaatggatcttctcaggccacagtatcttcagggaccaggatgtcagaagatggtagtagtccaactcaagcatcttcaagggatgtcatctgtgacgaaggtgcaatacttaaagtaatggagtttttggctttgcctagggctgatgccatacatctgcttgcacagtacaacggaaatgcggagacagtcattcagcagatatttgcgtaggcgttgtgcacgaaatcgggtttgttatttagaagaaaggtcaaattatttttttcaatattatttgattcaaatttgagaattttttctataccccttgtacatatagctgcacagaggatatcactgcaacgtttgaaacccgaattgacggaaactactctctgaaaagatctcttaatattggctcagttttaatgaga

SEQ ID NO: 217616 - DNA, 564 bp, Glycine max
ttgcagagttgaattccgaaagaggaatggcgaagcacgaggagcttcctatcccgattaacaataacctagaacccgtctatggcggaggttccgcactcgaagaagctcagcttcgtttcgataatttgaagtccaaattcgtcgaaatcttcggtcatcatcctcaaatcttcgctcgctcacctggaagagtgaacttgattggggagcacattgattatgaaggttattcggtgctgcctatggcaattcggcaagacacgatcgtggcgattcggaaaaatgaggcggaaaaggttctcaagatagctaacgtgaatggtgaaaaatattcactttgtacttatcccgccgatcctctccaggaaatcgacttgaagaaccacaaatggggacattattttatatgtgggtacaaaggtttccatgactatgcaaagttgaaaggagtgaatgctggtgaacctgttggacttgaagttcttggtgatggaacagtgccgacaggttctggactatcaagctctgcagcgtttgtctgctcatccacaattgctatta

SEQ ID NO: 217617 - DNA, 571 bp, Glycine max
gctggatgtcttactgtcacatttaaatgaaaagcttataaaccaagcatataatatcaatatattacaacaagcactgtagcatagcatcatgttgctatcagttaatgtctacaagcgaaagcaaatggaatggttgcatgcacctgataatagaaatgtaaaatcagagtttcaaactccattcatctgtaactgaaattttctagggttaaaattactcttcaacatttggctcttatccctttgcactatcaaaactcaatcaattcttctagaagctatgaactcctaacttagattcgaagatacgacatccttgaaagcatgaaccctcttggcttctgaatacacatgagcagctctctgatgcaacttgtattgctttgcaacttttaacacttctaaataagctgcattattgttcaaaaatgaagtcagcttttcccctgtaactgcttcaatttcttcagctgtatatggttcttccttcaaatattcctttacagcaagtacaggatcagatgagttataaataccagcaaatgatacgcataacccttcaacatca

SEQ ID NO: 217618 - DNA, 550 bp, Glycine max
caggctgggtcttgctctgaacttctccgtgttttactatgagattcttaactctcctgatcgggcttgcagccttgcaaaacaggcttttgatgaggctattgctgaattggatacattgggagaggagtcatacaaggatagcactttgatcatgcaactgctacgtgataacctcaccctctggacctctgacatgcaggacgatggtgcagatgaaattaaagaagccgcacccaaaggtgacggggaacaaaattaaacataccatactctctgcttattagtcattgaacttcccttctgtaatgttttcaaagggagaaggtgttgaatgctaatctcaatgttactgagattttgggcattcgtgttcttcgttatgaattgtggatgtactgggctattttagtttgtccttccatttatacgcgtttctgaactgcctattttcttaatgacactgaaatttccattatgatgcatgttagaatattacccagatgttgttctctttagcaaacttcgtatggctcattattttaggatg

SEQ ID NO: 217619 - DNA, 535 bp, Glycine max
gaatgaagcggctattcttgcagccaggcgtgacctcaaggaaataagtaaagatgagatctctgatgcgcttgaaaggatcatagctggacctgagaagaaaaatgctgttgtctcagatgagaagaagaaattagtagcctatcatgaggctggccatgctctagtgggtgctttaatgccagaatatgaccctgtagccaagatatcaattattcctcgtggccaagctggtggtctcacattttttgctcccagcgaagagaggctcgagtctggattgtacagtagaagttaccttgaaaatcagatggctgttgccctgggtggaagggttgccgaacaggttatttttggccaggaaaatgtcaccaccggagcatcaaacgacttcatgcaagtttcacgagtggcaaggcagatggttgagagatttggattcagcaaaaaaattggacaagttgccattggtggacctggtggaatccattcttgggtaacagatgtcatcgcaaaaggatactccatggcaact

SEQ ID NO: 217620 - DNA, 364 bp, Glycine max
cagccgaaaaaccatatttttaatttattaatggcgtaagctgctgggcaaatggttttttccccttgaattggataaaaaaattatggatttttacggggcacaagtcaaagcgtattttatggcccaaacataattctgggacttgggtgtatgattatgccacataaaattcggcttttccatcaaggaatagacccaggaacttttcaccatccacagtttctttttctatgaaaagttgagcaagcttgggaaggatatcaaggggagtagagataatatgggttgcccaaaaaaaggctttttttaccagttccctgacttgcgaatccactacatccgaagttgccatggagtaatc

SEQ ID NO: 217621 - DNA, 574 bp, Glycine max
gccggcgcccctgtctacctcgccgccgtactcgaatatctcgcggctgaggtaattgccgcaattagtcgttcatttcgaattcgattttgaaattatctccctatgtgattagatctagggtttcgtaatttcgattagattcatttgccctaattgaatggtttgaacattgttttaggttttggaattggctggaaacgctgcgagagacaacaagaagactcgaattgtgccgcgccacattcaattggcggtgaggaacgacgaggagttgagcaagctactcggtgacgtcaccatcgctaacggtggcgtcatgcctaacattcacaatcttctccttcccaagaaggctggtggatcatccaaggctgctgctgcagacgatgactcttaaataggggttctttttccgagaaaagttatcgaatttattctctttggattctctctgtttttgcagttattcagtttttgataattgcgttctgtagatgcagttaggttttcagtcactgatgtgaatagagaacgctctttctcttcaagaaagattgctggaatttaaatc

SEQ ID NO: 217622 - DNA, 498 bp, Glycine max
ccaacaatctttcttgaagaaaaagagcgttctctattcacatcagtgactgaaaacctaactacatctacagaacacaattatcaaaaactgaaaaactacaaaaacagagagaatccaaagagaataaattcgataacttttcacggaaaaaaaacccctatttaagagtcatcgtctgcagcagcagccttggatgatccaccagccttcttgggaaggagaagattgtgaatgttaggcatgacgccaccgttagcgatggtgacgtcaccgagtagcttgctcaactcctcgtcgttcctcaccgccaattgaatgtggcgcggcacaattcgagtcttcttgttgtctctcgcagcgtttccagccaattccaaaacctaaaacaatgttcaaaccattcaattagggcaaatgaatctaatcgaaattacgaaaccctagatctaatcacatagggagataatttcaaatcgaattcaaatgaacgactaa

SEQ ID NO: 217623 - DNA, 533 bp, Glycine max
  unsure (1)..(533): unsure at all n locations
caagaagttgtattttggcatccccgtggcttcaagaagagaatctcaatggaggcccaggagctgaagcgcgtgttccagatgttcgaccgcaacggcgacgggagaataacgaagaaggagctgaacgactcgctggagaacctgggcatcttcatctctgacaaggacctgagccaaatgatccagaggatcgacgtcaacggcgacggttgcgtggacatggacgagtttggggagctgtatcagaccataatggacgagcgcgacaatgaggaggacatgagggaggccttcaacgtcttcgaccagaacgccgacggcttcatcaccgtcgacgagttgaggaccgtcttgtcctccctcggcttgaagcaaggaagaaccgtccaagactgcaaggccatgatctccaaggtcgatgttgatggagatggcatggtcgattacaaggagttcaagcaaatgatgacaggcggtggattcactgctctcacttattttctntcaatcatctattccccatatatctt

SEQ ID NO: 217624 - DNA, 541 bp, Glycine max
  unsure (1)..(541): unsure at all n locations
gaaaatagaatcaacctttctcgactcaaaacttgaacaagaagaaaacacaaacagatcttgtgacagtagcagtagtctcccgatttcaagggtcttcctcccccaaaaaaccaaagacataataaagttgtagcattaccagggcaagaggcgctcatctcacttatggagccaggtttgctaactcccaaaaaccaacgactaacacattggaaaacacaagcacacacacacgtacacatacctaggacgagatgagatgaattgatctaatcctataccacaccatccatggtccgaaaccatgacaatcacaataatcctggtgatcctgattgaaagtaagttatatgtacaagaaagatatatggggaatagatgattgaaagaaattaagtgagagcagtgaatccaccccctttcatcatttgcttgaactccttgtaatcgaccatgccatctncatcaacatcgaccttggagatcatggccttgcagtcttggacggttcttccttgcttcaagccgagggaggaca

SEQ ID NO: 217625 - DNA, 582 bp, Glycine max
  unsure (1)..(582): unsure at all n locations
caaattcggggctttcatcaattacacccttcattcgcttcattccacccttcacctgaaaaaaaaaaaaaacaaacaaacaaacaaaaaggagtgcaaaccatgggcgatgcaattgatttgtccggcgacggaggagtcattaagaccattgtcagaaaaagcaaagccgatgctgttggtccaacagaaaattttcctcttgttgatgttcattatgaaggcacacttgctgatactggtgaagtttttgacactacacatgaagataacaccatcttctctttcgagattggaaagggcagtgttatcaaggcttgggaaattgctgtgaaaaccatgaaggttggagaagttgcaaaaataacttgcaagccagaatatgcatatggcagtgcaggatctcctccagatattcctccagacgcacaacttgtttttgaagttgagcttgttgcttgtcggccaaggaagggctccagtttgggaagtgtttcagaggagagggctaggcttgatgagctgaagaagcagagagagctagctgctgctgccaagaggcagagangacgaagagagaag

SEQ ID NO: 217626 - DNA, 508 bp, Glycine max
  unsure (1)..(508): unsure at all n locations
aaaagacccggtagattttgtacttcgtttttctttgatgaaaaaaaaataaattcgtaaacgtagaaaaaaattcatcaaagaaaatactctatccatagtagaggaaaaaaatgaattgcagggatggaaaagccgtatgcatcaatacgcagaaaatgcttgtacggttatttaatattatttttgcccatttttttattttcttatttgtatttatcccttttacctttatttgggaataaggataatctttaccaatataggagaaatcattatcaaaatctttatcaagataagggaaatacttattaagttataaaatcagggtaatgatccaccaacccgctagttctttttatgaggcacaaacgggagaatttatcctggaagcggaagagctactgaaaatgcgtgaaactatcacaagggtttatgtacaaagaacgggcaaacctttatgggttatatccgaagacatggaaagggatgtttntatgtcagcagc

SEQ ID NO: 217627 - DNA, 504 bp, Glycine max
  unsure (1)..(504): unsure at all n locations
aattaatgttattgttaacttgtacagttcacactctttggctctacccatccaatatttagtttagtaagtagattttttcacaatgaaatctagttatacagtaacggtatttaattatgaaaatttgctgggtagctgaccttcttattccgttcgtccaaaatccatcaaaattcattcattaaggacatactttatctttaattgaaatagtattttctccgcttaacgggtaactttatatttgttttgttaccgatgggaaagtccttctcatcttaaattgtaaattaagactattgggtttgcaccaatcgaaaccataaatttgatacaagatagaagaatgtaaagaatgtatatatataagttaagatagtctgaatgggaaaactacattcacactatcttaaccgatcaacaatactgaaaaaatgaaattgggtttttcttcttagtatatgatcntgacgagtcgcacatacaccctggtacacgttc

SEQ ID NO: 217628 - DNA, 535 bp, Glycine max
gccaaatgcaccatcttaaaaaaaaacaaatatatatttgaaaaaaaagaaaaaaatgcatgccatcatcatcaaccattcctggtcctgatcctaaatagggttagggtttatgcaatcgaactccagcgacggtgcatttgtgcgtaatcgatggcgaatcgcacggatccagcagcgaagagcataagagggacgaaccctcagaacctggtggagaagattctccgatcgaagatctaccagaacacgtactggaaggagcaatgtttcgggttaacggcggagacgttggtggacaaggccatggagctcgaccacctcggcggcacctacggcggcaaccgcaaacccacgccgttcatgtgcctcgtcatgaagatgctccagattcagcccgagaaagaaatcatcatcgagttcatcaagaacgaggatttacagtacgttaggattctcggtgctttttacttgcgtatcactggatctgacattgacgtctatcgctacctcgaacctttataccatgactatc

SEQ ID NO: 217629 - DNA, 574 bp, Glycine max
aaagactttgcgtggcacccacaagaaggccacacagtcaccaccaccaccacccatttctcccggtgcgcgactcactttatttttattcatccttccttcctaacagatccgatccccgatggcggcggcgtcgcggcggctccgggacctgcagtcctcggcggggaacaagatctgcgtggactgctcccagaagaaccctcagtgggcctccgtctcctacggcgtcttcatgtgccttgagtgctccggcaagcaccgcggcctcggcgtccacatctccttcgtccgatccgtcaccatggactcctggtcagacatccagatcaagaaaatggaagccggcggcaacgacaaactcaacgccttgctcgcccagtactccatgcccaaagaaactgacatcgtcacgaaatataacaccaacgccgcttctgtgtaccgcaaccggatccaggccatcgctgagggacgtccctggcgcgatccgccggtggtgaaggaaaacctctccgtcgaaaggggaaaccgtcgctgacacatacgcggaggaacaacgattctggatggg

SEQ ID NO: 217630 - DNA, 594 bp, Glycine max
ccttaaccaactcatctcaagatttagcgctcttggactttccaccaaggacttggtcgccttgtccggtggtcacacaattggacaagcaaggtgcacaaacttcagagcccgcatctacaacgagaccaacatagaaaccgcatttgcaaggactaggcagcaaagctgccctagaacatcagggtcaggggacaacaatctggcaccacttgatcttcaaactccaaccagctttgacaactactacttcaagaacctcgttcagaagaagggtctcctccactctgatcagcaactgttcaacggtgggtccaccgactccattgtgcgtggctacagcaccaacccgggcaccttctcctctgatttcgccgccgccatgatcaagatgggagacattagtcctctcactggctccaatggagaaatcaggaagaattgtagaaggattaactaatttaattcagtcttgaatattaagggtcctacacatacgcaagcaatttaattgcgtttattagttgttaaaacatgttttggttgtattttggattcctagtgtagtttccgtgatcaatgccgtctacttta

SEQ ID NO: 217631 - DNA, 510 bp, Glycine max
gaagggaaaattaaaaagcaaactccgttcttgataaatgcttgataaaggattttttttttccctacaatatagttaaggaaaaagtaaaaaagaaacaaaaataaagggaagtagaacacactaaagtagacggcattgatcaccgaaactacactaggaatccaaaatacaaccaaaacatgttttaacaacttattaaacacaattaaattgcttgcgtatgtgtaggacccttaatattcaagactgaattaaattagttaatccttctacaatttttgctgatttcttcattggagccagtgaaacgattgatgtctcccatcttgatcatggcggcggcgaaatcagaggagaaggtgcccggattggtgctgtaaccacgcacaatggagtcaacggacccaccgttgaacagttgctgatcagagtggaggagacccttcttctgaacgaggttcttgaagtagtagttgtcaaagctggttggagtttgaagatcaagtg

SEQ ID NO: 217632 - DNA, 406 bp, Glycine max
acgagggattttatcctattcaaactataggagtgcctgggctctacatctcaatccagatattgacattggatgggtacaccctttagtcggagtggtcaaatggtctcatgatcatggactgctagctcgcattgcttgttcatgatcgaattagccgatcgacttgctttgacatcgtacatgaacgtacgatttcgcacatgctgcgcttgagattggtatctatccatatatgcaaactgatcctactagttctggtcccgaggcccgtgcgcttgagacagaaagtctctgctacgcatcgaccaaggagctgtgcctgtactagatgtagctatgtccccggtctagatgcctaatatatactgcgctgtgatagcacatgctcatgatactgatgtgc

SEQ ID NO: 217633 - DNA, 419 bp, Glycine max
agttattccgatattcggacgcatcaacttgttatgaaatcacatggatagcctctactcgtgtcctagctcggctaagagctagatttgcctcaattgtgggactcttgccttccgccttattcaaattagctgctgctatttcaagagtacgctgtgcttcttgtggatcaatgtcactacccttatccgcatcatttactaaaacagggatctcattattgcatattctagcaaaaccggccatcagagccatcgctaaccattggcctttaagaagacgtattctcaaaatacctatatatacgggtgtggcaataggcgcatgattgggtaatactgcaatatgtacgctcttagtagagcaaatgagggccattcactttcgaatccgagacaattctattgggggtcagtac

SEQ ID NO: 217634 - DNA, 472 bp, Glycine max
tgcaattgaagttgaagtcttgcccttctctcttcaactccaaacacaagacatcatcatccatggctgcctccgtctccactgtcggagctgtcaacagagctcttttgaacctgaatgggtctggacctggggtttcagctcccagttcatccttctttgggagcagcttgaaaaaggttattggctcaagggtccccaacacaaagatttcctctggaagcttcaagattgttgctgtagaagagaagaaagagattgaagagacccagcagaccgacaaggacagatggaagggtcttgcctatgatatctcagacgaccaacaggacatcacaagaggaaagggtttggttgactcccttttccaagctccacaggatgctggaactcactatgctgtcatgagcttctacgagtaccttagcactggactttggcagtacttggacaacaacatggatggatttta

SEQ ID NO: 217635 - DNA, 479 bp, Glycine max
  unsure (1)..(479): unsure at all n locations
aagtggacactttaactcaaaattatagaggaagacagtccaatatgaaaaatatagtaaaatcatctcaaacttggcatcttctctttgcacctaagacattgagaattctaagaatgttacacgcaagtcccatcacaacttctagcacttggatcagcacaaccttcaggaacagaaatatttacttgccaagtttgctttgcctccaattcaagattggaagaaagttcccctgttaatagcatcctcgttagcatttccaagtgcagcctcgttcaagtacttgtcagccaattggactctcttgacattctcttgttcttggacaagcatgttaccatacgtcaagagcttctccagagtcatcttgggctgctcaaaggttggaggtccatcttttgagttcacaagcttctttccaatgccgtcaacaccaacaccagatatccacttcctcacttcgncatcatataggc

SEQ ID NO: 217636 - DNA, 522 bp, Glycine max
tgcaattgaagttgaagtcttgcccttctctcttcaactccaaacacaagacatcatcatccatggctgcctccgtctccactgtcggagctgtcaacagagctcttttgaacctgaatgggtctggacctggggtttcagctcccagttcatccttctttgggagcagcttgaagaaggttattggctcaagggtccccaacacaaagatttcctctggaagcttcaagattgttgctgtagaagagaagaaagagattgaagagacccagcagaccgacaaggacagatggaagggtcttgcctatgatatctcagacgaccaacaggacatcacaagaggaaagggtttggttgactcccttttccaagctccacaggatgctggaactcactatgctgtcatgagctcctacgagtaccttagcactggacttcgccagtacttggacaacaacatggatggattttacattgctccagcttttatggacaaacttgcttgtcacattaccaagaact

SEQ ID NO: 217637 - DNA, 511 bp, Glycine max
aagtggacactttaactcaaaattatagaggaagacagtccaatatgaaaaatatagtaaaatcatctcaaacttggcatcttctctttgcacctaagacattgagaattctaagaatgttacacgcaagtcccatcacaacttctagcacttggatcagcacaaccttcaggaacagaaatatttacttgccaagtttgctttgcctccaattcaagattggaagaaagttcccctgttaatagcatcctcgttagcatttccaagtgcagcctcgttcaagtacttgtcagccaattggactctcttgacattctcttgttcttggacaagcatgttaccatacgtcaagagcttctccagagtcatcttgggctgctcaaaggttggaggtccatcttttgagttcacaagcttcttcccaatgccgtcaacaccaacaccagaaatccacttcctcacttcgtcatcatatagtctggccctcagtgcaccaaagaaatcaatggat

SEQ ID NO: 217638 - DNA, 202 bp, Glycine max
aaaaaaaaaaaaaatattataaaaagaattttttatataaaaaaaatataaaaaataaaaaatctaatattataaaaaaaaataaaaaattttttttgtggccaagaataaaaaaaaaaaaatacccataaaaaaacgatatttttaaaaaatagagtagtatctcttctaaagtatttaaaaaatcaatatttaaacaacc

SEQ ID NO: 217639 - DNA, 472 bp, Glycine max
  unsure (1)..(472): unsure at all n locations
cgacaacaatgtgggattcaaggggtttgctataccaaaagatgtacaaggcaaagttgcaaaatttgatttccatgggcagccagcagagctcaagcatggaagtgttgtgattgctgcaatcacaagctgtacatatacatcaaacccaagtgttatgcttggggctggtctcgtggcaaagaaggctcacgagctaggtttgcaggttaagccatgggtaaaaacaagtcttgctcctggctctggagttgttacaaaatatctactcaagagtggcctgcaaaagtatctaaatgaacagggtttcaatattgttggatttggctgtaccacatgtattggcaattcaggggaactagaccaatccgttgcttctgctatctctgaaaatgacattgtagctgctgctgtgttgtctgggaaccgtaattntgaaggccgtgtgcatcccttgacaagagctaactac

SEQ ID NO: 217640 - DNA, 523 bp, Glycine max
gcttctttcttcctcaatgcagctgtaaagcagccagatgggacatacaggactttggcaagcggtcaggtggtgcagatccacccttcttctgtattattccggcaaaaaccagagtgtgtgatatttaacgaattggtccaaactaataacaagtatgtccggaatttaaccagagttgattacctatggttaaccgagctggctcctcaatattatgctatgcacaattaaattcttgatgttgccactaaacaggttactagattatttatctgttgaaacatatcagtgcaagcctcagactatgccccgccactggtttatggatcttttcataatgactgttttttatttaaggggcttatctttggcattcggtaacttttggatgcctggtatgtggagatgccactgaatcatataatgacaagtacttctttctgggttgttatcacgttattttctcttgagcagctatggccactaagactgagggaaaagtatgtggtggtagggtgca

SEQ ID NO: 217641 - DNA, 514 bp, Glycine max
atgagattgagttgagacaaagagatgattctcattaaggtcctagagtcctatcttatccaaaaattaggacatgttaacatgcacactagcagtcttataggatttacaaatgggacaaatgtggagtgaagacccacacacagtacacaagcacaaatgacggcacggcaaaatcagcacacaagactcttccttcctacagttcctgcacaacctcccattaccaccaccctccttatccttcacccctgcgcaccccgctaacgtgcgccaaccccccgtttccttttctaaaccgtcctcctcggtgctcccgcagcaggactcggcgtcgtccatctccgcgccgccgcacacggtggcgccttcgccgacgtcttcctccgccgccattccgccgcgctgcgcgagaacctgctctaaattacaccgcagagcattcgctgtggcttcgttggtttccgctatgttacgccacacctgattctccatgcagagatgcttcactttc

SEQ ID NO: 217642 - DNA, 541 bp, Glycine max
  unsure (1)..(541): unsure at all n locations
tttttttttttttttttttttttttttttttttttttttttttttttttaagcagtcaaggggatccagctcaattggtttagcagggtgcgtgagttattggaaactccttgacattggctttgatttctatggataaaaaaaaaaaacccactaagcaatgatgtcaacaaaagtttggcgagctcaaatactgccattgcccaagtgggaaaaaatcccacgattacaaaccagaagttgcccgtcttagttggctcatttgtacagaattaaacacttggattcatcaaaaacgtttcttcgaaacatgcttttatatgcctatagggtagaggcaattcaaaccccaactttgttaatctttgaattgcaattcctacattccaagaacagcagcagcactaccaatccccctatagcacctagccgtaggtacaacacagcagtgagagggtttcattattagcgctgccaccattcacatgcaaagtaaaccaccaattcaatcctttcactatcaccctcttnctcgactaac

SEQ ID NO: 217643 - DNA, 516 bp, Glycine max
  unsure (1)..(516): unsure at all n locations
cctagagttgatttttgcatccatcacagcacataatggcaaaccagttccccgaatctttagctcccagcgaggaggacgttcaacgcctcttggctacacaggcccacatcggtaccacccgtttggaggccgctatggagagatacgtctacaagcgtagctctgatggcgttcacttgatcaacgtacgcaagacctgggagaagctccagcttgccgccagagttatcgtcaccatcgaaaaccctgccgacatctgtgtcatctcttccagaccccagggacagagagccgtcctcaagttcgccagatacaccggtgctcacgctatcgccggacgttacactcccggttcatgtcatcaaccgtgtccaggatagattcctcgagccccggtttctcgtgctcaccgaccccagatcagaccaccagcccatcaaggagtcttcttacgtgaacattcccaccatcgctatctggcacactgactcctncatcaactacgtggacatc

SEQ ID NO: 217644 - DNA, 466 bp, Glycine max
agagagttgattttatctttttgatccgatttaagcgactcaggttcccgaagacaacaatttactgttgggcagtggcctcagcggcctcccagttggcaccagcggaaggggctccctcagcagcccattctccctcgtgagcgggggtgttccagtcctcagcgttgtaagttccgtagatgggctcagactcggtggcctcaccggcggcggtgatctcggcagccttctcttgctcggcttgctcctcggggttgcggaagaggaaaaggtcaaccatgacgtcccagggggagccacgggtgatggtgttgcggaggtagttaacctcacgtgcaagcaaccaccacatcagaccgatagcctgaggagacttgttgttgcaaggaatgacgatgtccacgtagttgatgggggagtcagtgtggcagaaagcgatggtgggaatgttcacgtaagaaga

SEQ ID NO: 217645 - DNA, 540 bp, Glycine max
cggctcgagcttggaataactggtcctgagggacatgctctttcacggcctgcagtgttggaaggagaggcaactgcccgtgctattcgtttagctgattttgtgaacactcctttatatgtggttcatgtaatgagcattgatgcaatggaagaaattgctaaggcccggaaatcaggacaaagggtaattggagagcccgttgcctctgggttagcccttgatgaatcttggctttggcatcctgactttgagactgctgcaaagtatgtcatgagtccccctattaggaaacgaggacatgataaggcccttcaagctgccctttcaacaggagttttgcagctggtaggaactgatcattgtgcctttaattccacccagaaagctcttggaattgatgacttccggaaaattcctaatggtgtcaatggtattgaagaaaggatgcatttggtatgggatatcatggtggaatctggccaatatctgtcactgactatgtctcgttgacaagcactgaatgtgctagaatcttca

SEQ ID NO: 217646 - DNA, 534 bp, Glycine max
ctcccccttttatttgaggaggttgtttgagcgcatgggtgcaacctatatcaaattgggtcagttcatagcatcagcgccaacgctgtttccacctgagtatgtacaagaattccaaaattgttttgatagagctcctcctgttccttttgaggaaattgaatctatattgcgcaaggaattaggaaagccattagaaagtgtttatgaatacattgacccaacacccattgcttctgcgtctatagcacaggttcatggagcaaggctaaaaggctctagggaggatgtggttataaaggtcttaaaacccggaatagaggacatattagtggcagatcttaattttgtttatgttgttgctaggatattggagttcttgagtcctgaaataagccgaacatcactggttggtattgtcaaagatatacgtgagtctatgcttgaagaagttgacttttacaaggaggctgcaaatattgaggcttttaggagatatttagaaacaatgggacttactgggaatgcaacagc

SEQ ID NO: 217647 - DNA, 524 bp, Glycine max
  unsure (1)..(524): unsure at all n locations
ctcccccttttatttgaggaggttgtttgagcgcatgggtgcaacctatatcaaattgggtcagttcatagcatcagcgccaacgctgtttccacctgagtatgtacaagaattccaaaattggtttgatagagctcctcctgttccttttgaggaaattgaatctatattgcgcaaggaattaggaaagccattagaaagtgtttatgaatacattgacccaacacccattgcttctgcgtctatagcacaggttcatggagcaaggctaaaaggctctagggaggatgtggttataaaggtcttaaaacccggaatagaggacatattagtggcagatcttaattttgtttatgttgttgctaggatattggagttcttgagtcctgaaataagccgaacatcactggttggtattgtcaaagatatacgtgagtctatgcttgaagaagttgacttttacaaggaggctgcanatattgaggcttttaggagatatttagatacaatgggacttactggga

SEQ ID NO: 217648 - DNA, 517 bp, Glycine max
gatccatatcaggccttacgagtttttgagagcatacgaaggtaccaaagacgaggagacaggtgaaagggcttcttttgatctcaacaaggcatattcaagctgtgacctttttcttctaagaacctccagagagcttgaaggagactggttggattatcttgctggtaattacaaggttcctgtggttccagttgggttgcttccaccatccatgcagataagggacgttgaagaggaagacaataaccctgattgggtcagaatcaaggattggttagacacacaagagtcgtcatccgtggtttatattgggtttgggagcgagttgaagctgagtcaggaggacctcactgagttggcacatggcattgagctttcaaatttgcctttcttttgggcattgaagaaccccagcttaagatcttggctcatggagcaattggagggtgcatgagtcactgtggctctggctctgtgattgagaagggtcattttggcacgtgcttgtgactct

SEQ ID NO: 217649 - DNA, 460 bp, Glycine max
tgcaattgaagttgaagtcttgcccttctctcttcaactccaaacacaagacatcatcatccatggctgcctccgtctccactgtcggagctgtcaacagagctcttttgaacctgaatgggtctggacctggggtttcagctcccagttcatccttctttgggagcagcttgaagaaggttattggctcaagggtccccaacacaaagatttcctctggaagcttcaagattgttgctgtagaagagaagaaagagattgaagagacccagcagaccgacaaggacagatggaagggtcttgcctatgatatctcagacgaccaacaggacatcacaagaggaaagggtttggttgactcccttttccaagctccacaggatgctggaactcactatgctgtcatgagctcctacgagtaccttagcactggacttcgccagtacttggacaacaacat

SEQ ID NO: 217650 - DNA, 447 bp, Glycine max
  unsure (1)..(447): unsure at all n locations
aggacaaaaggaaaaggcaccaaattcaatttaagtggacactttaactcaaaattatagaggaagacagtccaatatgaaaaatatagtaaaatcatctcaaacttggcatcttctctttgcacctaagacattgagaattctaagaatgttacacgcaagtcccatcacaacttctagcacttggatcagcacaaccttcaggaacagaaatatttacttgccaagtttgctttgcctccaattcaagattggaagaaagttcccctgttaatagcatcctcgttagcatttccaagtgcagcctcgttcaagtacttgtcagccaattggactctcttgacattctcttgttcttggacaagcatgttaccatacgtcaagagcttctccagagtcatcttgggctgctcaaaggttggaggtccatctttngagttcacaagc

SEQ ID NO: 217651 - DNA, 372 bp, Glycine max
aaagcgttggccatggcaaacatgattgtggcttccaccaaacctctggttccagtctgcaccagttcccgttcccccacacccaaagtgcccattctccaaatttcactccccaaagccccaaccttgaaactgaaactcccgatttcaaagccccagacgctgtccctgcttggagggatagcaccactggtcttgggcaaaccttccttggatgagaaattggaaaaagcgggtctcttggtcttaaacctaacccttccaatattaaggggggagtttctgctgaagatggttgccttggacaagatatgtctcaccccgctggggaaattcatggacgagagggacgcggcgatcagggagaagctg

SEQ ID NO: 217652 - DNA, 417 bp, Glycine max
aacctgaatctcggattttacattgaaaagtattgcgattacagaatagacccattcaaaagtggaaactgtgaatcctttggtgaggggattgaaatgaaaattacacagacatattaagcagtgggaagaaccttattaacaatctcctggctaagggctgcgatctgggaatcaagggacttgatggtttcttccttttgattctccaaggcagccagagccttctgtagtatatacttcagtctattcctcccctcagcaatcttttgttccacctcagcctgcgtgtccttcttgatcgtgttcagcgccgccgctatctcggcccgagaagccgccatgacagcattggccttctcctacagctgcttcacctcctccgacgtgtccttcacgctgctcagcttctccctg

SEQ ID NO: 217653 - DNA, 510 bp, Glycine max
  unsure (1)..(510): unsure at all n locations
caactacaaaggttgctgtaggagataagatattgaagtagtgctaagtgcctaacacctgcagtgaacaatggcctctgcatcagcatctcttctcaagtcttcacttgttcttgacaagtctgagtgggtgaagggacaaacacttcgccaaccttctgctgcatcagttgtgagatgcaaccccaccaccccatcaggcctcacaatcagagctggttcctatgctgatgagctcgttaagaccgcgaaaacagtggcttcaccagggaggggtattttggccatggatgagtccaatgctacctgtgggaagcgtttggcttcaattgggctagagaacactgaagctaaccgccaggcgtaccgtaccctccttgtgacagttccaggacttggtcagtacatctctggtgccattctctttgaggaaactctctaccaatccacaactgatggcaggaagattgttgacgtgctcctcnaacaaaacattgttcccggtattaa

SEQ ID NO: 217654 - DNA, 450 bp, Glycine max
gattgccgagattcaaccatgttatattgagacaatcaatcaagtacacaactcacagcaaaaaggtttataagctgtaaaggtacatgtaaccataaacaaaaatagtctccaagactataaaaacattacattttagacaaattagtcttcttccacttcatcctccgtcaacacctactacaactgctggtgttgctgctgcctaacatgtatcatattcactacaaacattttagtaggagtagcctttgacgaacaactccttcttggcttcctcagattcaccctcaccggtgtacttcccaagctgggcgagcgagttggacttggcacggaaaagaagtgcattttgtgccgccttcacattctctgggcggcctccccatgtcttcaaggcaatgttttggagggctctggcatacgagaaccacacgtgccacgggtttg

SEQ ID NO: 217655 - DNA, 428 bp, Glycine max
tgcacgcatagatagacattcacatcgatgcctcgatctacgctacgtaatcggctagagaaaggtctgggcagaggttttcttctaccttgctgagaacaatgtcctttttgagggtattctccttaagcctagcatggttacacctggagccgaggccaaggacaaggccagtcctcagacagttgctgattacaccctcaagttcctgcacaggagaatcccgcctggtgaccctggaattatgtttttgtctgggggacaggctgaggttgaagctaccctcaatttgaatgccatgaaccaatctccaaacccgcggcacgtgtaattctcgtatgccagagccctccaaaacactgtcttgaagacagggggaggccgcccagagaacgtgaaggcagcacaagatgcactctctttccgtg

SEQ ID NO: 217656 - DNA, 347 bp, Glycine max
gccgagcttaaaccattttggtatatattgagacataatcaagtacacaactcatagcaaaaggtttattaagctgtaaaggggcatttaaccataaacaaaaatagtctccaagactataaaaacattacattttagacaaattagtcttccacttcatcgtccgtcaacacctactgtaactgctggtgttgctgcctaacaagtatcatattcactgcaaacatcttagtaggagtagcttttgacgaacaactccttcttggcttcctcggattcacccttaccagtgtacttcccaagctgagcgagtgagttggacttggcacggaatgcgagtgcatctt

SEQ ID NO: 217657 - DNA, 345 bp, Glycine max
ggacaaggagggaatccccccagaccagcagaggctgatcttcgccgggaagcagctcgaggacggacgcacccttgctgactacaacatccagaaggagtcaactctccacttggtgttgcctcttcgtggtggtatgcagattttcgtgaagattcttacgggtaagactattaccctcgagggggagagctctgacaccattgacaatgtgaaggccaagattcaggacaaggaaggcatcccaccggaccagcagaggctgatttttgctggcaagcacctcgaggatggaaagacccttgctgactacaacatgcagaaggaatcaacccttcaccttgt

SEQ ID NO: 217658 - DNA, 460 bp, Glycine max
gggatattagagtactattattaatgggacacaattgagttcaacacaaaccgaacttattttcaagggacattattacagacccattaaacatcaaagttcttcaaatgttttgggaacacatccaacattacacaacgagcttaaaaccccccacggagacggaggacaaggtgaagggttgattccttctggatgttgtagtcagcgagggtccttccatcctcgaggtgcttgccagcaaaaatcagcctctgctggtccggtgggatgccttccttgtcctgaatcttggccttcacattgtcaatggtgtcagagctctccacctcgagggtaatagtcttacccgtaagaatcttcacgaaaatctgcataccaccacgaagacgcaacaccaagtggagagttgactccttctggatgttgtagtcagcaagggtgcgtccgtcctcgagct

SEQ ID NO: 217659 - DNA, 321 bp, Glycine max
ggacaaggagggaatccccccagaccaggacaggctgattttcaccgggaagcagcttgaggaccgccgccccctttctgactacaacatccagaaggagtaaactctccactgggtgtctcttcttcgaggtggaatgcagatcatcttgaaaattcttacgggtaagactattacccgtcaggaggagagctctgacaccattgacaatgagaaggccaagattcatgacaaggaacgcatgccaccggaccagcataggctgatttttgctggcaagcaccctgaggatggaaggaccctcgctgtctacaacatcca

SEQ ID NO: 217660 - DNA, 492 bp, Glycine max
gggatattagagtactattattaatgggacacaattgagttcaacacaaaccgaacttattttcaagggacattattacagacccattaaacatcaaagttcttcaaatgttttgggaacacatccaacattacacaacgagcttaaaaccccccacggagacggaggacaaggtgaagggttgattccttctggatgttgtagtcagcgagggtccttccatcctcgaggtgcttgccagcaaaaatcagcctctgctggtccggtgggatgccttccttgtcctgaatcttggccttcacattgtcaatggtgtcagagctctgcacctcgagggtaatagtcttacccgtaagaatcttcacgaaaatctgcataccaccacgaagacgcaacaccaagtggagagttgactccttctggatgttgtagtcagcaagggtgcgtacgtcctcgagctgctttccggcgaagatcagcctctgctggtct

SEQ ID NO: 217661 - DNA, 461 bp, Glycine max
cttccattaacgggtggtgcctctcttccatctccccagccaaaacctctctcaagaaggccacattaggcccttctgtcttcgcaaccgttagcactccttcttctccttcttcttcttcttcttcttccttcccttctctcattcaagacaggcctgtctttgctgcccctgcccccatcatcaccccaactgtgagagaggatatggcaaaggaatacgagcaagctattgaagaactccagaaattgttgagggagaagagtgaactcaaagccacagctgctgagaaagtggagcagataacagcttctctgggaacatcatcatctgatggcatcccatcatcagaagcctcagacaggatcaaagctggtttcattcacttcaagaaggagacatatgacaagaatccagctttgtatggtgaacttgccaaaggccagagccccaagtttatg

SEQ ID NO: 217662 - DNA, 507 bp, Glycine max
  unsure (1)..(507): unsure at all n locations
aactgcaatgcgactgtatttaaaactttgaatcttcatacaatttagcattgcttatataattaactaagattaatttgtcatctctctcggtgttgcgggctatataaagatcaaggttgaataatgaaaattttgttacaagaggatttccaaactcttatcaaaagaagattttccgacatgcataaacgcagttcatagtttcatatatatatatttttataaatatcatatggtgatgaaggtggctaggcctcttcattgcagatacacacgacctctaagcatggcccctatagcttccaatgcagaatggtggccacatctttaacttagggaaccaagatgaggtcattgataatggttgatgttcatacggagaaagaggatgcaaggccaaactgaaggccccagagctcaaaagatcccttaacaaagtcatagtatcctccttttagtgacaatgtctngttcaccaagccatctttaacaaatgggatgtta

SEQ ID NO: 217663 - DNA, 556 bp, Glycine max
gccgccctttttttttttttttctatttttttttttttttttttctattttcattcgaattcattttatttatatattaatattatattcaaatgaaataaaaagatatgaaaagatactaattataagaatttgaaagtgaaattataaagttattaaatgattaatcaatttttttctacctgttcctgtagtaaaaagagttccatctgttcttgaatagcttccttcaaaaggacttctgcttccccagtgaatgtcttggtagaagatatgatttctttgaattgaggtttattcgtgtttaagtaagcacgtaactcaacaagaaatttccttacctgtccaatttctaatgaatcaagataaccattcgttccagtataaatagttattatctgttcttccacggtaagaggagctgattgggattgtttaagcaactcgcgcaatcgttgacctcttgctaattgattttgagtagctttatcgagatcagaagcgaattgcgcaaaagcttctaattctgcgaatcgtgctaattccaattttaatt

SEQ ID NO: 217664 - DNA, 369 bp, Glycine max
gtggtaaaacctttcacttctgttatcattttctctcttctgccttatcttcctcagtttccactcatcaagtttcaatcttcctttgaataagcccaaatttgattgtatgaaccagcagctttttgctggtgcaaaatcgaatcgttgaactgggaaagtataaccctgtgttatcctacaccttgcactccaaactccaacaccaattggttggtgatggaggataataatagcaggagcacaaaatggacctctgtagagaacaagctgtttgaaaatgctcttgcagtgcatgatatggacaccccagatcggtggcacagagtggctgagatgattcctggaaagacagtggttgatgtgata

SEQ ID NO: 217665 - DNA, 410 bp, Glycine max
gggtggtgcctctcttccatctccccagccaaaacctctctcaagaaggccacattaggcccttctgtcttcgcaaccggtagcactccttcttctccttcttcttcttcttcttcttccttcccttctctcattccagacaggcctgtctttgctgcccctgcccccatcatcaccccaactgtgagagaggatatggcaaaggaatacgagcacgctattgaagaactccagatattgtggagggagaagagtgaactcaaagccacagctgctgagaaagtggagcagataacagcttctctgggaacattatggtgtgatggcctcccatcatcagaagcctcagacaggatcaaagctggtttcattcacttcaagaaggagaaatatgacaagagtccagcttt

SEQ ID NO: 217666 - DNA, 464 bp, Glycine max
gcgggctatataaagatcaaggttgaataatgaaaattttgttacaagaggatttccaaactcttatcaaaagaagattttccgacatgcataaacgcagttcatagtttcatatatatatatttttataaatatcatatggtgatgaaggtggctaggcctcttcattgcagatacacacgacctctaagcatggcccctatagcttccaatgcagaatggtggccacatctttaacttagggaaccaagatgaggtcattgataatggttgatgttcatacggagaaagaggatgcaaggccaaactgaaggccccagagctcaaaagatcccttaacaaagtcatagtatcctccttttagtgacaatgtcttgttcaccaagccatctctaacaaatgggtatgttagaaggtttccaagggaaacattcacagcttccttctcacagtgtgagcacaac

SEQ ID NO: 217667 - DNA, 415 bp, Glycine max
acatgaaaactattagtatgatcatatgatgataattgatatcccacagcatttaattaagccccttccctatttaaatttcacaaacattaaatcactgggatctcatcctgttgagctggttaagagcaggctgcaagatgttgtaaagaacccaagcaattgccggcgtaaccacacacaggagacgctgccccctggtgtcgttcgaggcagcttcagccatcgccgccacttcagaagccgccgccgtcgatgcatgcggcgcagccaccaagccagccaagccgccaagccccaacccaatgatcacgcctttggtgctgcgcatgcggttcagttggttcagcgccggctgcagaatgttgaacagaacccaccctattgcaggaattatgggcagcaacagtgccag

SEQ ID NO: 217668 - DNA, 444 bp, Glycine max
agcaaaacaagataagtgctatattgttgaaactctcatcaagccaagtggagaagctgaagaagaaggctaatgaacaaccttcaaaagaaggggtaagaccttatagcagatttgaagctatttcttctcatatatggagatgtgcatctaaggctcatcacgctcatgcatctgatgagaatcaccaaccaactgtagttatgtttagtgttgatattcgcagtagattgaatccacctctccctcataattattttgggaatgctttggcaaaaacagtgacacctaagtgtagtgtgggagatatcttatcaaacccattaagctatggggctcaaaagataaaggatgcggtttatgcggttacatatgagtttataaggtcacacttaagtgttgttttagggcaagagcaatttgataacataatggcttctttct

SEQ ID NO: 217669 - DNA, 353 bp, Glycine max
gagaaaaaagcccttatgttatccaattggtcttgccctaaaacaacacttaagggggaccttataaactcatatgtaaccgcataaaccgcatcccttattttttgagccccatagcttaatgggtttgataagatatctcccacactacacttaggggtcactgtttttgccaaagcattcccaaaataattatgagggagagggggattcaatctactgggaatatcaacactaaacataactacaggtggttggggattctcatcagatgcatgagcgtgatgagccttagatgcacatttccatatatgagaagaaatagctttaaatctgctataagggcttacccc

SEQ ID NO: 217670 - DNA, 460 bp, Glycine max
  unsure (1)..(460): unsure at all n locations
gtttcttacaaggctctactctactgcttcaccttctgctctagaaaattcagtggtgatacatggcttcggctactctctctgtagccaaaccagcccttcaggcaaatgggaaaggcttctctgaattctctggcctccgcagctcatcaggcttccttcccttttatagaaaatcttcagaggatttccattctgtcattgccttccagacctatgcagttggaagcagtggaggatacaagaagggtgtgacagaagcaaaactgaaggttgccataaacggatttggaaggattggaaggaactntttgaggtgctggcacggtcgcaaagactcccctcttgatgtcattgccatcaacgacaccggtggcgtgaaacaagcctctcaccttctcaagtacgattcgatcctccgaaccttcgatgctgatgtcaagccctgtggcagcgacat

SEQ ID NO: 217671 - DNA, 475 bp, Glycine max
caaggtaagaattttattgcacaatgagaaggcagagaaaattgatggttctgtttctcagtacaagttttagaatgaaaaatgaagcaacaagtgtttgtagtggtagtagtagtagtagtaagcatacaaaactacaatggcatggtacatacatataataattgaattaccaattcagaatttgatggctctcacttccacttgttggcaacaatgtcagccaaatccacaaccctttgggagtagccccactcattgtcataccaagcaatcaccttaaccatgtcatctcccatgaccatggtcaacgatgagtcaacggttgaggacacatcagtgcacctgaagtcaacagacacaagtggctcatcacacacagagaggattccctggagctcattgtctgcactctctctgaatgctgcattcacttcttctgcaaaggtcttctttgagacctgaacaacgaggt

SEQ ID NO: 217672 - DNA, 514 bp, Glycine max
  unsure (1)..(514): unsure at all n locations
gtgatggctttgaatttgccttctcccgcccaagtgaagcccttatttttctcttcaaataactccacaaaacttccaggtagcttttctttgaagagaaaagatagtgacacaacagtagagagacgagtttattgctctgccgctgctcaatcaccaccaccagcatggccaggaacagctattcccgagccttctgatttcaagacatgggatgggcaaaaacctatttctgtcttaggatctacgggttcaattggaactcagacactgagtatagtggctgagttcccagaaagatttaaagttgtgagccttgctgctggctctaatattactcttcttgctgaccagattaaaacatttaagcctgaagttgttggtcttagaaatgagtctctaattgatgaactcaaagaggctttggctgatgtggatcacaaacccgaaatcatccctggagagcanggagtcattgatgccgctcgtcaccctgatgccaccactgtagtta

SEQ ID NO: 217673 - DNA, 447 bp, Glycine max
  unsure (1)..(447): unsure at all n locations
ctgatggcaggaagattgttgacgtgctgcttgagcaaaacattgttcctggtattaaagtcgacaagggtttggtgccccttgcaggttccaacgacgagtcatggtgccaaggtttggatggtctagcctctcgctcagctgcatactacgagcaaggtgcccgtttcgccaaatggcgtactgttgtgagcatccccaacggtccctctgctctggcagttaaggaagcagcctggggtctggctcgctatgctgcaattgctcaggacaatgggttggtcccaattgtggagccagagatcttgcttgatggggagcatggtattgatagaacttttgaagtagcccaaaaggtctgggcagaggttttcttctaccttgctgagaacaatgtcctttntgagggtattctccttaagcctagcatggttacacctggagccg

SEQ ID NO: 217674 - DNA, 556 bp, Glycine max
  unsure (1)..(556): unsure at all n locations
gccgagcttaaaccattttgttatatattgagacataatcaagtacacaactcatagcaaaaggtttattaagctgtaaaggtgcatttaaccataaacaaaaatagtctccaagactataaaaacattacattttagacaaattagtcttccacttcatcgtccgtcaacacctactgtaactgctggtgttgctgcctaacaagtatcatattcactgcaaacatcttagtaggagtagcttttgacgaacaactccttcttggcttcctcggattcaccctcaccagtgtacttcccaagctgagcgagtgagttggacttggcacggaatgcgagtgcatcttgtgctgccttcacgttctctgggcggcctccccatgtcttcaaggcagtgttttggagggctctggcatacgagaatgacacgtgccacgggtttggagattggttcatggcattcaaattgagggtagcttcaacctcagactgtccaccagacaaaaacattaattccaggacagcaaggggaattctnctgtgaaggaccttgagg

SEQ ID NO: 217675 - DNA, 496 bp, Glycine max
agttgatacgttcaataacgatacttcaatttttgcatgcttactttccacaagagctggtggacagggcttaaatttaacaggagctgatacagttgtaattcatgacatggattttaacccacagattgatagacaagccgaagatcgttgccatcgaattggtcaaacaaagcctgtaaccatacatcggctggtgacaaagggaacggttgatgaaaatgtgtacgagattgcaaaaagaaagctagtattagatgctgctgttctcgagtccatggaggagattaatgaaggtgaattgcccgagaagaccatgggagagatattgtctgcaattttattgagttaaaatattgatctaagaaaaacagtttaatttatcatcacttcattcctatagttccaatcttgaattaatctgttgatttgggatagaagagaactggctgcctacaaattggcaagaatgcggtaccagtattgatgtacatta

SEQ ID NO: 217676 - DNA, 462 bp, Glycine max
tttatttttttttttttttttttttttttttttttttttttttttttttttttttttttttttttttttttttttttttttttttttgatttttgttattattttatattaataatatttatatattaattttttaaaaagaaaaaaaaaaaaaaaacaaaaaaaaaaaaaaaaaaaaaaaaaccgggggaaaaggaaaaaggggccccccccataagaaggggggaggaaaaaagagtattctataaaaacgccagacaaaagtgaaaaaccccccaaaaaaaaaacccggggggggaaaacacaaccaagaacaaaaaaggggggaccacaaaaaaaaaaaaaaaaaaaaaaaaaaggggggggacataaaagaaacccccaggaaaaaaccccccagaaaaaacccccgggaggggccccccacaaaaaaagggggccccccaaaaaaaaaagggccga

SEQ ID NO: 217677 - DNA, 512 bp, Glycine max
ctccgcgccgccatggagaacaccggtattctctgcgccgtcatgctcgacaccaaggggcctgagattcgaactgggtttctcaaggacagtaagcctatccaactgaaacaaggtaatgaaataaccatttccactgactatgacctaaagggtgatgagaagacgatttgtatgagctacaaaaagctgcctgaggatgtgaggcctgggatggtcatactctgcgcggatggcaccatatcatttacagttttatcatgtgacaaacaagcgggtttggttcaatgccgatgcgagaactctgccactcttggtgagaggaagaatgttaatttgcctggagtgatagtggatctgccaactttgacagacaaagacaaggaagatatcttggcctggggagttcccaataaaattgacatgattgctctttctttggttcgaaaaggttctgacctggtggaagtcaggaaagttctgggaaaacatgccaagacattatgctcatg

SEQ ID NO: 217678 - DNA, 513 bp, Glycine max
gctacgaaaaggcatacacttctcaattaaaacaactttagaccgtagaattcaaaatccagaagtggctagttttttggttcaccaaaagcctcatacaaaatcttaacaaatgaaagcaggtggctgctcgccacaatgataaggcaaatgtaacaaaaaaaaaaaaaaaaacagtaatataagatatgtgaaaaacaggtaacccatcctgataaatgcttgattgaagtttgcatccaatgtagatatgaagaggtataacgagacctcttttgcaccatctaaaaaatttgccaaaaacagcagaagaattccctgtaatggggtgatcatttcacagtcaagatcttgatgacagaagcagtgcccacacgatgaagtgccacaaccgaatccccgttgtggcagagacccttggacttggcatgttgcatggcgaattctattgcttcttcagttgtttcagcatgagaagctctagcagaagctgcactcaatacgggaaccaac

SEQ ID NO: 217679 - DNA, 508 bp, Glycine max
attcttcaagattcaggtactgcgtttcggaagcagacacagatggctcgtacgaagcaaaccgctcgtaagtccacaggaggaaaggctcctaggaagcagcttgcaaccaaggctgcacgtaagtctgcaccaactactggtggtgtgaagaagccccaccgttatcgtcctggtaccgttgctcttcgtgagattaggaaataccagaagagtaccgagcttttgatccggaagctccccttccagaggctggttcgtgaaattgctcaggacttcaagactgatctgcgtttccagagccacgccgtgcttgcattgcaagaagctgctgaggcataccttgttgggctctttgaggacactaacctgtgtgccattcacgccaagcgtgtaaccattatgcccaaggatattcagctggcaagaaggattcgtggtgagcgtgcttgagttggtggttggaaagatgaagatgattggtggctgcggttggtgttttgttttc

SEQ ID NO: 217680 - DNA, 544 bp, Glycine max
aacttaaacgagattagatggcaactgaatgttgtccaatacagtttctaaagtggctgcaacatcccgcaggtaaaaactaaaacagaagcattctaacacatacatatgtccaaaaatcaattacaagccaattttcttaaaggaagaaaacacagtcacggacacttagcagtatttgcctatatcccaattaatgctactaccagcagaaaacctaccctccctaacaaccccatctattgaataaaaaaaggaatctgaaaaacaaaaacaccaaccgcagccaccaatcatcttcatctttccaaccaccaactcaagcacgctcaccacgaatccttcttgccagctgaatatccttgggcataatggttacacgcttggcgtgaatggcacacaggttagtgtcctcaaagagcccaacaaggtatgcctcagcagcttcttgcaatgcaagcacggcgtggctctggaaacgcagatcagtcttgaagtcctgagcaatttcacgaaccagcctctggaagggggagcttcggat

SEQ ID NO: 217681 - DNA, 359 bp, Glycine max
cgaagcaatatttcatatccacgaaatgtaaatcaacatagaataatcaaaactaacgacgatattcaaagtcaaaacacagtttcaaatccaatttgtgcaaagcaacctcttctcctctcagaagcacgcatccaacagacagcagcagcagagagcagccaaactgcaacaattaaacaagaaattagaacccgtgcattgaacaaactctcactaatttcacacaagaatcgcaacgattcctcgttttaccaaagaaaaatgaacagacgagactgaaaattcaaaatcgagtcttctcaattaaaaattcaaagtttgcatttatcataaattatttcctatttcaaattaag

SEQ ID NO: 217682 - DNA, 548 bp, Glycine max
tgctcgtgaagcagtaaatgaagttaaagtggtgactgactcaagctggaataaccttgtgattgcaagtgagacccctgtgctggtagagttttgggcaccgtggtgtggtccatgcaggatgatagcgcctgttatcgatgagttagcaaaggattatgctggaaaaattgcatgctacaagcttaacacagatgattctccaaacatagcaacacagtacggcatcagaagcataccaacagttctgttcttcaagaatggagagaaaaaagaaagcataattggcgccgttcccaaatctacactgtccgcaacagtggaaaaatatgttgaattataaactgagaaaatgataaacaattgcatgcattacagtgctagaattgaagggatggaatgggagaagtgacaatagtgacattgcaaatttcattctcttcaattcttttccattccttaaatggcaatagatagtgtttgtttataagtttaaagaccatctcttcttctgggatttgacaattttaagtaatactttgtctctt

SEQ ID NO: 217683 - DNA, 536 bp, Glycine max
aagagtacaagtattacttaaaattgtcaaatcccagaaggaaagatggtctttaaacttataaacaaacactatctattgccatttaaggaatggaaaagaattgaagagaatgaaatttgcaatgtcactattgtcacttctcccattccatcccttcaattctagcactgtaatgcatgcaattgtttatcattttctcagtttataattcaacatatttttccactgttgcggacagtgtagatttgggaacggcgccaattatgctttcttttttctctccattcttgaagaacagaactgttggtatgcttctgatgccgtactgtgttgctatgtttggagaatcatctgtgttaagcttgtagcatgcaatttttccagcataatcctttgctaactcatcgataacaggcgctatcatcctgcatggaccacaccacggtgcccaaaactctaccagcacaggggtctcacttgcaatcacaaggttattccagcttgagtcagtcaccactttaacttcatttact

SEQ ID NO: 217684 - DNA, 411 bp, Glycine max
gcaaaggcatttgctgatgaaattggaattcctttcatggaaactagtgctaaaaatgccaccaatgttgaacaggctttcatggccatggctgctgaaattaaaaacagaatggcaagccaaccagtgaacaatgccaggcctccaacagttcaaattcgaggacagccagtgaaccagaaggctggttgctgctcgacttagaaagagacgaagtatttgtggtctcagacgtttacatgtgtctcagtggcatgtaaaactagcttttcacatattgctttcatatgaagattgttcgtcatgatttgctccttatcgttaagtcgttgttaaaacttccattctttttctatgtatttgattttaaaagaaaataacatttgtacaaaattaggaatattggtgaat

SEQ ID NO: 217685 - DNA, 411 bp, Glycine max
attcaccaatattcctaattttgtacaaatgttattttcttttaaaatcaaatacatagaaaaagaatggaagttttaacaacgacttaacgataaggagcaaatcatgacgaacaatcttcatatgaaagcaatatgtgaaaagctagttttacatgccactgagacacatgtaaacgtctgagaccacaaatacttcgtctctttctaagtcgagcagcaaccagccttctggttcactggctgtcctcgaatttgaactgttggaggcctggcattgttcactggttggcttgccattctgtttttaatttcagcagccatggccatgaaagcctgttcaacattggtggcatttttagcactagtttccatgaaaggaattccaatttcatcagcaaatgcctttgc

SEQ ID NO: 217686 - DNA, 332 bp, Glycine max
ccaagatcttctttgtattgctgctatgtctaatcatagcatcttcttctgggtttgtgaattgctctgatgttgagaaggaggaaaagattggaatatttgagctcaagaaaggtgacctttctttgacggtcaccaactggggcgcttcaattttgtccctggtgattcctgataagaatggaaagttgggtgacgttgctcttggatatgattctgataaggattacagttatgatacaacatattctggagctactgttggcgcggttgctaacagaattggaggagctcactttactttaaatggaatctattacaaattaattgct

SEQ ID NO: 217687 - DNA, 482 bp, Glycine max
aaacaaaattctgcatcactcatgcagagtcaaaatatcaatgaaaagcaacaaatccaaaccaaaacatgtttagagaaacagcttggaaggttctgaagctgccacaaattattagactaaccatgggactctaattattcattctaaggggggcccaagtttggatgaaatccagagctataaatgctacactgacttaccgtggcatattaaaaatgggggaaagctcactcctcctatctcactttgaactaatgtacggatttttggtggaaaacttaaaaagcatataatgcttgtaaggcttttcttgggtcacaattgttgaagggaaattaggatgattcactgaatcagggaatgcttgagactccaaacatagtcctgcatgagcattgtacacatatccaccttttcccttcaaatccttgatatagttaccagtgtaaaattgcaaaccaggagcatttgtgaacaac

SEQ ID NO: 217688 - DNA, 416 bp, Glycine max
gcaaagtgattgattccagctccaatggccttgggcaccaacgccttgatcggaaggaaggttcttgtctcacccccaacccccaaaacaaccaaatcatctactccgctacaattccttttcaagagaagcatcttaaatgctcacaattcacaagctgctctagctgcccttatcttttcctccgcgagcctctctgtgaccccacaagcccttgccgctgataacgtcacccctccccctgtaattgaagcccaacagagccaattgaacccctccaactcatcctgccctttctcacagaacctcctgcttacagctccaaagccacaagcctactccgacctccccgaaggcaccaactggcgctacaacgagttcttgaacgccgtcaagaagggaaagactagcgagtc

SEQ ID NO: 217689 - DNA, 472 bp, Glycine max
gtgctaattgttttttctccttgaatttgataaaataattattgattcttacagtgtacaagtcagagcgtattttatagtacaaacataattctgtgacttgcgtgtatgattatgcaacatataattcggcttttccatcaatgaatagactcatgaactctttaccattcacagatgctttttctatgagaagttgagcaagcttgcgaaggatatcaatgtgagttgatatagtatgtgttgccctagaatatgctctctctaccagttccctcacttccgcatccactacatccgcagttgccatggagtaatccttttgcgatgacatctgttgacccaagaatggatttccaccaggtccaccaatggcaacttgtccaatcttttgctgaatgcaaatctctcaaccatctgccttgccactcgtgaaacttgcatgaagtcgattgatgctccagtggtgaca

SEQ ID NO: 217690 - DNA, 517 bp, Glycine max
  unsure (1)..(517): unsure at all n locations
gccctggaaaaaatcaaagaagagttgatgctgttgggctttatttctctgctactgacaataacacaaaatgggatcatcagaatttgtgttccagtgggttggactcaccatatgcttccttgcagtctaaaggataaagaaaaggaagaatcaacaaaaaccacatcacattttcagacatttttctctttctctgatatttctggcactgctaggcgccttttagctgagagtgagagtgagaatgaggatcaccaaccagcaacaggagaaaaactttgtgctaggaagggcaaggttcctctattatctgtggaggcactgcaccaccttcatacctttatttttgtcctagctgtggcccatgtcacattntgtgttctcactggtgtctttggagggttaaaaatacgtgagtggaagcactgggaagactctattggcaatgacaataaaaatgaaacacaaccagttttggaaccaacagtgactcatgttcaccaacacgctttta

SEQ ID NO: 217691 - DNA, 512 bp, Glycine max
catccatagaagatcaggtaatctttattatttccttaaataagaggggttttctcactaaatatgagttacaagctagtttcgcattacactcggaaaatctattctaaaaacaatcttgcaaatataaaagcatattaaataagtgtatctgaatccatcaagacacaatgcaaagtacgaacatagaggcccaccaaatggatgggatatgcttctggaagttaagggtttacatggaaccttagcttctggaagcacgagaggagaggatattgcttcaatccttagttcaaaaatacaatagatggcacatgttggactttgtggtaatcctccccagcagttccaagcctggtcttgaatgatttaggcatccatctgatttctagctcccgaagagtagtgataaattttagtccatcaggaaccgtctttaaattgttgcaatcagatatgctcaaatcggtaagattgggcatggcttgatcctctattgtccactgatgtaa

SEQ ID NO: 217692 - DNA, 524 bp, Glycine max
  unsure (1)..(524): unsure at all n locations
gaagaatgttgaggtgttctgctatgccttgagtgttaatgatggtactgaatggaggcaacgtattcagtctgaagcagagcactttgtagatgtatctgccatgtcatcggatgcaatagcaaaaatgattaatgaggataagatacatatccttgtcaacctaaatggttatacaaagggtgccagaaatgagatatttgctatgcaacctgcacccattcaagtttcatatatgggattccctggaacaactggggctacttacatagactacttagtcactgatgagtttgtttcaccactacggtatgcaaatatatattcagagaagattgtacatctaccgcattgctactttgtaaatgattataaacagaaaaatcaggatgtgttagatccaaactgcccacacaaacgatcagattatggtctacctgaggatacatttatanttgcatgcttcattcaactttacaagatggatcctcgaatatttaatacatggtgtaatattcttaaac

SEQ ID NO: 217693 - DNA, 512 bp, Glycine max
  unsure (1)..(512): unsure at all n locations
ctcctcttcacacattttctgtgcgctctaacaaacattctcgttcacactttcagattgtgtgaagatgggggcgggtggccgaactgatgttcctcctgccaacaggaagtcagaggttgaccctttgaagcgggtgccatttgaaaaacctccatttagtctcagccaaatcaagaaggtcattccacctcactgtttccagcgttctgttttccgctcattctcctatgttgtttacgacctcaccatagccttctgcctctattatgttgccacccattacttccacctgcttcccagccctctctctttcttggcatggccaatctactgggctgtccaaggttgcatccttactggagtttgggtcattgcccatgagtgtggccaccatgcattcagtgactatcagttgcttgatgatattgttggccttgtcctccactccggnctcctagtcccatacttttcatggaaatacagncatcgccgtcaccactccaacactg

SEQ ID NO: 217694 - DNA, 540 bp, Glycine max
aacagaatacggtaacaacttggattcaagaactggaacaagaataagcttctccacagtcttgagaaacttggtcgacatgcaccgattgcaaaccatggtgcaataatcaaactgttcagagaggctatatcttattctgtaaacaaaaccgctatgcaactgtctagatacttactaccaacatcagggttcaacaaaattattcccaataagcaaccatgatactaaacagtcacaagggaaagttcaaagaagcctcggctacattaatcatcacaacttattgttgtaccaaaatacacctttgctctcggtactttgatctggctccacataaatacactctcttgcctctctccacattgccttgacaaatggagtctcatcaaaccgataatactctcccaaaatgggttttattgcctttgtagcctccattgcatgataatgtggcattgtggagaacaagtgatgtgctacatgagtgtctgtaatattatggaagaccttgttcaggattccataatctctatccac

SEQ ID NO: 217695 - DNA, 450 bp, Glycine max
gtctggtggacagtctgaggttgaagctaccctcaacttgaatgccatgaaccaatctccaaacccgtggcacgtgtcgttctcgtatgccagagccctccaaaacactgccttgaagacatggggaggccgcccagagaatgtgaaggcggcacaagatgcacttcttttccgtgccaagtccaactcgctcgcccagcttgggaagtacaccggtgagggtgaatctgaggaagccaagaaggagttgttcgtcaaaggctactcctactaagatgtttgtagtgaatatgatacatgttaggcagcagcaacaccagcagttgtagtaggtgttgacggaggatgaagtggaagaagactaatttgtctaaaatgtaatgtttttatagtcttggagactatttttgtttatggttacatgtacctttacagcttataaaccttttt

SEQ ID NO: 217696 - DNA, 502 bp, Glycine max
cattgattgccgagattcaaccatgttatattgagacaatcaatcaagtacacaactcacagcaaaaaggtttataagctgtaaaggtacatgtaaccataaacaaaaatagtctccaagactataaaaacattacattttagacaaattagtcttcttccacttcatcctccgtcaacacctactacaactgctggtgttgctgctgcctaacatgtatcatattcactacaaacatcttagtaggagtagcctttgacgaacaactccttcttggcttcctcagattcaccctcaccggtgtacttcccaagctgggcgagcgagttggacttggcacggaaaagaagtgcatcttgtgccgccttcacattctctgggcggcctccccatgtcttcaaggcagtgttttggagggctctggcatacgagaacgacacgtgccacgggtttggagattggttcatggcattcaagttgagggtagcttcaacctcagact

SEQ ID NO: 217697 - DNA, 523 bp, Glycine max
ggctcgaggtgggttgccatcacaagcctttgagtacatcaaatacaatggaggacttgagacagaggaagcatacccctacactggaaaagatggtgtatgcaaattctcagctgaaaatgttgccgttcaagtcattgactcggtcaatatcaccttgggtgctgagaatgaattaaaacatgcagttgcatttgttcggccggttagtgtggcctttcaggtggtgaatgggttccatttctacgagaatggagtttacactagtgacatttgcggtagcacttcccaggatgtgaaccatgccgtccttgctgtggggtatggagttgaaaatggcgtcccatattggctcataaaaaattcatggggagaaagttggggtgagaatggctacttcaaaatggaattggggaagaacatgtgtggtgttgcaacttgtgcgtcttatccaggtgtggcataaatagcataagaatatggtccctggtgactaccaccttgtcatgcttcagagtttaaa

SEQ ID NO: 217698 - DNA, 463 bp, Glycine max
gttaaatagtgcaaagtagcaaagacatgctatcttaattcttataactgataattaaagcggggcgcatcaatacaatacaatacaatatgtaactatgaactatcaatatatgatcgttatttatgtctgtgatacacacaattcaggccatgatattcttacgtgatttacagcaacttctaacttatttaatacatcataccaacccaactaggagcaattttcattatacaatgacacttatctttaaactctgaagcatgacaaggtggtagtcaccagggaccatattcttatgcaatttatgccacaactggataagacgcacaagttgcaacaccacacatgttcttccccaattccattttgaagtagccattctcaccccaactttctccccatgaattttttatgagccaatatgggacgccattttcaactccataccccacagcaagga

SEQ ID NO: 217699 - DNA, 534 bp, Glycine max
atcctggaccatcacccccttcacctgtgaagccgccaaatgtctgtgacaactactacagctgtgctgatagtgctacttgttgctgtatttttgagttcggaaatgcttgcttcgagtggggttgctgtcctcttgagggtgcttcctgctgtgatgaccactacagttgctgccctgcagactatcccatctgcaacacttacgctggaacttgtctcaggagcaagaacaacccctttggagtgaaggcattaaggcgtactccagcgaaaccccattggaccttcggacgtaagaacaaggtcagcagtgcttaagcagtttaaggaaatgtgaacgtgcagaaggagccaatgatgaagtaaaagggaagacgaaggactaaagcaccagctggatgcacttcccccttcttcacataatgctgcacgtaacataaagatctttaccattttattatgatacaaaatagataatgttctgtatcaaaattcagtcagacattggctctgtacatagggttatattatc

SEQ ID NO: 217700 - DNA, 462 bp, Glycine max
aagcaaattaaaatagcatgggaatttgggacaaatccaaatattgctgctgcattggcacataatctacagaaccttgaaaactaacagcaatcaaatatgttcgccatttggaatttgaatacaaataccgggcattgataatttaaccctatgtacagagccaatgtctgactgaaatttgatacagaacattatctattttggatcataataaaatggtaaagatctttatgttacgtgcagcattttgtgaaaaagggggaagtgcatccagctggggctttagtccttcggcttcccttttacttcatcattggctccttctggacgttcacatttccttaaactgcttaagcactggtgaccttgttcttacgtccgaaggtccaatggggtttcgctggagtacgccttaatgccttcactccaaaggggttggtcttggtcctgagacaagtt

SEQ ID NO: 217701 - DNA, 434 bp, Glycine max
ttctgaggctaccatcgccaaacgaaggagctatgcgaataccatcagctatctgactcctccagcagaaaatgcaggactgtacaaaggtcttaagcagttaagtgagctcatctcctcataccagtccctcaaggacactggccgcgggccacaaattgtgagctcaattatcagcacagctagacaatgtaatcttgacaaggatgtggaactgccagaagagggtgaagagatcccagcaaaagatcgcgaccttgtggttggaaaggtgtatgccaagatcatggagattgagtctcgcctgcttccttgtgggctccatgtcattggcgagccaccctcagccttggaagcagttgcaacactagtgaacatagctgcacttgatcgaccagaagatggtaattcctctcttccatcaatactagctg

SEQ ID NO: 217702 - DNA, 418 bp, Glycine max
gatacaagggaatcattctttatttattaaactgggagcaatttttgacatgttggtttggaatttgcaactgcccaaaggaacatgatccctgaaaatgattaaaattccagccgggaaaaaggagagaggagcaaaatcacattaaaaggaccccattaacaactttcaattcagggggggaaaaaagctccagatccaaagaaggcctagttaaaaaacagttaatgtttctgctgtgcatctcaattatcacttcagcgatcaatgccttctattttggcttacacttctgagtacaactgcctgagcttggcaatggtggcttctgaagtctcccagcaaccgcgtacattggcttccaagaatgtctgcaccagcttcctaaaggagtttggatttgtgctcattagcttct

SEQ ID NO: 217703 - DNA, 546 bp, Glycine max
atctatctatctatctccatcttcatcactcccatggacaacgacacaaacacaacaccaaccaccacctcagaaccacaaatagcacacgattttcccggtctcatccgtgtcttcaccgatggtcgcgtccaacgcttcaccggaaccgacgtcgttccaccctccaccactccccacattacatccaaagacatcacactcctccaccctcactccgctactctctccgcacgcctcttcctcccaacaccacaaaccaccagccgccgcaacaacaacctccctctcttaatctacttccacggcggcgccttctgcgcctcctcccccttcaccgcaaactaccacaactacgtcgccacaatcgtcgccgaagccaaagtcgtcgctgtctccgttgactaccggctagccccggagcaccctattccggcagcgtacgaggattcatgggctgcactacagtgggtggcgtcacaccgtaacaaaaatggacaagagccttggttgaatgagcatgcagacttcggtagggtttttttg

SEQ ID NO: 217704 - DNA, 453 bp, Glycine max
ctccccgcacttcagcaatagaaatacatctcagatggcactaatgaacgcttaatggtattattaggtcatcgacaaatttgtatcaatgaataagatattcatcccaaactgtgtgcaaagtcagctcaagctaacaatttagaacaaacgaccgtatctggaaaccttcatcaccttcacaaagctgcgggaatcatgtcaagaaattgccacaggtttgttaccaggtgggagtttacgatgggtatcagtgtcagatgccttggatggaggccagtaccgaaacatggacctaccaacaatgttctcaaccggcaggggaccccagttatgagaatcaaagcttttattccgattgtcgcccattacaaacacatatccttctggcacaaccattggatccatcttataagctagagcctctaatacaaaatcttgttcttcagcagc

SEQ ID NO: 217705 - DNA, 519 bp, Glycine max
  unsure (1)..(519): unsure at all n locations
cttctctctccaccatgcaccaagccatttcccacagaagcttcatccccatagtagcacgtggcatgccacacgcaggaggaatcaaagaatccaatggcacctatccatccaaagctgccacaatggtatcggagaacgcggtggtaatcattggaaaacggggatgctgcatgtgccacgtggtaaaaaggttgttacaaggtctgggagtgaaccctcccgtgtacgaggtggacgaggaccacgaagccgccgttgctctccacctgtccccgcagggcgccgaaacggtgcagtttccggcggtgttcctggccggcaagttgttcggaaggttggaaagagttatggccactcatatctcaggtgaattggttcccatcttgaaggatgctggtgccttgtggctctgactcttactctagctacctncatcttttttttctacatctgctcctttttttttaaacctaatttctcgagtgggaattaattagatatagcgaaataattttc

SEQ ID NO: 217706 - DNA, 516 bp, Glycine max
gatgaacttgtacgtcaacatcaactaattgaaacaaaatgtacaatatctctcttccagacttttcaacacaagggagttgttaacaacgcagtttctcatcttgcccagttaagagacgcaggaaaagaaaaataaaacacaaaaaaggagggaattgaacctaagaaaattaatttcgctatatctaattaatttcccactcgagaaaataggtttaaaaaaaaaagagcagatgtagaaaaaaaagatggaggtagctagagtaagagtcagagccacaaggcaccagcatccttcaagatgggaaccaattcacctgagatatgagtggccataactctttccaaccctccgaacaacttgccggccaggaacaccgccggaaactgcaccgtttcggcgccctgcggggacaggtggagagcaacggcggcttcgtggtcctcgtccacctcgtacacgggagggttcactcccagaccttgtaacaacctttttaccacgtggcacatg

SEQ ID NO: 217707 - DNA, 523 bp, Glycine max
agcaattcgaattcccaatccaaaaccctaataccttcaaagaacctagtagtgaatcagtgatggcacctaaggcagagaagaagccagcggagaagaagccggtggaggagaagaagtcgacggtgggagacaaggctccggcggagaagaagccgaaggccggaaagaagcttccgaaggagggaggagccggcggagaaggggggaagaagaaaaagaggaacaagaagagcgtggagacatacaagatatacatattcaaggttctgaagcaggtccaccctgacattggtatctcaagcaaggccatgggaatcatgaacagcttcatcaacgacatcttcgagaagcttgctcaggaatcttccagacttgcccgctacaacaagaagcccaccatcacttcaagggagatccagaccgcggtcaggcttgtgcttgccggtgaactggccaagcacgccgtttctgagggtaccaaggccgtcaccaagttcaccagctcttggacaaaatatct

SEQ ID NO: 217708 - DNA, 517 bp, Glycine max
cataaacaaccattccttttatcaaattgctcctatatgatcaattctaccaattccatacacagaggatcaacccaatcctaattcttcacttacaaattaaaaaccaaaaagctaccagttcaaacctaaacatagggtcgctagatctaacagatacacatgaagcaaaacaagagcgaggtaaacaaagttaagatattttgttcaagagctggtgaacttggtgacggccttggtaccctcagaaacggcgtgcttggccagttcaccgggcagcacaagcctgaccgcggtctggatctcccttgaagtgatggtgggcttcttgttgtagcgggcaagtctggaagattcctgagcaagcttctcgaagatgtcgttgatgaagctgttcatgattcccatggccttgcttgagataccaatgtcagggtggacctgcttcagaaccttgaatatgtatatcttggatgtctccacgctcttcttgttcctctttttcttcttcccccct

SEQ ID NO: 217709 - DNA, 524 bp, Glycine max
ctactactacttttcctccacaaaatgatgctcagaatcaagagggttcccactgtcgtttccaactaccaaaaagacgacgctgcagactctcctcgtcccgtcggaggttgtggtcggaattgcctcaaagcttgttgccttccagatgcaaagctgcctttgtatgctttcaagaaggctaatggaaaggatttggccctgcatgcatgcgccggggagcctcccctcacattcctcgactcacttcttcttggagagtgggaagatcgcatgcagagaggactttttcgctatgatgttaccgcctgtgaaaccaaggtgattcctggtgaatatggtttcgttgcccagcttaatgagggtcgtcacctcaagaagagaccaactgagttccgagttgacaaggtccttcaaccctttgatgaaaacaaattcaactttaccaaagttgggcaagaagaggtcctcttccaatttgaagctagcgaggatggacaagtccaagtctttccaatgctcca

SEQ ID NO: 217710 - DNA, 498 bp, Glycine max
gtttgagtttgagtttgagttgagtcctcagtgaatgatatttgtgactgaaaaggccaaaaacatgatcatgaggaagcacaacaacccactttggtttgtggtgttcttgtttccctcttaggctccttttggtgaacttcagagtgcaaagttggttggttggtgggttggtgtggttgcttcattttctaggtgcattttggtttctctctttttgtcatggctggtggacggagacaacagaggctcaacaagtcatgcattctcctcatagccattgcaagaatagaaaggtttgcattcaagggggtggcatccaacttggtgacttacctaactgatgttgtgaacttgagtaactcatctgcagcaaagatggttaacagttgggttggatttacttccataatgccattgctggtggcaccaattgctgacgcatattggcacaaatattccaccataatggtttcatctttcctgtattttgtggga

SEQ ID NO: 217711 - DNA, 467 bp, Glycine max
aatacaattactgttattcaatatcatgtcaagtagtccaacaaactttagcccaaaaggaatatgggaagataacacttgaaaactaaagaggaacaaaaaaaccctctcaatattcactatttgaatcactcttcttatggtaatatctacacaagagtgcatacaatagcaagctcactgtacttaaccatgctagaagccaatagtaactgtccaagtgtgcttcaaccatatcatcacagaaccagcttggtattccctttgaacttgtgtacacttcaactagtgtaatcaacagtgcactcacaaagcttccaaccccaaaaacacttgtatacaaggcaatccccattgtcctcatattcctgggaacttcaccatagaagaactcttgcatgccaacaactgtgaaaatgtctgagatgccaagaagaatgtactgtggtagcagccaaaaaatactt

SEQ ID NO: 217712 - DNA, 455 bp, Glycine max
tacaaaggttgctgtaggagataagattgcagtagtgctaagtgctaacacctgcagtgaacaatggcctctgcatcagcatctctgctcaagtcttcacttgttcttgacaagtctgagtgggtgaagggacaaacccttcgccaaccttctgcatcagttgtgagatgcaaccccaccaccccatcaggcctcaccatcagagctggttcctatgctgatgagctcgttaagaccgcgaaaacagtggcttcaccagggaggggtattttggccatggatgagtccaatgctacctgtgggaagcgtttggcttcaattgggctagagaacactgaagctaaccgccaggcataccgtacccttctcgtgacagttccaggccttggtcagtacatctctggtgccattctctttgaggaaacactctaccaatccacaactgatggcaggaa

SEQ ID NO: 217713 - DNA, 466 bp, Glycine max
gccgagcttaaaccattttgttatatattgagacataatcaagtacacaactcatagcaaaaggtttattaagctgtaaaggtgcatttaaccataaacaaaaatagtctccaagactataaaaacattacattttagacaaattagtcttccacttcatcgtccgtcaacacctactgtaactgctggtgttgctgcctaacaagtatcatattcactgcaaacatcttagtaggagtagcttttgacgaacaactccttcttggcttcctcggattcaccctcaccagtgtacttcccaagctgagcgagtgagttggacttggcacggaatgcgagtgcatcttgtgctgccttcacgttctctgggcggcctccccatgtcttcaaggcagtgttttggagggctctggcatacgagaatgacacgtgccacgggtttggagattggttcatggcattcaaa

SEQ ID NO: 217714 - DNA, 475 bp, Glycine max
  unsure (1)..(475): unsure at all n locations
tctgaacgtgttcgtgcattccaagccaaggttgcaacttactagctagctatgtcttcttcatacgggggataccattctcaatcctatgctccatctgcgccagaacaacctccatattccaattataatcacacttcttcttctacatcaaattcatcgtcatccagttttccagcagggacgccccaggacgtgattcggagctttcagatggtggatagggaccgaagcggcttcatcgatgagcgtgagttgcaccaagctctctcttctggattccaccacttcaactttaggaccattcgtcttctcttgttcctcttcaagaatccacaccaacccctcacaattggaccaaaggaatttgcagcactctggagttgccttggtcattggcgaggaatatttgagaggtacgataaagacaggagtgggaaaattgatccattaaaactcanagatgctctgtatg

SEQ ID NO: 217715 - DNA, 526 bp, Glycine max
  unsure (1)..(526): unsure at all n locations
gcgcttcaaggcgtctcgtagggctaatccgcctcacgagggtcaccaacggcacgtgcctttggggggccgaggccccctactgctggtcggcaaacggacggcgggcgcacgcgtcgcttctagcccggattctgaccacaaaacgctactctagactctagtagtagcagagtagcatcatcgtcatcatcaaaccttggtgaatcaaaaagaaaattagaaggaaaagatgttgttggggaagagacctcgtcctccaattatgaagagaacaacaagcatgtcggaaataaccttcgatctgaacacgtccttggacgatgatccgaacaactccgtgaagggaccaggaggagatgggcctnctgttgggctcaacggtttagatcagaacagggtttgggccatggtttcacccagaaaccaccatagaaggcaatattccgaggatacccctggcttcttgcgcgtttgctatctctgcaaacgccgtttagtacccggccgtgacatcttcatgtac

SEQ ID NO: 217716 - DNA, 507 bp, Glycine max
aagctaagggcatgagcatataggaataataataatgatattgcatcatcaatccttgtttggatgccacaattaactacaaggcaaccacggtttcgcctttagtattagtagtaacttgagacccagaattaggctttgccgcaacttgtttctttgatgatgccacacgacacttatcttttctctcatcatgcttcatctgctgttcacggcattctgaactgcagaaagcactatcacctttgtacatgaagatgtcacggccgggtactaaacggcgtttgcagagaaagcaaacgcgcaagaagccaggggtatcctcggaatattgccttctatggtggtttctgggtgaaaccatggcccaaaccctgttctgatctaaaccgttgagcccaacaggaggcccatctactcctggtcccttcacagagttgttcggatcatcgtccaaagacgtgttcaaatcgaggttatcttcgacatgcttggtagtctcttcat

SEQ ID NO: 217717 - DNA, 474 bp, Glycine max
tgcaattgaagttgaagtcttgcccttctctcttcaactccaaacacaagacatcatcatccatggctgcctccgtctccactgtcggagctgtcaacagagctcttttgaacctgaatgggtctggacctggggtttcagctcccagttcatccttctttgggagcagcttgaagaaggttattggctcaagggtccccaacacaaagatttcctctggaagcttcaagattgttgctgtagaagagaagaaagagattgaagagacccagcagaccgacaaggacagatggaagggtcttgcctatgatatctcagacgaccaacaggacatcacaagaggaaaggggtttggttgactcccttttccaagctccacaggatgctggaactcactatgctgtcatgagctcctacgagtaccttagcactggacttcgccagtacttggacaacaacatggatggattttac

SEQ ID NO: 217718 - DNA, 481 bp, Glycine max
aggacaaaaggaaaaggcaccaaattcaatttaagtggacactttaactcaaaattatagaggaagacagtccaatatgaaaaatatagtaaaatcatctcaaacttggcatcttctctttgcacctaagacattgagaattctaagaatgttacacgcaagtcccatcacaacttctagcacttggatcagcacaaccttcaggaacagaaatatttacttgccaagtttgctttgcctccaattcaagattggaagaaagttcccctgttaatagcatcctcgttagcatttccaagtgcagcctcgttcaagtacttgtcagccaattggactctcttgacattctcttgttcttggacaagcatgttaccatacgtcaagagcttctccagagtcatcttgggctgctcaaaggttggaggtccatcttttgagttcacaagcttcttcccaatgccgtcaacaccaacaccagaaa

SEQ ID NO: 217719 - DNA, 551 bp, Glycine max
aagcttaataccatctcaataatgcaaaagttcatatacaagccagttcagcaagctgtaaatccacctgcatctatacaaattaaagttgacagagaaataaagtgagtttcccttctgtacaaagtgagtcagtctgccttctgaaaatatgggacgattttcaatcgagaaaggataaagcttaatccagtatctcagataagagtttgcacacctcacacatagtacttgtataaattatgtgaaccttacaacaatagaaccagagacaagagaggctaaggcaaaggccacaaaagcaaccaaggacaaagccacagatgcatttgccatgtaggggaacttgtcctcaccccaattggaaacccaatcataagctctagtggcagctgatgatgatgctgacattagaaggtatgtcaagatctgatccagcgcgaaagtgaaataaccccttagctggtgctccaccaagtgctttcccgttgcaaagtaccgccaagatcacatatctgcaacgcggaatgcacaaacccaataacattcac

SEQ ID NO: 217720 - DNA, 335 bp, Glycine max
atttgttatgaaattgttttggcatattatgggcacgtaccatatgtgtatgtatatacacggggcaggtatttttgcacgcaacaacgtcaaagaagcaagcaatgcaattgaagatgaggaatattgaatggtggatgagaaaacgacgcttgccgctagggtttaggcagcgcgtgcgtaactatgagaggcagcgttgggctgccatgcgtggggttgatgaattcgagatgactaaaaatctccctgagggattaagaagagacatcaagtaccatctttgtctagacttggtgagacaggtgcctatatttcaacacatggacgatctg

SEQ ID NO: 217721 - DNA, 538 bp, Glycine max
aataatgcatgcattttttctttattttctaccaataagatcaatcaaaacaataaaattcgacacctgtgtgccacatccatatatatcatgttctcaaaagtcaaaatcatcctgattaggctttggggaggttaacaaagctgtgtagaggcgaagcttgtcctctccgatggaagaagaccgtgacaaaggtctcctgggccttataaaggacaatgaagtcaaagtcaacctatgcttgtacctcctccatgccaattgaatggccacagcagcccaagttctccaccctggtgagtaataccttgcacttctcttcaccttttccttaacaaatgtgtacctgaaatgttgtgtcacatacttcacgtcctgggcttcaaggccgaacgcctcggtggtttccaacgtgatgagtgtggatgaagacggccgaaggcgttctatgaaaggcctctcaacaccacgaaaggagctcgtccccactgaaagtttctggacctaacatgcaacaactcttcacaccatcccttag

SEQ ID NO: 217722 - DNA, 540 bp, Glycine max
  unsure (1)..(540): unsure at all n locations
gaaaaacataatcagacccttgagtacccaaatacaaaattcttgaatcattcaaattccttttaattctaacattgagacagcattacctatacatagcaacatcacaggaatattgtaacaaacaataattttcttaaaaaccgtctctctctcacataataataataataataataataataataataataataataataataatatatattcagttaacaaaccaagaattcattaatgcacatactacaagcaatatttgtagaacctatcaaactatacagcaatttaaggtcagcgccagtggcaattgccatgacgcattatttcagatttcacctgtcccaagaggctgccttgaggtatctccagaggcccaagcttgataatctttctcaagctgcttaagacaaatttataacaacaagtcagtctctttagaatctataatttataaagaaccaacggaccggaatgaaatcaatggaaaagtattccctaaaaagtttctttcaatcttaanaacacagctcggta

SEQ ID NO: 217723 - DNA, 429 bp, Glycine max
gtccatccaaatcttaaaaatattcagtgaagatcaacctcaatggcatctcttggcgtgcgaccagttcttccccctccattaacttccatctccgacccacctcctcttttcgatggcaccaccaggttgtacatcagttattcttgcccctatgcacaacgtgtgtggatcgctaggaactacaaggggctacaagataagatcaatttggtccctattaaccttcaagacaggccagcttggtataaggagaaagtctaccctgaaaataaggtgccatccttggagcacaatggcaaggtgttgggagaaagtcttgatttgatcaaatatgtagatgcaaactttgaagggacacctttgtttcccagcgatcctgccaagaaagagttcggtgagcaattgatatcccatgttgatacattc

SEQ ID NO: 217724 - DNA, 591 bp, Glycine max
  unsure (1)..(591): unsure at all n locations
aggataataataccatattggtcattatatcatattgatcagtgatcacaaactggtacataaacattattatgacatcaaacaaacaagctgaaaaatgaacgtgattatgacttcaaactatcctgcaactctggcagataaacacaaccgacatttgactgcagatgcatcccatcccgtgaatgaaaggacgctatatgggcagagtctacattttagaggaagcctgcagcaatacaacgttcactgttgaggcaggaagcgtttcttgaaaagatcaacgatctcctgaggatcgactctagtctcggtataagcatttagcttattcaactcctcaaaccatgttgcaagtttaggccttccttctgtgatgtcatgtttgaacacctcagcaaagacaatttggaatctttcaacaaatggaatataagcaatatccaccaaactgaattggccaagcaagaatggcccatcatcaaatntaccaagagcattctncaagtattcaaaagcgggactggcttgtgtacagcatcccctttcaatgaaacgaacaggtctttgctgatgtatcaacatgggata

SEQ ID NO: 217725 - DNA, 463 bp, Glycine max
agcactttaacattcctttctctaacctcgttcccactctcatattttcccttctgctgatattcagctaaactaagtcaataagatgactcagggaaagatagttgaagctgcagaagctcataaaacacttgaggatttcgatcctccaaagaagcgcaaaaggaacaagtatgcttttgcttgtgctgggctggcctccatgacttccatcttgcttggctacgatattggagtgatgagtggagcagccttgtacataaaaagggacctgaaagtgtcggatgtgcaaatcgagatcctgctcggaatcatcaacctctactctttgataggcttatgcctcgccggcagaacctccgactggataggtcggcgttacacgattgttttcgccggcgccatcttctttgtcggagcacttctcatgggtttctcccccaactattcctttctcatgttc

SEQ ID NO: 217726 - DNA, 529 bp, Glycine max
accctgcgcccgcagcctcaacgggaagatctcagaactataaacccacgtgatgggacccgcaccaatggagaacgtggccacgtaagccaacaccatggctatgctcaatgcaacggcccacattagtttcctctcggagtgaccaatgatcgtgaggctgatagcgagcgtgaggagagagagcaccatgcccccgacactagacaacaacaacggacgacgacccacgcggtccaacgtaaaagtagccgccaagatgaaaacggttttgacgaatccaacggccacggttgcaagaagtttatgcgtgtcgtctttgatcccagccttctcgaagatcctggggctgtacaaaacgacggcgtctacgcccgacgcttgttggaagaagtgaatcccaagggcagcgattacgatgtgacgaattgggggcgttggatagaggaagagttctttccatacgccttcacctgtgcttcgtttggttacctgaacgacgtcgtcgttgcaactcttcgggatccct

SEQ ID NO: 217727 - DNA, 464 bp, Glycine max
  unsure (1)..(464): unsure at all n locations
tgaatttgagagacgccggataacaaaggaagatgtacgagagcttatataccgagagactttggagtaccatccgaagatgttgaaggaatttctagaaggagcagagccaacaggtttcatgtatccaagtgctgtggatcacttcaagaaacaatttgcatatcttgaggagcattacggcaaagggggaactgttgctccgcctgagaggcaacatgcatcattaccgagaccttgtgtgttgtattcagaccactcaatgcagaacacatctgaggttgcagatgatctatccaaatgttgcatcaaagaagttgagaaacaacccatagaaaggagtagtgctatccctatgtctaggcttcctttacaagcaccgcaaaatattcaaggtgttgctgcaaggccccgaaaggttgttggttcagtaatgcgttacaacaactgtggngtagcagtga

SEQ ID NO: 217728 - DNA, 513 bp, Glycine max
gttgaagttcaacatgaacctctgggtggttatatttcttcctataaaaagcagatagaagttcctgcagctgaagcctcaattgaagctactgcccaaggcattgcatcaatgctttgtgcccatggtccagaggttgaatggagaatttgcactatttgggaagctgcttatggcctgattcctacaagttcctcagctgttgatcttcctgaaattatagttgcaaccccgctacaaccacccatactgtcatggaatttgtacatacccctactgaaggtcctggaatatcttcctcgaggaagcccatcggaggcatgtcttatgaaaatatttgctgctacagtggaagctattcttcagaggacatttccacccgagtccactagagaacaaaacagaaaatcaaaatacctagctggcattggctctgcctcgaagaaccttgccatggcagaacttcgtactatggttcattcactcttcttagaatcatgtgcatctgtagag

SEQ ID NO: 217729 - DNA, 290 bp, Glycine max
atggaatctgggtctagcgaaggagaagaggtgcagcaacgcgtgccgttgagggagagagtggagtggtcagatgttactccggttcctcaaaacgacggccctaaccctgtcgttccgatccagtacactgaagagttttccgaagttatggattactttcgcgccgtttacctcaccgatgaacgctcccctcgcgccctcgctctcacagccgaagccgttcaattcaactccggcaactacactgtgtggcatttccgacggttgttccttgagtcgctaaaagt

SEQ ID NO: 217730 - DNA, 415 bp, Glycine max
aattagttctaaaaatttttaagcatcctgaaaaaacttggggatcatttccccttgaagtagtttcacctttttaaagcccccggaaatttctccacgagctttaattttcggggggggctttaagggcttcaagggggtaaagcacttgagactttttaatagcttttaggccccccaagaaaggagaccttgttttgacaaaattttttggattccaagcaaaattggaaaaaagggcttctttaagtagttctgggcaataattaagttcattttcccatcctcctagggtttgaagagccccctgtttatgaaaccatgcatgataatgttgggcatcaacggacagtttttttttggggaacccgagcccattgtttctagcttcaggacctaacttttgggcaaccca

SEQ ID NO: 217731 - DNA, 451 bp, Glycine max
ggtttgaggaatttgcttggcgaagagtttgcgaggagcaagtggaggggttccacgaggttgctgcttctggatgaacgctacgcgggtcgcggcatggaggagttgcctgaggcaattaaggctgttttgaaggagtatgcagaaaagagtacaaatttgacgcttgagctagttagatgcaagctgacactattctatgattactggcagatgactgaggtcttggaggccttgctgcctgagggtatgattattccttctgcttttgagactgttggtcatatagcacacctgaatttgagagacgaacatttaccatacaagaggctaatagcaaaggttgtgctggataagaataagccaaggataccaaaccgttgtgaacaagattgattcaattcaaaatgagtacaggaccatgcagcttgaggttatagctggaaaccac

SEQ ID NO: 217732 - DNA, 570 bp, Glycine max
  unsure (1)..(570): unsure at all n locations
aaaaaaataaataaatactcatgttacatatatacacaatatcaattttagacagctaatgcaatggaacaaaatttactacatgcaatgaataaatattgtttaggtatcaactgcagcagtatcagcaaatgctacacttttagggagaataaacgatgcgcacaacatccattttccaggagcaacaagtcgtacccgtcgcatgtctacgttgaccgcaacttctagcagcgcaattcttattctctcgtgaaaatcaaattctggatctcgtgctttggagaatccataaacatggatcaatggcaaagtatattccccatccttgggtctatttttgtatattccccgaaatgcatctagaaattctgcagcttcacttggcaagttcataaccacttgtgtgatggactgagaaatatcactgtcatacatagctttaatgaacctncttccatccatgttaaagacctttatcttcctctcaagtttgtttagaacacaatttctttccagatactcaacttgcataaaggtttaagtcatttagcaaaacacgcttaacta

SEQ ID NO: 217733 - DNA, 495 bp, Glycine max
ctcgagccgaaacattaaagactatatggccgaaaagcttggcatagagaaaagcaaaattgatgacttgtccaacctcctctacaagaactatggaacaactatggctggtttaagggcaattggatatgactttgactacgatgaatatcacagttttgttcatgggagattaccttatgagaatttgaaaccagacccagttctgaggaacctcttgctgagcctaccctataggagactgatcttcacaaactcagacaaagtccatgcagttaaggcactaagcaggctaggattagaagactgctttgaaggaatcatatgctttgagacccttaatcccatccacaaaagcactgtctctgatgatgaagatgacattgaatttgtggggggttcaggcacaaccaatccaaccacaaaaaaaagatgctagcagctttcaaatctttgacatcattgggccatttgctcaacccaatcccacacagt

SEQ ID NO: 217734 - DNA, 522 bp, Glycine max
gttcatcaatgatctaagcagtcacagatgtctccacagcaagcttgccaggataagcaacttctgattttatgtcatcttcccatagttctggcactgcctccctaaggttgtggatgctttctaatgcataatctgctcctttaattctctgagattttccaaccagcacagtgtgaagacccacacgttttccagcttgtgtgttgcggacactatcctcaaagaacaaagttctttgtggattaaggttggctatcttgagggccaactcaatggcattttctgatggtttgcaaataattggtgtctttggcaaaactgtgtggggattgggttgagcaaaatggccaatgatgtcaaagatttgaaagctgctagcatcttttttttgtggttggattggttgtgcctgaaccccccacaaattcaatgtcatcttcatcatcagagacagtgcttttgtggatgggattaagggtctcaaagcatatgattccttcaaagcagtcttctaatcct

SEQ ID NO: 217735 - DNA, 409 bp, Glycine max
  unsure (1)..(409): unsure at all n locations
gggtgtgcccgctgagaacgatggctgcaaatgtggaccaaactgctcctgcaacccctgcacttgcaagtgaggtgttgggagagcaagcttcaagcagagatagcccttaattaggaataatgataaactattaatgtgtagctaaaaacttatgtattatgtctgtgatggttttcgtgcactctggtgttttgtgttaaacaaacatccttagaataaagtggtcatgtcttgcctttcagcaagttcaagtgttttggacttgtgatgggtgtgttaagctcatggttgcttctttttttttttttttaatgtttggtaattggtcgcttctgtataaagctcggctaatctgaattatgaatctctgcttatcgtnttcaaaaaaaaagcactttaacttatc

SEQ ID NO: 217736 - DNA, 384 bp, Glycine max
aatattataagcagagattcataattcagattagccgaactttatacagaagcgaccaattaccaaacattaaaaaaaaaaaaaaagaagcaaccatgagcttaacacacccatcacaagtccaaaacacttgaacttgctgaaaggcaagacatgaccactttattctaaggatgtttgtttaacacaaaacaccagagtgcacgaaaaccatcacagacataatacataagtttttagctacacattaatagtttatcattattcctaattaagggctatctctgcttgaagcttgctctcccaacacctcacttgcaagtgcaggggttgcaggagcagtttggtccacatttgcagccatcgttctcagcgggcacaccc

SEQ ID NO: 217737 - DNA, 445 bp, Glycine max
ttgtgaactcaaaagatggacctccaacctttgagcagcccaagatgactctggagaagctcttgacgtatggtaacatgcttgtccaagaacaagagaatgtcaagagagtccaattggctgacaagtacttgaacgaggctgcacttggaaatgctaacgaggatgctattaacaggggaactttcttccaatcttgaattggaggcaaagcaaacttggcaagtaaatatttctgttcctgaaggttgtgctgatccaagtgctagaagttgtgatgggacttgcgtgtaacattcttagaattctcaatgtcttaggtgcaaagagaagatgccaagtttgagatgattttactatatttttcatattggactgtcttcctctataattttgagttaaagtgtccacttaaattgaatttggtgccttttccttttgtcct

SEQ ID NO: 217738 - DNA, 445 bp, Glycine max
aggacaaaaggaaaaggcaccaaattcaatttaagtggacactttaactcaaaattatagaggaagacagtccaatatgaaaaatatagtaaaatcatctcaaacttggcatcttctctttgcacctaagacattgagaattctaagaatgttacacgcaagtcccatcacaacttctagcacttggatcagcacaaccttcaggaacagaaatatttacttgccaagtttgctttgcctccaattcaagattggaagaaagttcccctgttaatagcatcctcgttagcatttccaagtgcagcctcgttcaagtacttgtcagccaattggactctcttgacattctcttgttcttggacaagcatgttaccatacgtcaagagcttctccagagtcatcttgggctgctcaaaggttggaggtccatcttttgagttcacaa

SEQ ID NO: 217739 - DNA, 442 bp, Glycine max
ttgtgaactcaaaagatggacctccaacctttgagcagcccaagatgactctggagaagctcttgacgtatggtaacatgcttgtccaagaacaagagaatgtcaagagagtccaattgggtgacaagtacttgaacgaggctgcacttggaaatgctaacgaggatgctattaacaggggaactttcttccaatcttgaattggaggcaaagcaaacttggcaagtaaatatttctgttcctgaaggttgtgctgatccaagtgctaaaagttgtgatgggacttgcgtgtaacattcttagaattctcaatgtcttaggagcaaagagaagatgccaagtttgagatgattttactatatttttcatattggactgtctttctttatattttgaagtaaagtgccacttaaattgatttggcgcctttttcttttgtcct

SEQ ID NO: 217740 - DNA, 445 bp, Glycine max
aggacaaaaggaaaaggcaccaaattcaatttaagtggacactttaactcaaaattatagaggaagacagtccaatatgaaaaatatagtaaaatcatctcaaacttggcatcttctctttgcacctaagacattgagaattctaagaatgttacacgcaagtcccatcacaacttctagcacttggatcagcacaaccttcaggaacagaaatatttacttgccaagtttgctttgcctccaattcaagattggaagaaagttcccctgttaatagcatcctcgttagcatttccaagtgcagcctcgttcaagtacttgtcagccaattggactctcttgacattctcttgttcttggacaagcatgttaccatacgtcaagagcttctccagagtcatcttgggctgctcaaaggttcgaggtccatcttttgagttcacaa

SEQ ID NO: 217741 - DNA, 487 bp, Glycine max
  unsure (1)..(487): unsure at all n locations
cggtgcccttaattggtccctcttttccaaaccccaactgggtatcacaaagtttccaaattgaacgcaaaaacggaaatttcttcctcaaatgccttctgggtcgctcttctttgcatccagattacgaagtttttggtcgccagtaaggtctgtgattcaagtgctattttagcattttttttttttttcctggacggtgagggtcaacttgcatgcacatgttagtgaaaaaccacaataagggggatggatctaagtccctcgccgatacactggcgaaatggaaagaatataatgcttggctggagtctaacaatgaagctgagaagccggctaggaaggtccctgccaagggatcaaagaaagggtgtatgaaaggaaaaggagggcccgagaactcacgctgntactacaagaggagttaggcaaggacttggggaaaatgggttgctgaaatccgagagccaaacagaggaagtaggct

SEQ ID NO: 217742 - DNA, 451 bp, Glycine max
aatgaaaggcttaacgatactttgttatgcactaatgaatcaagttattgattttaaataactacacttacgccactaaccacggatgactgtttgggaataatacaaggctggatattacatgatttcaggtggagagaaaaaggaagcgaacaaaactaaataatggggccattggagagaggggatatgtcatgagccactaagaataaatgcttggagaaggctctgcgctgcttgggtttcatctggtgtaccggatatgacaataatcctgtcacttgttccgggacgaggttcatggataacaaccttggcacccgatatctgtctcagacgaaccaaattgcgaccattttccccgtatacacagtcaatagtatcatcaggaaccacaatttcgactgtcgtattagtcacgatagcagatttacttccactcacaagttct

SEQ ID NO: 217743 - DNA, 513 bp, Glycine max
gtcgagcttcaaactccgtctttccgaatcctctctttgtgattgtgttctgttctgcttcctaccgcgatagtttctcttctgaagcatggccatggcggtttctgcaattggttttgaaggtttcgagaagaggctggaaatatcctttttccagccgggactttttgctgaccctgagggaatgggtttaagagctcttgcaaagtcccagttggatgagatacttacaccggctgcttgcaccattgtttcatctctcagaaatgatcatgtcgactcctatgttctgtctgagtccagtctctttgtttatgcctacaagatcatcatcaaaacctgtggtactacaaagctactgcttgcaatcccacccatattgaaatttgctgaaatgctttccctcaatgttagatctgtgaattacaccaggggaagtttcatctttccccgtgctcagccctatccccatcgcaacttttctgaggaagtgctattcttgatggctacttt

SEQ ID NO: 217744 - DNA, 494 bp, Glycine max
gcacgcatacaaagtgatttattaaaatccattcgatgttcaaatggtaatagtagaacaataaaaggtccaaacgccctaacaatggtctaacataaaagggaaaaaacaccaaagaaaaacaatcactgtctggaaaaccggacttattttcgcaaggacataataaagacacttaagaaaactactcttcttcatcttcctctttccagcacttcagagttgatctaggtgaaccacagtcacaagtcttggcaaatttttggtagacaagagaaccacccattccaagcccttcgtggctcctctcttcgcgacagtatcccttaacatccagaaaacacgtctgatcaaacaacttgcttgcaccatccacatgaactgcaacagagaactcagttgggagaaaacatgccaataccctcttaaccatttcgttcagattcaccactttgaagtcatacccaacagtctcaaagcttgcataactgaaa

SEQ ID NO: 217745 - DNA, 488 bp, Glycine max
gctctttcgtgcaatccactgttactgaacttcccttctttgcttccaaggtgaggcttgggacggttggtgtggaggaagttctgggcttggggcacctctcagattttgagcaacaaggcctcgaaagccttaagcctgaactcaaatcatcaattgagaagggaatcaaatttgccaaccagtaattgaacatgttatcacatacatgtctggtaggttactggatattcctttaagaaccaaatcaaattttgcattctcagaaccattgatgtattgttgtcggcagtggtgtggcggttttgatgttttatttagtgtaggtatacgccatggtttaataattaaagtctgagaactgtttgttgccaaagggattgaacgatcttaaaaccaggtttaggatttggcattccattaataatggtcccttttaactgtatggtttcacttaatgtaattgcagggtgttgtaccctttattc

SEQ ID NO: 217746 - DNA, 407 bp, Glycine max
gaataaagggtacaacaccctgcaattacattaagtgaaaccatacagttaaaagggaccattattaatggaatgccaaatcctaaacctggttttaagatcgttcaatccctttggcaacaaacagctttcaaactttaattattaaaccatggcgtatacctacactaaataaaacaacaaaaccggcacaccactgccgacaacaatacatcaatggttctgagaatgcaaaatttgatttggttcttaaaggaatatccagtaacctaccagacatgtatgtgataacatgttcaattactggttggcaaatttgattcccttctcaattgatgatttgagttcaggcttaaggctttcgaggccttgttgctcaaaatctgagaggtgccccaagcccagaa

SEQ ID NO: 217747 - DNA, 447 bp, Glycine max
aaaaaaactaccctcgatccatgcctcaaaagggttgataataagtaaaaaaaatcaatgaattcatgataaaacccttctgcgtttttttattataaatttttttgtcaataaagggatcaaggggttgggggatcaaatggtaaagttcttttgttggtaaattggaggattagaaacatgactattgctttccaattagctgtttttgcattaattgctatttcatttattttattgattagcgtacctgttgtatttgcttctcctgaaggttggtcgaataacaaaaatgttgtattttccggtacatcattatggattggattagggtttctcgggggtattcttaattctctcatttcttgaggctctttttattctagatcaaaaacgaaatgaccccctccccaaaatttttttggtttgtcgggcacattaaaaagg

SEQ ID NO: 217748 - DNA, 546 bp, Glycine max
ttttttttttttttttttttttttttttttttttttttttttaagaaaaaagaaagttctaattattaataaattatatctatatatatatatatacagatagatattctatatcttttatcttaattaatatttgacccctccttataatgggtgatagttttctttatttttaggaacttatccattccttttttaatgggcccgacaatccgaaagaattctgggggaggggtcatttcgtttttgatctagaataaatagagcttcaagaaatgagagaattaagaatacccacgagaaacactaatccaatccataatgatgtaccggaaaatacaacatttttggtattcgaccaaccttcaggagaagcaaatacaacaggtacactaatcaataaaataaatgaaatagcaattaatgcaaaaacagctaattggaaagcaatagtcatgtttctaatcctccaatttaccaacaaaagaactttaccatttgatcccccaaccccttgatccctttattggcaaaaaaatttataat

SEQ ID NO: 217749 - DNA, 445 bp, Glycine max
caacaacgtaccttcatacagatgaggactgttctcaaggttgtggataactcgggggctaaaaaggtgatgtgcatacaggcattgaaagggaagaaaggggcaagattaggtgacacaataatagcatctgtgaaggaagcacatcctaatggaaaagtgaagaaaggaaaggttgtatatggggtagtggtgcgtgcggcaatgcaaaaggggcgttgtgatggcagagaagtcaagtttgatgataatgctgtggtgcttgttgacaagcaaggccaacctattggaaccagagttcttggaccagtgcctcatgagctaaggcaaaagaagcatgtcaagattcttacctttgcagggcacattgcataaatgagaaaaaaggcttgccttgagttttgttatgaaatcaatgtcacatctaccatttttatattggata

SEQ ID NO: 217750 - DNA, 511 bp, Glycine max
aggcaagaaaccaaatcatatactagttatttaagtagaagccttctacacctgttttactcctcataaattgataaagaactcaaacttgcacatcacatcaaaatatccaaatataaaaacggtagatgtgacatttgaattcataacaaaactcaaggacagccctttttctcattcacgcaatgtgccctgccaaggtaagaatcttgacatgcttcttttgccttagctcatgaggcactggtccaaaaactctggttccaataggttggccttgcttgtcaacaagcaccacagcattatcatcaaacttgacttcactgccatcacaacgccccttttgcattgccgcacgcaccactaccccatatacaacctttcctttcttcacttttccattaggatgtgcttccttcacagatgctattattgtgtcacctaatcttgcccctttcttccctttcaatgcctgtatgcacatcacctttttagccccccgagtatccac

SEQ ID NO: 217751 - DNA, 488 bp, Glycine max
  unsure (1)..(488): unsure at all n locations
catttccattaaaagagagaaaaaaaataaagagaaattttacaaaaatgccttcctcttccaccaccatagtctccaaatgcgtgatccaccccgaccagaaatcaaacatgaaacccttgagactctctgtttctgaccttccaatgttggcatgtcactacatccaaaagggcgtgttactcaccgccccgccctcctcttttgacgacttaatactttattttaaacacactctttctatcgcgctctctcactttcccgctctcgagggaaggtttgagaccgattccaacggttacgttaatattgtatgcaacgacgctggcgttgattttattcatgctaaagcaaaacacctaactctagacgccgtcgtttcgccgtccctcgttgatgttcacccttgcttcaaggaggagttgtttgcttacgacatgactatctgctacgccggccacaacacacccctcngcggcgttcaggtg

SEQ ID NO: 217752 - DNA, 475 bp, Glycine max
  unsure (1)..(475): unsure at all n locations
aacaaatacaatcaaagaatcttctttgctttctctcctttgcactttccttctcctcgtgattttttgtttgcatcaaagggagaaactgggagacacagaagatgagagagataattagtattcatattggacaagctggaattcaggtggggaattcatgctgggagttgtattgccttgagcatggaattaaccccgatgggaccatgcctagtgacacctctgttggcattgcacacgatgctttcaacaccttcttcagcgagaccggattcggcaagcatgtgccaagggctttatttgttgatttggaacctagtgttattgatgaagtaagaactggtccttacagacaactctttcaccctgagcaattaatttctggcaaagaagatgctgctaataactnttgcaggcgacactacactgttggaagagaaattgtcgaactatgcctcgatcgtatcaaaaa

SEQ ID NO: 217753 - DNA, 463 bp, Glycine max
aagtaatgaaaattgcagcattcctacgctgtcctttattttgctctttcactgaaacttacaaataaaccattgctgctcatgaggaaagcaattgtatcacttaacactttaacatgaaacaatagtaagaacagagctagcacacaacagaaaaatgcttaaaattcaatggacaaggacagacattagacagagaaaagaagggagatgtaggtaaggtagctggtgaaaatgttgatgaatgattgactctatttcgagtaatcgtcgtgttcttcttattcttcttcttcgccttctgctccaacctcttcatagtccttttcaagagcagcaagatcctcacgggcttcagagaattcaccttcttccattccttcacccacataccaatgaacaaatgccctcttggcatacatgaggtcaaacttgtaatcaatgcgcgcgaaaacctcagcaa

SEQ ID NO: 217754 - DNA, 465 bp, Glycine max
ggtacctcctaggataaggctttttcttcagtacttgctcttggtggaacaaccttgtaacaatggcttcctcagttacttcctcttttcgcatcagcaatttgaagtcggtttttgttggtgagactaataaactcagagtttcaagtgttcctggtgctcatgttggtttcaatagaaagactgtagaatgtaaggaatcacgaattgggaagcaaccaattcctgtgccatccaatgtcacagtcaaattggaaggacaggatatacaagtgaaaggtcctttgggtgaacttgcattaacttatcctcgagaagtgttggttgagagggaagagtcagggactctaagggttaaaaaggcagttgaaaccagaagggccaatcaaatgcatgggctttttaggacacttacagacaacctggtgattggagtatctaaaggctttgacaagaaacttcaac

SEQ ID NO: 217755 - DNA, 485 bp, Glycine max
  unsure (1)..(485): unsure at all n locations
actcggttaaaatatttccattgctaacaaatgaggaaaaacaacaggagataaatgaaaaaggaaaattgaaaccccccattacttcttcttccctgcttttccttcctttctccttacaatttcatcagcatatttgacaccctttcctttgtatggttctgggggtctccacttcctaattgaagcagcaaactggccaacctcagatttgtcatacccactaactgtgattctggtgttttcctccaccttcactttgaggccatcagggattgtcatcttaacaggatgagaaaatccaagattcagcacaacttcgtttccttctaccatagcacgataaccaacaccaacaagttgaagtttcttgtcaaaacctttagatactccaatcaccaggttgtctgtaagtgtcctaaaaagcccatgcatttgattggcccttctggtttcaactgcctttntaacccttagagtccctg

SEQ ID NO: 217756 - DNA, 466 bp, Glycine max
ggaagttggaagtcatggcagcaacattgatggcagcaacaacaagttctggtactcttaaagcaactcctttccttggccaaggcaagggtgccaatgccaatgctcttagggatgttgtctccatgggaactgggaagtacaccatgggcaatgatttgtggtatggaccagacagagtgaaatacttgggacccttctcagctcagaccccttcatacttgaaaggagaattccctggggattatggatgggacactgctggcttatctgctgacccaaaagcatttgccaagaacagggctcttgaagtgatccatgggcgatgggccatgcttggagcactatgatgcatcaccccagaggtgctagaaaagtggttgagagtggacttcaaggagccagtgtggatcaaagctggagcccaaatattctgcgaaggtgggcttgactatgtgggaaaccc

SEQ ID NO: 217757 - DNA, 501 bp, Glycine max
gcttcagacaaaactatattaacaaacaagagacatccgaggtttaaattgaaccttagtccttaagaagtacactaatccaacaattattgtgatcatataatctacacataaatcacaaaggtaagcacgagggatgggatcatagggattagggaagaagaagtcatatacattttaagaccctggggaaaacttagtggcatagacccaagcattgttggccacagggttgtctaggtggtccaaaaggttctccaatggaccttttccagtgacaatagcttgaacaaagaatccaaacatagagaacatggccaaccttccattcttgatctccttgactttgagctcagcaaaagtgactgggtcatcagctaggcccagtgggtcaaagtactggcccccagggtagaggtcattgccctctcccaccccatcaagcccattgatgcggtacccttcaacaaggcccattaggataacttggaagcccagcac

SEQ ID NO: 217758 - DNA, 379 bp, Glycine max
atgagaatcatttatttagcgaaaaaaatacttatttgattttttctacaaaattttcttgagccagcaagagtcacacatcataagaccgtgatctttaagcaggacaaaacaaaatctatcaaggaagccatatattggtatccaaattccaaacttgtgttgggtttggttccttgagttgagaggagtgaaaaaatggatcacagtgcggatgctcaacgcacggacctgatgaccatcacccgtttcgtgctgaacgaacagtcgaagcacccagagtctcgtggcgatttctcaatcctgctcagtcacattgttctcggctgcaagttcgtctgctctgctgataacaaggcgggtcttgctaagcttattg

SEQ ID NO: 217759 - DNA, 483 bp, Glycine max
  unsure (1)..(483): unsure at all n locations
ctaaatcacaaaacattaataacttttcttaacatatacatgacatgtgtaacaattagataacaattgcttgtgagtagcgaaagacaaagatagctttcttccagcttcattcctatttttcatcagcagagtaaagagccttgatttcctctacatcttcatagctaccaaggaatatgggagatcgctcgtgcaacttctttggaaccaaatcaagtgccctttggttgccggtgaaagcctgtcctcctgcttgttccatcaagaatgacattgggaagacttcatagagtacacgaagtttcccatttggactctttttatcagccgggtacagaaagatacctccataaagcaatgtgcggtgaacatcagcaaccatgcttccaatatatcttagggactttggtgatgaaccatcttttggatacttgcagttntccacatacatggtagtagggccatcccagtttttagcat

SEQ ID NO: 217760 - DNA, 385 bp, Glycine max
ctgtcatcgtgtcgttcaccgataagatgtcgtattcaaggagatcaaggtattctcgttctccttctccatacaagcgatacagtaggtctgtgtccaggtctctctcaaggacaagctccagaagccgttcaaggagtttatcaagagatgcagaaaatccaggaaacaatttgtatgtgacaggattgtctcctaggatcaccaagagagaactggagaaacatttttctgctgagggaaaagtgatagatgtccatctggtagttgatccttggacaagggaatcccgtgggtttggctttgtgacaatggagactcttgaggaggcagatcgatgtgtaaagtatctgaatcgctcagtacttgaagggcgtgtcatcac

SEQ ID NO: 217761 - DNA, 545 bp, Glycine max
  unsure (1)..(545): unsure at all n locations
aacaaggaaaagggatcctcatattatgcttacaaaataacctgtcctcaatctcatcccatgcactgatgcaagggtagtataataataactaattgttatatacatgattatcatagattacaaattttacaacccattaggctgcttgcatgctcacagttgaatcacggctcataaccacggcggattcagcacctacttcctcctcagcaggtagatcatctgaatgcagttccggttgcttaaggctccggacaaactcagtgaacaaaggaaaatgctctggagagaagaatgatgctcccattctatgatatgtgaacaagtccaatacattatctccagataaattcttcttaatttgttcaaacccccctggaacaccagattcagacgaattttgacctgaaacctgaacctcatgctttttgcaagcttccataatttgtgcaagtagcaactcagggctagaatggttttcctttggtgggtcgcgtccgaaaggtccatgccaggtaatataatttntgacgagttccgag

SEQ ID NO: 217762 - DNA, 518 bp, Glycine max
tctgattttcagttccccagagacgaagatgtctctccggcgtggagtccctctttctctgttggtcctcttcctcctcctggtatctccggcggcgaccttggccttccgcaagaagcacaagatcccgggggccgatcaaaaccatagtggagatagtgatggagaaccgctccttcgaccacgtcctcggatggctcaaatcctcccggcccgacatcgacgggctcaccggaagcgaatccaaccctctatgagactcctccccctcctccgccacaatccccgtcactgacgacgccctcttcatcgacgccgaccccggccactccttccaggccattcgcgagcaaatcttcggttccaacgacacctctgcagaccctaccccaatgaacggcttcgcccagcaagccgagtcaatcctcctgggcatgtccaaaaccgtcatgagcggtttcaaaccccacaccctccccgtctacactgctcttgcaaaccaattcggtttattcgac

SEQ ID NO: 217763 - DNA, 421 bp, Glycine max
ctatctatccagatagaaagccttaaaattgcacctcgtctatgcttcactctgggatccgtggtgaagagcattatgagccttcgcagtgagccctacatattttacctcgttactattaactttcgggcataataccaattctttgctcggaccccttatccgctgattatcgtttaaccgcgctcggagctctacctcgcgtgcgtcgactatggcagcctctgttacttgcgcatgtcagtactcggatcgaccgggtactatgtctgattatcagcaacatttactgggtcaaggtggattctctttggggacttatatggtcctcctgcactggtctggactagagtcggttatatagttggacctactggagcagcttcgatcctaaaactgaggtgcacattgatgatatgac

SEQ ID NO: 217764 - DNA, 386 bp, Glycine max
atagctaataagcataccaatcatcggacactgtaattagtcctgaattcacattggtggcctatacttaggcactaaaggcattaaaaacgctactaagcctgaaacgcatgatatttgactttaatcaacactctacatcctgctgccctcagcatcagtcctcgtgctcctccagtgggggcatgtcagtatcatcttcacctgcattcactggaacgctgagctcaagcttgaacattctggggatcccgttcacaaaagcgatgggctaccataggctgataccagaactgatactagcagtatctatctgtaccggtgcagggatcttcacgggattggcatacacggctgcatgagcgctcttactgagctccttcatg

SEQ ID NO: 217765 - DNA, 601 bp, Glycine max
catactctgacaaccagcctggtgtgttgatccaggtctttgaaggtgaaagagcaaggactaaagataacaatttgttgggcaaatttgaactttctggcattcctcctgcccccaggggtgttcctcagattactgtgtgctttgacattgatgccaatggtattttgaacgtctctgccgaagataagaccactggccagaaaaataagatcactatcaccaatgacaagggtagactgtcaaaggaagatatcgagaagatggttcaagaggctgagaagtacaaatctgaggatgaagagcacaaaaagaaggttgaggccaagaatgctttggaaaactatgcatacaacatgaggaacactgtgaaggatgacaaaattggtgagaaacttgatcctactgacaagaagaagattgaggacgcaattgagcaagctatccagtggctagacagcaaccagctcgcagaagcagatgaatttgaggacaaaatgaaggaattggaagcatctgcaatcctatcattgccagatgtaccaagtggtgctggtcctgacatgggtggtgctgtgctggggcagtcgatgatgatatg

SEQ ID NO: 217766 - DNA, 549 bp, Glycine max
  unsure (1)..(549): unsure at all n locations
gccgaagatgagggtgaggatggtgaggacggtgaagaagaacaagctgtgattggattatggagtggcattgcttggttggtagggatgactgtgttcattgctgtgttgtctgaatatgtggtggatacaattgaggatgcatcagattcgtggggtttgtctgtgagctttctcagcataatcttgctaccaatagttggaaatgcagctgaacatgcaggagcaatcatatttgctttcaagaacaagctggacatttcattgggtgttgcattgggttcagcaactcagattgccatgtttgtggtcccattatgtgtaatcgttgcttggataatgggtatcgatatggacctgaacttcaacctcctagagacaggttcccttgcgttggcaataatagtcacaggcttcactttacaggatgggacttctcactacatgaaaggccttgttctcctgctgtgctacattgctattgnggcatgcttcttcgtacaaagaacacccttaataatcaagctgatgttactaacatcacactta

SEQ ID NO: 217767 - DNA, 530 bp, Glycine max
aagcattaatagaatttttatttctcacacaataaatacaagagattctgcaaactgaaaaagggatttcttactaaagcaaactcaaacaagaacaacttccactcatttggcatctaccgtagtagaacaggatcaaaagcagctctctgatagaacacacgtatgtattatattgaacatcttgcacagtggttcatttctcacagctattgcaacttaaaatacttgcaaagcttctgcaaattccaaactttctttttctcccttctttatggatatgacaaagtgatcagatcatgaaacaataatcaatccattgaatttgaatctgatttttggtttggatcgatgccaccattcttcatcttaggaagggacaacaaataggccaaagcctactaattaagcgcttaaaactgcattagtggttggtttaagtgtgatgttagtaacatcagcttgattattaaagggtgttctttgtacgaagaagcattgcccataacaatgtagcacagcatgagaac

SEQ ID NO: 217768 - DNA, 452 bp, Glycine max
gcggtgaatctgaacgaaatggttcagagggtattggcatgtttcctcccaactgagttttctgttgcagttcatgtggatggtgcaagcaagtcgtttgagcagacctgctttctggatgttaagggattactgtcgtgaagagaggagccacgaagggcttggaatgggtggttctgttgtctaccaaaaattcgggaagactagtgactgtggttcacctagatcaactctaaagtgctggaatgaggaagatgaggaagagtagtttccttaagtgtctttattattctgtccttgtgaaaataagtctggttttccagatacgttattgtttttctttgatgtctattttagcttctgatagagaccatttgggcatttagacctttattgattctattaccatttgaacatcgagtggattaataaatcactttgtttgcgtgcaa

SEQ ID NO: 217769 - DNA, 449 bp, Glycine max
  unsure (1)..(449): unsure at all n locations
gcacgcaaacaaagtgatttattaatccattcgatgttcaaatggtaatagaaacaataaaggtctaaatgcccaaatggtctctaacagaagctaaaaaagacaacaaagaaaaacaataacgtatctggaaaaccagacttattttcacaaggacagaataataaagacacttaaggaaactactcttcctcatcttcctcattccagcactttagagttgatctaggtgaaccacagtcactagtcttcccgaatttttggtagacaacagaaccacccattccaagcccttcgtggctcctctcttcacgacagtatcccttaacatccagaaagcaggtctgctcaaacgacttgcttgcaccatccacatgaactgcaacaganaactcagttgggaggaaacatgccaataccctctgaaccatttcgttcagattcaccgn

SEQ ID NO: 217770 - DNA, 463 bp, Glycine max
  unsure (1)..(463): unsure at all n locations
cattcgaattcattttatttatatattaatattatattcaaatgaaataaaaagatattaaaagatactaattataagaatttgaaagtgaaattataaagttattaaatgattaatcaatttttttctacctgttcctgtagtaaaaagagttccatctgttcttgaatagcttccttcaaaaggacttctgcttccccagtgaatgtcttggtagaagatatgatttctttgaattgaggtttattcgtgtttaagtaagcacgtaactcaacaagaaatttccttacctgtccaatttctaatgaatcaagataaccattcgttccagtataaatagttattatctgttcctccacggtaagaggagctgattgggattgtttaagcaactcgcgcaatcgttgacctcttgctaattgattntgagtagctttatcgagatcagaagcgaattgggcaa

SEQ ID NO: 217771 - DNA, 525 bp, Glycine max
ttgttgttttttttttttttttaattcgtaaattggcttattatcccactttgcagagagaactatcagaaaatacaaatcaatgtagattttgttacaaattgcatgtaactgagaaaaccctcatacagcattactgtcgccatcactatgagaaaaaaataattaaaagaaaaggtaaatttaataataataataataataataataataataataatagaacatagaacaacaatttgttacaataatatatgtacaattaattgagagaaaaaaaaaaaggcataaatagagacaacacacaaattggtatcttgtaacttcaaactctgctcaagatgggtttagatcccgtgaggtttggccctgccatcttgagagaagaaatcttgctagtgggcttaaattgctattcgaattatgttccttggtttgacggttcttgctgttatcagcctccgcattttgggtttcttcagctgacttggtcttgctgaatagatggcctgacagtccctgcat

SEQ ID NO: 217772 - DNA, 354 bp, Glycine max
ctctgcttttgctagtggtactgtcttagctttgattctctgttctctgttttgttctgtttcgcgtattgtcttcatacaggaacttgaacaatgaagaatgcaaagggcaagggagcagcaagggcctcaaaagaatcactgaagcccgttgatgaccgaaaggttggaaagcggaaggcttccggtaagcctgggagaagtagtgcaccaaagaaggagaagaaggccaagaaagaccccaacaagcctaaaagaccacccagtgctttctttgtgttccttgaggagttcaggaagacctttaaggctgagaatcctaatgtgaaggctgtatcagttgttgggaaagct

SEQ ID NO: 217773 - DNA, 479 bp, Glycine max
gatcagaaagaaattatattacttaaagcaacccatgtaaggctacaatgcacaaagagtgattcaggtacgatagctaagtgagggaagctcaagtagttggtagagtatatcatgccaacaaaagaagaaattcttttctaccagcacaaatataaaaaagtagcctagtatgcacaatcagaatatataatagcctccttcacaaacaaaacatcataaccaaggttttggacatcaatctcagtcatcatcttcatcgtcctcttgctcctcatcatcctcttcctcctcctctccactggcatcatcttcatcattcacttcagatttggacttgtctgattcttcatcatctgcggagcttgcctgctttttatcataagctttgataagtttttcatactcagctgtccttttcgcagccttggcttcatatggagctttctcagcactggacaaggatttccatttctctc

SEQ ID NO: 217774 - DNA, 365 bp, Glycine max
cccaaagtgtgaggccgcccctggttgtggtgaatggaagaggccaacgaagaggaatccagcttataagggaaagtggagtgctccttacatcgataaccccagttacaagggcatatggaagcctcgcgagattccaaaccctgaatactttgaactcgcaaaacctgattttgagcctattgctgctattggcattgagatttggacaatgcaggatggcatcctatttgacaatgttctgatagctaacgatgataaagttgcagaatcctatcgggagactacatggaagcccaagtttaccgttgagaaagacaaactgaaggctgaagaggaggcggcaacggggttcagatggtatt

SEQ ID NO: 217775 - DNA, 507 bp, Glycine max
gcgttaaaaacagaatccattaatagaaaaataattgtacaacttcaactagctcaaacactcgagtctccaaaaacaggagaagatctacacccctgaagcaaataatcttttccttttcttaaaaggaagaaaaaagaaaatactgaaaacagagtgcacctaaaatgaaactaagcccaaaatttatctgtggtgatgatgatactaaacagggcgccactttaaaataaagattcaaccatttcaagtttctcgccttggcctccgacgcgcagcattagatgcttcctctttctgtttctccttctctttgttttcttcattctctccactaccttggttattggaagcttctgtgcgttctggtttcttctccacctttgcaggtttcttgccaccaaatatgagtctgaagaaaattgacacgaagacaaccacaacagctacaagaattccaattgtgagatttggctgtttctcagctttctcaatgagatcgaaatc

SEQ ID NO: 217776 - DNA, 568 bp, Glycine max
  unsure (1)..(568): unsure at all n locations
tctcaagcaaccatggcaatggcaacccaagcctctctcttaaccccacccctctccggtctcaaagccagcgaccgcgcctccgtgccatggaagcaaaactccagcctctccttctccagcccgaaagcccctcaagttctccagaacaatcagagcagcagccgccgacgagaccacagaggcaccagcaaaagtagaggctgcaccggtcgggttcaccccaccagaacttgacccaaacaccccttccccgatcttcgggggcagcaccggcgggctcctgcgcaaggcacaggtggaggagttttatgtcattacgtgggactcacccaaagaacagatctttgaaatgcccactggcggcgccgctatcatgagggagggtcctaaccttctcaagttggccaggaaggagcagtgcttggctcttgggactaggctcaagtccaagtacaagatcaagtaccagttctacagggtcttccctagtggngaggttcagtatttgcaccctaaggatggtgtttaccctgagaaggtcaacgccggacgccaaggggtgggt

SEQ ID NO: 217777 - DNA, 489 bp, Glycine max
agcgaaaaagaagtgtaaaattaaggtacagagtttaagcaatatttgtggcataataaaattgacaataggtacatgatatcacatgagaatatatagcatataaaggaagcacgggggatgatgatgatgaagatagagttgtgtgctcacaaatcatagggctgcttgccagtgaacttgacctcaataggactaacattcttaccaatagacctgaagttttgacccaccccttggcgtccggcgttgaccttctcagggtaaacaccatccttagggtgcaaatactgaacctccccattagggaagaccctgtagaactggtacttgatcttgtacttggacctgagcctagtcccaagagccaagcactgctccttcctggccaacttgagaaggttaggaccctccctcatgatagcggcgccgccagtgggcatttcaaagatctgttctttgggtgagtcccacgtaatgacataaaac

SEQ ID NO: 217778 - DNA, 593 bp, Glycine max
  unsure (1)..(593): unsure at all n locations
tggatccctacaagcaccggccatccagcgccttcaattctcccttctggactacaaattctggtgctcctatttggaacaacaactcctctttaaccgttggagctagaggtccaattctgctggaggattatcatcttgtggagaagcttgcatattttgatagggaacgtatcccagaacgtgttgtccatgccaggggcgctagtgcaaagggtttctttgaggtcacccatgacatttctcacctgacatgtgcagatttccttcgagcccctggagttcagacgcctgtaattgttcgtttctcaactgtcattcatgagcgtggtagccctgaaaccttgagggaccctcgaggttttgccgtgaagttttacaccagagagggtaactttgaccttgttggaaacaaccttcccgtcttctatgtacgtgatggcatgaagtttccagatatggttcatgctcttaaacccaatcccaagaaccacatccaggagaattggaggatccttgacttcttctctactttccagaaagccttcacatgttcanccttttatttgatgatttgggtgtccacaagatta

SEQ ID NO: 217779 - DNA, 411 bp, Glycine max
tttttttttttttttttttttttttttttttttttttttttttttttttttttttttttttttttttttttttaccattacagcaggaaacatgcccaaaagggttataaataccaacaaatacaaacgggtttttttgagaaaggtcaaactaggtacaatcatgggagttttgggccccctcaacattattttgcaagaaaagggttattcttttcagggaatccaaaatcccatccttatcgtcctttttggacgtttgcaactttaacaatcttttcggaggtgggaacaacattaaaattttggccccgtgccttaaagaaaaattattttttggcctaaaaaacggtcaatctgaaacccgtttgattttcaaaaactggggatcttatgggttacccgggggtt

SEQ ID NO: 217780 - DNA, 492 bp, Glycine max
atcgagaacatacgtgattgtagggctgtcttagcaactacttcagatgatggcatattaactccacatcagcttaccactgacttcaagccaaatttacctcaggaggcagaacgcataacacaatccagagggagggtattttgtatggaagatgaaccaggagtgtacagggtctggatgccaaatggtaaaacaccaggactagcaatatctagagcttttggagaccactgcatgaaggactttggactaatctccgtgcctgatgtcacacacagaaaaattaccaccagggatcaatttgtcatcttggcaacagatggggtatgggatgttatatccaaccaggaagcagtgaagattgtttcagcaacgtcacataaagaaaaagctgctcaaaggcttgtgaaatgtgccatacatgaatggaaacggaaaaaaagtggcattgcgatggatgatatgtcagctatgtgcctcttctttcac

SEQ ID NO: 217781 - DNA, 476 bp, Glycine max
acacttaaccacaaatgtcattttaattgataagtttatatacaagtctatatgtatttctgtgttacaacttacaaggaagctgtaatgaactgtttaaccacccaacattttttaatcaacaattttgatggctggggggagttgatgagagggggaagagtgaaagaagaggcaaatagctgacatatcatccatcgcaatgccactttttttccgtttccattcatgtatggcacatttcacaagcctttgagcagctttttctttatgtgacgttgctgaaacaatcttcactgcttcctggttggatataacatcccataccccatttgttgccaagatgacaaattgatccctggtgggaatttttctgtgtgtgacatcaggcacggagattagtccaaagtcctttatgcagtggtctccaaaagctctagatattgctagtcctggtgttttaccatttggcattc

SEQ ID NO: 217782 - DNA, 546 bp, Glycine max
aacataggtgattgtagggctgtcttagcaactacttcagatgatggcatattaactccacatcagcttaccactgacttcaagccaaatttacctcaggaggcagaacgcataacacaatccaaaggggagggtatcttggatggaagatgaaccaggagtgtacagggtctggatgccaaatggtaaaacaccaggactagcaatatctagagcttttggagaccactgcatgaaggactttggactaatctccgtgcctgatgtcacacacagaaaaattaccaccagggatcaatttgtcatcttggcaacagatggggtatgggatgttatatccaaccaggaagcagtgaagattgtttcagcaacgtcacataaagaaaaagctgctcaaaggcttgtgaaatgtgccatacatgaatggaaacggataaaaagtggcattgcgatggatgatatgtcagctatttgccttttctttcactctttcccctctcattaactgcccccagccatcacaattgctgattaagaatgttgggt

SEQ ID NO: 217783 - DNA, 492 bp, Glycine max
acacttaaccacaaatgtcattttaattgataagtttatatacaagtctatatgtatttctgtgttacaacttacaaggaagctgtaatgaactgtttaaccacccaacattctttaatcaacaattttgatggctggggggagttgatgagagggggaagagtgaaagaagaggcaaatagctgacatatcatccatcgcaatgccactttttttccgtttccattcatgtatggcacatttcacaagcctttgagcagctttttctttatgtgacgttgctgaaacaatcttcactgcttcctggttggatataacatcccataccccatctgttgccaagatgacaaattgatccctggtggtaatttttctgtgtgagacatcaggcacggagattagtccaaagttcttcatgcagtggtcttcaaaagctttaaatattgctagtcctggtgtttaccatttggcatccagaccctgttcactcct

SEQ ID NO: 217784 - DNA, 474 bp, Glycine max
tggttggaaggatgctgtaccattttaacacagccactaccaccaccctctctcacgggtctgtttgttgcctgaaatccttataatcagagcactccgaatttcccgcaaagggtgcacgcttcctcgtatcattgctcagtgccttacagcgggttgagagcacctgctttcatagatgcaattatctggtctactatgggaattggtcaacccttttatttgctgatgaagatgaacccatagggttcagttcttcatcaatatgatgttgacaacacccctggtgtcactgctgatgttagccacatggacactggtgctgcgggtcatggctttctggggcagctacatctcgagagtgcactcactggcatggacttggtaatcatacctgctggtgtaccaaggaaacctgtgatgacaagagatgatttatttaaataaatgctggaattgtgaggaccctttgtg

SEQ ID NO: 217785 - DNA, 548 bp, Glycine max
  unsure (1)..(548): unsure at all n locations
gttgcatctcttcttcatgatgaaagattgcctcccttagattggaaaacgaggcacaagatagccatcggaactgcacgaggccttcactacttgcataaaggttgcaagaggaggataatccaccggggacattaaggcttcaaacattttgttaacaaaggattttgaaccacagatatctgattttggactagcaaagtggcttccatctcaatggactcatcattcaattgcccctatagaagggacatttggacatttggccccagagtactacttgcatggagttgttgatgagaagacagatgtgtttgcctttggtgtgttcttgttagaagtaatctctggcagaaaaccagtggatgggtctcaccaaagcttacatagctgggctaaaccaattttgaacaagggagagatagaagagttggtggatccaaggcttgagggggcttatgatgtgactcagttaaaaagttttgcctgcgctgcctctctttgnattcgggcatcttcaacttggcgacctaccatgagtgaggtat

SEQ ID NO: 217786 - DNA, 495 bp, Glycine max
  unsure (1)..(495): unsure at all n locations
cacatccacaaaaaaaaatgttattagagatttgattagataggagtagcataaccacatgaactcctctctatgaaatttgtatatatacaagcaattgaaaaaggcatgtgactcttgattaagtacttccaatggagtcaagtaaagacattgaaaaggagctgtcatattcatattccagatcctcaaaaccccagaactcctcttcttgctctttttcttcctctggcattttccacttctctatatccgtctctccttcctccattatctctaatacctcactcatggtaggtcgccaagttgaagatgcccgaatacaaagagaggcagcgcaggcaaaactttttaactgagtcacatcataagccccctcaagccttggatccaccaactcttctatctctcccttgttcaaaattggtttagcccagctatgtaagctttggtgagacccatccactggttntctgccagagattacttctaaca

SEQ ID NO: 217787 - DNA, 312 bp, Glycine max
aattcgaatacaggctatttatataacaatgcaatgtgcacttgaaataaatacatattaatggatactaagtatcagaatgcgtgtgtgagataataccgttattcagtgattcatgaagcatcactaacctgtacctgtagttaaaagagttccatctgttcttgattagcttacttctaatggacttatgcttactcagtgattgactagcaagaagatacgataatatatgatcagaggaatagtcaggtttaagtaagcgcgtaactcgacacgacactcccttagctgtccagttactaatgactc

SEQ ID NO: 217788 - DNA, 541 bp, Glycine max
ttgttgtttttttttttttttttttgttttttttttgcatccaaatatattattatttcatggtttgggtaacagagcgagaacaccaatttatacttatggggcaattcaaaattcaaatacacgagatacattaagaacttttcagggcatatattaacttaagatccatatcgctacttgcccttagaaggcaccggacagattccctatgtcctcaggacattagatatgtatgaatcaaatcttactattcaagattgcaaaagcttctgtatgactttctcgattttcagaggtgaggtggtcggtgcatatatgtccacaagcttacgttctttggttactaagaactctgggaagagccacttgataccatcaccaaagattccccctttctgatgcttttgaaacttataaagaggggctgcattcttcccattgacttcaaccttatcaaagataggaaattcaaccttgaaccttgtgcaaacaacttgctgaattgcttgattgctttccggatcctgaccagcaaact

SEQ ID NO: 217789 - DNA, 260 bp, Glycine max
acacaagctcttcaaagctactactgacaaccaaatggatttctcgggaatctccaacacaagtgtgaccactgacgcccgggccgatgccttattggaatgcacattcactaaactatatttcatgtctggctcccgcacacaaacgaccacaaatgacattacctatattcataaccactgaggactaccgcaatgcatgcatgtcagctctcaccaagacactgagagaggatggactgtatactacctggaccatc

SEQ ID NO: 217790 - DNA, 318 bp, Glycine max
aagatgcattgttattcgttattcaggattgtagtccaagcactgcatccaagcttacaggatgatgaatgctcatcttgcaaggactgttgggaatggtgatatatatcatacagactttgcgggggagcagatacaagggctttgcgacttgattgcattgagactcctgtgctctagtgggtcatgagactggtgcactgtacttgtgcactgtcggcaaatactacgattccgatctatacaggatagcctgcatctttagcctcatgatgctacttgatagactgacaagcatttgcgactcattcatttgcc

SEQ ID NO: 217791 - DNA, 584 bp, Glycine max
  unsure (1)..(584): unsure at all n locations
caaaatcgaaaatctagagcaaagtgattgattccagttccaatggccttgggcaccagcgccttgatcggaaggaaggttcttgtctcacccccaacccccaaaacaaccaaatcatctactccgctacaattccttttcaagagaagcatcttanatgctcacaattcacaagctgctctagctgcccttatcttttcctccgcgagcctctctgtgaccccacaagcccttgccgctgataacgtcacccctccccctgtaattgaagcccaacagagccaattaaacccctccaactcatcctcccctttctcacagaacctcctcctcacagctccaaagccacaagcctcctccgacctccccgaaggcaccaactggcgctacagcgagttcttgaacgccgtcaagaagggtaaagtcgagcgagtcaggttcagcaaagacggttccgcccttcagctaaccgncattgacggccgtcgcgccttcgttattgtccccaatgaccccgacctcatcgacatcctcgccatgaaacgcgtcgacatttcccgtcgccgaggcgaatcccccaacag

SEQ ID NO: 217792 - DNA, 521 bp, Glycine max
ctccttgaatttgataaaataattattgattcttacagtgtacaagtcagagcgtattttatagtacaaacataattctgtgacttgcgtgtatgattatgcaacatataattccggtttttccatcaatgaatagactcatgaactcttcaccatccacagtttctttttctatgagaagttgagcaagcttgtgaaggatatcaatgtgagttgagataatatgtgttgccctagaatatgctctctctaccagttccctcacttccgcatccactacatccgcagttgccatggagtaatccttttgcgatgacatctgttgacccaagaatggatttccaccaggtccaccaatggcaacttgtccaatttttttgctgaatccaaatctctcaaccatctgccttgccactcgtgaaacttgcatgaagtcgtttgatgctccggtggtgacattttcctggccaaaaataacctctttggcaaccctttcacccagggcaacagccatctgattt

SEQ ID NO: 217793 - DNA, 499 bp, Glycine max
tcaaagtttcttcctttctctgatatttgacttctctgacacatttggcgccttgtagagcgtgtcatggcaagaaggtggtatggttaaagactttgaggttgctgagcgtggctccttctctgggaacggactaccaagaccgtcgaccatcagcactcattgatgctgacgagctcacaatgcggtcctttcacagggctctcattgctgaattcattgccactttgctcttactctacattactgtgctcacagttatagggtacaagcaccagactgacctcaacgaaaatggtgaaatctgtggtggtgttcgcattcttgtcatcgcatgggccttaggcggcatgatccttatccttagatactgcactgctggagatctcatgggagtacattaacccagctggtgacatttgcgctgtttttgactcgcaaggtgtctttgatccgagccatcatgtacatggtggctcagtgcttacgtgctatctga

SEQ ID NO: 217794 - DNA, 450 bp, Glycine max
aaaattaaaatttaacattttccataaatatatgttgggtacagagatgacagctgaagagaatcactctaaagaacaaaatgactctctaaagggaggaacaccacagaggaaagtgcataaggcgtcaccctgtcatgaaagagactctgatctacacttatccacaatctcgaagacatgatcgagagggtcaaagaaacgttgcaaaacacaagccaaaagcattcccaattattattaaacttgccatatcaacctgcatctgtccaaatcgtctttccactagagccatcatagggaagagaaggacgactcaagtatgggggttacttctgaatgatccaagagccttagctgcacctgctcttaagatgaactgatggtataaggctgcaatggctgccgcataaatggtactacccacaagatccaatggtcatcccatgg

SEQ ID NO: 217795 - DNA, 394 bp, Glycine max
cctcggggaattccaattccacattttcaagaaataaggaggcaaaaatgttcatatatgaattggaattatttgttttcttattaggcctatcctgaagccaaaggaaatgagatcggaattcctcggggaattccaattccacattttcaagaaataaggacgcagacatgttcatatatgaattggaattatctgatctcttattaggcctatcctgaagccaatggatatgagatcggaattcctcgtggaatgtccaattccacatttacaagaaatactgaggcaaaaatgttcatatatgaattggaattattagtgatcttattacgcctatcctgaagccaaaggaaatgagatcggaattcctcgggggtaccgagctcgaatt

SEQ ID NO: 217796 - DNA, 292 bp, Glycine max
caagatcttccccttcacggagaccaaggcctgtgacgtcttctgcgcaaacttaaaaagctgtttctttttctcgatcctactgcttctctttttagcaactgttgctctgctctacgttaaggacaagcaagttgaagcaattcctctggatgatgccactcaaccctcttgtttctttcagcttttcggtgctctgaaagagctcaagagaccgatgtggatgctgatgctggtcacagctgtgaactgggtggggtggtttccttacttccttttcgacactgactga

SEQ ID NO: 217797 - DNA, 529 bp, Glycine max
gaacattgtaaaaagtagcatttcccttattatcattaattgatgtaaagtcttaaactaagactcatccttaatcaccacattcctctgaacactgaaacagactaaaattatataagagggaagggtcttccaagaagttccaaccactgcaattatgtacaatcacaccaaactctgcaattactatgttcagtgggtgctacaaaaggttacaaatgtagcacttggtgggtctattacataattacacaccagcttcaaatcaaaagagactatccaatttttcctcttttattactggttttttttttctttctattaaagcaggggacaaaactgaaacatgcaaaactccattaactagtgaaagccccctgccatcatgcttgaagccttggcctcatcagctggctttggagttggcagcaagacaatcgccattatggcgctcaacgcggctgccgcagcacccaccatgaaagccggcaagttgccaccaccaaacaaggaatcccatggaccactt

SEQ ID NO: 217798 - DNA, 506 bp, Glycine max
cagcgatggcacagaagagattcatcatcgaggtcgagaaggcgaaggaggcgagcgaaggaaggccttcgagaggacctgtctatcgtagcctcttcgccaaggatggattccctgctcctatcccaagtctcaatagttgctgggacgtttttcgattgtctgttgagaaatatccatcaaatccaatgcttggtcgccgggaaattgtggatgggaagccgggcaagtacaagtggctaacatacaaagaagtatatgaccaggtgatgaaagttgggaattctatccgcagctgtggttatggagaaggtgtaaaatgtggtatttacggtgctaattctgcagaatggattatgagcatgcaggcttgcaatgctcatggactttattgtgttcctttatatgataccttgggtgctggggctatagagtttattatatgccatgcagaggtctcaattgcatttgcagaagaaaagaaaatacctgagctattgaagaca

SEQ ID NO: 217799 - DNA, 524 bp, Glycine max
aaaataaatgacgtatccatatataactactcagcgtatatacagtcaccaaaaggaaacaattgaacggagacaaacaccatcacatacagaaaataaattatctcccaaatcaggtctcaggcactgggtttacttccactcttatacatgttgtcaatggcattctgatagtatttaagcaactgtggcctcttcttcttgtatgttggagtgataaggtcacgttccatgtcaaatggaattgagtcaaggtgaactgcttttataaactcaaaacctttcaacttcttttccttcgcaatctttgagagctcttcaattatgtaactttttgctcgagcatcttcacagagagaattgaagtccatggatataccattttcttgggcccaatgttcaagtgcttgcttactggggttaacaacagccacaaggaaggcctcaaaactgtttccataaacccatatagattcaatagaagaaacttgaccgtaaatattctccagttttcgacagcaaca

SEQ ID NO: 217800 - DNA, 548 bp, Glycine max
  unsure (1)..(548): unsure at all n locations
aacaaactcaatttaaaataatgcttcaattattttccacaatttacttcccataagccactttagcagctggcttccatttgctactttggttagaaaaataaaaatgaatataaaacagactaaaactactagggagcagaaaataaacccttagcacattgtacactggtcaaagttgatcaacaaagtgaacacttattgggattttatggctattattttcagctttaaatacagacatcgtacatcattgaggattgcctggaatagatcatgttcagcattgatgatgaataaaacgattatcatcaaagtcatgcatctacgacactttattgaatcctttttcacctgcacttgccattccatacttcatacttcgtgaaccaatccgtataaatcatccatagtaataattcagtaagtatcctaataaacacgagctttaggagggaatgattccacctcatcatccaacgtattcatgtgcaccggcctgtaatctaaccgcaccttctcattatcccaatatctgcanatcaata

SEQ ID NO: 217801 - DNA, 447 bp, Glycine max
aaaaatagcaacaaaaacaagaaaaaaggttacctctttcaattttatcccttgttgtgagcttaattcaatttctgctcacacataatgggcttatccagaaaaggttcaggcgtcaaaggaattttgttactaggaataaggttactgtcatacatgccgtggcaattccagtacaaccagctccggtggaaagtgcggagtatagaaaacagctagctgaagactacggtttcaggcaagttggagagccgcttccagatgatgttactttaaaggatgtcatcaattcccttcctaaggaggtctttgagattgatgatgtgaaagcatggaaatctgttctgatatctgtcacttcttatgcactgggtctcttcatgatttccaaagccccctggtatcttcttcctctggcttgggtatgggacaggactgcaataactg

SEQ ID NO: 217802 - DNA, 503 bp, Glycine max
agaccataatgtgcgatatgcctcgtgctaattgatgcattaaacaggtttatgatataatatacttccaacgtgatgacaagaaccccactgttcagattaccataacatctactttaacctaatgaatgcttctcgatgacttgaccttggataatccgcaacttggtaatataattaccctaatacgtgaactttgagagcagcaagcaattttttcgttatacatgatatgaaaaatactagtagaactatattaaacaagatcgaaaatgtaaaaagaaaatgaatggcatacgaacctaatttgatacataaaaaatttcatatgagaaaaaaagccagtttgggcataattaagcataatcaggcatggtttccttcaaaaatgtaattggacgagaatcttcaggggcaaagtcgtcgaaggcaacataattttgctccttgtcgtacacatgacacactgtcatgaatgcttcatcaatctccatttcaactag

SEQ ID NO: 217803 - DNA, 366 bp, Glycine max
  unsure (1)..(366): unsure at all n locations
aaaaatagcaacaaaaacaagaaaaaaggttacctctttcaattttatcccttgttgtgagcttaattcaatttctgctcacacataatgggcttatccagaaaaggttcaggcgtcaaaggaattttgttactaggaataaggttactgtcatacatgccgtggcaattccagtacaaccagctccggtggaaagtgcggagtatagaaaacagctagctgaagactacggtttcaggcaagttggagagccgcttccagatgatgttactttaaaggatgtcatcaattcccttcctaaggaggtctttgagattgatgatgtgaaagcatggaaatcntgtctgatatctgtcacttcttatg

SEQ ID NO: 217804 - DNA, 466 bp, Glycine max
  unsure (1)..(466): unsure at all n locations
caatccaatgtgccacacgccacgtgcttttttatccatcagacaactttataatataatattcttccaacgtgataacaagaaccccactgttcagattaccataacatctactttaacctaatgaatgcttctcgatgacttgaccttggataatccgcaacttggtaatataattaccctaatacgtgaactttgagagcagcaagcaattttttcgttatacatgatatgaaaaatactagtagaactatattaaacaagatcgaaaatgtaaaaagaaaatgaatggcatacgaacctaatttgatacataaaaaatttcatatgagaaaaaaagccagtttgggcataattaagcataatcaggcatggtttccttcaaaaatgtaattggacgagaatcttcaggggcaagttcgtcgaaggcaacataantttgcttcttgtcgtacacatgacacac

SEQ ID NO: 217805 - DNA, 500 bp, Glycine max
ctcataacacaaagcacaaagcaaagctcatccttgagttaaaaaatggcagcagcttcttccatggctctctcatccccatccttggctggcaaggccgtgaagctgggcccatcagccccagaaagtgggaagggtgagcatgaggaagaccgtcaccaagcaggtctcctcaggaagcccatggtacggcccagaccgagtcaagtacttgggcccattctctggcgagcccccgtcctacctaaccggtgagttcccaggcgactacggctgggacactgctgggctttccgcagacccagaaaccttcgccaagaaccgtgaactcgaagtgatccactccaggtgggccatgctcggagccttgggctgcgtcttcccggagttgctgtcccgcaacggggtgaagttcggagaagccgtgtggttcaaggccgggtcccagatcttcagcgagggtgggctcgactacttgggcaacccaagcctgatccacg

SEQ ID NO: 217806 - DNA, 573 bp, Glycine max
gtaaaaagcaagtaacattaagttggattcggatacacaagataattcacattatctgaagtacttcaccaaacacaaatctaaaaactctcaaaagtcatttcgttctttgacgctcactttccggggaccaaagttggtggcataggcccaggcgttgttgttgacagggtcagcaaggtgatcggcgaggttctccaatggaccctttccggtgacaatggcctgaacaaagaagccaaacatagagaacatggccaatcgtccgttcttgagttccttcaccttaagctcagcaaaagcctctgggtcatcagcaaggcccaatgggtcgaagctgccacctgggtagattgggtcagtgacctcaccgagggggccaccagcaatacggtaaccttcaacggcacccattaggataacttggtgtggcccagatggcgaggatgctctgggcgtggatcaggcttgggttgcccaagtagtcgagcccaccctcgctgaagatctgggacccggccttgaccacacgggttctccgactttaccccgttcgggacagcacctcgggag

SEQ ID NO: 217807 - DNA, 525 bp, Glycine max
  unsure (1)..(525): unsure at all n locations
gtgagcacttactattctgtgagcaatggctttaacactagacaaaaaatctgttggtacctttttcatgcttttcttgacatgcatatgtcgtgcctcgtcacgcactctctctgagtcttccattgccacacagcatgaagagtggatggccatgcacgaccgtgtttacgctgacagtgcagagaaggacaggcgccagcagatattcaaggagaatttggagttcatagagaaacacaacaacgaaggaaaaaagaggtacaatttaagcctaaacagttttgctgatttgactaacgaagaattcgttgcttctcacacgggagctctctataagccaccaactcaactaagggtcgttcaagattaaccacagtcttggcttccataagatggagtgtcggtgacattgaggctagcttggattggagaaagagaggagctgntaatgatattaagaaccaaggcagatgtgggagttgctgtgcattttcagctgtggcagcttgtgagggaatcaac

SEQ ID NO: 217808 - DNA, 508 bp, Glycine max
ggtagtcaataaatttttctcttaacgaatataatgtggtaaacatatgatctgatctaagatcatgatctcatagatgctacgtacattgcagcattacataaggattactggtggattaattaacttaaataatatttttttattttagggtaatgtgctctaacacatatttaaagaaacggataagaggcttgcatgttaatgccgcaaagaccttgagggttaccagtgtccctcataagcttcatgtaaccaccctcaccccaacttttgccccatgaattccttatgagccagtattttccctcagcctcctcaccatacccaacaatggtaactgcatggttaagttcagttccacactcgccactgaaaactcctcctgagtaaaactgaaacccttgtcccttggcttcaaggagcaccgagacaggttgagaggccactgcagttagaagttgctcctcgttctggggagttacactttggtaacctctgatctgaa

SEQ ID NO: 217809 - DNA, 518 bp, Glycine max
  unsure (1)..(518): unsure at all n locations
tgttcgccgccgtggccaccgtcgcgatggcggtggccgcgtccgacgccgacgacatcctgatccgtcaggtggtgccagatgttggcgaagccgacgaggaggacaacctgctgaacgccgagcaccacttcgcgagcttcaaggccaagttcgccaagacctacgccaccaaggaggagcacgatcatcgcttcggcgtcttcaagtccaaccttcgcagagccaggctgcacgccaagctcgacccctgcgccgtccacggcgtcaccaaattctccgatctaactccggccgagttccgacgccagttcctaggcctcaagccgctccgctatccggcgcacgcccagaaggcgcccatactccccaccaaggatctccccaaggatttcgattggcgagacaaaggagccgtcactaacgtcaaggaccaaagggcgtgtggttcgtgttggtctttcagtacgacgggtagcgtngaaggagctcattatctggccactggtgagctcgtg

SEQ ID NO: 217810 - DNA, 564 bp, Glycine max
ttgttttttttttttttttttttaggaccacacatttccttggatttcccacttgtatatgtcaagcatacatacagaaattacatactacataaacaacatggtcttagcagtttcctgatcctatacggagataattttaccagtaccaaatgataaagttcacaacataaatatttatacaaactccccttagtccagtatcacatcacaaccacaatcaggcatatctttgtatttaatggctggatggatatatagcagctacagttgagaccatggaatctacttcacacacatttcgacctttgcagatcttgtaatatgcattctctacccagctctcgccccatgaattcttaatgatccagtaagggttggtcttaaaacgaatgggagcatatgcaccttcaccataaccaactagaagaaccccatgatccaaatgcttcccacagatgtatgagcatgagacgccaccaacatatgtctgcataaaaactgcattgatagcaactgcaagagggccattctttactaggtttgcagcaatttgttcttcat

SEQ ID NO: 217811 - DNA, 365 bp, Glycine max
aacagagcaaatgcaaatctttgtgaagaccctcaccggaaagaccatcaccttggaggtcgaatccagcgacaccatcgagaatgtgaagcagaagatccaagataaggagggaatcccacccgaccagcagcgattgatcttcgctggaaagcaacttgaggatggccgaaccctctctgactacaacattcagaaggaatccaccctccacctcgtccttcgactccgaggaggaatgcagatttttgtgaagaccctcactggcaagacgattaccctggaagtcgaatccagcgacaccatcgagaacgtcaagcagaagattcaggacaaggagggaattcctcctgaccagcagagac

SEQ ID NO: 217812 - DNA, 494 bp, Glycine max
  unsure (1)..(494): unsure at all n locations
gtgtgtacattatttactgtcctcctctcaatcgaagaacgagatggagggtggattccttctgaatgttgtagtcagagagggttcggccatcctcaagctgctttccggcaaagatgagtcgctgctgatcaggtgggattccctccttgtcctgaatcttctgcttcacattctcgatggtgtccgatgactcgacctccaaggtgatggtctttccagtgagggtcttgacgaagatctgcattcctcctctcaatcgcagaaccaaatggagagtagattccttctggatgttgtagtccgacagagttcgtccatcctccaactgcttgccagcgaagatcaatcgctgctgatcgggtgggatcccttccttgtcctggatcttctgtttgacgttctcgatggtatcgctggactcaacttcgagggtgatggtcttgccagtcaatgtcttgacgaagatctgcattcctnctcgcagtctgagc

SEQ ID NO: 217813 - DNA, 568 bp, Glycine max
  unsure (1)..(568): unsure at all n locations
atttggatttgcagatttgaaggagatagcgtctcttatcgagaccggttcgtactcgaaggaagttcgtagaattgctcgcgctgttcgccttacaattgcgttgaggcggaaattgacagcatccgctatctcttcttttctcgatcatgttctcactcctggctctgaagttcacgccaaattgtctgcgtatcttcccaaggatgatgatcatgagatggaagtggacgctgcaacatctgcgattcaaaccccagccaaacacttgttgcccgagctagaaatctactgttacctgcttgtactcctttttctgattgatcagaaaaaatacagtgaggccaaagcttgttcctcagctagcattgtttggctgaagaacataaacaggagaactgttgatgttattgcatccagactgtatttttactattcgtatagctatgaacttatgggagatcttgctgaaattcggggcaaccttcttgcattgcaccgaattgccacccttcgccatgatgagcttggtcaggaaacacttcttaatgtgntacttcgtaactac

SEQ ID NO: 217814 - DNA, 573 bp, Glycine max
  unsure (1)..(573): unsure at all n locations
gtctgaaatttggagtgttttttcgtttgctgtgttcagctccttatggagctctcactctctccaacttcacatcgtgttccttccacaattcccactttgaatttcgctaaactatcatccactaaggccacaacgtcccaacctttggtcttaggattttccaaacacttcaactcaattgggttgaaccatcacagttacagatgctgctcaaatgctgttcctaagagaccccaaagacccagttccataagggcctgcactggagttggagctgctggttctgatcgtccattagctgaaagacttttagatttgaaagatgcttgctggagatttttaaggccacatactatacgtggtacagcactaggttcatttgctttggtggcaagagcattgattgagaacacgaatttgataaagtggtctcttttgttcaaagctttctctggtctttntgccctgatttgtgggaatggttatatagttggcatcaatcaaatctatgacattagcattgacaaggtaaacaaaccttatttacctatagcttgctgagatctttct

SEQ ID NO: 217815 - DNA, 576 bp, Glycine max
gaaactctctctctagaaaccctattgcacgttttgcaatcgaactcgacaatggccaacagcaacctccctcgaagaatcatcaaggaaacgcagcgtttgctcagtgagccagcaccaggaattagtgcctctccttctgaagagaatatgcgatatttcaatgtgatgatccttgggccaacccagtcgccttatgaaggaggagttttcaagttagaactatttttgccagaagaatatccaatggctgctccaaaggttaggtttctaacaaaaatatatcatccaaacattgataagcttggcaggatttgtcttgatattctgaaagataagtggagtcctgcccttcagatccgcactgttctactaagcattcaagctctattaagtgcaccaaacccagatgatccactttctgagaacattgccaagcattggaaatctaatgaggctgaggctgtcgaaacagcgaaggaatggacccgattatatgctagtggcgtctgatgatagggttcaaactcatggctccaaaataacaattgtaacccatttatattggaaatctag

SEQ ID NO: 217816 - DNA, 514 bp, Glycine max
gtaaaaagtataattatttcttctctcataagtactaatagagaaatttccaacatgccctaaccaatcaaatctttgaatgattcattgatgagtaaagagaacagaaactaattcacaaattttggcctttgatgttgagaataccaaattacttcacagtcgatgattgaagcacgctctaaattgttagataggtaaatgatcaacgcatatattcatacaaattcaaacataaggcagctttcaagagaagaaattaaaaggtaactggaaactgcgaggaatattaattccaatagttcataaatcaattcctctagatttccaatataaaatggttacaattgttattttggagccatgagtttgaaccctatcatcagacgccactagcatataatcgggtccattccttcgctgtttcgacagcctcagcctcattagatttccaatgcttggcaatgttctcagaaagtggatcatctgggtttggtgcacttaatagagcttg

SEQ ID NO: 217817 - DNA, 487 bp, Glycine max
tgcgggtactgacacaacacacacggccttggagtggacaatgtcagagctgttaaagcacccaatggttatgcataaattgcaagacgaggtgagaagtgtggttggtaacaggactcatgtaactgaggatgatttgggccaaatgaactacttgaaagctgtgatcaaagaaagtcttcgtcttcatcctccacttccattaatagtccctaggaaatgcatggaagatatcaaagtgaagggctatgacattgcagctggcactcaggtattagtgaatgcttgggtaattgcaagagacccttcatcttggaaccaacctctagagtttaaaccagaaaggttcctcagcagttcagtagacttcaaaggacatgattttgagcttattccgtttggtgctggaagaagaggttgtcccggaataacgtttgccacatatataattgaggtggtatttagcaaccttgttcaccaatttgat

SEQ ID NO: 217818 - DNA, 534 bp, Glycine max
  unsure (1)..(534): unsure at all n locations
acagattataaatagctgcaaccactttggttgactcatacaggtcccttggagccacttgtcctgtattgaaaatccattttgcttcatttcattccctcacatagtgtttttttctttccatggaaaaacttgttgggtctgctgagaattcatgttgaaaaaggtgtaaatcttgccatcagggatgtggtgagcagtgacccttatgttgtcatcaaaatgggaaggcagaagctgaagactcgggtagtcaagaagaatctaaatcctgaatggaatgatgacttgaccttgtctatttcagaccctcatgctccaattcatctacatgtgtatgacaaggacacatttagcatggatgacaaaatgggggatgctgagtttttcataggtccatttattgaagcagtgaagatgcgcttgtcaggtctccccacaatactatagttacaaaagtgctacctagcagacanaactgtttagctgaagagagtcacataatgttgaaagatggcaggttgtccaaacatg

SEQ ID NO: 217819 - DNA, 470 bp, Glycine max
gttctagatcgcgagcggccgccctttttttttttttttgttatctcttcacttgttaaaggggaataggaaattaattaatgtgattgaatccttatcctgtaggtttttaaaaaaaaaaaaaaaaaaaaaccgaaaaaaaagacaaataaaaaaaaagaaaaaaagaacaaaaaaacaaaaaaaaaaaaaaaaaaaaaaaaaaaaaaaaaaaaaaaaaaaaaaaaaaaaaaaaaaaaaaaaaggggggcccccccaataagaaggttcaacaccctgaaaaaaactcagccccggatcaaaagggcaaccaaaatttcctaaataggactgcttataaacaattgtgcaaaccaggaggaaaaactctcctaaggggaaaaattatttcccataaaattgcccccactgactagaccctgaaccaaaaagcaaaagaccggggtacccaaaggagagacaccacccaa

SEQ ID NO: 217820 - DNA, 491 bp, Glycine max
ctcaagctgatattggggtgttggttatttctgctcggaagggagagttcgaaactggatacgagagaggtggacaaactcgtgaacatgttcagcttgcaaaaacgctgggtgtgtctaaacttcttgatgatgtcaataagacggatgagcctacagtgcagtggtcaagagaaaggtatgatgaaattgagtcaaagatggttgcatttataaagcaatctggatacaacgtaaaaaaagatgtcttgaagataccaatttctggtctaatgggtgcaaacatgaaaacaagagtggataaaagtgtatgtccatggtggaacgggccttgcttatttgaggcacttgacgctattgaagtttcactgcgagatcccaaaggtcctttcaagatgcctattattgacaaattccaagacatgggaactgttgctatgggcaaagttgaatctggcagtgttcgtgagggagattccttgatggtcatg

SEQ ID NO: 217821 - DNA, 494 bp, Glycine max
taaatccatatcctcccccaaagtctttgtcttctccgcccccactctcccaccccacttacatacacactctcccactcctccgagccggtcgagttgaatcggtgagtcagtgaccgagttgaaccatgtcggacgaagagcaccatttcgaatccaaggccgatgccggagcctccaagacctatcctcagcaggccggaaccatccgcaaaaacggctacatcgtcatcaagggtcgtccctgcaaggttgttgaagtttctacttccaagactggtaagcacggccatgctaagtgtcactttgttgggattgatattttcactgccaagaagcttgaagatattgtgccctcttcccacaactgtgatgttccccatgtgaatcgtactgattaccagttgattgacattgctgaggatggatttcttagcttgcttactgaaaatgggaaccaccaggatgacctgaagttacctacagatgagagt

SEQ ID NO: 217822 - DNA, 482 bp, Glycine max
aaaacaaaaataatttgatagtcgtattttatcaaaaaaatatcaagacaacatcgaaacagagaaatgttaaacagtttctgtcacatccataaacacagttgataaaactagtctgacttagagtctccataactccggggtttaacaagatcatacaaaaatatataacttttgcataaatgaaaacagcaaactaccagcaattgaggctagttctttggcccaatatccttcagtgcacaaatctgctcctcacccattgcagacataactgacacaacaaggtccttaccctcagcaaacccatcctttatctgagtaagcagactctcatctgtaggtaacttcaggtcatccttggtgttcccattttcagtaagcaagctaagaaatccatcctcagcaatgtcaatcaactggtaatcagtacgattcacatggggaacatcacagttgtgggaagagggcacaatatcttc

SEQ ID NO: 217823 - DNA, 568 bp, Glycine max
taaatccatatcctcccccaaagtctttgtcttctccgcccccactctcccaccccacttacatacacactctcccactcctccgagccggtcgagttgaatcggtgagtcagtgaccgagttgaaccatgtcggacgaagagcaccatttcgaatccaaggccgatgccggagcctccaagacctatcctcagcaggccggaaccatccgcaaaaacggctacatcgtcatcaagggtcgtccctgcaaggttgttgaagtttctacttccaagactggtaagcacggccatgctaagtgtcactttgttgggattgatattttcactgccaagaagcttgaagatattgtgccctcttcccacaactgtgatgttccccatgtgaatcgtactgattaccagttgattgacattgctgaggatggatttcttagcttgcttactgaaaatgggaacaccaaggatgacctgaagttacctacagatgagagtctgcttactcagataaaggatgggtttgctgagggtaaggaccttgttgtgtcattatgtctgcaatggtgagg

SEQ ID NO: 217824 - DNA, 450 bp, Glycine max
aaaacaaaaataatttgatagtcgtattttatcaaaaaaatatcaagacaacatcgaaacagagaaatgttaaacagtttctgtcacatccataaacacagttgataaaactaggctgacttagagtctccataactccggggtttaacaagatcatacaaaaatatataacttttgcataaatgaaaacagcaaactaccagcaattgaggctagttctttggcccaatatccttcagtgcacaaatctgctcctcacccattgcagacataactgacacaacaaggtccttaccctcagcaaacccatcctttatctgagtaagcagactctcatctgtaggtaacttcaggtcatccttggtgttcccattttcagtaagcaagctaagaaatccatcctcagcaatgtcaatcaactggtaatcagtacgattcacatggggaaca

SEQ ID NO: 217825 - DNA, 584 bp, Glycine max
  unsure (1)..(584): unsure at all n locations
ctctaatagtaatagtaatatacataagtaacataaccaatggaagcgcgtgcaggagccaatcagcgtattgcaagaatctctgctcatcttcagcctccaaatttccaggaagggagtgatgttcttcttaagagtgctgagtgcagagcatagggtggggcacctggattcaaagttgcaattttgggggctgctgggggaattggtcaacccttttctttgctgatgaagatgaacccattggtttcagttcttcatctttatgatgttgtcaacacccctggtgtcactgctgatgttagccacatggacactggtgctgtggttcgtggctttctggggcagcaacaacttgagagtgcactcactggcatggacttggtaatcatacctgctggggtaccaaggaaacctgggatgacaagagatgatttatttaaaataaatgctggaattgtgaggactctttgtgaaggaatngccaagagctgncccaatgcaattgtcaacttgattagtaatccagtgaattccacagttgctattgctgcagagttttcaagaaagccgtacatatgatc

SEQ ID NO: 217826 - DNA, 496 bp, Glycine max
  unsure (1)..(496): unsure at all n locations
agtacaaaaggctgatattttagtatctttctgagattattaagcagttccactgatgtcaaatccgttatcatcagcaattacggatgacaccaaaaatttagagtactattcttaagaagaagaaaaanaatctatgaacaaagagaagcattacacatggtccttatatataagagacaaaaactagtttttccttatcacatttattttctgatgaactctacacccttctggatgcttcctgctaactctctctttgccttttccaatccaatcctttcatactcattcaggggacccagttgataaacctcttctgctccagcacgacctagacgtaccttggttgcaaagaagggaagttccgtaacctgagaatcaacaaaagcacactccactaccccagcttctccttttaagccacggaggcatgcaccagcaaacttggcagctgcatatgccattgatagtgttgcagaacctgtcccagctt

SEQ ID NO: 217827 - DNA, 555 bp, Glycine max
gttccttctctcgagacgatccggagggatgggaggtcctggtggccctggatttcctcttgcttttggtcaatccaaagccaagtttcaaatggaaccaaacaccggagtgacatttgatgatggtgctggggtggatgaagccaaacaggactttatggaggtggtggagtttttaaagaagcctgagaggtttactgctgttggggctcgcattcctaaaggagttcttcttgttggtcctccaggaactgggaagaccttgttagccaaggctattgctggtgaagctggtgttccatttttctctatatcaggttctgagtttgttgagatgtttgttggtgttggtgcttctcgtgttcgtgatttgttcaagaaggcgaaagagaatgccccttgcattgtctttgttgatgaaattgatgctgttggaagacaaagagggactggaattggtggagggaatgatgaaagagagcagaccctcaaccaacttttgacagaaatggatgggtttgagggtaacacatgtttcattggcgttgcagcaac

SEQ ID NO: 217828 - DNA, 521 bp, Glycine max
agacgtaaagaaactacaaatttttacactaaaaacagtttctcttttatacatactctctgttgtcatttgtcaacactacaaaaaatgaaaaagtaaggtagaatctttaatcattcacaaatatggagcaggctgcagagggcattctgtattctaagataatacatatgaaagatgttacatatataggctattcaaacagtggctggtactggagttgaaggagcaacacggttttcagctggaatttcaacaaactcagacaatatagcacggaattcatctccgctcagagtctccttctccagaaggacttccacaatcttgtcaatggcctcacggttgttccttatatgctccagtgcaatttcatatgcttcatctgagatcctcttgatggcagcatcaatgtcttctgcaagcctctctgacattgagttccttgccatcattctcatgatgacatccccaccttgtgctgatggttccataagtgaccaaggaccaatatcagacat

SEQ ID NO: 217829 - DNA, 570 bp, Glycine max
gttccttctctcgagacgatccggagggatgggaggtcctggtggccctggatttcctcttgcttttggtcaatccaaagccaagtttcaaatggaaccaaacaccggagtgacatttgatgatggtgctggggtggatgaagccaagcagggacttatggaggtggtggagtttttaaagaagcctgagaggtttactgctgttggggctcgcattcctaaaggagttcttcttgttggtcctccaggaactgggaagaccttgttagccaaggctattgctggtgaagctggtgttccatttttctctatatcaggttctgagtttgttgagatgtttgttggtgttggtgcttctcgtgttcgtgatttgttcaagaaggcgaaagagaatgccccttgcattgtctttgttgatgaaattgatgctgttggaagacaaagagggactggaattggtggaaggaatgatgaaagagagcagaccctcaaccaacttttgacagaaatgggatgggttgagggtaacacaggtatcattgtcgttgcagcaactaacagggctgacat

SEQ ID NO: 217830 - DNA, 541 bp, Glycine max
  unsure (1)..(541): unsure at all n locations
agacgtaaagaaactacaaatttttacactaaaaacagtttctcttttatacatactctctgttgtcatttgtcaacactacaaaaaatgaaaaagtaaggtagaatctttaatcattcacaaatatggagcaggctgcagagggcattctgtattctaagataatacatatgaaagatgttacatatataggctattcaaacagtggctggtactggagttgaaggagcaacacggttttcagctggaatttcaacaaactcagacaatatagcacggaattcatctccgctcagagtctccttctccagaaggacttccacaatcttgtcaatggcctcacggttgttccttatatgctccagtgcaatttcatatgcttcatctgagatcctcttgatggcagcatcaatgtcttctgcaagcctctctgacattgagttccttgccatcattctcatgatgacatccncaccttgtgctgatggttccataagtgaccaaggaccaatatcagacattccaaatgtggtcaccatct

SEQ ID NO: 217831 - DNA, 391 bp, Glycine max
atgaatttgaggctattgaatcccttgatactgctcgtgaaagggcagaaactcgtgctgagtcattgcgtaatgagcgtatttcagcaaaggcaggggatggaaaggtcaccctatcttctttagctgcagcactcatcgtcaggaaagctgtctggactagatttgcatcaactacatattattttgaaggttgatcttcacggatctattgaagctgtcagaaatgctctggagattctaccacaatacactgtcactctgaagttcttgtcggacgcatcaggtgatgtaaccacaactgatgtggaccttgcagttgcaagcaaggccatcattttgggattcaatgtgaaagcaccaggctctgtgaaaagctatgctgagaaca

SEQ ID NO: 217832 - DNA, 543 bp, Glycine max
gaagccataacgcgaagaagagaatcaagtgcaatagagtcttaggcaatttgcttggactacttccgtcgcttatctcatccagcaatttcccccatatcttctagtgaaggaaggaagaagaacccaaaaagtaaaggttacaaaaatatagataaactctcttttccttttaatcttatttttattttttattcttaaaagaagagtcccaaaaaagcatgtgctttcctgctcctagatactatcatctgtgtgcatttgagctagaattgagcctcctaacaaatcgtcccttcattctgggccgtcgatctgcgttgactttcctcacctggtacctgatctttttcgagaagaggcgcgttcgccgcttctccttgtagcgcagcacgctagcttctctcactcctccattgtcccacaacaaatcaatttgcgacaaccgcgcagtgacgtcattttccgggacgtcggcgagggggctatcgtcggtgaacggtgttccgctgtcagaccaagcgtttcgaacgccgtcgtaat

SEQ ID NO: 217833 - DNA, 521 bp, Glycine max
  unsure (1)..(521): unsure at all n locations
ctttttcatcttcttcctcctctcataccaccttcacttccatgaagccacaacatcaatatcaatgacaacaacagtttccaccgatttcctccccctgttcaacccccaccccaaccgcaccaattcccattctaattcccgtacactcccaattctcaatgaaaccaccaacatcaaccgcactctctcttccgtttccaagccccaaacccataccctcgatttcaaagacacccatctcctcaaatccctctcccgatcctgcaaagccggcaacttcaacgagtccctctacttgctgcgccacctcgtcaacaagggccacaaacccgacgtcgttctgtgcaccaaactcatccacgggctcttcacttgcaaaaccatagacaaagccattcaggtcatgcacatgctcgaaaaccacgggcaccccgacctcatcgnctacaacgccatcatcaccggcttctgcagagcccaccgaatcgattctgcataccaagtgctcgacagaatga

SEQ ID NO: 217834 - DNA, 454 bp, Glycine max
ggtaattaatcagacaaattaagctgtctggacacatcaagcttgcaaaatgttttgtacaatcgttcaaatgaatgttcacaaatagcatccatattaacaagggtggtagccaagtccctagcattatttagacaccccccaaaaccaatcccttcaatcaaaaaagtgtaagtagtttcatttggccgacaccctttggccaccattgcagccaacacctcaatggcatcactaactctactcactttgcacaacccaagaagaacaatgttgtaactaacaacacttggcttacactcactactctccatctccatgtccaccaacaactcaatgggctcatccaccattccatctctgcacaaacaagatattagcgaattatacgtaatcccatcaggatcaacacccttgtccaacatctccaaaatcattcctaatgctctaactt

SEQ ID NO: 217835 - DNA, 531 bp, Glycine max
ctcgcggttattatcctacttgtcagaaacttgcacttcactacacagtttagaagtgaatcaatccatccgagatggtgagactttggtttcagcacgtggaattactgaagtgggtttcttcagtcccggaaattcaacaagacgatacttgggtatatggtacacaaatgtatcccctttcacagtagtgtgggtggctaaccgaaatacacctctagagaataaatctggagtgctgaaactcaacgaaaaaggggtccttatgattttcgatgctgcaaacagcaccatttggtcgtccagcataccaagcaaagcaaggaataatccaattgctcatctcttggattctgcaaattttgtagtgaaaaatggacgcgaaaccaacagtgttttgtggcagagttgtgattatccaagtgatacattgatcccaggaatgaagattggagggaacttggaaactggtgaagataggttcataacatcttggaaaagtgctgatgatccagccgtgggagaatatac

SEQ ID NO: 217836 - DNA, 628 bp, Glycine max
  unsure (1)..(628): unsure at all n locations
atgcacatgcatatangccgtccggatcnattgcaggaattacaggctcagctaatcggcggccgccctttttttttttttttgatgagcataatttgcaatttacttcagttataattgtctcattgtaaaaggcaggaaccgttggttctggcaataatttctctccattcaacattggaaccactgatgacatatctggtctgtgttctggtcttctttgtacacataataagcccacttgtatgcatcgtatgacttcaaatggtctacattgttcttctaacactttatccaataggtctagtgccctctcttctacccataatctccatgcatgtccaagaagattatggcagtgttctgggtctgaaaattccctgtttttcttcccactaacaatctctagtattattacaccaaaactaaatacatctgatttcaccgagaaattcccacgtacagcatactcaggaggcatgtaaccgtaagttccaaccaccctattggtctttgcttcaaattgatcttccaaaaatgatcgagccaagccaaagtcggatatcttggggtcccaatttgaatccactaaaatgttgctagttttaagatctctatgaataatcct

SEQ ID NO: 217837 - DNA, 421 bp, Glycine max
gttattgaccaaataatccacttttggattataccattttattaagggaaaaaagagttccaactcttatttcaaaatttttgcaatcaaaaacttggatattctgattgtctgagaccaaaactaacatgagtatacctatattctttttatacaacaacaaccctaatatacacttttttttttaaccaaaatcagtcgtgggggatttttcaaaatctagttggagttttttttttctgacttaacctggtggattctttgacgtagtttaccccgggggtcatttattttccaaaggccatgtcccaatattacaggggagtttattccccgtgtgataatgggagccaaaattttatcagtttggatccactcccaacctaagtatattgccaacaatcctttcagaaatggggaa

SEQ ID NO: 217838 - DNA, 530 bp, Glycine max
ctcaacctctgcttgcaccttcttcaagttctccatctcctcctccatggctgttttctcttgtttttgtctcttcttatgctccagtaatgatgtatcagaatctttaacagagaaaaacatgggtcccagcttagccagccactggggctccaccgctgttgcacactgcatgtactcctttgtggtcaggattaactcatgataaactacatactcaggagtgcaacccataccatagagagcactactgggatgaagatgacatggcatcccgttcctgcagttaacatactcccccacaccctttaatcttgctgaattgtggaagtatgcagaacaaattgctttcctgacaatgtcagtatccggccaacatgaggttaaggggatctttaaagtcttgagaatatcaagcagctgggatctaacctctctggcctttcttaggcctttaacatgcaaaaaatgatcattgcaccaatcacctctgtaatcatgttgtttccattgctgataaacgttgtaca

SEQ ID NO: 217839 - DNA, 566 bp, Glycine max
  unsure (1)..(566): unsure at all n locations
ctttagagagatagagagaggaagaaagaatggcagcttgcactgtctactcaacacaatctctgagcacaaattgctccatctcaaccccatcaaagacgcaactcagttttttccaccaaaagcagggtagttntctggaggaacagcaagaagggcagctgcagcagcagaagaagctatgtgataacatgtgcagcaggtgactcacagacagtggtgattggcctggctgcagactcagggtgtgggaagagcaccttcatgaggaggctgaccagtgtgtttggaggagcagcagagccaccaaagggtggcaaccctgactccaacactctcatcagtgacaccaccactgtcatatgcttggatgattaccactctttggacagaactggaagaaaggagaagggtgtcactgcccttgaccctagagccaatgattttgatctcatgtatgaacaagttaaagctcttaaggatggaattgctgttgaaaaaccaatctacaaccatgtcactggtctctgggatccccctgagctcattaaaccccccaaaatctt

SEQ ID NO: 217840 - DNA, 477 bp, Glycine max
ggctcaatcttgtatcaacataactgaatctcagcctcgctttttcttctcggataagtacatacatacataggggttttttcattaattatcatgcagaacagccctaataacaattgacaaaataacatgaaatagagtggaattgtggaaaacatgaaagaagaaagaaaatgatgattttgatgatgagagaactcaatttggctgcgttgctcgatcgatatatgtatatatattatggcaggttcaattcctaagcttttgcagctactggagtctcagccttgctggctattagctgctcatatagatctcttatcttcaaaccaactatggtttggaagagacctgttccattggtgctgccgggaaaatcagcatgcttcaacatctggtgagtaacctctccatagaactttgtagagaggttgcttaggtggctctcaacgtatattagttcatctagtctggcaa

SEQ ID NO: 217841 - DNA, 517 bp, Glycine max
aatcctcctcaaatagttcaaaaccaaagtaaggagattattgccgcaaattattatataatttaacagtgacaagaattcactatagctcagcatcattttgtgcatcgagtacaaacataaaagtaacaacatctaaattctacaacaaccaggaaagaaaaaaaaaaaaaagcatctacaagactaatgacccttaaccttatcatctgccacaacattgagaatgggcaagctactgaggaactcgtcaaggccttcaaaaaaaccaatcccttcaatattatcctcagcatgtccagcagcattcccttcgcggtcgcgcactccacgggaaggctcctccacctcattgctgaactccacattcaaatccaacttccccaagttcccagcaccccgccttctcgaaccacccaacgcagccttcttactagactccccccttgcaccagccggcacagtagaggcaacattagcatctgcactagcaccagttgcagcatcaccagaaccc

SEQ ID NO: 217842 - DNA, 479 bp, Glycine max
gaaaagaactgaatatgaaattgacagtggagatgaagaatcggattgaagttgtcgctgttagatagagacagagtgacctcggagtttgctaaggaattgcaccctatggatgtgataaagacgccatatatctcatctcgaccaattccgaacgtgcaggctgaccctctcgttcttctcagcattgacgtcatcttcatcagtgtctccaatgacacttgcaagcgcctcttcggcctcttgctctgctcctgcttctcaggctccgtcaacgccatcaaccgcttcgccgtgccctttggagaagatgacaccgatcctagcatctgggctcttgaccacatttaccatgaacttatgttttgcatggcttaaagcgtaagtgcagatgagcacgctgtggtgaggtatggaactggtccagacctgctcgagactgatcgtgacgttctcgggttaattgatgacgatggtcc

SEQ ID NO: 217843 - DNA, 333 bp, Glycine max
gaagagtaaaattcattaagcaccggaacattatacaaggatcgttatgccatgttaggtgtacgttctttactcctagcaaaaatagaaaaaaggtgtaactaatattaaatccacgtattctaatgacatttagagctccggccataacaaaccgcttaaaacttatgcagctgtacttggcactgtaactgttttcgagtcttgtgcccgttcatgtcccttgttgagcatcgtgttggttatcaaattgtggagtgctttcacacttctaaggagagacgagaggtctattaccagcagcatataatcggattccactgcgaaagcctt

SEQ ID NO: 217844 - DNA, 507 bp, Glycine max
gaagcatctaagtgagatacacagtagttaggtagcaagcataagtgtctaaccttagaaacatatctgctacatatcgtgtgcattttggaattgtgccactaaaattctattcatctatggctgcctcatcttatgctatgcaatcaatccttgcaaaccctatgatccgcatttccagcgggtctagggagaaccattttggtgttcctgcttatcacatgagaaggaatgttggcctgagagttaggtccatggctgaggaagagcaaccaagtcagcctgcgaccccagttacaccaccaccagcagaacccaaaccacagccagtctctactccttcaccaaaggtgagcaccaagttttctgatgtgttggcgttcagtgggccagcacctgagaggatcaatggaaggttggccatgattgggtttgtgggtgcaatggcagtggaagtagccaaagggcaaggtgtgtttgaacaaatatccaatggtggtatcccat

SEQ ID NO: 217845 - DNA, 480 bp, Glycine max
gaagataaagattactagttgaatttcttttattaacaaaaattaataaaatactaatgattaatattttttgataaaaaaaaatgataattttatatgctgattaaataaaggcaccaagtacaaaaagagattggtctttctaaccacgaatgacttaagaccattttggtgtgcattcatgactgaattacaccaaggtaccacccttaacatactcagtaaaagccagagcaaccaaacccaacatagcaaatctcccattccacagttctgcatctgaggacatgaaccctttggacttagactccacgctgatcccttggaagagtggaatcaaggaagcaagggtaaggaccacacttgttcccaagaaccatgggataccaccattggatatttgttcaaacacaccttgccctttggctacttccactgccattgcacccacaaacccaatcatggccaaccttccattga

SEQ ID NO: 217846 - DNA, 483 bp, Glycine max
gaagcatctaagtgagatacacagtagttaggtagcaagcataagtgtctaaccttagaaacatatctgctacatatcgtgtgcattttggaattgtgccactaaaattctattcatctatggctgcctcatcttatgctatgcaatcaatccttgcaaaccctatgatccgcatttccagcgggtctagggagaaccattttggtgttcctgcttatcacatgagaaggaatgttggcctgagagttaggtccatggctgaggaagagcaaccaagtcagcctgcgaccccagttacaccaccaccagcagaacccaaaccacagccagtctctactccttcaccaaaggtgagcaccaagttttctgatgtgttggcgttcagtgggccagcacctgagaggatcaatggaaggttggccatgattgggtttgtgggtgcaatggcagtggaagtagccaaagggcacggtgtgtttgaac

SEQ ID NO: 217847 - DNA, 449 bp, Glycine max
gaagataaagattactagttgaatttcttttattaacaaaaattaataaaatactaatgattaatattttttgataaaaaaaaatgataattttatatgctgattaaataaaggccccaagttcaaaaagagattggcctttttaaccactaatgacttaagaccattttggcgtgcattcatgactggattacaccagggtaccacccttagcatactcaggaaaatccagagcaaccatacccaacgtctcaaatttcccattccacagttctgcatctgaggacatgaaccctttggacttagacttcacgctgatcccttggaagagtggaaccaaggatgctagggtaaggaccacacttgtatccaagaaccatgggataccaccattggatatttggtcaaacacaccttgccctatgggtacttacactgacattgtaccc

SEQ ID NO: 217848 - DNA, 392 bp, Glycine max
ggggtactcttagtttaaagcttggtggccatgcttctgcagtggtggatagggaagttgcaagctgggacggtacgaatgggaagaaaagtagagtgtcgggaagtacttcaaatcgagctgtttgtcaggtggaggactgcagtgctgatctgagcaaagctaaggattatcacaggcgacataaagtttgtgagatgcactccaaggccagtagggcgcttgtgggaaatgcaatgcagagattctgtcaacaatgcagtaggtttcacctgcttcaagagtttgatgaaggaaagagaagctgccgaagacgtttggcagggcataataaacgaagaaggaaaacaaatcatgaagctgttcctaatggaagttcattaaatgatgat

SEQ ID NO: 217849 - DNA, 495 bp, Glycine max
cacacaagtattacactaaaatataatatcctgccaaataaagttttaagtagagttgcatctacatacattgtacaaggatggccattaaggataacaaatacgtaaataatattgcacagtttagctaatacaaagaaccagtccctagaggaaatctcggtcattcagtctatgaacgcatccttacattgcctatcaagttttattgagttgcaagttaatgaaccttagcttgttccaaagtccaaattctcccacctgaagggtcggaacatacatataacttcgggggagcttttaaacagaagggccacacagacacagacagcggctattgccaccattgagagcattgcaggtctgtataccaaagacctgcctactgcagttctgcaagaaattctcttgtcacaaagcttacagtgcccttggccacgtattacttcagcctttccaatctcaaaggtagtggataactcattttgcttctcg

SEQ ID NO: 217850 - DNA, 530 bp, Glycine max
ggggtactcttagtttaaagcttggtggccatgcttctgcagtggtggatagggaagttgcaagctgggacggtacgaatgggaagaaaagtagagtgtcgggaagtacttcaaatcgagctgtttgtcaggtggaggactgcagtgctgatctgagcaaagctaaggattatcacaggcgacataaagtttgtgagatgcactccaaggccagtagggcgcttgtgggaaatgcaatgcagagattctgtcaacaatgcagtaggtttcacctgcttcaagagtttgatgaaggaaagagaagctgccgaagacgtttggcagggcataataaacgaagaaggaaaacaaatcatgaagctgttcctaatggaagttcattaaatgatgatcagacaagtagctaatctgtgattagtttattgaagatactttcaaatatgcattctgacaggtcagatcagactacagatcaggatctactaactcatattctgaggagtcttgctaggcagaatggtgagcaaggg

SEQ ID NO: 217851 - DNA, 494 bp, Glycine max
  unsure (1)..(494): unsure at all n locations
cacacaagtattacactaaaatataatatcctgccaaataaagttttaagtagagttgcatctacatacattgtacaaggatggccattaaggataacaaatacgtaaataatattgcacagtttagctaatacaaagaaccagtccctagaggaaatctcggtcattcagtctatgaacgcatccttacattgcctatcaagttttattgagttgcaagttaatgaaccttagcttgttccaaagtccaaattctcccacctgaagggtcggaacatacatataacttcgggggagcttttaaacagaagggccacacagacacagacagcggctattgccaccattgagagcattgcangtctgtataccaaagacctgcctactgcagttctgcaagaaattctcttgtcacaaagcttacagtgcccttggccacgtattacttcagcctttccaatcttaaaggtagtggataactcattttgcttctc

SEQ ID NO: 217852 - DNA, 580 bp, Glycine max
tgtcaacagagctcttttgaacctgaatggttctggagctggagcttcagctcccagttcagccttctttgggaccagcttgaagaaggttattgcctcaagggtccccaacagcaaggtttccggtggaaagcttaagaatgtgctggaaaagagaagaaagagattgaagagacccagcagaccgacaaggacagatggaagggtcttgcctatgatatctcagacgaccaacaagacatcacaagaggaaagggtttggttgactcccttttccaagctccacaggatgctggaactcactatgcagtcatgagctcctacgagtacctcagcactggacttcgccagtacttggacaacaaaatggatggattctacattgctccagcttttatggacaagcttgttgttcacatctgcaagaacttcatgaccctgcccaacatcaaggttcctctcattctttgtatctgcggaagcaagggacaaggaaaatctttccaatgtgagcttgtctttgccaagatgggaatcaaccccatcatgatgagtgctggagagttggaaagtggaaatg

SEQ ID NO: 217853 - DNA, 541 bp, Glycine max
aaaggaaaaggcaccaaattcaatttaagtggacactgtaactcaaaattatagaggaagacggtccaatatgaaaaatatagtaagatcatctcaaacttagcatcttctctttgcacctaagacattgagaatgctaagaatgttacacgcaagttccatcacaacttctagcacttggattagtacaacaaccttcacgaacagaaatatttacttgccaagtttgctttgcctccaattcaagactggaagaaagttcccctctgaatagcatcctcgttagcatttccaagagcagcctcgttcaagtacttgtcagccaattggactctcttgacattctcttgttcttggacaagcatgttaccatacagcaagagcttctccagagtcatcttgggctgctcaaaggttggaggtccatcttttgagttcacaagctttttcccaacactgtcaacaccaacacccgaaattcacttcctcacttcatcatcatatactctgggcctcagtgcaccaaagaaatcaatggatt

SEQ ID NO: 217854 - DNA, 542 bp, Glycine max
gtctttgtaagaaaactatccgttttagcgttagaaattcttttatggtgttagcatgattttgaattgcgattgcggtcgtggcggtggttgcgttacggtaagtcagaaaacctttatagttcaaggtaatcgcgggaaaatgtggattgcaattgcggcattacaggagtcaaaatactttgatattgcggttgcaattgtggttgcaaaacgctatttaaaaccatgggtgttagcattagaatcaaaacttaacttgtatgtatgtgtagggactaaaactcaacagttttctgaactaaaattaaaaaagatcaaatgattaatagcttaacctattttgttgatctatgattgttccttcagtttttgatactggtaccctctaatttgagtgttttcatgtttttctgcagagtctcgtgctataatgaggtattatgcagaaaaatacagatctcaaagcgttgagttgctgggaaaaaccatagaagagaggcgtctagtggagcaatgggtgaagttgaagcacacaactt

SEQ ID NO: 217855 - DNA, 546 bp, Glycine max
  unsure (1)..(546): unsure at all n locations
tccaaatgcatcttgattacatccacggctaatttttccccaacttgattgaaaaatatttctggatcttttcttttctaagatttcttgcttgaatacactgaaatgtctgttacacctatttttatttttcgaaaaagtattttggaaattctgcattaggaacaaacgtgctactactccagtaagtgcttttaatggtttttgtgaaacttcacttgctgataataccatttggaattttacttccagctggagaaagaggcccttgtaaagggtgttccaattggacaggctcttgatatagacattccccctccacggcccaaaagaaagccaaacaatccttatcctcggaagaccaggattggtaccacatcattacatagtggagcaaaggatggaaaactcaatttagttgaatcttcacatgttaatcaagcactggacttgaaaaaagaaccacttncagagaaacatgatttagacgaagggctaacaactgtaaaagaaaataaggatgagaaccacgcanaagtatttact

SEQ ID NO: 217856 - DNA, 534 bp, Glycine max
agtaaaagagcgtacacagtaatttaatacggtacacacatctacacgacaagtttcgtgagctgcagaattagaaataaacatacaatataggtacaccgttggagggataaagaaatgatatgcaaaaaaccaaaggttgcctttatgttactgcatatatcaaacctcaagtcgaagtctccccttccaaacgtattctcttacaaccttgctcttcaccttgattgctgcttgctccaaccctattttccttggcctccatggaacatcttttgtagggtttaaaacctgttcgatgagtcttaagctttccttgtccaagccctatggttaacagtccctcgttattttctacaaatagcaggtttttctgcatcgcttcataattagaactgcatttcttgccgtcaagatcttcatctttgtcatctatgttttgcttgttatcattggcgttgtccatttgatgatccgtattcttcaaagcatgaggaggtgaaaagctttgatgcaacacctctctggagaaca

SEQ ID NO: 217857 - DNA, 595 bp, Glycine max
  unsure (1)..(595): unsure at all n locations
ccacaacccttcttatcaatacttcaatttggatgagaaagacatctggattggctgtggcagatggcctttcaaaccttttaaagtgtcgcctctcagctacaattagatgtctttctcatccaagtgcacatgtccgagctctgagtatatcagttcttcgtgacattttgcatactggttcaatcagatgtagtcctaaacctcggagattaaatggcacccacaacccttcttatcaatacttcaatttggatgccgttgactggcaagctgacatagaaaaatgcttgacttgggaagctcacagccgactttcaaacggattgtctattaactttcttgatatcgctgccaaagagttaggctgtactatttccatgtgaaatgaaatcatccatcttagtctgtgacaattttttgctagacttatagaaaaagaaaaagaanactgaagttattgatatgcttatggaactaacgggtttgcaaataagcataattctgctagtcctgttaaaaagagctgcaatcataattctagtatgccatagaaagctcattttggatcatgcatgtactctagctaaactag

SEQ ID NO: 217858 - DNA, 563 bp, Glycine max
ccacaacccttcttatcaatacttcaatttggatgagaaagacatctggattggctgtggcagatggcctttcaaaccttttaaagtgtcgcctctcagctacaattagatgtctttctcatccaagtgcacatgtccgagctctgagtatatcagttcttcgtgacattttgcatactggttcaatcagatgtagtcctaaacctcggagattaaatggcacccacaacccttcttatcaatacttcaatttggatgccgttgactggcaagctgacatagaaaaatgcttgacttgggaagctcacagccgactttcaaacggattgtctattaactttcttgatatcgctgccaaagagttaggctgtactatttccatgtgaaatgaaatcatccatcttagtctgtgacaattttttgctagacttatagaaaaagaaaaagaaaacagaagttattgatatgcttatggaactaacgggtttgcaaataagcataattctgctagtcctgttaaaaagagctgcaatcataattctagtatgtttatagaaagctca

SEQ ID NO: 217859 - DNA, 515 bp, Glycine max
  unsure (1)..(515): unsure at all n locations
aaaactcagcacaacacccctcccaaccctctttttctcttaatttctcatcatatcatatctattaatcttacacatatattaagacatagatataattgttttcgttttatttttccttgcatgggctgttaaaataagatgtctcgcacgtgctcacagtgcggcaacaacggccacaactcgcggacatgcaccgacggtggcgccgacgcttcctgcggcgggtctcccagggagaacggcatcatgctgttcggcgtaagagttatgaccgaagctaactcctgcttccggaagagcgccagcatgaacaacctctcacagtacgacgcggaatccaacgccgncgacgccggctacgcctgcgacgacgttgttcatgcctacggccgcacgcgcgagcgcaagcgaggtgttccttggacggaggaagagcataggttgttcctgttagggttacacaaagtcgggaaaggagattggagaggtatttctcgaaacttcgtgaaaac

SEQ ID NO: 217860 - DNA, 482 bp, Glycine max
cagttattgtcaccagtatgcatggaggctctgaaaatccacaatccatcattgaatctttgttcaagaagctcatggcggatgctggtgaagggtgcaagtccttgcacctttctgacacacagtggtagtaagcgaagagggtttggcaaagtaagagttactgctgaagactcagtttctccctctgagaccattgcagatgactattatgaagttcttggactgcttccagatgcgacaccagagcagatcaagaaggcatactacaattgcatgaaatcttgccacccggatttgagtggaaatgatcctgagaccacaaatttctgcatgttcatcaatgaagtctacacggtgctcagcgatcccgtccaacgcatgatttatgatgaaattcatggctactctataacttcaatcaatcctttcttggatgattcaagcccaaaggatcatgcctttgttgatgaattcagctg

SEQ ID NO: 217861 - DNA, 322 bp, Glycine max
ttgttgtttttttttttttttttttttttttttttttttttttgttttttttttttttaaaccgagcacactggaaccataattatgattttataaacaagcttttttatattttccaaagaattcctatgggtcatacattgaaaaaaatgtacctcaaatggagcagctgcttaaacaattacgggttgcttaacgcgaaaaaacaactcatggggttaacttaggggggtatcaaagaactgagtacccgggcctcaagggttttgtcaaaggtgaaagaaatgccgttcacttgcacttgccgaggaccgtcactgga

SEQ ID NO: 217862 - DNA, 428 bp, Glycine max
gagagagaaagagacgtgtgttgttggtgaagtttttgagaagaatatggaacgatgtggcggaatggtaacggggtcgcatgacaggaacgaacttgttagagttagacacggctctgactgtgcgtctaaacccttgaagaatttaaatggccagatgtggcaaatatgtggcgacaccattggattaacggctactggtgacctatctggtgcttgccatgagagtggcttgccactttgtcattcttgatacgagtatgagctgaacaatgtgagccaagacttgtcctcagcgccagactacattcacaggtggccaagatggtgctgaagtggagggagatcatgatgacgaagacgatgctgttgatctagatcacgggatcaactatggccaagggtacaattccatgtcggggatgctc

SEQ ID NO: 217863 - DNA, 204 bp, Glycine max
ttgtcgtcctttttttgtaaaaaactgtgtatgataattacattactcatcaacaatggtacatcagatcacactattttaggacaaagcatgtcttaaggttcatcctttacttcattgcattccaaacgcacacctagaaagaatcatcaactaatgtgtaatacgtttctctgtcactctatctatatctactccatctat

SEQ ID NO: 217864 - DNA, 482 bp, Glycine max
tgctctcttcttctcactgatccgcattgccgttcaaagtggtcttatttgaaaaacacttgggcgttggtgcaaatgtttgcttcgttaattttctctggggacaacaggctcactgagaaaacaatttttacttgcagagatttggacatcttggttgtttattatacaatagcaactcaatttagaaaatttctaccgcattacattaggtggcatctgtataccttgttgatctacattctcccatcttttctcactgctgaaattaaatataagcggaatttgagtaatattcatatttccgtcttattttacgacggcagatacaaattctggactaaacacgagaaaaatcttgctttgacagaagaggaaaagatggaggtgattagaaatagaggcattcctgctgatgttcttgcaaagcgagctcatgaatttgaaaaacatgttgctcatgaaagcctcaaggatcaaat

SEQ ID NO: 217865 - DNA, 431 bp, Glycine max
aaaaaaacccccactttacacattattaccacaattaaaagagggggggaaattttaaaatagacagggcattcttaacaaggggggcatggctaatttcctttattgaattaaacaaacgaacaaacgaaagaaaacccaaattccaaatcatgccgaggattccccattttcaaaaaaactggcaatagcctgtggaacaaaaaaagctggcctaagagttttccccgcaatttcaaaatcttgggaaattcccaagagaattttaaaaactgtagactgtttgggattggcaataaggaaacttaagggccctgaaatttgatttgcccacttaaaactccacattttaaaacccttttttgggccacataccttttttgggaaaatcaattcccacgaatgggggtcccattttggccacttacatg

SEQ ID NO: 217866 - DNA, 533 bp, Glycine max
tgaactcaatctttatattagatttcagagtggacagtgagatgataataataatggtggaacacagataaatcaaattataactagagaatggcaaagcttaatggcatcatagcatgaattggtagtttacttgcgtgataaggtttttgaacattaatagtcactcttctcctccccttctctctctattgctaaataatggtaatagcttctttagctaatattaatatcacatgttcaatgaaattgcttttatttaacatttagcaccaaatagtgttttatagatatttaacagttgatctttattgtgtttattttttgcgtgatttaatgtgtgaatggatggttctgagggaagataactttttaaattacagggtgggatgtccaatgaactatacaacactattgcccgcgtaactgatgggatatatgaaggcattgctattggaggagatgttttccctggttccacactttctgaccatgttttacggtttaacaacatgccacagggtaaaaatgat

SEQ ID NO: 217867 - DNA, 596 bp, Glycine max
catcaagagaaatataattttaaaaatgaccaagttctctctttatgaaatttaatacaagttacaaatggaagatgacttttcaccaatagatcgtacaacactagtctaacagctacaaaaccactccagcatatttcagatgtgcatgatttcccaaaagattgctaatttgaagcatgccaaagttcttacagtcgcacaaaactttctcactttgtgtagagaacatcctcccatgggtgacggtaaagtggttgcttcaatcgcttttggtcaaaggtgtgcccaatcagaccaatggagcgtgccagcacaaagaggccattcagatagccaatctccacaatttcatcaatctcttgtttggtgaacattccactaccagcaagaagatccaagaaaagagatccaattgcaccatctacgttaagaactaaattatttgcctttgtgagcgtgtaggtctcaacttgaacagcatattccatgtatttcacagaaggaaaatgtgtgcgtgcaaacttctgtagcagctcaactctcttatcttggtggccctattcttgatcctgtgccctattcctggcacacga

SEQ ID NO: 217868 - DNA, 460 bp, Glycine max
caggctcaaggttatcaggaaatgttcaataatttgggtgaactgctgtgcaccatcactgggtttgactccttctccttgcaaccaaatgctggtgctgctggagaatatgccggacttatggttattcgtgcatatcatttggcaaggggagaccaccaccgcaatgtttgcattatacctgtctcagcacatggtacaaatcctgctagtgctgctatgtgtggaatgaaaattgtctctgttggaactgacgccaagggtcacattaatatacaagaatcgagaaaggctagccgaacacataaagacaacttatctgcacttaatggaacatatccttgaactcacggtgtttatgaggaaagatcgacgaaatttgcacgattattcatgatcatggacgcccaagttatatggatggtgccaacatgaatgctcagtgggactcacaagccca

SEQ ID NO: 217869 - DNA, 497 bp, Glycine max
atacaattcgtttacatgaatcaaattcattttttcacattattgtgacagataggcctaaaatacattcctaaaataaaatagcagcagcaattatacgaattacttttttttgtttcctgtggttggatgaaacttaagagcagtggattatcatcattatcacatatgatgaagcaatattcaagaggtgcaagaactgtatgaataggaataagagtttatgtacaacgggaaatgaaaatagttgtcatttgaacacactatgctgtggcagcagcttgttcttcaacagcctgtgatgctggcagaagggtgcaaatcaagttgcggtcaccgtacacattatcaacacgtcctgtggtaggccagaactttgaagcacggagccaaggagctgggaaggctgcatattccctggagtatggttttgtccatgcatcagccatgagcagtgatggtggatgaggggcgctcttaagtacattttgtgtaat

SEQ ID NO: 217870 - DNA, 392 bp, Glycine max
ggatattctcttatgctgattcacaaaggcacagacttggaccaaactatctgcaacttcctgctaatgctcccaagtgtgctcaccacaacaatcatcatgaaggtttcatgaatttcattcacagggatgaggaggttaattacttcccttcaaggtatgatcctgttcgtcatgcagaaacgttccccatacctcctgctatctgcagtggaaggcgtgaaaagtgtggaattgagaaggagaacaactttaagcagcccggagagagataccgatcttgggcacctgacaggcacgatagatttaatcgccgatgggttgatgctttatctgacccacgggtcacccatgagatccgcagtgtctggatatcttactggtctcaggct

SEQ ID NO: 217871 - DNA, 476 bp, Glycine max
ccaatatattccattctctctgtgtatttccctacctctcccttcaagatgcagatcttcgtcaagaccctcaccggcaagaccatcacccttgaggtggaaagctctgacaccatcgacaacgtcaaggccaagatccaggacaaggaaggaatccccccggaccagcaacgtctcattttcgctggaaagcaacttgaggacggccgtacccttgctgactacaacattcagaaggagagtactcttcacctcgtgcttcgtctccgtggtggcatgcagatcttcgatgagacactcaccggcaagaccataaccctagaggctgaaagctccgacaccatcgataacgtcaaggccaagatccaggacaaggagggtatccccccggaccagcaacgtctcatgttcgccggaaagcagctcgaggacggccgcaccctcgccgactacaacatccagaaggaatcaaccct

SEQ ID NO: 217872 - DNA, 452 bp, Glycine max
ggacaattaatcatttcatatttcacacattcataacaaacgttggtgggatattagagtcctattattaatgggacacaattgagttcaacacaaaccgaacttattttcaagggacattattacagacccattaaacatcaaagttcttcaaatgttttgggaacacatccaacattacacaacgagcttaaaaccccccacggagacggaggacaaggtgaagggttgattccttctggatgttgtagtcagcgaggggccttccatccttgagctgtttgccagcaaaaatcaacctctgctggtccggagggatgccttgcttgtcctgaatcttggccttcacattgtcaatggtgccagagctcttcacctggagggtaatagtcttacccgaaagagtcttaccgaaaatttgccttccaccacggagacgcaacacccagtgg

SEQ ID NO: 217873 - DNA, 428 bp, Glycine max
aagacagctcatgaatctgcttcttcttggtgccatttcactcccctctgctggaatgcttattccctacacctacttttttgtccctgcaggttcaggttcttcagctggtggtactgttgccaaggatgctgttggaaatgatgtaattgcagagaatcggctcaaggcacatggacctggtgaccggaccctggcacatggattgaagggagatcctacctatcttgttgtggagaaagacagaacccttgcaacatatgcaattaatgccgtgtgcactcaccttgcatgtgtcgtgccatggtatcaagcagagaacgagttcatctgcccttggcatgggatctagtacaatgaccaatgaagtagtcgtgagaggacctgctcccttgactctggcattagcacatggtgatatagatgat

SEQ ID NO: 217874 - DNA, 574 bp, Glycine max
  unsure (1)..(574): unsure at all n locations
tccttttttttttttttttacacggtaaaaagtgacccgttcaggttcctttccatcttagcttcagttcacaaaatatcaatttgattacaaaatatatttatgcattaatacaaaacagaatgtttgaatttcatgtttaaatatacatgacaacagagggacggctttaaggagtctaagcccaccatggagcatcacctgttctgaaatctgtttcaacccaaggaacaaacaccaccttcccatcatctatatcacaatgtgctaatgccagagacaagggagcaggtcctctcacaactcttccttggtcattgtactgagatccatggcaagggcagatgaacttgttctctgcttgattccatggcacgacacatccaaggtgagtgcacacggcattaattgcatatgttgcaagggttctgtctttctccacaacaagataggtaggatctcccttcaatccttgtgcaagggttcggtcaccaggtccatgtgccttgagccaattctctgcaattacatcatttncaacagcatccttggcaacagtaccaccagctgaaga

SEQ ID NO: 217875 - DNA, 565 bp, Glycine max
ccaagaagtcccccttctccgtcaaagtcggcctagcccagatgctccgcggcggcgtcatcatggacgtcgtcgacgccgagcaggcccgcatcgcggaggaggccggtgcctgcgcggtgatggccctggagcgtgtccccgccgacatccgggcccagggcggcgtggcccgcatgagcgatccgcagctcatcaaggatatcaagcgggccgtcaccatccccgtgatggccaaggcccgcatcggccacttcgtcgaagcccagatcctcgaagccatcggcatcgactacgtcgacgagagcgaggtcctcaccctcgccgacgacgccaaccacatcaacaaacacaacttccgcatccccttcgtctgtggctgccgcaacctcggcgaggcccttcgccgcatccgcgagggcgccgccatgatccgcaccaagggcgaggccggcaccggcaacatcatcgaggccgttcgccacgtccgctccgtcatgagcgacattagggttctccgcaacatggacgacgacgaggtctttacctttcgccagaacatcgc

SEQ ID NO: 217876 - DNA, 510 bp, Glycine max
ctaaaatccaattaacacggttcaaaacaccgaaaactaaaaacataaccttattataatatataagaagcaactaaaacccttaatagtccaaattgaagcgccacagagaaacaaatctgagaattattattcatttcattcagagcgattggcgaacctctcaaccttgtcatcggtcaaattgataccaaccatggcttcacccaatccgcagctaacctccgccaaaatctcagggtcgctgtagtgagtcacggcctgaacaatcgccctggcgcgcttcgcgggatcgccgctcttgaaaacgccggagccgacgaagacgccgtcgcagccgagctgcatcatgagcgcggcgtctgcgggggtggcgactccgccggcggcgaagtggacaacggggaggcggccaagctgcttggtctgcatgacgaggtcataaggcgcagcgatgttcttggcgaaggtgaagacctcgtcgtcgtccatgttgcggagaaccctaat

SEQ ID NO: 217877 - DNA, 540 bp, Glycine max
catgaccctgcccaacatcaaggttcctctcattcttggtatctggggaggcaagggacaaggaaaatctttccaatgtgagcttgtctttgccaagatgggaatcaaccccatcatgatgagtgctggagagttggaaagtggaaatgcaggagagccagcaaaactgatcaggcagagataccgtgaagccgcagacttgatcaagaagggaaagatgtgtgctctcttcatcaacgatcttgatgcaggagctggtcgtcttggtggaaccacccaatacactgtcaacaaccagatggtgaatgccaccctcatgaacattgctgataaccccaccaatgtgcagcttcctggtatgtataacaaggaagagaatccccgtgtgcccatcatcgtcaccggtaacgatttctccacactctatgcgcctctcatccgtgatgggcgtatggagaagttctactgggcaccaacaagggatgaccgcattggtgtctgcactggaatttttcgcaccgattcaattcctgaacagga

SEQ ID NO: 217878 - DNA, 540 bp, Glycine max
  unsure (1)..(540): unsure at all n locations
aggacaaaaggaaaaggcaccaaattcaatttaagtggacactttaactcaaaattatagaggaagacagtccaatatgaaaaatatagtaaaatcatctcaaacttggcatcttctctttgcacctaagacattgagaattctaagaatgttacacgcaagtcccatcacaacttctagcacttggatcagcacaaccttcaggaacagaaatatttacttgccaagtttgctttgcctccaattcaagattggaagaaagttcccctgttaatagcatcctcgttagcatttccaagtgcagcctcgttcaagtacttgtcagccaattggactctcttgacattctcttgttcttggacaagcatgttaccatacgtcaagagcttctccagagtcatcttgggctgctcaaaggttggaggtccatcttttgagttcacaagcttcttcccaatgccgtcaacaccaacaccagaaatccacttnctcacttcgtcatcatatactctggccctcagtgcaccaaagaaatcaatg

SEQ ID NO: 217879 - DNA, 536 bp, Glycine max
ctcaatttttctctcaaccggcccaatttagcataagcccagcatggccaccgcaacagcagcagccacctcgtccttcatggggacgcgcctcctggaggcccactccggggcggggcgggtgcaggcccggttcgggtttggcaagaagaaagccgccgccccgaagaaagtttccagggggtcgggctctagctccgataggcccctgtggtatccgggcgccaaggcgcccgagtacctggatgggagccttgtcggagactacggattcgacccatttgggctagggaagcccgccgagtacctgcagttcgagttggactcgctggaccagaaccttgcgaagaacgtggctggggacatcattgggaccaggaccgagctcgcggacgtgaagtccacgccgttccagccctacagcgaggtgttcgggctgcagaggttccgcgagtgcgagctcattcactggaggtgggccatgctcgccactctcggagctctcactggtgagtggctcactgtgttacatggca

SEQ ID NO: 217880 - DNA, 550 bp, Glycine max
aacatcaagcagaagcatttctgcttagcctctccaatttcacgttacaagtttttcacaagtactactaatccagctatgtagaaaatgtttaattacaacccaaagccgaagaagaagaaaaagacttttacaatataactagaatgaccaggcacaagaaagactattcttcttcttttgcttcttcttaagaggaggatgagaaggtgtcaatgatggttgtgtggagtgggtcactcaagtgggtggcccagttgttgagcgggcccttgccagtggcggcagcttggactgcaaagcccaagaagcccaccatggcgagacgggcgtgcttgatctccgccaattgaagggtggctttcttctctggatctgaggccaggcccagtgggtcgaagtaactgccacctgagtacagcctcttttctgggtccagctctgcgttcctctggaactctatgtagccaattacgagaacctcgatccagatcagtgtggtgattgagaatggagtggttgccctaggtatgatgaacctttcactagc

SEQ ID NO: 217881 - DNA, 515 bp, Glycine max
ggttcaggaaactatgcctctgctttgtatattgcatctgtgaaagccaatgcagtggaaaaggttgagactgagcttctgcaatttgttgaggcagtaaagaatagtcccatattttcacagtttataagggacttgtctgtggctaaggatgttagagtgaaagttatccaggatatttgtggggaagccaagttttcggatgttacaaagaacttccttgttattgttgctgagaatggaaggcttaaaaacatagacaccattgcaaagagatttgcacagttgtcaatggcatataagggagaagtgcaagcgactgtgaccactgttgttcctcttccccctgaagaggaaaaggcattgaaggagactcttcaggaaataataggttctggagcgaaagttcatcttgaacagaagattgatccaagcatacttggtgggctcgtgcttgaatttagccaggaggtctttgacatgtccattaacaccagggcatcacagatggagag

SEQ ID NO: 217882 - DNA, 579 bp, Glycine max
agagtaaagatatattcatcattaattaaattatagtacccatccaacggctacatacaacttcatcttcctttactttgtagtacgaagcatcattattaggtatccagattacgacagatgcacccactaattaaaatctcaaaatgccaaatcaaaacacattcagatacactgaaatgacaatgaagcataacaagaagttggaaagaggtagcttttatttgcaaaatgatggcattccatcccataaaaatctacatgcacacaatttataatgaacaagaatgtaatacttctttctttaaaccatgataacacagattgtcaggagagattatagtcttctagatgttggcaatggacacaggctctcggaggatcctatccatctgttgtgccctggtgttaattgacatgtcaaagaccttctggctaaattcaagcacaagcccaccaagtatgcttggatcaatcttctgttcaagatgaaccttcgctccagaacctattatttcctgaagagtctacttcaatgccttttcctcttcagggggaagaggaacaacagtggtcaca

SEQ ID NO: 217883 - DNA, 445 bp, Glycine max
cagaaaaacaagtagttgagaactaagaagaaggaaatggcttcctcaatgatctcctccccagctgttaccaccgtcaaccgtgccggtgccggcatggttgctccattcaccggcctcaaatccatggctggcttccccacgaggaagaccaacaatgacattacctccattgctagcaacggtggaagagtacaatgcatgcaggtgtggccaccaattggcaagaagaagttcgagactctttcctacttgccagacctcgatgatgcccaattggcaaaggaagtcgaataccttctaaggaaaggatggattccttgcttggaattcgagttggagcacggtttcgtgtaccgtgagcacaacaggtcacctggatactatgatggacgctactggaccatgtggaagctgcctatgtttggctgcactgatgcttctc

SEQ ID NO: 217884 - DNA, 293 bp, Glycine max
attaattaaaaaaaaaaaaaaaaaaaaaaaaaaaaaaaaaaaaaaaaaaaaaaaaaaaaaaaaaaaaaaaaaaaaaaaaagaagaaaaagaaaaaaaaaaaaaaggaagggaaaaaaaagataagaaaatatggaaaagactaagaagcctaaaggccagggggcaaagaagcagaaaaagtgaaattggggaatggtaaaaaagccaaggatccagatgaaaccatggaggcatgggggtttaaccttttgaacttataaagaaagctgaaaaccaggaaagaaggaaaaca

SEQ ID NO: 217885 - DNA, 533 bp, Glycine max
caaatattaaacatcatttatatatatatatatatatatatatatatatatatatatatatataaaagaataattgattaattataataataatttactttattttcatacatttgattcaaacacaacaatatttccttgaggagaaaacaaaatatgtgtaaacactaatcatctcccgttgtaaataaatcaataagttaatttctcattcttgaattacttccaattccaaaggtagtcttgccgaagtcaatccactaggaatagtggaagtggatgagtgaaatggattaggaggaacagttaataggtcttcctctttactttccaacatttgtatgacagattttatggatggccggttcaatggctgccactgaatgcaccaaagtccaacaatggctagttctcttgcaattttaacatcaccttcatcctcaacatggatatgtacatctccatgaactaggtcatgcatccaatctgggtacaacacatggaaatcttctgcagaagacgtgtctacattc

SEQ ID NO: 217886 - DNA, 346 bp, Glycine max
gaacaagtggtgaacccatgggaagtttccgccaaaggcaaaatcgattacgacaaactcattgaccgtttcggttgccagaagctcgacgaagccctaatttcgcgtctcgagcgcatcacctatggcactccccacgtctttctacgacgcggcgttttcttcgcccaccgtgatttcgcggagattctggacgcgtatgagaggggagataagttctacttgtacaccggacgcggaccttgctgtgaagccttgcatttgggacactcgattcccttcatgtgcactacgtattggcaagacgtgtctaaggttgcttcgggtatacagctcactgatgatg

SEQ ID NO: 217887 - DNA, 477 bp, Glycine max
tttttttttttttttttttttttttttttttttttttttttttttttttttttttttttttttttttttttttttttttttttttttttttttttttttttttttttttttttttaaaaaggaaaaaaaaaaaaaaaatttttaaaaaaaaaaaaaaaaaaaaaaaaaaaaaacccaagaagggggaaaaaaaaaaaaaaaaaaaaaaaaaatttttttgaaagcaaaaaaaaaaaaaattccagacacggggagggggcaaaaaaaaagggggcccccctttaaaaaaaaaaaaacccaggggggggggaatattatataaaaaaaaaaacaaaaaaatataaaaaccttttgtaaaaaaaaaaaagaatttttaaaaaaaaaacccacgggggggggggggggggggggaaaaaaagattaaattcaaaaaaggggggggggggaaatattatccaacccggagggggggggggg

SEQ ID NO: 217888 - DNA, 576 bp, Glycine max
attaaaaactcaatatcaaattctttgtcccacaaaagatggggttcactcccacaagtactgcaacatgctttctcataatagcacctctggttgtgctatggtgttggaagctactaaagtgggtgtggctgaggccaaagagattggagagagcattaagggcacagggccttcaggggaatccctacagcctcttgattggggacactaaggaaatgtacacagtgctcatgcaagctgccagatctcaacaatctacaagttcttttctctctaaggataaggatgcagcaccacatatcacaacctttaaccatcacattgtcaacaaattcggcaagaattcatttttttgggaaggtaccaaaccaaaagtggtaatcactgaccctgagcaaatcaaagaagtcttcaacaagatccaagactttgagaaacccaagttgagtcctattgtcaagttgttgggctctggacttgcaaatttagaaggcgagaaatggcgtacacatcgaaagattattaaccctgctttccatttagaaaaattgaagggtatgctaccaatatttc

SEQ ID NO: 217889 - DNA, 542 bp, Glycine max
  unsure (1)..(542): unsure at all n locations
aggaaataaaaatagcattcaatataataaagaggtttccctctataaatacaagagattagaacataagaaaggaatggagataattaggtgtgcaggatacaaattaatagatgacactacaacttatgtaagatgatatgagcaccaaattttggattaagagtgagcacagtgactggagcatgtgcataggtaggagaaagctcaaatgagaagcgttgtaagagtaatgacaaaaccaacttcgcttctaataaagcaaaattttggcctaagcacactctaggaccccatccaaatgggaaaaacacaacttggccttttgttgcctttgctactccttcagcaaatctttctgggttgaactctgtagcatcatcaccccaaatatcacgatcctggtgaatcaatagtattggtaaggaaacttgcactcccgcaggtagggaaaggtttccaagtttcacatcattcttgatcgctcgagcaaaatataattaaaggtgggtatanacctaagaacctcgtataaaatcatg

SEQ ID NO: 217890 - DNA, 520 bp, Glycine max
gttgaagtcttgcccttctctcttcaactccaaacacaagacatcatcatccatggctgcctccgtctccactgtcggagctgtcaacagagctcttttgaacctgaatgggtctggacctggggtttcagctcccagttcatccttctttgggagcagcttgaagaaggctattggctcaagggtccccaacacaaagatttcctctggaagcttcaagattgttgctgtagaagagaagaaagagattgaagagacccagcagaccgacaaggacagatggaagggtcttgcctatgatatctcagacgaccaacaggacatcacaagaggaaagggtttggttgactcccttttccaagctgcacaggatgctggaactcactatgctgtcatgagctcctacgagtaccttagcactggacttcgccagtacttggacaacaacatggatggattttacattgctccagcttttatggacaaactttgtgttcacattaccaagaacttcatgacc

SEQ ID NO: 217891 - DNA, 507 bp, Glycine max; identical to SEQ ID NO: 209122

SEQ ID NO: 217892 - DNA, 468 bp, Glycine max
gacactggcaaagaacatgcataacaacttggagccgtttcctgataacaggataactaaaaccaaaaattcaattacaaaactataagacacaagcaactaaaagaaaagagttaactcatgaattaactcaataaattaacctataattacaagctataatatctatttattgctttacacagttaccgtatcacttatgataggttttccagaaatgacaaggttgctaaaccagctgcccagacatcattatctagcacatgctcttgtggagagtgacttatgcctccgcgacaacgcacaaacagcattcccacctttgttaagtgagatattgccattgcatcatgccctgctccgctcattaatgttggcacttcatcctgaatgtcaccctccatcttcttgagtgcagaataagctgctgacttgagctgtgaacttagatccgaatcacaaatcaca

SEQ ID NO: 217893 - DNA, 511 bp, Glycine max
ttgttgttctttttttaatgtttcttatctaagtctatttagcggagttataaacagcattaacatcatacaaagattgtaaaagagcgtacacagtaatttaatacggtacacacatgtacacgacatgtttcgtgagctgcagaattagaaataaacatacaatataggtacaccgttggagggataaagaaatgatatgcaaaaaccaaaggttgcctttatgttactgcatatatcaaacctcaagtcgaagtctacccttccaaacgtattatcttacaaccttgctcttgaccttgattgctgcttgctccaaccctatttaacttggcctccatggaacatcttttgtagggtttaaaacctgttcgatgagtcttaagctttccttgtccaagccctatggttaacagtccctcgttatattgtacacatagcagggttttctgcatcgcttcataattagaactgcatttcttgccgcaagatctgcatctgtgtcatatat

SEQ ID NO: 217894 - DNA, 501 bp, Glycine max
ccaaaccttttgcatgggctcggcgtgcacttgtatggtctggagaagcttacttatcttatagtttaggtgctttatctgtttttggttttattgcttgttgctttgtctggtttaataataccgcttatcctagtgagttttacgggcccactgggccagaagcttctcaagctcaagcatttacttttctagttagagaccaacgtcttggggctaatgtaggatctgctcaaggacctacaggtttaggtaaatatctaatgcgttccccgacaggagaagttatttttggggaagaaactatgcgtttttgggatttgcgtgctccttggttagaacctctaaagggtccgaatggtttagacttgagtagactgaaaaaagatatacagccttggcaagaacgccgttctgcggaatatatgactcatgctcctttaggttccttaaattccgtgggtggcgtaactacagagattaatgcagtcaattatgttt

SEQ ID NO: 217895 - DNA, 602 bp, Glycine max
  unsure (1)..(602): unsure at all n locations
atgtatctatataatcgaattgaaattacgattctatcaaatctttttatttactttttttttttttaagaaaaaagaaagttctaattattaataaattatatctatatatatatatatacagatagatattctatatcttttatcttaattaatatttgacccctccttataatgtgttatagttttctttatttttaggaacttatccattccttttttaatgtgcccgacaatccgaaagaaattctggggaggggtcatttcgtttttgatctagaataaatagagcttcaagaaatgagagaattaagaatacccacgagaaacactaatccaatccataatgatgtaccggaaaatacaacatttttgttattcgaccaaccttcaggagaagcaaatacaacaggtacactaatcaataaaataaatgaaatagcaattaatgcaaaaacagctaattggaaagcaatagtcatgtttctaatcctccaatttaccaacaaaagaactttaccatttgatcccccaaccccttgatccctttattgacaaaaaanttataataaaaaaacgcaaaaggttttatcatgaattca

SEQ ID NO: 217896 - DNA, 481 bp, Glycine max
cgattaatcacttcatttacacatgcaaccccggtgatgccgatgcaacatcctcagggttgttcaccccacccacacggaacgcgacacaagtcgggtgatcgaattttcctggaaattcagcatagctagggggttgttttgggccgatattttgttccatataagttctgcacttggatgttattttgatgcaatagttcagcagtgcgttgacgatgagttgaggtgtcggctctgccatctgcttgatcaacatcttgagctggtctgttctgaattggctctttaattcatcggcgcgtctgtgtgattcaaatgccttccagttgtcaccgtttaactctgcggagacatccctcggcttcaaaccgtgttgttgggggtcaaaattgtcgtgaactccatcagagcagatgaatatgatatctccatggtgtacctcgaaaaagtataacttgaggttgcgaaggtccggagc

SEQ ID NO: 217897 - DNA, 451 bp, Glycine max
ttatcatctttctttttttcttcatctcttatatttcacctttattacctttatcgaaggaaaaatgagcaacataagcatggtagaggcaaagctgccaccagggttcaggtttcatccaagagatgaagaacttgtgtgtgattacttgatgaagaaggtggcacacaatgattcccttctcatgataaacgttgaccttaacaagtgtgagccatgggatattcctgaaacagcttgtgtgggagggaaggagtggtatttctatacacaaagagaccgtaagtatgcaacagggctacgcacaaatcgtgccactgcttcagggtattggaaggccacagggaaggacaggtctatccttcgcaagggcacccttgtagggatgaagaagactttggtgttctatcaagggatggcacccaaagggaaataaactgagtgggtcatg

SEQ ID NO: 217898 - DNA, 465 bp, Glycine max
atcgttttgcagccatggaaacaggcatagcatgctacactcgcgggcctttcttgcctagtgtttcttccaagcactctccaccttccatttctccatcttttggcttgaggagtctgaaatcaagctctttatttggagaatcgctaagagtggcctccaaatcaacaataaaggtttcaaagacaaagaatacttcactcgtgaccagatgtgaaattggtgacagtctcgaagaattcctcacaaaagcaacaccagataaggggttgatcaggttgttggtgtccatgggagaagcattgagaacaatttccttcaaagtgaagacggcttcatgtggtggaacacaatgtgttaatacttttggggatgagcagcttgcagtggatttgctagctaatcagcttctttttgaggccttaaattactctcatttctgcaagtatgcttgctctgaagaaa

SEQ ID NO: 217899 - DNA, 517 bp, Glycine max
  unsure (1)..(517): unsure at all n locations
accaacataaatttactttgttattatagtgattaacagaaatatgtgactaaattgcaggtacttgtctgaagatatagcatatatctttttttctaaaagcagataaaatagacaatgaattgcaggtttaacagattaagcagctgctccaacagctacaccatccttgagcctggatttaccatacagggtttcttcaaaccggatgatctcattcttggatccataagcaacttgagttctctcatcaatgttagtgatgactttgtctagcacagactgatgaccatcactgctgtaacctccggctttttcaatcaagaaccccaacggagctacctcaaacaacagtctcagcttggctttggctgatggtgatgtcacattggtgaagatgcctttttcttttacaataatctggttgacatctggcaccattcctcccgtgtatctcaatgtgtacttttcattgacatagtaatcgatcaacttagcatanatcgggttgtcagat

SEQ ID NO: 217900 - DNA, 394 bp, Glycine max
cgccgatcttcaatctctgagccaatcgcttcccgatgcatcttaccatggtttgctacgcagggtttttgttactttaccagtctgacttcatattccgatcccctcaatgaagccgaagattccgagttgctttgctcacgaagattacattgcgtgatctgattctgccatggtacattagtagatcggattaatatatatgatattttcgcttttgtggttctgaagattcaattgcgtgttgaggaccttgcgaagcttgcagaggctgcacctggtcgtcgctctaaaggtgaagatatgagtgctgaggttggagatagcaatccttatagtcggcttatggcacttcagagaatgggtattgtggacaactatgaaaggatacgcg

SEQ ID NO: 217901 - DNA, 577 bp, Glycine max
atgattgaaattaatttagatagactgtaattatggtcaataatttgaaattagttttcctcaattttaaaacaaactgatgctaagttgaactggcttacttgaacaatgatgacagtttgaactttgaaatttcaaaagtttttttttctaaaaataaaaataaaaacaaaaactttgctgacactatgcagaattaatggcttcaagttgcctacgaagatcttcaaggtcgtcattgtcaactaatggagcgtcaagagttgccttatgaaactcgtcagcagtaggaagttcatgtgtgagaccttccggcagaacatctgaacttctggtatccggactatccagctcaatatcatcaacaacacttatattccattcattttcttcatgaagtggcacttcctcagttgatggtgcttcagcttccatttttgctttggctgcagcatctcttgctggttttgcaagcatgtactcttcctgtctttccaaacaagctacatttgaacattgagggtttggcttcatttgcatagttgggaaaaaatccttaagagaatatatcccaaat

SEQ ID NO: 217902 - DNA, 382 bp, Glycine max
catgctcagaaattctttacaaagttggagaaagaggcctttgtaaaaggtgttccaataggacaagctcttgatatagacatcccccctccacggccaaaaagaaaaccaagcaatccttatccacggaagaccaatgttggtgccccaacattacatagcgaagcaaagcatggaaagcctctcatttcaatcgcatcttcacatggtaaacaagcactggacttggagaacgaaccacttgcagagaagcataatgtcgacctaaggccaacgactgtgaaagaaaattaggaccgaagctgcttaaacgtatttaccattatccaagaggcaccctgttcatcctgatcttgcgacaaccagaattcaacatgaatat

SEQ ID NO: 217903 - DNA, 492 bp, Glycine max
aaatgctcaaacggtacttaatgtttcttgtctaagtctattttagcggagtttttaactgcagtaacatcaggccaagaaagtaaaaagtgtgtatgtagtaatttaatatggtacacagacctacacgacaagtttcgtgagctgcagaattagaaaataagcaatacagacaatgaacaaggaaacttagaaatatatgcaaaactagagattttctttgtgtggttgcatgggaatatcaggcatcaagttgaagcctccccattcaagcgtaatctcttgggacctttttcttcaccttggatgcaggctgttccgatcctgttttcattggcctctaccgaacatcttttgtaaggtttaaaccctgttcgacgagtctttagctttcctggtccaagacctatggttagcagtccctcctcctcattggtatctttgacaaatagcagatttttctgcaccccatcacaaatagaactgcatttc

SEQ ID NO: 217904 - DNA, 511 bp, Glycine max
gagcatgcatgtaatcatgaccttgaaagacaaactcccactcaattggatctgcaccacctacaagctgcccattacgaagctcccggcaacagatgagacaaagatcaaaagagcattttgtacagcttctgtggtaatcaaatattgatgttttgcagttgtcacagtacacacgctcggcttttgcataatctgtctttactatatttagctttgagaccgagagcccttgcatcttagcttctatctcattctcaatcatttgttcttcatccaactgccttaaatacggaagaagtacttgcagcaaatgcatagagtgttcaatcttgtcatcttcatcagtatttgctttgcctttcatttttttaataggttcatcagatctcaagcatgctttgcagttgcaattaccacagcacacaggacattcctgagcaatatcctcctctttcaaatgaggataccaatttcttaaacagggcaagcaatatcttttccgcttaca

SEQ ID NO: 217905 - DNA, 271 bp, Glycine max
caaaggcattggttatgagcatctaagtttggcagcagaaattttgatcaccctatggtgagccattttgctcaagaatttaagacgaaaaacaccaaggatattagtggaaaagccagagccttgaggatgtagcaaacaccatgtacaccacaaccctggactgacttctacggtgatcaaaccaccccaaacgtcgattccctgtaacaaggtattgacgaccacacatacctatcccgtgcctgctctgaaaaacctcgcatgggtt

SEQ ID NO: 217906 - DNA, 501 bp, Glycine max
attactgatgatgcataattcaatataaaggcagtggagcaactgtgtaattgtacactgggcactgtgttatataaattaggacctaaaaaaggctatattttgtttgtatactagagctacttaagccagaggtaattagaaaaaccattcacaaggtttgctcattcttcacttgtccaaacagcaattatgcaggatggtaattgcacctctctaaagtaaaatgcctttctcctttctcgtggcacttggaagatcaatcaaaacttaaaaggcttagcctaagtttggttttctgttattgtctgaatggctgagagagacacatgcatggaactttcttataggccactggaacggttggcatactcttgaactaatgccccaaagagagatggcctttggagcaagttggctggtgaatcaaattctttggcccgccctgcatctacaactagaactctatcacagtccattactggtggtattctatgagca

SEQ ID NO: 217907 - DNA, 626 bp, Glycine max
cttggtgatgtggttaaggttatggggttccataattcagctccagaaataaagttcgttcggcgtagcaatcttctgcttagcatcaacatagacaagaacacagagaaagatcttcaattggctgtggaatcagcatcacaattgttggcagaggagaaattggaagtagttgactacactagccacatagatttatccaaagagccagggcactatgtaatcttctgggaaataagtggtgaagcatgtgaagaagtgcttggtggatgctgcaactgtttggacaagtcttttggtgatgctggctacacaagctcacgcacagtcaactgcataggtgccctcgaactccgagttgttcggagaggaacattccagaagatacttgagcattcccttgcactatgagctgctgtgagccagttcaagacatcaagatgtgtaggccctacaaacaccaaagtgttgcaaatattgaatgaaaatgttgtcaagaactatctcagtactgccttcaattgagttgtaagaatagctatatctatctatctatctatatatagatatatctatatagttccctttctcaattgataaaaactttgccttgttttctacttttc

SEQ ID NO: 217908 - DNA, 456 bp, Glycine max
ggttgctgtccttttccttgcacttatgatagacagactacatcattacataagagaactgcggattcgaagaaaaggcatggaagctgtgaagaaacaaaccagagggactgaagatgggaaagttgcaaattcagaagaaattaagtctgtggaggaagaaagagccagattgagagctgaacttagccgccttgaatctgaactacagtcaaaaacaaaagacgtagatggtgctgaagccaatatagctgctctgagaaaacaatctgaggggttccttcttgagtatgatcgcttacttgaggaaaaccagaacctccggaaccaactacaatccttggacaggaaattgtcacattcaggttccaagaagaatatgtaagaaaattgcaggtaagaatggcttcttttgtatactcttaaggaattccatggcagtttgttgataacagc

SEQ ID NO: 217909 - DNA, 511 bp, Glycine max
gcgcgtaagagtaggagtaggagcacgtaagacagagcagagaagattgtttcaaatttcaatgcaaagggcgttgcaatcgatcaacgatctacagttgcgggacccaccaaactaccaactacagctccagtggcagcgccgcactcgtcttgtctcaaacaaatgcaacaagcggttattcttatagttattgaggaggagtagtacttataagaggaagcagatttgattctgattctaatttatttgattctttattatttataaattgaaaagaaagtcacgctggcggtgaagaacgtttctgcggcggccgaggaggaggaacacatgacgctgatttccgatgttgagaaccttgcggatgccgaaatccccgacaccgcacatcaaattagcaccgattcatggtttcaagtggggttcgtgctgacgacgggaatcaacagcgcgtatgtgcttggatattctgggaccatcatggttcccctgggttgggcagggggtg

SEQ ID NO: 217910 - DNA, 544 bp, Glycine max
  unsure (1)..(544): unsure at all n locations
actgaaagaatataatgcatttaatcataaatccgcaaaaacatggtacgttttggagtctaaatcaataagtcgcagggctgcaatagccgccgcagcagacatgagggcaaagaaacaaatattgatccaatgccagagcttttgggtggatgttagtttgttctcatttgtcactaggtacatatggtttgcaaggataaatgtgaggggaaatgtgctgatagctccagtgaggctcatgaaatctccaagaaatggcaacagagctgatacaaatgtgtttacagtcaggtagccacctcttaccaagactcgaaatgacaagttcttgaaagccagggcactccctttgatcccatatttggtatccaaatactcatacattggacttgcaaatatatgcaatgcaatgactgattgaagaaaggctgcaatattggccatggccttagcccaaactggaccattcacatcactcatcanataggttgctgttgaagatccataagcccagtatcctgcaaggttaccagatataatg

SEQ ID NO: 217911 - DNA, 552 bp, Glycine max
  unsure (1)..(552): unsure at all n locations
aaggaagaaacaaatttaccatgcacttttaatcaacttatgttaattggaccaaaggtacatcaagccaacatcatcaagtatgacatgatcgaccagcccattttacacgataataatctattttaatgtggcaacctggctaacttgccctgttgaaagggaagaagagtgaaagaagagacaaatagctgaaatgtcatccacggcaatgccccgtctctagcgtattcatgcatgcanccgacactccaccaaacgtttagctgccttaagcttatctgctgctgaagatacaatatccactgcttctttattagagattacatcccaaaccccatcagtggctagcacaacaaactggtctctactagttatatttctgtgtgttacctcaggcacagaaataagaccatgccctttgatgcagtagtcaccaaaggccctagacatggctagtcccggagactcttcatccggtaaccacaccctatgcacccctggctcgtactataagcagaacacacgcccctggcactgaattattctctc

SEQ ID NO: 217912 - DNA, 444 bp, Glycine max
caaggagcaggtaaagcttttccaaacaagattgtttttgatgataagcttgtgttggctaacacacaagaattctttgatggaaattttccagtggattcttggttaccaatttttgtgaattgtctttatcctgtaagtcaattaccttcagaagctgtcgttgtaaatgttacatgtggtagtggacgtggtggtttacccaccactgcttggattaggtctgcagttaacaatcgctcctcagatatcaacaaatggattcgcacagcacttgggagaggtaagaaaattgtttttcttactagagttgatccttttccagtagctctactggctgttctttttggcgttaagaatgaaattctgagttctaacgccattaaccctatgctgacgcgacttcttgagaacctgtagagtctcaaatatctggttgatgag

SEQ ID NO: 217913 - DNA, 525 bp, Glycine max
aaacacactcattgcacatagtaatgcgctttatttaagtgaataaaatattacatactagttcacaaatgcaaaaggacactcatcaaccagatatttgagactcttacagttctcaagaagtcgcgtcagcatagggttaatggcgttagaactcagaatttcattcttaacgccaaaaagaacagccagtaaagctactggaaaaggatcaactctagtaagaaaaacaattttcttacctctcccaagtgctgtgcgaatccttttgttgatatctgaggagcgattgttaactgcagaactaatccaagcagtggtgggtaaaccaccacgtccactaccacatgtaacatttacaacgacagcttctgaaggtaattgacttacaggataaagacaattcacaaaaattggtaaccaagaatccactggaaaatttccatcaaagaattcttgtgtgttagccaacacaagcttatcatcaaaaacaatcttgtttggaaaagctttacctgctccttg

SEQ ID NO: 217914 - DNA, 465 bp, Glycine max
  unsure (1)..(465): unsure at all n locations
gttgaatctcttgggaacaggatacaaaatgagggtactgtggcatactatttgttattggacaaccgattccgtgtttccagtggctatcttggagctgagtttcaagagaccatggattccggttttaatcaaatgcaaaactcttcagttgttggaaaccgttttccaggctacttggagtatccgggagtaggatcgaggcaacagttccctgttgaaaggaaatgggcccttgggcttcagtctcgagcccatcctcgtgaaataatgactgaggtccttaaagctttgcaagaattaaatgtttgttggaagaagattggtcactacaacatgaagtgtangtgggttgctggcattcctggtcatcacgaaggaatggttaacaataatgtagataataataatttctttggagatgattccaacatcattgagaatgatgctggttctacttcaaat

SEQ ID NO: 217915 - DNA, 530 bp, Glycine max
gtcttatttatcacgagaatcaatctctgtcgagatttaagggaataaacaattctaatcatggttgttttgcaaagtgtaatccttctactaagtcagaagtatcatgtgattcattttcacatggggtacttgatatccttcaacgtgccattagtcaggctgagaatgatttcttgtacatggttgagcaggaaatggaggaacgtcctgatttagtttctattggatcttgtgttttacttgtgcttcttcacggtaatgatttgtatacacttaatctaggtgacagcagagcagtattggcaacatgcggtacagctgatcggatggataagagtgagagactcaaggctatacagcttacagataatcatactgttgataataaagttgaaagagctagacttctggctgatcatcctgatgatcccaagattgttatagcaggaaaggtgaaaggtaaattgaaagttactcgcgcttatggagttggctacttgaaaaaggttagttagtattctcttaca

SEQ ID NO: 217916 - DNA, 547 bp, Glycine max
gaagaattggcaaatcttaaatgcaagttgatgcctttgaagtcctctgattcatccctagcatgattacaattacggtcacgtcgtcatggtacttccttctccttccagctggaatattcatcaactcttccatgctcagacctgcatgagtgttacttagccaaccaataatcatgtaatataacaaataaacatttacattgatgcaaataaaattaaatttagcattagatcttgaaaatgaccggcagaatcagctgctctagctacaagctgttctatgagaaactttgctggatcaccaaaaggattgttcaagatataagactccacaagctttactgcctcatcattgctgaagaagtcaaataaaccatcactccctactataacaaattgatcggaatttgagattctatggacattcaatgatgggttagcggatatgtatggtgggcttttaagatcgtgaactcgaaggattcccatcaaagcatcattcagacttttctgcatgagaataaaataagaaaatcaaatctat

SEQ ID NO: 217917 - DNA, 343 bp, Glycine max
cgagatactcgcaccgatcaaaacggtgcgtttgacgaggaaccgcgacgaggatgctaagaccatgaaaagtttgctgaaacatggtgacctggttgtgtgccctgaagggaccacgtgtagagagccctatttattaaggttcagccctttgttttcggaactgtgcgttgaaataatccctgtggcaattgattgtcacgtgacaatgttccatggcacaaccgcaggaggtcttaagtgcttggacccatttttcttcttgatgaatcccacaccttcttactctggtcaggtgctagaaaaagggtcacctttcattaccggtagtcatggtatcaat

SEQ ID NO: 217918 - DNA, 476 bp, Glycine max
  unsure (1)..(476): unsure at all n locations
ggccaaaaaataatgacaacaagcaagggaagtcatttttgccgtattttccttgtctatgttttccatcacaagggcattgctaattattagtgatttaaacaaagcatgagcaaaatcaaaaccctattaactatttaccactctttgtggtcgaaactataccttcattaccggccaaaatcaagtacttgtcctttctattaagttgagtgcattcaaattccaaggccttcccaatttgcgtttgcacgtgattagccactgcaaatcccgcataatcgccattgataacattactagcggtaatggaaggtgacactttctctagcaactgaacagagtaagaaggtgtgggattcatcaagaagaaaaatgggtccaagcacttaagacctnctgcggttgtgccatggaacattgtcacgtgacaatcaattgccacagggattatttcaacgcacagttccgaaaac

SEQ ID NO: 217919 - DNA, 565 bp, Glycine max
caatattattctcctcattccttcatttttaaacctagctccatctccctccactcaccataacatggcatcagaagcaaatgctgccaacaccaacttctgtgtaaatgttagcaacaatggctacattagtgctaatgaccccttgaactggggtgcggcggcggaggctatggctgggagccacctcgacgaggtcaagcgcatgctagaggagtaccggaggcccgtcgtcaagctcggtggagagaccctgaccatctcgcaggtcgcggcgatcgcggcccacgaccagggggtgaaggtggagctggcggagtcctccagggccggtgttaaggccagcagtgactgggtgatggagagcatgaacaagggcactgacagctacggcgtcaccaccgggttcggtgctaccttccaccggagaaccaaacagggcggtgccttgcagaaggagctaattaggtttttgaatgctggaatatttggcaatggtacagagtccaattgcaccctaccccacacagcaaccagagcagctatgctagtgagaatcaacaca

SEQ ID NO: 217920 - DNA, 557 bp, Glycine max
tgcgcgtcgcggaccagtccggattaattcccgggtctactcggcggccgcccttttttttttttttttcaagagaaaacatccttcacatggaaggccatgtattgatatttgcacgcaaagctacggcaaacaaatggaattctattacattatgaattacaagttccttgcatggcatacatcaaggaaaactgggaagtcgttgtatgtggattgatttgccacagccttatatagacaaaccaaatgcttaatatcaacacaaacacgtgtacagaaaagaaaccactcttcaagaaaacagaaaatgagaaaaactaacatattggaagaggtgccccattccactccccaaggcattccaaaagtggatcaatgatcttcccttggcacaaagcagtgaacactttgtcacactcttcacccggtgagataaccctttcaccagttagcaatgctgtccccaacttctctctgacaaacttgtacatggggtaagacctgcattccttgatcttgtttggaattgcacattggtcattctcatatgcaac

SEQ ID NO: 217921 - DNA, 562 bp, Glycine max
  unsure (1)..(562): unsure at all n locations
cggctcgagatctgtttctctgctcttattcctatctttctttgccttctttgcaccctctgaatctcacgacaaagtctcgttggaattgtactacgaaagcttatgcccctacagcgccaacttcatcgtgaatcacctcccaaaaatcttcaccccagatcttgccccaatcgttcacctcaaactcgttccttggggcaatgccaaactccgtgccaacgccacctttgactgccagcatgggccatatgagtgcttgctgaacacagttgaagcctgtgcaattcacatctggcctcaactcagcaaacattttcctttcatctactgtgttgaggatctggtgtttcagagtaagcgtgaggaatgggaatcttgttttgagaaactggatcttgattcggaacctattaatcagtgttataatagtgaacatggaaaacagttggagctacaatatgcagctgaaacaagtgctctggagcctnctcacaagtatgttccttgggtagttgttgatggagaaccactctatgaggattatgagaacttcttaagc

SEQ ID NO: 217922 - DNA, 468 bp, Glycine max
  unsure (1)..(468): unsure at all n locations
cgtgcaaggaaaaaacaataatttttgattaattcaggatagcaaaggggacccaggcatatcaagccccaactatttattttgaccgtccacaaaagtcccaatcaaattcgaatcaactgcatttaatatacaggtattttcctttcacatgggtatacaaaagagaatgctaatgcttcagatggatgtatacggggttcctcatactgctggcaaaaatgatcttgagaatacatgcagcaccatggtttcaagggatagtttaatcccatattttggctagcatttccacctaatagatagcctatccaattcctgtacaaatcagggacacatcaatggctgcatagcctggcgtaatcaatgtaatgtaaccttagattgctaccctaagcagactgataagtgacctgatctgccgtagttgtgtcatatntggcatgtgcctcgggggtatcttcttac

SEQ ID NO: 217923 - DNA, 485 bp, Glycine max
  unsure (1)..(485): unsure at all n locations
attccagacatgaagcatagtgacttgagtacctcgggaacctcaaagcaaacctattgcttgatatacatttgcatgaccatgttgagacactttatgatcaaattcgtcacaaagcccttatccagtacacactcccatttgtgtctgttgatttgaacatgatggctaatgcattcaagacaactgttgcgggacttgagaaggaactagaagcattgattactgataatcagatacaggctcgaattgattcgcacaacaaaattttgtatgcacggcatgcggatcaaaggaatgccacctttcaaagggttctggaaactggaagggaatttgatcgtgatgttcgttccatgttactgagatcaaatcttatcaagcatgagttcaatcttagagcattaaggaaactntgattatggactgatgataatgggaccaagttgctattttactttntaatatagcaggcgtttatcaac

SEQ ID NO: 217924 - DNA, 607 bp, Glycine max
  unsure (1)..(607): unsure at all n locations
cttctgagagctcattataattaccagaacagagaattcttaagacagatcatgagaatgttttcggaccatcaacactcaattcttgcgcaacggagtcaccaaaaatgaggtgcaggttaaaaacaggaaatgaagatcttgtgacgaattaattgagaaattatgaaagagtatatacaaaagaaaccataatatgccgttaaaatgtttgcacaaaaatgtacgtttgcaaccttgattcactccagaatcctgcttcgttagagttgataaacgcctgctatattaaaaagtaaaatagcaacttggtcccattatcatcagtccataatcaaagtttccttaatgctctaagattgaactcatgcttgataagatttgatctcagtaacatggaacgaacatcacgatcaaattcccttccagtttccagaaccctttgaaaggtggcattcctttgatccgcatgccgtgcatacaaaattttgttgtgcgaatcaattcgagcctgtatctgattatcagtaatcaatgcttctagttccttctcaagtcccgcaacagtngtcttgaatgcattagccatcatgttcaaatcaacaga

SEQ ID NO: 217925 - DNA, 516 bp, Glycine max
  unsure (1)..(516): unsure at all n locations
acaagcttcaccatcaccatagccaacacacccctcaacattcaatacctacgatcttcactttcttctcccaatgaaatccatcttgctgagttacccttcaactccacccaacacggtttgccacccaacatagagaacaccgagaagctccctctcactcacatagcaaaactctttctttcaacactcagcctcgaagctcctcttcgctccttgatatcacagatcacagaacaagagggtcaccctccactttgcattatatctgacgtgttccttggctgggttaacaacgttgcaaagactttaggtattaggaacctaagcttcaccacttgtggtgcttatggaactttggcctatatttctatctggtccaacctacctcataggaaaacagactctgatgagttccatgttccggggttccctcaaaactacaaattccacccgacccaattggcataatntctaagagcagctgatggcactgatgagtggtcacagtttttc

SEQ ID NO: 217926 - DNA, 524 bp, Glycine max
aatatccattgaccatctatattgttttaaaatcatcaatcaaaaaaagtgaacttttgatctccacagtgacatgatcaaagtcaagtgttaaagattgcttagcagtttcaaaagtatgcttacacaagcaactttattattattcaaattccaaattctaaatgtagcaaatcatacagccttgttgggtgataaaatggttgtaacaagatcatccattgctctcacagaagaccccttttctttacctttctctggtatggcctctctcatgtgagctgcaatctcattcgccttctccttcatctcctttcccttcccttcttgctccatagctatttctataaccttcttaacctgctccccagagatcacagtttccacagttcgagtgagctcaatagccacacccatttccttcaccaacatcttcacattgtatgcttgttcagcagctagtggccacccaatcataggcaccccatagctgagactctccaacacagagttccatccacaat

SEQ ID NO: 217927 - DNA, 490 bp, Glycine max
ttttttttttttttttttttttttttttttttttcatgctataactaccctttatttacttctagatgtgaatttgggattacaaataaatacatcggactgaggcttcaaaaccaccctaaatgagttgatccaaataacatattttggcagaagaaattcccaaaaattagatataacatggtgtcggactgtcagaaaacaaagcaaaatgagtagcggcacacattcaaatggcaccatattttctttccgttggtctccatgcagcacctgcaccttgagaaggaccaggaggacgttcccaagaggtttcactgccaaatgcactattgatgtcttctggccgtgagtagccttgcccagctccactaactgtctctaagcacgcagaaagaattgtcatgccaggcaatgcatcaattccacgctggcgttccacttttggcttggaaatgaacccttcacaacaaaagagtgttgaagagac

SEQ ID NO: 217928 - DNA, 564 bp, Glycine max
actatttgagatttatggacccacataattccaaggaattggttgataagacaaaagaaaggtattggggccctgttgatgtgtatgttgggggtgctgagcatgcagttctccatttactgtatgctaggttctggcacaaggttctttttgacattggtgttgtatccaccaaggagcccttccaatgtgtcataaaccaggggattattcttggagaggtaatttcaattctttctgcatgaaaattaggagaaaaaataactaactgtgacaagtttctaattgcttgagtggcaggttcaatatatgacttgtagagatcaagttggcaatctgatatctgctgattcaaccgacatgttgaatgaacataaactagaaataattcctgcagaaaaggtcatgaaatctggggattcttttgtcctgaaagaacatcctgatatacgtttatttgcccgcgcccacaaaatgagtaaaagtaggggaaatgttgttaatccagatgatgttgtctctgagtatggtgcagattctcttcgattatacgaaatgttcatg

SEQ ID NO: 217929 - DNA, 549 bp, Glycine max
cttttccaccagaaacgcgtttcacaatcaagagaatttcgcacatcgtaacaacccaattcatcatttaaggtaggtatgcgtctctgtcatttaacatttgttagacttagactctataattgaacatcacttggcttggcagattcaccatttatgtgttctgttgtgtgtgtatgtagctcacacatacaattgtagttcagtccaattcttcaccatcaaattatgttgtcacctgaaccctgtgatccgaactttctgctgtgtctacccgatgatgtgtttggcatggtgtcacggttcctcttgcccagagatgtttgcaatctcagcctctgctgcaagagtctctatgctctttcatcctctgaaaaagtgtggttccctcagtgttacatggtgggagtggtgccccaaaaagaccttgttgagtggagagagggtgtctcatcttaccaggcactttgcccgttccttttgagtgttaaaccattgcttgggatatgggttcatcagaaccctgagcttggtaacccttgctatgtc

SEQ ID NO: 217930 - DNA, 572 bp, Glycine max
  unsure (1)..(572): unsure at all n locations
ctccacttcatatatattcgcgatttctcttccaccgtgaaaccctagacccgactgcgagcgcggagccaagccatgtccctcaaccgcctccgccctctcctccctccgatccctctccgcctccaccgccgtggcccccgccgcctcctgccctccagtccatactacccccaccggcatgatctatgaccgcgctgccgaggccgtgaagtgcaagctccggctgctcgagaaccccgacccccgatttctcaagcacgggtgcccccggtcgaccctctcggaccacacgcgcatgctctgcgaccccgagacgcgcgtgaccacgcttcacaacggactccgcatggncaccgagttcaccctgagcgcgcgcaccgtcaccgtcagcgtctggatcgacaccaggtctcggatcgagaccgacgagactaacggcaccgcgcacttactggagcacatgatcttgaagggcacccagaggcgcaacgcgcgtgagctcgaggaagagatcgagaacatgggaggacacctaacgcctacgctccagggagcagaccactattatg

SEQ ID NO: 217931 - DNA, 551 bp, Glycine max
aatcaaaacaccattttcgacaaggaggaataattgcgaaggatgccaattacatcactgacaacagcatacttattactgcaaaattgttacaaaatagaggcccataacaaataaatgaaaaacagaggcataaatgttgtaaattagaataaaacattatgccagacctcccatgaagttgaaatgaggcaaaaaaaaaactataatgaactaataacggttccagtaggttctacgtctgaaccagttgtaatcaggcaaacgctgaataggacccatggcagcaataacaacatccttgtcatagataaatcgattggcaacacgtttaatcgtactggcatcaacagcatcaattctagcaaacaattcagcaaacgggattcttcgaccatatgtgagtaactgacggccaatatcttcagccaccgggcttgttccatctatgtgtagtagcagtgaagatttcaactgattacgagcacgtgtaacatcatcttctgaaacgcgataagccaacttggttgctcatacattatagcataaga

SEQ ID NO: 217932 - DNA, 533 bp, Glycine max
cggctcgagtcgcaaaggacccaaagaacgtcatctacgtcatcagtggacgcgacagaaccgcactgaatgagtggttcaagggagtgccagtggggttcagctgtgagcatggctgcttcttcaagatgtacccaggagcggaggggaaggatcactgggaagacgtcggcagcgaattggatctctcctggaaggccactgtcggcagcatattcgacgattacaccgatcgagtcccagggtctcatgttgaggccaaagagatttgtctgacgtggcactaccgcaacgctgaccccgagtttggagagaatcagaaaaatgaattggtgctgcacttgcagtcactggcaggactgcccattgatattctgttggggaagaaggcagtggaggctcgtcctcagggaattcacaagggcagtgtggtgaagagagtcatgtccatgctcagtgatgctgattttgtattgtgcattggtgatgatgtcaccgatgaagacatgttcgaagaaactgtggaacacgag

SEQ ID NO: 217933 - DNA, 496 bp, Glycine max
  unsure (1)..(496): unsure at all n locations
aatgaagaattgtttattttcacaaacaagaaaaacctaacaagtgtcactgagatgctttcgctaaatctcccaacagatccaacactgattcctgctcatcgaaataatagccagcaaatgtgggctttttgccaacagttatcgtaaactttccttcagaatctggcttctcgtgttccaacagttcttcgaacatgtcttcatcggtgacatcatcaccaatgcacaatacaaaatcagcatcactgagcatggacatgactctcttcaccacactgcccttgtgaattccctgaggacgagcctncactgccttcttccccaacagaatatcaatgggcagtcctgccagtgactgcaagtgcagcaccaattcatttttctgattctctccaaactcggggtcagcgttgcggtagtgccacgtcagacaaatctctttggcctcaacatgagaccctgggactcgatcggtgtaatcgtcgaatatgct

SEQ ID NO: 217934 - DNA, 544 bp, Glycine max
tgcaattgaagttgaagtcttgcccttctctcttcaactccaaacacaagacatcatcatccatggctgcctccgtctacactgtcggagctgtcaacagagctcttttgaacctgaatgggtctggacctggggtttcagctcccagttcatccttctttgggagcagcttgaagaaggttattggctcaagggtccccaacacatagatttcctctggaagcttcaagattgttgctgtaaaagagaagaaagagattgaagagacccagcagaccgacaaggacagatggaagggtcttgcctatgatatctcagacgaccaacaggacatcacaagaggaaagggtttggttgactcccttttccaagctccacaggatgctggaactcactatgctgtcatgagctcctacgagtaccttagcactggacttcgccagtacttggacaacaacatggatggattttacattgctccagctgttatggacaaacttgttgttcacattaccaagaacttcatgaccctgcccaacatcaa

SEQ ID NO: 217935 - DNA, 409 bp, Glycine max
tagtcctttttttttttttttttttttttttttttttttttttttttttttttttttttttttttttttttttttttttttttcaaattaaaggggcccctttaccccaaaatttttggggaaaaccgccccttttgaaaaatttggaaaaaacacctcaaactgggcatttttttttggccccaaaaacattggaaactttaaaaaggttccccccaagccccataaaaacttttacccctgggaccagcccaaccttagggaacaaaaatttttcctggccaagtttgtttggcccccaattcaaaattggaaaaaagtccccctgtaaaaagcacccccgttggcatttccaagggcaccctttttaaagtacttgccagccaatgggactttttggacattcttt

SEQ ID NO: 217936 - DNA, 497 bp, Glycine max
tctggatcagcaaaatgcatttctgttgaccttcctggtcatggaaaatcaatattacatggtgtaaagggtgctggtgaagaaccattgttgtcactggagacaattgctgatttggtgcataaattaattcatcacattgctccagaaaaagttacactagttgggtattcaatgggcgcaagaattgcattgtatatggcactgaaattttgcactaagacaaagggtgctgtattaatatctgggagtcctggtttgaaagatgaattatctagagaaatgcgtactgctaaagatgattctagagcacttgcagtcattgcacatggtttagaactttttgtcagttactggtatgcaggagagctgtggaaaagcctaagaagtcatccccattgcaatcgaatcattgctagtcgcttgcagcatgatgacatgcagaatcttgcacagatgctgtctggataagcatatgaggcagtcgtcatgtggga

SEQ ID NO: 217937 - DNA, 542 bp, Glycine max
  unsure (1)..(542): unsure at all n locations
caaacagaaaggtgttcgtgcagacttgattggttccatcatcactcattatgcctccatatggctccctgacctctcttcctctgctgaaaatggtgtcaccactcacttccaatcccccgaaagcgtcacaaattcatggatgaagaagaggttctttgtggaaaccttggtgagtgttctgcctcctgagaaggattctgtcccatgcaacttcctccttcgccttctcagaaccgccaacatggttcgtgttgacgccacttatagaggtgagcttgagaaccggatttcgtggcagctagaccaagcttctctcaaagagctcatgataccctccttcagccacacgtgtgggacactcttggatgttgagctagtcctcaggttggttaagaagtttatgagtttggaccgcgatggtgctgctttggttaaagtggccaagttggttgattgctacctcgctgaagctgctgtggatgccaatatgacctngtctgagttcattgcacttgctggagctcttccagtcattcaag

SEQ ID NO: 217938 - DNA, 363 bp, Glycine max
cacgcacggttcgtagctgagcgaacaacggaataattaccggctcaataagcggcggccgcccttttttttttttttttttttttttttttttttttttttttttttttttttttttttttttttttttttttttttgtgtaatttgttttttatttctatctattattgaaagaataacaaaaaatagggggtgccccccaattacatagaaaagtggcaaacggaaaacacacatgctccaagaatatgtcccgagagcaccaccgaaaaaagaaggaggaggtaaaacacaacacaaatacccaataaaagatgggcagtactactaggctgaaccgaaggtaagacaacccgaggggg

SEQ ID NO: 217939 - DNA, 531 bp, Glycine max
  unsure (1)..(531): unsure at all n locations
gtgcgtgtacggagttctgctgcagagtccgcgggtcagaacattgatccacttcttgataataattctgagtccatgaaatttgaggtcaaggatttttcttttcttcctaaaatgatttctgagagacatgaggagtatctgtatcttaagctggttcaggacatcattgctgaaggtacaactaagggtgataggacagggactggtaccttgtcaaaatttggttgccagatgaggttcaatctgcgtggaaactttcctcttctaacaactaagaaagtattttggcgaggggttgttgaagagcttctttggtttatcagtggctcaacaaatgccaagtgttggtttgacagagcgggaggagggtgacttgggacctgtttatgggtttcaatggaagcactttggtgccagatatactgacatgcatcatgactactccggccaagggttngatcaacttttagatgttattaacaagataaagcgtaatcctgatgatcggcgaatcattctctctgcatg

SEQ ID NO: 217940 - DNA, 594 bp, Glycine max
  unsure (1)..(594): unsure at all n locations
aaaaacaccggctttatcttaaacatcgagtttcagatccctcaaaagtacaatagagcgtgtaccttggaaaggaaggaaattaagttaatctaaatcaccttagaggcataacaggtggagccagagaattcccacttaagtaacagtatttatgcgatgaagtatgtgctacgatatgttctttaattgtacacagatttaacataatcttcctaaggttgtgcctcatttcaaaaagcagaaacaacctgaaggagtgagaatccccagattttagacagacagcttcatatcaatcttctggtgaggatcatagcctatgagcttgaaatcagcagccacaaaagaatctatatctttcttctttggatttatcttcaaagttggaaaaggctttggctggttatggagctgctcctgcaaaggcctcacgtgattgcggtaaatatgagcatccncaataacatgaataaaatcaccaggaatgagatcacaaacatgagcaatcatgcatgtcaaaagggcataagatgcantattaaatggaaatgcccagcccatatcagcagatcgctgatacattngacatga

SEQ ID NO: 217941 - DNA, 445 bp, Glycine max
aaaatcctaaccttgacacagctgaagtcaacatcaatgtggatcccgatgttgggaaggttactgctgctacctatgaattgaggccattattgcgcatgcttgctgggtcatgtcctgaagttgatttaagttgtggcattaccaagatattggaggagcgaagggaattaagagagctccttaaagatgtcgataccccgacaatattggcatcaaccaggcgacaagcatttaaggacagtttacaacagagaattctcaaatctgagaatattgatgtctcttttgaaactttcccttattatctaagtgatacaacaaagaatgttttgattgcttctacatgtattcatttgaagtgcattggctttggaaaatatgcttctggacctccatcagtgtcttcacgaatattggtatctggtcctccaggttcggaaat

SEQ ID NO: 217942 - DNA, 571 bp, Glycine max
acaagaaataattaagaattattttatttttacgagaaaaaaaaaactcagtatatacaagcaagaataaggggagggagagttggatcagctgggaacctaaattaaacttttttatctcaattgaaatagtcaacaaattctactaatatctgaaaaaatttggagaggatggtgagggttggaaaaaggggaaagaaaacctatgatgatataatacactagaggcagaaccaaagatgggatttccacatcaaacaggtcactgctgaccttgctgcaccctttaggtggtgatagaagaatagcctaagcaagaaatgctatacagagagagagagagagagagagagctttacatgaaatagctcagagatctcatttttcttgatcctccttctccatagaggtcattccattggagtagctcattcatatttgttgactctgatgacacacttgcacacacctgctcatgtgcatatctaaaatcatccatctttaagggacgaatgtcaccgctgctacacaatccaggtaaaggtttgttctcagacaatgctaagcttct

SEQ ID NO: 217943 - DNA, 227 bp, Glycine max
tgggaatcaaccccatcatgatgagtgctggagagttggaaagtggaaatgcaggagagccagcaaaactgatcaggcagagataccgggaagccgcagacttgatcaagaaaggaaagatgtgtgctcttttcatcaacgatcttgatgcacgagctggtcgtattggtggaaccacccaatacactgtcaacaaccagatggtgaatgccaccctcatgaacatt

SEQ ID NO: 217944 - DNA, 553 bp, Glycine max
  unsure (1)..(553): unsure at all n locations
aagtggacactttaactcaaaattatagaggaagacagtccaatatgaaaaatatagtaaaatcatctcaaacttggcatcttctctttgcacctaagacattgagaattctaagaatgttacacgcaagtcccatcacaacttctagcacttggatcagcacaaccttcaggaacagaaatatttacttgccaagtttgctttgcctccaattcaagattggaagaaagttcccctgttaatagcatcctcgttagcatttccaagtgcagcctcgttcaagtacttgtcagccaattggactctcttgacattctcttgttcttggacaagcatgttaccatacgtcaagagcttctccagagtcatcttgggctgctcaaaggttggaggtccatcttttgagttcacaagcttcttcccaatgccgtcaacaccaacaccagaaatccacttcctcacttcgtcatcatatactctggccctcagtgcaccaaagaaatcaatggattggccagnggaggtgtcaacaatcttgacaacgtcctgttca

SEQ ID NO: 217945 - DNA, 486 bp, Glycine max
ggagaagcttacttatcttatagtttaggtgctttatctgtttttggttttattgcttgttgctttgtctggtttaataataccgcttatcctagtgagttttacgggcccactgggccagaagcttctcaagctcaagcatttacttttctagttagagaccaacgtcttggggctaatgtaggatctgctcaaggacctacaggtttaggtaaatatctaatgcgttccccgacaggagaagttatttttgggggagaaactatgcgtttttgggatttgcgtgctccttggttagaacctgtaaggggtccgaatggtttagacttgagtagactgaaaaaagatatacagccttggcaagaacgccgttctgcggaatatatgactcatgctcctttaggttccttaaattccgtgggtggcgtagctacagagattaatgcagtcaattatgtttctcctagaagttggttagctacttct

SEQ ID NO: 217946 - DNA, 509 bp, Glycine max
aagaaaaaagaaagttctaattattaataaattatatctatatatatatatatacagatagatattctatatcttttatcttaattaatatttgacccctccttataatgtgttatagttttctttatttttaggaacttatccattccttttttaatgtgcccgacaatccgaaagaattctgggggaggggtcatttcgattttgatctagaataaatagagcttcaagaaatgagagaattaagaatacccacgagaaacactaatccaatccataatgatgtaccggaaaatacaacatttttggtattcgaccaaccttcaggagaagcaaatacaacaggtacactaatcaataaaataaatgaaatcgcaattaatgcaaaaacagctaattggaaagcaatagtcatgtgtctaatcctccaatttaccaacaaaagaactttaccatttgatcccccaaccccttgatccctttattgacaaaaaaatttataatcaaaa

SEQ ID NO: 217947 - DNA, 418 bp, Glycine max
ggcgacggcaagatctcgtgcgccgagctgaaggagatgatggtggcgctgggatccaaaacgacgtcggaggaggtgaagcgcatgatggcggagcttgatcggaacggcgacggctacattgacctgaaggagttcggcgagttccattgcggcggcggcgacgggagggagctccgggaggcgttcgagctgtacgatctggacaagaacgggctgatctcggcgaaggagctgcactccgtgatgcggaggttgggggagaagtgctccctcagcgactgccggaggatgatcggaaacgtggatgccgacggtgacggcaacgtcaattttgaagagtttaagaagatgatgactcgctcgtaggtggtggtggtagtagcactctctttcagtaatgttgccggttcttcgt

SEQ ID NO: 217948 - DNA, 489 bp, Glycine max
aggagactactaatatgcttttaaatattttgtctatttcaatagctactacccttacgaaactgtaatcagtttgttcactttcattacacagatcttagaggaatctgatgagcgttttggagatgaaggtgtaactgaaatagtagagctggtgaagaaaacattgccactgcctctcaatatgaagaaggaagaaatcaccaagggtgacgaagaaaccgcaacattactgaaagagagtgctactaccaccaccacctacgagcgagtcatcatcttcttaaactcttcaaaattgacgttgccgtcaccgtcggcattcacgtttccgatcatcctccggcagtcgctgagggagcacttcttcccgaaccttcgcatcacggagtgcagcttcttcgccgagatcagcccgttcttgtccagatcgtacagctcgaacgcctcccggagcttcctaccgtcgtcgccgtcgcaatggaactc

SEQ ID NO: 217949 - DNA, 506 bp, Glycine max
aaaaaagaatctatataaatataaaaataatatatataaggtacaaatagtaaatcgaggtacccattttatgataaactttccttccatttttgttcctctagtaggcctagtatttccggcaattgcaatggcttctttatttctttatgttcaaaaaaacaagattttttagatacagaaaacaaagtaaaattctggggttttttattccccaattataatactaaattcaaaaaaaggagagtaatgagtataatctttcgctcagacgatgtactgatatattctatggcggaggttcgaagaacaagcaatttattttgggccgttttcactttgttaggttcattggggttattgttcgttgcaatttccagttatcttggtatggatttgttctttatttctgagaaaattagtgatttttcttttattccggactttatttattttccatttattccacaaggggccacgatggctttttatggaatcgcgggtct

SEQ ID NO: 217950 - DNA, 593 bp, Glycine max
  unsure (1)..(593): unsure at all n locations
agctaaaaaactttaaattaaaatttgataagtgaatcattttgtcagtcaatcattcattgaatgataaatcactacaagtgatggagatacgcgatttaaataacgaaaaatccaatattttaaaattgtatctaaaatgactggaaaagtggaaacaagaccagatataatttgatcattttgagcaaatccaaaatctttatagacgaaaccaatcactagttcccaaccatgggttgaatggaatcctatacataaatcagttaatagaagaatagaaaaagcttttattgtgtcacttaaattatatataaattctcgaaccaaagagttaataagaacaagttcttgattaccaagaatagaataaccgcttagaataaagaaacaaattatatttgtcgagaagtgcaaaatcgtattcatacgatcttcgttgtgcgttttgattaattggattgtttctttatagattccagtacgcaggttttgtagatgtgtttccggacattcctttaacatgtcatctaagaaaaacagttcttcaaatgctatgaatnttttagaatactctnttctttatatcattc

SEQ ID NO: 217951 - DNA, 548 bp, Glycine max
  unsure (1)..(548): unsure at all n locations
ggtttctatttagctggagattacacaaaacaaaaatatttagcttcaatggaaggcgctgttctttctgggaagctttgtgcacaggctattgtacaggattctgagctactagctactcggggccagaaaagaatggctaaagcaagtgttgtgtaacaaaaacaagaattgaaagagtcatggtagagtacaggagcatcatttcaactttggcattctttgtctgtggtcaggactcaggagaccttcaactttattagttcatacgaataaagaaaggctcagcttctgaaatttagctcaccgtcgtcaactgtgtgcaataagctatacggaacaaacgacatgtgtcaacttaaagtcagcccattgttttgttatcctccaattttctggatcaatgtttgtattggaaagaaatatgtcattattcaaacttgtttatatccactttttttatttatcaacatttgtcacaacctttcngtgagtagcaaattattcccagaaaggcacattacatatatatatatgcattggatatt

SEQ ID NO: 217952 - DNA, 425 bp, Glycine max
aactgctcaccccacagtaagaaaattttgtatgatggataagataagccaacggctacaccatgacaaacattactactgtcaaactaaataaacgacactaaccgaaatcaaatatcattctcaataatcaataatgtgtgagatcaaatcaaatggcttcacttatcgaggaggggaagggggaggcggtggcaagtttgattttgcaaatcccacccatgcaacaatgccgactgccagaattatccatccaaatatgtcatacttcagatcactggtcttctgtctcttgtgagtctttgtacccgaagcagaagtagaagatccagctgttgctgccgtctgctgctgctgaccaaatccctgcttatggatctctacatgctagttatgagccttagcagccacttacaatgattcgc

SEQ ID NO: 217953 - DNA, 491 bp, Glycine max
caagggttgtgaaagcagagaagtgagatacactaagttatcctcataaatacactctaattaggtggcaagataagtgtctaaccttagtaacattgccacatattgtgttcattttggaattgtgccactaaaattctattcaattcatctatggctgcctcttcttatgctatgcaatcaatcctggcaaaccctttgatccgcatttccagcgggtctagggtgaaccaatttggcgttcctgctttgcacatgagaaggaatgttggcctgagagttaggtccatggctaaggaagaacaaccaagtgagcctgcaaccccagttacaccgtcaccatcagtagaacccaagccacagccagtctctgctccttcaccaaaggtgagcactaagttttctgatgtgttggcattcagtgggccagcacctgagaggatcaatggaaggttggccatgattgggtttgtggctgcaatggcagtgga

SEQ ID NO: 217954 - DNA, 597 bp, Glycine max
  unsure (1)..(597): unsure at all n locations
gattaacgaaataattttgatatgtagattaaataaacacacgaagtacaaataaacattggtctctctaatcacaaaggagattaagtccattgtggtgtgccttcatgactgaattataccaaagtactacccttaacatactcagtaaaagccagagcaatcaaacccaacatagcaaatctcccattccacagttctgcatctgaggacatgaaccctttggacttagactccacgctgacaccttggaagagtggaatcaaggaagcaagggtaaggaccacacttgtccccaagaaccatgggatgccaccattggatatttgttctaacacaccttgccctttggctacttccactgccattgcagccacaaacccaatcatggccaaccttccattgatcctctcaggtgctggcccactgaatgccaacacatcagaaaacttagtgctcacctttggtgaaggagcagagactggctgtggcttgggttctactgatggtggcggtgtaactggngttgcaggctcacttggttggtcttccttagccatggacctaactctcaggccaacattccttctcatgtgc

SEQ ID NO: 217955 - DNA, 487 bp, Glycine max
agcttttaacacttttgatggacttgagagtgatgtaatgaatgctctatcctctatgttcccttctctttatcccattggtcctttccctttacttttaaatcaaagtccacaaagccacttgacatctttaggttccaatctttggaatgaagatctagagtgtcttgaatggctagaatctaaggaatctcgatccgttgtttatgtgaattttggcagcatcactgttatgtctgcagaacaactcttggagtttgcttggggtttggccaatagcaagaaaccctttctgtggatcattaggcctgaccttgtcattggtggatccgtgattttgtcgtctgagtttgtcagtgaaacatgagacagaagcctaatagcaagttggtgtccacaggaacaagtgctaaaccatccttcaattggtgtattcttgactcattgtggatggaactcaactactgaaagtgtttgtgctggagtg

SEQ ID NO: 217956 - DNA, 508 bp, Glycine max
gaaatatcaagactaagatattacataccacaataaacaaaacacaaagtggcacttccagggcaccatttctacaatgcagaaaattctagagaagatcaatgaactatcatgataaattaaagcattaagaaaaagaaaaaaagaaaacccttcaatctaacagtgtctaattaagcaacacctccttaattactttgtccaagttcatgtatgaacaaccaccaggcttggtgacctcctctgccttcctctttaactccatgaccttttctctcatcttctttcccttctctcccaccatcaattcattcactagcttctccacctcctctctcttcgcactggtatcaatttccatcccaatttcccactcattgcaaatgtatctacagtttgttggctgttctgcaaaaaatggccaacacaacattggcactccagcacaaacactttcagtagttgagttccatccacaatgagtcaagaatacaccaattgaaggatg

SEQ ID NO: 217957 - DNA, 554 bp, Glycine max
  unsure (1)..(554): unsure at all n locations
tgtcttcttcttcttcattttttgggtctctctgtttacaagcttttcagttatggcatcgaaacgcatcgtcaaggagctcaaggatttgcagaaggaccctcctacttcctgcagcgcaggtcccgtggcggaggacatgtttcactggcaggcaacaatcatgggacctcctgatagcccatataccggtggtgtattcctagtttcaattcattttcctcctgattatccattcaaaccaccaaaggttgcatttaggactaaggtattccacccaaacatcaacagtaatggaagtatatgccttgacattctaaaagaacaatggagcccagcactaaccatttctaaggtccttttgtccatttgctcactgttgacggatcccaaccctgatgacccgcttgtgcctgaaattgcccacatgtacaagactgacagggctaagtatgaagccactgctcgtagctggacacagaagtatgccatgggatgatcatgctcctnctttagctgcacanatcatgatnntatgaagaaacannaattac

SEQ ID NO: 217958 - DNA, 417 bp, Glycine max
atataaaaaaaaaaaaaaaaaaaaaaaaaaaaaaaaaaaaaaaaaaaaaaaaataaacacaaaaagacaaacaaaaaaataaaaaaaggggaaaaaacagacaaaaaaagagaaaaaaaaaaaaaaaagtaaaataagaaccccaaaacaagtatgaaagagaaattaaggaggagcgagaaaaacccataccaaagggggggatccaaccccgaaaaaaggataaaaacttaaccaaaaaaaaaatgttcattttaaaaaaaaaaagggtgggcgggtaaaaaggggggggatccacacccagggaggaaatgggtaaaacgacaccaaaaaagggtaataaaggccccacagaactgtaaaaagggaaggcatttacgcccaaaacgggacaaaaggggggggcaccccaaaaga

SEQ ID NO: 217959 - DNA, 488 bp, Glycine max
gtactttgttcattgtgaagcaggttttaattgggaatctgatataggctttggaggttcttccacttccaaggatgctttcaattatacactacagaggatttttcagtgattgagtgagtggatatgaacatggaaggatcttatgattcatcatgcaatggagaagctggtaacgaaagccttcagatcattaaatactctccttataaaccctgcaccatgatatcattatcatcaccttggtttgttctaagagtgttttatgtgagagtgtgtggcattcaggttgatgaatccaccccagagtttctctctctcaaccatattcctcttagtcctgatacccttttagaggtgaatggtgttaggagcagcatttactctgatggagaagagtcttcagttctgagaagggatagagtggataagaaatctgaggaagctacctttgtgaacactgatagtatacgttttaccgggagcat

SEQ ID NO: 217960 - DNA, 457 bp, Glycine max
gtagatgaggcactgacgttgatggaagaatttgggatcaaaccagatgtagtaacctttagcaccatcatgaatgcatggagttcagcagggcttatggaaaattgtgaggagatattcaacgacatggtgaaggccggtatagaacctgacatccacgcatatagcatccttgcaaaaggctatgtgcgtgccggacagccacgaaaagccgaggctcttctgacttctatgagcaaatatggcgtacaaccaaacgtggtgatcttcactaccatcatcagtggatggtgtgccgcaggcaaaatggatcgtgcatttagactttgtgagaaaatgcatgaaatgggaacttccccaaatttgaaaacttatgaaactttaatatggggatatggagaagcaaaacaaccatggaaagctgaagagttacttactactatggaagagaggggtg

SEQ ID NO: 217961 - DNA, 510 bp, Glycine max
ctgccattctgtgtaacaggtcatgagaaagataagactgaagccctcggtgaggtgttaaatggcgatcgccttgttagtgctccttatgaacttagtttcaagaaggagaaagactctaaggttgtatgcaagaggaagctcacaaaggagcaagttgctcagttccgagaagcagttaagaaggactattatttccagatgtactatgatgacttgccgatctggggatttattgggacggttgacaaggaagggaaaactgaccctagtgagtacaagtattttctttacaagcacattcagttcgatattcattacaacacagatcgagtcattgaaatcagtgcccggatggaccctcattctgtggtggacctgactgaggataaagatgtagatgttgagttcgtgtacactgcaaaatggaaggaaacagagactccttttgagaagagaatggataaatactcccagtcttcttctttgccacatcactcggagattcac

SEQ ID NO: 217962 - DNA, 557 bp, Glycine max
atatgtaactagctaatcatattaaatggtcatttgcagagaagacaattaattagtacaagctacttcaaataaatttcagtgactacagtaatcaaagttaaatcccatggttccaaaaacttcctcaagtgcaagcctgtgcagttatagagatagcatgacaccaattcatgaatagagtctaagcttctctagtttccaggtacacactatataacctaccttatgacagcaaaagaaaaaaataataacagacccttttctcttctcctaacagaaataatatgaactttaccaacaccttcaaaccccagctactcacacttgatggaccggtatatgtgacgaacaaagagcagggaggcacggaatcctacgctaccgagcatgaggaagaagccatagcagatacaggccatgtaaccaaagaagaacgaagtttgcataaaaccagacatatctgatcgtgcatagtagtaatacaagcaatagccgtagatgaacaagccagttgatccaccacaaagggaaagaccttcaccaccattcatgat

SEQ ID NO: 217963 - DNA, 606 bp, Glycine max
  unsure (1)..(606): unsure at all n locations
ttttcaattcatttccattttgagattataatttagattctatctgtttgttttgttgcaaattccttccttcgaagttgagtataaaattctattttatttattcctcttttcataataggtatttcatacacgggattagttaaaatttcatgtaattcagtataaagaacagaaattccagtattgctaaattgattcatgtgatttgatgaagaatggcagcaaatcggtggaatatttttcgataaaattcacggggaaattgaaaatgcttggggatggaaatgaaggaatgtctacactacctggattgaatcagatacaatttgaagggttttgtaggttcattgatcggggcttaccagaagggctttttaagtttccaaaaattgaggatacagatcaagaaattgaatttcaattatttgtagaaacatatcaattattagaacccttgataaacgaaaaagatgctgtatatgaatcgcttacatattctgctgaattatatgtatctgcgggattaatttggaaaagtagtagggacatacaagaacanactatttttgtgggaacattcctttaatgaatctctgggaactt

SEQ ID NO: 217964 - DNA, 510 bp, Glycine max
cacgaggtacgtacagttagaaatttatatttataatttcatattttttgttactgaattgaccatagaccaattccctttttattagggagtattcaatacatccataattctgagtttcatgttactcattccaagagacatgtcagattcagggcatcccaattaaattaaatggaatgacagtttctcattcggaatctgtacaataaaaatttttatcaaatcacacatcgcagtatactagactttctaattcctttagagatttatctaaaagatttgcgatataactaggaagacgtttcaaataccacacatgagttactaggcatgccagttttatatagcccatttgatatctacgtatccgagaatcaataaattctactccgcattgttcacaaaattttgggtcgtcctttttatctctgattactcgataatttccacaagcacaaatcccactttttataggcccaaaaattctttcacaaaataatccatctt

SEQ ID NO: 217965 - DNA, 570 bp, Glycine max
caacccttcaatgacgtccatggccactttcttcgcccaaacctccttcccctcccactctctctccaaaaccttcgatacccatttcgcccctgccccgaaagtcaacgtctttgtgaacttcagggcgaggaggcacgttggggtgcgagtttcgaacgcgctgatcgaaccagatggagggaagctcgtggagcttgtggtgacggattttgagagggatttgaagaagggtgaggctctttcgttgccgaggatcaagctctcaaggattgaccttgagtgggtccatgtcctcagcgaaggatgggccacacccctgaaaggcttcatgagagaagccgagttcctccaaacgcttcatttcaactcgctccgactcgatgatgggtcggtcgtgaacatgtcagtgcccatcgtgctggctattgatgatgcgcagaagcatcggatcggtgataacaaaaaggttgctctttttgattccaagggagaccccgttgcaattctcaataatattgagatttataagcatcctaaagaagaaagatagcccgaacttggggaacc

SEQ ID NO: 217966 - DNA, 475 bp, Glycine max
  unsure (1)..(475): unsure at all n locations
agcacaaccacattatattacagagagttggcatgcacaattgcaccataagtgcaagaggctgtctaaatgccatacatacagagagaggcaatgtgtccgtgcttgtgcctccccaaagttttaatttattattattattagattgggccagaggatcctcgtgaagtatgtcttagcaggagaatacataagcttaaggtttctcccaatcatgagatatatacattatgatatgatacaagattaagctggaacagcttcctgcactttgccgttgcttgagagtactaagctatcatagtaatcaaccagcaccttccatccaccagggcacataaatccatcaggaggactttctttgctccttgccaatgtgcgcatctttgtgcctgatatgaacaggaagtcctgaggccttgaagggtcaaagaatgccattntaccctgagtcttgtcatatgcagcaaccctg

SEQ ID NO: 217967 - DNA, 574 bp, Glycine max
  unsure (1)..(574): unsure at all n locations
acaacggccaactcctgaaggggcgcatcaccgtcaatctcatctggtacggcaccttcaccccgatccaacggtccataatcgtggacttcataaactcactaagcagcgcgccaaacgcgccgcttccatcgactgccacgtggtggaaaaccacggagaagtacaaggggggaggatcctctgcgctcgtcgtagggaagcagttcctacactcggcttactcgttagggaaaaatctcaaagggaaagacgtcctcgcactcgcgtccaagttcaacgaactgaaatccataacggtcgtattaacggcgaaagacgtcgccgttgagggcttttgcatgagccgctgcgggacccacggctctacccgcaacgtcaaaaacgctgcccggacagcttatatttgggttggaaactncggaactcagtgccccgggcaatgcgcgtggncattccaccaacccatttacgggccccagacgccgncgttagtcgcgcctaacggcgacgtcggagttgacggaatggttattaactnggccactcttctcgctgggcaccgtacgaaccc

SEQ ID NO: 217968 - DNA, 507 bp, Glycine max
  unsure (1)..(507): unsure at all n locations
gccctgcagtgccgccaaagcaagcctgccctaaaaattgaacagggcagagagcaagggcaagcgagtgaacatgggaacctctgcgaacgctgtcgcaggtggtcgtggcggcgcccctgtccccaaagacgtcgactacgctaattacttctgcacctatgctttcctctaccaccagaaggagatgctctccgaccgcgttcgcatggacgcttacttcgacgccatttttcaaaacaaacgccacttcgctggcaagactgttttggatgtggggactggaagtggcattcttgctatatggtcggcacaagcgggtgcgaggaaggtgtatgcagtggaagcaaccaagatgtcagaacatgcgcgtgcacttgtcaaagcgaataatctccaggatgtagttgaggtcattgagggatcgatggaagaaattaccttgccagagaaagttgatgtgatcatctctgaatggatgggttatnttcttctgcgtgaatctat

SEQ ID NO: 217969 - DNA, 496 bp, Glycine max
gtgtagtgaagcgcgaggatttgtggattacatctaaactctggaatactgatcatgctccagaagatgtaccactggcactggaccggaccttgaaagatttgcagctggattatgtagatttgtatcttatccactggcctgctccgatgaagaaaggatcagctggctttaagcctgaaaatcttgtgcaaccaaacatacctaacacctggaaggcgatggaagcactctatgactctggcaaggctcggaccatcggtgtaagcaatttttccaccaagaagctctcggatttgctgctaattgctcgtgttcctcccgctgtcaaccaggtggagtgtcatccttcctggcagcaggacaagctgcaggctttctgcaattccaaaggtgtccacctctctggatattcacctttgggttcccctggaacaacctggcttaaaagtgatgtcctcaagcatcaagttataaatatgattgcggagaaact

SEQ ID NO: 217970 - DNA, 600 bp, Glycine max
  unsure (1)..(600): unsure at all n locations
gatgcaaagtttcatcaaaccaggaataaaataaaatttgctcaagtcaacaaaggagtatactgattcacagtttcacagaactctcactcctcgatccattcacttatcaaatttacagatagatttctcagatttcaccatcccaaagttcctcaagggatctgtaggcaccataagtttcatgggcaaatgtggtacccctgagtaatcttgcctgttgaatctcagaaaatttggcgagcaggtcctcaggtatagaccagccaaaaacatcaaaattttcctttattctagtttcgtttgtactcttgggaagaacactatggcccatttgaagtccccagcgaagagctacttgtgcaggcgtcttgcctagtttctccgcaatcatatttataacttgatgcttgaggacatcacttttaagccaggttgttccaggggaacccaaaggtgaatatccagagaggtggacacctttggaattgcagaaagcctgcagcttggcctgctgccaggaaggatgacactncacctggttgacagcgggaggaacacgagcaattagcagcaaatccgagagcttcttggtggaaa

SEQ ID NO: 217971 - DNA, 412 bp, Glycine max
gcatatctatggcagaggcaaaactaaggtatgctgttgttactggagcaaacaaagggataggatttgagactgtaaaagagctggcctcaaatggagtcaaggtggtgctcacagcaagagatgagaaaaaaggccatgaagcctttgagagattgaaagagtgtggtttctctgatttggttatttttcaccagcttgatgtcactgaatctgctagtatttcttcactagtagagtttgttaagaccaattttgggaagcttgatatattggtgaacaatgcaggaatcagtggtgccaatctggatgaagtggaaggatcaacatttatatgggaggaactgactcaaaccaatgagatgactgaaaagtgcctaacacatactactatgggtgcaagaaacaactg

SEQ ID NO: 217972 - DNA, 608 bp, Glycine max
  unsure (1)..(608): unsure at all n locations
tccttttttgatttttttttttaacaattaactggaattgatttttatattaccttaaaccaagaatagttcatctcatgttctagaaattaaatttcaccagaagatgacaaataagaactttgacaattcctagcaagaatagaagataatggtcgtacttgcataagggtaaaaaatacgggcaagaggaacattctgtcatgtgttaattcatgtgtctgcatgaatgtatttgcattacatttaaaatcattcagaagtttgacaattcttgcctaatatagaagaggcccgaaggggaaccatcaggcaacagtgccaatttcacaacactagcagcaccttggtcaacggttaagatgccagtgtttttgtttatgtctgttttgacaaaaccagggcacacactgttaatgcacatgttttggtgcttcttggctagaatccttgtgtatgaattcatggctgcttttgagacaatatatgcagacaagaaggttggccaccctttggttgctaatgaaccttcnttgaagtctttgataaactctttgagtacctcgtctattctctcttctgtaagaatatcagcatcatcaagcacc

SEQ ID NO: 217973 - DNA, 443 bp, Glycine max
cggctcgagcggctcgagctgtaatttccatttccacagttactcttgtgaattagcgagatttgaagcgagtgatggctgcgaaggaagagaatcgaatatttgttggaggtttatcctgggacgttacggagcgtcaactcgagcatgcctttgctcgttacggcaaaattctcgaatgccagatcatgatggaaagggatacaggccgtccacgtggatttgggtttatcacatttgcagaccgtaggggaatggaggatgcaatcaaggaaatgcatggacgggaaattggtgatcgtatcatctcagtcaacaaagcacagcccaagatggggggtgatgatgcagaccaaggttacagaagtggctactcatcaggtggtatgggaagctatggtgcttgagatagggtaggacaggatgactgcttcaaatgtggg

SEQ ID NO: 217974 - DNA, 549 bp, Glycine max
  unsure (1)..(549): unsure at all n locations
gcagcgataaatcatgcttacttgcattagggaagttagtcaaagcgtcaagcaaacgcgggggaaaaatcaacagggattggcacgatctaaataaggaaacaaactatgaaatccacaatctatgaaactacaatctagcagtagcagttgtcccaaacaggatgtcctacgtaacaagaacaagaactaggtctctaatgtggcttctgcatttggatttcccgttaaaaacatcagcagtagaaatcagtagcgatcaagtgatgaacgagaacccctgcttgggcggtcatatggaccaggtctacccctataactccttccttcatctcgacctgccattccacttccatacctatcagcaccttctcgtggaccactgtaccggtcataccctctttccttgccataaccattttgtgggtagtctgagccagcgccatatcgatcacttgcaaatcgatctccactggttggatacctgtcaccagcatagcggtcgcggctgccatattngtagtcacgggtatcaaaacgatccctatc

SEQ ID NO: 217975 - DNA, 472 bp, Glycine max
gttttcatcgtctttgagaaatgggtgcttcgctatcggtctcggaaaaatccatccatgaattcatggtcaaggatgctaagggcagagacgtgaacctcagcatctacaaagggaaggttcttcttgtagtaaatgtcgcttcaaaatgtggatttacgaataccaattacacccagttaactgagctttacagcaaatacaaagacagaggccttgagatactggcatttccatgcaaccagtttctgaagcaggagcctgggagtagccaggacgtagaggaatttgcctgcacaagatacaaggccgcgtatcccatttttggaaaggtacgtgtcaatggacctgatacagcacctgtctacaaattccttaaagcaaataaatcaggatttctgggttctaggataaagtggaatttcaccaagtttttggctgacaagggagggaatgtcctacggcgtatggt

SEQ ID NO: 217976 - DNA, 598 bp, Glycine max
ctggtgaaatgcagtacataggtttttcatatcatccatatatatagactcttgagtcttgatagacttggtagggactgttccctagcattataataagtgatgcaacttcctcgacactaatacacatgaggccatgaccattacatgcattttaaatgatacatgaaaacacacttctaacacaactcaaaccaatgcccattaattaagttttaaataacgattccaaaacagatttctaatacaacaaacacaaaaaaacctagacatgaaatttttaagaaataatcactagaagaaacatctacaaatatacattccttatgtttcaatcatcttcaacaagagcaccaatttgaagtgattgtagagtttttcaagcctcccccaatgctctcttgatgtcattttcaatggaaaacggtgaggtggttgaaccataacgccggaggacattcccttccttgtcaaccaaaaacttggtgaaattccactttatcctagaacccagaaatcctgatttatttgctttaaggaatttgtagacaggtgctgtatcaggtccatttgcacgtacctttccaaaaatgggata

SEQ ID NO: 217977 - DNA, 537 bp, Glycine max
ccataagagataactatttcttgttccaatatcaacatttaaacctgttatttggagaagagggaacacaaatcatgaccatctttcaattcaagagaccatctagcactctaataggtttctaaataggcaagtacccaatagaaaccaccctattaagagtagagagaaggatagtaacccaagtaagaagggccatccaaccataaaaacacctaagcaaacaaccacaacataaggcagaaaagaccttacaattgacctgaaatcaacccagtgccccttaaatattaccaaagctcctacattcaccatgttccaattcattgatccaccataacacagccgattcagacagttggcaacaaacgagtggcagttgcaagtgaaaaggttgtgagttttgttctcaaaataccgcaaacttgtctgtaacgcatcgtcccatgcgattgcagtaccatactcggcatgcaggtaaccgtgcttgcatgtatgtgcagataggttaggggggaagcaacactgtctacgatc

SEQ ID NO: 217978 - DNA, 517 bp, Glycine max
  unsure (1)..(517): unsure at all n locations
cgattccagacatgaagcatagtgacttgagtacctcgggaacctcaaagcaaacctattgcttgatatacatttgcatgaccatgttgagacactttatgatcaaattcgtcacaaagcccttatccagtacacactggcatttgtgtctgttgattcgaacatgatggctaatgcattcaagacaactgttgcgggacttgagaaggaactagaagcattgattactgataatcagatacaggctcgaattgattcgcacaacaaaattgtgtatgcacggcatgcggatcaaaggaatgccacctttcaaagggttctggaaactggaagggaatttgatcgtgatgttcgttccatgttactgagatcaaatcttatcaagcatgagttcaatcttagagcattaaggaaactatgattatggactgatgataatgggaccaagttgctatnttactttttaatatagcaggctgttatcaactctaacgaagcaggattctggagtgaatca

SEQ ID NO: 217979 - DNA, 566 bp, Glycine max
  unsure (1)..(566): unsure at all n locations
gagatacaatgcactaagtttcattttcgttcaagtccgggaactatcatggctgcagtggcatccattcagtgtttcttctagccctttggatggaaagaatcaccttgctattctcattaaggttcttggcaaatggacagaaaagttgagacacaggattactgatgttgatgcacaaaaagattcatctgtcataacaacttcagttgaggggccatatgggcatgaagtaccataccacttaatgtaagtggttacaagcccttttttttttctatgttgcacacataatacatgatagaaaccttggtttagtccttatatgcatatactttcagaccaaagaagattttgagtcaacttatgctatagttcttcaactaatgaaatgattggtcattttgttctcttaggtacgaaaatcttatattagtggctggtggtattggactttcacccttccttgctatattgagtgacattctccaccgtgttagggaggggaaaccctgtcaatcgagaaatattttacttgtttgggcggtgaaaaaatcanacgagct

SEQ ID NO: 217980 - DNA, 560 bp, Glycine max
caggactgaatgaactaatggagtctaaaggtgggaaaaagaagtctagtagtagtagtagtaaatcattgttctacgaagctcccctcggatacagcattgaagacgttagaccaaacggtggaatcaagaaattcagatctgctgcttactccaactgcgctcgcaaaccttcctgatatccatccagattgatagttcattgcatgcaaccatagttttattaggttttttcttctttgttttcaattaggtttttgctgctctccttcaaactccgtctttccgaatcctctctttgtgattgtgttctgttctgcttcctaccgcgatagtttctcttctgaagcatggccatggcggtttctgcaattggttttgaaggtttcgagaagaggctggaaatatcctttttccagccgggactttttgctgaccctgagggaatgggtttaagagctcttgcaaagtcccagttggatgagatacttacaccggctgcttgcaccattgtttcatctctcagaaatgatcatgtcgactcctatggtctgtctgag

SEQ ID NO: 217981 - DNA, 432 bp, Glycine max
gcacgcctaccaagggatttattaaaatccattcgatgttcaaatggtaataggagaacaataaaagggccaaacgccctaacaatggtctaacataaaagggaaaaaacaccaaagaaaaacaatcactggctggaaaaccggacttattttcgcaagggcctaataaagacacttaagaaaactactcttcttcatcttcctctttccaacccttaagagttgatctaggtgaaccacagtcacaagttttggcaaatttttggtagacaagagaaccacccattccaagcccttcgggggtcctcttttcgcgacaggatcccttaacatccagaaaacacgtctgatcaaacaacttgcttgcaccatccacatgaactggaacagagaactcagttgggagaaaacatgccaataccctcttaacca

SEQ ID NO: 217982 - DNA, 511 bp, Glycine max
aaaccatggaagtctttctgatcgtataatgagctactatggagactcgcctaggggaatggtagaatctgcttttgaatttgcaaggatatgccgaaagttagactatcacaattttgttttttctatgaaagcaagcaacccagttatcatggttcaggcataccgcttacttgtggctgaaatgtatgtccaaggctgggattatccattacacttgggtgttactgaagctggagaaggtgaggatgggaggatgaagtctgcaataggcattggaactcttcttcaggatggattgggtgatacaattagggtttctctcacagaaccaccagaggaggagatagacccttgcagaaggttggcaaatcttggaatgatagcttctgaactccagaagggggtggaaccttttgaagaaaagcacagacattattttgactttcagcgccgatctggtcaattgccagtgcataaagagggtgaggaggtggattacagaggtgta

SEQ ID NO: 217983 - DNA, 457 bp, Glycine max
  unsure (1)..(457): unsure at all n locations
aagagattctcattattattgatggctgatggggcaaagcaatacactgttatctgtatacatgttctagctgtcgatttcctcacaacaagctttaattgggatctttctcaaaaggaacttaaaactaggctcaaacttaagcattgagtgttatcttatattacatgtgtacaataattggatatgacaatgctcatcttactatggccttgaatgccaatctcaaaattaagctcttgcttttactcctcggcaggagggtccacccatcgtccatgttcttttattagatcgatcaaggcattggttgcatgctccattgcaattccacgcttcaccacagtcttcccaacatagaggtcaatcttcccgggagtgcctcccacatacccaaagtctgcatcagccatctnccctggtccatttacaatgcatcccatgattgcaatcgaaa

SEQ ID NO: 217984 - DNA, 337 bp, Glycine max
gccccggaaattcgcaaaataaaaaacgggctttcccccagggacaaatcgtaaataaggcgcctggaaacgtggaggggggagcagattccccggggcaaagggcccaaaaactgggtcccggggggcgaaaccccccaggggtccccaaccatgggttgaaaggcagcctatccattccccagttaaaagggggggacaaccagctttaggggagccctccaaggaaaggtccagggcgggaccaactaggaaattagaacaagttcgggagggccaagaatagcttggccggcccgaataaacaagcccttataggttgccgagaagtgccggg

SEQ ID NO: 217985 - DNA, 527 bp, Glycine max
gaggtctgaattagtttcgtctcagcaagcgttggcatcttccagaagcaaaatggaggagcaggagcggttgttggaactgcagctgagtgagcttggggagcagagggcaagtgtgatgtcctacatggaaaatttgaaggatgcacagattgaagtggagagtgagagaacgaaactcagggttgcagagtctcggaacagagagcttgaacgggatctgaagatggaaaaggagcttattagtgagttggaggaggagctgaagaaagagagaacttctttggagcaggcagtcaaagaagtggctttgcttcaagaggaattggagaagaaaactgccgagtttagagaaacaagtgccgttcttcaggttaaagagtcagagcttgttgatgctaagctagaaatccagcgtttgaaatctgaaaaggcttctcttcagggtatcttggaggagatagactttgagctttccagtgctaggaaaatgcttggggatgttaaccaggaaatctatgatctta

SEQ ID NO: 217986 - DNA, 526 bp, Glycine max
gtcactaataacttttacattataatataattatattcatatttatttatataaaatgaaatacaagtgcaacagcctcatataagagtttcccatatgagttggcagtagaaacgaaataacatctgcataatcacacaagtgaagtgaagctacacaacaagttcattgcttcactcacatcataacccccatatttatttatttaggtaataacacactcgacagtaaagataaataacaacagaacataaaaaccagaagtacttatatctccctcacttcatcttcgttctcgtcctcactccagcagcatttcagaatagacctaggagatgcactaccatcgcagccttgaacaaatgtttggtacacaactgcaccacctactccaagctcttcagtgctcctgtcaccacagtagtatcctttgatgtctaagggaaatttattaagtttctcaccatgcatgtcaatgtgcaaagcaacagaaaactgtggtggacaaaagcaagctaaaatcctt

SEQ ID NO: 217987 - DNA, 546 bp, Glycine max
  unsure (1)..(546): unsure at all n locations
aacgaaacatggcaagagtggtggcactccaacagaaccaactatctttctctaccttagcttcctctctttctgacttcagtggaaccagacttcaaactcaacttcagttcaagagaaagcaatgccatccaaaagggtctttctacgtctccgcatcgagcaccaagaaaatcctaataatgggaggcaccaggtttattggtgtgtttttgtctaggctccttgtcaaagagggtcaccaggtgactttattcacaagaggtaaagcgcctgtcactcaacagttgccaggtgaatcagacagtgattatgctgatttttcttccaagatcttgcatttgaaaggagacaggaaggacttcgactttgtaaaatccagtctctcagcagagggatttgatgttgtttatgacataaatggacgcgaggcagatgaagttgaacccatactggatgctctgcctaatctggagcagtttatttactgctcttctgccggtgtctatctcanatctgatctattacctnacgcagagactgatg

SEQ ID NO: 217988 - DNA, 531 bp, Glycine max
  unsure (1)..(531): unsure at all n locations
acactatactccggtagccgctgtgttggtgagtgagttgtggtgcttttgaaagatgaggccgattctgatgaaaggtcatgagaggccattgacgttcctgaaatacaacagggacggcgatctcctcttctcctgcgccaaggaccacaaccctaccgtctggtttgccgacaacggcgaacgcttgggcacttatcgcggccacaacggcgccgtttggacctgcgacgtctcaagagattcggctcgactcatcacgggaagtgccgatcagaccgccaagctatgggacgtgcaaagcggcctgcaattatacaccttcaacttcgattccccggccaggtccgtcgatttctctgtcggcgataagctcgccgttatcaccactgaccccttcatggagttgccctccgcaatccatgtcaaacgcatcgctaacgatccatcccaacagatcggggaatctgtgcttctcattaagggtcctcagggaaggattaacagagctatctggngaccccttaacac

SEQ ID NO: 217989 - DNA, 517 bp, Glycine max
aagccaaaaatgcataatttcatttaaaaaaaaaactcttccatattaccaatatataattaaaatgttggttgagaataattaaatgctaacttctaggaaccacctaattttaaccacaaaccatcaggcactatattttgatgttgaaataatctgggtcgaagtggtgcaaccgtacataaccatcttcacctccacttgaaaaactttttccatcagggttaaaagccaatgcattaattggtccaaaatggcctttcacacccccaatttcttcttgaagaatcttgtcaaagaatttggcttcaaatttgccagcacgatgatcagtagttgtaacagctgacgcatcctgaccacctccaataaccacatgatcaagaagaggtgacatcgtaactgcattgacagggcgttccgtgacataagtcttgataagagtcaatgacctagtatcccaaagcctagcagacttatcaagggaaccagtaagggaatgtgaatcatcggcaga

SEQ ID NO: 217990 - DNA, 363 bp, Glycine max
cggctcgagtgtatctgaaacgttgtcttaaggtaagtagattcattgtagatgttcttttactgaaacaaagagaaaacgctgaaatcacctgaaactgaggctaatgaggctcgagatataaatgccctgtgttaaccaaaagaagggggcggatcacaagaagtgacaaaggctccattgaccaaatctcccgctcccgttattcgggcaagacagttcgcctctgagcctgttcaaactggactagttgttatcgactcaacgaaacgcctcggtcggtggcatggcggattaatccttggagccagactttcggcaggagctgtgccctacattacatctgaacttgattgacaggga

SEQ ID NO: 217991 - DNA, 308 bp, Glycine max
aatattatattcaaaggaaaaaaaaagatactaaaagatactaattataagaaaaagaaagggaaaccataaaggccttaaatgacgaatcaatggtttactacccgcgcctggggaaaaagagttccatctgggcgggaaccgctaccttcaaaagggctcctgcttccccaaagaatggcttgggaaaacacatgatttccccgaattgagggccattcgggaaaaagcaagcgcgtaactcagcaggaaatcaccttacccgtccaatgtctaatgaaccaagataaccattcgttccagggtaa

SEQ ID NO: 217992 - DNA, 560 bp, Glycine max
atttgtgggaagaggctgaagctcgacgtgattcatgaaaccgatgtgtataagtgggatcccgaggatttgcctgggcaatctatattgaaaacgggagataggcaatggttctttttctgtcacagagataggaaatatcctaatggtggaaggtctaaccgagcaaccagacgtgggtattggaaagcaacaggaaaggatcgtaacgtgatatgcaattctaggtcagttggagtgaaaaagaccctggttttctacgcaggcagagctcctagtggtgagcggactgattgggttatgcatgaatacaccttggatgaagaggagcttaagagatgccagggtgttaaggactattatgcactttacaaggtttacaagaaaagtggacctggtcctaaaaatggtgaacagtatggtgcaccatttaatgaagaagagtgggcagatgatgacatagtagattttaatattaactcagctgatcaggaagctccaaatgatgctgctgataatgttaatgtaccactgccttttcttgatgatgaaatcaataa

SEQ ID NO: 217993 - DNA, 306 bp, Glycine max
tttgttttttttttttttttttttttattttttatttgacattaattatttataattaaagtgcttacttcaaccaacagccttaaaaactgaaactagtggacaaaaagtggccacataatacaacacatacacaccccttcaagatgattcacatgcaaaatagcgctccactgataagtgcttacgcaacactgaaagaacttgctgtgctctacacaaaaattcttgctcccttaaaggcacactatcgtcttcagcttgaaccttggctatagccagctcgtcgtctaacacagatgctgc

SEQ ID NO: 217994 - DNA, 521 bp, Glycine max
cggctcgagcggtgatcaacggcgccggctgtagtgactccaccttgggcggccacctggcccgccggctggtggaaatacggcgtcacacgactgtgttctctcgttcctcggggacattcaacgctgtacgcctgatgggcacctcttatcgctggagctcatgtcatagcttgtcctttctctgattctaggaaaatgataactgcgccttgcactggtacagggccacattacaagaggcactgtgctcactgatacactgcgtctgcctcacacaacagctattggtcatagctctagcgctcatcgagaactggccgctaatatgcatcgcacggcgtgcccaactacaactattacggcaccagtactatgctccgatgcgccatgggattacccgattgcagacatgagctcaggtgctgtcagaccatttcttgcttgcaggctgtggtgaataacttggaagatgctcatgagttgactgatacagcaatctcaactgcgctgaaagaaag

SEQ ID NO: 217995 - DNA, 499 bp, Glycine max
aaaaagaacgatgctttacttaagaataatcgaaatgaacaaaggtgataaacaaaggtgaacaaaagtgaaagaatttacacaaacaagtggggagtcagtttagcataaatgtttcaagccattaacaaaggtaaattccctacaagggcatcatctcaaatgattctgactttcatagagctaaagggcaactgcagcaatttagtcataggataaattctgaagattactgaggattgggaggacggctattggcagcataaacccttgagccccattcaagcaattctttactggtgtcatccttatgaacaatcacctcaatgaagcatacggagtctttcttgggtcctgtggctgtggcaattgcttcaactagctcctcttcacagaacaccttggcagtccagcatttcccttcaccattggggattgcatgaatcaacccagtgtaattccagttcttaatcacattgtacggtccatcatgaatttc

SEQ ID NO: 217996 - DNA, 445 bp, Glycine max
tccaactccaaggacgaccctgccaaggaagctgccaacttcacatcccaagtcattatcatgaaccatcctggccagattggtaatggatacgcaccagtccttgactgccacacttctcacattgctgtgaagttttctgaaatcttgaccaagattgacaggcgatctggtaaggagcttgagaaggagcccaaatttttgaagaatggtgatgctggtatggctaagatggatccaaccaagcccatggaggttgaaactttctctgagtatcctgcccttggtcgttttgcttgtgagggacatgcgtcagaccgtacctgttggagtcatcaagagtgttgagacgaaagaccccaccggagctcaggtcacaaaggctgacgccaagaagaagtgattgcattttggcaatactgctagcacatgtgatcatcgacgt

SEQ ID NO: 217997 - DNA, 464 bp, Glycine max
aacagttaacaaaacttccttataaattaaatgcaaatttaagacatccctcctcagcagcaaaggaaatggactaaaaccctatggctgcttgtgaatttgaaaatctcagacttttaccatcaaaacaaaaaacagtactcatcaaaaacaaacagcaacgaaaatgttaccgccgatcaagaacccagttttgaaggctacggctacatgaaatcggcggacacttcaaaatataactggtaaaacaaacacctaagactctgcaaagataaactactgtaaaggaacaagtttttttgaaaccacgttgatgatcacatgtgctagcaaaattgccaaaatgcaatcacttcttcttggcggcagcctttgtgaccttggctccggtggggtctttcttctcaacactcttgatgactccaacagctacggtctgacgcatgtccctcacagcataacga

SEQ ID NO: 217998 - DNA, 437 bp, Glycine max
acaacataaaaacccaacttgaattgtcgtaattttcaaacaaaacatctatcaatatttcattcaaatctcaattcaaaattggatttagaattcttaatttgtatatttaaactttcttaaagtaggagttctagcggttgactcgcttttttcacatcgtgtttcattattaagaaacggtatcaccgataaaatacgagcttgatgtatagccattgtcattaatcgttgttgttttaaggtcaatctatttacgcgtctggataatatctctccttgttcactaataaatcggctaattaaacccatgtttttataatcaatccgggcccacgattggatcgggggcaaacgcctacgagaagatcgcttggatttcctaatgagtcgctcagatttgtgcatggcttatctatccctatccaaagatgaca

SEQ ID NO: 217999 - DNA, 577 bp, Glycine max
gacagaggaagcatatccctacacaggaaaagatggtgtctgcaaattctcagctgaaaatgttgctgttcaagtccttgactctgtgaatatcaccttgggtgctgaagatgaactaaaacatgcagttgcatttgttcggccagttagtgtggcctttcaggtggtgaatgggttccatttctacgagaatggagttttcactagtgacacttgtggtagcacttcccaggatgtgaaccatgccgttcttgctgttggatatggagttgaaaatggtgtcccatattggctcataaaaaattcatggggagaaagctggggtgaaaatggctacttcaagatggaattggggaagaacatgtgtggtgttgcaacttgtgcatcttatccaattgtggcataaattgcataacaatatggtccctggtgactaccaccttgtcatgcttcagagtttagagcgtattgctgatgccagtattgatgaatgatgattaaagattagtgtaattggatgataaaaatgctcctagttgggtggcatgatgttaaaataagctagagttgttgaaat

SEQ ID NO: 218000 - DNA, 442 bp, Glycine max
  unsure (1)..(442): unsure at all n locations
agcaaaaacaatgctatcttataactgatatttgaagcgggagcattaatacaatacaatatgtaactatgaactatcaatatatgaacgctattatgtctgtgatacacacaattaaggccataatatacttatgtgatttacaacaacttctagcttattttatacattatgccaacccaactaggagcaattttcatcatacaattacacttatctttaatgatgattcatcaatactgggatcagcaatacgctttaaactctgaagcatgacaagggggttgttaccagggaccatattgttatgcaatttatgccacaattggataagatgcacaagttgcaacaccacacatgttcttccccaattccatcttgaaggggccattttcaccccaactttgtccacatgaaatntttatgagccaatttgggacac

SEQ ID NO: 218001 - DNA, 528 bp, Glycine max
  unsure (1)..(528): unsure at all n locations
tttccctcagactgagtcctgcgagttgctcatcattgatagaactattgatcagattgctcctgtgatacatgaatggacatatgatgccatgtgccgtgatttgttgaatatggagggaaataaatatgttcatgaggttcctagcaagactggtggtccacctgagcgaaaagaggttcttttggaggatcatgatcctatatggcttgaacttcgtcatgcacatattgcagatgctagtgaacggctgcatgagaagatgaccaacttcatttcaaagaataaagctgcacaaatccaacatggttcaagaggtagtggtgaaatgtcgacaagggacttacaaaagatggttcaagcacttccacaatacagtgaacaaattgacaagctctccctccatgtagagattgcaggaaaaattaacagaatcattagggagtcaggacttcgggaacttgggaagctagaacaagatcttggttttggagatgcanggatgaaagatgtgatcaaatttttgac

SEQ ID NO: 218002 - DNA, 420 bp, Glycine max
gcccgggaaaaacatataacggtctttcgaatctgaaaaactactttcattattttggctacatctccaacgtgtcctcgaagtcgtcgaattttagcgacgatttcgatgatgcgttggaggcagccgttagagcctaccagaagaacttcaacctcaacatcacaggggagctcgacgaccccacgatgaaccaaatcgtcaagccacgctgcggcgtggctgacatcatcaacggaaccacaacaatgaactccggcaagacaaacaccacggattcaccgacgttccacacggtagcgcattattctttctttgacggccagccgcggtggccggtggggacacaagaactaacctacgccttcgatcccgataacgctctcgacgacgtgattaagaccgtgtttggcaacgcgt

SEQ ID NO: 218003 - DNA, 428 bp, Glycine max
ggaactgtatattattattctttaatagaccatcacgcaaaaagaatgctaaggaatgatggtacaaagcgtaccgtatcggaccaaaacgaaatcctatacactacgtatccgtatacccgcgtgcgtatcagaaacgccccccctgtacaaaactcccaaacaaccaaaaaaaaaaaacccgtcctacaaaaactcacacgtgcaatccaaacacaacgaagaacaaaagagagaagaacacaccgcacgtggctcccacgtgccgaacaccaccatcgctcgtgtcgctctcacgcgaagaggtagcaggagtcccagtgaaattagggttggaaccgtagagaacctgaatcccttgtatatcatcttcgttgagctccaccttcctcgtcctcgcggtaatcgtagggtacataatagcatct

SEQ ID NO: 218004 - DNA, 461 bp, Glycine max
gatcgacgtgctcggtggccgccctttttttttttttttttttttttttttttttttttttttttttttttatcttgggtaaaaagaaagggggtcattctaccctggcactacaaagaaacatgttctttacacaatataaacacttaagagtttagaccgttggcttaatgggctccaagtccaagcacaaacattaaaattaaagaaaaaaagattggatataacaagacattacaaagcaaccatccttagccattatgtgcacaaagtattggaaaggaagtagcataacaacgactttttaagagctatccctcaggaagaagaactctcctaaaaataaaaattaatgaataccatcaatcaacaaatttctagctctgtgcttggtccacgtttacagaacttggactggaaggactcaactttttggccctggtcaaaagcctcttgaatga

SEQ ID NO: 218005 - DNA, 552 bp, Glycine max
cccaattcctaattgtttaaacctaattctcatttcttcatcgttcgattcttctcctcctaaagatgcagatcttcgtgaaaactttgaccggtaagaccatcacccttgaggtggagtcctccgacaccatcgataacgtgaaagctaagattcaagacaaggaagggatcccacctgaccagcagagacttatctttgcgggtaaacagcttgaggatggtcgaacccttgccgactacaacatccaaaaggaatccactctccacctcgtgcttcgcctcaggggtggcatgcaaatctttgtcaagactttgactggcaagaccatcaccctcgaggtcgaatcctcggacaccattgataatgtcaaggccaagatccaggacaaggagggtatccctccagatcagcagaggttgatatttgctggtaaacaacttgaggatggaagaacccttgctgattacaatattcagaaggagtctaccttacactcggttcttcgtttaagaggtggcatgcagaatttcgtcaagactttgacgggaa

SEQ ID NO: 218006 - DNA, 514 bp, Glycine max
cgctgaaacgagttcaatacatcattttaaaacataataaacagcagcacttaaaccagagatgcaaagcacaagttcaagggagacactgaacaaacagataagacatatgagaacacttcataaaagggattccccttagcaaccaccacgaaggcgaaggacaagatgcaaagtggattccttctgaatattgtaatctgccaaggtacgaccatcttccaattgcttcccagcaaaaatgagcctctgctgatctggagggataccttccttgtcctgaatcttagctttcacattgtcaatagtatcagagctttccacctccaaggtaatggtcttccctgtcagagtcttcacaaatatctgcatacctccacgaagcctcaacaccaaatgcagagtggactccttctggatattataatcagcaagagtacgaccatcttccagctgcttcccagcaaagataagcctctgctggtctggtggaatcccctctttgtcctgatct

SEQ ID NO: 218007 - DNA, 497 bp, Glycine max
cccaattcctaattgtttaaacctaattctcatttcttcatcgatcgattcttctcctcctaaagatgcagatcttcgtgaaaactttgaccggtaagaccatcaccctggaggtggagtcctccgacgccatcgataacgtgaaagctaagattcatgacagggactggatcccacctgaccagcagagacttatctttgcgggtaaacagcttgaggatggacgaacccttgccgactacaacatccaaaaggaatccactctccacctcgtgcttcgcctcaggggtggcatgcaaatctttgtcaagactttgactggcaagaccatcaccctcgaggtcgaatcctcggacaccattgataatgtcacggccaagatccatgacatggagggtatccctccagatcagcagaagttgatatttgctggtcaacaacttgaggatggaagaacccttgctgattacaatattcacagagagtctaccttacac

SEQ ID NO: 218008 - DNA, 467 bp, Glycine max
gtgctcggtggtcggcctttgttttttttttttttcgctgaagcgagttcaatacataatttcaaaacataataaacagcagcacttaaaccagagatgctaagcacacgttcaagggagacactggccatacagatcagacgtatgagaacacttcataaaagggattcccgttagcaaccaccacgactgcgaaggacaagatgcagagcggattccttctgaatattgctatctgccaaggtacgaccatcttccaattgcttcccagcagagatgaccctctgctgatctggaggtgatccttaattgtcctgaatcttagctttcacatcgtcattagaatcagagctttgcacctcgaaggtaatggacttcattgatacagtcttcacagagatctgcatacctccacgatgcactatgaccaaatgcagagaggactccttctggatagtacaatcagc

SEQ ID NO: 218009 - DNA, 540 bp, Glycine max
ctcgagccctttctatcctacttgctacttcccacttccattcttttcttaaccagctaggatggtgagtgttgaagagattcgtaaggcgcaacgtgcagaaggccctgccactgtcatggctattggcaccgccactcctcccaactgcgggtgtcaaagatcctctcctggctgttacgttcacatgagcttctgcgggcacataaacaggctgatccattccttatctctcatgaggcattgcccgtacatttaccttcgatacacgtgcttaaacgggcagatcctgcaagagaatccgagtgtttgcgcttacatggcaccttcgatggatgcaaggcaagacatggtggttgtggcggtaccaaagttgggaaaagaggctgcaactcacgcaatcatggaatggggtcaaccccagtccaagattacccatctgatcttctgcaccactagtggtgtcgacatgcctggtgctgattatcagctcactaaactattaggccttcgcccctacgtcaagcgttacatgatgta

SEQ ID NO: 218010 - DNA, 470 bp, Glycine max
gtgtaagcttaattgaaaaaatagtataacaagttgttatttactagtatacaaacagaagcatttgcagggcaggggaaaaaaaatcgaaacacaatacgttttttcaaaccggccagccaagaatacatatgaaaaaagaaagatttgttctcttgctcaatatatatgatcagagagtgacactgcggagcacaacagtctcaacggtgagtccagggccgaaaccaaatagcacaccccagtcaagaccttcaccggttgtgccaagtccattttctattgatttcttcctcatttgatccaagatgaatagcacgcatgcacttgacatgttaccatactcgctgagcacatgtctagtagcttccattttttcaggcttcaggcctaacttagcctcaacttggtccaaaattgcgggtccaccacggtgtgcaatccagaagatagaattgtaatcggagatt

SEQ ID NO: 218011 - DNA, 487 bp, Glycine max
ttctcagtctctgtgtttgcggctgaggattccgaacgagtgaccttcttcgtttctcgcaaagtttaagtaatcatgggtaaggaaaaggttcacatcaacattgtcgtcattggacatgtcgactctgggaagtcaactaccactggtcacttgatctacaagcttggaggtattgacaagcgtgtgattgagaggttcgagaaggaggctgccgagatgaacaagaggtcattcaagtatgcctgggtgctcgacaagctcaaagctgagcgtgaaagaggaattaccattgatattgctttgtggaagtttgaaaccaccaagtactactgcacggtcattgatgctcctggacatcgtgactttatcaagaacatgattactggtacctcccaggccgactgtgctgtccttattattgactccaccactggtggttatgaagctggtatttctaaagatggacagacccgtgagcatgctc

SEQ ID NO: 218012 - DNA, 450 bp, Glycine max
aacaaaacttccttataaattaaatgcaaatttaagacatccctcctcagcagcaaaggaaatggactaaaaccctatggctgcttgtgaatttgaaaatctcagacttttaccatcaaaacaaaaaacagtactcatcaaaaacaaacagcaacgaaaatgttaccgccgatcaagaacccagttttgaaggctacggctacatgaaatcggcggacacttcaaaatataactggtaaaacaaacacctaagactctgcaaagataaactactgtaaaggaacaagtttttttgaaaccacgttgatgatcacatgtgctagcaaaattgccaaaatgcaatcacttcttcttggcggcagcctttgtgaccttggctccggtggggtctttcttctcaacactcttgatgactccaacagctacggtctgacgcatgtccctcacagc

SEQ ID NO: 218013 - DNA, 542 bp, Glycine max
gggtcgattgggtccccaagctgtttcttctctgtttctgacaaactttataacccttatcaaacatgagtggtcgcttttctcgcacaatttatgttggcaacctgccctctgatataagagagtcagaaattgaagatctattctacaagtatggccgtataatggatattgaattgaaggttcctccccgccctccatgttattgctttgttgagtttgataatgctcgagatgccgaagatgcaattcggggtcgagatggatacaactttgatggttgtcggttaagagtggagcttgctcatggtggtagagggccatcatcaagtgatcgacgtgatatggagaagacggaagcggatgcttgagaaccaagatctatcccaaccggaggctctgcatgaccccgagcaaccgatacgcgccatgtgtctgcgacaaactacctgaatcggttgattggaggaaggcatgtgctgttcctccagtcaaagaccaaagaagctgtgggagctgatgggcattctcagcaatcggtg

SEQ ID NO: 218014 - DNA, 459 bp, Glycine max
agaaaagaaaaaaaaaaagaactggactccttcaattagtgcattgtttcttttcttcaaatggtagcaagaagacattgttaatttgagagatggcgagttacgaggctattaagaactttgatgatgatgatgatgatgatgatgatgtggagatggcactcccccatagccagatctctgaatcaagatctgccactgtttcttcccccattggccaaactaccccgcttcacattcacaacattattgaggaacaacgcattatctccaggcaccaacctcaacccaaatctccgcgtctggtttctcttgatgttattcgtggtctcaccgtcgcgctgatgatacttgttgatgatgctggcggactcattcctgcgctcaaccattccccatggaatggtttaacactagctgattatgtcatgccatttttctattattgttggtgtttcg

SEQ ID NO: 218015 - DNA, 517 bp, Glycine max
ggtggatcttagctctgatggatctggccaaattccatatgaacttattagggacacacttcagatcagtgatgatgaggtggaactatgggtagttagaggattaactgctaacttaattgactgtaagatggaccaaatgaatcaagttgtagttgtcagtcatcctactgagcgtgtgtttggtcagcaccaatggcaagcactgagaacaaagctagtgacatggaggggaaacattgcaaatgtgatcagtaccattcaggccaacaaaataacggaggatgggtcccaggcagcccaaggcttggtagttcggtgaggacgattgagtgaagcaattatctgagtatctagattttatccaggtggaatttttttatcttaaacagaggataagagtgtaatttgctttgttgcaatttatttttccatttattttagttggctggtgactctaatttgtactaaactttggcagagccattttgattgaagtttttccatttttaattta

SEQ ID NO: 218016 - DNA, 482 bp, Glycine max
atttcacccttttagcatttgtacattcctttcccttccttgaatcgttcttaattgcgagaggggatatcggagaagttgattggcctcccattaattgcaggtctgaatgatctgatggagtctaaagttgggaagaagaagtcgtctagtagtaagtcccttttgtacgaagctcctctcgattacaccattgaagacgttcgaccacacggtggaattaagaagttcagatctgctgcttactccaactgcatccgcaagccatcctgagattccctaggttgtgtgacgacatagcccccgtagtcttgcatctgctatattattctagtctcttcttttcccttttcttgttctcttccttgcccttttgttctctctacctatacagcaagactttgtttctttttgagtcaagatggctggctcagctattggtttcgaaggctacgaaaaaagacttgagatatcattttttg

SEQ ID NO: 218017 - DNA, 485 bp, Glycine max
aacactaaaatagtaactcctcatgtaatgattgtacgtacatatcttgtagtagagtaccaaaaacagatgtgatcactatctgtacattgtacatatcttgcaaactaagggaagattttatgatctaccaagggacaagttagccttgcaatggctttgggagcaaaaagatatcaaaatacaataccccccaacacacacacaactttcttcattacctctctctcttagtttgcaggaacaatacccgcctgcatcacaagctgctcagacaaagatgagaggcgagcaactcttgcttttacctcttcgaaacattcagggttattggtgtcggggatcaaatcgggggctttattaccatcagggacactgatgtagttatcagcttcaacactcatgatagctttgttcagaagttgtcgactcatttcagccagtttttgtagtgcattggtggcagcttcaacttcaagctgagc

SEQ ID NO: 218018 - DNA, 558 bp, Glycine max
  unsure (1)..(558): unsure at all n locations
cataaaaaatacttagttaaaaaaacgaaaatactgtattgcaattgtattgcaattcgaaacgaaatatagttcgagatcattgtattatttttgtactatattaatcttaatcttaattggaacgaaatctttcaaaattggatttctaattcttaatttatattttcgttttttcgttcttttctttttcttagattataatccgaaaacaaaagagttaagtgaattaaaaacccaagggaggttcatggccaaaggtaaagatatccgagtaattgttattttggaatgtaccggttgtgataaaaagagtgttaataaggaatcaacgggtatttctagatatataactaaaaagaatcgacagaatacgcctagtcgattggaattgagaaaattttgtccccgttgttgcaaacatacaattcacgcagaaataaagaaatagatcaaattgatcgcttgtgtgttacccttcgaaccaaagaacttaacatgtaaaatgatctatntntcttatctatatagatagatctatctgtattctatcattta

SEQ ID NO: 218019 - DNA, 481 bp, Glycine max
acaacataaaaacccaaattgaattgtcgtaattttcaaacaaaacatcaatcaatatttcattcaaatctcaattcaaaattggatttagaattcttaatttctatattttttttttcttaaagtagtagttctagcggttgactcgcttttttcaaattgtttttcattattaagaaaaggtaacaaagataaaatacgagcttgttttatagcaattgttattaatcgttgttgttttaaggtcaatctatttacgcgtctggataatatttttccttgttcactaataaatcgactaattaaacccatgtttttataatcaattcggtcccccgattggatcgggggcaaacgcctacgaaaagatcgcttggatttcataaagagtcgcttagatttttccatggtttatttatccctattccaaaaatcacatttattacaagaaatactataaaggatttgttttttattctga

SEQ ID NO: 218020 - DNA, 509 bp, Glycine max
ctaggattcccaaggttcaacagttgttgcaggacttcttcaacggaaaggaactttgcaagagtattaacccagatgaagctgttgcttatggtgctgcagtgcaggctgcgattctcagtggcgagggtaatgagaaagtgcaggatcttcttttgttggatgttactcctctatccactggtttggagactgcaggaggagtcatgactgtgttgattcccagaaacacaaccattcccaccaagaaggagcaggtgttctcaacctactctgacaaccagcccggtgtgttgattcaggtctatgaaggtgaacgaacgaggactcgtgacaacaatttgcttggcaaatttgagttatctggaattcctcctgctcccagaggtgttcctcagatcactgtttgcttcgacattgatgccaacggtatattgaacgtgtctgctgaggacaaaaccactggacagaagaacatgattacaattaccaacgacatgggcaggctt

SEQ ID NO: 218021 - DNA, 464 bp, Glycine max
tgctcggcggccgccctttttttttttttttttttttttttttttttttttttttttttttttttttttttttttttcttgtttttttttttttttttttttttttgggccaaaacctcaattgttggcccaggtaaaaacgggaaaaaggcccttaaacaaaaaccaataatctaaacaccacctaaaaccaaaaggccccccgctaactaaaaactccaaggggggctagcaaaaagcaaaaaccccccacgagaatctctacgcaaaccaagctccccaatttggggcccaagcccccttccactggacattgcaaggcccaccccaaccagggggccccccgcattacccacagccccctgggcccaattgggcatactgggctaacaaaagcttgccaagccccttggggcaaccccaaaacgatacgccccaaacaaaggggggcccattgcccctgg

SEQ ID NO: 218022 - DNA, 551 bp, Glycine max
tggtgctggttctgatgctggagcccttctggtggatgggcttggagatggacttcttttggaagcgccagacaaggattttgaatttattagaaacacttctttcaatttgttgcaaggctgcagaatgagaaatacaaagacagagtatgtctcatgtccatcctgtggcagaacattgtttgatcttcaagaagtaagtgcacaaattcgggagaagacatcacacctccccggtgtttcgattgcaatcatgggatgcattgtaaatggaccaggggagatggctgatgcagactttgggtatgtgggaggcactcccgggaagattgacctctatgttgggaagactgtggtgaagcgtggaattgcaatggagcatgcaaccaatgccttgatcgatctaataaaagaacatggacgatgggtggaccctcctgccgaggagtaaaagcaagagcttaattttgagattggcattcaaggccatagtaagatgagcattgtcatatccaattattggacacatgtaatataagcatacactcaat

SEQ ID NO: 218023 - DNA, 460 bp, Glycine max
ggcactattctaagagattctcattattattgatggctgatggggcaaagcaatacactgttatctgtatacatgttctaactggcgatttcctcacaacaagctttaattgggatctttctcaaaaggaacttaaaactaggctcaaacttaagcattgagtggtatcttatattacatgtgtacaataattggatatgacaatgctcatcttactatggccttgaatgccaatctcaaaattaagctcttgcttttactcctcggcaggagggtccacccatcgtccatggtcttttattaaaacgatcaaggcattggttgcatgctccattgcaattccacgcttcaccacagtctttccaacatagaggtcaatcttcccgggagtgcctcccacatacccaaagtctgcatcagccatctcccctggtccatttacaatgcattccatgattgc

SEQ ID NO: 218024 - DNA, 376 bp, Glycine max
ggctcgcggagtgtcggcatcagaagcctgtgaggacatcaaggacaggggaggactcgagacagaggaagcagacccgtacactgcaaaagatggtgaatgcaaagtctgagctcaaactgttgccgtacgagacactgactgagacactatcacctagggtgccgagaatgaatcagagcatgcacgcgcattggatcggcacggctactgttgcctatcaggtggtgcatgggctccatttatacgagactggagcctacactagtgacacttgcggtaacactcaccatgatgctaaccatgccgcgcttgcatgaggagtcttgagttgaaattggctacacacatcggctcataaaatacttacggggag

SEQ ID NO: 218025 - DNA, 482 bp, Glycine max
aaactgcaagcgttgggagaaaggaaggaagaccttatcatctccgaatttcattttcagaagcctctttgggaatcaaatccgaagcatgatgcattgtgcgagcattgtctcggctccgtcctacgcgttcccttttctctctggctccgcttccactactccaactgcgatctcgctcactaagcgcagttggaagccacctccgagcatggcaaaaggcccagtcagagccaccgtttctatagagaaagagaccccggaggccaatcgtcccgaaacgtttctcagaggagtggacgaggcccagtcttccacttcggttcgggcccgcttcgagaagatgataagggaggcccaggacaccgtgtgcagtgccctcgaggccgctgatggtggggcccagttcaaggaggacgtttggtccaggccccgtggcggcggtggcattagcagggtccttcaagacggtgccgtttggg

SEQ ID NO: 218026 - DNA, 523 bp, Glycine max
tcactgctcggtggccgcccttttttttttttttttttttgtgcaatactggcattaaagaagctgccttttgttttcttacatgggattgaggagttacttgtagaaagaacaatggttggcagtaggtatactacatacgcagcctagacatttgtaattttctgcattttcacgctttacgcggatgactctagcaaaatacgtgatttacaatccacctagtacaacaagctaacattctgactcatcataacaagcacttgatatacaccgataaaagaaacaagctcccttattattaaattaaaaagctgacaaattggggggtcaactgatgaattagatccattccttggggttgatgcatgcgtacaagagtttccattcttcgattgcttctttcggtttatgatcgtattcccaccgagcagtcagtgggagagaaacaagtatactctctattctccctacagttctcagtccaaatgttgtacccctatcatataccaaattgaattca

SEQ ID NO: 218027 - DNA, 519 bp, Glycine max
atctatctatctatctccatcttcatcactcccatggacaacgacacaaacacaacaccaaccaccacctcagaaccacaaatagcacacgattttcccggtctcatccgtgtcttcaccgatggtcgcgtccaacgcttcaccggaaccgacgtcgttccaccctccaccactccccacattacatccaaagacatcacactcctccaccctcactccgctactctctccgcacgcctcttcctcccaacaccacaaaccaccagccgacgcaacaacaacctgcctctcttaatctacttccacggcggcgccttctgcgcctgctcccccttcaccgcaaactaccacaactacgtcgccacaatcgtcgccgaagccaaagtcgtcgctgtctccgttgactaccggctagccccggagcaccctattccggcagcgtacgaggattcatgggctgcactacagtgggtggcgtcacaccgtaacaaatatggaccagagccttggttgaatgag

SEQ ID NO: 218028 - DNA, 540 bp, Glycine max
cttatataccttagcttttgaagaagttgaatgaaaagagcttttataaaagtgcgtaagttgattttagtttacgtgagaatatcatcttctcatgtaagtacttatagagaagcttatccagagaggaccttatatgcttttcttatgtgaagtataatcctttcttttattctaagaaaataataacagggtcttgcagtggaaaagggcgacatcacaagaggcactggtttcactgctacactgcctctgcctcacacaacagctattgatttcagctctgtgcctgatgtgaaaggttcatcaaagagcttcccaaagcatgaaacgcgacacctttcagaacacaagaatattgccagatgtgctaggtttagtgctgatggaagatttgttgccactggaagtgcagatacatcaataaagttatttgaggtttcgaagatcaagcagatgttgctgccagaggcaaaggatggtcctgtgcggcctgtcatacgaacatattatgatcatatacaaccataaatgatctgg

SEQ ID NO: 218029 - DNA, 472 bp, Glycine max
ggttcatccaatccaactttaagctactttcgtgaaaatatggaatatgaaacagtagtagctgttaagaattgtttgaaagatggagcaaaacaaatcatcagaaatagataatcttccaattccgagagctgaatgcattaactacttctgcaggcaaaaagccttaggctactactagaaattaaagaaaaataaatggaaattcccagagttaactttcaataagtgataactttaattagtctgtaaatgcattcagcctccttcccattaattatacagttttcttgcagaaccgaactgacctatcagttccacaggaaataaaagcagactctattggtgagtgttcaagccagctgggtgcaccaacatgattagaaggccactttgctactttttctggtgtcatcgcatcccagataacgatctcattgctcagttcatctatggatagaataaattcttc

SEQ ID NO: 218030 - DNA, 520 bp, Glycine max
gcaatatcagagtattgtggatgagaaattgaaagagattggacctatgcagcacgcactgggcaagctgcggactacaaataatgccggccggggtggtttgtgttcatctgaggatgaacttaacagtgttatatatagtttacaataccgcatacagcatgagagcattgctttgactgaggaaaaacaaatcctgcgagaaatcaaacagcttgaggggacaagggagaaagttattgctaatgctgcaatgagggccaaattacaggaatctatggggcaaaaagaagccattcaagatcaggttaagcttattggtggggatttggatggagtgaagaaagagagagaagcaattcagtccaaaatcaagcaaattgatgatgcactgaatgccatagacaaggatatccagtctctacaagaggaactgacagctgattctcagaagagggacaaagctactgagagtatacagcagctaagtagacagcgcgaggaggggaacacctatttc

SEQ ID NO: 218031 - DNA, 456 bp, Glycine max
aagtaatgaaaattgcagcattcctacgctgtcctttattttgctctttcactgaaacttacaaataaaccattgctgctcatgaggaaagcaattgtatcacttaacactttaacatgaaacaatagtaagaacagagctagcacacaacagaaaaatgcttaaaattcaatggacaaggacagacattagacagagaaaagaagggagatgtaggtaaggtagctggtgaaaatgttgatgaatgattgactctatttcgagtaatcgtcgtgttcttcttattcttcttcttcgccttctgctccaacctcttcatagtccttttcaagagcagcaagatcctcacgggcttcagagaattcaccttcttccattccttcacccacataccaatgaacaaatgccctcttggcatacatgaggtcaaacttgtaatcaatgcgcgcgaaaacc

SEQ ID NO: 218032 - DNA, 560 bp, Glycine max
cataaaaaatacttacttaaaaacacgaatatactgtattgcaattgtattgcaattcgaaacgaaatatagttcgagatcattgtatctatcattgtactatattaatcttaatcttaattggaactaaatctttcaaaattggatttctaattcttaatttatatttgcgtattttcgctcttttctttctcttagattataatccgaaaacaaaagagttaagtgaattaaaaacccaagggaggttcatggccaaaggtaaagatattcgagtaattgatattgtggaatgtaccggttgtgataaacagagtgctaatatggaatcaacgggtatttctagatatataactgaaaagaatcgacagaatacgcctagtcgattggaattgagaaaattgtgtccccgttgttgcaaacatacaattcacgcataagataagaaatggatcaaattgatcgcttgtgtgttacccttcgaaccaaagaacttaacatgtcacatgagctataggtcttatctatatggatagatctatctggattctatcatttac

SEQ ID NO: 218033 - DNA, 487 bp, Glycine max
atttcacccttttagcattcgcacattcctttccctttcttgaatcgtccttaattgcgagaggggatatcggagaatttgataggcctcccattaattgcaggtctgaatgatctgattgagtctaaagtgggtaagaataagtcagctagtactaagtccctttggtacgaagctcctctcgattaccccattgaagacgttcgaccacacggtggaattcagacgttcacatctgctgctaactccaactgcatccgcacgccatgctgagattacctacgttgtgtgacgacatagcccccgcagtcatgcatctgctatactattctagtctactcttttgccttaacttgcactcttccttgcccttttgttctctctacctatacatgatgactttgatgctttctgagtcaagacggctggctcagctattggcatcctaggctacgaaaaacgactcgagataccgttgtttgaaaat

SEQ ID NO: 218034 - DNA, 474 bp, Glycine max
caatattagtgatttgaaactttatggaatcatatactatgattttgggagaaattttattttattttactatttttatctggggtggggggattctgtcacgtatttgtttctatataactcgatctagattctgattgtcctaatcactttatgaaataattactaatcaatattgtgatattgcgaactcagattgtgggagctgcatcgaaatgtgacttcacggttgatgagaaagagcgtgagaagaatgttgaagacacatatgaggctcttcagtttcttgagaatgagctgacggacaagaagttttttggaggagaggaatttgggttggtagatattgctgctgtcttcatagcattttggatcccaatttttcaggacatagcatggttgccgttattcaccagtgagaaatttcctatactctacaaatggagccaagaattgcttaaccacccttttgtg

SEQ ID NO: 218035 - DNA, 477 bp, Glycine max
acatatagctagtatcattttacatgaaattcaaacagcaataactcaacaagacacaagttgttcaacaaatatccttaaataagtctattttgaagcagaaagactttcatagcgggctttgaagtaggcaaaaagtgggtctctaggaggaaggacttcgtgcacaaaagggtggttaaggaattcttggctccatttgtagagtataggaaatttctcactggtgaataactgcaaccctgctatttcctgaaaaattgggatccaaaatgctatgaagacagcagcaatatctaccaacccaaattcctgtcctccaaaaaacttcttgtccttcagctcattctcaagaaactgaagagcctcatatgtctcttcaacattgttctcacgctctttctcatcaaccgtgaaaacagatttcgatacagcacccacaatctgatttcgcaaatcacaatatgtattagtaat

SEQ ID NO: 218036 - DNA, 467 bp, Glycine max
attggaatggatccttcaaaatggatattggacatataaagcccctgcaaccttgagaatttttctacataacttggaagctttcccaccaaatgattattgcttacattcaatacaacgactgatgagttaaaaatgttgcttgggagtctaccagtaaatctattatggctcaatatcaaggtctgcaaaccattagggatattcaaaataggtccctcaagcatattggttgaaagtttcaagaattggagtgggtgtccatctgctaatatgttctcaggtatttttccagacaattggttctcggaaagatccaatgaattcaatcagctcatttggcctaactcactaggaattgatccttggatgctgatcccagacaagtttagatattgcaaatttggataaattgaactgatattgctgctaggaatttggccatttacggtattgtccgacacgtc

SEQ ID NO: 218037 - DNA, 555 bp, Glycine max
ctttatatccataataaccagaaagtggcatcaagttataggtatgtttgacatattgttcggttggtccaaagcttccaaatgtaagaaggcgatcaaacgagcccggtgccggctcaggctactcaagaacaagaggcaggcaatagcaaggcaactgagaaaggacttggctgagctaatacaaagtggccatgaagaaactgcatttaaccgggtggaacagcttatgggagatgaaagcttaacagctgcgtatgaattgttagatcacttctgcgaatttatccttacgcaactctcctacatccagaggcacaaggactgtccaaatgatattaatgaagcagtctctagtcttatatttgcttctgcaagatgtggggatcttcctgagctcggtgtcatcagaaagctctttggacagcgttatggtgagaggtttgcaactgcagctgtagagctatcaccaggaaatctagtaaacaaacaattgaaagagaacctgtcagtgaaatctgtgccggatgatatgaagtacagaatggggatgaa

SEQ ID NO: 218038 - DNA, 576 bp, Glycine max
gctcgagaataaagcatcaatctaaatcaattcatatctatttatatatgaattaatttataacgtaaacaaattaagagctctgaatcaataaaaactgagaatattgattcacgaaaaaacaaatcaatattcgaaaaaaaaaaagattattaattttaagatatgagaaaggctccattgtcgaattcagacctaaccattaatcgagaagtgatgggaacgacgaaacctgcaaatacttaagattttattaaaaacaaatcttaatgattcattaggtgggatggcggaagaaaccaaaaagcaatcctttttttaggagttgtgccctacattacatctgaatttgattgataataaaagagtaaatattcgcccgcgataattttgattttattgaattttttttttatttttgccaattctatttattctttctaataataaaaaatattctaataactaataataaaaaggaaaataaagattcattagaatattataaaataacatataatagaacagaacatgattcttttagtatatatgtaaaaacaaaaatggttttattat

SEQ ID NO: 218039 - DNA, 474 bp, Glycine max
tggtcggcggccgccctttttttttttttttttttttttttttttttttttttacgttctattatatatatatctatctatattctatatatagatatattggttaggttatcaagtattaatctgaaataaataagaattgctgcttctaatacttataataattactacaaattctaataattactacaaaagggatatatgttagataaaatagattaattaatctatttcacaaaaaaataatgtatccatagcacagtttcgtcttataatacctcgggtgctaatgaaactattttagtgaaatttaactgtctcaattcccgggcgattgcacaaaagattcgagttccttttggatttccttcttgatcaatgacaactgcagcattatcatcatactgaattattataccgttgctacgtttgagttctttacaagtacgtacaattacagctctgatcacttct

SEQ ID NO: 218040 - DNA, 586 bp, Glycine max
gaagaacagagcctcgctgaaaccgaagcgggcctggaaagttgggagcccaacggcgaagacgccggcgatgagagcttcgtcgaaccgccggaagaggccaagctcttcgttgggaacttgccttacgacgttgatagccagaaattggccatgcttttcgaacaggccggaaccgttgaaatcgctgaggttatttataacagggaaactgaccagagtcgcgggtttgggtttgtgacgatgagtactgttgaagaagctgaaagcgctgtggagaaattcaaccgctatgatatcgatggaagactgctgactgttaataaggcttctccaagaggaactcggcccgaacgcccaccacctcgtcgttcctttgagtcttccttatcaatctatgttggtaatttgccatgggatgttgacaatacccggcttgagcaaattttcagtaaacacggtaatgttgtgaatggctcggtagtctatgacagggagtcaggtcgatcacgtggctatggctttgtcacaatgtctgatgagacagaaatgattgatgccgtgctgctcttgatggcagagtttg

SEQ ID NO: 218041 - DNA, 564 bp, Glycine max
atctctggtgccattctctttgaggaaacactctaccaatccacaactgatggcaggaagattgttgacgtgctgcttgagcaaaacattgttcctggtattaaagtcgacaagggtttggtgccccttgcaggttccaacgacgagtcatggtgccaaggtttggatggtctagcctctcgctcagctgcatactacgagcaaggtgcccgtttcgccaaatggcgtactgttgtgagcatccccaacggtccctctgctctggcagttaaggaagcagcctggggtctggctcgctatgctgcaattgctcaggacaatgggttggtcccaattgtggagccagagatcttgcttgatggggagcatggtattgatagaacttttgaagtagcccataaggtctgggcagaggttttcttctaccttgctgagaacaatgtcctttctgagggtattctgcttaagcctagcatggctacacctggagccgagtccaatgacaaggccagtcctcagacagttgctgattacaccctcaagcttcttcacaggagaattccc

SEQ ID NO: 218042 - DNA, 484 bp, Glycine max
aagtacacaactcatagcaaaaggtttattaagctgtaaaggtgcatttaaccataaacaaaaatagtctccaagactataaaaacattacattttagacaaattagtcttccacttcatcgtccgtcaacacctactgtaactgctggtgttgctgcctaacaagtatcatattcactgcaaacatcttagtaggagtagcttttgacgaacaactccttcttggcttcctcggattcaccctcaccagtgtacttcccaagctgagcgagtgagttggacttggcacggaatgcgagtgcatcttgtgctgccttcacgttctctgggcggcctccccatgtcttaaggcagtgttttggagggctctggcatacgagaatgacacgtgccacgggtttggagattggttcatggcattcaaattgagggtagcttcaacctcagactgtccaccagacaaaaacataattccagggacagc

SEQ ID NO: 218043 - DNA, 400 bp, Glycine max
agactcaagtcaccagtttcgatattggctaggtttttgaaattaaagaaaaaaaaaatacaagattcacaacacaatcttgtttttcgttctggtttgacaacaaattattcattcaggtgaagctcgaaaaatcctacatactccacatacgagcaaaagacccaattaaatcagagataagaacatatcacagaaaagccgggccttaaggtgttatcttaagcctaagcagcagtttgtgttacatttcctattgttttccgatcaaagatttcaatccagtatccatcaggatctttaataaatgctatacctttcattttccccttgcatatgcaaagaggctgtttccggattcgaacccatgaccaacaagtcaccaaggcacaactttacc

SEQ ID NO: 218044 - DNA, 553 bp, Glycine max
gcggtgtttctccgagttgcttcaattgaatggctcttcagcttccaccacttcctggccgtgccatgcgcttcaactcaagcgtgtgctcccttcctgcacgaaaatctagcacctttgccactctgtcacaaccccgaagcgactgggttgaagccactaacagtttcttcgaccaagacaaacgacccatcatgttatttgacggagtatgcaacttgtgcaacgggggtgtgaagttcgttcgtgataacgatcgaaataagacaattagatatgaacctcttcagagtgaaacgggtaaaatcttactcaggagatcaggaagagctcctgatgatatctcaagtgttgtacttgttgaaaaggaaagatcctatattaagtcagaagccgtgctgaagataatggaatatatagacttaccctttccacagctagcaattcttcttcaatttgtgcctctggttatcagagattttggttatgacaatgttgcaaacaatcgttacctgatttttgggtcgttcgaatcatgtgaaatatagcatca

SEQ ID NO: 218045 - DNA, 485 bp, Glycine max
ggccattggtcatggcaactcgaagactttcattgctcctctctcgctctctatcttccacttcttttcaagctgcttctctacttcactcactagggagaaactctggcaagtggggaaactttaacagattcagcactgcagcagcagttgaggatttaatcactccacaagttccaataacatacactaagcatctgataaatggacaatttgtggatgctgcttcagggaaaacttttccaacacatgacccacgcacaggagaagtgattgctcaagttgctgaaggtgatgcagaagatatcaaccgtgcagtatcggcagctcgcaaggcctttgatgaaggaccttggccaaaattgactgcttatgaaagatgcaagataatactgcgctttgctgatttggttgagaaacacggtgatgaacttgcagctctggagacatggaacaatggaaagccttatgaacagtctgccact

SEQ ID NO: 218046 - DNA, 467 bp, Glycine max
gaatggtgcaaaatttatatcctacagcaacagtgtcattacagtatccaagtttgtgtttgagcaattaacaagtgaaaaatacataaattcaactggtataatgttcaggtacctaatcaggttttatcttagtaacatcacattatttattgcatgccattgcctcagcggaaaaagatgatagccacgtaggatttcggtcatagcagtttgagcaattcacaaatcacaaccatgcaggtttcttcactggtgaaaccacagctttcacttgcaggtaattgttgagactgtagatacccttctccctgccaatgccgctcattttgtaccctccaaagggaattgcagcatcaaaaacatcaaagcaattgatccatactgttccaaccctcagtgctcgcatcaaagtgttggctgtgtgcacattcttagtgaaaactcctgcagctagaccatagtgc

SEQ ID NO: 218047 - DNA, 510 bp, Glycine max
gttggaaagtatgagaagaggatcgacgacatcttgaacaagttcgaccctgtcgttgaaagggtcatcaagaagcgccgtgagatcgtgaggaggagaaagaacggagaggttgttgagggtgaagtcagcggggttttccttgacactttgcttgaattcgctgaggatgagaccatggagatcaaaatcaccaaggaccacatcaagggtcttgttgtcgactttttctcggcaggaacagactccacagcggtggcaacagagtgggcattggcagaactcatcaacaatcctaaggtgttggaaaaggctcgtgaggaggtctacagtgttgtgggaaaggacagacttgtggacgaagttgacactcaaaaccttccttacattagagcaatcgtgaaggagacattccgcatgcacccgccactcccagtggtcaaaagaaagtgcacagaagagtgtgagattaatggatatgtgatcccagagggagcattgattctcttc

SEQ ID NO: 218048 - DNA, 491 bp, Glycine max
aatataaggattgatagtttatagtagatgatgtgattcaaaaaaaaaaaaagattgccttaggtagcaaacgaagacaaatgggagatgatacaatgtgcatggaagggcttatatacttcataaaaagtagatgaatgagaccttattgaaatgatgattatcaacacacaaaaagtaaatattacatatgatgatgatgacgatgatcttaattaagaaaggagtttagatgcaacgccgatccttgcaagtggaacacagacaagactatgtgcccttggaacagtgaggccggctctctcttccatgctaactttggcgtcaccacccttcaatatctgtccttgtggacccagcacttgcaagtcgaagcactgaataagagatgcaagaagtgttgccattcccgaagtagccagattgactccagggcacattatccttccagacccaaatgggagaagttgaaaatgttgtcccctaagatc

SEQ ID NO: 218049 - DNA, 524 bp, Glycine max
  unsure (1)..(524): unsure at all n locations
gcggcttccaccgcagctatgtcagaaatgcttggaaaccccgtgagcctgagaggcgccaccaggtctgctccatcaccgtctacacctgttactttcaagaccgttgcgcttttctccaagaagaaagcagcaccaccttctccaaagaaaaagcctgctgctgtatcccccgccaatgaggaactcgccaagtggtatggtcctgacagaaggatcttcttgcctgagggtctcttggaccgatcagagatccccgagtacttgaccggagaagtgcctggagattatggttatgacccgttaggtcttagcaagaagccagaggacttcgccaaataccaggcgtttgagttgattcatgccagatgggcaatgcttggtgctgctggattcatcattcctgaggcctttaacanatacggagctaactgtggtcctgaggctgtttggttcaagaccggagctatgcttcttgatgggggtacgttgaactacttcgggaaacccatccccatcaatct

SEQ ID NO: 218050 - DNA, 502 bp, Glycine max
aaagtaaaatgccttgagttttatatagtaagatgtattgtacatttaagagtggagaagaacataaagatgattgatttacagagttggagccctctcaacggagccagcaatcacagtgagcaggttattaccaaaagggtcactgagatgttttgctaagttctcaactggaccttctccagtgacataagcttggaagtagaaaccaagcattgcaaacattgcaagcctaccattcttaatttccttcacctttagaagtgcagcttggtctggatcctttgctaggcccaatgggtcaaatggaccacctggatgaagcttgtcttccaaatccaggccattaattattctgtagtactcagcaccacccacaagaactatctcagcaacaacagcaacaataagattgatggggatgggtttcccgaagtagttcaacgtacccccatcaagaagcaaagctccggtcttgaaccaaacagcctcaggaccacag

SEQ ID NO: 218051 - DNA, 539 bp, Glycine max
attaggttaagagtgaagacacagagagcatagtaatacttactgagtgcttgcagttgctgcgtcgcaaggtaccggcggcgacggagagctatcttctcaatttccgatcactgcattggttctgttgacgagggttttgttctacttgacttgcatacttgatggcgtcaaagttgcagaagttgcagtccgcagcatgtcacgcatctcaatttgtatccagtcgtggaactaactactacaggcaattgctggcacagaacacgcaacacattcaggagcctcctacagtagagaaatgcaacctgctggcaaagcaattgttttacacccgccttgctagtattccgggtcgcaatgagtccttttggaaggaacttgattatgtcaagaatttatggaagaacaggatagagctaaaggttgaagatgcaggcattgctgctatgattggcctggaatgctttgcatggtatagtggtggtgagattgttgaaagggatctactttcaccggttactatgtctaaataatac

SEQ ID NO: 218052 - DNA, 519 bp, Glycine max
ttcgtcctttttttttttttttttttaaaaagcatgacaaaaatgttaaaagaattgcaggagtatcatcactgtggagtaccatcactagctttccaacatgataaaagaacaacacaaggttcatcccgctttcaactacaaggggttattgaggcttatcataacaaaaattgccatgcagaatgcaataatccacacaatgtataaatgaccagagcagttggctttaggagtatatggccctgataaaatctacactttccaagtggttattattagacatagtaaccggtgaaagtaaatccccttccaacaatctcaccaccacaataccatgcaaagcattccaggccaaacaaagcagcaatgcctgcatcttcaacctttagctctttcctgttcttccataaattcttgacataatcaagttccttccaaaaggactcattacgacccggaatactagcaaggcgggtgtaaaacaattgctttgccagcaggttgcatttctctact

SEQ ID NO: 218053 - DNA, 492 bp, Glycine max
ctcgagaaataattagagagagagagagagagagaggatatgggttcgaagaggtatgcgctattgatgtgcggtgaggattcggagtacttggtgaagatgcacggaggcacctatggggtattcatgaagttgctccaagagcaagaggaaaagtgggacctctacaagctcgtccaaggagagttcccggagcagcatgacttgcctctctacgatggctttgtcatcagtggaagctgctatgatgcacatgccaatgacccatggatccttgacctcattgctctcgttatcaaattggactccatgcacaagaagatccttggcatttgctttggccaccagataattgggcgtgcattgggaggaaaagtgggtcgctctcccaatggttgggacatttggtgctaaagctataaacgtgtcatcatctttacccttggctatctcatctcttaagctcccatcacagctttccatttacaaatg

SEQ ID NO: 218054 - DNA, 524 bp, Glycine max
ttcgtcctttttttttttttttttttttttttttttttttttttttgaattagaatgaaaaaattagataattcttgtggaataccggggcattgactgcacccatagtcattgttcataatggataccaacctagcaatagcatggctaacattaggcaaaggccacacgcagcccaagtgttgcttcttctaattaataaaaacccttttacacaataataatatctcaaaaatattatttgtctattcatattgaattgtcagtcacaatcgaccctttaaaaaatcaacgcacaatcttttcaatatctctttatctggctcttgcgatgccgccttaacctttgcatccacagcaaacgcttcctggaccaaatttcgctgaataatacggtcaataaagaacaagagaaggtcataggtgaattccgggtggccttggatgccaaacatgtggtctccatagctaaacatctcaactccagtcatttctgaccaagcaatcacctctgcttttgaggg

SEQ ID NO: 218055 - DNA, 503 bp, Glycine max
atttgcttaggccattggtcatggcaactcgaagactttcattgctcctctctcgctctctatcttccacttcttttcaagctgcttctctacttcactcactagggagaaactctggcaagtggggaaactttaacagattcagcactgcagcagcagttgaggatttaatcactccacaagttccaataacatacactaagcatctgataaatggacaatttgtggatgctgcttcagggaaaacttttccaacatatgacccacgcacaggagaagtgattgctcaagttgctgaaggtgatgcagaagatatcaaccgtgcagtatcggcagctcgcaaggcctttgatgaaggaccttggccaaaattgactgcttatgaaagatgcaagataatactgcgctttgctgatttggttgagaaacacggtgatgaacttgcagctctggagacatggaacaatggaaagccttatgaacagtctgccactgctgaatta

SEQ ID NO: 218056 - DNA, 443 bp, Glycine max
gtgtgaatggtgcaaaatttatatcctacagcaacagtgtcattacagtatccaagtttgtgtttgagcaattaacaagtgaaaaatacataaattcaactggtataatgttcaggtacctaatcaggttttatcttagtaacatcacattatttattgcatgccattgcctcagcggaaaaagatgatagccacgtaggatttcggtcatagcagtttgagcaattcacaaatcacaaccatgcaggtttcttcactggtgaaaccacagctttcacttgcaggtaattgttgagactgtagatacccttctccctgccaatgccgctcattttgtaccctccaaagggaattgcagcatcaaaaacatcaaagcaattgatccatactgttccaaccctcagtgctcgcatcaaagtgttggctgtgtgcacattcttagt

SEQ ID NO: 218057 - DNA, 556 bp, Glycine max
ggccactgctggtgatactcacttgggaggtgaagattttgataacagaatggtgaaccattttgttcaggaattcaagaggaagaacaagaaggatattagtggaaatgccagagctctgaggaggttgagaacagcatgtgagcgggcaaagaggactctctcttccactgctcaaaccaccatagagattgattccttgtacgagggtattgacttctacacaaccattacccgtgcccgttttgaagagctaaacatggatttattcaggaagtgcatggagcccgtggagaagtgtttgcgggatgccaagatggataagagtaccgtccatgatgttgttcttgttggtggttctactaggattcccaaggttcaacagttgttgcaggacttcttcaacggaaaggaactttgcaagagtattaacccagatgaagctgttgcttatggtgctgcagtgcaagctgcgattctcagtggcgagggtaatgagaaagtgcaagatcttcttttggtggatgttactcctctatccactggtttggagact

SEQ ID NO: 218058 - DNA, 591 bp, Glycine max
tcggatgttcccttgatataatttctccgtatcatttgtacttgaaccctagattggtggtgaagcaatatcagttttggcgtctggttactaatttcttgtactttcgtaaaatgggtaaaatttctgccgttcaccatttagtgaattgttattcatcagatacgggtatttcaatttcagttttaatgtagaaaaagtctcgatttttttttatgctcacatgtttggggcattcttttgctgatgccacctgtgaggaactcattttatttttagtttaggtagatcatgtactaaagtcccccgctcttgggtagttacacttacatatgtatgtgataatgaatattgatcgttggtaaatggggagtgtggacatttttaagcatcatgaatttaatccttacatgatgaaaatcagtaaatcacattacgagagcaatttcattaataaattgtaactgttttcagagggagcactagtgaagaaaggctattgctatagatgggtggtatacctacattttggcaaaaggggtcaatccgattgcccctgactaatcataagagatatgactatggacatga

SEQ ID NO: 218059 - DNA, 485 bp, Glycine max
gcatcaaagggagaaactgggagacacagaagatgagagagataattagtattcatattggacaagctggaattcaggtggggaattcatgctgggagttgtattgccttgagcatggaattaaccccgatgggaccatgcctagtgacacctctgttggcattgcacacgatgctttcaacaccttcttcagcgagaccggattcggcaagcatgtgccaagggctttatttgttgatttggaacctagtgttattgatgaagtaagaactggtccttacagacaactctttcaccctgagcaattaatttctggcaaagaagatgctgctaataactttgcaaggggacactacactgttggaagagaaattgtcgaactatgcctcgatcgtatcagaaaattagcagacaattgcactggtttgcaaggattcttgggtttcaatgcttgtggccgtggtactggttctggtttgggatca

SEQ ID NO: 218060 - DNA, 521 bp, Glycine max
gcgaagttgttgcaggttcattatgataagttttggttgattggtgctgcggctacttacgagagttacttgaaattcgtggggaagtttccttctatagagaaagactgggatttgcagcttctgcctattacctctgttaagcctccttctgaatcctatcaccgtcccaggtccagcttaatggattcatttgtaccgtttggtggctttttttcgtcacagtctgatttgaaagctccactgaatagctcgttttattgtgttccccactgtcaccagtgtggggaaaggtgtgaacatgaagtccttgctgcttccaaggaaaggttttgtgcttcttcagctgctgatccgcatcaatctagcttgcctccttggttgcagattgcagaatttggctcaacaaaagggttgaatgttaagaccaaagataatggtgttttgctcgatagtagtgaatctgggccactgcataagaacttagacaagttatcccagcatctgctccatcgagatgc

SEQ ID NO: 218061 - DNA, 462 bp, Glycine max
gtgtgtgtgagagatggttatggcttcgtggaagaagctggtgttgttgttgttgatctttctctgcacttgtaaagcacaggaggaacagagctccaccccggtgtacctgtaccataactgttccggcggcaacaccaccgccaacagtgcctaccaactcaacctgaggaccctcctcacttccctgtcttccaacgccaccaccaccgaattctccaacaacaccgtgggactgggaacatccccgtccgacagggtgtacggcctgttcatgtgcaggggtgacgtgccctctgctctgtgccaacagtgcgtggtgaacgcaacggggcgtctacgctcccagtgctccctggccaaacaggccgtcatttggtacgacgagtgcaccgtgcggtactcgaaccgctccttcttctcacagtggacacgcggacacgtgtcggcctactgaacacc

SEQ ID NO: 218062 - DNA, 527 bp, Glycine max
gcataatacatatattttatttagttgaaaaataagcaactataatacaaagtgttccaaggtttcgtcatttaaaactaggagaaataagtacatggataataatacatattagaacctccaagcgatcaagcttatcgaggatccatttcgctaatcgacatgtcattcacagacattggtattgattgatcgaatggcagctcctttggcatgtttggatcagttccactgtggacgaaaaatgcaggctgcgtaggagttggtagagtaacagtgttactgtctagcataagaactattgttgccattgtgggtctgtcagctggatcttcttggacacacaacaaaccaatatggatgcttctgatgacttcattctgattataggattctcttaatatggggtccatcagttccaaaggtgttccatccttccaaagttgccaagcatagctcaatagatcctcagcaccatccgtttgatagaaagagctattcttcttgccacttaaaatctccatgag

SEQ ID NO: 218063 - DNA, 514 bp, Glycine max
aagcagcctggggtctggctcgctatgctgcaattgctcaggacaatgggttggtcccaattgtggagccagagatcttgcttgatggggagcatggtattgatagaacttttgaagtagcccaaaaggtctgggcagaggttttcttctaccttgctgagaacaatgtcctttttgagggtattctccttaagcctagcatggttacacctggagccgagtccaaggacaaggccagtcctcagacagttgctgattacaccctcaagctccttcacaggagaattccccctgctgtccctggaattatgtttttgtctggtggacagtctgaggttgaagctaccctcaatttgaatgccatgaaccaatctccaaacccgtggcacgtgtcattctcgtatgccagagccctccaaaacactgccttgaagacatggagaggccgcccatagaacgtgtaggcagcacaagatgcactcgcattccgtgccatgtccaactcactcgctca

SEQ ID NO: 218064 - DNA, 495 bp, Glycine max
agtacacaactcatagcaaaaggtttattaagctgtaaaggtgcatttaaccataaacaaaaatagtctccaagactataaaaacattacattttagacaaattagtcttccacttcatcgtccgtcaacacctactgtaactgctggtgttgctgcctaacaagtatcatattcactgcaaacatcttagtaggagtagcttttgacgaacaactccttcttggcttcctcggattcaccctcaccagtgtacttcccaagctgagcgagtgagttggacttggcacggaatgcgagtgcatcttgtgctgccttcacgttctctgggcggcctccccatgtcttcaaggcagtgttttggagggctctggcatacgagaatgacacgtgccacgggtttggagattggttcatggcattcaaattgagggtagcttcaacctcagactgtccaccagacataaacataattccagggacagcagggggaattc

SEQ ID NO: 218065 - DNA, 555 bp, Glycine max
  unsure (1)..(555): unsure at all n locations
cagcttttatggacaaacttgttgttcacattaccaagaacttcatgaccctgcccaacatcaaggttcctctcattcttggtatctggggaggcaagggacaaggaaaatctttccaatgtgagcttgtctatgccaagatgggaatcaaccccatcatgatgagtgctggagagttggaaagtggaaatgcaggagagccagcaaaactgatcaggcagagataccgtgaagccgcagacttgatcaagaagggaaagatgtgtgctctcttcatcaacgatcttgatgcaggagctggtcgtcttggtggaaccacccaatacactgtcaacaaccagatggtgaatgccaccctcatgaacattgctgataaccccaccaatgtgcagcttcctggtatgtataacaaggaagagaatccccgtgtgcccatcatcgtcaccggtaacgatttctccacactctatgcgcctctcatncgtgatgggcgtatggagaattctactgggcaccaacaggcatgaccgcatggtgtctgcactggaattttcg

SEQ ID NO: 218066 - DNA, 386 bp, Glycine max
aggacaaaaggaaaaggccccaaattcaatttaagtggacacttttactcaaaatttttacggaaaacattcccatttgaaaaatctagggaaatcctttcaaacttggcattttttctttgcccctaaaacattgagaatttttaaaatgtttcccccaaattccatataaacttttagcacttggatcagcacaacctttaggaaccgaaatttttacttgccaaatttgctttggctccaattcaaaattggaaaaaagttcccctgttaatagcatccttgttaggatttccaagggcagccttgtttaaatacttgtgaacccattggactcttttgacattctcttgttcttggacaaactttttaccataccttaaaaa

SEQ ID NO: 218067 - DNA, 470 bp, Glycine max
ctgcaatgcatgtgggagctatagaaattatcattgatagtttcgcaagtcctgactgcaacatagttggtgcaatgcttttggttgatacttatcataccaatcctgaaaatgcagatcgtagtattgttgttgcgcctttcagaggcggacggcccattctggtggctacatagccgaataccatggtgcagattgaaccagacatgaagttaaggtttcagcttctgagtaccactacctatggtgattttgttcaaggaaaagatctctccatggttaaagttaatgcaggatgtgctgctgttggcttgacatcaagttacactgtaacttcattggtggaatctgctttgcaaaaagacatagggttaattgaggagtattttggaaggactgtttacgttgctcacaacgttaatcagccccaagagaaagatttgacggagggaaatttttccttcgatatt

SEQ ID NO: 218068 - DNA, 398 bp, Glycine max
aaaataacacacacttaacacataattcccacaactaaaaaagggggggaaatttccaaataggcagaccttactcaaccagaggggcatgaccaaggtcctttattgaattaaacaaaccaacaatcgaaagaaaacacaaattccatatcatgcacaggatcccccatttccaaaaaacctggcagcaccctgtggaacacaaaaagctggcataaaaattttacctgcaatttcaagctcttgaaaaattccccaaagaatttcaaaacccgcaaactgtttgggcctggcaatcaggaaactgaagtgccctgaacattgatttgcccacacaaaactccacatttgaaaaccatgtttaggaccccatacctctattgggaagatcaattccc

SEQ ID NO: 218069 - DNA, 503 bp, Glycine max
  unsure (1)..(503): unsure at all n locations
gtttctgttcttctcaatttgtttgaatttgtataaacttagcaattttctctgctcaccaagccgttggtttctcagtgctcacgccaaagatcattctttcttcttctgagtacgtgcacagtgaatttgattgaagaatggcacaagatattgctactccaccagttccttttgattttgaactcttggttggtgatcaccttagaactgtcacagcctcatccaacagcagcaggacagacccatggattgaacctgaaaggttgaaactcagacacaggattggtcggtgaccctatggagatgtttggttagcaactcatcatcaatcaactgaagattatgatgagtatcatgaagttgctgccaagatgttaccttcaatcagagaggaacatatgaagactgcattagagaaattatgtgaattatattttcagtgcccaggagcggctagggtgtgctggctacttggaanttcaattttaaatggaaggtta

SEQ ID NO: 218070 - DNA, 472 bp, Glycine max
acattcagtgttggccccgttggcatttatgtataattacaaatttacaattctcaagtgatatgtttgtcccaacaacagcatgatagaacaggttaatattgagatagaaggggtaaaactagcgaccattagccaagttaacaccttctctggaaaagatgttagccactgaagatgtccatgtagggctagcattctggttatctgtataatgactttcactatccattgcattagcattcatgttcctcccaagtttctttccaattgacattcctagtttcacagcagtaagaaagccaaatgcaatcagaacaggtctaactgcccagtggtgatcctctacatgttgatacttctctatcatcttcggacaattcttaaagttaacgacatcaacctcggagggatcagccaagacagttcttggtgcatcccaaaagttcaacatgccttgaaacttgacaac

SEQ ID NO: 218071 - DNA, 474 bp, Glycine max
  unsure (1)..(474): unsure at all n locations
ctcttctcctgaatcatatgcagtgcggattttggtccgaatcggtgaatccccaaaatgggtaacagcagaaagaagcaccgtcgtgtgcaagactcgccgtcttcttcatcctcttcgtcctcggactccgaccactcttcgcggcggcggcggcggctgaggcggcgcgagaaggagcggcgcagaaagagcgagggaaaggatgagcgaaggagtaagaagagagacaaagagcgcaaaaagaagaagaggaggctccacgattccgatgactcctactcttcggaggagggggaacacgaacaacctagggttcagcctgaaactgtcttaaccgaaatgatgaaagagtttcccgatgtcggcaacgatttgaaacagctcttgcaaatgattgatgatggacaagctgttgacatacagggtatatcagaaaaatctttagcgaagcgtttganaaagctgatcctt

SEQ ID NO: 218072 - DNA, 522 bp, Glycine max
  unsure (1)..(522): unsure at all n locations
cttcgtccaggagttcaagcgcaagaacaagaaggacttgaccaccaacgctcgtgctctccgtcgtctccgcaccgcctgtgagcgtgctaagcgcactctctcgtcggctgctcagaccaccatcgagatcgactcgctcttcgagggtatcgacttctacacttcgatcacccgtgcccgtttcgaggagctctgcggtgacctcttctcgcacaccatcgagcccgtcgagaaggtcctccgcgactccaagatcgacaagggatccgtccacgagatcgtcctcgtcggtggttccacccgtatccccaaggttcagaagctcctcaccgacttcttcaacggccgtgagctcaacaggtcgatcaaccccgatgaggccgtcgcctacggtgccgtcgtccaggccgtcattctctcgggtgacacctcggagaggacccaggacttgctcctnctcgacgttgcccctctctcatgggtatcgagaaccgacgtggtgtcttcactcccctgatc

SEQ ID NO: 218073 - DNA, 393 bp, Glycine max
gcggaaacaatgcaaagggtcacatcagattgaacggaacgcgaagatacgagtacatgcgggtggtgagggggaatcaatgcgagaaacgaagtgccacctgcggaaagggggtgtgctttttctgaagagtaagatgaagctggagagcgagaccattagtcgagctcctcgacggtggggccgtcgtcgccaccgggagcagcaccaggagcggcaccaggagcaccgacgggcatgccaccgggagcaccgccagctgccgagtagatcttggtcatgatggggttgacctgctcctcgatctccttctgcttgtccttgagctcgtcggtcgatgcggtggtgttgctgtccaaccactcgataccttgcttgacgatcttctcgagc

SEQ ID NO: 218074 - DNA, 545 bp, Glycine max
ctatcttttcaggaatggatgttccagtatcttctctgctttgtgtttttctcttccattttttaacaggaagctttaaggtcaagagggctgaaggatgatacaacttgcctcgttgtagatattattccttcagatcatcccgtgttgccaacaattccaagaaagaaacgtaacgtgctaacttcccttctctttggaaagaaatctcaaaactctacaaacaaaggcaccaataagctttcttctgttggtgttgtggaggaattatttgaagagggttctgcaatgcttacagagaggttaggcaaggattttccatctaatacgaatcctgagattttccgctgtgcggtttgccaagcagatcagccctctgtggacagtttatcaatgaacactgggccttttttccccccagtatctaagccatgggaaggtccattcctctgcacaaactgtcagaagaagaaagatgccatggaaggaaaaaggtctacttggcccttcgagacagcatagtaatatagtattctagcagcata

SEQ ID NO: 218075 - DNA, 393 bp, Glycine max; identical to SEQ ID NO: 208347

SEQ ID NO: 218076 - DNA, 477 bp, Glycine max
  unsure (1)..(477): unsure at all n locations
cgtgcaaggaaaaaacaataatttttcattaattcaggagagcaaaggggacccaggcatatcaagccccaactatttattttgaccgtccacaaaagtcccaatcaaattcgaatcaactgcattttatatacagcttttttcctttcacatggctatacaaaagagaatgctaatgcttcagatggatgtatacggggttcctcatactgctggcaaaaatgatcttgagaatacatgcagcaccatggtttcaagggatagtttaatcccatattttggctagcatttccacctaattgatagcctctccaattcctgtacaaatcagggacacaacaatggctccatagcctggcgtaatcaatgtaatgtaaccttagattgttaccctaagcagactgataagtgacctgatctgccgtagtngtgtcatanttggcatttgcctcggggtatcttcttcataggtggaac

SEQ ID NO: 218077 - DNA, 534 bp, Glycine max
aacaaagagtgtgtgttgtgtggtttggtttggtttttcacttttcttcatctttttgcgagaagacacacacacagagagagatggctacgacgaggattgtggcaaataagaagccgaagactaagatcgtgtgcactctgggccccgcatcacggtcggtcccaatgatcgagaagcttctgcgagcaggcatgaacgtggcgcgctttaacttttcccatgggtaccacgagtaccaccaggaaaccctcgacaacctccgcgccgacatggagaacaccggtattctctgcaccgatatgctctacaccaaggggcctgagattcgatctggctgtctcaaggacggtgatcctatacaactgatacaaggtaatgaaataaccatttgcactgactatgacctaaagggagatgagaagacgattttgatgaactacaaaatgctgcctgaggatgtgaagccacgtatggtcatactctgtgcggatggcaccatatcatttacaggtttatcatgtgacaaacaag

SEQ ID NO: 218078 - DNA, 477 bp, Glycine max
aacaaaaaaaaaaaaaaccagtaatatatgatatgtgaaaaacaggtaaccgatcctaataaatgcttttaattgaagtttgcatccaatgtagatatgaagaggtatatcgagacctcttttgcgccatccaaaaaatttgccataaacagcagaagaattccttgtaatgggggtgatcatttcacagtcaagatcttgatgattgatgcagtgtccacacgatgcagtgccaccactgaatccccgatgtggcagagacccttggacttggcatgttgcatggcgaatactattgcttcttccgttgtttcagcatgagaagctctagcagaagctggactcaacacgggaaccaacccgcggaatataaggctatgtctagcaggggcctaatcactgcatgcccaatcaaagctatcagtcttgagctagggaacaaccacggaaagaattggcatacctggcctgtatttc

SEQ ID NO: 218079 - DNA, 539 bp, Glycine max
aaaacatctccagtgggttcttcttcttctattacaacaacgtcgtccaagaccatgaccatggccatggccacgatcctgctcctgttcacggtcttcgcggtttcatcggccctagacatgtcgataatctcgtacgacaacgcccacgccgacacgtcgcgcagcgacgaggagctgatgtccatgtacgagcagtggctagtaaagcacggcaaggtgtacaacgcgctcggagagaaggagaagaggttccagatcttcaaggacaacctgcgattcatcgacgaccacaactcccaagaggaccgaacctacaagctcggactgaaccggttcgcggatctcaccaacgaggagtacagggccaagtacttgggaaccaagatcgatcccaaccggaggctcggcaagaccccgagcaaccgatacgcgccacgtgtcggcgacaaactacctgaatcggttgattggaggaaggaaggtgctgctcctccagtcaaagaccaatgaggctgtgggagcttgtgggcattctc

SEQ ID NO: 218080 - DNA, 546 bp, Glycine max
  unsure (1)..(546): unsure at all n locations
aatccaaataatgctgcattgtcacatagtctacataacctgggaaactaacagcaatcaaatatgttcgccatttggaattggaatttgaatacaaatacagtgcatcaataatataaccctatgtacacagccaatatctgactgaaatttgatacagaatagtatcaatttgtatcataataaaatggcacagagaaatttatgtgaaggtaaaggggaagtgtatcagctggtgttttaattcttcgtctttcatttacttcatcattggctccttcctgcacgttcacatttcctttatctgcttaagcactgctgaccttgttcttacgcccaaaggtccaatggggtttagccggagtacgcctcaatgccttcactccgaatgggttgttcttgctcttgagacangttccagcataagtgttgcagatgggatagtcgttagggcagcaactgtagtggtcatcacagcaggtagcaccctcaagaggacagcaaccccactcaaagcaagcattttcgaactcgaaaatacagcac

SEQ ID NO: 218081 - DNA, 549 bp, Glycine max
  unsure (1)..(549): unsure at all n locations
atttgattgatgaagctggtttacgagtccggcttcaacatgcacagttacctgaagaagcaagagaacttgacaaggaggtgaggcagattattaaggagaaagaagaagctgttcgcaaccaagactttgaaaaggctggagagctacgtgatagagagatggatcttaaggcacacatctcagcacttgacgagaaaggcttggagatgcgcatggcagagactgaggcctgggatgaaagtgctatcgtgactgaagctgacatacagcatatagtctcatcctggactggtattcctgttgagaaagtctcaacagatgaatctgatcgcctcctgaagatggaagagactttacataagcgagtcattggtcaggatgaagcagttaaagccattagtcgggctatccgtcgagctcgggttggactaaaaaatcctaatcgtcccattgccagcttcatctttactggtccaactggtgtggngaagtctgaattgctcaagcataggctgatactactttggctcgaagaagctatgattc

SEQ ID NO: 218082 - DNA, 479 bp, Glycine max
ctcgagccgctcgaagcaagtcgacgactccaaccccaaactcctcatcaccgtcccagaattatgggacaaagtcaagaacctcaacctccccgccgtaattatcgatacggaaacagctcaaggactcgtgagtttcgagctggaggcgctgctgaaggctattgagaagcagagggtgacgaagctgtgggtggtgcctccgatcctgcttggtctggcgaaacagagcgtggttggaaactacgatctttcctcgttgaggcgtataggttcgggtgctgctcctctcgggaaagacttgatggaagagtgtggcaagcgttttcctcatgttgccatttgtcagggttatggtatgacagaaacttgtggcattgtttctgtggagaatccaagagtaagggttcgtcatactggctcaaggggaacgctagtttcaggagtcgaagctcaaatgtgagtgtggatacacagaa

SEQ ID NO: 218083 - DNA, 464 bp, Glycine max
ggtgaagaggagaaaaagactatggagggtttgaagaagagaaagctggagctggacgaagcaggcaacggtgaattggcttccaaggaagagcttcgcttcctcattgaacctctcgctaaaccccagctcgtcgatcttcttgctaaactagggtcccaatatccttcaattgcagaagaaataaaaagtattgcaagtgcagatcctgcccatcgaaagctttttgttcgtggcttggcctggaataccacttcagaaacattgcgtgctgcatttcaagagcacggagaaattgaggaaggagctgtgatctttgataaagtgacaggaaaatcccgtggctatggatttataactttcaaaaatatggaatcaactcagcaagcattgagagcccctagcacgttaattgatgggagattggctgtctgtaatctagcttgtgagagtctaagcggaac

SEQ ID NO: 218084 - DNA, 473 bp, Glycine max
gcagtgctggctagcaacgccatggccattgaagtgttgctgggtggtgatgacgggtctctggctttcgttcccaacaatttctccgtggcctctggggagaagatcgtgttcaagaacaacgcaggtttcccccacaacgttgtgttcgacgaggacgagattcctagcggcgtggatgcagggaaaatctccatgagcgatgaagaccttctcaatgcgcctggtgagacttacagcgttactttggatgctaagggaacctacagtttcttctgttcgcctcaccaaggagctggtatggtgggaaaagtcactgttaattaattattgtctcaagggctcgtctcctacgtctaagttctcatatggttccttcttctaatatttttggtttttctagacgagcttggttgatctttcttgatatggcctatgggatgaatgaacgatataatgcgtttctgtaattc

SEQ ID NO: 218085 - DNA, 439 bp, Glycine max
gaattacagaaacgcattatatcgttcattcatcccataggccataacaagaaagatcaaccaagctcttctagaaaaaacaaaaatattagaagaaggaaccatatgagaacttagacgtaggagacgagcccttgagacaataattaattaacagtgacttttcccaccataccagctccttggtgaggcgaacagaagaaactgtaggttcccttagcatccaaagtaacgctgtaagtctcaccaggcgcattgagaaggtcttcatcgctcatggagattttccctgcatccacgccgctaggaatctcgtcctcgtcgaacacaacgttgtgggggaaacctgcgttgttcttgaacacgatcttctccccagaggccacggagaaattggtgggaacgaaagccagagacccgtcatcaccacccagcaaca

SEQ ID NO: 218086 - DNA, 470 bp, Glycine max
atttcgtccgccctcaaccgccgtgatggccctcgtccgccaccgccgccaccccaacctccgtctccccctcccggagccctccgagcgccgcctccgcttccccctccccctccctcccaccaccaccgacaaaccagcctccggcgacgccattgccgccgccgacctcgagaagctcgccatccttggccacggaaacggcggcaccgtctacaaagtccgccacaaggccacctccgacacctacgcgctcaagatcatccactccgacaccgacgccaccaggcgccgacgcgccctctcggaaacctccatcctgcgccgcgttaccgactgcccccacgttgtccgcttccacagctccttcgaaaagccctccggtgacgtggcgatcctcatggagtacatggacggcggcaccctcgagaccgacctcggcgacagcggcacgttctcggaagagcgac

SEQ ID NO: 218087 - DNA, 468 bp, Glycine max
aattcagaattttaaattctttttatcattggcaagcataatttacgtacaaagggaatgattctcttagactcagttaagaattgaaaacaatagagccgtagataaataattcagaattttaaattcccttttatcataatttacaaaggggatggttctcctaaaactgaaaaggtttgaatccgggggaatatacaccaactcaaaaaggtgattccaagatccaagtcataacaaaaaaacaaccgggtcaacccacttaacatgtatccgggtcattgcacacaaacgggtgggtcaagagctgagccgtcgtccacctttccccggactccttcttgaggcagcactccacgaaatcgcgaaactccggtgacgcggtctcggggaggctcggcgggtcgccgaagcaaattgcacacataagggtagcccagtcgggtctctgacccgcttgaagaaatg

SEQ ID NO: 218088 - DNA, 565 bp, Glycine max
  unsure (1)..(565): unsure at all n locations
ctaaaaagccagagaaaacaaaacccccaaaatatctctcgctctgaaaccggcatggatttgcagcagagcgagttcgatcgcctcttgttcttcgagcacgctcgcaaggccgcagaagctgaatacgagaagaaccctctcgatgccgataacttaacaagatggggtggagctctattagagttgtctcagtttcagagttttcctgaatcgaagaaaatgacccaagaggctgtttcgaagctagaggaggcgcttgcagtgaatcccaagaagcatgacactctttggtgcctgggaaacgctcacacttcgcaagcgtttttaattccggaccaggaggaggcaaaggtttattttgataaggcagctgtgtactttcagcaagctgttgatgaggatccttcaaatgaactttaccgcaaatcattggaagtggctgctaaggctcctgagctgcatgtagaaatccataagcagggatntggtcagcagcagcaggcggcagcaacagctggatcttctacttctgcttcgggtacaaagacctcagagaaaaaga

SEQ ID NO: 218089 - DNA, 489 bp, Glycine max
aatatacaatgcatatatatatatgtaatgtgcctttctgggaataatttgctactcaacgaaaggttgtgacaaatgttgataaataaaaaaagtggatataaacaagtttgaataatgacatatttctttccaatacaaacattgatccagaaaattggaggataacaaaacaatgggctgactttaagttgacacatgtcgtttgttccgtatagcttattgcacacagttgacgacggtgagctaaatttcagaagctgagcctttctttattcgtatgaactaataaagttgaaggtctcctgagtcctgaccacagacaaagaatgccaaagttgaaatgatgctcctgtactctaccatgactctctcaattcttgtttttgttacacaacacttgctttagccattcttttctggccccgagtagctagtagctcagaatcctgttcaatagcctgtgcacaaagcttcccagatagaaca

SEQ ID NO: 218090 - DNA, 424 bp, Glycine max
tgagcagtgatgatcgggccagtattaatctcgaggtcgacgacgctgactcgtccttttgtcgcccttttaatgaagaatttgtgaacaaaaacttatatgattgaccaagcaggaacggcgaaaagtgcattaataaataagagaacaataacatcgcatgtataaacataatgacacgctgttatctaaacttgagaagggtctgtgaccagatcaagaacaacccatgagaatattcggcttaatcgacttcatcaattttgggtccatgaccgcatccactgcctgctgcaggacgatccttatacatggatccacccggatcacggccaggactctggtacatatttggtatgaggggattacaagtggtctagaactcattgattttatcctcaaattcgtcagcctgagcaagtct

SEQ ID NO: 218091 - DNA, 445 bp, Glycine max
agtatgtaaacatatatcataagctcttagggctgtttcattcgaatattttcttccaatcttccatggagaaaagtagttttgacatcaagttgttcaagttccaaatcttggtttgccactattgcaagcaaaaccctgatggatgtatgtctgatcacaggtgaaaagatttcgttgaaatctattccttctttctggctgaatcccttagcaactaacctagccttggatcttatctcttccttttctgaaagactaggtttcctcttgaatatccacttgcagcctaccacatgtcttcctttaggggggtcaacaagttttcaggtttgattcttatatagagattccatttcctctttcatagctaaaaccaattttcagcttcaggatgattgatagcttttttgtaagtggccggttcatttgaatctatttcttc

SEQ ID NO: 218092 - DNA, 556 bp, Glycine max
gcgaaaagggaggatgctcagccgctgtgttttgaggtgaccgaacgaacagatagagggtttgcaggttggtggggcagagagaaagatggatccatgcctaacttcttgcggtttgaggctccttgtgttctacaaaacaacagggaaattgttgataagaatggtgaaataaactacttcagtggcctgttcctttgtagaccaaccgggcaagggaaatccatgctgatagttaggtttggaggaacaaaaagatctccactagcaaaagtgtttcctaagtggtacttccatcagaatgcaagcaaggtgtttgagcaagacatgggattcttgtcatcacaaaatgaaattcttctgagagaaaaggttccaacaaaggaactatacctgaatctgaaatcatcagacacatgggttgctgaatacaggacgtggatggacaaagcggtgcatggaatgccatatcattttggtcacagcactatctctatgctaaagagcctgctgtgaatgaacacgcacctgcttgactagtcgcaggacaatcagc

SEQ ID NO: 218093 - DNA, 425 bp, Glycine max
agacaaactggttagtattcatttgaacaactatttttacaaccagtcactcacaatctcctatgggtcctaataaaatttggtggattcattgcaatggcggttgagcaagcatagactccaacagagcagagagctgcagatgccaagagaaggaccttccattggctcccaaaaagcagaattgccaacgcagttaatgcaattgccacagctgaaagagcatttttccaagcttcgaaagctttgacgacgggtctacatcctttgcaatgaatcacatgcctaaaatatctgttggcaaaattaggggcatgcattggtccaatgccccccttggttggtgaggaagctgattgtcctgcgactagtccagcaggtgcgtgttcaaccacagcaggctctttaggcaaagagatagtgct

SEQ ID NO: 218094 - DNA, 440 bp, Glycine max
aacaaaaacaccaattctccaccctctcattgaaaaaaaaacaaccaaacaaaaaaaatcaatcattttattttatttttctacgaaaatggttgatttacattggaaatcaaagatgcctagttccaaaacaccaaaactctctctctccgacaacaagtccttaccctctttgcaactacccttccgcaccacagatatctctcccgccgctccttccgtttgcgccgcttacgactactatctccgtcttcctcaactcagaaagctttggaactccactgattttcctaattggaacaacgaaccgattctaaaaccaattttgcaagctctcgaaatcacgttccgctttctttccattgatctctccgatcccagaccttactccaaccacagagaatggactcgccggatagagtctctcatcatgcatcaaa

SEQ ID NO: 218095 - DNA, 472 bp, Glycine max
catatccatttgttattatcgttattatcccacaggtatccaagaaaagtcttggcggcatccaagcttggaaaatacgtcggttcaaggaaaatctgagtcaacgagtcagccgagtcgcaactcaacccaactcggttaccgttagcctctgaacttcccatcaccaccgccaacacctgcttatacgcgtagaagaatctcttcatcgccgcctcaatcgcctgcatcgcctgcaacaagtgaaccttctcgaactcgctcttcgaaacgtagagcttcatcgccgcctcttgaatcctcggtcctcccttcggatccacctccacctacaatatctccggcaccttgtgcctcagatctctgcacatcttcgtcagttccactaactcattcgatctgaagcagaacgatgccgtttcgccgctcgaggatttcaccgagagttgattctttagcctcaagaaatcgt

SEQ ID NO: 218096 - DNA, 454 bp, Glycine max
tgaagattccacaacagtgggagggagatccaaaaagagagagtggaaaagatggcgcggttgatcacagtggtgtggtgcgcggtggcggtgctattatgcgccgcggccggtgcgtcgtgggtggaggaggcggcgaacccgatacgaatggtgtctggcgtggaggcggaggtggttcgggtgatcggggagtgccggcgtgcgttgaagtttgctaggttcgtgagcaggttcgggaagagttaccaaagcgaggaagagatgaaggagaggtacgagatattctcgcagaatctcaggttcatccgctcccacaacaagaagcgtttgccctatactctatctgttaatcattttgctgattggacttgtgaggagttcaaaagacacagactaggagctgcccacaattgctctgccactcttaacggcaaccacaagctcaccgatg

SEQ ID NO: 218097 - DNA, 473 bp, Glycine max
atttctgccagcctcaaaaaagacttgctctgcctctgccactctctgagtaggactacactgccatggctgcctcagtctccactgttggagctgtcaacggagctccactgagcttgaacagctctggagctggagcttcagttcccagttcagccttctttggcaccagcttgaagaaggttattgcctcaagggtccctaacgtcaagatttcttctggaagtttcaaaatcgttgccgcggaaaaagagattgatgagaaacaacagacagacaaggacagatggaaaggtcttgcctatgaagcttcagacgaccagcaagacatcacatgagggaaaggtttggttgattccctcttccagctgcacaggatactggaactcactatgcaatcatgagctcttatgagtaccttagcactggacttaaacagtacaacttggataacaacatggacggcttttaca

SEQ ID NO: 218098 - DNA, 438 bp, Glycine max
aagagaaagacatcaagactttaacattgcacacattgtaaaatgtagacaatgtaactcaaaattatacaggataacaatccaatatgaacaagataacttattttattatctcaactcttagcttctctccaagtggagaatgcttaggttctcagggtgtgtataagcaggttccatcatcacttcttgcagttgggtcgaagtttgaggcatttggatcagtacaaccttcaggaacgggaatgtttacttgctgagctgctttgccatagaaagttcctctgttgatggaatcttgattagcatcaccaagagcagcctctttcaagtacttgtctgccagttgtactctcttcacattctcttgttcttggacaagcatgttaccatacttcaagagcttgctcaaagtaatcttccggttggtcaaaggtt

SEQ ID NO: 218099 - DNA, 467 bp, Glycine max
acatgtaacatgtattgggttgttatttcttatgagcaataactccttcatatacaaattacatgacaaatgattataattttgtatacttaaataattgttatgagaattatcaagggcatggctataggtagcgtacgtgggactaaaatgacaccaatggaagcatatatatatatttgttaatttatacaacataacgacgaagattatccaaccgagctggatgcttaagcttaatgagagctttgacttcatgcttccggacaatttccctagaaatattcaagttcccagcaatttctcccaatgttctgtcacccttgccatcaagtccatatctctggctgatcactaggctctcctttggcttcagggaatcaagcacattatcaagagcaagtcttaaaacagcaagttgccttctattatcaccattaacaccattaacatcagttattccatta

SEQ ID NO: 218100 - DNA, 472 bp, Glycine max
attgaaaacaaaatggtatctgttgagaggatcaaacagttcacaaatattccatcggaagcttcatggaacattaaggatcgcctgcctcctgcaaattggcccggggaaggccatgttgatatcaaagacttgcaggtcagatatcgtccaaacactcctttggttcttaaaggcatcaccctaagcatcaacggaggggaaaagattggagttgttggtcgaacaggaagtggaaaatcaactttaattcaagttttcttcaggctggtggaacctacaggaggaaaaataatcattgacggcattgacatatccgccttggggcttcatgatcttaggtcacggtttggtatcatccctcaggagcctgtcctttttgaaggaaccgtcagaagtaacattgatccaactggacagtacacagatgaagagatatggaagagtttggaacgttgtcaactaaaagatg

SEQ ID NO: 218101 - DNA, 527 bp, Glycine max
caacgagaagtccaaagtatattactgatgatgcataattcaatataaaggcagtggagcaactgtgtaattgtacactgggcactgtgttatataaattaggacctaaaaaaggctatattttgtttgtatactagagctacttaagccagaggtaattagaaaaaccattcacaaggtttgctcattcttcacttgtccaaacagcaattatgcaggatggtaattgcacctctctaaagtaaaatgcctttctcctttctcgtggcacttggaagatcaatcaaaacttaaaaggcttagcctaagtttggttttctgttattgtctgaatggctgagagagacacatgcatggaactttcttataggccactggaacggttggcatactcttgaactaatgccccaaagagagatggcctttggagcaagttggctggtgaatcaaattctttggcccgccctgcatctacaactagaactctatcacagtccattactgtggtattctatgagcaatgctga

SEQ ID NO: 218102 - DNA, 484 bp, Glycine max
agattctattctcctcaagcaaaacctatagctcccccacactcctccagtacttgaataaaagctaaataaatattaaagcctttccttcatcaaggtactgtttgatctttgaatttcagtcctcaaagattggaacaacaggaacatgtgtactctcacaactgttcctgtgctcccttctaagcttaacaagccttcgctttctccgcaccacaattctctttttccctactgaggaagacgggtcgggaagaagaacaaagcaatggttcctgtatgtgtaacttttcttttcttctgagtttttttttttatttattatcaacatttattgatgttgtgtttgtctcatgggtttgtttggaattgatcaggttgcaaggttgttcgggccagccatatttgaagcctcaaaactgaaggttatgctcttaggagtggacgaaaattaacacccaagatatcttcccaggacttatac

SEQ ID NO: 218103 - DNA, 526 bp, Glycine max
ccactccttacaaaaatctgtttaattctttgaaataaccatgcatacagacatattatacatgaactaatttaatttcttacgaaagaaaaatcataacaaagaaagtaaagaaaaatatataaaaaaaaaaaaattgcaaatacgagcttccttatttacattgaaatgggtttcgaatatttaatttgtatacagggaatttgccaatttggcagcatccccgtaactgtgaattgtagtagtttggctgtttatagattttgttgggtcccaatcccatcacaaggttcgtaatggcggctgggaacttgtttagaccactgaatagggctcaacgtaagcggtggaaagcaacattggcattcttcttggcatggctgtggaattgccaacccctcctcctggaccccacctgtgggtgctgacgcttccttcagtgggccccaacattccaccttgttgaattctggaatgtttgagtgaaagtagacccaaaccaaggcatcttgcaattctgggtagc

SEQ ID NO: 218104 - DNA, 425 bp, Glycine max
agcaaacataacttgcagtaatggcttcaatgaataaccaaaaagaaattgagctctttgagggccaatctcttctgtacatgcagctatatgggcacctaagacctatgtgtcttaagtgggctgttcaactaggtattccagacataatacagaaccatgccaaacccatttctctttctgacttggtctctactcttcaaattccaccagctaacgctgcttttgtgcagcggttcatgcgcttcttggcacacaatggaatctttgagatccatgagagccaagaagatcatgaactaacatatgctctaacccctgcatcaaagcttcttgtcaatagtagtgatcattgtctatctccaatggttctagcgtttaccgatccacttcggaacgtaaataccatcacttgggggaatgga

SEQ ID NO: 218105 - DNA, 446 bp, Glycine max
gaaacaaaagccaggtaaagacgtaaagccataccaaaacattgtatattgattgcatccattacatgtttattcaatttattttggccaaataggaatgagaaatccgtacacagaacatttaacaacatagcggggaggaacataatggaattccaccagaagttgataatgctatgtcatcatagctttattcagcaaacaacacgcaaaccactaaatacaattacaacgatgtctgaggatgttcataaatataaacgttaagggtgacatacacattataaaaatgttcaaggatagacctcaatcagagatctaaaaccaaagatgggaaatattttgtagggtttgaatcctgcttcgatgaaaagttgtttccattctttttccggtctctctcttccattcatcggcaacataataatgtccaaactaagctttgt

SEQ ID NO: 218106 - DNA, 424 bp, Glycine max
aacactcataacacaaagcacaaagcaaagctcatccttgagttaaaaaatggcagcagcttcttccatggctctctcatccccatccttggctggcaaggccgtgaagctgggcccatcagccccagaagtgggaagggtgagcatgaggaagaccgtcaccaagcaggtctcctcaggaagcccatggtacggcccagaccgagtcaagtacttgggcccattctctggcgagcccccgtcctacctaaccggtgagttcccaggcgactacggctgggacactgctgggctttccgcagacccagaaaccttcgccaagaaccgtgaactcgaagtgatccactccaggtgggccatgctcggagctctgggctgcgtcttccccgagttgctgtcccgcaacgggtgaagttcggagaag

SEQ ID NO: 218107 - DNA, 487 bp, Glycine max
  unsure (1)..(487): unsure at all n locations
gtaaaaagcaagtaacattaagttggattcggatacacaagataattcacattatctgaagtacttcaccaaacacaaatctaaaaactctcaaaagtcatttcgttctttgacgctcactttccggggacgaagttggtggcataggcccaggcgttgttgttgacagggtcagcaaggtgatcggcgaggttctccaatggaccctttccggtgacaatggcctgaacaaagaagccaaacatagagaacatggccaatcgtccgttcttgagttccttcaccttaagctcagcaaaagcctctgggtcatcagcaaggcccaatgggtcgaagctgccacctgggtagattgggtcagtgacctcaccgagggggccaccagcaatacggtaaccttcaacggcacccattaggataacttgtgtggcccagatggcgaggatgctctgggcgtggatcaggctngggttgcccaagtagtcga

SEQ ID NO: 218108 - DNA, 508 bp, Glycine max
aacactcataacacaaagcacaaagcaaagctcatccttgagttaaaaaatggcagcagcttcttccatggctctctcatccccatccttggctggcaaggccgtgaagctgggcccatcagccccagaagtgggaagggtgagcatgaggaagaccgtcaccaagcaggtctcctcaggaagcccatggtacggcccagaccgagtcaagtacttgggcccattctctggcgagcccccgtcctacctaaccggtgagttcccaggcgactacggctgggacactgctgggctttccgcagacccagaaaccttcgccaagaaccgtgaactcgaagtgatccactccaggtgggccatgctcggagccttgggctgcgtcttcccggagttgctgtcccgcaacggggtgaagttcggagaagccgtgtggttcaaggccggtcccagatttcagcgagggtgggctcgactacttgggcaacccagcctgatcacgccagagcat

SEQ ID NO: 218109 - DNA, 528 bp, Glycine max
gtaaaaagcaagtaacattaagttggattcggatacacaagataattcacattatctgaagtacttcaccaaacacaaatctaaaaactctcaaaagtcatttcgttctttgacgctcactttccggggacgaagttggtggcataggcccaggcgttgttgttgacagggtcagcaaggtgatcggcgaggttctccaatggaccctttccggtgacaatggcctgaacaaagaagccaaacatagagaacatggccaatcgtccgttcttgagttccttcaccttaagctcagcaaaagcctctgggtcatcagcaaggcccaatgggtcgaagctgccacctgggtagattgggtcagtgacctcaccgagggggccaccagcaatacggtaaccttcaacggcacccattaggataacttgtgtggcccagatggcgaggatgctctgggcgtggatcaggcttgggttgcccaagtagtcgagcccaccctcgctgaagatctgggacccggcctgaaccaca

SEQ ID NO: 218110 - DNA, 323 bp, Glycine max
attcgggttcttcttactcacctacggaacacaggaaaagcctccaaaaccaacccaccgttggcgcgatggctttcccctccaaaggcgatgacgagcaggttctggtgcagcgtaaatcgaatgcgagagttttgacactaaacaggactaaacagttgaatgccctctctttttatatggcttctcggctacttgaaattttttctgaagatgagaaagattctgatattaaattggttgtcgtgaagggaaatggaagggctttttgtgctggtggtgatgttgcagctgttgctcgtgatggaagtaaaggtgactgg

SEQ ID NO: 218111 - DNA, 482 bp, Glycine max
atgggcttattgaattaattgcacataaatagagaatattcaatttcctctaaattagagattatatacctggaaactacatttattagagtatcatactctgattctcaacggtagacttcactagttttaaaatcttatcaattgtaacggtagcaattcataaactgccatacattgaaacatccaagaatcaattgaatggagcaatacgtgtcttccatactttgggcttgaaaatatgagaatgatgatgctttacagctttgaaatagcatatgtaggcagattattaaaccttttaggaagctccaaatctttccatcctttatcatcaagtttagagaagtaacgattaacatcgctatcactaagaagctccaatttggaaggttcccactttgggtttctgtctttatctatcagtatagccctacaaccctcgaagaaatccttgctgtagtggccttttagaatatgac

SEQ ID NO: 218112 - DNA, 309 bp, Glycine max
attcggtttctttttactcacctacggaacacaggaaaagcctccaaaaccaacccaccgttggcgcgatggctttcccctccaaaggcgatgacgagcaggttctggtgcagcgtaaatcgaatgcgagagttttgacacttaacaggactgaacagttgaatgccctctctttttatatggtgtctcggctacttgaaattttttctgaagatgagaaagagtctcatattaaattggttgtcgagaagggaaaaggaagggctttttgtgctggtggtgatgttgcaactgatgctcgtgatggaa

SEQ ID NO: 218113 - DNA, 481 bp, Glycine max
atgggcttattgaattaattgcacataaatagagaatattcaatttcctctaaattagagattatatacctggaaactacattaattagagtatcatactctgattctaaacggtagacttcactagttttaaaatcttatcaattgtaacggtggcaattcataaactgccatacattgaaacatccaagaatcaattgaatggagcaatacgtgtcttccatactttgggcttgaaaatatgagaatgatgatgctttacagctttgaaatagcatatgtaggcagattattaaaccttttaggaagctccaaatctttccatcctttatcatcaagtttagagaagtaacgattaacatcgctatcactaagaagctccaatttggaaggttcccactttgggtctctgactttatctatcaggatagccctacaaccctcgaagaaatccttgctgtagtgtccttttagaatatga

SEQ ID NO: 218114 - DNA, 491 bp, Glycine max
  unsure (1)..(491): unsure at all n locations
tggaattcggctcgaggttggcagatgcaaagngatgtatatgctaagcagtcatataatcgctgatccggaagagcgtggagcatgtgattcgggttgtaacggtgggttgatgaccactgcatttgagtacacactcaaggctggtggactaatgcgagaagaggattatccctacactggaagagaccgtggcccctgcaaatttgacaagagcaaaatcgctgcttccgtggctaatttcagtgtggtttcccttgatgaagaacaaattgctgcaaatctggtcaagaatggtcctcttgcagttggtatcaatgcagtttttatgcagacatatattggtggcgtctcatgcccatacatctgcggcaagcattttggatcatggggttcttttggtggctatggatcttgtgcttatgctccatattcgtttaaggaaaagcctactggatcataagaattcatggggggagagctgtngagaa

SEQ ID NO: 218115 - DNA, 438 bp, Glycine max
gggggaacacaaattaattttattcagggtacttgcaataactattgataacccgggggaatacttggagctagactaactagcgtataaaatttccccttaaaaacataaacatgggcttagcagattcctccttcataacattttccattatggaaattatttacataccccctttactggggcccctaccatgtttagggattcacccttatatttaaggggttcaaacatgttttgcatctacaggggaaaccattgagttcaccccaaatacattgggacctctgcaaaacttggaaaatcctttttttccccagattttcccccatgaaatctttttgatccaaaaaggcttttccttaaaaccaattggggccttagcgccagattcatttgccaccaaaagaaccccatgatccaaaagctttccccaaa

SEQ ID NO: 218116 - DNA, 581 bp, Glycine max
  unsure (1)..(581): unsure at all n locations
gtgacataagagctgcctgaatgaaatgagagaacatttccagtatgcatgccctctctgctcaaagtcagtctgtgacatgtcaaaggtttgggagaaatttgaccttgagattgctgctacacgaatgcctgagcaatatcaaaataaaatggtttggatcctgtgcaatgactgtggtaaaacttctcacgttcagttccattttgtggctcaaaagtgtccgaactgcaaatcctacaacacacgacaaacatgaggcggagcaggtggccacgattattcattggcttcatcaaaagccttcactcgagagctctcttgatgttgtcgtgacttgtgaaggcagtgaaaatagatgtgcatccattgggtacgtggatgtgcacgtgtgggaatttggagtgcatgatgagccacattcagagggataaaataatggttcttatgttgatttggagtgnggggtttaatttgctggtgcttccctagtagttggaatagtccagagtggtagagttcttgtattatatcggtttagccctatcgataagattctagttacatactcgttagtgaaa

SEQ ID NO: 218117 - DNA, 409 bp, Glycine max
ttttttttttttttttttttttttttttttttttttttttttttttttttttttttgggtttttaataattattttactttgaaatcatataaaatggggagacctccacccacaaaaagaacgggaagggcgaagaccaaaacaagggggggaaaaccaaacacaagaaaaaccccaaaacccggggggaacccaaaaaaaaggggggcccccccaaaaaaaaaccccccccccccaaaaaaacccaaaaaaggggggcacacccccccaagggggggccaaaagggcccaaaaaaaccccagggggggacaccaaggacccaagggggcccaaaaggcacaccggggccccaagggcccccaagggaaagaagggcccccaagggaggggtctgggggacccccagg

SEQ ID NO: 218118 - DNA, 434 bp, Glycine max
aacccaaaccgaaaccctaaccctaacggagagatactgtggctatgggcatcgatattcgggacggagaaggacagggtgaactgtccgttctacttcaagatcggcgcgtgcaggcacggcgaccggtgctcccggcttcacaccaagccgacaattagcccaacattggttctgtcgaacatgtaccagaggcccgacatgaacatgagcattatcaccaaccccgatcagccacaaccccaatcccttgaccccgacaaggtgcaggatcacttcgacgacttctacgaagatctcttcgaggagctcagcaagtacggccccattcagagctttgaatattgtgacaacctcggcgatcacatggttgggaatgtgtatgttcagtttagggaggaagatcatgctgccaacgccctcatgaatctcac

SEQ ID NO: 218119 - DNA, 500 bp, Glycine max
aggagattaagagagtgagggcgcaaatggaagaggatgaacagttagcgacgctcatgaggggtcttcgaggccagaatttgagggactcgctcttcgctgaggacgatgttgaacttcgacttgttgaggtagacgagagtagtgagtttttgccattggtgtatgatcctgccagcatttctgcatattgcggaaaacgtccacgcgcggatgcaacgcgcattgtgcagttgctatcagttgcaggaggttttctttctcgcattgccggggatgtgattaacaagaaggttaaagagaatgaagttgctagggccattgagttacgtgaaattgtgacatctttgggtccagcgtacataaaactcgggcaagcattgagcattcgacctgatatactggcacccgtagcaatgacggagctgcagaagctatgtgataaagttccttcatttgcagatgatgtggctatggctctaattgaggaggagcttggt

SEQ ID NO: 218120 - DNA, 476 bp, Glycine max
  unsure (1)..(476): unsure at all n locations
gcctattcggcaatatggcggaaaatggttcaattgagctgaacaagtttgtgttgttttgtttgttgttgctaatacaagtggcagtttctgaaatcatttttgaagagcgatttgatgatggatggcgaagtaggtgggtgaaatcagactggaaaagcagtgagggcaaagcaggttcattcaagcacacagctggaaaatgggctggtgatccagatgacaaaggtattcaaacatccagtgatgccaaacactttgccatctctgcaaaaataccagaattcacaaacaagaacagaacattggtccttcagtattctgtaaaatttgagcaagagattgaatgtggtggatggtacatcaagcttctctctggatttgttaatcaaaaagagttttggtggcgatacaccatatatnttaatgtttggaccagattatgtggcacggatacaaagaagcttcatgtgata

SEQ ID NO: 218121 - DNA, 513 bp, Glycine max
gcgacaaataaaccacttttatttaaaattaaaaagtttcccttggaaagtaacatgagatggactatcaatgtaactataattcataacaatcttgaaatttgtcaaccagataattgagaaggacgttttatcccatcaaagctcgtcatgaccatcgtaatcatagcgatgccttctatatttgtctctatatctgtcccgatatcgtcgatcatgacctctctctcgtctacgcctttcaccttcttctcttgctctttgagcctcctcctcctctttggcttttctcactttctctgcttcctcaaaaccttccttttcaatctccctgttggcaaacacctcctcaacaacttgttttgcataatcagggtcgtcacaaatcaaaacgttgtcaaaaactgaaccgcctttaacctgccaaacttcaatgcctacatacttgataggcttaagcacataaagatcagggtcgtcttcaaactctggattatctatccatggagtttt

SEQ ID NO: 218122 - DNA, 494 bp, Glycine max
gcatgatagttcagtgtctacaataccaggtgattttgtcattggtgttaagttgacaaccataaacaatatgtgtgcatatgggctcaatcctggtatttcaggttctcgtcttttgggcaccattcctcagtctatttcacagcaaactgtttggaatcaaatggcaacagtgagaacaccattgaattttgattctagcaagcagagcttttgtcaattttctattgaccttctcggtggaggaattttagtggacaaaactggagattggatcacacttatacaaaattctccaattagtaacttgttgagagttgctgcttggaagacaggctgtttaatggttaaaattgcgatgtctgggaatgcagcagtcaaaaagagtgattgcgcctcattggtacaagtgtttttaacaaacagcaacagtacagagcatttcgatgcatgtaagtggacaaaatcggaaccacattcctgggaattgatct

SEQ ID NO: 218123 - DNA, 534 bp, Glycine max
  unsure (1)..(534): unsure at all n locations
aaaataacacacacttcacacatcattacgacaattaaaagaggtgtggaaattttcaaatagacagagcatactcaacaagagggtcatgtctaatttcctttattgaattaaacaaacgaacaaacgaaagaaaacacaaattccagatcatgcagaggattccgcattttcagaagatctggcagtagcctgtggaacagaaaaagctggcataagagtattaccagcaatttcaaaatcttgagaaattcccaagagaatatcaaaaactgtagactgtttgggattgtcaataaggaaactcaagtgccatgaagtttgatttgcccactcagaactccacatttcaaaaccattattaggaccacatacctctattgggaagatcaattcccaggaatgtggttccgattttgtccacttacatgcatcgaaatgctctgtacttgtgctgtttgttaaaaacacttgtaccaatgaggcccaatcactccttttgactgctgcattcccagacatcacanttttaac

SEQ ID NO: 218124 - DNA, 321 bp, Glycine max
cccagttcaaagaaacttgacaccgattagattaggggcttcgaacaaggagccccgaaacccaaaccctaatctgattcgctttcgattatggcgtctgagagcgcttctcgatcgagttcccgcggcccgattcgtacattgggagcttgataagcttgacctctaagagtgagatcagatacgaaggtattctctacaacatcaacaccgaagagtccagtattggcctcagaaacgtgcggtcttttggaacagaaggaaggaaaaaggatggcccacaaatccctcccagtgacaaggtttatgagttatactttt

SEQ ID NO: 218125 - DNA, 320 bp, Glycine max
tttggtcataaagactacttctaatccttatgtgacacggtggaaattggtaatgatttctatctgcttggccctgattttggcagttaccttgaggcacaggctgctgccgataaagcatttgttgaacccagagaagtggatcaagatgagtatccttagtgttgctggctctgggagatttagcagtgacagaaccattcaagattatgcagagaggacatggaaaattgatccctgccgatgccctctctgatctcattattagaaattttagttttgtttggggaggccagaagaaaagggacaatgaaaattgt

SEQ ID NO: 218126 - DNA, 348 bp, Glycine max
ttttttttttttttttttttttttttttttttttgtttttttttttttttttttttttttttttgttttttggtttcttttttttttttttttaccggcccccaaagaaaaaggaaaataccctgggaccggctacccggtcacaagggcaggggggggaaaaaccccggggggaaacccccaaaagcaagagggatctccccccaagaacggggccacccaaacagggaagggcccgaggggggcagacgggggcaccggggcggaaggggacaagaccagacatgagcttttccaacggggcaagatttccccagcttaaaggggcccctaccttggggccccccc

SEQ ID NO: 218127 - DNA, 529 bp, Glycine max
  unsure (1)..(529): unsure at all n locations
ctaagaccgcatttgttgctgcggatgctgatgggagtgttccctttgtctggggaactgatgctgatggaaatctcattttttcagatgagacagagatcgtaactaagagctgtgggaaatcttctgcaccattccccaaaggatttttcttttcaacatccggaggtttgagcagttttgagcatccacttaatgaggtgaagcctgtaccaagggttgacagttctggacaggtgtgtggtgcaactttcaaggtggatgctgaggctaagaaggaagcaactggcatgccaagggttgggagtgctgctaactggtcgaataatatctgattgcgactctattctgtttgaattaagacttttattttatcatagctgcactcggccgaattttgaagttctgtacctggttccataatatgataaccttgaggctctagcgaggcttagcttatcatattaatttatttactggcgaggcttagcttatcatatntaattatttactgaatctgagatatgat

SEQ ID NO: 218128 - DNA, 504 bp, Glycine max
  unsure (1)..(504): unsure at all n locations
aaggcagtaaataatcatttggaagaacctgtccgcaagtttacattattacatgatgagtgcgaagagagtatgagcttaatatttgcttcaaagcaacttcgtatagcttcatgaaatcatatctcagattcagtaaataaattaatatgataagctaagcctcgccagtaaataaattaatatgataagctaagcctcgctagagcctcaaagttatcatattatgggaacaggtacagaacttcaaaattcggccgagtgcagctatgataaaataaaagtcttaattcaaacagaatagagtcgcaatcagatattattcgaccagttagcagcactcccaacccttggcatgccagttgcttccttcttagcctcagcatccaccttgaaagttgcaccacacacctgtccagaactgtcaacccttggtacaggcttcacctcattaagtggatgctcaaaactgctcanacctncgatgttgaaaagaaaaatcct

SEQ ID NO: 218129 - DNA, 545 bp, Glycine max
cagcaacattcttctagatgaggagatgaatccaaagatatcagactttggtcttgccaaaatatttgggggaaaagaaactgaagcatgtacagggagagtaatgggaacctttggatacatggctccagagtatgccttggacggattcttttcaaccaaatccgacgttttcagctttggagtagtccttctagagattctcagtggaaaaaagaacactggattctatcagtccaagcaaatttctagccttttgggtcatgcatggaagttatggacagagaataagctactggatttaatggacccatctctttgtgaaacatgcaacgaaaatgaattcattaagtgtgcagtcattggactcttatgcgtacaagatgaaccaagtgatcgacccactatgtcaaatgttttgttcatgctcgacatagaggcagcaagcatgccaattcccacgcagccaaccttttttgtgaaaaagcatctttctagctcagcttcctcttcgagcaaaccagatataagtcagtatgagagca

SEQ ID NO: 218130 - DNA, 541 bp, Glycine max
aaccaagaaaaattttatattaaaaacatacgttataaattcaaaatggtgtatgtactaaaaagacagacaggaaatccaaaatttatccttaaaaataatacagaatactctaaattgttataaaatacaattaaaatatcattaattattttacacgtactctaacaatagcttcaatcatgcactatcgaccttcttgataactgctctcatactgacctatatctggtttgctcgaagaggaagctgagctagaaagatgctttttcacaaaaaaggttggctgcgtgggaattggcatgcttgctgcctctatgtcgagcatgaacaaaacatttgacatagtgggtcgatcacttggttcatcttgtacgcataagagtccaatgactgcacacttaatgaattcattttcgttgcatgtttcacaaagagatgggtccattaaatccagtagcttattctctgtccataacttccatgcatgacccaaaaggctagaaatttgcttggactgatagaaatcagtgttcttttt

SEQ ID NO: 218131 - DNA, 529 bp, Glycine max
ggctcgagatgcaggaagcgacgaaggtgataataatcggtgccggaacttctggtatcgccaccgccggttgcttaacgaagcaatcaataccttacataatgctcgagagagaagactgtttcgcttcgctgtggcagaaatacacctacgatcgtctccaccttcatttgaggaagcaagtttgcgagttaccgcacttaccgtttcccaagtcttaccctcactacgtgcctcggaagcagttcatagactacttgggaaactacgttaaccactttgagatcaagcctctgtaccagcgtgcagtggagttggtggagtatgatggatggaaagggatttggagagtgaaagctcagaatagaagatctggtgagcttgaagaatacgctggaaagtacctggtcgtggccagtggcgaaaccgccgagcctcgtctgcctcagattcaaggcttggagagtttcaatggaaaagtgattcactcaactgcctactaaaacgggaacgagtttaagaataaaca

SEQ ID NO: 218132 - DNA, 504 bp, Glycine max
ctacaatagtaaaaaatttattattgaaacaaaattatatatgaatttcttaccataataatatcacattacgagaatcacaacaagtaatttaaaacaacatacctaattcatatccccaaaagaagaaagtgtcatgtacatactgtttctgcaaccaataatagataatagatcattacatgacacaaattccttctctttcttcttgaggaattaacgaggcaatatcatttgctactaattgggcatccatgttagctccaaagaaaccccttcttgacagcccaacacaatacaaaccatttcgacctttccaatgatttgggaaactgttttttggaaagccatcctcatttagaagatcatcaccccccttaagccacttttgagttgatctcttgaagcctgtacagaaaacaattgagtcgaatgtgtacgatttgccatcctggaacaaaacttcattacctcttatactctttatttcagctggcaacacct

SEQ ID NO: 218133 - DNA, 512 bp, Glycine max
attatactctctgttgctaattttggttagcaactcggccttcacactgacataccggattacacttacaccaatctctcacttgccctcctattctgcttctctactccaccttcctgaatgcaatggacggaacatatgcctgcgccctctgctataactgcctactaccatggccacagacgatcaagacaaggttgaggaagatgctgccgttgatgatacgtgaaatcctacagctattgtagcatagacacagtagagatcaaatcagatggagaaatggagcacgaattaatacaggcactgcaagcattctattatgagggcaaggctattatgtcacatgaggaatgtgatgatcttaaggactaactgatcgctgatgggagcaccgttgtgatgctgagtcctgaggagcaaaaatgtctggaagcgtctatgggacatgtgtctggaaaaccaatctcgagcgacagatagcttgatcagttgaaacttaggctatagat

SEQ ID NO: 218134 - DNA, 507 bp, Glycine max
aatcattcgtctttcttttctgttttttttttaccgctccattattaaaaaatggggccgcacagcatttttgcaaaaggcccaaagtgtgcctacaaattaaaaatcttgatgttaagaatatcctcatataattcatctcttctggtagacgaacctacgtatgctatacaaagttcataccattacaactcactagcatatatggtgtgcgacattgtgaacaatgatttcatggcccatagagaacaatgatttcagtagcttctacctatgacgatctgatctcattacaggaaacaatagtatcaagcgtgcctacatttaagcattacttccttctggtaatgtaatcaatcttgtttttgaatcatacaccattttagttacacagttttcacatttgactttgatggaggaatcgccacttgaaaccgacagtattgtcccacagaaagaggtattttcagtaccacagttgcgacaagggccctctaaatcagaaaa

SEQ ID NO: 218135 - DNA, 218 bp, Glycine max
  unsure (1)..(218): unsure at all n locations
attcggctcgagaaggaatatgaacttctcagaaggaacttcagtgatactggttgcttcggctttggtattcaggagcatattgatttgggaatcaagtatgatccttcaactggtatttatggaatggatttctttggtgttctggagcgactctgctatcgtgttggacgtcgccgaagatgcaagtcccgtgtnggaattcagcaccgagtcac

SEQ ID NO: 218136 - DNA, 343 bp, Glycine max
gattcaaaaccggccaaaaaaaaaacaaaaaatcacaaaaagaacgagccaaaggggacaaaactggaaacacacccccaaagggaacccaacctaaccaaagaaaagcccgggacctggaaaggggcacccccacggactaaacggggaaccccctcaaagaagccacccgggggacccggggcggaagcccaacccgggacttgcatttgcgggggcgtccaacacgacagccagggagcgccaaaacaaccaagaaaacgcacccttaaaaaccggagggagggacaaaccggagaccccaaaccaaaagcccccgaaaaccaaagccgaaaacacccgg

SEQ ID NO: 218137 - DNA, 420 bp, Glycine max
aatataagaaccataattagcactaaaatccaacatgcaaaatttccacattgcctgcatggtgacgatgacgaccttaacccgctaaacaaataaaccgaagactaggatatttagttctgatgagcatgaataacatgagtctaatacgaaaaaattaatcatggagattactgtgaaacacccaaccacttagaacagatgtcgaataccgaataatcacgaatctgacaccatagggcgatcccatgctatcccagcagcctagaaggccgacgcttactcgttagagacagtattcctgttcttggcaagctggtccttcttgaccttaacccgctgtgcctcagcgagaaggggcattctcttagcaagcttggcataaggattcagcttcagcatcgagttgagattcttaag

SEQ ID NO: 218138 - DNA, 513 bp, Glycine max
cgaagaagaagaatccaaaagcaatcccatctgtgtgtttgcacatcggaagggagggctatcaaactctaagatctaatctaatcagccttttgggggtgtttcagacattgcatgcatatgggtggttgtgttggatgctataaaaggccttcactgagtcccacagtggatgtgccatcaaaagggttggcaacacaaagtaacgtagtgaggaaaccgagttcatcagaggatttttggaccaccagcacgcatgatatggacaacagcgctgttcagtcacaagggagcatctcttcagccagtctaacaaaccaagctgtggtttctcatgctggttctttcaaaagcagcaccaaccccactgaatttggaaatcacggtgtaattctttggaatcagactcggcaacgttgggttggaaataaatagcctgagaaccaaacacaacaattacaagaacctaaattgagttggaatgcaacatatgaaaagttacttgggagcaac

SEQ ID NO: 218139 - DNA, 459 bp, Glycine max
caaaccaaacaaaacataagcaccgctcttttctctccgaaatccccatctcccttcacttctgagctctggacgagatcccagatctcaccatctttcacgcactcttccatcagattcaccctttcgtttaacgcaaactcataacttgaaggttaatggctgctccaccggcaagggctcgtgccgattacgattatctcataaagcttctcttgatcggtgacagcggtgttgggaaaagttgcctccttctgcgtttctccgatggttctttcaccactagtttcatcacaactataggcattgattttaagataagaaccattgagcttgatggcaaacggatcaagctccaaatttgggatactgcagggcaggagcggtttcggacaattacaactgcttactaccgtggtgctatgggcatattgctagtctatgatgttacagatgaag

SEQ ID NO: 218140 - DNA, 518 bp, Glycine max
  unsure (1)..(518): unsure at all n locations
aacttgttaaaaaagtcagagacactacttatcacacaaatttataaagaatgacaaggttaagcacaaagtcagcatcatgatcattatacacgtaatttcttctttcttcttgttcttgtacaagaatgttgcctccaatttgtaacatttgtcctcaaccacaacaagccgatttttgtgcagcctgtccagcccctcctgactggtcttggttgattttgattgttgatggctctgccttggtgtcagtgtcagccagcctttgttttatatctcttgctattgagaagaaaacttcctccacgtttagatttgtctttgcactagtttcaaagaatttgatcccatactcatcagccagtgcttggcccttggacgtaggcacggcccttttgctttcatccatatcagctttgttccccaccagtattttgttaacattgtctgaagcatgttgctcaatattgcgaatccaattcctgatattgttaaatgatgcttcatcntgtacatca

SEQ ID NO: 218141 - DNA, 326 bp, Glycine max
  unsure (1)..(326): unsure at all n locations
atttgcttagcctcgcataacagttatgaagatagaaaaaaattgtacagacagaaccttgatgatgaaaccttaatatgaatcaaatttcagcatcaaaaaaaaaaaaaaaaaaaaaaaaaaaaaaaactgtntttcccaaactaacaataaaccttgttgcaaacaaaaaaaaaaaaacataaaaagaaaaaaaaaaaaaaaaaaaaaggggggcccccccacaaggggccccccccccccggaaaaaaattccggccggggcccggggggggacccatttttccttaaggggagggaattaaaacctgggggctcactgggaa

SEQ ID NO: 218142 - DNA, 451 bp, Glycine max
caatggcatccacacaatgcttcttgcaccaccatgccctcaccactccaaccagagcttcatcacagcgcttagttgtgagcaccaaaccaaaccacattgtttgcaaggcacaaaagcaggttgtccaagagggtgaggacactactaacattgtctctcgcaggttggccctcactgttctcattggtgctgctgctgttggctctaaggttgcacctgctgatgctgcctatggagaagctgccaatgtgtttggaaagccaaagacaaacactgacttccttccatacaatggggatggattcaaactctcaattccctcaaagtggaacccaagcaaagaggttgagtacccaggtcaggttcttagatatgaggacaattttgactcaaccagcaatgttgctgtcatggtcactgcaactgacaagatgtccatcactgacta

SEQ ID NO: 218143 - DNA, 510 bp, Glycine max
aagtccttagaagacatgaaaaattaagaatcaaagtgcttactccaaccaacagcctcaaaaactgaaacttgtggacaaaaagtggccacataattcaacacatacacaccccttcaagatgattcacatgcagaatagcactccactgataagttcttaggcaacactgaaagaacttgctgtgctctccacaaatcttcttgctcccttaaaccatctcttgtctccagcttgagccttgcaaatgtatagtttgccatctttcacagttgctgcaatcagctggtgcttgccaccttcatctccatcagctgtccttgtcaacacagtcaaactgtagtactgtttcccatcaatgacaggcgttgaactctccaagatgttgcagttgccacagcattggaatcaaaaccaccctcagcatcagtttggccaaagaaggcttgtttctccagcaagtaatccacctgagataggaactactaagtgaaccttatcagtgatgga

SEQ ID NO: 218144 - DNA, 377 bp, Glycine max
gcctgtttcttggtacgacaacgagtggggatacagctcacgtgtcattgatcttcttgtattcgttgccaagaagtctctttaaggtgttacttcaaagtagcttgtcttcacattattaccgtatgtttatgtttagctgcgatttagtgtcttgctcgagcaaaaaatgagaggtctgaataaatcggtttctgaaaccagtggtgttacttgctggaggagcattagctcttttttggacttttgatgttttctcttgtggagggggatcgagtttttggatttttatatactcgctgatgtacttggcttgaatacttgctaatgtacttgttattgattgttatagtagatatttgtccgtcctttttttc

SEQ ID NO: 218145 - DNA, 382 bp, Glycine max
gaaaaaaaggacggacaaatatctactataacaatcaataacaagtacattagcaagtattcaagccaagtacatcagcgagtatataaaaatccaaaaactcgatccccctccacaagagaaaacatcaaaagtccaaaaaagagctaatgctcctccaacaagtaacaccactggtttcagaaaccgatttattcagacctctcattttttgctcgagcaagacactaaatcgcagctaaacataaacatacggtaataatgtgaagacaagctactttgaagtaacaccttaaagagacttcttggcaacgaatacaagaagatcaatgacacgtgagctgtatccccactcgttgccgtaccaagaaacaagcttcac

SEQ ID NO: 218146 - DNA, 535 bp, Glycine max
gaactttctcataaaactcaagctgcagctgcagtagcttcatcaatagctgaggagtcctttggtgcaataagaacagtaagatcatttgcccaagaagattatgaaacaacacgctactcagagaaagttaatgaaacacttaatcttggtcttaaacaagctaaagttgttggactcttttctggaggccttaatgctgcatctacactttcagttattatagttgttatatatggagctaatttgacaataaagggttacatgtcctcgggtgatcttacatctttcattctttatagtctctcagtgggttcttctatatccggtctgtcaggattgtatacagtagttatgaaagctgcaggtgctagcagaagggtatttcaacttttggatcgtacctcatccatgcctaagtcaggagataaatgtccacttggtgatcaagatggtgaagtagaactagatgatgtgtggtatgcctatccatcacgccctagtcatccggtgctcaagggcattacattgaagc

SEQ ID NO: 218147 - DNA, 541 bp, Glycine max
attctaacagtatagatcacactaattactttcggttttaaaatatcgttagttacaccaaatctgttgctaaactttaatcatgtgtttggactagaagaaaatacagacaatgatacattttcttttatttggttgaggaaagaaagaaaaattgacatttagaagaaaaaatcaaaattttctttctttctattttctcttctattcaattttaaaatttttctcacttccttcgttttctttcctctgaaacagaaggtaatgctgtaacttgcaactgtggaagtgaaggtcttccaaggaacttgtgcctcagtatcatatgccccttttgtgggcagactagagtgtttaacaagcaaggtggtagggtttggttattcataatttgctagaccgagatttcggtttttgttggttgcagttgtctcttgaccaatgcagtatagacaccattcttgttgagaagctcttcatggttgcctctctaactacttggccatcagatataacttgaacagtattcagcagtttaaca

SEQ ID NO: 218148 - DNA, 513 bp, Glycine max
caccgaccaccgaagctctcttaaccctaacactggttgacattgcatataataatagcagtgtttttagagggtaaatattcattgattcattgattccagatcctgaactcaacaacaacccaaagataaaaagcacaacacaagacactgaactcgcactcactgggttttcaaccatggatgcgatacggaagcagctcgatgtgttgatgggagccaaccgtaacggcgacgtccgtgaagtcaatcgcaagtactacgatcgcgacgtctgtcgtctctacctcgtcggtctctgccctcacgaactcttccagttaacgaaaatggatatgggcccttgccctaaggtccactccttgcagctccggaaagaatacgaggaggcgaaagcaaaggggaccgataattatgacagggagttggaggatgtaatagataagcttattggtgagtgtgataggaaaattggcagggctctaaagcggctcgaggacgacgatgcgaaag

SEQ ID NO: 218149 - DNA, 395 bp, Glycine max
  unsure (1)..(395): unsure at all n locations
ggcagggtacatgtcaagcaagaagaccatggagatcaaccctgagaacccaatcatggaggagctcaggaagcgtgctgatgcagacaagaatgacaaatccgtgaaggaccttgttctgttgctgtttgagactgctcttctcacttctggtttcagccttgacgagcccaacacttttggaaacaggatccacagaatgttgaagcttggactgagcattgacgaggatgcaggtgaagctgatgctgaaatgcccccactggaggaagccgaggctgatgctgaaggcagcaagatggaagaggttgattaaaattaaatatgatgcgtttcttgttagtagcgtctctaatgccttttttggctatgnttntatctcccttttttaattt

SEQ ID NO: 218150 - DNA, 475 bp, Glycine max
actacaaccaacaactcaaaaatagacccgcgaaattatagctaattagctaaatatccattgaacactgtcatcaatccaaaataaaaaaaggagaaaaaaacatagccaaaaaaggcattagagacgctactaacaagaaacgcatcatatttaattttaatcaacctcctccatcttgctgccctcagcatcagcctcggcctcctccagtgggggcatttcagcatcagcttcacctgcatcctcgtcaatgctcagtccaagcttcaacattctgtggatcctgtttccaaaagtgttgggctcgtcaaggctgaaaccagaagtgagaagagcagtctcaaacagcaacagaacaaggtccttcacggatttgtcattcttgtctgcatcagcacgcttcctgagctcctccatgattgggttctcagggttgatctccatggtcttcttgcttgacatgtaccctgcc

SEQ ID NO: 218151 - DNA, 428 bp, Glycine max
ctcgagccgaatcagctcgagcaacaacaatacaagttctcgctctatgggcgttattacttcacactaaggccactgataaatatgatggcacgcctgctctagttaaaactgactctgaactagttaagactacccctgccggtgaatatcttactgctgccctgaatgactttgatccagatcaatatgaggggcatgctgccatatctgatggtgcaaacaagcttttgatgctggttctggctgctgtcattaaagctggtgcttctagagaacatgagatactcgctgaaattaaggattctgatttctcttttattagaaagatggaaccaaaacgagtaatggacaccatgcttgtttcccgtgttagaattctggatataagatctttgcttgctagatccccagagttgcaatcaatt

SEQ ID NO: 218152 - DNA, 444 bp, Glycine max
  unsure (1)..(444): unsure at all n locations
caaaccaaacaaaacataagcaccgctcttttctctccgaaatccccatctcccttcacttctgagctctggacgagatcccagatctcaccatctttcacgcactcttccatcagattcaccctttcgtttaacgcaaactcataacttgaaggttaatggctgctccaccggcaagggctcgtgccgattacgattatctcataaagcttctcttgatcggtgacagcggtgttgggaaaagttgcctccttctgcgtttctccgatggttctttcaccactagtttcatcacaactataggcattgattttaagataagaaccattgagcttgatggcaaacggatcaagctccaaatttgggatactgcanggcacgagcggtttctgacaatacaactgcttactaccgtggtgctatgggcatattgctagtctatga

SEQ ID NO: 218153 - DNA, 518 bp, Glycine max
  unsure (1)..(518): unsure at all n locations
aacttgttaaaaaagtcagagacactacttatcacacaaatttataaagaatgacaaggttaagcacaaagtcagcatcatgatcattatacacgtaatttcttctttcttcttgatcttgtacaagaatgttgcctccaatttgtaacatttgtcctcaaccacaacaagccgatttttgtgcagcctgtccagcccctcctgactggtcttggttgattttgattgttgatggctctgccttggtgtcagtgtcagccagcctttgttttatatctcttgctattgagaagaaaacttcctccacgtttagatttgtctttgcactagtttcaaagaatttgatcccatactcatcagccagtgcttggcccttggacgtaggcacggcccttttgctttcatccatatcagctttgttccccaccagtattttgttaacattgtctgaagcatgttgctcaatattgcgaatccaattcctgatattgntaaatgatgcttcatctgtaacatca

SEQ ID NO: 218154 - DNA, 445 bp, Glycine max
  unsure (1)..(445): unsure at all n locations
ccgaaacccaatgacccacctagccatggtttggcttcaaacatggctccctgaaccctagcgtttctccctcttcgccaacaacgctgatccgatcccgatctgtttctgattccgatccgatccaatccaatggctggggcagcctctgctctgttcctccttgacatcaaaggccgcgtcctcatctggcgcgactaccgcggtgacgtcaccgccgtcgaagctgaacgcttcttcaccaaactcatcgaaaaagagggggatccgcagtctcaagatccggttgtgtatgataatggtgtgacctacttgtttatacagcatagcaatgttttcctcatgatggctaccagacaaaactgcaatgctgctagcctncttttcttcctacaccgtatcgttgacgtggttaagcattattttgaagaattgaagaggagtc

SEQ ID NO: 218155 - DNA, 529 bp, Glycine max
ctgtaaaactgtgaatagatatttgaaaaatacatgtatattttatcgtgcatacatggttgagggacaattatttccctatctataattggtcagactacaatttgaccaattatacaaaaccctagaattctctgtaaaatgaagatcagactacaatttgaagacgatagaaaaagatggacagattgtgattacaaaaaaggcctgagaatgaagaggaagaaccaatcatttttcctatcaaaacagatttgaccaaagggacttgcaagagtttctagcttagatttagctgacaactttctagacaatgagtaacttataatttgatgcggtcagccaaaaatcgattaaagactccctcttccatccacgatcgttaaatgagacaattattttgtgaataccaaacagagacacaaatctcagatgagcctcagttcatactcttcagccattgttatgtatctcacccatggaagagcctgataaccacttttctcaataatcttcaaatatcttacct

SEQ ID NO: 218156 - DNA, 435 bp, Glycine max
aaattctagtgattatagactatctttatataataatataaataagaataaaaaaataaaaaaaaaaaaagaatctatataaatataaaaataatatatataaggtacaaatagtaaatcgaggtacccattttatgataaactttccttccatttttgttcctctagtaggcctagtatttccggcaattgcaatggcttctttatttctttatgttcaaaaaaacaagattttttagatacagaaaacaaagtaaaattctggggttttttattccccaattataatactaaattcaaaaaaaggagagtaatgagtataatctttcgctcagacgatgtactgatatattctatggcggaggttcgaagaacaagcaatttattttgcgccgatttcactttgataggttcattggggttattgctcgttgc

SEQ ID NO: 218157 - DNA, 486 bp, Glycine max
attgaagatatcaaaaccaccacctatatcccaaaaaataatcgacccaaaataaaaactactaaagagacccgcgattccataaaaagccatcgtggccccttgtggaataaatggaaaataaataaagtccggaataaaagaaaaatcactaattttctcagaaataaagaacaaatccataccaagataactggaaattgcaacgaacaataaccccaatgaacctaacaaagtgaaaacggcccaaaataaatggcttgttcttcgaacctccgccatagaatatatcagtacatcgtctgagcgaaagattatactcattactctcctttttttgaatttagcattataattggggaataaaaaaccccagaattttactttgttttctgtatctaaaaaatcttgtttttttgaacataaagaaataaagaagccattgcaattgccggaaatactaggcctactagaggaacaaaaatg

SEQ ID NO: 218158 - DNA, 381 bp, Glycine max
aaattatatagattatagactctgtttataggacaatataaactataatgctgaaattatcagcagtgtagagactgtgtatacataaaactcatatatataaggtactgatcgctaatctgggtgcccatcaattgaaaactgggctgagattttcggtgctctagtaagactaacgtctgcggcaattgcaatggctgcgcaatgtatatatgaggatatactcaagatcttttagatccagaagcctgcttatagtcctgcggtttcagatgccccagttgtcatactaaatacagaaacaggagagttacgagtgtaaactttgagtgacacggtgtactgatatatactatggcggatgctcgaggaacaagcatt

SEQ ID NO: 218159 - DNA, 548 bp, Glycine max
attggagatatctaaaccaccacctatatcccaaggaataatggaccgataattagaactactaatgagacccgggattgcataaaaagtcatcgaggtcccttgtggaatcaatggaaaatgaatgatgtccggaattagagaaatatgactaattttcttagaaataaagaacaaatccataccaagataactggaaattgcgacgaacaataaccccaatgaacctaacaaagtgaaaacgggccaaaataaatggcttgttcttagaacctacgtcatagaatatatgagctcatcgtttgagcgagagattatactgattactctccttgttttgaatctagcactatagatggggaatcaaaaaccccagaattttactgcgctgtcggaatctaaaaaatcctgattttttgaacattaagagatatagaagccattggaattgcccgacatactaggcctactagaggaacaaaaatggaatgaaagtctatcataaaatggtgacttcgatttactatgttgaccttatagagattact

SEQ ID NO: 218160 - DNA, 518 bp, Glycine max
  unsure (1)..(518): unsure at all n locations
caggctcattgatgtaccaatgagtaactgcatcaacagtggtatcaacaaggtgtacatcctcactcagtttaactcagcctctctcaacaggcacattgctcgcgcttacaactctggtaatggagtcacctttggagatggctacgtagaggttcttgcagcaacccaaactccaggggaggcaggtaaaaagtggtttcaaggtactgctgatgcagtgaggcagtttcactggctctttgaggatccaagaagtaaggatattgaggatgtcttgattctttctggagatcacctctaccgaatggactatatggactntgttcaaaatcatcgggagagtggtgcagatatcactctttcttgtctgccaatggatgacagccgtgcctcagattttggtctgatgaggatagacaacaagggaaggatcctttcatttagtgaaaagcccaaaggagaagagttgaaagcaatgcaagtagatacaaccgtgttgggcctttcaaggatga

SEQ ID NO: 218161 - DNA, 393 bp, Glycine max
ctgctgatcggcgcggtcgaaaagcccaaagcatatagagggtccgaggacacttggacaacagcgaccatacagagatatgcgcgtgcatatatgcgtatgcacacggtatcagccgttatggagacaagatgatagctacgcgaggttttgactgcttaccaacctggtggaacactatggctgcatactggatccggatattgtgaaccggttccgatcatgcagatgcacattcacatagtcaaggctcatgggggggcgtctcaattaggcatgatgagtgaaccatcacgggagggataagatctttaactcgagatagactgctcgggctgaactatggtgcatatgagagcgatgtcaaaagggtctttcgatgactgataaatg

SEQ ID NO: 218162 - DNA, 498 bp, Glycine max
gttggcagatgcaaaggatgtaatgcaagcagttcataacctgggaggcattagattgccagttctgactcctaatttaaaggtgcaaataactgctagagcaacaataaatgggcatatttatgttcagatgtctgatctgttacaattatagggttttgaagctgctatagcggctggcgctagagaagtagctgtttttgcatcagcttctgaatctttctcaaaatcaaacattaattgtagcatagaagaaagccttgtccgctatcgagctgttactcgggctgctaaacagctctctattcctgttcgagggaactgtagttccaatgcttttggctgtaatggctgttgtgccagcagagaagcttgctgtccacttccatgacacttatgggcaatcccttccaaatattcttgtgtcccttcaatggggatcagtgcagttgattcttcagttgctggtctaggtggctgtccttatgccaagggagc

SEQ ID NO: 218163 - DNA, 523 bp, Glycine max
  unsure (1)..(523): unsure at all n locations
atcttgtaaaagagtaaatgatattttctatgatctttttcagaattatacaagaggcgtggtataaactaaacatcatgcacaatgagtgcatgatttaaactaaaaaacaaaaaattggagggataaaaattgcaagcttacactcaaatgagaagcttgtacttgtacttgctattggcagattacatgcattacttcttcctttccaactcatcaacgtgagtgggcattttattctttttctataattacggggttaataagatgaaacaatagggtgatgaaacgaatagggtgtcctctcactgcttgaagcatccaatttttatttttatttttatggtagaacatattatcatatcttggaagcatcagctgtgactcggctaaaggctaccgcggtctttgagccagatgggcgccccaaatgcttgccgatgaactcaccggctaacatgagctttccgagatcaacgttggttntcaccccaagtccattcagcatgtacacaacatcttc

SEQ ID NO: 218164 - DNA, 419 bp, Glycine max
agggcctcgtgtcatccttggaagtggttaaccgaaaccgggtccgcgtgcacctgcacagcccgatctcgccctctggatcacaatacccctccccctcgtcgtccggcggacctatcacctcgccccttccctcgtctagcagccccgcaccataccacttcacgatcggctcggtcgacagctttgaaacgcagcttacggctgcgcaggaggagctgggcatcccgtctcaggagcgcatacccgtccaatacaaggaggagggcagcggatggtcagtgctcatctcgcttgcgccgacgttgttgctgggagggttccttttctggagcatgaggcggtcgccgatgggccgtgggggtggatcgggccgaatctttggcgtgggcaagagcaaggccagatgttcaacagga

SEQ ID NO: 218165 - DNA, 491 bp, Glycine max
ggcaaagaattttgcatagccaagatccaatgcataattctcaatctctaactaggactatctgtagtgtttcatgaataagaaatataatgactgtgacctaaacaaactctaaacaaaagggtaattaaaagtgatgaagagaaagcaatttgtagtctctaaaatcctctgccgcagaaggatttacatttgatgaggtgctatctgtgtcccctccctattcatgtcccccgtttgttgatgttactgttcctgttgctgctgtttgttgttgctgttgctgctgctgttgttgttgctgttgctgcagctgttgttgcagttgcagctgttgttgctgctggtgaaactgttgttgctgctgaagttgatgctgaaattgctgttgctgctgaagttgatgctgctgctgcttttgggaatgaatttgaagttgttgaaacttttgtgcagctaaaagagtgtgcatagcctgattgttgggatag

SEQ ID NO: 218166 - DNA, 513 bp, Glycine max
  unsure (1)..(513): unsure at all n locations
gctcgaggattgaagagacccagcagaccgacaaggacagatggaagggtcttgcctatgatatctcagacgaccaacaggacatcacaagaggaaagggtttggttgactcccttttccaagctccacaggatgctggaactcactatgctgtcatgagctcctacgagtaccttagcactggacttcgccagtacttggacaacaacatggatggattttacattgctccagcttttatggacaaacttgttgttcacattaccaagaacttcatgaccctgcccaacatcaaggttcctctcattcttggtatctggggaggcaagggacaaggaaaatctttccaatgtgagcttgtctttgccaagatgggaatcaaccccatcatgatgagtgctggagagttgnaaagtggaaatgcangagagccagcanaactgatcaggcagagataccgtgaagccgagacttgatcaagagggaaagatgtgtgctcttttatcacgatct

SEQ ID NO: 218167 - DNA, 408 bp, Glycine max
aggacaaaaggaaaaggcaccaaattcaatttaaggggacactttaactcaaaattatagaggaagacagtccaatatgaaaaatatagtaaaatcatctcaaacttggcatcttctctttgcacctaagacattgagaattctaagaatgttacacgcaagtcccatcacaacttttagcacttggatcagcacaacctttaggaacagaaatatttacttgccaagtttgctttgcctccaattcaagattggaagaaagttcccctgttaatagcatcctcgttagcatttccaagtgcagcctcgttcaagtacttgtcagccaattggactctcttgacattctcttgttcttggacaagcatgttaccatacgtcaagagcttctccagagtcatcttgggc

SEQ ID NO: 218168 - DNA, 538 bp, Glycine max
ttgaaccgcccgcttacctttgccgagaagatcctctactcccacttggacgacccccacggtcaagagattgagcgcggctccagctacctcaagctccgtcccgaccgtgtagcctgccaggatgccactgcccagatggctattcttcagttcatgtcagctggtctgccctccgttgccactcctaccaccgtccactgcgaccatcttatcgaggcccaggttggtggtgagaaggatttggcgcgcgccaacgagatcaacaaggaggtttacaacttcttgtccacctcttgcgcaaagtacaacatcggtttctggaagcccggctctggtatcattcatcagatcgtgcttgagaactacgctttccctggtgctctcctcatcggtactgactcgcacactcccaacgctggtggtctcggtatggccgccattggtgttggtggtgccgacgctgtcgatgtcatggctggtcttccctgggaactgaaggcctctaaggttatgggtgttaagcttactggcaagc

SEQ ID NO: 218169 - DNA, 513 bp, Glycine max
gttctgggacgttgcggaatggaatgtgaaggacttgagaccttgtgcattaaggatcagacacttacaaatgaaaataattggttgggctttaagccaccacctcatgcagaattcagaagctaagcctgattcaaagcttgtattgtcctgtgagagcattctgtatggaattgggatcttgcagtctatccagaatgaatccaagagcctgaagaaatcacttaaggatgttgtgacagaaaatgaatttgaaaagaggcttttggctgatgttattccacctagtgacattgatgttacttttgatgatattggagctcttgaaaaggtcaaggatacattgaaggagttggtgatgcttcctttacagaggcctgagcttttttgcaagggacaattaaccaagccctgcaaaggtatcctattatttggtccccctggaactggtaaaacaatgcttgcaaaggcaattgctactgaagctggtgctaacttcatcaacatttctat

SEQ ID NO: 218170 - DNA, 247 bp, Glycine max
gtgagggtgaatccgaggaagccaagaaggagttgttcgtcaaaagctactcctactaagatgtttgcagtgaatatgatacttgttaggcagcaacaccagcagttacagtaggtgttgacggacgatgaagtggaagactaatttgtctaaaatgtaatgtttttatagtcttggagactatttttgtttatggttaaatgcacctttacagcttaataaaccttttgctatgagttgtgtactt

SEQ ID NO: 218171 - DNA, 247 bp, Glycine max
aagtacacaactcatagcaaaaggtttattaagctgtaaaggggcatttaaccataaacaaaaatagtctccaagactataaaaacattacattttagacaaattagtcttccacttcatcgtccgtcaacacctactgtaactgctggtgttgctgcctaacaagtatcatattcactgcaaacatcttagtaggagtagcttttgacgaacaactccttcttggcttcctcggattcaccctcac

SEQ ID NO: 218172 - DNA, 449 bp, Glycine max
ctgctcagacgctaagggttttatgcaggcatatcataacctagataccattatattgccgattttgactcctaatataaaggtgcaaataactgctaaagcaacaataaatgggcatctttatgttcagatgtctgatctgatacaattatagggttttgaagctgctatcaccgttgtcgctagataagtacctgtttgtgcatcagcttctgaatctttctcaaaatcaaacattaattgtagcatataagaaagccttgtccgctatcgagctgttactcgggctgataaacagctctctattcctgttcgagggaactgtaattccaatgcttttggctgaaatggctgttgtgccatcagagaagcttgctgtacacttccatgacacttatgggcaatcacttgcaaatattcttgtgtcccttcaaatgtggatcagtgca

SEQ ID NO: 218173 - DNA, 467 bp, Glycine max
  unsure (1)..(467): unsure at all n locations
ccggtttgtccgctggtgttgccgttgtagccactggccacccctttgataccgtcaaggtgatgctgcaaaagcacaatgcagaagcacatatgattcagtatagaaatggattgcattgcactgctaggatattgaagactgaaggaatcaaaggactttatagaggagcaacaccatcttttgttgggatggcagttgaaggatcactcttttttggcatttattcccagacaaaagtgtaccttcaggggggagttcaaagtggggaaccacggcctcaagtgataataccatctgcagcttttagtggtgccatcatcagttntgtgttaagtccaacagatctgataaagtgtaggatgcagatacaaggcactgactctttggttcctaaatccagtagatacagtagtccccttgattgtgcccataaaactgtaaaagctgaaggggtgaggaaattc

SEQ ID NO: 218174 - DNA, 481 bp, Glycine max
cactgtaaacgtatttagaaaatattacaagtgtatgtatcttggggtagatgggtgttacaagtgggcttttctgtcttggccatactatacacttccaataatgttaacttcaatggatataaacaaatatactttcatgccagagatagaaatgttctacacttctatccaaaaaattggaggggaaaaagcatgtagaggcctaggggacagttaaaataaaggcctctgattccaagttcgttaagcaagctctctaataaaaaaagaattaaataaccagcttcaaatgcaatgttgaatgatgtcctgagctttgttgtattatccgcaattaggtagactctcagtcacgcttaatgcctagcattttcaatgctagctcccatgctacaatcgttgcagcattagcaggaaatgctcgacttacagtagcacccaaacctgtatagcaccccttcaatccagccctttgata

SEQ ID NO: 218175 - DNA, 471 bp, Glycine max
aaaatggaagaggattatacttattaattaaacatattttttgttcttgggattgatttaatacaattcatgttacattgttggaaagagaatgttaagctttgcaagaagcaaatatattattacattttgacaagcatctaagaattatattattaggacatggtttgtaagtagagaaaaattctggatcctgctcaagtgcttcagtgtagctctccaaaattgcgactatctcatcaaaatgtggtcttttatctggattgcttgaccaacatctgttgatgaggtgactaaaagcctttggacagtcacatggcaacgggggcctttcattcttgtgagtcacagcatatgctgcttgctctggtgtcatgttgtcaaatggcgtcaatcctggtaatagttcccacagaactatggcgaaactatagacatctactttcttggtgtgacgcttttttttgatca

SEQ ID NO: 218176 - DNA, 449 bp, Glycine max
aaatggactagggtcatcaggaacaggaaattctgatcaaaatgagaagctgactaagaaaaggaaggatcaagatgaagatgaagatgaggatcaggagaatgatcttgacaatgaggacccatcagcccagaagaagcctcgggttgtttggtctgtggacctgcaccgcaagtttgttgctgctgttaatcagctaggcattgacaaggctgtacctaaaaaaattcttgatttgatgaatgttgaaaagcttacaagggagaatgtggcaagccatcttcagaagtataggctttatctgaaaagaattagctgtgtggctaaccaacaagccaatatggtggcggccttaagggttgcagatccatcctatttgagaatgaggttcgtgagcggggttggacatgtacaacattagtgggttccgacagctttcatacataatt

SEQ ID NO: 218177 - DNA, 507 bp, Glycine max
aattcggctcgagcgaagattacaagttcaatggtttggcatggctctttttgggtgtccctacaagcagctcattgctatataaggaggaatttgagaagatgcaagagaaatatcctgacaacttcaggcttgacttcgctgtgagccgagagcaaacaaacgagaacggagagaagatgtacatccaaacccgaatggctcaatatgcagaagagctgtgggaattactgaagaaggataacacttttgtgtacatgtgtggactaaaaggaatggaaaagggtattgatgacattatggtgtcattggctgccaaagatggcattgattggactgagtacaagaggcaattgaagaaatcagagcaatggaatgtcgaagtctattaatttctgatcacttgcacaaatatcatctcctactttgtgctgcaacaagtctatcaacccttctgccgtgtgtagatatatgacgtccctggaattttctttgacgattttatac

SEQ ID NO: 218178 - DNA, 349 bp, Glycine max
gacatacggaacttggattaatttattttggatcatccctcaaaaataggacttggaaaactgacattgaagttgttcatgaacgggttaaaaatcgtcaaaaaaaaattacagggacgttatatttttacacaacgcaggagggttgatagacttgttgcagcacaaagtgggaaatgatttttgggcaagggaaccgaaattaataaacttggacattccatgggtctgattgcttcaatggccttttggactcaggccaataaatgccatttttggcagccaatgaccccataagggcataaatacccttttccattccttttagtccacacatgtacaccaaagg

SEQ ID NO: 218179 - DNA, 323 bp, Glycine max
attgtgggtcattggttgttgccaaagttggaaatcacaaacaaattgttggtttccatgttgctggaagcaaaggaagactgggatatgcttcattgataccatacgttgagccagttgtgcaagcttaaaagcgctgaagtttactctgacttcttccctgtggaggttgatagtcaagagggagttgctcacattggtgaatcgaaatctggtgtctatgttccactgcctacaaaaactaatttggtggaaactcccaaggaatggcaactggatctaccttgtgacaaaattcctagtgtcttgactcaactgatgag

SEQ ID NO: 218180 - DNA, 567 bp, Glycine max
  unsure (1)..(567): unsure at all n locations
aaacacactcattgcacatagtaatgcgctttatttaagtgaataaaatattacatactagttcacaaatgcaaaaggacactcatcaaccagatatttgagactcttacagttctcaagaagtcgcatcagcatagggttagtggcgttagaactcagaatttcattcttaacgccaaaaagaacagccagtaaagctactggaaaaggatcaactctagtaagaaaaacaattgtcttacctctcccaagtgctgtgcgaatccttttgttgatatctgaggagcgattgttaactgcagaactaatccaagcagtggtgggtaaaccaccacgtccactaccacatgtaacatttacaacgacagcttctgaaggtaattgacttacaggataaagacaattcacaaaaattggtaaccaagaatccactggaaaatttccatcaaagaattcttgtgtgttaaccaacacaagcttatcatcaaaaacaatcttggttggaaaagctttacctgctcctttgtaacccaacanatcaatgctcaacagtagatcaatattatc

SEQ ID NO: 218181 - DNA, 532 bp, Glycine max
ctccaacgcagaaacagacacatcctctcttctcttatcatggcttctcacaacatcaaaatccacgaccactcaagggtctcccctccctcagccacagaaatatccctctctctcacttacttcgacctgctctggctcacgttccaccccgtggaacgcatcttcttctacaccctccctacaccccattcaaatccatccattgtctattccaaacttgttccaaagctcaaaacatctgtctctcgcactctccaacacttcccccctctcgccggcaacgtcgtttggcctgataacaccccaaaccccaccgtccaatacaccccacgggactccgtttcacttgaggttgctgaatccgaagctgatttcaccacgtgttagatgactcacctcacgatgcatcagagttacgttgcttactaccccacttggatgcatcggattctcatgcttctgttgtctactttccaatcactctgatacctaacagaggctatagcataggaatcagcacccaccatgc

SEQ ID NO: 218182 - DNA, 527 bp, Glycine max
atgatcaatcatctaacatttcttgacgaaacaaagtacaaaagagatccatgacatgttccttcagcacgagcccaacttgaacaccatcattcccatccttgctgtctgcaaacccaatggttcaggctctatccaccgatgctatctccaccttagcaggctttccccaaccaaaatcaggtccataaactccaaaccgggtagaccctgcatttcccatgatgtcaactccgtgttttcccaaagactcatatctagaaaacgcactctccatcccatgaaaaatcccctcatctaatatcatctttattttactatgaatactctttgcaacaatagcagaagcttcttcctttatgaagtccaatggttcagcatccaccacatgcccccacacacaattgccaaaataattatcatggattggaggctccaacctcgccctgcaatccactgtgaacgcaaaagcaaattgctctttctccttttcaactgcatgaatggccttagcaatgcaagctagc

SEQ ID NO: 218183 - DNA, 514 bp, Glycine max
cttcgtcctttttttttaacaatttgtcaatttatgaaaatttgatctattttcaccttttaagagattgaattgagacaaagagatgattctcattaaggtcctagagtcctatcttatccaaaaatcaggacatgttaacatgcacactagcagtcttataggacttacacctgggacaaatgcgtagtgaagacccacacacagtacacaagcacaaatgacggcacggctcaatcagcccacaatactcttccttgctacagttcctgcacaacctaccattaccaccaccctacttatccttcacccctgcgcaccccgctaacgtgcgccaaccccccgtttccttttctaaaccgttctcctcagtgctcccgcagcaggactcggcgtcagccatcttcgcgccgtcgcacacggtggcgccttcgccgacgtcttactgcgccgccattacgtcgcgctgcgcgagaacctgctctaaatcacaccgcagagcattcgctgtggc

SEQ ID NO: 218184 - DNA, 530 bp, Glycine max
aatcgccatagttgtgcctaccgttctcgttgttgttgctttgctcattttcattagcatatattttaggaggaggaaattagcaaggaaaaatcttctcgctgatgaagacgatgatgaaattgcattggctgaatcattgcaattcaacttggacacagtacaagttgcaacaaataacttctctgactctaataaactcggagaatgtgggtttggagcatgctaccaggctctctaatggacaagtgattgctgtcaaaaggttgtcaagcgatcctggccaaggtggcgtggaatttaagaatgaagtccttttactggccaagcttcagcaccgaaatttacctaggctacttggttttagattggaagggaaagaaaagctacttgcttatgaattgtgtccagataaaagccttgggtacttcatatttgatcccacagagaatgcacgactggattgggatagaccatacaaaatcattcgaggtattgctcgaggtcttctttatcttcacgaggattca

SEQ ID NO: 218185 - DNA, 455 bp, Glycine max
agctgatctaatttgcattggtttagatgaacatagtccgaggaacagcctccatatgtgtggcatggagttcctatctatgttggacggacttgacgaggaacggtgcggtgactaaccgcggcattattctgtcaagaggcttcgactaactgtgctacaagtgtacgctatgtagaagaactttgactgagataacacgcttgcacctgagacgaaagtgaagcttgcccaagaacttgggttgccacctacaccagtagccatttggatccaaaacctccgaacccgatggagaaccatactgttggagagagattatggagacctcatagccaatgatgacgctcttaagcttaactacggcactctcaatgaggacaacctaatcttattatagcacgtagaataatcatacaacatagtataatatgtagaatagttgattatgagtc

SEQ ID NO: 218186 - DNA, 522 bp, Glycine max
attcattctcaacaacaaaccaatctttcttagaaaatgagggggggcttgtggcaacttgggcaatcgatcactcgccgtcttgcccatggagataagaaggctgttgctcgtcgatgttttgcctcagaagctgagctgaaaaagacagtgtttcatgacttccatgttgctcatggtgggaagatggttccatttgctgggtggagcatgccaatccaatacaaggactcaatcatggactctaccatcaactgtagggagaatggtagcctctttgatgtttcccatatgtgtgggctgagcctcaaagggaaggacgctgccccattccttgaaaagctggtcattgccgatgttgctgggcttgcccctggaactgggacgttgactgttttcacaaatgaaaagggaggtgcaattgatgattcaggaattactaaggtgacggatgaccacatatatttggttgtgaatgctggctgcagggataaagatctggctcatattgaggaacacatg

SEQ ID NO: 218187 - DNA, 433 bp, Glycine max
aaaggcattaacagggactggaacccccgattttgggaaaatttggcaacaggggaaaaagccattaggaaaaggttaaaaaataaaacccgaagtaaatcaggaagggttatagtatttgggggggccaaagggcatttttggaaccaccccttaatgggggttccccccaaaaaaaatctttactttgggggctgccttgggcaaaccaaatttcacatatcccagggctatgttctttggggggcaaggaccgaatcccccacgggggaattccccaaggggggggcccccttaatctggaaactcactggggcttttgggagggggccccaaaaaaaagaaacccacccccccgattttaggacccttttaaagctggttcaggaaaacaatagctcctaaaaaaccacctttgggtttcccccttttc

SEQ ID NO: 218188 - DNA, 488 bp, Glycine max
gtgcctgcaacacaaaaggtttggatggacttatactcccttccagtccctggatctggtggtaagacgtgctcccagatatttgaagaagctgggtgtgacacaccagctagtcctagttgcggtgcttgtttgggtggcccgaaagatacttacgcacgcatgaatgaacctaaggtttgtgtttcaactacgaacaggaacttcccgggccgaatgggacacaaggaaggtcaaatctatttggcttccccatatacagctgctgcatctgcattgaccggttatgttactgatcctagagagttcttgcagtagaatgttgttacagtcatcccattggtgttgtacacgttgttggttagttgtgtattctctagccataagttaaaactgatagctatttaagccgaccaatcttttggtattttttgtctgaagaaatttcggtgactattattcaattgacacaagtttggttgtaaaaa

SEQ ID NO: 218189 - DNA, 466 bp, Glycine max
gtgcctgcaacacaaaaggtttggatggacttatactcccttccagtccctggatctggtggtaagacgtgctcccagatatttgaagaagctgggtgtgacacaccagctagtcctagttgtggtgcttgtttgggtggcccgaaagattcttacgcacgcatgaatgaacctaaggtttgtgtatcaactacgaacaggaacttcccgggccgaatgggacacagggaaggtcaaatctatttggcttccccatatacagctgctgcatctgcattgaccggttatgttactgatcctagagagttcttgctgtagaatgttgacacagtcatcccataggtgttgtacacgttgttggatatttgagaattctctagcgatcagttaaaactgactgctatttaagccgacctatctttcggtattctttgtgtgaagaaatttcggggactattattcaatt

SEQ ID NO: 218190 - DNA, 383 bp, Glycine max
cctcgaggtcgacggatagcttgatatcgaattatttatatgtgaattgagcacacaatggggatttaaaaaaacgaccgagaaggttatgaaatatcattccagatcaaagagtgctaattttctcataaaggaaggcgagaaagtaaagaaacttgcagagcagtatgttgaagctgcccaacagaacagaaaaaattgattcatatggtatcatttcatactcgacaagttttctttagtcattgcccgttacccgcctttgttctattatggtgctatacttgcttattaagaaacttgccatattgggcagctgtggatatattagatttagtctcacctcgtcatttatatgtgaattgagcacacaatggggattt

SEQ ID NO: 218191 - DNA, 467 bp, Glycine max
  unsure (1)..(467): unsure at all n locations
attcggctcgagtttcttccgccatattccacaagaactctccaaggatcctccttcccacgagattctttggtgggaaaaatccaagaggtttgaaatttgaaggcagggaagatggattatttcaatgcaccaggaagaaaccatctctttgttccagggccggttaacattccggaccagatcatccgggccatgaacagaaacaatgaggactaccgttctccagcaattccagctatgacaaaaactttgcttgaggatgtcaagaagattttcaagaccactactggaaccccatttctcatccctacaactggtactggtgcttgngagagtgctctcacaaacacactgtctcctgnggatcgaattgtatcgatcctgattggccaattcagcttgctttggattgatcagcagcaacgccttgagttcaatgttgatgttgttgagagtgaatgggg

SEQ ID NO: 218192 - DNA, 484 bp, Glycine max
gatatacaggacaataaaagaagcaatgcattaaagctgaaagtagaaagtacgttcatcttcaaaggagtgtaaaagagggtaatatatattttacagaatttctgaaagagcagaaaaaggaagtaaagacaagaatgatttgtgactcaaatcctggaagggatcataggaatagtgttctgtaagtatgcactggcagcagcaactccacttccaagctttacaggataacccacatctttgagtatcatctctacaccagctagacatcccaacagttgcaactcattcaagtggccaagatgtccaattctgaaaaccttcccagcaactttgttcagtccaagacctaagctcaaattgtatctcttccatgccctcctaactatttcagtactatcaatgtaagcaggaacaagaacagcagtcacagtgtcactgtaccactcttccttttgggtgcaattcttcaaaccccatg

SEQ ID NO: 218193 - DNA, 471 bp, Glycine max
gaaccctattttggcaaatattttaagaatcatagtcttttaccactttcaggtttagcattattatctgaaatggcatcggtgtctagtcagcatcagttccgttacacgcagtcaccgacaaaggttcttcatttgagaaatttgccgagtgagtgcacagaggaggaactaattgagcttgggaagccatatgggaaagttgtaaacacaaagtgcaacgttggaccacatcgtcatcaagcttttattgaactcgcagatttaaatcatgcgattgcaatgatatcggattatgcctcatcgacggagcctgctcaagtacgagggaaaactgtgtatctacaatattgcaattggctagaaatagtgaatcacaaaactgcaccatatgttgctggaaatgtactgatagttacaattgatggtgaagatgcacgccttgtcagcattgatgacttacacttggtc

SEQ ID NO: 218194 - DNA, 338 bp, Glycine max
ctaaccaaacataacataagcaccgctcttttatctacgaaatgcccatctcccttcacttctgagctctggacgagatcccagatcttaccatctttcacgcactcttccatcagattgcaccctattcgcgaacgcaaacttatgactggaaggttaatggctgctccaccggcaagggctcgtgccgattacgagtatatcataaagcttctcttgatcggtgacagctgtgttggcaaaaggtgccttcttctgcgtgtctccgatggtgcttataccactggtttcagcacagctataggcattgacttgtacgatagaaccattgagcttga

SEQ ID NO: 218195 - DNA, 498 bp, Glycine max
cacctttctcctaaaacatctccagtgggttcttcttcttctattacaacaacgtcgtccaagaccatgaccatggccatggccacgatcctgctcctgttcacggtcttcgcggtttcatcggccctagacatgtcgataatctcgtacgacaacgcccacgccgccacgtcgcgcagcgacgaggagctgatgtccatgtacgagcagtggctagtaaagcacggcaaggtgtacaacgcgctcggagagaaggagaagaggttccagatcttcaaggacaacctgcgattcatcgacgaccacaacttccaagaggaccgaacctacaagctcggactgaaccgggtcgcggatctcaccaacgaggagtacagggccaagtacttgggaaccaagatcgatcccaaccggaggctcggcaagaccccgagcaaccgatacgcgccacgtgtcggcgacaaactacctgaatcggttgattggaggaaggaaggt

SEQ ID NO: 218196 - DNA, 409 bp, Glycine max
cgggcaaatccaaataatgctgcattgccacatagtctacataacctgggaaactaacagcaatcaaatatgttcgccatttggaattggaatttgaataccaatacagtgcatcaataatataaccctatgtacacagccaatatctgactgaaatttgatacagaatagtatcaatttggatcataataaaatggcacatagaaatttatgtgaaggtaaaggggaagtgtatcagctggggtttaaattcttcgtctttcatttacttcattattggctccttcctgcacgttcacatttcctttatctgcttaagcactgttgaccttgtttttactcccaaaggtccaatggggtttagccggagttcgccttaatgccttcacttcgaatgggttgttcttgc

SEQ ID NO: 218197 - DNA, 326 bp, Glycine max
gctaaggctcttcaagatggactcctattggatttaccaatgtcagtggcattttataagcttgttcttggtcaagagcttgatttgcatgacattcttttcattgatgctgagcttgggaaaactttgcaagaggtaaatgcccttgtttgccgaaaacattatatacaatctactggtggtagctacaccgatacctttgctaatttgcattttcgcggggccccaatagaagatctctgcttggacttcacacttcctggttatccagagtacatcttgaaacctggagatgaaattgttgacatcaataatctagaggagta

SEQ ID NO: 218198 - DNA, 322 bp, Glycine max
gttgtttggagcgatccgagaaaaactctgtaaacatgttggtttaccaggacctccttacaggtgatgagcttctctctgactccttccgttacaaggaaattgagaatggaatgctgtgggaagttgaaggggaagtgggttggtaaaagagcagttgatgtagacattggtgcaaacccttctgctgagggtggaggagaagatgagggagttgatgatgcagctgttaaggttgttgacattgttgacacattcagacttcaggagcaacccgcattcgataagaagcagtttgttaccttcatgagaggtttatcaa

SEQ ID NO: 218199 - DNA, 434 bp, Glycine max
aaaatccttataaataaaaccatgaagccaaattaaaatttttttagtccccacccaaaaatttttaaaaagaaacttccgggaatttagcacgaccaaaatcataaattaaggaaattttaacccatcgataattaaatttggggggaattatgatgtagcagtagcacacgtttaacctttaaaatcaaaatcccaggtcaaagtttcaagtaacttaggacagaacgtaaaaaaaaactagataaaaggggtagatagctcggtccattaagtcacttagcacttgacctcctttaaggcatatgcaaagtccaggaatgttggatcagcagcgccgtccttgtagtaggcaaagaccaagcaggcattatcacccatgcttttaccaacaaaaaattggaaatctttaatcttagagggcaggtatttag

SEQ ID NO: 218200 - DNA, 322 bp, Glycine max
atcatttctccatttccattttctctctcacttttcaagaatcgtaagctatgggaaagtcttacccaactgtgagtgctgattaccagaaggccgttgagaaggcgaagaagaagctcagaggctttatcgctgagaagagatgcgctcctctaatgctccgtttggcatggcactctgctggaacctttgacaagggcacgaagaccggtggacccttcggaaccatcaagcaccctgccgaactggctcacagcgctaacaacggtcttgacatcgctgttaggcttttggagccactcaaggcggagttccctatttt

SEQ ID NO: 218201 - DNA, 313 bp, Glycine max
ctgtgattcgggtaatggccaccagtggaggcgatgaggggcagaacaaccctgccctcgacccggatttggatgctccggatgacccggatcacgagttcgctgagttcgggtcgggttgcttctggggtgctgagttggcctttcaccgagttgtgggtgtggtgaagactgaggttggttacactcagggtcacactccggatccgaattacaaactggtttgcaccggaaccactaaccacgttgaagtggttcgggtccagttcgacccgaaggttcgcccctacaatgatctagtcgctctgtttgg

SEQ ID NO: 218202 - DNA, 366 bp, Glycine max
gaatagcaaattggtcaactaaaggcccaattgcaatttgggccctttgaagatccccccttggctttattttattttggaaaatattattatttgggggtccccaacagatgggtgattgaagcccaacatggggaaaggggccccaagaaaggggtcatcattcatcagccatagcccctggggggaacagggcaccctttttttggggattggttggtgccttgacctccaccctttttcaaaaattggggaggggattcctttggtttggaaaacctttttggtggaaggattttttggacaattttttcctttaggtccaattggtttgccttttttgattcccggcctaaacaagcttgg

SEQ ID NO: 218203 - DNA, 320 bp, Glycine max
ctacaaaggttgctgtaggagataagatattgaagtagtgctaagtgcctaacacctgcagtgaacaatggcctctgcatcagcatctcttctcaagtcttcacttgttcttgacaagtctgagtggggggaagggacaaacacttcgccaaccttctgctgcatcagttgtgagatgcaaccccaccaccccatcaggcctcaccatcagagctggttcctatgctgatgagctcgttaagaccgcgaaaacagtggcttcaccagggaggggtattttggccatggatgagtccaatgctacctgtgggaagcgtttg

SEQ ID NO: 218204 - DNA, 565 bp, Glycine max
caaccatgtttgttatatattgagacataatcaatcaagtacaccactcacagcagaaggtttataagctgtaaaggtacatgtaaccataaacaaaaatagtctccaagactataaaaacattacattttagacaaattagtcttcttccacttcatcctccgtcaacacctactataactgctggtgttgctgctgcctaacatgtatcatattcactacatacatcttagtaggagtagcctttgacgaacaactccttcttggcttcctcggattcaccctcaccggtgtacttcccaagctgggcgagcgagttggacttggcacggaaaaggagtgcatcttgtgccgcttcacgttctctgggcggcctccccatgtcttaaggcagtgttttggagggctctggcatacgagaacgacacgtgccacgggtttggagattggttcatggcattcaagttgagggtagcttcaacctcagactgtccaccagacaaaaacataattccagggacagcagggggaattctctgtgaagagcttgaggtgtatcagcact

SEQ ID NO: 218205 - DNA, 316 bp, Glycine max
attcaataagaggagaaagaacactcagcttaattagcaatggaattgaagaagcattttcttttatgccaagaaggaattggatgctgataagtggtatcgattgatctgttattttctgtgggagactgagaaacgatgccacgccagctatggttttctctgccaatgatttacaagaatggaaagattttcccaaagggctcaaggttcttctccttgagagagacaacatttgctgctgccgagataagggcaaagcttgcagccatggactacattgtttctacattctgggacgagaatgaagccttgt

SEQ ID NO: 218206 - DNA, 400 bp, Glycine max
ttttattttttttttttttttatttttttttttttgtttatgttatttttttttgatttttttttttttttgatttttctttacttttattttttgattgcgttttcaaaaacaggaggacttaaatagcccccaccgcctacgagagccagggcaagctagagccgcagaagataatgggggccttactaagcaacaaacacgggccccgaccgcgcgcctgggcaaaggccgccggagaactgagaaccggaagaaacccccccatattgcccccaacagacacagctcaggggctgaccctgaccccctcgacagagacattgactgcctactgctcattgccgtcctaagacttcccaatcttgaggccttaaggcgatgagcaatcacccaaaac

SEQ ID NO: 218207 - DNA, 302 bp, Glycine max
cgaggctgatcacaaggctgctgctgcattgaagggttcagatcatcgccgtgcaacaaatgtcagtgccagactggattctcaacaaaagaagctcaaccttccaatcctgccaaccaccactattgggacccttccctcagactgtagaactgaggagggtacgccgtgaattcacggctaacaagatctccgaggaagagtatgtaaagtcaattgaggaggaaattcgcaaagttgttgagcttcaacactagcttgatattgatgttcttgcccatggagaaccatagagaaatgat

SEQ ID NO: 218208 - DNA, 580 bp, Glycine max
  unsure (1)..(580): unsure at all n locations
tcgagcggctcgagcaataactctccaaggatcctccttcccacgaaattcatttggtgggaaaatccaagaagagggtggaatttcaagccagggaagatggattatttcaatgcaccaaggaagagaccatctctttgctccggggccggttaacatcccggaccagatcattcgggccatgaacagaaacaatgaggactaccgttctccagcaattccagctatgaccaaaacactgcttgaggatgtcaagaagattttcaagaccataactggaatcccatttctcatccctacaactggtactggtgcttgggagagtgctctcacaaacacactgtctcctgtggatcgaattgtatctttcctgattggccaattcagcttgctttggattgatcagcagcaacgcctgaaatcaatgttgatgttgtacagagtgaatggcgccagagtgctaagcttgatgttctggaatcaaagattgcttcagatactttacacactattaaggcaatttgcattgtccacaatgagactgcaactgnngtcaccaatgatttggccaagtgagaca

SEQ ID NO: 218209 - DNA, 410 bp, Glycine max
gatatacaggacaataaaagaagcaatgcattaaagctgaaagtagagtgtatgttcatcttcaaaggagtgtaaaagagggtaatatatattttacagaatttccgaaagagccgaaaaaaggaagtaaagacaagaatgacttgtgactcaaatcctggaagggatcataggaatagtgtcctgtaagtatgcactggcagcagcaactccacttccaagctttacaggatagcccacatttttcagtatcatctccacaccagctagacatcccaacagttgcaactcattcaagttgccaagatgtccaattctgaaaaccttcccagcaactttgttcagtccaagacctaagctcaaattgtatctcttccatgcccttctaactatttcagtactatcaatgt

SEQ ID NO: 218210 - DNA, 553 bp, Glycine max
gttcccaaccaagagtagctttatggaacccttttgagtgaaaacattataggtgtaatccatgaccattttatcacatattacctagatatggacgttgatggctctgacaattcatttgttgaggtaaacatccatgaagcctgagacctcttcaggagaatcacccagatagagttatctaaaagctgttaaaaaagtggcaaagacagagaaagatgctcaaataagacttcaactctatgacccatcggaatttcatgtggtgaacccattgaagaagacaaggatagggaaccctgttgggtacaaattggttccaggtgccacagcagctagcctgctggatccagaagatcctacacagaaaagagcagcttttacaaacaatcaaatatgggttactccttacaacaaaagtgagcaatgggctggtggtttatatgcttaccagagcagaggggatgatactctttaagtctggtccaacaggtatcgtccaattgagaataaagacattggtttgtggtacacaatagggttccatcatata

SEQ ID NO: 218211 - DNA, 491 bp, Glycine max
aacatcataatttttcttatacataagaattaaacatggtatcaaaaggttttacaatatttatacattctgtttaatcaacagaactagaccctctttactttaagttaggtttaaagttcagtttgggcatcatcatttgctacatgcataaataaagcatgtatctaattagactaaaaaccaactgatgggatctcaagctgaatcacgagccttgcaaacaggtaaatcatcttcgaaattgggagggactccaaggattggatttctctcaaagaaattagcaggcttcaaatcaaaacttgatgatacagtaggcatgacaggatagtcctcttgacagggtatatgatggaaccctattgtgtaccacaaaacaatgtctttattctcaattggacgatccctgttggaccagacttgaagagtatcatcccctttgctctggtaagcaaataaaccaccagcccattgtcacttttgtgtag

SEQ ID NO: 218212 - DNA, 574 bp, Glycine max
  unsure (1)..(574): unsure at all n locations
cggcaatgcaaacgcgcgcagcgttgacaacaaaaccacaaaccaattaaccgaacatgaattccgattgggacagcggcggcggtggcggtggcgcgacgctaatccctggtctcccaaacgacgtatcggggtctatcctctcgaaggtcccctactcccaccacgggaggctcaaagcgacatgcaaatcatggaaactgctcctctccttgaaatcgctcttagcctcgctgaacaaacgtaaccaccttctctgcatcttcccgcaagatccttcactcgcttcaccctttctcttcgatccgaactcgctcgcgtggtgcccgctcgctcccatgccctgcagcccccacgtgtacggcctctgcaacttcgccgctgtcttcgtcgggccccacctctatgtccttggtgggtccctcttcgacacgcgctccttccccatcgatcgcccttccccgtactacgacacgttcaggttcaactatcacgacttctcgtgggagccacgcgcctcaatgctgtctaccagggggagcttcgnctgcgcggtgtgccgcccgcgggagca

SEQ ID NO: 218213 - DNA, 454 bp, Glycine max
atccattataaatatttcagtacttcaggattacaacactagaaaaagctgatactatacgtcacttgtatccaaatttagatggtatcaactaatacaaagtgaatgccccgatcaagacatactacatacagaaatatacaaataagccacctacatggaatctggtggatcaaatgatgcgatacacaatcaatttggaagtgatccctatactatacaaataggatgcaacattattcatagacaaattgagctcaatacagcactattaatatctatagggtaatggaaaggtgattttgcaacaagcgatctccatgtcttcttttttgggtcatatatttgaatgaacagagttcctgccctcttatgttgtctggaccttcgtgtttctgtaaaatcaacgacacataaatgtgtcactacataaagctccccgtctacacaacaa

SEQ ID NO: 218214 - DNA, 595 bp, Glycine max
  unsure (1)..(595): unsure at all n locations
ggaaagtggaaatgcaggagagccagcaaaactgatcaggcagagataccgtgaagccgcagacttgatcaagaagggaaagatgtgtgctctcttcatcaacgatcttgatgcaggagctggtcggcttggtgggacccacccaatacactgtcaacaaccagatggtgaatgccaccctcatgaacattgctgataaccccaccaatgtgcagcttcctggtatgtataacacggaagagaatccccgtgtgcccatcatcgtcaccggtaacgatttctccacactctatgcgcctctcatccgtgatgggcgtatggagaagttctactgggcaccaacaagggatgaccgcattggtgtctgcactggaatttttcgcaccgattcaattcctgaacaggacgttgtcaagattgctgacaccttccctggccaatccattgatttctttggtgcactgagggccagagtatatgatgacgaagtgaggaagtggatttctggtgttggtgttgacggcattggngaagaagcttgtgaactccaaagatggaccttccacctttgagcaggccaagatgactctggaga

SEQ ID NO: 218215 - DNA, 458 bp, Glycine max
aagtggacactttaactcaaaattatagaggaagacagtccaatatgaaaaatatagtaaaatcatctcaaacttggcatcttctctttgcacctaagacattgagaattctaagaatgttacacgcaagtcccatcacaacttctagcacttggatcagcacaaccttcaggaacagaaatatttacttgccaagtttgctttgcctccaattcaagattggaagaaagttcccctgttaatagcatcctcgttagcatttccaagtgcagcctcgttcaagtacttgtcagccaattggactctcttgacattctcttgttcttggacaagcatgttaccatacgtcaagagcttctccagagtcatcttgggctgctcaaaggttggaggtccatcttttgagttcacaagcttcttcccaatgccgtcaacaccaacaccagaaatccacttcc

SEQ ID NO: 218216 - DNA, 322 bp, Glycine max
ctaatattctttagaataatcaaaaagaatattaaattcaaataaattttagatagaaaaaagacttaaaaaggaggatttgaaatgcgagatctaaaaacatatctttccgtggcaccagtagtaagtactctatggttcggggctttggcgggtctcttgatagagatcaatcgtttttttccagatgcattgatattcccttttttttcattctagttattgacacggaaaggggtgaagaagattatagatccaattaagtattaaatatatgtaattaatatgtaattaatctcctcttctttatttcgtcttttat

SEQ ID NO: 218217 - DNA, 570 bp, Glycine max
cttaaagtagtagttctagcggttgactcgcttttttcaaattgtttttcattattaagaaaaggtaacgaagataaaatacgagcttgttttatagcaattgttattaatcgttgttgttttaaggtcaatctatttacgcgtctggataatatttttccttgttcactaataaatcgactaattaaacccatgtttttataatcaattcggtcccccgattggatcgggggcaaacgcctacgaaaagatcgcttggatttcataaagagtcgcttagatttttccatggtttatttatccctattccaaaaatcacatttattacaagaaatactataaaggatttgtttttttattctgacttttttaatatatgttgctatttttttaatatatgttgttatatactgatatttgtatatattcaactgtaaatgatagaatacagatagatctatctatatagataagaaaaatagatcattttacatgttaagttctttggttcaagggtaacacacaagcgatcaatttgatctatttctttatttctgcgtgaaatgatgt

SEQ ID NO: 218218 - DNA, 489 bp, Glycine max
ctgaagctagaacttttattgaaacccttttaggagtacatatactttatatagctacccctttacattttacaagattgatgaaccaacaaatacatttacaaaatatgctagcagttgccaacaatccaccacagccccaacttctaaaatatgtcagaaatatgggattcaaacacttgaagctttttgcagactagcagcatattgtcgagcccattggtcatagtgaataatttcttcgagtgacggagatgctactaattccttttgatgttcctgacaagttagttccacaaccttgaatatatccagataactaatcttttcttcaacaaacatttctacagctttctcatttgctgcactaagaactcctgtcatggtgccttcagcacgtcccgcagcatagcaaagattcaccgatggaaacttcttgtcatcccgtgcataaaatgttagagaaccatacttgctaagatcaagacg

SEQ ID NO: 218219 - DNA, 317 bp, Glycine max
cactcataacacaaagcacaaagcaaagctcatccttgagttaaaaaatggcagcagcttcttccatggctctctcatccccatccttggctggcaaggccgtgaagctgggcccatcagccccagaagtggggaagggtgagcatgaggaagaccgtcaccaagcaggtctcctcaggaagcccatggtacgggccagaccgagacaagtacttgggcccattctctggcgagcccccgacctacctaaccggtgagttcccaggcgactacggctgggacactgctgggctttccgcagacccaaaaccttggcc

SEQ ID NO: 218220 - DNA, 461 bp, Glycine max
gtaaaaagcaagtaacattaagttggattcggatacacaagataattcacattatctgaagtacttcaccaaacacaaatctaaaaactctcaaaagtcatttcgttctttgacgctcactttccggggacgaagttggtggcataggcccaggcgttgttgttgacagggtcagcaaggtgatcggcgaggttctccaatggaccctttccggtgacaatggcctgaacaaagaagccaaacatcgagaacatggccaatcgtccgttcttgagttccttcaccttaagctcagcaaaagcctctgggtcatcagcaaggcccaatgggtcgaagctgccacctgggtagattgggccagtgaccttaccgagggggccaccagcaatacggcaacctgtaacggcactccataggataactagtgtggcccatatggcgaggatgctctgtgcgtggat

SEQ ID NO: 218221 - DNA, 308 bp, Glycine max
ggcttcaatctcaggcatatgctcatcctccccaactctcaaccactccaccccaaaacgacgccgcaccccactcctcccttcctgctcattcccctataaaccctccccgcctcgctccctcgcgcgtgagacccccgcgccgcaacaacaacaacaacaactgtgcgcagtaacaaaaccactccacgccgggctcgagaaggagccacgcgccctatggcggcgctacgtggagtggctctaccagcacaaggagctggggctctaccttgacgtgagccgggtcgggttctccgacacttcgt

SEQ ID NO: 218222 - DNA, 432 bp, Glycine max
aaagaagaaaaaaaaatcatcttcattgtagatggagagatccaacaaccaaaacaacttataataccattatggaatgaggatttcattaatctactactcaagcgtacaattcatcaagattacactccccaagaaaaaccttgatgctcctcggagaaccacagttaccttcagcaattagtgctctgtcattggcagccatatgagcaatgatcttgtaaatcatttcaatatcttctggggcatggcaacggtcagctacttcttcaagtgttaatggttcaacaggctccttgcagcttgcttcattgagtactgccaatacccgtttctgaagtgctaacacttctcctgctgctttcttaccagcttccacaccaaggttggtgataagcatttatgttaacaagcgaagcatatattccaacg

SEQ ID NO: 218223 - DNA, 315 bp, Glycine max
cgtgagaaaaacaaaagagtagtggcctttaggtggtgaagaacaagagctcaaatcaaatcgaatcgaaaaaagaaagaaagatcatattcatggcgatggcaagcctggctcgacggaagggttacccccgtcgttttgtcgtcgaggtcgtcgttttgtctgacaagctggaggggattcgcgtccggatctgacgaaaacgacgtcgtcgtcatcggcggcggtcccggcggctacgtggccgccatcaaagccgcgcagctcggtctgaaaaccacttgcatcgaaaagcgtggcactctggcggtacct

SEQ ID NO: 218224 - DNA, 515 bp, Glycine max
aagaacaacacaatcattcctcttattatgcaaacaagtaaacaaggggctaatttgcatttaaaaacctgaatctaaatttaacacaggatgtatcatctccaagtcattgtaaaattcttggacaaaaatgaaaacaagaagtagcaaccggctccttttaaatgtgaatgggcttgtcataagtggccattgcggcttctttcacagcctcgctcattgttggatgtgcatggcacacacgtgcaatgtcctcactagatgcatcatactgtagtgctattgctgcttcatgaataagctctcctgcattgggtgccataatgtgcactcccaatatcttgtctgtctccttttcagccaatatcttcaccagtccttcagcattgtcaattgccttagctctgctattagccatgaacgggaacttgccacacggtattcaactcccagttccttcacctgctcctctgtcttcccaacagatgcaacctcgggcatttgatagacaacac

SEQ ID NO: 218225 - DNA, 514 bp, Glycine max
tagacatcatcactgacctcgccatgttcattactccgctttggattgcggttatcgtcggcgtcgtcgtgggctgggcctggaagcccaaatgggcctttcaccccaaagacgctcttctcaagtttccgctcccctcgcccttccaatccccaaaacgacaccgctttcaccttctccaccaccagttcctccgcgcgtgaaaaagacgcgagtgcgagtgcgagtcatttagtgacggaatacgatttgctgcatctgtggaagttggttgaggaaaaagacggagggccggcatggattcagatgatggaccgttctaccccgaccatgagatatcaagcgtggcgtagggatcctgagagtggaccgccgcagtatcggagcagaacagtgttcgaagacgcgagtcctgagttggtgagggatttcttttgggacgatgattacaggttgaagtgggatgacatgctcatacatgctttcaccattcaggaatgtgtcctcactggaa

SEQ ID NO: 218226 - DNA, 545 bp, Glycine max
  unsure (1)..(545): unsure at all n locations
ctgctaccaatttcaccattctcatcctccaaagttgaaccataatttcaaatccaaccaagagacaccatgtcatcaagtggaaccatttggagctatgaggaagaaaaagcatttgagaatgccatagctatgcattggattgaggaatcctcaaaagagcaatgggagaaaattgcttcagcagttcccagcaaaagcatggaagatgtgaagcaacattaccaggttctagtagaggatgtaagtgcaatagaggcaggtcacatatcattcccaaactatgctgcttctgaggaaatcacatcttcaaataaggactttcatggctcttccaaggccacaagctcagataaaagatcaaattgtaattatggacgtggtttttctgggttaggacatgactccaccactcatagtagtggtaaaggaggcttgtcaaggtcatcagaacaagaaagaagacaaggaatcccatggactgaagaggaacacaggttatttntacttggtctagagaagttctgtaaaggagattggagaag

SEQ ID NO: 218227 - DNA, 569 bp, Glycine max
acttcggctcgagcaacggtggaagagtacaatgcatgcaggtgtggccaccaattggcaagaagaagttcgagactctttcctacttgccagacctcgatgatgcccaattggcaaaggaagtcgaataccttctaaggaaaggatgggaatccttgctcggaattcgagttggagcacggttttgtgtaccgtgagcacaacaggtcacctggatactatgatggacgctactggaccatgtggaagctgcctatgtttggctgcactgatgcttctcaggtgttgaaggagcttcaagaggctaagactgcataccccaatggcttcatccggatgattggatttgacaacgttcgccaagtgcagtgcatcagcttcatcgcctacaagcccccaggcttctaagtcattgaaaaatttgcaaagcatctgtagccaccccactttgattgttgtacttaaactacattcccatttgtttttgctttatgagatttcatcatcctggatttttggtttctggtttccgacttcaatggaaattaatggatgagaactaatgaaaa

SEQ ID NO: 218228 - DNA, 426 bp, Glycine max
aattagttctcatccattaatttccattgaagcccgaaaacagaacccaaaaatccggggggaggaaatctcataaggcaaaaccaaaggggaatgtagtttaagtccaacaaacaaagggggggggctacaaaggctttgcaaatttttcaaggacttaaaacccggggggcttgtaggcaataaagctgatgccctggacttggggaacgttgccaaatccaaggatccggatgaagccatgggggtatgcagtcttagccttttgaagctccttaaacacctgaaaagctttagggcagccaaacttaggcaggttccacagggcccagtagcggccatcatagtttccaggggacctgttgggctcacggtacacaaaaccgggctccaactcgaattccaagcagggaatccatcctttcc

SEQ ID NO: 218229 - DNA, 320 bp, Glycine max
gctttctgtttatcctgtatccgcaattggcgtaatagtgctgccccaacatctggaatggacatcggtaatgctggcactgctaatacagtcagaacctgtcctgtttgtcgcaaactatcatattttgtcatttccaagtggtatttggtattctactaaggaagaaaaacaggaaattatcaacaactacaaggcaaactgcaaattaattgattgcaagcattttaactttggaaatgggaattgtccattcggggctagttgcttctacaagcatacagtgaagcctggctcttacacatggaacatcacaggcc

SEQ ID NO: 218230 - DNA, 298 bp, Glycine max
ctgtggaaacatgttgggttaccacgacctccttacaggtgatgagcttctctctgactccttacgttacaaggaaattgagaatggaatgctgtgggaagtttgaggggaagtggggttgttaaaggagcagttgatgtagacattgctgcaaacccttctgctgatggtggaagaaaagacgagggagttgatgatgcagctgttaaggatgttgacattgttgacacattcagacttcaggagcaacccgcatttgataagaagcagtttgttaccttcatgcgaggcttatcaa

SEQ ID NO: 218231 - DNA, 560 bp, Glycine max
  unsure (1)..(560): unsure at all n locations
gactattaaaattgcaacttcgagggtacataattacatagtaagtatcgcaaagatatcccaagtgcaagaagagcacagaaaaaggctccaaagattcccgtatataatcaccaaggctttaggtaaaattcaaaattatacatgaaaatatggtggaaaagggttaaaaagaaccttccaccctcaattaataatgggcctccccattgataattgctcatctggtccactttgctcaaccgcaaatctcaagaaatcgtctggaacaggaatatttaactctgaacacacaagttggacaatttttccagtgacacctccaaaggacattttgttcagtgtcacagcaacagagaagttattggtgacatcacaaaaacccgtggatccacccattcccgagtgaccaaaggcaatggatgacccatccttagaactaaacctcttaaaccctaggccaaaactttcccctggcaaagctaaattctcgtactctcctgtacccaagaattcatcnnatatcctaggattcttgaggaccttacgagcaacatggg

SEQ ID NO: 218232 - DNA, 519 bp, Glycine max
gttgaacttggacattctatgcaattttataagtgtgttccggagtacatgttcaacatgtgatttttctcaataatcaaagcgactaaactgactcagaacacaagcagaagtgaacagcattacaattgtgtttgctggctctctcttttctataggcagggcccacgggacagtaaacaccaacataaatacatattctacagtggccaaacaatgtgcctatcatgcaggtgcatgactagctatagtaacttatagtttggaggcatgacttgtaactttactcaaagcagtagctgcttttgaaccagatgcacgtcctaaatgcttgcagatgaaatccccagcaagcataagctttccaaggtccacatttgttttcactccaagtccattcagcatgtaaacgacatcctcagtggctacattcccagttgcacccttggcatatggacaacctccaagaccagaaacagatgaatccactgtgctgatccccatctgagtgaaattaaa

SEQ ID NO: 218233 - DNA, 552 bp, Glycine max
attcggctcgagctttttgtggatcattaggcctgaccttgtcattggtggatccgtgattttgtcgtctgagtttgtcagtgaaacaagagacagaagcctaatagcaagttggtgtccacaggaacaagtgctaaaccatcccttcaattggtgtattcttgactcattgtggatggaactcaactactgaaagtgtttgtgctggagtgccaatgttgtgttggccattttttgcagaacagccaacaaactgtagatacatttgcaatgagtgggaaattgggatggaaattgataccagtgcgaagagagaggaagtggagaagctagtgaatgaattgatggtgggagagaagggaaagaagatgagagaaaaggtcatggagttaaagaggaaggcagaggaggtcaccaagcctggtggttgttcatacatgaacttggacaaagtaattaacgaggtgttgcttaattagacactgttagattgaatggtttctttttttcttttcttaatgctttattatcatgtagttcattgatttctct

SEQ ID NO: 218234 - DNA, 464 bp, Glycine max
ggttgctgtaggagataagattgcagtagtgctaagtgctaacacctgcagtgaacaatggcctctgcatcagcatctctgctcaagtcttcacttgttcttgacaagtctgagtgggtgaagggacaaacccttcgtcaaccttctgcatcagttgcgagatgcaaccccaccaccccatcaggcctcaccatcagagctggttcctatgctgatgagctcgttaagaccgcgaaaacagtggcttcaccagggaggggtattttggccatggatgagtccaatgctacctgtgggaagcgtttggcttcaattgggctagagaacactgaagctaaccgccaggcataccgtacccttctcgtgacagttccaggccttggtcagtacatctctggtgccattctctatgaggaaacactctaccaatccacaactgatggcaggaagattgttgacgtgct

SEQ ID NO: 218235 - DNA, 495 bp, Glycine max
aagtacacaactcatagcaaaaggtttattaagctgtaaaggtgcatttaaccataaacaaaaatagtctccaagactataaaaacattacattttagacaaattagtcttccacttcatcgtccgtcaacacctactgtaactgctggtgttgctgcctaacaagtatcatattcactgcaaacatcttagtaggagtagcttttgacgaacaactccttcttggcttcctcggattcaccctcaccagtgtacttcccaagctgagcgagtgagttggacttggcacggaatgcgagtgcatcttgtgctgccttcacgttctctgggcggcctccccatgtcttaaggcagtgttttggagggctctggcatacgagaatgacacgtgccacgggtttggagattggttcatggcattcaaattgagggtaggcttaacctcagactgtccaccagacaaaaacataattccagggacagcagggggaattc

SEQ ID NO: 218236 - DNA, 539 bp, Glycine max
gtcgtcgcgtgtactttcttgcgaaacagaagggcgaaggggcaaacacaacttttttgtttttttgtagagcgagagagaaaaaaatgttggggatcttcagcagttccgtggtgtcgccgccggaggagcctgttggctgccggcagcagaacgccgtcgccgaagacgacggcggggaagctgctgaaccggttcgtggagaacaaggcgtcggcggtgtcgctgcaggtgggagaacacgtgcagttggcttacacgcaccacaacgagtcaccgtggcatcccagatcatttgctgataaggatgagatattctgcttgtctgagggggctctagacaatttgggcagcctgagacaacagtatggactggccaagtcagccaatgaagtggttctggtgattgaggcttacaaagctttacgtgatcgagcaccataccctgccaatcgtgttgtatgccatctcagtgggagctttggcttcatagtttttgacaagtccacttctaccctttttgtggcttctgatcaagc

SEQ ID NO: 218237 - DNA, 481 bp, Glycine max
ttttttttttttttttttttttttttttttttttttttttttttttttttttttttattttttagtttttatttttattcctttacaccccaaaaccacaacaaaaacccagcacatcaaaacccagagggcccaccgggcaacacccacaaaaggcccccggcccaaaaaaaacccaaaaaagggcccaaaagaaaccccaggaaaaacgtcaccccccccccacacccccccaagaccccacaaagggggttaacgcgggcccccagggaaaccctcccccggaacgggccaaaaacccaaaccccccgaaaaaaccccccggggctctccccaaaaaaaaaagtttcgcacggggcccgaaaaggggggggacccccccgccccagaaaaacccccccccaaagctcccccccccgggggggaccccacacggcaatggtggggggaccctacgcggaaaacccccccccgggagggg

SEQ ID NO: 218238 - DNA, 529 bp, Glycine max
cgtttctcttgttttgtttcacagtctgcagagtgcagagccttctctcctctattttggcttccaacctttttgctccattcattctcaacaacaaaccaatctctatattttgcttagacaatgagggggaagctggtggcaacttgggcaatcgatcactcgccgtcttgcccatggagataagaaggctgttgctcgccgatgttttgcctcagaagctgagctgaaaaagacagtgtttcatgacttccatgtagctcatggtgggaagatggctccatttgctggatggagcatgccaatccaatacaaggactcaatcatggactctaccatcgactgtaggcagaatggtagccttttcgatgtttcccatatgtgtgggctgagcctcaaggggaaggatgctgtcccattccttgaaaagctagtcattgctgatgttgccgggcttgcccctggaactgggacattgactggtttcacaaatgaacaaggaggggcacttgatgattcagtaattact

SEQ ID NO: 218239 - DNA, 484 bp, Glycine max
aacatgccaaattaaactcatacatgtctgaaaattgataccgagttatgaatgcaactgaaagccttatatttaagacaatgacattagcagtggctgtaacacttgattatgggaaaatttgtcaacaagggagaatgattaggaaatgcttaagatataaatacagaagtagatcaggatggcttatagtattttgttggtacaaatggcatttttgtaaggactccttcattgggttttcctcgaataataatctttactttggtgcctgccttgtgcaatccagatttcacatatcccatggctatgttcttctggaggcaaggactgaatccaccactggtgatttccccaatgttggtgcctccttcatcttgaatctcactgtggcttctgggaggtggaccagaagaaaagaaaccaacacgcctgattttaggaccttcttcgagctgtttcaagataacatcagctcctagaa

SEQ ID NO: 218240 - DNA, 553 bp, Glycine max
cggctggggagtcaaatgtgtcagttaaagcaaggaaatctaatggtgacagtgatccattgccacgttgcgttgttcttgacattgaaggaactactactcccatatcatttgtttccgaggttctcttcccatatgcccgtgataatgttgggaggcatctatctctaacatatgatacccccgagaccaaagctgatatcaagttgcttcgttcccaagttcaaagtgaccttgaacaagggattgcaggtgctgtgcctatccctccagatgatgctgggaaacaggaagtcattgctgcacttgttgccaatgtggatgctatgattaaagctgatagaaagatcactgccttaaaagagttgcagggtcatatatggaaaactggctatgagaataatgaattggagggaatagtttatgatgatgtaccagaagctctagaacagtggcacgccttgggtataaaggtatacatatattctagtggtagcagattggctcaaaggctaatatttggaaataccaaccatggggacctaagaaaata

SEQ ID NO: 218241 - DNA, 479 bp, Glycine max
  unsure (1)..(479): unsure at all n locations
ggagaaactcaacgcaaaatacattacattacattattttaattttttttaattacattattttaattaagaagtgaacgttacactattcttagtaatgataacacatttaatgtcattccagaagactgcaattggtcttagatctccgagaaggatttgattgtcttgaagccatgattgtcagggaggggtccatttccaggtcgaatagaaattatcacctccaaacctgcagccgttgcagctgtggcttcttgatatacatcagtgacaaataaaatatctgatggtttttcaacancgagtgactcaganatttcacatactgcgtgtctctctttggttcccactgtagtgtcaaaaacccagataatattntttaggtcccatggttggttttcaaatttagcctttgaccaatctgtaccactagaattatgataccttatacccaagcgtgccactttttagagctc

SEQ ID NO: 218242 - DNA, 317 bp, Glycine max
atccgcaagcccgtcactatgcactcacgtgcccgtgcccgagagctgaccgccgcacgacgaattggccgccaccgtggtttcggtaagaggaagggtaccgccgtctctcgtatgcccaaccaaaatactctggatgcgccgtctacgggttctccgccgtgtactagtcaagtaccgtgccgccggaaagatcgacaagcacctctaccacgagctctaccacctgtacaagggtaacaccttcaagcaccagcgtgctctcgttgtacacatccacaacgccaaagctgggaatgcgcgcgagatgccatcaa

SEQ ID NO: 218243 - DNA, 321 bp, Glycine max
tagcgcttatgcacgtctctatgattatgaacgtgtacgcaaggtttgcgataaacagaaagctatactattggcagatatggcacacatcagtggattggttgcagctggtgtcatcccatcaccttttgattatgctgatgtagttactaccacaactcacaagtcacttcgaggaccacgtggagctatgatattctacagaaaaggggttaaagaaattaacaaacaaggaaaagaggtattgtatgactacgaagacaaaatcaaccaagctgttttccctggactgcaaggtggccctcacaccacactattact

SEQ ID NO: 218244 - DNA, 316 bp, Glycine max
ctttgtttagattttgtccctacttcatcagttgtcaaatcatctacaaaaaaaaatggaccaaaggcttattgtcagtacaaatactcatggtacttatggacttaaaataactatgctttgtgaatcgggatcaataactattctttataggagtgcttctgttttgactttccttcaatgagcttgggctttttctagctgttcaatggccccttccacttcaatacttccaaatttcaaatagttctcaagattctttgttttcgattattctaagtggatgaatttgtgctgaactgtaaattgtttggtg

SEQ ID NO: 218245 - DNA, 456 bp, Glycine max
  unsure (1)..(456): unsure at all n locations
acttatatgaaccaataagcaatttactaaatagttttactacagaggaacttaacctcaacttccatcacaacaatgacaaaaaagaagaaaaaacaagtaaaaaagtgataaaacaaaggttattttatcacaaaatattgcagatctgataaaagtgcacatcccttttatatatcagaaggaggaggaaagatgcgtgacacaggagatattacatattgttggatataattcttagaattgtttgggtcaggaatccaatgaatctcactcatgtttggtgtctcaacaaaggccatagtgaaccctcctaccttcactagtttccctctcttccctgccctcagtataaggttcccatgctggtacgaaaatatgccattggtaagacaaattatgtcacctgaatcaaaagcatcacactcgtcgncccagaactggaaatgaatagct

SEQ ID NO: 218246 - DNA, 317 bp, Glycine max
tcagaatgcagagcgcaacacgcgccgaggcggagcgtctcctggggatcgcggagaagctcctccagaaccgcgatctggtggggtctcgagagttcgccttcctcgcccaggaaaccgagccttttcttcgaaggctccgaccagatcctggccatagttgacgtcctcctcgccgccgacaagcgcgtcaacaaccaccccgactggtacgccgtcctccaggtggaccgccgctccgacgacctggacctgatcaagaaacagtaccgccgccttgccctacttctccaccccgacaagtaccgtttccactt

SEQ ID NO: 218247 - DNA, 309 bp, Glycine max
ctttgcgtggatcatttggcctgaccttgtcattgttggatccttgatcgtgacgtgtgagtgtgtcatgaaaacaagatactgaagcctaatatcacgttggtgtccacaggaacaatgagctaacgcatacttcaatcgctgtatacttgactcattgcggatggaactcacctactgaaggtgtttgtgctggactgccaatgttgtgttggccattttgtgcagaacagccaacacactgtagatacatttgcaatgagtgggaaattgggatggatattgacaccagtgcgaagagaaggaggt

SEQ ID NO: 218248 - DNA, 542 bp, Glycine max
tgtgtgtgttggatgggacccggaaggcgtgcttggtccaccccaaactgggcacctcgccaggttcgagtttaagaggcgcctcgagagagacgcagatgcccgcgaagccttccaacgtcaagtccgtgaagagaaagaacgccgtcaatcccttcgacaatctcgtcctcttcccgatactccgcaagacctcattgaatacttccttgacactgaagctcaggagattgagtttgagattgcaagaatgagaccaagattgaatgaggaattctttgcgcaactcaaattcgagttaggacagcttcgattcgctgttaacaaaacacagctcatggaggacagacagattgagctggaggctctagagaaagccatactagaaggattagaagcctatgataagatgcaaggtgaactcgtaaaagccagggcaagcctaaccaaaatcttgacatcaaaggatgccaaagcaactttgctggagatggttgaacagaatgaaattaatagatctttatggcactttagatgaaaac

SEQ ID NO: 218249 - DNA, 538 bp, Glycine max
aaaatgtacaatttgatacttctgatattacagtggagaaatctgctaccacaacatcccagttctttagtattgtctttctgatcaacagcacaattttcacaaaacttaatagtaaagtgggaagaaacgtactatatgcactaaactgtaatgtaccgaagaacagccccgcggagcttctccatatattctgcagcctgtttctggttgcccttttgtgcacttgctatgttttcatctagaagtgccaataaagatctattaatttcattcttttcaaccatctccagcaaagttgctttggcatcctttgatgtcaagattttggttaggcttgccctggcttttacgagttcaccttgcatcttatcataggcttctaatccttctagtatggctttctctagagcctccagctcaatctgtctgtcctccatgagctgtgttttgttaacagcgaatcgaagctgtcctaactcgaatttgagttgcgcaaagaattcctcattcaatcttggtctcattcttgcaatct

SEQ ID NO: 218250 - DNA, 350 bp, Glycine max
aaggtcacaatgtatatcgaaaggtgaattaagctggaatggtgcattgaaccttcaacgaagatggactacaagactataaaaacattacagttctagacacaataggcctcacacttactcgaccgctaacacctactgtaactgctgatgatgctgcctaacaagagtcatatgaacatgatacactgtatgaggagacgctaatgaccagcaactgcttatggggatcctaggattcaccctaaccagcgaacttcccacgctgagacgagtgagatggacttggcacggaatgcgagagcatcttgtgctgcctgaacgatctatgggcggacgccgcatgtcta

SEQ ID NO: 218251 - DNA, 458 bp, Glycine max
gtggaagaggctcatgttgacctttctatgtgcctttgctgctttcttcgcttacaatatcatgactgcgctagttatgttcttgtccatagtcacaattgggttaagtagtggtgggcttgcggttttggtttccaatcacggttttgtacttcattgggtatgtgtacctcaccgtggtgtggcaactagccagcgttgtcactgtgttggaggactcgtggggggttcgagccatggcgaagagcaaggagttgataagggggaagatgggtttgtccatattcatctttttcacccttgtggcttcttttgagcccattagggttttgttcaaggtgatggtggtggatgatggaggccgtagtatctttggacacaccagcatatggtgttctctgtttcttgctattgtcttgggtgctactctttgggcttgttttgcacactgcgctcta

SEQ ID NO: 218252 - DNA, 562 bp, Glycine max
gatgtgaaataaagtcatctcatagcattaattaatacacctttgcaaaagagtcctatttttaaacagaaaattaaatacatataaccaatcatatagagagtaatgaaattcacttcacacctgccttaatttcacacacaaaagatatttctaaagacatcaagaaaccaaagcagatataattaaccgcatcatcaatctagacacatgatgatgattaatttaatttatctaattaagctatattataaatcaaacttggtactgctccagctgaacatccttagccgtcaatggcacatactctccacgatacccttcaagatgatctgccaaagccgatttgtcaatattctcatggtgataggacttgcaaacaaagtagagcacagtttgcaaaacaagcccaaagaggaacaaacaagacaatagcaagaaacagagaaccccatatgctgttttgtccaaagaactcaccctccatccatccaccaccatcaccttgaacaaaaccctaatggaaacaaaagaagccacaagggtgaaaaagatgaatatg

SEQ ID NO: 218253 - DNA, 320 bp, Glycine max
gagctttttgtgaggattccaaagcatggcttcccttgcagcatccactgctgctgcttcccttggcatgtcagaaatgcttggaaaccccatcaacctcagtggtgccacaaggccagctccatctggctctagccctgcctcctttaaagactgtggctcttttctccaaaaagaaggctgcacctccaaaaaaagctgcagctgctgctcctgccaatgatgagcttgccaagtggtatggtcctgacagaaggatcttcttgcctgagggtctcttggaccgatctgagatcccagagtacttgacggagaagtcc

SEQ ID NO: 218254 - DNA, 476 bp, Glycine max
ccaaggaacaaagccaaatgccttaatatctcagggatatgtattgtacattaagtaagattggagaaaaacatgaagatgaatgatttagagaagtggagctctctcagcagatccagaaatgacagtgagcaagttgttgccaaaagggtcactgagatgttttgcaaggttctaaacaggaccttctccagtgacataagcttggaagtagaaaccaagcatggcaaacatagcaagtcttccatttttaatttccttcacctttagcagtgcagcttggtctggatcatttgcaagccccaatgggtcaaatggaccacctggatgaagtttgacttcgaaattcaggccattaataattctgtcgaactctgaacctaccacaagaacaatcttagcaatgacagccacaataagattgatggggatgggtttcccgaagtggttcaaggtgcccccattaagaagcagag

SEQ ID NO: 218255 - DNA, 320 bp, Glycine max
aatccactcacttgctacgatgtccccttctgccaacactaacggaacttctgccaccaatggctcgtcgaagcctcgtcctactttcgctgtcaaggctggactcgctcaaatgctcaagggagggggaatcatggatgttgtcaacgttgaacaagccaagatcgctgaagctgctggagcttgcgctgtcatggccctgcaacgtatcccctctgatatccgaaaggacggaggtgtcgctcgtatgagtgatccccacatgatcaaggagatcatggaagccgtttccattcccggcatggccaagtcccgtatcg

SEQ ID NO: 218256 - DNA, 463 bp, Glycine max
aagggagagtagctacaaagagaaaactggtgattttgcaaagtgaggccaaaaggggacaaaaaaacgaacgattaaaaatttttctatacaaatgtcacaattcttcctttgttgcccaaaataaccatgtccagggaaaggaaagagggaagtgaaaagttgaaaagcgagagtttagtaacctcgatcaggggtcataacctttccagctttggcgcctaatcgggattctccctttatgccttcaccgaggccccaagaaatcttggggagcttgacgggatcttggtagtgagtagtagcgaggaccacggtaccagcgaacttttcggggttttcagatttgaagataccggatccaacaaagacaccattcataccgagctttatattgagagcagcatctgcgggagtagcgattccttcagccgaaaacattactactggaagtcccttgaac

SEQ ID NO: 218257 - DNA, 302 bp, Glycine max
atcaaaagaaaaaagagaaacaaatggcagcactgggtggctttaccgacatcaccggagcacagaacagcatcgatatcgaaaatctcgctcgctttgctgttgatgaacacaacaaaaaagagaatgcagatctggagtttgagagggcgattagtgcaaagaaacaagtggttgctggcaccttgtactatatcactttggaggcaaatgatggtgtgacgaaaaaggtttatgaaactaaggggttggagaaaccatggttgaacatcagggagggtcaagaattcaagcccatcact

SEQ ID NO: 218258 - DNA, 413 bp, Glycine max
aacttaaatgaaatctatatttcacttaatgtcaataaatattaagatagatccaaggagggcaagaacttcaagattgtgaccccataatcgcattgagtacagaagggaccgctccaccagatcattctgctataaagttcgaatcatcaccatccacgctttggacgaaacacgcataaattaatacataatcaattattttattaatctcgatggcaatatttatactgaaatatataggatggcaaacatgcacaaccccacaccgtttgtagagttaataggtacatttattcagttcatacatattattactcttgcggccaagctagtcacttccataacctagctatgtgctagaccgtcaccgaaagaggattaacagcaacagtgatgggcttgaattcctg

SEQ ID NO: 218259 - DNA, 318 bp, Glycine max
gtggtagtaagcgaagagggtttggcaaagtaagagttactgctgaagactcagtttctccctctgagaccattgcagatgactattatgaagttcttggactgcttccagatgcgacaccagagcagatcaagaaggcatactacaattgcatgaaatcttgccacccggatttgagtggaaatgatcctgagaccacaaatttctgcatgttcatcaatgaagtctacacggtgctcagcgatcccgtccaacgcatgatttatgatgaaattcatggctactctttaacttcaatcaatcctttcttggatgatt

SEQ ID NO: 218260 - DNA, 542 bp, Glycine max
tggaatgcaacctataccaacttatgaaagacagggaaaaactgttttctgaaggtgaagttagaaattggtgttttcaagttttccaaggccttgcttacatgcaccagcgtggatacttccatcgcgaccctgaagcctgaaaacttgctggttaccaaggattttatcaaaatcgctgattttggcctagcccgagagatcagttcacaaccaccctacactgagtatgtctccacacgatggtatcgtgctcctgaggtgctgcttcagtcttatctgtatacctctaaagttgacatgtgggcaatgggtgctataatggctgagcttttctctcttcgtcctcttttcccaggtgccagtgaagcggatgagatttacaaaatatgtggtgtgataggcaatccaacctttgaatcatgggcggatggactcaaacttgcaagggatattaactaccagtttccacagcttgccggtgtgcatctttctgctataattccgtctgctagtgatgatgcaatcagccttattacatc

SEQ ID NO: 218261 - DNA, 561 bp, Glycine max
ctgagactcttgaagaatcttttccattcttcggttatgtatggaaagatagaaataaaatgactacaattttgggtattcacttaatcttgttaggtataggtgcgtttcttctagtattcaaggctctttattttgggaggtatatatgatacgtgggctccggggggcggagatgtaagaaaaataaccaatttgacccttagtccaagtattatatttggatatttattaaaatcaccttttgggggagaagggtggattgttagtgtggacgatttggaagatataattggggggcatgtatggcttgggttccatttgtatacttggtggaatctggcatatcttaaccaaaccttttgcatgggctcggcgtgcacttgtatggtctggagaagcttacttatcttatagtttaggtgctttatctggtcttggttttattgctagatgctttgtctggtttaataataccgcttatcctagtgagctttacgggctcactgggccagaagcttctaagctcaagcatttacttttctagttagagaccaacgt

SEQ ID NO: 218262 - DNA, 573 bp, Glycine max
aagaaaaaagaaagttctaattattaataaattatatctatatatatatatatacagatagatattctatatcttttatcttaattaatatttgacccctccttataatgtgttatagttttctttatttttaggaacttatccattccttttttaatgtgcccgacaatccgaaagaattctgggggaggggtcatttcgtttttgatctagaataaatagagcttcaagaaatgagagaattaagaatacccacgagaaacactaatccaatccataatgatgtaccggaaaatacaacatttttgttattcgaccaaccttcaggagaagcaaatacaacaggtacactaatcaataaaataaatgaaatagcaattaatgcaaaaacagctaattggaaagcaatagtcatgtttctaatcctccaatttaccaacaaaagaactttaccatttgatcccccaaccccttgatccctttattgacaaaaaaatttataataaaaaaacgcagaaggttttatcatgaattcattgatttttttactattatcaaccttttgaggcatga

SEQ ID NO: 218263 - DNA, 594 bp, Glycine max
ggagatcggagagagagagagagagagagaggagggaaaggatgggttgttgccaatcatcgacgttgctgagagtgggagagagggagactcaccctgaaaaggaaaaggaaaaagaccaccagaggcttctttgaggccgagaaagagggctttgatttctccttctctgagttctcgctggctgagctgaaggcggccaccaacaatttcagctctgactatatcgtgtctgagagtggggagaaggcacccaaccttgtttacaagggtcgcctccagaaccatagccgctggattgccgtcaagaagttcagcaagtctgcttggcctgatcccaagcaattcgtcgaagaggcttccggcgtcggcaagttgcgccatccaaggctcgctattttgatcggtttctgctgcgacggcgatgagaggcttctcgttgccgagtacatgcctaatgatactcttgccaagcatcttttccactgggaaactcagactattgagtgggctatgcggctgcgagtcgctctttacatcgccccagctttgcattattgcagctctgaggtcgtccctcgtccatgacttgat

SEQ ID NO: 218264 - DNA, 494 bp, Glycine max
  unsure (1)..(494): unsure at all n locations
agaataacctcaataaacacctggttgacagtaagtaacccagtaggcatcaaccaatcaatttcattaacaatggaaaaattaccggtattccttcccaatttagagtgcataagcacagttttcaagttaaccgattcctataagatggtgaaataaaatgcatgtgccatctactccaccacttttgtatttctctgacacattttatactcattcaaacgttagttttgcttcccagctcaacctttatacagaacttgacaccctcaaattagcccactgcataaaactatgatcctctcgctcctctttgcctcttctcttccaatgcagctgcctcatttaacatatcagccgcatccttgtgcatgtccagttttgcaagagcaactgattgcatgtagaaagccgtgggccagtctggataaacgcactgtgcttgcattgcatctcgtagcgcaggatctggntgatcacataacagatagcat

SEQ ID NO: 218265 - DNA, 318 bp, Glycine max
cattatttgagaacaacagcagagaataaaagagaagaggagatcttggagctggttcaaaatactgattttttagtacttgcgaggtctatgcggatactatccagcttctttttaaggagctattggaagggatataattaacatccaccatggcctgttaccatcatttagcggcagcaatccatctaaacaggccggtgatgcaggtgtgaaattaattggtgcaacaagtcactttgtgactgatggacttgatgctggacctattattgaacaaatggttgaaagagtttcccatagagaaacttgctgagc

SEQ ID NO: 218266 - DNA, 318 bp, Glycine max
cggctcgaggtttgaaatcacaaaccgatgcacatacactgtctgggctgcgtctgtgcctgttggcggtggcgtgcaattaaacccgggccagtcatggtccgtggacgtgcctgcaggaacgaaaggggcccgtgtttgggcccgaaccggctgcaacttcgacggttcgggccgtggtggatgccagaccggtgactgcgggggtgtcctcgactgcaaagcttacggtgcgcctcccaacaccctggctgaatacagcctgaacgggttcaacaatttggacttcttcgacatctccctcgcgactgttttaac

SEQ ID NO: 218267 - DNA, 400 bp, Glycine max
gaaatggaatttcattgcccaaagagtttaatatattattcataaggaccccatttcatttagaatagaagtacacacatgatacacgatgagggggcacgcaaagggcacacgccttatggaaatctatggatctgtatttcagcgcatatatgatttatcattgaatggcatctgcttgaagcgacttggataaccctgtagtcagctccaccattacaagtgaaggtgcttgctggatcatccttggggtaactattagcatcggggcacctttgcttgaagaatctggaataatcagggggcccacagcttccggaattgtgacagtactggtcggttttgaagacagtgcaagggttgttgcaacctccttgagtattttgcttactagggcact

SEQ ID NO: 218268 - DNA, 319 bp, Glycine max
gccaaatcaatcaaattctttgagttgaacacaggggccaagattccttctcttgggttagggacttggcaagctgaacctggtgttgtagctgaagctctcaccacagccattcaggttggatacaggcatattgactgtgctagtgcgtataagaatcaagcagagattggttctgctcttaagaagctttttgatgatggtgtggtgaagcgtgaggacttatggatcacttccaaactctggtgttcagatcatgcaccagaagatgtgccaaaagcattggataaaacattacaggaattgaacttgactatct

SEQ ID NO: 218269 - DNA, 409 bp, Glycine max
gtcaaattcactcaactcactttattatattgaataaaagatacaatcattaaatgaaaaataactcttggctacttattcggtgttaccatcaatagtaacacttctcaaaatctcacttgaatcactacaactagtgggtataaggcagaataaatttgctctaggagcaatgtatttttcaacgtctcaaagatgcatattgctcagagttcaccatcccagaagtcttcaatgctcctataggcaccataggtctcgtgaacaaaaaaactggccttaactagcctttcctgcttaatttcagagatcttggtcatcaaatcttgaggaatagaccagtcaaagatatcaaaatttcccttgaatctggactcattagtgctcttatgatgcacactatgacctg

SEQ ID NO: 218270 - DNA, 314 bp, Glycine max
cggctcgagcggctcgagctcgagaaaagcagcatagtgagatactacgtatactacgtagtactacacatttcatttgcctcttgtagtagccatggttttccaaacaaacattaatcctcacttcgtatttgtttcctctcatggctcaaggccacatgatccccatgatggacattgcaagactattggcacggcgtggtgtgattgtttccatattcaccaccccaaaaaatgcatcacgattcaattctgttctttctcgtgatgtttcatcaggcctcccaatccggctagtacaactccattttcca

SEQ ID NO: 218271 - DNA, 529 bp, Glycine max
gctgtaataccatatatagccatcaatttcattcatggttttgtgaaatgcataaaaaataaattccatacactatacttgtcatgaaaaagacatgtacccattttcattacattacccaggaaagatagttacataagaagaagaaaaaaatttagtaaacttttaaaaatttaaccattaaaaacatcaagcgctacatataaattgcgactcttaggcgtcaacactttacatcctccttgctacttgattgttgcatgatgtcttgtataagcaaagtcatgtcaagatgggaagacccccctttttcaaccgctttctttgccatctcacagagtttggttgccctttctcttctctctttgctttcttcttcatcattgtccatcaccatgcatattgccctctcaatgttcttcttcttcaccaacacaccagttttctcttcctctccccaattcattggaacttttgccccaacactcacaccaatcttcaacacttgagtaacgagcttttcatttaa

SEQ ID NO: 218272 - DNA, 317 bp, Glycine max
cttctgtgcaaccagaaaaaaacggaccttgccctcagtctcttttttccatcatcacttcattaaacattattcactctctttctctgtctctagtttttacaacatggctactgcggtaactgctgcagtgtcctttccagccaccaagtccacttctctttcaagcagaacctctatcactgccccagatagaattgtcttcaagaaggtttcgttgcaatacagagatgtttcaaccagtggaagggtagtttcaatcagagcacaagtgaccacagaggcacctgctaaggttgaaaaggatcaaagaaaca

SEQ ID NO: 218273 - DNA, 519 bp, Glycine max
gacttcatctatattgatagatcctcaaaattatttcatgcaaggctgttgcaatgaagcttgtacgttcataaggaaggtaaaaaatcccatcatagaaaaattacagggccgtaatctatctacacagcgcatgacagcaaaatagatttgctgctgcacaaagtagggcatgatatctgagcaagtgcaagtgatattaattagtagacttcgacattccattgctctgccttcttcaattgcctcttgtactcaatccaatcaataccatcttttgcagccaatgaaaccattatgtcatctatacccttttccattcccttcagtccacacatatagacaaaagtgttatctttcttcagtaattcccataactcttctgcatattgagccattcgtgtttggatgtacattttctctcctttttcgtttgtttgctctctgctcacagcaaagtcaagcctgaagttgtcaggtgctttctccttcatcttttcaaattcctccttataaagt

SEQ ID NO: 218274 - DNA, 544 bp, Glycine max
cctcctcacagctccaaagccacaagcctcctccgacctccccgaaggcaccaactggcgctacagcgagttcttgaacgccgtcaagaagggtaaagtcgagcgagtcaggttcagcaaagacggttcccgccctccagctaaccgccattgacggccgtcgcgcctccgttattgtccccaatgacccggacctcatcgacatcctcgccatgaacggcgtcgacatttccgtcgccgagggcgaatcccccaacagcttgttcaacatcataggcaacttgctcttccccttactcgcattcgcgggcctgttcttcctcttccgcagagcccaaggcgggcccggcgggcctggcgggctgggagggcccatggacttcgggcggaacaagtccaagttccaggaagtccccgagaccggcgtgagcttcgctgacgtggcaggcgcggaccaagcgaagcttggattacaagaggttgctgatttcttgaagaatcccgataagtacaccgcgcttggcgcgaagattccgaagggtgt

SEQ ID NO: 218275 - DNA, 519 bp, Glycine max
gaaagtgtaactcagccgtagaaccatattttttatttatttattgcgtaagctgctgtgctaattgttttttctccttgaatttgataaaataattattgattcttacagtgtacaagtcagagcgtattttatagtacaaacataattctgtgacttgcgtgtatgattatgcaacatataattcggcttttccatcaatgaatagactcatgaactcttcaccatccacagtttctttttctatgagaagttgagcaagcttgtgaaggatatcaatgtgagttgagataatatgtgttgccctagaatatgctctctctaccagttccctcacttccgcatccactacatccgcagttgccatggagtaatccttttgcgatgacatctgttgacccaagaatggatttccaccaggtccaccaatggcaacttgtccaatttttttgctgaatccaaatctctcaaccatctgccttgccactcgtgaaacttgcatgaagtcgtttgatgctc

SEQ ID NO: 218276 - DNA, 552 bp, Glycine max
ctagcttccttcgcaaccaacaatccctcttcccaacctctcgattcttctctcttcctctctgctccttcaatttttgtttcaggttcgagatccatggtgagttttgaagcagaaggagggaaggggtgtaaccgcttcctttttccgcgcgtttgacatggacgacaatggggacgagtgcatggatgagtactttcataaacccgagaagaagcgtcgtctctccatgaaccaggttcagtttctggagaagagtttcgaggaggagaacaagcttgaaccggagagaaagaccaagcttgccaaagaccttggtttgcggccacggcaagttgctatttggttccagaaccgtcgagctcgctggaagaccaagacgctggagaaggattacgaggctctgcatgcaagttttgagaatcttaagtccaactatgacagcctcctaaggagaaagacaacttaagagctgaggtggcgagcctaatgagaaggtgcttgcagagggaaaccagagggcacatgaagcagcaagctgaagtgaagaag

SEQ ID NO: 218277 - DNA, 559 bp, Glycine max
caacgagaagacattatttaattacattggaaccaacagtttgattacaagtactaacaaaatgaggcaaaaagaaaacaaacatttctttcctgataaagctaaagctatagccatttttgaagcctggacaaaaagtgcaaatactaaatactaattactaaaaaaacatatgacacaaacacacacatgaacatggaagaaaacttagtatgcccaggtccaaagggcgtgatcttcctcagaaaatccaaaattacaagaactttcaggcgggtcggagtaatccacatcttcttcaagtttgggaaagaggtacgaagggtagagacttttgctgaggttatcttcttcatcttgtgacatatccgattgatcatgctcaaacacataagaagaatcaccatgctctagcagtgcggagttaactccatcggtgtaatgtggactatctgaatccaaaatatcactcctggctgaactgatatcttcctgtttacaacccccgcaacagaagagactttggatccttctcccttcgaaactgatccagtaaaag

SEQ ID NO: 218278 - DNA, 484 bp, Glycine max
gcatcatacaaagcattgaattcaaaaactaagttcatttcttgtgctttgctttattcctcaaaaccaaacatgtcgaacacatgcggcaactgtgactgcgctgacaagactaactgcaccaagggaaacaagttatggttatagtagagactgagaagagctacatcgagactgttgacatggatgttccagcagctgagcatgatgggaagtgcaagtgtggcactaactgcacttgcacggactgcacttgtggccattaaggaatatgtatgaaaatgtaattgccatgtgtttggcaatacaaatctccaaataatgtaatcttcgtatgaataaatgtgtgctgttatcctacttcagggtctgtgtagtcatgcagtctgaatcatgtccagttcctgtcataggtattaacagccatggttgcggcattctatatatggatttatagtagataaataagtgtaactctccgttc

SEQ ID NO: 218279 - DNA, 482 bp, Glycine max
gaacggagagttaaacttatttatctactataaaaccatatatagaatgccacaaccatggctgttaataactatgacaggaactggacatgattcagactgcatgactacacagaccctgaagtaggataacagcacacatttattcatacgaagattacattatttggagatttgtattgccaaacacatggcaattacattttcatacatattccttaatggccacaagtgcagtccgtgcaagtgcagttagtgccacacttgcacttcccatcatgctcagctgctggaacatccatgtcaacagtctcgatgtagctcttctcagtctctactataaccatagctgtttcccttggtgcagttagtcttgtcagcgcagtcacagttgccgcatgtgttcgacatgtttggttttgaggaataaagcaaagcacaagaaatgaacttagtttttgaattcaatgcttgtatgatgc

SEQ ID NO: 218280 - DNA, 500 bp, Glycine max
gtgtcatttacgcttctcttctctgcagcaactatgcctaaccctaaggtcttcttcgacatgaccatcggcggtcaatctgctggccgcatcgtgatggagctctacgccgacgtcactccccgcaccggcggagaacttccgcgcgctttgcaccggcgagaagggcgtagggcggagcggcaagcccctccactacaagggctcgtccttccaccgcgtgatcccgagtttcatgtgtcagggtggcgacttcaccgccggaaacggaaccggcggcgagtcgatttatggcgccaagttcgccgacgagaacttcgtgaagaagcacaccggtcccggcatcctctccatggcgaacgccggtcccggaaccaacggatctcagttcttcatttgcacggagaagacagagtggctcgacggaaagcatgttcgtgttcggacaggtcatcgaaagattgaacggtgtcaaggacatcgagaaggtcggatccagc

SEQ ID NO: 218281 - DNA, 498 bp, Glycine max
aggcgaattatagatgtcctaattttattgaaggtagctcatcatgttttttttatgcttctcataacagactccattcactcactctatgaaccccaaccaaccaaccacatgatactgatattgaaaaggaaaggggaagggtttcgaaatgatatccttaacaccacaatcccctaaacgacgacacgagaaagaaaagaagagaaaaaaaaggcaaaaacgacaccgaaagaaataacacagattcagagattaaagccgcgggtcaacgtcgtctaagagagttgaccgcagttggcgatgacaacgggcttggaggtcctgccggagctggatccgaccttctcgatgtccttgacaacgttcaatccttcgatgacctgtccgaacacgacatgctttccgtcgagccactctgtcttctccgtgcaaatgaagaactgagatccgttggttccgggaccggcgttcgccatggagaggatgccgggaccg

SEQ ID NO: 218282 - DNA, 469 bp, Glycine max
attaggaaagggaggacaaattcatttcaagaaagctataattttatttgttgaccatcattaaaagaaaagaaaaattaaggcatactaaatttacaatttaattaaggaaaaactcaagaatgcccttccaatgaaataaagcacttggatgcctgcagggtcaattatttgttgaaatcataagaacattttgaaagcatcaacaactttctcaggccagtccttttgtggcatatgaccagctccttctatcaatttaagctggatttgagctggatttcctttctgaaactgctctgccacaaactggggcaagtacttgtctgataatccccaagcaagtagtattggtttatcccatctctcaagtgcaaatcctgctgatatttcactgaaagtacctttgaagttagcttttcttgcaacttcaagtagagcaaattcaggtccactgcttgtcaaataa

SEQ ID NO: 218283 - DNA, 320 bp, Glycine max
aacgaggtggaaaagtgaagttgcaatccatagtgatgcctctttctgagtttgaccatgaggaaaagggagatgccctgtatgcaatggaacttgctctgtcgttggagaagctaaccaatgaaaaaattacttaactttgcacagcgttgccttaaaagaacaatgatgtgcaattggcagattttgttgaaagcgagtttttgggtgaacaggtggaagccataaaaaaaatctctgagtacgttgctcagctcataagagttggtaaaggacatggtgtgtggcactttgatcagatgctgctgctgaggagggcg

SEQ ID NO: 218284 - DNA, 525 bp, Glycine max
caaaaaaaaaataatccattcttccatttttaaattgatttaatttttcgttgaatcttaaattttgatttttcactataataataaataataaataaaaagattaagtaaatcatgatatataagataataatcatgatatatgatgcaatataaattcagcaaaaaaaaatgatgatgtataatcttaatattttcttttttgagtttgaattaaaagttcatactctatcaaaacttattaaaacaaaataataggcagatcattggactgttatattttgtcaatgtttattatttcaaattcatacaatggctttttgtttgccatcttttgttaatatatatatatttttttttgtgaaataatagtatttgtttaatatatatgattgcgtttgtttttctttgcttatcaaatagaagcttatgatcttcttatctatattgataatttgagttttcgatataaacgaccagaactttggataacttcataaaattggtggaaattaataaatatta

SEQ ID NO: 218285 - DNA, 314 bp, Glycine max
gattttccaagaggtcatatatcacttaagagtttcaatgctgaagtagttgatgaagcagggaaccctgtgcctcttcatgaaacttatctccaccactgggttgttgtaagatactatcaaccttaatatgtgacgacacacacatactatgatggacataagatacttcacaactctgaccatatatttgtgaggaacagcggcttatgccagagagatactctaggacaatactatggccttggatctgaaacacgaggaacagctacggatgttcctgacccttttgggatagttgtacgtgatcctgc

SEQ ID NO: 218286 - DNA, 506 bp, Glycine max
aatcaaaataactagtaatatgtatgatattttaataagccatatacaaaagtgtattattgatgtatcgtcgatgagcatataactaggatgcttgtttctatcggaaaatgactttattcaatgtacattctacttttctgctaatcctacataacttagaatttgtttgaagttgtctattggcagatcacatgatggtagtattggaccataaccaaatcaacagacactattacacttgaatgacttagaccccgtgatcgttgcagcatgaaatcagataagatgctgaccaaagatcctgagtgaacagtgcaaaccgtcaaaaaatatccatatcaatagagctaactagcactccatcatcttcccactttatatcctttgccacgggatcgtttcctatcaatttaagaggaacatctaatgggggtggagtcatgttgcggataagaggccaattgattccacggaaaaaaggatgttgcttgatttcattggca

SEQ ID NO: 218287 - DNA, 608 bp, Glycine max
cacaagaagactcctcaatcatccatagacatggccaccgtcacttctgcagcagtttctattccctcattcactggcctcaaggcaagcgcaggcaaagtgagtgccgccgcagtaaagtctagctccccagccacaaggttctgcggcatcaaggcttccctcaaagacgttggagtcgctgttgtggccactgctgcgagcgcagttctagctagcaacgccatggccattgaagtgttactgggcactgatgacgggtctctggttttctctcccaactctttctccgtggcccctggggaaaagatcgtgttcaagaacaacgcaggtttcccccacaacgttgtgttcgacgaggacgagattcctagcggcgtggatgcagggaaaatctccatgagcgaagaagaccttctcaatgcggctggtgagacttacagcgttactttggatgccaagggaacctacagtatctactgttcgcctcacccaggagctggtatggtgggaaatgtcaccgataattaattatatattgtctcctacctctaagttctcatatgcttgtttcctagaaagcctaaatcatctttcttgtagggcct

SEQ ID NO: 218288 - DNA, 490 bp, Glycine max
aggccctaacaagaaagatgaattaggctcttctaggaaaacaagcatatgagaacttagacgtaggagacaatatataattaattaacggtgacttttcccaccataccagctccttggtgaggcgaacagtagaaactgtaggttcccttggcatccaaagtaacgctgtaagtctcaccagccgcattgagaagggcttcttcgctcatggagattttccctgcatccacgccgctaggaatctcgtcctcgtcgaacacaacgttgtgggggaaacctgcgttgttcttgaacacgatcttttccccaggggccacggagaaagagttgggagagaaaaccagagacccgtcatcagtgcccagtaacactctaatggccatggcgttgctagctagaactgcgctcgcagcagtggccacaacagcgacttcaacggctttgagggaagccttgatgcccgagaaccttgtggcttggggagctg

SEQ ID NO: 218289 - DNA, 571 bp, Glycine max
gttgttcggagcgatccgagaaaaactctgtaaacatgttggtttaccaggacctacttacaggtgatgagcttctctctgactccttccgttacaaggaaattgagaatggaatgctgtgggaaggcgaggggcaagtgggttgttaaaggagcagttgatgtagacattggtgcaaacccttctgctgagggtggaggagaagatgagggagttgatgatgcagatgttaaggttgatgacattgctgacacattcagacttcaggagcaacccgcattcgataagaagcagtacgctaccttcatgaagaggtctatcaagaatttgactcccaagctcgatgcagagcaacaggagttgtttaagaagcacatcgagggagcaactaaatacctgctctctaagattaaagatttccaattttatgttggtgagagcatgggtgatgatgcttgctaggtctttgcctactacaaggactgcgctgctgatccaacattcctgtactgtgcatatgccttagaggaggtcaagtgcttagtgacttaatgtaccgagctatgtactc

SEQ ID NO: 218290 - DNA, 408 bp, Glycine max
caaatccttatcaataaaaccatgaggccaatttaaaatttttttagtccccacccaaaagtttttcaaaggaaacttccgggaatgtaggccgaccaaaatcataatttaatgaaattctaccccatcgttatttaaatttgaggggaattttgatgtatccgtcgcacacgttttacctttaaaatgaaattcccggggcaaggtttcaagtaccttaggacaggacgtaaaaaaaaacttgataaatggagtagatagctcgggacattaagtcacttaactcttgacctcttttaaggcatttgcaacggccaggattgttggatcagcagcgcctgccttggggtaggctaagaccacgccagcatcataacccttgctttcaccaacaaaaaattggaaatc

SEQ ID NO: 218291 - DNA, 515 bp, Glycine max
ctcatggcccatatgcatgggatggggaggccacatataaattcactacttaccaccctggccaaaactacaaaggtttatccaatgtcaaaaactacttccaccatctcggctacatccccaatgcaccacaactcgacgacaacttcgatgacaccctcgtatctgccatcaaaacctaccaaaagaattacaacctcaacgtcaccggcaagttcgacatcaacactcttaaacaaatcatgacaccccggtgtggcgtccccgacataataatcaacacaaacaaaaccacatcgtttggcatgatctcggactataccttcttcaaagacatgccgcggtggcaagctggaaccacacaactcacctacgctttctccccggagccaagacttgatgacactttcaaaagcgcgattgcaagggccttcagcaagtggaccccagtggtgaacatcgcgttccaggagacgacgtcctatgaaacagccaacattaagattcttttgcga

SEQ ID NO: 218292 - DNA, 489 bp, Glycine max
aaattaaggtaaatttgtcacatttattcattatcatatatgcatcacctagtatcagctggtttattcttaattaagagaaaactaaaatacaatatcttacatgctatttttgttgttcttgaattagaataatttcacctcgataactttcaaaatcctttaatgcaaattaccgaaataaaactctagttctagtacaaacaacacctagctataataattaggggttgataccatagagctttcgaatcccgtctatatcatcttgcgctagattcaccttcctagttcgaggtggtatagaaggatacatgatggctcttaggtccgacgagtggcctaatccgagcaagtgcccgatctcgtgcactgccacagattcaaggtcaaacgcacttgtcaccggcgatttggtgacatcgccagacgccacccaatattcgtcggcgtcaaagtggcacctcccatcagtgggagcgaatgcat

SEQ ID NO: 218293 - DNA, 318 bp, Glycine max
caaaatggatggattctacattgctccagcttttatggacaagcttgttgttcacatctacaagaacttcatgaccctgcccaacatcaaggttcctctcattcttggtatctggggaggcaagggacaagggaaaatctttccaacgtgagcttgtctttgccaagatgggaatcaaccccatcatgatgagtgctggagagttggaaagtggaaatgcaggagagccagcaaaactgatcaggcagagataccgtgaagctgcagacatgatcaagaagggaaagatgtgcgctctcttcataacaatcttgatgc

SEQ ID NO: 218294 - DNA, 356 bp, Glycine max
aaaggaaaaggcaccaaattcaatttaagtggacactgtaactcaaaattatagaggaagacggtccaatatgaaaaatatagtaagatcatctcaaacttagcatcttctctttgcacctaagacattgagaatgctaagaatgttacacgcaaggtccatcgcaacttctatcacttggattagttcaacaaccttcacgaacagaaatattcacttgccaagcttgctttgcctacaatacaagactgggcgattgtttccctctgaatcgtatatctcgcggctttgactttggccaaactccgtgtccatggtgtaaacttttgggacttgatatatactatcctgtttgg

SEQ ID NO: 218295 - DNA, 315 bp, Glycine max
ccttttaacaataccttctaaaggatggctagtccaagatgctgaacaacaaagttttattttggaacaacatcatcattatgggaatgtacatgcagtagaaaaattacgccaatccattgagatatggtatgctacaagtgaatattttcgacaagaaatgaatcctaattttaggatgaccgacccctttaatacagtccatataatgtccttttcgggagctagaggaaatgcgtctcaagtacaccaattagtgggtatgagaggattaatgtcggatccacaaggacaaatgattgatttacctattca

SEQ ID NO: 218296 - DNA, 487 bp, Glycine max
accgttcttggtggtatcaacacggcactgtgtcgggatatcttatccatttctccgggaaaatagatatccccggaaaatatttttaattcaatctttttttttttcttctccaatcggaccaatccccttactcgacttcttatatttaaagtgattagtgtatctacttcaacgatactattgttccgtaccattatggaagaagattctggtaaaatatgcacttcctcgggaatgaaaaaaaattgatctactttaatttggtattttgtcttaaattctttaactccttgatactcaattaaaaaatcctctttttttaaaaatggaatttatacctatagtcctatatttagtaattcccgagctctgtgttcggtattgaggatcatcgaaataagcaagaatgctatttctacgaaaaataccattgattggtatttcaatcgagatactggaagctaacattagctctttgcctcgt

SEQ ID NO: 218297 - DNA, 316 bp, Glycine max
ccttttaacaataccttctaaaggatggctagtccaagatgctgaacaacaaagttttattttggaacaacatcatcattatgggaatgtacatgcagtagaaaaattacgccaatccattgagatatggtttgctacaagtgaatattctcgacaagacatgaatcctaattttaggatgaccgacccctttaatccagtacatattatgtccttttcgggagctagaggaaatgcgtctcacgtacaccaattagtgggtatgagaggattaatgtcggatccacaaggacaaatgattgatttacctattaaa

SEQ ID NO: 218298 - DNA, 510 bp, Glycine max
  unsure (1)..(510): unsure at all n locations
accgttcttggtggtatcaacacggcactgtgtcgggatatcttatccatttctccgggaaaatagatatccccggaaaatatttttaattcaatctttttttatttcttctccaatcggaccaatccccttactcgacttcttatatttaaagtgattagtgtatctacttcaacgatactattgttccgtaccattatggaagaagattctggtaaaatatgcacttcctcgggaatgaaaaaaaattgatctactttaatttggcattttgccttaaattctttaactccttgatactcaattaaaaaatcctctttttttaaaaatggaatttatacctatagtcctatatttagtaattcccgagctctgtgttcggtattgaggatcatccaaataagcatgaatgctatttctacgacaaataccattgattggtatttcaatcgagatacttggagctaacattagctctttgnctcgttcttgaatcgattggaattgaaa

SEQ ID NO: 218299 - DNA, 493 bp, Glycine max
ctgccggtttctgagtcaatgcaacactgccatggctgcctcagactgcactattggagctgtgaacagagctgcactgagctagaacagctgtgcaactggagatatagcacccagttccgccgttctttgcccaagcttgaagaaggttactgccagacgggtacctatcgccaagaatacccctggaagcttcaaaatcgttgcggcggagaaagagattgatgagcaacaacagacacacagggacagatggacaggtcctgcctatgatattgcagatgaccagcaagacatcacaagaggaacgggtttggatgattacctcttgcaagctgcacaggagactggaactcactatgcaggcatgagctcttttgagtaccttaacactggacttaaacagtataacttggataacaacatggacggatattacattgctcctgcttatatggacaagcttggtgtatacatgaccacgaactttatg

SEQ ID NO: 218300 - DNA, 444 bp, Glycine max
agtaaaactatcttctattatttgaagccacaaagttcagcagaaccacaatgaacaccaggaaatattaattgattatctcaagtgttttttttagtagtgagacaatgtaactcaaaattattaaggataacaatccaatatgaacaagataaattatttgattatatcaagtcatagcttctcttcaagtggagaatgcttaggttctcagggtgtgtataagcaggttccatcatcacttcttgcagttgggtcgaagtttgaggcatttggatcagtacaaccttcaggaacgggaatttttacttgctgggctgctttgccatagaaagttcctcttttgatggcatcctgattagcattaccaagagcagcctcgttcaagtacttgtctgccagttgtactcttttcacattctcttgttcttgacaagcatgtta

SEQ ID NO: 218301 - DNA, 562 bp, Glycine max
  unsure (1)..(562): unsure at all n locations
aatcaagatagctcctttgaattttctatcagaatctgagggcccaaaatctagggttttctgttcttctctggggatctgaagacatgcagtccaagtctgaaactgcaaatcgactgagatcagatccttaattcctttcaacctggcagtgtttattctgagccttggtggcgtggtattgggtacaatcctgtggcccagacaatggctggggcaaatgcatccaattcatcgtctcttgaatgccctaatggtgattctgaatccaatgaagaaggtcagtctttgtccaatagcgggatgaatgaggaagatgatgatgccactaaggattcacagcctgctgctcctaatggaacaggaaattatgggcaagaacagcaagggatgcagcatactgcatcatctgcaccctctatgcgtgaagaatgccttactcagacaccacagctggaacttgtcggtcattcattgcatgtgctacaaatccttatcaggatccgtattatggnggcatgatggcaggctatggtcaccaacagttgggatatgctccttt

SEQ ID NO: 218302 - DNA, 542 bp, Glycine max
caaggaagggatcccacctgaccagcagagacttatctttgcgggtaaacaacttgaggatggtcgcacccttgccgattacaacatgcaaaaggaatcaaccctccatctcgtgcttcgcctcaagggtggcatggcaatctttgtcaagactttgaccgggaagaccatcacccttgaggcggaatcctcggacaccattgataatgttaaggccaagatccaggacaaagagggcatccctccagatcagcagaggctgattttcgctggtaaacaacttgaggatggaagaacccttgctgattacaacattcagaaggaatccacccttcacttggtgcttcgtttgaaaggtggcatgcagattttcgtcaagactttgacaggaaagaccatcaccttggaggtggaaagttctgatacaattgataatgtgaaagccaagattcaggataaggagggtattcccccagaccagcagaggcttatctttgccgggaagcagctttgagatggaagaaaccttgctgattataaca

SEQ ID NO: 218303 - DNA, 437 bp, Glycine max
gggagatgataatggttttttattcttttgcacgagaccgtgcatagcaagctatgtcacagacatagccttaaaactaaaaacattaaagcagcacctaaataacagctgcaaccaacgagttcaacatacactggacataacaacagagaattcaactaatattggacataacagacagactcagaaaccaccacgaaggcggaggacaagatgcagggtggattccttctgaatattggaatccgccaaggtacgaccatcttccaattgcttcccagcaaaaataagcctctgctgatctggtggaataccctccttggcctgaatctttgctttcacattatcaatggtatcagagctttccacctccaaggttacggtcttccctgtcagagtcttcacaaatatttgcataccaccacgaagccttaaca

SEQ ID NO: 218304 - DNA, 545 bp, Glycine max
  unsure (1)..(545): unsure at all n locations
catcgtcaaaatatggattgctgattggtttgccaagctcaacaacaagatgggaggagatttgaagaaaattgagaccgtgggccgttacttgatcgagatttggaaggctgttgggatggatctggagagtgggaaaagttgagtttctgtggtcctccaaagagattaacgccagagctgatgagtactggcctcttgtgttggatatagctcagaagaacaatcttaaaaggattatcaggtgtagccaaataatgggacgaagtgaacaggatgaattaactgctgctcagatattctatccatgcatgcagtgtgctgacatatttttcctcaaggccgacatttgccaattgggaatggatcagcggaaagtgaacgtacttgccagagagtattgtgatgacattaagaggaagaacaagcccattatcttgtcacaccacatgttacctggtcttcagcaagggcatgaaaagatgtcanaaagtgacccatcatcttgcattctcatggaagatgacgaggcttgaagtgatgtg

SEQ ID NO: 218305 - DNA, 562 bp, Glycine max
aaataaaaatataaatataaatagacacatctatattttaagtaaacaaaaatcacattactcattctaaagaaaacctccgccacattttagaagtccagaagtgtataatctcataacgtgaaagaacgactgtttggcaaagaatagaaattagcctgaagtctttaacgagcatattatttggtgactctgtaagccttgacccttttcagtagctctttagcattgctgtccttcctaaagtgttccctaacaggctccagaattttattcaatgactttgccaatgctgtttaaggtcaccaggatgtaactctccactttcataggctgcagtcagctcagcaaagcttgtgaaagtcttattcccaccattatctgcactacgctccactgtgaactcattaaaccaaggtaagacaagatatttaatgtactccaagcatgggtttccttccacagtcttgggagggcaataagccttttttattttcacattcacttcagccttctcatcttccatgaaaatggaagatgatggtcactttttgacatcttt

SEQ ID NO: 218306 - DNA, 417 bp, Glycine max
ctctgcctgtaagagtgaaaaaaccttctcttttccttctctcaagtctcaagagatttcatcatggctccaaagaaggacaaggctccaccaccttcctccaagcccgccaaatctggcggtggcaagcagaaagacgaagaagtggagcaagggaaagcaaaaggagaaggtgaataacatggtgctgtttgatcagggcacctatgataagctcctttctgaagctcccaaattcaagctcatcactccttccattctttctgatcgtttgaggatcaatggatcacttgcaaggaaggctataagagaattgatggctacgggttcaatcaggatgtgtgtctgcccatgcaagccagcaaatttacaccagggcaacaaacacctagtgtgtggaacttgatcttagcttac

SEQ ID NO: 218307 - DNA, 426 bp, Glycine max
gaatgtaaccaaaaatacaatctgagcattggatttagcgacaatctaaaactgatagaaccatatgagatgcttcccaaagtgcaaaagaacaatacttcattactattcctaccaattctccgtaagctaagatcagttccacacctaggtgtttgttgccctggtgtaaatttgctggtttgcatgggcagacaccattctgattgaacccctagccatcaattttcttatagccttccttgcaagtgatccattaatcctcaaacgatcagaaagaatggaaggagtgatgagcttgaatttgggagcttcaaaaaggagcttatcataagtgccctgatcaaacagcaccatggtattcaccttttccttttgctttcccttgctccacttcttcatcttctgcttgccacggcagatttg

SEQ ID NO: 218308 - DNA, 506 bp, Glycine max
cgaaaggttggaaagcggaaggcttctggtaagcctgagaaaagcagagcaccaaagaaggagaagaaggccaagaaagaccccaacaagcctaaaagaccaccgagtgctttcttcgtgttccttgaagagttcaaggaagacctttaaggctgagaatcctctcgtgaaggctgtatcagttgttggaaaagctggaggagagaaatggaaatccctgtccagtgctgagaaagctccatatgaagccaaggctgcaaaaaggaaagctgagtatgaaaaacttatcaaagcttatgagacaaagcaggcaagctctgcagatgatgatgaatcagacaagtccaaatctgaagtgaatgatgaagatgatgccagtgcagaagaggaccaccaagaggacgaggatgatgaggaagaagaggacgatgaagatgatgactgagattgatgtccaaaccttggatatgatatttggttatgagggaggctttatatattcgact

SEQ ID NO: 218309 - DNA, 506 bp, Glycine max
gatcagaaagaaattatattacttaaagcaacccatttaaggctacaatgcacaaaaagtgattcaggtacgatagctaagtgagggaagctcaagtagttggcaatatatcgtaccaacaaagaagacattcttttctaccagcacaaacataaaaagtagcctagtatgcacagtcagaatatataatagcctccctcataaacaaaatatcataaccaaggttttggacatcaatctcagtcatcatcttcatcgtcctcttcctcctcatcatcctcgtcctcttggtggtcctcctctccactggcatcatcttcatcattcacttcagatttggacttgtctgattcatcatcatctgcagagcttgcctgctttttctcataagctttgataagtttttcatactcagctttcctttttgcagccttggcttcatatggagctttctcagcactggacagggatttccatttctctcctccagcttttccaacaactga

SEQ ID NO: 218310 - DNA, 487 bp, Glycine max
taaaagccttagccttccctacaactccaaacacaaagacatcatcatccatggctgcctccgtctccactgtcggagctgtcaacagagctcttttgaacctgaatggttctggagctggagcttcagcttccagttcagccttctttgggaccagcttgaagaaggttattgcctcaagggtccccaacagcaaggtttccggtggaagcttcaagattgttgctgtagaagagaagaaagagattgaagagacccagcagaccgacaaggacagatggaagggtcttgcctatgatatctcagacgaccaacaagacatcacaagaggaaaggggtttggttgactcccttttccaagctccacaggatgctggaactcactatgcagtcatgagctcctacgagtacctcagcactggacttcgccagtacttggacaacaaaatggatggattctacattgctccagcttttatggacaagc

SEQ ID NO: 218311 - DNA, 520 bp, Glycine max
  unsure (1)..(520): unsure at all n locations
ggaattttcttccttcttactttaccttcgattgtcaccttctaattctgcaacaagttccaaaccttcaaatctcactgccccaaaaatcctttcttttttaaatagccatttgacttcagcctctacagcagagtcccagatctctgcattccaattcccatggctggtcgctatgacagtaaccccttcgatgaggaagaagttaaccccttctataatcctggaagtgttcccgctgccactaattcaaggctttcacctctgaagccagaacctgttgattataattatggctttggtgcgacagttgatatacctcttgattcatcaacggatttgaaaaagaaggagaaggaacttncagccaaggaaactgaattgagaaaaagggaacaggaagtgagacggagagaagaagctgcttcacgagctggaattgttcttgaggagaagaantggccgncttttttcccaatatccatcacgacattgctaatggaaatccaattcatcttca

SEQ ID NO: 218312 - DNA, 457 bp, Glycine max
ggaacaagacaagtgaaccttttaaactatatagaggattaatttccataaattatagcatgtttctaccagccactagtatgtccaagctctcagctttcgatatacactaacaaaccacattaataggtagcatgctaaacagaaaaataaataaacaaataacagctgtaaacaaaaatcatgctcagtgaaatatttttgttcacaatttctgtgtgtggcttctaatatacaacattgatccatacacaagttatccacacttccttctccacaagactgatgaatcatattgcagccctcagtgctccccttgcggcctcccgtttcatctcagcggccttcccactgccgcggaagtacatgtatacttgctgaataacccaaatgctgatcaaagtttcaacgcagaacaatccaaatccaatgaagtagaagatcccaatcaaagcat

SEQ ID NO: 218313 - DNA, 530 bp, Glycine max
caaggagtgacagatgttgggcttgaagctattggaaggggttgtccaaatgtgcaaaacttgaagcttcgtaagagtgcttttctgtcagacaagggattagtatcatttgccagggctgctccatcagttgagagcctgcaattgcaagagtgccacagaattacccaaattgggctctttggtgtcttttttaactgtggtgcaaaattgaaggttcttactctgattagctgctatgggatcaaagatctcaatatggatttgccagcattatctccttctgaatcaatttggtcattaacaatccatgactgccctggatttggcaatgctaaccttgccttacttggaaagctgtgtcctcggcttcagcatgttgaattgagtggacttcagggagtaacagatgcagggtttcttccattgcttgagagctctgacgctggtctggttaaagttaatctaaatggctgtgtaaatctttcagacagagtagttttggtcatggtcaactcacatggatggac

SEQ ID NO: 218314 - DNA, 561 bp, Glycine max
aacagtacaaagggcatatctcagtatcattacatgatatagaaggttacaatgacaagttcaaaaaaaaaaatgaagcttaaaaagctagggctttggtagtaaaaaacaacccatcccaacgggaaaagattgtgatgacagaccaggataacttgctgccatgaccaacgcccctgaggacaaaggcttcataactctgaagaactgccaaagtaaaccaagacaacaccacataaactggaacttcaacatgccccttgactaaaacttaagacccaaaaatcacgtaaagaacataagctcaaatacgtgaaaaattgggtaaacaccactggacagactcgataaatgtactgctgcaaagaaacgaggacaaggaaacacatggtggcaaaaccgatacaaagcagagctaaaaacatcaggtgccaacactagaaaaaaagatacctaactccagaactcggtaactatgctcgcagagataaacagccatattctaaaagtggcatctcatcaacggagtgcccaaaaatttgaacagatttccaattaatg

SEQ ID NO: 218315 - DNA, 409 bp, Glycine max
ctggaccactttcagatctgcaactctagcggtctctggtgagggctttctggcacgtgatatagcttttgagaacaaggcagggccagagaagcatcaagcagtggccttgagagtgaatgcagactttactgctttctacaggtgtgctatgtatggttaccaagacactctctatgtccactcctttagacaattctatagggagtgtgaaatttttggaaccatagattacatatttgggaatgcagcagtggttttacaagcatccaacattatcacaaggatgccaatgcttggtcaattcactgtcatcactgcacagaccagagattcccctgatgaggacactggcatttcaatccaaaactgttcaattctagccaccacagatttgtactccaatttt

SEQ ID NO: 218316 - DNA, 267 bp, Glycine max
ccctctctctctttctctttctctctcatccagatcttgcaaaaaaaaaaaaacccaggggcggggagcgctcccactcaacgcgaagagtccgggtacatggggaacctggcggagcaggccaagccctacgaggagatggtggaggtcagggaaagggtctccgcctccgccaagagcgaggagctgaccgtggaggagcgcaacctcttttccgtcgcctacaagaacgtaatcggcgctcgccgcgcctcctggcgcattatc

SEQ ID NO: 218317 - DNA, 457 bp, Glycine max
aaaatcgatcggaataaatgattccgaggctttagaataaaaacaaataaaggtgtcacaccttcacatgctaaaacaattagcaataccaagtttgctagagaacaatatcttaatattctaaacagcattataatggaaatttcagtgtcattatgaaaataggcagttcagaaacgcgtactaatggaaggacaaactaaaatagcccagtacatccacaattcataacgaagaacatgaatgcccaaaatctcagtaacaccgagattagcattcaacaccttctccctttgaaaacattacacaagggaagttcaatcactaattagaagtatggtatgtttaattttgttccccgtcacctttgggtgcggcttctttaatttcatctgcaccatcatcctgcatgtcagaggtccagagggtaaggttatcacgaagaagttgcatgatc

SEQ ID NO: 218318 - DNA, 448 bp, Glycine max
  unsure (1)..(448): unsure at all n locations
ttccatttgtgctcttgatttccgcatggatgaatggggagttgatgtggcaataactggctcccagaaggccctttcccttcccactgggataggtattgtggtcgcaggccctaaagctattgaggcctcaaaacatgctaaatcacttagagttttctttgactggaaagactacctcaaattctaccagctaggaacctattggccatacactccttccatacatttgctgtatggactgagagctgctcttgatctgattattgaggaaagactcgaaaatgtgatcgcacggcacattctgttacgcaaagcaaccagacttgctgtagaggcatggggattagagaatcgcacccaaaggaagaagggtacagtgacactgtgactgctgttcttgttcctgcttacattgatagnactgaaatagttacgagggcatgga

SEQ ID NO: 218319 - DNA, 520 bp, Glycine max
cataagatgcaatgatttttgatatacaggacaataaaagaagcaatgcattaaagctgaaagtagaaagtacgttcatcttcaaaggagtgtaaaagagggtaatatatattttacagaatttctgaaagagcagaaaaaggaagtaaagacaagaatgatttgtgactcaaatcctggaagggatcataggaatagtgttctgtaagtatgcactggcagcagcaactccacttccaagctttacaggataacccacatctttgagtatcatctctacaccagctagacatcccaacagttgcaactcattcaagtggccaagatgtccaattctgaaaaccttcccagcaactttgttcagtccaagacctaagctcaaattgtatctcttccatgccctcctaactatttcagtactatcaatgtaagcaggaacaagaacagcagtcacagtgtcactgtaccactcttccttttgggtgcaattctcaaaccccatgcctctacagcaagtctg

SEQ ID NO: 218320 - DNA, 473 bp, Glycine max
gtagaacccttccactgtggtgactctgcgatgggtgcctacaagtatgttacagagctatggcgcacgaagcagtctgatgtcatgcgcttcttgcagcgggtgaggtgctgggagtataggcagcaacctttccatggttcgaatgacaaggtctacccgccctgacaaggctcgtcgctcgggcttcaaggctaagcagggctatgtgatctaccgtgttcgtgttcggaggggtggccgaaagagaccagttcccaaaggtattgattatgggaagcccacaaaccagggagttacccaactgaaatttcagcgaagcaagaggtcagttgccgaagagcgagctggaccgaagctgggtggacttagggtcctcaattcttactgggtgaatgaggactctacttataaatactttgaggcgattctggcggatgttgctcatgctgctattagaaatgatcccagaa

SEQ ID NO: 218321 - DNA, 554 bp, Glycine max
  unsure (1)..(554): unsure at all n locations
atagaaaaagatgattaaatcattcaaaactcgaatttcaaagtcaaaacatcaaatgctgtgtgttctcaaaatagtatttcagaaaatgaagcaaaaataagatgacagcgaaattaacggtagcggcggagagacagggtgttgtttctcttccaggttgccctgcgggatggacgtgctttgtgatatagatgtcctctgccacgtaaacccctgttgcttttcccggcagaggtaagcccacgcagctctctgtgcttgtgcactggattggcgagccaattgattctgggatcatttctaatagcagcatgagcaacatccaccagaatcacctcaaagtatttataagtagagtcctcattcacccagtaagaattgaggaccctaagtccacccagcttccgtccagctcgctcctcggcaactgacctcttgcttcgctgaaatttcagttgggtaactccctggtttgtgggcttcccataaacaatacctttgggaactggtctctttcgccacccntcctacacgacacggtaatcacatag

SEQ ID NO: 218322 - DNA, 477 bp, Glycine max
atctaaggttagtaaaaattaataagttagaaaaacttcataagtttatttttgatagaaaaatagaaaggatccaatttgagcatggttcaaaaaaatggttggaattagtaaaactgttttgatcaaaagtgtagcccgcaagacttaacctgctattagtatgattctttcatagaaagaaaaaatggtatgttgctgccatttttgaaaagattgaagattcccgaagtaatgcctaaacctaatgattcaaagacaagctaaaagatcatggctcatgctgatatcatttctacattggctcatgaatactattatccaatgttattgacaatagattatgaagacacgaaacacgggcaatagaggagagttgagaccactctatcaatgaaatagctactaatggctctgttcattttatagatattggatcattatgcaatttgggttattgcgctataaacttgaaga

SEQ ID NO: 218323 - DNA, 397 bp, Glycine max
atattattatataaagatagtctataatcactagaatttctatatatttatacttagtatataataattctagtgattatagctaagccaatatatatcataatataatatacccttttcttattcaaagaatttatggctatgccttatcatttttagtcaaagaaaagaaattatggaattgaaataactcactcagaacgccctttaaaagattacgcggtacgattgaatcaaataagcccttatggaataaatattcagctgcttgtgaaccttcaggtactggcttattcaatgttttgttcaattactcttttaccaacaaatgcaatataagcatttggttcggcaataatgatatcccccaacatgccaaaactagcagttacccccc

SEQ ID NO: 218324 - DNA, 502 bp, Glycine max
  unsure (1)..(502): unsure at all n locations
ggaattttcttccttcttactttaccttcgattgtcaccttctaattctgcaacaagttccaaaccttcaaatctcactgccccaaaaatcctttcttttttaaatagccatttgacttcagcctctacagcagagtcccagatctctgcattccaattcccatggctggtcgctatgacagcaaccccttcgatgaggaagaagttaaccccttctataatcctggaagtgttcccgctgccactaattcaaggctttcacctctgaagccagaacctgttgattataattatggctttggtgcgacagttgatataccttttgattcatcaacggatttgaaaaagaaggaagaggaacttcaagccaaggaaactgaattgagaaaaagggaacaggaagtgagacggagagaagaagctgcttcacgagctggaattgttcttgaggagaagaantngccgccttttttcccaataatccatcacgacattgctaatg

SEQ ID NO: 218325 - DNA, 502 bp, Glycine max
ggaacaagacaagtgaaccttttaaactatatagaggattaatttccataaattatagcatgtttctaccagccactagtatgtccaagctctcagctttcgatatacactaacaaaccacattaataggtagcatgctaaacagaaaaataaataaacaaataacagctgtaaacaaaaatcatgctcagtgaaatatttttgttcacaatttctgtgtgtggcttctaatatacaacattgatccatacacaaggtatccacacttccttctgcacaagactgatgaatcatattgcagccctcagtgctccccttgcggccttccgtttgatctgagcggccttaccactgacgcggaagtacatgtatacttgctgaataacccaaatgctgatcaaagtttcaacgcagaacaatccaaattcaatgaagtagaagatcccaatcaaagcatggtcgcccagcacatctatggcagccagaatgcccgtcagggatt

SEQ ID NO: 218326 - DNA, 479 bp, Glycine max
  unsure (1)..(479): unsure at all n locations
ctcttccataaacgggtggtgcctctcttccatctccccagccaaaacctctctcaggaaggccacattacgcccttccgtcttcgcaacccttaacactccttcttctccttcctcttcatcttccttcccctctctcattcaagacaggcctgtttttgctgcccctgcccccatcatcaccccaactgtgagagaggatatggcaaaggaatacgagaaagctattgaagaacttcagaaattgttgagggagaagagtgaactcaaagcgacagctgctgaaaaagtggagcanataacagcttctctagggacatcatcatctgatggcatcccatcatcagaagcctcagacaggatcaaagctggtttcattcacttcaagaaggagaaatacgacaagaatccagctttgtatggtgaacttgccaaaggccagagccccagttcatggtgtttgcttgctcagactcagg

SEQ ID NO: 218327 - DNA, 524 bp, Glycine max
ccgacatgcataaacgcagttcatagtttcatatatatctttataaatatcatatggtgatgaaggtggctaggcctcttcattgcagatacacacgacctctaagcatggcccctatagcttccaatggagaatggtggccacatctttaacctaacaaagaagaaaaatgcagtggtgaaagaccataaaaatattacacgttccttgaacaaaacggattgaacttcaatttggaatagagggtgatatgtggagaaatctccatatccacttttattattaggaaattcagcacatgcatgcattataacaagagcaattaattacagagtacattttagataggagaatacttagggaaccaagatgaggtcattgataatggttgatgttcatacggagaaagaagatgcaaggccaaactgaaggccccagagctcaaaagatcctttaacagagtcatagtatcctcctttcagtgacaatgttatgttcaccaagccatctttaacaaatgggta

SEQ ID NO: 218328 - DNA, 452 bp, Glycine max
gtgggagaaagccttagagagaatttttttcaaaaaagaaaaatattccttcttaattctacgtacgtgaggtgttagaagacacaacaatgaatttggcaaagggtgttggcggaaacattgacaaatcccaagttctgtccgctgttgaaaagtacgagaagtatcatgcttcttatggaggtcaggaggaggagaggaaagctaattatgttgatatggttaataaattctatgatcttgctactagcttttatgagtatggctgggggcaatctttccattttgcacctagatggaaaggggaatctgttcgagaaggcattaaaagacacgagcacttcattgctttacaactttgcctaaagcctggacaaaggttttggatgttggatgtggaaattggggaccacttagagaaatatcccgattcagctcaacatcaataacag

SEQ ID NO: 218329 - DNA, 488 bp, Glycine max
aaaagtacaataaagccttggtaatataaaattatagatgtaaaaaaagaaactcaaaacaactgaagtcacattggaaaggctaattgaaggcaataaattttacaacttttctccttgaatcgcaataactcatttgcagcaccaccttattgaccaccaaaattaggctttcgagccaaaaagaagtacattggtgtgaaaatctctttctttccaccttcaagtagtccatctgctgccctttgcaagatttcttgaacttttagacttgcccttggagctagtctaacaaattctaaagcccttatcagacttcttgtgaaaaatcgtccaatagatgttacaggaaaggtactaagtgagaagtgacttgcatccaaatgaaagtaccaatgaactggagaattaactgcaagatctttctcccagattaccgtaaaacctgcttgctttagagcttcaacacactttgtggtcaatctaat

SEQ ID NO: 218330 - DNA, 407 bp, Glycine max
ctagagacttcaatatttgcaccactgtgtgtgagaatccacactgtggtgcaaatattgaagtctctaaatgtgccttctgaaaccatagatgtgcttgaaaatgacttgacgcgccaagggctgaaagagtactcctgttgggctacctttgctcacgtctacataaaaagagagttttttggaggctgtgatatcactgctgatgcatatcagaaggggtaattgcaggagctgttggagaaggcagtgttgtcctgaagctatggaaggaatgataggacttctcaagtttgtactctgcaatcttccccctaaagttgtacttgggctcacagacaatggaccaaataaaatgcgtgatgcattttgtgtccacagttgcctattatgaatactgcaataca

SEQ ID NO: 218331 - DNA, 265 bp, Glycine max
cgctgattcacatgattgggtcaagcacgaaggctcagacgccaccattggtattactgaccatgcccaggaccatcttgtagaggttgcgtatgtggagctgccaaaaccaggcggcacaattttcaaaaagtctggcttcacactcaaagaccgtgcctaagaaacaagcgatctatactctcaaatctggggggagatcgttgaggttaacaaaaaggtcacagaaacgcctggcctggtcaactcaagcccatacgaagat

SEQ ID NO: 218332 - DNA, 486 bp, Glycine max
aataaaaatatttttattaaagaaattagaatgtagacacactgaagtgtcggtgacaagagacaatagcaggggaaggaaaaatggaaagaaacaggtctgttgcatattaaaaaactgttcagaaggggataagatcataaacatatgaagaacagtcagtcccatacataactgcatgagccaattgagtagaaaccctaatgacttgcatgttcttcctcacaaaattttgcgtgctcctttggacccatatgggaatctaattcagatggatcgcttggctttactttgatcatccatccatctttggatgggcttgagttgaccaggccaggcgtttctgtgagctttttggtaacctcaacgatctcccccgagattggatagttgatatgacttgatgctttaacactttcaacggcttcgaagccagacttcttggaaactgtgccacctcgttatcgcagcttcacatacacaaac

SEQ ID NO: 218333 - DNA, 486 bp, Glycine max
gagccagagtaagaaaggagtgtcattcatggcgattgaggcatggttgatggacgatagcaatgaagatccaaggctttctcaccgtcgcaatcccaacgaatcagtttcattggaccaattagcagaattgggtgtgttatactggaagctcaatccaactatctatgagaacgatcaagagttgaccaagattagacaagataggggatacaactacatgcgaatattctatttatcttttaattgtatttgctttctggaattagatagtgcttcagttgctacctcttcagtcttcattgattaatccaggataggaatagtatttagaattcccagcgtgctatgaatacatagagcagagttgctacagtaatcagtggagttcacgaaacaaaaacagaattcttgaaaagataataaattctgcaaaatttgttaaaaagaattttaaaaagcccacgctttatgcccaatccggat

SEQ ID NO: 218334 - DNA, 394 bp, Glycine max
cgcgaggattccactctctgtatttctgacacaagctgtgttgtgtctcctttggtgaggatgaacaagaggaaggcgcttccagatctttgcaatcgagaagtcggccacctatcccccagaaatttcgctcctccgtcttggctcttccgaggatcttgtccttcgacttcaattactgaggaatctgcaaaagcaccgaggttgtgtcaacgctgtgagcttcaatgcagatggtgacattctggtctctggttccgatgattgtgggattattctctgggactgggaaactggccgcattagactctccttccattctggtcattctaacaatgttttccaggccaagatcatgcctcactctgatgatcgaaccattgtcacctgtgct

SEQ ID NO: 218335 - DNA, 515 bp, Glycine max
  unsure (1)..(515): unsure at all n locations
aaaaaataaaaaaaaaaaaagaatctatataaatataaaaataatatatataaggtacaaatagtaaatcgaggtacccattttatgataaactttccttccatttttgttcctctagtaggcctagtatttccgggcaattgcaatggcttctttatttctttatgttcaaaaaaacaagattttttagatacagaaaacaaagtaaaattctggggttttttattccccaattataatactaaattcaaaaaaaggagagtaatgagtataatctttcgctcagacgatgtactgatatattctatggcggaggttcgaagaacaagcaatttattctgggccgttttcactttgctaggttcatcggggttattgctcgttgcaatttccagttatcttggtatggaatttgttctttatttctgagagaattagtgatttttcttttattccggactntcatttatttccatttattccacatggcngccacgatggctttttatggaatc

SEQ ID NO: 218336 - DNA, 497 bp, Glycine max
caaaaggtacacaaaataaataggacaattctgaagctttttgtgcaatttaatttctaattaagttcaattctcatcagtaaaaaagtggtacacccaaaaatacagataattcgccagctttatgtgcaatttgtgtcccattcaaattatcttcaatacgagtcaagggaataaacccctgttctatggtttccagataaacgatactctcaaaagtactggtacgagtaaaaataccctcttctttaacttctgttattattctgatggagtgaagctcgttcataggtatttcgagaataatacgacgattttttccaggaaatccccaacgaacaaaacgtacctttttcccttttttattgaagatatcaaaaccaccacctatatcccaaaaaataatcgacccaaaataaaaactactaaagagacccgcgattccataaaaagccatcgtggccctttgtggaataaatggaaaataaataaagtcc

SEQ ID NO: 218337 - DNA, 369 bp, Glycine max
gggggttaataaaattgttggtttttttttttatctcaagtttaaaagaaaaatgaacccacaagtgttgtaatggtaatagtcgtagtaagcatccaaaattacaatgggctgggtcatacctaataaattaattaccaatgggaatatgtttggctctcacttccatttggtggcaacaatggcggccaaaaccacaaccctttgggaggtgccccattcattggcatacccagcaatgaccttcaccatggtatttcccaagaccatgggcaacggggagttaacgggtgggggcccatcagggcccccgaagtcaacgggcacaagggggtcattacaccccgagggggtacccctgagcccaat

SEQ ID NO: 218338 - DNA, 415 bp, Glycine max
  unsure (1)..(415): unsure at all n locations
gactttcccccagggcacttcccgaagtgttaagagaatgcctctttctatagggggaggagctggtgcaaagaatgctattctcatgaatatgccaaatgctgttctttcaatgtggagatattttgttggagatctcgtctttgaagtttctaagatgacttctccctacattaaatgtacagtctctttcttcatagcatttggaaatttggctgatgacaccatcaattttgaggcttttccccacaagctggtgcagtttggagagattcaggaaaaagttgtattgaaattttcacaagaggaatttcttacagcttggtcaactcaggtgcgtcctgcaacaactctgttggctgatgggtgtccatatttgtatgctatggtgcatgatagntcagtgtctacaata

SEQ ID NO: 218339 - DNA, 494 bp, Glycine max
aaaataacacacacttcacacatcattacgacaattaaaagaggtgtggaaattttcaaatagacagagcatactcaacaagagggtcatgtctaatttcctttattgaattaaacaaacgaacaaacgaaagaaaacacaaattccagatcatgcagaggattccgcattttcagaagatctggcagtagcctgtggaacagaaaaagctggcataagagtattaccagcaatttcaaaatcttgagaaattcccaagagaatatcaaaaactgtagactgtttgggattgtcaataaggaaactcaagtgccatgaagtttgatttgcccactcagaactccacatttcaaaaccattattaggaccacatacctctattgggaagatcaattcccaggaatgtggttccgattttgtccacttacatgcatcgaaatgctctgtactgttgctgcttgtaaaaacacttgtaccaatgaggcccaatcact

SEQ ID NO: 218340 - DNA, 491 bp, Glycine max
gttgggatctccatacgccggatctgctaaaatacgcttgatccatatgggcctcctcgaccacttgtgggacgacaccgtcgccggcccaaggccggaaaacggtctgggcaagctccgaaaacaccacaccttcactttccgacctagctccggcaagggtacgccctgcctcgttaatcatactcatataattcaccaacgattttcgttaactacaagtccacaactacaatcgttaactcaactcttatcataattatcattcttttataatctaaccactcgtaccttcgaatcggagaccgatttgtgtgttttaggttgcatgctgtcagatctacaccctaaacatgcttttcaagctcgaatcctccaagttccgaatcttctaaatcatttccacatgatctatatgcaataatagtaaaagatgatatagtttgggagatgaaataacctgaacataaccactttaaattttgagatac

SEQ ID NO: 218341 - DNA, 201 bp, Glycine max
cttctagcattgtgatgttgattgcatatgttgtctacattgtctttcaactgtggacacacagggagttatttgaagaagaagatgacggttaagatggcgaggatggttcagaagaacaagctgtgattggattatggagtgatattgattggttggctggaatgactgtattcattgctgtgttgtgagaatatgggg

SEQ ID NO: 218342 - DNA, 413 bp, Glycine max
  unsure (1)..(413): unsure at all n locations
cagaaagcaagctcatcctagagttttaaaaatggcagcagcctcctccatggctctctcttccccatccttggctggcaaggccgtgaagctgggcccatcagcccccgaagtcgggagggtcagcatgaggaagaccgtcaccaagcaggcctcctccggaagcccatggtacggcccagaccgcgtcaagtacttgggcccattctctggcgagcccccgtcctacctcactggcgagttcccaggtgactacggctgggacactgctgggctttcggccgacccagaaaccttcgccagaaaccgtgagctcgaagtgatccactccaggtgggccatgctcggngccttgtgctgcgtcttcccgaactgttgtcccgcacggggtcaagtttgagaagctgtgtggt

SEQ ID NO: 218343 - DNA, 482 bp, Glycine max
gtaaaaagcaagtaacattaagttggattgggatacacaagataattcacattatctgaagtacattgcaataacatatacttcaccaaacacaaatctaaaaactctcaaaagtccacaagtcatccttttctttcatgctcacttgccggggacgaagttggtggcgtaggcccaggcattgttgttgactgggtccgcaaggtgatcagcaaggttctccaatggacccttaccggtgacaatggcctgaacaaagaacccaaacatagagaacatggccaatctcccgttcttgagttccttcaccttaagctcagcaaaagcctctgggtcatcagcaaggcccaatgggtcaaagctgccaccagggtagattgggtcagtgacctcaccgaggggcccaccagcaatacgataacccttaacagcacccattaggataacttgggtggcccagatggcgaggatgctctgggcgt

SEQ ID NO: 218344 - DNA, 503 bp, Glycine max
gtggtccacgtggcacatcgccacaccatcgtgatcggcatgctggcatggcgggtccccaggaatagcatcagccccacatgctattcagtcattcactctctcaaccaccttaggatcctccatgttcttcacagatgataggtctactgacccaagtgtagtggttaattcctctatttgctgtacactggtatggggcatagattgccttgttttcttctcctgcaataccttctggcggctttcgtaaaattcaaagtcatccaatatggaagttcttgccacataattcttgaaaatgttaagcatttcaacaccttggggaaaactcacctcttgtgtgtctctactatttgtgacaggcttgtgatcattattctcgagtattatgtggcgtagttgaggatttggaacatcctttataatgtgccatttgacagagaaatatccattccacttatcctggtgccagaaatccatacttttggtgaaatcaactc

SEQ ID NO: 218345 - DNA, 488 bp, Glycine max
gcagcaaatctcaagctgtcaacgccaaatacgttgtcgcacctattctattctttgttgggttgctgatcttgatttgcatctatttaagagtaaggaagccaacaaagcattttgagagtgaaaccatggttgatgacgaaattaaactagtcgtgtcatcacagtttgactttgacaccataagagtcgctacgaacaacttctctgatgcaaacaagcttggacaaggtggatttggacctgtttacaaggggacactcttcaataaacaagaagtagcaatcaaaaggttatctagcaactcttgccaaggaaatattgaattcaagaatgaagtgatactaatgtccaggcttcagcaccgaaatttagttaggctccttggtttttgttatgaaagcgaagaacggctccttgtctatgagtttcttcccaataaaagtcttgacaagatcatatttgatcccatcgagcgtgcacatttg

SEQ ID NO: 218346 - DNA, 455 bp, Glycine max
tcaagattgttgctgtagaagagaagaaagagattgaagagacccagcagaccgacaaggacagatggaagggtcttgcctatgatatctcagacgaccaacaggacatcacaagaggaaagggtttggatgacttccttttgcaagctccacaggatgctggaactcactatgctgtcatgagctcctacgagtaccttagcactggacttcgccagtacttggacaacaacatggatggattttacattgctccagcttttatggacaaacttgttgttcacattaccaagaacttcatgaccctgcccaacatcaaggttcctctcattcttggtatctggggaggcaagggacaaggaaaatctttccaatgtgagcttgtctttgccaagatgggaatcaaccccatcatgatgagtgctggagagttggaaagtggaaatgcaagagag

SEQ ID NO: 218347 - DNA, 423 bp, Glycine max
aggacaaaaggaaaaggcaccaaattcaatttaagtggacactttaactcaaaattatagaggaagacagtccaatatgaaaaatatagtaaaatcatctcaaacttggcatcttctctttgcacctaagacattgagaattctaagaatgttacacgcaagtcccatcacaacttctagcacttggatcagcacaaccttcaggaacagaaatatttacttgccaagtttgctttgcctccaattcaagattggaagaaagttcccctgttaatagcatccctcgtagcattttcaagtgcagcctcgttcaagtactttgcaggccattggactcttttgacttctcttggtcttgggacaagcatgttaccatacgtcaagagcttctccagagtcatcttgggctgctcaaaggttgga

SEQ ID NO: 218348 - DNA, 326 bp, Glycine max
ccaagattgtagctgtagaagagaagaaagagattgcagagacccagcataccgacaaggacagatggaagggtcttgcctatgatatctaagacgaccagcaggacatcacaagaggaacggaactggctgacttcctttatccaagctccacaggatgctggaactcactatgctgccatgagctcctacgagtaccttaacactggactgcgtcaggacttgtaccacaacatggatggattttacattggtccagctattatggacaaactcgtagtccacattaccaagaacttcatgaccctgcccaacatcacggttcc

SEQ ID NO: 218349 - DNA, 450 bp, Glycine max
aggacaaaaggaaaaggcaccaaatttaatttaagtggacactttaactcaaaattattgaggaagacagtccagtatgaaaaatatagttaaatcatctgaaacttggcatcttctctttgcacctaagacattgagaattctaagaatggtacacgcaagtcccatcacaacttctagcacttggatcagcacaaccttcaggaacagaaatatttacttgccaaggttgatttgcctacaatttaagattggaagaaagttcccctggtaatagcatcctcgtttgcatttccaagtgcagcctagttcaagtacttgtcagccaattggactctattgacaatctcttgttcttggacaagcatgttaccatacgtcaagagcttgtccagagtcatcttgggctggtcaaaagttgcaggtgcatcttttgagttcacaagcttc

SEQ ID NO: 218350 - DNA, 530 bp, Glycine max
cggaattcggctcgaggcagggagagggatctctacaagaactcttcacatgcatgtgagacccttctgtccctgatggttgacaagaagcgatgtcggaaaacggcaattctctcgctgaagaaatccagtcctgagcttcctggagctcctgacacaattttctgccggcattgctggtactggccttgcagtcctgctatccgtgatgtgtaacctagcttgtggaagggctaccttttgtacttctagcttgttcaacaccgggtttggacttgggttggtttggctttctggggtagtaaataagctaagggccacaattgtcaacatcagcaagaatgcaggaaagttgggtttgaaagaagaggaaatgatgcaaaagctggataagagcataagagatatttactatactgctgcagcattgctagcagtggtagtgctaaggcttgcttgagtaacatctacaagatgtagttatttctggctggatggatgctacagtgatggcttttggtgaaagaaag

SEQ ID NO: 218351 - DNA, 475 bp, Glycine max
attatactctctgttgctaatcatggctagcaaattggccttcacactgacatacccgcttccacttacaccaatctcttccttgtcctcctcttctgcttctcgactccaccttcttcaattcaatggccgccacatatgccttcgccctcggctatttctgttttctcccatggccacagccgatcaagacaaggttgaggaagatgctgccgttgttgatagtaaaatcctacaatattgtagcatagacaaaaaagagaagaaatcagttggtgaaatggagcaagaatttctacaggcactgcaagcattctattatgaggggaaggctattatgtcaaatgaggaatttgataatcttaaggaagaactcatgtgggaagggagccaccgtgtgatgctaagttctgatgagcaaaaatttctggaagcgtctattgcttatgtgtcttgaaaaccaatcttgagcgac

SEQ ID NO: 218352 - DNA, 471 bp, Glycine max
gtaatcaagttttaatcattcgtctttcttttcttttttttttttaccgctccattagtaaaaaatggggccgcacagtatttttgcaaaaggcccaaagtgtgcctacaaattaaaaatcttgatgttaagaatatcctcatataattcatctcttctggtagacgatcctacgtatgctatacaaagttcataccattacaactcactagcatatatggtgtgcgacattgagaacaatgatttcatggcccatagagaacaatgatttcagtagcttctacctatgacgatctcatctcattacaggaaacaatagtatcaagcgtgcctccatttaagcattacttccttctggtaatgtaatcaatcttgtttttgaatcatacaccattttagtttcacagttttcacatttgactttgttggtggaatcgccacttgaaaccgacagtatagtcccaaagaaag

SEQ ID NO: 218353 - DNA, 486 bp, Glycine max
cgttcttcgtgttctccattccctctctcactccttcatctactgatatcatatcacaatgtgtggcatacttgctgtgcttgggtgctctgattcatctcaagccaaaagggtccgcgtccttgagctttctcgcagattgaagcaccgtggtcctgactggagtgggctccaccaatatggcgataactatttggctcatcaacggttagccatagttgatccagcttctggtgatcaacccctcttcaatgaaaacaaaactgttgctgttacggagaatggagagatctacaatcatgaacaactcaagaaacaattgcctaatcacaccttccgtacaggaagtgattgtgatgatattgctcacctgtatgaggagcacggagaaaactttatggacatgcttgatggtatatattcatttgttcagctggatactcgtgacaacagttttatagcggcacgggatgcaattggggtcac

SEQ ID NO: 218354 - DNA, 392 bp, Glycine max
atgatgactagtataataatattatatgctggttctagggcaactactagtccttgctatggctcatacaagctctatatggcaactcctagtggagaaacttccatcttgggtatgaacttctctggttctacagctttgacctggtttccataagctgatgcatgcactccaagtgctgctttacctgatggatcaaggttgttagaccaagcagcatcccactcaacagcttttgctgagctacatgcaacacttggtccttcaggaacagtgagccttgctgagttctgagggaagaacctttcaaatatcattctataggggcatgcctctttggtggttggagtgtcaaaggggaaaatgcttgcagcattgagcatcattctggc

SEQ ID NO: 218355 - DNA, 438 bp, Glycine max
ggtaaaacaattggactctacttctcagcggaatggtgcgtcccatgcgccaagttcactcccaagctgatttccgtttaccgctatggaatccaagcttatccattcagtaaggacaggttggagcagctgcaaaaggaagacaaagtgaagcgtgataaccagactctcactaatttactagcaaaccaccatagagactacgttttgagtcacactcacacgggactcaaaaaggtacctgtagcttccctagtgggtaaaacaattggactctacttctcagcggaatggtgcgtcccatgcgccaagttcactcccaagctgatttccgtttacgagaagataaagcacgagctagccgaaaagggagaggaggacttcgaagttgtgctaatatccagcgaccgcgaccaagcatcctttgactcctactac

SEQ ID NO: 218356 - DNA, 518 bp, Glycine max
ccgggattgagaagtaagatggaggttgttatgcgccgtaagtaatttgtttgttggattggaattgagaaaacagcaacaaggggaaatgggagatagagaagaacaaggcgagggtgctggctcctccttggaattggaagctcctattccagagacccaaaaagaaatcccaatttcagatggcatcgcattcaacaatcagagcgcgattttccaagccatcgaggttgtggaacgagactcgttggccatcgctcagagtttcacttctctcttcgcttccctccgattggccctctccgaatccacatccacctctctccatcacatgcagtgcttcaccgatgccaccggtcgccttcaggaatctgtgcttgatgcagctaccaaggggaatcgctatataaattcctgtctcagattgaatgaggagatgaagagtgttgatggtctcgcctctcaattaaaaatcttaagaaagcatgtcgatgctctggacgcagctgttaacaagc

SEQ ID NO: 218357 - DNA, 536 bp, Glycine max
aagaatcaaatcattatacatcatattcagttccagttaatgatttcacacgttactagcatcatttacccacttttaccatagaagaatgtaagttacatatgaaccataggttaggtaacagcgaggtgtctatcctaattcagaatatttaaaatggagtggtgctttcaaagcataaccatgtcacatggaaaagtgctcaagttgccttgtaggtgaaattcaaaacactagctcaagttgccttgtagatgaaattcatgagcctgcgttcgaaatattcattttcatgtttgccttgtacaagactgcatccccccagtttcaggggatatgaagaagcttgttaacagctgcgtccagagcatcgacatgctttcttaagatttttaattgagaggcgagaccatcaacactcttcatctcctcattcaatctgagacaggaatttatatagcgattccccttggtagctgcatcaagcacagattcctgaaggcgaccggtggcatcggtgaagcactgcatgtgat

SEQ ID NO: 218358 - DNA, 460 bp, Glycine max
gttcgagctctccggcatcccccctgccccccgtggtgttccccagatcgaggtcaccttcgaccttgacgccaacggaatcatgaacgtctccgctctcgagaagggcaccggcaagaccaacaagatcgtcatcaccaacgacaagggccgtctttccaaggaggagatcgagcgcatgctcgctgacgccgagaagtacaaggaggaggacgaggccgaggctggccgcatccaggccaagaacggcctcgagtcctacgcctactccctcaagaacacagtctccgaccccaaggttgaggagaagctgtcctctgaggacaaggagagcctgacctccgccatcgacaagactgttgcgtggatcgacgagaaccaaaccgccaccaaggaagaatacgaatccgagcacaagaccctcgaagggtgttgccacccgatcatgactaagatctac

SEQ ID NO: 218359 - DNA, 498 bp, Glycine max
gatgattagaaaacgttcatttctcgaaaacctcaagcgaggttggctacattacagaaggatgcttttttttcctccaagtcatagcatcatgaattttgagcagaagaaaaatcccaaatctagtcggaacgccgtgttgtcgatgcaagttgagagtcgtgaagcgagacgcttagtcgacctcctcaacagtgggaccgtcctgcgggtcctggggaggaccaccggcaccgggcatgccgccgggagcaccgcccttctgagagtagatcttagtcatgatcgggttggcaacaccttcgagggtcttctgctcggattcgtattcttccttggtggcggtttggttctcgtcgatccacgcaacagtcttgtcgatggcggaagtcaggctctccttgtcctcagaggacagcttctactcaaccttggggtcggagactgtgttcttgagggagtaggcgtaggactcgaggccgttcttggactggatgc

SEQ ID NO: 218360 - DNA, 396 bp, Glycine max
gttttgtgggtggctcctgaggataaggcgagtttatggtcacaacttcattatgtttcgtgtaataatctggaaatgcaagaagcttatcttgtcaatctcgtaaatgtgttacgagaattgtatttgcacaagtccaaaggaagctcgccaattgagaaggaaagctctctctcgtattgaatggctgcaaaaagctgatgtgcctaccatagcacagattgaagagttccattcgatgcagaggatgatgaatgctcctgattcaaatgataatattgatctactgttgagcattgatttgatgggtttacacggagcaggtaaagctcttccaaacagattgattttgatgatagcgttgtgttggctaacacacaagaattctctgatgga

SEQ ID NO: 218361 - DNA, 511 bp, Glycine max
aaacacactcattgcacatagtaatgcgctttatttaagtgaataaaatattacatactagttcacaaatgcaaaaggacactcatcaaccagatatttgagactcttacagttctcaagaagtcgcgtcagcatagggttagtggcgttagaactcagaatttcattcttaacgccaaaaagaacagccagtaaagctactggaaaaggatcaactctagtaagaaaaacaattttcttacctctcccaagtgctgtgcgaatccttttgttgatatctgaggagcgattgttaactgcagaactaatccaagcagtggtgggtaaaccaccacgtccactaccacatgtaacatttacaacgacagcttctgaaggtaattgacttacaggataaagacaattcacaaaaattggtaaccaagaatccactggaaaatttccatcaaagaattcttgtgtgttagccaacacaagcttatcatcaaaaacaatcttgtttggaaaagct

SEQ ID NO: 218362 - DNA, 459 bp, Glycine max
gtacaataataaatccatatttttataattaaaagtagtagattacagcgatgcacttgagaaacatattaagtggactaattctccctggtcaagcaagaaaaaaaccagctatgacccaaggtagagagagattatacacagaatactagtaattaactaagactggctctgcaattgccaaaaactccattgcagtagcagccacctgagaagacactaagacctagactagaccatacataatgaagattaatacccttacataacaacataggacactaagaaaacacggcttcacagagaatcccagtcgatctcataagaggggtacttctggagattaaaattatccgaatcaccttcccactgcggctcgctgacgtcagcgaaagtcagaaccgaaagcggcgaagaaccttcagaagaggaggaagcagcttcgaccttacaagagtt

SEQ ID NO: 218363 - DNA, 454 bp, Glycine max
caacgccgccgcttacaacgtaatgcttcggtttctcagcagaaggcaagactgggaaggcgcggagaagctcatctacgaaatgaagggttccgaattgataagttgcaacgccttcaacacccttatctacgcgtgctgcaagcagagcctcgtgcaattgggaacaaagtggttccgaatgatgttggattgcggcgtcgtgcccaatgtggccaccattgggatgctcatggggctctaccggaagggttggaacctcgaggaggcggaatttgccttttcccgaatgagagggtttcgtattgtgtgtgaatccgcgtattcgtccatgattaccatttacacgcgtctcaggttgtatgacaaggccgaaggcgtgatcgagttgatgaagaaggacgactgtggtgcccaatttggagaactggctggtgatgatgaatgctcctag

SEQ ID NO: 218364 - DNA, 508 bp, Glycine max
caacaaacatctgtttatttgttttatttttgctacaagatatacagaaaaatcttaccaagggaagccatagttcagaggctttactcatgtaggaattttaaggtcaaactattcttcaaagaacaagggttagaaggtccaagaccacttagataatgccatagctttatgaaattcatattttcatctgcttcatccataatgaccatttaactgcttctaaaaatttatcatttcgtcgcagtgcagtgataagattagtgtagcttttcttgtcaggttctattccattttttctcatttccttgatcaaacctacagcttctgcaaccattcctgcaatcccatacgccttgatcaatgtgttatagctgcacaaatcaggtctgagtccacattctttcaattctgtaagcacattagcaacttcattaatccatccttgttctccatagatattgatcaaagtgttgtatgtgtagtggtcagaggcacaattggaatc

SEQ ID NO: 218365 - DNA, 426 bp, Glycine max
ggttgcatgtgctgctgtgtgcaagtcctggagagaaatgtgcaaagaaattgttaccagtcctgagttctgtgggaagattactttccctgtctccctgaagcagcctggttcaagggatggaaccatccagtgtttcatcaagagagacaaatctaatctgacataccacctattcctttgtcttagtcctgcattgctagttgaaaatggaaagtttcttctttctgcaaaacggaccagaagaactacatgcacagagtatattatatcaatggatgcagataacatatcaagatctaatagcacttacattggaaaactgaggtcaaattttcttggcaccaagtttataatttatgatacacagcctccctataacaatgctcagctgtctcctccaggccgaagccgtaggttttattc

SEQ ID NO: 218366 - DNA, 547 bp, Glycine max
aaatcttaatgagaaatttatattcatgaattaaaatgatgaagtaccaaaatatactaatgtgttttttggttcaggagagcctaccataggaagaagcccattacactgcagggaagcaacacatagatagtttgctgcagagaagaaaaggaaaagcatataagaaaaattacattgagcacaggttgttctgtcctttacagttatactctggtgtaaaatgactccatgcagcttcacctcccagtgaataaataaatggagatagaatcctattgtctttgtaccacacctctcattgtcactattcacaagctagttttgtgtcaaaactagtcaagcaaatggcaaaagcctgaaatgcagataggggatatctatagtccatagtaaatatatccttgccaaccttgccaaactgaagaataatcttgtcatgatcagactgcgctggctgcgatgacggtgtatgagcatcggtttgaagtggctgcggcgcagcaatcagctggaaattcttgactgaggcaacagtcacccttcc

SEQ ID NO: 218367 - DNA, 422 bp, Glycine max
gctactttggcaaacttggtgcaggaagcaatgcttatattttgggtggccaagacaaagcacagaactggcatgtctactctgcttctgcagattctgtaactcaatgtgacaatgtttacactcttgagatgtgcatgactggcctggatagagagaaagcacaggttttctacaaagaacaatctgcttcagctgccatgatgactgttaattccggcattagaaaaattcttccagattccgagatttgtgactttgactttgaaccatgtggttattcaatgaactctgctgaaggcgctgctgtttctacgattcatgttaccccagaagatggtttcagctatgcaagcttcgaaactgttggttatgacttcaaagcggtgaatctgaacgaaatggttcagacggtattggca

SEQ ID NO: 218368 - DNA, 583 bp, Glycine max
gcacgcaaacaaagtgatttattaatccattcgatgttcaaatggtaatagaaacaataaaggtctaaatgcccaaatggtctctaacagaagctaaaaaagacaacaaagaaaaacaataacgtatctggaaaaccagacttattttcacaaggacagaataataaagacacttaaggaaactactcttcctcatcttcctcattccagcactttagagttgatctaggtgaaccacagtcactagtcttcccgaatttttggtagacaacagaaccacccattccaagcccttcgtggctcctctgttcacgacagtatcccttaacattcagaaagcaggtctgctcaaacgacttgcttgcaccatccacatgaactgcaacagaaaactcagttgggaggaaacatgccaataccctctgaaccatttcgttcagattcaccgctttgaagtcataaccaacagtttcgaagctttgataactgaaaccagttttctgtgtaacatgaatcgtagaaacagcagcgccttcaacagagttcattgaataaccacatggttcaaagtcaaagcacaaat

SEQ ID NO: 218369 - DNA, 466 bp, Glycine max
  unsure (1)..(466): unsure at all n locations
atgacattgtagcagctgctgtgttgtctgggaatcgtaattttgagggccgagtacatgcattgacaagagctaactaccttgcctctcctcctctagttgttgcttatgctcttgctggcacggttgacattgactttgagaaggagccaattgggacagggaaggatggaaagaatgtctacttgagggatatttggccatctactgaagaaattgctaaggttgtccaatccagtgtgttgcctgagatgtttcgaagtacatatgaggctattaccaaagggaacccaatgtggaatcaactacaagttcctgctgacactctatactcatgggaccctgactcaacatatatccatgaacccccttacttcaagagcatgaccatggatcctnctggacctcatggtgtaaaagatgcttattgcctactgaattttggtgacagtataaccactgatca

SEQ ID NO: 218370 - DNA, 466 bp, Glycine max
aaagaaagaaattttcactaccataacactgcattagcagaccgagtgccgtgcgcaattggcagggttcacacttcacgtcggcttttacacaattgtccccattttcaaggggcagggttatcgcacaatcaaatgaatcaccgtttaccggtctggtctaataattaataagcttgaaaactgtcgaaatgcccctgtaaaaaaagggatcttttcctagctctcagaaaatcattctcacattttacaactttaaaagcatatgggaacaatgaccttggaattttcaatcgggtatggcttgactgcttaatgaggtttcttatgacatatggaagtatgcctccgtggttgaagtaagcaagttcgacctcaatgtcaaagcgtgctgtgcaagtgaaagattttgcattatcggttgtgactgtcacatgttggccaggcctaatctcattgataatac

SEQ ID NO: 218371 - DNA, 325 bp, Glycine max
gaaaaaacaacaacgcggtgtcatcactggcgtgtccgttgctgagtgattacggttacagcgtggcgccgccggaagtgcaaccggcgaattggtttctgagagagtggttgagtcaggtaaggggaaattagaagaaggactgaggctttgcgcgcacattgggtgcggtcgaccggagacgcggccacacgagtttcgccggtgttcggtttgcggcaaagtgaattactgttcacgtggatgtcaggcgctggattggaagttgcggcataagatttgagtgttcgcccgtggaaatgtacggtgatggttgtgtttgatg

SEQ ID NO: 218372 - DNA, 486 bp, Glycine max
gacaaataaaaagtatttccttgtattgcatgtaatgcattaaacatttagcaccgttgataaaattaacacggaaaccattttttaataaagaacttttaatcttagttgtccataaatatatatacatatatataaaagttactacctcatctgtacatagtacataccaactgattgacattttttttttaatttatagaatcgcttcttttcctctctattttcttatttttcaaccttagaaattgattctgtcgctgaaacacttcttcaaacggcatcgtttgggaccacaaactcattctccacatcaacaccaccatcaccgtacatttccaccggcgaacactcaatcttatgccgcaacttccaatccagcgcctgacatccacgtgaacagtaattcactttgccgcaaaccgaacaccggcgaaactcgtgtggccgcgtatccggtcgaccgcacccaatgtgcgcgcaaag

SEQ ID NO: 218373 - DNA, 469 bp, Glycine max
  unsure (1)..(469): unsure at all n locations
cggctcgagccaactcctactggaagaattcacaaaggagtatgttcaacctggatgaagaatgccattcccttagagaaaagccgtgactgtagttgggctcctatttttatcagaacatcaaacttcaagttaccagctgatcattccattcctattattatggttggtcctggtacaggcctggcacctttcaggggatttttacaggaaagattggccctcaaagaggatgccgttcaacttggtcctgcattactcttctttggatgtaggaatcgacaaatggattttatttatgaggatgagctaaagaattttatggaacaaggtgctctgtcagagttgatagtcacattctcgagagagggacctgaanagagtatgttcaacacaagatgatggataaagcttgcaatctgtggaatgtgatgtctcagggaggttatctntatgtttgtggtgatgc

SEQ ID NO: 218374 - DNA, 515 bp, Glycine max
catcaactagaagaattatttcattaatcgagtgcttattcattgccaattcctacaatttgatacatggccattggaaataaactagtgcgacctatacgtattaaatcatctatgaagctatctatcagtccccctaaaaataatcctagttcaaatatcatgacaagagagaatatcaaggcggcgaaaaatataagaaaaccacacaaatgtccacgaaaacgatttgctttctcaaggaaatttcagcctccatcattggtgtcccaaaactccgtgatagaagagtatcaaatatccttcaaccaatcttgaacttaacagaccaaatagcaaggaaggcacaacccagaaagatgaataatcagaaaatttaccagacatctctaagataacgtccatccatctggagttttttaactatagcctctgcctttgaagagtccacattttcctgctgctggacaatggtatgaagagtccgatgaacatctcgggccatgcccttagca

SEQ ID NO: 218375 - DNA, 404 bp, Glycine max
tctctctctacaatggcctcagccgcagcccccacaactttctctctcctccactccaccaccccggcctcctcctcctccgccacctccgcctccccctcgcgcgtgcagctctcctcctccctccgctcgcgcccgctcgcgcgccgccttggcttcgccgcagcggacccgctgctcgcggcgaatgtcgcagcgcgcgtcgcagcggtgagaggaggaaagggcgcgaggggggtggtgtcgatggcgaagaagagcgtgggggagctgagcgcggcggacctgaaggggaagaaggtcttcgtcagggccgacctcaacgtcccgctcgacgacaaccagaacatcaccgacgacaccagaattcgcgccgccattcccaccatcaaacacctaatcca

SEQ ID NO: 218376 - DNA, 516 bp, Glycine max
  unsure (1)..(516): unsure at all n locations
ggcagcaactaaaagatttattcgaatttatggctctcagccagggtttacagttacacgcaatttatgtgtgaagccaataataactcaagcatgataaaatttacactaacagactccgaagggtcctacaacatatgctcttttacaagattgacaacaccgaaatctgaggatggaaaaattttccaagctgaaaattgtcttacacggcaactgggacggcttcatcgagagcaaggactcctggaagctctttgccttccaataactccaaactggcaccaccaccagtagatatgtggctcatgacactagcaactcctactttctccacagctgcaacagaatctcctcctccgataattgtggtcaccccctttccactgagatcagccagcttctttgcaatagcctctgtaccaacagcaaacttgtcaaactcaaacactcccattggtccattccatatgatggttngggtagtatccaatgcttcactgaatgatttaacag

SEQ ID NO: 218377 - DNA, 317 bp, Glycine max
ggcagaaattgctgttaagagtttgacggtgcataatttctatgttggagagggttcagacttcacgggtgtcctcacaaaaatgctgacagttaatggcactttacgcatgagcatctacaaccctgctacattttttggcatccatgtgcactccacacccatcaatctagttttctcagaaatcactgttgctactggcgagctgaagaaacactatcagccaagaaaaagtcaccgcattgtatcagtgaacctagagggtactaaggttcccttatatggggctggatccaccataactgtatcccaactgg

SEQ ID NO: 218378 - DNA, 515 bp, Glycine max
tggatatatagaaattaaagacagatcaaaggacatcataatctctggtgctgaaaatatcagcagtgtagagatagagaatactctttactcacatccttcaatactggaggcagcagtggttgcaagggcagatgaaaaatggggcgagtctccctgcgcttttgtgacattaaagccaggagtggataaaagcaatgagcagcgtataattgaggatatactaaagttcagcagggccaagatgcctgcttattgggttccaaaatcaggtgtgtttggagccttacctaagacagctactgggaagatacagaagcatatactgagggccaaggcaaaagagatgggacctgtaaagttgagcaagttataaacatattgaaatgatcatgacgaataacgaactagttataaacatattgagtactttataaacatattgagatagcctatttgtgattgtgattctgcatacttatctataataatatagcccgaaccttttatatgtg

SEQ ID NO: 218379 - DNA, 528 bp, Glycine max
aaagaatataatgctcaatccaaggacaatgtaattgcaattatgcttgataccaagggtcctgaggttaggagtggggatttgccacaaccaatcaatttaacaactgggcaggaattcacatttaccatcccggaggggtgttggaactgcagattgtgttagtgtgaactatgacgatttcgtcaatgatgtggatgtgggggacatgcttcttgttgatggtggtatgatgtctttggtggttaagtctaagacagaggattctgtgaaatgtgaagttgttgatggaggagagctcaagtcaaggagacatttgaatgttagaggaaaaagtgcaacacttccttccatcactgagaaggattgggatgacatcaaatttggagtggataacaaagttgacttctatgctgtttcttttgttaaagatgcacaagtagttcatgaactgaagaaatatttgaaaagctgtgatgctgatatacatgtcattgtcaaaatgaaagtgcagactctataccaaac

SEQ ID NO: 218380 - DNA, 452 bp, Glycine max
ggctgaaagcatttttcattccaatttctaatcaaaatttcaatggcacctactatcatatgtctaatgtccgtgattaatatagaacaatcacccaaaaataatgattacaagaaagtaatagatgaagaaaaaatgaaaaacctaggcaacaaacaaacaactaaaatgccggacttagcaaattggcatcaacccaccaaaagggaacatgctcttctaaaattaaatatattgtcctgaaaggctgaaacttggttcatggccatcttcacctttttttattttggtttcactgttcggacctggatattgtgagtggattggaacctccatatgggttgcctgccactttgtactagtgctacttcttctcctgatttcaccattccttgcttctgcagcaaatccaaggcccttgtgaaagtctcttcagcatcttcagagaattc

SEQ ID NO: 218381 - DNA, 347 bp, Glycine max
ataaataacaaaataaaaaaaaaaaaaatacaaagagaagagaaaagaaaaattaaaatggaggggaaggtgacaggatgtgtcgctggcagcgaacaatttcccggagagacagcccattgggacgaatggagacgggcccgcacgactgtaggggctaccagcagcgggaacaatctcctctgtttgccccgacggatttcacttttcttttctttgacagagtaaggatagccgagtttgcgggcacttttctgtttctatgcatcaatgtcttaaccgtcatgggagccgccggggctaagtctgagtgcattaccgttaagactggggggatcgcttgggcc

SEQ ID NO: 218382 - DNA, 428 bp, Glycine max
ccgaggtcatggccgaccccgaggctcgaggcgtcgtcaaccgtgccatcaagaccttgcgagaggtctccaaggtctacgagggtgacggtaccaacgtgcctcctctcaagatcgccgagggtaaccacctcgtcaccaacttgatcgccgagttcaaaaaggccgacgccaaggagatcccggacaacgagaaccccgcgctcgtctacgccggtgtcctcgctgccggactcgtcaacgcccacaactatgaccagcagacttgggagtccaccttgtgcccttacctctccttggccgttcccggatacgacaacggtcccgtcgtccgagagctcttgcaaaagaaggccgacgaggagggtcaggacgaccgagtgttcgacgacgaggaggagggcgaggacttgtgtaactgtaccttt

SEQ ID NO: 218383 - DNA, 505 bp, Glycine max
gtgtaaatcaattgaaagccctcatgtatatgcaattacggacacagccatccgagaaatgatacgggatgaagtgaatcagtctataattataagtggtgagagtggagcagggaagactgagacggcaaaaatagcaatgcagtacttggctgcccttggtggtggaagtggaatagagaatgagatattaaagactaatccaatactagaagcctttggtaatggaaaaacattaagaaatgacaactcaagtcgttttggaaagctcattgagattcacttcagtgaaactggaaaaatatctggtgctaatattcaaacatttttgctggaaaagtctagagtagtccaatgcaacgaaggggaaaggtcatatcatatattttatcagctatgtgctggagcaccatcatctcttagggagaagctaaatctactaagtgctgaagactataaatatctgaggcagagcaattggtattaattacgggagtgatgatgc

SEQ ID NO: 218384 - DNA, 509 bp, Glycine max
  unsure (1)..(509): unsure at all n locations
gagtatctaactccacaactcgtgcagaagtttctcatacataagagtggctagcaacagctaacctaattacagtaaacagtaatttattcgccctactcctatcgtatctttcctattgtattttcctcattttccgatatatagttggcaatgcccttaaaacagtgcatagaccaaagccaaaccccaataagataaaataaataaatcaacttattcttgtactattccttcttccccaccaacttttcttcactttctcaatcgatccatcttcactcccaagtttatgtaaaatgacctttgtttcacgtagtcttgcaccataatcctttttccaagcttcaaacatttgttttaaccttctaagctctctatctgggttcaaacttgcttcaacttgaccagattntacctctaccaagaatttagaatcatcaccaaacacttgactcctttgctcaaattcttcagccaaccgacttattacactcaaaccagcactc

SEQ ID NO: 218385 - DNA, 366 bp, Glycine max
ggcaaaaaaaattggtggttctgtttttcagtaccagtttaaaagaaaaatgaagcaccaagtgttgtaatgggagtagtcgtactaaccatccaaaattaccacggcttggggcatacgcaatggattacttacccttggaaatttggttggctctcacttccatttgttgggcacaatttcggccaaatccaccaccctttgggggttgccccattcattggagtacctagcaacggccttcacgattgggattgccattaccgaggctcacgaggagtcaacggttgtgggcccattagggctcctgaattcaacggcctcaattgggtcatatccccccgaggggattcccttgagcccatt

SEQ ID NO: 218386 - DNA, 532 bp, Glycine max
  unsure (1)..(532): unsure at all n locations
gctttgcttgatttgtcgaacttcatatttgttacgcagactccgcatttttcactttacagtcattcttagtgtcagctaagaccctattttattctaattttcttgtaatcatgggcgttgacgttgaaaccatatcacccggagacggtcatacctaccccaaaacaggacaaactgtcatcgtacattataccggaactttaatcaatgggaaaaaatttgattcatcgagagatcgaggccaacccttcaaattcaaaattggcaaaggagaggtcattaaaggatgggatcaaggtgtagccaagttaagtgtgggtgaaagagcaaaactgacttgcactcccgactttgcctatggttctcgaggccaccctggaatcattccccccgactccaccttaatnttcgatgtggaacttctgaaagttgaataatcaatattcttcctataatcaatataagccaattctttgatgcattttaaacaaattaatctanactgattaagtttttgcacttaatttct

SEQ ID NO: 218387 - DNA, 303 bp, Glycine max
ccacggcttcatcagatcacacaattaagataattggggtcagcaacacggcctcccagcatctagcaactttgactggtcaccaaggacctgtatggcaagtggtgtgggctcaccctaagtttggttctcttcttgcgtcgtgttcctttgacggccgtgtcattggttggaaggagggtaaccaaaatgaatggactcaagctcatgtgtttgatgaccacaagtcatctgtgaatttcggtgcttgggcgcctcacgagttgggtctctgcttggcttgtggctcatctgatgggaata

SEQ ID NO: 218388 - DNA, 556 bp, Glycine max
aaaacaactcaaactaatcaactttcattcttccaagcacagaatactcaatggatcacaaacgtcaaggaactagtggcattatgaagcacaattaatcaactgtataatatgcaaagaaacaagatgtcaactatatttcaaaacgaaaactctaaccattttcaaaacgaaaaatcacattctaaggctccactgtagtcacctgttgccattccccatctactgcttccttccacaatgtcacattgttgttcccatcagccacagccagtatgtttcctgtcaatgaccatgagacccttcaaacaggggtcttgaaatcattcaaaaccttgccttcccactgatctccctctttcgccacggtccatatgatcactttaccatcctgcgatgcactagcaatggtagatttaggaagccctaaattgggtgcccaagcaacatctcggacccaatccgtgtgcatctgaagagcagggaagcagtccatctttcagagtccattggttaacttccataccttcacagtttatcacaaccaccagagcac

SEQ ID NO: 218389 - DNA, 519 bp, Glycine max
caattttagagcaagtgttgatttgcagcgcactcatcgtattaaaggaatgattaaaatggtggccacagttggtattcctgagaatacaggtatagcattggcctgtgctatgaatagttcttttagggggccgtgccagttctgatatttacaccatctgctctcaagactgtgaattatggaatcctgcttgcacaaaagcaatgactatgtcatttaatccaaacccgtgttctgatgcatggagtttggaatttctgaagcgtaccggatttcattgagatatcatatgtgtcactggatggactgccactccaatgcaggatgttcaggttacaattgattggattatttcctctaggaatgtgttcccggacttattgtgttttaaatccacaaaatccttttgtgttgaataggtggatggggaaactgactatgcccaggcactatccgagtgttaagagatgcctcttctataggggaggagctggtgcaaagatgctattctatgaa

SEQ ID NO: 218390 - DNA, 525 bp, Glycine max
  unsure (1)..(525): unsure at all n locations
cttttctgcaagaaaacatttcagggtaacccatgccctccttatctggaggcagtttgcaggaatatcttaaaaatgtgtggggggttgccactggcaattgtggcaattggtggtgcattggctacaaaaaaccagggcaaacatagaagagtggcagatggtttacagaagttttgggtctgaaattgaaggcaatgacaaactggaggatatgaagaaagtgctttccctgagtttcaatgagttgccttactatctcaagtcctgtttgctgtacctaagcatatttcccgagtttcatgctattgagcacatgcgattgattcgcttgtggatagctgaagggtttgtgaacggagaagatggaaagacactggangaagttgcagacagttacctaaggagctcttgacagaagtctgctgcaagtggtagcaaaaccagtgatggcaggatgaagacttgtcgcatgcatgatcttctaaggagattgtcaatttgaagtcaaggatcagaactttg

SEQ ID NO: 218391 - DNA, 503 bp, Glycine max
cacaagtctcggcacaccttcaggcgaccgatcaccccttacagatcaacacgacgttcttgctactcagtgcagagcgatccggctcccagttcctagtcctcaacagcagatctttcacttcttcatctttcaatctagcagctcgacgctcaaagaccatgcctcctaaaaaagccgccgctcccgagaagaaggctctcctcggaaggccttcgaacaacttgtacgtcggtatcgttggaatgcccaacgttggtaaatcctccttattcaatactctcactcgatgtgatctcggaaaggttgccaacttcccttacgctactatcgaacctgaggagactcgtgtacccgttcccgactctcgcttcgactggttttgcgacctctccagcccgcttcgaaagtaccagcagtcctcacttgcgtagatattgccgtttgacaaaggtgcttcgaccgagctggatggagaaacacttttggcaaacgttcgagct

SEQ ID NO: 218392 - DNA, 538 bp, Glycine max
gggagcgaaagatgtatatattcaagacgtagggtgagaggagaatgctatgtatcgagaaatggcgttcacaagccaaaggaaaatacaaaacatctccgagaggtatttttggggggttgtatgcggaaaggattctccgattaggcgttgtgcttccagtgagcgatatctccatcgaccatctcgtaaggctttcctttttgttgaagtttaccagcagccttgacagcagtttccgaaccgtattccttgaggtcatcaaagttcatgatatcaccacagatgaagtgcttttcgaaatcagtgtggatgacaccagcagcttgaggagctttagttccttcccgaatcgtccaggctcgtacttcttgaggaccgcaagtgaagtatcggatgaagttgagagcttggtaaccagcaaccatgattttacctaattgaccttgagtgttcaatttcgtgaactcctcgactcgaacgttatcatcttcgaattcttgcaacatgcgctctttcaacgcgaccgagaaaggaa

SEQ ID NO: 218393 - DNA, 278 bp, Glycine max
ggcggatataaaaaaagccgtgttctttgtaatcgctcaatgcttcaccttttccgcatatgctgcaaggttagaaatcacaaaccgatgcacatacactgtctgggctgagtctgtgcctggtggcggtggccttcaattaaacccggaccagtcatggtccgtggacgtgcctgcaagaacgaaaggggcccgcgtttgggccacaaccggcttgatactttacggttcgggccgcggtggatgccaaaccggtgactgcgggggtgtcctacact

SEQ ID NO: 218394 - DNA, 480 bp, Glycine max
cattgcccaaagagtttaatatattattcataagtaccccatttcatttagaatagaagtacacacatcatagacgaggaggggcacgcaaagtgcacacgccttatgtaattatattgatctttattttagtgcatatattatatattatgtaaggttattgggttcaaggacaaaagacaaccctatagtcagtcccaccattacaagtgaaggtgctagttggatcatccttggggtaactataagcattggggcacctttgcttgaagaatctggaataatcagtgggcccacagctaccggaattgcaacagtgctggtcggttttgaagacagtgcaagggttgatgcaacctccttgaggctttagctcactagggcactgtccgttaatgtccgcagtgcagtttatgccacgtgtgcatccattcgaggttggactaaagtccatgggcaacgttaaaccgttgacgaggg

SEQ ID NO: 218395 - DNA, 482 bp, Glycine max
  unsure (1)..(482): unsure at all n locations
tgcatgcatggtggtctttcccctgaactcacaaacttggatgaaatcaggaatctacctcgtcctactgcaattcccgacactggcttgctttgtgatttgctttggtctgatcctggtagggatgtgaagggttggggtatgaatgacagaggagtgtcctacacctttggccctgatatggtcgctgaattcttgacaaagcatgacttggaccttgtttgtcgtgctcaccaggttgtagaggatgggtatgaattctttgctgataggaaacttgttacgatattttcagctccaaactattgtggtgaatttgacaatgctggtgcgatgatgagtgtggatgaaaacttgatgtgctcatttcagattcttaagccctgcagagaaaaaatcaaagtttgtgatgtcaaacaagatgtgatggntgggacatcactgtcaagtaattaacaagatgtattcgtggggtaaattaa

SEQ ID NO: 218396 - DNA, 484 bp, Glycine max
caaaccataaaatccagcaattgcacctttactaactgaataaaattggccacaatcacaaactgctctatcagtgtaaatcgatagtctaagaggacctttcagagcaaataaggtcatttccacagcatctacaacacatatatgtacatattgtgttgcagaataattatgaaacaaggaaaaaaataaaaataaaaagataaaagcctttgcttttatggccatccaatagtgcttaatatctcttgtagtccctcatgctctctgcctgactggatgttatagcagtaaacttgcctcttcatcatcatcacctagaatagatggaacttaagaccattcaatctaaatcttcaggatttaatttaaccccacgaatacatcttggttaattacttgacagtgatgtcccaaccatcacatcttgtttgacatcacaaactttgattttttctctgcaggcttaagaatctgaaatgag

SEQ ID NO: 218397 - DNA, 256 bp, Glycine max
gttggcaaaagacgaactggcagatcaatcagcattctagatatttatggctttgagtcattcaataggaacagttttgagcagttctgtataaattatgcaaatgagagattacaacaacacttcaatcgtcatttattcaagttagaacaggaggaatatatccaagatggaattgattgggctaaagttgaatttgaagacaatcaagattgccttaatctttttgaaaagaaaccactcgggctactatccc

SEQ ID NO: 218398 - DNA, 444 bp, Glycine max
tgaacaccagaagttaccctttgcctccaaaaaccaacctaaggtatgtttctgctttgagtttgaagcaaataattcatgcaattctgtgactgacaggaagcgaaaatgaaagagattgtgactgtccaagttggtgatttcgccaacttcgttggttctcacttctggaactttcaggatgagttgcttgggttggctgggaatccctctgctgattcagtcttcaagaatcaggatcttaacatggatgttctttatcgtactggtgagacacagcagggtatcccttcatatactcctcgcctactttcaataaacttaagaggatcccttggatctatgagttcacgtggtacgttgtatacggagggtgctttcacaacaccagatgttgtcacctggactggtagagtttccacccaagcctctgaaccttataaa

SEQ ID NO: 218399 - DNA, 462 bp, Glycine max
gggaagaacaacgcatatattctaatctgaatctgatgacaactgaggaggatgcaatgccgctaccattttagacaacatctcttccatttccaccaattcttcctggccaaagccccaactcctaagtaactcagcccccgctgctcctcgttgaattccaaactgatgaagatttcgcagcttactctccaagagtggtaacacaatactgctagatcgtaatctggcagccatgggaatggaatggatgtcgagggatccttttggtgaagaattagtaatttgaccactcatcaattcaccgtgctggccaacattgttcccaaatattgatggaaaaggcaaggggattggcaagggactaagagcaacagatagatgacagaacattggccttgaattggcacatcgaaaagcagcatcaacggtatcctttaccttaccaactgaagcacgatg

SEQ ID NO: 218400 - DNA, 526 bp, Glycine max
  unsure (1)..(526): unsure at all n locations
caactcccttctccttctctgcacctccctcgctctctccttcactctcctcctctcccccgccgactccgccgccgcctttgttgtcacctccccaaggaagctccagtccgatgaactcgccaccgtccgcctcttccaagagaacactccctccgttgtctacataaccaaccttgctgtcaagcaggatgcgtttacattggacgtgttggaggttcctcaggggtcaggatctggctttgtttgggataaggagggtcatattgtgaccaattatcacgttatccgtggtgcctctgatctcaaggtcactcttgctgaccagtcaacttacgatgccaacgttgttggttttgaccaagacaaggatgttgcggtgcttgcgtgttgacgcacctaaagacangctcaggcctatacctattgggggtctctgctgacctgcttgntggtcagaaggtttatgctattgggaacccgtttggactcgaccacacactcacaactggtgtcattagtggac

SEQ ID NO: 218401 - DNA, 512 bp, Glycine max
gcagtttcctatagatctagagcagtatgatagaagagaacagctgaagaagagtggccttggaaaggtcattatgtttctatcgaagtctgatgaagaaatcaatgtgaataggaaactagccaaggagctggttgataagtggagccggcctatatttaataagagtacccggtttgaagacatgagaaatgtggaggatgatagggttccttataggagaccatcagttaaaaagtactcttatacctatcgatcttcaattgcttggcttctgctgcatttgttccaacatgttaaatttatacaatttggttgacgtcttacaggccggcaaataaagctgcaggaatggaatctaagacagtgatcttgatttagaactttcacagcctaggtctggacagtcctcttctaggcagcatgcatcaaggcccggagcaacacctttggattttgtggtccgcccccagtctaaatgatccagagaaatagagcacgagcaaacaagc

SEQ ID NO: 218402 - DNA, 604 bp, Glycine max
  unsure (1)..(604): unsure at all n locations
taacaattcaataagaggagaaagaacactcagtttaattagcaatggaattgaagaagcattttcttttatgccaagaaggaattggatgctgataagtggtatcgattgatctgccattttctgtgggagacttgaaaaacgatgccaagccagctatggttttctctgccaatgatttacaagaatggaaagattttcccaaagggctcaaggttcttctccttgagagagacaacatttctgctgccgagataagggcaaagcttgaagccatggactacaatgtttctacattctgtgaggagaatgaagccttgtcagcaatctcaagtggactcgacagcttccacattgccatagtggaggctgagttcaagcagtggccagggaggtttcaaatttcttgagaatgccaaggacttgccaaccattatgacttcaaacaatcattgcttgaacaccatgatgaagtgcatagcgcttggtgcagttgagttcctcagaaaaccactatctgaggacangctcagaaatatctggcagcatgtggttcacaaggcattccatgccagngcaaagcatctgtctgatcacttaaacc

SEQ ID NO: 218403 - DNA, 440 bp, Glycine max
atgagattgagttgagacaaagagatgattctcattaaggtcctagagtcctatcttatccaaaaattaggacatgttaacatgcacactagcagtcttataggatttacaaatgggacaaatgtggagtgaagacccacacacagtacacaagcacaaatgacggcacgggaaaatcagcacacaagactcttccttcctacagttcctgcacaacctcccattaccaccaccctgcttatccttcacccctgcgcaccccgctaacgtgcgccaaccccgcgtttgcttttctaaaccggcctactcggtgctcccgcagcaggactcggcgtcgtccatctacgcgccgtcggacacggtggcgcctacgacgacgtcttcctacgccgacattccgacgcgctgcgcgagaacctgctctaaattacaccgcagag

SEQ ID NO: 218404 - DNA, 491 bp, Glycine max
gggaataacatcttattttttttaatttgaattttgtgactatctgttgaggatgcaatgccgttaccattttatacaacatcttttccatttccaccaattcttcctggccaaagccccaactcctaagtaacttagcccccgctgctccttgttgaattccaaactgatgaagatttcgcagcttactctccaagagtggtaacacaatactgctagatcgtaatctggcagccatgggaatggaatggatgtcgagggatccttttggtgaagaattagtaatttgaccactcatcaattcaccgtgctggccaacattggtcccaaatattgatggaaaaggcacggggattggcaagggactaagagcaacagatagatgacagaacattggccttgtattggcacatcgaaaagcagcatcaacggtatcctttacctcaccaactgaagcacgatgaccttatgatgcaagagcttcatggaca

SEQ ID NO: 218405 - DNA, 370 bp, Glycine max
gacttatattaatagtttataatgggggcgaaaacaaaataaaaaaaagggggggggcccgccttttaaataataaataaaaaaaaaaaaaaaaaaaaaaaaaaaaaaaaaaaaaaacaaaacaagggagaaaaaatacaaaaaaaaaacaccttattaaaaacacgcgaaaaaaagcaggtataaaaaaaaaggggggaaaaaagaaaaaggcaaggggggaaaaaaaacccccaaaaaaatttggggcaccccccaaaagaaacaacaaaaaaagaggggagggggggtaaaaaaaagccccaacaagagcggataaaacctcgcccaaaaaaaaagaaggtggtgccaaaaaaaaaaataaggggga

SEQ ID NO: 218406 - DNA, 336 bp, Glycine max
atcttaaaagctatattgctgcacgatctcgtgatagtgatatttctgtcattgcaaagatagaaagtattgactcattgaagaacttagaagagatcgttctagcggcagacggagctatggtggcacgaggagacttgggagctcaaatacctttagaacaggttccatctgctcaacaaaggattgttcaggtttgcaggcaattgaataagcctgtcattgttgcctctcagctacttgaatccatgattgagtaccctacacctacaagagctgaagttgcagatgtttctgaagcagtcagacaacgagctgatgctttaatgctttctg

SEQ ID NO: 218407 - DNA, 600 bp, Glycine max
  unsure (1)..(600): unsure at all n locations
taaagccattccacaaacgaactaaaacattctttcttgcactaaagagcagctgcagacaaacaagcctcttttggggttggattagctggtgagatccatggaagatataggtccgaattcatgcacaaggccagtgacagagaagaaagcaagaccccaagaacaattgaattgtccaaggtgcagttcaaccaacacaaagttctgttattacaacaactacagcctcacacagccaagatacttctgcaagacttgtagaaggtattggacagaaggagggtctctgagaaacgttcccgttggaggtggctctaggaaaaacaagagggtcacctcatcaaaggttcctgacttgaatccaccaattagcctctcatcagtctcagccatttcttcccaaaaccctaaaatgcaaggagtccatgaccttaatctggcttttcctgcagctatggacaagtatcatcatggcacgtctccgtatgttgagatgccaaaactcgaaaatggtggtgatcacagtactagtcatcatagtcaccaccatagccatagcccttctcttgagttgagctactacngtctggcatggat

SEQ ID NO: 218408 - DNA, 609 bp, Glycine max
aaaaccctgaagaaagacacagccattgtttacttttcattgattgagccaaagctttgtattttctgcgataattttccattgggtggaagaaagtctcaacctttattcgaaagagcaaggatctgagttgagttgagtgatcatgtgtggtggtgcgattatctccgacttcataccggcaggtcccgccagcggggcgcggcgcgtgaccgccgacatcctgtggccgagtttgaggaagcgcttctcgaagccgctgctggacgatgatttcgaggctgggttcagagaattcaaggatgattcggaaatcgaggatgttgatgacgaggacgatgaagacgaggaggagttgaagaagaagccctttgggttctctcgctccagcaacaaggctgcttctaagcctctctctcgtggatcagcaactgtggaatcaaaggggcaagctgagaagtgtgccaagagaaagaggaagaaccagtatcgtggaatccgtcagcgtccatggggaaagtgggctgctgagatccgtgacccaagaagggggttcgtgttggcttggaacttcagcactgctgaagagctgcagagctatgatgctga

SEQ ID NO: 218409 - DNA, 500 bp, Glycine max
ttttttttttttttttttttttttttttttttttttttttttttttttttttttttttttttgttttttttgggggcaaaatttggggggctttgttaatttttttgggctcaaagaccaatagcctctttccggaagaaggtgtatcccccaccaaaaaggggcggggggctttcattattttttaaaaataaaaggaagtgtttttcttttccccttaaagggcaataaaattaacctatgaaaatgtttaaaaaaactttcctcgctaattaattccttgggggaaggggaatttataaccccagcgggtttttctacaaatccaccttttgcccatggttacccccccccccaaaaccctcccctggttttattttacaaaaagggggggcaaaaaaatgaaaaaataaaaccccgggaaatttttcatttttttccctccggggattcattttggacgcaggaaaaccatgggtatctcctttctttcccccccc

SEQ ID NO: 218410 - DNA, 536 bp, Glycine max
  unsure (1)..(536): unsure at all n locations
ctcgagccggttctggatttctggccaagtccatttgggatgagggtcaggattgcacttgctgaaaagggtatcgaatatgagtacaaagaagaggacttgaggaacaagagtcctcttctcttacaaatgaacccggttcacaagaagattccggttctcatccacaatggcaaacccatttccgaatccctcattgctgttcagtacattgaggaggtttggaatgacagaaatcccttgttgccttcagacccttaccagagagctcaggctagattctgggctgattatgttgacattaagatacatgatcttggaaagaagatttggacatcaaagggagaagaaaaagaagctgccaagaaggagttcatagaggcccttatattgttggaggaacagctgggagataagacttattttggaggagacaatattgggtttgtggatatagcacttgttccattctacactngggttcaaagtctatgagacntttggcagcctcaacattgagaatgagtgccccaggt

SEQ ID NO: 218411 - DNA, 557 bp, Glycine max
gataatacggaaaatactttattgcaaaaccaacaaacacatgaaagatacatcagaaaaattttaaaacctacacaatccaacagaaagcatgaagtttggcacatccaaatgcctttttattacacaaatattatttagttgaaaggtcaagaacgaccaatacttcactatggctattaagatccaacatgaaacctactcgatgactaacttcttttttatcttcacaacgaactcatagaccttgtgctgatcaggaagagactttgcaacactctctttctgtaggcacctcttggcccaagcaacaaacctggggcactcattctcaatgttgaggctgccaaaagtctcatagactttgaaccaagtgtagaatggaacaagtgctatatccacaaaaccaatattgtctccttcaaaataagtcttatcttccagctgttcctccaacaatttaagggcctttatgaactccttcttggcagcttctttattttctccctttgatgtccaaatcttctttccaagatcatgtatcttaatgtcaacat

SEQ ID NO: 218412 - DNA, 503 bp, Glycine max
caagaagaaaaaaccaacaaaaaagatctagtcctagaatccaacaggggcgacctcacctccaagaacacatagccatgtcaagaaacttgcttcttgttctttttgcagtagccaccttcctccatggctcagaagcacaaaccagacacgtggtaggtgatgccacgggctggatcatccctcccggcggcgccgccacctacaccacctgggcttccaacaaaacattcaccgtaggcgacactctcgtgtttaacttcaccaccggccaacacgacgtggccaaggtaacgaaatcagcctacgacgcgtgcaacggcgggaacgccgttttgaccctgacctccggtccagccaccgtaaccctgaacgaaacaggggaacaatactacatttgctcctttggatcacactgttccggcggtcagaagctggcaattaacgttaacagagcttcttctagcactccttcccctgctcctgaagcacaagcaccagca

SEQ ID NO: 218413 - DNA, 415 bp, Glycine max
ttattttttttttttttttttttaatttttttttttcggagatgaaataaaagctaactttattgggaccctcaaaaacaaaagaaaaagaaaaactgaattcactaaagaaaaactaaagagcgaaaaatcctaactaatagaataatagaaaacattctcggtaactgaaagaagggtggcggattctccaacaagaccgagagatgcagcagcatatttctgtgggggaggactgacagcacctgatggagaagggctaaaatgagtggtgggggcggtggcggatctttccccggtgacgttgatggaaagcttttgtcctcccaaacagtgccccggaattccacagatgtagtaatgttcaccgggtttgctaagggggactttggtcggtggagcggagaaaggggcg

SEQ ID NO: 218414 - DNA, 518 bp, Glycine max
  unsure (1)..(518): unsure at all n locations
gcagcagtgcagggaagttggtgtgtgtcaccggtgctgccggttatattgcttcatggattgtcaagttcctacttgaacgtggttacactgtcagggccactgttcgaaacccaaatgatcacacgaaggtagaacatttgctaaaacttgaaggtgcaaaggagagactgcacctttttaaggcagatcttttgggtgaaaattcttttgactccattgttgagggctgtgatggcgtctttcatactgcttctccttttattatcaacgtcaaagacccacaggctgacctacttgacccagcagtgaagggaactcttaacgttcttaaatcatgtgtaaaatcgccatctgtgaaacgagtcatcttaacatcttctgtggctgcagttgcatataataaaaggcctaaaagtcctgaagttgtagttgatgaacctggtggtctgatccagattactgtanggaattaagctgtggtatttactctcaagacttggctgaagatgctgcct

SEQ ID NO: 218415 - DNA, 519 bp, Glycine max
gatacttaattattatctttttataccacacgttggtttccttcatgagtacaaaccgaaataaaaccaacaattaatcttgttttattacaacacacaagcttgacatttcagtacaatagtttattttcaagcaatgagattttaaaaccagaaccacaaacgaaacaccgttgagattctcaacgtgttcactcctgatcaagcagagatatcagagactaaaagttggcaaagttcttttctttcaaagtttccactgtctttttaagactcacttccaaaggaataaattcaatccccaaggtctttgccttttctttggaaacctgaaatgttggtacataaggcttatcgtctgcagacttttctggaatttgatatgtcgggtactgatcacgttaaatcctggcgagttcagagaagtgtgccactcttttaactaaacaattatttccactagctgaagcaatctcatatgccggaatatgtgcgtttgcaacatctttcacattgatc

SEQ ID NO: 218416 - DNA, 524 bp, Glycine max
ctttcttctctttctcaatttcgctttgtattgtcttcaattcagtaaaccgcaccaattccgatggcggcgtcgcggcggctccgggacctccaatcccaaccggcgaacaagatctgcgtcgactgttcccagaagaacccgcaatgggcctcggtttcctacggcgtcttcatgtgcctggagtgctccggcaagcaccgcggcctcggcgtgcacatctccttcgtgcgatccgtgacgatggattcgtggtctgaaatccagatcaagaagatggaagccggaggcaacgacaaactcaacgcgtttctcttgcagtacggcatccccaaggaaaccgatatcgtcgccaagtataactccaacgctgcctccgtctaccgcgaccgcatccaggccctcgccgacggccgcccctggcgggatctccccgtcgtcaagaagccgtccgttcctcctccgctgcattcaagggcaagccgccgctctcggctagcagcaacaacaacggcggatgggat

SEQ ID NO: 218417 - DNA, 492 bp, Glycine max
ggagaaagagatggtgagaactcagaatttgaagagtaattatcgaaagactcataaccaaacaaggactcaaaagtctcagacaattcaacagtactagtgcttgttgtgcttccctttgttgttgtaattccttcactagaagaacaggaattttgagtcacagccgaggcagcacatgaggctgattttggtgtgtttttcatccaccctttcaacaaacgagctatgttatcagcacttgaagcatagcacatagattgtgttgttgttggtttattagtgttactattatagaaggtactattttcattggagaggtttgaatttgattcagctaacaaggttgatgatgatgatgatgccttgtttggtgagagtgcttcactaagtgcttttttggccatgtgaatatctgtttgaagccttctttcccactggcctctagacattggttgagaaactgatgaaaacccaatattattatgtcct

SEQ ID NO: 218418 - DNA, 633 bp, Glycine max
  unsure (1)..(633): unsure at all n locations
ctgttctcttctgtcattgcttctcctccacacacgcacagagacacacacttttgcagtcacattgagaatggggcgtgttcgcacgaagacggtgaagaaatcctcgcggcaagtgatagagaggtactactcccgcatgacgctggacttccacacgaacaagaaggttctggaagaggtggccatcattccctccaagaggctccgcaacaagatcgcggggttctccacccatctcatgaagcggatccagaagggtcccgtgcgtggaatctccctgaagctgcaggaggaggaacgcgagcgtcgcatggacttcgtccccgatgtctccgccatcaggaccgaccagatcgaggtcgacaaggagacgctcgacatgctcgccgccctcgggatgtccgaggttcctggcatcgttcaggtggatcctgttgccgtccaggcgcccctcggcttctgccgtggcggccctgggaggaggtactaactgtccgccttcttcgagcttncagtttttgtcgtgttgtcaactagagcacttaattgtcatgcgtttgagtttggtntacattatttaanattctgagctgagtttcgattgttgacttgttaagctgtatggaatca

SEQ ID NO: 218419 - DNA, 408 bp, Glycine max
aagcaaagacaaaatgaattccattaacagctttaacaagtccaaacaatccgaaactcagctacagaaattttaaaataatgtaaaaccaaaactcaacgcatgacaaattagtgctctagttgacaacacgacaaaaactggaagctcgaaggaggcggacagttagtacctccttccagggccgccacggccgaagccgaggggcgcctggacggcaacaggatccacctgaacgatgccaggaacctcggacatcccgagggcggcgagcatgtcgagcgtctccttgtcgacctcgatctggtcggtcctgatggcggagacatcggggacgaagtccatgcgacgctcgcgttcctcctcctgcagcttcagggagattccacgcacgggacccttctggat

SEQ ID NO: 218420 - DNA, 540 bp, Glycine max
  unsure (1)..(540): unsure at all n locations
tgcacgcagaaaaattttctgggaaaatatcttggtatgggaaagggatcttttcaggactctgttaaagctctggaagctgacattcagtatgctaataccctggcattaggctatccaagggacaaagatggaggatgctttcagatgaggatatcatacagtccagcagcccctctttttctgtttcttgttcaatggaccgattaccgcctcgccggtgctctgggtttgctgagaattctaatttatgtgacttatggaaatgggaagaatactatgtcaatatatgaaaggaaagcaagcattagacaattttactcgattatatttcctgctctgttgcaacttgagaaaggcatcacagatttggaggaaaggaaacagaaagaagtatatgcccttagataccaaaggaaaagtgagttcaatgagagaagacaatctgaaattgacattgaaagagaagaggaatgtggagtgtgcttggaggtgaaagcanaagttgtgcttcctaatngctgccactacatgtgtttg

SEQ ID NO: 218421 - DNA, 445 bp, Glycine max
gggaaaaaagccagttaaatatatacacaattaaattatgggctaaaatgcatgtacaagtaaagtgaaacatacacactattttccaaaaatctgtaggcaattccttcatttcaaaaggggatcatagaacacatatctgggatctggaacaattagaggcagcttttttatgtacagaaacagcatcttacaattttctttgaaaattgtcccaacatcaacaatgtcactggtgtcagggtaaatccaaaggtccccaaagttggttctttttaggctatcccggcaaaaggggcaagactgagacctttgacacctgaatcaacaagcaccattgtcacatctagagaacaacaaactagggatcactttctgattttctaatggcaagggcaaatataacaatcaacttttacaaggagttaaggaatgttgggtgttg

SEQ ID NO: 218422 - DNA, 474 bp, Glycine max
  unsure (1)..(474): unsure at all n locations
gttttgttctcattctgtgactctgtgcttagttaacgttaacagtgacttaagatggcggattctgcagatgtcacccacgatgttgtgtccctcctctcttctcctcaaagggactttcttcttcgaaacaacggcgatcaggttaaaattgacagcttgaagggtaagaaacttggtttgtatttttcggcatcctggtgtggtccatgtcaaacatttacgccaactttggtggatgtgtacaatgaggttgcaaaaaaaggtgacttccagatcgttttcattacggctgatgaagatgatgagtcctttaacggttacttttccaagatgccatggcttgcaatcccattttctgattcagacacacgcagccgccttgatgaattgtttcatgtgagggggattccccatcttgcattacttgatgaagctggncatgttgtcacttgagatggagttgatgttata

SEQ ID NO: 218423 - DNA, 491 bp, Glycine max
aagagcaaaccattataccatatatattaaagaccataattaacatcaaaatacctcatccaaatattcagattattctgcacaactcacaaaacatactaggaagggcgttcacaataccttatccaaatattcagattattctgcacaactcataaaacatactaggaagggcgttcacaatactttatccaaatattcagattattcatcaccaaaacccttgacaagcagtttttaggcttttttgcagacttttccatcacaaacccattcatctttggacttttcttccttggcatcatctttgcttccttctttgtcctccttttccaatgcacattttggatggagatcaaagtcacaatctccacagtaggaggaccatatatgtccctcttcattgcaagcattacagaaatacaccctgcggcgcgtcaacacaagctcatgctcatgtaattcatgcttcagcttctccgggcacccct

SEQ ID NO: 218424 - DNA, 604 bp, Glycine max
  unsure (1)..(604): unsure at all n locations
cggctcgagctcaaaatacgtttctttgagtccaaagcgcgcactgtggaaattcttaacacatcgtttggccaaaaccgaaattaacaaaaactcatttttccaatggagtgccagtttttccttcctccttaaaattgttccttcccccattcaatccctttctgcatttcagatctaagaccataattgggttcctcgctctctaaagaacaagggactccaatttgggtactgtactagtttataaagatttcatttttattataaaatatttaagggtgggggctagagaaggagaggaatggggttagttggggtccaagaaaacgggaacggtaatggagatggaatctctgagattccgttggggactaaaacaaaatacattaagatgacctctgatccagttgaggaagatgaagaagttctgcagagcagaaagtacgagaccaaaaaatatatctttgcatgtgccgtttttgcttctctcaattccgtgcttctcggctatgatgtgggtgttatgagtggagcaattatattcattcaggaggatctgaagataactgaggttcagcangatgtactagttggaattttg

SEQ ID NO: 218425 - DNA, 511 bp, Glycine max
ctcattttcgccggaaagcaacttgaggacggccgtacccttgctgactacaacattcagaaggagagtactcttcacctcgtcctccgtctccgtggtggcatgcagatcttcgttaagacactcaccggcaagaccataaccctagaggttgaaagctccgacaccatcgataacgtcaaggccaagatccaggacaaggagggtatccccccggaccagcaacgtctcatcttcgccggaaagcagctcgaggacggccgcaccctcgccgactacaacatccagaaggaatcaacccttcacctcgtcctccgtctccgtggtggcatgcagatcttcgttaagaccctcaccggcaagactattaccctagaagtcgaaagctccgacaccatcgacaacgtcaaggctaagattcaggacaaggagggaatccccccagaccagcagaggctgatcttcgccgggaagcagctcgaggacggacgcacccttgctgactacaaca

SEQ ID NO: 218426 - DNA, 452 bp, Glycine max
gggatattagagtactattattaatgggacacaattgagttcaacacaaaccgaacttattttcaagggacattattacagacccattaaacatcaaagttcttcaaatgttttgggaacacattcaacattacacaacgagcttaaaaccccccacggtgacggaggacaaggtgaagggttgatttcttctggatgttgtagtcagcgagggtcctttcatcctcgagctgcttgccagcaaaaatcagtctctgctggtccggcgggatgccttacttgtcctgaatcttggccttcacattgtcaatggtgtcagagctcttcacctcgagggttatagtcttacccgtaagagtctttacgaaaatttgcataccaccacgaagacgcaacaccaagtggagagtcgactccttctggatgttgtagtcagaaagggtgcgttcgtc

SEQ ID NO: 218427 - DNA, 568 bp, Glycine max
ctcttcctctcatacagagattgaagagatatatcactgtgtcactgtctctctgtgatataatatagatagatagatagctaattagttaggtctggtcttatttatttattaatttacaaagaaaattagaagaactgttattattattattattttaaataggatggatttgttgattttttctctcctggactcaactcaatttgataaacctaggggtttgatggaggggagatatagtggggattgatatagacatggtgctataattgctgactccgtttgcaatgacaaggacacaagggattgtgtagataaaaaaactggaattaagggacgatgcgttgtggcagcaattaccaattacaccaaccagctcctcgagtatggcagtgacactaaatccaaatataatctgactcaatcacttttattcctttcacattttttgggagacgtccatcagcccctacattgtggctttttctcagacaagggtgggaatgaaatcaatgttcgctggtacagaagaaagcaaatccttacccacgttgggatgcagcct

SEQ ID NO: 218428 - DNA, 478 bp, Glycine max
aaattcccaagtcgtattcaaatccttatcaataaaaccatgaagccaaattaaaatatttgtagtacacacccaaaaattcttcaaaagaaacttccgggaatctagcacgaccaaaatcataaattaatgaaattctaacccatcgataattaaatttgatgggaattatgatgtagcagtagcacacgtttcaccattaaaatcaaaataccaggtcaaagtttcaagtaacttaggacagaacgtaaaaaaaaactagataaaatgagtagatagctcggtacattaagtcacttagcacttgacctcctttaaggcatatgcaaagtacaggaatgttggatcagcagcgccgtccttgtagtaggcaaagaccaagcaagcatcattacccatgctctcaccaacaaaaaattggaaatctttaatcttagagagcagggatttagttgctccctcgatgtgctttttaaac

SEQ ID NO: 218429 - DNA, 380 bp, Glycine max
ccacaattcacaaccgaaacagtttccatctctctcacaaaatgacaacaatatcaaattgctcccttctcttcctcttcctcttcctctccaccctccacatagcttccaccctcttaacccccaccaacttcatcaagtcctcctgcagcaccacccagtacccagccctctgcatccagtccctctccgtctacgcctccaccatccagcaagacccccacgagctcgtccagacagccctctccctctccctcaaccacaccgaggccaccaaaaccttcgtcgcaaaatgcaacaaattcagaggcctcaaaccgagagaatacgcctgcctgaaggactgcgctgaagaaatcagtgacagcgtcgaccggctc

SEQ ID NO: 218430 - DNA, 499 bp, Glycine max
caggaaaaaaaaaaaaaaaacatggtggtgaaggtgtatggtccaacctatggatcccccaagagggtcctggtgtgtctgattgagaaggaaattgagtttgaaacagtgcatgttgatctcttcaagggagagaataaggaacctgagttccttaagctgcagccatttggatcccttcctgttattcaagacggtgattatactctctatgaatctcgtgcaataatcagatacttagctgagaagtataaagaccaagggactgacttattgggaaagacaatagaagaaaagggtctagtggaacaatggcttgaagtggaagctcataactttcacccaccactctacaacttggttattaatgttctgtttgcgccattaacgggggctccttcggaccaaaaagtgatagaagaaagtgataaaaagattgagaaggtgctggatgtttatgaggagaggctgtcaaagagcaagtacttggctggtgact

SEQ ID NO: 218431 - DNA, 405 bp, Glycine max
cgttacaataatcttacgcttttctaagacggttcttcgtccatttggtctcgcgggcataaaaggttcttaaaaaaaaaagacctcactcaacactggggccagccaaattttctgggttcttcttattcccataatttaacatctttggcccagaaaatccttatctaaccacgctatctccatacagcatatgattacccacctgggccaaaagcaatcctttttgccaatcccttccattggaaagcctttgttttcgatctccttacccttttgaccatccaatcaacttcccttacaaggctgcttattatggccctcttaacatctgtaattttcaacccagttccccactccttacaacataacccacatttggtttgttgctctgcaaagaaaggc

SEQ ID NO: 218432 - DNA, 106 bp, Glycine max
caattctatcttctggattgtaatcggagatggccccgcaattttggaccaatttgttgctcagttacgcctgaagcctgaaaaaatggacgcttctaactgtgct

SEQ ID NO: 218433 - DNA, 472 bp, Glycine max
atatagataacttgtgtgtaagcttaattgaaaaaatagtataacaagttgttatttactagtatacaaacagaagcatttgcagggcaggggaaaaaaaatcgaaacacaatacgttttttcaaaccggccagccaagaatacatatgaaaaaagaaagatttgttctcttgctcaatatatatgatcagagagtgacactgcggagcacaacagtctcaacggtgagtccagggccgaaaccaaatagcacaccccagtcaagaccttcaccggttgtgccaagaccattttctattgatttcttcctcatttgatccaagatgaatagcacgcatgcacttgacatgttaccatactcgctgagcacatgtctagtagcttccattttttcaggctttaggcctaacttagcctcaacttggtccaaaattgcgggtccaccagggtgtgcattccaaaagatagaatt

SEQ ID NO: 218434 - DNA, 496 bp, Glycine max
tgaaaagctcacccaaactgttagagagctagaagaggctgtccttgcaggtggtgcagccgcaaatgcagtgagggattatcagcggaaagttcaagaaatgaatgaggaaagaaagactctagacagggagttggctcgtgccaaggtaacagcaaacagagtagctgttgtggttgcaaatgaatggaaagatgctaatgataaagtgatgcctgtcaaacagtggcttgaagaacgtcgattcttgcagggagaaatgcagcaacttcgtgacaagcttgctatagttgagcgcgctgcaaagtctgaagcacaattgaaagaaaaatatcatttacgacttaaagtgctagaggagagtttgagaggaaattctaacagtagtaatcgcggtaccccagagggaagaagtatgagcaacggcccttctcgtcgtcaatccctaggcggagctgataacttctcaaaactaacctctaatggggttttatct

SEQ ID NO: 218435 - DNA, 560 bp, Glycine max
ggctgttaaggcattgggcctgccaaagctgtcgtttggtgacagtgagtcagcgacgtgcgggtgcttggtgtactgtacggccgtaatttcaattttgaagtgtttgagagagagagagggagacacaacacaagggaaggaaaaccaagtggaatcaatagccatgaagatcgttcggaaagacctcgtacccaatggacctggcagcgttaagatggttgcagtggattcggatgatctctggtttgcgtataacctgatagctcccggagactctgtcatggccgttactgtcaggaaggttctaagagaagctgctagtggcggacgggaagcagaacgcgtcaagctcaaattggaaattaaagtccaagagcttgctgattatgacaaagaaggttctattttacgtgttcgcggaaagaacattttggagaatgaatatgtcaagataggagcttttcatactttagaactcgaactgcagcgcccgtttgtgctcagaaaggatgtttgggattcttggctttggaggtactacagcaggcctctgatcc

SEQ ID NO: 218436 - DNA, 555 bp, Glycine max
  unsure (1)..(555): unsure at all n locations
gtgtacaaagacatgggagaagaccagcctgctcaattgccgactccagatgttcctcctcatcacatgaaggcgctcgaagagctgaaaggaattttgaagggagagattccctcttcgttcagcgatacaaggttgctgaattttttgagggccaaaaaattcaacgtcgagcaaacgacggaaatgttgagggcggattttaaatggcgtaaaagcgagaaagtggaagagatatttgagtttgcaaaaacagagcatggaaggctagcgactgagtattggccgaaccgaatgcatggattcgacaagtatggaatcccagtggtctacgataagactggatcgtgtgatacgaggtctctcctccaagttctcagcaaagacgaacttttgaaaacgcacatctactttcaagagcgtcaacaaanaagtgtggacgaagcagcagctaaaataggaaaacccttaaattgtggcattgtctttattacagatttggaaggattgggttngaaacacatgtacgcccctggtctggcagtagctagagag

SEQ ID NO: 218437 - DNA, 535 bp, Glycine max
caatgtaccagctatacttgttccttttgaaggttagaagtgctacaatacaaacagtggcagctactcatgaagatgtgaagcttttgggtattgtgggaagcccatttgtgtgcagggtccagattgcccttaagttgaagggagttgaatacaaatttttggaagaaaatttgggcaacaagagtgatttgcttctcaaatacaaccctgttcacaagaaggttccagtgtttgttcacaatgagaagcccatagcaaagactcttgtgattgttgaatacattgatgagacatggaagaacaaccccatcttaccttctgatccttaccaaagagccttggctcgtttctggtccaaattcattgatgataagattgtgggtgctgtatggaaatctgttttcacggttgatgagacagagcgtgagatgaatgttgaagaaacatatgaggctcttcagtttcttgagaatgagctgaacgaccaaaaagttttttggaggagaggaattttgggttggaagatattgct

SEQ ID NO: 218438 - DNA, 474 bp, Glycine max
aatcactctagctgttgcaaatttctactatttttcaatggcttctgcagatgttgagttccgttgctttgttggtgggcttgcttgggtcaccggcaacgatgccctcgagaaagccttttcaatctacggcgacatcgttgaatcgaaggttatcaacgaccgtgagactggaaggtccagaggattcggatttgtgaccttcgcctcagagcagtcaatgaaagatgcgatcgcaggaatgaacggccaggaccttgacggtcgtaacatcactgtcaacgaagctcagacccgcgccagccgtggtggtggtggaggcggtggtttcggaagtggtggtggatacaaccgcggtagcggtggatatggtggtggtggtggcggcggcggataccgtggtcgtcgtgaaggtggatacaaccgtaatggtgggggtggaggtggaggataccgcggtggtagagaccgtgg

SEQ ID NO: 218439 - DNA, 463 bp, Glycine max
ccagcaaacagatagcaaaatccatagaaatttgatgcgataatttcttactatcatttcattcgatcgactataaacacaactagaattgttggtcaaaaacgaaaaccacaggaacacgaaacgaaaccaacacagataccgaaacttaaaccacacacagacaacaccttaaaataattgaacttaatcataaaccctaatttacagggtcatatgcctaatttctccagtttccatcggatccaccgccttccccaccgggagagtagcgagaaccaccatcaccaccgtaaccacggtctttaccaccggcgtattctccacctccacccccaccattacggttgtatccaccttcacgacgaccaccgtattcgccggcgccaccaccaccaccatatccaccgctaccgcggttgtatccaccaccactttcgaaaccaccggctccaccaccacc

SEQ ID NO: 218440 - DNA, 448 bp, Glycine max
cagagtactggttcttgtgagagacatgatgtcatcttccggcgccgccaggtacatggcttttccaccctcgccctccgcgcctccgtcgccgcacctctccggtgctcttcgctccactcccctctccgacccggacaaatatcttactgaatggtggggagaacgtaacaagcttagtcccttcatggcggtccttccccactgctttcgattgttaaaccaagaaattttgcgtgtaaccacgctgatggggaatgcatcagttttaggtcaaagtgggcttgaacatgctagccccctggctaccggtggaatattttcaaatggaggcgccgatgtgaacggatgggcatcacgatatcaatcagaagtgtggatactaaccattaacataacttcattaattcattttcatctaattctggattataaaagtttttttgac

SEQ ID NO: 218441 - DNA, 473 bp, Glycine max
tttcttccttttttttttttttttgttttttttttttctttttttttttttttttttctttgttttttgttttttttttttttttcttttactttttttttccccggcggggaaagggcccgaatcaacttaaaaaaacccacaattttctcaaacaccccccaaataaattttattccggggggcaacaccggggccccaaaaaaaatctccccttgggggggaccaaaaccccgggggcaagaaaaaaaaaaaattccaaccggccccccttttcctcccaaaaaaaaaatggggaaaaaaaaatttccaaggcgcaaacccccaaaaaaaaccccccggcggtgggctatgacaataaaggtaccctacggccccccccattttggtgtcccccacaccaaaggggggggggggggaaaaaaatacaccaccggttcccaaaatatttatagggggggggggccgctttt

SEQ ID NO: 218442 - DNA, 534 bp, Glycine max
  unsure (1)..(534): unsure at all n locations
gaggggactcgttgttcttctcccaggttatttagaaaagcaaaatggtgaagatttgctgcattggtgctggatatgtggggggtcctactatggcagtcattgcacttaagtgcccatccattgaagttgctgttgttgatatctctaaatcccgcattgcagcctggaacagtgaccagcttcctatctatgaacctggccttgatggtgttgtgaagcaatgccgtggcaagaacctcttcttcagcactgatgttgaaaagcatgtctttgaggctgacatagtgtttgtctctgtcaacaccccaaccaaaactcagggtcttggagctggtaaagcagcagatttgacatattgggagagcgcagctcgcatgattgctgatgtttcgaagtctgacaagatcgttgtagagaaatccacagtcccggttaaaacagctgaggcaatagagaagattctgacccacaatagcaagggaatcagattccagattttatcanaccctgaattccttgctgagggaactg

SEQ ID NO: 218443 - DNA, 508 bp, Glycine max
caccaatatgatattaagagaagaatcagaagattaatcaaacaaaacaagtttccctagtacattcataaaagattggagtacaaagtaacatataacataaaccctcccatttcccacaatttataccccatttatgtcaccaactattatgagaaagttaagcaggaaaagaaaaactcttacaaaaaataataaagaattaaactgactgcctcaacatttgactggtattgcagtgtacttgatcaatgatctattttacgccaaagcaggcatgtctttgagccatggatccagtggcttaccaattgagtaaactatgaagccaatctcacgcaacttatcagcatccacaatgtttctgccatcaaaaacaaatgctggtttttgcatgttgccaaatatcctctggtagtcgagagtcttgaactcatcccactcggttagaatgcaaaggccatgtgcatcctttgttgcttcataggcatcccatacaacactgtcc

SEQ ID NO: 218444 - DNA, 571 bp, Glycine max
  unsure (1)..(571): unsure at all n locations
cggctcgagtgaaagtggcaaactcggtgaagatcccaagggcatcccaaataacctcatgccttacattcagcaagtagctgttggaagattgactgaactcaatgtatacggtcatgattatccaacgagggatggctctgcgatccgggactatatccatgtgatggacttggcagatggccatattgctgccctgcgaaagctcttcacaacggagaacataggttgtactgcttacaacctgggaactggtcgtggaacatctgtgcttgaaatggttgcagcatttgaaaaggcttctggcaagaaaattccagtaaaattatgtccaagaagaccgggagatgcgactgaggtttatgcatctacagagagagctgagaaagaacttggttggaaggcaaactatggtgtggaggagatgtgcagggaccaatggaattgggcaaagaacaatcccttgggttacgcggngaagccttgaattagcttgagaaatatactgctcatctacgaatgcttttcacataaataggcatctcttatatagaatactttcatgttggat

SEQ ID NO: 218445 - DNA, 450 bp, Glycine max
aaaaaaagagggccgactggataaacttttttcaatatcaaatcaagggccagcctattttaaagattttgtttaaaaacatagctttaacttcttgaaatgctgccaaattttattggcaaaattttacaacgaactgcctaaacaaatcatccaacatgaaagttttctttttaagagatgcctatttatgtgaaaagctttcgtaaatgagccttttttttctcaagctatttcaaggcttccccgcgtaaccccagggattgttctttgcccaattccattggtccctgcacatcttctccacaccataggttgccttccaaccaagatttttttaaactttctctgtggaggcataaaccctagtcgcatctcccggtctttttggacattattctactggaatttttttgccataagccttttaattgctgcaccatttaagcc

SEQ ID NO: 218446 - DNA, 448 bp, Glycine max
atttccataaccttagtcatcttcttctttcatctttctccctaacggtatcgagggaaaaatatggcggaagaacacagatgccaggcaccgcgcttctgcgccaacaattgcggtttctttggcagccctgccacgcagaatatgtgctccaagtgctaccgcgatttccagctcaaggagcagcaatcttccaacgccaagatggttctcaatcagtcgctggttccttcaccgccaccggcggtgatttctcagccgtcgtcttcttcttcggccgcggtagatccgtcatcggcggtggttgatgacgcgccacgcgaggcggaggaggttaaagcgccgcagcagaaccggtgtatgacgtgcatgcggcgcgtggggctcacaggggttcaggtgtctgtgcgggatgaatgctgtgcgggacccacccgttccccggagc

SEQ ID NO: 218447 - DNA, 549 bp, Glycine max
gaaggtgaatgacaattgaaatgtttttcaaattttttaatttacaatgacaacgcaaccacataacaatgacccaccaaactcacccactcacccaccgccttttacgggtcaatgatccgacccgcgtttcgcatccgttatccatcaccaccaacttgataaacacgaaattaccataacacccttcgttcattcgtttcagatcttgtcgagcttctcgcccttcaccaccggattcgccttcgcgatctgctctctccccatccccttgaagtcgaactcgcacgcgtgctgctccgggtaacggtgggtcccgcacagcatcatcccgcaccgacacttgaaccctgtgagccccacgcgccgcctgcacgtcatacaccggttctgctgcggcgccttaacctcctccgcctcgcgtggcgcgtcatcaaccaccgccgatgacggatctaccgcggccgaagaagagacgacggctgaaaaatcaccgccggtggcggtgaaggaaccaacgactgattgagaaccaatctggcgttggaa

SEQ ID NO: 218448 - DNA, 528 bp, Glycine max
  unsure (1)..(528): unsure at all n locations
gtctggttctggttctggttctggttctatccttattcctgatgagacttggggtgtctttagttctggtccttatttgatatttcatggtcaagcaccaggattcaccaattctaatggtagctcaagaggtggtcctaggcgtgttgattttggtgactactttctgggtcctagactagaaggactaattgaacaacacatttcaaatgaccggcttggtccaccccctgcatcgcactcttcgattgatgcaatgccaactattaagatcacacatgaacacctacagtctgattcacactgtccagtttgtaaggaacgatttgaactgggatccgaggccaggaagatgccatgtaaccacgtttaccactcagattgtattgttccatggttagttctgcataactcgtgtcctgtgtgccgtgttgagctgccaccgaaagaacatactagttctcgtggtagacaaatttgnngtatggcagtggtagtggtagtagcaatgatatctctaggggaaga

SEQ ID NO: 218449 - DNA, 468 bp, Glycine max
  unsure (1)..(468): unsure at all n locations
cctcgttgtcccagttaaaaaagactcttccaccctccaatatattactcaaatcaaacaaagaacaccactcgtcccagaaaacctagtacttgacatcggtggccaattcctgtgggtcgattgcgacaacaactacgtctcctccacttaccgccccgcacggtgtggctccgcccagtgctccctcgccagatccgacagctgcggaaactgcttctccgccccaaaacccggctgcaacaacaacacgtgcggcgtgacgccagacaacaccgtgaccggcaccgccaccagcggcgagctcgcgcaagacgtcgtctccctccaatccaccaacggtttcaaccctatacaaaacgccaccgtttcgcgcttgttattctgctgcgctccaaccttcttactgcaaggcnctcgcacncggtgtcagcggcatgtgccgtctcggcagaactagaattgctc

SEQ ID NO: 218450 - DNA, 563 bp, Glycine max
gcaatacatcagatcttggttgcgacacactacagagacgatgaaggaactaatgagttgtcgttccaagagtggactcaacagatgagagatatgctggaggcaaggaagcgtggagactatgcattccgtgacaaggactttaagacagccattgataactattcccagtttattgatgttggaacgatgatctctccaactgtttttgcaaggcgcagtctgtgctatctgttatgtgatcaaccagatcctgcactacgagatgcaatgcaagcacagtgtgtttatccagactggcccacggctttctacatgcaatcagttgctcttgcaaaactggacatgcacaaggatgcggctgatatgttaaatgaggcagctgcattggaagagaagaggcaaagaggagcaagatgatcatagttttatgcagtgggataatttgagggtgccaagttctgtataaaggttgagctgggaagcaaaactaaccgttgaatctgagttaaatgtgtcagagaaatacaacagtggtggagtagatggcacatgctctttat

SEQ ID NO: 218451 - DNA, 485 bp, Glycine max
tttcttttttttttttttcattaacaatggaaaaattaccggtattacttcccaatttagagtgcataagcacagttgttttcaagttgtaacagattcctataagatggtgaaataaagagcatgtgccatctactccaccactgttgtatttttctgacacatttaaactcagattcaaacgttagttttgcttcccagctcaacctttatacagaacttggcaccctcaaattatcccactgcataaaactatgatcatcttgctcctctttgcctcttctcttccaatgcagctgcctcatttaacatatcagccgcatccttgtgcatgtccagttttgcaagagcaactgattgcatgtagaaagccgtgggccagtctggataaacacactgtgcttgcattgcatctagtagtgcaggatctggttgatcacataacagatagctcagactgcgccttgcaaagacagttggagaga

SEQ ID NO: 218452 - DNA, 534 bp, Glycine max
tccatctcttgtttcttgctttctttcttcaccatgtcacttgctgggaaaatcaccactgaaatcggggttcatgcaaccgctacaaagtggttcaacctcttcgcaacacaactccatcatgttcaaaacctaactgatagagtgcatggaaccaagctgcatcaaggtgaagactggcatcacaacgagacagtcaagcactggacttataccatagatggtaaggttacaacatgtctggagagtattgaatccattgatgaacagagcaaaacaatcacctacaagctcttcagtggtgacattgatcataattataagaactttaagttcatctttcaagccattgatgataatgatcatggcggtactattatcaaatggaccgttgaatacgagaggcttcgtgaggagggttgatcctccatatggccacattgaatacctgcacacatgcactaaagatattgatggtcatcttctaaaagcatagctagctctaaaagtatgcactaaaaaataatgggcttg

SEQ ID NO: 218453 - DNA, 537 bp, Glycine max
actcacgaaaatcataaacatccattcattaataatattcccatgcatcacattgagcacttccaaatataatttaacacacttcaagatatcaccgacatgcatatccaagtttattttccatacaaaggaaggatctacataactaagcattcttctcgtcaaacttcacaccgattttattatacatataagcacttatccaaaggtcaagcccattattttttagtgcataacttttagagctagctatgctttgagaagatgaccatcaatatctttagtgcatttgtgcaggtattcaatgtggccatatggaggatcaacctcctcacgaagcctctcgtattcaacggtccatttgataatagtaccgccatgatcattatcatcaatggcttgaaagatgaacttaaagttcttataattatgatcaatgtcaccactgaagagcttgtaggtgattgttttgctctgttcatcaatggattcaatactctccagacatgttgtaaccttaccatctatggtataagt

SEQ ID NO: 218454 - DNA, 381 bp, Glycine max
caaatggcccagtcagcctccctcttgtagggaagtgtgtgatgagtatgggagagagctggtgaagctatgtgggaggttgatgaaggttctatccataaaccttggattggaagaggatgctcttcagaaagcttttggaggagaagatgttggagcatgcatgagggtgaatttttacccaaagtgtccaaggccagagttgacgctgggtttgtcttcgcactcagatccaggaggcatgacacttttactttctgacgaccaagtccctggtcttcaagtccgaaaaggcaacaattggattacggggaagccccttccccatgcttttattgtcaatattggagaccaaattcaggttctaagcaatgcaaacta

SEQ ID NO: 218455 - DNA, 514 bp, Glycine max
gaagcaggcttgtcaagcattgcatcatacaattaatacagtacatactattactatatgatacaaatattgcccctaagattatggtgcacttatcaccgtcatctgttgggaatgtggggacacaaatctctaattattacaaagctataggaatgatctttgcggacctcccaaattcatccattaacataaacagtttttccacatcaatttcatatctatattatccaattgcttttgtggtttaactattaggcaatttgttcagacaagtacatatctaggaacaggatttacaatactattaattatataatattgcaagcaatgtccttgttgataacgatatatcgatcatcttggagattttaacgattccacatgagattttccgcatggtcctctcaatctaatgaagagcctgtattcatcaaaggtcatgggcgtgtagagtgcaggtttgtctggctttaccaattcctttactgggtcaatgggtatgtcacttttg

SEQ ID NO: 218456 - DNA, 236 bp, Glycine max
ggaaaaagagattaatacaaacttttgaattaccaccaatacactcgcatgctacactacagccaaaataagacttactttggtgtagaccttattctgaataaattcttgtaattacaaattaaactcaacaattctgaacataatttattgaaaaagttcaaattgatttagctgcaaggttaatacacaggaggtgggggtgagttatagaggtagggtggaggaggcgaatg

SEQ ID NO: 218457 - DNA, 452 bp, Glycine max
gcttaattaattgaaatggattggatcggatcgaatcttactcgtgtacaaaaaaacattgagggggcaacatacatgccacacaaatataaaaaaaacttgaatcatcattatcttcaccattcatcaatttaaacaacattatcatcatcaccatctccaaaacatttcttcttcatgcttattaaaagggcttccttcttcccccttcttgtggatccgctcaattgatttttttttctttctttccatcatatcattcattcagaatcactttccatgcttcccatagccttcaaccctcttggtctcttcttgttacttttcttctccctaacttcatatctctcttggcacatatcagtcaaccacgccccgggactcaccataaggaagcttctttgaatgattttggccctctttttgggtcgctgaggaagcttgcaaccctt

SEQ ID NO: 218458 - DNA, 526 bp, Glycine max
actaacaacatgtaaattttattttacagaacaaaaaaagtgttctacataaattttgtgtttccactggtctaaatgatgtaaatttagttagcattgttatttattaaagtttgaatgattagctttaataaaagaaattcactaacatgtattacaacactcaagtctaatatgtaaatttaagaaaaaccgttggtataatgacgtgtaggctctgaataaaatatgttttgtttgaagaagaagcttccctgtcgacgattttgaccggaaatccacctttcattagggaggattaaaaagatatgaggtgaggctcatcccctggagtgagcactggaaccaccgtgaacctcctgagaataccagccaccaaccttttgatttgcataaaggccatttttctttcccaacatattctgggaccagcctgattcaccgtgttagttaaggaattcctttccacaaagtttcactttcctgtttgaagtttttccaaccaccttttttggccttaaccgaa

SEQ ID NO: 218459 - DNA, 468 bp, Glycine max
gccagcatacatttagataattatatatcagctccacaaattgataacaaacagtattaacattaatgggacaatagagttcaacacaaaccaaacttatttttaaaggtcatttcagacccattacacattacattttttcttaaaatgtttgggaaaatccaacattgaacatcacacagaaatcagctccagcttaaaaccccccacgaagacgcaacaccaagtgcagagttgactccttctggatgttgtagtcagcgagggtccttccatcctctagctgtttgccagcaaaaataagcctctgctggtccggtgggattcctttcttgtcctggatcttcgccttcacattgtcaatggtgtcggagctctccacctcgagggtaataatcttacccgtaagggtcttgacgaagatctgcataccaccacgaagacgcaacaccaagtggagagttgact

SEQ ID NO: 218460 - DNA, 507 bp, Glycine max
actgaatacacattctaaattaaaaagccgtggtagttgtacaccgattgcggcaatgaaatcaagcaagcatgccacgtgacatataaattatcttgtatgtcaacaccatcaaattaaggcacatctttgtataccgaatccacgaccaacgaacctgtattagccgccaatccatcagggagaagaggaacgtgaatttgtgtgcttagacaaagatgcagcgcaaacaataggctttggaactggaattttaagacaattttgactaccaccagggattatagagcactctggcagtggtctttgcatattcctttcaggaatacagtttattgtgaaatcaaaccctacactgaataaccttgaacatttctgggtcattccatagaagaaattgtaagcaacggttatatttaataggctttctcaaggagcataccaatttggataatttcccagaaagcttgttttgtgccaaaataagaacctttttgttttgcaagc

SEQ ID NO: 218461 - DNA, 517 bp, Glycine max
tttatttttttttttttaattaacaaaacgcatggaaatatattcaatcaaaaatcaaacaaacaagatgtaagctacacatttcgcacgcacaatagggtgcaagagttctcaattatatctaaaagtattatctaatttaagcaatcatactaacccaagttacacaaaagagaatacttctagcaagcattttgctattacaacattttctttaaaagataagcatttttttccaagaaccgccatactctcatgaaattaccagacaagaccaaaattgttcaaatgtctcatgctttgctggcaatgttgttagaaagccagtccaaacccttatagagaccctcttcagaaattgcacaagtgctttggatataccagtggcgtttgacggagtgaatgaattccaagcttgtcagttattttttgcgcttttaattggattttgaaagatcttgcttgttggcgaaaacaagcaaaacatcatctttaagttcattcttattaaacattt

SEQ ID NO: 218462 - DNA, 474 bp, Glycine max
aggcaaggcacgaaataccatgccaacatttttcttgcataacaatttacaaactaaataattttgagtacatgaatgcataatctgagagtcacagattccactaagccacattgatcaccatgacaatgggcttttctgtatcttcctttcttgcctctgattataacctttaaataaacatgctcagattttgcatttatcatggcttggattagtagtagtaataacaccagtttgagagaagtcacagttgaaatcatggcgcccattggcctggtagtaggcattcatggcataagtggcaagagccttaacgttgttggctgcaaagcaatctccttctggttgaattgggctacaatcaactccttgggtgcacacatagtttatgtttgtttgctaagcttggttgctagcatctgccttttggacacaccatttttgatcttctactggatgggcaggttttgt

SEQ ID NO: 218463 - DNA, 565 bp, Glycine max
  unsure (1)..(565): unsure at all n locations
aaacactcttctatattcctagtactttgaagagatattgaaataaacaacaatggccaattccatgagctttttcctgcttctttcttttctagcttttgctcccttgtgcctctgtcactataaccaagagggttacctctaccctcagttttatgactattcatgcccacaagctcaacatattgtcaagtctgtccttgctaagtatgttgcagagcaacctcgattggcggcttcgattctcaggcttcatttccatgattgttttgtcaagggttgtgatgcttcgttgttgttagatagcagtgaaagcatcaacagtgagaagggatcaaatcccaaccgtaattcagctagaggatttgaagtcattgatgcaattaaagccgaactagagagacaatgcccttctactgtgtcttgtgctgacatcttgactctagctgcaagagattcagtgttctactggtggaccaaactgggaagtacctttaggcagaagggactcactaggtgcaagcataagtggngtgcacaacaacatcccaagcccaacaacaca

SEQ ID NO: 218464 - DNA, 450 bp, Glycine max
atatactatgcggactttagaaatgcttccttttctaatttagattactggcacataacatttatagcagaacacaaattttcaagctacctttttagtccaactaccaccggcctaacctactaacccaacaaataacttacaagaacagaacagcaacataaagaaggtaaaaaaattaaataattgacaataaaatgataaaacgaaaaggaaaaagaaaaataggctatttattatcgcttcaccggtagcttcggtaggatggggtatacatacagctctctgcaaacttcaccaaatctttaggttgaggaaggcgagtggccaagccaagctcataagccttagcagcaacattggcagctatgtgtgctgaaatctttcttatgttggtgaatggtgggtatatgagtcccttatcaaagttctcttggctcacttgtgcag

SEQ ID NO: 218465 - DNA, 405 bp, Glycine max
ctaggatgtgccatcgtttttttccataataaaatatcgttggtgtaacttaaagaggaacctaagaatgtattcaggggtgaaagggttgttcaacataagccaaaaggtgataggaacggtgggattgatgcgtaagaatgtgctagacatcaacagcataacgagtgtgataggtcttattggcaccggcatcaacataattgggtcaacagttgatggtcttacttccttcttgggtcgttctgtgtgtcttcagttgaatagagctaccaaggctgatggaaatggatatggggtagttggaaagaagacctatttggaaggtattattacgtcgataccaacattgggagcaggccaatctgcgttcactattcattttgaatgggacgcagacatggg

SEQ ID NO: 218466 - DNA, 615 bp, Glycine max
tttttttttttttttattttttttatgtttatttattttttttttttttttttttttgggttttttattttttattatttatttttttatcacaatatatacttattgcataatgtcaaaaatattgattaaccaaactaataaactacactttcgacaaccgccaaaaaaaggggaggggaaaaaaacaaaaacaccgggggacaaaaaaattttcgacccccacaaaaaaagccaacaaaaaaaacactcgggagagggaaaaagaacccccccccaccggggtgattttagcccaaacaaaaaaaactcaaaaaaaaaaaaaaaatttcgagcccacaaaaaccaccccgagaaaaaaaaagaagaaaagggaacaaaaaagggaggggcccccccccccaaacccaactttcaaaaataaaacacgagtactatgggggcgggggtggaaaaacacaaaaaaaccccacgtaaagaaaaagagggtctcgcccaacaaaagaccaaaaccccccccttaaaaaaaattgtggggggggaaaaaaaaatctcccccccccaccaagggtcgggggcacaaaaaaaaaaaaaaatcccttctgggtaattatc

SEQ ID NO: 218467 - DNA, 554 bp, Glycine max
attaccagagtggttctagtaattcagtgctgctagaagatggaaactagtgaatggcatatcgagcgaagatctagcttcggctctgaatcccccttagcaagagaggcaggaaatgtgcctgaaactgggtcactctctattgtggtgcttggtgcttctggtgatcttgctaagaagaagacatttcctgcacttttccacctatacctgcagggattcttaccaccagatgaagttcatatttttggctatgcaaggacaaaaatctctgatgatgaattgagaaaccggttgcgcggctatcttgttccaaagaaaggtgcttcccccaacagttggaggatgtagagaagtttttacagctgatcaaatatgtaagcggctcttatgattctgaggatggcttccgcctgttggataaagagatttcagagcatgaatatttgaaaacagtgttgaggggttatctcgaggcttttctatcttgctcttccccttcagtatatccatcagtttgcaagatgatcaagacttgttgcatgaataaatct

SEQ ID NO: 218468 - DNA, 547 bp, Glycine max
agcaaaacgtaatcatttggattacagtccatggttcaaacttcagagttccagagacaggaacctgaatctacttgcaaaaaataattaaatgaaaactgaataagctcagccaatgttttacaagaatgaatattataatttatggcaataaactggttttgtgctattttggagctagctttttctggcaatgtcttttcctttttcagaccaacgatgcatgtgcaatataggagcagaaaaaaattattgaaagaatgatgatactagaacgttctatcacttaaataccaaattatggcaggttttgtcacaagggtaaggacagccaatagcctggacactaactcggccaaaataccagttcccaaccgactccgcgatccccctatttccaatacgaggggaatcatgagcaaaccatgtatcctgtctttctgattggcaatgggcgaaacatgaatttatgaataacccattttataagaccgtgagaaggctcttgtagatctaagcatctgatttcgaaaaccttgaagatact

SEQ ID NO: 218469 - DNA, 501 bp, Glycine max
caaaattgatcatcttacttatttattctccgaaaatggttgatttacattggaaatcaaagatgccaagttccgacatgccttccaaaactctaaaactctctctctccgacaacaagtccttaccctctgtgcaactacccttccgcaccacagatatctgtcacgccgcaccttctgtttgcgccacttacgactactatctccgtcttcctcaactcagaaagctttggaactcctcagattttcctaattggaacaacgaaccaatcttaaaacctatcttgcaagctctcgaaatcaccttccgctttctctccattgttctctccgatccaagaccttactccaaccacagagaatggactcgcaggatagagtctcttatcacacatcaaattgaaatcattgccatactctgtgaagatgaggaacaaaattccgacacacgtggcactgcaccaaccgctgatctcagcaggaacaatagcagcgagagca

SEQ ID NO: 218470 - DNA, 516 bp, Glycine max
ctggtcaccacatattatctgctaagtttgacttgaataataaacaaaaaaaggtatggtcctatcccaatagaaatgggatcaaatgcaaagatgcaatgtacaccaccacatatgaggaatagagccaagtctgtactggaaattaaattactttgatacaacagaatcaatagctctttccaacaatacaaattatttaaagttcttacaggggaatgttaaaaaacaaaagcaagccatgcttatcctcactgttttgggagtattaatctttttctctcttcctactcaatgtacaaaatgcttagtgctttgtgaacctctcaaggacttcaaagtagtcgggaaatgtcttcctggtgcaaccaggatccttgatggttactggaacatccccacaagcagcaagagagaatgccatggccattctgtggtcatcatatgtgtctatagctgtgacattcaatttctcaggtggagtaatcacacagtaatcaggaccttcttcaactg

SEQ ID NO: 218471 - DNA, 643 bp, Glycine max
  unsure (1)..(643): unsure at all n locations
aaagaaaaaaaaaggaaaaagaaagaaaaaaaagaaaaaatgtcaaaaaaaagaaaaaaaaaaaaaaaaaaaaaaagaacattaaaaaaaaaaaaagggggggtgagcgttgagcacnctgaagaacaaaaaagaaaagagagaaaaagaaaaganaganagnagaaaaaaaaaaaaaaaaaaaaaaagaaaaagaaaaaaagaagaaaaagaaaaaaggaaaagagaagaagaaaaaaaaaaaaaaagaagaaggaaaaggaagaaaaaagaaaaaaaaaagagaaaaaaaagaaaaaaaaaaaaagaanaagagaaaaaaaaaaggaggaaaaaggaagaaaaaaaaaaaaaagaaggaaaaaaaagaaaaaggaagagaaaaagaaagagnagaaaaaaaagaaaaaaaaanaaaaagaaaaaagaaaaaggaaaaaaanggagaaaaaagaaaaaaagaaaaaaaaaagaaaaaaaaaagaaagaagggaaaaaaaaaaaaaaagagggagaaaaaaaaaaaaagggagnaaaaangaaaaaaaaaagaaggaaaaagaggaaataaaggaaaaaaaaagaaaggaaaaaaagaaaaaaaaanggaagggaaaaaagaaaaaaagaaaaaggaggaagg

SEQ ID NO: 218472 - DNA, 452 bp, Glycine max
aacacctaaacacatttattaaacaaaaataaagaccatatataaatcgattggtttatttatgcctgtcggcaaataaatatataatgtaaaaaaaaaaaaccacaaataaagatctaaaaaattgacactattatatacatctcaatatcaatcatcacatatcaccctgatcggtatgatccaccggagttgttgtacggcccctccgtcgagattgccggtggtgactgccgccaaatttcaaccttccggtctccttaaacctttgtttcttggagggtacaatgacacactcgggttgtggcacagggtaccttaaagtatcatagcaatttgaatagtacatgtaacgctgacggaaccgtcgcatggtgaggcggtgcatgggggtcacgccggcttattcttgagcctcgagatcggcgtgttggtcggagcaagacttggtg

SEQ ID NO: 218473 - DNA, 470 bp, Glycine max
ccttgagccacgtggagaatcttatcaccggcgtcaccaagggctaccgatacaaagtgaggttcgtttatgcccattttcccatcaacgcacgcatcggcaacagcaacaagtctattgagatccgaaattgccttgacgagaagaaggtgaggaaagtccacatgctagatggcgtgtccgttgttcgatctgaaaaagttaaacatgagttgattttggatggaaaccacattgaacttgtttctaggtcctgtgctctcattaaccagaaatgccatgctaaaaacaaggatatcaggaaatttctggatggtatttatgttagtgagaagggaacactactggaagagtagatgttgaaaacaacgagtaccgtgatggattaattcggggaccttcttggtaacttcgtcagattggattttacaatcttgcgttgccaaacctttttcttattgggaatattt

SEQ ID NO: 218474 - DNA, 446 bp, Glycine max
caaaacatgagtccatcttatatgcacatgaagaagactaattaatgagagtggtctctgaaagttttcccctgataatgcttgtgttacatagttggaatagatacaaatttatttgtaagcatagccgcaggattgaaatgaagtgtctaaagttgaactaatgaacactttgaagtagtacatatgaagggatgtggtttctccctgataaaaccatttataaagaaagatgaatgttcctatccattacttattatagctcctctttggccactggtttaatcactggaaacttgtttttaacccagtccacataacctcctcccatgtttttcacatttttaaaaccttcatacagaagatcagcagttgcatacagagatctcaccccactttgacaacccaaaaggagatgatcttttttgttggaagctgatgaaacc

SEQ ID NO: 218475 - DNA, 444 bp, Glycine max
ttatttttcttatttttaatgaaaacttttcccacacttgacattaagtttgggtcaccctgtcagaattacaatattgccccagatagaatgggagatatatatattattcaacacggattatatcatcacatccattcctcttattatgcaaacaatgtaacaaggggctaatttgcattcaaaaatctgaatctaaatttaacagaggtggtatcattttcaagtcattgtaaaattcttcggacccaaatgataacatgaagaaagtttcaaccgtttctttagaagtgaatgggctttgtataagggggcattggggcttctttcacagccttccttattgttggatttgcatggcacacatctgccatgtcctcacttgatgcataatacagtagttttattgcaaacttcattgaataaacttctctgccttgggcg

SEQ ID NO: 218476 - DNA, 480 bp, Glycine max
aaccataacaagctgaaatatccatattcataaattttacacaaagggttgtcatcatggccccttacaacaacaaagtactacatctaactattctttaaaaatctaacacgatgattcaaaggacgccctgttgtcatcaggagaacttatattctctcttgcacaacaaccaagccccctcaaccaaaacaattcccacctaaacacaaactctaaaacatgttaaacaattaattagcttctatataacataatcagaccatgaagtatggtccatggtaaaactaggcatcttattccaatttaatagggttattcttccctccaaccaacctagcagggtttcccaacagcagtagtccttggtggcacttccttcacacaacagaacaagcacctatcttagctccatcaccaattttaatgttccccaaaatacaaggtccctgcacctatcaacaccctatcaccaatctt

SEQ ID NO: 218477 - DNA, 306 bp, Glycine max
catactttcagctggtgctgctgatttttcaggcgtgaaggctcaccatgagcaggggtcagttggtgaaatcaccaacagtgcattctagccatcatctatgatggccaagtgtgatccccgccatggcaaatacatggcgtgctgtcttatgtacagaggtgacgcagtgcctaaagatgttaatgcagctgctggaattatcaagaccaagcgcactattcaatttgttgactggggccccaccggggtcaagtgtggaatcaaataccagcctccgactgttgttccaggtggtgatcttgc

SEQ ID NO: 218478 - DNA, 527 bp, Glycine max
aatgcattctgttgtattcgattcgtttctactatggaaccgcagcttcagcccaggctggagcccgcgccagagctggtgagcgctggcgctgaggattccgagaagtcgcatgtcagtgatgtcacggaggttcgccacgttgccatggctgaggcaaacgccggttgttgcgcttccgttttgaaacggaagcgtggccgtccggccaagggaagccgcgttccgaaagggatgactccgccgtcgaggcagaaaaaggaagaagaggatgtttgcttcatatgcttcgacggtggaagccttgttctctgtgatcgccgtggatgccctaaagcagatcatccctggtgtattaagcgagacgaagcctttcttcgctcgaaggccaaatggaattgcggttggcatatatgtaacgcttgtgggaagggatcgcattatatgtgctatacttgtacctattcttttgggcaagagatgcacaaaaaatgcccattttgtctctatcaaagaaaataaaaggt

SEQ ID NO: 218479 - DNA, 548 bp, Glycine max
gctgtgttcgcgccagaaggatcacaatttgatgctcgtcaatatgatgctaagatgaatgagttacttggaactgatgggcacgatttttttacttcttatgacgaagtttgtgaaagctctgatgctatgggattgcaggagaaccttctgaggggtatttatgcatatggttttgagaagccctctgcaattcaacaaagggggattgttcctttctgcatggggcttgatgttattcaacaagcacaatctggaactggaaaaactgctaccttttgttctggagttatgcagcagcttgattacagcttagcagaatgccaggcactggttcttgctcccactcgtgaacttgcacaacaaattgaaaaggtcatgcgagcactaggggactatcttggtgtcaaggttcatgcttgtgttggtgggaccagcggttcgtgaagatcaacgcatactctcaagtggggttcatgttgttgttggtactcctggacgtgtatttgacatgctgagcatgccatgcattgtgctctgataacatg

SEQ ID NO: 218480 - DNA, 512 bp, Glycine max
aattatcacgaatgttacaattcacactcgaagtggggctaataatccattaccacgatactccatataaacgtaatacagaaaaacaagttatcgattttattgaaatcagaataattaatctgatgaaaccaactttgataggcatatgcttataatggttgaaaggtgaaattggaaagtcacacaaacacacatgaaaatacgaatacttatcaaagtatgaaatcgacttagacagtcatctgcttatggttgcaaggtgatagtggagagccacacaaacacttgttgtgagagtacaaagacttatcgatcttttgcaattctccacccttcggtatgagaccgcataactgattatagctgacgtcgaatagctgaaaatgttcgactttggtcaaccccacaggaaggctcccataaatcttattgtggttgagatccaaccttgccagggtcttgtggggaatctccacgcgagaaaatcaaacgcgataatgttccttgaa

SEQ ID NO: 218481 - DNA, 488 bp, Glycine max
caatcaaattagttcattctctttgcgcagttccctacctctcctttcaagatgcagatcttcgtcaagaccctcaccggaaagaccatcacccttgaggtggaaagctctgacaccatcgacaacgtcaaggccaagatccaggacaaggaaggaattcccccggatcagcaacgtctcatcttcgccggaaagcagctcgaggacggccgtaccctcgccgactacaacatccagaaggagtcaacccttcaccttgtccttcgtctccgtggtggcatgcagatcttcgtcaagactctcactggcaaaaccataaccctagaggtcgaaagctctgacaccattgacaacgtcaaggccaagatccaggacaaggagggaatccccccagaccagcaacgtctcatcttcgcctgatagcaacttgaggactggcgcaccctcgccgactacaacatgcagaaggatcaacccttacctcgtct

SEQ ID NO: 218482 - DNA, 521 bp, Glycine max
gacagaaatgcaagatagattactaattccagagaatagtcaacaccaaagcatatagaagtaacgatttcaaaaaaaatattcccataagaaaaagtttgacaacacaaaattgtaaaatccaatctgaacgagttaacaaaaaaggtccccaaactaaaccatcaaggtactcgttgttttcaacatctactcttccagtattgttcccttctcactaacataaataccatccagaaatttcctgatatccttgtttttaacatggcatttctggttaatgagagcacaggacctagaaacaagttcaatgtcgtttccatccaaaatcaactcatctttaactttttgagatcgaacaacggacacgccatcaagcatgtcgactttcctcaccttcttctcgccaaggaaatttcggatctcaatagacttggtgctgttgccgatgcttgcgttgatgggaaaatgggcataaacgaacctcattttgtagcggtagcccttggtgacgccggtga

SEQ ID NO: 218483 - DNA, 534 bp, Glycine max
gtgaaagaggtgtatgccaatacacccctcacttatgaagggtatggaagcaggttgggagtgaacaaaggggccattttggattggagtgactacttctttctccatcacatgccttgttcccttagggaccaagccaagtggccggccctcccaacatccttaaggaacattatctctgaatatggtgagcaagttgttatgctaggaggaaggatacttgagatattgtccataaatcttgggcttagagaggattttctcctaaatgcatttggtggggaaaatgaccttggtgcttgcttaagggtgaatttctaccctaaatgcccacaacctgacctcactcttggcttgtcccctcactcagaccctggtggcatgaccattcttctccctgatgaaaatgtgtcaggacttcaagtacgcagaggagaagattggatcactgttaagccagtccccaatgctttcatcatcaacatgggtgaccaaattcaggtgctaagcaattgcaattacaagagtatagag

SEQ ID NO: 218484 - DNA, 240 bp, Glycine max
tggtgatatcttagttatctaattacctcaattaatcccttaattgcaagcatcatggctgaggagaaacaccatcaccactttcaccaccacacgggcgatgatgtgcctggcgaggttgattatgatatggatgagaagcaccactagcttattgagcaccttgatgcactaggtgctgaggatgtcgctgctgatgccctgcatgagaagcatgaggccaagaaagacccaatgcat

SEQ ID NO: 218485 - DNA, 496 bp, Glycine max
actcttaacacatacgccttgcataaaattatcaggataataatacaatctcaaattactttacaatcttattatcaatatagccaacatagcatacattatatatacgcaaatatatatatgaagtaacaccataggcataattaaacactcttcaagctcgcacagaatttattcaaaggcacactagaaatggaagatatgatagagatacacaggcatggtgatactttggagcttgaatattaattatatatgaatatttatcatgttcagccaaacagatggtggtgcttctttccatgagcttcctcatcttctttcttaacttcctttttctcatggtgttcatgcaagacaaaaccaccagcaccaacagtagctgctgccgcaatctcctcttctaccttgtgcctgtgagcatgctctgggtctttcttggcctcatgcttctcatgcaaggcataagcaccggcagtcgcagcaccaagttccc

SEQ ID NO: 218486 - DNA, 519 bp, Glycine max
  unsure (1)..(519): unsure at all n locations
aaaatcttcatgtcacaaaagtgcaatggatcaaaatacaactttctaaataattctcaacatatgcatatatatgctaaacacgaagggagtgtctgagtgatgagcttttttcacgcaccatcatgattttgactcccatcaggccaacaaaactgaaatctaatttacatctcaaatgaacccaaagaaaattgaaaaattatattacgatatcaccaagtaaatattattccatttgatggattcattaacctaatctatacagaataagtatctttagaattttaaattttaattaaaaaattctaaaaattatcctttgcttgccggataacacccagggcttctgcatcatctgccgtggctgcaatatttagtttttgccggatttctatgctccatgtgcgaaggaatggattgcangcctttttcactttcagcgtaattggaatcgtgggcaagcctttatttctaaggttagatacatgggtagcataggattgaagttccttgttt

SEQ ID NO: 218487 - DNA, 528 bp, Glycine max
gtcgaaccagacacacttccacgtcaccaccaccgtggaaggtggcgcgtgaggctgtttccggcgacctataccggcggcgctgagtggtgatcaaggaaatgggtcagaggctaagctgcgtgcaacagcagcacgaggagcatggtgtgctcttcccagcacttgcaagtggagaattggaggttgttgaggccatggtggaggaagaccccactgtgttggaacacaccactggctgtgaccgcctttctcctctgcatgtagctgctgccaatggtcggatcgaggttctttccatgttgttggataggtctttcaatgttgacgtattgaatcgccataaacagaccccgttgatgttggctgtgatgcatggaaagactggttgtgttgagaagcttattcatgccggagcaagtatattgatgtttgattctatacgtcggagaacttgcttgcactatgccgcttattatggaaatatagactgccttaaggtcattctttctgctgctcattccacac

SEQ ID NO: 218488 - DNA, 537 bp, Glycine max
ggttgttgaacacagttattttttttatcaaattaagacacctgccttccctagcccctcataacagaaacataatcttacccagaaaacaggaagtgaaaagcaaaccccccaaaagttttcatagatgcaatccatttcaatatacattatccaaacacaaatcagcccatggcatacttctgggtccagctgcgtgcagtggcctcatacttggcccggtcagttttgtacatgtgagcgatttccggaacaagtggatcatcaggatttggatcagtcagcaatgagcagatagaaagcagtaccttatagatggggagtgcagggctccactgcttcttcaggatatcaagacaaatgctaccattgctattgatgttcgggtgaaacaccttagtcctaaaggcaaccttaggaggcttgaaaggataatccggagggaagtgaatagtgactaggaatacacctccagcattaggactattagcaggacccatttttgttgcttgccaatggaacatgttcctagctact

SEQ ID NO: 218489 - DNA, 514 bp, Glycine max
caatctcaaaacaacatacggggtaaatgtaaccctccgggctcaatgtcaccacaacaagtaatacagttcaggaatacacaaacatgatatgagaaagacaacatcaagaaatacaactataacagtaaaatgggacatcaacaattcgagattctatatgagcaggaaacggtaacatttgttctcctcacttagtggcttgtgcaattatattactaaacgaactggcttcttcctttgcattctccaccaacgaatcctgtgctgctatcaatcgggcaactgttttcttgctggactcttgaagctcaccggcaattagaatttcatctagtatatagtaggccttgtgaaagttgaatattaagttcagtttacagacactgccaaaataccggtcaagaatctccacaaaatgatgaatcatttcaaggacttctaattcattgtcatcttgatcaatgcacatgcagaaatagagactagcataccttttataaacaactttatg

SEQ ID NO: 218490 - DNA, 594 bp, Glycine max
gaaaaaagaaaaatgtaagtggaagaagagaaagtggcatcgcttaggtacagatacagacacaacctggtaaaaatcccgaccccagtgccgcacaattttccttcactcgcagcggaggtttacttttgatctagtacctgctatccctatgtataagcatggacttctagcatactattgtttgattaaccaagttcttccatattggttgaggaagcctcgagtcaatatttagtttttgctgccatctgtgggtttctgatggatgatgccgggcatcgtgaaaatggaaggcacaaagcagcagatcaatataaatctgctcagggacagtggttgatgcaacatcagccttccatgaagcagattatggcaattatggctgaaagagatgtagccattcaagaaagaaatctggccatttccgagaaaaaagcagcatatgctgagcgcgatatggcattcatgcagcgagatgctgcaattgctgaacgtaataatgcaattttggaacagatatgcaaatgcactcttagtatcgcgaaccttttaagtagtgcagtatgcatcatgccctcagatgcaaattac

SEQ ID NO: 218491 - DNA, 434 bp, Glycine max
caacacttcatttcttactctcactgaaaaaaaatagcttgttcacaccatcctattttttcaactcatatatacaaatatatataacatggcttctaccttctctcgaagcctagcacttgtaagcttctacattgtcgtttgtgctgccggtaacttgaaccaagactttcagcttacgtggggagatggtcgtgctaaaatactcaacaacgaaaatcttctcactctctcccttgacaaggcctctggctctggcttccaatccaaaaacgaatacttatatggcaagattgacatgcagctcaagctcgttcctggaactctgctggcactgtcaccgcctattatctgtcttcaaaaggatcaacatgggatgagattgacttccgagtcctgggggaatctgaatggcgatccatacattctacaca

SEQ ID NO: 218492 - DNA, 460 bp, Glycine max
gggccatcggcgatgggagacgactgtggcagcaaccggtcaaagccggagtggcggcagcagtatgatctaatagggaagattggagaaggcacctacggtctcgtcttcctcgctcgcatcaagtcttccaccaatcgcggaaaatccatcgccataaaaaaattcaagcaatccaaggatggcgatggtgtctctcccaccgccatacgtgaaatcatgttactcagggagataacgcacgagaatgttgtgaagcttgtgaatgttcacattaatcatatggacatgtctctctatctggcttttgattatgcagaacacgacctttttgaaataataagacatcatagggacaaagtcaatcaatccattaaccagtatactgttaaatcgttactctggcagttgctcaatggactaaactatctacacagtaattggataatacatcgggact

SEQ ID NO: 218493 - DNA, 526 bp, Glycine max
ggctcgagcccagttgagtttcatggagttcctgtttttgctccaaatgtgacaagggaaatgcttgatatcaggccaggagaggccttggctgtgaattttcccttgcaactccatcacacagctgatgagagtgttcatgtgagcaacccaagggatggacttctgagattggtaaggtcactttctcccaaggtgaccacactggtggagcaggaatcaaacacaaacacaacccctttcttcaacaggttcattgaaaccttggattactacttggcaatctttgagtccattgatgtcaccctcccaagagatagcaaggagaggattaatgtggagcaacattgtctggccagggatattgtgaatatcattgcttgtgaaggcaaggaaaggggttgagagacatgaactgttcggcaagtggaagtcgaggttaacgatggccggcttccgtcagtgtcctttgagttcttatgtgaattctgtcataagaaagcctttgatgtgctattcagaacac

SEQ ID NO: 218494 - DNA, 506 bp, Glycine max
  unsure (1)..(506): unsure at all n locations
aactgatgctaaataatttattgaaacactgaggtgtggtctaactacaaaaatcaacggattcaatttgtaaaccataagacatgaataacaaaaacaaattacctgggagaacctacaggtatgaactatacacataccccaccaccagcaataaccaccatatcaaaactatcatcatattcaagaatagaattgtatgctcctcctctctatacaccaaagttaaaattagaaaatataaaccccaggtagtgaaactaaatcaaggatgaatggaagttatggaaccctcttaaaatgatgaagcagaagtttctgtctggcttcctctgctgcgacggtgtcgttttccatggtgacggcggccaccaccgaacgtgacgggatcaaaccttctcagcctctcagcttcttgggaattgatgacacactctgaaggagggactttgtatctgactntgtcataacagtaggagtatgtcatgtgcttctttctgaaattc

SEQ ID NO: 218495 - DNA, 578 bp, Glycine max
caagtcatcaactttaaccctttcattcttttcagctactgagtaatgatcaagtgagctaagctttctcacagctgatatgttttgcctagagaatagcgccaattaattacagtgatttccattctcttacataaattatacccaagttcactaagctgtgttgcaaatggtaacagtaagtacaaaattgtcgtgtataaggttcaattacccatacttgtcttcttttattgatatcaatcagctactcatcataaacccagttggtgacacgtgaacgacgacctgcagatcctccagcaatttttgagtcaaacaattggagttgccttttaacccatggaggatcatactcacttagccacagagcttcgccggtatccttgtgcttaaaatcaggctgttttggatttcgcttgctctttctttgatcccaccactcatttggattggaaaaaaacacttgccaaaggtgaagccgatcttgatttttttgcatgccagcatcttcaacagattccaatttcttgccgcctagataaccagacctttgagcaacaaactcgaactccttc

SEQ ID NO: 218496 - DNA, 452 bp, Glycine max
gatcttctcaggtacaaccccgtgcacaagaaggttccggttttggtccacaatgggaacccattacccgagtcacttatcattgttgaatacatcgatgagacatggaaaaataatcccctcttgcctcgagacccttatgagagagccctggctcgtttctggtctaagaccttagatgacaagatcttgcctgctatatggaatgcttgctggagtgatgagaatggacgtgagaaagcagtggaggaagccttggaagcattgaaaatcctgcaggaagcactgaaagacaagaaattttttggaggagagagcataggattggtagacattgctgccaatttcattgggtattgggttgccatattgcaagagattgcagggttggagttgctcaccattgagaaatttcccaagttatataaatggagtcaagagtttatcaatca

SEQ ID NO: 218497 - DNA, 446 bp, Glycine max
  unsure (1)..(446): unsure at all n locations
gacgcaaaatggtgacccctctcgtaaaacacaagatcgtgaaaaaacgcaccaagaaattcgtgcgtcactattccgatcgtttggttcgtctcaaccaaaaggtgtcatggcgacgacctcacggtatcgactcacgtgtccgtcgtcgattcaagggtaacatgttgatgcccaagattggttatggtacaaacaagaaatttaaacatgtcctccccaacggtttgctcaaattctccatcaacaatgttcgcgaattggacttgttattaatgcacaatcgtaaatatgctgctgaaattgcacacaatgtctccatccgcaaccgcaaggctattngtgaacgtgctgcacaacttaacgtcaaagtcatcaacggaaacgccaaggttcgcacagaagaaactgaataaattatacacacctacaaccaacaacaaact

SEQ ID NO: 218498 - DNA, 498 bp, Glycine max
ccttcttgaaccagcttttaaattgaacccgatccgatctcaatttgaataattaatttttattgtaatagtggaaaggagtaggacacctattttatattagaatcttactaccacattgatggaacacaagaacataaatattcaaaatatatcttttttacttctcagaattctagtaacaaaaccatcactgaaacataaactagacatgaataagttagaaggaagtggatgagaaagaaaaacaaactaattggctgcttcaaaatgactgaaattcaacatgaaaacttagattttgttgaatgcaacaatgtcacagctttggacatactcattgatgggctcaactgtgagagtctcctcaacaagggtgttcacagatacaaggtccttcacaatagttaacatgatctgcaacttcttgatcccataaccaacaggaaccagtttggatgctcccacaatagaccaggcatttcaacactgggaaca

SEQ ID NO: 218499 - DNA, 504 bp, Glycine max
  unsure (1)..(504): unsure at all n locations
aaacatttccctgctacttcatcttcttcttcttcttcttcatcaccggtggttctgttcattcttccttgcaccttcttctttgaagatcgaaattgtgtttttgaaaaaatgggagttccagagaaagaccctctttcccaattgagtttgcctcctggttttcggttttaccccaccgacgaggagctcctcgttcagtatctatgccgcaaggtcgctggccaccatttctctcttccaatcattgctgaaattgatttgtacaagttcgacccatgggttcttacaagtagggcgattctcggtgagaaagagtggtactttttcagccctagagacagganataccctaacgggtcccgacccaacagagtagccgggtcgggttattggaaagccaccggaaccgacaagatcatcaaccaccgaggtagaaaaagtggcatagnaaaagcccctcgttttctacaatgggcaaagcccccaaagggcacccaaaac

SEQ ID NO: 218500 - DNA, 507 bp, Glycine max
  unsure (1)..(507): unsure at all n locations
atgaaaaaaggaagtttcttacgaaataccacgttatatgctcgcatgcgtaacgctcgaaattttgctagagttccagacgatgagaaagatggaagggaaggatacatgatgagtatctgggagcgagcatatggcccaggagacaatcgattgggacagtagcgcatatccaagactaccagcgaggactaccaccagccgatgcctgcgcctttttttgacccaacctacttaaccacaccaaggggggggggggggggtgtggcaaaacttatnnccacttttctgtttctctacatcaccgacttaaccgatatggtagtctcccaggctaaatctaattgtaataccgttgggatgtaaggaatcgtttgggccttcggtggcatgatcttcgccctcgtattactgcaccgctggcatctcagggggacacataaacccggcgatgacatttgggctgtttgtggcgaggaaattgtcgttgtccagggcgatttttta

SEQ ID NO: 218501 - DNA, 483 bp, Glycine max
aattatataaaatgctaaaatggtaattacgaacaactaatttcaaagagataaaaaaacaagcatacgcattaaacaaaaagtttgctaaactgctaattaagttccataatgtcaataaagtaaattactagcaactgaatccagcatcttcaactcatttcatgaaatagaagtaaagttgctcttcaatgtcatcttgaagatattaacttattccaaggttcattgatggatggaccaatccagtgaaaggatgaatgcctacagccacatttgctccttaaatcccaggaaaaatattttcaatttgttttagaaccaatttttctcttagcaaaagatggcaaacagaaagccgctgtttgaatctcagaattgtaaaatttcaatggtcttgactggtgactatcattctcacttaaaggattcactgggtgcttgaaatcaacaagaggacctttagttgagcaaagcataaaa

SEQ ID NO: 218502 - DNA, 555 bp, Glycine max
ctcgagccgattcggctcgagtcggaggctaatctattacgcgctgttctctcgtcttctacaagattttctgttcgatctcaaccaaggttgttccttccacctccgccatgagtttcatctttggaaagcgaaaaacccccgcagagcttctgcgggaaaataagaggatgctggacagatgaatcagagaaattgatcgtgagcggcaaggattgcaaacacaagaaaagaaattgattgcggtgataaagaaaagtgccaaacagggccagatgggagctgttagagttatggcaaaagatcttgttagaacacggcatcaggttgagaagttttataagctaaaatctcagctgcaaagtgtatcactcagaattcagactttgaaatctacacaagcaatgggtgaggctatgaaaggcgtgacataggccatggcgcaaatgaataggcaaatgaacttgccatctttgcagaatatcatgcaagaatttgagagaccagatgagaagatggaattgcatctgacatgatgggagatgcaatagatga

SEQ ID NO: 218503 - DNA, 495 bp, Glycine max
aataagtgcatgcttcacccaaacacgctaatgaagcctgtctcacttcctatgacaaggtttattgagccagtcatcggcatgacatgagatgaaactaagatttcataatacaaagcattatatgttttattacagccaaagctaacagtgatttgccccataacaaaaagcatacttcacctgcagttttggtgatttcataataaatagcataaaaccactcacttatgcataagttacataaaacaactcacacatgccaccaagacatgtgtttattacagccaaagtcaagtgacttgccccataattcacctatagtttctgtagacaggagaatacatgcagctttcagcatacttgacaagattctgaggacgagggagacgagtagccaagcctagctcatatgccttgccagctacacttgctgctatgttagctgaaatttctctgatgttagagaatggcggataaataagcccttttcgt

SEQ ID NO: 218504 - DNA, 499 bp, Glycine max
gggccatcggcgatgggagacgacagtggcagcaaccggtcaaagccggagtggctgcagcagtatgatctaatagggaagattggagaaggcacctacggtctcgtcttcctcgctcgcatcaagtcttccaccaatcgcggaaaatccatcgccataaaaaaattcaagcaatccaaggatggcgatggtgtctctcccaccgccatacgtgaaatcatgttactcagggagataacgcacgagaatgttgtgaagcttgtgaatgttcacattaatcatatggacatgtctctctatctggcttttgattatgcagaacacgacctttttgaaataataagacatcatagggacaaagtcaatcaatccattaaccagtatactgttaaatcgttactctggcagttgctcaatggactaaactatctacacagtaatttgataatacatcgggacttaaagccatcaaatatattgggtatgggtgaaggagagg

SEQ ID NO: 218505 - DNA, 531 bp, Glycine max
gagaaataaaatgcttcagcactgtcactttaacacaatgcatgtgctccgacataatccacaaaggcttcttagttcgcccaatacatcatgtcatacgtgtgaaactttacatccgtgaaatcaagaacttgaaagatcaaaatccttctacttcaactatagacagaatgcccctacatgaaatcacagaaaaaatagaagaccaacttgaaatagctgtaacacccaacactaaggtttacaaagcgagaaacaaattttccactcatacagcacataaatgtaacgcttgatgagtcctcatgcgagagcacccacaatcctgattgttcttcagggataggactggtcagcacatatgaacaattttttgtaaagatttttgctttattttttctttctggctttgctgcatacaacctgtacataatgagcacaatcataagctattgagcacttggtgcatctctcatgcttaaattcagactgttgcgcatagtttttctaccaattccagcggtgcctttt

SEQ ID NO: 218506 - DNA, 508 bp, Glycine max
  unsure (1)..(508): unsure at all n locations
ctttctgaaacagagcatggctcctctcacattctccttcttcttcatccttatctcttacatttcttcatcatcagaagcgggatcaatcggaataaactatggaagaattgcgaacgacctacctacaccggcgaaagtggtggagcttcttaagagtcaggggctgaaccgtgtgaagctctacgacaccgacgccaccgtcttaaccgcgtttgccaactcaggaatgaaggtggtggttgccatgccaaacgagcttctcgccaacgccgccgcggaacagtccttcaccgacgcgtgggtccaagccaacatctccagctactaccccgccacgcaaatcgaagccatagccgtgggaaacgaagtgttcgtggacccgaacaacacgacaaagttcctcgtacccgccatgaagaacgttcacgcttctctagtcaaatacagcctggacaaaaacattaaaatctnctcacccatcgcactctcggcgctccaaaactcg

SEQ ID NO: 218507 - DNA, 409 bp, Glycine max
caaaagaaatgtattctatattattcttcattaaaaaatagagataattacaaataaatgagtcaaggaaatcaataaccccacaaagtaatcatcataatgatttattacaaacagtaacgctaacgcatatttctcaaagcctaaacacgtgctaccaatggaaaagctcctaaaaactcccgcgaaatccagataaatccaaatcaattaaggtttcaccaaaaacactccatctccatcatttcagtatcccgtgggaaattcgcagttaccatacttgggaggctgagtgacgacataagcagtgccaccaaaatagcacgtgccggatgcacgtgccatcttctgatagaaactgttgaaagcgaaggaagcatgtgcctccaaagtgttaggaacgtaacac

SEQ ID NO: 218508 - DNA, 442 bp, Glycine max
gtttcggctaggacttcgcctgctgggtctaggccgtcttctcccaggtcacataatgaaagtgaggggtacaacagtgctgatgagcagaagccttgcctggtttcatcttatgatgattttgaaagggagcggcagtttgaaattgatatcagaagggcaaaaggttatgaagtcaaaaaaatgatggaggatggaaattgtcttttccgagctgttgcagatcaggtgtatggggactctgaagtgtatgatttggtcagacagatgtgcatagattatatggagcgagagagagatcacttttctcagtttataactgaaggcttcacatcttactgcaagagaaaaagaagagataaggtctatggaaacaatgttgagatccaagccctgtgtgaaatgtataatcgtcccattaacatatactcctacacgacag

SEQ ID NO: 218509 - DNA, 428 bp, Glycine max
tttattttttttatatttttgttttttttttttttttttttttttttttttaaaaaataagaggggtattacatttggcaagggctaggggtactattttaaaaggttaaccttggtatttttttccatcaggtcaaaaattaggggagatgggggactaccattccttgggcattttgaccttaacaaactccttgttgtttatttgggcggcgccatcgacattagcctctggaatcattttagcaacctctctatcagggggcattcctcccaagggtggtcatcacatgggggggctcatgaacataaatgaacccattttggtccttggcaaacactcggaacgccttttttagcttcttctaagaatcaggggccttcatttttttagccatgggggtcaaaaacccagggaaggtaagggg

SEQ ID NO: 218510 - DNA, 509 bp, Glycine max
agccacttgatgtgcctattgctgataaagagttgaaaaagcgcgaaaagaaggatcttttagccgcacatgctgctgagcaggcaaagaaggaggctcttagggatgaccacgatgctttcactgtggtcattggaagccgggcttcggtgcttgatggaggagatgatgctgatgctaatgtcaaagatataacagtagaaaatttctccgtgtctgcacggggtaaagaacttctgaaaaatgcaacagtgaagatatctcacgggaagaggtatggtttggttgggcccaatggaaaaggaaagtccacgctgttgaaacttcttgcttggaggaagataccggtacctaagaatatcgatgtccttctggttgagcaggaggtagttggtgatgataaaacagctcttgaagctgttgtttcagctaatgacgaacttggtaaaattcgacaagagttgcatctctgcagaatgcagcttctgttgaagacaaagataatgatg

SEQ ID NO: 218511 - DNA, 412 bp, Glycine max
ggaaaaaatgggtgccaacttacatgggggatgcctttttagctggaatgtctacacctcagcgctctgaaagtatgaactttttctttgacaaatatattcataagaaaattacccttaaagagtttgtgaaacaatatgggataattcttcagaataggtatgacgaggaagccattgcagattttgatacattgcacaaacagccagcacttaaatctccttcaccttgggaaaaacaaatgtcaacagtttatacacatgcaatatttaagaaatttcaagttgaagttttgggtgtagctggctgtcaatctaggatagaggctggagatggcactattgcaaaatttatagttcaagattacgagaaggatgaagagtttttggtaacttggaatgagttgagctc

SEQ ID NO: 218512 - DNA, 397 bp, Glycine max
atctgattctgcttctgatcaaaccctctctatgatgggctcagataacatgatggaggaccctttttacaggatatgacagatcggtcatgatgagcacagggatgtgattaacacgaatgatcaggaactagctgttgtcctctatcccttgatggcctctgattacatgacatgcatgtgcatgtacgacaccgactatggacccgggaactatttatattatgatgtaagagactttatgaccctattatatcatgagaatcattgtgaccgctttctgcattaagaaccctattgaaaatcctaggcaagacgttatagctgattgtgtggtcgagtcaactggtgtattcactgacaaggacaaggctgctgctcacttgaagggtggtgc

SEQ ID NO: 218513 - DNA, 520 bp, Glycine max
atcaaaatatgttaacaatattatattattaacttaattataacaaagagacgtggaaaacaaaatgttgcttatactagatgattatgataacgaaacagaatagtcaatcgtcccttacgagaggaaaaacctataaggccgtctaccaactcaacatattgcactgtttttcaatgatatctctcacagcaacacaaagtgtttattccgaattcacactaaaataaactcgattaagataaaaatttggaacggtgtagcgatgatatccaagctcagactcaattctttaagccacggatgcaatgtggacaatcaaatcaatcacacgggaactgtaaccccattcgttgtcataccaggaaacaagttttacaaagttgtcattcaaagaaatttcggccttggcgtcaaatatgctagacctgttatcaccaacaaaatcagtagacacaacatcatcttctgtgtaacccaaaatacccttcaatttgccttttgattcttcttgatagca

SEQ ID NO: 218514 - DNA, 588 bp, Glycine max
ctctctcaccaaagccttcctagaacgaaataaaaaaagaagagcaattttccctcaccaaagaagaagaagcaaacaatggccgatcaacttaccgatgaacagatctccgagttcaaggaagccttcagcttgttcgacaaggacggcgatggttgcatcacaaccaaggagcttggaactgttatgcgttcattggggcaaaacccaactgaggcagagctccaggacatgatcaatgaagtggatgctgatgggaatggtaccattgacttccctgagttcctaaatctcatggccaggaagatgaaggacactgattctgaggaggagctgaaagaggcattccgggttttcgacaaggaccagaatgggttcatctctgctgctgagctccgccatgtgatgaccaacctcggggagaagcttaccgatgaagagggtgatgagatgattcgcgaggccgatgttgatggcgatggccaaataaactacgaggagttcgttaggtgatgatggccaagtgatcatcacattatggccacaaaaacctaaatgaagaaatgttgattaaaggaaacgacaaaa

SEQ ID NO: 218515 - DNA, 462 bp, Glycine max
tttttttttttttttttttttttttttttttttttttttttttttttttttttttttttttgggttggggaaaaaaaaagacgctttatatttattctttgaaaacgcaaatgttaaaaacaacctagggttttgaggggggaaatccttaattaccacttttaagctcatttttgaaacaaaatcctaattaaccgcgtttttgcttaagggcaaacaaaactaggtggcccccccacacacaattttccccagagatttggggccccacatacatgaatctattttgaaccagggggggttttattaaagcctttaacaaacacatattttttagaaatactaagttttcccccacattttcaaatttatttggaaccaaaaaggcttttttagagccccttgaaaaagggaaaaacaggattttttgggggccatactttttttggcaaatgggtggtt

SEQ ID NO: 218516 - DNA, 558 bp, Glycine max
gctacatgggcatatgaggttggtgcacaatcaatggtttgtccaatcattgttgaggatctcaatcctcctcgtcagatgctagtagagatgctttgtgaggaatgcggtttctttctggaaatagctgacttaatcagaggattaggtttaaccatcttgaagggagtcatggaagctcgcaatgacaagatctgggcacgctttgctgttgaggcaaacagggatgtaaccaggatggaaatatttatgtcactggttcgtcttttggatcaaacgatgaagggtggtgcatcttcgtcgaatgcaattgataacaacatgatgctgtatcattctttcccacaagctacccagataccagcaactggcaggcctagtagtttgcaatgaactacctacttatagtttcttggtctggatgctcttgggagaaagaaatcctctcttaagatgaatttaactttgtctaactactggttcatctcagtttggagggggatgagtttagttagtgaagaacttctcaagataaatatgctttgataatgatatgca

SEQ ID NO: 218517 - DNA, 517 bp, Glycine max
gaacttgaagctgaactaactcgtttaggaaagcctgtagcagctgatgctgggggaaagttgtatgcaatcatggaaatatgccgctcatttgatcaaatatttaaagaccatcttgatggcgtgcggcctggaggtgataaaatttataatgtctttgacaatcagctccccgctgctttaaaaaggttgcagtttgataagcagctttcaatggaaaatataaggaaacttattactgaagctgatgggtatcagcctcatcttatagctccagaacaaggatatcgtcgtctaattgaatcttctctaataactattaggggccctgctgaggcagctgttgatgcggttcactcgctgttaaaggacttggttcacaaagctatcagtgagactttggacttgaagcagtatcctggtctccgggttgaggttggggctgctgctgttgattcactagaaagaatgagggatgaaaagcaaagagcaacactgcagctagttgatatggagt

SEQ ID NO: 218518 - DNA, 543 bp, Glycine max
ataaagattattttcattgtgaacgcatcagaatctcatacaaataaaaatgggcagtggagatttggaaggtctgaaaaatgaaatatacggggacactcaattgtataacccaaaaaatcatttttttcccttttcagaatcggctcatctatttaagatgacaatacaagtggataagatgacaacaaaaaatgagtatgaataatgaactggaaatagggaaacaatgaataatgacactgctggctctcgtataaacgtgatctgacatacatatatttacttagaccaagcaactgcatctatttcagcttgtgcactccggtataactctagtttctttgcgagcgccactacgtcgttccataattgcaggatcctcatttaataacgatgacagacgcttggtctccattttgcctagctcggtgaaaaagtgatcacagtaacttcgttttgccttccgcacttgcaattgaacgatggactgggaaattgattccgcagtggtacccagaccttattgcctatgacaaaatt

SEQ ID NO: 218519 - DNA, 371 bp, Glycine max
accaaatcaaagcaagccaattggtctctctcttacaccatgagtgcatcaaccaaagcttggattgtggcatcaagcataggggcagtggaggccttgaaagaccaattaggtgtatgcagatggaactatgctttaaggtcactacaacaacatgcaaagaacaacatcagatcttatagtcaagctaggaaattgtcctctgcatcctctgctgcggtttccaacaaggtcaagagaaccaaagaagagcatatggggaaagtcatcgaattcaattgttggggtcctagaactgcaaagttttaattagttaatttttatcttaaggggttgctacgaatgagacggtgaaataaagactgcttttt

SEQ ID NO: 218520 - DNA, 586 bp, Glycine max
tttaattgcaattttggtgtttctactagttctgttgcttctgtgtgctcgtaagaggggtaattcaaatcagagaggaaatggtgtgggtcctgctcctgttggcagtagtcctccaaatcccggtgtaccaatcgactttccaaatgtcggagattcatttacctatcatcagttgctccaggcaacaggagatttcaatgatgcaaatcttatcaagcatggccacactggggatttcttcaatggtgttctggaaagtgggattcctattgttatcaaaaggatcgacacgcgctcagctaaaaaggaggcttacctgtcggaattggacttcttcaataaggtttctcatcaaagatttgttcctttgttaggtcattgctttgaaaatgagaatgagaagttcctggtttataaacgcacgccaaatggggacttgtctaattgcttgtactacaaaaacacatcctgagatggtacttcgcaatcattggattggataactaggttaaaaattgctactggagcagcagaggccctatcatatctacatcatgaatgtgttccaccgattgttcacaga

SEQ ID NO: 218521 - DNA, 488 bp, Glycine max
aagaaagtgacatttagaagaagcaaaaagaagtttattgagattcagaaatggaggtttcagcgctgagtaaaacctaaaaaaaagaaaaaaaatagtgaaaatggaatcgagcgttctggaatgtctgggcatggagataatcggcgtgatgagcccagtctcgatctgcatgttccttgtggtcctgttagtgtattctctctcctcgccgtccaccaccaccactatcgccaccgccgccaacctcgtctacgccgagaacccctccgacaccaccgcccagaagctcgagggcgccgtcctcaacgccgtggtcttcgtcgtcctcatcgcgctcgtcaccttcctcctcgtcctcctctactactacaactgcaccgccttcctcctccactacacccgcttctccgccttcttcgtcctcgccgccatgggcggatccatcctcctctccctcctccagcgcttttccctccccctcgacg

SEQ ID NO: 218522 - DNA, 423 bp, Glycine max
gtggtttcgcgtattgaccgtcggccgtgccttgtagtcgagcgccgggagctcctcgtcgcggctcgacgccaattccacgaggagcttgagcgggccgccgggggcgaggacggcgaccagatcgtagagcgcgagggcgacgaggagcgtccaggtggtccactcggggagcttggtgaaccacgcggcgacgatgatgccgaggcagacggtgtagcactggcggaggaggatcgggaggccgccggaggcgaagacggagaggactccgacgacggagaagttgaagaggaggaggaaggaggtgacggcgtcgagggggagggagaagcgctggaggaaggagaggaggatggatccgcccatggcggcgaggaccaagaatgcggtaaatcgggtgtagtggaggaggaaggccgt

SEQ ID NO: 218523 - DNA, 525 bp, Glycine max
caattcacaaccgaaacagtttccatctctctcacaaaatgacaacaatatcaaattgctcccttctcttcctcttcctcttcctctccaccctccacatagcttccaccctctcaacccccaccaacttcatcaagtcctcctgcagcaccacccagtacccagccctctgcatccagtccctctccgtctacgcctccaccatccagcaagacccccacgagctcgtccagacagccctctccctctccctcaaccacaccgaggccaccaaaaccttcgtcgcaaaatgcaacaaattcagaggcctcaaaccgagagaatacgctgccttgaaggactgcgctgaagaaatcagtgacagcgtcgaccggctcagccggtcgctgaaggaactcaaattgtgtaaggtgaagggtgaggacttcacgtggcacatcagcaacgttgagacgtgggtgagttcggctttgaccgatgagagcacttgcggcgatgggttcgccgggaaggcgctgaatggga

SEQ ID NO: 218524 - DNA, 485 bp, Glycine max
catacaaaaacagatctcatatttcacatttgatcagaagcaacacaggatccatatctctataaaaactcacaattacatacaccacacaaaacacaaaattaaccattaaccaaccacatagaactgtttgttctttttttttttcccctcaaaggaaaaaacgaaaacaaaaaacaaaaactttcttcccaactccccctagtgtggtgcagcatactgattaataagcgagagagcattgctagtaacctgagcaacattgaccattctagccctaatcgcctccttaatcttcccattcagcgccttcccggcgaacccatcgccgcaagtgctctcatgggtcaaagccgaactcacccacgtctcaacgttgctgatgtgccacgtgaagtcctcacccttcaccttacacaatttgagttccttcagcgaccggctgagccggtcgacgctgtcactgatttcttcagcgcagtcct

SEQ ID NO: 218525 - DNA, 533 bp, Glycine max
ctcgagccgaatcggctcgagcgcccgtcatcttgcttgccaataaccattgatgttggcacaaacaatgagaagttgctgaatgatgagttctacattgggcttaaacaaaagcgggcaactgggcaggaatatgcagagcttctagaggagttcatgcacgcagttaagcagaactatggggagaaagttctcatacagtttgaggatttcgccaatcataatgcatttgatctgctggaaaaatacagctcatctcatcttgtttttaatgatgatatacagggtacagcatctgtggtattagcaggattgcttgcatccctgaaattagttggtggaaccttagttgaccataccttcttattcctgggtgctggagaggctggaactggtatagctgagctgatagctcttgagatttcaaagcagactaaagctccagtggaagagacccgcaagaagatctggctcgtggactcaaagggacttattggtagctttcgtttggaattacttcagcagttcaaaaa

SEQ ID NO: 218526 - DNA, 406 bp, Glycine max
tcggcctttttgtattttatttttctgttttttttttttgctgagctcttataccttggaatttaaagataaataattatatttcttctttatacaaataaaaaccttgtaagaataagccccttttaaaagtctattttgggcttttccaaaaaatcttacaagcaattaattcaatctgccccctaaaagaattttttgggggattactgttgggggttcacctcacaatattcaaaaaacccaccggtggttttggttgcctgggctggccatgcaactttttgcatatttgacaagatcctttggtccaggcatattgataagccctacccaaattatttgccctagccgtgattttaccaacaatgtgggctgatttttttcggaagtttgagaatggggg

SEQ ID NO: 218527 - DNA, 491 bp, Glycine max
ggcattaaggaaattcgattgaaggatattcccagtttcgttaggaccacaaatccagatgagttcatgcttgatttcatacagtgggagtgtgggagggctcgaagagcttctgcaataattttgaacacgtttgatgccttagagcacgatgttttggaagcgttctcgtccattttgcctccagtttattccataggtcctttgaatttacacgtgaagcatgttgatgacaaagagttgaatgctattgggtctaatctttggaaggaggagtccaagtgcgtggagtggctcgacactaaacaacccagtagtgttgtttacgtgaattttgggagcatcgcggttatgacaagtgagcaattgattgagtttgcatggggacttgctaatagcaacaaaaactttttgtgggtcataagggcagatcttgtggcgggtgaaaatgctgttttacctccagagtttgtgaaacaaaccgaaaatag

SEQ ID NO: 218528 - DNA, 445 bp, Glycine max
cccactaaggaataattattttaaaaaaagtcttcacacaacaaaggagtaagttaaaagatttgagctcttctacccctaatatttaagacttttgcccaaaagaacatcacgaaccatgttgtccaaattagcaaatgaagatccaacagagcgaaaagcagcactttctgccaattccttccattggaaagcttttttcttcatctttttacccttttccccatccatcaactccctaacaagggtctttattttttccctcttaacatcttcaatctccaacccaatcccccaatccttgcaacaaaaccgacaattggtctgttgctctgcaaaaaaaggccaacaaataattggaacaccttcacacatacttttcaacgttgaattccaaccactgggtgtaaaaaaccccccaactgaagggtgagccaacacttgc

SEQ ID NO: 218529 - DNA, 271 bp, Glycine max
agggttttccaattcgcagagcaactcaacacaacgaaccaaaccaacaatgtcgcagccgcagcctcagtcgcagccgcaacacgggcaagcggcgctggagcaggtgcagtgcttcggtcgcaagaagacggcggtggccgtgacctactgcaagcgcgggcgcggcctcatcaagatcaacggctgccccatcgagctcgtcgagccggagatcctccgctttaaggccttcgagcccatcctcctgttgggaaagagccgtttcgcc

SEQ ID NO: 218530 - DNA, 521 bp, Glycine max
aacaatattaatccgtaccttcatattacctaaacagaaaaagttgaatcaaaacaagaatccataatccaaccattataaaaaaaacgatcaaaattataaaactaccaaaaccaccaacaaaagttttcattttttccacagcataaaacatgaaccgaaccaaaaacaaaaaaacacaaaaacaccaccattctccttcaacgggaagacttctggaacctcgcacgtgcgccacgcccaccaaacttcttgggctcgcagcgcctgggatccgcgacgagcaaggtacgatcgtacctcaccagaatgtccttgatctccttcttactctgttcatcaacggacttatggtagaacgcgacgagcgccttggcgatgctctggcgaatggcgtacatctgggaggtgtggccgccgcccttgacgcggatgcgcatgtcgacgccggcgaagcggttttttcccaacaggaggatgggctcgaagccttaaagcggaggatcttcgggtcgacgagc

SEQ ID NO: 218531 - DNA, 603 bp, Glycine max
  unsure (1)..(603): unsure at all n locations
agaacacttaccttaatttcgccaaatcaaccaaagacaaaaaaaaagaatccaaaggaacagaagagaaagcttgaagctatggggaacaccatgggaaggagtaaaaaggccaaggtgatgaaggtggatggagagacgttgaagctgaaaacaccagcgagagcaaacgacgtcgtaaaggactacccgggccacgtgcttctggactccgaagcggtgaaacatttcgggcttcgggccaaacctcttgagccgtaccaggaactgaagcccacaaagatttactttctcgttgagttacccaagattcagcccgaagaggaaaaaacggcgctaccgaggagggtgcgatccagtgggatacgcggcatgaacgcctccgataggctccagcttctcatgctctccaaacgctccgtttcggacctcccgctctccaggcagagccccaatctgggctctgatgggcccatcanggttaagatgaggctccccaaggcccatctgataagttgatggaagagagcaccgacggctcccaggtggccagaaaatataagttgtatatgggaaccaatgccgcgagggtgctgcgagttt

SEQ ID NO: 218532 - DNA, 551 bp, Glycine max
ctttatgaatcaattccattcgattttgttgacctactaaatactaaattgtttctctgatttttctcatgcgtgaaaaaacatgcagctattataagttacaaagcttttcccctaaagaaggaagtgaagaaattgatacaccttgttttccatgccatcgcattaatacttggaatagttggaatttatactgccttcaagtttcacaatgaaagtgggattgccaatctctacagcttgcattcatggcttggaattggggttattgtcctttatggcattcagtggatatatgggtttgtgatctttttcttccctggtgggactccagacattagacgcgcctcacttccttggcacgcgctatttgggctgtttgtatttgtcttggctgtgggcactgctgctcttgggtttctggagaagctcactttccttgagaactcaggattggacaaatatggttctgaggctttgcttgtaacttcactgccattatcacaatcttatttggtgcctttggtgtgttatctgctctagctgatgct

SEQ ID NO: 218533 - DNA, 505 bp, Glycine max
ggaaaagctgaggagagaaagcatggaggaatggtgcctcctagacaattcctggatttagttccgagtggtacgaccgaaatagatgatcaagtatcgaattcttctttgggtgaaaggactcgatcaaccacacctcccagctgcaataaaaatgatgataaggataagaaagagactactgatattccacactctggcaaattattgaaccatacgacggatccatccactagtccggaagccgctatgagaaaagctcgtgtctcagttcgtgcccgatcagaagcacccatgatcagtgatgggtgccaatggcgaaaatatggacaaaagatggctaagggaaacccttgtcctcgagcatactacagatgcaccatggcagttggttgcccagttcgcaaacaagttcaacgttgtgcggaggacagaacaattttgacaacaacgtacgaggggacccataaccatccactgccaccagctgcaatggctatggcat

SEQ ID NO: 218534 - DNA, 526 bp, Glycine max
aaagaaaggcagtacgtattatttcaattgttaaataagaaaaaaaatatgatatcaatcaggctaacaaaattaaacatgaaatcaaagacaaagaaacttcaaacttttgaattgaaacaccatggcgataaaccctatcactcccaggaaaggaagacacatatttcctttttctccatttctgcactttgtgtcgaacttgagtgacacaatttagtagaaagtggtatggttgaacctaatccttgtacttcatttcagataccaggaagccaggcatgtcaaacaaggcagagaacttttcaacatcagctttgagatcttcaatagccttgttgttgacgagacccttgttgaaatccttgataagtttgccatgctccttctggatctccagtgtgagagtcacagcaccgtgaaggaactcaccaatgtgctcaaagtctttttaaaccaacccctaaaatcatggcaggggccccaattcccactcccccggggccaggcactgttataccaaaac

SEQ ID NO: 218535 - DNA, 469 bp, Glycine max
ggtacatcccatgtctccgcaagtaatgtttcttatcgtgttacagtgcttttctttggtggtggtgatgatcatgaagcccttgcttatggagctcgtatggctgagcaccctggcatcagattgctggttattcgctttgtaggggaaccaatgaatggagagattgtaagagttgatgtgggtgactccactagcaccaaattaatctcacaggatgaggaattcctcgatgaaattaagacgaaaatagccaatgatgactccatcatctatgaagagaaagtagtaaaagatggtgcagaaacagttgctattatccgtgagttgaaaagctgcaatctgtttcttgtgggttcaaggccagccagtgaagttgccagtgctatgaaaagaagtggatgccctgaacttggacctgtgggtggtttgttggcatcacaagattaccccacaactgcatccgttt

SEQ ID NO: 218536 - DNA, 632 bp, Glycine max
gttctaagcaatgcaaactacaagagtgtggagcacagggtgctagtaaattcaaacaaagagagagtttccctagccttcttctacaatcccaaaagtgacatacccattgaaccagtaaaggaattggtaaagccagacaaacctgcactctacacgcccatgacctttgatgaatacaggctcttcattagattgagaggaccatgcggaaaatctcatgtggaatcgttaaaatctccaagatgatcgatatatcgttatcaacaaggacattgcttgcaatattatataattaatagtattgtaaatcctgttcctagatatgtacttgtctgaacaaattgcctaatagttaaaccacaaaagcaattggataatatagatatgaaattgatgtggaaaaactgtttatgttaatggatgaatttgggaggtccgcaaagatcattcctatagctttgtaattattagagatttgtgtccccacattcccaacagatgacggtgataagtgcaccataatcttaggggcaatatttgtatcatatagaaatagtatgtactgaattaattgatgatgcaatgcttgacaagcctgcttcaaattcaatgcactatattaattattg

SEQ ID NO: 218537 - DNA, 528 bp, Glycine max
cacattctatatataaaaaaacacacaattccgataacattattcccagccatcgcaagctgcatttggggatggtaatgggacaacagaaaatcgccctcgcccctccctcttcgtccttccgcctccgcagccgcagcctcaactccctccgcctccgccgcatcttcgacatgttcgacaagaacggcgacggcaccatcaccgtcacggagatcagccaggcgctgagcctcctcggcctggacgccgacgtggcggagctggagtccatgacgaaactctacataagacccggcaacgagggactcacgtacgaggatttcatggcgctgcacgagtcgctgggtgagacctactttgggttggtccaggacgaggaggagcagcagcaggattcggatctgtgggaggcgtttaaagttttcgacgagaacggcgacggttacatctccgccaaggagttgcagatggtgctggggaaacttggcttggtgaaggaaatttgtggacaatgtcataggatga

SEQ ID NO: 218538 - DNA, 546 bp, Glycine max
ctcgagccgtttttctctcattccattcacattctcaacccaacacacaacttccaaccatattctctcgccacttcctcacatggacgcaaagagaaccctagagctcacggttttatcgttggaggagctccacgtggactggaagcacgccgcggagagcctctacgtggtggtacgggcagagtccatcaccagctactccacgggcacggccaccgaaagcggtggcaacccgtcgtggaacgagaagctggtagttgacgtgcccgtgcatgcgaggtccatcacgctggaggtgaagtgcaaggacgcccccagcgtgaaggacctcggcatcgcgaggatagccatctcggatttcctcggtggcggcacgatggcgccggagcagtgtttgcaatttttgagttacaggttgagggattgggaagggaggcgcactggggtgattaatattttcgttagggttagggctacggagaaggcatgttcttggtccggggacgttgttattgtgcgtcccattttgtggaacaggtaaag

SEQ ID NO: 218539 - DNA, 443 bp, Glycine max
gaatataaatcttttaaaaatactctataaatgtagtgtgccgtccgaagacacatacaaggaaaaactcaaagaaagaatcatatgattcggtacataacttggtaaacttaagcaaaatgaaatccaatgccactgtaaattgaaataaccctaaggtgtgttcgctgcccatcttcgcaggataataatgtgcaccacaaacatgaaataaaaatcacttccacaacttccgcaatgacatgtttttttcagtctcctttttcatcaccttggccacagccatctcaaaatccttctgagttacgtgtaccctccgctcccttaatgcaaacattccagctttggtgcaaacagccttaagttcagcaccagatgctccattcatcttcttggtaatcttcttcagatcaatgccacgcattaaattcatttcttcttga

SEQ ID NO: 218540 - DNA, 617 bp, Glycine max
gcgtcttcttgttcctctcgcccagaatccgagatcaaccctgacccctaaggccaggggtttttctcggcttcttcagattcctgaaatggcgtctgtttcagctttagccaagtacaagctcgtcttcttgggtgaccaatccgtgggcaaaaccagcatcatcactcgcttcatgtacgataaattcgataacacctatcaggctacaattggtattgattttctatcaaaaactatgtatctcgaagatcgaactgttcgactgcagttgtgggatacagctggccaggaaagatttagaagtcttattccaagctacattagggactcatctgtagctgttattgtatatgatgttgcaagccggcagactttcctaaatactgcaaagtggattgaagaggtgcgaacagagagaggcagtgatgtcattattgttcttgttgggaacaaaactgatcttgtcgagaaaagacaagtctctatagaggaaggggaagcaaaagcacgtgagctcaatgtcatgttcattgaactagtgctaagctgggttaatataaaggcctatttcgacaaatgctgcgccctacctggaatggaacactttcttctgc

SEQ ID NO: 218541 - DNA, 549 bp, Glycine max
aatccagatgaacaagttaaattttaaacatatcacacgttttacagggtacaatgaacacaattcaattttgggttgggtacctttactacattatgccgttcaaaaaaaaaaaattcattagtacacattataggcaaaaaaccaactaacaacagaaattgtctagacagaacttttatcaacccctaccctgagccgcttatatattctttcatcttttcatataatgctgtagaagactatagaaaaacccgcataaaacaaaaagcatgacacaaaaaggtggaccgcacatgataaagtatacttaacaagcacattcacttgactgaggttgagactgagcactgccatttgtagactttaagtttacatcaaccatgtcttcttgttttgcagaagatagtgtttccattccaggtagtgctgcagcaatttttcgaaatagggcctttatattaaacccagccttagcactagttttaatgaacatgacattgagctcacgtgcttttgctttcccttcctctatagagacttgttttt

SEQ ID NO: 218542 - DNA, 589 bp, Glycine max
gtgggttctaccgaactccgagtgtgacccgatcgtacttaactacacttcaggaacgacgtcgtctcccaaaggcgttgtccactgccaccgtggaacgtttattgttgcagtggactctcttattgattgggcggttccgaagaacccggtttatctctggacgcttccgatgttccacgctaacggctggagcttcccgtatgggattgctgccgtgggtggaactaatatctgtgtccgcaagttcgacgctgagattgtttactctctcataaaacgccatcacgtgactcacatgtgcggcgcgccggtggtgctcaacatgttaaccaacgcgaactccccgttggagaaaccggttcagatcctcaccgccggagcgccgcctcctgcggcggtgctcttcagaacagaggctttggggtttgtcgtgagtcacgggtatggtttgactgagaccggaggattggtggtgtcatgcgcgtggaagggggagtggaacatgttgccggcgacggagagggctcggctgaggcgaggcaggggtgagaacggtgcaatggcggagtcgacgtggtggtcccac

SEQ ID NO: 218543 - DNA, 420 bp, Glycine max
cattccacgtaaagataagaagagttgaatttgggtacaatataataaacaattctccaccacacaataatctataatcaaaatacaccactaattaaactcttattatacataaactttactaggtgataatacaataggaacttgatgccaagcatgccataaactattggagagtaattcacattcgactttgcgtgaaggaccccatctccttggcgatttgtctcagcacaaacttctgtatcttccccgtagatgtcttaggaagctcgtctttgaaaacaaccgttttgggaaccatataatgcggcatgttgtccctacaatactcaattatgtccttctcagtgggtttctctttctcttttatcccttttttcaagctcacaaacgcgcacggcgtttctcccaatactc

SEQ ID NO: 218544 - DNA, 563 bp, Glycine max
  unsure (1)..(563): unsure at all n locations
gcgaggaagaaaaatgaaggttgtttacctcttcgttgtgctgatggctttggcatcatctgttgcctttgcttatgatccaagccccctgcaagacttttgtgtcgctatcaatgacaccaaagctggtggtctatacggtgtgttcgtgaatggaaaattttgcaaggatcctaagtttgcttatgctgatgatttcttctttggtggattgggacccggagacactgcaaacgcacaaggatcaaaggtgacagctgtcacagttaatgaaatattagggctcaacacacttggtatatccttggcacgcatagattttgcaccaaaaggtttgaaccctcctcacactcatcctcgagggacagagattctggtagtcttggaaggtaccctctacgttggttttgtcgcgtccaatcaaaacgacaaccggttattcaccaaggtgttgtacaagggtgatgtgtttgtgttccaatagggctgattcactttcagcanaacgtatgttatggaaatgccgtggccattgctgctcttagtagccaaaaccctggagt

SEQ ID NO: 218545 - DNA, 399 bp, Glycine max
acttaacagtatcaatattgatatatataagatcttgtaaagacacatatgctagccacgttactgggtcctttattacacttacaagttcaaattcacacaaaacaactaagcatatttttgcagaaatggcttgggaagcgaaattgagaaaattatttatccaaggtccaagccagagatgggatcactatttaattatgttccctgttaactttgttgttggatccgaattgcttctgaagggagacgactatgtttttgcccacttgaaaagctttggcgagaacttcatcagagataggaggtttagatccaaaaacagcatttgcaattgtaataactccagggttttggctactaagagcagtaaaggccacggcattttcataacctacg

SEQ ID NO: 218546 - DNA, 461 bp, Glycine max
aattcgcatgatagggagtttcatgtggcgtctctgccgtacaagccggacttcaaggttatgccggaggggtgggatggcattaccaaggatgtggatgaggtgcattatgagatctccatgaaggaggatgagatgctctatcgggagtttgtcgagaagatgaacttcaataaaaagaaaatggctggagaggtaaaatgccataagtatagtcgacgacgcccttcagatggatggacttttacagtagagaaattgggacatcagggaaagcgtggaggtggtggtggctggaagtttgctagcatgccagatggatcaagccgaccactgaatgatatggagaaaatgtatgtgaagcgagagacaccacgccggcgacgcaagattcttacttgattacttgatttttatttttggaaagtttgattaactgttaaaattagattttttaccca

SEQ ID NO: 218547 - DNA, 619 bp, Glycine max
ggaagcatcttgaggatgtcttcgagaaggacagtggagtagctcctggcatacttcgactcttcttccatgactgctttcctaatggatgcgatgcgtctatattgttgaatggagacggtgacgagaagcaacaccgtgctaactttggtttaaggcaagaggccattgacgccattgaaaaccttcgggttctcatttacaagcagtgtctaccagttgtctcatgctcagacatccttgttatcgcagcacgtgaagctgttcgccaattaggaggccctgattttgacgtgccactgggaagaaaagacggtctaggaccaaacgccaccgcgccggacaacctaccggcaccattcttccgaaccgacgatcttctcagaggattcggaaatagaggtttcgatgccaccgatgtggtcgctctctccggcgcacacacctacggtcgtgcccactgtccctccctagtgaacagaaccatcgaaacggacccaccaatcgacccaaacttcaacaacaatttgatagctacgtgtcccaatgccgagtcccccaacaccgttaatttggacgtgagaacccccgtgaagttcgacaacatgtattacatcaa

SEQ ID NO: 218548 - DNA, 421 bp, Glycine max
cgcagagcaaagcagagccaagaagaagaagaagaaaaccaacataatcaacaacaacaacaacaaaaagcttgcaaattagaagaatcttcagttaaaagggaagaagaacacacaagaagaaagagaagaagaaacgcgcgcgaatgaagggagaattagagttgccacctgggttcagatttcaccccactgatgaagaattggtgaatcactacttgtgtaggaagtgcgctggtcaaccaatcgcggttcccgtcatcaaagaggtcgatttgtacaagtttgatccatggcagcttccagaaattggtttttacggcgagaaagaatggtacttcttttctcctcgggaccggaaatacccgaacggttcacggacgaaccgcgccgccgggagcggctattggaaagccacccg

SEQ ID NO: 218549 - DNA, 431 bp, Glycine max
ggagacgcaaaggcagtggctcacgtggatttcgaccggctgccctgaacaaggtccctgaacaaccaagcgaatctccgaaagaggatgactatgattatctcaaggaaggaaggaagcagagtgaagtaaagttcaaaaaggccctttcacgggtgaagtccatggatcaacatccagaggcacgggctcaataccggcggctgctaaatgtagatgaggacttccgtcaaaccaagggaggtaatttgaatttgataaattcggaagagacagctgatggtgtggaggatttgattgatattgacatgcttttagatgatgaaaatttcttacctatagcattcgatagattctctgctgctgctccacccacccccggtaaatagatggccagttggtattatttggcactggagagatcctaacat

SEQ ID NO: 218550 - DNA, 550 bp, Glycine max
atcgacactagaacaatggcagataactccattaccttattttctccatacaagatggggaaattcaacctctctcatagggtggtattggctcccatgaccagatgcagagccctcaatgggattccattgccagcgcatgctcaatactatactcaaagatcaacactaggtggattcctcatcactgaaggcaccttgatctctcccacttcttctggatttcctcatgttcccgggatatattcagatgaacaagtagaggcatggagaaatgtagtggacgccgtgcatgccaaaggcagcattatcttctgtcaactctggcatgttggccgtgcttcacatccagtgtatcagcctggtggggctgcacccatttcgtccaccagcaaacccatatcagacaagtggaaaattctgatgcccgatggctcccatggcttctacccagagcctcatgctcttaccacctctgagatatctgaaatagtgcaccattatcgccaagcagctattaatgcaattcgagcaggttttgatggaatcg

SEQ ID NO: 218551 - DNA, 428 bp, Glycine max
cagggcaaatagcttatgttattttattctaaatgaaataccgaatacaaatgggaatgaaattaaaatgtgcatactggcataagatctaaacatcctaacaagtatacgagtcacctgatttgcttcttttaaactcaactaaagagttttggatgttatgaacattatatagaaagccaaatggacattaaaaatttaaaattaagggcgtacgtgcacttagatagttacttaatttgtttaggttgttccgttgaggaaaggataatccgtgtagcctataacaggatcttgagtgtaaaatgtgttcctgttatactttgtgagaggggcatgaagcttgagccttaaaaccaagtttggattggtgatgaaaagacgacctttggaaaccaagttagcttggtcttgagcaacagcttcca

SEQ ID NO: 218552 - DNA, 580 bp, Glycine max
ctctcttcttcccttctttgacccaccctcctccttctccttcaatgtcttttgcactcctcaatccattcccacactctttcccctgagattctcccccaattcccaccactccaaacaaaccctctccctctttttcccttcctagggtgcagaaaagatgaagtcctcgctcagcaagttgaagaaaattgcacttcacaagaccgtctccaaggacaaaaaggactttccccccaccgttaaattcgacgaactcgccctcgctgccaagcaggacatgcaagacatgagagattgctacgatagcctgcttgctgcagcggctgctacgcaaaacagtgctcacgaatttgctgagtcactgcaggacatgggtacttgcctactggagaaaactgccttaaatgatgatgaagaaagtggtaaagttttggggatgcttggaagtgtgcagcttgaacttcagaagctcgttgatagctatcgttctcacatagtactgacaataaccaatccatcagagtctcttcttaatgagctaagaactgtgaggacatgaagaagcatgtgatgaaaa

SEQ ID NO: 218553 - DNA, 364 bp, Glycine max
acggagatatagaccaagtattgcacgataccgaccacccaagggtcacaagggaacactgattacctctttattgatacaaaatactcgcttaactgatgcactctctggctcttaaattgccgtatcacattttgatagtttgcaactgttgatgaaatcaaatgctgaggaaatcatcaagccaaggcaatatctagcattaactgatgagggaatgccacaacacaatttgccattcatgaatgttaccctctacatccagtataatgtggtaaagccctactcagggtttgtgttccctgaccaatgccagttataggaaaaggtgctgcctcagaaaagcagtacgcacaattcacat

SEQ ID NO: 218554 - DNA, 572 bp, Glycine max
aggagggcaggaggcatgcaactgggatatgcaatcattattgcgcgccttataccaaagcattcaattttcatatacttgaaatctgccaagaactgtaaactaaataacattaccagccaaaacctaaaggtaaatttatcacgcagttataactgcattatccaaacaaaagataaaccaagcagaaattatagaacctctactaccataaattgcactactgttgagcacattgcactcggtgaccagatggctcatcatcatcttcgtcgtatgcctcgcggtgttgctgttgctgctttcgtctcatctcctccttaaagttgacatcatgcaaagtggtctcctcacaatcatccagctccatatctgagacgtgcttgctgctcttctgaggcaacaccttttccaataactggcattggtcaggggaaagaaaccctgagtcggggaaatcaacattaaattggatgtaaaggcgacccttcatgaatggcctattgtgttgtggcattccctcatcatttaatgcttatattgacctggcttgatgacttcccaggatttga

SEQ ID NO: 218555 - DNA, 582 bp, Glycine max
  unsure (1)..(582): unsure at all n locations
ctcagaacctgattaaggagagtatggcacagtttagtggcaaaactttggtgcagtggttggtagcaacactgctgattgccttgttgggtggtgcacaagctgttgtgttatgtaacatcgactcaagtcaactaaacttgtgtcgtgctgcagttactggtcaaaaccctccaccaccagatgagaaatgttgtgcagttattcgccaagccaatttaccttgcctctgcagatacaagtctattcttcctttaattggaataaaacccgaaaaggctttggccttgcctggtaaatgtggtctccaatcccctcctaattgttgagtgtagtgaagcaattaatgaaggtcttgttcattacaagcacttagtgttcaggtgtttcattaacactgaagatgcttttatgttttatggaagcatttatgtccctcgaataaagatgcagtttattttaatcagtgttttatgcctaatttgcaagcagatgtgtgtggtgtattaaatagtgtctgatgttgtatacaagatatctctacttctcaatgagacacnacaagtataattaatatggata

SEQ ID NO: 218556 - DNA, 537 bp, Glycine max
atttttgcgaaccccaagttgaatgaagctgcgatgggaaactcgcatgctaaaaagcgtgacactcaattttccagaaacgttgttgaagggagagttccctctccgaaaaacaaaaccttgtcgccgtcaccgtcgctagaaccaccactaccacgagaaccaccaccaccagcagctatgtctttgaataagggttcggggaaactgtctgccaaagagaaatatgctctgattcccgataacttcaccaccctagaacaggttacaattgccttgaggaaggaaggtttagaatcatcaaatcttgtccttggaattgatttcacaaaaagcaatgaatggactggaagtgtctcattcaacaatagaagcctgcatgctattggaagtacacctaacccctatgagaaagccatctctattattggcaagactctggctccttttgatgatgacaacttgattccttgttatggctctggtgatgccaccactcatgatcaagaagtgtttagctttcacagtgataattca

SEQ ID NO: 218557 - DNA, 566 bp, Glycine max
ggaagtcctccccagccacagtccctcttcgaacgaccccttcgatttcaatcgtgcaaggatttccccctatctcagcgctccttcttctcccaagcgttttggccaattttattacctaagcgccccctcaagcccttctaaagattttgatcttgcggctcacgatgatgatgccttcgcctttttcgttactggggaatccaagagccctcgatccgcggcagagcttttcgacggcggcaaaatcaagccgctgagcgaggatgattcctcggagtctgctaaaagcccacttctccctgccaaacgatcttccatagcccaaggcaagaaggccattcgcgaagccttctcgacgagaaagaagaaagaagagggagatttaagtgaagaagaacaagagacacgagggagagataggactgcgagttctagtagggtcacgcgttctctctctccttgtaacagaatatctcactacacgtgggacgaggaacgcaaccaatcgcagagcaacaaagccgactcgctttctagactccaggagatggagctcactgact

SEQ ID NO: 218558 - DNA, 501 bp, Glycine max
gaagaaaagatggtagtatattaaaatttaaagaaaagaatacaatttgctgacgcaaagaaaaaaggaattggattgatagcggtggttgcaaaagcacgtgatgatgaatcattttgatccgaagccagccaaccttcccaagatcccctgtttgtatggcaaaaaggttctctttttcaaatcctctgtttccgctttctttctggcgtagtgcaattcatgcgcggagaggggttcctttctcctagtctttgggcctgggttggaagcttttgggtcttcgggcttcttgtagaaagtggggaactttctcaaggggttcttgctggaacctcttccttccgaggcgctgcggaacagcaaaaagtcagtgagcctccatctcctggaagtcttaaaaagcgagtcggctttgttgctctgcgattggttgcgttcctcgtcccacgtgtagtgagatattttgttaccaggagagagagaacgcgtgaccctact

SEQ ID NO: 218559 - DNA, 404 bp, Glycine max
gaagcttgcaattaacatggttctgctagagaagctctgggatgatgttgaggctgggcgtcaacctgagcgcggactaggcgagctcacaaaactcaccaccctcaacactattgatgaaggagaaagtagcacgctgcagaagacgatgccacgccggtggccactacacctacgagggcgtcgtcgacgtctacgtcgcctgtgtcaccaccggctgcaccacgccaccggaaagatcgcttggcaccacgtgagcaattctcctcacaaataccacactgtgctcagatgttagaccaaacacttctcaacactaccaactggatatcactcggctgaacgaccaggatgaccacagggccggtccgaacaaactgaacggatcagctctgatgaccatt

SEQ ID NO: 218560 - DNA, 560 bp, Glycine max
ctgttattgtaggctcaatttttttggggctggtggtcattgttgtctttaagatagcactctattttagacagaaagaagacgaccaagcaagagtggccaagtttttagaggattacagggcagaaaagcctgcaagatttacctatgctgatttgaaaagaatcaccggtggctttaaagaaaagttaggggaaggagctcacggggctgtattcagaggaaaactttcaaatgagattctagtggctgtgaagatcctcaataatacagagggagaagggaaggagttcattaatgaagtgggaatcatgggaaaaattcatcacatcaacgtggttcgtttgcttggcttctgtgcagaaggatttcatcgtgctcttgtctacaatttgtttccaaacggatccttacaacgaattatagttccaccggacgaacaggaccatttccttggctgggagaagctgcaacagattgctcttggtatagctaaagggattgagtatcttcatcaaggttgtaatcaacccatattattttgacatcatcctcacaat

SEQ ID NO: 218561 - DNA, 492 bp, Glycine max
aatatcaacttcatcctcaacatggatatgtacatctccatcaatcaggttatggatccaatccggatacaaaacatggaaattttgggcagaagacatgtctacattctttctttctccaaccatttctaacaataacattccataactgtaaatatcagacttataagacacattcccaaagtttctggagaaaacttcaggtgcaatgtatcccacggttcctcttgcagctgtcatggacaccaaactaggattcttggaacacaatttggctaagccaaaatcagaaatttttggagtgaagttgtcatcaagtagcacattgtgaggattgatgtcaaaatgaataatgggttgattacaaccttgatgaagaaactcaatccctttagctataccaagagcaatctgttgcagcttctcccaagcaaggaaatggttcttgtcgtccggaggaactataattcgttgaaagaatccctttggaaa

SEQ ID NO: 218562 - DNA, 374 bp, Glycine max
gcgaaatacgaagaaagacgataggaaatgaaacgtaatacaacaacatagaagtcgaaaatatgaagaaagaacaaaaaaacagaaaagagaaaaaaaaattaaaaaaaaaaaagggggttagttgatgcagtcaggaaacgaaggaagaagaaagaaaagagagaagaaagaaagagacgaacataaaaaataaagagaaaaaaagaaagaaaagaaaaaaagaaagaaaagagaaaaaagaaaagaaaaaaagaaaaaaagagaaaacgaagaaaaccagaaaaaaaaagaagaaaagacaaaaaaaaagaaaaaagagagagaaaaaaaaataagaggagaaagaagaagagagaaggaagaaagaaaaa

SEQ ID NO: 218563 - DNA, 466 bp, Glycine max
ggaaaaaatgggtgccaacttacatgtgggaagcctttttagctggaatgtctacagggcagcgctctgaaagtatgaactttttctttgacaaatatattcataagaaaattacccttaaagagtttgtgaaacaatatgggataattcttcagaatagcgtatgacgaggaagccattgcagattttgatacattgcacaaacagccagcacttaaatttcctttaccttgggaaaaacaaatgtcaacagtttatacagaggcgatatttaagaaatttcaagttgaaattttgggtgaaacttcatgtcaaaacgtgatagaggctggtgatggcactattgcaaaatttatagttcaagattaccagaagggatgaatagtttttggtgaacttggaaatgagttgtgccatctaggcccctagcatagatgcaatgatttgatattaaagggttttcttt

SEQ ID NO: 218564 - DNA, 411 bp, Glycine max
tctgactcctatagtttcctctgctaattccatatccccgttttccttcactcttgaaccccgattcatttccaccagcacaagaagcatggctgcaatatcaataccttctcacatgaaagcttggacatactctgagtatggaaaatccaaggaagttctcaagtttaatcagagtgtggctttgcctgaggtgaaggaagaccaggtcctcatcaaggtcgctgctgcttcccttaaccccattgatcataagagaatggaaggctatttcaagaacagcgactcccctttacctactgctccgggttatgatgttgctggagtggtggttaaagtgggaagtgaagtgaagaaatttaaggttggggatgaagtttatggtgatatcaatgggaaagctttggaata

SEQ ID NO: 218565 - DNA, 559 bp, Glycine max
aatattaaactacacttttttacattgcattgcaattctaaacaaacccctcaatttccgaacgtgggtggacctaacattttccatttttaatgaacaaacacaaagcaaagcctccaaaatatgacttattcaacccttcccaatgtcgtcataactaatagattttttttttcttacacacgctcgaaataggttcgtatcaacggcccacgacggacggtcctgatcaactcaccctaatcgcttcgatcatcatatcaacggtgcagattaaatcctccgtagcttctcgcctttgatcacgggattcgcccgtgctatctactttctccccaccgccttgaaatcgaagccacacgcgtgtttctcggggtaccggtgagtcccacaaaacgtggttccgcacctgcacttaaacccagttaatcccacgcgctttctacacgcgccgcaccggtttctctgaaccggtgcggccacatttggcgaactcaccaccgacggttgagggagggattcaacccgccgccggaagaaaatccaccgcgggaggcaa

SEQ ID NO: 218566 - DNA, 594 bp, Glycine max
gtcgtttcggtgaataagtgtcgtttaaagatgcagagtctgcaacagagggcttccgaatggagcggtgtttccatagacgacgctttcggcatcgacgacaccaatctcttccagaaactcggcctccaaaccttcattaacctctccaccaatttctacaacagggtttacgatgacgaggaagaatggtttcgttcaatattcgcgaattctgagaaggagaatgccattcaaaaccaatacgagttcttcgtgcagcgaatgggtggtcctcctctcttttctcagagaagaggacatcctgctctaattgctcgacatcgaccatttcctgtcacgcatcaagctgcagagaggtggttacatcacatgcaacatgcattagacagtactacagatatagatgatgactcaaagaccaaaatgatgaactttttcaggcacactgcatattttttggtggctggagatgagctaaagaatcaaaaccaacatattccatgcatacatgcagcagccaaaaaggatgattcttgattcataaaactgtttcaattttctttaatttattgcctttatccataaaacttt

SEQ ID NO: 218567 - DNA, 397 bp, Glycine max
ttttttttttttttttttttttttttttttttttttttttttttttctagaggagtccaatttaaaggccattcaagaatgctattcgttttttttttttttttttggcaaaacaccttttgtatttttttaggggttttttaagattttttgctaacaataataaaccctgtcttactaaccttttggtttcaaagtcggcatgtttgtaatggggcttctgtttaatcccccccacatttggacaatgcttttactctgatacaaagttttttgggttaaggcttttaatttaagaaaattgaaacagtttttgatataagaattatcctttttggctgctgcatgtttgcttgggatttgttggttttgatttttttgcctatctctcgccccc

SEQ ID NO: 218568 - DNA, 558 bp, Glycine max
acatggttgatctagattggcaaacaaagatggttcactccaacatgcctccaaaggcccccaaactctctctcccggataataacattccaatcccccttcgccagaacgacatcaccgcagcgtcgtctccaatctgcgctgcctacgacaactacctccgcctccctgagctcagagccctctgggcctccaacgacttccctaattgggccaacgagcccatcttaaagcccaccttacacgccctcgaaatcaccttccgcttactcgcaaccgttttatccgacccgaggccgtacataaacaagcgcgagtggacccggcgggtggagtctctcgccacggcccaaattcagatcatagctatgctgtgtgaagatgaagaagaaaaccccgagacacgtggcacgacgccaccggtgagtgacattaacggcttcatcgctcatagcagaagctacagcgaggagagcctgctcccgcgcctcgccacgtggcacaaatccaaggacgtggcgcggagaatcctcgattcggtagagtaccagatgatga

SEQ ID NO: 218569 - DNA, 463 bp, Glycine max
gatccaaaagaatagtcaaataaatattattttacagacaaagatttgtttacaccaacctattacaaaaatttagcccttttttttttctttttgttttcccgtttgtgtgagtaagtatatatgactaggaattaattgattaattttttaattaactagcagggaaccccattttgattattattttcccaataataagcgagaaaggtcttggcagcatctaagctagggaaataagtgggttcaaggaatatctgagtgaacccattatcggcctgggagcttcctatcataaccggcacaacctgcttataggcgttgaagaaccttttcatcgtcacctcaatcgcctgcatcccctgcaaaacatgaaccttctcgaacccgttccttttctttttctccgggtaaaccttcatcgccgccttcattatcccgggcccacccgtggggtccacct

SEQ ID NO: 218570 - DNA, 620 bp, Glycine max
gacaacccttctcctacctccatggctaatttcataactttcttcattcccctagccctaaccctccttttctcctccctcgtcactgccagttaccatcaaagcatctctccaagccttctacgttctcgtgagaagctcacgcaccttcgcttctatttccatgaaatttttactagcgacaaaccctctaatctcgtgatcgacccccccaaggtggtagccgactctccccttccatttgggtcccaagtggtgatcgaggacccattaacaattgggcctgatgtcgagtccaaacagataggtaaggcccaagggttttacctatccgcaacccaaaggcccggtttggagttggagatagtcatggggatggccttgaccttcttagaaggcgaatttaacggtagcagtttaagtgtgttggggagaaacaaaatcttcaatgaggtgagggagttgcctattattggtggcacgggtgagtttcgcttcgcacgtggctatatcctagctaggagtgtcaaggtcgattaccataaggggatgctaccgtggaatacaacgcttatgtgtatcaattatctttcactagctcttcgctcacgagattttta

SEQ ID NO: 218571 - DNA, 553 bp, Glycine max
ggacccttggactgcgtgtggaagatgacaaaacaaccaaacaagcaattgttgaaggctgtgggggattgtttcccactagtaaggaatctaaagatgaaatcaatttattccttggaaatgctggtactgcaatgcgtcctttgacagcagctgtggttgctgcaggtggaaatgcaagctacgtacttgatggggtgccccgaatgagagagaggccaattggggatttggttgctggtcttaagcaacttggtgcagatgttgattgctttcttggcacaaactgtccacctgttcgtgtaaatgggaagggaggacttcctggcggaaaggtgaaactgtctggatcagttagcagtcaatacttgactgctttgcttatggcagctcctttagctcttggtgatgtggaaattgagattgttgataaactgatttctgttccatatgttgaaatgactctgaagttgatggagcgttttggagtttctgtggaacacagtggtaattgggataggctcttggtccatggaggtcaaaagtacaagtc

SEQ ID NO: 218572 - DNA, 448 bp, Glycine max
gagtagagccaagtcggtactgaaaattaaattactttgatacaacagaaccaatggctcttttaaacaatacaaattatctcaagtccttataaaggaatgtttataaacaaaagcaagccatatactcactgctttgtgagtatttatatatatctctctctcttccctactcaatgtacaaaatgcttagtgctttgttaacctctcaaggacttcaaagtagtcaggaaatgtcttcctggtgcaaccaggatccttgatggttactggaacatccccacatgcagcatgagagaatgccatggccattctgtggtcatcatatgtgtctatagctgcgacattcaatttctcaggtggagtaatcacacagtaatcaggaccttttttaactgttgctcctagctttctgagttctgtgcagattgctatcatcctctcagtc

SEQ ID NO: 218573 - DNA, 437 bp, Glycine max
aaacagtagtggagagagggagagaaaccaaagaacaagattgaccatggcttcatcaatgaggatctgaaggctgctctctcgttctttgctttctgcttccactactcctttgatctctagacgtggaagtggtgctattggtgcagggctcataaaattcagcactgctgctgcacttgaagaaccaatcaaaccaccagtgtaagtagaccacacccagctcttaatctatggaaaagtcgtggatgctgctactggccaaactattccaacgctggaccccaagacaggagatgtgacttctcatgttgctgagggcgaccatgaagatgttgatcgagcagatgcagctgctctcatagccttcgaccatggacctttgccaaagatgacacgctatgaaagacacaagacattgctgcgagccgctgatc

SEQ ID NO: 218574 - DNA, 474 bp, Glycine max
gaaaaagaaaatagatcatattcatcattatcagatactttgaatggaataaacccaatttaattatctttattattggagcctatttattaatctttttcatcaaataaatctaaagctaatgatgttcaaagccaagcagggttcttcaaggatgtaacaacagccttcacttgcaagtagttcttgagactgtattctcctttttctcttccttggccactcattttgtaccctccaaagggaattgctgcatcaaatgtatcaaagcagttaatccacactgttccaactcgcaatgctctattcaaagtgttagctgtgttaatgttttttgtgaacacccctgctgcaaggccatagtgtgtgttatttgctctttgaatcacatcatcaaggtccttgaattttaatatggtttgcactggaccaaagatctctttctttgcaatcagcatggcttcctaacatttg

SEQ ID NO: 218575 - DNA, 365 bp, Glycine max
aggagttgctgagtaagacccatctttttcccatggaggtcggatttggattgagggcgagccttatgctcttaatgggctagacataacggatgccatcttgccctgggtgcaagactatgtctgattctacttcgagtctaatgaggaactgcctaagaccctggactcaaactagttggaaagaacttgacgaggagagagcggatgatgtgaaagataaccaatgagtggccaaagatgcttactcgaggggacttggcttaagctgacgatctcctaaaaccgatcgcgtcttcccttaatgctgccgactactctagtcagaaggcatgttgatgtgttctccagagcagggccactat

SEQ ID NO: 218576 - DNA, 422 bp, Glycine max
cggctcgaggtgatttggagtttggagcgactgaactaatcattaatttgcactcgctgtttcagcttcatcacccttcttttgcatcatttatatctcttgagaaatggcacaagaaacctttctattcacatctgaatctgtaaacgagggtcaccccgacaagctgtgcgaccagatctctgatgcagtacttgatgcgtgccttgaacaggaccctgacagcaaggttgcctgtgagacatgcaccaagaccaacatggtcatggtcttcggagagatcacaaccaaggccaacgtagactatgaaaagattgtccgcgacacatgccgcgaaattggattcatctctgatgatgttggtcttgatgctgacaaatgcaaggtgttggtcaacattgagcaacagagccccgatatcg

SEQ ID NO: 218577 - DNA, 512 bp, Glycine max
gggacaaaattttgataaaattttcattgcatcaacacagtaacattgcatagccaaacaataaattgtgagtatagggagaaaaaaaaaaaacgaacagtttaggtattgatgagatggcattagacattgaatggagtagtagtagaagtagtcatgaaacacgcatattattcatccacacccagcaagacatccactgaagggagtgattaacttaacaacactcttaagcttgaggcttctctgacttgagtggcttaacaacttcccaggggaagactgcatcattccttccaaagtgcccataagcatctgtcttgaggaacctatgaccacccctcttaaggtccaagttaatggtgatcattccaggtgtgaagtcgaaattctcctttacaatttgcagaaattccttgtcaggaatctttccagttccataagtggtcacaaacaactgacaagggctcaaggacaccaatggcataggaaacttgcacaatgcacctttt

SEQ ID NO: 218578 - DNA, 452 bp, Glycine max
ctcgagccgaatcggctcgagctcatgagccaggagattcaagagagaaaagaagcaattagtgataataagaaagaataccctgttgatatatcactgccagacataaacaacggtgtatatggaacagatgattttaggatgtacaacttcaaggtgaagccttgctcaagggcttactcccatgactggaccgagtgtccattcgttcacccaggggagaacgctaggaggagagacccacggaaatacccttacagctgtgttccttgcccagagttccgcaaagggacctgccagaagggtgattcctgtgagtatgctcatggtgtttttgagtcctggctgcatactgcccaataccggacaaggctttgcaaggatgagactggctgcgctagaaaagtctgcttctttgcccacaaacctgaagagctacgccctgtctatgc

SEQ ID NO: 218579 - DNA, 503 bp, Glycine max
ccatttctagagagagaaactcgcagtcgcagacatgtcttccttcgatgccttcgccgacgacttgaacgtcaactcttcttccactcgccagcacgacgatgacgaggacaacttctctggctacggcggctactcctccttcaccggaggattctccgccgacggagatgtcgccgtcgatcactccgccgccgcgtcgccggagatctacggcttcactgattcgaatcccgcttactctcagtctcccttcgaatcggccaccgtagagaacgaaaacggaaacggatacggcgacggcgacggtgtttttgtctccgacggtccggtgcttcctccgccgacggagatggagccggaggaaggttacgctcttcgcgagtggcgccgtcaaaatgccattcagctagaggagaaggagaaaaggggaaaagaaatgagattgaagattattgaagaagctgaggagtataaggtggttctctatgagaagaggaagc

SEQ ID NO: 218580 - DNA, 445 bp, Glycine max
gggttttagcgcagcttcttctagatttaaggaagatgggtaaggaaaaggttcacatcagtattgtggtcattggccatgtcgactctgggaaatccactaccactggtcacctgatttacaagcttggaggcattgacaagcgtgttattgagaggtttgagaaggaagctgctgagatgaacaagaggtctttcaagtatgcctgggtgctggacaaacttaaggctgagcgtgaaagaggaatcaccattgatattgctttgtggaagtttgaaacaacaaagtattattgcacagttattgatgcgcctggacatagggatttcattaagaatatgattactgggacatcccaagctgactgtgctgttcttatcattgattccaccactggtggttttgaagctggtatttccaaggatggacagactcgtgaacatgc

SEQ ID NO: 218581 - DNA, 481 bp, Glycine max
ataaagaaaaagcaaaccaagccaaaaattgaacactacaaatagaaagttgacatttaataaaccaaagcaacacaacgcagcaaagtcctgaaactcgctgcgcttaacaaaaatgtaatcaggggttccgacaaacacaacacattaaaacacagattaataaaagcaattttgccaccgtagatcaagaacccagttctgggaacaacagttgcgagatgatggtggagacttcaaactttgtccgaaaaacaagctacctagaaaagaagacacaagagttcagaaaagaaaccaacatttattgtaaccaacatcccctgatgaaccagcccgcacgattcacttcttcttctgggcagccttggtgaccttggctccggtaggatccttcttctcaacgttcttgatgactcccacagcaacagtttgacgcatgtccctaacagcaaacctaccaagtggaggatactcggag

SEQ ID NO: 218582 - DNA, 464 bp, Glycine max
tttctaatagattatcctaagtctttgggaatagtgctgcaatggcttcaagtcaggaggaggtgacccttttgggagctactggaagcccatttgtgtgcagggttcatattgccctcaagttgaagggagttcaatacaaatatgcggaataaaatcaggggaacatgagtgaactgcttctaaaatacaacccagttcacaagagggttccagtgtttattcacagtgagaagcccataggagagtctcttgtgattgttgaatacattgatgagacatggaagaacaaccacatcttgccttctgatccttaccaaagagcctggcttcgtttctggtccaaattcattgatgatgaggtaattcaacttttcttatctccttgctttgatcttatttgttcactaaacaccacctttcatgatatctatgtgtatgttggaataagttcgagaaacatt

SEQ ID NO: 218583 - DNA, 483 bp, Glycine max
gagaaaaagaaagatgctatatatttattctttgaaatagcaaatgtcaagaacaacctaggatttcaaagggagaaatcctaaattacaacttataagcatcattttgaaacaaaatcctaattaacagcgatatagctcaatgacaaacaaaacaagttgtccacaccacacacaattttccccagagattctgagtctcacatacatgaatctattttgaagcagggaggctttcatagaagcctttaacaaacacataattcttagaaatactaagtctcacaccacatcatcaaatctattttgaaccaaaaaggctttcatagagacccttgaaaaaggagaaaacaggatctctagggggcagactttctttgacaattggatggttcaaaaattcttggctccaattgtggagcttaggaaatttctcacttgtgaataactccaaccctgcaatttcttgaaccataaggaccc

SEQ ID NO: 218584 - DNA, 602 bp, Glycine max
  unsure (1)..(602): unsure at all n locations
ctcaacccaacacacaacttccaaccatattctctcgccacttcctcacatggacgcaaagagaaccctagagctcacggttttatcgttggaggagctccacgtggactggaagcacgccgcggagagcctctacgtggtggtacgggcagagtccatcaccagctactccacgggcacggccaccgaaagcggtggcaacccgtcgtggaacgagaagctggtagttgacgtgcccgtgcatgcgaggtccatcacgctggaggtgaagtgcaaggacgcccccagcgtgaaggacctcggcatcgcgaggatagccatctcggatttcctcggtggcggcacgatggcgccggagcagtgtttgcaatttttgagttacaggttgagggattgggaagggaggcgcagtggggtgattaatttttccgttagggttagggctacggagaaggcatgttcttgctccggngacgttgttattggcgttcccattttgtggaacaggcagaattagaatgaagcttagtcacatgcgtttcggtgcatgtgcagctcatggaattcgggtctatgaatacaagcttcaccagttagttata

SEQ ID NO: 218585 - DNA, 549 bp, Glycine max
cacaatcccacaaccactccttgttataaatcagatttttttttctcttcttacagatccaaacatggccgaagaacaccgatgccaagctcccgaaggtcacagactctgctccaacaactgcggcttcttcggtagccccgccacaatgaatctctgttccaaatgctacagagacatccgtttgaaggaagaagaacaagccaaaactaaatccacaatcgaaaccgctctttctggatcttcctccgccaccgtcgccgttgcctccgccgtggattctcttccggcgccggttgaatccctccctcaaccgtcggtggtgagttcgccagatgtggccgcaccggttcaggcgaaccggtgcggcgcgtgtaggaagcgcgtgggattgactgggtttaagtgcaggtgctgaaccacgtattgtgggactcaccggtaccccgagaaacacgcgtgtggcttcgatttcaaggcggtggggagagaggagatagcaccggcgaattccgtgatcaaaggcgagaagctaccgaggatttaatc

SEQ ID NO: 218586 - DNA, 498 bp, Glycine max
attaaactacacttttttacattgcattgcaattctaaacaaacccctcaatttccgaacgtgggtggacctaacattttccatttttaatgaacaaacacaaagcaaagcctccaaaatatgacttattcaacccttcccaatgtcgtcataactaatagattttttttttcttacacacgctcgaaataggttcgtatcaacggcccacgacggacggtcctgatcaactcaccctaatcgcttcgatcatcatatcaacggggcagattaaatcctccgtagcttctcgcctttgatcacgggattcgcccgtgctatcttctctctccccaccgccttgaaatcgaagccacacgcgtgtttctcggggtaccggtgagtcccacaaaacgtggttccgcacctgcacttaaacccagtcaatcccacgcgctttctacacgcgccgcaccggtttgtctgaaccggtgcggccacatctggcgaactcaccac

SEQ ID NO: 218587 - DNA, 461 bp, Glycine max
ctctcaatcgttttctacataatacaaacctctctaatttttgaagcttattatacccaatctcgatatgcagatcttcgtgaaaaccctaactggcaagacgatcaccttggaggtggagtcctctgacaccatcgacaacgtgaaggccaaaatccaagacaaggagggcattcctccggatcaacagcgtttaatcttcgccggaaaacagctcgaagacggcagaaccctcgccgactacaacatccaaaaggagtccacgctccacctcgttctccgcctccgcggcggcatgcaaatcttcgtcaaaacccttactggcaaaacaatcacgctagaggtggagtcctccgacacaatcgataacgtgaaagccaagattcaagataaggaagggattcctccggatcaacaacgtttgatcttcgccggaaaacaactcgaagacggcagaaccc

SEQ ID NO: 218588 - DNA, 514 bp, Glycine max
  unsure (1)..(514): unsure at all n locations
ggctatgcaaagcggaatcggagtctccaagatcctcatcatagcaggagcaggttacaccggcaccgtcctcatcaaaaacggaaaactctcggatttaatcggcgagcttcagttgctggtgaagggattggaaaaatctggggagcatgctgaaggtgaaggtgaatatgctgatgccatagctgctcaggtgcgtcgcctggcgaatgaagttcggcagctagcatcaaacaggccaatcacagtactgaatgggggttctgaacaaagtaatttatcatcccttgtcgttccagctgctgccttgggcgctctgggttatggctacatgtggtggaagggaatttcattctcagatcttatgtatgtgactagacggaatatggaaaaagctgttgcagatttaaccaaaaagttgcagcatgcctcagatgtcattgctgataccaagaagcatttgacccaaagaattcagaatttgaatgacanaatgctccagctgaatgagttg

SEQ ID NO: 218589 - DNA, 609 bp, Glycine max
gaagacgagcttccccttgcgccgaagggccaccgatggttgaaaccgagatggatgcagaaactgttgcaaatgtggttccaccaaaggagactccaaatagtgtttccatttctcatcattcctcacaccctccccttaatgagaggattatttcatccatgaccaggagatctgttgctgcacacccatggcatgaccttgagataggacctggtgctccaattatcttcaattgtgtgattgagattgggaaagggagcaaggtgaaatatgaactggacaaaaagtcggggcttatcaagatcgaccgcgtgctttactcatcagttgtttatcctcacaactatgggtttatccctcgtactatttgtgaggacagtgatcccctggatgtcttgattattatgcaggagccggttcttccaggttgctttcttcgggccaaagcaattggtctcatgcccatgattgatcagggggagaaagatgataaaattattgctgtctgtgctgatgatcctgagtatagacattacaatgatatcaaagaacttctcacatcgtttagctgaattcgtcgtttttttgagactacaagaagaatga

SEQ ID NO: 218590 - DNA, 481 bp, Glycine max
aatattacaccctttctaccctttctaatgaatataaaattatacagggataaaacatgtggctaaagtgcagagatgaaatatttgaaattaagcacgtgtagtctgtagaacacgcatgtgctaagaggcagctaaagtaaaatgttttttttttatccctacataatattgataatgcagccttttttcatgcaaatatcttccattggtccgtcagttaaaaatccttgacgtgcatcattcatcggctaccgcctcaagctctccactatgtaatccgcatacaagctcatggatcgcttaaccgcttcaaaagcagctgaggcaggcaaaaagtcgtttactgcaacttccttgttttcattcttcttgtagtcttcaaaaaaacgacgaatttcagctaaacgatgtggaggaagcctcttgatatcatggtaatgtctatactcaggaacatcagcacagacagcaataattt

SEQ ID NO: 218591 - DNA, 538 bp, Glycine max
tacttaaacttaccaattgagcacaaacaatgttttgcttattgcgcaatatttcccaaagatgaaagcatagggaagcaatatttaattgaactttggatggctaatgggttcatttcatctaatgaaagattagatgttgaagatgtcggtgatcaagtttggaatgaattatatcaaagatcttttttttcaggatattgagacagatgaatttggcaaagttacaagtttcaagatgcatgaccttgttcacgatctagcacagtctattgcagaagatgtttgttgcattgcagaagacaatcgagtaactactttgcctgaaagaatacaccatctcttagatcataggtccatgtggaatgtatatggggaatccaaaaattcagtgttgctgcatccagtcaaatctttgagaacctatatattgccagatcactatggtgaccaactttctcctcatcctgatgtgttgaaatgtctttctttgcgggtccttgattttttaaagcaagaaacattgtcatcttcaata

SEQ ID NO: 218592 - DNA, 562 bp, Glycine max
gcaagtgggactagtattgattgaatgattgatagaggagtgagtctcggggcatcaaagaagaaagatgggagacgtagcagataaattggcgtatttccaagcgataaccggtttagaagatcccgagctctgcacagaaatcctggctgcccacaattgggacctggaactcgctatctctactttcacctcttcctcaaaccctaacaaccctccaccgcctcccgctctggcttggaaactcatcaccctacccgtttccgtcatctccgccagtctaggcttagtttccgccgctatcggcttgggcctatgggccgcggggggcgtcctctcctattccctcggcctcgtgggcctgggctcgccctcggccccattggtttccgtcacggccgccgctttcgaggcgatggatttcgtggccgctttcgagagggactacggctccggtgggcccaatttcgtgggcgagggcttcatggacgctcttcagcgatccaggaactcgttcaagcttctcttcgtttacttgcattcccccgatcaccccgacacg

SEQ ID NO: 218593 - DNA, 398 bp, Glycine max
ccaaatatgtatattatatatatcattattctaaatcatctccatgtaacgctatctgcttgattgattcaattgaaaataagagaaatcaaaactacataaaccacgacaacctatttatctaacgtatataatcgttcagcaagtcgattcttttacacagaagaatgaaacatcagaattatttgccggccacatcttgtattcataagaacattaggcaagcttgattttcatgaactgagctccacaaacaggctggcctgaggatgcaatccagcttccttcaatgacaaggtcaacttctcttgtccataaacagtccgaggaaaattggagaccaggctgtaactcttggcttctaaacatccaagtgagttaacataatcctacaaaga

SEQ ID NO: 218594 - DNA, 419 bp, Glycine max
aaaagaggttacagaagaagaatacaccaaattctaccactctcttgccaaggatttcagtgatgagaaacctttagcatggagtcatttcactgctgagggtgatgttgagttcaaggcagtcctgtttgtaccacctaaggcacctcaagatttatatgagagctattataacgcaaacaaatcgaacctgaagttgtatgttagacgtgtgttcatttcagatgaatttaatgaactgttgcccacgtacctaaactttttgctgggtcttgttgattctgacactttgccacttaatgtatcacgagacacgcttcaacaacatattagtctgaagacaatcaagaacaaacttattaggaaagcccttgatatgatccgcatgattgctgatgaggatcctgacgagtcaactg

SEQ ID NO: 218595 - DNA, 452 bp, Glycine max
gaacttgaacaatgtgttaagactaaggtggtaaggcaaaattccaaggggatagtatgattacagtaagactaatgttctcctttaactacttatgaaatcaaaactcatgctgaagaagtcttttacggtctatcttaaagctaaaacaaacaaaggggaatcggcagcaccgtcattaaatagtggatgtcatgcaaaatctacaactcgtccttgacatcattatcatcgttaacagcatcagtttcaggctatgaattttctttcgggtcactttcagcctctacttaagggtcatcttcctcctcaactgttgcttcaggactgatgtccaggctagtcttcactgaatcataaatccgggaagcaaaattcttgggatcatcaagcaggaagccgttttaaagagtgcagtctggtacatcatctgtgctgtatgcttcacaccc

SEQ ID NO: 218596 - DNA, 322 bp, Glycine max
gctttggtgtatgcagcgactgacctaatgttttatttgcgctcactgtctcaactggggggggactctcttgaaacttttatcctttttgacaaatggtacaacaaacctttctatagacacctgacccggaacactgagggtcaccccgacaagctgagctacctgatgctctgatcactacctggcattatggactggcacgagcctcacccatggttgctggggtatatgccacattacctacttggttgggtcttctgagagaacgcgacctaggcctgccgtgcgtatgaaaagatctgctccggagccttgccgc

SEQ ID NO: 218597 - DNA, 456 bp, Glycine max
gtataacatgttgtttttattccacttatgaaaaatttgaccgttgaagttaaggtgaatatgactacataaagtcttcgacatttaaataaaaaatcttaatgatacaagagccaacattcggctttatttaataaatcttagaagcaaaacatatagttccttttattttggggtatgaggggagaacattgtttaatcctttcacaatatcctcatctaattaatgccatgagaaagaactctgcgtaccctagcttccagatgaacatatagaatgatccagtggaagctttgtggctcaaatctacggacttggcttggtaccacagaattgaagcaagaacaggattctccatacccgtgaaaattttaatccaaaagtgggagcatgatgctccggccaggataccaacttctaaagccatttaaaaaagtgaacgcacattcaaatgc

SEQ ID NO: 218598 - DNA, 567 bp, Glycine max
caaaatcatttggctcctttgattcattcatcaaatcaaaaaatccattttccatgggcacttctcagagccgcgaaggcctcgaagtcaccgactcagactccgactacgaaaacgaagaagaaacagagcactacgaagacgcgaaaaccacccactccaccgagctcgatgacgtggacgcgaaactcaaagccttaaaactcaaataccaaacgccgtcttcctccgccaaaccgcttccccaaaacgccgttaagctctatctccacatcggcggcaacactcccaacgccaaatggatcctctccgacaaacacacctcctacgctttccacaaagacaccgacgaaaacgaaaacgacgatgtttggctcctcactgtaggttccaaggtccgcgctagggtttcctccgaaatgcaattgaagatgttcggcgaccagcgccgcgtcgatttcgtcgccgacggcgtctgggccctcaagttcccctccgatgacacctaccgccgattcgtcacggaatttcagagctgcatgttcgagaacgtgtacggaatcgagt

SEQ ID NO: 218599 - DNA, 486 bp, Glycine max
ggtggaattgccttttcttcataagcaattattttattatttgtaataaaaaaggacaattcagtcagcaaacccaaactaatcacaaaaaagaagaaaatacatacagggcaacctaaaacgtgctttacagaaaaataacagcattttaaacttggatacaagcaagtatattgttcaaacttcaaagacactcctaacactagaaatttgaaacctttaaagaaaaaatgtaaacagaggtttaaccatgtcgctttccagacatgctgattgagctgactttcataggagttgccaccaccaacggagcttctggagagtcactaacagcaaatttgtcgtgcataaatcgcgattctacaatggactcatccttcaatattatcttgtaacagtaacagctcttcagcccttcttgattcctgtaacattcatgagcactgttcttcacctgctgaaaatcccatatcacactaaacttgc

SEQ ID NO: 218600 - DNA, 454 bp, Glycine max
caagaacaaaacgcatggaaatatattcaatcaaaaatcaaacaaacaagatgtaagcaacacagcacgcacgcacaagagggtgcaagagttccaattatagctaaaagtattagctaatttaagcaatcatacaaacccaagttacacaaaagagaatacttctagcaagcattctgctattacaacattcgctagaaaagataagcatctttctccaagaaccgccagactcgcatgaaatcaccagacaagaccaaaatttttcaaatgtctcatgctttgctggcaatgttgttagaaagccagtccaaaccctcatagagaccctctccagaagttgcacaagtgctctggatataccagtggcgttgacggagtgaatgaagtccaagcttgtcagttatttctgcagcattcattgcattaagaagatcttgcttgttggcaaaaa

SEQ ID NO: 218601 - DNA, 582 bp, Glycine max
ggagatgggagaaatagaaagagaggagatgtcgtcgacaaggtgggagaaggaggaggaagaagaagaagaagaggcccaaatggatatctggaagtacatatttgggtttgtggaactggcagtgataaaatgtgcgattgagcttggcatagctgaagccatagagaagcatggaagtcccatgacactatcggagatatcatcaagtttagggtgtgatacttcacatctgaagcgcatcatgaggttcctggtgcaaagaaagatattcaaaggcgacgggtgcagcaggggctattctcaatcagctctgtctcgtcgattgatgagaaacggcgaacacagcatggctagttttctcttgctggagagtagtcctgtaatgctggcaccttggcacagtctgagtgctcgcgtcatggccaatggcaacccctcatttgcaaaggctcacggtgaagacgtgtggcgctatgctgccgcaaatctcgatcacagcaacctcatcaacgaagcaatggcatgtgatgctaagcttgttatgcctatcatcattcaaaggtgcagcgaggcatttca

SEQ ID NO: 218602 - DNA, 428 bp, Glycine max
gaagaagaggatgatagtagtaagattgttattccagtcccagagagcgagtccttgtcattgaaggaggatagcaatagggtttctgattccgagaaaaatgccattgatgagctgaagaagctcctgaaagaggaattagaggacgaggaggtttccatctggggcgtccctctctttaaggatgacaggactgacgtcattctcctcaagtttctcagagctcgtgagctcaaagtgaaggacgcccttgtcatgtttcaaaacactctccgatggaggaaggacttcaacatcgacgcccttctggatgaagatctgggcgaccacttggagaaggttgtcttcatgcacggacacggcagagagggccatcccgtctgttacaacgtctacggcgagttccagaacatggacctctaccacaa

SEQ ID NO: 218603 - DNA, 469 bp, Glycine max
gcttggaggagctttatttgatgaatgatggtatatcagaggaagctgcaaaagcagtttctgaattgcttccttccactgagaagcttagggttcttcatttccataacaacatgactggggatgaaggggcaattgctattgctgaaattgtgaaacattccccagctttggaagattttcggtgctcatcaaccagagtaggctctgatggtggagttgcccttgctgaagcacttggggcttgtaaacatttgaggaagcttgacttgcgtgacaacatgtttggagaagaagctggagttgctctaagtaaagttatacctgcatttacagatcttacagagatatacctcagttatttgaacctggaggatgatggtgcaaaagcccttgctaatgccctcaaggaatctgcaccatcactggaaattttggatttggctgggaatgacattacttgcaaagc

SEQ ID NO: 218604 - DNA, 561 bp, Glycine max
gattaaggagagtatggcacagtttagtggcaaaactttggtgcagtggttggtagcaacactgctgattgccttgttgggtggtgcacaagctgttgtgttatgtaacatcgactcaagtcaactaaacttgtgtcgtgctgcagttactggtcaaaaccctccaccaccagatgagaaatgttgtgcagtttcgccaagccaatttaccttgcctctgcagatacaagtctattcttcctttaattggaataaaacccgaaaaggctttggccttgcctggtaaatgtggtctccaatcccctcctaattgttgagtgtagtgaagcaattaatgaaggtcttgttcattacaagcacttagtgttcaggtgtttcattaacactgaagatgcttttatgttttatggaagcatttatgtccctcgaataaagatgcagtttattttaatcagtgttttatgcctaatttgcagcagatgtgtgtggtgtattaaaatagtgtctgatgttgtatacaagatatctctactcctcaatgagacacaacagtaataattt

SEQ ID NO: 218605 - DNA, 242 bp, Glycine max
ctaaattgtgtagttatttaaaaaaaaaaggaactgatcacaaggaaagcattgggggggcccctacctccttctttcttcttctcctctctcctttctctttctccctttcactctcttactccctttctcttcctttctttttcttccttcacttttctctttcttatttcccacacatttcttcctctttccctcatcctttctcctactccatctccttccctctccctttttccttt

SEQ ID NO: 218606 - DNA, 511 bp, Glycine max
cctcgcgccctcgctcttcccttcctggtggcgacaatgtcgactcctgctaggaagaggctgatgagagacttcaagaggctgcaacaagacccgcctgcagggatcagcggtgccccccaggataaacaacataatgctgtggaatgctgtcatatttggtcctgatgatactccatgggatggaggcacgttcaagttgactctccagtttactgaggattatccaaataaaccaccaactgtgcgatttgtgtctcgcatgtttcatccaaatatttatgctgatggaagtatttgtttggatatactacaaaatcagtggagtcctatatatgatgtggctgctatactcacatctatccagtcattgctttgtgatcccaacccaaattctcctgcaaactctgaagcagctcgaatgtttagcgagaacaagcgtgaatacaatcgaagagtgagggaaatcgtggagcagagttggacagccgactaagttcatccttatatg

SEQ ID NO: 218607 - DNA, 531 bp, Glycine max
gaagctaattatcaaaaaccattgcgcgatcataaccaattcagcaaactacaacttctttgttgaatgtttgacaacaatccaaagtaaattgacacgcataattctattttacattaactgacatatgcaatgcaaaagctacaataaattaaagatcagatgatgctatcattcatatgagaagagaatatatatctgatgagtttgcacaatcattcttatatataggtgcgcaccactgcaacctaattcatgccctcaaagcttcctgcatataaggatgaacttagtcggctgtccaactctgctccacgatttccctgactcttcgattgtctctacgcttgatctcgctaaacattcgagctgcttcagagtttgcaggagaatatgggttgggatcacaaagcaatgactggatagatgtgaatatagcaggcacatcatatataggacttcactgattttgtaatatatccaaacaaatactttcatcagcgtaaatatttggatgaaacatgcgagaca

SEQ ID NO: 218608 - DNA, 532 bp, Glycine max
  unsure (1)..(532): unsure at all n locations
ctccggaacccaatcaactaatatggcctaatttgaaaatcaagtactttcagagagagctgaggcaatacttggtgtatttcattgtggcactgactatattcttctacatgattccaattacatttatatctgcatttactactttggataatttggtgaaatatctcccattcataaagccaattgttaatataaaggctttgagaacagtgttggaagcttacctccctcaacttgcgctgattattttcttggctttgttgcccaagttgcttctgttcttgtctaaatttgaaggcattccaactgaaagtcatgcagttagggctgcatcaggaaaatatttttattttaccgtactgaatgttttcattggagttactattggtggaaccttgttcaaagcattcaagagaattcgggagcacccgacgttggatgaaatttcgtccttgctagctgaaagcctnccaggcaatgctacttttttcttgacctacgtggcccttaaaattttcattggctatgg

SEQ ID NO: 218609 - DNA, 561 bp, Glycine max
ctcgagccgattccactaatgtaagcccttattgggacccagctcgtaaatgggttgatgacaattatagaagcattgattttccatttgagcccgtggatggagctgatcacacaggaccctttgagtttgtgacggaaacaatgatggatttggatgatttcttgacctacataagatcatggtcagcatatcagacggctaaggagaaaggagtggagcttctcacggaggatgttgttgaaaaattcaagcttgcttggggtgaagatgctaaaaaagttgccaagtttccaatttatttgagaattggaagaacaggggattcctaaagatatatgcaaatggttgcttttactgtgtgggagatgtgacgagtaccaacttttatgagtttatccattgattgaataatgtaattttattgaattgcgttcatgttaagaagtcaaaagcttttaaattcgaagggtacaattcctacttatctggaaagagttgagccttagtttgctatgtttaatttgtaatttggtattgataaattttgctgggtgtgtc

SEQ ID NO: 218610 - DNA, 522 bp, Glycine max
gacacacacaacaaaatttatcaataccaaattacaaaattaacatagcaaactaaggctcaactctttccagataagtaggaattgtacccttcgaatttaaaagcttttgacttcttaacatgaacgcaattcaataaaattacattattcaatcaatggataaactcataaaagttggtactggtcacatcttccacacagtaaaagcaaccatttgcatatatctttaggaatcccctgttcttccaattctcaaataaatcggaaacttggcaacttttttagcattttcaccccaagcaagcttgaatttttcaacaacatcctccgagagaagctccactcctttctccttagccgtctgatatgctgaccatgatcttatgtaggtcaagaaatcatccaaatccatcattgtttccgccacaaactcaaagggtcctgtgtgatcagctccatccacgggctcaaatggaaaatcaatgcctctattaatggcatcaacccatttacgagctg

SEQ ID NO: 218611 - DNA, 534 bp, Glycine max
  unsure (1)..(534): unsure at all n locations
cggctcgaggtggatgtaagatctctttccgatattgatgatctcactaccacttttttaaagttgaacaaggctgttagtggaccaagaagtccaggagttattggtgaacggggatcaagagaaaattcctctgcttctgaatggtcacaaagggatgacattccctactggtttgatcagcatgcttacgaccctgaagggcaaggctttcaggatggaaaaagatggtcatcacatccccattcttctctaactcagctacatgactcaaggcccttgtacagaacatcttcatatcctgagcagcaacgacagctgcaacaccaacttcaacattgctctagtgaacctgtttcaaactggtttgatcagcattttaatgatagtgaaactactgaggatggaaagagatggtcatcacagccacattcctccattgcccacttacaagaatcaaagcccttgtatagaacatcatcatatcctgacaagcgacaggagcttactcgttnttctagtgaacctattttg

SEQ ID NO: 218612 - DNA, 368 bp, Glycine max
acatatgaatactcgtttattgtgcactagcggactagagttaactgcgcaggggttcgatggtaaccaagaccttgttctcttcgaccagatctccgaccttgtaattgactgcagtgacggtaccagcaaatggactgcgaatagtgtgctccatcttcatggcctctaagatgagtagactctgattggcagtcacttgatcgcccttgttcacattcaccttgatcactttgcccggcatcggagactgcagtgacgcggcactcgtcttggcgtcacgtgatgtgggttctaatttgggcagcacgggctccagggtgatcaagccgttcactgaatgcacggtgatctctccgtgagtaccg

SEQ ID NO: 218613 - DNA, 552 bp, Glycine max
gtgagtccagagtcccacagaagaaaaacaaaaccctcactgagcgctgctgctttgagagagagatggctccgaaccttgaatgtcgtatgtacgaagcgaagtacccggaggtggacatggcggtgatgatacaggtgaagaacatagcggacatgggggcgtacgtgtcgctgctggagtacaacaacatcgagggcatgatcttgttctcggagctctctcgccgtcgtattcggagtgtgagcagcctcatcaaggttggccgcatcgagccggtgatggtgctccgtgtcgacaaggaaaagggttacatcgatctcagcaagcgcagggtcttcgaagaggacatccaggcctgcgaggagaggtacaacaagagcaagctcgtccactccatcatgcgccacgtcgctgaaaccctcaacatcgatttggaggagctctatattcacattggatggcctttgtatcgcaaatatggtcacgctttcgaggctttcaaaataattgtgactgatcctgatactgttttaagtactctcactcgtg

SEQ ID NO: 218614 - DNA, 522 bp, Glycine max
  unsure (1)..(522): unsure at all n locations
gatttggagtttggagcgactgaactaatcattaatttgcactcgctgtttcagcttcatcacccttcttttgcatcatttatatctcttgagaaatggcacaagaaacctttctattcacatctgaatctgtaaacgagggtcaccccgacaagctgtgcgaccagatctctgatgcagtacttgatgcgtgccttgaacaggaccctgacagcaaggttgcctgtgagacatgcaccaagaccaacatggtcatggtcttcggagagatcacaaccaaggccaacgtagactatgaaaagattgtccgcgacacatgccgcgaaattggattcatctctgatgatgttggtcttgatgctgacaaatgcaaggtgttggtcaacattgagcaacagagcccggatatcgcccagggtgtgcacggtcacttcaccaagcgcccagaggaggttggtgctggtgaccaaggtcacantgtttgggtatgccaccgatgaaacccccgagtacatgcccctc

SEQ ID NO: 218615 - DNA, 560 bp, Glycine max
gaagaatggtgctttcggaggaggaaatcggtcgtctataccgaataaggaagacggtgatgcatatgctgagggacagaaattttctggttggtgacttcgagatcaacatgtccaagcacgagttcaagtccaagtacggcgaacacatgaagcgcgaggacctcgtcatcaacaaatccaagaaggacaactccggcgaccagatctacgttttcttccccgacgaacccaaggtcggcgtcaagaccatgaagacctacaccaaccgcatgaactccgaaaacgtctacagagccatcctcgtcacccagaccaacctcacccccttcgccagaacctgcatcagcgaaatctcctccaaattccacttagaagttttccaggaggcggagctgctggttaacattaaagagcacgagcttgttcccgaacatcaggttctcactgacgccgagaagaaaaccttgcttgagagatacaccgtcaaggaaactcagttacctaggattcaggtcacagattctgttgcgagatattatggattgaagcgtggacaa

SEQ ID NO: 218616 - DNA, 478 bp, Glycine max
accaaaagaacttattagctattaataaacagaaacaaagttccatataacagattgacactaatcataacaacatatgtcaaccaatttatgatataatcatctaaatatataggttcgattccaaaagtttcaacaatcagacatttcacttcttgtaaatcaagagttcccccatgcaaaaaaagaaggctttatatccctatccatcactttggcaatattgccaatatgttaaagcaaattcctatacaacaaatcggtacgtaacatatctgccagcagattcacttggccggataatcttgacaacttgtccacgcttcagtccataatatcttgcaacaggatctgtgacctgaatcctaggtaactgagtttccttgacggtgtatctctcaagcaaggttttcttctcggcgtcagtgagaacctgatgttcgggaacaagctcgtgctctttaatgttaaccagcag

SEQ ID NO: 218617 - DNA, 493 bp, Glycine max
tgacgtgatctcctagacagacagacgtacatgcactgtccctacctagctttgagttcggtcggctcaagccgctcgagcagctttgcggttcggtgtatgactttcgcttagacaggtcactccacttaagacggcgaaaatgggacactctaggacgtaacaccacgactctgctcgaaaggtacttaatgtggcacagcggcggcgaggatgaaagtgacaggacacaggcttcgacgcttgcaacgcctacctcctcttttccggctacctcatgtctaatatgcacaccgacttgggcgtgcgctgacactgatgcatccgcgccaggagcaccatgaacatgatgctcaccaacgtgctgaacactgacgtcgccggacggttttactacctctaggctatgcttggatttcagcttcctgtgcaacagcttcatcggcaaacatttgtatggtctcaaggacaggcgttcatcctgctacgacta

SEQ ID NO: 218618 - DNA, 463 bp, Glycine max
aagagtaaaccattataccatatatattaaagaccataattaacatcaaaatacctcatccaaatattcagattattctgcacaactcacaaaacatactaggaagggcgttcacaatacctcatccaaatattcagattattctgcacaacttataaaacatactaggaagggcgttcacaatacttcatccaaatattcagattattcatcaccaaaacccttgacaagcagcttttaggcttttttgcagacttctccatcacaaacccattcatctttggacttttcttccttggcatcatctttgcttccttctatgtcctccttttccaatgcacattttggatggagatcaaagtcacaatctccacagtagtaggaccatatatgtccctcttcattgcaagcattacagtaatacaccctgcggcgcgtcaacacaagctcatgctcatgtaat

SEQ ID NO: 218619 - DNA, 501 bp, Glycine max
  unsure (1)..(501): unsure at all n locations
caaacgaagatgttagtatgcttgcatttacttcagagcagattactgctccattcctacttcccgagatggttgaaagagtggctagcatgctcaattactttctgctgcaattggtgggtcctcaaagaaaatcgcttagtctgaaggatcctgagaaatatgaatttcgtcctaagcatttgctaaaacagattgtgcacatatatgttcatctagctaggggtgacacgaattccatcttcccagctgccatctcaaaggatggccggtcatacaatgatcagttgtttagtgctggggcagatgtccttcacgnaattggggaggatgggtagaattatacaggaatttattcaacttggtgctaaagctaaagttgctgcttcagaggcaatggatgctgaagctactctaggggagataccagatgaattcctggatccaattcaatacactttgatgaaggatccagttatcttgccttcttcaaggatcacg

SEQ ID NO: 218620 - DNA, 591 bp, Glycine max
ccagacacagggaatggaaaaggcaaaatatcaaaacacattacacatggctttcacttgatgaagggcaaatcagcgcatcctatggaagattatttagtttcagaatttaagcaagaaaaggacagagaattaggcttgtttgcaatatttgatggccacttaggccatgatgtagcaagctatttgcagaaccaccttttccaaaacatcttgcaacagcatgacttttggactgagacagaaagcgcagtgaaaaaagcttacgttgaaacagatgagaaaatattggaacaagaacttgtgttggggcgaggagggtcaacagctgtgactgcaatacttattgatggtcagaagcttgtagtagcaaatgttggtgactcaagagctattatctgtgagaatggaaaggcaagacaactatcagtggatcatgaaccaagcaaggaaaaaaatcgattgagaggcgtgggggttttgtatcaaacattccaggagatgtccttcgagtagatggacagctggcagtagcaagggcttttggtgacaggagcctgaagatgcatcttagttcagaacctgatgtga

SEQ ID NO: 218621 - DNA, 620 bp, Glycine max
gaaaaatataataataattaaaattgtcgtactccgtgtttaattattattatattttggaaaaaaaataaaaaataagattattcgtaaattattatgttcgattaaccaaaaaatttattttattaaaggataagtattcaataaaattaattattgaaataactaaaaaaatataaaatgaaaaaaaatcataatttatttaaaaatagtaatcagaaaatttaataaatatatcaaacataaaaaaatataaaaaaatttaaaaactaacattttaaaaattgttaccgacgttaaaacaaacactaaaaattactaaaacaacttatttacattatagtaaaacaaaattttcaaataataaaaaaaacaagaatctagttgaaatgcccttaaatataactgtatataactgtataaattattttttaatttcatatattctaattagtttatttacataaagtttgtttgaattttacttttcaaaaactaataaggtgtataaagggaaaaaaatataaccaattttaatttaatacatctttattttcttatttatactggtttctcaccttaaaaaaagtaattatcattaataatgaactgaatgctta

SEQ ID NO: 218622 - DNA, 540 bp, Glycine max
ctctctctctctcttttctctgtgtgtgtgcgtggattggtgaatttgagattgaagaagatgatgcaggctggacccggcggcatggcccaacaagcgaaccagcaatacgcacagcaacagcaacaacaacaacaacaagcctacatgatgatgccgccgcagcctcagccccctcagatgtgggccccatcggcccagcctccgtcccaatcggtagctcctccgcaacccaccagcgccgatgaggtccgtaccctctggatcggcgatttgcagtactggatggacgaaaattatctctatacctgtttcgcacacaccggcgagctggcttcagttaaagtcattaggaacaaacaaactagtcaatcggagggatatgggtttattgagtttactagtcgagctggtgccgagagagtccttcaaacatacaatggcaccattatgccgaatggcgggcagaacttcagattgaactgggcaacttttagtgcaggtgagaggcgtcatgatgacagcccggatcacaccata

SEQ ID NO: 218623 - DNA, 487 bp, Glycine max
ctcgagccgaatcggctcgagctcacacactttgtactctccgtccttccttcttcgatccagatctctctccttctccctcaaatggcttcccttctgcaatgttccatgcccctcgtgtgtctttccaatcgagctctggtacccggtaccaggatctccaacccaagttcagtttccctttcaattaagggaagaagtttcccatccgttacattgcagcccagagggcgtcggtttcagcttagatgtgcggcaaaaccagagacagtgaagaaggtgtgtgacatagtcaagaagcaattggcactgccagatgaatcagctgttactggagagtctaaatttgctgcgcttggagctgattctcttgacacggttgagattgtgatgggacttgaggaggaatttggtattaccgtgggagaagaaagtgcccagagtatcaccaccgttcaagacgctgctgatatgatcgataagcttc

SEQ ID NO: 218624 - DNA, 527 bp, Glycine max
cattcaacggaaacaaaatgactgagttcttaaaactattattataggaatcgcaatacaatccagaaaagaactagcagttacttagacaatcaagttgtaataccaaagataaagattaaaaaccccttccgtcgacatagcagaaaactttaaaatggacatgcttgtcctttttactagtttaagccttggtttcaagaagcttatcgatcatatcagcagcgtcttgaacggtggtgatactctgggcactttcttcttccacggtaataccaaattcctcctcaagtcccatcacaatctcaaccgtgtcaagagaatcagctccaagcgcagcaaatttagactctccagtaacagctgattcatctggcagtgccaattgcttcttgactatgtcacacaccttcttcactgtctctggttttgccgcacatctaagctgaaaccgacgccctctgggctgcaatgttacggatgggaaacttctttccttaattgaaggggaaactggaccttgggtt

SEQ ID NO: 218625 - DNA, 554 bp, Glycine max
cttgctccctcagaagcgaagaagaagccacagagaaccagtctcctactctctctcacccacaagaaaaatggcatctcacatcgttggatacccccgcatgggtcccaagagagagctcaagttcgctctcgagtctttctgggatggcaagagcagcgccgaggatttgcagaaggtggctgctgatctcaggtcatccatctggaagcagatggctggtgctgggatcaagtacatccccagcaacactttctcgttctatgaccagctgctcgacgccaccgccaccctcggtgccgtcccccccaggtacggctggaccggcggcgagattggattcgacacctacttctccatggccagaggtaatgctaccgtgcctgctatggagatgaccaagtggttcgacaccaactaccactttattgtccctgaattgggccctgatgtgaacttcacctatgcttctcacaaggctgttgatgaatacaaggagggccaggcgcttggagtggataccattcccgtactcgtggccctgttacatactt

SEQ ID NO: 218626 - DNA, 415 bp, Glycine max
gcacaaaactggtaatatttcatatcaataaggattgcggcaaagccgcaaagatacaacattcattagggaaaacaggagttgggaaaaataaggggagaggggttgaggaagaatcaattgctcacagagcatgcttaaaccatctaaatattccacacacggttattgaaacaacccaatatagaaaatttttctttggtgtattataaaagcagaaccaatgaacttgtagattctactttcttataccattcacttggcaagctcgttacggatgagttttgctgcggcaaccatgtttgagagggctggcttcacttcagtgtacttgcgggtcttgagaccacagtcagggttgacccacaggatgttcttctcgagcactggaagcatcttattgattctgtcagcg

SEQ ID NO: 218627 - DNA, 471 bp, Glycine max
ccacattcaatttacaataatttcacgactccttcggagatctatctctagcccataatccaaccatggcaaatacgggaaatttagacgcggcgatagagcaattgctgaacgtggagaagcagatgaggctcgccggtgacgtggcaggtaccagaaaggcggctaccgatattttgcagctctgcttcgatgcacgagcctggaaaaccctcaatgaccagattgtcgttttgtcaaaacgacgtggcctggtcaaacaggccgtaacagctatggtgcagcaagctatgctatatattgatgagacaccacatatcgtaactcgcatagaactcatcaaaacgctgaacagtgtgtctgcagggaagatataactggaaagtcgagcagagcttagattgatcaagaaacttgcatagattaaggaagaacaagggcttatagctgaagctgctgatttgatgcaag

SEQ ID NO: 218628 - DNA, 466 bp, Glycine max
gaatataaatgagcaaacactcaatttctagccactgcttcaatcaagatcttataggatccagtcataagtcagtggtaaggtatgtaccagtagtatacaacaatgctactttcagtactatgatgcatatatccagctctaccctgaacgcatgagtgacaaaatataaaaaagaaaaagcgataatcgtttagcgaaattcttcaccaactcagtcagtgacagttcaatagaacattcctgaaaaggcaacttcagtacaaaatcacatcaatattgagatgccctgtgacagtatgtgaaccttcttaaaccttcaaagcagctttatggaccatggtttccttgtgtatttgatgacaactcttctccacaagatcaagcaatttctccaagtttgctgcccatgaattaagaatttcattgctatcctctgctgtgtggaaacagactatccccattg

SEQ ID NO: 218629 - DNA, 545 bp, Glycine max
ctctgaaattctcagttatgtcgtggcaagcgtatgtggatgatcacctactgtgtgaaatcgaaggtaaccacctcactcacgccgctatcatcggccaagacggaagcgtttgggctcagagcaccaacttccctcagttcaaacctgaggaaataactgccatcaataatgactttaatgagcctggatcacttgctccaactggattgtatatcggtggcaccaaatacatggtcatccagggtgagcctggtgctgtcattcgagggaagaagggtcctggtggtgttactgtgaagaagaccggtgcggccttgatcattggcatttatgatgaaccaatgactccaggtcaatgcaacatggtagttgaaaggcttggcgattatctcattgatcagggtctctaatctctgctttatgtctggttatcgcgcatatttcattggcttctgtacaagtttttgcatcgacctggactggaatgctatgatgcagagtaataatcttggtgcgagtatgaaatgtcacgggatctgcgt

SEQ ID NO: 218630 - DNA, 473 bp, Glycine max
agaataagcaaacttttgataaatatgccaaccattataacatagcattaaaattttaaaaccactgtaatgtatacaggtaccccactaaaaaagtacaaagatagagattatagtcatcatttctcaagcatcaaacactttcttcactacacgcagatcccgtgacttttcatactcacaacaagattattacactgcaatcaaagcattccagtccaggtcgatgcaaaaacttgtacagaagccaatgaaatatgcacgataacaagacataaagcaaagattagagaccctgatcaatgagataatcgccaagcctttcaactaccatgttgcattgacctggagtcattggttcatcataaatgccaatgatcaaggccgcaccggtcttctttacagtaacaccaccaggacccttctttcctcgaatgacagaaccaggctcaccctggatgaccatgtatttg

SEQ ID NO: 218631 - DNA, 472 bp, Glycine max
tttccaattagggtttcgcttagagtaaccaattaccatgggagtcttcacctttgtcgttcgcaaatccggcgccgaatggagcgccaagcaacattccggcgacatcgaggcctccgccgactccacctacgatctccaaaggaagctcgtgcaagccgctctcgccgttgattcctccggtggagtccagtcctccttctctcccgtgtctcctacctccgctgtgttccaggtgatagtgggtggtgctgtattcgttggaggtggcggtggtgctgttgcagctgcacctgcaggtggtgctgctgcagctgatgctgccccggctgctgagaaaaaggaagaaaaggtggaggaagagtccgatgatgatatgggaatgggactgtccgattaaaagattttttgctttttattgagttttgagggaaaagggttgttaagggtttaattctataaattggggggg

SEQ ID NO: 218632 - DNA, 531 bp, Glycine max
gttcagtaacatgtaagaagaaaatcgtattaacagcaaaaaccgtttgatcagcgcaaaattctatccgacagtgataaaagacgagcgagacatttgtttgaaatagaaaatacctactaaaatccaatgcagaagaaccatttgggtcacagcacataactctatctgacgaagttcaatgtaccattaactggtgaaaagcaatatacccacacaatttataggattaaacactaaaaacacttttccatcaaaactcaataaaaagcagaaaatctctaatcaaacagtcccaatcccatatcatcatcggactcttcctccaccttttcttcctttttctcagcagccggggcagcatcagctgcagcagcaccacctgcaggtgcagttgcaacagcaccaccgtcacctgcaacgaatacagcaccacccactatcacctggaacacagcggaggtaggagacaccggagagaaggaggactggactccaccggaggaatcaacggcgagagcggcttgcacg

SEQ ID NO: 218633 - DNA, 618 bp, Glycine max
ctctcttcggtcagaaacatgaatttggaaacgcaaccaggaacggcgtcgtattggtgctacagctgcacccgtttcgtgcacctctctgtccaaagcaccatcgcctgcccccactgtcaaagcggtttcgtcgaagagatccgtgccggcgccggagccgaagcctcgccacgccatcgactaagtcctttccccgatgatcctcttttgctccggcgacagggcttccgccgccgtaggagagaagcttccggcaaccgctccccgttcaaccccgttatcgtcctccgcggccccggcgacgactccgccgccgccgaccacgacggcgtcagcacgttcgagctcttctacgacgacggcgacggcaccggcctccgccctcttcctcccaccatgtcggagttgctcctcggctctggctttgacagacttctcgaacagttcgcgcagatcgagatgaacggattcgggcggccggagaatccgccggcgtcaaaggcggcgatcgagtccatgccgacggtcgagatcggagaaacgcacgtggaaaccgaagcgcactgcgccgtgtgcatagaagcgtttgagctgcacgccgaggcgcgtgagtta

SEQ ID NO: 218634 - DNA, 574 bp, Glycine max
  unsure (1)..(574): unsure at all n locations
gaaactattatccacagtagctaagcctgcaagcttcgccgtttgaaacagtgcctcaaccatggcagaacaaacagagaaggcttttctgaagcaaccaaaagtgtttctatgctctaagaaaggtgggaagggaaagaggcctgggaaaggtgggaatcgcttttggaagtcaattgggcttggattcaagactcccagagatgccattgaaggaacctatattgacaagaagtgccccttcactggcaatgtttccattcggggtcgtatcctagccggtacttgtcacagtgctaagatgacaaggaccattattgtgaggaggaattatcttcattttattaagaaataccagagatatgaaaagcggcattcaaatattccttcacacatatcaccttgtttccgtgttaaggaaggagatcatgttattattggccaatgcaggccaatctcaaagacagtgaggttcaatgtgttgaaagtgatccccgctggatcctctagcggtgcanagaaggcttttactggaatgtgagatttgaatcttcagttctcattgaagggtagt

SEQ ID NO: 218635 - DNA, 449 bp, Glycine max
ggaaaacagaaataactgcaactactattcaacaattaaagtctggaacatataaccactcaaagcattacaagatatcaaaaaattgattcaatctttaacttaaccttgatgtatttgaacagaggcttctactaactttgtaaggtaacactacccttcaatgagaactgaaaattcaaatctcacattccagtaaaagccttctttgcaccgttagaggatccagcggggatcactttcaacacattgaacctcactgtctttgagattggcctgcattggccaataataacatgatctccttccttaacacggaaacaaggtgatatgtgtgaaggaatatttgaatgccgcttttcatatctctggtatttcttaataaaatgaagataattcctcctcacaataatggtccttgtcatcttagcactgtgacaagtaccggc

SEQ ID NO: 218636 - DNA, 403 bp, Glycine max
atcatattaaatattaaatagaaaaaatggcccgatcatttatcaaaggccaatcttcggtagaagagaaggttcctttggaacacttatttctatttcagtataccgggtctctttttttcatttcaaaaaatttatagaatttcgattttgaaatgaaagaaaagtgtggggataaatataaatgacaaaaagatattggaacataatcttggaagagatgatggaagcaggagttcattttggccacggtactagaaaatggaatcctaaaatgtcaccttatatattctgcaaagcgtaagggtattcatattataaatcttattagaactgctcggtttttatcagaagcttgtgatttagattttgatgcagcaagtgagggaaaacaatttttaat

SEQ ID NO: 218637 - DNA, 514 bp, Glycine max
tttctttttttttttgtctactttcattttttattttaaataccgcgactaatcacataaagtgtgggggggggctttttatatctatattatttatatttgtattctttgtacaatctattactagtatagaaatcgattcccttaatttatgaacccctccaactaaatccaatagattgcttatgtcatgattaaccaagaatttcgtatatagctagaacggccctcacagattgcaaatactactctgttaagaattaatcgaatcgaggctatagcctcatcattagctggaattgaaatatcggcgaggtccgggtcacaatttgtatcgattaaacaaattggtgggaattccacaggtttacattctcgaagagccgtatattcttcttgttgatcgacgattatttacatatcaggtaacccccgtcttatatttaatgccgccaagatcatgttgcaaatgagctaaatgtctctttaatatagcgggatctttttttggaaa

SEQ ID NO: 218638 - DNA, 535 bp, Glycine max
  unsure (1)..(535): unsure at all n locations
ctccggagaaggatctgatgagatctttggagggtatctgtacttccacaaggcacccaacaaggaggagtttcacagagaaacatgccgcaagatcaaagcactccaccaatatgattgcttgcgagccaataaatcaacatttgcttggggtctagaagcccgtgtaccatttttggacaaggcatttatcaatactgcaatgagtattgaccctgagtcgaaaatgataaaaagagatgaaggacgaattgagaagtggattctgaggagagcctttgatgatgaagagcatccttatctgccaaagcacattttatacaggcagaaagagcaattcagtgatggagttggctatagctggattgatggccttaaggcccatgctgcataacatgtgactgacaaaatgatgcttaatgctggtaacatctaccctcacaacaccccaacatccaaggaagcatattactacagaatgatcnttgagaggttcttncctcagaactcagctaggctcaccgttcctggagga

SEQ ID NO: 218639 - DNA, 420 bp, Glycine max
gtgattgttgtgactcgttcttcttcgtcgttatcttcttcttttgttgtttgtgtgtttgttttttctctcacctgaaaatgtcttgctgcggtggtaactgtggttgcggaagcgcctgcaagtgcggcaacggctgcggaggctgcaagatgtacccagacttgagctacaccgagtcaaccaccaccgagaccttggtcatgggagtggcaccagttaaggctcaattcgagagtgctgaaatgggtgttcccgctgagaacgatggctgcaaatgtggagctaactgcacctgcaacccctgcacttgcaagtgaggtgttggagagctaaagcttcaagcagaaatggcccttagaaataatgataaaaactatatgtagtttcaaaactttcaaattatgtagtatgtattat

SEQ ID NO: 218640 - DNA, 481 bp, Glycine max
aagaaaaaacacataatatacggaaattagcatataatgggaactaaatcacatcaatggtcaatgactagtagttactcacaaataaataaccattcagctataattgaaaagcactaaacataaatatgcagtatcatctatggtagtcggaaatattagcatctcttccgacgtcttcaacctaattaattgcgtgtggaaccatttctgcctagctagacatcatgacatgatcaattgcctgcagtgcttggttggagaaaaatcgcacgtccacatagggatcctaaatgaactcaaccagacatggacgaatattcttgtccaccacagactgatcaacgatggggaagatggactctaatacctttgccagattgaactttatgttgggcactctgtcttttgatgcagcaacaactactggctacaagtttgaacaagtgatttcagggcccatcacaggagccagcagaga

SEQ ID NO: 218641 - DNA, 516 bp, Glycine max
cggctcgagactgggaagtttagtcatagctgaaagctgactctagctagaggataataataagattaagatcatccatccaacaagaaagaggaagtgtgtttttgattggatccacaaaattcaagatgactccagttaatttggctggccagtttggtgacacaacatacactaaggtgtttgttggaggcttggcctgggagactcaaaaggagacaatgaagaagtattttgagcaatttggtgagatcttggaggctgttgtcatcactgacaaagccactggaagatctaaaggctatggatttgttacttttcgtgaaccagaagctgccatgagagcttgtgtggatcctgctcctgtaatcgacggtaggagagctaactgcaaccttgcttctttgggtgtccagagatctaagccttcaaccccaaacatggaggaggaggaaggaactttagagtaatgggttctttcagacaggatttggagggggagtgggatcgtctttt

SEQ ID NO: 218642 - DNA, 550 bp, Glycine max
  unsure (1)..(550): unsure at all n locations
ggatgagcaagttactactcattcgtgttgctgggttcgtggcaacctttgtcaccatggtgatgatgatggtgcccaaaaacgtgagtgcccaaaacataggtgatgacatcgtcacacaagacttcttcaacagcataatcagtcaggctgatgatggttgtgcagggaagaacttctactcacgagatgctttccttaatgctcacaattcctacaatgagtttggtaggcttggtaatcaggatgactccaagcgtgaggttgcagctgctttcgcccatttcacccatgaaacaggacatttttgctacatagaagagattaacggtgcatcaggggactactgtgacgagagcaacaccgagtacccatgtgcccctaacaaagcgtactatgggcgtggaccaatccaactatcatggaacttcaactacggaccagcagggcagagcatcggatttgatggatngaacgctgcagagacggtggccaatgaccctgttgtgtccttcaagacaagcctgtggtactggatggaacatgtgcg

SEQ ID NO: 218643 - DNA, 439 bp, Glycine max
  unsure (1)..(439): unsure at all n locations
gcctggaaggttggaccggcattggcctgtggcaacaccattgttctcaaaacagctgagcagacaccattatctgctttatatgcagcaaaactatttcatgaggctggacttcctgctggtgttttgaatgtagtttccggctttggtccaactgctggtgctgctcttgctagtcacatggaggttgataagcttgcttttaccggttccactgatactgggaaagttgtccttgaactggcggctaaaagcaatcttaagcctgttactttggagcttggtgggaaatctccctttatagtgtgtgaagacgctgatgtagatcaggctgttgagctcgcacactttgccttattctttaatcanggacaatgttgctgtgctgggtctcgacatttgtacatgaaaatgtatacgangagtttgttcagaaagc

SEQ ID NO: 218644 - DNA, 525 bp, Glycine max
ctcgagccgctttacttaattagcaaatccaaatatggcactttcttcttcatcatcttcaacatccatatttgctttagctttgttcactcttttgcttataggaagttcttcagctcaactctctgagaacttctatgatagtaaatgtcccaaggttttctatgccgtaaaatccgttcttcaatctgctttggctaaagaacctcgccagggagcatctatcgttcgcctcttctttcatgactgctttgtcaatggttgtgatggatcagtactacttgatggcccttcctcagagaagactgcacctcccaacaataactctttgagaggttatgaagtcattgatgccatcaagtctaaggtcgagacagtatgccccggagtggtgtcatgtgctgatattgtaaccattgctgctcgtgactctgttgcaatccttggagggccatattggaaggttaaacttggtagaagggattccacgactggatttttaaccttgctagcagtggtgtgctc

SEQ ID NO: 218645 - DNA, 587 bp, Glycine max
gtggcacagcactagatcatggtgtcgtggctgttgggtatggaacagctaaaggtcatgattattggatcgtaaggaattcatggggttctagctggggagaggatggctacatcagattagaaagaaatcttgctaacagcagatcaggcaagtgtggaattgcaattgagccatcttatccccttaagaatggtccaaatccccctaatcctggaccatcacccccttcacctgtgaagccgccaaatgtctgtgacaactactacagctgtgctgatagtgctacttgttgctgtatttttgagttcggaaatgcttgcttcgagtggggttgctgtcctcttgagggtgcttcctgctgtgatgaccactacagttgctgccctgcagactatcccatctgcaacacttacgctggaacttgtctcaggagcaagatcaacccctttggagtgaaggcattaaagcgtactccagcgaaaccccattggaccttcggacgtaagaacaaggtcagcagtgcttaagcagtttaaggaaatgtgaacgtgcagaaggagcccatgatgaagtataagggaaga

SEQ ID NO: 218646 - DNA, 469 bp, Glycine max
tggagttagttctaaacagcacaacaattggagttggagttgtttctctgatcctcctcttgtacttgtttttgcgtggtggttcatggaagagtggggaagagggtcctccaacagttgcaggtgcatggccaataattggtcacctcccattgttgcttggttcaaagacacctcataaaacattgggtgacttggctgacaagtatggacccatattctcgatcaagattggtgccaaaaacgcagtggttgttagcaactgggaaatggctaaagaatgctacaccacaaacgacatcgtcgtttcctccctccccgatcttatctccgctaacctcttgtgctacaaccgatccatgatagtcgttgcaccctacggtccctattggcgccaacttcgaaagattttaatgtctgagttcctatctccttcccgagtagagcaactacaccatgttcgcgtctc

SEQ ID NO: 218647 - DNA, 455 bp, Glycine max
gtaaaaaattataatccacaaaggttttatttattaggtctaatgtatggcgtgactgaaataataattaaagcgatcaattatccaataactagacagtgcgaaatgatcctccatactcccaaattagttattgttgtcgtaccaagattgcttttgaagataatcgattatagtcttgtccacctggaaagctttggtgagaacctcagaagaaataggcggattagctttaaacaaagcatttgcaatagtgatagctcctggattttgactgctaaggccagcaatggcaacagcattgccatatcccacattcaattggaaatgaatcagaccaattgggaacacaaacacatcacccttgttcagcactttggtgaagaggcgatttccatcttgattggaagtcacaaattcaacataaagagtaccctcaaggactataaggatct

SEQ ID NO: 218648 - DNA, 526 bp, Glycine max
ggaagaaaccctagcctctcaccctccctgcgacacgatgcagatcttcgtgaaaaccctaacgggtaagacgatcacccttgaggtggagtcttctgacaccatcgacaacgtgaaggccaagatccaggacaaggaaggcatccctccggaccagcagcgcctcatcttcgccggaaagcagctggaggacggtcgcaccctcgccgactacaacatccagaaggagtccaccctccacctcgtcctccgtctccgcggtggcgccaagaagcgcaagaagaagacctacaccaagcccatgatgatcaaacacaagcacaagaaggtcaagctcggcattctccagttctacaaggtcgacgattctggaaaagtgcagaggctccgcatggagtgccccaacgccgagtgtggtgccgggactttcatggccaatcacttcgaccgccactattgcggcaagtgtggcttgacctatgtctaccagaaggccgatgcttaaattcgttggaagtgaattctc

SEQ ID NO: 218649 - DNA, 650 bp, Glycine max
gaaattatggaggcattgatcccacttcggaagccccgtaagaattccgggtagacagctactagtcggagggcgccctttttgttttttttttccaacatgaacaactagattacttattttaaccttcctcactttagaggaatcaaatccaaaaaggcaatcataactctactgggaaacaaatccagacgatatgaaagcatcaacaacctggtctctacttaaagcagatgcctgtggaagccaaccgacatcgccttggttgcattaagattaaaaacagttatagcaagaaaccaatagctgctctctccctacgaaagatcctcaaagaaacaaacaattacaactcaaatgctgcactgcaatgcacgaccattaaacaaacaaccaaaacccataatcaatcaattgagtgcaccaactccagccccactattgcgagcgagtttcgtccactcggtatgaaaagccccagggcgatcaaccctctcgtaagtatgcgcccgaaacaagtccctctgagcctggacaaggattgccggaagtcctgccctccgataggtatcaaagtaagcaagactggcacacattgcgggagtactaatcccagccgaaaccgccaaccacacaaccctcctgcacgc

SEQ ID NO: 218650 - DNA, 435 bp, Glycine max
cggctcgagcagagttccagggatctttgtgagtgaagagctagaacaaaaaatacggaacgttggtggtggtgtgctggaggagaacacgccgctggcttactcgcacgtggggacggagttgcgtgtgcagaccaagatgtcgccgtaccttaagcccgatgctgacatggcctgttgtcatgacttggaggcttacttgcacttggtggatgggttcttggcctcaaattgtcccttcagatcaaatgctaaaagaagcttagctaggttaatgcaagaccaaagtgctaatgtcaaaaaattgtatactagcaaagctaaatccttgactgtcaatcttagtaggcagggatccatgtctatgtctagttgtttgtcaagtccctcttaatcaaaactcaaatgttacatatgcaccattttcatgcttca

SEQ ID NO: 218651 - DNA, 401 bp, Glycine max
aggacgaccttattttttcttttttctataaaacaatctattccaaatctgtatttaatcggggggcttcagtcatgatcaaatacattaacatttagaccatgactcaaggtaccagctccatataatcaaaccatacacaggattcactgttctagactgataaactacatatcccactatactttatctcagtgtagagacaactgaaattatatgattcggccatctatccctctatttatgacggatctaacgttccatagaaaactcaatagataatctaaagcaacgagaactgtgctgaagcctctcttgtctatataaaaaaaaatttcaatacctactctgatatgcacgagccatgaatctcattgcctgggtgataaggcacaacatgc

SEQ ID NO: 218652 - DNA, 384 bp, Glycine max
gcaccgtctgtgatgagaaacttgattgacaggtccacaaaccttgactggagcaagggtgcaactctgctagaagcacttgaccagattagtgagcccaagaggccctctgacaagcccctcaggctttcacttcaagatgtgtacaagattggaggtattggaactgtgccagtgggacgtgttgagaccggtgtcttgaagcctggaatggtggtgacttttgcaccaactggactgacaactgaagtcaagtctgtggagatgcaccatgaatctcttacagaggcacatcctggtgacaatgtgggattcaatgttaagaatgttgctgttaaggatttgaagcgtggttatgttgcctcaaactcaaaggatgaccct

SEQ ID NO: 218653 - DNA, 389 bp, Glycine max
ctcgagccgctggttttgagggagacaacatgattgagaggtccacaaaccttgactggtgcaagggtccaactctgcttgatgcacttgaccagattagtgagcccaagaggccctctgacaagcccctcaggcttccccttcaagatgtgtacaagattggaggtattggaactgtgccagtgggacgtgttgagaccggtgtcttgaagcctggaatggtggtgacttttgcaccaactggactgacaactgaagtcaagtctgtggagatgcaccatgaatctcttacagaggcacatcctggtgacaatgtgggattcaatgttaaaaatgttgctgttaaagatttgaaagcgtggttatgttgcctcaaactcaaaggatga

SEQ ID NO: 218654 - DNA, 354 bp, Glycine max
gaacactacaaattgaaaggtgacatttaataaaccaaagcaacacaacgcagcaaagtcctgaaactcgctgggcttaacaaaaatgtaatctggggttccgacaaacacatcacattataacacagattactaaaagctattttgccaccgtcgatcaagagcccagttctgggaacaacaattgcgagatgatggtggagacttcaaactttgtccgaaaaacaagctacctagaaaagatgacacacgagtacagaaaagaatccaacattgattgtgaccaacatcccctgaggaaccagcccgcacagattcacttcttcttctgggcagccttggagaccttggctc

SEQ ID NO: 218655 - DNA, 528 bp, Glycine max
caaattccactcactactactctctctttccatcattgtccccttaaaaatcatgagtgtagaaatactagacggtgcaaccatcgtaggattcgtggaggacgaggaagccttcaacgtctgcgtgagcgacctattcacccaactggacaccgacaaggacggtcttctctcttacgcggagatgctgaaggagttgcagaggctgagggtgttcgagacccacttcggcgtcgacgtgaagcgtgaccccgacgaactcgcacgtgtgtacgagtccatgttcgtgcaattcgaccacgacttgaatgggagggttgaccttgaagaattcaaggaggaaacgaagcagataatgcttgccatggcgaatggacttggatttctccctgttcagatggctcttgaacacgatagcctcctcatgatagccgttcacgagagtactgtcccaaagtgcggctaaagaattatatgcatatgggaaatattgatccaccggcgcatatatgcatgcatgctcatgct

SEQ ID NO: 218656 - DNA, 455 bp, Glycine max
cttgaacacaccgcgtttcggagagagacgtcgcaatggggaggaggcctgcaaggtgttatcggcagataaaaaacaagccataccccaaatcacgcttttgccgtggtgttcctgatcctaagatcagaatttatgatgttggtatgaagaagaaaggtgttgatgagtttcccttctgtgttcatctggttagctgggaaaaagaaaatgtttcaagtgaagcattggaagctgctagaattgcatgcaacaaatatatggcgaaatttgctggaaaagatgctttccacttgagagtccgagtacatccattccatgttcttaggatcaacaaaatgctttcatgtgctggagctgatatgcttcagactggaatgagaggtgcatttggaaagccacagggaacatgtgctagagtcgccattggtcaagttcttctttctgtccgctgc

SEQ ID NO: 218657 - DNA, 532 bp, Glycine max
caacaaccaaaacaaaccaaacaattccccacaaggaacatacattactttgttctttttctttttctcaaatcttcttttaaagacaatcttatttgtttatttctgcacgagaattcgaaccttgaacaacataaacatgggaataaacacacgtacactagaaatcaccgttatctccggcgaaaacctccgcgtaacggaggacgcgtacgtcgtcgttcgggcggagtccttaaactgctgcaccacgagaaccgccaaggacgacggcaccaaactcctctcgtggaacgagaagttcctcttggacatgcccatgcatgcaaggtccataaccttcgaagtgcaatgtaacaggttcaagggctttcggccgctcggggtggcccgaatcgccgcctccgatttcctcggcggcgccgtgccggaaaatggcttgcaggtgctgagttacgggctgagggactgggaagggaggcggaacggtgtcattcattttgccgtgagggtggcggcgacgtcctcgtcg

SEQ ID NO: 218658 - DNA, 570 bp, Glycine max
  unsure (1)..(570): unsure at all n locations
gctagggttagtgctttgtttcactctttgctcttgatttcttccctgggattggcttctcaaatccatgtttcctctgggaaactagtccctggactatcatggaattactatttgttgacatgtcccaagcttgagaggattataaggaagcatcttgaggatgtcttcgagaaggacagtggagtagctcctggcatacttcgactcttcttccatgactgctttcctaatggatgcgatgcgtctatattgttgaatggagacggtgacgagaagcaacaccgtgctaactttggtttaaggcaagaggccattgacgccattgaaaaccttcgggttctcatttacaagcagtgtctaccagttgtctcatgctcagacatccttgttatcgcagcacgtgaagctgttcgccaattaggaggccctgattttgacgtgccactgggaagaaaagacggtctaggaccaaacgccaccgcgccggacaacctaccggcaccattctttcgaaccgacgatcttctcagaggattcngaaatagaggtttcgatgccaccgatgtg

SEQ ID NO: 218659 - DNA, 552 bp, Glycine max
gcggctttgcctgattctgattccaagtatgtggaaactcttgacaagttcagttcttgttaccctgtgtctggtgatgcagcactcaagaaaccattcagtgttgagtataaatggcaaaagaaacgttctggggacttgctcatgctggctcaccctcttcatgctaagcttctgtcatatgatcgtgatgttactgtgctgaatgattttaagtatagaagcattgatggtgaccttgttggtgttgttggagattcatgggtgttggaaaccaatcctattcctgtgacatggaattctaacaaaggtgtggagaaagagtcttatggcgagattgtcacggcgcttgttaaggatgttcaagcgctgaattcttcagcaataggaacaaattcatcttatttctatgggaagcaagttggaagggctgcgaggttggcgttgatagcggaagatgtgtcttaccctaaagtgatttcaaaagttaagaaatttctgaggagactattgagccctggttggatggaactttcaaagggaatgcttttc

SEQ ID NO: 218660 - DNA, 512 bp, Glycine max
atacacaaacacaaacacaaacacacgtgtcgagtgaattcaaatcaatttaggcagaaaatgaggtgttttggttttatagtgataggtctagtggctgtgcttggagggttacccttctcctcaaatgcaaaattagaaccctgtttttacaagaagacttgtccccaggtgcattttattgtatttaaagtcgtagagaaagtttcaagaacggatccacgtatgcctgccagtctcgttaggcttttcttccatgactgttttgttcaagggtgtgatgcatcaattttgttgaacaacactgccaccatagtgagtgagcaacaagctctgccaaacaacaactcaataagaggtttggatgttgtaaaccagatcaagacagagttggaaaaagcttgccctggcgtagtttctagcgctgatattcttacccttgcagctgaagtatcttctgttctggctcatggtccttatttgaaattcccttgggaatgagggatagttta

SEQ ID NO: 218661 - DNA, 522 bp, Glycine max
gcttaactgaaaattcattcatgtgttactatttctccaataccaaacaaaggataaggacttcaatactagaaatgaactcattattggggggcagtacaaccgcatccaaagcagaagttttagacactgttgtgtcaataaccgaggcagcactagtgcatcacagaacagcacggaaatcacaatgtttatggagtttcattcacattttacatatttagttggagatcactgaaattggctattcagtttctaaagaagttagtgccttaagctctcaactatgtaagcagcatacaagtccatggagtaattgatggcatcaatggcagcttcagccggtagaaagtcttcaacatcaactattttgttctcattcttcttgtaggcctcaaagaatcttctgatttcagcaagccgatgtggaggaagctcattgatgtcagtgtaatggcggaactcagggtcatcagcacaaactgctatgatcttgtcatccctctcaccctggtcaatcat

SEQ ID NO: 218662 - DNA, 407 bp, Glycine max
cagaggaaggtggttttggaatgtcatatgatcttctgtatggacgagctggattcttatggggtgcattgttcgtgaacaagcacctaggagaagatgcagtgcccaaagacattttgatgcttattattgatgcggtgttggctggtggtagagcaggagcatctgatattaaagactgcccattgatgtatagatggcatggaacaaggtacttgggtgcagcaaatggccttgctggtatccttcatgtgctgctacattttccacttccaagtgaggatgctgaggatgtcaagggaactttgtggtacctcatgagtaagcgtttccctcacagtggaaactatccctccagtgaaggtaatccaagggataagttagtgcaatggggtcatggggcgact

SEQ ID NO: 218663 - DNA, 497 bp, Glycine max
ctgataaaatttccattgcatcaaaacggtaacattgcataaccaaaaaataaattgtgagtcaaaggagaaaaggaaaaaaaaaaacagtttaagtattgatgagatgacattatacctatgaatgaagtggtagtagtcatggaacacgcaaattattcatccacacctagcaagacatccattgaagggagtgattaacttcacaacaatcttaagcttgaggcttctcagacttgagtggctctacaacttcccaggtgaagtcagggtcatcccttccaaagtgtccataagcagctgtcttgaggaacctatggccacccctcttaaggtccaagttaatggggatcattccaagtctgaaggctagattctccttcacaatttgaagaatctgcttgtcaggaatcttcccagttccataagtgtccacaaacactgacaagggctcagggacaccaatggcatatgaaacttggacaatgcaccttctg

SEQ ID NO: 218664 - DNA, 554 bp, Glycine max
aaaaaacctctttttaagtttcttgcttctttctctctgaaagaaaattgaagtcctaaccagttggctcttttgttttatcgctctccatggctcacaaaaccgagaaagaagaaaccgacttcaaagttccggaaacgattacgctttgcgtcaacaactgcggcgtcaccggaaaccctgccacgaataacatgtgccagaagtgcttcactgcctctaccgacaccacttacggcgccggaggtgccggaatagcttctccggcgaccagatccggcgtctacgcgcgtcctcagaagagatcttttcctgaagagccctcgccggtggcggatcctgcttcttgggaccagacgactccgtcggaggcgaagcgcgtggtcaaccgctgctccggatgccggcggaaggtcggactcaccggattccggtgccggtgcggcgagctcttctcgccgagcaccagtactccgaccgccacgactgcagctatgactacaaagccgcccgaagagaagccatcgcgagggagtatccggtgatcagagctg

SEQ ID NO: 218665 - DNA, 420 bp, Glycine max
ttttctttattatttgcgtggataatggctaacatcggacaactttctgacatgagaattggatcagtacgtgtcaccaacttatccatcacatacgtacattgctccattaaactaccatataaagctgatgtcatattattaaactaccgttgtatgccaaataagacttatgaggcacttgagaatggtccaaatgcccctattcctgaaccatcacccccttttactgtgaatgcggctaatgaatgggaccacgacttcagctgtgctgatagcgctacttgttgctgtatgcttgagtccggaaatgcttgcttcgagtggggtcactatgctcttgagggtgcttcctgctgcgatgaccactacagttgctgacctgcagactgtaccatgtggaacacttacgcctttact

SEQ ID NO: 218666 - DNA, 398 bp, Glycine max
actaaccatagcacatcgaactcgccatgtcccacaggaagttcgaagctccccgccacgggtctctggcattcttgccgcgaaagcgcgctgcccgtcaccggggtaaggtgaagagcttccctaaggatgaccccaagaagcccgtccacctgacggccgccatgggctacaaggccggtatgaccacaatcgtccgcgaccttgaccgtcctggtgcgaagttgcacaagaaggagattgtcgaggcctgcacagtcatcgagactcctcctatgatcgctgtcggtcttgtcggctacatcgagaccccccgcggtctacgatcgctcaccaccgtctgggccgagcacttgagcgacgaggtcaagcgccgattctatccgaactggtacaag

SEQ ID NO: 218667 - DNA, 551 bp, Glycine max
  unsure (1)..(551): unsure at all n locations
cggctcgagttcaaggaagataacaatgatggctcccagaggatctctggagatgctttgaaagatctgtacaagtcatttgtgtcagagtacccaattgtttcaattgaggatccatttgaccaggatgactgggagcactatgctaagctaactgctgaggttggagccaatgtacaaattgttggtgatgatctcttggttaccaaccccaagagggttcagaaggcaattgatactaaagcatgcaatgctcttctcctcaaggtcaaccaaattggttctgtgactgagagtattgaagctgtcaggatgtccaaaaaagctggatggggtgtcatggccagtcacagaagtggagagactgaggataccttcattgctgacctttctgttggtttggctacgggtcanattaagactggagctcatgcangtctgagcgtcttgctaaatataaccagctcttgagaattgangaggagcttggtgctgaagcaatgtacgccggaactaacttttcgtacccccgttgaaccctactaaagttt

SEQ ID NO: 218668 - DNA, 573 bp, Glycine max
gaacctccaaatgatgatttaatgaaacgttcacctgttggaaggaagggaaatttcatcagcaatgtcatgtggaggaacatcttaggtcaatccttgtatcagtttatggtgatatggtttcttcagtcaagaggaaaatcaatctttttacttgagggccccaattcagatctagtcttaaacacgcttatttttaacacgtttgtcttctgccaggttttcaatgagataaattcacgtgaaatggagaaaataaacgtttttaaaggcatattggataactatgttttcgtgggtgtcatcagtgctactgttttcttccaaatcataatagttgagtacttgggaacctttgcaaacacaacacctctcaccctggcacagtggttcttttgcttgttggttggatttttgggcatgccaattgctgctcgcttaaagaagatccctgtttgatgcacctgaatggataaaaagcagtagttggttaccgctagttgttgcattgcttcaagggtcattatgcctttacattcactaactcgcctggtaatgcttgaggctttcttg

SEQ ID NO: 218669 - DNA, 512 bp, Glycine max
tgaccagtttcaccgcacgaatatcttgttgtttggagcgatccgagaaaaactctgtacacatgttggtttaccaggacctccttacaggtgatgagcttctgtatgtctactttcgttccacggaacttgagaatggaatgctttgttacgctgtggagaagtgaactgccccagcttcccggaacttccattgaaggagttgaaactggtggttacaccatttttgacaactccactggcaacaagcctgatgtcattttgatcggaactggttcggaattggaaatcgctgccaaagctgctgatgacctaaggaaggaagggaaggctgttagagttgtttcccttgtttcttgcgaactttatgatgagcaatcagaagcctacaaggagagcgttttccctgctgctgtttcagccagaagtagcattgtgcaagatcaacatttgtgtgggagaaaattgttggagcaaagggaaaagcaataggcattgatcgttttggagct

SEQ ID NO: 218670 - DNA, 508 bp, Glycine max
attgaatctcagaattctctaaaagagatctttttctgctctttgaagaaagaagggtctttgcttgattttggagatgtctctgctctcagatctcatcaaccttaacctctccgataccaccgagaaggtgatcgcagagtacatatggatcggtggatcaggaatggacctgaggagcaaagcaaggactctcccaggaccagttagcgacccttcagagcttcccaagtggaactatgatggttccagcacaggtcaagctcctggtgaagacagtgaagtgattttatacccacaagccattttcagggatccattcagaaggggtaacaatatcttggttatctgtgatgcctacactcctgctggagaacctattcccactaacaagaggcacgctgctgccaaggttttcagccatcctgatgttgttgctgaagtgccatggtacggtattgaacaagaatacaccttgttgcagaaagatatccaatggcctcttggg

SEQ ID NO: 218671 - DNA, 592 bp, Glycine max
  unsure (1)..(592): unsure at all n locations
ccaatttttgtttttttttttttcaatttttaatctcctatccctttttttttaattttggaatcgaaatatctaatctaaataatccaaaaattcactcttaatcttgacagtgatatatgttgtatatgtaaatcctagatgtaaaaataggcagacttctcccgggaaaaaaagtaggtaaaaaaatatgctaagtataaattgtctactgatgaaatacgaaagctgatgatattgaaaaaaaaagaattgtaaataaggttcaggttcgacttccatagagaatatagatgatattgtctataatgatagaaaaaaataaaaaactttcgaaagattttatccaattgaaattttaaaaatgactgggataaacttaagaattcaattattgaaattgaataagtaaacaatttaattggattggtcgaatggtatcaaaaaaatggagtactaactcccatttcttatttattattgaattaaccgatcaacttgctttgttatcgaacatttctttttgatttcaaaaattttccggaaaaaattngaatctatttttatatgcgaatcaatcctactacttctg

SEQ ID NO: 218672 - DNA, 520 bp, Glycine max
ccattttccatttcttgaacacttcgactttctcggagtacacggtgggggattcggcctgtgtggtgaagtttgtgagcacagaccacagtctcagcatcaagaacctcaccttgctcagttgtggtgtctccacaggggttggagctgcttggaatacagctaatgtgcattcgggttcaactgtagctgttttcggcttacgagctgttgggctcgctgttgctgaaggggcacgagctagaggtgcatccaaaataataggtgtagacatcaaccctgacaaattcatcaaagctatgggagtgacaaacttcataaaccccaaggatgaagagaagccagtatacgagagaattagagaaatgactgatggaggtgtacactacagttttgaatgtactggaaacgtggacgttcttatggatgccttcttgtctgctcatgagggttggggattgactgtagtattgggaattcatgcatcaccaacttttgttgacatccacccaatggagct

SEQ ID NO: 218673 - DNA, 570 bp, Glycine max
  unsure (1)..(570): unsure at all n locations
tgttttttctttttctttgtaactagcacgaactcttatgacgctgatacaactcttatatgaataaacatgtgcggatatacctcgctttacttctttaaattgaaaacagctcttaaggttattagggcaatacttgccataccttgtgccttgtgagtcttcggccaggagcttgatcagtaccggtttatccccagtaacctgcaacgaagtgattgatcacatatataccagtctctcatcaaccttgttaagtgtgtgccacaatacccactttttgagaactttcacaaatagtccaaataagcgtgcagtagacatcataacacctggtcccatttctgtccttgccctgctttcacccagtgactaggtgcatagattgccttcagcctaacatagtccgcaataccttcaattaatncaccaagagcacgaccattcccactccactgccaaacgtgcaccatttcatggtacagcacaccctgtatctttggttttacgtgccctttatagattccaacgtatcttgcactgagatggatttgattgatgctagtatat

SEQ ID NO: 218674 - DNA, 401 bp, Glycine max
gcaccctctttggctcaacaatccttcagacccagagccctcgttgtcccagttaaaaaagacgcttccaccctccaatatattactcaaatcaaacaaagaacaccactcgtcccagaaaacctagtacttgacatcggtggccaattcctgtgggtcgattgcgacaacaactacgtctcctccacttaccgccccgcacggtgtggctccgcccagtgctccctcgccagatccgacagctgcggaaactgcttctccgccccaaaacccggctgcaacaacaacacgtgcggcgtcacgccagacaacaccgtcaccggcaccgtcaccagcggcgagctcgcgcaagacgtcgtctccctccaatccaccaacggtttcaaccctatacaaaacgc

SEQ ID NO: 218675 - DNA, 444 bp, Glycine max
tctgaaacttcagaagcggcttgccgctagcgttctcaagtgtggtagaggcaaagtttggcttgaccctaatgaggtcaatgaaatctccatggctaattctcgacaaaacataaggaaattggttaaggatggcttcattatcaggaagccaactaagattcattcccgttcccgcgctcgcagaatgaaggaggccaagaggaagggacgtcactctggttatggtaagcgtaagggtacaagagaggctaggctccccaccaaaatcctttggatgaggaggatgcgtgtcctcagacgattgctccgcaagtacagggaagcaaagaagattgacaagcatatgtaccatgatatgtacatgaaggtaaagggtcatgtcttcaagaacaagagagtcttgatggagagcatacacaagtccaaggctgaaaaggcaag

SEQ ID NO: 218676 - DNA, 535 bp, Glycine max
ctcgagccgaatcggctcgagatcaccgcattattcatcttttctcttgtcattcaccaattgacaattcattttatttcttaagatgccaactgacacgtcatcagtttccggcgaaatcgtgtgtgtgaccggcgccggcggtttcatagcctcttggcttgtcaaacttctcttagagaaaggctacactgcgagaggaaccgtgagaaatccagatgatccgaaaaatggtcatttgaaagagccggaaggaggcaaggagaggctaactctgcataaagacgatctcttcgatattgcctccattaaagcagctcttcacggctgccactgtggtcttccacaccgtttctccggtcaccgacaaccctgaagagatggtggagcccgcagtgcaaggaacgaagaatgtgatcatagcagcagcagaagcgaaagtgcgacgcgtggtgctcacttcttcaataggcaccgtctatatggaccccaatacgagtagggatgcgtcggatgatgaatcattctggagtga

SEQ ID NO: 218677 - DNA, 558 bp, Glycine max
gttaaaagttaaaacatgcatgatcgcatttattattttgggttccattatactaacacaactctgtttattaatgacaaatacaaatacattcagccactccaaatacatgacttaagcatacacaactgattaaggaatctggttccttcaatttcacatttatttaaaaccaggaacagtacttatgcaaccatagggtccttagatagagatactgttgggaattcctctgaaagtcaatccctcctcactagaaggatagagcagagtgtaaggcattttagctggcccatagcggcttctcaatgtctcatctttgctcttctctataagcttcttttcaatctcttcaagcttttttccaaacctcttaaatgcctctaatggaccggcatcagaagtccagtaatcaccaccatctctctgtccaaggtagaactcatcagatgcgtgccttgacacgatttctataacttgaaggtcaaagaagggctccttcttgccagaaatagtcttcaaaaactccctctcagggttcttaaccaacgcatcata

SEQ ID NO: 218678 - DNA, 526 bp, Glycine max
atcatattaaatattaaatagaaaaaatggcccgatcatttatcaaaggccaatcttcggtagaagagaaggttcctttggaacacttatttctatttcagtataccgggtctctttctttcatttcaaaaaatttatagaatttcgattttgaaatgaaagaaaagtgtggggataaatataaatgacaaaaagatatcggaacataatcttggaagagatgatggaagcaggagttcattttggccacggtactagaaaatggaatcctaaaatgtcaccttatatatctgcaaagcgtaagggtattcatattataaatcttattagaactgctcggtttttatcagaagcttgtgatttagtttttgatgcagcaagtgagggaaaacaattcttaattgttggtacaaaaaaaaaagcagcggatttagtagcacgggctgcaataagagctcggtgtcattatgttaataaaaagtggctcggcggtatgttaacgaattggtatactacagaaacacga

SEQ ID NO: 218679 - DNA, 429 bp, Glycine max
aatccaaagcgaaacagtattcataaaggtttaatcaaagcccaaacagtcataacactaattgaacaaaaacattaaccaaaacttttaaataactaaaattaaaatagaaccacagagaattcacttccaacgaatttaagcatcggccttctggtagacataggtcaagccacacttgccgcaatagtggcggtcgaagtgattggccatgaaagtcccggcaccacactcggcgttggggcactccttgcggagcctctgcacttttccagaatcgtcgaccttgtagaactggagaatgccgagcttgaccttcttgtgcttgtgttagatcttcttgggcttggtgtaggtcttcttcttgcgcttcttggcgccaccgcggaaaccgaggacgaggtggagggcggactccttctggatgtt

SEQ ID NO: 218680 - DNA, 284 bp, Glycine max
agaagcttgaaaatggagcatatgtaacattcgtgttgggattaggagggacttgacaaacaactagacatatacctggatccctgcctactattattgccagtccaggacttagcttggctagtatacaaatagctgtcattagcactttggccgtgcattcacctagctaggctctttttcacatttgatcggaatggacagtttgaggccaagaacccatccaccaagtgcaagtaagcgccctagtcatgacaacaggccatgccagcatggggcttaaa

SEQ ID NO: 218681 - DNA, 429 bp, Glycine max
gtgattggtgtgactcgttcttcttcatcggtagcctcttctcttgcagatggtgcgctaggtggttctctcacccgaaaatgtcttgctgcggaggtaactgcggttgcggaagcgcctgctagtgcggcaacagctgcagaggctgggagatgtacccagacttgagctacaccgagtcaaccaccaccgagaccttggtcatgggagtggcaccagttaaggctcaattcgagagtgctgaaatgggtgttcccgctgagaacgatggctgccaatgtggagctaactgcaccttgctcccctgcactcgctagtgaggtggtggaaagctaaagcttcgagcagaaatggcccttatagatagtgataaatactatgcgtagctgcaaaacttgcaaattatgtagtatgtattatgctgcactc

SEQ ID NO: 218682 - DNA, 500 bp, Glycine max
  unsure (1)..(500): unsure at all n locations
tttccctctatcgtcttctccctccttgttcaatggtcttagggtttccggtgtccatgcgtagaagctagcaataatgcgtttttgaaacccgtattcatctgtatccaacgatttactagaaggagatcgcaatttctccatcttctcgtttcggtggctcgtgaaatcgaaagttatcgaaactttcgcgcgacacgaagtattgggaaccaagcaaaatttctatggctgacgaaccactatatccaatagcagtgcttatagatgagttgaaaaatgatgacatccagctgcggttaaactcaattcgcaggctatcaacaattgcgcgtgctcttggggaggagcgaacccgtcgagaattaattccatttttgagtgaaaataatgacgatgatgatgaagtacttcttgcaatggcagaagagttgggagtgttcattccttatgttgngggagtggaacatgctagtgtgttgctgccaccgctggagaca

SEQ ID NO: 218683 - DNA, 614 bp, Glycine max
  unsure (1)..(614): unsure at all n locations
gttgagcaccacttcattaaactcttcccaccgttaagctccactcatcccccatgatcccttcaggaataatgaagcaccccagaggaaagcttcctcttcccatcattgtcatcacaacctgtgttcttgcttttgtggctatcttgtatgtagagaggctcagtttcctctcttccaagtccattttcaagttcaagccatgtcctagaaaaaccaccaaaccaaagactagtgacaaaaaaacagatgaggaggttgtggttgtgaatgcatcatcatggattgatgacaggtttgattttgaccctgaggagtgcaatgttgcaaatgggaaatgggtgtttaaccattcaataaagcctctctactcagacataagctgtccatacatagatagacaattttcttgtgtcaagaatgggaggaatgattctgactatcgccattgggagtggcagccagaagattgcaccttgccacgtttcaacccagagcttgccctcagaaagcttcaagggaaaagggtgctattcgtggnggattcactgcaagaaaccaatgggaatcttttgtctgctcggtagatgggtcatacctcataagcataagtc

SEQ ID NO: 218684 - DNA, 497 bp, Glycine max
aactaacagatcaccaagaaaagcacaagcttcacaagccatgaaagaaatagtagcatttactagtctaggacttggaagtcaacatattttatccgaatgaaccaattgacttgggtatgggtaccaagcaaaaaacaaagtaggctctggcaatcacacaaaacaggttttatggccttttcacgacttgtccgcctcatatacattcatacatacatgatattcgtccaactcttatattggaaaaatattgatttcaattaaaccattgcaggctgcaatatcatatatatattcatatacacaaacaatatcttcctgtgacagcaactgtggtgatgcgtcatgacgtgaactgtaccttttatatgcgatgatgttatttcttatccgttgtaacgccaacaacaacattgctcaccaatttcccacttgaatcaacagacattggattttctaccactaccggttgactttgagatttgggcattgat

SEQ ID NO: 218685 - DNA, 227 bp, Glycine max
ttatatttttttttttttttttttttaaaaagaactcgcccataagagaacattgttattgtgagtataataacaagcgagacaacaataaaatttgttacgctagaacttgacgaacaaggacataaacatcttgtttgggaacacactgccaataacaataaccgactgaccctgtgcttgccctgcattctgggctgaaccaaacacagcgaaaacggcggagt

SEQ ID NO: 218686 - DNA, 583 bp, Glycine max
  unsure (1)..(583): unsure at all n locations
ctcgagccgcaattgtttaagagtgtattactaaggaaaaacaatgaaagttgtgtacttccttgttgccatcttggctttgacatcctctcttgtctctgcctatgatcctagtcctctgcaagatttctgtgtggcagccaaagaaaaagatggtgtgtttgtgaacgggaaattttgcaaggaccctaagcttgtcaaagctgaagatttcttcagacatgtagaaccggggaagactgacaacccagtaggttcaaacgtgactcaggtgtttgttgatcaactaccgggactaaacacgcttggcatagctttggctcgcatagattttgcaccaaagggtttgaacgctccccacactcaccctcgcggcactgagatccttatagtccttgagggtactctttatgttggatttgtgacttccaatcaagatggaaatcgcctcttcaccaaagtgctgaacaagggtgatgtgtctgtgttcccaattggtctgattcatttccaattgaatgtgggatatggcaatgctngtgccattgctggccttagcagtcaaaatccaggagctatcact

SEQ ID NO: 218687 - DNA, 574 bp, Glycine max
  unsure (1)..(574): unsure at all n locations
cttcgcacaccaaacccttccttcctatctctcactaatctaatggaatccgcagcactgtcgcgcataggcctggcgggcctggcggtgatgggccaaaacctagccctaaacatcgcagaaaaggggttcccgatctccgtgtacaaccgcacggcctccaaagtggaccagaccgtagatcgtgcccgcaacgagggctccctccctctcacgggccaatacacccctcgcgacttcgttctctccctccagcgccccagatccgtcatcatcctcgtcaaggccggctccccagtcgaccacaccatcgccgtcctctccgaccacctcgaccccggcgactgcatcatcgacggcggcaacgagtggtacgagaacaccgagcgccgcatgaacctcgtcgccgacaaaggcctcctctacctcggcatgggcgtctccggcggcgaagacggcgcacgccacggtccctccctcatgcccggtgggtcccaccattgcctactcaacgtncaggacatnctncacataatcgccgnccaggtcgaggacggggcctgcgttacctaca

SEQ ID NO: 218688 - DNA, 498 bp, Glycine max
  unsure (1)..(498): unsure at all n locations
cgaagataccttctttcagcctcccttcaacacccttttggccctttattcttcaaagtctcaaagcaaagctcgaagacctgagaagaacaaagggttgattaaattctgtgtggttgttgttggaggttgaaacacaagttgccaccccaagtgtgtgttaatcttaaatttcacaagcaagttgcttttttggagtattatattgtatgaccaaatatttttgtgttttaggactagatattttgcttctggtggcaatttttctcttctccttctggatctcatcctttgtgttcttctttgtctctcatctgtctgaggatttttccatcttagttcctggaggcaccaggaacctgacccaataaacaaaccctnttttttctttctaattcttctaaagtttcattttttaatccaatggcaacttgggtattatcagaatgtagcttggagcctcttgctccagtaatccctagacctagaactgggcag

SEQ ID NO: 218689 - DNA, 402 bp, Glycine max
ctcgagccgctggttttgagggagacaacatgattgagaggtccacaaaccttgactggtacaagggtccaactctgcttgatgcacttgaccagattagtgagcccaagaggccctctgacaagcccctcaggcttccccttcaggatgtgtacaagattggaggtattggaactgtgccagtgggacgtgttgagaccggtgtcttgaagcctggaatggtggtgacttttgcaccaactggactgacaactgaagtcaagtctgtggagatgcaccatgaatctcttacagaggcacatcctggtgacaatgtgggattcaatgttaagaaatgttgctgtaaggattggaagcgtggttatgttgcctcaaactcaaaggatgaccctgcaaaggagg

SEQ ID NO: 218690 - DNA, 577 bp, Glycine max
  unsure (1)..(577): unsure at all n locations
aagaaatttaagtgaggagctagagaatgatgatgaagtctgctatgtgtgcagtggtggttgtagcacttcttcttctggcggaggtggggcccatggctgaggctgtgacatgcaccccaacagagttgagtccgtgtcttccagcaatcacttccggtgctaaaccttccaatgcttgttgcacgaagctgaagcagcaaaaaccatgcttatgtggctacctcaaaaacgctagcttgaagcagtatgttaactctcctaatgcccgaaaaaccgttgcttcttgtgggattccctttccaacttgttaattaattaagccttcttataattaaagngtgggatatatatatatatatagataaacagtttaatttatacacactttgatcctacaaagcatcttgacacaagcattcaataggatttcaccactttatcgcaacattttaacatgatgcnggaataaagtaaattcttgttgaatatttggataacgatgttatatactcatagttngtgtgtataaattaaanctatatttattatttactctatatatgtcactctacgt

SEQ ID NO: 218691 - DNA, 622 bp, Glycine max
  unsure (1)..(622): unsure at all n locations
cgcatcaaagggcaagccgccgctctcggctggcaacaacaacaacggcggatgggataattgggacccggacgacggattcggaccgccccgaaccagacgggggttaatcagcaaaacgattatctttctgtcgtttctcagggatttggtaaattatcattggctgctgctaatgttgttcaggccgggacaaaagaattctctgctaaggtaaaagagggtggttatgattacaaggtcaatgaaactgtcaatgttgtctctcagaagacatcagagattggacaaaggacttggggtataatgaaaggggtcatggcattggcttcacagaaggttgaggaattcgctagagataacccgaattggatgtctgataactggcaacgaaatgaaagtgatagaaatggtttctaccaggagttcaatcgagagaataatggccgaaattcttctaccagagaaggacaacattcttcaggtgggcaaactaatacttttcactcaagctcttgggatgattggggccacaatgattctaggaaggaagaaacagctaaaggatcagctcctcagtcatcagggtggaagttngataataatataactcaagctcttg

SEQ ID NO: 218692 - DNA, 493 bp, Glycine max
  unsure (1)..(493): unsure at all n locations
gtgagatttgcgaatctgagaaatggcggattcttctcgggaggagaacgtttacatggcgaaattggcggagcaggccgagcgttacgaggagatggttgagttcatggagaaggttgcaaagactgtggaggttgaagagttgacggtggaggagaggaatctcctctctgtggcttacaagaacgtgattggtgcgaggagggcttcgtggaggatcatatcctccattgagcagaaggaggagagcaggggcaatgaggaccacgtggccattataaaggagtacaggggcaaaattgaggctgaactcagcaagatctgtgatgggattttgaacctccttgagtccaacctcattccttccgctgcatctcccgagagcaaagtcttttaccttaaaatgaagggtgattaccacaggtaccttgctgagttcaagaccggggcagagaggaaagaggctgcanagagtactttgcttgcttacaaa

SEQ ID NO: 218693 - DNA, 478 bp, Glycine max
ggatgagcaagttactactcattcgtgttgttgggttcgtggctacctttgtgaccatggtgaggatgatggcgcccataaacgtgagtgcccaaaacataggtgatgacatcgtcacacaagacttcttgaacagcataaacatggatgctgatgatggttgcgcagggaagaacttcgactcacgagatgctttgctctgtgctcacaattcctacaacgagtttggaaggcttggtcatcaggatgactccaagcgtgaggttggaactgctttcacccatttcacccataatacaggacattgttgctacatataagagattaacggagcatcacgggactactgtgacgagagcaacaccgagtacccatgtgcgcctaacaaagcgtactatgggcgttgaccaatccaactatcatggaacttcaactacggaccaggagggcagagcatcggacttgatggattgaacgc

SEQ ID NO: 218694 - DNA, 465 bp, Glycine max
atcacagaattaacgtatttttattcaatattggatgcacaatatcgatggtaatcagatacaatattcccaaaagtagtaattacattaataatcaaaataaggctgtaagccttgaatggtttattttctgatatatgttaagatataccgtatgaatgtatgatgtcatcatatggaaccatctatactgataaattagcaagtaagattgtcaccaggggaaacaccaagttgtgaacaatactgggtgtagtaattaacacgagcctgaacagtactagggtttgcaccatcacattcaagtcggccattgatagctctaatggttgcaccaaaaccctggttgatgacaggacgcacatgttccatccagtaccacaaggctgtcttgaaggacacaacagggtcattggccaccgtctctggagcgttcaatccatcaaatccgatgctctgccctgc

SEQ ID NO: 218695 - DNA, 561 bp, Glycine max
ggaggatggaaatgtcagagttgatatgggggaaccaattcttaaagcctcagatgtgcctactaaattacatgcaaataaggataatgctgttgttaaatcagaactagttgtagatggagttatctggcatgtgacctgtgtcagcatgggaaatccacactgtgtaactttcagtagagaaggaagccagaatttgcttgttgatgaattgaagctagcagaaattggcccaaaatttgaacatcatgaggtgttccctgcacgaactaacacagagtttgtacaagtgttgtctaattctcacttgaaaatgtgtgtctgggagcggggagcaagagcaaccctagcctgtggaactggagcttgtgctactgttgttgcagcagttcttgagcgtcgtgctgggaagaattgcacggttgatctacctggaggacctcttcagattgaatggagggaggaaagatatcatgtttatatgacaggctcagccgatgtagtttatttacggatctttgcccctttaatatgttgcccccattgttaaaacccatatgg

SEQ ID NO: 218696 - DNA, 569 bp, Glycine max
  unsure (1)..(569): unsure at all n locations
tggtaaccctctggctcggttacaccctataccagcggctacgcttcaagctccctcctggcccacggccctggccggtagtcggtaacctctacgacataaaacccgtccggttccggtgcttcgctgagtgggcgcagtcttacggccctatcatatcggtctggttcggctcgaccctaaacgtcatcgtttcaaactcggagttggccaaggaggttctgaaggagcacgatcagcagctggcggaccggcaccggagccggtcggcggcgaagttcagccgcgacgggaaggatctcatttgggccgattatgggccgcactacgtgaaggtgaggaaggtttgcacgctcgagcttttcacgccgaagcgcctcgagtccctcacgcccattagggaggacgaggccaccaccatggttgagatccgtttacaatcactgcaccaccactggaaatttagggaaagcaatattggtgaagaagcactnggggtctgtggcattcaacaacatcaccaggttggcatttggaaaagatctgtgaactcagaagtgttatggatg

SEQ ID NO: 218697 - DNA, 487 bp, Glycine max
acttcattgacaagattctttactattatgtttacaatgtcataactcaactcgtgtaacaaaaaaaaaaaaggattttgtttttatcatcattatcattgaggcactgatagttgatcatccaaggaaggcactagtgtttctcaaagccatgctgggttcttcaagggattaacgacagccttcacttgcaagtagtttttgagactatactctcctttttctctgccttgaccactcattttgtaccctccaaagggaattgcagcatcaaatgtgtcatagcagtttatccaaactgttccaactctgagtgcccgcgtcaaagtgtttgcagtgtccatgttctttgtgaacactcctgccgcaagcccgtaacgtgtgttgttcgctctttgaactacctcaccaaggggccttgaattttaatatggattggactggaccaaagatctcatcctttgcaatcagcatgccatccttaaca

SEQ ID NO: 218698 - DNA, 544 bp, Glycine max
acacaactatggttttatcccaagaaccatttgtgaagacagtgatcctatggacgtgctggttctaatgcaggaacccgtgcttcctggttccttccttcgtgctcgtgctattggactaatgcctatgattgaccagggtgagagggatgacaagatcatagcagtttgtgctgatgaccctgagttccgccattacactgacatcaatgagcttcctccacatcggcttgctgaaatcagaagattctttgaggactacaagaagaatgagaacaaaatagttgatgttgaagactttctaccggctgaagctgccattgatgccatcaattactccatggacttgtatgctgcttacatagttgagagcttaaggcactaacttctttagaaactgaatagccaatttcagtgatctccaactaaatatgtaaaatgtgaatgaaactccataaacattgtgatttccgtgctgttctgtgatgcactagtgctgcctcggttattgacacaacagtgtctaaaacttctgctttggatg

SEQ ID NO: 218699 - DNA, 491 bp, Glycine max
ggattacgcttgtctctgaacaaatattcaaacttataagatacatgaaccatgttggggcttatccaaattaaaaaacatgaaccctgtatgtatcaaaaggaaataaaaaatacttgtgtttaacagtttatttgaaactcgtagttgcgaagctcaacctaaattccgcaggcggcgtttattatgaatgagagaatgagataatgctaattattgaaacgttttccttctacgcagcggaggttaagttgaagttatcacacgttgttcggcttccatagagcaaagagctgaatcccaatcttgaagtagccaaatcgaactgcaaaagattatcctccagctgatgtcctccaatcactatcgaagccctcggattcttacctccattcacaaacccaaggcataacaccttatcatggctcacactaaccatcgagttcggtccaaaaatcctacaaaccgtattttggttctgcagcacaagc

SEQ ID NO: 218700 - DNA, 526 bp, Glycine max
gagccatttgggagttaggttctgcacgctctgcttccagcgagtgttctttcttcgtttcaacaccttaatttgcacacgctgcttcttcagcttgagaaatggcacaagaaacctttctattcacatctgaatctgtaaacgagggtcaccccgacaagctgtgcgaccagatctctgatgcagtgctcgatgcgtgccttgaacaggaccctgacagcaaggttgcctgtgagacatgcaccaagaccaacatggtcatggtctttggagagatcacaaccaaggccaacgtagactatgagaagattgtccgtgacacatgccgcgaaattggattcatctctgatgatgttggtcttgatgctgacaaatgcaaggtgttggtcaacattgagcagcagagccctgatatcgcccagggtgtgcacggtcacttcaccaagcgcccagaggaggttggtgctggtgaccagggtcacatgtttggctatgccactgatgaataccctgagtacatgcccct

SEQ ID NO: 218701 - DNA, 335 bp, Glycine max
gatatatagaaaaacaaaggagaaaagatagaaatggagaagtttccagttgttgacatggggaaccttaataatgaagagagatcagcaaccatggagataatcaaagatgcctgtgagaactggggtttctttgagttggtgaaccatgggatatccatagagttgatggacaccgtggagaggatgacaaaagagcactacaaaaagtgtatggagcacaggttcaaagacatggtagcaagcaaaggtttgtagtctgctcaatctgaaatcaatgatttgggatggggaaagcacttttctttttgcgccaccttcctgcctctaacatt

SEQ ID NO: 218702 - DNA, 379 bp, Glycine max
ctggcctataagaatactgttgagtctataacagggattatatctaaaaccatctcaactaagggcatgctagctgtatacaatgctttatctgaagatgagaaaagggaatttgagaaggcttatagtgcttcttattatccttgcatggaaattctgtatgagtgctatgaggatgtagccagtggtagtgagattcgcagcgttgttctggctgggcgtcgcttttatgagaaagagggtctacctgcttttcccatgggtaacattgatcaaaccctcatgtggaaggttggtgagcgtgttcgatctacaagagcagccggtgatcaaggcccattatatcctttcctgctggtgtctctgtggcattgatgat

SEQ ID NO: 218703 - DNA, 389 bp, Glycine max
cccgacccgagcgggataacggccatctcgcttcttgagctgcaccaccatccatgatgcctggcgtgttctggtctatcccgtatgagttgctggctatcatagcttctgatgtggcggtggttttgatctttctcggagctgcgactctggtggacacctgtcctttgctcatgtttatgatcccacctcacccatttagtcctcgtttgctgcacagggtcttgcccctgctggactcggcgacactaaagctgaacattgttgaggatccttttttgtcaaatacactcatgcccttctggcctgccatgacctctccatcgaggatatgagggggcttgatggtcttaaagaattaggacaccatgaggaatgtgaagctgcct

SEQ ID NO: 218704 - DNA, 595 bp, Glycine max
cacaaccgaaacagtttccatctctctcacaaaatgacaacaatatcaaattgctcccttctcttcctcttcctcttcctctccaccctccacatagcttccaccctctcaacccccaccaacttcatcaagtcctcctgcagcaccacccagtacccagccctctgcatccagtccctctccgtctacgcctccaccatccagcaagacccccacgagctcgtccagacagccctctccctctccctcaaccacaccgaggccaccaaaaccttcgtcgcaaaatgcaacaaattcagaggcctcaaaccgagagaatacgctgccttgaaggactgcgctgaagaaatcagtgacagcgtcgaccggctcagccggtcgctgaaggaactcaaattgtgtaaggtgaagggtgaggacttcacgtggcacatcagcaacgttgagacgtgggtgagttcggctctgaccgatgagagcacttgcggcgatgggttcgccggggaggcgctgaatgggaagattaaggaggcgatcagggctagaatggtcaatgctgctcaggttactagcaatgctctctcgctaataatca

SEQ ID NO: 218705 - DNA, 467 bp, Glycine max
caaacggttcatgcttaatcaagttgggaacaacaacaacaacaaaaatcaagccaatgtttgtgggttttggtttcatttcattaagatgatctgtttatctcttttcttctttttaaaatttaaagtctttgtattttgtatgtaaagatgtaaaattatgattattaggtggtgcatgtgtcgcgtcatgggccaatgttatcctctgcttttaagttggaagaggcccaactcatgtgtgatgtacggctgtgattgtgtaatttaatttgcaaaatcaaaaataacaccagagtcatatatatgcatctctttattttctctggcccccaccatgtcttctatgtaatatttgttgccctcttcccccaagtatatgacaaggttgggtttctttttatccacgcctgtgcccgttatcacttgctatggataattgaaatccggtgagagtgagaaagtgg

SEQ ID NO: 218706 - DNA, 552 bp, Glycine max
  unsure (1)..(552): unsure at all n locations
attcaatataattcaccaccaccaccatcaccgccacctccaacacctgtttatcattacaattcaccgccaccaccgtcatctccaccacctgcacctgtatatgaagggcctttgccacccgtcatcggagtctcgtatgcatctcctcctccaccacccttttattgattcttttgagaacttttctcctctaacccttcgcctctaccatagcaacgaaaaaaaaccaaaaacacccattcaagatcagttcatacttttgttattattggtggccatttcttccgtgccctcttcttcctgtgccagccaggtcaagtacgcgacactcgtcgcaaaattaataaaacctgagaaatcgagaagggcttgtgtaaggctgcacacgttttttgtaatatgggatgaaaactgagaagaggttgttacagtggattgaggttagaggagaaagtctctccatattgatttgactcggtatggatattcagagttgtgaaataaaaatggctgcgaaagagangttgcagagaaaatgtgtatgtatag

SEQ ID NO: 218707 - DNA, 443 bp, Glycine max
agtacccaactggccaacaactacaataaaagttaatcaaaacacaaacatattaaccactgaatcaatgacgcaaaattaaaacgtaacaaagcgtataaatgatatcaccaccatgcatgatgcatgcatgcatatattgcgcgcggtggatgcaaaatttccccatatgcatattaattctttaagccgcaattttgggacagtactctcgttgaacggctttcatgaggaggctatcgtgttcaagagccatctgaacagggagaaatccaagtccattcgccatggcgagcattatgtgcttcgtttcctccttgaattcttcaaggtcaaccctcccattcaagtcgtggtcgaattgcacgaacatggactcgtacacacgtgcgagttcgtgggaggcacgcttcacgtcgacgccgaagtgggtctcgaacacc

SEQ ID NO: 218708 - DNA, 528 bp, Glycine max
accaacaaaatatgacattcattccatttaagatggttcataaaagattagataaacttaacatagtttaatagtttaatactacgagtagagcaattaagaaactcaaattgagtcaaacacaactattgtggtcaaagcccactggttccatgttacaagccatctaagcagtagcagtagcactagatagaaaagcttgtcctggttgacggtttgccagtggtccatggcacccaagaagcttagcattcacaccatcaggcacaatcctgctctctgacttgtacttgagataatcagcacggcttaacttggtgaaaccccatttccggctaactatgatcttctgacgaccagggaacttaaacttagcacgacgaagagcctcctgtgcatgatgactgttgctgtccttgcagcggacagtatgaagaacctgaccaatggcgactctagcacatgttccctgtggctttccaaatgcacctctcattccagtctgaagcctatcatctccagcacatg

SEQ ID NO: 218709 - DNA, 547 bp, Glycine max
  unsure (1)..(547): unsure at all n locations
gtcactaacaacgcactctcaactcctggcggcgtggctttccgtgacaaaataggggctgaatacgccaagcgaacacttgactcggccacccaattcatatggaggatctttcagcaaaacaacccttctgacagaaaaaatgtgcagaaggtaagcttattcgttgatgacatggatggtgttgcatatactagcaacaatcaaatccatctcagtgcaagatacgttggaaacaataaaggggacgtgaaaacagagataacaggtgtgctgtaccatgaaatggtgcacgtttggcagtggagtgggaatggtcgtgctcctggtggattaattgaaggtattgcggactatgttaggctgaaggcaaactatgcacctagtcactgggtgaaagcagggcaaggacagaaatgggaccagggttatgatgttactgcacgctntttggactattgtgatagtctcaaaagtgggtttgtggcacaacttaacaagttgatgagaactggttatagtgatcaatacttcgttcagttactgg

SEQ ID NO: 218710 - DNA, 545 bp, Glycine max
  unsure (1)..(545): unsure at all n locations
ctcgagccgcaacaaacaggcaactgagtgtggttcaccctatttacaaacttctgtttcctcactaccgtgacaccatgaatattaattcacttgcccggaaagccctggtcaatgcagatggtattatagagaaaacattcttgtggggtaggtactctatggaaatgtccgctgtcatttacaaggactgggttttcactgatcaagcattacctaatgatcttgtaaagagaggagttgctgttaaggacccatctgctccccatggagttcgtcttttgattgaggactatccttatgcttctgatgggctagagatatgggatgccatcaagtcctgggtgcaagaatatgtctcattctactacaagtcagatgaggaactccaaaaagaccctgaactccaagcttggtggaaagaacttgtagaggtgggtcatggtgatttgaaagataagccatggtggcaaaagatgcacactcgtgaagagttggttgaagcttncgctatcctcatatggattggctcagcccttcatgct

SEQ ID NO: 218711 - DNA, 530 bp, Glycine max
gtagaaacgaagccgccatttccttcctcaccaacgtcgcccgcactgccttcggcctgggcgcagcggccaccgccgtctcctcttccctctacaccgtcgacggcggccagcgcgccgtcctcttcgaccgcttccgcggcatcctggactccaccgtcggcgaagggacccacttcctcatcccctgggtccagaaaccctacatcttcgacatccgcactcgtccccacaccttctcctccgtctccggtaccaaggacctccagatggttaacctaaccctccgcgtcctctcccgccccgacaccgagaagctccccaccatcgtccagaacctcggcctcgaatacgatgaaaaggtcctcccttccatcggcaacgaggtcctcaaggccgtcgtcgcgcagttcaacgccgatcagctgctcacggagcggtcacaggtctccgccctcgtccgtgacagcctcattcgtcgcgccaaagacttctacatcgttctcgatgacgtcgcgattactcacctc

SEQ ID NO: 218712 - DNA, 563 bp, Glycine max
tttctttttaggctgctaactacttgaacatcaagagcctgctggaccttacatgtcaaactgtagccgacatgatcaaggggaagactccagaggaaattcgcaagacctttaacattaagaatgacttcacccctgaggaggaagaggaagttcgtcgggaaaaccaatgggcatttgaatgattttgttaatctcaaaaaatctgaatcaaagatctgccatgtggatttatgctatgcttgtttgtttatcaaagatctctcttgtagatttgcctatgctatatacttgtttgttttatattcaagactatttccgttgactgtgttcactacaactagtcataagaattatcttccttcatgaacttaagagcactttgaattgtaagtaatagttatgatgagggatgcgttgattctgacacgagggttattgagttcaataacagccaacccttggctccatatttttcatcccgtgaactacgtgataatgtgtatatgcacctttgtaaaggggaggtgcagaaacaagattcggagaccatttgatcatgt

SEQ ID NO: 218713 - DNA, 308 bp, Glycine max
cgaagataatgctggggtcatagtgaatcccaagggtgaaatgaaaggttctgctatcactggtcctattgggaaggagtgtgctgatctgtggcccaggattgcaagtgctgcaaatgctattgtttaagctgggtttttagtttatgtaatgtttctgcttcttgaagttgtttcagatattgttttaggttgaattgcagacaatattggcatttggcacatatagtttgtttttgcttgacttctcagtgagaagtgttttgatgagattaattgatagttataagaggtgttttcttggtttt

SEQ ID NO: 218714 - DNA, 513 bp, Glycine max
attaaagctaaatatcattaaacacctttcaaagtcttaagacataactgtcctagctctgtgaatcagaactcaaattattggcaaggtctttatcataccaagactaatgttccaactatcaacttatatatcacaccatataccgcgcacccaaatctcaatgctcaaactcgtgtggatctccaggttttttccacttgaaaactttagtagggttcaacgggggtacggaagttagctccggcgtacactgcttcagcaccaagctcctcctcaattctcaagagctggttatatttagcaagacgctcagacctgcatggagctccagtcttaatttgacccgtagccaaaccaacagaaaggtcagcaatgaaggtatcctcagtctctccacttctgtgactggccatgacaccccatccagcttttttggacatcctgacagctttaatactctcagtcacagaaccaatttggttgaccttgaggagtagagcattgcatgct

SEQ ID NO: 218715 - DNA, 491 bp, Glycine max
  unsure (1)..(491): unsure at all n locations
tgaggagacgtacccccatgcgtaagcnccgtatgaattcctgcgtagactcgctaactagtcggaggacaaccttaagtgttgagctttataattgtttgattttctccgctatgtgtgcagtggtggttgtagcacttcctcttccggcggaagctggggaccatggctgccgctgtgacctgcaccccataaagatgagcccgtggattacaacccagaccccaggcgctaaacctcacaatgcttgctgcaccaagctgaacctgcaaaaagcatgcttatgtggctacctgacaaacgcttgcttgtagctctatgttaactatgcaacgccccataaccgcagttgctgtgggattccctttccaacttgataattaatcacagccttcttatgactaaagtgtgggatatatatatatatatagatgaacagcttaatttatacacactctgatcctacaaagcatcttgacacaagcattcaa

SEQ ID NO: 218716 - DNA, 448 bp, Glycine max
gctatcactaaatctcattcttcatctgcagctatttggattgctgattattgttaactgatattggtgcttttctttgagaaagtgtgtacactttttggataagagaaaacaagagaggtgacattggaagctaactcagagagaggcaaagatgttgggaattttcaagcagaagttggttaatgcacccaaggagctgaacagtccagcttctttgaattcatgcattaagcctaagctaagtcatgaaatcctgaaggatttcatgtcctgcaattcctccaatgctttctcaatgtgctttgggaatgatgctttgctagcctattccacttcatacaagccctccattaatcataggttattctctggattggataacatatacttgtgttttcctggggtggcctgcacaaccttagcatgctcaacaagcagtatggac

SEQ ID NO: 218717 - DNA, 529 bp, Glycine max
  unsure (1)..(529): unsure at all n locations
tgggccaacccaccagcctattgagcacctagcaagcttccgggcaatgccaaacattttgatgcttcgtcccgccgacggtaacgaaacagccggagcatacaaagtggccgtgctcaacaggaagagaccctccattcttgccctatccaggcaaaaactgccccagcttcccggaacttccattgaaggagttgaaaagggtggttacaccatttcggacaactccactggcaacaagcctgatgtcattttgatcggaactggttcggaattggaaatcgctgccaaagctgctgatgacctaaggaaggaagggaaggctgttagagttgtttcccttgtttcttgggaactttttgatgagcaatcagaagcctacanggagagtgttttccctgctgctgtttcagccagagttagcattgaggcaggatcaacatttgngtgggagaaaattgttggagcaaagggaaaagcaataggcattgatcgttctggagctagtgctccagctggaagaatatac

SEQ ID NO: 218718 - DNA, 548 bp, Glycine max
  unsure (1)..(548): unsure at all n locations
agaagatgatgaggaaacattggtagaagaaattggagagagagagagagagagagggttggattggttttcttcttcctcttcctaaagagaatctaatctcaatcctcattacacacatatctacagatttcttcattcctctctcaatcttttctgttttcttttcccctctttgacatcctcgttttcgccgaaacaaaaacaactaagattttgttttttgttgtatttttcttcctgttgttatttgactcggttgtctgaatcagttgttgcagcagggtcgggagccacagctatgcagagccaagttgtgtgcaatggttgtaggagccttctgctttacccaagaggagcaaccaatgtctgttgtgcattgtgcaacacaattacctctgttcctccacctgngatggaaatgtctcaactttattgtggaggttgtaggacattgctaatgtacacacgtggagctacaagtgtgagatgttcctgctgtcacactgtaaaccttgttccaccagcatctaatcaagtggctcatg

SEQ ID NO: 218719 - DNA, 535 bp, Glycine max
aacaagcttgcgctcaacaccgtgattgttctggagcaggaagaggaggttgatttgatcgttgaattgagcaagaagctctgcattaagcccgtgattgggcttcgtgcgaagcttagaaccaagcattctgggcatttcggtgggacttcaggagagaaggggaagtttgggctcaccaccgcacagattctgagggttgtgaagaagctggcccacgcaggcatgctggattgcttgcaactgctgcattttcatattggttctcagattccctcaaccgcgttgcttgctgatggcgtgggagaggctgcgcagatctactgcgagctggttcggctcggggcgaacatgcgagtcatcgatattggaggtggactgggcatagattacgacggttccaaatcttgtgactcagatatttctgttgagtacggtctcgaggagtatgctgcagcggttgttcacgcggttcagtgtgtgtgcgaccgaaggtccgtgaaacaccctgtcatctgcagcgagagtgggagag

SEQ ID NO: 218720 - DNA, 546 bp, Glycine max
  unsure (1)..(546): unsure at all n locations
gtctcggggaggattggggaagctctcaatccgtggaagcaacatggttcgtggggtgactagtcatggtctcaaggctgttgctcgtggatgcccttctttgaaggctctttctctatggaatgttgctaccgttggtgatgagggcctaattgagattgctaatggatgccaccagctagagaagcttgacctttgcaagtgccctgcaattactgataaggctttggttgcaattgcaaagaactgccagaatctgactgagttgtcatttgaatcttgccctaacattggtaatgaaggtctacgagctattgggaagttatgctccaatctgaagtccatatccatcaaggactgcactggtgttagtgatcacggaattgctggattgctttcttcaacttctttggttctatcacaggtgaagctgcaggcattgactgtttcagatctctctctagctngtatgggtcattatggcaagtcaggtactgatcttgtccttaatgcctcccaatgtcagcgagaggnggttctgggtca

SEQ ID NO: 218721 - DNA, 538 bp, Glycine max
gagaaaaaaaaagaaaggtatcgtataggaagaagaagaagctctggattccacctcttcccgtccttcgagacggttgttaggctgcttgctcttcaggttggcctgggtttcaatctaaaggatcttgatttacattttgagacatggagggtgtttgtttctggacaaattgctaccagtatcggttttttgcattccaagaagtgcttgattggcgagttttcatccttggagattttcttcgggtttcctttgttaattgtacttagtgttctgctcccctttaaagatcagcacagggtacgtgatgctacattcttctgatacaggtgctgcatcttaagtgcacttgtacaatgcattgctgacccaacattcagttaaaactattgggctgaagcatatagatttgtgactgaatattggattctgcctgcatctttgagtgaagcatttgcactgaatcagtgtggactgtagttattgaaatttttctccgtgttgctctcaatgggtattgttgctgacaatacat

SEQ ID NO: 218722 - DNA, 579 bp, Glycine max
tggacctgcaatggtttcattaaccttcatgttcatcataagaccagttgagagttatcgacaatcaagatcctccgatgggactggtttcacgtttatctacagcatttgccttctcttggctgcttacttgatgggagttttgttgctagaaaacatgtttgatttggaccatagcaccatcacattgtttgcagttattttgatcattctcatatttcttcctatcatagttcccattctcttggttttcttctctggaccccaaagtgctgaccaagaagccctcttggagccaccaatgctagaagcaactaagcctaagcactttgttggggagagtagtactagcactacgaaagtaaccaagcacttcgaaaacgagaagaatccttcgaagctagaggtgctgcctctgtcagaagggcctagggatgtttttcagtttcaagctagactttggcaagctgttaccaaagctgtgaagaagatcaagcgaaaaaatgggccccatagaggagaggatttcaccttgtcacaggcaatggccaaggctgatttttgggcatggtcttctct

SEQ ID NO: 218723 - DNA, 508 bp, Glycine max
ttctttttttttttttttttggttttttttttttttttttggcagaatgattaattaggaggaattattaccatcagagtactctttgttactacaaaagtacaaatactttgccaaaccacaaagcagcccttgaagggtaaggacatattaaggagttcaatacattgcaaacattctaattgtgcctatatttgcttgcacactatatatatcattcaaaaattgaataagttcgaatttaatcctgaaacagtatctgtatacttgacaaaaacaaatgaataattaagcataaacttgtggattctccagcagggaggcttccacaaccttgcagactccaagagagctttcccttccttcctttatctcttcctctttgacttcaaaacccccaatgacgttatatttgggtgtcattttacaaaggcaacctccatcactagtggcctcaaacttaactgtataagctatagactcaagcttgtcctccaatggatctgct

SEQ ID NO: 218724 - DNA, 442 bp, Glycine max
aacaccgaaagtacatgttttattatagggtacactagtgagctgctggttcttattcactaggaagttacaagacaatacaacaaacatgtagtcacagtttgtagtagctaacatccatagtgcatttacgccctgtcatctttgttttcagcaacaaccttaactctttcaaggcagagtgtaaggtccacacttgttaccaacagggcgattagccaggttacaacgcttggggatggtgacagcaacttgagggttgacgccagccattttggctgtgttagagagaagaactgcacagaggcaactagggttctgcccaattttcttcacctgagcacagcaactctgagaaacactagcattctcatcttgtgctgctgaggcacatggtgcaagcttataagcctcattatcaggggttgtagatataccacat

SEQ ID NO: 218725 - DNA, 424 bp, Glycine max
ctggttttcagttcacagttcaaggcttacagaaggcaaatgtcaataaaaaacttttattggctgccccaaaatattccttttactttgtaccaaagggaattaggcttttttatcttatcgcttttattcaccaaattcaagcggatacggcgatgtgtgacaggagagttgatcttcctgacaattttaaacaaataataaagtttgtatgcaacaagtaaaaagcggcgatactgtaaaggttcattatcatggccgtttaaccgatggaacaacgttcgattcctctgcaggtcgtgaaccgctgcaattcgaagtaagaagcggaatggttattcctggtttcgacaatggtgttatgggaatgatagttggtgataaaagaaccattaatataccagttgccgaagcttatggtgct

SEQ ID NO: 218726 - DNA, 424 bp, Glycine max
aggaccataagcttcggcaactggtatattaatggttcttttatgaccaactatcattcccataacaccattgtcgaaaccaggaataaccattccgcttcctacttcgaattgcagcggttcacgacctgcagaggaatcgaacgttgttccatcggttaaacggccatgataatgaacctttacagtatcggcgctttttacttgttgcatacaaactttattatttgcttaaaattggcaggaaaatcaactctcctgtcccacatcgccgtatccgcttgaatttggtgaataaaagcgataagataaaaaagcctaattccctttggtacaaagtaaaaggaatattctggggcagccaataaaagctttttattgacatttgccttctgtaagccttgaactgtgaactgaaaaccag

SEQ ID NO: 218727 - DNA, 465 bp, Glycine max
ccctctacgaccctcttctaatgctgaaccacatgcttttcttcaggctgacgcactagggagggttccattctcatcaattcgcaggccccgtcctctactggaagttgatcctcccaattcctctcatgcaggttgccccgagccaagcatttcacagaaaccccttgaacaggaaccaatgcttgcagctagggatacaattgaagatgggatttatcttcttcttgatgtagatgatattgaccggttcctacagattaatcagcttcaagatggtggtcttgtgttaaaacggaaacggcaaggtcttatggaaggacttgctacctcgcttaagctagcctgatccactgggaaagaatggacgtacggatacacttgctgcaaaagatgactgtgtttttctcagagagttgctctaccaagggactgaagctacttgctaggtatcctcaactgctc

SEQ ID NO: 218728 - DNA, 468 bp, Glycine max
tccttcactccaaaaaaaatactactaaagagatgagttttgcaggttttctttctcttcaatcaatgtctgctacctgcggcttcttcttcttctccttcacccttctcttctccttcttctccttcctcgtcctcatctccaggatgaagccctggtgtaactgcgatctttgcaagagctacttgacggtgagttggctgaaaaagttccccaatctctgcgactggtacactcatctcttgcgtaaatccccaaccggcaccatccacgttcacgtgctggggaacaccatcacctcgaatccccacaacgtggagcacattctcaagacgaatttccaaaactaccccaagggaaaagcccttctccaccatcctcggcgatcttttgggaagaggaatcttcaacgtcgacggcgaatcgtggcagttccagcgcaagatgacgagtctcgaactcgcagcg

SEQ ID NO: 218729 - DNA, 592 bp, Glycine max
cggctcgagctctcaccaaagccttcctagaacgaaaaaaaaaaagaagagcaattttccctcaccaaagaagaagaagcaaacaatggccgatcaacttaccgatgaacagatctccgagttcaaggaagccttcaacttgttcgacaaggacggcgatggttgcatcacaaccaaggagcttggaactgttatgcgttcattggggcaaaacccaactgaggcagagctccaggacatgatcaatgaagtggatgctgatgggaatggtaccattgacttccctgagttcctaaatctcatggccaggaagatgaaggacactgattctgaggaggagctgaaagaggcattccgggttttcgacaaggaccagaatgggttcatctctgctgctgagctccgccatgtgatgaccaacctcggggagaagctcaccgatgaagaggttgatgagatgattcgcgaggccgatgttgatggcgatggccaaataaactacgaggagttcgttaaggtgatgatggccaagtgatcatcacattatggccacaaaaacctaaatgaagaaatgttgattaaaaggaaacga

SEQ ID NO: 218730 - DNA, 525 bp, Glycine max
gcagcagaaagtgaaactggtctgcttcagtcactagttgtgctgaatggcaggcctgttcctcttgtaatacgtccagctcgaaattcagcagaaaaatgggatgctctgttgtacaggcataatatggatggagatacacaggtggaagctatgttggacaagactatatgtgccatgtctagcgtgatcattggagcccctggttccactttcactgaagacatcctgcggctgagaaaggactggggatcagcatccatgtgtgatgagtatctttgccaaggtgaggaaccaaacataatagcggaaaatgaatgacaacaaaaaaaggtcttctcaagcccatgactcatgtccagcacgtatttacttctgccatgattggggatacgccaatgtgagtagtcatgtatgatgatagagtcagccatgttatggataattcttgcttgttatacatattcttttgccataatgattataacatgtatttagtgtattatcgacacattggtccagaat

SEQ ID NO: 218731 - DNA, 518 bp, Glycine max
atttcctttgttttatcaaaccttgtttgtttgcactcattgctaaaacaagaacgatcgaacatatggcaaccaagtttgctcatgcactcactttatttgttctagtggcctcaatgctttcaatgagcatggccaatatggattggtcctttggttctaattctaactactctgattggtggtccagattccgcaaccgtcaccaaaacaagacagaacaagaacccagaaagatcattgtgggtgggtctgagggttggcacttcggttttaactacacagattgggctttcaagaatggcccattttaccttaacgatacactagtgttcaagtatgatgctccaaacgctaccagtttcccacacagggtgtacatatttccaaacttgtggagttatttgaattgtgatgcgaagagtgctaagatgctggcaaatcccacacagctggaagagagggctttcatttcgtgttaaataggtggcagccttatttctttgcctgccgtgaga

SEQ ID NO: 218732 - DNA, 542 bp, Glycine max
  unsure (1)..(542): unsure at all n locations
caagatcacatgggagtggggattcccagacctggacccatgggccaacaggagaagtgtctgctgttgattctcgcatagatatgtgcaagaaaaggatagcaagcacaaacgaagagactcatgattgtgacagcactctgataaatggttctcctttacgcatatctgatggttcttgttccttggatgagaactttgagtattgtgtgaaagtaattcgttggctagaatgtgagggtcacatcaaacatgaatttaggttgaaattgctaacatggtttagtttaagggcaacagagcaagaacgcaggggtggttaataccttcattcaaactcttatcgatgatccaggtagtttggcaggacaacttgtagactctttttctgatattatatccaacaagaggctaagaagtggattctgtagtaaagctggggcatcaaattaagggcattttttaaaattaatcaccttccaagggattcattnctattgcagacaagctttgtcttgctaaaggatttgctttgatgatct

SEQ ID NO: 218733 - DNA, 430 bp, Glycine max
  unsure (1)..(430): unsure at all n locations
gtcagacagaaagcccaaaagctcaaaaaagaaagggaagaagcattcactatttaatgggattagtcaagaaaaacattttgagaagtctgatggttggcaaggtaccccaccttgggatcctttggtggggggaaatggatatccaaagttcctttgtgatgtcatggttgaaggcttggcataacatttacggtgtgttgggatcgatgctgcagttccttattcaaagaagcctgaaccaaggatgttgatagagcaagcacataaagagaaacgagtgatnttgacgtgggatgcaaagttgcttagacatgattatctgacacanaaccaaatctatagagtgaagagtcttctaaaaaatgaacagctacttgaggttattgaagcttttcagataaaaattaatgaggataagctaatgtca

SEQ ID NO: 218734 - DNA, 505 bp, Glycine max
agtatcccatccaactaaaatcataaaaggtaaaattcaataaaaaagcatcaaataagttttaaacagataaatggatgaaagcaactacacatttagtccacttcctcaatcttggggccagcaccacttccaccagaaggagcagcataatcatcctcgggtgccccagcaccagcaccacccatgtcaggaccagcaccaccttggtacatcttggcaatgataggattgcagatgctttccaattccttcattttgtcctcaaattcatctgcttctgcgagctggttgctgtctagccactggatagcttgctcaattgcgtcctcaatcttcttcttgtcagtaggatcaagtttctcaccaattttgtcatccttcacagtgttcctcatgttgtatgcatagttttacaaagcattcttggcctcaaccttcttttgtgctcttcatcctcagatatgtacttctcagcctcttgaaccatcttctcgatatcttc

SEQ ID NO: 218735 - DNA, 557 bp, Glycine max
aaaaacaccaattctccaccctctcattgaaaaaaaaacaaccaaacaaaaaaaatcaatcattttattttatttttctacgaaaatggttgatttacattggaaatcaaagatgcctagttccaaaacaccaaaactctctctctccgacaacaagtccttaccctctgtgcaactacccttccgcaccacagatatctctcccgccgctccttccgtttgcgccgcttacgactactatctccgtcttcctcaactcagaaagctttggaactccactgattttcctaattggaacaacgaaccgattctaaaaccaattttgcaagctctcgaaatcacgttccgctttctttccattgttctctccgatcccagaccttactccaaccacagagaatggactcgccggatagagtctctcatcatgcatcaaattgaaatcattgccatactttgtgaagaagaggaacaaaattccgcacacgtggcactgcaccaaccgctgatctcagcagcagcaatagcagcgtgagcagaagctacagcgaggcgag

SEQ ID NO: 218736 - DNA, 486 bp, Glycine max
  unsure (1)..(486): unsure at all n locations
catatccatttgttattatcgttattatcccacaggtatccaagaaaagtcttggcggcatccaagcttggaaaatacgtcggttcaaggaaaatctgagtcaacgagtcagccgagtcgcatctcaacccaactcggttaccgttagcctntgaacttcccatcaccaccgccaacacctgcttatacgcgtagaagaatctcttcatcgccgcctcaatcgcctgcatcgcctgcaacaagtgaaccttctcgaactcgctcttcgaaacgtagagcttcatcgccgcctcttgaatcctcggtcctcccttcggatccacctccacctccaatatctccggcaccttgtgcctcagatctctgcacatcttcgtcagttccactaactcattcgatctgaagcagaacgatgccgtttcgccgctcgaggatttcaccgagagttgattctttagcctcaagatatcgcccggatccatcatc

SEQ ID NO: 218737 - DNA, 564 bp, Glycine max
gcaagcggtgactcttgctttggtgttagccaccgtctctgcatcagatcctgatcctcttcaagacctctgtgtcgcagaccttgcttcagcggttaaagtgaatggattcacatgcaaagatgctgccaaggtaaatgcgagtgatttcttctcagacatactagccaaaccaggtgccacaaacaacacctatggctccctagtgactggagccaacgttcagaaaatcccaggactcaacacccttggcgtgtctttatcacgcattgactatgccccaggtggcatcaacccaccttacacgcacccacgtgccaccgaggtagtgtttgtgcttgaaggaacactagatgttgggttcataaccacagccaacgtgctcatatcaaagagcataagccagggtgaaatatttgtgttcccaaaagggttggttcacttccaaaagaacaatggaaaggaacaagcttcagtgattgcagcattcaacagtcaattgcctggcacacagtccattgctctaacgttgtttgcagcgacgccaccggttccagacaatgt

SEQ ID NO: 218738 - DNA, 492 bp, Glycine max
aaagaaatgaatatgctccattttatactctcattccagaccttggaatttatgagctcccaacaaacatgaattgctaagcatcaagaacaaggacaagagaggaaggtgtaacaagtaagaacaatgagagagacattacttccacatgccacattggaatgaatgattccttaggagcaagcctagacgtaattttctcaacctccttggtacccacctgggacgccttggttaacacattgcctggaaccggcggcgtcgctgcaaacaacgttggagcaatggactgagtgccaagcaattgactgttgaccgctgcaatcactgaagctggttgctttccattgttcgtttggaagtgaaccaacccttctgggaacacatatatttcacccttgcttatgctctatgaaatgagcacgctggctgtggacatgaacccaacatctagtgtgccttcaagcacaaacactacgctggtggcacgtt

SEQ ID NO: 218739 - DNA, 537 bp, Glycine max
ctctgtctctgtcctccaccaacccggcaatttttctctctctaaaacacatgacatgtccttatactcctcgccggcgatccagctccgaccaccgcaccaggccagaaggagcgcccccctcccccggttacgcctactccgagttcagcacctcctccaccgtgtccgcccaccggaactccgtctccgccgtcgccaagtccttcgccggaatctttgccgggtgcttctccccgccggattccgacaactccaagagcctcggggattgcgaggagttcaagtcttcttccactgtatcaaatgcttccagagctggtagtcagagagggcatggctcgaaacgaggtaccagcatcagttcatacaacatattaccagcgaaagaaccaggcagtgttgagttcaccatggaggaaatcttccgagtcacaagaaacttctccccttctttcaagattggccaaggtggttttggtgctgactatagggccaaactcctggatgggactgttgttgcagtatagcgtgcta

SEQ ID NO: 218740 - DNA, 481 bp, Glycine max
aggaatatggtcctggtagcgaagtctacttgcctgccagcccaggactggaagcttatatttggttactggcaaaggcttatgttggagcgaatgatgcatgctaccatcaaatcattagccattggcgtagcactcatgcaacagctgagccatttgtcataccaacacacaagcaactgagtgtggttcaccctatttacaaacttgtgttttctcactaccgtgacaccaagaatattaattcacttgcccggaaagccctggtcaatgcagatggtattatagagaaaacattcttgtggggtaggtactctatggaaatgtccgctggcatttacaaggactgggtgttcactgatcaagcattacctaatgatctcgataagagaggagtagctgttgatgacccacctgctgcccatggagctggagtctagattgacgactatccttatgcttctgatgggctagagatatg

SEQ ID NO: 218741 - DNA, 433 bp, Glycine max
  unsure (1)..(433): unsure at all n locations
gccttatcgacttgatgaatcaacaggtcttattgattatgatatgctggagaaaactgctactctgtttcgtccaaaactcattgttgctggtgctagtgcttatcctcgggacattgactaccctcgtatgagaaaaattgcagatgaagtaggtgcttttcttatgatggatatggctcatataagtgggcttgttgctgcatctgtactttctaatccctttgagtattgtgatattgtgaccaccacaacccacaagtctttacgaggtccaagaggtggtatgatattcttcaagaaagatactgtgcatggngttgatttggagcctgccattaacaatgctgtttttcctggtctacaggggggtcctcataaccacacaattggaggactagcagtttgcttgaagtatgctcagtctccagaa

SEQ ID NO: 218742 - DNA, 460 bp, Glycine max
gccataaaatgttacaacatattattagcaacacacatcgaagcatgattattgtacaaaattttttaacagcgtcttagttttaagtattcattatgcgggtacacttatactgcgggctttggattctgagtagacagagctataactttgctacgcaactgtgataccttctctcccaatggaaattcagaatatgttgcaaacttgaaaaaatcttggagcttcgttcctgagaccaaacttttggcttcaagacttatttgcacaccctcatgaatgaaatctgcaatgagtgaaaattctttctcaccaagtcctcttgttgacattgctggtgccccaatgcgaatgcctactggaactagggcactcttatcaccaggcactgaatctatgttgagggttatcgaagccaagtcaagagttttgtccacccgagcaccatcaagaccagatg

SEQ ID NO: 218743 - DNA, 255 bp, Glycine max
gggaaggggagaacccccttttttttttgaaaaccgagagcctccaaatccaataggggagaagttcaggcaatatttacccatagacatgcataaaggctatgtttctcagaagtcccccatttataaggaaaccccccaccctttttaataaaaaaaagaaacgggtgggaatcccttggaaagacaacccttcctcacttgaacgatggaacaaagtgtttggcaccttaactggcccaacccgggttttaa

SEQ ID NO: 218744 - DNA, 568 bp, Glycine max
  unsure (1)..(568): unsure at all n locations
gttgaagaatgttcataaggaccaaaaagtattgcaagagtttggttaaagagatggtagtacacagacgttatccccaaaagcaccctttgccatctaacaagttgctctggaagccagaaacccacccaacccagcttcccttatagtacacaaaagaactgcaaaattactataatttttctacagaattccctatgaaatgaagacaattgctctagtggacttgagaggacaaaatgcctactcacacttaatggatcgataaatgtggcggacaaagagcaatgcagcacggaatccaacagttccaagcattaagaagaaaccgtagcatatacaggccatgtatccgaagaaaaatgaggtctgcatgaatccagacatgtcggagcgtgcatagtagtaatacagacagtaggtatagataaataacccagttgaaccaccacataggaatgatctccaccaccactcatgatcctcagcagcangctggaagtatgtcaatgccacagtgatgaaagcagttacaatcaagagtatgatgaagacaatgaacaggatg

SEQ ID NO: 218745 - DNA, 457 bp, Glycine max
  unsure (1)..(457): unsure at all n locations
ataaaatactgatcnctngccatcgaagtnccatatttatggttagaagagctaactcctcggtggccgccctttttttttttttttagtcacatgtactctctttatgttacattaattctaacatagatatgttggaagaggttttatgttggccacacacatgatacatgatgcattctaataaaaacattttaaatacactgaaatatggctaaaatctgccttgatgctcacaccttcaatattccttcagataagtctttcgcatatatatcacactacaattgatcatgatttcatttcagctcgctttatagatgcgttcctcaaaacccattccaccatagtatcaacaccaaatcctgttgcacagggctgcttttcattccacaccggaccagtcatgttaatatgcattcattgaaccttcccgtcaacaaactggtttaataaa

SEQ ID NO: 218746 - DNA, 568 bp, Glycine max
taagattatattgctaagaagaaaaaatatgaaggttgtctacttgcttgttgccctcttggctttgacatcaactgttgtctctgcctatgaccctagtcctctgcaagatttttgtgtggcagccaaagaaaaagatggtgtatttgtgaacgggaaattctgcaaggaccccaagcttgtcaaagcagaagatctcttcagacatgtggaacctgagaaaactgacaacccactacgttcaaacgtgactcaggtgcttgttgatcaactaccgggactaaacacgctcggcataggtttggctcgcatagattatgctccaaagggcttgaacgctccccacactcaccctcgcggaactgagatccttatagtacttgagggtactctttatgttggatttgtgacttccaatcaagatggaaatcggctcttcaccaaagtgctgaacaagggtgatgtgattgtgttcccaattggtctcattcattttcaattgaatgtgggatatggcaatgctgatgccattgctggtcttatcagtcaaaatccaggagctatcact

SEQ ID NO: 218747 - DNA, 540 bp, Glycine max
  unsure (1)..(540): unsure at all n locations
agcaaananaatggggcggctcnnccgntaagcgatagcncggtgtttgatttcgggcgcgagctcctcactcggctgcgggcgccccatttggacttcaataaatgaatttttagacccacccggcgtttccaacacatggagagcaacggcggcactccatgactcagacatggctagagccctcggactgagcattttctcttcatagaggctggagggattgttaccattagcaggagtggttcctgctgttacccacttgggcttgcaccccggacgtcctccaccaaagttgctcgcattttgtgcatcataaggatatgcatatatctggatatgctccagtacgcccaccaagcgctgtcaaaagcgatattcttaataatgcgtgttgcacaaaaattgcagagagattggggaagacaccctgacatgttgcccttcgatggggcttgcgcgccagtcatagcgtgctccctatgagcactgatgtgaccagaaccaatggagatctcgatctcttcgactgggctattc

SEQ ID NO: 218748 - DNA, 554 bp, Glycine max
tggagatgttactgcgattttggaggatggagaagtggctgaagaaaatgatgaacagggtggatgggagatggaggatttaggtctgggccctgaagctgacactcccaaagcttctatcagtacacaatcttcagtttttgtgaccccaacacctggcatgccagtaagtcatatatggactcagaaatcatctcttgcggctgatcatgcagctgctggaaattttgatactgcaatgaggttgctgaaccggcaacttgggataacaaattttgcccccctgaaaaccatgtttctggatcttcatactggcagtcattcctatctccgggcattttcttctgctccgatcatatcacttgcagttgaaagaggttggactgagtcatctagtgcaaatgtgagaggcccaccggcacttcctttcaaattgtctcaattggatgaaaagcttatagctggctataagtttactactgctgggaaattcactgaggctcttaagacatttgttgatattcttcataccattcctttgattgttgttgagt

SEQ ID NO: 218749 - DNA, 563 bp, Glycine max
ctcactcacaaacgcacactgaattcaaaaacatcgaaagagagaggcatggccgagcaaaccttcatcatgatcaagccagatggcgttcaaagaggccttattggcgagattattagcagatttgagaggaagggtttttacttgaaagggttgaaactcgttactgtggaccgtccttttgctgagaagcactatgctgatttgtctgcaaagcctttctttagtggtttggtggattacattgtctctggccctgttgttgccatgatctgggagggtaagaatgttgttacaactggccgaaagattatcggagccacaaacccagctcaatctgagcctggaactattcgtggtgactttgctattgacattggaaggaatgttatccatggaagtgattcagttgagagtgctaacaaggaaattgcattgtggttccctgagggccctgctaactggcaaagctcccagcactcttggatctatgagtaatacaaatgcctcaagttgatcttgaaattggccttaggttgatccagattatctacatgttttct

SEQ ID NO: 218750 - DNA, 557 bp, Glycine max
aaaagcaaatctagtttgggatttaatttatcaaactgtgagcatgtttcaacagaaatgacataaatagactctacatgcaaaccacggtaccaaactcttagcaaaagtccaacaatggacaaaaacagaaaacatgtagataatctggatcaacctacggccaatttcaagatcaacttgaggcatttgtattactcatagatccaagagtgctgggagctttgccagttagcagggccctcagggaaccacaatgcaatttccttgttagcactctcaactgaatcacttccatggataacattccttccaatgtcaatagcaaagtcaccacgaatagtttcaggctcagattgagctgggtttgtggctccgataatctttcggccagttgtaacaacattcttaccctcccagatcatggcaacaacagggccagagacaatgtaatccaccaaaccactaaagaaaggctgtgcagacatatcagcatagtgcttctcagaaaaggacggtccacagtaacgagtttcaaccctttcaagtaaaaaccc

SEQ ID NO: 218751 - DNA, 391 bp, Glycine max
ataccgtgaaagaaagaggaaattgatgactgatcaaatgaactctctctttggagggtgccatcccatgaatgggaggccccgacctctactgggagctgatgctgcccattactctcatgctagatgaccggagcaatgcacttacagaagccacttgctcatgaaccaatgcttgcgactagggctacaattgaagatggcgttgatcttcttcacgatgtggatgatattgagcgtatcctacaagtgaaccagcttcaagatggtgggccagcgtggagacggaaacggcaacgtcttctggcaggacatgctgccgcgctcaagggagtagagccgctgtgaaagaggagagcggcggttgcactggctgcctaagatgactttg

SEQ ID NO: 218752 - DNA, 405 bp, Glycine max
ctatgacatatatcagaaacattaaagattatattatattggtaagaaaaaaaaatatcaaggtagactacttgcttgatgccctgttggctttgacatcaacatgggtctctgcctatgaccctagacctctgcatgatgttcgcgtggcatgcaaacataaatagggtgtatttgtgaacagtaaaccctgctctgaccccaagcgtggtaaagcagaagatgtcttcagacatgtagcacctgtgaaaactgacgacaccactatggtcagacgtgactgcggtgttcgatgaataactaccgggactaaacacgctcagaataagtgtggctacacatagatgctgctccaaaggggacgtacgctatgcacactcacccatggagaactgtgatgcttat

SEQ ID NO: 218753 - DNA, 437 bp, Glycine max
ctttttcccaacaagaaggggctctttgattacactcaaactaggtatagaccaggaacgcggaaccccggtactaaaggatttgaataatgaccctactactttccgttttctatattcagtggcatgaggacatgttgaactgacccacaacaagcataggacactacgatagcctatatatcggaagtgaactcctagtttcaaaatataatcctcgtgattatcccttcatagcaccagaggatgaagtcatgacttatgtattccacgcaaagatcagcagagatgctcttataagccatgagattgtacaagaaccatggaacccggcactaaccatgtttaaggagcttgagtgcatttactaactgtggacggatccctaccctattcaccatgttgttgctgataaatgccacatgttcaagactgac

SEQ ID NO: 218754 - DNA, 472 bp, Glycine max
agaggattaaggttggtggcaaggccggtgctctcgccgacaccatcaccgtcacacgtgagaagaccaaaatcatagttgcttcatacagcaacttctccaaacggtatctcaagtacttgactaataagtacttgaagaagcacactgtgcgggactggctcacagtgattgcttgtaacaaagatagaagcatttatgaattgaggtacttcagcattgctgacaatgaatgagaggaggaagattaacttacccattttgagaaaccttctttacccattttcccagtgttatgctcctcttttggattgagctatgttgctttgtttacactagttgaggcattaacgagatctgttcattgatgagatggggtgctatttctgttgtattcagaatagagttcacatattacattgtcagcttctgcctttgatacagggccattgcattattaaacattcgaacg

SEQ ID NO: 218755 - DNA, 313 bp, Glycine max
ctgaatattgacctgttggcgaagtctacttgcctgccaacgaaggatggcatgctaacacgtggtcactggccaaagcgaatggtgaagtgaatgatgcattctaccaacaaatcattccgcattggctgagcactcatgctgtcggtgagccatcatggataccaacgaacaggcatctgccggtggtgcaccctaagtacaaacttatgtttcctcactacctccacaccatgcatcataagtcacttgcccgactagcgctttccaccgcaacatggaattataaagaaaacattctcgttggcgtggt

SEQ ID NO: 218756 - DNA, 542 bp, Glycine max
ccggcggtgacatttgggctgtttttggcgaggaagttgtcgttgcccagggcgattttctacatcgtgatgcaatgcttgggtgctatttgtggcgctggcgtggtgaagggtttcgaggggaaaacaaaatacggtgcgttgaatggtggtgccaactttgttgcccctggttacaccaagggtgatggtcttggtgctgagattgttggcactttcatccttgtttacaccgttttctccgccaccgatgccaaacgtagcgccagagactcccacgtccccattttggcacccttgccaattgggttcgctgtgttcttggttcacttggcaaccatccccatcaccggaactggtatcaaccctgctcgtagtcttggtgctgctatcatcttcaacaaggaccttggttgggatgaacactggatcttctgggtgggaccattcatcggtgcagctcttgcagcactctaccaccaggtcgtaatcagggccattcccttcaagtccaagtgattcaatcaaacggttcatgctta

SEQ ID NO: 218757 - DNA, 495 bp, Glycine max
gaaacccaaaaggtaaaagaaattagacaaccaaccatcaacattatgttacatgtaatactcaagccaaaacaggaacctgaaaataaaatataaaatggctttctctgatgctaaacaaccagcaaaatattttcaggttcagaaaatggatgaagctcccttctctaggagatccaattcttaaaatccaggttgttgagtgaaatagcttttcttcaaatcagcaacaactacttgtggatgcatcagactggggtggcctctccttaaaaatgttctttttaacaccctttgagccctcggctatgaggctaggtgtatccaaaatcttcaaaacaagctcttcgaagcattgctgaacgttaactcgagttttagcactgcattcaataaataggcaaccatattccctggcaaagtctattccctctttctttgtcacaactctatcaccctcctttgttactttgtttccaacatgcatcttgatgc

SEQ ID NO: 218758 - DNA, 522 bp, Glycine max
tcacaaccgaaacagattccatctctctctcaaaatgacaacaatatcaaattgctcccttctgtttctcttcctcttgctctccaccctccacatagctggcaccctctcaacccccaccaacttcatcaagtcctccgtgcgcaccacccagtacccagccctatgcatgcagtccctctccgtatacgcctgcaccatccagcaagacccccacgagctcgtccagacagccctgttgctctgcctcaaccacaccgaggccaccaaaaccgttggcgcaaaatgcgacaaattcagaggcctcaaaccgagagaatacgctgccttgaaggactgcgctgaagaaatcagagacagcgtcgaccggctcagccgtgcgctgaaggaactcagactgcgcaaggtgaagggtgaggacttaacgtggcacatcagcaacgttgagacgtgggtgagttcggcgttgaccgatgagagcacttgcggacaggggttcgccgggaaggcgctgaatgggaa

SEQ ID NO: 218759 - DNA, 526 bp, Glycine max
ttcgtccttttttttttttttttgatcattttcaacacaagatccatatctttataaaaactggcaatttcttacaccacacaaaacacaaaattaaccattaaccaaccacatagaactgtttgttctttttttttttcccctcaaaggaaaaaacgaaaacaaaaaacaaaaactttcttcccaactccccctagtgttgtgcagcatactgattaataagcgagagagcattgctagtaacctgagcaacattgaccattctagccctaatcgcctccttaatcttcccattcagcgccttcccggcgaacccatcgccgcaagtgctctcatcggtcaaagccgaactcacccacgtcttaacgttgctgatgtgccacgtgaagtcctcacccttcaccttacacaatttgagttccttcagcgaccggctgagccggtcgacgctgtcactgatttcttcagcgcagtccttcaaggcagcgtattctctcggtttgaggcctctgaatttgttgcattt

SEQ ID NO: 218760 - DNA, 479 bp, Glycine max
atccaacccagtaaacgtggaacacacctgacacctgatccgcgagcgagggtttgtgaagatgacgacgattcgcaggttttgctgcaacgatcttcttcgctttgccgccgtcaatctcgaccatcttaccgaaacattcaacatgtccttctacatgacctatcttgcaagatggcctgactatttccacgttgccgaaggccctggaaatcgaatcatgggttacattatgggtaaagttgaggggcaaggagaatcttggcatggccatgtaactgcggtgaccgttgctccagagtatcgaaggcagcagttagccaaaaaacttatgaatctgctggaagacatcagtgacaatattgataaggctttttttgttgatctctttgtgagagcgtcaaatgcaccagccatcaagatgtatgaaaagcttggctatgtgatttatcgacgagtgctacgctactattctgggg

SEQ ID NO: 218761 - DNA, 546 bp, Glycine max
gggttttgcagcttcaggcatattttcttgttcttgatgacattatggataactctcacacacgccgtggtcagccatgctggtttagagtgcccaaggttggaatgattgcagccaatgatggagttctactaagaaaccatattccacgtatccttaaaaagcacttcaggggaaagccatattacgttgatcttcttgatttgtttaatgaggttgagttccagactgcttcaggacagatgatagatctgatcaccacactggaaggagaaaaagacctgtctaaatacacattaacactgcatcgacgtattgttcagtacaagactgcatattattccttttaccttccggttgcatgtgcattgctcatggcgggtgagggatcttgacaaccatgttgatgtaaagaacattcttgttgagatgggaacatactttcaagtacaggatgattatttggattgttttggtgatcctcatacaactggaaaggtgagcatttctgataatgggtttggaaacatcaatttctctttactc

SEQ ID NO: 218762 - DNA, 420 bp, Glycine max
cagaagaaattataaataggcaaacaggtttcccaagacagatttgaagataaaatacaacaagatcttatcactaaaaaacaaaaattaaaaaaaaatgacaggaagaaaattaatttttgaaaaattccaagccacggaacatgaccctgctttagataaaaatcacaactctagtttctattgcatgtccaacaattttggtcctcaccttaagtggactttccttctgccgcttgtaaattttagccaaaaaggacttctatacagcttgaactgctttgctaggatgagccccaatggaggaaacaagctttgcatagctcccgttctcatactcctaaaatacagccggaagatgaagctcattattcagggccttaactttagcaacattttctggatctgccttaccatagt

SEQ ID NO: 218763 - DNA, 582 bp, Glycine max
aaaaaatccaatgcttcttctggtgctgctgctgcaccaggtcccgcaccgaacaaccacaagcacaagaaaagtaggagaaaactcttagggtggattctggggtttgtggcaggggcagtggcgggaatcttagcaagattcgtgttttctctaatgttcaagctggctctggcgttgataaaaggaagaggaaggaaagcggggcctgatatctacagtccattgataaagaaagcagaggatttggccttcttggagaaagaagaaggaatggcatcgttggaaatcatcgggcgaggtggctgcggagaggtttacaaggccgagttaccgggaagcaacgggaaaatgatcgctataaagaaaataattcagcctcccaaagagggtgctgagttagcagaagaggacagcaaggttctgaacaagaaaatgaggcagattcgatctgagatcactacagtgggacaaatcaggcaccgaaaccttcttcctttgcttggccacgtgtctaggccgggatgccactaccttgtttacgagttcatgaagaatggcagcttgcatgacaccctgagc

SEQ ID NO: 218764 - DNA, 553 bp, Glycine max
cactctctctcaccaaattcttattagaacgaaaaaagaaaagaaaagaaaaaagagcgatttttccctcaccaaagaagaaccaaaacaatggcggatcaactcaccgatgaacagatctccgagttcaaggaagccttcagcttgttcgataaggacggcgatggttgcatcacaaccaaggagcttggaactgttatgcgttcattggggcaaaacccaactgaggcagaactccaggacatgatcaatgaagtggatgctgatgggaatggtaccattgacttccctgagttcctaaacctcatggctaggaagatgaaggacactgattctgaggaggagctgaaagaggcattccgggttttcgacaaggatcagactgggttcatctctgctgctgagctccgtcatgtgatgaccaacctcggggagaaactcaccgatgaagaggtcgatgagatgattcgtgaggctgatgttgatggagatggccaaatcaactacgaggagttcgttaaggtgatgatgggccagtgagtgatcatcacat

SEQ ID NO: 218765 - DNA, 489 bp, Glycine max
gaccaaggaataattagttctactcattctcatgcatatcttaggagaatccatatcacacattgacttttcaaataaactacgatgcatgtcaaatatcacaatattcgtcatctttcaaaaaaaaaaaatgagcggtagaatgcgaagtgacattaacattacaaccctttatttcttggaaaaaattacagacgaactaagaaggttcagttccactacatccattagtagcaggaattgccactaattgacattttaaggttggattcaaaaaccggcaaatataaatgtaggaagaagaaaggacaaggacttctacatcactgttatacagcccaaacccttgtccttccccttacctgtgattttatggtcatttccttttaatcaacactgcttcatttaggatcttgtggccataatgtgatgatcactcacttggccatcatcaccttaacgaactcctcgtagtttatttggccattt

SEQ ID NO: 218766 - DNA, 536 bp, Glycine max
aattttctcactactatagtaacacaacgcagtttgtggacaaactaagcaatactaattaattaaaagggaaataaataaataaataaggatttgttttgttggatgtaaatttgagatagttgctgcatttgacgacacacgacacagacactaaactaaacctacaacggctggtctggtttaggtttaggttgagcgatgtcgggtctgtataactccaacttctcaccagtgagggctgcttctcctcagattagaaccaacccagaagtcgacagtcagtaccttacggagttgctggcagagcatcagaagcttggtcccttcatgcaagcccttcccatatgcagtcgtgtcttaaatcaagaaatattaagagtttctggaatgctgtccatcaaggttttggtgactttgacagactgcggcatagaagccctagtcctatgggttcttcaaacctcatgtcaagtgtcactggaacgggattgggtggatggaatagtcttcagcaggagagaatacgcggaact

SEQ ID NO: 218767 - DNA, 417 bp, Glycine max
ggccttctggaaagagggccgccgagattcgcgatcgtcatcgttcggcccgggtctggctcggttcattcgataccggcgaggacgccggccggacctatgacaagggctcgttcgaggtacgcggcccacggggcaagctcagttttcccttggtcgacgagtcgatctctctccaaccggagatggctgcgtcagaagagcagattaacaacgcggataatctcaatcaaggcatgagaatggactcgcacgaatactgggacaggatcaacgatgctgattttcatccgctcatgatgatgatggattttactggagattcgtcagactctgctgccactgggtacactctcagatcctgagattgatattcaattacaccaaataattcagtaatgttaatgcgcgcttaac

SEQ ID NO: 218768 - DNA, 549 bp, Glycine max
ggggaacttcgagttggtgttaggcgtgcaatgagacaacagggtaatgttccatcatcggttatctcaagccacagtatgcatctcggtgttcttgcaactgcttggcatgccatattgactgggaccatgttcactgtgtattacaagcctaggactagtccagcagagtttattgttccctatgatcaatacatggagtctctcaaaaataattataccattggcatgcggttcaaaatgaggttcgaaggtgaagaggctccggagcaaaggtttactggtaccattgttggaatcgaagatgctgataccaaaaggtggccaaagtccaaatggagaagtcttaaggttagatgggatgaaacatcaaacataccacgtgctgagagagtttcacaatggaagatagagcctgctcttgccctcctgctctgaatcctctaccaatgcccaggcctaaaaggcctcgatctaatgtggatccatcatccacgaattcctctgttcttacgtcgtgaagcttcatctaaagtcagcgtagatcct

SEQ ID NO: 218769 - DNA, 482 bp, Glycine max
ggcaaaactccaaccaccaccatgatattggggcataattttagaatgatcacgctgaaaagggtcaacatcttttttacatttattttaagcttgaaaaaaaacccatttagtgaaaaataaataatttcaatatttatttttaactggtggagtttgtgtcttcaaagctgagaatagacaaaattcaatgaaacctaacatctgtccatgcttatgagcaattagagaaattgaaagatcacactttttaaaaaccgttgacagctcaactagaaaaagctgcttccttataatcttctgtcacattagtttcaccttcatttaagcttggagcttttgggaggagtccaagaactttaaacatgagttgatcagcatcaaaatcattattaggagtagtgagaagcttttcaccagagaatatagaatttgcaccggccagaatgcacaatgcctgctcaagcatggagaatcgaact

SEQ ID NO: 218770 - DNA, 438 bp, Glycine max
cggctcgagcacaacgttacaaatcacacaaacacacaaacgaacaatgaaacccactttcctcctttctctcttattcttcacattcacactctcccatctcaccccacccgccaccgccggtgaccgttacgtttccggcgacaattccggcgatgccgacttcatccgcgcgagctgcaacgcgaccctgtaccccgacctctgcttctcctccctctcccgctacgccgacgccgtgcagagcagccacgccgccctagcacgtgtcgccgtcgccgtggccctcgccaaggcccacggcgccgcggactacctctcgcaccagaccgcggcggccagcgacgacgactccggcgccggctccgccctgcacgactgcttctcgaacctcgaggacgctgcggacgagatccgcggctctcttaagcagatgcg

SEQ ID NO: 218771 - DNA, 504 bp, Glycine max
ataaaaactaaattactgagaaaataacataaccgatgaaagcacaaagctacaacggagcaaagaaaccaaaacctttgaacatacaagaaggattcacattcacactttttaacttaagcaacacattaacctatgatcttccgctcctttttatcacacacatagcaaaacgcaaagtaaccaaccaaaacgacagagaaaccattactattcccatttggcggttataactataagttattagcgaaaccgttaaccagcgccaaggcattgctggtgaacttcttgaccctagtgacgcgatcgcatacgctcgtcttcacgggaccttcctctacaccctcgaatccgtcagtacacgtttcctcgtcagtgagcgcggcgctcatccacgtcagcacgttgctgagcccaaaccggacggagctggagtcagagtttccggctccggctggtttgagccggcgcatctgcttaagagagccacggatctcgtccaca

SEQ ID NO: 218772 - DNA, 442 bp, Glycine max
gttccttttgaaggttagaagtgctacaatacaaacaatggcagctactcaggaagatgtgaagcttttgggtattgtgggaagcccatttgtgtgcagggtccagattgcccttaagttgaagggagttgaatacaaacttttggaggagaatttgagcatcaagagtgatttgattctcaaatacaaccctgttcacaatgaaggttccagtgtttgttcacaatgagcagaccatagcacagtctcttgtgattgttgaatacattgatgagacatggaagaacaaccccatcttaccttactgatccttaccaaagagccttgtctcgcttctggtccaaattcattgatgataagattgggggtgctgtatccaaatctgttatcacggctgatgagaaagagcgtgatgagaatgcttgacacacatatgatgctc

SEQ ID NO: 218773 - DNA, 338 bp, Glycine max
tttacttttttttttatatcgaaaaatataatttctttattaactgaaatggccaaaacgaaaacaagaccctaggattcttttttttttctttctgggattcacatatcgctagcttcattttacatgaaattcaagcagcagtagctcgtgctgacactaggagggctacagatcatcttaaataagtctattctgaagcagaacgacttacataccgggcttttagggatgctgagaccgccactacccacagaaggactccaggcacaagaggggggatgaggaactcctggctccattctgagcagtgtaggaaatttgtaacctgcgattaa

SEQ ID NO: 218774 - DNA, 342 bp, Glycine max
  unsure (1)..(342): unsure at all n locations
aaaaatctgtgggcgtcgactccgatngcaattgcngtgttatgatttgtgggtcgacgtgctcactaggctgcgggcccccttgacttgatgaatcaacaggtacttcaggcccagatatgctggataaaactgctaccctgtttcggccaatactcattggggctggtgctcgtgcttatcctcgggacatggactacccgcgcatgggaaaaatggctgatgaagacagtgctttggttatgagggacctgcgccctatctgtgggctcagcgcttggtatgtactttataggcggtctgtgtatggagatactgagaccaccacaaccctcatggcgc

SEQ ID NO: 218775 - DNA, 461 bp, Glycine max
caaagacccttttctctcagttcccctgtgactcactctcttccttcactgctaaactcttgcaatggcaacaaaaaaagtcaaagccataggcattgacttgggcacgacctacagctgcgttgcagtgtggcaacacaaccgcgtcgaggtcatttccaacgaccaaggcaatcgcaccaccccttcctacgttggcttctacgacacccaaaggttgttgggtgactccgccatgaaccagcgatccatgaatccgaaaaacaccgtctttgacgccaaacgtttgattggtcgccgattctccgaccaaaccgttcagcaagacatgaagatgtggccttttaaggttgtccctggaaacaaagacaagcccatgatcgcggtcacttacaaaggcgaagagaaactccctgccccagaagagatatcttccatggttttgtataagatgaaagaag

SEQ ID NO: 218776 - DNA, 566 bp, Glycine max
  unsure (1)..(566): unsure at all n locations
gaggcaaccaccttaaccggcgtcatccacaaaacgacgtcgtcactgtctctcacaagtcacaagtcttccttcccacttgcaccctctctctctcgccggtcgccgaatctttctccgcatccgcaacctccgccgtatccgcctttgattcttcaaccgatggatcggccggcgaccggacctggcgtggacatgccgatcatgcacgatagcgaccgctacgatttcgttcgcgatatcggctccgggaatttcggcgtcgcaaggcttatgagggataagcagacgcaagagcttgttgctgttaagtatattgaacgcggagataagattgatgaaaatgttaaaagagaaatcattaatcacaggtctctaagacatcctaacattatcaggtttaaggaggtcattttaacacctactcatctggccattgtaatggaatatgcatctggtggagagctatttgagaaaatctgcaatgcanggcattttaatgaggatgaggctcgtttcttctttcaacaactcatatctggggtcagctactgtncatgcatgga

SEQ ID NO: 218777 - DNA, 429 bp, Glycine max
ctcgagccgatttggagtttggagcgactgaactactcattaatttgcactcgctgtttcagcttcatcacccttcttttgcatcatttatatctcttgagaaatggcacaagaaacctttctattcacatctgtatctgtgaacaacagtcaccccgacaagctgtgcgaccagatctatgatgcagttcttgatgcgtgccttgaacaggaccctgacatccaggttgtctgtgagacatgcaccaagaccaacatggtcatggtcctctgatagatcacaaccgaagccaacgtagactatgaaaagattgtccgcgacacatgccggcaaattggattcatctttgatgatgttggacttgatgctgactaatgcaacgtgttagtcaagactgagcagcaaaagcctgatatcatccatggtgt

SEQ ID NO: 218778 - DNA, 341 bp, Glycine max
ggggacaaaattctgataaaatttccattgcatcaacacagtaacattgcatagccaaacaataaattgtgagtatagggagaaaaaaaaaaacgaacagttttggttttgatgagatggccttagacattgaatggagtcgtagtagtagtagtcatgaaacacgccaattattcatccacacccagcaagacatccactgaagggagtgattaacttaacaacactcttaagcttgaggcttctctgacttgagtggcttcacaacttcccaggtgaagtctgcatcatcccttccaaagtggacataaacagctgtcttgaggaacctatgaccaccc

SEQ ID NO: 218779 - DNA, 353 bp, Glycine max
cgaaggccctcgagcagctgcaagacgccgtctccgagaaagattcctacgccgtcgataagctccagggcgccatcactttcaacggcggaggtcgcgaatgccattctattctctggaaaaatctaggtcctggtcattgatgaggtggcgaaccacccatggggtcactgtgctggaacatagacacacagtttggttctgattgttccctacgaccagaagataacgcctatcgtgctgctctacaagtgtctaggaggatgtggctctgcgctggaccgaatggtgacaacgcacgcactctaaaacaccgccgacgaggagtcagtgcttgctagagcactaaatgt

SEQ ID NO: 218780 - DNA, 358 bp, Glycine max
ggagcataaagttattctctttgttattttctgggggccctcagaccactgctacacgggggagagaggtatcagcatcaaccccggtggcccccgtgtctctgtcatggacacctgcatggagttgattccatgatttatgggtcccaccacaggtcttatgtatggctacgacctaccactcaccagtggtggggcgttgatgcccccgtacatgaacaagatggtgctgacagtgaacatagagacaatgggcgttaaacgactgtatgacaatgactggaactacgacgaccacagcttacatgtatgtggctttctccatgaacatgactgtttggactccagcggacttaca

SEQ ID NO: 218781 - DNA, 560 bp, Glycine max
actgcagaacttcttttcattttccaaaggtaatacatatacataatacatgtgcgaaacaagaggctagagtctagaactaaaaatttagtggagcaacaacaaacacaaagcataagttgcacataccaaaaaaaaaaaacattagacaactcaacatcatcattaacatcagacgaaactaggtctccactacctttgccgaggcaatactaatgatatactcaatctcttctggcacctctttcattgaaggtcgagtctggctcttttcctccaagcaacccaatgccaaaaacgccactgccttaatcgtctctagctatataggggaagctgcattcttcaacactggatcaatgacatacatgaacttttcctcggccaccatctgatgcacgtaaatcgccaagttcacatcatcagcagccctgttaaaatctattgccttctgagctgtcaaaagctcaagtagcaccaccccaaaactgggaacatcactcttatcaggcaattggtagttcctataatactcaggatcaaagcaaccagggtcccct

SEQ ID NO: 218782 - DNA, 468 bp, Glycine max
  unsure (1)..(468): unsure at all n locations
ctcgagccgattcggctcgagtttctatctctcttatactctcactactctctttgctctttcttttctccactatggctgcacaagaaaacaacttccaagactacttgcctgtgatggccaacaagcttggtggggatggcctaattgatgaactgtgcaatgggttcgatcttttgaaggattctgataaaggggtcatcacttttgagagcctcaagaggaattcttacttgcttggtcttcagggtctcagtgatgaggatcttcgctccatggttttggaaggtgactttgatggtgacggtgcactcaaccagatggagttctgtgtcttgatgttcagactcagccctgaattgatggagggctcanagatgtggcttgaacaagtccctcaacaagaagctanagattatttctaattcttgtaatttttttctctttctcccttactcttttaattca

SEQ ID NO: 218783 - DNA, 546 bp, Glycine max
gaaggaactaggaagtatcaaattaatcacttttgccatttcatttttttttaaattttcttacataagtatatgggaaattgcccaaaatgacaaatgaattaaaagagtaagggagaaagagaaaaaaattacaagaattagaaataatctttaagctcttgttgaaggacttgttcaagccacatctttgagccctccatcaattcagggctgagtctgaacatgaagacacagaactccatctggttgagtgcaccgtcaccatcaaagtcaccttccaaaaccatggagcgaagatcctcatcactgagaccctgaagaccaagcaagtaagaattcctcttgaggctctcaaaagtgatgacccctttatcagaatccttcaaaagatcgaacccattgcacagttcatcaattaggccatccccaccaagcttgttggccatcacaggcaagtagtcttggaagttgttttcttgtgcagccatagtggagaaaagaaagagcacagagagtcgtgagagtttaagagagatagaaact

SEQ ID NO: 218784 - DNA, 546 bp, Glycine max
  unsure (1)..(546): unsure at all n locations
cttacactcaccgtcaagttcgtctcgcgccaccgtcgacgcagttccggccactgcctttggttccctcactttctgtctcttcttcttcttctcagaaatatgccttctcagaaggttgaaacgggtcatcaagacacagtccatgatgttgcgatggattattatggtaagaggctggccacggcttcatcagatcacacgattaagataattggggtgagcaacacggtctctcagcatctcgcaacattgactggtcaccaaggacctgtttggcaagtggcatgggctcaccctaagtttggttctctacttgcatcatgttcctatgatggtcgtgtcattgttcggaaggagggtgaccagaatgaatggactcaagctcatgtgtttgatgaccacaagtcatctgtgaattctgatgcttgagcgcctcacgagatgggtctttgcttggcgtgtggcttatctgatgggaacatatctgatntcactgcaagagcagaatgtggctgggacactgcaaagattgatcaggctcat

SEQ ID NO: 218785 - DNA, 552 bp, Glycine max
ctatactctatttttcgcgtcacataaacaaaaaaaataaactggggagaagcatgttgatgatgttgggactatgcttcctattgttctctgcatttccacttgcgttctctgagagatgccacccacaagacaagaaagcgttgctccaactccagaaggacctcggcaacccttatcacatcatatcctggaacgcaaaggaggattgctgcgagtggttctgctgcgttaagtgtgacgagaaaacaaaccgcgtcattagcgttgccttatcatccccttttccagacaccaatctctcggaccaaatacctccctctgtgggtgacctcccttacctcgagtccctcgtcttccacaaattccccaaactcgtgggcccaatccagcccgcaatcgccaaactcaccaaactcaagtaccttgatctctccaacaacaatctctctggcccaatacccgattttttcgcgcaactcacgaacctcgacgatatcgacctttgcttttacaacctctccggccccataccaagctcgcttggaaact

SEQ ID NO: 218786 - DNA, 375 bp, Glycine max
tttattttttttttttttacagaaaaacaagtaatcgatttcattgaaatcagaatacttaatgtgacgaaaccaactttgtttggcatatgcttataatgggtgaaaggtgaaattggaaagtcacacaaacacacatgatgatacgaatacttatcaaagcatgaaatccacttagacagacatctgcttatggttgcaaggtgatagtggagagcctcacaaacacttgttgtgagagtccaaagacttatcgatcttttgaaactctccacccttcattatgagaccgcatacctgattatagcttacgtcctatagctgatagtgtaccactctgatcaaccccactggaatgctcccatatatcttatt

SEQ ID NO: 218787 - DNA, 542 bp, Glycine max
gcagcattgggagatagaaagagagagagtaagagagagagagaaagacccttacccttctctatcgctcgctttcctttgacgcttctgaccctcgctttgtctgcgtcttccttctttctttctttcattctctgcgtgtccgaaacggctctaccagactcttcttcccgttgcaactccctgaacccctccttcatctactgctcttactccaaaacgctccctctccaccacatgctcaacaccggctgcgctgtcgtcgtcgccggtccctccccgccggcggccaatctagacgccggatcgcgtggcctcatgattccctctgccatcgagtcacgcaagatcgagttgtactcccccgccttctactccgtctgcaccgacggtggcatcctcaactgtggccctactcacatgaccgtcactcctcttgacctagaacagtgtaatatgcagagtgaccctgctgagtacacgagcatctcgtctggttttggagttgtgcttaatgagcacggattcaggggcttttttcg

SEQ ID NO: 218788 - DNA, 416 bp, Glycine max
gaacgttgtgagccaagttgctaagcggactctcaccacaggtgtcaatggagagcttcacccttcaaggttttgtgagaaggacttgctcaaggttgttgatagggagtacacatttgcatacattgatgacccctgcagtggcacataccctttgatgcaaaagctgaggcaagtgcttgtggactatgcattggccaatggggagaacgagaagaacacgaacacatcaatcttgcaaaagatcgcaacatttgaggaggagttgaagacccttttgcctaatgaagtggaaggtgcaagagttgcatatgagaatgaccaatgtgctattcccaacaagatcaaggaatgcaggtcttaccccttgtaccagtttgtgagagaggagttgaggacagcattgcttactggtg

SEQ ID NO: 218789 - DNA, 562 bp, Glycine max
  unsure (1)..(562): unsure at all n locations
gtttctctctcttcggtcagaaacatgaatttggaaacgcaaccaggaacggcgtcgtattggtgctacagctgcacccgtttcgtgcacctctctgtccaaagcaccatcgcctgcccccactgtcaaagcggtttcgtcgaagagatccgtgccggcgccggagccgaagcctcgccacgccatcgactaagtcctttccccgatgatcctcttttgctccggcgacagggcttccgccgccgtaggagagaagcttacggcaaccgctccccgttcaaccccgttatcgtcctccgcggccccggcgacgaccccgccgccgccgaccacgacggcgtcagcacgttcgagctcttctacgacgacagcgacggcaccggcctccgccctcttcctcccaccatgtcggagttgctcctcggctctggctttgacagacttctcgaacagttcgcgcagatcgagatgaacggattcnggcnggccgagaatcnctgcgcgtcaaagcggcgatcgagtccatgccgacngtcgagatcggagaaacgcacgtggaaac

SEQ ID NO: 218790 - DNA, 534 bp, Glycine max
gccactcccacctggctggatgggttggccttacataggagaaacctttcaaatgtattctcaagatccaaatgtcttctttgcctcaaaaataaaaaggtttggctctatgttcaagtcccacattctaggttgtccctgcgtgatgatttccagccccgaggctgcaaagtttgtgctcaacaaagctcaactcttcaagccaacattcccagcaagcaaagagaggatgttgggaaaacaagctatcttctttcaccaaggagagtaccatgctaacttgagaaggcttgttcttcgcaccttcatgcccgaagccataaaaaacatcgtacctgacattgaatccattgcccaagattgcttaaagtcttgggaaggccgtctgatcaccactttccttgaaatgaaaacgttcaccttcaacgttgctctgctttcaattttcgggaaagaagagattctgtacagagatgctctgaaacggtgctactacactctggagcaagggtacaactcaatgcccataaacgt

SEQ ID NO: 218791 - DNA, 525 bp, Glycine max
caacatcataacacacgaatcagccctagtaaaggcatttcacaagcatgatttaaagatggccttgcaaattgccaatcacaaaatacctaactcaaatgtaattcagcataatcatagaaagttaaaagagagtgccaaaatgccattaattaggtatacttttctgtcaactgcagactggtattggtaactcataagaacaaaaccaccacacatgtggaataaggatgaaaactttcaattattttgagggctgcaatctacagctttccctgtttgtttttcaaattataaaaattcatctattggttcctagttatcaaccacttctacgagagttgtctcatagtcgctgggagcctcgaatccatgaagattcatcacagttgcagcaacgttggcaagcccgccggttggaacatcatttcggaatcttacaccaggggccaatccgggaccaccaatagcatttggcacaggctcaagagtatgggaagtaagaatctggattttccatccttg

SEQ ID NO: 218792 - DNA, 479 bp, Glycine max
ccaagatccaggacaaggagggtatcccttcagatcagcagaggttgatatttgctggtaaacaacttgaggatggaagaacccttgctgattacaatattcagaaggagtctaccttacacttggttcttcgtttaagaggtggcatgcagattttcgtcaagactttgacgggaaagaccatcaccttggaggtggagagttcagataccatagacaatgtgaaagccaagattcaagataaggagggtatccccccagaccagcagaggcttatcttttctggtaaacagcttgaagatggacgaacccttgcagattataacatccagaaggaatctaccctgcacttggttttgaggcttcgtggtggcatgcaaatctttgttaagactttgaccggaaaaacaataactttagaagttgaaagttctgataccatcgataacgtgaaggcaaagatacaggacaaagagggg

SEQ ID NO: 218793 - DNA, 520 bp, Glycine max
tggcaagcttcttcttgtagactttgaccaggtttctgtttcatcactaaatcgacatgctgttgcgacaagagcagatgttggcatctcaaaagctcagtgccttaaggagcatttcttatctatctttccagagtgcccaatagatgccaaagtgatgttatatgattcatccactgaagaagaaattctctcaggccaccctgactttgttttggattgtattgataacattgatacaaaggtggcgcttcttgctgcatgtgtacgtaggggtttgaaggttctatctgcaacaggggctggtgccagagctgatccaactagaatacgcattgccgatctaagagaatcaactaatgatccattatctcgagctgtaagacaccgtttgaggaaagattatggtattgaaagtggtatcccagctgtgttttctttagaaaaacccaaagctaagctgcttccatttaagggtccaagtggagaagaggaaaacccttcagattaccagatagta

SEQ ID NO: 218794 - DNA, 422 bp, Glycine max
ggttacaatctatgcttcttcactatgtgaaggtatgggggagggatattgcccgcacccttacctttgcatatgcaaagagactgtttccggattccaacccatgaccaacaagtcaccaaggcacaactttaccgatgcaccagggctcgccctctcacctaacaaaataaaccatattaatttcacaagagtattttgttacatgcgctttaatacaaataagaaaaatataccgagatccagaaaggaagagagactcaagaatccaattttttttaaacaacaattactgcgaggaatatattctgtaaacttaatcatttgctggacctgaaacgtaacggagatcatgaatgtggctccctaaaaatccatctaaaaagaatagtagactgatatacaactgtgaaccaaggaat

SEQ ID NO: 218795 - DNA, 503 bp, Glycine max
ttcatttcacttcacttagggtggtgcatttgcaaccctttaatttcctcacaaaaatggaggaacgtattttgtactcactagtgtttcttgtgcttgctttggctattgtgaacaaagtgcatgggcaagggacgcgtgtagggttctattcgagtacatgcccacgcgctgagtccattgttaagtccacagatacaacccatgtcaattctgatagtactttggctgctgggttgcttcggatgcacttccatgattgctttgtgcaaggctgtgacgcttctgttctcattgtcggttctggcactgagagaacaggatttgctaaccttggtttacgaggattagaggttattgatgatgcaaagaaacagctctaggctgcatgccccggtgttgagtcttgcgctgatatccttgctcatgctgctcgagattccgttgctctgagatgtggactgagttatcaaatgcttactggacgcagcgatggtcgcata

SEQ ID NO: 218796 - DNA, 564 bp, Glycine max
  unsure (1)..(564): unsure at all n locations
atcatcggcaacagtgacagtaacggtggaagagagaaaggattcgctctcctcaatccttatataagctccagcgacccaatttcttctcttatcgatttgattgtttctgagtaatggcttcgtcgcgagtagatctggatgggaaccccataaagcccatcaccatttgcatgattggcgccggtggcttcattgggtcccacctctgcgagaagctcatgtcggagacccctcacagtgtcctcgccttggatgtctacaatgacaagatcaaacacctcttggaaccccacacgctcccttgggcctctcgcatccagttccatcgcctcaacatcaagcacgattcccgtctcgaaggcctcatcaaaatgtcagatctgactattaatctggctgccatttgcactcccgcggattacaacacgcgccctcttgacacaatttacagcaacttcatcgacgcgcttnctgtggtgaagtactgttcagagaacaacaagcgtctcattcatttctctcgtgtgaagtctatgggaaaacgattggaagcttcctccc

SEQ ID NO: 218797 - DNA, 474 bp, Glycine max
atccaacccagtcaacgtggaacacacctgacacctgatccgcgagcgagggtttgtgaagatgacgacgattcgcaggttttgctgcaacgatcttcttcgctttgccgccgacaatctcgaccatctgaccgaaacattcaacatgtccttctacatgacctatcttgcaagatggcctgactatttccacgttgccgaaggccctggaaatcgaatcatgggttacattatgggtgaagctgatgggcaaggagaatcttggcatggccatgtaactgcggtgaccggtgctccagagtatcgaaggcagcagttagccaaaaaacttatgaatctgctggaagacatcagtgacgatattgataaggctctttttggtgatctctttgtgagagcgtcagatgcaccacccatcaagatgtatgaaaagctcggctatgtgatttatcgacgagtgctacgctactattc

SEQ ID NO: 218798 - DNA, 461 bp, Glycine max
  unsure (1)..(461): unsure at all n locations
agaaaaagatggtgagagtcgagtccgatngcgaggaccaaatgacgggtcatgcaccctactatacggtgggcgtcctgctcgaggcctctttaatctaaagaaccctcacgcgctagctatatctttactgtagatacagggtacgatacctgatttaacattctgctaacaaaattatctaggatgaaccttgaccctccacgaagcctcagaggtgcccaccaagatagcaacacaccgctgaacaaggctgccttatatgcgcctgatgatactctatgggacggaggcacctcatgcttgtctgttccatgtactgcagactatccaattctaccaccaactgtgcgagaccggccgcgcatgagggatgctgatctctatgctgacggaaggagacgatggcttatactacaacaaaacaggagttctatctgtgatgtagctgctatactgac

SEQ ID NO: 218799 - DNA, 543 bp, Glycine max
  unsure (1)..(543): unsure at all n locations
gattatcctaagtctttgggaatagtgctgcaatggcttcaagtcaggaggaggtgacccttttgggagctactggaagcccatttgtgtgcagggttcatattgccctcaagttgaagggagttcaatacaaatatgtcgaagaaaatttgaggaacaagagtgaactgcttctcaaatccaacccagttcacaagaaggttccagtgtttattcacaatgagaagcccatagcagagtctcttgtgattgttgaatacattgatgagacatggaagaacaaccccatcttgccttctgatccttaccaaagagccttgactcgtttctggtccaaattcattgatgataaggtttttggtgctgcatggaaatccgttttcacagctgatgagaaggagcgtgagaagaatgttgaggaagcaattgatgctctgcagtttcttgagaatgagataaaggacangaagttctttggaggagaggagattgggctggtagatattgctgctgtctacatagcattttgggtcccctatggtc

SEQ ID NO: 218800 - DNA, 455 bp, Glycine max
ttcttttggtcttttcttttttatttttcttgagaaattcaaagatgctctatctttattctttgaaatggcacatgtcacgaacaacctatgattgcaaagggagaaatgctagattacaactcttaagcgatctttggaaacaaagtcctaatcaacagcgtttttgctaaaggtcaaacataaccagttgacgacaccgcacacaattttcccccgagacattgaggctcacatccatgagactattttgaagccaagaggctttctttgaagcctttagcaaacacattatctttcaaaattctaagtctcacaccacatcagctagtctattctgaaccacaacggctgtcatatagaccctgggaacaggagactacaagatctctatggggcacactttctttgacaattggatggttcaaaaacacttggctccaattggggagctt

SEQ ID NO: 218801 - DNA, 572 bp, Glycine max
  unsure (1)..(572): unsure at all n locations
ggccaaaccccatctcaatcaaccctttatttctctcttagtgccttgaattttctatagcctttctgtgcaaaatttgcatcccttaattcttgtagaattgatgtctggtttgtacaatcagatttcctcaccttcaacagcaagggccaattcaccaaacataaacatgagaagcaattttgaggctgaaagtcagtacttaacggagctgctagcagaacaccagaagcttgggcctttcatgcaagtcctacccttgtgtaccaggctcttaaatcaagagattttaagggtttctggaaagaatggaatgatgcagaaccaagggtttagtgactatgacagagtgcagttcggaagccccaaacccaatcttatgccttctttagacatacaaccaaattttacaggctggaacagcttgtcacatgaagggttagctggagtacaaggactaaacgtggattggcaaacatcgccagggtgtccaagctctcacattgtgaagaggatattgcgctnggatattgctaatgatagctatccanacttcaatttggntggaaggc

SEQ ID NO: 218802 - DNA, 549 bp, Glycine max
gctgctgctgctgcaaaacctagggttgagccttttgctcaggttttcagcgcttctttcttacaatggttctacagaacgatattgatttgctgaatcctccagctgagttggagaagagaaagcacaagctcaagcgtcttgtgcagtcaccaaactctttcttcatggatgttaagtgccagggctgcttcaacataacaactgtgtttagccactctcagactgttgtggtttgcggaaactgccagactgtgttgtgccaaccaacaggcggacgggcaaggttaaccgaagggtgctcttttaggaagaagggagattgaatggtttgttaaccagacttttctttgtcaatgattgaaaattttcggttgttaggtttttgaaatggaatccatttccgttatggtatattaattttgttaaattgtaagacaatatctctctcagccttccacaagacatagtagccaatgttgaatttttctttattaaagtggatgtggttttgttcgacaacatttactaaaatcaatatggtttagt

SEQ ID NO: 218803 - DNA, 528 bp, Glycine max
gtaaaaataaccatcaaactaaaccatattgattttagtaaatggtgtcgaacaaaaccacatgcactttaataaagaaaaattcaacattggctactatgtcttggggaaggctgagagagataatgtcttacacattaacataattgacataccatagcggaaatgggttccatttccaaaacctaacaaccgaaaattttcaatcattgtcaaagaaaagtctggttaacaaaccattgaatctcccttcttgctaaaagagcacccttcggttaaccttgctccgtccgcctgttggttggcacaacacagtctggcaggttccgcaaaccacaacagtctgagagtggctaaacacagttgttatgttgaagcagccctggcacttaacatccatgaagaaagagtttggtgactgcacaagacgcttgagctagtgctttctcttctccaactcagctggaggattcagcaaatcaatatcgatctgtagaaccattgtaagaaagaagcgctgaaaacctg

SEQ ID NO: 218804 - DNA, 511 bp, Glycine max
aaagcaacaagatgactaaggttattaattattgatcactgatcaaataaactctttctttcacaaaatgtgaaccaaatgaaaggaagtgcttagacttcaaaaaagtgcatatgctgtgcagcacaattattatatattaatgtaatcatgcccttcccaaaagaaacaaacttctagtcagattaatttgactagcacttttattcattctatcgttaatttggttggaacttattaagccctcttgaagataaccctgaaggatggaaccttatcactcaaagacaaatgcttgttcccatcatcaccaacatacaacccaagttccctgcacaaagtctgtgcaaacgagggacagaaagaaagcacatagtctttctcagccttttcaatcttgaaccaattgacaacagtgttaacccctggattgccttcaacaccaccagtgctcaaaaaccacaccccagttagcaccttgaggagcttccacactggagggttatcacaa

SEQ ID NO: 218805 - DNA, 312 bp, Glycine max
ccgattctgttggggtttctatctttcttatactctcactactctctttgctcttggttttgtccactatggctgcacaagaaaacaacttccaagactacttgcctgtgatggccaacaagctaggtggggatggcctaattgatgaactgtgcaatgggttcaatcttctgaaggattctgataaaggggtcatcactttttgagagcctcaagaggaattcttacttgcttggtcttcagggccaaagtgatgaggatcttcgctccatggtataggaaggtgactttgatggcgacggcgcactcaac

SEQ ID NO: 218806 - DNA, 504 bp, Glycine max
aaaagaccatgtcggtgaaggagtgcgagcaccacaaggggaagaagaggaagatcttccggcaagtgttctggtgcttagtggtgttccttttcatcgtgctggtcacaattcttttgatatgggcaatccttagacccaccaaacccaccttcacgctccaagacgtcaccgtctacgccttcaacgccaccggggcgaacttcctcacttcgaattttcaggtcacgctcatctcgcgtaacccgaacgaccgcatcggtgtttactatgatcgcctcgaaaccttcgtgacctaccggagccagcatgtcacgtaccgaaccgccatccctccgacatatcaaggccataaagagatcaatgtttggtctccgcttgtttatggcaccaacattcccgtcgcgccgttcaatttcctcggcctcagccaggaccagagtaacggtaacgtcctcgtcaccatccgagccgagggtagggttcgttggaaggtcggcacct

SEQ ID NO: 218807 - DNA, 543 bp, Glycine max
  unsure (1)..(543): unsure at all n locations
aactctttctcttcttccttcgctcgttgttctccctcgcgtagatcgacaatggcggagacagagacgtttgctttccaggctgagatcaaccagctcctcagtctcatcatcaacaccttctactccaacaaggagattttccttcgtgaactcatcagcaacgcctccgatgctttggacaagattcgatttgagagtttgacagataagagcaagctcgatgctcagccagagttgttcattcatattattccagacaagactaacaatacactgaccattgttgacagtggtattggcatgaccaaagctgatttggtgaacaacttgggtacaattgctagatctggtaccaaggaattcatggaagccttggctgctggtgctgatgttagtatgattggacagtttggtgtggggttctactctgcatatcttgttgctgagaaggtcattgttacaaccaaacacaatgatgatgaacagtatgtttgggagtctcaagctggaggttctttcactgtcaccagngataacact

SEQ ID NO: 218808 - DNA, 493 bp, Glycine max
cttccttctccttctcttcgtcaacatcctccaccttaccctcctgatccttcttctcttcctcatcctcatcatcagagatctccttctcagtagttttctcaatccaaagagaaattgggtagctaatgaactcagaatgcttcttgatcagatccttcaagcgacgctcctcaaggtactcaagctgatcttccttgaggtagagagtgatcttagtacccctgccaagaacctcaccagtgttatccctggtgacagtgaaagaacctccagcttgagactcccaaacatactgttcatcatcattgtgttgggttggaacaatgaccttctcagcaacaagatatgcagagtagaaccccacaccaaactgtccaatcatactaacatcagcaccagcagccaaggcttccatgaattccttggtaccagatctagcaattgtacccaagttgttcaccaaatcagctttggtcatgccaataccact

SEQ ID NO: 218809 - DNA, 478 bp, Glycine max
catggccaccacctacgcattcctcctccttcccctactactgctgctacacctcgccatcgtcgctcacggtataggcataaactacggcacgctaggcgacaaccttccaccggccgcggcggtggcgaacttcctgaagacgaagacgaccatcgaccgcgtgaagatctacgacgtgaacccggacatgctgcgggcctttgccggctgtggcatttccgcgacggcgaccggacccaacggggagatctacgacttgaccaaaatcgactgggcgaggcaatgggtggcgacgcacatgacaacctatcaccctcaaaccaaaagtacatacatcctgactggcagcgcgggtctgcactggggcagacaccaacatgatccggggactcttgcctgccatgagaacgcttcactcagccctactagccgagggcatcaccgacatgaaggtaaccactgctcactctctggc

SEQ ID NO: 218810 - DNA, 397 bp, Glycine max
gttcctatctctggttttgagggagacaacatgattgagaggtccacaaaccttgactggtacaagggtccaactctgcttgatgcacttgaccagattagtgagcccaagaggccctctgacaagcccctcaggcttccccttcaggatgtgtacaagattggaggtattggaactgtgccagtgggacgtgttgagaccggagtcttgaagcctggaatggtggtgacttttgcaccaactggactgacaactgaagtcaagtctgtggagatgcaccatgaatctcttacagaggcacatcctggtgacaatgtgggattcaatgttaagaatgttgctgataaggatttgaagcgtggatatgttgcctcacactcaaaggatgaccctgcaa

SEQ ID NO: 218811 - DNA, 402 bp, Glycine max
gttgaggaaacaattgggggctgtggagcatttggtgtatatggtttgtgatccaagaggatgggtgggctttgacccctagataaacaggtggatttctttacctaagatacctagtgatgagtgctttaatcatgcacacaatgatgctcttggccgtgggctgcgaactgttggtcttgagactagaatcgatggattatgccatatgaaagaatagcatgatttgtcgtgggtggatgaactgccaagagatgaaccaaccccgatgtaggtctgtatctatgagggttggatcgattgctatcgttgctgggggaagagataagcacggaaatgtgctaaaatcatgtaagagagtatgactctgtaacaaggattgtgggatacttttaccaatca

SEQ ID NO: 218812 - DNA, 169 bp, Glycine max
tgcttgaggttcctatctccggctccgagggagaccactttatagggaggtccacaatccttgagtggagcgagggtcccactcttgctgatgcaccctaccccattatcgcacccccaaagcccatctgtcgagcccctaagctatcccttcatgatgagtacccaat

SEQ ID NO: 218813 - DNA, 455 bp, Glycine max
gtcaaacttgagttcaaacactctcatcttcttattcttctgctttcactctctgactcaatcgttctaatccacaaaaaatgaccttaaattacaacattgccctcgccttctctgcggtgctcacgctgctcctctttcccctactgaccgtaggggagctcgtggaggagcagccactagtcctcaagtaccacaacggccagctcctgaagggccgcatcaccgtcaatctcatctggtacggcaccttcaccccgatccaacggtccataatcgtggacttaataaactcgttaagcagcgcgccaaacgcgcctctcccctcgaccgccacgtggtggaaaaccacggagaagtacaaggtgggaggaggatcccctgcgctcgtcgtagggatgcagttcctacacccggcttacacgctagggaaaaatctcaaaggaagagatctc

SEQ ID NO: 218814 - DNA, 371 bp, Glycine max
agaaagcccctggttaaaagcctactggattgggtgctcctcctagaggccccccatctaccgcagatgcatatgaaaggctgattctatccattcccgagattgccaactttgggaagcttattaagtcttccgaaccagaggagcttactgtagcacataccgattatgcagttaatgtgggttaacacatttttgatcggcatgttgagtttcaatacaactgcacaaacacgataccagagcaattattgtacgaggttactgtaattgtggctgcatctgcagcagatgagctctctgaagaggtgtcaaagcctatcagatgtctttcttatgatacgcctgcgcatacatcagtgggtgcagaa

SEQ ID NO: 218815 - DNA, 425 bp, Glycine max
  unsure (1)..(425): unsure at all n locations
ggacaaggagggtatccccccggaccagcaacgtctcatcttcgccggaaagcagctcgaggacggccgcaccctcgccgactacaacatccagaaggaatcaacccttcacctcgtcctccgtctccgtggtggcatgcagatcttcgttaagaccctcaccggcaagactattaccctagaagtcgaaagctccgacaccatcgacaacgtcaaggctaagattcaggacaaggagggaatccccccagaccagcagaggctgatcttcgccgggaagcagctcgaggacggacgcacccttgctgactacaacatccagaaggagtcaactctccacttggtgttgcgtcttccgggtggtatgcagattttcgtgaagactcttacnggtaagactattaccctcgaggtggagagctctg

SEQ ID NO: 218816 - DNA, 590 bp, Glycine max
  unsure (1)..(590): unsure at all n locations
gtggaacatttggactcaataaagaatatcttgagcaaccagacattcccaatacatggagagcaatggaggcactctatgactcagacaaggctagagccataggagtgagcaatttctcttcaaagaagcttcaagatttgttagatatagcaagagtggttcctgctgttaaccaagtggaattgcacccaggatggcagcagccaaagttgcgcgcattttgtgaatctaaagaaattcatctatctggatattctccactaggttcaccagcagctctcaaaagtgatattcttaagaatcctgttgtcacagagattgcagagagattggggaagacaccagcacaagttgcccttcgatggggcttgcaagcaggtcatagtgtgcttcctaagagcactaatgagtccagaatcaagggaaattttgatatctttgactggtctattcctcaagatttgatgaccaagatctctgaaattaagcaggaaaggctagttaaggccagtttttttgttcacgagacctatggtgcctataggagcatngaaagactctgggatggtgaactctgagncatatgc

SEQ ID NO: 218817 - DNA, 572 bp, Glycine max
cactcaactgacttttttatattgaataaaagatacaatcattaaatgaaaaataactctcggcttcttattcggtgttaccatcaatagtaacacttctcaaaatctcacttgaatcactacaactagtgggtataaggcagaataaatttgctctaggagcaatgtatttttcaacgtctcaaagatgcatattgctcagagttcaccatcccagaagtcttcaatgctcctataggcaccataggtctcgtgaacaaaaaaactggccttaactagcctttcctgcttaatttcagagatcttggtcatcaaatcttgaggaatagaccagtcaaagatatcaaaatttcccttgattctggactcattagtgctcttaggaagcacactatgacctgcttgcaagccccatcgaagggcaacttgtgctggtgtcttccccaatctctctgcaatctctgtgacaacaggattcttaagaatatcacttttgagagctgctggtgaacctagtggagaatatccagatagatgaatttctttagattcacaaaatgcgcgcaactttg

SEQ ID NO: 218818 - DNA, 567 bp, Glycine max
ggattcgttaccttcttcttgcaagaatgttgagattaataaggatcctaatgtatgtcaagcgataccgagcctttgtggcaactttattgactctcataccaagtttgatgccatacctagggatcatattttgtaccttgtgtatttattgttcaattggagtacagatttttggtggaatcgttaatgctggaaaccccgaattggaattaacagctcttgctgaaaatgactatttggttttcaatttcaatgattacccgaatggaattgtgacacttttcaattttcttgtcacggcaacctgggacgaagtaatgacaagctacaaggaattaactgggacttcttggacctatttgtacttcattagcttctacttaattactgttttgctgcttttaaacttgattattgcttttgtcttggaggcattctttgccgaaatggaacttgagtcatcagaaacttgtgaaggaaatgacaaggaagttgaaggagataaatatcgaaagcggtctattggcacaaaaacacgaagcccagagggtgatgctcttcttc

SEQ ID NO: 218819 - DNA, 471 bp, Glycine max
ctaggcacagctttggacactcaggaggttttgcctgcccatttgttccattcttacctgctgcatgtattcttataaacacctacttactaatcgatcttggagttgctacatggctgcgagtttcggtatggatgttgataggagtacttgtatacttgttctatggccgcactcacagctcactgttgcatgcaatctatgttccctcagcatatgctgatgaaatccatcgatctcaagcaagtcatcttgcctagtatttgcacggcagctaccaaagttaccacacttcaggtctatatccatttgttacataattgtgacatattacattacatggcttacaccaatttgtaaatatcctattctaaaccaatgctttctttccgctatcagacggatgattactatgattatttatttgtttatttaaacaagtggccataaccggatgagtccatcctttta

SEQ ID NO: 218820 - DNA, 619 bp, Glycine max
  unsure (1)..(619): unsure at all n locations
ctcgagccgctcgagccgctcgagccgattcggctcgagctcaagcctttctctctttctaacaagttacaaataaaagttcccctttttctccggatcaatgaacgatcatctggtgctgttcgtggaccatctggtgcggcccgtgccggtggtcgagccgctggcccaacaaccccccgagcccgtgacgcccgtcaatgaggccgcggtggcgggtccctccgggtcgtctccgtctgcggaggacgacggagacgacgacggggaggacgcgccgctgctgcagctggcggagtgtcgcatttgccaagaggaggacagcgtcagcgatttggagaccccctgctcctgcagtggtagtcttaagtatgctcatagaaagtgcgttcagcgttggtgcaatgagaaaggagacataatttgtgagatatgtcataagtcctatgaacctggttatactgccccgccacctcgtcctcagcctgaagaaactaccattgatataggtggaggctggacaatctctggcatgccattggactngcgtgatacccggctcttagcaatngcagaggctgaacgtncattctggaaagctgatacgatggatatgctg

SEQ ID NO: 218821 - DNA, 541 bp, Glycine max
  unsure (1)..(541): unsure at all n locations
tttaatcctatcctatcgtagcaaagaaagaaagaaagaaaaccctagcttaccttttcaactttcaagatgcaaatctttgttaagacactcactggtaagacaatcacccttgaggtggagagttcagataccatagataatgtaaagtccaagattcaagacaaggaagggatcccaccagaccagcaacgtctcatttttgctggcaagcagcttgaggatggacgtacacttgctgattacaacattcaaaaggagtccactctacacttggtgctccgtctccgtggtggaatgcaaatctttgttaagaccttgaccggaaagacaatcacccttgaggtcgagagctctgacaccattgacaatgttaaggctaagattcaagacaaagagggtatcccaccagaccaacaaaggcttatctttgcaggaaagcagctagaagatggcagaaccttggctgattacaatatccagaaggtatctaccctccattggtgctccgtctcgtggtgggatgcanatctttgtcaag

SEQ ID NO: 218822 - DNA, 434 bp, Glycine max
attgaaagtactaattgcattaaaacatgattgcaaattgcacacattcatagcttttgaagggccgctaatggacccgggatgcacacatactcaaagttcaggagcatatttaaagaaacgaccagattatagactttcacttacttcagttcacaccaaacaagggacctgcagaccattctcatactcaaaacccaccacgaagacacaagacaaggtgaagagcagactctttctgagtgttgtaatcaacaagagtccttccatcctccagttgcttcccagcaaagatcaacctctgttgggctggggggataccttccttgtcctgtgttcttgcctagacattatcaagtgagtgtgaactctcaacctccaaggtgaatgttatcgctgtcaaaggcttcacatagatctgcatacctgccctc

SEQ ID NO: 218823 - DNA, 303 bp, Glycine max
gatcgatggttttgtctatgacctactcgccatcttgcaagagcttcaggtgcaatcttgtatcttcgttggccactctctttctgctatggtgggcctcctcgcttccatctctcaccctcatctcttcactaaactcatccttgtctctgcctctccaaggtttctgaatgattcagaatactttggagggttccagcaagaagatctgacccaactctacgatggaatccggtcgaattacaaagcatggtgttcggggttcgctccgctggtgatcggcggcgacatggactccgtggc

SEQ ID NO: 218824 - DNA, 591 bp, Glycine max
gcagatccatccgctctgccaccaggtgaatggaaggaagtggcggtggcggtgcttcaccgtctgcaccggtgaagcagtatttgcacgatttctcgaagctgtttcagtactatctggataaatccactccacattccacgtacagatggattgggactttcgtgatagcatccatctacgttttgcgcgttgtttatgtgcagggtttttacattgtctcttatggactcggaatctaccttctgaatctcttgattggttttctctcccctttggttgatcctgagctcgatccctccgactcccctttgcttccaaccaaaggctccgatgagttcaaacccttcattcgccgccttccggagttcaagttctggtattctttcaccaaggctctctgctagcgtttgtgatgaccttatttccctgtttgatgttcctgtcttttggcctatattactactgtactggattgttctctctgtccctacaatgaggcgccaagttgctcacatgatcaaatacaaatatatccccttcaacttgggaagcagaagtatagcggtaataaatcttctgcaaggagca

SEQ ID NO: 218825 - DNA, 590 bp, Glycine max
agatgaactttgccttaatattgaggtagaagccaccaagcatggaaaaattacagcatcacaaattcacaatacaagctgagatttacaagaaaagtccaatcaataacgtgcactgacaatgagattcactatcaatattagcacgtcttcatgtataataaaacgagtggacattaagattttccgtatcagcataatgcatactgacatccataataccatgaatacaaattctttcatagaaaaggggggcattgactagcctgaatgttcagaaaacctaactaagtagatcttccaatcatgagagacaagtttcagtctgcacgagagctactgctccttgcagaagatttattaccgctatacttctgcttccccaagttgaaggggatatatttgtatctgatcatgtgagcaacttggcgcctcattgtaaggacaaagagaacaaaccagttacagagttatatatgccaaaagacaggaacatcatacagggaaaaaatggtcatcacaaacgctatgcagagaaccttggtgaaagaataccagaacttgaactccggaggcggcgaatgaagggt

SEQ ID NO: 218826 - DNA, 499 bp, Glycine max
tgggtgcagaagcaaatggcggcgagaagcaattgaaatttctgatctacggtcgcagcggttggattggtggtctactgggtaagctctgcgaagagcgcgggatccaatatgagtacggcaccggcagattggagaaccgctcgtcgttggaggcggacatagcggctgtgaagcccagccacgtgttcaacgccgcgggtgtcacgggtagacccaatgtggactggtgcgaatctcacaaagttgaaaccatccgaaccaacgtcgtcggcactctcaccctcgccgacgtctgccatcataaaggcctcatcctcatcaactacgccaccggctgcatcttcgagtacgattcttcccacactctcggatccggcatcgccttcaaggaacacgacactcccaatttaaccggatccttctactccaagaccaaagccatggtggaggatctggttgggaactacagaacgtgtgcacgttgcgtgtgaggatg

SEQ ID NO: 218827 - DNA, 471 bp, Glycine max
aagtaggtaacaactagtttattcatatgataataaaaaatacaaatataacattaaaattaaatgcaacaaaacacacgaaggaaaatctgaaatggccagcagaagaagatgtaaattaaaacggtaaactaacataacatgtccaagttatgttatgcctttttctgatttggctggaatacatacttaacgagggagtctttgatggacaaaagttgaggaaactcattcttcaacttagaggcgtcaagctcgttgttgcttctaggggcaacaatcaccttagcctgctcctccagagtgaagttcttccatgtaaagttcggatccacgtattccttgtacatctgtaaaatctcggtgagacttacgactccagggttggtgaaattccagatcccagtgaggttccgcttggccatctccagcgagattgggagaagctcgcccaatatggtcatggagttg

SEQ ID NO: 218828 - DNA, 482 bp, Glycine max
agctgctacaccgcaacaaaatccttcaggtaatggtatcaaagccattggagtcattgctggaggagttgctgtgggtgctgcactgttgtttgcatccccagtaattgcacttgtttattggaatagaaggaagccactggatgattactttgatgtcgcagctgaggaggatcctgaagttagccttggtcagcttaaaaagttttcactgcctgaactgcgaattgcaacaaataactttagtaacaaaaacattcttggtaaaggtggatttggcaaggtttataaaggacgttcaaccactggtgatgatgtagcagttaacagacttaaccctgaaagcattcggtgagacgataagcaatttcaaatagaagtggacatgatcagcatggctgtacatcgaaatttacttcggctgactggtttctgtatgacatcttctgaacgcttgcttgtgtatcctttatggctatgga

SEQ ID NO: 218829 - DNA, 563 bp, Glycine max
  unsure (1)..(563): unsure at all n locations
cgattctctctttctctttcttcagaaaaattaaacccattcaaagaaagaaagaaagagcgatcatttccaatcacaatggcagatcaactcaccgatgaacagatctcggagttcaaggaagccttcagtttgttcgataaggatggcgatggttgcatcacaacaaaggagcttgggactgttatgcgttcgttgggtcagaatccaacagaggctgagctccaagacatgatcaatgaagtagatgctgatgggaatggcaccattgacttccctgagttcttgaacctcatggctagaaagatgaaggacactgattctgaggaggagctgaaagaagcgttccgagtgtttgacaaggaccagaatgggttcatttctgctgctgagctccgccatgtgatgaccaaccttggggagaagctcactgatgaagaggttgatgagatgattcgagaggctgatgtcgatggcgacggccaaataaactacnaggagtttgttaaggtcatgatggccaagtgatggtagtacaccatcttcactaaattctgaactga

SEQ ID NO: 218830 - DNA, 443 bp, Glycine max
tgcgttgcagttcagatgcgatatgcgtttttgattctgggccgacacctactagtctgaggccgcccttttttttttttttttttagcagtagagctttccactaaatgtcgattagattgaaggcaagaacatgaaataaaaatctagaaataagacagtaatgacattaggcaaggactaggtgtactatatcacaggttcagccttgtcatttttttccatcagttcagaatttagtggagatggtgtactaccatcacttggccatcatgaccttaacaaacttgtcgtattttatttggccgtcgccatggacatcagcctctcgaatcatctgataaacctgttgatcagtgagcttctccccaaggttggtcatcacatggcggagctcaactgcagaaatgaacccattgtggtccttgtcaagcacttggaac

SEQ ID NO: 218831 - DNA, 502 bp, Glycine max
gccacttcgacctcaatcaccctcgcgccctcgctcttcccttcctggtggcgacaatgtcgactcctgctaggaagaggctgatgagagacttcaagaggctgcaacaagacccgcctgcagggatcagcggtgccccccaggataacaacataatgctgtggaatgctgtcatatttggtcctgatgatactccatgggatggaggcacgttcaagttgactctccagtttactgaggattatccaaataaaccaccaactgtgcgatttgtgtctcgcatgtttcatccaaatatttatgctgatggaagtatttgtttggatatactacaaaatcagtggagtcctatatatgatgtggctgctatactcacatctatccagtcattgctttgtgatcccaacccaaattctcctgcaaactctgaagcagctcgaatgtttagcgagaacaagcgtgaatacaatcgaagagtgagggaaatcgtggagcaaagttg

SEQ ID NO: 218832 - DNA, 513 bp, Glycine max
caaaaaccattgttcgatcataaccaattcagcaaactacaactgtctttgttgaatgtttgacaacaatccaaagtaaattgacacgcataattctattttacattaactgacatatgcaatgcaaaagctacaataaattaaagataagatgatgctatcattcatatcagaagagaatatatatttgatgagtttgcacaatcattcttatatataggtgccaccactgcaacctaattcatgccctcaaagcttcctgcatataaggatgaacttagtcggctgtccaactctgctccacgatttccctcactcttcgattgtattcacgcttgttctcgctaaacattcgagctgcttcagagtttgcaggagaatttgggttgggatcacaaagcaatgactggatagatgtgagtatagcagccacatcatatataggactccactgattttgtagtatatccaaacaaatacttccatcagcataaatatttggatgaaacatgc

SEQ ID NO: 218833 - DNA, 553 bp, Glycine max
  unsure (1)..(553): unsure at all n locations
ataatattctcacaaccacacttcccacagcctcaggtgtccctctacaaaagttcaccattttggaagtgtctgaagatatcaacgctgctaaatgggtagcttgtcatcccctaccatatccctatgccatttactattgccacttcatagcaacagggagcaaggtgttcaaggtctcactaggtagcgagaatggagatgacaaaattgaagctcttggcatttgccatttggacacatctgattggagcccaaatcatattatatttaggcagcttggaatcaagcctgggaaggatgcagtgtgccacttcttccctataaaacatcttatgtgggttcccaagcctttacaagccaccatgtgaatggaatgagttccctgggtttctgtaataaaggtcaatctcaacaatgatgaccatgtaccctttgtggacttcctctttgtttgtatgtcttgggccttggtttatgttacncaatgtgcttggcagaaaagacttcatgtatgctttgatttcaggtaagaaaatatttctattggcag

SEQ ID NO: 218834 - DNA, 552 bp, Glycine max
ttaccagttgccacactacaccgagattccccctaaacccgtttgcgttgttgtttgcgaagaaatggcgactaagaggagcgtgggaacgttgaaggagggtgatttgaaagggaagagggtgttcgtgagggtcgatctgaacgtgcctttggatgacaaccttaacatcaccgatgacactagagtccgtgctgctgttcccaccatcaagtacttaactggtcatggagccaaagtgatcctttctagccacttgggacgtcctaaaggtgtaacacctaaatacagtttgaagcctcttgtgccaaggctgtctcaacttctcggaattgaggttacgatggcaaatgactctattgggaaggaagtgcagaagtctggttgcacaacttccagaaggtgggtgttttgcttctagagaatgtgaggttctataaggaggaagagaagaatgaccctgagtttgcaagaagttggcttctttgctgatctctacgtgaatgatgcttttcgcactgcccacagagctcatgcttctacagaaggagt

SEQ ID NO: 218835 - DNA, 600 bp, Glycine max
gataaaactaaaggaacataactaacaaagtaaaactccttttgaaatgaacattgttcaagaacaattagatcaaagctcaatgcaacaccaaggatgccacaaaaccctcttatttcgaaacctaacctatattaagcctctacaggagcaacaagagctctctcattgtacctcaatccactgttggctgaaatccaaccataataataatataaagcacaaattacagaggaactagtgatgtttactcaagcatcatcaagggcaaggacaccagggagttgcttcccctcaagaagctctaagctggcaccaccaccagtggagatgtggctcatcttgtctgcaagaccaaccttctccacagcggcaacagagtcacctcctccaatgatggtcgttactcccttcccactcagctctgccagtttcttggctatggcctctgttcctgtggcaaacttatcaaactcaaaaacacccattggtccattccaaatgacggtctgggtcttatccaatgcttcaccaaatgtcttgatggtaatcggaccaatatctaatcccatccacccgtctgggatgcttgattgctgc

SEQ ID NO: 218836 - DNA, 577 bp, Glycine max
  unsure (1)..(577): unsure at all n locations
ctcgagccgcctgacttttgtgtgcatcgatggcggcgatcagtctccggaaggggaacacgcggctgccgccggaggtgaaccgcgtgctgtacgttcggaaccttcccttcaacatcacgagcgaggagatgtacgacatcttcggcaagtacggcgccattcggcagatccgcatcggcaccaacaaggacactcgcggaacggccttcatcgtctacgaggacatctacgacgccaaaaccgccgtcgaccacctctccggcttcaacgtcgccaaccgctacctcatcgttctctactaccagcaagcgaagatgagcaagaagttcgatcagaagaagaaggaggacgagatcgcgcgcatgcaggagaagtacggcgtctccaccaaagataagtaaattaagtacttccttctcggaaatgcctagggttagggttaggggttttcgagactctgtttggaggctattttgcattcctattattggtggagttagtataagtgactatgaattaatgtttacgatgctatcattatttgtgagaatgaaatgaaatatanattcatcgg

SEQ ID NO: 218837 - DNA, 559 bp, Glycine max
  unsure (1)..(559): unsure at all n locations
ctcactccaaccccttccccatcaaccgtcatggctttctctgcattaaaagaagaagatcttaagcttatgttggctgcccgtgttcatatcggcaccaaaaacattgatcctcaacaacatcgttatgtatggcgtcgtcgtcaagatggtgtatacatcatcaacttgggtaaaacctgggaaaaacttcaattagctgcacgtgttattgttgctattgaaaatcctgaagatgttacagtcatctctgcacgtcaatatggtcaacgttcagtattcaaatttgctcaacatactggtgcacaatatattggtggacgttatactccaggtaccttcaccaatcaaatccaaaagaaatttttggaaccacgtttgttggttgtcactgatcctattactgatcatcaacccgtaaaagaatcatcttatgtgaacatccccgttattgcatttacttcatacgatgcaccattaacacatatngatcttgccatcccctgtaacaaccagggtaagcaatcaattgctttgatgtattggttattagcacgtg

SEQ ID NO: 218838 - DNA, 408 bp, Glycine max
cgaaaattgtggtgttggttctgggggaggaggaagatggttgcggggttttggaagcttgattaggaggaagcaagttgattctgttcatgtcaggagacatggtcaatcggctaggaagttgtcagctgctgatctcgctggaattggggttggagctaccataggagctggagtgtatattctcattggaacagttgctagagagcaagcaggaccagcacttgtgatatcacttctcattgctggaatagctgctggactgccagctttttgctctgctgagcttgcatgtcagtgtacgtctgcggagagtgcttatcattatacatacatatgcattgtagaatggattgctcggctggtcggttggtctctgattctagaacatacacctggtgcttcggc

SEQ ID NO: 218839 - DNA, 545 bp, Glycine max
ctttctccgagaacaaaaaaaaaaacgtgattcgctcttctcttcgaataaaccacaaaaccaacaaacgagaagaggagtgagagaagatggggttgtcgttcacgaagctgttcagcaggttgtttgcgaagaaggaaatgaggattctgatggtaggtctcgatgctgctggtaagacaaccatcttgtacaagctcaagcttggagaaatcgtcaccaccatccccaccatcggatttaatgttgagactgtggagtacaagaacatcagcttcactgtgtgggatgttggtggtcaggacaagatccgtcctctgtggaggcattatttccagaacactcagggtctcatttttgtggttgatagcaatgatagggatcgagtggttgaggcaagggatgagttgcacaggatgttgaatgaggatgaacttagagatgctgctctgcttgtttttgccaacaagcaagatcttcctaatgcaatgaatgctgcagatataactgacaagcttggactttattcactccgtcaacgccac

SEQ ID NO: 218840 - DNA, 470 bp, Glycine max
  unsure (1)..(470): unsure at all n locations
attcaaccaaaaatcaaactaacaaaatgaacacaaacaaggcacgcacaagagggtccaagagttccaattatagctaaaagtattagctaatttaagcaatcatacaaacccaagttacacaatagaagagaatacttntagcaagccttctggtcttacaacattgacaagaaaggattagcatatttctccaagaaccgccattctcagcaggaaatctccagacaagaccaaaaattttcaaatgtctcatgccttgctggcaatgttgttagaaagccattccaaaccctcatagagaccctctctaaaagttgcacaagtgctttggatataccagtggcgttgactgaatgaatgaagtccaagcttgtcagttatttctgcagcattcattgcattaggaagatcttgcttgttggctaacacaagcaaaacagcatgtgtaagttcatgctcattcaaca

SEQ ID NO: 218841 - DNA, 544 bp, Glycine max
gttcctatctctggttttgagggagacaacatgattgagaggtccacaaaccttgactggtacaagggtccaactctgcttgatgcacttgaccagattagtgagcccaagaggccctctgacaagcccctcaggcttccccttcaggatgtgtacaagattggaggtattggaactgtgccagtgggacgtgttgagaccggtgtcttgaagcctggaatggtggtgacttttgcaccaactggactgacaactgaagtcaagtctgtggagatgcaccatgaatctcttacagaggcacatcctggtgacaatgtgggattcaatgttaagaatgctgctgttaaggatttgaagcgtggatatgttgcctcaaactcaaaggatgaccctgcacaggaggctgctaacttcacagcccatgtcatcatcatgaaccaccctggtcagactggaaatggctatgcccctgtcctcgactgccacacttctcacatagctgtcaagtttgcttgactcatgaccaagaatgacaggcgatccc

SEQ ID NO: 218842 - DNA, 376 bp, Glycine max
cagctacgaaggaggctaatattaaggcagggtccctatcctatgactgggacgggggatcatctctgcttgaggcactagaccagattcgtgagcccatgaggccctatgacaagcccctcaagctatcccttcaggatgtgtgcatgattggaggtattggaactgtgccagtgggacgtgtcgcgaccgcagtgtggaatcctgtaatggaggtgactgtctgcaccaactggactgacaactgaaggcaaatatgtggcgatgcaccatgaatgtattacagaggcacatcctgctgacaatgtgggattcactgttgagaatgttgctgccattgatctgagcgtggctattgttggcttaaactcaaaga

SEQ ID NO: 218843 - DNA, 564 bp, Glycine max
agaaagcccctggtaaaaagcctactggtttgggtgctcctcctagtggtcccccatctaccgcagatgcatatgaaaggctgcttctatccattcctgagtttgcaaactttgggaagctttttaagtcttcagaacctgtggagcttactgaagcagagacagaatatgcagttaatgttgttaaacacatttttgatcggcatgttgtgtttcaatacaactgcacaaacacgataccagagcaattattggaagatgttattgtaattgtggatgcatcggaagcagaagagttctctgaagtgttctcaaagcctctcagatctcttccttatgattcgcctgggcaaacatttgtgggttttgagaagcctgagggattgtcaattgctggaaaattttctaacgttctgaaatttattgttaaagaggttgacccaaccactggtgagacagaagatgatggcgttgaagatgaataccaactagaggatttagaggttgtcaccgcagactacatgttgaaaagtggagtgtctaaattcagagtgcatgggaaag

SEQ ID NO: 218844 - DNA, 546 bp, Glycine max
  unsure (1)..(546): unsure at all n locations
ttcgttcttttttttttttaaagcacaaattagtgacatcttttgcactaaaaatagttatttttaacatatatccaaatcattgaaaaaaaacaattttatgcatatccccaaaattcgttttacagtcgctacaaatatatgaaaagtataaccatcaccattgaagtttactccttctcacccaacgtaatactggaaagtattgttgccggtctaacaagcatgcaaaatgggtgaccaataaattgcatatattaagaagagttcagctttgcaatactttttacacacggctatctatgaggctgctaaactccaatctcagtgacacaaagaaaggccgagttgagtcaacatttcttgatcgagtgcactagccactagccacaatctcatggattggatcgctgtcagcttcatcctcggatctgacagaaagtttcatagcaacatgctttggaccatcaagtncaaaagacaaccgcacaagatccttgacatttcctatgaattcacctgacaacaagcatgtgtgtgaccttg

SEQ ID NO: 218845 - DNA, 401 bp, Glycine max
  unsure (1)..(401): unsure at all n locations
attctttccgggatactgccttgtacaaaattttgttttctctagttttacactatagtatgataggcactttatgtaaaaaaaaaaaaaaaaaaaaaaaaaaaaaaaaaaaaaaaaaaaaaaaaaaaaaaaaaaaaaaaaaaaaaaaaaaaaaaaaaaaaaaaaaaaaaaaannnnnnnccggggggggggggcccaggaactttagctataacgggaaaaataaaagggccggcgacccccggttgggtacctttttttaataaaggagaaaattgggccagggggaaccctggagacaaaatggatatgcgttaagattataaactggggagcaaaacccaaaaacaaagataaacagaattgccttgggtttgctggggggagggcaaaaaggaaac

SEQ ID NO: 218846 - DNA, 365 bp, Glycine max
gttctggggtttttttattttgatttcaccttctaccccattttaaaaaaaaaggaaccccccaaaaaacaaaaaccaaaaaaaaaaaaaacccccacccaaaaaacaaaccaaaaataaatcctttagccccccaaacaaaacacaccccccccccaaaaaatccacaaaaccctaaaaaacccaaacaaaaaacaaaactaaccccccgaaaaaaaacccagaagcgaaaaaaaccaacataacaaaaaacaccccaaccaacatctcagcccacttaacaaaaaggaaaaaaaaaaaaaaaaccccccacaccaaaacccccccaaaaaaaaataaaacagccaagaaaacgaggccccccc

SEQ ID NO: 218847 - DNA, 578 bp, Glycine max
aaaaaaacccaaaaaaccaaaaataccataaaatttttcagcttctccgccgccgtacagccaccacctccgttcggatctccggcggacctactatccctactactctatttacacggaagaacaaaaaaactatcccacaaaaaaaattccaaaagcggttcggttagggtttagtttttttttatattatttcgtgtatctaatttttcatcagtaatattatttttgaggcggcgagatggcgcagattcaggtgcagcatcagagtccggtgtcggctcctcctccgaacggcgtggctaacgcgccgaacaacccgaaccagttcgttacgacgtcgttgtacgtcggcgatcttgagcagaatgtcaacgacgcacagctatacgatctgttcaaccaggtcgtccaagtcgtttcggtgcgcgtttgcagggaccttacgacgcgtcgatcactcggttatggctatgttaatttcagtaaccctcaggatgcggcgagggcattggatgtgctgaatttcactccactcaacaacagacctattaggatcatgtattctcatcgggatc

SEQ ID NO: 218848 - DNA, 626 bp, Glycine max
  unsure (1)..(626): unsure at all n locations
agganaaagaagacaagaaaggattgcggttannatgnattgccnatgttttaggttagaggagcataccagtcggcggccgcccttttttttttttttttttaatccaaaccgcaaatgtttatctaataaatccaacaagttatgctaatggatcctacagaaattcagatacgaaaaaaagtgaaaccaaaagtaccaagaacataaacttccttagtactctgactaaaacaaaacatctaagacacctgcaaataaactggggggaagcatacggaataggaataactggaaagcagattccagtcaaaagactaaaggaatctaagacacaagattgtcattgagagagagtgaagctagttgatcagctgggttagtttgctgttgagcaacatttcttaacacatccatggcttcagcaacttttgccttcagagcatctggtgactcaatcagatgtaaaacttcaggctggtccatcttcagaagcatgccagtaacctttgctgcagcatcgtgttccagctgatccacaagcgggtttaaagcttcaccgagcatagtcctctgctgctcagggggagcatttgcaagagccgtggccaaagcttgaatgggca

SEQ ID NO: 218849 - DNA, 588 bp, Glycine max
  unsure (1)..(588): unsure at all n locations
gctcgagccgctcgagcggctcgagatttctgactacgttttgctctacgcctctccctctctctcaaaaatcgttctcttcgattttagggttttgttttgctgctgcctccgttccccccttctcataaacaacgcgttttctcttctgcttcgtatctattctttgcttttggttttggttgattcaaggccttcacagcattcgttgcggcattttaatcgatttatccaagcaggactgaatgaactaatggagtctaaaggtgggaaaaagaagtctagtagtagtagtagtaaatcattgttctacgaagctcccctcggatacagcattgaagacgttagaccaaacggtggaatcaagaaattcagatctgctgcttactccaactgcgctcgcaaaccttcctgatatccatccagatggatagttcattgcatgcaaccatagttntattaggttttttcttctttgttttcattaggtttttgctgctctccttcaaactccgtctttccgaatcctctctatgtgattgtgttctgttctgcttcctaccgcgatagtttctcttctgaagcatg

SEQ ID NO: 218850 - DNA, 483 bp, Glycine max
aaaacacgcttgatttagcaaacacagcgcaagattagtgtgaacattgacaacatcacacaaattttgcacgcatacaaagtgattgattaaaatccattcgatgctcaaatggcaatagttgaacaataaatggtcctaacgccctaacattggtctaacataaaagggaaaatacaccaaagaaaaacaatcactgtctggaaaaccggacttattttcgcagggacataatagagacacttatgaaagctactcttcttcatcttcctctttccagcacttgagagttgatctaggtgaaccacagtcacaagtcttggcaaatttttggtagacaagagaaccacccattccaagcccttcggggctcctctcttggcgacagtttcccttaacatccagaaaacacgtctgatcaaacatcttggttgcaccatccacatgaactgcaacagataactcatgtgggagaatacatgc

SEQ ID NO: 218851 - DNA, 570 bp, Glycine max
caaaaatgaaaaacatgaaattgtgttcggtgatgctatgcttatcactagcgttccttcttggggccacagcagaacaatgtggcacacaagctggtggagcgttatgcccaaatagattatgttgcagcaaatttgggtggtgtggtgacacagattcctactgtggagaaggttgccagagccaatgcaaatctgcaacaccctcaacaccaactccaacaacacctagtagtggtggagatattagcagactcattagctcttctctctttgatcaaatgcttaaataccgaaacgatggccgctgttctggccatggattctacagatatgatgctttcattgccgctgctggctctttcaatggctttggcacaaccggtgatgacaacactcgcaagaaggagattgctgctttcttggctcaaacttctcatgaaaccacagttgggtgggcaagtgcaccagatggtccatatgcgtgggggtattgttttatcaacgaacaaaaccaggcaacttattgtgatggtgggaattggccatgtgctgctggtaaaaatatta

SEQ ID NO: 218852 - DNA, 460 bp, Glycine max
ggtaatatattttagtttcttatttaatcaagataaggggaacttctttagaaacaagtttcccagtacatgtaagatcatggtagatcctttattacatactatttattctctatatggatgatatatgtgagcaatttgcttaagcaaatggcctttgattgttacaatccaagttgtctccggggcttattcccatcatctggcagtaccttcggtagaagccgatccgatcttggacccgattatcctggccgtggccgcattcgaggccaccgttgattatgttggtgatgacaccgtagccaggagcccgacccgctgagctgtcagcactagatggagtccatcttccagtgatcacatcatggcttgatggcttgtttccctgtgcagtcatccaaaaccatatggctgtcttgaatgacacggttgcgtctgtggcttcaagatccggatt

SEQ ID NO: 218853 - DNA, 540 bp, Glycine max
tgtgagggtgcctggttacctattctgctggccctattcctcatgattataatgtttctttggcactatgcgaccatcagaaaatatgaatacgatcttcacaacaaggtgtcactagattggcttctagccttaagtccaagcttgggaattgctagagtcccaggaataggcctagtgttcactgacctcaccactggcatcccagcaaacttgtcccgctttgttaccaacctccctgcatatcaccggatccttgttttcgtgtgtgtaaaatcagtgcctgtccctcatgtacctgctgctgagaggtatctggtaggccgtgtaggacctgctgctcatcggtcctaccggtgtatagtcagatatggatatcgtgatgctcatcaagatgccgattcctttgagtctgaactagtagcaaggcttgctgatttcatacaatatgatcggtaccgatctaagaagagtaacatgagcattgctgatgatggttcacactccaatgaatcatcaagttacagattaactgtcatt

SEQ ID NO: 218854 - DNA, 530 bp, Glycine max
ctcttctgatactactggtaccgagattgatgctgaaaatgatgcaaagtctgggtggctttttgatgtctcagacttctctgctcttcctggaataggtgttcaatgttttatagacgggaagcttattttggttggtaacaggaagttgatggaggaaaatggcatagatatttcaacagaagtggaaaattttgtggtagagctggaagaaagtgcgaagacagggatactggttgcatataatgatatattaactggagtcttggggattgcagacccactaaagagagaggcttctgtagtcatagagggcctccagaaaatgggtgtcacacctgttatggttacaggagataactggagaacagctcgtgctgttgccaaggaggttggcatccaagatgttagggcagaggtcatgccagcgggaaaagctgacgttgttcgttcattccaaaaagatgggagcatacttgcaatggtgggtgatggtatcaatgattctcctgcattagctgctgctgatg

SEQ ID NO: 218855 - DNA, 615 bp, Glycine max
agaacataatgttccatttctcggcatttgcctgggaatgcaaattgctgttattgagtttgcacgatctgttctcggtctgcatgatgctactagcacagaattcaatcctgaaaccaagaccccttgtgtcatatttatgccagaaggctcaaagactcatatgggaggaactatgcgtcttggctcaagaagaacttactttgaagttgctgactgcaaatccgcaaaattgtatggcaatgtaagctttgttgatgagcgacatcggcatagatatgaggttaatcctgacatgatatcaccgctagagaatgctggtctatcttttgttggcaaagatgaaactgggaggcgtatggagttgagttgcctagccatcctttttttattggcgttcagtttcaccctgagttcaagtccagaccagggaaaccttctccgctcttctcaggattaatagcagcagcaagtgaatctaggaggacaatcatggtgccaagtaatggtcacgccaagttaactaatggaaatggaatgtgcaatggacactcaccataactgatagcacaccataagggaaatggctttcattcatccaatggttccttaaat

SEQ ID NO: 218856 - DNA, 555 bp, Glycine max
  unsure (1)..(555): unsure at all n locations
ggaaaaaagatgtgagtgggccattttcgatancgaaggcnatgttatgatttctggcctaagcccctaactcggctggaggcgccctcattctctctgccaccaggagacatggattgaaggggcagaggcagagcttcaccgactgcaccggggaaacaataaatgcacgatcccaccaagctgtttgaatgctttacgcatacatccacaccacattgcacgtacagagggactgcgactagattgatatcgaacctcgacggcctgctcggtgtccatgagcagggcttatacattgccacccacggactcggaacctaccttatgaatcccttgattggtccactctccccttggggtgaacctgaaccagatccctgcgacttccctttgctgccaaccaaaggctgcgatgaggacacaccctatactcgacgacgtccggaagacaagcactggccaccaatcaccaaggcacgttgcatatcgggatgcacgaccgttgattccgctgcagaggaccctgtcgtctggcctatgtcactctggtac

SEQ ID NO: 218857 - DNA, 524 bp, Glycine max
aggacttcaaagttctgttagatatacagtgttattctgctttcgatcgctctattattcatttgctaagaccttagagaagacagaggatgggtaccctgcttccagatgaaaaatcagagaatccaaatgctttggaacaacttcaacaccaaaaagatgtggatgcaggcgctctctttgtcctcaaatccaaaggttcttggatgcattgtgggtaccacttgacaacttcgatcgtggcaccacctcttctaagtcttccttatgcattcaccttccttggatggacggctgggatcttaagcttagtgattggagctttggtcactttctattcatacaatttaatatctagggttcttgaacaccacgctcagatgggtatgcgtcagctacgctttagagacatggctcgcgatattttaggtccagggtggggtcgttattttgtcggcccaattcaattcgcagtctgttatggtgctgtagtagctggtactctcttgggaggacaatgcatg

SEQ ID NO: 218858 - DNA, 544 bp, Glycine max
agaacaacaaaacttcattggatggtccaacatgatcatacattagcaaataattggtaatttttagcatcaagaactatctgcctaactgctgcaactgctgctatagctcccaatgcggagaaagccacaacaattatcacattcaaccagaaaacagggcttcgcttagatggcttaaatgtcaaattgtagaaaaccattggcaagatgaagtcaagtgggataaagccaaaagctcctataagagagtttatgtctccaaaaaatggaagcatggctgctatagtggttgaaatagcaatagctaatgaccgagatatcactctagggattacattgcgtttggagaactcggggctttttgggtctccaaatgtttgctctagcacttcatttgttggttgcaaataaaccacaccaaccgcagataattgtgttatagtgaaaatgttggtcatgtaaatgaaccacttgggcaccagaggcttcccattgtccacgaagttgcttaagatgaggccttctgattcattaccaaatg

SEQ ID NO: 218859 - DNA, 613 bp, Glycine max
  unsure (1)..(613): unsure at all n locations
ccaaaggcaaaaaacaatacaagatgaagagcgagttcctttttgttttcctattcttgggaattcttaactgtgaagcacaatatttcaatgctaacccatacgactatttacaactagccttaaggtggcctaattcctattgcttgacacatgaaggtggttgcagggaaatagtaccacaatatttcactattagctaccttcatcccatgagaagaggaggcccggatctgcaaaattgcccctcaccatttaatatgccaaatagcactatggagacaaacaaaaatgacctactcaaatactggcctgatctgagaactgataattttatagagagtaagtcattatggagggaccaatggagaaagtttggttcatgctacagtatgatgccagatgactatattgtttatgcactcaacagcagaaagagaaatgacctcaagacaatcttgacangtgcaggtattggtgcaagtggaaatccatatccaacccgtaggatactgcaagctttcaggaaagctctaggtgtgaatgttgacatagtttgtgagccagatagaagtggaaatgtttatcttgcagagtacatcatgtgtgatgc

SEQ ID NO: 218860 - DNA, 521 bp, Glycine max
tgttgatccatctcttgtttcttgctttctttcttcaccatgtcacttgctgggaaaatcaccactgaaatcggggttcatgcaaccgctacaaagtggttcaacctcttcgcaacacaactccatcatgttcaaaacctaactgatagagtgcatggaaccaagctgcatcaaggtgaagactggcatcacaacgagacagtcaagcactggacttataccatagatggtaaggttacaacatgtctggagagtattgaatccattgatgaacagagcaaaacaatcacctacaagctcttcagtggtgacattgatcataattataagaactttaagttcatctttcaagccattgatgataatgatcatggcggtactattatcaaatggaccgttgaatacgagaggcttcgtgaggaggttgatcctccatatggccacattgaatacctgcacaaatgcactaaagatattgatggtcatcttctcaagcatagctagctctaaagttatgcact

SEQ ID NO: 218861 - DNA, 573 bp, Glycine max
  unsure (1)..(573): unsure at all n locations
gtgataatgatagttttatctcagcttccttcttttcattccctgcgacacatcaacttgtgttcactacttttcgccctgggctacaccatcctggtggttggtgcctgtattcatgcagttacaaccattttgcaggtacatcagaaaatgcccctccaagggactattccttagaacctaagaagtctgcaagggccttcagtgccttcacttccatgtccatacttgcagcaatatttgggaatggcatattgcccgagatacaatttctgggtattgggtatttggaaacaaatccaactcaaacattttgaagagtctgctgccagatagtggacctcctttggctccaacttgggttcttggacttgcaatcatctttgttcttcttcaactctttgccattggtctggtttattctcaagttgcttatgagataatggagaagaaatcagctgatgtgaggcaggngatgtantccaaaagaaatctcattcctcgcataattctccgaacaatttacatgatattctgtggggtttggcagccatgctaccattatttggagac

SEQ ID NO: 218862 - DNA, 525 bp, Glycine max
gttaaacctatctagagcgtatacacaaacccaccatgaactccagtacatcaccaatgctgggaacagtgcttttatctatctgcattgatgatttatgtatgcattaggttaatccacaacatcactactaaacaacttaaattggttggcatcaagaaccaatttccttatggaagagaatgcacccatcattccagcacccgtgaatatcaccataattgagacgttgatccagtaagtgaaggatgattttggaggcttgtattccatgttgtatagaagcataggcaaaatgaaatctagagggatgaaaccaatagcaccaaccacaccgttaatgtctccaaaaaatggtagcatggctgccaaaaccccacagaatatcatgtaaattgttcggagaattatgcgaggaatgagatttcttttggaaaacatcccctgcctcacatcagctgatttcttctccattatctcataagcaacttgagaataaaccagaccaatggcatagagttgaag

SEQ ID NO: 218863 - DNA, 540 bp, Glycine max
aaaaaataaacatatattgagaatggagggttgtgtgaagaagttgctatgccttgttgggtttgtggtgcttgtgagtactattggtggggtggagagtgctggtgaatgtgggaaatctacaacccctgataatgaggcttataagcttgcaccatgtgcctcagcagcacaagatgagaatgctagtgtttctcagagttgctgtgctcaggtgaagaaaattgggcagaaccctagttgcctctgtgcagttcttctctctaacacagccaaaatggctggcgtcaaccctcaagttgctgtcaccatccccaagcgttgtaacctggctaatcgccctgttggttacaagtgtggaccttacactctgccttgaaagagttaaggttgttgctgaaaacaaagatgacagggcgtaaatgcactatggatgttagctactacaaactgtgactacatgtttgttgtattgtcttgtaacttcctagtgaataagaactagcagctcactagtgtaccctataataaaacatgtac

SEQ ID NO: 218864 - DNA, 563 bp, Glycine max
  unsure (1)..(563): unsure at all n locations
tcacaatctaccacaccgacacaggtcccgtgtccctaacatggtcacgctccattgtaggacgctccctccacattcagctccaccaaaaccaaaaccccttagattccccaccctaccctaaccccaccaccctctccttccaccaccacataagacccttcctcttctggaaaaaacacggttccaaaaaactcgcccccgacactttcctcttctggaacctctccagagccaaattcggcgccgccccagaacccctctcgggcttctacgtcgccctcgtcgtccacaaccacatgaccctcctcatcggcgattccaccaaagacgcgttttccaagtccaaggcccgccaccctaacacgccacaactcctnctactaaaaaaagaacacgtcttcgccgacaggctgtacaccacgcgcgccacgttcggaggcacagcgcgtgagattcagatcgattgcggctaccacgaccactccaggctctgcttcagcgtggacggagagaaggtgctgcagaataagcggctgaagtggaagttcagagggaacgag

SEQ ID NO: 218865 - DNA, 533 bp, Glycine max
ctttgtaaacactgagtataaccacaaacgccttctcaaagcaagaggccctgattcccttaatggcctctcttcatttcgctttgagaccattcctgatggtctacctgagactgatctggatgccacacaggatattccttccctgtgtgaggccactagaagaacttgctctcctcacttcaaaaaccttcttgctaaaatcaatgattcagatgctcctccagtgagttgcatagtttctgatggtgtcatgaccttcactcttgatgctgctgaagaattgggtgtccccgaggtgctgttttggaccactagtgcatgtggatttatgtgttacgtgcaataccaacaactcattgaaaaggacctaacacctctcaaagactctagttatatcacaaatggttatttggagactaccatcgattggataccaggcattaaggaaattcgattgaaggatattcccagtttcgttaggaccacacatccagatgagttcatgcttgatttatacagtgggagtgtgg

SEQ ID NO: 218866 - DNA, 539 bp, Glycine max
ccatacttcaataagattgacattaattggaaaagaaaaataaacaaatgatacgtttgtacctggtacacttcatttcccactaaggaataattattttaaaaaaagtcttcacacaacaaaggagtaagttaaaagatttgagctcttgtacccctaatatttaagacttttgcccaaaagaacatcacgaaccatgttgtccaaattagcaaatgaagagccaacagagcgaagagcatcactttctgccaattccttccattgcaaagcttttttcttcatctctttacccttttccccatccatcaactccctcacaagggtctctattttttgcctctcaacatgttcaatctccaacccaatcccccaatccttgcaacaaaaccgacaattggtctgttgctctgcaaagaaaggccaacaaatcattggaacacctccacacatactttccaacgttgaattccaaccactgtgtgtcaaaaatcccccaactgaagggtgagccaacacttgctcctgggagcaccaac

SEQ ID NO: 218867 - DNA, 619 bp, Glycine max
  unsure (1)..(619): unsure at all n locations
ctcgagccgattcggctcgagtttgaatgcaaacatggcatcttcaccaaccttagtaccctttctcctcatcttcttcctcttccacttccacttccaccgttcctcctccctccccctctccgtggagaaccccgaagatgacgtcatagtctcgtcgccgaagggaaccttcaccgcagggttcagccccgtgggggagaacgcgtactgcttcgcgatatggttctccacgcaagcgacgacaaagaccgttgtgtggatggcgaaccgcgatcaaccggttaacgggaaacggtccacgctttcgctcctcaagacggggaacctcgttttaaccgacgcgggacagttcgatgtctggtccaccaacacgctctcctcgaagacgcttgagctgcatttgttcgacaccggcaacctcgtactccgcgagcagagtaatcaaagcgcggttctgtggcagagcttcagttttcccacggataccctccttcctggccagattttcactaggttcacgaagctngcttcctcaagaagtgagggcaaccattcctctggtttttacaacctctacttcgacaacgacaacgtttgtgcgtattctctacgatgg

SEQ ID NO: 218868 - DNA, 543 bp, Glycine max
aagaatatggtcctgttagcgaagtctacgtgcctgccagcgaaggagtggaagcttatatttggttactggcaaaggcttatgttgttgtgaatgatgcatgctaccatcaaatcattagccattggctaagcactcatgcaattgttgagccatttgtcatagcaacaaacaggcaactgagtgtggttcaccctatttacaaacttctgtttcctcactaccgtgacaccatgaatattaattcacttgcccggaaagccctggtcaatgcagatggtattatagagaaaacattcttgtggggtaggtactctatggaaatgtccgctgtcatttacaaggactgggttttcactgatcaagcattacctaatgatcttgtaaagagaggagttgctgttaaggacccatctgctccccatggagttcgtcttttgattgaggactatccttatgcttctgatgggctagagatatgggatgccatcaagtcctgggtgcaagatatgtctcattctactacaagtcagatgaggaact

SEQ ID NO: 218869 - DNA, 527 bp, Glycine max
aaaagttaaaacatgcatgattgcatttattattttggtttccattatactaacacaactctctttattaatgacaaatacaaatacattcagccactccaaatacatgacttaagcatacacaactgattaaggaatctggttccttcaatttcacatttatttaaaaccaggaacagtacttaagcaaccatagggtccttagatagagatactgttgggaattcctctgaaagtcaatccctcctcactagaaggatagagcagagtgtaaggcattttagctggcccatagcggcttctcaatgtctcatctttgttcttctctataagcttcttttcaatctcttcaagcttctttccaaacctcttaaatgcctctaatggaccggcatcagaagtccagttgtcaccaccatctctctgcccaaggtagaactcatcagatgcgtgccttgacaagatttctataactgtaaggtcaatgagggtctccttcttgccagtaatagtcttcaaaaactcct

SEQ ID NO: 218870 - DNA, 483 bp, Glycine max
agaatggcagcacttggtgggaatcgtgatgtgacaggaagccagaacagcgttgagatcgatgctctagctcgctttgctgttgaagaacacaacaaaaaacagaatgcccttttggagtttgaaaaggtggtaactgcgaaacagcaagtggtttctggtaccttgtacaccatcactttggaggcaaaagatggtgggcaaaagaaggtttatgaagccaaagtttgggagaagtcatggttgaacttcaaggaggtgcaagagttcaagcttgttggagatgcacctgcatagtctagtgcttaattaggttgctgaagagtgaagaatgagacagcctggttcgaaggggaaaagcctaaggatatatcaaaggatcctatatgtataaaataaatgttgcttttttaccttcggtattgatatctgaagtctaatttgacatcctatatatgaatatatgatctatgtgtttctttc

SEQ ID NO: 218871 - DNA, 483 bp, Glycine max
gaaagaaacacatagatcatatattcatatataggatgtcaaatgagacttcagatatcaataccgaaggtaaaaaagcaacatttattttatacatataggatcctttgatatatccttaggcttttccccttcgaaccaggctgtctcattcttcactcttcagcaacctaattaagcactagactatgcaggtgcatctccaacaagcttgaactcttgcacctccttgaagttcaaccatgacttctcccaaactttggcttcataaaccttcttttgcccaccatcttttgcctccaaagtgatggtgtacaaggtaccagaaaccacttgctgtttcgcagttaccaccttttcaaactccaaaagggcattctgttttttgttgtgttcttcaacagcaaagcgagctagagcatcgatctcaacgctgttctggcttcctgtcacatcacgattcccaccaagtgctgccattct

SEQ ID NO: 218872 - DNA, 568 bp, Glycine max
gctgaagagcttttgaacagttctggtttaccagtcattgaattactggcaaaggctcttgccaaggctgttggttataccgatgtaaagcaaagatcacttctcacttccatggagaactatgttacattagtccttgagactgggaaaccaatctatacccaatcttatggctattcaatcttgaggagatttttgcctgaagagaaggttgaggctgtgaaaggtctttcactcactgctgatggaaatggcgttgtttttgatgtaccagctaaagatttagacatatatcttaatggtcaggaaaatgcctcgaatgtatgtttagaggtagtgaaaacactgccacagttgcaacagaaagagccacaatcaagaggtggcagatttggtgataatggtggtcgtggtgggaactacaggtttggtggaagaggtggaggaggcaggaatggtaggttctccaatggtggtgggcgtggcggcaactggcgtggaaagagatggtgaagctgagaagggactctgggagtgagtgtttcacttctgctcgtggggatcatac

SEQ ID NO: 218873 - DNA, 433 bp, Glycine max
gagaaagatgtggttccaaaacatgaagataaagctaattgttctgggtatcataattgccttgattctcattattgttctttccgtttgtggtggcttcaactgtggtaaatgagtcttcccacatcctggcttcaactgtggtatttgtctcctcacttgataagattgttgctagcagattgccattgcctctactgtcaacatagtgcttttgactttttgggatttacattcttccgacttctccgatgatgaatattatatggcattgcttgtatagtgtgaattatttagcctttatcatcttgtctccatagcataatgctaatctgtcattctctatagtttagggtgggagtttcagcatttggtgtgaggattatgttttttaattatgcttacatattaagaaatcaaccttacgtagttg

SEQ ID NO: 218874 - DNA, 485 bp, Glycine max
tcacaatctaccacaccgacacaggtcccgtgtccctaacatggtcacgctccattgtaggacgctccctccacattcagctccaccaaaaccaaaaccccttagattccccaccctaccctaaccccaccaccctttccttacaccaccacataagacccttcctcttctggaaaaaacacggatccaaaaaactcgcccccgacactttactcttctggaacctgtccagagccaaattcggcgccgccccagaacccctctcgggcttctacgtcgccctcgtcgtgcacaaccacatgaccctcctcatcggcgattccaccaaagacgcgttttccaagtccaaggtccgtcaccctaacacgccacaactgctgctactaaaaaaagaacacgtcttcgccgacaggctgtacaccacgcgcgccacgttcggaggcatagcgcgtgagattcagatcgattgcggctaccacgaccac

SEQ ID NO: 218875 - DNA, 605 bp, Glycine max
  unsure (1)..(605): unsure at all n locations
aatttaccagctatacttgttccttttgaaggttagaagtgctacaatacaaacaatggcagctactcaggaagatgtgaagcttttgggtattgtgggaagcccatttgtgtgcagggtccagattgcccttaagttgaagggagttgaatacaaatttttggaagaaaatttgggcaacaagagtgatttgcttctcaaatacaaccctgttcacaagaaggttccagtgtttgttcacaatgagcagcccatagcagagtctcttgtgattgttgaatacattgatgagacatggaagaacaaccccatcttaccttctgatccttaccaaagagccttggctcgtttctggtccaaattcattgatgataagattgtgggtgctgtatcgaaatctgttttcacggttgatgagaagcagcgtgagaagaatgttgaagaaacatatgaggctcttcagtttcttgagaatgagctgaaggacaagaagttntttggaggagagggaattgngttggtagatattgctgctgtcttcatagcattttggatcccaatttttcangaaatagcaggggtgcagttattcacagtgagaaatt

SEQ ID NO: 218876 - DNA, 537 bp, Glycine max
acatatatctagtatcattttacatgaaattcaaacagcaataactcaacaagacacaagttgttcaacaaatatccttaaataagtctattttgaagcagaaagactttcatagcgggctttgaagtaggcaaaaagtgggtctctaggaggaaggacttcgtgcacaaaagggtggttaaggaattcttggctccatttgtagagtataggaaatttctcactggtgaataactgcaaccctgctatttcctgaaaaattgggatccaaaatgctatgaagacagcagcaatatctaccaacccaaattcctctcctccaaaaaactttttgtccttcagctcattctcaagaaactgaagagcctcatatgtttcttcaacattcttctcacgctctttctcatcaaccgtgaaaacagatttcgatacagcacccacaatcttatcatcaatgaatttggaccagaaacgagcccaggctctttggtaggatcagaaggcaagatggggttgttcttccatgtctcatcaatg

SEQ ID NO: 218877 - DNA, 562 bp, Glycine max
tacgtacatagcttgaaaacacagtgcttgtttagactagtatcttccatggctccgaaagatagaatcctggttttgggacccacaggagccattggaagacacatagtttgggcaagtgtaaaggcagggaatcccacttttatattggttagggacacccctgcctctgttaacaagccaaggcttgtcactgctgctaatcctgaaaccagggaagagctcattcagagcttccaaaattctggagttactctaatccagggagatatgaacgatcatgaaagtctggttaatgcaatcaagcaagttgatgtagtaatctgctcatttggtagactactaatagaagaccaagtcaagatcgttgcagcaataaaagaagctggaaacgtcaagagatttttcccatctgaatttgggctggatgtggaccgtcacgatgcggctgagcctgtagagaagttttcgaggaaaaagcgaaaattcgaagagtaattgaagctgattgaattccttacacttacctatgttgtcatgcctttactggttatttcttacg

SEQ ID NO: 218878 - DNA, 513 bp, Glycine max
ctttgtaaacactgagtataaccacaaacgccttctcaaagcaagaggccctgattcccttaatggcctctcttcatttcgctttgagaccattcctgatggtctacctgagactgatctggatgccacacaggatattccttccctgtgtgaggccactagaagaacttgctctcctcacttcaaaaaccttcttgctaaaatcaatgattcagatgctcctccagtgagttgcatagtttctgatggtgtcatgaccttcactcttgatgctgctgaagaattgggtgtccccgaggtgctgttctggaccactagtgcatgtggatttatgtgttacgtgcaataccaacaactcattgaaaaggacctaacacctctcaaagactctagttatatcacaaatggttatttggagactaccatcgattggataccaggcattaaggaaattcgattgaaggatattcccagtttcgttaggaccacatatccagatgagttcatgcttga

SEQ ID NO: 218879 - DNA, 533 bp, Glycine max
ccatacttcaataagattgacattaattggaaaagaaaaataaacaaatgatacgtttgtacctggtacacttcatttcccactaaggaataattattttaaaaaaagtcttcacacaacaaaggagtaagttaaaagatttgagctcttctacccctaatatttaagacttttgcccaaaagaacatcacgaaccatgttgtccaaattagcaaatgaagatccaacagagcgaaaagcagcactttctgccaatttcttccattgcaaagcttttttcttcatctctttacccttttgcccatgcatcaactccctcacaagggtctctattttttccctctcaacatcttcaatctccaacccaatcccccaatccttgcaacaaaaccgacaattggtctgttgctctgcaaagaaaggccaacaaatcattggaacacctccacacatacttatcaacgttgaattccaaccactgtgtgtcaaaaatcccccaactgaagggtgagccaacacttgctcctgggagc

SEQ ID NO: 218880 - DNA, 567 bp, Glycine max
  unsure (1)..(567): unsure at all n locations
agaaaagaaaattcaccagtgaacaacgaaggatagaagaaaaaaaagcttcagtgaaagaaaatggcgttgtacctggacgaagaagagatttggaagtgcccgaagcatccatcgaagcgaagaagaagcggaatttgccatatttgccttcgcgaccgtctcgtaactctttgccctgactgtgctaacgtgcgcccctgttcctgctacgccaccagctcctcctcctcttcttcctcttcgtcttccttctcgcgtttttccggcgccagcgactccgtcggccgcgtccacaacctcatcgagcgggagccagggctgcgacgctcgcgctccatggcgattccgtttctccgatcgaggtcgcggttctccggcggcggcggaggagatagggttttggatctcgatagcgcgagggagtcgccggcgatgaacggaagccggtcggcgaggtcgttctggtcaatgttcaagtcgcagaagagcagtagacacggcggcggtgagcangagtgggaagcgaagaagatattggcagaggaacgcgacggcgacgggagc

SEQ ID NO: 218881 - DNA, 527 bp, Glycine max
ctcgagccgcgccgcctacaaggccgtcgagtacgtcgagtccggcatggtcctcggcctcggcaccggctccactgccaagcacgccgtcgaccgcatcggcgagctcctccgccaaggaaaactcaaagacatcgtcggaatccccacctccaccaaaacccacgaccaggccctctccctcggcatccccctctccgatctcgactcccaccccaccgtcgatctcgccatcgacggcgccgacgaggtcgatcccttcctcaacctcgtcaagggccgcggcggctccctccttcgagaaaagatggtcgagggcgcctgcaagaagttcatcgtcatcgtcgacgagtccaagctcgttaactatttggggggcagcggcttggccatgcccgttgaggttattcagttctgttggaagttcaccgcggcgaggttgcagaagctttttcaggagggctggtgcgttgccaagcttaggactttcgcggagaaggatgaaccttatgtcacggataatggga

SEQ ID NO: 218882 - DNA, 539 bp, Glycine max
  unsure (1)..(539): unsure at all n locations
cttcttcttcattttttgggtctctctgtttacaagcttttcagttatggcatcgaaacgcatcgtcaaggagctcaaggatttgcagaaggaccctcctacttcctgcagcgcaggtcccgtggcggaggacatgtttcactggcaggcaacaatcatgggacctcctgatagcccatataccggtggtgtattcctagtttcaattcattttcctcctgattatccattcaaaccaccaaaggttgcatttaggactaaggtattccacccaaacatcaacagtaatggaagtatatgccttgacattctaaaagaacaatggagcccagcactaaccatttctaaggtccttttgtccatttgctcactgttgacggatcccaaccctgatgacccgcttgtgcctgaaattgcccacatgtacaagactgacagggctaagtatgaagccactgctcgtagctggacacagaagtatgccatgggatgatcatgctcctcctttagctgcacaatcatgattnttatgaagaaac

SEQ ID NO: 218883 - DNA, 548 bp, Glycine max
agtcaacaagcttaaaaattgtgacattataatacaatttcttgcatgagaccatgaccgatgtcttgcaaagaaatattcacaaagtgacaatcaattcccttaccatggttgatttacactgacaaaaaaagataaaacattcattaaaagtaaattttgtttcttcataaaaatcatgattgtgcagctaaaggaggagcatgatcatcccatggcatacttctgtgtccagctacgagcagtggcttcatacttagccctgtcagtcttgtacatgtgggcaatttcaggcacaagcgggtcatcagggttgggatccgtcaacagtgagcaaatggacaaaaggaccttagaaatggttagtgctgggctccattgttcttttagaatgtcaaggcatatacttccattactgttgatgtttgggtggaataccttagtcctaaatgcaacctttggtggcttgaatggataatcaggaggaaaatgaattgaaactaggaatacaccaccggtatatgggctatcaggaggtcccatgattg

SEQ ID NO: 218884 - DNA, 586 bp, Glycine max
gcgaaatcatttaagataagagtgcattactactaagaggagaaaaaatgaaagttgtatacttccttgttgctatcttggctttgacatccactgtggtctctgcctatgaccctagtcctctgcaagatttttgtgtggcggccaaagaaaaagatggtgtatttgtgaatggaaaattctgcaaagatcccaagcttgtgaaagctgaagatttcttcaaacatgtggaacctgcgaatactgcgaatccactaggttcacaagtgactccggtctttgttgatcaactacctggactaaacacactgggcatatctttggctcgcatagattatgcaccaaagggtttaaaccctccccacactcatcctcgtggtactgagatccttatagtacttgagggaactctttatgttggatttgtgacttctaatcaagatggaaatcgcctcttcaccaaagtgctgaacaagggtgatgtgtttgtcttcccaattggtctcattcatttccaactcaatgtggggtatggtaatgctgttgccattgctggtcttagtagccaaaatccaggaactatcac

SEQ ID NO: 218885 - DNA, 522 bp, Glycine max
aaactcaaacattttattgtactatatcaaacacaaaacagaacaactacacggtaaagaaatacaaaccacagacattttacttattacaataataactatttgtaggtcaattgcctacggtgattgacatattgaagtaatcaaatatccataattagcgtcaaataatcgtccatatttcaaatctagttattggtgtcataccaagattgcttttgaagataatcaattgtgctcttgtccacctggaaggctttggtgagaacctcaggagaaataggaggattagctttaaacaaagcatttgcaatagtgatagttcctggattttggctactaagaccagcaatggcaacagcattaccataccccacattgagttggaaatgaatgagaccaattgggaagacaaacacatcacccttgttcagcactttggtgaagaggcgatttccatcttgattagaagtcacaaatccaacataaagagttccctcaagtactataaggatctcagta

SEQ ID NO: 218886 - DNA, 498 bp, Glycine max
caacgtgaaagttgctgtcaagagaggcatgccagggtccaggcaaggccttccagagttccagactgagataacagttctgtccaaaattcgccatcgccacctagtttcactagttggtttctgtgaagagaattcagaaatgatacttgtctatgagtatgtcgaaaagggtccactgaagaagcatttatatggttcatcactacaaacacctctctcttggaagcagcgtcttgagatatgcattggtgcggctagaggccttcactatcttcacactggttttgctcaaggaatcatccaccgtgacatcaagtcaaccaacatattacttgatgaaaactatgttgccaaggttgctgactttggtctttcaaggtcagggccatgcatcaatgaaacacatgtgagtactaatgtgaaaggtagctttggctatcttgatcccgagtattaccggaggcagcagcttacggataagtcagatgtttattc

SEQ ID NO: 218887 - DNA, 588 bp, Glycine max
  unsure (1)..(588): unsure at all n locations
gctcattacaaatttgactgattaagctccagaataataagtacagaattgctgtataaaataaatgaataaattatactacaaaaatcttgctaccaatgaactagtgctatatggagccttccgtgagtaaatcttgctaatacggttttgatgcaattttcttcaaaaaaaaaacttggtaggaaaaaaaagaagtttgaaagcttaggtactgctttaatttcttgcttatatttgcggcataaacctatctctatctgccttcattgttcattagctgggaaaacacttggctagtacttacatctgaagaacagttataatgatccctctctgtccttctgttggtagaaggatttccaggaataattgcatttgtcacactcacaaattcttcactagcatgtctattggcatgtggctccctttgttgaccactttcttggagctgaagtgcatattccaaattccacaacacatcacccattgcaggcctgtcaacaccatattcagccaaacatttctctgcagtctcacaaaatnttttcaaggagtttttgtggatctgtccaacaagatgaggat

SEQ ID NO: 218888 - DNA, 408 bp, Glycine max
  unsure (1)..(408): unsure at all n locations
ctcgagccgattcggctcgagggagaatttcgacttcagacctggaatgatcaccattaacttggaccttaagaggggtggccataggttcctcaagacagctgcttatggacactttggaagggatgaccctgacttcacctgngaagttgtgaagccactcaagtctgagaagcctcaagcttaagattgttgtgaagttaatcactcccttcaatggatgtcttgctaggtgtggatgaataatttgcgtgttccatgactactactacttcattcataggtctaatgtcatctcatcaatacttaaactgtttttttttttccttttctccttttactcacaatttattttttggttatgcaatgttaccgttttgatgcaatggaaattttatcagaattttg

SEQ ID NO: 218889 - DNA, 553 bp, Glycine max
  unsure (1)..(553): unsure at all n locations
cccaagcactgatgacatggaatgtgacatgcacatactcacaatttctggctcagaaaactccctcttgctgtgtctcactttcatctttctataatgatacccttgttccctgcccaacatgtgcatgtggctgccaaagtaactcgtctcggtcagggacctgtgtagatccagatacaccacatttggcatcagttgttgctggctctgggaagaataacttttcacctttggttcaatgtactagacatatgtgcccagtccgtatccactggcatgttaagcttaactacaaggagtactggcgtgtgaaggttactattactaattttaattacaggatgaattattctgagtggaacatggttgttcaacatccaaactttgacaatctgactcagctgttcagtttcaactacaagtcattgactccttatggttcaataaatgatactgcaatgctatggggagttaagttctataatgattntctcaaccaagctggccctaatggcaatgttcaatcagagctactcttccgaaaggataa

SEQ ID NO: 218890 - DNA, 558 bp, Glycine max
cggctcgagctcgagccgattcggctcgagatccatctcttgtttcttgctttctttcttcaccatgtcacttgctgggaaaatcaccactgaaatcggggttcatgcaaccgctacaaagtggttcaacctcttcgcaacacaactccatcatgttcaaaacctaactgatagagtgcatggaaccaagctgcatcaaggtgaagactggcatcacaacgagacagtcaagcactggacttataccatagatggtaaggttacaacatgtctggagagtattgaatccattgatgaacagagcaaaacaatcacctacaagctcttcagtggtgacattgatcataattataagaactttaagttcatctttcaagccattgatgataatgatcatggcggtactattatcaaatggaccgttgaatacgagaggcttcgtgaggagttgatcctccatatggccacattgaatacctgcacaaatgcactaaagatattgatggtcatcttctaaagcatagctagctctaaagttatgcactaaaaaatatgggc

SEQ ID NO: 218891 - DNA, 509 bp, Glycine max
actcacttaaatcataaacatccattcattaataatattgccatgcatcacattgagcacttccaaatataatttaacacacttcaagatatcaccgacatgcatatccaagtttattttccatacaaaggaaggatctacataactaagcattcttctcagcaaacttcacaccgattttattatacatataagcacttatccaaaggtcaagcccattattttttagtgcataacttttagagctagctatgctttgagaagatgaccatcaatatctttagtgcatttgtgcaggtattcaatgtggccatatggaggatcaacctcctcacgaagcctgtcgtattcaacggtccatttgataatagtaccgccatgatcattatcatcaatggcttgaaagatgaacttaaagttcttataattatgatcaatgtcaccactgaagagcttgcaggcgattgttttgctctgttcatcaatggattcaatactctccagacatg

SEQ ID NO: 218892 - DNA, 520 bp, Glycine max
aacactttccaatacaataatcactaactgaatattcgatcggagatgtctgccgccgccgaagaagctaacgctcccgccgtcgaaaagccggttgaggaggtgaaggcgccgaaccccgcgaaggagaagaaacctaaggctccgaaggaaaagaagccaaaacaggccaaaacagcttcacatcctccatattttcagatgattaaggaggctttgatcgctttgaacgagaaaggaggatcgagtccttatgcgatagcgaagtacatggaggagaagcacaaggcggtgctccctgcgaatttcaagaagattctaggtctgcaactaaagaaccaagctgcgagagggaaactcgtgaagatcaaggcttcgtacaagttaaccgaagccgcgaagaaggagaacaccgccaaagtgacgaaggccaacgctgagaaaaaggaatcgcgtccaaaacgaagcaaaaccgcaaccgtcgctgctccgaagaaaaccgaggcggttaatagggcag

SEQ ID NO: 218893 - DNA, 643 bp, Glycine max
gaagtaatggcgaacatagacatcgaagggatcttgaagcagcagcagccttatgatgggcgcgttccgaagacgaagatagtgtgtactttgggccctgcttctcgatccgtagaaatgaccgagaagcttctgagggcagggatgaacgttgctcgtttcaatttctctcatggcacccacgactatcaccaggaaaccctcaacaatctcaagactgccatgcacaacactggcatactctgtgccgtcatgcttgacactaagggacctgagattcggactggttttctgaaagatggaaaacctattcaacttaaagaagggcaagaagtcaccataactactgattatgacattaagggggatccggagatgatatccatgagttacaagaagctgcctgtccacttgaagcctggaaataccatactgtgctctgacgggacgattactctcactgtcttgtcttgtgaccctgatgctggtactgttagatgtcgttgtgaaaacactgcaacgttgggtgagagaaaaaatgttaaccttcctggtgttgtggtggatctacccacacttactgagaaggataggaagacattcttggatgggtgtacccacaagattgcatgatgctctttca

SEQ ID NO: 218894 - DNA, 517 bp, Glycine max
aaaaggtaagagtattatttccatgataatctgatttagaagtactccgcaatataaacagagtataccaaaaaacactcgatctacagctagtaactaaatcctccattctatgatacggataaacagcagaaagaaagaaataaaaggcaaaacataaccctgcattagttggcggcacgttgagttgagcatgcattatttgactatgcagatctttatgacagaggcagctccaatacgatgcagggcaacaactgcatcaccaggcttacaaagggccctttctgttgcggacttaagagcagcttccagaatgacctctgtggattctgcatcggtagcctttgcagatccctcgcccagtataggaatcaagcccctgtatatcaggctgtgccttgctggcgtctcatcactgcaggcccaatcaaatgagtccgtgctcaacactggaaccaccaccgacaatattggaaccgctggcctatacttggcaactaacctggctgtagac

SEQ ID NO: 218895 - DNA, 442 bp, Glycine max
  unsure (1)..(442): unsure at all n locations
gcttgttccaaccatggacaagcaaactagcacagcagagatgttggacttggctttagactacataaaagatcttcagaaacaattcaagactctgagcgataaacgggctaaatgcaaatgtataaacatgcagaagtcagaagcagatcgagttgcttgagtttcttttgtacaggtaataaaaggaactatgcaaaacttgaataggacccgggttttatattttgacgtgctgaaaaatcaaatagatcaagaaagctaatataagatgcagaaagccagcttttaactcttcattgctacattgtgtattttgagttaacgggggttccagccacacagacaataaatcataattctgtatacaaaaattctaaggaattaattttagcgttnaaaaaaaagaaaaaaaaaaaaataaaaattataataaaaacac

SEQ ID NO: 218896 - DNA, 578 bp, Glycine max
gttagactctgcttctttctccaacttcacacacaaaaaaacatggcaaaggatagaacaattggtgtggctctagatttctccaaaagcagcaagaatgctctgaaatgggcatttgagaacttagccgataaaggtgacaccatttatgtcattcacatcaacccaaactctctagacgagtcccgcaacaagctatgggcaaaatctggttctcctcttattcctttggtagagttcagagagcctgagattatgaaaaagtatgatgttgaaattgatattgaggttcttgatatgcttgacactgcttcaagacaaaaagagatccacattgttacaaaaatatattggggggatgcaagagagaagcttttggatgctattgaagatctgaagctggattcgctggttatgggaagcaggggcctcagcacaatccaaaggatcatattgggaagtgtaagcaactttgtgatgacaaatgctccttgccctgtgactatcgtcaaggaaccacctagcagcagcaagtaaagatgatcacttttggagagaacattaaatttcatatgata

SEQ ID NO: 218897 - DNA, 625 bp, Glycine max
  unsure (1)..(625): unsure at all n locations
ggccttcgggaaagtgggccgccgagattcgcgatcgtcatcgttcggcccgggtctggctcggtacattcgaaaccgccgaggacgccgcccgggcctatgacaaggcctcgttcgagttacgcggcccacgggccaagctcaatttccccttggtcgacgagtcgctcactctccagccggagatggctgcaacagaagagcagattaacaacgaggataatctcaatcaaggcatgggaatggactcgcacgaattctgggacaggatcaacgaagctgattttcatccgttcatgatgatgatggattttactggagattcttcagactctgctgccactgggtacactctcagttcctgaaattgatattcaattaaaccaaataattagttttgttaatgtgcgtttaacaattgtacaactcggctaagcgtatttgttaaattagcatttgctagctccactgcaatacattacactacatgtatttctgtaatatctttcttccgctaggttnttttcgtgaggaagttgcttcatagtacaaatcaagagttttaatggttcatttcaccacccccagagtatgctatgtataaagaatagcgtttattacttgt

SEQ ID NO: 218898 - DNA, 581 bp, Glycine max
cacaaaactcagtttccaattcaccaaactcacaatggttgatctagattggcaaacaaagatggttcactccaacatcatgcctccaatgtcccccaaactctctctcccggatcataacattccaatcccaactttgcaactcccccttcgccaaaacgacatcaccgcagcgtcgtctcctatctgcgctgcatacgacaactaccttcgtctccctgagctcagagccctctgggcctccaaggacttccccaattgggccaacgagcccatcttaaagcccgccttacacgccctcgaaatcaccttccgcttactcgcaaccgttttctccgacccgagaccgtacatcaacaaacgcgagtggacccgacgcgtcgagtctctcgccacggcccaaatccagatcatagccatgttatgcgaagacgaagaagaaaaccccgagacacgtggcaaggcacccgtgactgacattaacggctataccggtcaaagcagaagctacagcgaggaaagcctgctcccgcgcctcgcacgtggcagaaatcccaggacgtggcgcagaggattctcaa

SEQ ID NO: 218899 - DNA, 619 bp, Glycine max
  unsure (1)..(619): unsure at all n locations
agggganagatggtgtgtgtccgatcnacatagcnatatgcntagtttttgttttatggcgctaaccagtcggcggtcgcccttttttttttttttttgatccaaaaagaattcaattttatttatcttgacagacaaagattggttgacggaattcaatccttgcggtgtctgtgtgtgagtcacatggaattgaagggaatcaaagaatgactgctgggtgcactaaccaagaaagggcttggcagagatccaagctagggaaataagtgggttcagggtcatatcttggggaacccattatcgggctcggagcttcccatcataaccgtgacatcctgcttatacgcgtagaagaacctcttaatgggcacctcaatcccctggatcccctgcaatacatgatccttccctttctctttgtccgagtaaacctttatcgccgccttcatcatcccgggcccacccttggggtccacctccacctgcaatatctccggcaccttctcgctgagattcctacacaccctgggcaccttcacaagctgcctcgagctgaagctaaacgccaccgtttcgcccgcagttttattatccctaactccttcttcatcctcaa

SEQ ID NO: 218900 - DNA, 549 bp, Glycine max
ggcagattgggtgaggctccaagacctgaacttcgtgaacatggccgaatttctggtgcctgctttgatgcagctcgtggtattacaactggcttaaaggttagaggaactgactacaagacaccggatggaacatgcatacgagactacattgatgtaactgatttggttgatgctcacgtgaaggctcttgagaaggcacaacctgctaaagtagggatctacaatgttggaactggaaagggtagatcagtgaaggagtttgtgaatgcttgcaaaaaggccacaggggtggacatcaaagtagactaccttccacgtcgacccggcgattatgccgaggtgtatagtgacccttctaagatcaacagggaactgaattggaccgcacaatacactgaccttgagaagagtttgcaggttgcatggaaatggcaaaaagctcatcgtaacggttacggtatttcatctgcaatctgagtttctagccattcagccagcagttggccatcaactgctctttacatggtgctcaggattttttttttc

SEQ ID NO: 218901 - DNA, 509 bp, Glycine max
ataccaaccaaaggctgggcattatattatttattattattgacccattggatgttgaatacacatgtaagtataacgaatcaactaccaaactccctaagggcgaccaaatagaaaaagaaaaaaaaaatcctgggcaccatgtaaaaaaacatttgatggcccactgcttggctgaatgggtaaaaactcaaattgcaaatgaaataccgtaaccgttacgatgagctttttgccatttccatgcaacctggaaactcttctcaagggcagggtattgggcgggccaattcaagtccctgttgatcttaaaagggtcactatacacctcggaataatcgccgggtcgacgtggaaggtaatctactttgatgtccacccctggggcctttttgcaagcattcacaaactccttcactgatctaccctgtgcagatccaacattgtagatccctactttagcaggttgtgccttctcaagagccttcacgtgagcatcaaccaaatca

SEQ ID NO: 218902 - DNA, 482 bp, Glycine max
ataataacaaaattttttttttggtccaacatgatcatacattaggaaataattggtaatttttatcattaagaactatctgcctaactgctgcaactgctgctatagctcccaatgcggagaaagccacaacaattatcacattcaaccagaaaacagggcttcgcttaaatggcttaaatgtcaaattgcagaaaaccatcggcaagatgaagtcaagtgggataaagccaaaagctcctataagagagtttatgtctccaaaaaatggaagcatgggtgctataatggttgaaataacaatagctaatgaccgagatatcactctagggattacatagcgcgaggagaactccgcgccttaagggtctccaaatgtttgctctagcactatattagaaggttgcaaataaaccacaccaaccgcagataattgtgccatagtgaaaatgttggtcatgtaaatgaaccacttgggcacc

SEQ ID NO: 218903 - DNA, 516 bp, Glycine max
ttagccttcgtcccttgattgaagtattaaatattcctatataaatataaattgggggtcttgaaattcaaagccatatctgtgattcatcaaatttgtgtttccccgaccccgattgcaagcaatggacgccttcaattccttcttcgattcaagaaaccgatggaattacgatactctcaaaaacttccgtcagatttctccggtcgtgcagaatcacctgaagcaggtttattttactctgtgttttgccgtggttgctgcggctgtcggggcttaccttcatgtcctcttgaacattgggggttttcttactacagtggcatgcatgggaagcagcttttggttactctccacacctccttttgaagagaggaagagggtgactttgttgatggccgcatcactgtttcagggttcctctattggacccttgattgatttggctattcatatcgatccaagccttatctttagtgcatttgtgggaacagctttggcctttgcatgcttctc

SEQ ID NO: 218904 - DNA, 389 bp, Glycine max
aaaaagtggaaaacactgcatagacggctgtctttatgtattacagaccaagcgaggtgaagtgttaatcgagcagattggtgagaaaatcaatctcttctcttctttttcttctcattcctctcagtcgatttcttcaacataataacaagaatccggacaaaaactgcgaccagatcggttaacaaggtcaaggcatgctttacatagtccagatcgcccaagtgtgccctctcaactatttcttgggtgtctactacaatgtaacctacatactccaatagcccaaagtacaactcatacttacagagagctgtcgagcctccaaagatggaagaagcaaagcgcaaccatagaaggatggacaatccataagaatccaagccacc

SEQ ID NO: 218905 - DNA, 518 bp, Glycine max
gcgccccccatcagtaccagtcgattaagaaaacgcgaaaatcatcgctgaaaaacaaacatggtctgcctctgttagcagcaaatattaggttgtttgttccgaacccaaccatggaagagttcagatccaaatcgtacggtgacggaaggatgcagattgaggcctaccgtggaaccaacatgcaagatctccggtgctacagcgcctcctacgcctcttcggtgcacccaacaacaacacagcaaacccagatgggaaataacgacgccaagtttaagaagggaaagtcaacgaatgggtccacatccaaaagttggagctttagtgaccctgagttgcagaggaaaaagagggtcgctagttacaaggtctatgctgttgaaggaaaactcaaaggctctctcacgagagtttcaagtggttcaaggacaggtgcaacagagttgtctatggctggtagttattacaacaacaacaacaactatgggtgttttatataatgtaagaataataat

SEQ ID NO: 218906 - DNA, 576 bp, Glycine max
gaaaaaggggcttgaagaacttgaagctgttttggctgagctaggatacacacgaaaggaacccactggtcaagaagatgattccaatggtgctgagaagaaagaagaggatcctaagggtgctgtggagaagaaggagaatgctactggggaaagcaaaaatgctaaaaagaagaagatgaaggaaaaatcttcaaaggagcagaaagaatcacaagaccagcttgatggcttggatgctggaactggaaatgcaacttctgaaactgctgaaacggagaaggctgaggatgcatctgcaattgatgttaaagagaggctcaagaaagttgcttcaatgaagaagaagaaatcaagcaaggagatggatgctgctgcgcgtgctgctgctaatgaggctgctgcaaggaatgcaaggctagctgcatccaagaaaaaagagaaggcacactacaatcaacagccagtgcggtaaacggggtgtcaaagtgactgtatcttctctttggtgtttaattttccttttgtgccttttcatttgctatctttctatgtcatatatatgagcatatgctc

SEQ ID NO: 218907 - DNA, 504 bp, Glycine max
cagatctgcgcaacctcgttgccccccgaacatgggaaactgctgcgccacgccgtccacggacgaaacggcgaacaagaagggcaaaaagggaaaaaaggaaaaccccttcgcgatcgactacggtttcaacgccaccgccgcgaacgggtcgaagctcaccgttttgaagtccccgacgggccgcgagatcgaggcccgctacgagctgggccgtgagctgggccggggcgagttcggcataacctacctctgtacggacaaggggaccggagaggagctggcgtgcaagtcgatctcgaagaagaagcttcggacggcgatcgacatcgaggacgtgaggagggaggtgtgagatcatgcgccacttgccgcagcatgcgaacatcgtgaccttgaaggacacctacgaggatgacaatgccgttcatcttgttatggagctttgtgagggcggggagctcttcgaccgcatcgtggcgcgaggccactacaccgaacgcg

SEQ ID NO: 218908 - DNA, 456 bp, Glycine max
gtgataatgacagatatatctcaggttccttcttttataaatgtgaacataagctgggtaggagttggacctcactcaccatctggagggggtgcctgtattatgcataacaaccattttgcaggtgcataagacaatgcccctgcaagggactattccttagaacctaagaagtctgcaaggaccttcagtgccttcacttgcatgtccatacttgcagaaatatttgggaatggcatattgcccgagatacaatatctgggtattgggtatttggaaacaaatgcaactcaaacatttcgaagagtctgctgccagatagaggacctgctttggatacaacttgggttcttggacttgcaatcatatatgatcttcttcaactctatgccattggaccggtgcattctcaagctgcttatgagataatggacaaaatatcacctcatgttaggc

SEQ ID NO: 218909 - DNA, 419 bp, Glycine max
gagacagagggagtgagatggtttgcattttacacagaacacatgaagtgaacggcataagaatgcatgttgcaacaaaaggagagggtccactggtgttggtcctccatggcttgcctgagctctggtactcatggcggcaccagattctctctctcatctccctcggataccgagccaccaatgacgctctccgtggatgctgtgacacccagggaccaccttctatcagaagctacagctgctttcacatagcgggagatcacaatgcgctcattgactctctgggtgtccaacaagttttccttgtggctcatgactggggagccatgacctgagggtatttatgcatgtatcgccctgacaaagttaaagcctatgtttgcctcagagtttcttttcttcgcacagacccaaac

SEQ ID NO: 218910 - DNA, 343 bp, Glycine max
cttcttggtttccttgagcttttggtcttatggcgccaccagattctccctaaaaaaaaaattgggtaccgtgccggtggtgccgaacaacgagctacagagacacccccgcccctccttgaatcagcagcgacaactgcttttacatagtgggagacctccttgtgcttatagaaaatgggggggggcaacaagttttccttggggaaaaaaaaagaggccccttcttgggggggaaaaaaaaaatgtcccgggctgacaaagttaatgcctatggcagacacagggtttcttaaataaaaaaagacccagacgggggagggggggtttcatgcgagggggg

SEQ ID NO: 218911 - DNA, 556 bp, Glycine max
acaacattcactcgctctctctcttatctcctctgttcccgcattttattgctccatggccgtcggaggtttcaccaacgccgccggtggcgccgatttcgaggccaaaatcactcccatcgtcatcatttcatgtatcatggctgccaccggaggtctcatgtttggctacgacgtcggcgtttcaggtggtgtgacgtctatgcccccgttcttgaagaagttttttccgacggtatacagaaagacagtggaagagaaaggactggatagtaattactgcaaatacgacaaccaaggattacagcttttcacgtcgtctctgtatctggctggtttgacttcaacgttcttcgcttcgtacacgactcgtaggttgggaagaaggctgaccatgttgattgctgggttcttcttcatcggtggagttgtcctaaatgctgctgctcaagacctcgccatgctcatcgttggaagaatcttgcttggttgtggtgttggctttgctaatcaggccgtgccagtgttcctctctgagatcgcaccttcaagaata

SEQ ID NO: 218912 - DNA, 436 bp, Glycine max
cgggaaatcaatatatattattcctttcaaagacaaacaatttacaaaaagaaaagggggggaaaaaaaaccgtttgactatttggcttgcaaaacagggtaataaatgtctgattaacggattacaatgttgtcgccggcctaggccaccaacatggattggaggtgggggaaataaaaaataatttgcttaattcgtgactaacccacattcattcttacttagcatgtaatgcacctactctagagtctaaaatactcaatgccattggatttacaacctggagggtggatccaatccattaccattagagacattggctgctttctcatctgcgggatcatcgataaaccttttccagaaccaatgctggttccacactctctcggacatttcttaaatggggacattctttgtttctggcgacaagaaaag

SEQ ID NO: 218913 - DNA, 533 bp, Glycine max
ggagtttaaggctatcctctttgttcctaagagggcaccttttgacctctttgacacaaggaagaagcctaacaatattaagctttatgtccgccgtgtctttatcatggacaactgtgaggagttgattcctgagtatttgggctttgtcaagggtattgtggattccgaagatctaccactcaacatttcaagagaaatgttgcaacagaacaagatcttgaaggtcatcagaaagaacttggttaagaagtgccttgagctcttctttgaaattgcagagaacaaggaggattacaacaagttctatgaggctttctccaagaacttgaagctaggtatccatgaggattcacagaacaagggaaagattgctgaattgctcaggtaccactccaccaagagtggtgatgaaatgacaagcctcaaggattatgtgaccaggatgaaggaaggtcagagtgacatctactacatcacaggtgaaagcaagaaggctgttgagaactctccattcttagagaagttgaaga

SEQ ID NO: 218914 - DNA, 564 bp, Glycine max
  unsure (1)..(564): unsure at all n locations
gacccgcgaaattattgctaattagctaaatatccattgaacactgggatcaatccaaaataaaaaaaggagaaaaaaacatagccaaaaaaggcattagagacgctactaacaagaaacgcatcatatttaattttaatcaacctcctccatcttgctgccctcagcatcagcctcggcctcctccagtgggggcatttcagcatcagcttcacctgcatcctcgtcaatgctcagtccaagcttcaacattctgtggatcctgtttccaaaagtgttgggctcgtcaaggctgaaaccagaagtgagaagagcagtctcaaacagcaacagaacaaggtccttcacggatttgtcattcttgtctgcatcagcacgcttcctgagctcctccatgattgggttctcagggttgatctccatggtcttcttgcttgacatgtaccctgccatgctgttgtcccttagagcttgggccttcattatcctttccatgtttgcggnccaaccgtattcgccagtcacaagacagcatggtgaatctacaacgcggtcagagaccac

SEQ ID NO: 218915 - DNA, 490 bp, Glycine max
  unsure (1)..(490): unsure at all n locations
cagggtactgcaggactgcagtatatgtttggagtctttcacagacggagatgagctgatacgtttgccatgtggacataagtttcactctgtttgcttggatccttggattcgctgctgtggagactgtccatactgtcgaagatgtatagttgtaaatactcactcatcattaaacgaggacgagtaattgatttcttgattgactttgttttgttctgtggttgtatgacaggataagaatgctgtaatggagctggttttttgtaacgatgctgaatacttgtctcttaccttgatatcgtattttttttttatcttttcctggtgacaatgggaaagatgtgggtagctaaatttggtattgtaagacgtgttataaaataataacagtcacgtgaatagtaaatagtatttttaatatttgtattctanannaaaaaaannaaaaaaaaaaaaannnnaaaaccctaaaaaaaaaaaacaaaaa

SEQ ID NO: 218916 - DNA, 562 bp, Glycine max
gaaataactccaggcaatttacttgctgtcaaatccaaacgggaccatgaagctttacgagtttgtaattatatttggatgcttcatgctgattttggctcaaatcccatctttccactctttgaggcacattaatctagtgtccttggttctgtgcttagcctatagtgccggtgctactattggttccatttacattggagactcatcaaaaggaccagaaaaggattattctttgaaaggtgattcagtgaatcgcttatttggaatcttcaatgcaattgctatcattgccacgacttatggaaatggaatcattccagaaattcaggcaacattagcaccacccgtaaaagggaagatgctcaagggactatgtgtttgttatcttgttcttatagttaccttctttagtgtatctgtatccggttattgggcatttggtaatgaatcagaaggcctcatcttaagcagcttcgtggacaatgggaagcctctggtgcccaagtggttcatttacatgaccaacattttcactataacacaattatctgcgggtggt

SEQ ID NO: 218917 - DNA, 436 bp, Glycine max
agaacaacaaaacttcattgggtgggccaacatgatcatacattagcaaataattgggaatttttagcatcaagaactatctgcctaactgctgcaactgctgctatagctcccaatgcggagaaagccacaacaattatcacattcaaccagaaaacagggcttcgcttaaatggcttaaatggcaaattgtaaaaaaccattggcaagatgaagtcaagtgggataaagccaaaagctcctataagagagtttatgtctccaaaaaatggaagcatggctgctatagtgggtgaaatagcaatagctaatgaccgagatatcactctagggattacattgcgtttggagaactcggggctttttgggtctccaaatgtttgctctagcacttcatttgttggttgcaaataaaccacaccaaccgcagataatt

SEQ ID NO: 218918 - DNA, 641 bp, Glycine max
  unsure (1)..(641): unsure at all n locations
cttactctcactgaaaaaaaatagcttgttcacaccatcctattttttcaactcatatatacaaatatatataacatggcttctaccttctctcgaagcctagcacttgtaagcttttacattgtcgtttgtgctgccggtaacttgaaccaagactttcagcttacgtggggagatggtcgtgctaaaatactcaacaacgaaaatcttctcactctctcccttgacaaggcctctggctctggcttccaatccaaaaacgaatacttatatggcaagattgacatgcagctcaagctcgttcctggaaactctgctggcactgtcaccgcctattatctgtcttcaaaaggatcaacatgggatgagattgacttcgagttcttggggaatctgagtggcgatccatacattctacacaccaatgtgttcagccaaggcaagggcaacagagagcaacaattctatctctggtttgacccaactgcagatttccacacttattcaattctttggaatccccaacgcattgttntttctgtggatggcacccccatcagggaattcaagaatttggaatcaataggagttcctttccaagaagccaccgatgaggattactcaagccatggaacgctgtg

SEQ ID NO: 218919 - DNA, 444 bp, Glycine max
aaaagaatggttcttaagattatattgcaacacttgttatgggtcgtgcgagatgtgagtcctatgggctctaggagcgtttgcattctacatggaaggcctcgaggaaatctcctgttgtcggtgccctaattgccaatcaggctgttcttttgctcccaacgcaccctatgctgcactatgctatccagctcttgtgacaaccatgcattactgggagacgcacatgaaggtgaccattacgatttccatgatgattttccatagaccctaacacaaccaccgtcgttggactccctggaggatgcagacaaaggaccttagacccattgctgcttgacaagtacaacccttgaggaccactcatgagcgttccataggctggagtataccctcaacggtaggctttcttgaaaaggaactccaatcgattccaaattcctg

SEQ ID NO: 218920 - DNA, 554 bp, Glycine max
aatttccatatcccaacggatcgcaatatagcaagtagcgaacatgatttcttccgtgtcctttccagcgtctcttcccgccgttaacttctccggcaacgccgtggcttctccgtcgtgccgcgtcaaatccaggcctatagttgccttcgccaccgccaccgccaccgcggaagctcgctcttcctggacggagcaaccgagaccttcgtatctgaactcctcttgctcttcgctctacgaggttctcggcatccccgccggcgcctctaaccaagaaatcaaggcggcgtaccggcgactggccagagtcttccaccccgacgtggcggcgattgaccggaaaaactcatccgccgatgagttcatgaagatccacgctgcgtactctactctttcggatcccgacaagcgcgccaactacgatcagaggctcttccggcgacacggccgttgtcgacggcggcggtgttctccggttatacgcgtcggaactgggaaacggatcagtgttggtagtgagtcactgagtcgactcgctcgagtgaatggga

SEQ ID NO: 218921 - DNA, 277 bp, Glycine max
accaaagtctattttcttctgtttttttccttttccttttgttcatccataaaattttgatgataagtgggagagagtcagtacaagtggcagtctattctactctacgcgtatatgtatgtttgtagctatacatatacgtagtataatacaaactctaacgactaactaattagcgattaactttactatatgcaaggaaaggcgcttgaacaaccgcgtcttttcccattcactcgagcgagtcgactcagcgactcactaccaacactgatcc

SEQ ID NO: 218922 - DNA, 592 bp, Glycine max
actgccaccagtgaaagtcattcctgcacatcgaatggcggttcacggtgacgatgacaccatggtgatggtggttcccaaactctctccgcccaacacctacgaagccgtcgtcaatggtggcaccttcgaccgattgcacgacggccaccgcctcttcctcaccgcttcagcggagttggcaaggcgccggattgtaattggagtttgcgatggacctatgctggcaaaaaaacagtttgctgaactgatacagcccattgaggaaaggataaataatgtcaaaactttcataaagtctatcaagccggagttggaagtgcaagctgtgccaatcacagatccatttggcccttccattacagatgagaacttggaggctgtgattgtaagcaaagagacattaccgggaggattggctataaacagaagaagagctgacagagatctttcacagttgaagattgaagttgtagatttggtctctggagagtcaggtgaaattaagctgagttcatcaatgctacggaagatgaggctgaagggctaaacaacatacacgataccgagactatgtacagacatttgttaa

SEQ ID NO: 218923 - DNA, 224 bp, Glycine max
ggaatactattacattctgaaggggaagggtcctgctttgaatacataaaggacaactgggaagttgttgaatgtggattgatttgtcacatccttatatagacaaaccaaatgcctattataaacatcatacaggtcatcagaaaaaaaaccactctccctgaagtcagaagattagataaacttccattttggcagaggggccccattatactcgccaaggg

SEQ ID NO: 218924 - DNA, 585 bp, Glycine max
  unsure (1)..(585): unsure at all n locations
ggactaatggaggcaatgaagcaaccttttagccagagtgaagtgaagtgcttgatgatccagcttttagaaggtgtgaagtatcttcacgacaactgggtgcttcatagggatttgaagacttcaaaccttcttctaaataataggggtgagctcaaaatttgtgattttggcttggctcgtcagtatgggagtcctttaaagccatacacacacctggtggtaactctttggtacagggcacctgaacttcttctgggggcaaaacagtattcaacagccattgacatgtggtctttaggttgtataatggctgagctattgtctaaggaaccactgtttaatgggagaacagagtttgatcaacttgacaagattttccggattcttggcacaccaaatgaaacaatttggcctgtgttctccaaattacctggagtcaaggtcaattttgtcaaacaccagtacaatctcctgcgtaaaaagtttcctgccacatcattcactggatctcctgttctttctgattctggatnttgattgttgaacaagcttctaacttatgaccctgagaaagcgatcact

SEQ ID NO: 218925 - DNA, 480 bp, Glycine max
ccggcctacactctctataccaatctatcaagctcctgagtcacggggagcaaacctggcgctcgggaggcatacatccatccaatgtgccagcagaggcgtgcccatacaggggttggacacgaggctgactcttcacactcctccacttagaacagtttgtttaggcttagctttggctccactaatcaacatgggatgtgcactaacattctctgttgagcggcagaagcagatatgcattctccaaaggaagaaaggctatggctacagcctggcaaaccggcaagtcacgacaaggcagtggactccattggggacgctatggctatctattgatcagctatgccgatcttattgctggaaaatgtaatagaacaaaggtgggcttcctttgagaaggtaccaactttcgctgcccgaattactcaagttgcagctgactagaatcactttctctctgagcagcctctgcagatg

SEQ ID NO: 218926 - DNA, 550 bp, Glycine max
cttgtcaccgttgataaggtcggtggtcccggcgagagctatggtgatctcgctgcctccttgcccgacgatgattgcagatatgctgttttcgactttgattttgtcaccgttgataactgccgcaagagcaagatcttcttcattgcatggtctccaacagcatcaaggataagagcaaagatgctctacgcaacatcgaaggatgggctgagaagagctctggatggaataagctatgaagttcaggccactgatccaaccgagatgggattcgatgtaattcaagacagagccaaatagatggatgccccctttttttaaagtgggaatccaactccttatttatgtgctgagctaatcaattaatctgtcaatcttactctctctctctctttatttgctatatataaattaagtaaccatatatagtccaatgactgtatgacatgtgctatctcttcttctttcttggttttatgctagtttaattgtgtttgatgtaagtggggcatctaatcttcaatccttactcataataataaagtat

SEQ ID NO: 218927 - DNA, 367 bp, Glycine max
ttcactctttataccaatctattttgtttctataacacatgacctattattgtgcgtagggggtgaacattcatccgcccgctcttgatgaaacacggttaaactggggtgtgagcgggaactaaccactgacactccttgtcttacaacagttggactaggcttagctacggcttctataatcaacaagggatgtgagctagcattctctcttgactggcaaatgcagatatgcattctacaaaggaggagagggtttggctactgactgacaggccggctccatacgaaaaggcaatggactacatagaggtctctctggctatgtatggctcatgtatgtagctcttcttgctgttccatgcat

SEQ ID NO: 218928 - DNA, 521 bp, Glycine max
aaaatcaagcaacattttgcaagttatatccatttctttatccattacaaatatttcagtacatcaggattacaacactagtaaaagctgatactatacgtcacttgtatccaaatttagatggtatcaactaatataaagtgaatgccctgatcaagacatactacatacagaaatatacaaataagccaccttacatggaatctggtggatcaaatgatgtgatacacaagaaatttggacgtgatccctatactatacaaataggatgcaacattattcatagacaaattgagctcaatacagcactattaatatctatagggtaattgaaaggtgatttggcaacaagcgatctccatgtcttgttttttgggtcgtagatttgaatgaacagagttcctgccctcttatgttgtctggacctccgtgtttcagtaaaatcaacaacacataaatgtgtcactacatacagctccctgtctaacacaacaaccccatatgacgaatagtaagggagc

SEQ ID NO: 218929 - DNA, 581 bp, Glycine max
  unsure (1)..(581): unsure at all n locations
aaagactttctcaaacaaaaccagacggttatctagtcttccaatcttccccctattccctgttcctattcctattttatcaatcaataacataaataacacttcttcttgccttttaatatatttttctctcttcccctcttgtttcacctttcaacacttaattagagacgacccactttccttgcagatctttttccagggaaaagtttggatgttttgtggtaagagttagatgttgagtgatagacggaaaggttgaggtggagctggattatatggatagtctttgttgcttcagctctgtcagtcaggtggtcggagggcgttcttcatgtaactctggcaaaggcaagagcagtcagtcctcagtcaagtatggctatagcctagttaaagggaaagcaaaccatccgatggaggactaccacgtagcaaaatttgtgcagttcaaagggcgagagcttgggctttttgctatatatgatggacacctgngtgacagtgtaccagcctatttacaaaagcatctgttttctaacatcttgaangacgaggactttctgaatgatccattcatg

SEQ ID NO: 218930 - DNA, 508 bp, Glycine max
gtataaactgctgccatcttcttcacactgctccacaacataacaatgcatattacaaagaaaaattatggtgtgattctacacaacgaagaatcaagaaatactaaacagctaaacagcacgacctaaattcgagaacttaaattttatatttttacatatgaagggatggggcaaaacctatttttgcaggaaattccaaattgataatggatttcatgagcatggaattgcatcttgatatgtagaatatatataccctgaatttagagagtatgtgtgttcccttttttcaacccttgaaacgaactacaatgcaggaaatatcatccttactgtctctgttcaatgcctcagtggctagttgtttcgctgccttttgtggatcctttatctttcttgcaatatcaacagcttcttggtttgccattaccttccatagaccatcactagcaagtatcaaaagctcaacatctggggtaatgtcagtatactgaatgtcaggatc

SEQ ID NO: 218931 - DNA, 523 bp, Glycine max
atttcaagatgctctctctctcccccttgttttaaacttgtaaataatggtatggtagaagtagtagtagcccttcaaatttcaaactgaaatagcacaaacaataccaactctcctcataccaaaacacacaactccagttattgaaattgaaattacccttttccttttttcccccaaatttcacccgaggctgtttttttttctttttttttttctctcttttgaccttaccctttgagagtttcgtggctgtaatttcgttgtaaccgatgctggaaatctcaactttaccggaaaccgcgacggagaacgcggacggcggttccgcggcggtatccgacgggtcgaaagcggagcacagcgaagacggtgaccggaattccgccgcgaaccggtggccgagagaggagacaatggctttgctcaagataaggtctgaaatggacgttgctttaaagacgcaaaccccaagcccctctctgggaacaagtctcaaggaagttagcagagctaggatata

SEQ ID NO: 218932 - DNA, 369 bp, Glycine max
gatgagaaatggagattttaaatgcctcctacaaaaatttccattcatgtgcaaaaaagagatgatctcttcaaatgccttgacaaggtagaaatcttggattagtagtctaatataaagaaacagaatttgtgaaagcatcaaattgagttagtcatggcatgctcatcctctagcaatgatagtcttctcttagaaaccttggacctataacaccacacttcaaatgcctcagttaagtctggatactgcatgtactcattatccagccactcagttaaaacctctgcttgatcccctgaaggcaatgcatgaatgatagacacaaacgtggattctaaggattgccacatttcgccatctaattta

SEQ ID NO: 218933 - DNA, 491 bp, Glycine max
  unsure (1)..(491): unsure at all n locations
ggcaagctcagaaaactcaccaccctcaaaactattgatgaaggagaaagtagcaagctgcagaagacgttgtcgatgccgtcgacaccaacaaccccgatgactccgacgactccaacgacaccgggatcggcccttaaagctgacaacgtttggaggagcgtcttccatcctgggagcaactccgccacaaagaccatcggtgctcagatgtttgacaaaccacttcccaacactcccactgtctatgactggctgtacagtggggagaccagaagcaggcaccgctgaagctgaagtctttagctaagatgaccgtgggttgcatgtaaatattgtcgttnttcgttaagcatctgccacgtttgcagctactattactattatgtgtcgggaatntattgctccgttgctgactcaaacataatattactagcgtgtttggtttttttgagcaagtgaatgtaaaatgctaaataattcgttagtat

SEQ ID NO: 218934 - DNA, 498 bp, Glycine max
acaacatatgattttaacaaaaatttatttattttaatactaatcatttaacaaagggagaaaaagattaaccaatcgccaaagttcaaggcagatctggcttaacaaaacttagcatactaacgaattatttagcatttttacattcacttgctcaaaaaaaccaaacacgctagtaatattatgtttgagtcagcaacggagcaataaattcccgacacataatagtaatagtagctgcaaacgtggcagatgcttaacgaaaaacgacaatatttacatgcaacccacggtcatcttagctaaagacttcagcttcagcggtgcctgcttctggtctccccactgtacagccagtcatagacagtgggagtgttgggaagtggtttgtcaaacatctgagcaccgatggtctttgtggcggagttgctcccaggatggaagtacgctcctcaaacgttgtcagctttatggccgatcccgtgtcgttggagtcgc

SEQ ID NO: 218935 - DNA, 555 bp, Glycine max
  unsure (1)..(555): unsure at all n locations
ggaatatggtgcttcatcacggtcctgttgttctccccagtggcgttttcggaactgtgcaacccacaggacaagaaagtgctgctccaaatcaagaaggacttcaacaacccttacctgctagcctcctggaaccctaacaccgattgctgcaactggtactgcgtccagtgccaccccgaaacgcaccgcatcaactccctcgtcatattatcctctgttccccaaaccaatttatccggcccaataccaccctccgtcggtgacctaccttttcttgagacccttcaattccacaagctccctaaactcaccggcccaattcagcccactatagccaagctcactaaactcaaggagatctacatcagctggaccaatgtctccggcccagtacccgatttcttggcccggctcactaacctccagtttcttgacctttcctttataacctctcaggcccaatccccagctcactttcccagctgtccaacctagtttccttacgcttggaccngnatangctcacgggcccaatcccgaatcattcggtcc

SEQ ID NO: 218936 - DNA, 484 bp, Glycine max
aaaaattcaaacctgttctttagctttacaaagagggatggaagtaaagcttgacattatctttcaatgtctacagaaagagatattctttttatttaaaaatgcacgtattctctgctgcacaattcacttcacttgcagctagtaaggggtgatccacataaacacttgttgtgaaaatacgaatacacatcaaacttttgcaatctcccaccctgcggtatctcaccacacaaccgattatagctcacgttgaacccctgcaaaaaatccactgcggtcaaccccacgggaatgctcccggtgatctgattgtgattcagatccaacgatatcaagctcgtggggaactccaccttggataaatcaaacgccaacgagttcctcgaaacgtcaactatctgtgtcgttttgttgcgaccgaaaagcacggaggcgtcgccttcgagtttgttcctggagaagtctatcctttgtgggtcta

SEQ ID NO: 218937 - DNA, 570 bp, Glycine max
attgcctctttcaagaagcatctgagtgtttactattttgtactatatttatatatagtcactcaagcttctaggatttctgcctgctgcatcaaaatgggaagcaacttgaggtttttgagtctttgcctcttggcattgattgcatcaactcatgctcaacttcagcttggtttttatgctaacagttgcccaaaagcagagcaaattgttttgaaatttgttcatgaccatatccacaatgctccatcactagcagctgcattaataagaatgcactttcatgactgttttgtaaggggatgtgatgcatcagtccttctgaactcaacaaccaatcaggctgagaagaatgctcctccaaatctcacagtaagaggctttgacttcattgacagaataaagagccttgttgaagctgaatgccctggtgtggtctcttgtgctgatatcctcactttggctgccagagacactattgtagccacaggtggacctttttggaaagttccaactggtcgaagggatggggtcgtctctaacttgacggaagccagaaataacattcct

SEQ ID NO: 218938 - DNA, 533 bp, Glycine max
  unsure (1)..(533): unsure at all n locations
gttcctccttaccttcgagtgcacaaagacagcacggtcgagagaattgccggcacccaagtcgttcccgcaggcctcgattccgacaccaacgttgtctccaaagacatcctcgtcgtccccgaaaccggcgtcactggcaggctctaccgtcccaattccaccccgccaaccgccaataagctccctttacttgtctacttccacggcggcgccttctgcatctcctccgcctccgatcctctctaccacacctctctcaacaacctcgtcgccgaggccaacgttgtcgctctctccgtcaattacaggctcgcgccagaacaccctcttcccaccgcgtaccaagactcttggtccgcgattcaatgggtcgctgacgcctctcgtgctaaacaacaccaccaagaagattggatcagggacaacgttgactttgacagagtcttcctagcaggggacagcgcaggtgccaacctgngacactacatggcctttaaaatgaataataattntccacanatgatggtttc

SEQ ID NO: 218939 - DNA, 448 bp, Glycine max
ctgcttcatgccactcagagaattatgttcctccatgtatacccttttgtggtgattgattagagaaacataattctctgagtggcatgaagcagagaagctatggccacatcttagcaaaccggcaagtcacaaaaaggcaatggactctctctcattaaagggtccttatggctatgtatgtattgattctattgtagttcttcttctttgtttcggtagaatgtattaataaacaaagatgttcttcctttgagaagctacataccaacttgtgttgtccataacactcaatttgcagatgactagaatcaggctttctcttcagtttctgcaaatgagtaggtaggtaattatgaccttatatcatatcccatgtgtgttagtgtgtatgcttgctatgttgtgaccttatatgcaataaaagaattatggtagtgttttagtt

SEQ ID NO: 218940 - DNA, 448 bp, Glycine max
aactaaaacactaccataattcttttattgcatataaggtcacaacatagcaagcatacacactaacacacatgggatatgatataaggtcataattacctacctactcatttgcagaaactgaagagaaagcctgattctagtcatctgcaaattgagtgttatggacaacacaagttggtatgtagcttctcaaaggaagaacatctttgtttattaatacattctaccgaaacaaagaagaagaactacaatagaatcaatacatacatagccataaggaccctttaatgagagagagtccattgcctttttgtgacttgccggtttgctaagatgtggccatagcttctctgcttcatgccactcagagaattatgtttctctaatcaatcaccacaaaagggtatacatggaggaacataattctctgagtggcatgaagcag

SEQ ID NO: 218941 - DNA, 549 bp, Glycine max
gcatggtggatcgggaggaaagatgaaaacccagaagaatccaagctggaatttcctaatgaattgtatgagggacaccaagctgagtatgactttaaagggggtgcaggtgcaggtgcagcttctgtagttaatcaaggtgttcccagaaccaacattcaacgtgtagagcaagagtcaccaaagacacccaccgaagatgatttgtcagacaatgaaatcaatttaaaagatacaaaggaattggttccggtccgacattcaacaagaactgcaaaaaaatcatacaaatttgctgaaatttcttccggtgatgattctggtgaaaacggccctgagctttctgatgatgaagagaaagtggtagaagttgatactgctatacagaaaaaaactgtagtttttgacctcgatgatgaggatgatgcaccagtagatcaacctgccaagataaatactgagtctgcttctcgatcaaaaagtaaagaagtgtctcaatctgcttcagccagtgcatctacttgagttaagtccagtaatcgtggatca

SEQ ID NO: 218942 - DNA, 382 bp, Glycine max
gcggacgtccttcctttataccttttgatggatgatatggttgagtacttccgtgaacaattgccaggctttgccttcaccgtttatgggtggcagcaaccctatggattccgttgagtgaaaactcccaatgactaccgcgtggtgaggcaacccaaagtcttccccgtcttctggtcatctctggctcagagctttaccaagcgcccaatgaagggaatgcttaccggtactgttaccaatttgaactggccctctgttacacatttgcaaactatagcggtgagcaccttcctcatgcttctgtggatcaaggacgaattggtagaccttgttaaggttagcctcaccgtattacacattgtgtaagttggtttgagag

SEQ ID NO: 218943 - DNA, 564 bp, Glycine max
gagacagagggagtgagatggaaggcatagaacacagaacagttgaagtgaacggcataaaaatgcatgttgcagagaaaggagagggtccagtggtgttgttcctccatggcttccctgagctctggtactcatggcgccaccagattctctctctcagctccctcggctaccgcgccgtcgctcccgatctccgtggctacggtgacaccgaggcaccaccttcaatcagcagctacaactgctttcacatagtgggtgatctcgttgcgcttattgactctctgggtgtccaacaagttttccttgtggctcatgactggggagccatcataggttggtatctctgcatgtttcgccctgacaaagttaaggcctatgtctgcctcagtgttccttttctccgcagagacccaaacatcagaacggtagatggcatgcgtgctttgtatggagacgactactatgtctgcagatttcagaaaccaggcgaaatggaagctcagatggctgaagttggcactgggtatgttctcaaaaacatccttacaagtcgcaaaactg

SEQ ID NO: 218944 - DNA, 378 bp, Glycine max
ggaaaaaatggaaaattaatttaaaggctttgccatttttttttatttttacatacaactttaacgatttaaactgtttttttttttgaccctgcaacttttttcaggatgaattcgtttttggatgaaattaaaacttcttgataaaatcggaaatgggagttttgatttcctcgggggctttttgattattgaagggagccactcctttttgcacaatcacttgttctaagtttggcacattttgcttgaaccctccaccggggatataccccttcaagtttagcgagggttataccgagtccaactcacctgtaatgaattttacgggccccttgatttgcactcctgtccatggagctgtcagctcccaaacta

SEQ ID NO: 218945 - DNA, 575 bp, Glycine max
  unsure (1)..(575): unsure at all n locations
cacacttagaattaagttagtagcgagagagggagaaatgaaggttgtttacttcttcgttgtgctattggctttggcatcctccattgcctttgcttatgatccaagccccctgcaagacttttgtgtggctatcaatgataccaaaactggtgtgttcgtgaatggaaaattttgcaaggatccaaagcttgctaaggctgaagatttcttctttcctggattgggacccggaaacacttcaaaccccctaggctcaaaggtgacagctgtcacggttaatgaaatattagggctcaacacacttggcatttccttggcacgcatagattttgcaccaaagggtttgaacccttcacacactcaccctcgagggacagagattcttgtagtcttggaaggtaccctctatgttggctttgttgcgtccaatcaaaacgataaccgtttattcaccaaagtgctgaacaagggtgatgtgtntgtgttccctattgggctcattcacttccagcaaaacataggttatggaaatgctatggccattgctggtcttagtagccaaaacccctgag

SEQ ID NO: 218946 - DNA, 531 bp, Glycine max
acacatataatagccacatgcattccatttatttaatatagtatatagtaattgactattgcatgaagcagaattgagaaaatcatttatccaacctaggccagagcaagatgtacggtatcgcgattctattatgttcccacctaactattgttgtaccagaattgcttctgaaggtagtcgattacgtttttgcccacttgaaaagctttggcaagaacttcatcagagataggaggtttagatccaaacacagcatttgcaatggtaataactccagggttttggctactaagaccagcaatggccaaagcatttccataacctatgttttgctggaagtgaatgagcccaatagggaacacaaacacatcacccttgttcagcactttggtgaataaacggttatcgttttgattggacgcaacaaagccaacatagagggtaccttccaagactacaagaatctctgtccctcgagggtgagtgtgtggagggttcaaaccctttggtgcataactatgcgtgcca

SEQ ID NO: 218947 - DNA, 541 bp, Glycine max
ccaaatcatcacacacacatactaagaagcaacaattcttctacaatggatctcctccttctggaaaagaccctcataggtctcttcctcgctgcggtggtcgccatcgccgtctccaccctccgcggccggaaattcaagctcccaccgggcccactccccgtcccaatcttcggcaactggctccaagtcggcgacgacctcaaccaccgcaacctcaccgatttggccaaaaaattcggtgacatcttcctcctccgcatggggcagcgcaacctcgtcgtggtttcttcccctgagctcgccaaagaggttctccacacgcagggcgtggagttcggctcccgcacccgcaacgtcgtcttcgacatcttcaccggaaagggccaagacatggtcttcaccgtctacggcgagcactggcgcaaaatgcgccgcatcatgaccgtccccttcttcaccaatcaggttgtgcaacaataccgccatggatgggaatcggaggctgccgccgtcgtcgaggacgtcaagaaaaaccccg

SEQ ID NO: 218948 - DNA, 393 bp, Glycine max
agagacaaaagtgtaggtttattagaaaaccatctcaaaaccgggcatcacttcaagttcagagatttacaatacccattagcaggccaaatatatatgacatttttggaacaaccccattttcaagcattgatacaatacagagtaaagaaaagggaaaagaaaaaagaaaaaattaaggggattgatcatatgatcatgatcatgtggtggagtctaaaatgaccttggctttgccacaatggtggaatgcttgagtatgtgcaagctaaattgccctcctttctcactagtgtcaatctgtgactggccagggggaggcaagagctcaaagttttggaccaaacgtcccaaagtgatgccaagaattggcaatgcaagattgattccagg

SEQ ID NO: 218949 - DNA, 587 bp, Glycine max
accctaaacaactctttctcttcttccttcgctcgttgttctccctcgcgtagatcgacaatggcggagacagagacgtttgctttccaggctgagatcaaccagctcctcagtctcatcatcaacaccttctactccaacaaggagattttccttcgtgaactcatcagcaacgcctccgatgctttggacaagattcgatttgagagtttgacagataagagcaagctcgatgctcagccagagttgttcattcatattattccagacaagactaacaatacactgaccattgttgacagtggtattggcatgaccaaagctgatttggtgaacaacttgggtacaattgctagatctggtaccaaggaattcatggaagccttggctgctggtgctgatgttagtatgattggacagtttggtgtggggttctactctgcatatcttgttgctgagaaggtcattgttacaaccaaacacaatgatgatgaacagtatgtttgggagtctcaagctggaggctctttcactgtcaccagggataacactggtgaggttcttggcaggggtactaagatcactct

SEQ ID NO: 218950 - DNA, 426 bp, Glycine max
agctaattagctaaatatccattgaacactgtcatcaatccaaaataaaaaaaggagaaaaaaacatagccaaaaaaggcattagagacgctactaacaagaaacgcatcatatttaattttaatcaacctcctccatcttgctgccctcagcatcagcctcggcctcctccagtgggggcatttcagcatcagcttcacctgcatcctcgtcaatgctcagtccaagcttcaacattctgtggatcctgtttccaaaagtgttgggctcgtcaaggctgaaaccagaagtgagaagagcagtctcaaacagcaacagaacaaggtccttcacggatttgtcattcttgtctgcatcagcacgcttcctgagctcctccatgattgggttctcagggttgatctccatggtcttcttgcttgacat

SEQ ID NO: 218951 - DNA, 555 bp, Glycine max
  unsure (1)..(555): unsure at all n locations
gggaaaaaaggcgtggaccgatctcgatagcgagagccnatgttatagattctggcctcagctcggaactcggatttcgactccagtttacaccttatcagccacaccttctgcattttgcttggttctcaaaactgaactgtgccggtggaaaggtgccaagacctacccaggaaagggcatccgatttgtgtcgggggattctcaagctttcctgtttgcaaactcaaaatgtaagaggtatttccacaatcgcctgaagccttcaaagctcacctggactgcaatgtacagaaagcaacacaaaaaggacattgctcaagaagctgtgaggaagaggagacgtgctgccaaaaagccttactctaggtccattgttggtgcgaccttggaagtcatccagaaaaagagagctgagaagccagaagttcgagatgcagctagggaagctgctcttcgtgaaatcaaggagaggatcaagaatacaaaggatgagacgaaggctaacaaagcagaagttgcttccaagtcgcaaaaagcaggagggaaaggcca

SEQ ID NO: 218952 - DNA, 554 bp, Glycine max
ggattcgattctctctgcactcacttctagggttttctctgcgctataagcaatcatggcggatgaaacaccaaatgagatgaaggaggaggttccagaaattgttccttttgatcctaccaagaagaagaagaagatgaaaattacaattgtagatcctgctgatgaacctgtggagaaattggctgagaagacagaaaacctctcagattccgagggggttgagactgcatttactggtttgaaaaagaagaagaagaagcctgttgaaatgggtaacttgaatgatgagagtggagatgcaattgaagatttggatgatcaccctgaagatgatgaaggagaaatggttgttccccatgctcgttatccttgggaagggagtgatcgtaattatgaatatgaggagctgcttggcagggtgtttaacattctacgtgaaaataatcctgaacttgctggagatcggcgaagacagatatgaggcctcctcaagtgctcgtgagggcacaaagaaactgtgtatgtcattatatggatctatgcaaacgatg

SEQ ID NO: 218953 - DNA, 426 bp, Glycine max
gactcaaaagatacatttactacaacaaactcaattggagagtaagagagacatcatataatatgcaaaactttatggaaaaggttcatatcctcagccaaataacataaatcaaaagtaggactatgtccctgtgttccttcggccaacacgagcaacaaaaccagccttgattggagcaactgatcttcctgatccacacttctcacaccggagaaagaagagacgattctcctttgaaagtatagtatccggactcttgcacccaaggcaaataacatattcattgacatatcgtcgcagaattccttcaaagttctttggtgcaaaccttccctttacaaccaatctctgctgtccatcaagggagccacttgtacccaattcagcatgcaagatggccatgacatggtctggctgccgatg

SEQ ID NO: 218954 - DNA, 576 bp, Glycine max
gggactactctctagctccgtccacgtgccgtcgtacgctctgaaatcttccgtcgtctctggcatctccgctgccagccttctgatctgtcataccaaatggccaacagggttcaaattcctaccaacaattcagcactcattgctatgattgcagatgaggatactgtagttggatttttgttggctggagtgggaaatgttgacatacgtaggaagacaaattacctcattgtggattcaaaaacaaccgtcaaacaaattgaggatgcattcaaagaatttacaacaagggaggatgttgcaattgtgctgattagccaatatgttgcaaatatgataaggtttttggttgatagttataacaagcccgttcctgcaatacttgaaatcccttctaaagatcatccttatgatccggcacatgattcggttctgtcacgagtgaagtatctcttcaataccgaatcagttgcatctgggagacgctgaattcaccttttgcagttgcagctttttgggggtggttgttggttttctttgtacaatatggataataatcttttcttgaaatca

SEQ ID NO: 218955 - DNA, 441 bp, Glycine max
aagttgaactttcatctgaatctgacatgacaccagaaaatattggcccgtcttgaagttctgtgacaggaattttaaattatccccagacagcacaaattatttaagctacagctacatagaactctgaatttcaagaaaagattattatccatattgtacaaagaaaaacaacaaacacccccaaaaagctgcaactgcaaaaggtgaattcagcgtctcccagatgcaactgattcggtattgaagagatacttcactcgtgacagaaccgaatcatgtgccggatcataaggatgatctttagaagggatttcaagtattgcaggaacgggcttgttataactatcaaccaaaaaccttatcatatttgcaacatattggctaatcagcacaattgcaacatcctcccttgttgaaattctttgaatgcatcctcaa

SEQ ID NO: 218956 - DNA, 307 bp, Glycine max
agaaaagtctgcagacgataagccttatgtaccaacatttcaggtttccaaagaaaaggcaaagaccttggggattgaatttattcctttggaagtgagtcttagagagacagtggaaactttgaaagaaaagaactttgccaacttttagtctatgatatctctgcttgatcaggagtgaacacgttgagaatctcaacggtgtttcgtttgtggatctggttttagaatctcattgcttgaaaataaactattgcactgaaatgtcaagcttgtgtgtgtgaataaaacaagagtaattgttggt

SEQ ID NO: 218957 - DNA, 458 bp, Glycine max
gcattccatttctctctattcgctctctttcaatcacaacaacatggccgaacgtggaggcggagaccgtgccggtttcggtcgcggctttggcggtcgtggacgcggcggcgacaggggacgagggcggcgcagggcaggagggcgccgcgacgaggaggagaagtgggtcccagtgacgaagctggggcgcctggtgaaggaggggaaaattcggagcctggagcagatctacctacactcgctcccaatcaaggagcaccaaatcattgacaccctcgtggggcccaccctgaaggacgaggtgatgaagatcatgcccgtccagaagcagacccgcgccggtcagcgaacccgcttcaaggccttcgtggtggtcggcgacaacaacggccacgtcggtctcggagtgaagtgcagcacggaagtcgtcaccgccatacgcggcgccatcattc

SEQ ID NO: 218958 - DNA, 542 bp, Glycine max
ccaaattgatacacaagatcactgtttttttagagagagattgagagaggatgtttggttcaaagaaaactcctctgagagatgctaaacctagttctgttggccatgcccataacccctttgattctgatgaagagacaaacgataaaaagtataattcctctaagaagactttgaccaacaccaacccctttgatgatgaagttgatgttgatgccactggccactcctcgtcgtcttcttatggcctttcgtcttcccatcgaaataggtataagagcgatttccgcgactctgggggattggagagtcaatctgtgcaggaattggagaactatgctgtttacaaggctgaagagacaacaaactcagtgaacagctgtttgaagatagcagaggaaatgagagaggatgctaccaagactttggtgatgctgcaccatcagggtgagcagattacaaggagtcaccatgttgctgctgatattgatcacgatttgagtcggggagaaaagcttttgggaagtcttggtggcatgttc

SEQ ID NO: 218959 - DNA, 409 bp, Glycine max
gacgatagagattagaatcataaataatctcaaatcaaccaatacattatatatttcagagacaaatatttcacaagcggattgtacattactatatttgaaaccagtatcctggaacattggaagctcctttaattgaataatgcaagggaaaaattagtatcaatctcatgatatacgcccctatttcccaagcaaacgatgactacgttgattagcaccattcacacggacggtcaacttctccatatcattgtcaaaaccgtccaaggcttggttttgcctcccgatttcagatcccatgtcaatggccatgcctttcagttctcccaagagatcacttaaatctgacagtgcatcatcttgcttccctttttcaacctcaactttttcgagcgcatttgatggc

SEQ ID NO: 218960 - DNA, 541 bp, Glycine max
gtgctttatccagacagcgttgtcggaactgattcacacactactatgatagatggcctgggtgttgctggatggggagttggtggaatagaagcagaagctgcaatgcttggccagcccatgagcatggtcctaccgggtgttgttgggttcaaattattaggcaaactacgagatggtgtcacagctactgacttggtgttgactgttactcaaatgctaagaaagcatggggttgttggcaagtttgtagagttttatggggaaggcatgagtgaactgtctttggcagatcgtgccactatagcaaacatgtctcctgagtatggtgcaaccatgggcttctttcctgtggatcatgtcactttgcaatatttgagactgactggcagaagtgatgagactgtttctatgatagaatcctatttacgagcaaataagatgtttgtggattatagcgagccccaagtggagagagtgtactcatcctatttggaactcaatcttgaggatgtagagccctgtgtctcaggtccaaaaa

SEQ ID NO: 218961 - DNA, 512 bp, Glycine max
  unsure (1)..(512): unsure at all n locations
agccancnnaaaagaggggcgccagtcangcgtnntgtatggcnaaggaangatttcggggtaaacgacctaactaggctgcggccgccctttgctttcttttgatttggttttacagtttatacttgataatcccaaaagcctgcagctgagggaccttaattgctaaagaagatggcaggtgccatatactaacgtttaatgtattattaatagcctgcccgcgttcccagatgctgtgacttaattcatggtttgaacacgaggagaccaattcacgtttggtcctgaccgaatatgatatgttcaacagagaccccactggatgcacactaagtcactaccttcatgtaggccacgctgatgacacatttttggtgcccattccttattatccaggttcagacctgcatatgagtggaaccaagaattaaacttgcgccagtggtgggcgataactcaaacaacatccaggtgacatatcatgcttagggagaagcctatgacaaggc

SEQ ID NO: 218962 - DNA, 563 bp, Glycine max
tgcttagtatattcgtttatgaactagtaataatgtgaaaaaaaatccaattccaaaatttgagaaacttggaaaacaacaacatacgcaaaacccattttactccctctttcacaaaagaacaatatctctattttccaaactacacacatcatttagaaccatgtctttctctaccaaattgcctttggtcctattattttcatcccttttcatccatgcatctttggctgagatggtgtgtgaggacctgccaaaggaagtgtgtgctttctcagtagcttcatcagggaagaggtgtttgttggagactgagaaggcagccgacggtggcgtcgagtaccaatgccggacatcggaagtggtggtggagaggatggcagactacatagagacagaccaatgtgtggaggcatgtggggttgataggaactctgttgggatttcatctgatgccttctttgagcctcaattcaccggcaagctttgctctcctgcatgttaccagaagtgccccagcattgttgaccttttcttcaactggctgctggagagggggtatt

SEQ ID NO: 218963 - DNA, 509 bp, Glycine max
caagaatcgtgacactgccttcacacgcgtggaggagtttgacacatgtgtggaggataatgatgatattgaggttgaggttgtggagggtgttgatctttggttgaagattcaagaggaggcaaggttagatgttgatcaagaaccaattttatccagctactatttcagttccattttgtctcacaaatctttggagagtgccttggccaaccacctctccacaaatttgagcagcttgagccttccaagcagcaccctttttgaccttttcatgggtgttttggttgatgatggagatgatgacatcgtacgtgctgtgaaggatgatttgatagctgctaaggagagggaccctgcttgcataagttatgtgcattgcttgctgaatttcaagggttttttggcatgtcaggctcataggattgctcacaaattgtggcttcaagggaggaaagtcctggcgctgttgattcagaatagggtgtctgaagtttttgctgtggata

SEQ ID NO: 218964 - DNA, 378 bp, Glycine max
aaccataacaagctgaaatatccatattcataaattttacacaaagggttgtcatcatggccccttacaacaacaaagtactacatctaactattctttaaaaatctaacacgatgattcaaaggacgccctgttgtcagcaggagaacttagattctctcttgcacaacaaccaagccccctcaaccaaaacaattcccacctaaacacaaactctaaaacatgttagacaattaattagcttctatataacataatcagaccatgaagtatggtccatggtaaaactaggcatcttatccaatttaatagggttatgcttccctccaaccaacctagcagggttcccaacagcagtagtccttggtggcacttcct

SEQ ID NO: 218965 - DNA, 502 bp, Glycine max
aagacccagaagcaccaccgcgaccggcgaatccagccaccgtgtgcggcttcgaattgagtccgagaacgcagttagacaggctttatattgaaacttgagacttgaagggaagctgttataattggtcaggctttggatgtttaaacaattctgatcaagatccaagtttgccttctaattttgtcatagatttttcgttacagtcttcccatggcgtatcccttctcagatttcaagtactcagatggcctcactgtagtgggtatctccttctgcacagctattgtctgtgaggctatctcatgggttcttatctatcggaccaattcttacaaaaaccttaggtcctccattgacaaagcctccaagaaacttgagaccatgaagacagacagcaataaaatcaacatcaagaagtccaagaccaaaaaaattgacccgtgttgagacaagcctcaaagaatcgagtcgcgacttgtctctcttcaagttcaagtct

SEQ ID NO: 218966 - DNA, 531 bp, Glycine max
  unsure (1)..(531): unsure at all n locations
atagtaccatagagaagagtctttattactcttgaatcaaaacttaacaagaaaatcaccatcagtatcagttgcaccaattaaaatcattctggtctccctaagagaaccaaatcaaatataaatgactgaagttattcagttccatctcatcttcatcctagaaataactgagataaaaagtttaaatattgttaaacgcaatcaactggtctttggatcaggcattggaaagaggccagcaccagcaccagcacctcttggcggtgcaaaacccaagaacttctgcaaatttgttctgatgctaatggaacacaagaagtatagaaatgccatggaacaatcagttgggtcattaccctgcaagcctcgatggctcatcttcataataagcccaaaaggtttgaagggcaatttggcaactaccttgccttcgaagagcgaattcagcaacccatagaccacatagagaaccagagccaccacacccncagacttgaacttgaagagagancagtcgcgactcgattc

SEQ ID NO: 218967 - DNA, 554 bp, Glycine max
aaagaaggggtcattgggtatcattgcacccattgctattgggttcgttgtgggtgccaacatcttagcagcaggcccattcagcggcggttcaatgaacccagctcgctcattcggcccagctgtggtcagtggagacttggctgctaactggatctactgggttggcccattgattggaggaggtttggctggcttgatttatggagacgtcttcattggttcctatgcccctgtcccagcctctgaaacctacccttgagcttcaacttcacttgtgtgttccttcaagtttcatctctgttcaccgtttcatgtcatgagcctcttggcttcttgcattttaaactctactttatctattatccaccgcttgcaataattatgtaaattataattcgaacttgatacatgaattgttggaaggtccccttggttttcggttttcgtcctaccaatgacagcgagctagctaagtggttttacggatcagatctgcagttcatttttcaactgtaatcaatctcggccaatatttatagactaacataatt

SEQ ID NO: 218968 - DNA, 454 bp, Glycine max
aattatgttagtctattaaatattggccgagattgattacagttgaaaaatgaactgcagatctgatccgtaaaaaccactagctagctcgctgtcattggtaggacgaaaaccgaaaaacaaggggaccttccaacaattcatgtatcaagttcgaattataatttacataattattgcaagcggtggataatagataaagtagagtttaaaatgcaagaagccaagaggctcatgacatgaaacggtgaacagagatgaaacttgaaggaacacacaagtgaagttgaagctcaagggtaggtttcagaggctgggacaggggcataggaaccaatgaagacgtctccataaatcaagccagccaaacctcctccaatcaatgggccaacccagtagatccagttagcagccaagtctccactgaccacagctgggccgaatgagcgagctg

SEQ ID NO: 218969 - DNA, 589 bp, Glycine max
  unsure (1)..(589): unsure at all n locations
cgcagagtcagagagagagattcactgaaacagagcgcagaagaaaatacataaactaatccagaaaatgagcagcggcgctggaaaggtggtgtgtgtcaccggcgcttccggttacattgcttcctggatagtcaaattcctcctcaatcgcggctacaccgttaaggccaccgttcgcgacacaagtgatccgaaaaaaataaaccacttggttggcctcgacggtgctaaggagaggctgcacctctacaaggcgaatcttcttgaagaaggttcctttaactctgtcgttcaaggttgccatgctgtgtttcacactgcttctcccttttatcacaatgtcaaggacccccaggctgaattgttagacccagctttgaaggggactctcaatgttctgaaatcgtgtgtaaacttgccgacgctggaacgcgttgttttaacctcttctgttggctgcagtgcgtacaacggaaagcctcgaacttccgatgtagtagttgatgagactnggttatctgacccggtttctgtagggaatcacagatgtggtatacactttcaaagactttgggccgagatgctg

SEQ ID NO: 218970 - DNA, 486 bp, Glycine max
ataccaatcttgatttaagtcttatttaatagtaagtttgttcagaagcatgagcatcacaagccaagtgaccaaccacacaaggtttctattattaacgttttctcctctaggagatatcacaaattaaaagttggtaaacttcttttctttcaagctatccacagtctccttgaggctcacttccaaaggagtatattcaatccccaagctctttgccttttctttggatacctgatatattggcacatatgggttatcatctgcacacttctctggaagtagtaatgtcgggtacaaatcacgtaaaatcttcacaatttctgagtagtgtgccactctctccaccaaacaataccttccattagctgaagcattctcatatgctagaatatgggcatttgaacatctttcacattgacccaaccaaaagatgcatttggaaatgtttgtgcaccattaattacgtttaaaattgaagcagca

SEQ ID NO: 218971 - DNA, 355 bp, Glycine max
ccaaacctttccctcagcaacggaatccaccaaactctcgcatcaatcttcgtttctttagagagagagagagagagagagagcgcggtgtcggaatcgtgttctccgattgcaccggtggttcgatttatggtcgtcggagaatcgccgatctcgctgagagtttcgaatcgcaccggtgaccggaggagatggtgaattccatggtggaacgcgccacgagcgacatgctcatagggcctgattgggccatgaacatcgagatctgcgacatgctcaatcatgaccctgggcaagcaaaggatgttgttaaaggtataaagaagcggatgggaggtaaaaattcaaaagttca

SEQ ID NO: 218972 - DNA, 606 bp, Glycine max
cgacggtcgagatcggagaaacgcacgtggaaaccgaagcgcactgcgccgtgtgcaaagaagcgtttgagctgcacgcggaggcgcgtgagttaccgtgcaagcacatctaccactccgattgcatcctcccgtggctctcgatgcggaattcgtgcccggtgtgccgccacgagcttccttccgatttggaaactagggttcccagccagatcgacgaggagacgatagggttaacgatttggaggcttcccggcggcggattcgccgtggggagattctccggcggccggagaacaggcgagagtcatttcccggtggtgtacacggagatggacggtggactgaacacgaacggtggtgctcctaggagaatttctcgttctgttagaagcaatagggttagggaaagtcgagggtttggtagagttattagcaatttcttttcattctttggaagaattggttctagaaactcttcttctggacatgggtctgtaagtagaagccgtagtcacgtgagttcaatcttcaatagaagctcgcggagacatagcaggacttgggttatggatgattaattggtgaatggtgatggcattttgc

SEQ ID NO: 218973 - DNA, 441 bp, Glycine max
gtggtgcggtccttgcaaattcatagagccagcgattcacgccatggccgacaagttcaacgacgttgacttcgtcaagatcgacgtcgacgaattacctgatgtggcgcaggagtttcaggtgcaggcgatgccgactttcgtgttgtggaagaaagggaaggaagtcgacaaggttgtgggcgcaaagaaggacgagctcgagaagaagattgagaaacatcgatcgtgatcttagctctgtaatcctattcattcagctatttatctttctttccaaggtgaaaagaatattaaaacagagtttaaatttgttatatttggctgtagtgttatgatgatgatgatgatgatggatgcggttgtaaaattttaaactggttgggttgtttcttcaggaagatggtgtctgtttcatattttagcaaaattgttatatag

SEQ ID NO: 218974 - DNA, 575 bp, Glycine max
  unsure (1)..(575): unsure at all n locations
gcgtaatgttagattcggtgttagagaacacggaatgggagctatctgcaatggcattgctcttcacagccctggactgattccatattgtgcaaccttctttgtattcactgactacatgagaggtgccataaggctttctgcgctgtctgaggctggggttatttatgtcatgacccatgattcaataggacttggagaagatgggccaacccaccagcctattgagcacctagcaagcttccgggcaatgccaaacattttgatgcttcgtcccgccgacggtaacgaaacagccggagcatacaaagtggccgtgctcaacaggaagagaccctccattcttgccctatccaggcaaaaactgccccagcttcccggaacttccattgaaggagttgaaaaggggtggttacaccatttcggacaactccactggcaacaagcctgatgtcattttgatcggaactggttcggaattggaaatcgctgccaaagctgctgatgacctagngaaggagggcaggctgttagagttgtttcccttgtttcttgggaacttttgatgagcaatc

SEQ ID NO: 218975 - DNA, 534 bp, Glycine max
accatgcaacaaactatccatgtcaacatttcttaatgaacaaaacacggccatccaaacactcaaatgctaagagtgaatctgcaagtgaaacaaattatacaagtagtatacactagcatctatggttgatatgatcaaacattgaatttaaccatgtggcagtgcaaaactaaattgtcaaatagttattacaagttcacaaaattctttgatctatgttgcttcttcacttaaaatcccaaattcccaatcgaaggatatttaacctttttcttattcatgacatggaatgctctcaaccaaaaccagaaggcaaaaaaaatcaaaagttctagataagctctttagctgcagcaacaacagcttccttagtgataccaaattctttgtatattcttccagctggagcactagctccaaaacgatcaatgcctattgcttttccctttgctccaacaattttcttccacccaaatggtgatcctgcctcaatgctaactctgggctgaacagcagcagggaatacactct

SEQ ID NO: 218976 - DNA, 584 bp, Glycine max
ctcttaattcagtgaggttctgaattgttcaacttgagatgatggcatcatttgcagggactactcagaagtgcaaagcatgtgagaagactgtgtatttggtggatcagctcactgctgacaacaagatctatcacaaatcatgtttcagatgctaccactgcaagggtacccttaagttgagtaattattgttcctttgagggtgttttatactgtaagcctcattttgatcaactctttaagaagactggcagcttggacaaaagttttgaaggtattccaagaactgcaagacttgaaagatctgccgatcaggtccaaaccaatacaaaggtttcaaatttgtttgctggaactcaggaaaaatgtgttgcttgcaagaaaacagtttacccaattgaaaaggtagctgttgatggaacatcttaccataaggcttgtttcaggtgcactcatggaggatgtgtaattagcccatcaaattatgttgcccatgaacatcgtctttattgcaggcaccatcatactcagttgttcaagcagaaaggtaacttcagccaacttgacaagcaagaaaacgat

SEQ ID NO: 218977 - DNA, 503 bp, Glycine max
atcacagtaatgaaaaatacaaacttcattaaacttcaaagcaaaatgcagattggtcagccgcgccgtatgattaagccaaactatctactaattcttctcaattatcaacccaaaatttgtctcacaaaacttttcacatacatagtaaacagaaaaaaaaatgtggattgagacaagggaatttgatgcctgaaaatgagtcaccaactgaacttgtattgccaatgtaacttgaaagttgaatgcttgccattactcagttattctgttctccgtcaccccttcatcgttttcttgcttgtcaagttggctgaagttacctttctgcttgaacaactgagtatgatggtgcctgcaataaagacgatgttcatgggcaacataatttgatgggctaattacacatcctccatgagtgcacctgaaacaagccttatggtaagatgttccatcaacagctaccttttcaattgggtaaactgttttcttgcaagcaacac

SEQ ID NO: 218978 - DNA, 529 bp, Glycine max
  unsure (1)..(529): unsure at all n locations
gttgaaacgggtcatcaagacacggtccatgatgttgcgatggattactatggtaagaggctggccacggcttcatcagatcacacaattaagataattggggtcagcaacacggcctcccagcatctagcaactttgactggtcaccaaggacctgtatggcaagtggtgtgggctcaccctaagtttggttctcttcttgcgtcgtgttcctttgacggccgtgtcattgtttggaaggagggtaaccaaaatgaatggactcaagctcatgtgtttgatgaccacaagtcatctgtgaattcggttgcttgggcgcctcacgagttgggtctctgcttggcttgtggctcatctgatgggaatatatctgttttcactgcaagagcagatggtggctgggacactgcaaggattgatcaggctcatccagttggtggtcacttcngtgtcatgggcgccatcaatggcacccggagccctcgtcggtgcagggttgcttgatcctgtacagaagctgtgctctggt

SEQ ID NO: 218979 - DNA, 502 bp, Glycine max
aaatcttaaaacaactcaaactaatcaactttcattcttccaagcacagaatactcaatggatcacaaacgtcaaggaactagtggcattatgaagcacaattaatcaactgtataatatgcaaagaaacaagatgtcaactatatttcaaaacgaaaactctaaccattttcaaaacgaaaaatcacattctaaggctccactgtagtcacctgttgccattccccatctactgcttccttccacaatgtcacattgttgttcccatcagccacagccagtatgtttcctgtcaatgaccatgagaccctccaaacaggggtcttgaaatcattcaaaaccttgccttcccactgatctccctctttcgccacggtccatatgatcactttaccatcctgcgatgcactagcaatggtagatttaggaagccctaaattgggtgcccaagcaacatctcggacccatccgtgtgcatctgaagagcagggaagcagtccat

SEQ ID NO: 218980 - DNA, 567 bp, Glycine max
  unsure (1)..(567): unsure at all n locations
ctcgccgagtctctcttccgatccgcgcttcttcttaccaacacgaactcgtccaaaccgccaaatctattgcatctcccggtcgtggaattcttgcaattgatgaatcaaatgccacatgtgggaagcgtttagcatccattggattggacaatactgaggtgaatcgccaggcctataggcaacttctgctcaccacacctggccttggtgaatacatctctggtgcaattctttttgaagaaaccctttaccagtcgacaacagatggaaataaatttgtggattgcctccgcgatcagaacattgtgcccggcatcaaagttgataagggtctggtccctctgccagggtcaaacaatgagtcttggtgccaagggctggatgggttggcttctaggtctgctgaatactacaagcaaggtgctcgatttgccaagtggaggacagttgttagcattccatgtggtccttctgcattagctgtcaaggaagcagcgtggnggcttgcacgttatgctgctatctctcaggacaatggtcttgtgccaatcgtagagcctgaaa

SEQ ID NO: 218981 - DNA, 568 bp, Glycine max
  unsure (1)..(568): unsure at all n locations
tttacaccgagcagccacacctcccgcagcagccatggttctcaaaactgaactatgccgattcagtggtgccaagatctacccaggaaagggcatcagatttgttcgtggtgattctcaggttttcctgtttgcaaactcaaaatgtaagaggtatttccacaatcgcctgaagccttcaaagctcacctggactgcaatgtacagaaagcaacacaaaaaggacattgctcaagaagctgtgaggaagaggagacgtgctgccaaaaagccttactctaggtccattgttggtgcgaccttggaagtaatccagaaaaagagagctgagaagccagaagttcgagatgcagctagggaagctgctcttcgtgaaattaaggagaggatcaagaaaacaaaggatgagaagaaggctaagaaagcagaagttgcttccaagtcgcaaaaagcaggagggaaaggcaatgtttctaagggtgctatgcccaaggtcccaaactggcggtggaggcggggaacgctgagctnttagttttgttcctaattttggctacaatctaaatag

SEQ ID NO: 218982 - DNA, 518 bp, Glycine max
ggcgtaaaaagaatataaaactagcacagattgcgaaatccattcaataaccaagtaccttctgaatatccaaacacaggtttagtaaaacagtaaaataaaagattaatcttccaaatgaaatatcagtacagcagtgtcaaaacaactatttaaattgtagccaaaattaggaacaaaactaaaagctcagcgtttcccgcctccaccgccaagtttgggacctttgggcatagcacccttagaaacattgcctttccctcctgctttttgcgacttggaagcaacttctgctttcttagccttcttctcatcctttgttttcttgatcctctccttaatttcacgaagagcagcttccctagctgcatctcgaacttctggcttctcagctctctttttctggattacttccaaggtcgcaccaacaatggacctagagtaaggctttttggcagcacgtctcctcttcctcacagcttcttgagcaatgtcctttttgtgttgctttctgtaca

SEQ ID NO: 218983 - DNA, 523 bp, Glycine max
  unsure (1)..(523): unsure at all n locations
ctttctctaacgtcaaggttctctctgctcttgtggccgacggattctccaacactctcaccaggcgtgggtacgcagcagcgacacaaagcgcaacaagaggaggagctgcctccatcagcagcaagatagctcccaagtcaggggaagacaaggtaggaggaggtgctgaaaaggtttcgtgggtcccagaccctgtcactggttactacaaaccggagaacatcaaagagattgatgttgctgagctgagagccacggttttgggcaaaaaattcaaccactagctcgctagctagttaatttcaataacctttttggtcacttgaatatgttatatcatatatgactctctcgaagttcacagaaccttcggggattattcagcatgggccatctagcatatggccaaattaatgtctactagtgtgattggatctcatgttgaatactcaaactatgctttagttgaattctcttttgctgaataatacgagtagtttgaaactttcaaannnnaaaa

SEQ ID NO: 218984 - DNA, 609 bp, Glycine max
agaccaaaaaagcgggggtacgtctgatgcgaagccgcgttatgattcctgcccaagcagctaactaggctggggacgccacacaactctttctcttcttcctttgctcgttgttctccctcgcgtagatcgacaatggcggagacagagacgtttgctttccaggctgagatcaaccagctcctcagtctcatcatcaacaccttctactccaacaaggagattttccttcgtgaactcatcagcaacgcctccgatgctttggacaagattcgatttgagagtttgacagataagagcaagctcgatgctcagccagagttgctcattcatattattccagacaagactaacaatacactgaccattgttgacagtggtattggcatgaccaaagctgatttggtgaacaacttgggtacaattgctagatctggtaccaaggaattcatggaagccttggctgctggtgctgatgttagtatgattggacagctcggtgtggggttctactctgcatatcttgttgctgagaaggtcattgttacaaccaaacacaatgatgatgaacagtatgtttgggagtctcaagctggaggttctttcact

SEQ ID NO: 218985 - DNA, 559 bp, Glycine max
  unsure (1)..(559): unsure at all n locations
gaaaaaggaaaaattgcctgaggtggttcaatcactatggaatcctgcaattgtattgacccacaagtgccagctgatgacttattgatgaaataccaatatatctctgatttcttcattgcccttgcttatttctcaatccctttggagcttatctactttgttaagaaatcagcagtatttccatatagatgggtccttgttcagtttggtgcttttatagttttatgtggagcaacacatctaattaatttatggacctttagaattcattcaagaactgtggctgttgtaatgaccactgctaaggttttaactgctgtggtatcatgtgcaactgccctcatgctggtacatattattcctgatttattaagtgttaaaactagggaattatttttgaagaacaaggctgcagagcttgatagagaaatgggcctgattcgcacacaagaagaaactggtcgacatgttaggatgttgactcatgagattagaagcactcttgatagacacancatattgaaaacgactcttgtttgaataggtagaactttgg

SEQ ID NO: 218986 - DNA, 497 bp, Glycine max
aatcaaaacagtctaggacagtataaatgcaattttaccgccattgcaaaacatcgaaagtctgctataaaatgcagaatacacaacatatacgaacttgtgttcacaaaaaattatttaacaacgcagactcaatcgttgttccttttgccgggatctcaaaacagcaaaaaggatgacaactaatgtcaattgcctcattgcttcataagtttgggctcttctccaaatttgatatagctatgtacaacaatctaacaggttaaacactttcgaacagaactcggcgctccaatagttctgataaaacacccctcattttgtcaacagaaacaggtttcaatataaggccatccataccaaccctcatacagttctcttttgttacctttttggtgtttccagtaagagcaactatcagtggtctatcttgatgcttcgtaaacttctcatgtatacggactgcgagttcataaccatctaaccctgtacaaaca

SEQ ID NO: 218987 - DNA, 639 bp, Glycine max
  unsure (1)..(639): unsure at all n locations
ctttcatacccaaggtaaatggagaaattgtaaaaattcaacgggtgtcagcccctgttgggcagatgcaactgaagagcctgattgaagctcatgttgaaaaaaccggtagtacaaaaggtgcggctattctgaaggactgggagaagtatttatcactattttggcagctggttccacctagtgaagaggatacccctgaggcaaatgccaagtacgacacaactacggcagatcaggtcacttatcagtctgcttagggtgacgatgcaaggttacattacattgattacgccaggctatggagccattgttgtatccctgatttgtacaggaattggagaagctatcaataaggtggaaatgctagccaaaatatggggattaaactatcccttgaaaccatggtcgctgcattgattctcaagatcatttttgccagcagtacgatgcaccccgtatacatccatctaaagcattagcattctcttttgtatagccatgtgaaaagcaaactgtatataaaatgcagttgattcgaatctgattgggattttgtggacggtgaaaataaatagtggnngcttgatatgctancatcttttctctctctgataatgaaaaatattgtttcttctg

SEQ ID NO: 218988 - DNA, 472 bp, Glycine max
caaggagaaaacaatattttttcattaatcagaggagagaaaagatgactaggcttatcgagccccaactaatttattttcaccgtccacaaaactcccaatcagattcgaatcaactgccttttatatacagtgttgctttcacatggctatacaaaagagaatgctcatgcttcatatggatgtatacggggggcatcactctgttggctgaaatgatcttgagaatcaatgcgccggccatggtttcaagggatagttaaatccccatattttggctagcatatccaccttatcgatagcttcaccaattcctggacaaagtagggatacaacattggctccatagcctggggtaatcaatgtaatgtaaccttgcatcgccgccctaagcagactgataagtgacctgatctgccgtacttgtgtcgcacttgacatttgcctgacgggtatcctctctactaggggg

SEQ ID NO: 218989 - DNA, 510 bp, Glycine max
gttcctccttaccttcgagtgcacaaagacagtacggccgagagaattgccggcccccaagtcgttcccgcaggcctggattccgacaccaacgttgtctccaaagacatgctggtcgtccccgaaaccggcgtcactggcgagctctaccgtaccaattccacccaggcaaccgtcaatatgctgcctttacttgtctacttccacgggggggccttctgcatatcctccgcctccgatcctctgtaccacacctctttgaacaacctcgtcggcgaggccaacggtgtcgctctgtgcgtgaatcacaggctcgggcgagaacaccctgttgccaccgcgtaccaagactgttggtccgcgattcaatgggtcgctgacgcctctcgtgctaaacagcaccaccgagaagattggatcagggacaacgttgactatgacagagactttctagcaggggacagtgcaggtgccaacctgggacactacatggccttaacattgaataat

SEQ ID NO: 218990 - DNA, 578 bp, Glycine max
tgagaatcgagcagcaacgttaacagtgagtgtggtatgttccacgccctctcccaatgcctgtcctccagcacagcctccctgtcccaggcgcggcaagcccacgccctcattctccgactgaacctcttctccgacacccaactcaccaccagcctcctctccttctacgccaacgctctctccctctccaccccccaactctccctcaccctctcctcccacctcccccaccccaccctcttctccttctcctccctcatccacgccttcgcccgctcccaccacttcccccacgtcctcaccaccttctcccacctccaccctctccgactcatgcccgacgccttgctcctcccctccgccatcaagtcctgcgcctccctccgcgccctcgaccctggccaacagctccacgccttcgccgccgcatccggcttgctcactgattccattgtggcatcctccttgacccacatgtacctcaaatgcgaccgcattttggatgcccggaaactgtttgatagaatgcctgatagggatgtggttgtctggagtgccatgattgccgggtactc

SEQ ID NO: 218991 - DNA, 545 bp, Glycine max
ctcgagccgaatcggctcgagcgcatatcgcagtttcttccttcatttcatactctctggcaaaaccctcgtcgacggtgaccaatcggtggatcaaacatggacaagagcatgctagcggatttggattcgctccctgaggctgataagcaaagaatgactgtcatgatcgatcagctccaaatccgtgacagtctgagaatgtataattcactggttgagagatgctttaatgattgtgttgacacatttaagcataaatccctgcaaaagcaagaggaaacctgtgttcgaagatgtgcagagaaatttctcaagcattctatgcgggttggcatgaggtttgccgagctcaaccaaggagctgctacacaagattaatttctgtttaacttcttccaatggaaaactgttaatttattattgttattattttgaatgcagttcgtttacttgcatttttgatcctgaaaaatgagactgtagagaattctaatttgctattggtacacaataatttgtgctaaataatttcatcattatgc

SEQ ID NO: 218992 - DNA, 482 bp, Glycine max
gcataatgatgaaattatttagcacaaattattgtgtaccaatagcaaattagaattctctacagtctcatttttcaggatcaaaaatgcaagtaaacgaactgcattcaaaataataacaataataaattaacagttttccattggaagaagttaaacagaaattaatcttgtgtagcagctccttggttgagctcggcaaacctcatgccaacccgcatagaatgcttgagaaatttctctgcacatcttcgaacacaggtttcctcttgcttttgcagggatttatgcttaaatgtgtcaacacaatcattaaagcatctctcaaccagtgaattatacattctcagactgtcacggatttggagctgatcgatcatgacagtcattctttgcttatcagcctcagggagcgaatccaaatccgctagcatgctcttgtccatgtttgatccaccgattggtcaccgtcgacgagggtt

SEQ ID NO: 218993 - DNA, 580 bp, Glycine max
gtgtttcgctgtctctcccatcctttcgcattctcaatacccttttgatttgtgaaaggaaagcaaacatggttgatcaggtccaacaccctacaatcatggacaaggttgctggtcagctccatctccgttctggtctttcatctggtattagaagttatgatggagcctaccgccacccagctatgtaccaaagaccctcttttgggaattactcgaatgctgcattgcagtttcctgtgatgcccacatgcaaagctaccatggatttgtctgctactgcaacatctgcctcacccgtctttgttgctgctccagcagagaaaggccattttcttttagactttctcagggaggtgtttcagcagctgtctccaaaactgctgctgctcccatgaacgtgttaagcttttgatccagaaccaggatgagatgatcaaaactggtaggctttctgagccctacaaggtattggtgattgtttcaagagaacaatggcagatgaaggtgctatttctctatggagaggaaacactgctaatgttatccgttatttccccacccaggcttttgactttgc

SEQ ID NO: 218994 - DNA, 477 bp, Glycine max
gaaatcataaaattggaattccaagtgacagctttcccctgccactcaaataaatcatattctcaaatgtaaaatttccatcatgatgaaatttaaaaacggtttttgggacaatatcccatctagtaaatttattaaacaaaatttgcggcagcaattagtctaagactcttggaactcaatggtttttttcatcgccatctaaaaacaaataatagtactgactcagcattagaacttaagccccaccagagccgtacttcttgccgaacacaagaacctgcaacttgtcataaccagcaagcacaccagcaccggcaacggcacggaggatgttggcaccggcacccttgaacaaggacttggcaccctcattcttgaagatctgtgtgaatgcatccaaggagctcttgtacttgacagcttcaccagaggtcatcatcattcttcttctaacagtgtctattgggtatgatg

SEQ ID NO: 218995 - DNA, 556 bp, Glycine max
  unsure (1)..(556): unsure at all n locations
ctcgagccgctcgagccgattcggctcgagctcaagtctctcgaagcctctttctctctcttctagaagctatctgtgtttggtgttactaagtctccaacaagcaaagtacatggttgatttggaaatccaggtccccaccccattcgacccgtttgccgaggcgagagaatcggatgcccccggagcaaaggagtatgtgcatattcgaattcagcagaggaatgggaagaagagtctgaccacagtgcaagggctgaagaaggagttcagctacgagaagatcctcaaggacctcaagaaggagttctgctgcaacggaaccgtggtgcaggacaaggagcttggcaagatcatccaactccaaggcgaccagcgtaagaacgtctcccacttcctcgttcaggctggccttgtcaggaaggaccagatcaagattcatggtttttgaccaattggtcttgtttntgttagtagtaatttcaagttgttcttgagtttgtgagttctgaaaagttggattgcttctctgtttgatgagtggtgcttggaataa

SEQ ID NO: 218996 - DNA, 417 bp, Glycine max
cggaaaaccgaattatcatttattaactgtaacttgctttggaacaattcaagttcactaacaacatccatgaaatccaatcattaaaaattggaaaaccaaaccaaaccaaaccaaaccaaacttatttccaacccccctcatcaaacagaaaaacaatccaaactttcaaaactcacaaactcaagaacaacttgaaatttctactaacaaaaacaagaccaattggtcaaaaaccatgaatcttgatctggtccttcctgacaaggccagcctgaacgaggaagggggaaacgttcttaccctggccgccttggagttggatgatcttgccaagctccttgtcctgcaccacggttccgttgcagcagaactccttcttgaggtccttgaggatcttctcgtagctgaactcct

SEQ ID NO: 218997 - DNA, 546 bp, Glycine max
  unsure (1)..(546): unsure at all n locations
cacaaagaaaagtaaacactgcaatagcaagagttttcaaatggcagagggaaaaggtagagtttgtgtcacgggaggcactgggttccttggttcatggatcatcaagagactccttgaagatggatatgctgttaataccactattagatctgacccaggacgcaagagagatgttagcttcctcacaaacctacctggtgcatcagaaaagctaaaaattttcaatgctgatctcagcgacccagagagttttggtccagcagttgagggttgtgttggaattttccacactgccaccccaattgattttgcagtgaacgagccagaggaagtggtgaccaaaagagccattgatggggcactaggaatcatgaaagcaggcctcanagcaaagacagtgaagaggngttgtttacacttctagtggctccaccgtttccttcagcagccttgaagaaaagatgtggtagatgagagtgtttggagtgatgttgatatgcttatgagtgtgaagcccttttgatggtcctatgcagtttcaag

SEQ ID NO: 218998 - DNA, 566 bp, Glycine max
agacaaacgaaaaagattatttccctcattcatttattacgagtaacatcatacattccaagatgtgcatatcatgaaccatgattgccatcgatctgaaatagttcaaactaacaaccatcttcgtcaattttactttgtcaatctcatggctaaaatcgattaaagataacccttttccttgcagcattcaattgcatcctgaaacatgtcctccaagctatacttgaactcaaaaccagcatcctcaagtttcttggaggttaaatgtggttgcttgacacctttaattcccttcagctcgtctactgttggtatttgatattctggatatttggctgaaagaatttcacccatctcttcaatgggtacaatgaatggtgagcagttatacctcccttttggattaggatgctcaagcaggaagatatgtgctctagcgacatcatccacatgtaccatatggtaacgaatgacaccaatttcttccttttgcccacaccataagcagagctttttcatggagtcaggaagctggggacaacaaaacgaccaacaatgaaagg

SEQ ID NO: 218999 - DNA, 516 bp, Glycine max
caagtttatgaggaaactgctggcttgatggttaatgatccggtgttacggactcacaagcctttatccgtggagttgggacctggaatactggggaatattttcgatggaattcagaggcctttgaaaactattgctaaacgatctggtgatgtctatattcctcgtggtgtctctgttccagcactcgacaaagatacactttgggaatttcaacctaagaaaattggtgaaggcgaccttttaactggtggagatttatatgctactgtttttgagaacagtctaatgcaacaccatattgcacttcctcctgataacatgggaaagattacctacattgcaccacctggccaatattccataaaggatactgtattggaacttgagtttcaaggtgtcaaaaagaaattcaccatgcttcagacttggcccgtacgtacaccaaggcctgttgcatcaaaacttgcagctgatactcctcttctactggtcagcgtgttcttgatgcccttt

SEQ ID NO: 219000 - DNA, 529 bp, Glycine max
acaggacacaacaggaaagagaattggcattaaggtcatttaaaagtggcaacacccccatattggttgcaactgatgtggctgcacgtggtcttgatattcctcatgttgcccatgtggttaactttgaccttcctaatgatattgatgattatgtacaccgaattggaaggacagggcgagcaggaaagaaaggcctggcaactgcattctttaatgacaacaatgcatccctagcaagggctttagcagatctgatgcaagaagcaaatcaagaagtgcctgattggctctcacggtatgctgctcgctcttcctttggtggtggaaggaaccgtcgatcaggaagaagccgttttggtggccgtgactttcgaagagagggttcttttaagtagggtggttctgattactacagtgcaggaaacaacagtagtggatatggcaattctggtgtgtatggtgcaggatacggtcctggggtaaccagtgcttgggactgattttcaacctgatagcattatatact

SEQ ID NO: 219001 - DNA, 569 bp, Glycine max
  unsure (1)..(569): unsure at all n locations
ctcgagccgctcgagccgaatcggctcgagtgtgatttggcctcggctttgcatgccatgggctaggacgagagggctattgaggtgtttcagaaggctattgatttgaagcctggtcatgtggatgcactttataatttaggtgggttgtatatggatctgggtaggtttcagagggcttctgagatgtatactagggttttggctgtgtggccaaaccattggcgagcattgctgaacaaggcagtgtcactgctgggagctggggagactgaagaagccaaaagagctttaaaggaagcattgaaaatgacaaatagggttgagctgcacgatgcaatatctcatttgaagcagctgcagaaaaagaagaccaaacctagtaatggaggtgcttctggggaggcatcgtttgttatagttgaaccatctaangttaaggtagttggagaaaagactactgcaagacaggagctagccactgccctgcanatcagagcacttcagagggttactagattgagtcgttgcagcgtggagcttttgagaaggagatgagcgaacgtgat

SEQ ID NO: 219002 - DNA, 465 bp, Glycine max
  unsure (1)..(465): unsure at all n locations
agcatgataaacacaaatgtttgtcacggaggttaaaggttttacaatgtctataaacagttactaaagagcagtgaagcaccacctgaaacaattattaaacaaggggccaaaatgcctgctgaactcatgagctctagttataatcacattcacacctgaaaagctaggataaacaagatgggataatacaagatagtagaacaaaaaaatctaaagacaaaaaattgaatgccgatatctacttttcattacgggattgcaaggtgaagcacatacacttatctttcatgggttcaccctcacttccatactctttaaatctgtactcttcctgcttaaatgaagaaggcacttttgcctcactgtagcattggttacacaaactaaaatgagattntatctccttaaaccgagaaccaataattgggtagcggcaaacagagcacaccacgtcgccatgcc

SEQ ID NO: 219003 - DNA, 604 bp, Glycine max
ctttccttcattttctctcttcctctcaccgagtcacgcactcggcttgactcgtacgaactccgatccccccccgagtcacactcaaccagcaccaccgcccgatccgacgatgtctcgcgcctcctccgccgcagattccgccgcctccggtgagatcatactgttcggagtcagagtcgtcgtcgattccatgaggaagagcgtcagcatgagcaacctctcacagtacgagcatcctcaagacggcagcaacaacaaagacgctctcgccgccggttacgcctccgccgacgacgccgctcctcagaactccggccgcctccgggagcgcgagcgaaagcgaggagttccgtggacggaggaagagcacaagctgtttttggttggattgcagaaggtagggaaaggtgattggagaggaatctccaaaactacgtcaaaacgcgaacgccaacgcaggttgcgagccatgctcagaagtactttctccgacgaagcaacctcaatcgccggcgccgtagatccagcctctttgacatcaccaccgacacggtctctgcaattccatggagggagaacaggtccagaatcaagacacgct

SEQ ID NO: 219004 - DNA, 554 bp, Glycine max
gaagaggggaattgattgattgtctctcagttggatcggtcttgcgggttcaatttactttcaaacatagcagatctgggttcttcaaggagtattgttgttctgacacttggtgtccagaagaagggctattttcctttctatccgtgttttgcattgtgtactagagtttgagaactaacttctgatagacagagccatcggattttttttctgctgcatgtggtgtctccttggtggtgccacatcatttcattaatgggggagtggattgttggagctttcatcaacctctttggtagtattgcaataaactttgggaccaatcttctcaaactagggcataatgagagagaaagacatttacttggaagtgatggggtaaatggaaagatgaatctgaagcctattatatatttccagagttggagaattggcattgtatttttctttcttggaaattgccttaatttcatttcctttgggtacgctgctcagtcacttcttgcagcgctgggatctgttcagtttgtatctaacattgccttcgctta

SEQ ID NO: 219005 - DNA, 577 bp, Glycine max
cctataaagtcactcaaacaccgtcatcacggcttcgaaacggaggcggcgccgtcgttgcctgcgatggcggactgcaccgtcagtacggacatgctcggagacgacggcccttcgccggcggggttggctgcggtcggaaaatgggtggctccggcggcggcgttgatcaaggggttaacgttaacgttcctggtgggacacgtggcagtggagattgcagtggcaagtgaaattggcatgaggcaaagaccttttccttgaagatactgcatagccgaacccatgtcttcttccattagtttcgcgacctggtgctccgtcatcgttaggctatcgtttgaggttgttgccgctgtcgtttggttggtgttggtgttggtggttgaagcctgagccccaccgccgttactcttgccgttggcttgaatgcagtctccgcctccctcagaggacatatcagcaacaaggggagcgacagcagcagcaccgcccaatctgctcatgctcagaaaccttgactggagctgcaggaacttacgtaatcgatgatctcatctagcatggatgccttgtc

SEQ ID NO: 219006 - DNA, 597 bp, Glycine max
  unsure (1)..(597): unsure at all n locations
tttggacacaccctctaaaccaatctatcaagtcctgaatctggtgagcaaatatggagctttgttggcaaacatccatccatggttcttgaagaagcatggagataaaggggtgtgagagggtcctcaccactcacactcctccacttaaaacagtttgttttggcttagctttggcttctctaatcaacaagggatgtgttctaacattctctcttgagtggcagaagcagatatgcattctccaaaggaggagaggctttggctacagcctggcaaaccggcaagtcacgaaaaggcaatggactccattggggtctctatggctatctattgctcatctatgtagttcttcttgctgtagaatgtaataaaacaaagttggccttcctttgagaagttaccaacttttgctgtccaaattactcaatttgcagctgactagaattcctttctctctgatcagtttctgcagatgagtaggtaggtaatttgtgatcactcccttcccttcatgtctgtgttcccttttccatgctngtttgtgttgctagctataaccttatgaggaaataaaagatagtacaattctagtcc

SEQ ID NO: 219007 - DNA, 467 bp, Glycine max
aaccttagaaagaagactctgaagcttttctattaaagttcaatagaatacaatcctaaactttgagggactagaattgtactattcttttattcctcataaggttataactaacaacacaaacaatcatggaaaagggaacacagacatgaagggaagggagtgatcacaaattacctacctactcatctgcagaaactgatcagagagaaaggaattctagtcagctgcaaattgagtaatttggacagcaaaagttggtaacttctcaaaggaaggccaactttgttttattacattctacagcaagaagaactacatagatgagcaatagatagccatagagaccccaatggagtccattgccttttcgtgacttgccggtttgccaggctgtagccaaagcctctcctcctttggagaatgcatatctgcttctgccactcaagagagaatgttagaacaca

SEQ ID NO: 219008 - DNA, 531 bp, Glycine max
  unsure (1)..(531): unsure at all n locations
gccatttgggagttaggttctgcacgctctgcttccagcgagtgttctttcttcgtttcaacaccttaatttgcacacgctgcttcttcagcttgagaaatggcacaagaaacctttctattcacatctgaatctgtaaacgagggtcaccccgacaagctgtgcgaccagatctctgatgcagtgctcgatgcgtgccttgaacaggaccctgacagcaaggttgcctgtgagacatgcaccaagaccaacatggtcatggtctttggagagatcacaaccaaggccaacgtagactatgagaagattgtccgtgacacatgccgcgaaattggattcatctctgatgatgttggtcttgatgctgacaaatgcaaggtgttggtcaacattgagcagcagagccctgatatcgcccagggtgtgcacggtcacttcaccaagcgcccaaggaggttggtgctggtgaccagngtcacatgtttggctatgccactgatgaaacccctgagtacatgcccctcagccatg

SEQ ID NO: 219009 - DNA, 389 bp, Glycine max
gggacaaaattctgataaaatttccattgcatcaaaacggtaacattgcataaccaaaaaataaattgtgagtaaaaggagaaaaggaaaaaaaaaaaaccgtttaagttttgatgagatgaccttagacctatgaatgaagtagtagtagtcatggaacaccccaatttttcatccccccctagcaagacatccattgaagggagtgattaacttcacaacaatcttaagcttgaggcttctcaaacttgagtggcttcacaacttcccaggtgaaggcagggccatcccttccaaagtgtccataagcagctgtcttgaggaacctatggccacccctcttaaggtccaagttaatggtgatcattccaggtctgaagccgaaattc

SEQ ID NO: 219010 - DNA, 567 bp, Glycine max
  unsure (1)..(567): unsure at all n locations
gttggctttctctcgcgttttccaattccccccaaatctcacgcctagggtttctatcgcaaaccctccctacctccaaccaggtcgcgtgcaaagggatttcgaagcttcggaagaaaaaaatgaaacctgttttctgtggaaacctggatttcgacgcgcgtcaatctgacgtggagaggctcttcagaagatacggcaaagttgatagagttgacatgaaatccgggtttgcttttgtctacatggaagatgaacgtgatgctgagtatgcaatcagaaggcttgatagaacagaatttggtagaaagggtcgccggattcgtgttgagtggactaagcagaaacgtgacagtagaagatcagggtggtgattccagaaaatcttcatctaattcaagaccatccaaaactnntgtttgttataaattttgatcctgttcatgccaggacaggggatctggagagacattntgattcctatgggaaaatattaaatataaggatcagaaggaattttgcttttattcagtttgaatcccaagaggacgctactagagctttgga

SEQ ID NO: 219011 - DNA, 536 bp, Glycine max
  unsure (1)..(536): unsure at all n locations
gagcaacataataacatctaatataatggtcatttgcacattaaggttctgaccaaacatagcataacagtaaatacaataacaagttcgagtttttgctgtcaaagtacggtctaaaatgaaattaaaatggtctaacaacaacttcacacagttctattcagcttttcctcaagatcgcgacctttctcggggtgggggagatcggctatcatatctcccattatttattgggctttcagctcgttcatacttggggcttcctcttggatctggtctggaagatggatttgatccatgaccataatctgggctaccccgacctctacgataaggactaggggatctaccacgaccatatctcccatcaggagagtcatggcctcttctatcaggactgtatccattccttctgtctctgtcatcatcatctctaatggcatactccacagtgataacacggtccataaacttgctcaggttggtggcctncaaagctctagtagcgtcctcttgggattcaaactgaataaaag

SEQ ID NO: 219012 - DNA, 443 bp, Glycine max
ctcgagccgaatcggctcgagcggctcgagcaagtttactgttgatacctctatgctccatgaaaaacctatggcagaggaagaggatgataataccaagatggcacagatggtgtgctctttaacaaaccgagaagagtgtttggcttgtggaagtcgaaagcattccaaggtgcattttcccggattgattttgggcctaaaaacccttaataagtgcaaacctcaaaaatttggtctaggccttaatgatataaggttgaactcatacatgataatcttaagcattctaaattatctttagagctttggatagaacttatggggataatttcattcgtacctgtttatgtattgaatgttaaatagctgaaagatgtcattgttggtcgcatgtcaactgaccagtgagattccttatttcctacattgaaatgttacta

SEQ ID NO: 219013 - DNA, 428 bp, Glycine max
ctcttaagtcagagagggtgtgaaatgacccacttgggatgatggcatcattggcagggactactacaaaccgcaactgatgtcatatgactgagcctttggtggatcaactgactgcttgcaacgtgacctatggctaattgtgctgcatatgcttccactgcaaggggaccctacccatgagtaaatattgctcctttgaggatggccatactagcagcctaatgtggatctactatgtatgaagactgtgccgatcgtacaagatggcttgaaggcatcccaagaactgcaagactcgaaagatctgccgatcacgtgcaaaccaatacaaaagcctcaaatcttgttgctggaactcaagaaaaatgtgttgcttgcaagaaaacagtttacccaattgaaaaggtagctgttgatggaacatc

SEQ ID NO: 219014 - DNA, 524 bp, Glycine max
gtgggttgaaatcttggacgaggaaaaaaacccaatacaagagggttcaaagatccatgtgaagctgcaatattttgatgtcacaaaagaccgcaactgggctcgaggcattagaagtcccaaattccccggcgttccctatactttcttctcacagaggcaaggatgtaaggtatctctgtaccaagatgctcatgtacctgataattttgtacctaaaatacctcttgctggaggcaagaattatgaggctcataggtgttgggaggatatatttgatgcaatcactaatgctagacacttcacatacattactggttggtctgtttatactgaaatttccttggtgagggattctaggaggccaaagcctgggggagaccaaacacttggtgagcttctcaagaaaaaggcaaatgaaggggttaaggtattgatgcttgtttgggatgatcagacatcagttggtttgttgaaaaaagatggactaatggctactcacgatgaggaaactgcacagttct

SEQ ID NO: 219015 - DNA, 482 bp, Glycine max
atattaagattattactaagtagtaatgaaaacacagattaggatgtaagcaataacaagtttgtaacaaagtacaaaatcaaattaagtagtgagaataggggggaggtagtcagctttgccaccaagaatgcgagccttggtgtcgggaaagaattcaaatcctggcagctcggtgacatctccttcactggcaaccccgatggggtagcggagaaggtgaccgggaaggtcatgctcaagtgactcgttagaatacagatcccaatatttgtcagcaacttggttcaccttgttaatgcattcatcactttctggctggaggaaggagtcatgaagcatgccaaggtgctcataccacaatgacatgcggaaaccgtgaatctgaccacgtgctggctggctggtagccaaatgatagggctgataagcacccatggcaatctgagagtccctagcaccatccattgacctttggttga

SEQ ID NO: 219016 - DNA, 457 bp, Glycine max
  unsure (1)..(457): unsure at all n locations
aaaagaagaaactttgtaagctcaatttgtttccaaggttgctctgggaatccgaggttctaaactctgcaactaactttaatggcaactgggcaagtcattaataaacctccttcacttcctccgtaccctgagatgattcgggaggcaattgaagcactgaatgaagagaatggttcgaataaatcatcaatttcgaagtacatcgaatccacctatggtggattgcctcaggcccacaaggttttgctcaatgtgcacctcgcgaaaatgagggaaagtggagtgctagtgttttggaagaacaactacaccaagcgtgacccaaatgcgccgccacggcggtgccgtggcaggccacccaagcccaaggagcctctgccaccgggcactgtcttatcaccgcccaggcccaggngccgtccttcgaaggacccaaatgacctgcagaagcctc

SEQ ID NO: 219017 - DNA, 494 bp, Glycine max
ctagctagcgctggaaaaatgccgagggaaatcatcactctccaggttggccaatgtgggaatcagatcggcatggagctctggaagcagctctgcctcgaacacggcatcagcaaagaaggcatcctcgaagacttcgccactcaggggggtgaccgtaaagacgtgttcttctaccaagctgatgaccagcattatataccacgggctctcctgattgacttggagccaagagtgattaatggaattcaaaatagtgactaccgaaatctctacaatcatgagaacatctttgtctcagatcacggaggtggtgctggaaacaattgggccagtggatacgatcagggacaacatgttgaagaagaaataatggacatgattgacagagaagcagatggcagtgacagtcttgagggatctgctctatgtcattcaattgcaggaggaacaggctcaggtatgggctcatacttgatggagactctgaatga

SEQ ID NO: 219018 - DNA, 435 bp, Glycine max
ccaatgaccaaccaaccatatacattgctaaaaacgaatcaatacagaaagattctgtactcaatctcccttcccttgggcacaaacgattagcaaacaaatacaaacaaaactaatcacaccgaataccatctcacaccccaaaaaagttaaaaacttcaaaagaaaccttggtgatctttcagaaaaaccctttccttatttatgctttccttgtggtactgggttttttcacgctactgaatttggatccaatgatcctgtaacatagccttctcctgttagcatgttgcctggatcctccattccccatttgatataatctggggactcacaggccttgtattcatcaaccaatgtctcaattatgtccctcgattcatcaaattctgagaggccattatcagcaaacataggaaacttcctgtaggcgtc

SEQ ID NO: 219019 - DNA, 538 bp, Glycine max
  unsure (1)..(538): unsure at all n locations
gcaatcaacatcctccgatgaggagttgccaacaaggacaccggctaggtctggaaggttggcaaggtcatctagctactcggctcggatggtgaggaaggctgaggctatagtgtgtcatcccaagagctcccttgttgctgtgatgatccaggccattgctcatagagtgaactacttgtgggttattgaggatgattgtagcttagttggcattgtcactttttctaatatgttgaaggtgttcagagaacatttagagactatttagattattggctttggatgctgctggtgagaagcaagaacaccaaggtctatgaacatggcccttcttttgttatgagtattgcaatgtggcccgggaggtttggtttttgttgtgctttatttctgtgtgcttcccttctaataagagaactcccttcaacgcaattctttgtagaggaccaattnttcctgcctcagtttgtttgaaagaacttanaatgttcccatgtccaatgagactgttttgtattggaacgagatttgtgca

SEQ ID NO: 219020 - DNA, 471 bp, Glycine max
gcacaaatctcgtttttatacaaaacagtctcattggacatgggaacattttaagttctttcaaacaaactgaggcaggaaaaattggtcctctacaaagaattgcgttgaagggagttctcttattagaagggaagcacacagaaataaagcacaacaaaaaccaaacctcccgggccacattgcaatactcataacaaaagaagggccatgttcatagaccttggtgttcttgcttctcaccagcagcatccaaagccaataatctaaatagtctctaaatgttctctgaacaccttcaacatattagaaaaagtgacaatgccaactaagctacaatcatcctcaataacccacaagtagttcactctatgagcaatggcctggatcatcacagcaacaagggagctcttgggatgacacactatagcctcagccttcctcaccatccgagccgagtagctagatgac

SEQ ID NO: 219021 - DNA, 543 bp, Glycine max
  unsure (1)..(543): unsure at all n locations
ggagaaagaagttaaccctttctctaatcctggaagtgttcccgctgccactaattcaaggcttccacctcttaagccagaacctgttgattataattatggctttggtgcgacagttgatatacctcttgattcatcaatggatttgaaaaagaaggagaaggaacttcaagccaaggaaactgaattgagaaaaagggaacaggaagtgagacggaaagaagaagctgcttcacgagctggaattgttcttgaggagaagaattggccgccttttttcccaataatccatcatgacattgctaatgaaattccaattcatcttcaaaaattgcaatatgttgcatttactacattgttaggattagtgttgtgccttttttggaatgttatagctgttactgctgcttggataanggtgaaggtgtaaaatatggtttcttgccattatctatttcatagcangggttcctggagcatatgttctgtggtatcgcccattatatcgtgcttttaggaatgaaagtgccntgaaatttggat

SEQ ID NO: 219022 - DNA, 498 bp, Glycine max
ctcccctcacctctctctccgaaatccccaaattgcctgtgaatgctagaaaccctaggcacgttcgatttgatgctctcccatttgcaatcaagggcgagcgcattcggttcttgcacgcaaggctggtactaccgctgcatcggcctcgatccctgaattcatcattctttctcgcaccatctttttctattccgattcgatttgttgttgttgttgttgttgttgtgtttttgtttccttccttgacgaatcatcacgatgttgatgagcaagcagaagaagagccagatccagaacgcgaagaggttgttgataagcatcaatgtgctggggagcgcggggcccattagatttgtggtaaacgaagaggagcttgtggcggcggtgatagacaccgccctcaagtcctacgcccgtgaggggaaggcttccgtcctgggaaacaacaccaccggtttcgcgctttactgcccccatcttggatccgatgctcta

SEQ ID NO: 219023 - DNA, 520 bp, Glycine max
atcttcttccatcaaacctcgggatggagagaatgaggggaaggatgccaattcagcaaccttctcatccaatgaagggagatgttgtcacaaacctagatttcatccggaagaggaagatttctagtgacttcaacatgatgatggatcagaaaatatacacatgtgagcatccccaatgcccttatagcgaagttcgccttggtttccatgataggtctgctagggacaatcatcaattgaattgtgcatacagaaacagttctgcagattatggtggtggtcccaatttccatgctactgaggataagccagtcatattcccccagtcctttgttcaacccaacactacaacacagtctgcaagtttggttgcaccttcatttgatctaactggtcttggagttccggaggatggacagaaaatgattagtgaccttatgacaatctatgatacgaatgttgtaggaaacaagaaacttagttccctcactgtgtagctgtagaaaatcataacctt

SEQ ID NO: 219024 - DNA, 470 bp, Glycine max
cttaagcatgtattttgaaatactcgatatagatgctcatagttatttgcacaaaactggtaaaattccagatcaataaggattgcggcgaagccgcaaagatacaacattcattagggaaaacaggagtggggaaaaataaggggggaggggttgaggaagaatcaattgctcacagagcatgctaagacacctaaatattccacacacagttattgaaacaacccaatatagagaaaatttttctttggtgtattataatataaagcagaaccaaatgacttggaagattctactttcttataccattcacttggcaagttcgttgcggatgagttttgctgcggcaaccatgtttgtgagggctggcttcacctcagtgtacttacgggtcttgagcccacagtcagggttcacccacaagatgttcttctcgagcactgccagcatcttgttgattctgtcagcaa

SEQ ID NO: 219025 - DNA, 490 bp, Glycine max
cgacaaaaaaacgacattttatttatcatgcattagacaataacagcagcaaaggccctatcattctctacactcaaactcacaagttttcacaaattcaataatcctaaagggatatatatcatatatgaaatttattttcttcttttcacaaccagaaagagaactcagtcccccaacagggaccatgtcatgtcatcattggtctgatatagatttactcccccattcgaatgatgcatctgatggactcccctttcagcatgtaatcaaaagccttgttaatctctgagaatggaactgtgtgagtgatgaatttctccagttccaattccccattcatgtacttctccacaacagaaggaagatcagtgcggggtttgtagtttccgtagaaggtaccctttagagttctctcgttcaagaaattcactggatgagttttgaatgcatcatctttgtttggcactccaacatgtacagcaacacc

SEQ ID NO: 219026 - DNA, 508 bp, Glycine max
attgctcaggacttcaagactgatctgcgtttccagagccacgccgtgcttgcattgcaagaagctgctgaggcataccttgttgggctctttgaggacactaacctgtgtgccattcacgccaagcgtgtaaccattatgcccaaggatattcagctggcaagaaggattcgtggtgagcgtgcttgagttggtggttggaaagatgaagatgattggtggctgcggttggtgtttttgtttttcagattcctttttttattcaatagatggggttgttagggagggtaggttttctgctggtagtagcattaattgggatataggcaaatactgctaagtgtccgtgactgtgttttcttcctttaagaaaattggcttgtaattgatttttggacatatgtatgtgttagaatgcttctgttttagtttttacctgcgggatgttgcagccactttagaaactgtattggacaacattcagttgccatctaatctcgtttaagtt

SEQ ID NO: 219027 - DNA, 508 bp, Glycine max
aacttaaacgagattagatggcaactgaatgttgtccaatacagtttctaaagtggctgcaacatcccgcaggtaaaaactaaaacagaagcattctaacacatacatatgtccaaaaatcaattacaagccaattttcttaaaggaagaaaacacagtcacggacacttagcagtatttgcctatatcccaattaatgctactaccagcagaaaacctaccctccctaacaaccccatctattgaataaaaaaaggaatctgaaaaacaaaaacaccaaccgcagccaccaatcatcttcatctttccaaccaccaactcaagcacgctcaccacgaatccttcttgccagctgaatatccttgggcataatggttacacgcttggcgtgaatggcacacaggttagtgtcctcaaagagcccaacaaggtatgcctcagcagcttcttgcaatgcaagcacggcgtggcttctgaaacgcagatcagtcttgaagtcctgagcaat

SEQ ID NO: 219028 - DNA, 541 bp, Glycine max
cggctcgagatttgaggccaggcaagccccactcaaccaccacacctctcctcgttcacgctacccctttctgctcttcttctacctttcaagttttaaaagtataaagatggcagagacattcctatttacctcagagtcggtgaacgagggacaccctgacaagctctgcgaccaaatctccgatgctgtcctcgacgcttgcctcgagcaggacccagacagcaaagttgcctgcgaaacatgcaccaaaaccaacttggtcatggtcttcggagaaatcacgaccaaggccaacgttgactacgagaagatagtgcgtgacacctgcaggaacatcggcttcgtctcaaatgatgtgggactggatgccgacaactgcaaggtcctcgtcaacattgagcagcagagccctgatattgctcagggtgtacacggccaccttaccaaaaaacctgaagaaattggtgctggtgaccagggtcacatgtttggctatgccactgatgaaacccctgaattgatgccattgagccatgtt

SEQ ID NO: 219029 - DNA, 488 bp, Glycine max
aacttgaacactctctttttgatattgatattaagagacacattggtagggcatacatacaaacagagagtacatgtttttagttgatcacgtaaaaaattacaaaagaacatacaaataacaaaataggaggaagaggagagaaacacacagagtaagagacgtggaaagttatggatattagacatattataagggcaacgctcaaaaaacttccagcatagagcagtggaatgaattacttaggccttctcccacttgaggggtttgaccacttcccatgtgaagtcagggtcttctcttccaaagtgtccataagcagcagtcttcaaaaacctgttatttccacccctcttgagatcaaggttgatggagatcataccaggcctgaaatcaaagttttccttcacaatgttgagaatctccttatcatggatcttcccagtgccataggtgtcaacaaacacagacaaaggctcaggcacacc

SEQ ID NO: 219030 - DNA, 536 bp, Glycine max
  unsure (1)..(536): unsure at all n locations
gaaaagagtgtaagagtaggaaacgagattgacgaaccctaagctgaaagaagaaaaaatgtctggcgtgaagagagcactgaggcagttcaccttcggaaccggcaagaccgccggtcgcaactcggcggggcgcataacgtccttccaccgcggcggcggagccaagcgcttgcaacgaaccgtcgatcacaaacggaataccgcttcttctctcggcgtcgtcgaaaggatcgagtacgaccctaaccgctcctccaaaatcgccctcgttcgctggatcgaaggcgtccatcaccgtcgccgccgcgctgcctccgccaacgccgcttcgcccaagctcctccatctcgatcccgccactaacgacgctaacagcattcgcggcgttttcgctctcaattcgatgctgccgcacactcacgctggaacatcctccagagagctntttctgtctgcgttggcgtccaaggccaagggatcagaatcggaatcggtttcttcgctcggaattccnagggtcgcggttgcggcgg

SEQ ID NO: 219031 - DNA, 343 bp, Glycine max
tttttctttttttttaccataatataccatccttggtttttgtcctatttcattgggacatagttaagaggcaggtgcttcagcaggcgaagggaccaaccacagaaggattatatttacaacatgcgttatctataggagagatcacaaacaaaaagggggtaaaagtctttcttttggagctatccacatactgattgaggctcacttccacaggagtatagttcaatccccaagcggtatgcctccactttggatacctgagatattggcacatactgggttatcatctgcacacttctctggaagtaggaatgtcaggcacaaatcacctaaaactgtc

SEQ ID NO: 219032 - DNA, 482 bp, Glycine max
tctcactgaagcagctgctgcagaagagaatcccgatttttccaaaatgtcgatgtcgaagagttccaagatgcttcagtacatcaactaccgtatgcgtgtcaccattcaggacggtcgtcaactcgtcggaaaattcatggccttcgaccgccacatgaacctcgtcctcggcgattgcgaggagttccgcaaacttcctccggccaagggcaagaaaccagccgaaggaggcgaccgcgaggaccgccgcacgctcggcctcgtcctcctccgcggcgaggaggtcatctccatgaccgtcgagggccctcctccgccggaagagtcccgctccaaggcagtcggcgccgccgctctcgccggccctggtattggccgagccgccggaagaggtatcccgcccgctcccgtcgtccaggctcagccaggcctcgccggccctgtccgcggtatgggcggccccgcccctggcatgatgc

SEQ ID NO: 219033 - DNA, 528 bp, Glycine max
tgaaaatgtcgcagttgttggaaaaggccaaaaactatgttgcggagaaagtcaccaacatgcccaagccagaggcgagtgtcaccgacgtggacttcaagcgcgtgagccgcgacagcgtcgagtacttggccaaggtctccgttcagaacccttattccacttccattcccatttgtgagatcaagtactccctcaaaagtgctggcagggagatagcagcaggaacaatacctgacccagggtcattgaaggcaagtgacacaacaatgttggatgtgccagtgaaggtgcctcatagcatattactgagcttggcaaaggacattggtgcagattgggacattgattaccaattggatattggacttgttattgaccttcctgtcattggcaacttcaccattcctctttctcagaagggagagatcaagctccctaccctcactgacatgtttgcctaattccaactaaaggcttagaacaaagaaaataaatcaataaatacatcctccatcatattttcct

SEQ ID NO: 219034 - DNA, 297 bp, Glycine max
acaacaggaaaatatgatgggggatgtatttattgacttatttcctttgttctaagcctttagttggaattaggccaacatgtcaacgagggtagggagcttgatctctcccttctgaaaaagaggaatggtgaaatcgccaatgacaggaaggtcaataacaagtccaatatcccattggtaatcaatgtcccaatctgcacccatgtcctttgccaagctcaatcatatgctctgaggcaccttcactggcccatccaacattggtgtgtcacttgccttcaatgaccctgggtg

SEQ ID NO: 219035 - DNA, 519 bp, Glycine max
tgagaatcagcttacttctgatttggttgaagattggatactgaataacccagaggcctccatttgcacaccagaaggaataaatgatttcagggccatagctaactttcaggattatcatggtctgcccgagttcagaaatgctgtggctaaattcatgggtagaacaagaggaaacagagtcacgtttgatcctgaccgtattgtcatgagcggtggagcaactggagcacacgaagtcactaccttttgtttggcagaccctggtgacgcatttttggtgcccattccttattatccaggttttgaccgggatttgaggtggagaacaggaattaaacttgttccagttatgtgcgatagctcaaacaatttcaagttgacaaagcaagcattggaagatgcgtatgagaaggccaaagaggataatataagagtaaagggcttgctcatcaccaatccatcaaacccattatgcacagtcatggacagaaacacactaatgaaccgtgatgagct

SEQ ID NO: 219036 - DNA, 484 bp, Glycine max
gtctcaaaaagaaaagagggtgggtattgaagaccctctattaacaatttattgatcatcgaccttacaattgcagtataagaatacagacttcttctggactcttctaataaaccaataaccttacaaacattataaacttttttcaccttgaacccattatttggtaagtgaaaaaagaaaaaaaaaatgcccctaaaaattgaaggggcatgtttccagtagcacaagttctatgacgcaaggcaaagagacttcgatgttggtaacaaaaacaatatcaggcattgcctgttactgctgttaaaaataacaaactcaagcactttatgtaccttgccaaaacaacaagtcaaagagccaaataatcatcatatatcagttacttcttctagagggttcagagaaatatgccaactcaaattgtggctttaaccagaggtgactgacgtatgggggagtgaggtgacatcatgatatcatc

SEQ ID NO: 219037 - DNA, 542 bp, Glycine max
  unsure (1)..(542): unsure at all n locations
cttcctcaccctgttagggtttgcatcagattcccccaattcttgtttgattttgcgctttcactagtttttcttcgacatgactcaagatctcgagatgagggatcgctcaacgccttccaactctgtttctttgcctgctccatctactttgcagcatttgaaggagatagcgtctcttatcgagaccggttcgtactcgaaggaagttcgtagaattgctcgcgctgttcgccttacaattgcgttgaggcggaaattgacagcatccgctatctcttcttttctcgaccttgttctcactccaggctctgaagttcacgccaaattgtctgcgtatcttcccaaggaggatgatcatgagatggaagtggacgccgcaacatctgctattcaaaccccagccaaacacttgttgcctgagctagaaatctactgttacctgcttgtactactttttctgattgatcagaaaaaatacaatgaggcccaagcttgttcctcggctagcatntgttggcttaagaacacaaacaggagaa

SEQ ID NO: 219038 - DNA, 375 bp, Glycine max
ggaaataaatagtaaatctttcgatatgttaaactgactttcagagatcttccacttagaaaatgaaaaattcaccttttgaaaaggaaataataatggaaattcttcaaaaggaaaagatgagcaaaggttggaaacgaaggtatcctcatagcaattcatagggtgaaataagacaattatcaaaaatcatcgtcatcctcctctgcaatatgcttagccagctcttgctcttgctgttgactctctcttctcttttcagcactttccttctctttgtgtgtgtttggtggaaaacgaagagctcgaaccgcctcattgtgcatgttaagacagaaagcaatccgagaattgaaggctgactgtggctcattt

SEQ ID NO: 219039 - DNA, 602 bp, Glycine max
cggctcgaggtcggaaagaataagaggatttccaagggaaagaagggtggcaagaagaaagccgctgatccctttgccaagaaagactggtacgatatcaaggccccttccctcttccaggtcaagaatattggcaaaaccctcgtctctcgtacccagggaaccaagattgcatccgaaggactcaaacatcgggtttttgaggtctcattggctgatctccaaggggatgaagaccactccttcaagaagattcgtttgagagctgaggacgttcaagggaagaatgttctgacaaacttctggggaatggatttcacaactgacaagttgaggtctttggtgcgaaaatggcaaactttaattgaagctcatgtggatgttaagaccactgataattatacattgaggatgttctgcattggctttactaagaggcgtagtaaccaggtgaagaggacctgttatgcacaatcgagccaaatcagacagattcgcaggaagatgagagagataatggtcaaccaagcaacagcatgtgatttgaaagattggtgcgcaagttcatccccgaaatgattggaaggagtatgagaagcaca

SEQ ID NO: 219040 - DNA, 451 bp, Glycine max
gacaaaacaaaaatccagatttagatttgcaacaaatgtgtttctaaatattaaaacaaaactgaaaattaatatttgtaagaaaaacaggaattctaaaataaccaaaaatgcattatgagccagatcaagccccaactacttaaggggcttcctcagccaatgtttcatcggcaggtctgtccaccttggcaccaacattttcagagtaatccccatgaacctccatcagttttccaagatcaaactttggagctttaaggatcttaactttacgaatgaacacattctgtagaggatagatgctaaatgttgccttctcaatctcctttccaatcatttgggggatgaacttgcgcaccaattctttcaaatcacatgctgttgcttggttgaccattatctttttcatcttcctgcgaatctgtctgatttggctcgattgtgcata

SEQ ID NO: 219041 - DNA, 420 bp, Glycine max
caacattttctcaggtcattgcacggttggacaaaatcgttgcaaattgctcaaaacaaggatggtggaaagatacttttaaactcccttggaaataaataacaaagtacatactacgtggcaaggaagacatcaagttcagggttgcatcctcaaaaccaatttgtcagcttcatggtggtgtactgttaatagcccttgcaattaataattttggaattcgaataatattaacttgagcttggattaatttgagcgtgaaaatgaatttgcatggttcgtcctatgttcctgtctactagagggctggaacagctcctctctgtacaatgtaccataaaggagatataacatctcagaaattttcttataaaaatgtttttcttaaaaaaaaaaaaacaagaaaaacaacaaaataag

SEQ ID NO: 219042 - DNA, 554 bp, Glycine max
gatcaacttataaatgaattggaggagatgtttgacataaagggacaacttcaacaccggaataagtgggaaattgtcttcactgacgatgaaggtgacatgatgcttgttggagatgatccatggcctgaattctgtaatatggtgagaagaatcttcatttgttccagccaggatgtgaagaagatgagttgtggaagcaaactgccgatctcctcagtggaagacgggactgtaataagctcagacacaaccgaaacctgaaacttttgacattctttcctgtggttttgcgtttgtttgtcagcagcacccaaatgctgatccttcttgttgcttcaaattgtttgtgggaaggaagttggtctatctgggctgcggtgagtttcatgttatcagatgtgagacactagctaattgtaacttaatctgtggagacgccaccaccaggcattaattgtgctagaaaaaaatagacctagacagatctctttatataattagtaagtgggaagatggcagatttaggcttagtatatgtgaatattcatgtc

SEQ ID NO: 219043 - DNA, 575 bp, Glycine max
  unsure (1)..(575): unsure at all n locations
ctcgagccgtttacattgtgcactctaattcccttgttttgtttacccacatttgtgagactatattatattggagcatatatcatgggtctgaagtttacacatggagtggtgatattaattgttataagtgcttcaatgttttcagtgagcatggccaacaaggattggtcctttggtttcaactacactgattggtggtctagatttgggaatcatcctcaaaacaaaacacagcaacaacccaggcaaattctcgtgggtggctcagagcattggcactacggtttcaactacaccgattgggccttcaagactgccccattttacctcaatgatactctagttttcaaatatgatgctccaaatgccaccagtttcccacacagtgtgtacatgttcaaaagttttgggagcttcttgaagtgtgacattaaaaaggctaagatgctagcaaatcccacacaaggttcgggagagggcttcaagtttgtgttgaagaagtggcagcctcactactctgcctgtggtgagagaaatggcttncattgcaacaacggtaccatgaagttcgc

SEQ ID NO: 219044 - DNA, 560 bp, Glycine max
atcattctcatatcctaaatcaccccctttcgcactcgctcttcccttcctctggcggcgacaatgtcgactcctgctaggaagaggctgatgagagacttcaagaggctgcaacaagacccgcctgcagggatcagtggtgccccccaggataacaacataatgctgtggaatgctgtcatatttggtcctgatgatactccatgggatggaggcacgttcaagctgacactccaatatactgaggactatccaaataaaccaccgactgtacgatttgtgtctcgcatgtctcatccaaatatttatgctgatggaagtatctgatcggatatattacaaaatcagcggagtcctatctatgatgtggctgctatactcacatctatccagtcattgctttgtgatcccaacccaaattctcctgcaaactctgaagcagctcgaaagtttagtgagaacaagcgtgagtacaatcgaagagtgagggaaattgtggagcaaagttggacagcagattaagttcatccttatatgcatggggagctttcgaggcatga

SEQ ID NO: 219045 - DNA, 497 bp, Glycine max
gtaaaccaatatgtagctaattatttcaaaaaccttgatgaggggataatttgttcagcaaactataattttcccgttgaatgtctgacaacaatcgaaagtaaattgacacgcattatattttttttacattaactgacattttgcaatgctcaagctttaataaattaaagataagatgatgctatcattcatatcagcagagaatataaatgtgatgagtttgcacaatcattcttatagttgccatcactgcaaccaaattcatgccttcaaagcttcccatgcatataaggatgaacttaatctgctgaccaactctgcttcacaatttccctcactcttttattgtactcacgcttgttctcactaaacattcgagctgcttcaaagtttgcatgagaatttgggttgcgatcacaaagcattgactggatagatgtgagtatagcatcccctcataaataggactccactgattttgtatatatccaaac

SEQ ID NO: 219046 - DNA, 587 bp, Glycine max
  unsure (1)..(587): unsure at all n locations
gaagccaacataatagccatctccgtcgacttcagactcctcccacaccaccctatccctgctgcctacgaagacggttggaccaccctcaaatggattgcttcccacgccaacaacaccaacaccaccaacccggagccatggctactcaaccacgccgacttcaccaaagtctacgtaggaggtgaaaccagcggtgctaacatcgcacacaacctgcttttgcgtgcaggtaacgaatccctccccggggatctgaaaatattgggtggattactatgctgccccttcttctggggctcgaagccaattgggtcagaggctgttgaggggcacgagcagagtttggccatgaaggtctggaactttgcctgccctgatgcccccggtggaatcgataacccctggatcaacccctgtgttcctggggcaccctcattggccactctngcctgctctaagttgctcgttactatcactggcaaagacgagttcagagacagagatattctctaccaccacaccgttgagcaaagtggctggcaaggtgaacttccactctttgatgctggcgatgaggagcatgc

SEQ ID NO: 219047 - DNA, 594 bp, Glycine max
  unsure (1)..(594): unsure at all n locations
ctcgagccgattcggctcgagaaaggagcactgctttttactacagtgggcaatgaatcaacatttcagccaaaccctaactctgtttaccaaacagaacatttatcttatttcaaatttgttggtagagtggtcggtaaagcattatttgatggtcaactcttggatgttcattttactcggtcattctacaagcacattcttggagtcaaagttacatatcatgatattgaagccattgatcctgattatttcaaaaatttgaaatggatgcttgagaatgatatcagtgatgttctggatcttacttttagcattgacgcagatgaggaaaaattgatcttatatgaacgaacagaggtgactgattatgagttgattcccgggggacggaatatcaaagttactgaggagaacaagcatcaatatgttgatttggttgccgagcatcggttgacaactgctattcgacctcaaataaattatttcttagaagggttcattgcattgattcccagggagttgatatcgatattcaatggacaagagctggaatngttgatcagtggacttcctgatattgatttggatgac

SEQ ID NO: 219048 - DNA, 478 bp, Glycine max
gagagcagcaagtaatgatggatgcgctgataaaggtgcagttcaacgcaccaaaaccataaaaagcgcttctttcgtcttatggcatgtctgaggaggaagaagcactgcgtcaaaggccaacatcgttgatttctttcccaccccatgacaattcttcgcttcttctgccccttctttatactcttcttcactccaatagcttctgtgcaagcgttcaccggaacctatggtataaattatggtaggattgcaaataatattccttcacccgatgaagttgttactcttctcagagcagcaaaaataaggaatgttagaatctacgatgctgatcacagtgttctcaaggcatttagtggaactgggcttgacattgtagtggggcttcccaatggccagctgcaagacatgagttcgaatccagaccatgctttgaactgggtaaaagaaaatgtacagtcatttcttcctgaca

SEQ ID NO: 219049 - DNA, 551 bp, Glycine max
aactagtaccaaatatgtgtatttactgatctgaaaaaccattggtgaccaaaagtgcaaggtttacgcaacaggatacattaatgcattgatacaacacgacacaatgttcttctaagaaaattctatactaatttttattttaaaatgaaagcatctgaaacactaaagcctctggtgctacaattgctgaaagaatacaatgaatttaatcacaaatcagcaaaaacatggtatgttttggagtctacagaaatgagccgtatggctgaaattgttgctgccagagacataatggcaaagaaaccaatattgaaccggtgccagagcttttgtgagctgtttaatttgtccttctttgccttaaggtacatgtggtttgcaagaataaacgtaaggggaaatgtgctgatcgcccctgtgaggctcatgaaatctccaaggaatggcaggaaagccgccacaaatgtgttaaaggctatgtagccacctcttaccacgactcggaatgacaaagttttagcattcaatgcacttcctttgatcccata

SEQ ID NO: 219050 - DNA, 371 bp, Glycine max
caaaatccttgatgaaggggtaacgccgccacatcaccccatatttttaatgttgaatgtccgacaacaattgggggggaaatgacactcttgggtggtttaaaaaatccactgaaattttctatgctgacgctataatggattgaagagaagacgatgctatcattcatatcaccagataaaatggacgcggtgagtccgggcaatcaggctcatagttgccattactgaacccaaactcatgcctttcaagctttccatgcatatacggaccaacttagtctgctgaccaagtctgctccacaattggcatcactcttggattggactgacccctgttctcactaaacattcgagctgcttcagaattt

SEQ ID NO: 219051 - DNA, 498 bp, Glycine max
gaacaacacaacagagagacagagcattatggatgttggagctgtgccgcaagccactgaagatgtggttcggcggtggaggcaacgacgacggcctcctctggcacacagaccttaagccccacgcttcagggaactactcaattgcagtggtgcaagctaattcatccttggaagaccaagcacaagtatttacctctccctccgcaacctttgttggtgtatacgacggtcacggtggtcctgaagcttcccgtttcatcaccaaccacctcttctgcttccttcgcaaattcactacataggagggtggcttgtcggaggaagttataaagaaggcgttcgaggcaacggaagatgagtttttgcgtgtagtgagggaatcatggattgcgcggccacagatagcttccgagggttcgtgttgtcttctgggagcgatttcaaagggagttctttatgttgctaatctcggggattcgagggcggttttgggtc

SEQ ID NO: 219052 - DNA, 419 bp, Glycine max
  unsure (1)..(419): unsure at all n locations
tttctttctttttttttttttttttantttncncttttagagaaatanaaaaaaatctggggattaagataatgggaattactcctttaaccatccttttcctttggccaccgtaactactacttctgtatgtgacaaatctccttgggtaaaaagcagtcccggggagagtcactgctaatggctaattcaatttaaagatcagcttcacctgagctcacagagaagatatctataggagttttaatgcagtcataaactcctttacctcttgatctaccattttgggattcttttgaaggaccgagatatagaacgaccactgttatctcatcatgaaaatggcgccttaaacctttatctggtttccttagatccccatacctcatttctcttttctttggaacctcttttattgc

SEQ ID NO: 219053 - DNA, 543 bp, Glycine max
tacgaacatcatttagaaccatgtctttctctaccaaattgcctttggtccttttattttcatccctttttatccatgcatctttagctgagatggtgtgtgaggacctgccaaaggaagtgtgtgctttctcattagcttcatcagggaagaggtgtttgttggagaccgagaaggtggccgacggttgcgtcgagtaccaatgccggacgtcggaagtggtggtggagagaatggcagagtacatagagacagaccaatgtgtggaggcatgtggggttgataggaactctgatggaatttcatctgatgccttctttgagcctcaattcactggcaagctttgctctccagcatgttaccagaagtgccccaacattattgaccttttcttcaacttggctgctggagagggggtgtttttgccagaactgtgtgagaagcacacgaccaaccctcgtcgtgccatggttgagctggtgagctctggagctgcccctggccctgtttctggcgtgtcagaggacattactattgcatcag

SEQ ID NO: 219054 - DNA, 423 bp, Glycine max
ggaagccatgtatcccccatattctattataggagcccaacaacaataataataattataaatgccttgctgatcaattcacacccttttctgccaaaggaaagtggtttttcaagggaccaaaattaccggggaaaaggggaaggggcttatgcaataataatgtcctttgaccccccaaaaacagggccaggggcagctccaaagctcaccaacttaaccatggcacgacgagggttggtcttgggcttctcacacaggtttggcaaaaacacccccttttcagcatccaatttaaaaaaaagggcaatattgtgggggcacttctggaaacatgctggagagcaaagcttgccaatgaattgaggctcaaagaaggcctcaaatgaaattccaacagagtttctatcaaccccacatgcc

SEQ ID NO: 219055 - DNA, 552 bp, Glycine max
ggtttttctttttctcttctcactgcatcgcttcaggttcttctgaaaagatgtctcgcgtgtatgttggtaacttggattcacgagtcactgagagagatctcgaagacgaattccgcgttttcggagttattcggagtgtttgggttgcacgtagaccacctggttatgcttttattgactttgatgaccgcagagacgcacaggatgctatccgtgaattggatggcaagaatggttggagggttgagctttctcacaactctataggtggaggtggtggtcgtggtggtcgctctggtggctctgatttgaaatgctacgagtgcggagaacctggtcattttgctcgtgaatgccgcatgcgtggtggttcaggaagacgccgtatccgtagtccgcccagattccgtaggagcccatgttatgggcgaaggagttacagtcctcgtgggcggtcccctaggcccgcagtttgtcacctcgtggacgtagctacagcaggtctcctccttatcgtgggcgtgaggagggtccttatgctaatggaaa

SEQ ID NO: 219056 - DNA, 455 bp, Glycine max
  unsure (1)..(455): unsure at all n locations
agggcaaaaagatctggaactatatttaacaaactagtaacaacaaccttaacaagatcattacctgcaatgaaactacaagcaaagataaattcaacacaagctgagacataaaataaactaactattccaatccaagagtagaaactcagggccttgcccaacaaaacagactcatacttcagtcaaagcaccactaaattaacaaaatctcactattctcttaacaatcacagatacccaataccaaactctcaaaatcaacttctggttctgcgtcgttccctaaggccatttccattagcataaggaacctcctcacgcccacgataaggaggagacctgctgtagctacgtccacgaggtgacaaactgcggtgcctaggggaccgnccacgaggactgtaactccttcgcccataacttgggctcctacggaatctgggcggactacg

SEQ ID NO: 219057 - DNA, 481 bp, Glycine max
  unsure (1)..(481): unsure at all n locations
gatagtgttgttgtagggtcacacattaggggtagcagattgcgagctgctggggatgaggaggtggatctacttctacccggtacagcaagactacaaatccagctaggtgtgaacatgcctgctagggcagagcagattcctggaaaagaggaagttcaaatgttccatgaggcttacgatgttgtactttaccttggtataattgacatattgcaagagtacaacatgactaagaagattgaacatgcatacaaatctattcagtttgattcattatctatctcggcggtggacccaacattctactcgcgtcgcttcctggattttattcagaaaatgttcccaccacatgaaatggcaagataaggtttgggggttaaattcaaccagttggtttattcagaaagtgtgtacattgtcacattgtcctcttttgtgcatgctgtataattgacttgaatatgtttagattntatat

SEQ ID NO: 219058 - DNA, 546 bp, Glycine max
  unsure (1)..(546): unsure at all n locations
tgagctctcgtatattccccagccatggccgaaaaggtcaccataatgaggctcaaggttgatcttcagtgccacaaatgctacaagaaggtcaagaagattctctgcaaattccctcaaatccgagaccaggtgtacgacgagaagaataacatcgtgaccatcgcggtggtttgctgtaaccctgagaagctcagggacaaaatttgctgcaaaggttgtggtacgatcaaaagcattgaaattgttgagcctcccaagcccaaaccaccacctcaaccagaaaagcccaaggaaccagagaagccaaaagagccacagaagccgaaagagccagagaagccgaatgagccagagaaaccgaaggagccaccgaagcctaaggaacctgaaaaaccataggaaccagagaagcccatagagcctgagaagcccaaggagccagagaagcccatagagcccgagaagcccaaggaacccgagaagcccaaggagcccgagaagcccaagcctgaatgcccctctccngtgccggtttgtccggca

SEQ ID NO: 219059 - DNA, 504 bp, Glycine max
gtgaaaatgtaagttatcactttatatagtatcagttacatacatgacagtgaaaacatttattctttagctagctagcctctggtatcatatcatattatctatatttgtttcacgtacgaaacatttttggactcccaaacacaaaaaaacaaagatcattattccttggattgatgagggtgatgatcgctccaacaataagatggaagaacgcgccgttgcaacaacttgcatgcatgggcggcacaagagagagagattcgatgaatgaagtaagtaagtaataatgcgatcgatcacataattgtgcaagcagaggtgttttcttcacagaaatattcatcgcaacggctcacgtaacaaggcctgctcccaccgtaactatcataaacaggccttccataataagcgtcataacatggtgggggcccaccgccgtacccatcaaagcatggcccaccgggccgaccttcatagcatggaacacagcacaccccaatc

SEQ ID NO: 219060 - DNA, 528 bp, Glycine max
ctcgagccgaatcggctcgagctgaaacgtaggttttataagaactggtgcaagtccaagaagaaggccttcaccaagtactcaaagcagtatgaaactgaggagggaaagaaaaacattgaggcacagctggagaaactgaagaagtatgctactgtggttcgtgttttggctcacacccagatcaggaaaatgaaagggttgaagcataagaaagcccatatcatggaaattcaggttactggtggtactattgcacagaaggtgtactttgcatacagtttctttgagaaacaggatcctattgatgccgtgttccagaaggatgagatgattggcatcattggtgtgaccaatggtaagggttatgagggtgttgtcactcgttgtggtgttacccggctttcccgtaagactcacagaggcttgaggaaggttgcttgtattgatgcctgtcatcctgcacgagtttcattcactgctgccagggctggacagaatggataccaccaccgaactgagttgaac

SEQ ID NO: 219061 - DNA, 433 bp, Glycine max
atataaaatcattttatttggaattttttaaaagatcagtctgagcaaaagtttggccaacttaaggggggaaaacactcactactcggggatccataatgtcaaaacagaaaacacttctatttgttaataagaaatgggcaccgaatagaaatccagcatttccatccaattaacaaaattatgctttgaggcgtccaaagaacttctgcttctcctgtgtggtctggaagcgaccatgcccaaactttgaagaggtgtcgataaacttgagcttgatctcctccagagcaacacgagaagtctgcttaaggagggattggcgcaatgtaataacccttttcttgggaccaacgcagcatcccttgaccatgatataatcatccttaacaacaccatagtgagggaaaccccctattggggtaatgtcttt

SEQ ID NO: 219062 - DNA, 438 bp, Glycine max
aaaatgatggagtacgtaaagtatgagcatttaatgttcgagctatctagatcggatccgatgtgaaacaataatttgtgaggtagacagacagaggcggcagcgaataagaatggcttcaaatcccaaacctttgacttttgaggaggtggctaatcacaacagcaaaaaggattgctggattatgatcaatggaaaggtgtatgatatcacgccatttgtggatgagcatcctggaggagatgaagttttggtgacgtcaacagggaaggatgccaccattgattttgaagatgtgggccacagtgatcttgccatagaaacgatggaaaactacttcgtcgggaaggttgacacttgcactcttccagcgaaagttaaccatagtctggcacaacctacacaagcaggtggcgctggcaatcaatcttctggatt

SEQ ID NO: 219063 - DNA, 339 bp, Glycine max
gggctttgggagttcgctaaggggtgttctattactcagaaacttgaaatgagagggcggttatttttgagagaacgtgcacttgctgtggctgcaacacaattgacttctcttaggtacttgtgggcgcaaggttatggtgtatctccatctggacgagatctattgttaatggctctacccattgggaacattgagtctactccttctagaaaggtggctacgaataccaatccatatgaaactgttgttggtgagcatcctgctcatattgctgcatattattctcttgcaggtcagagatcagatttcccagacactgtcgggcctttgtgcact

SEQ ID NO: 219064 - DNA, 565 bp, Glycine max
  unsure (1)..(565): unsure at all n locations
ctttgatgggcataatggaaacgccgctgccatttttaccagggagcatttgttaaatcatgtgctgggtgctcttcctcgagggcttggacgagatgagtggttacaagctttaccaagggcattggttgctggctttgttaagactgacaaagaatttcagagcagaggagaaacttcgggaaccacagctacattcgtaatagtggataggtggactgtgactgttgcatctgttggagattcccgttgtatactagatacccagggtggtgctgttacctccttaactgttgatcaccgacttgaggagaatattgaagagagggaacgtgtcacttctagtggaggtgaagttgggagacttagcattgttggtggggctgagattggtccccttcgttgctggccagggggtctatgcctttctaggtcaataggtgacatggatgttggggagttcatagttcccataccatatgtcatacaagtgaagctatcaaaggccggtgggaggcttatactngcctctgatggcatatgggatgctctatcctcagaaatg

SEQ ID NO: 219065 - DNA, 520 bp, Glycine max
attactcagagtgtcatttttgtgaacaccagaagaaaggttgattggctgactgacaagatgcgaagtcgagaccacacagtctcagcaacccatggagacatggaccagaataccagggacattattatgcgtgaattccgttctgggtcatcccgtgttttgataactactgatcttttggcccgtggtattgatgtccagcaagtgtctttagttataaattatgatctcccaacgcagcctgagaactatctccatcgtattggacgtagtggaaggtttggtaggaaaggtgttgccattaacttcgtcacaaaggatgatgaaaaaatgctgtttgacatccagaagttttacaatgtggtaattgaggagctgccttcaaatgttgctgaactcctttgatgagtttttttgttccatcatattagaggaaagttggtttctgaggattgcaggatcattgtgaggcaagatattcggttgtggttctctactcaacagctatatggattgc

SEQ ID NO: 219066 - DNA, 608 bp, Glycine max
  unsure (1)..(608): unsure at all n locations
ctttcttctcttcccccattttttcctctttcttcctcgcctagctagctccagaaaattaggatctgcttcagatctagtgtttccctgtcccaaatcacgagtccattgagtttgattttgtggatgaaaagcatagatagggcttttgcaaaactctccaatgtttcttgaaattatatgaccatgcgtcgaattcgtatgctgcactccttctccgtcgtgttcctctactggttctacgttttctcatgaactccctcttaaatccgtgattaattagatctatctccttagttaatccttgtcttttccaataattaattagatctgcgtctcctttttggattagtttcttttttggttctgttatcacatcaaataaaaaatctccttctcggaaatggcatcaccgatccaacaacaacaacgctcgactactacaagttctggatctgaaggaggagatccgcatatcatcgatgagaggaagcggaagaggatgctgtcgaaccgcgagtncgcgcggcgatcgcggatgatgaagcagaaacagctggaggatctgaccgatgaagttagcagattgcacagcgcgaacaagaagc

SEQ ID NO: 219067 - DNA, 504 bp, Glycine max
agaagatgagatttcttttatttaaaataaaacagccaccataaaaaatgattacaagtcgcgcaaagggacacacactgccactaccagccatcaacaccctgtacctcacattcatctctttcaggaacccaatgcattgatgaccacacgatacttttgatgcagacagataacactaatagtaatataatacacataacagagaaagttactaccgcactgaataaccctaattaaagtaaaatcctcaggaatgatcaacgcagaaacatgtttgcggtggccataatcggttgtatcggatgaggaatctgccagggcttgaggagaggatctggaatctcgggaatctcaacggataacccttcgacctcttcagcgatctcaaggatggagttcaagaagcgcaatcgatcggccagttccattgtctgtgctctcagaatgctgttcgccgcttcggtctcgacgcacgcttcttccttggcctctatgttctcc

SEQ ID NO: 219068 - DNA, 470 bp, Glycine max
ctcgaatatcttgttgtttggagcgatcctagaaaaactctgaaaacatgttggtttaccaggacctccttacaggtgatgagcttctctctgactccttccgttacaaggaaattgagaatggcacgctgtgggaagctgaggggaagtgcgtcggtaaaggagcagctgatgtacacattggtgcacacccttctgctgagggtggaggagaagatgagggagttgaagatgcagctgataaggttgctgacattgttgacacattctgactttatgagcaacccgccttcgatgagaagcaggatgctaccttcatgaagaggttgatgaagaatttgactgccaagctcgatgcacagcgacatgagtggtgtaccaagcacatggagggaggccctaattacctgctgtctaagattaaagatttccaatgttctgttggtgagagcatgggtgatgacgcttgc

SEQ ID NO: 219069 - DNA, 418 bp, Glycine max
gcgccgttgccaagcgccttcccttccccggctccggcgatggccccgatggctactggaaccgcggcatctccgcgtgcgccgtctgcgatggcgccgtgcctatctttcggaacaagccactggcggtgatcagcggaagcgactcggcgatggaagaggccaccttcctcaccaagtactggtccgaggttcacataattcaccgcagggatacattcagggcttccaagattatgcagagcaaggttatgggcaatagcatgattaaggtgatttggaactcggtggtggttgaggcttttgggggcggagataacaagagggtgcttgggggattgaaggggaagaatgaggtgactcgagaggtatccgaattgaatgtatgtgagctgattttcgcaattgggcacgagcc

SEQ ID NO: 219070 - DNA, 415 bp, Glycine max
gtcaaatacaaatttcaatttgctattacaaaacgaagaaactatgattggaattcattcaaattgaagtgcacatgattaataagattcaaccaaactagagaaggccaccacggagcctaaaggacaacatatacatagaaattttgttatatcatacacattcaaggaagagaaaatctcaatagcaagattcaactgaaactagaaatcgccaccacggagcctaagaacaaggtgaagcgtggattccttctgaatattgaaatcggggagagtgcgtccgtcttcgagctgcttcccagcgaagataagacgctgctgatccggaggaatcccttccttatcctgaatcttcgcgttcacgttatcgatcgtatcagaactctccacctccagagtaattgctttcccg

SEQ ID NO: 219071 - DNA, 504 bp, Glycine max
gtaatgccaatgaattattgtcttcaacatttgagcttaatagtaaagcctcgagtttttttcttaactttgtacttgctgtgagcatttcaaataactgttctgtgaattgttatgtagttgggccagaacacactgtcttggagtctttggaatttgatttggttacaattgaagcagccacaaacaatttttctgaagaccgcaggattggcaaagggggttacggagaagtgtacaagggaatccttcctaaccgagaggaagtagctgtaaagagattatcaacaaattctaagcaaggagcggaggaattcaaaaatgaagtgttgttaatagcaaaacttcaacacaaaaatttggtgagattagtaggattttgccaagaagacagagaaaaaatacttatttacgaatatgtgcctaacaagagccttgaccacttcttatttgattcccaaaagcacagacaattaacttggtcggagcggtttaaaatcataa

SEQ ID NO: 219072 - DNA, 533 bp, Glycine max
aaattctaaaaaatattaatattttcttgaaattccagtggaggaaaacttaagttgaaacatctaatcagtttaatttgacataacatatagtaattagtaacaaactatcgaggggaagaaagcagtcgtagacatcttattcacagaggacaaggaagaacgattggtggagtaacctgaagatgattcatgttcagctgaatgtcttctcattctgccatgcatgaaaaatgctggttctagagggaatggcatttcaagcgatgggttgctaagatatgaaacaatggttcccattgtaggcctatcatctggattttcttgtacacacaataaaccaatctgcatacacttttcaacttcgtttggaacataagactctagcagagttggatccagtaattgaaatgatgattcatccttccagtatttcatgcataactcaagaggtcatcaacacggcatgattcaaataacaagagttcttcttcccactaataatctcaagaaccatactccaaactgataca

SEQ ID NO: 219073 - DNA, 547 bp, Glycine max
gggaaaactttcagatgatgaagccttgcataggtgtgtggtagcatatacttcagatctaatctttcttcaagtgagtttaaaccccaaccgtaggaagggcaggaaggcacgtgctgtgagtctggaccactccatgtggtttcacagacctttacgagctgatgactggatactatttgtgatctttagtcctactgccaataatgcacgtggctatgtcactggccaaatgttcaatcagaagggagagctacttgtatcagtggttcaagaaggtgtaatgagggaagttatttctgcaaagtcagccatcaaatctaatttgtgaaaatctgaatatgcatagaactagtggttttctttttagttctgtcttgttttatagtgcatggtgaggacatctcttttgttttccttctatggtgaaccatataattggtggtgcccagtttatcaccatcatatagtgtatatttatttttaatcaacggttcaaaattgtgattgacaagtaattgatgtgttggatttatttacattaact

SEQ ID NO: 219074 - DNA, 488 bp, Glycine max
aaataaatccaacacatcaattacttgtcaatcacaattttgaaccgttgattaaaaataaatatacactatatgatggtgataaactgggcaccaccaattatttgggtcaccattgaaggaaaacaaaagagatgtcctcaccatgcactataaaacaagacagaactaaaaagaaaaccactagttctatgcatattcagattttcacaaattagatttgatggctgactttgcagaaataacttccctcattacaccttcttgaaccactgatacaagtagctctcccttctgattgaacatttggccagtgacatagccacgtgcattattggcagtaggactaaagatcacaaatagtatccagtcatcagctcgtaaaggtctgtgaaaccacatggagtggtccagactcacagcacgtgccttcctgccctttctacggttggggtttaaactcacttgaagaaagattagatctgaag

SEQ ID NO: 219075 - DNA, 476 bp, Glycine max
ccttggattgggggggggaattacatataggaactctaaccctatgtgtatataacattacaaggaaataaaatctgcagcgaggattgggacacggagacagcagtcttgtggcgaggaacttcctatggtaatcctttgatctacagcatgaactgcttcacaaatcaaaacagcccaaggaacactgcttatgttaatgcatagggaaaggcaaaatgctacaagtatatcttgcgaatcccttcttgagtagtgccaactggtttgttggataatctacgcttataccgtttgagaacagatgccaaattctcctttccctttgggaaggctacgtcaccagcagcggttcctgtgcgacctttccggctggagattgctatctccacatccttgaccatctcaaacaccactgatgcagttgtgcattttcccggcccggtttgacgcagggggcagcatcccattggaag

SEQ ID NO: 219076 - DNA, 502 bp, Glycine max
taccgattctgtcactgtctcttatctgcagctctacatggagactctccaggacttgctgaatccagcaaatgacattattcctatagcggaagacccaagaagcggggacgtatctatgcccggggcaactcttgtggaaatcacagaccaacatagttctttggagttgttaagagtaggtgaagctaatcgaatcgctgctaacacaaaattgaatactgaatcttgtcgcagtcatgccatgctaatggttcatattaagagatctgtcttggaaaatgaagatatgcctagtcaaaatggtgatgcctctcatttgactaaaccttcacaaccacttgactggaagagcaagtcgcatgtcgctgacttgtcaggttcagaacgcgtgcataagtcaggaagtgaagggcacatgcttgaggaagcctaatctatcaatctttcactgagttcactgagaccatgtatgactgctctagcagagaacaatgctcat

SEQ ID NO: 219077 - DNA, 420 bp, Glycine max
gtccagcatgcatcttgcttctgggattgtgaccctcggagacatggggtataagaaactgtccagatattgctatgatagcaactggttcattacaatctagtaaattctgtgtctaacggcattggatctattgatggccattcaactgacgcagatcacactggaatggttattgctaaagatctcgactcaacaaatgttactgtgctactctggacccactagagtcctatttcagcgttgtgcttctatcctagtggcaccattttaatgtcagcttccattcatggtcccaatcttaatgttttcaagataatgcctgcaagtgcgaagtggccagcatgtgttactggtacctactatgttcatttgacctggtggcaacgcggctctcagatgcagttatacaagatatca

SEQ ID NO: 219078 - DNA, 457 bp, Glycine max
gtttttaataggtagtaggtaggtgtaatcgttgtcttcctgcagatatggaagaagcgggtttaggagattgttgttcctctaatacgactattacgaggaaaagcgagaagcgaaagcagcagcaccaacaacatgagaagccatacagaggaataaggatgaggacgtggggcaagtgggcggcggagattagagaacccaacaagaggtcgaggatctggttgggttcttacgccacccccgtcgtcgccgcacgcgcctacgacaccgtcgtcttccacctccgaggcccttgcgctcgccttaacttacccgaattgctgtcccatgacgacgacgtttctacccaacaacagggcaagatgttcgccgattcaattcgcagaatagcgacccaagtcggcgccagagtctacgcgctccaaaccgagcttgagcaatcctggtcgacaca

SEQ ID NO: 219079 - DNA, 568 bp, Glycine max
  unsure (1)..(568): unsure at all n locations
ctcgagccgaatcggctcgagttgacatcatgaagttcgccatccgctacattttgagtggcaaagcatggaacaatctcctagaaaacaagactgccttcaccaccaagaaagactatggtaaagaggagagggaagctcaatgggctcttgctcagaggaccctgcatggacttcaaccaccagaaacttctaatatcttcaatgaaaagagcagttatagagaactcactgagattgctgagcaggccaagaggagagctgaagttgcaaggcttcgtgagcttcacacacttaagggacatgttgagtctgtggtgaagctgaagggtctggacattgacacaatccagcagcattacaccgtgtaatagttacacaagaacgatgtagataacaaaagggccaaaattcaatgattaaaatgaacggagagacaaggagaaggcctaactctatttatgcttactcggttgggagaggaagcctgtgatatatctctctctcagtctggttatctttccntcatgtcttttcagatgttttggtctaaattttgctttgatgc

SEQ ID NO: 219080 - DNA, 517 bp, Glycine max
ccagtagacaacttttcatagatggagagtggaaagtccctcttctcaacaatcggtttccgatcatcaaccccgctactgaagacatcatagggcatattccagccgctactaaggaagatgttgaccttgcggtggatgctgctaaaagagccttttgccataacaaaggcaaagattggtcttcagctcctggctctgttcgtgctcgctatcttcgagccatcgcttcaaagataacagagaacaaggatgaactaggaaagcctgaagcaattgattgcggaaaaccactagatgaagcactggcagacctggatgatgttattggtcgttccaactactatgccgagcttgcagaatgattggacgcaaagcatcatgctcctgtatgccttcctatggaaaccttcaagagttatgttactaaagagcccatcagagctgttgcattaattactccatggaactatcctctattgatggctacatgtataggtgctcctgctctagctgc

SEQ ID NO: 219081 - DNA, 500 bp, Glycine max
gtaaaatcaacttttcccgtcattaacaaggccatggaacaatttcagtgttatacatatgcacattattttctcgaattaagatcatcatcacaaattaatgtcccccacaacttattcatgccagattttagaacagcaattcatatcacagctttgaaggcgactgataccagccccacggttcatcagatatgtacttggtcacttgcttcacacttaaatagttctcgagtccccattctcctagttcacgaccaaaaccactacgtttaacgcctccccatggagcttgaatgaagcttggttgagcacaatttatccatacaattccagcctgaatagcctttgatatgcgctcgcatctttctagatcttttgacattacagcagaccctatagccgagtgtgtgtcatttgctagttcaatagcttcttcttcggtactgaatgttttcacacatagcacaggtccaaaaacttcttctctccaatttgca

SEQ ID NO: 219082 - DNA, 512 bp, Glycine max
  unsure (1)..(512): unsure at all n locations
aaacatcnatttctgtaaagaacttaatattgaacaacaaatttctgtataaaaatacatattccattacaaggaggtttagactgtaatattttccaacacccgcatgatccgcaagaaataatcccttatccaattctgttcaaagagactctttcattcggtcgagtgtccctttccactggagatatcaactgtggcatagtcattcctccggaaacaatgatttcaatgccttctcgaatggaaagatttggtcttataatatctttggagataaccaaaaatatatcaccaatatatagatgattcgtagggacaaaaacactacaaagctcttcatcttcattatgtttctgtagaataacagctgatgttataaagccaaatgcatattcaccaacacgcgggtgacggataattgctacctcttaaaggcagtggtattttgatctggagatattgcagcactgatctgcttggatgcagagtatatatgcctaacaaggggc

SEQ ID NO: 219083 - DNA, 554 bp, Glycine max
ctcttggtagatgataacaatgcttgcattgacctttcaatgggagaggagaaagtagctaaactgtctccattgtcaccaaagattttagtgtctattgattggtctcagaagcttcgggagaagtatgatactcatacactcgagactttgcctgaagttttaaaatatggacctgtaaccaagaaagctcgtactgaacctctctccttgttcacctgcttggaagcttttctgcgtgaagaacctctggcgcccgaagacctgtggaactgcactaaacgcacagagagacgacatgcatgcacgaagctagatttgtggagactcccataggtcttggtcattcattggaagaggttctcatacagcatgtcaatgaagcataaactggagacttttgttaactctcccattcatgattttgatttaactaatgacatagccaacaaatacaactctcggcgtcaactgtacgaactgtatgcccttacaaatcattctggccgtatggctagcggtcattacactgcacacatgtagcttttagatga

SEQ ID NO: 219084 - DNA, 494 bp, Glycine max
gtcttctcccatggccgccaccgatgaatccctccgcaaatccctcgccgagaagcacgccgcagtggaagcccaaggcaacgccgtccgcgccctcaaggccgccaaagccgccaaacccgaaatcgacgccgcaatcgaagccctaaacgcgctgaagctcgaaaaaagctccatcgagcacttgaggcaatggctgagaaagaagctttggatatgaaggctgctctggagtcaaaaggggaggtggagtttcaagtgtgtacacttgggaaaaatgtgactattaagaagagtatgctgaccattcaaaaggagataaagaaagagcaccagcgagtttttacaccatctgtgattgaaccatcatttggaattggacgtataatctattgcctctttgagcacacattctacacgaggccaagcaaagctggggatgaacagttgaatgtatttcgattcccttcactcgtagcccctataagagtaca

SEQ ID NO: 219085 - DNA, 535 bp, Glycine max
ggaatagaaaaaccattatttggatgtgatcctcatatacacggacggaagagtaaaaaacatggaagatgtaccttgttagttcgcagttctaacaaaggatcaaattcagaatctgatggctttgttccatatatgggcaagcggacagttcttgcctggttaattgactctggaacagtagagttaagccaaaaggttcagtaccgcagacggaagaaagtcatgctggaggggtggatcacaagagacggcattcactgtggctgctgtagtaagatcctcacagtttcaaagtttgagcttcatgccggtagcaaattgcctcagccatatcaaaatatatatttggaatctggagtttctcttctacagtgccagatagatgcatggaatagacaagagcatgctgaaaaaattggtttccattcagtggatattgatggaaatgatcctaatgatgatacttgtggtatatgtggagatggaagggattttaatctgttgtgatggctgtccatcaacatttcatcag

SEQ ID NO: 219086 - DNA, 600 bp, Glycine max
  unsure (1)..(600): unsure at all n locations
ggcttgtatcagagtacaacagggtacggtgagtagcagtaacgacactaaggaaagcccgtggatattgtgcagtgtcgcgcaagttgagcaagcaaagatattgctatcagttattcccatatttgctagcaccattgttttcaacacaatattagcacaactgcaaacattctcggtccaacaagggagttccatggacactcacctcaccaaatcgtttcatgtccctcctgcgtcgcttcaatccattccttacattttgctcattgttgtggtccctctctatgatagtttctttgtcccttttgctagaaaaatcaccggccatgagtccggaatttcacctttgcagcgaataggctttgggctctttctagctacattttctatgatttcagctgcccttgtggagaaaaagagaagggatgcagctgtgaacctcaacgaaactatatccattttttggattaccccacaattcttaatttttggcttgtctgagatgtttacagctgctgggctcattgagttccnctacaaacagtccttgatagggatgcagacattcttcactgccatcacatatngctcttactc

SEQ ID NO: 219087 - DNA, 553 bp, Glycine max
gtgccttatcgctgtggttatcatcttcttcttcctctttcttagatctcttctttctctacgccgcacgccgaaaccatggccggaaaaggagagggtcctgctatcggaatcgatctcggaaccacctactcttgcgtcggtgtgtggcaacatgaccgcgttgaaatcatcgccaacgaccaagggaacagaaccacgccgtcttacgtcggattcactgacaccgagcgtctcatcggtgatgcggccaagaatcaagtcgccatgaaccccatcaacaccgtcttcgatgccaagaggttgattggtcgtagattcagtgattcctctgttcagagtgatatcaaattgtggcctttcaaggtcattcctggtgctgctgacaagccaatgatcgtggttaactacaagggtgaagagaagcaatttgccgcagaagaaatctcttccatggtgctcatcaagatgcgtgagattgctgaggcttacctaggctccacagtgaaagatgctggtgtcaccgtgcctgcttacttcaatgattctcagc

SEQ ID NO: 219088 - DNA, 524 bp, Glycine max
gatgactaaagacttgatatgtcatttaacaagacagaataattcgtacaggtaaagtgcataacaattgagtataccatctaataatgaaaataacgcaaataacataatgcttaaagcaacggtcatattaaaaagggaaaaatagtttgaatcccatccaacaaaaatcatgcgattaaaatccaattaaaaaagcataaagtaaaataagtttttaaaacaggtatctggaggaaagcaactacatttagtccacttcctcaatcttggggccagcaccacttccaccagaaggaggagcagcatactcatcctctgctgcaccagcaccacccacgtctggaccagcaccaccttggtacatcttggcaatgattggattgcagatgctttccaattccttcattttgtcctcaaactcatctgcttctgcaagctggttgctgtctaaccactggattgcttgctcaattgcatcctcaatcttcttcttgtcagccgggtcaagtttctcaccaatc

SEQ ID NO: 219089 - DNA, 571 bp, Glycine max
atttattctccgaaaatggttgatttacattggaaatcaaagatgccaagttccgacatgccttccaaaactctaaaactctctctctccgacaacaagtccttaccctctttgcaactacccttccgcaccacagatatctctcacgccgcaccttctgtttgcgccacttacgactactatctccgtcttcctcaactcagaaagctttggaactcctcagattttcctaattggaacaacgaaccaatcttaaaacctatcttgcaagctctcgaaatcaccttccgctttctctccattgttctctccgatccaagaccttactccaaccacagagaatggactcgcaggatagagtctcttatcacacatcaaattgaaatcattgccatactttgtgaagatgaggaacaaaattccgacacacgtggcactgcaccaaccgctgatctcagcatgaacaatagcagcgagagcagaagctacagcgaggcaagcctgcttccgcggcttgccacgtggtacatatcccaggacgtagcgcagaggatccctctctcagttgaat

SEQ ID NO: 219090 - DNA, 495 bp, Glycine max
cccttatcatatctatttgttattatcgttattatcccacaagtatccaagaaaagtcttggcggcatccaagcttggaaaatacgtcggttcaaggaaaatctgagtcaacgagtcagcccgagtcgcaactcaacccaactcggttaccgttagcctcggagcttcccatcaccaccgccaacacctgcttatacgcgtagaagaatctcttcatcgccgcctcaatgcctgcatcgcctgcaacaagtgaaccttctcgaacgcgctcttcgaaacgtagagcttcatcgccgcctcttgaatcctcggtcctcccttcggatccacctccacctccaatatctccggcaccttgtgcctcagatctctgcacatcttcgtcagttcaaccaactccttcgacctgaagcagaacgaagccgtttcgccgccggaggatttcaccgagagctgattcttcagtctcaagaaatcgtccggatccatcatcag

SEQ ID NO: 219091 - DNA, 636 bp, Glycine max
  unsure (1)..(636): unsure at all n locations
cggctcgagaatagaaggagcatgtccatcaccaccttccttctcctcctcctcctctcgccggcgatcaccgccaccccgacggcgtacgagatgctggagagctttcactttccggcgggtattctccccaagggagtgaccggttacgagctggatccgtccagcggcaaattcagcgccgatctgaacggttcgtgcagtttctccctcgaaggttcgtaccagttgagctaccagaaaaccatcaccggctacgtatccgaaggcaggctcaccgaactccgcgggattagcgtgaagatcctcttcttctggctcaacattctcgacgtcgttcgcgtcggcgaagacctcgatttctccgtcggcgtcgcctccgctttctttcccctcgataacttcttcgtctccccgcagtgtggttgcggcttggattgcgatgattttcgaattacgaaactcgatttgggaaaccgaaaaccctccctttcctctgtgtagaaatcaagttcaattaaactctcctttatataattatgattatgatctgtggacgctngtgctctatgatatctctggctagatgttgatttattaggactaatatatattatatcgtatgacatatacaag

SEQ ID NO: 219092 - DNA, 536 bp, Glycine max
gggggggggtttttttttttttaatatgtcatactataataatatatattagtactaataaaatcgacatctaacaagagatatcatagagcacaagcgtccacagataataatcataattaaataaaggagagtttaattggaacttgatttctacacagaggaaagggagggttttcggtttcccaaatcgagtttcctaattcgaaaatcatcgcaatccaagccgcaaccacactgcggggagacgaagaagttatcgaggggaaaggaagcggaggcgacgccgacggagaaatcgaggtcttcgccgacgcgaacgacgtcgagaatgttgagccagaagaagaggatcttcacgctaatcccgcggagttcggtgagcctgccttcggatacgtagccggtgatggttttctggtagctcaactggtacgaaccttcgagggagaaactgcacgaaccgttcagatcggcgctgaatttgccgctggacggatccagctcgtaaccggtcacttccttgtggagaatac

SEQ ID NO: 219093 - DNA, 465 bp, Glycine max
aagagaatacaccaaaacccaacatgaaaacccttaacaaagcctcacttattttattccctctcttgttcctttccctattcaagcattcccatgctgcaggaatcgctatctactggggccaaaacggtggagaaagcaccttagcagaagcttgcaacactagaaactaccaatatgtgaacatagccttcttgtccacttttggcaacggccaaactccacaactcaaccttgcaggtcattgtgaccccaacaacaatggctgcactgggttgagcagtgacatcaaaacttgccaagaccttggcatcaaagtgttgctctcccttggtggtggtgctggaagctactccctcagttcagctgatgatgccactcaacttgcaaactacctctggcagaatttccttggaggtcaaaccggatcagggccattaggtaatgttatattggatggcattg

SEQ ID NO: 219094 - DNA, 545 bp, Glycine max
ttgggagaagaggtcgagtttcacagcagcaatgagcaacaaggacattgttgcacaaataatatctgctagcattgctggcgatattgttcttgctgcagcatatgcacatgagctgccacgatatggtcttgaagtagggcttacaaattatgctgcagcttattgcactggtctcctgttggcccgaagagtcctcaaaacacttgaaatggatgaggagtatgaaggaaatgttgaggctactggagaggattattccgaggaacctgctgagagcaggaggccattccgtgctctccttgatggtggtcttattaggactacaaccggcaaccgtgtgtttggtgcccttactggagctctggatggggggttggatattcctcacagtgacaagaggtttgatgggttagataaggagaagaatgagcttgatgcagaggctcatcggacatatgatgctggtggacatgttgctggctatatgaagatctcggcggatgatgaaccacagaaataccaggctcacttgagtgaataca

SEQ ID NO: 219095 - DNA, 396 bp, Glycine max
ggcccgaaaggacatggaccggatcaagggcccgtggagcccggaggaggacgaggcccttcagaagcttgtggagcggcacgggcccagaaactggtcgctcatcagcaggtccattccgggccggtctgggaagtcatgcaggcttcggtggtgcaaccagctgtcgccccatgtcgagcaccgggccttcacaccggaagaggacgagaccattattcgggcccatgcccggtttgtgtaacaagtgggccaccattgcgcgccttctctcgggccgcaccgataacgccatcaagaatcactggaactcaaccctaaaacgcaagtgcgcgtccttcatgatggcggatgatgaagccgtcgccgtgagtccgaggccgctcaagcgatcct

SEQ ID NO: 219096 - DNA, 303 bp, Glycine max
ctcgagccgatactgctcgaggacaagagttactggggaccccgactccgactaaccagccatgctcattctgtccaggacatggtcctgtcttctgacagccagattgccctatccggctcctgggacggcgagctccgcctctgggacctcgctgctggcaggtggatttcggcagattgcttaacttactatgaataggctatcatatgccgcatacagagagagaaaatatattcatggagattgtataacatcattagcagtcaatctgctgcaaaacctaatgtgagctgcacgctc

SEQ ID NO: 219097 - DNA, 469 bp, Glycine max
ctcgagccgattcggctcgaggacaagacttacggtgtcccccgccgccgcctcaccgggcattctcattttgtccaggacgtcgtcctctcttctgacggccagtttgccctatccggctcctgggacggcgagctccgcctctgggaccttgctgctggcacctccgctcgccgctttgtgggccacaccaaggacgtgctctccgtggccttttccattgacaaccgtcagatcgtgtctgcctctcgtgaccgcacgatcaagctgtggaacaccctgggagagtgtaagtacacaatccaagacggcgatgcgcattctgattgggtaagctgcgtccgtttcagccctagcacccttcagcccactattgtttctgcctcgtgggaccgcaccgctaaggtttggaacctgacaaactgcaagttgaggaacacgctcgctggacacaatggttatgtgaaca

SEQ ID NO: 219098 - DNA, 479 bp, Glycine max
ccaaaccaaaacttttgtgacttacacacaaacacgcactcccttataactatctctgtctccgagccatgtgccagttatcatctccctccactctgtgtgaaagcaatgagggccatccaaacatgcccccaaccaaaattcatgaggagcctgacatgttcgtccttttgatccccaaacccccaacaacaacaacattcttcgaacaaggccaaaataaccaaaagccccataaaacccatttttccctcgccctcgacgaagtcaaatgcgtagccaacatagcattacccatggtgctaaccgggttactactctattctcgctccgtaatctccatgctcttcctcggtcgcgtcggtgagctcgccttagctggtggctctctcgccattggattcgccaacatcacaggctattctattctctcgggcctcgccatgggcatggagcccatttgcggccaggctttcggg

SEQ ID NO: 219099 - DNA, 508 bp, Glycine max
ggaaaactgacaacccactaggttcaaacgtgactcaggtgtttgttgatcaactaccgggactaaacacgctcggcataggtttggctcgcatagattttgctccaaagggtttgaacgctccccacactcaccctcgcggcactgagatccttatagtccttgagggtactctctatgttggatttgtgacttccaatcaagatggaaatcgcctcttcaccaaagtgctgaacaagggtgatgtgtttgtgttcccaattggtctcattcatttccaattgaatgtgggatatggcaatgctgttgccattgctggtcttagcagtcaaaatccaggagctatcactattgcaaatgctttgtttaaagctaatccacctatttcttctgaggttctcaccaaagctttccaggtggacaagagcataattgattatcttcaaaagcaatcttggtacgacaacaataactaatttgggagaatggacgatcatttcgcactagc

SEQ ID NO: 219100 - DNA, 488 bp, Glycine max
tttctagcttcagcataataatatctatttttctgcatccacagtaacagtacccctctcttggggatcatttcatggaggattcttcagctggtgaagacaccaagacttgccctcgtggccactggagaccccctgggggatgaaaagcttagacaacttgttgaacaatatggtgcccaaaactggaattcaatcgctgaaaagctccaaggaagatcagggaaaagttgcagattaaggtggttcaatcagctggacccgagaatcaacagaaggccattcacggaagaggaagaagagaggctactcgcggcacatcgcattcacgggaacaagtgggcactcatagcgaggcttttcccccgtcgaaccgataatgctgtgaagaatcactggcacgttataatggcgagaaagcaaagggaacagtccaagttatgtggggagagaagcttccaagacgtttacaacgattccaacaacac

SEQ ID NO: 219101 - DNA, 492 bp, Glycine max
aaattaacaacaatcttttatttattaagatatacgagatgtccaaagaccaataagaaacaacgacacgtacgagtaaaacaaaaagaaatcatgcgcgggggaacatgcactgatggacattcaacaatcataaaattattacaaccaaggtaaagcgtgacgcacgagtagacctaattaatacaaaaggagaagtaagtaagcgaatccaagagacaaagtggtgattaaactcactcccaaacgccctacgtggcctgcagagtcctctacgttagcaaactgatgctgaacgttggtcttatcagatttcgagagctgcacctttcgttggtgtgaaggcaatatgcaagggtacataacagagtcctctttgttagagtggtcaagccctagtaaatgccctatctcgtgcattgccgcactctccaagtccaaaactgctttctcccacgacaacctaccggtttcactgggaagagcccacaa

SEQ ID NO: 219102 - DNA, 450 bp, Glycine max
gtttatcggaacgttgctataaacgttgttgttttcagataaacacgtgactcactatctatctatcaatcgatatctccgagttcagccgaaccaaactccgaagctatggcagagctccaaaccaaggttgaacctgttacggtcccggctccggtggatcccgagccaccgctagctgaggctccgccgctcgagaagaaagcggtggcggtgccaccacctgttccggctgcggcagaggaaaccaaagctcttgctattgtggagaaggagaaggagaatgagaagataccagaacctgtcaaaaagaacgcctcatgtggatcccttgatagagacattgctcttgcagacatagagaaagagaaacgattggctgatgtgaaggcttgggaagaaagtgcaaaatccagagctgagaataaagcccaaaagcagctctctgct

SEQ ID NO: 219103 - DNA, 520 bp, Glycine max
  unsure (1)..(520): unsure at all n locations
gagcgctaaaaccgaagaagaaacagaattgaattgaattgcgtttgcgccattgaaaatcggaagtaatggaattgcattgctccgtgaaaaaattggaaaacgagaaagcgtttgagtttctcggaggcgttcctcttctgcagaggcttccgagctcgtctctgaggaagatagctcaacttgtggatgtcaaacactgtgagccaggagagtatgttgttcgcgagggtgaacctggagatggcgtgtacttcatattggatggagaggctgaggttcttggatctgctagggccaatgatgaaaatcgaccagagttccaattgaaacaatatgactactttggttatggtttgtcaaacacagttcaccaggcagatgttgttgctttgtctaagctcacatgcttagtgctctcccatgtgcactcaacactgctgcagccaaagtctatctggagagcagaaaattctctccagacatgctcacctgtggagaatatatngcatttggagcc

SEQ ID NO: 219104 - DNA, 593 bp, Glycine max
caactagggagcttgctcagcaaattgaaaaggttatgcgagcacttggagattatcttggtgtgaaggtgcacgcatgtgtgggaggtaccagtgttcgtgaagaccaacgcattctatcgagtggtgttcatgttgttgttggtactcctggtcgtgtatttgatatgctgcgcagacagtcacttcggccagactacatcaagatgtttgtattggatgaggctgatgaaatgctttcccgtggttttaaagatcagatctatgatatattccagttgcttccatctaagattcaagtgggagttttctctgctacaatgcctcctgaggcacttgagatcacaaggaagttcatgaacaaacctgtgaggatccttgtgaagcgtgatgagctcaccttggagggtatcaagcaatttcatgtcaatgttgagaaagaggaatggaagcttgacacactatgtgatctttatgagacattggcaattactcagagtgtcatttttgtgaacaccagaagataggttgattggctgactgacaagatgcgaagccgagaccacacagtctcagcaacccatggagacatg

SEQ ID NO: 219105 - DNA, 370 bp, Glycine max
gacctctgtccttaaagcttggtggcaatcacattccaagtggccttaccccacagaggaggataaggcacggttggtgcaggaaacgggtttgcagctaaagcagatcaataattggtttatcaatcaaaggaagaggaactggcatagcaacccctcaacttctactgccttgaagagcaagcgcaaaaggtcatagtggtgctgatcatcacatgtaaatggaggaaaactcaagaaccaatccctgactctgtactctgttagtttgtctctgcggtcaatcatgggtgcatggcaggggattcatgtaaggccatcataaaaaaaaaggtcacatttaacttcccgttattggaccggccctaca

SEQ ID NO: 219106 - DNA, 501 bp, Glycine max
acgagggacaccctgacaagctctgtgaccaaatctctgatgctgtcctcgacgcttgcctcgaacaggacccagacagcaaggttgcctgcgaaacatgcaccaaaaccaacttggtcatggtcttcggagaaatcacgaccaaggccaatgttgactacgagaagatagtgcgtgacacctgcaggaacatcggctttgtctcaaacgatgtgggactggatgccgacaactgcaaggtcctcgtcaacattgagcagcagagccctgatattgctcagggtgtacacggccacctcaccaaaaaacctgaagaaattggtgctggtgaccagggtcacatgtttggctatgccactgatgaaacccctgaattgatgccattgagccatgttcttgcaacaaaactcggtgctcgtctaccgaggttcgcaagaacggtacctgcccttggctgaggcctgatgggaagaacccagtgaccgttgagtattacaatga

SEQ ID NO: 219107 - DNA, 421 bp, Glycine max
gttgatcatgacattcttcttttacttcttcttgcccgaaacaaagggcattccaattgaagaaatggggcaggtttggcaggcacaccccttctggtccagattcgtggagcatgatgattatggcaatggtgttgagatgggaaagggagctattaaagaagtgtagttagccctcgtcttggtttatttttctcaatgactagcgttttagcttatgttggtaaatgatactattggtttcaatgcattggattgttcctaacaattaaaaaggggtatttttgttatgtatcccctgcttcttcatatgaagcaagtttacaggatacttttgtatattaatccaattgcacaaattgcgatgcctttgaaaacatcatgttggatgcacactcatacctcatagacatgcgatttc

SEQ ID NO: 219108 - DNA, 403 bp, Glycine max
cggctcgagctcgagccgcaagctctctccaaagcctcctcttccatctcttcctccatcaaccgtttcgtttccaaaaaccacatctctcaggttgcgggtgctgatgctttgaaacgactgcgtctcacgacggatttggaggatttacagctagcggatttgatcattgaggcgattgtggaatccgaagatgtgaaaaagagtttgtctgcgcaactcgataggattgccaagagttctgcgattttggcgtccaacaccagttccatttccgtcacgcgtctagccacctctaccagcaggccacgtcaggtgataggaatgcattttatgaacccacctcctgtgatgaaactgattgagattgtacgaggtgcagacacttctgaggagacattcg

SEQ ID NO: 219109 - DNA, 503 bp, Glycine max
caaaaggccatataatttttttttatttgaaataatgtccgggatcatccacaagattgaggagaccctccatgtgggagggcacaagaaagaggagcacaaaggagaacaccatggtgagcacaaaggtgaacacaaaggagaacaccatggcgagcacaaaggtgaacacataggagaacaacaccatggggagcacaaggagggacttgtggataagatcaaggacaagatccatggtgatggccatgacaagggtgagaaaaagaagaagatggacaagaagaagaaggagcatggacatgaccatcatgggcatagcagcagcagtgacagagactagatcttatatgttaagcaggtgtaccgcacgatggtagtgtggagccacaatccctcctcctgctttatgatataatacaaataaaatagcgactccggaaatcatgtctgcagctgctctttttatttatgtgataaatgtgaaacgctttgggctggct

SEQ ID NO: 219110 - DNA, 397 bp, Glycine max
gggtactaatatgaacagaatctcctctcaacacctttgccttgctgcagttcgcaactgcaactgcactcaaatataaatatatatacatatatatatatatatatatatatgtattacttcatgggcacacatagttaagtttattaattactaggtagctggttttgaatagggtagctggcagttatagttgttgtcccagatatggaagaagcaggtttaggagattgttgttcctcgaattcgacgattacgaggaagagcgataagcgaaagcagcaacaccaacaacaagagatgccatacagaggaataaggatgaggaagtggggcaagtgggtggcggagattagaagacccaataagcgctcgaggatctggctgggttcttacg

SEQ ID NO: 219111 - DNA, 604 bp, Glycine max
attaagcaccacaccactctccaatatccccaacatggctcaagtgggttctctatcttccgaaatggagacactgaatcatgtcctagccctagtggaggcattccgagcatttgacgcggacaacgatggccgaatcacgcaggcagagctaggaggaatcttggggtcactcgggtacaaccctagcgagcaagaagttagggcaatgattgaacacggcgacaagaacaaagacgggttgttgagcatccacgagttcttggagatgaacaccaaggatttggagggtggaaatctcgccaacaccctcagcaccgcgtttgaggctttggatgaagacgggaacgagattttaaccggggaagagcttcatgaggtcatgcaaaacttgggtttggacttgtctcttgagatctgtgtgcatcttgttacttctcttgatgcggatggagatggggctgtgagcttggatgaattcaggctcatagtcgattccctaatctaattgtatcttgtggtgcatatggggggtgatcaataatcatatcatatatatgtatacctatagttaggggttgagaaaataatgtatcttcataaa

SEQ ID NO: 219112 - DNA, 547 bp, Glycine max
caattattctttcgcaccttcgaaaatcaattttctgtcttctctgcgtcttcttcctctatcaatcgttttccatggctcgtaccaagcaaaccgctcgcaaatccaccggtggaaaggctcctaggaagcaactcgccaccaaggctgcaaggaaatctgcaccgacaaccggtggagtcaagaagcctcatcgctatcgccctggaactgttgctcttcgtgagatccgaaaataccaaaagagcacagagcttctgatccgcaagctccccttccagcgacttgttcgtgaaattgcgcaagacttcaagaccgatttgaggttccagagtcacgctgttcttgcgcttcaggaagctgcggaggcttacttggtgggtttgtttgaggacaccaacttgtgtgcgattcacgccaagagggtgaccatcatgccaaaggacattcaactcgcacgccgcatccgtggagaacgtgcttaggctaataataagagtaataacgtagttgctgctgctttttttcggtttgcaatacatttctt

SEQ ID NO: 219113 - DNA, 598 bp, Glycine max
gaaaatggggtctctaatgttctctcttactctcactcttgtattggcattagtgtctctgagcttgccatctcaaacctcagctgacaagtacgagtattcatctcctccaccaccggagaagccttacaactaccactctccaccaccaccaccacccaagaagccatacaaatacccttctgctccaccacctgtttataagtacaagtccccaccaccaccgtacaaatattgatgtgctccaccaccacctaaaaagccctacaagtacccatcacccccacctccagtttacaaatacaaatcaccaccaccaccggtttacaagtacaagtgcccaccaccaccaccacctaagaagccctacaaatacccatctcctccaccaccggtttacaagtacaagtcacctcctcctccttacaagtacccttctgcaccaccaccaccatacaagtacccatctactccaccacccccagcttattactacagatcacctgcaccaccacctaagaaaccatacatgtatgcatctacacctgcaccacactatgtctatgcatcaccacctcccccagtccacaactagata

SEQ ID NO: 219114 - DNA, 533 bp, Glycine max
  unsure (1)..(533): unsure at all n locations
aagagaatacaccaaaacccaacatgaaaacccttaacaaagcctcacttattttattccctctcttgttcctttccctattcaagcattcccatgctgcaggaatcgctatctactggggccaaaacggtggagaaagcaccttatcagaagcttgcaacactagaaactaccaatatgtgaacatagccttcttgtccacttttggcaacggccaaactccacaactcaaccttgcaggtcattgtgaccccacacaacaatggctgcactgggttgagcagtgacatcaaaacttgccaagaccttggcatcaaagtgttgctctcccttggtggtcggtgctggaagctactccctcagttcagctgatgatgccactcaacttgcaaactacctctggcagaatttgcttggaggtcanaccggatcacggccattaggtaatgttatattggatggcattgactttgacattgaatctggtgggagtgaccattatgatgacctaggcagggcattaaactagctca

SEQ ID NO: 219115 - DNA, 497 bp, Glycine max
ggccttcgggaaagtgggccgccgagattcgcgatcgtcatcgttcggcccgggtctggctcggtacattcgaaaccgccgaggacgccgcccgggcctatgacaaggcctcgttcgagttacgcggcccacgggccaagctcaatttccccttggtcgacgagtcgctcactctccagccggagatggctgcaacagaagagcagattaacaacgaggataatctcaatcaaggcatgggaatggactcgcacgaattctgggacaggatcaacgaagctgattttcatccgttcatgatgatgatggattttactggagattcttcagactctgctgccactgggtacactctcaggtcctgaaattgatattcaattaaaccaaataattagttttgttaatgcgcgtttaacaattgtacaactcggctaagcgtatttgttaaattagcatttgctagctccactgcaatacattacactacatgtatttct

SEQ ID NO: 219116 - DNA, 554 bp, Glycine max
  unsure (1)..(554): unsure at all n locations
cactggattccgacccgcagctcccgcagatcaaaatccaccacccctcctccccgcgccatcaccacccctcctccgccgccacccccacccccaccgccggcgcacgccgcaaaatcggcgtggccgtcgacctctccgacgagagcgcctacgcggtccgctgggccgtgcagcactacatccgccccggggacgccgtgatcctgctccacgtcagccctaccaacgtcctcttcggcgccgactggggctcgatcgacctctccatcaacactgaccccaactccgacgaagacgccgtcagcgccgtcaacagtaacgaccacgccaacgccggcaacagcaaacgcaagctcgaggacgacttcgacgccttcacggcgtcgaaggccgcggatctcgcgaagccgttgagagaatcgcaaattccgttcaagatccatattgtgcaggatcacgacatgaaggagaggctgtgcttggaggtggagaggctcgggctgagcgcggcgattatggngagtagagggtttggcgctgtgaggcgtggc

SEQ ID NO: 219117 - DNA, 592 bp, Glycine max
ctcgagccgattcggctcgaggacaagacttacggtgtcccccgccgccgcctcaccggccattctcattttgtccaggacgtcgtcctctcttctgacggccagtttgccctatccggctcctgggacggcgagctccgcctctgggaccttgctgctggcacctccgctcgccgctttgtgggccacaccaaggacgtgctctccgtggccttttccattgacaaccgtcagatcgtgtctgcctctcgtgaccgcacgatcaagctgtggaacaccctgggagagtgtaagtacacaatccaagacggcgatgcgcattctgattgggtaagctgcgtccgtttcagccctagcacccttcagcccactattgtttctgcctcgtgggaccgcaccgttaaggtttggaacctgacaaactgcatgttgaggaacacgcttgctggacacaatggttatgtgaacactgttgctgtttcccctgatggctctctgtgtgccagtggtggcaaagatggggttattcttctgtgggatttggctgagggtaagcgctttactccctcgatgctggttctatcatacatgc

SEQ ID NO: 219118 - DNA, 525 bp, Glycine max
tttttcccccatctgtagtttgtggggctagaagtttctatttctgggcattcagaagattgcaggaaaagttatcagctttatttccatattgaacagagttgttgatctagaatggagatcactagaataggccaatggttaagtcttctgatatgtgtactactattactgcagacagaaggggttcctgtgggaatcacttttgttgaaaatgcagtggcaaaaggggctgtttgtttggatgggagtcctccagcttaccacttccacaagggatctggagcagggattaacaactggatagttcactttgagggaggaggatggtgcaacaacgttactacttgcctttcccgcagggacactcgattaggttcatctaagaaaatggatacatcactttccttttctgggtttttcagtaacagtaaaaagttcaatccagatttctatgattggaacagaatcaacgctacgtattgtgatgggtcatcatatactggtgatgttgaagctgttgat

SEQ ID NO: 219119 - DNA, 441 bp, Glycine max
gtcattccgatatgcttaataacccgatttttcactctctcttcccttcctctggagccgggggtgttgattactgctaagaacaggctgatgagagactgcaagaggatgaaacaagacccttgtgcaggtatcagtggtgccctcccggataacaacctactgctgctgaatgctgtgatatttggtcctgatgatactccatggaatgccggctcggacctgcaagccctgcaatatactgaggactatgccgataaaccaccatctgtacgatgtgtgtctcccatgtctcatccagatatttctgctgaaggaagcatccgatcggatatatcacaaaacttgcgaagctctatttatgacgtagctgctatactcacatataatcaggcatagctttgtgatcccaacccaaattctactgcatactctgaagca

SEQ ID NO: 219120 - DNA, 509 bp, Glycine max
ggcggtccaaacactcttctctgcagcttttgcctacaactcccttcaccatggctgaacaaaccgagaaagcttttctgaagcaaccaaaagtgtttctcagcacaaagaagactgggaagggaaagagacctggacaaggtgggaaccgcttttggaagtccattgggcttggatttaagactcccagggaagccatcgtaggaacctatattgacaagaagtgccccttcactggcaatgtttccatccgtggccgcatcttggctggaacatgtcacagtgctaagatgaacaggactattattgttagaaggaattatctccatttcatcaagaagtaccagaggtacgagaagaggcactcaaatattcctgctcatatatcacctgccttccgtgtgaaggaaggggatcacgtcattattggtcaatgcaggcctctctctaagacagtgaggttcaatgtcttgaaagtgatcccagctggatcttctagtggtgcaaag

SEQ ID NO: 219121 - DNA, 508 bp, Glycine max
ggccaaatcaatcaaactctttgagttgaacacaggggccaagattccttctgttgggttagggacttggcaagctgaacctggtgttgtagctgtagctctcaccacaaacattcaggttggatacaagcatattgactgtgctagtgcgcctaataatcaagcacagattggctctgctcttaagaagctctacgacgatggcgtggcgaagcgcgaggacttatggatcacttccaaactctggtgttcatatcatgcaccatatgacttgccccatgcactggctccaacattacaggaattgctactagagtatcttgacctctatctgatccactgggcagtccgcatgaaaagtggacctttcggactcaataacgaatatgttgtgcaacctgacattcccaatacatggagaggcgtggaggcactctatgactcagacaaggctagagccataggagtgagcaatttctcttcaaagaagcttcaagatttgttagat

SEQ ID NO: 219122 - DNA, 523 bp, Glycine max
  unsure (1)..(523): unsure at all n locations
agcacttgcatttggtgacttgttgaggaaactgtggtcttcagggcgaactgctattgcgccccgtgcattcaagagcaaattggcccgatttgctccacaattcagtggctataaccagcatgattctcaggaattgcttgcttttttattggatggattgcatgaagatttgaatcgtgtcaaacaaaagccttacattgaaatgaaggactcggatggtaggccagatgaggaagttgcatctgagtgctggaaaaatcatatggctcgaaatgattcattgattgttgatgtatgccacggtcaatacaagtcaacattggtttgtccagtatgtggcaaaatttcaatcactttcgatccattcatgtacttatcattaccactgccttccactgtcactcgcacaatgacagtaactgtcttttattctgatgggagtggtcttnccatgccatacactgtgacagatctgaagcatgtagctgagagatctttgccagcatangcactgatgctg

SEQ ID NO: 219123 - DNA, 421 bp, Glycine max
tggacattgagaggccaacctacaccaaccttaatcgtttagtttctcaggtgatatcatcactgactgcttccctgaggtttgatggagccttgaatgttgatgtcaatgaattccagaccaaccttgtgccataccccaggattcattttatgctttcatcttatgctcctgtaatttcagccgagaaggctcaccatgagcagctatcagttggtgaaatcaccaacagtgcattcgagccatcatctatgatggccaagtgtgatccccgccatggcaaatacatggcgtgctgtctcatgtacagaggtgacgtagtgcctaaagatgttaatgcagctgttggaattatcaagaccaagcgcactattcaatttgttgactggtgccccaccgggttcaagtgtggaatcaatta

SEQ ID NO: 219124 - DNA, 407 bp, Glycine max
ctccgtaccagtttcaccgcacgaatatcttgttgtttggagcgatccgagaaaaactctgtaaacatgttggtttaccaggacctgcttacaggtgatgagcttttctctgactccttccgcctcaaggaaattgaaaaatggagcgctgagggaagtcgaagggaagtgggttgctgaaggaacacctgatgtagacatggtcgcagacccttctgttgatggtggtggacctaatgagggagccgctgatgcagctgtgaatgttgttgacattgaggacacagctatactctaggagcgaccccaaattgataagaagcagtgtgatgcctatatcactagggtgatcagctaattggactctccgagcgtcgcgcataacaacgagagatgttcaaaatgca

SEQ ID NO: 219125 - DNA, 525 bp, Glycine max
tctcactgaagcagctgctgcagaagagtatcccgatttttccaaaatgtcgatgtcgaagagttccaagatgcttcagtacatcaactaccgtatgcgtgtcaccattcaggacggtcgtcaactcgtcggaaaattcatggccttcgaccgccacatgaacctcgtcctcggcgattgcgaggagttccgcaaacttcctccggccaagggcaagaaaccagccgaaggaggcgaccgcgaggaccgccgcacgctcggcctcgtcctcctccgcggcgaggaggtcatctccatgaccgtcgagggccctcctccgccggaagagtcccgctccaaggcagtcggcgccgccgctctcgccggccctggtattggccgagccgccggaagaggtatcccgcccgctcccgtcgtccaggctcagccaggccttgccggccctgtccgcggtatgggcggccccgcccctggcatgatgcagccgcagatctcgcgccccgccagctcaacgcaccgcggtgt

SEQ ID NO: 219126 - DNA, 432 bp, Glycine max
attacacaatccatggggaaaaacaaaaaagaacaccctgttcaaaaggacccaatacaattatatcttctgagccaattccactacttctttcaccaccaacgccaaaaaaaaacttttcttatttgcaacaaagcacttatcacaaatctcccctttcccaatacgatccgatatcacatatatctggctgaccttcacaaaagcattggaaaatttcttaaaaaacacttcctggtctgaagcgaactggttcacgatttccttggttttggggctgccctccatgtcctggtcagaagtgaacactccttggcggctcacgagggggctgtaatacatgttgtctaacttcacgggggtttctacttccaaattaaccgatgtgggggactcggcattgggacacctacctatcaaattgttgctgaa

SEQ ID NO: 219127 - DNA, 452 bp, Glycine max
ggatgccaaagctggtgattgatggtccttatggagctccagcccaagactacaaaaactacgaagtaatccttcttgtgggactaggaattggtgccacccctttgattagtatactcaaagatgtgctaaacaacatgaaacaacagaaagacatagaagaagcgatggtagaaagtggagttaagaacaacaagaggaaaccttttgccaccaaccgtgcctatttctactgggttactcgtgaacaaggttccttcgaatggttcaagggtgtgatggatgatgttgccgagtatgacaaggatggaataattgaacttcataactattgcacaagtgtgtatgaggaaggagatgctcgttctgctttgatcactatgcctcaatcgctgcaccatgccaaaagtggtgtggatatagtttcagggacaagggtcaagacacatttt

SEQ ID NO: 219128 - DNA, 394 bp, Glycine max
cacaactcattctcaaatattcattttgtcaccaatcacatctcatttttctaaattcttgtttacacactctcattaatttattacattccatattgtaattaattcttcgtacgtatccatgaagagacagagagatttcaaggggtttgagagcatagatttggcaaattgtctaatgatgctctctcatccccaacaaaatgagaaactacttcaaaaaaaaattgaggctgtggaatttgagtgcaagacatgcaaccgcaaattctcttcctttcaagcattgggtggccatagggctagccacataaggtcgaaacttgagggagatcatgaactcaaagcacatgctatatctctaagtttggcaaacatacccaaaatgcacgag

SEQ ID NO: 219129 - DNA, 469 bp, Glycine max
gtcaatacgacagccagacactgacgatgttcacgtcgtcgctgtatctcgccgcgttgctgtcgtcgttggttgcctccaccgtcacacgtaggttcggccgaaaactctccatgcttttcggaggcttgcttttcctcgtcggtgcccttatcaacggttttgcccaacacgtgtggatgctcatcgtgggtcggatcttgctcgggttcggcatcgggtttgccaatcagtctgtgccactctacctatctgaaatggctccatacaaatatagaggagcattgaacattggctttcaattgtcaatcacagttggtatcctcgcggccaatgtgtcgaactacttctctgctaaaatccatggtggctggggatggagattgagtttgggaggtgctatggtccctgcccttataatcacaataggatcactagtccttccggacactcccaattccatgattga

SEQ ID NO: 219130 - DNA, 498 bp, Glycine max
tgaaaccattcaaagatgcagctcatatattggcagagaagaaggattggcccccattatatgacgttcaggttctgaataacaataaggtacctgttgctgcagctgtttactatgaagacttgtacgtgaattttaagctggccatggaaacagcttctcaaatagcagggattaggccatggataactaatgagttcatgcattctggcttgcgtgatgatgggagcaaagctattgatcatttgttggggatgctaaatggaaagaaacctctattttgatcaccattacatgcatgtttggaaatatcgtgaaaaataagaaataaggtctagggtatagaagctataacttttagtttctctgtaaacgtggaaaactacatctggattatagaaccaaacatgttatacatctctaatctgcctccttagcccttgaattgtgaacttctattttcttcaaagttgggggaatcttccattcttcatgttt

SEQ ID NO: 219131 - DNA, 459 bp, Glycine max
  unsure (1)..(459): unsure at all n locations
tacaacactactttcagttttttctgtctctgaatctcaaactcttcggaaagattaacattaatggctccaagggatatcaatagatccaacgttgttgttgttgccggagtatccaacccgacccataaagagatccgttaccgcggcgtgaggaagcggccgtggggccgctacgccgccgagatccgcgacccatgcaagaagacacgcgtgtggctaggaacgtttgacacggctgatgatgcggcgcgtgcgtatgacacggcggcgcgtgagttccgcggcacgaaggcgaagaccaatttccccaccacgcggcggctgcgcgtagtcccagccagagcagcacgctggactcctcgtctgcgccgccgctggaccttactcttgccgccccactcaccgncgcgggcgcgttggttttcccggtggcgcgtcccgtggtgttcttcgacg

SEQ ID NO: 219132 - DNA, 481 bp, Glycine max
ctctctactactgctagctgtgacttgttttgagttcaatcaaatcgcattggtatctgaaatcaggaaagatggttagcgtagctgagatcaggcaggcacaaagggcagatggcccaacaaccatccttgccattggaactgctaacccaccagaccgtgttgatcagagcacctatcctgattactacttcaaaatcagcagcagcgaccacatgaccgagctcaaagagaaatttcttcgcgtgtgtgaccagttttttgtccagaccgagatatatgtacctaaacgaaaagatcttgaaagagaatccaaacatgtgtgcttacatggcaccttctttgaatgctaggcaagacatggcggtggtagaggtaccaaagctagggaaagaggctgcagtaaaggccataaaggagtggggccagccaaagtcaaagattacccacttgatcttctgcaccactagcggtgtggaca

SEQ ID NO: 219133 - DNA, 462 bp, Glycine max
ttcctacaatcattccaaatgtgcccttccggtcgcaccctcctcccttcctccgtgtccgatttccgaccggcattcgacgtcctcgatgccgaccgcgacggctaaatcagccgcgacgacctccgcgccttgtacgccggagtcggcggcggaggagatgacgtgatcggcgcaatgatgacagtggctgacaccaataaggacgggttcgtggagtacgaggagttctagcgcgtggtctcggcggagagaaagcccgcggggtactgtggggccatggaggacgtgttcagggtcatggacaaggacggcgacggcaagctcagccaccatgatctgaagacttacatggcctgcgctggttttacggccaccgacaacgacatcaacgccatgatccgattcagcggcggcgaccaacacggcggcgttacggtcgatggtttgctacgtatattg

SEQ ID NO: 219134 - DNA, 425 bp, Glycine max
ctccattccgtagtatccctctgttcgacccttttacttagcattccctggttccggtagtggctccctttttattttctgcattctgtctggtgttacttagatcactgtcccgcaccaaatctggtgcacggtgagaaggtagcgatcattaattttgtatgaatcttccatgtgagcgggacgcgtggggataccagagtcttttccggaagcaagagagggtattatccgtttccaataaatctatcactggattcttttgagggggaaaccggggccattgccttcgaggtttataaagaccccaccgttacaaccctatgaacagaaccctaaccctatgtggctgttcgtgattttctaattcaattcatatcgccagcgacgctagagatgcctgacctggctggttgagtggatgc

SEQ ID NO: 219135 - DNA, 466 bp, Glycine max
gtgttgtttgaggttgttgtcgttggttgtgttgtgttgtgttgtgtgggttttatgagagtgagtctcacatggggagggcctttgttcttgaattggatggcagatcttacggatgcaaattctgcaacacccctcttgccctcgctgatcacattctctctcggaatttcaactgcagtcacgggagagcctaccttttcagcaaagtggtgaacgtaatacttgggcctcaggtggagagaatgatgatatctggactgcacactgttgaagacatattttgttgcaactgtggaaaccttcttggatggacatatgttctggcacatgacaagaatgaaatatacaacgaacgtaagtttgtgcttgagaggcggacgatagttgacagtgaagaggaggaattgtattctgatgcacaagctggctctcatactggctctccagctggctcaagtgacac

SEQ ID NO: 219136 - DNA, 578 bp, Glycine max
gacacgtatcaacttcaataatcgcatcgcagaagcagtttccggtgcatctcatcgtctccgaaaatgaacgacgcagatgtctcgaagcaaatccagcagatggtgcggttcatccgccaggaagctgaggaaaaggccaacgagatctctgtctccgccgaagaggaattcaatatcgagaagctgcagttggtcgaagccgacaagaagaagatcaggcaagaatacgaacgcaaagagcgccaagttgaaattcgcaagaagattgagtactcaatgcagctgaatgcttctcggattaaagttcttcaagctcaagatgacgtgatcagttccatgaaagaagctgcatccaaggaacttttgactgtgagtcatcatcatgatgatcatgtgtacagaaaccttctgaaagatctcattgttcagcgtttgctaagactgaaagaaccttctgtcttattgagatgtcggaaagatgacctgcacttggcagagaacgtgctggattcagctgctcaggagtatgctgagaaagcaaatgtcgatcccccagagatcatttgtgacaacca

SEQ ID NO: 219137 - DNA, 393 bp, Glycine max
agaaatgagagggcgtaggcttgattccgtacgaaaaccgcgtgacgcttacgacgcttgcctagctctgaagcaccttcagggccaccacctcaaatattttcagtcgtacacaggggcccaaattccttctgttgggttagggactcggcacgccgaccctggctgggagagtgcaactctcaccacagacactcaagttggatacaggcatcatagctgcgctagagcagctaagactcatcagagatgggcactgctgctagatgccgtttgatgaggacgatgcgcaacacaaggactgatcgatcactctccaactctgaggtaagagcatgcgccacaatacgtgcctgccgcatcggacaaaacattgccggaagtgcaaccgga

SEQ ID NO: 219138 - DNA, 370 bp, Glycine max
caataatcctttggcaccttcaaacatgttttatatgacgtctctgagtcttcttgctctatggaccgtgttccatggctcgttccatgcaaaccgctcgcatatccaccggtggaaaggctcctaggaagcaactcgccaccaaggctgcaaggatatctgctccgaccaccggcggagatactaggcctcatcgctatcgccctggaactggtgctcttcgtgagatccgaaaataccaaaagagcacagtgcttctgatccgcaagctccccttccagcgtcttgttcgtgaaagtgcgcacgacttcaagaccgatttgaggctccagagtcacgctgttcttgcgcttcaggaagctgcggaggc

SEQ ID NO: 219139 - DNA, 505 bp, Glycine max
tgcaaatattcatggctttctttattctcttcttcctcttccttcttcttgcttcatctgccagtgcttgtgatcgctgcttgtatcaatccaaggcttcctatttctccaaagcttctgctctctcatctggggcatgtgggtatggctctttggcactagacatatgtggtggacaccttgcagctggtgtggattctctcttcaaaaatggagcacgttgcggagcctgctttcaaataagatgcaagaacccaactctatgtagcatagaaggcaccaaagtggtattgactgatcttaatcacaacaatcaaactgattttgtgctaagcagcagagcctttgcgggcatggctcaaaagggtatgggccaacaaatactgaagcttggcattgctgaaattgaatacaagagagtaccttgtgattacaaaaatcagaatttggccgttcgagttgaagaatcaagcaagaagcctgattactcggcattaaatttttg

SEQ ID NO: 219140 - DNA, 577 bp, Glycine max
agagagaaagccacatgcactgttgacaccatatccacttcaaggccatatcaacccattgttcagattagcaaagctgcttcatctgagaggctttcacataacctttgtccacactgaatacaacattaaacgcttgctcaactcaaggggtcctaaagcccttgatggccttcaagactttcattttgagaccataccagatagtcttccccccacatatggtgatggtgatgtcactgaagacgcagtgtctcttgctaaatcagtgagagagaagatgctcgtaccctttcgcgatcttcttgctcgtcttcaggattcttccactgctggccttgtacctccagttacttgcttggtttctgattgttccatgctttttactatacaagctgctgaagaactttcacttcctattgctctattttcaccggtcagtgcttgtgccttaatgtctattttgcactaccgttctctttttgtaagggtctcataccactcaaagaaagagttatttgacaacgggtatttggcccaaaagtggactggataccaggaatgacaactttaactg

SEQ ID NO: 219141 - DNA, 574 bp, Glycine max
tactactgctagctgtgacttgttttgagttcaatcaaatcgcattggtatctgaaatcaggaaagatggttagcgtagctgagatcaggcaggcacaaagggcagaaggcccagcaaccatccttgccattggaactgcaaacccaccaaaccgtgttgatcagagcacctatcctgattactacttcagaatcaccaacagtgaccacatgaccgagctcaaagagaaatttcagcgcatgtgtgacaagtctatgatcaagacgagatatatgtacctaaacgaagagatcttgaaagagaatccaaacatgtgtgcttacatggcaccttctttggatgctaggcaagacatggtggtggtagaggtaccaaagctagggaaagaggctgcagtaaaggccataaaggagtggggccagccaaagtcaaagattacccacttgatcttctgcaccactagcggtgtggacatgcctggtgctgattaccaactcaccagacaattgggccttcgcccttatgtgaagaggtacatgatgtaccaacaggtttgcttgaggtggcacggtt

SEQ ID NO: 219142 - DNA, 464 bp, Glycine max
aggctaaaaagccaccaaacacgtattatgattttaatataaacgtacacaaacaaactctaaacgagttttttttttttttgggggttgttgttgttacaaaccccaagcaagtttgaaaaagtggtacacaataatgaaataatatatgaggcatctcagatggccacactatgcaaaacaacagtttcaatggtaagtccaggtccaaaaccgaacaacacaccccattcaagtccttcacctgtggttttatgtccattttcagcagatttcctcctcatctcatccaagatgaaaagaacacaagcacttgacatgttcccatattcactaagcacatctttagtggccttcatttttcaggtttgagacccaactttgctcacttgggctaaaatcgcagcccaccagggtgtgcatccaaaaatggagttgtatcagagatgttcaatgggtgaaag

SEQ ID NO: 219143 - DNA, 489 bp, Glycine max
gggaactaagataattgatgagtctcatgatcaggacaccacagatttacacaaatgtgtggcatacatacgtgacctcaccccaaatgttgatggatcagaactatgcattcttgttgctggagcacttggtgggagattcgaccatgagattggaaatattaatgtgctgtgccgattttccaacacacgaattatacttctatctgatgattggctcattcatcttcttccaaagaatcattggcatcaaatctttattgaatcttctgttgagggtccgcattgtggactcattcccattgggatgccttctggaagctctacatccacaggactcaaatgggatctcaatgacacagcgatgagttttggaggtttagtaagtacatccaatattgtgaaaggggaaatagttacagtacagtctgattcagatcttctttggactatttctattaagaagctcgaggttttacatggtgcata

SEQ ID NO: 219144 - DNA, 494 bp, Glycine max
ccgaagaatgagaaatatgtgcctttgtttaccggcggtgatgattcggagatagttgaccggagaaacgggctgcgcaaacagattgaagataggttggttgcagctgctgccagtggcaaggatttagaagagactggcagtgaggatgatggtctcttggatctgagtgatgatgatttttttcttgccgggagttctagtgacgaagcagatgcggatgatgaatggacagacaaaagtgcaagagagcaggcttctagtgcttctgggaaaggtgtgtctggcatgtccagtgacgaaaaaaatcagaggcagatttctgcttgagctttgatgccttctcctcgtgcttcaaacatgaagttgtcaagatttgggtcttgttctggccataattcatctgcgcagagatctgagatttccacatcgagcaacacatcaaatagcaaaagcagctcagacttcaaagtcagaccctcatgatcagggac

SEQ ID NO: 219145 - DNA, 455 bp, Glycine max
ctcgagccgaatcggctcgagactttctatatttatcgtccattctctctcactccataattgcttcttgctttggtcgatccattcggtgatcactgatcagtggtttggtgttgttgatagagaaaatgcattccagccctttgcttcttgaggaacccattaggatggcatccatccttgagccatccaagcctactttttttccggctatgacgaaaattgttggcacacttggtccaaagtcacgatcagttgatataatttcccattgccttgatgcaggaatgtctgtggcacggtttgacttttcatggggtgatccagaataccatcaagagacattggaaaatctgagagttgctatcaaaagtaccaagaaactctgtgcggctatgctagatactgtgggtccagaattacagattgagaatatgactgatcaccccatcacc

SEQ ID NO: 219146 - DNA, 540 bp, Glycine max
ctcgagccgaatcggctcgagtgctgatgctcatctttgtgtgtggagtatagatacatgggagaaaagaaaagcaattccaatacaactacccgcaggaaagtcacctgttggtgatacacgcgtacaggtccattccgatcaacttcgcttattggtagttcatgagactcaattggcaatatatgatgcctctaagatggaacgcattcggcagtgggttccccaagatgttctgtctgcccccatatcatatgcagcttattcctgcaacagtcagttaatatatgctacattttgtgatgccaacattggtgtttttgatgctgatagctcgaggctcagatgtccgattgctccatcaatatgcttgtcaccggcagctttaagtggaagtcaaggcgtgtatcctcttgtgggtgctgctcatcctctataacccaaccagtttgcggttgggttgacggatggatcttgtcaagtgatagaaccgaacgagtcatagggtaagtggggaacctgcccaccaacgacaatgga

SEQ ID NO: 219147 - DNA, 282 bp, Glycine max
ctcgagccgaatcggctcgagaccaaatttttgagcccaagaggccctcagacaagccactcaggcttccattgcaggatgtctacaaaatcggcggtattggtaccgtgccagtgggacgtgttgagactggtgtcgtgaagcccggtatggtggcgacttttggtcccactgggctgacaactgaggtttagtctgttgagatgcaccatgaggctctcacataggctcttccaggcgacaatgtcggctctaacgtgaagaatgttgcagatacggatc

SEQ ID NO: 219148 - DNA, 523 bp, Glycine max
cagaaagttgcatgtacagcccaggctaccgaattgcaccagagatgatcaaacccaagccaaccgttttgattggatcatctggagcagggaagacatttactaaggaggtggttgaaaccatggcatccttgaatgagaaaccacttattcttgctctctccaacccaacttcacaatctgagtgcacagctgaagaagcttatacatggagcaagggtaaagcaatctttgctagtggaagcccatttgatcctgttgaatatgaaggaaaactttttgttcctggacaggctaacaatgcttacatatttcctggttttggcttgggtttgatcatctctggtgcaattcgtgtgcgtgatgagatgctcttggcagcctctgaagctttggctgcacaagtatcacaggaaaactatgataagggactgatttaccctccattctcaaacatcagaaagatatcagcccacattgctgctaaagtcgcggctaggcatatgatcctggtctggcttct

SEQ ID NO: 219149 - DNA, 293 bp, Glycine max
gatggcgtcatcaagtgttagggaggacaaataccgcttttttatgcgcgaagacagtgagaagaacatcgaatggagatatggtgctcctccaaattatgacgttgtcaacaaattatttgatgaaggcagaaccaaggtatggcctccgggttcacttgaagaaaaggtgcagactttagtgaagaattgggagatggaaatgttccacaaggaggatttcaaggataacagatcagtggacccagagaaatacactttcagcctaaacggaagggaacctattagtttgg

SEQ ID NO: 219150 - DNA, 553 bp, Glycine max
  unsure (1)..(553): unsure at all n locations
agacggtccagtgatcaatagctggtttcctttgtttcgtttgtttctctttactttttttgttgtcttccttttgatcccttttctctctttttctccttcttccacaccctcttctcctcatcatctcatcatcacatcatgtattctaaaggcaaaggttcactagctgaacgtaaacgtgcagcgaaaaaagaagaagtcaaagaagatggatctacagaaaagaaaacaacatctgcatttttgcgtattcaaaaagatttggctgatcttgaattacctgataatgttgaattaaaaaaggaggatgattataatttctcatttgttcttaatatcaatgaaggttattggaaaggtggtatatttgaatttaaatttgcatttccacaaacatatccatttgcaggtcccaaagtgacatgtatggataaagtctatcatcccaacattgatctggaaggagctggttgtgtgtcagtgttacgtccatggaagcccacctattctacccaaattgntctctctggncttctcttcttattctctc

SEQ ID NO: 219151 - DNA, 399 bp, Glycine max
caaaaataccctcataggaaaagtacgcgtgcgtatctccacgctgcatacagggagagtgtataaaaacacttacccgttgttggtgctgagtccggtttcggggctgaagaaaatgggggagattgagatagcaataaggttgcgtcggacgactcaacggctagatttcctccacgtgtactcgcagccgatgctgccgttgatgcaccatgtcaagccgatgggggtggtgcaataagaggcgctgcggaacaccaccgtgaggatggtggcgggacacctgttcagtgcagaaccgccgctgaggaaggaggtggtgatctacatgctggacgcctacttacacaacttctgcatgatgaaagtgcgcgccaactggtataagatcatgaacgt

SEQ ID NO: 219152 - DNA, 382 bp, Glycine max
gtggcatgttctccaaaacttggaaacctaagaagacaggcacgataactggccctgttgtttttggagaggatccagtgagaaagaagggcaaccacttggagcaaagagagaagttaggattgacttctgcccctaaagggcagtcaaagtcacgtacaacactttctgagccatcaaatgtgcttgaaaaagttgaggttgaaaaagggaagcaagatgatgcactgtcagatttaagtgatctcttgggagaactgaaaggcatggccattgacatgggatctgaaattgggagccaaaaccaagccttggatggttttgacaatgatatggagaagttgatcgttcgcgtgaatggtgctaatcaacgtggacgtcg

SEQ ID NO: 219153 - DNA, 437 bp, Glycine max
  unsure (1)..(437): unsure at all n locations
cataaaccctagctagctaagtagcgttcgagatggagatggagaataatggattcctgaatgtacaggcaggggcaccagaaatgtccggcgagggatttccatatgcaccagaaaattggccggaagatggtgacatttgnggatggagaactgggcggagaattgtcgcagatcgttcccactatcaggatcggtatgtttatctgccgaatcgactaatccgcgccttgaaagaggaaaaagaaaaagagaacccacgggtcaggggctgactcacgctctaattctagctgaatccgcaggcaacaacacatctttgctagcaagcttgctgatgaacgttgcatcaagacatattttcctgatgctgatattgatgccttttttgcttcctttctctggaagagacccgctctacgatccaatggcaatgc

SEQ ID NO: 219154 - DNA, 480 bp, Glycine max
ccaccacacacttcctacacatttgtactctttatcctatccaattccggtttctcaatagtgaacaatggccactacaacacaactgaacttaccccctggattcagattccattcaacagatgaacaactcgccatcccctacctttgtctgagacgcacctcacaacatataggggctcccatgaccacactaatggatctgtccaagcacaacccttggtacctttcaggaatggctatggacggagagaaagagtggtctattcccacgcctgggaaccgcctgtactccaacggatgaaggccgaaccgttccgcgggaaccgtgtactggaaggcaaccggagcggatctaccagtctgataacacgaaccggttgggatcaagaaagcgttggataatgacgctggaaaagcgcccatgggagagaaaactaactggatcatgcacgagtatcgtcttgcagacgcggatcg

SEQ ID NO: 219155 - DNA, 528 bp, Glycine max
aaaagaacttgcccataagagaacatttttattcttagtataataacaagcaagacaacaataaaatttgttactctagaacttgacgaagaaagtcatagacatttcatttgggaacaaaatgcagagaacaataactgactgaccctgtccttgtcctgcatcctgtgctaaactaaaaacagcgaaaacagaataataaaaaaaaaaaaaaaaattgaacacctcaacaacgaccacgacgaacaacaagaagaagacacaagcaacagaaacaaagggaatgactactgcgagacagatttcaagcacatatataagaccactgctcttcatcatcttcaccagcaggaacagcagcagcagcagcaacatcatcagccacaaaggaagacagaggcagcagataaggcattctgtcaaaggtgcgagcaaggccagcggccagaaccgctgctgcgttgtcgtggctgacatactcctgcgcgcggtgcttgagtgtctcgaacatgagctcgggctggtgct

SEQ ID NO: 219156 - DNA, 473 bp, Glycine max
cattcttacaaataaaaataaatgaattgaattgaatcaccactgtcaaaagtatactacaatctaaaagctaaaactagcgaataaggcccaagtactatatatgtacaagaacaaattaatcccaaataacttaaaaaaatatataaaaaaacactgaataatttttttggatctatggatcagtattgagggatttcaatcttgggtatggtcaaattgaaacgggacttcttggatggatgaggactggtaacctcgtcatcgacgaagaaccttgctgagaagtccggaaaagccgggaggttgagatcgaaatcgcggtggcttcctgtgtgagtggaccccactccctcagaggcggttacggcgctgttaccgccttcgtagtgacaacgtttgtgtcctccaaggcctgtcctgtcgaaaacgttttgtggcagatggagcactcgggggtcctaccaccaccg

SEQ ID NO: 219157 - DNA, 416 bp, Glycine max
aaaagaacttgtccatgcgagaacatttttattctaagtataataataacaagcaaggcaacaataaaatttgttaccctagaacttgacgacgaaagtcatagacatttcatttgggaacaaaatgcagagaacaataactgactgaccctgtctttatcctgcattgcatccaggacaaaactaaaaacagcgaaaacggaataataataaaaaaaaaattgaagacctcaacgaccacgacgatcaacaagaagaagaagaacaaccaagcaagcaacagaaacaaagggaatgatgactagtgcgagactatttgaattgaagcacatccattaataagaccactgctcccccagatcttgagcagcaggaacagcagcggcaacatcgtcaggcacaaaggaagacagaga

SEQ ID NO: 219158 - DNA, 460 bp, Glycine max
cagattcgcacgcattgcttcgcctcacaacagcagctgcagcagcaatggctcccaaacgaggtggaaaggctccggctcttgccgctaataagaagcctgagaaggtcacgaatccgatgttcgagaagcgtccgaggcagatcggaatcggaggggcgttgcctccgaagagagactggactaggttcgtgaagtggccaaagaatgatcatattcacaggaagaagaggattctgaatctgaggttgaaggttgccccagctttgaaccagtttaccaaaactcttgacaaaaacctagcaacaagtctgctcaagttgcttctgaagtacaggccctaggacaaagctgtaaagaaggagaggctcttgacaagggctcaagcagaggctgaaggctaaactgttgaagcttagaagcctattgttgtgaagtatggtctcaccatgttacctac

SEQ ID NO: 219159 - DNA, 408 bp, Glycine max
caaaaacattcccctgctacttcatcttcttcttgttcttcttcatcaccggtggatatgatcattcttgcttgcaccttcttgtttgaagatcgaaattgggtctctgaaaaaatgggagttccagctagagaccctctgtgccaactgaggccgtctactggctttcggacttaccccaccggcgcggagctcctcgttcagcatctatagccggaagagggggtggccaccatttcatctcttccaatcatggttgaaattgaatagagcagatgctacccatgtgttcttacatgtaggcgattttcggagagaaagagtggtgctctttcagccctagagacaggaaataccctagcgggtcccgacccaacacatataccggttcgggttatcggaaagtca

SEQ ID NO: 219160 - DNA, 447 bp, Glycine max
ctcgagccgaatcggctcgagcggctcgtgcggctcgaggttgaccagaaaaaccctagccaccgtgcttcgcaacgacgcgaagcccataatcggagtaggcataacagcagcggctactaattcacgcgggttgcacgtgtacacgctgcccgatctggattacgactatggcgcactggagccagccatcagcggcgacatcatgcagctgcaccaccagaagcaccaccagacttacatcaccaactacaacatggccctcgagcagctccaagacgccatcgccaagaaagattcctccgccgtcgttaagctccagggcgccatcaagttcaacggcggaggtcatgtcaaccattctattttctggaataatctagctgctgttcgtgaggagggtggtgaaccacccaagggttcactgggatgggctattgacacaca

SEQ ID NO: 219161 - DNA, 437 bp, Glycine max
ctcgagcctgttcggcatcgtgctccatcctaatcacttctagcttgaacaacgcggagaggataaggctaacctccttgttcccattagagaaccttgtgacctatgggtcacctagacacttccctgcgatgatcatagggacgatgcgccctgctactatcttgacagcgaggatgactgggaacctgagcatttgggcttggtcatggatgccgcggactgcagagatcataccactgaacatatacagagacatgtcgcgacgtagcgtgaatttgcttggcatgcaaaaggacatggacaacaaaacccttgaactatgctttgagatagatgagaacaaagaggattgcgacaagtgctatgaagcttactacaagaacatggagctatgtctccctgaggcatcacatatcaaggggatgattgctgaa

SEQ ID NO: 219162 - DNA, 316 bp, Glycine max
gttaaattaataaatcttttgacacaattaaatcatatacatatcaaaaaacaaaaacattatcaaaaaaaaagatatacataaaaaacataaaataatataaataaaaaactaaaaaacaaaaacaacatataataaataaaaaaaaatagcaaaccactaaaaattaaaaaaacccacaacaaaaacccaattaaaaaaaaaaatagtaaaaacacttacacccaaaaaaaaaagaaaaacaaatactagaagaaaaaatactcaaagaaaaaaaaaatatggaggaaaaatggaatatacaaaacaaactgta

SEQ ID NO: 219163 - DNA, 416 bp, Glycine max
agcaaaattaaaaatataattgataagatcaaaatccaaattacaccaagttcatagtaataataataactaataacaataagttaaacccaagataataataattatgaaaaaaaaaaaagagagtaccggaaagaaacaaggtggtggttgttatagttttggaatttcccaatgaaacgctcagttatggtcgtccttgtcatggggctttctgcagaggatcatgtgcatcggcgagaaaatgccagagtcaccccctctggtcaaatagtcagcggtcttgaagagcatctcatgaacatcgacggtccccttgggcgcgattcccaaagcggcgagaacagtgaccacaatatggttccgccagtaggcgatcctacccatcttcaatcggttccaccatggctgagccg

SEQ ID NO: 219164 - DNA, 458 bp, Glycine max
  unsure (1)..(458): unsure at all n locations
gaagacgaacttcccttaaaaggtatttcactctgtacattttcacagtcgaaaatctattggctataataattgcaacaaccgtggcaccaaaaaaaaattactcaatgagaaaaaaatgtacaatattgaatattttcattgattcatttatagttattccactggcactggctctgcaaaagccaacaattttttagctgcgactgcaccgtttccctgaagtccttcactttcaccaaacaaaaatgggtcgaacaaatccccattcccgaaccgggtcctgacccgacccgaacggtctttaaaagataacaaaccgggccgaacccgacgcccttcccctgaaccaccaccccccacgccctcgtcgtcctctctccgncgncatcctccgccgtgtattcgtccaactcctccacgaatatgactccctccggcaccggcgtttaaccgga

SEQ ID NO: 219165 - DNA, 410 bp, Glycine max
atgaaaaagataaaacaaataacttagaatacttgtaactgagtataacaatttcttcaaaattcaagaaactacaaaattttgaacatgtctttgacaacaaacattgcacacaagaaaaactaggcactcagctactatgaattacttctccagtgtataacttttcaagcaacagggacctcaatatcattagcagccaaaactggagcaggctggatgtattcttcttcctcctttggagaatggattgtgacaagatcagggaggggagttttaggaccctgtttccccttaggatcccaatcaagcatgatcttcaccttaatgccaagaacaccctgtctcaagagcacatgtctcacttgagagtcaatgtaatctttgacaggttgcccaaaagaaatcat

SEQ ID NO: 219166 - DNA, 484 bp, Glycine max
gacgagagcagagcagtgctcaggagcacaagagcatgagggggctttgtggacttggagtggaattgactgcctgcgtcctcttcgctcttcatcctttcgatccatacctcattcctaatcctacaatccaaccacctcagtctcaccctcacatatacgcatatatgaacgcgtatcgcacctcctatgggttcaaagcgcatcctaaaggagctcagggacttgcagaaagacccaccaacttctcgcagcgctggtccaaaactgaggacaggtcccattggcaggcaacaatactgggtcctgctgctaggcctcatgctgaaggtgtattcctagtcactattcacttgcctccggagtatcctttcaagcctactccagttgggcttaggactacaggtgattcacccgcacatcaatagccatggtcgcattggccctgatatcctgaatgagcatgggagccctgcactcacca

SEQ ID NO: 219167 - DNA, 471 bp, Glycine max
cagagagagagagatccatcgatcaattaatttccaatggccgatcagctcaccgacgaacagatctctgagttcaaggaagcctttagcctcttcgacaaggacggcgatggttgtattaccaccaaggaacttgggactgtgatgcagtcgcttgggcacaacccaactgaggctgagctgcacgacatgataaatgaggttgatgctgatgggaatggtaccattgatttccgagaattcctcaatctcatggcgcgcaagatgaatgacactgattcagaggaagagctgcaggaggctttccctgtgcttgacacggatcagaatggctttatctctgccgcatagctacgtcacgttatgaccaatctcggcgagaagctgaccgatgggaagtcactagatgattctgacgctgacgtgatggtgatgggcagatcaactacgacgagtgtggcaaactcatga

SEQ ID NO: 219168 - DNA, 476 bp, Glycine max
tttctcgcttcagcataataatattatcgcctgcatccacagtaacagtacccctctcttcttcatcatttcatggaggattcttcagctggtgaagacaccaagacttgccctcgtggccactggagacccgctgaggatgaaaagcttagacaacttgttgaacaatatggtgcccaaaactggaattcaatcgctgaaaagctccaaggaagatcagggaaaagttgcagattaaggtggttcaatcagctggacccgagaatcaacagaaggccattcacggaagaggaagaagagaggctactcgcggcacatcgcattcacgggaacaagtgggcactcatagcgaggcttttccccggtcgaaccgataatgctgtgaagaatcactggcacgttataatggcgagaaagcaaagggaacagtccaagttatgtgggaagagaagcttcaaagacgtttacaacgattc

SEQ ID NO: 219169 - DNA, 272 bp, Glycine max
tttctcgcttcagcataataatattatcgtctgcatccacagtaacagtacccctctcttctggatcatttcatggaggattcttcagctggtgaagacaccaagacttgccctcgtggccactggagacccgcttgggatgaaaagcttagacaacttgttgaacaatatggtgcccaaaactggaattcaatcgctgaaaagctccaaggaagatcagggaaaagtcgcagattcaggtgggtcaatcagctggacccgagaatcaacag

SEQ ID NO: 219170 - DNA, 378 bp, Glycine max
tttgtttctactgctgatcctgagaaagaacctcctcttgtcactgcaaacaccatcttgtctattttagctgctgattacccagttgagaagctttcttgttatgtttctgatgatggaggtgcacttctaactcttgaggcaatggccgaagctgccagcttctgctaacatgtgggttcccttctgtcgtaaacatgatatagagcccaggaatcctgaatgatacttcaacttaaaaagagacccttacaaaacaaagtgaagcctgattttgtcaaggaatcgtagactggtaaagcgtgagtatgacgaattccaggttaggatcaatagtctgcctgaatctatccgccgcggtcagatgcctatcatgca

SEQ ID NO: 219171 - DNA, 369 bp, Glycine max
atataaaatatggtaaggaaatattaagaaaattggaccatccaaaaggaatatataagaaaattgaccacgcgggagagatggtaaacatcatcgtcgtcgtcgtcgtcgtcaacctcctctttacaaggaaaattttcgctgcaggctcaacctaatcgagtgtcttaaaactacatgagacaaattatacttttgtttcaaggtgggggatggaaaggtttcaaaaacaatggaattgacatgacagatgagttaaagactaacaaaaaagagaaggcactggtaaaggaacgggcttttccttgttctgccattgtagaaaattgatggacgatgctcttttttctattaaatcctttagatctt

SEQ ID NO: 219172 - DNA, 448 bp, Glycine max
ccggctcgagcgcaaacctcacggcgctctttgacagatcgtgcttcgcgccgatatccccaaggcccccaatgtccgccacgtgtcactccagacaggcggtgggcactacatcggacccttcgaattcatcgggcagatcgaatctcatgaacctcccttcacaggaggatatgccgcgcctggatgcagcccaattcttattgccccggacaggatcttctttctgaagaaacccgatggaaagagggtcagacctggtcagatcacagaccccaagtaatctttgggttttcgccttacagtttaatgagcatgattgggacgctcagcgtgtacgccgcaatttgcaagcacgagggtgttccgctgagattccccggcacgagaggcgcgtgggagagctattcttgtgcctccgatgctgatgagcttgccgagcagcaca

SEQ ID NO: 219173 - DNA, 497 bp, Glycine max
ataacataggcctcctcctttgtttttccacatcacatcacatcgcatagagagagagatccatcgatcaattaatttccaatggccgatcagctcaccgacgaacagatctctgagttcaaggaagcctttagcctcttcgacaaggacggcgatggttgcattaccaccatggaacttgggactgtgatgcggtcgcttgggcagaacccaactgaggctgagctgcaggacatgataaatgaggctgatgctgatgggaatggtaccattgatttcccagaattcctcaatctcatggcgcgcaggatgaaagacactgattcagaggaagagctgaaggaggctttccgtgtgtttgacacggatcagaatggtttcatctctgccgcagagctccggcacgtaatgaccaatctcggtgagaagctgaccgataggaaggtgatgagatgattcgtgaggcttgacgtgctggcgatgggcatatcaactac

SEQ ID NO: 219174 - DNA, 435 bp, Glycine max
aggagacaacacaaagtgcaaaccaacagtaattaaacactactaatagctagctagggtgagaaaatgggtgaagctaaggaaatatggactgcaccaataacccctagaacagcttcagtagtaggaacacctgctgtgacatctgcacctgtgtcatgtacaccctctcaggttgactcaccatatctaacatagtcacctctacatcaccctgaggatggagatgcaccacttcgtacaacatctaagactccaaagactccacgaacccctagaacccctagaaccccacttagaatctctaattcgactccaaagctcatgacccctatgggaagccctatgagaaaagctctgaggctcaccaagcttgatcctcaagatgcattgattacaatatgctgcctaaggaatggtaacaagtactatgct

SEQ ID NO: 219175 - DNA, 327 bp, Glycine max
cttccatcttgctaggatatgatattgcagtgatgagtgcagcacccatatacataaaaagggacccgaaaggctcgaacgagcaactcgagatcctgctcgggatcatcaaactatactctctgatatgctgaggtgtcgacggcagaacctccgactggataggtcgccgatacactattgatgtcgccggcgccatcttctttgacggagcactcctcatggatttctcccccaattattccttactcatgtgcggccgtgtcgacagtggcattggcatctgctacaccctcatgatagtctccgcatacaccgccgaggtct

SEQ ID NO: 219176 - DNA, 532 bp, Glycine max
aagaaaaataatattcatcaatgattagaacgctgtacactgggaagaagaaacacatgagcccaaccatttaaaatttctttcccctttgcaacatttctcccagggaacaaacagaccaacaccaaccaagcataaggccccagctatcatcaatttccagctggataaataaataaacccaacatttttgtttgcaacaaaagttaaatttattaatagtagtaataatagtaacatattaaatactataatcactagccaatcaagacacacccctcttcgagtgagtgatgaaccttgcaatttgcatcaacctttttcaagtttcaaccccaattaaccgaaattggggatccaaccaggtgcttcccatcggaccattctacccttccaaaagcgttttctgtatgctgtggcgaacccgatgacgaaaacgtgacggtgaacgttttcttctcgttctccttgaaacttaacacttgcggttctaccgagattttaacgacgcagtgtctgacgtcacggaagc

SEQ ID NO: 219177 - DNA, 486 bp, Glycine max
ccaaacactcaaatgctaagagtgaatctgcaagtgaaacaaattatacaagtagtatacactagcatctatggttgatatgatcaaacattgaatttaaccatgtggcagtgcaaaactaaattgtcaaatagttattacaagttcacaaaattctttgatctatgttgcttcttcacttaaaatcccaaattcccaatcgaaggatatttaacctttttcttattcatgacatggaatgctctcaaccaaaaccagaaggcaaaaaaaatcaaaagttctagataagctctttagctgcagcaacaacagcttgcttagtgataccaaattctttgaatattcttccagctggagcactagctccaaaacgatcaatgcctattgcttttacctttgctcaacaattttctcccacccaaatgttgaacctgcctcaatgctaactctggctgaaacagcagcagggaaaacactctccttgta

SEQ ID NO: 219178 - DNA, 388 bp, Glycine max
tttctttcttttttttgaaaattaaattactttgatacatcagaaccaatggctcttttaaacaatacaaattatctcaaggccttataaaggaatgtttagaaacaaaagcaagccatatactcactgctttgtgagtatttatatatatctctctctcttccctactcaatgtacaaaatgcttagtgctttgttaacctctcaaggacttcaaagtagtcaggaaatgtcttcctggtgcaaccaggatccttgatggttactggaacatccccacaagcagcaagagagaatgccatggccattctgtggtcatcatatgtgtctatagctgtgacattcaatttctcaggtggagtaatcacacaagaattaggacccttttt

SEQ ID NO: 219179 - DNA, 434 bp, Glycine max
aaaaatgaccaagttctatctttatgaaatttaatacaaggtacaaatggaagatgacttttcaccaatagatcgtacaacactagtctaacagttacaaaaccacttcagcatatttcagatgtgcatgatcacccaaaagattgcttattttgaagcatgccaaagtttttacagtcgcacaaaactttctcactttgtgtagagaacattcttccatgggtgacggtaaagaggttgcttcaatcgctttaggttaaaggtgtgcccaatgagaccaatggagcaggctagcacaaagaggccatttagatagtcaatctccacaatttcatcaatctcattgttaggtgaacatttcactaccaggaagaagatccatgaaaagagatctcattgcaccatctacgtttagaacttaattatttgccttt

SEQ ID NO: 219180 - DNA, 493 bp, Glycine max
  unsure (1)..(493): unsure at all n locations
gaaaattaagcaaataacaagaaagaaacaatgaacgacttgttctccggttccttctcccgcttccgcagcgaccagtcctccccggaccgccaccacgacatcgagatgggcgccaccgcctccggcggcggtcgcggcggcgaggtgaaccttgacaagttcttcgaggacgtggaaggcgtgaaggaggaactaaaggagttggaaggtttggctcagagtctaaggagcagccacgagcagagcaagacgctgcacaacgcgaaggcggtgagggacctgcgcgcgcgcatggacggcgacgtctcggcggcgctgaagaaggcgaagctgatcaagctcaagctcgaggcgctggagcggtccaacgccgcgaaccggaacatgcctgggtgtggaccgggttcgtcctcggaccggacccggcnctccgtggtcaacgggctcaagaagaagctgaaggatgctatggagaggtttaacgagattc

SEQ ID NO: 219181 - DNA, 457 bp, Glycine max
aatgttggacaacagtgcgatttctgcctcaggtgcaaagttggcatttaagtccaatgaagagatagcttttcaagtaaggactgttcctcttgatgaagtgattccgaaatcagagcgtgtgcttctgcttaaaatagatgttcagggctgggaatatcacgttcttaaaggagcatcaaagttgctctcaaggaaaggaagccaagccccttatctcatatacgaagaagatgagcgcttgttacgggccagtaatagcagtgcaaaagagattcgagacttcctacgtagtgtgggttatcatgattgcacccaacatggcacagatgcacactgcgtcaagaaagattgatcataattttggttgttagattctgctgctcctagatggaaaaccaagttattgccagctgactatgtcagctaattcttgagtggtggattgactgctgat

SEQ ID NO: 219182 - DNA, 483 bp, Glycine max
gtgcagaaaaaacaaatcagcactatattttctgtcatcactataaaaaaattcaaaatttgtcaggacaaaattgatccaaattcaactcaaaagtgaaaatcgtattccataaggagcaagcttacagggattgacaagctgttatcaacaaactgccatggaactcctgaagagtatacagaagaaaccattcctacctgcaatgtttcttacatattcttcttggaacctgaatgtgacaatttcctgtccaaggattgtagttggttgcggaggttctggttttcctcaagtaagcgatcatactcaagaaggaacccctcagattgttttctcagagcagctacattggcttcagcagcatctacatcttttgtttttgactgtagttcagattcaaggcggctaagttcaactttcaatctggctctttcttcctccacagccttaatttcttccgaatttgcaactttttcatct

SEQ ID NO: 219183 - DNA, 540 bp, Glycine max
ccaccacacaattcctacacatttctactctttagtttctccaattttctttctcaattctcaacaatggccactacaacacaacttcacttaccccctggattcagattccatccaacagatgaagaactcgtcatccactacctttgtcgcaaatgcgcttcgcaacatatcgcggttcccataatcgccgaaattgatctgtacaagtacgacccttgggaccttccaggaatggctttgtacggagagaaagagtggtattttttcacgccgagggaccgcaagtacccgaacggttcgcggccgaaccggtccgcgggaaccgggtactggaaggcaaccggagcggataaaccagttggtaaaccgaaaccggttgggatcaagaaagcgttggttctttacgctggaaaagcgcccaagggagagaaaactaactggatcatgcacgagtatcgtcttgcagacgtggatcgttccgttcgcaaaaagaccagctaaggctgatgactgggtgctgtgcctaattacaacaag

SEQ ID NO: 219184 - DNA, 471 bp, Glycine max
tcagtgcctccttctggtctccctggtgttggtctcctacgctgcccggtcggaatcagcgctgggcggctggagccccatcaaggacgtaaacgacagccacgtggcggagatcggcaactacgcgctgagcgagtacgacaagcgttctggggccaagctcacccttgtcaaggtcgacaagggcgagactcaggtcgtttccggcaccaactaccgtctcgtcctcaaagccaaggatggatccgccacggccagctacgaagccatcgcctgggagaagccttggctccatttcatgaatctcacttgcttcaaaccccttcattaatgttagacccatacttttcttcactttgtgtcttatcatatgtcatgtgtgagctattatggttttctgaataaggctcctgtcatgtgctaatgaatctcaaatcgtatgttggattaaaaaaaaagacaacaagaaaa

SEQ ID NO: 219185 - DNA, 473 bp, Glycine max
ctcgagccgtggaaaattctcatgccctatggctcccatggcatctatccagagcctcgtgcacttaccacttctgagatatctgaaatagagcatcattatcgccaagcagctattaatgcaattcgagcaggttttgatggaatcgagattcatggagcacatgggtatgtcattgatcaatgcttaaaggatgcaatcaatgatagaacagatgaatacggtggaccactagaaaaccggtgcagggtcttaatggaggtcgacgaagctggggtctgtgccattggcgcgggcagagtgggtatcacaatttcaccagcaattgatttcaatgactgccttgagtctgacccagttgggcttagctcaacagtgattgaaagactcatcaatttgcagaaacaagtgggcacaagactcgcttatattcatgttactcagccttgattcacactaatggcgcaaccgtg

SEQ ID NO: 219186 - DNA, 430 bp, Glycine max
ccactcccttgggcttctccgccaactacatcatcggcagcttcatcgccttgatccgagactccgaactctcccacaaaatcttctccaatgtcaggcccgacgccttccgcttagtgggccaccccttccggaaaaaaactattcggcgaacacatcctcatgtacatgactggccaagaccacaaaaatctgcgccgtcggatcagcccccaatttcacccctaaagccctctccacctacacctcgctccagctgattatgatcctcaaccacctcaagtcatgggtcagtctggcccaagcccaaggctactattttattacgctccgcatgctgactcgtgacatgaacctcgagacctcccagaccgtctgcgtgggcccgtacttgggctctcaaggccgagagcgatctgggagggattac

SEQ ID NO: 219187 - DNA, 538 bp, Glycine max
aatcttgttaacaatatattgtcaaatttgatcatacaattggggatccgtctaaacatgaaaataggttttttagagccatacaatcaaatatactacaaattgaatgataacgtgtatacactattataaaagagccaaggcaggccaaatttaatttattgccttccccttcaagctaacttccgagtaaccttttttaagttgccactaaaaagttttcatattctgcttatatcacggccaaacacaagagtagtagcccagttgatagctacatagaatctgttcctccagctgatgactcgagttagatatgccgagcgccaaataaaccaactgacaaaacctgccagggataaccctttgccctccttgttctgtctgaggtccactagagccttgtaactccctatagatgccatgcttcccatgtgcttgtaaacaaactgatccccaaagtctacatcttttgcactgtttgcacggcctccattggctttacctattttggttagtaagattcctaaatatttac

SEQ ID NO: 219188 - DNA, 563 bp, Glycine max
aacaacatatagcatttgttgaaatgaacattgtcactttgtaattataattattacaatgacacatgacatccggaacagtcccttgaacataaaatcacaagcacacctcagtcaaagaaagattcttttcgggggtaagaaaatcgggggggtaatacttgttatagagatatgagaaaactgttattacaaacaaagaagaacataaatatttccaggatattcattcctcaagcaatcgaattacttggtattttgtgctaacttcacttatgcaacctctttctgcagattcttccaccgtttcttttctcaaaataaagaaccaaaaaaatcagagaatgataaaagcctcattgttaaaatgctcatatatataatcagaaggctgcccatcctgaagctgtggtcgacccggaggtggtcgttgagggaagatttttctgaagttgagagaaatctgataaagcgtcggttgaatgtttcacactttcatatgtccctttatgacctgtagcgcaaccggtggaaagcaatcgagcaggaacgggatcatttgg

SEQ ID NO: 219189 - DNA, 550 bp, Glycine max
gttgaaaaggtttgttttcttaaacaatgttaaaaataaaaaaattacaatatttaaagttcaagcaaatattctactaaatataaactaatcataaaattaaaatttgtcatgttctattctataccctgtggcatgcaccaatggttcatctggaaaaacaaacttaatccctgataaatttgcccttgagcatcgatactatgcccattacattaacttctgtaagtgatgtaacaaaattacagtatcttgtcagccatgaaacaacactcacctcacatgtacccattccatcgcctctttcagtctaaggcctgccccgcctcaggctgcatgatggacatttatattgctttatgctctcagcctttgcaggggtaatcttaacacactttccatggaaccacctatcacatatgtcacagcaaatccaaaactcatcagcgttgtaatttccgccgcagcttccacaaagtggttcattatgctcatcttcatcctcctcataaccctgatctacaaactttgggttgctttaacttgccca

SEQ ID NO: 219190 - DNA, 496 bp, Glycine max
  unsure (1)..(496): unsure at all n locations
ccggcgttgattaatccgtgtccgcctccggcgccggcggtggaggagaagaaggttgttccgccgaaggggaagcactaccgcggcgtgcggcagcggccgtggggaaagttcgcggcggagatcccggacccggcgaagaacggngctagggtttggctggggacgtttgagacggcggaggacgcggcgttggcgtacgaccgcgccgcctaccggatgcgagggtcgagggcgctgctgaatttttcgttgagggttaactccggcgagccagatccggtgagggtgacgtcgaagcggtcgtcttcgccggaaagtatggcggcggcggcgccgaagagaaagaaagttatggtggtggggacggtgcaagagcaagtggggagtcaagtggtggagtgtacacgtggcgaacagctattggttagctgagagagactctaaattggtattgtgtttattaaataccaaaaatacaatactcttttgtaat

SEQ ID NO: 219191 - DNA, 540 bp, Glycine max
  unsure (1)..(540): unsure at all n locations
aagagtctcaccaatgactgggaagagcatttggctgtcaagcacttctcagttgagggacagttggagtttaaggctatcctctttgttcctaagagggcaccttttgacctctttgacacaagggagaagcctaacaatattaagctgtatgtccggcgtgtctttatcatggacaactgtgaggagttgattcctgagtatttgggctttgtcaagggtattgtggattccgaagatctaccactcaacatttcaagagaaatgttgcaacagaacaagatcttgaaggtcatcagaaagaacttggttaagaagtgccttgagctcttctttgaaattgcagagaacaaggaggattacaacaagttctatgaggctttctccaagaacttgaagctaggtatccatgaggattcacagaacaagggaaagattgctgaattgctcaggtaccactccacaagagtggtgatgaaatgacaagcctcaggattatgtgaccaggatgaaagagggtanagtgacatctactacatc

SEQ ID NO: 219192 - DNA, 482 bp, Glycine max
  unsure (1)..(482): unsure at all n locations
tctcactgaagcagctgctgcagaagagaatcccgatttttccaaaatgtcgatgtcgaagagttccaagatgcttcagtacatcaactaccgtatgcgtgtcaccattcaggacggtcgtcaactcgtcggaaaattcatggccttcgaccgccacatgaacctcgtcctcggcgattgcgaggagttccgcaaacttcctccggccaagggcaagaaaccagccgaaggaggcgaccgcgaggaccgccgcacgctcggcctcgtcctcctccgcggcgaggaggtcatctccatgaccgtcgagggccctcctccgccggaagagtcccgctccaaggcagtcggcgccgccgctctcgccggccctggtattggccgagccgccggaagaggtatcccgcccgctcncgtcgtccaggctcagccaggcctcgccggccctgtccgcggtatgggcggccccgcccctggcatgatgc

SEQ ID NO: 219193 - DNA, 465 bp, Glycine max
ccgatgtgcttgtcttagcgtgtcagtcattcctgtgcctcaagtcaagcttggtagagagcagatataatggctgttgaaagggcccgaattgccaaagatgttacggaatagatctggaaaaccccattagtatatctaaataaactggcggctggtagtgctgcccgcatagctgctaaactggagaagatggagccatgctctagcgtgaaggacaggatcgggtatagtatgattgctgacgcagaagagaagggactcatcacacctggaaagagtgtcctcattgagccaacaagcggtaatactggcataggattacccttcatggcagcaggcacgggctacaagctcacaattacaatgccagcttctatgagtcttgagagaagaatcattctattagcttcaggagctgagttgggtctgacagatcctgctaagggaatgacaggtgctggt

SEQ ID NO: 219194 - DNA, 515 bp, Glycine max
tgcgaagttaacggcgctatgttacagaacgtgcttcgcgccgttatccccaacgcccccaatctccgtcacgtgtcactccagacaggcggcaagcactacatcggacccttcgaattcatcggcaagatcgaatctcatgaacctgccttctcggaggatatgccgcgtttggatgcgcccaatttttattacacccaagaggatattctttttgaagaaaccgctaagaaagagggtttgacctggacagttcacagaccccaagtgatctgtgggttttcgccttacagtttaatgaacatgattgggacgctcagcgtgtacgccgcaatatgcaagcacgagggctattgcggtgagattacccagcacgagaggcgcgtgggagagttattcttgtgccttcgatgctgatttgattggggagcagcacattagggccggggctgatccctacgcgcggaacgagggcgttaactgctccaatggagacgtgttcaggtggaagcatc

SEQ ID NO: 219195 - DNA, 490 bp, Glycine max
ccaaaaccacttgacacaccttgccaacttgcccttccttcaaaaaccaaagagagacagaccgactccgagaagaaacaaagaaacaaacatgggaagcaacaaaacctacgaggaagaagaaagcacggttctattttcccattcccaaacacaaacagagttgttacccttcaacgagaacgacccgcaggacatggtcatataccaagtcctcaacgaagccaatgctctcaccaacacatttctccctcagttgtgcctcgagcccaccagaaacataacaaagaagcactacagaggagttcggcgccgcccctggggaaaatacgccgctgagattcgcgactctgcccgccacggcgccagaatatggctcggcaccttccaaaccgctgaagaggctgccatggcttatgaccgagccgcggtccaagatgaggggctccaaggctatgctcaatttcccagctgaaattggtgctgcacg

SEQ ID NO: 219196 - DNA, 575 bp, Glycine max
gacagcaaatagtcattatatttccaaaaacatgaactgaacccagaaacagtctgtgtcaaacgaattacacatctatcgacttgcgaatgaacaagcatgcacaattacacacgttaaaaggatgcacaataccaggaattcaaggcaaacaactatgtatatgaaatactaagaaaccctcgacgggctggaaatgataaatacatgggcaataatatggaggagaataaaacatcccttatccacttgagatttgacattatcaaaagcattacctcattaaacatagtatgtaacaaagacccatcgagaaaaaagatgacacgaaataatttggcaaattcgaaaggagatctattgttcctcgaactcatgcatgtgatccaaaaggtagttggcagccaattcctcatttttgttacaagcgaagtacaccttcaatacgattgcacgatcaaaacccattgcttcaagctggggttaaacacaacattgcaaaacacagaaatttcagaagaactaggttactcctggtgttccttagaaacagcatgggtctatctaaaaatact

SEQ ID NO: 219197 - DNA, 586 bp, Glycine max
aaccattaatgtcatgtatacataaaaacaagttttatttttcaaagcatggtatatgaattaactcacctataactaagctacaacagaaattaatcaaagcaagagtaggtagtgttatttcacaaaaacaagcatcatcaagcttgtttgattgatgaatcatgattcttggttgtgccaagagagcacgagatcttgcaaggcatgtttccaatccccccaatgaagttcctcaaactccaaagcaccctccagcaccttaaccgccactaaaagaagttgatgaggcacaatctcaaggagctcaaaaaccaaagccactttccctttgagcaacgcaattgcaccgatgctctttccaaccttaaccttaaaccccaacagccctcccacttgcttcaccttcttctccaccaccttaactctcgcactcgaagtgaacctcttgtctcttttacttctcgaatcccacttcgttttgaacaacctcgttgaatccaaaccccaagacatcgatattatgtcaaacgctgtcacacccgaacttatacctccttcgtaatataactacctttcacgtagc

SEQ ID NO: 219198 - DNA, 436 bp, Glycine max
taagtattctcataagaacaaaggaaagacaaagagagagatggagaactttcccgtgatcaacttggagaatctcaacggggaggcgaggaaagctaccctgcaccagattgaagatgcttgccagaactggggattttttgagttggtgaatcatggaataccccttgaacttttggatacggtggaaaggttaacaaaagagcgttataggaaatgcatggagaagaggctcaaggaggctgtgtcaagcccagggctagaacatgaagtaacggacatggattgggagagcaccttctttttgcgccatctcccaacctccaacatctcagaaatccctgatctcagccaagagtaccgggatgcattgaaggaatttgcacagaaattagagaaactagcagaggagttgctagacctgttatgtgaaaat

SEQ ID NO: 219199 - DNA, 530 bp, Glycine max
gtttccggcgaccttgtcggagattttgttgtttatttttcgcaccccttgtgaaacttctcaaaaaaaaaaaagaatgtttcttgttgattggttctatggaattttggcgacccttggtctgtggcaaaaggaggcgatgattttgttcctagggttagataatgctgggaagaccactttgcttcacatgctcaaagaccagagactggttcagcatcaacctactcaatatcccacttcggaggagttgagtattgggaagataaagtttaaggctttcgacttgggtggccaccagattgctcgtagggtctggaaggactattacgctcaggtggatgctgtggtcttcttgggtgatgcatttgacaaggaaagattttcagaatcaaagaaggaggtggatgctcttctctctgatgagtcactagcaaatgtgcctttccttatcttgggacacaagagtgatataccttatgctgcctcagaggatgaactacgctatacatgggcctcactaacttcac

SEQ ID NO: 219200 - DNA, 428 bp, Glycine max
gtgttatatctccgcagtggatcaaatcaaacaaacacttccatccatcaccctttctctctgcttagggattagatcgcatcggatcttcactctcttctccgatctcaaaatgcccgccgtttatggagctcgcttgaccaccttcgaagactccgagaaggagagtgaatacggttacgttcgcaaggtatcaggaccagtcgtcgctgcagatggcatggctggggctgctatgtatgaactcgtgcgtgttggtcatgataatctcattggagaaattattcgtctcgaagggaattctgctaccatccaagtttatgaggaaactgctggcttgatggtaaatgatccggtgttacggactcacaagcctttatccgtggagttgggacctggaatactgaggaatatactcgatggaattc

SEQ ID NO: 219201 - DNA, 302 bp, Glycine max
aattaggaatattcgacaggtagagtttcttcaatggctcctaaagctgataagaagaatgatccaaaggcccaggccttgaagactgctaaggcagttaagtcaggtgctacctttaagaggaaggtaaagaagatccgtacttctgtcactttccacaggccgaagaccttgaagaatgacaggaaccccaagttccctctcattagcgccccgccgaggaacacgcttgatcattatcagaatctgaagtaccccctcaccactgagtctggcatgaagaagattggggacaacaacac

SEQ ID NO: 219202 - DNA, 406 bp, Glycine max
aaacaataacacatcttcttttttagagtgaacaacaaatacagctttagttctcaattaattaataacttttccagactcttcatgatggaaggatggatgttgcgtgtgtcgtgctagtagtatactttctttcttttactgatcgacaagtttgctgcctttgacatccacaacaaacctgtatctcacgtcattcttctccaacctttcaaaggctttgttaatgtaatccatgtttaccatttcaatcatcgaactcagacccttctctttccagaactccaacatctgctctgtctccttcatgctcccaatgaagcttcccgttattgacttcctccctagcatgaccatggggctaacataatgaagaagggtgttgatgacccccatcaagatcaac

SEQ ID NO: 219203 - DNA, 423 bp, Glycine max
ctgcaaatgatcaagctgttgtgataatctatccgcatctaatcaagataccttttaagagtcacactacaaatgaaaataggaaattgaagcaaattactagtcacaacaaattccaccaagtcagtgagcaaagaatttaaaatattaactttaaaataagacatctgcagttgggagatacagagggacaaatacatgctcccacttataatgtcatcagaataacattagcacccagatgagtgctattgcagaaacctgtgcacctctttctacagatactgattcttttcatgaaccacagtaagccgacttttgcgcaggttgaccaccactggttgcctggtcaggttgggaaaatcttgatagtctgaggctcagcttttgaatctgggtctgcaagcctttgcttaatatctc

SEQ ID NO: 219204 - DNA, 239 bp, Glycine max
attaactgatttggcctttgcgaatacttgatcctaggaccctgcattaacctatttgggataaacatatacgtagtctcatacgacatgcaaaacaaacatgaataactcaacaagacacaaggagcaaagccaaaagtcctcacaaaaatctagattgaagccgattgacttgaatagcggggcactaagaaagataaaagggggatactacgaggacggacacaatgaacaaaaag

SEQ ID NO: 219205 - DNA, 483 bp, Glycine max
aatcaaatggaacgcacataccatcaatatctctaatacaaagccattagcattaccaacatgcaatgtgttataacttgaaaaatgtttgagccaatatctgccatctaatgccaaaagcaccacaaatgaataagataggcataatcaaagtgcaataagcatggaatagcaaactaggcggtgtctgacgcaggttgggttacaccagacttcaccaacatcttatttagggcctctggggagcaaacttcatacttgactttttcagagggtgaaaggaaaacctctgcaagttcaagcttttccgagggtagacttgtgctgccatggtttacttaaaaccttaatgcaagtgcactgcttcttcttttgtgataaaatccttgtaatcctggtttagtattgattgcgctggcctgatatttgccccaatggcttcagcttttcaagcaccgtattttcactatggtcactcatgta

SEQ ID NO: 219206 - DNA, 513 bp, Glycine max
gcaaaactataggaattattctaacaacactttagcatatgacaaaagcaattcatgtaacagagttgtgaataagcagaaatcagaatgatcatacaaccacaaccagcaccacaccagagaagtaagaaaagagataatatttagtttgttgtatgttacagatgaatgaaactagtaacggtacttggtggagtaatctttgggagcgatgacgagaccacgtcccttcctggctccacggaagacggtctcaacaatgtcgatgaactcctgcttgaccttgagagcccagttgatcttgttgttgttaccggttcccagatcaatcatgatgtgcttgttcctgaagaagaacataaccgtggaagggtcgtagagctcgtacatggtgttgaaatccggcacctccgttatgtcaaccaggtatattcaccggaaagttctttatcgacttcgtcaccgacgccaacacctcgtccatctgcatgcaggtttcgtcccaatcgtgcc

SEQ ID NO: 219207 - DNA, 334 bp, Glycine max
gacccacgagaccattgctattgagctaaatatccattgttcactgccattactccacttttaattatggagccaaatgcattgcccaatagggcatttgcgacgctactaacatgatgcgcaggatacataatactactgaagctactacatctagctgccctcagcatgagcctcggcctcctccagagggggcatttcagcataagcctcacctgcatcctagtcacaggtcagaccaagcttcaacattctgcggatccagtcagcaaaagagaagggcccgacaaggctgaaacctgaagagagaagagcaggctcaaacagcaacaga

SEQ ID NO: 219208 - DNA, 317 bp, Glycine max
gaaaataacgcaaattacataatgcttaaagcaacgttcatatcagaagggataaatagtttgaatcccatccaacaaaaatcatgcgattaaaatccatataaaaaagcataaagtaaaataagtttttaaaacaggtatctggaggaaagcaactacatttagtccacttcctcaatcttggggccagcaccacttccaccagatggtggagcagcatactcatcctctgctgcaccagcaccacccacgtctggaccagcaccaccttggtacatctaggcaatgattggatagcagatgctttccaattcctt

SEQ ID NO: 219209 - DNA, 335 bp, Glycine max
cgttcccaaagttttatacatttaaaactctaaatttcaccaagcaatttcaaataaatgttttcaccacacttcacataaagctccaaaagtaccggaacaaggcaagttccacggaaaagatcaacgttacactgagcacgagaagaaaaacaacacagaaagtaacataatagtgcaaacttctaatcataatcctctccttcatcaccatcttcagttgcctctgcaccaacttcctcataatccttctccagggcagcaagatcttcacgggcctcagagaactccccctcttccataccctcaccaacataccaatgaacgaacgccct

SEQ ID NO: 219210 - DNA, 368 bp, Glycine max
caaacatatagcatgactgcaaatattatttaatacgactgaaaaacatcttattttacaacttccaactgaacaaaacttttcttccacaaaatttagcagaaacatactacatacacaagtaataataatactataatatcattgagtgagtgtgtgacagatagagagatataccttctattttctaaggcaatattacaaaatcactcctgtacatttacttgagcactggctgcttccatcagtccattgcgtatctgctcaccaatatccctaacgtggccaggaccatggggtataaaaacagaggtattctttgatgagttcccaaggtctttgattgcgtcaaatgactgagtaatcat

SEQ ID NO: 219211 - DNA, 454 bp, Glycine max
  unsure (1)..(454): unsure at all n locations
ggatgatgacatgtaatgaagctgagagtcgngcagaatcaattccagggttgacgatgctcatctatgtcggcaggccgcccttttttttttttttttttttttttttttttttttttttttttttttttttttttttttggttttttgtttttttttttttttttttgggttaaaaaagggttttaatcccttaaatttttttttggataaaaaaaacccacctaaggttccggaaaaaagggggctttccaaaggaacccccctaaaaaaactggaaaaacgaaaaatcccccaccgggaaagaaaccccaaattttggaacccccaaaaatggggtaaagattaaagcttttgcccctataaaaggggagcccaacaaagactttctactccaacaaaaaaatgtaaaaccctttcacaccccttaaaagaggatttgggggatttaaac

SEQ ID NO: 219212 - DNA, 323 bp, Glycine max
atcgaaaaatataatttctttattaactgaaatggccaaaacgaaaacaagatcctaggattctttttttttttttttgggatttacatatagctagtatcatttgacatgaaattcaaacattaataactcaacaagacacaagttgttcaacaaatttccttaaattagactattttgaatcatagagactttcatagcgggctttgaaaaaggtaaaaagtgggtctataggaagaaggacttcttgcacaaaaaggtgcgtaaaggattcttggcttcatttgaagagtctaggaaatgtctccctggtgaataactgc

SEQ ID NO: 219213 - DNA, 457 bp, Glycine max
  unsure (1)..(457): unsure at all n locations
tgactntttcattctatgcagtcagactcngcgtaactatttccagggtctgacgatgctactatgtcggaggccagccctttttttttttttttttttttttttttttttttaaaggaagcttaactttacattcacacaatatttagtacacaatctcatggttatgaatctaatgtcaaagctacaagagcaactgtttcggtacattttagagacacaggaaattgcagcagcatctgcagtacatttcttattcatagtttatttattggcaactccaaacattcataacttcatgcatccaacaacttcagcaagtccttctcaatgctcagaggagaagcagagggtgcattgcgatcaacaacattcccctctttatcaacaaggaactaggcgaagttccatttgatgccatccccaaagagtccaccttagcttgattttagatatt

SEQ ID NO: 219214 - DNA, 351 bp, Glycine max
caatacgttaattacttctgtagagaaccaacaactcctcggtagtgttgtaatccagtcaaaaagtatttttcactatgcacagacgatagtaaaatgcaaaatttcaataaataggaggatcaggattgaataacacagattctctccagaagagttccttgatatcttcttcagtgaaagatggttgctcaaaatcaaaactgaaaggtctaacgcaaactggttcctcattaatatcatgaagaggagccaagtatgggtgacgcagagcttctttaactgtaatgcgcctattaggatcaaagacaagcatcttctctaacaaatcaacagcaccaggagacatac

SEQ ID NO: 219215 - DNA, 345 bp, Glycine max
acataacgcatggtatttttttcaatcaaaaatcaaacaaacaagatgtaagcaacacagcacgcacgcacaagagggtgcatagagttccaattatatgctaaatgcaattagctaatttaagcaatcatacaaacccaagttacacataagagaatacttctagcaagcattctgctattacaacattcgctagaaaagataagcatctttctccaagaaccggcagactcgcatgaaatcaccagacaagaccaaaatttttcaaatgtctcatgctttgctggcaatgttgttagaaagccagtccaaaccctcatagagaccctctccagaagttgcaca

SEQ ID NO: 219216 - DNA, 459 bp, Glycine max
tcatcattcattattgcagtgcagacatgagcagaactatttccagggtctgacgatgctcactattctagcaggccgccctttttttttttttttttttttttttttttgttctaattgatataagatttatttcgggggtccattaaaccgttttcatataagtcttcaaagcaaataacacacaatgttctgaaatccataatcccacattatcatggtaaaacattagaacacattagaaataccacaatcacatccacacgactcagattatatattatgcctaacacatagtcaggctggtaaaatttgacacttaagactccaaccgctcagaaaccatgaatcttgatatgatccttcttcacgataccagcctggactaggaatgtagaaacattcttcctttgatcacctagaagtagaataacctgtcctagttctgggccctgaaca

SEQ ID NO: 219217 - DNA, 288 bp, Glycine max
actaggaaactgttatataaaattgagcaatttagataacagactgtctactgaaaacagctcatacacataaagcccataaaaaaataaaaaataaaaatccaccatataaaccagattgtctagcaaactcatctacacactagtaataatactgagtaatcttagctaacgagaataacccttccaattttccctcctattgttcctgaatgcacagcaccctatggagtagacaataatgaggaagacaaggaatacgatgttaacaacagccaccctcttcca

SEQ ID NO: 219218 - DNA, 372 bp, Glycine max
  unsure (1)..(372): unsure at all n locations
tgtgatattctacatgaatttatagttgnagcatnatgntctgaataacttcccgggtcgacagatgctactagtcggaggccagcccttttttttttttttttagcttaagaattttaaactgatggctaaatccattcaataacaaggtaccttcacaagctccaaacaaaggtttaataaaacagtaaaatagtacagattcaaaacaacactattttaaatgttgccaaaaatgggaaccaaagtaaaggctcagcgtttcccgccttcaccaccaagttagggaccttagggcatggcacccttcgaaacatttcctttcccttgagattttagggactaggcaaactctgctttcttagccttctt

SEQ ID NO: 219219 - DNA, 442 bp, Glycine max
  unsure (1)..(442): unsure at all n locations
tggctctatattctatatctggcagttgcagagattaggatanccacttgattaatttcccatctcgatgatgctcactattcggcttcctcccttttttttttttttttaaattaagagttttgatttttatacatcttccaagtttattgacacattgttaacacctgttatttatttctctttgtatcacaacattttcaccattcataatatttatattctctctttattcactatgtcacaaggcgcttaatgccattcggtgcgtcattcacataactgggactgggttaagccttgaaacagggacacatattatgggagtagccctcggttgtgagatgccagacttctcttacatgtcctccttactattgccattatcaaacttccactgaaaacactgaatcattattgccagattcacatgcacaatctg

SEQ ID NO: 219220 - DNA, 483 bp, Glycine max
caaaacaggctaaaatattctactaaaatatgtcaacgagcattttacaaactggtcataccgttttaccttaaaaatataaccagggcaaataagttacaataggcgagagttgaaacataaaggcagggcagtccaataagcctttcaaaactataagcgtcttccaaacattaaaaaaaatatcagattcctatactttctaagccccctctgctagagtcctctttgaggtactgatgtatagaacattattccctcggatgaaagcgtcaccatacttgttcttcagttgtccattgacgtactcctctgtctgctccattgcaatattcatatagccatctagacaagcaagtttacctctgtaatcaacaccagaattgagcttgacgacaaccggccttccaacaatggatttgaggaaatcggcgggggttttggtggttcctgatccttgcttctctgttcccctcattttta

SEQ ID NO: 219221 - DNA, 392 bp, Glycine max
gacccaccgaacagctgcctaggtccaggacactattccacggtctacgcgctcactagccagcaagccagccctttccccccctctctctccccctcccctcccttttccccccccccctcccccctccctaactcccaaaccctacctctaatcaaacccccaccaccccacaaacaaaaccccaacaccaaacaaaaaaaccccaacacccaaacagcgcccaccaaaaccccccaccaaaagaaaccaaacaaaaacaaaaacaacaccccaaaacctaaaaaaaaaaaaaaacaaacaccacaaacaccccccaaccacaacccaaacacccaaacccccaaagggcaccccagaatcaaacccaaaaacacgtgcctaccagcaaa

SEQ ID NO: 219222 - DNA, 465 bp, Glycine max
  unsure (1)..(465): unsure at all n locations
ttggtctcatttatataatgctgacttnccggtctattccagggtcgacgatgctactatgtcggaggccgccctttttttttttttttagtactgaatgagctactttatttactcgaacaggagaaagccacaggtcctcacaaccatttatctgtcttacatattacacaattggctagcaaacataacagttccatagagagttagtgacatgcaaaccaagctacatgcacaaccatgacattagttacaacttatttcttgccacgcagtttagctccaagagctctttccaacttgctaattatctgctggttaggaaaggccttccctgactcatactcctggatcacttgaggcttctcattgatctgctgagcaagctgagactgagtaagctttttgtccatcctagctggcattatagccttcttaagttcagctggcaccttctcatgagct

SEQ ID NO: 219223 - DNA, 251 bp, Glycine max
tttttttcttttttttttttttttttttttttttttttttttttttttttttttttttggtttttctgttttttttaaaaaaaaccccaaaatttcacccttttcaaacgggcacctccgtcccaaccactccccattatgggggccccaaacggccggctttttaaacctctcccgaaaaccgggatgcccaagccccccgttacccccgggggaaattgccccaattgacctggggggtaccccccccc

SEQ ID NO: 219224 - DNA, 540 bp, Glycine max
gatccgtaaaaaccactatctcgatgtcattattggtaggacgaaaaccgaaaaacaaggggaccttccaacaatccatgcatcaagttcgaattataatttacataattattacaagcggtgaataatagataaaggtacagttaaaaatgcaaaaagccatgaagctcgagacatcaaacggggaacaaagatgaaacttgaagggacaggacacacaagtgaatagaacaagaagtcatatttttcaagttgaagctcaagggtaggtttcagaggctgggacagccgcatatgaaccaatgaagacgtctccataaatcaagccagccaaacctactccaatcaatgggaaaacccaatagatccagttagcagcgaagtctccactgaccacagctgggccgaatgagcgagctgggttcattgaaccgtcactgaatgggcctgctgctaaatgttggcacccacaacgaacccaatagcaatgggtgcaatgattcccaatgaccccttttttgggtctgctgcagttgcata

SEQ ID NO: 219225 - DNA, 398 bp, Glycine max
gcacttcaacaattacttaattaaaactttgggtggagcagctacaaaaaagcgggagctttttaagtgcattccaaattcaaacaggtgccgagattgaatagatcttaaaaccaatggaaaacaccgcctggtacaagctttcatatttatggcagaaatggggatcaaaatagaacccaaacagatgagcatagactatcagagaaacaaaatttgagaacttattaaaaaaaaaaaaaaaactctaacaatctcttcaggggggcttatccggtttagcagcagttgcagcagcttgccccctaagacgaccaggcctcctagcagcaatgagaccaaccttttggccaggaggagcatcacgcctgacgggactggcatgaccaataggctgg

SEQ ID NO: 219226 - DNA, 357 bp, Glycine max
  unsure (1)..(357): unsure at all n locations
cccttatcatatccatttgttattatcgttattatcccacaagtgtccaagaaaagtcttggcggcatccaagcttggaaaatacgtcggttcaaggaaaatctgagtcaacgtgtcatccgagtcgcaactcaacccaactcggttaccgttagcctcggagcttcccatcaccaccgccaacacctgcttatacgcgtagaagaatctcttcatcgccgcctcaatcgcctgcatcgcctgcaacaagagaaccttctcgaacgcgctcttcgaaacgtagagcttcatcgccgcctcttgaatcctcggtcctcccttcggatccacctncacctncaatatctccggcacctt

SEQ ID NO: 219227 - DNA, 263 bp, Glycine max
ccccccctctagtagtcagtggagggaagctgctcgagggtgaggctgataatgacaacctcgtaaacaaggccagcgattccaccaccgatgagaggcccggcccagaagatccagaggttggtccaggtccagctcacgacagcaggcccaaatgtcacagcggggttcatggccgctccagagaaggccccacccaacaaaatgttagcgccgacaatgaaaccaaaggcgatgggtgcaataattcccaaattaccctt

SEQ ID NO: 219228 - DNA, 497 bp, Glycine max
ttattttctatggatgcatggatgacatgacgagatctattccagggtctacgatgctactattcggaggccgccctttttttttttttttttgtcctggatggagttgattctacatggcttaataattgaaaattgttttgaaaagcctctgttttttaacaattttgaacctgaattgatcaatataattaaacagctgctggacattcaccctttctagggtcacttactgctgttagagtgccatgctttgtaagtgatttggagttttcaccaactttcctattgaagttcataggcgtttagtgagtttgcacaataagctgagtcacagctagagcttcagaacctctcagttgatgacctctctcttctaagaaaagcctactttctttagaaagctcaatgtgatcgccattatgagcagtccagtgctcataacgaactacattagagatttgcttgagatagatccttgggctcacaactgcatc

SEQ ID NO: 219229 - DNA, 332 bp, Glycine max
agggtgaaaaggttacattgattagaaaccagtcaaagccatacccaccaacaacatcagataactaaaatctgtcactgaaatcttcagaaaaatagcagaataaacatctccacaagacatcacagactatattaagattattactaagtagtaatgaaaacacagattaggatgtaagcaataacaagtttgtaacaaagtacaaaatcaaattaagtagtgagaatagggggagaggtagtcagctttgccaccaagaatgcgagccttggagtcgggaaagaattcaaatcctggcagctaggagacatctccttcactggcaaccc

SEQ ID NO: 219230 - DNA, 288 bp, Glycine max
aatataaggattgatagtttatagtagatgatgtgattcaaaaaaaaaaaaagattgccttaggtagcaaacgaagacaaatgggagatgatacaatgtgcatggaagggcttatatacttcataaaaagtagatgaatgagaccttattgaaatgatgattatcaacacacaaaaagtaaatattacatatgatgatgatgacgatgatcttaattaagaaaggagtttagatgcaacgccgatccttgcaagtggaacacagacaagactatgtgcccttggaaca

SEQ ID NO: 219231 - DNA, 438 bp, Glycine max
ggcactcaaacgcaagagtcgtataaatcacaaatcataataaaacacactaggaacaagcaaagcttgttaaaaggtgcaatagaatttatgccacaacttggaaaatagagagttagggaccataactacccaagttgaccatcccacaaactaggatattttccatgagtaactaaggcttaaagagagctgctcccaccagaaagcctactattttctataatcattttagttggcccggcttttgaacacatcaagacccatctcagtaagatcagttgcttgcagctctacttgaattccatccagctccctcttgaatctgtctttggagctctgatagatcatcttgctcctcacccttgatgagtcaagggaccatgcaatgaaaaaaattctgcttttatggacattcccttcagtcagatactcaaa

SEQ ID NO: 219232 - DNA, 310 bp, Glycine max
  unsure (1)..(310): unsure at all n locations
ttatatgcattgctanatgaggaacatgctggaattatttcccgggtcgattgatgctactattcgtgttcctgccctttttttttttttttattattcttgtttttgcttcctccataggcacatatatttaaccgaagtgttgaaggtataatgatttcagttcacattgataatggtacagagagtattaaatatatatatatatatatatatatatatatatatatatatatatatatataaaactaagcataattactgcaaatacacatttataatcgtcaccctttgatataacttctttgta

SEQ ID NO: 219233 - DNA, 532 bp, Glycine max
ctcctcttctcttcttttccaaaaacaatgaagctcattagcaccatcaaccccaaaaacctcaaactaagccccaaacgcttctttcgtaaaaaggaaccatctttagtctcacgctccgacccgccttctttcggatccggatcctcttccgttgactcttccaccgcaaatcacaaaccttccgccggtaaccaaactccgaccagcgttctcccggacgtctccggcgagtggtccgaggtcgccaccgccgccgttgacgtgcggtgggacctcgcgcaggccttacgcctcatcgatcgcgacaacgacggcgtcgtcacgcgccaggacctcgagtcgcttctcacgcgccttggcgcgtcgccgagccccggcgacgtggcgctcatgctcggcgaggtcgacggcgacggcatcacggttgagtctctcatgagctacgtcgggtcgggtctcgaaactgggtcggatcccgacgagctcaaagaagccttcgaggtgttcgacacggatcgagacgggagga

SEQ ID NO: 219234 - DNA, 439 bp, Glycine max
  unsure (1)..(439): unsure at all n locations
aaaaagataaacaaaataaaaaataagaataagaaaaatgtaaaaaataaaatataaaaatcaaaaagtacatatagaataatgtaaatagagataataagatagattaaacgacattaaataataataaaaaaaaaganaaagatggaggaatactgcttggggaaacctaagggaaaaaatatacgggaagacgagcaaactagtaagcggccgccctaaaaataataataaataataaaaaataaaaaatttaattaaaaataaaaattaaaaggggaaaaaaaaaaaaagaaattataaagggagataaaaagaaaacaaaaaaaaaaaaaaaaaacaaaaatgaaaaaaaaaaaaaaaaaaaaaaaaaaaaataaaaaaaaaaaaaaaaataaaaaagggataaaaaaaaaaaaagggaaaaaaaggagttaat

SEQ ID NO: 219235 - DNA, 589 bp, Glycine max
tcgcgatctacaaccaaactaggcatttttgaataccaatataatataagctttgttaaagagttcaattaagtttcttctttgccctttctaaagctagctagacattattccatctctcttagcaactcgtcaattaaactcaatggaagcaacgaaaggatttgtatctccaacttcatgcaaatgtgatgatggacacctagttaccgtgcttagtattgatggtggcggcattcggggaatcattccaggaattatacttggtttcctcgaatcagaacttcagaagcttgatggtgaacatgtaagatcggcagattactttgatgtgattgcgggaacaagtactggaggattagtgactgcattgctcactgctccagatgaaaataaccgacccttgtatgcagccaaggatattaaggatttctaccttgatcatacccctaaaatctttccacaaaaaaacaaattattctcacctatcctgaagttgggcagaaccctggttggaccacagtacaacggcaagaacttacacaggcttataagggagaaactgggagacacataattgcaccaaaca

SEQ ID NO: 219236 - DNA, 471 bp, Glycine max
aaagaagagctcaaaaagtctaaggttattaaaatagactctcaaaaatcatgggaacaccacatctcttatgctaccaatcaaaagtaccctattgtagttcatttctctgctttctggtgtgtcccttctttagttatgaatcctttctttcaagaattggcctccacttatgaagatgttttgtttctgacgttggatgtggatgaggttaaggaaattgcctccaagatggaaatcaaagccatgcccacctttctgttgctgagtggagggactcctgtggacaaaattgtgggtgcaaatcctgatgaaattaggaaaaggattgaccattttgttcactcaactcgttcctagaacttttgttcattgtgctaggaagcatttcatatatgttttatattccaaagtaaatattataccggttgttctgtgcttgtttcattgttgaatatatgtttggtgacc

SEQ ID NO: 219237 - DNA, 564 bp, Glycine max
ctattatcatccgcagctgcttttattcgcaccgcaaacagtgagccatggccgtcggaaagaacaagcgcatctccaaggggaagaagggtggcaagaagaaggcagctgatccctttgccaagaaggattggtatgacattaaggctccttctgtttttcaagtgaaaaatgttggcaaaaccctcgtctctcgtactcagggtaccaagattgcttctgaaggactcaagcatagagtgtttgaggtctccttggctgatcttcaaggggatgaggatcatgcattcaagaagattaggttgagagctgaagatgtgcaagggaagaatgttctgacaaatttctggggaatggatttcacaacagacaagctgaggtcattggtacgaaaatggcaaactcttattgaagcccatgtggatgtgaagacaactgataattacacattgaggatgttttgcattggatttaccaagagaagagctaaccaggtgaagagaacctgttatgcacaatcaagccagattagacagattcgtaggaagatgagggagatcatga

SEQ ID NO: 219238 - DNA, 811 bp, Glycine max
aataaaaagaaatataaaatatgaacaaacaaaaaaaaacaaaagaaatacaaaaaaaaaataaaaaaaaaattaaatgataatgagaaaaaacataaaaaataaaataacaaaataaaaaataaaaaaaataaaaaaaaaaaaaggcaggaacacctagaaacacaaacggaaaaaataaacgaataaacaagaaaaaaaaaagacggacaaaaaaaaaaaaaaacataaataaaaaaaaaaaaaaaacaaaaaaaaataacacaccaaaaaagggaaaaaaaaagaaaaaaaaaaaaggaaaaaagctaaaaaaaaaaacaaagaaagaacaaaaagaaagaaaaaaaaagaataaatgaaaacaaaaaaaaaagaaaaacaaaaaaaattagaaaaaacaataaaaaaaaaaaaagaacaaaaaaatacaagggaaacaacagcaactaaaacaaaaacagagaaaacaaccaaagcaaaaacaaacaaaaaaaaaactacaaaaaccaccaacagaaaccaaaaaaaaaaaaaaagagccataaagaacaagaacataaaaaaaaaaaacataatgcaaaaagaaaaaacaaaaatggagaataaaaaaacaacaaaaaaaaaaacagaagaaaaaaagtacaggacaaacaccaaaaaaacacaaaaagaagaatggaagggaaaagaaaaaccaaaaaaataacaaaaaaaacggaaaaaaagagaaaaaaagaacaaaaaagggtatacattaacaaggaaaaaaaaaaccatcagagaaaaaaaaaaagaaaaacaaacctaa

SEQ ID NO: 219239 - DNA, 546 bp, Glycine max
  unsure (1)..(546): unsure at all n locations
gttgttgtaactcgttcttcttcttttgttgttctgtgtttgtgtttgttttttctctcacctgaaaatgtcttgctgcggtggtaactgtggttgcggaagctcctgcaagtgcggcaacggctgcggaggctgcaagatgtacccagacttgagctacactgagtcaaccaccaccgagaccttggtcatgggagtggcacctgttaaggctcaatttgagggtgctgaaatgggtgtgcccgctgagaacgatggctgcaaatgtggaccaaactgctcctgcaacccctgcacttgcaagtgaggtgttgggagagcaagcttcaagcagagatagcccttaattaggaataatgataaactattaatgtgtagctaaaaacttatgtattatgtctgtgatggttttcgtgcactctggtgttttgtgttaaacaaacatccttagaataaagtggtcatgtcttgcctttcagcangttcaagtgttttggacttgtgatgggtgtgttaagctcatggttgcttctttttttttttttt

SEQ ID NO: 219240 - DNA, 333 bp, Glycine max
accattaataacaaaattaaaataaatataatcaaaaccaaaaaaaggattaaaaaaaaggaggaaaaatcaataattaaaatcggccgaactttatacaaaaacaaccaatcaccaaacattaaaaaaaaaaaaaaagaagcaaccaagagcttaacaaaccaataaaaagcccaaaacacttgaacttggagaaaggaaaaacaagaaccacttatactaaggagggtagcataaaaaaaaaaaccaaagggaaagaaaaccataaaagaaaaaataaaaaaggtccaagctacaaaaaaaaaagcaatcacaataccaaaaaaaaggcaa

SEQ ID NO: 219241 - DNA, 579 bp, Glycine max
  unsure (1)..(579): unsure at all n locations
tcaaattccactcactactactctctctttccatcattgtccccttaaaaatcatgagtgtagaaatactagacggtgcaaccatcgtaggattcgtggaggacgaggaagccttcaacgtctgcgtgagcgacctcttcacccaactggacaccgacaaggacggtcttctctcttacgcggagatgctgaaggagttgcagaggctgagggtgttcgagacccacttcggcgtcgacgtgaagcgtgaccccgacgaactcgcacgtgtgtacgagtccatgttcgtgcaattcgaccacgacttgaatgggagggttgaccttgaagaattcaaggaggaaacgaagcagataatgcttgccatggcgaatggacttggatttctccctgttcagatggctcttgaacacgatagcctcctcatgaaagccgttcaacgagagtactgtcccaaaattgcggcttaaagaattaatatgcatatggngaaaatttgcattcaccgcgcgcaatatatgcatgcatgcatcatgcatggtggtgatatcatttatacgctttgtacgttttaatttt

SEQ ID NO: 219242 - DNA, 535 bp, Glycine max
acactaataataaattaaatattattaatttttaatataaatatatacttaataataatgggggtgtatatttaataagaaaataaaaaaaattaaacatataactaaccaggggattactttatataaaaaaagggaagaaaaaaaaaaatctggagagacactgaaaaaggttaattataaatatggaagaaagaaacctgaagaaaaataaaaaaacttccgtcaaatataaataaaatgatttaaattgtaaatgaaaaatggaaagaaaaacaaaaaaaaagggaaagaacaaaggacaaaacaaaaaaaaaggggtaaaacaaaaaaaaccacaggaaaaggcaaaaaaaaagaaaagggaaaaaaaaaacccacgagagaagcaaaaaaggggcggggagaaaaattcaaaggaaaaattaaagcgaaatgggaaaaaatttaagaagggttaaaagggggtgtataggaaaaaaaaataaaaaggggaaaaaaaaaaacatttgcaaggaaaaaaaaagggaaaaga

SEQ ID NO: 219243 - DNA, 585 bp, Glycine max
gaagctgtcttgttgatgattgaaaaccctgccagggccaatggccacatatttaatgtgggcaaccctaacaatgaggtcactgttaggcagcttgctgaaataatgattcaggtttactcaaaggtaagtggagaacaaactgctgaaacacctaccattgatgtgagctcaaaagaattttatggtgagggatatgatgacagtgacaagagaatccctgacatgaccataataaacaagcagcttggatggaatcctaagacttcactttgggacctgcttgaatccactctgacatatcagcacaggacatatgctgaagccgttaagaaagtcattgcaaaacccctcgcaagttaagcttttacagtgatggtgatgtgctacctttgagaaggggtgttcttgcccaagtgttctgccatattttactggttggttttatataaaatcgcaaattttcctccttttggtttcgttagccagtaagcaatatagcccacataagccccaatgccttggtgtatgttcctggagaagtaggaaattatatatagggcaatctgtgctgctatgtaattt

SEQ ID NO: 219244 - DNA, 792 bp, Glycine max
  unsure (1)..(792): unsure at all n locations
aacaagagaaagaaaaaaaaaaaaaaaaaaaaaaaaaaagaaaaaaaaaaaaaaaaaaaagagaaggaaaagaaaagacaaaggaagaaaagaaggaataaaggctagaaaaaaaaaatataaaaaaaanaaanaagacggaatacaaatagaaaacnagaaanaaaaagatagaaaaaaaaaaaacaaagagaaaagaaaaagngaaaaaaaaaagaangaaaaaaananngaaanagaaaaaaaaaaaaaaataaaaaaaggaagaaggaaaaaagggaaaaggagagaaaaaaggggaaaaaagaaaaaaaaaagaaaaaaaaaaaaaaaaaaaaaaaaaaaaaaaaaaagaaaagaaaaaaaaaaaaaaaaaaaaaaaaaagaaaaaaaaaaaaaaaaaaaaaaaaaaaaaaaaaaaaaaaaaagaaaaaaaaaaaaaaaaagaaaaaagaaaaaaaaaaaaaacaaaaaaaaaaaaaaaaaaaaaaaaaaaaaaaaaaaaaaaaaagaaaaaaaaaaaaaagaacaaaaaaaaaaaaaaagaaaaaaaaaaaaaaaaaaaaaaaaaaaaaaaacaaaacaaaaaaaaaaaaaaaagaaaaaaaaaaaaaaaaaaaaaaaaaaaagaaaaagaaaaaaaaaaaagaaagaagaaaaagaaaaaaaaaaaaaaaaaaacaaaaaaaagaaagaaaaaaaaaaaaaaagaaaaaagaaacaaaaaacaaaagaaaaaaagaaaaaaaaagaaaaaaaaaaagaaaaaaaagaaaaaaaagacagagagag

SEQ ID NO: 219245 - DNA, 532 bp, Glycine max
  unsure (1)..(532): unsure at all n locations
aagcaatcgtgactcnatggcaaaaccaggggaacgttcaggcaaagactcgtatggtcttggtggtggtggaggaacccatcgagtgtcctatcaattttgcatctgtatcacccttaaatgctggcagggggtgattatcactaaaccggtacctctctgcataaactatggaagaatggcgaacggcctaccttccccggctaaagcggcggtgcttcttaagagtcatgggctgaaccgggtgtagttttatcaaacccacgccctcgtcttaaccgcgtttggcaactcaggaatgaagggggtggttgccatgccaaacgagctttttgccaacgccgtcgcgggacaatccttgactgacgcgggggttcaaaccaacatctgcaagtacctatcccgccacgcaaaataaagccatagctctgggatacgaagtgttcgtgggcccgaaccacacgactaagttctcttgttccgccatgaagaacggttactctttttttagtcaaatacagcctggacaaaa

SEQ ID NO: 219246 - DNA, 580 bp, Glycine max
  unsure (1)..(580): unsure at all n locations
ctcgagccgattcggctcgagcggctcgaggtgtaaaacctcagaatgatcttgctcaggaatttaacaggcagctcaaggaccaagtgtttcagataaggagaaagttcccacttgcaaaatttacatatgttgatgtgtatactgccaagtatgaactaatcagcaatgcaagaaaccaaggttttgtgagtccattggagttctgttgtggcagttactatggttaccacataaattgtgggaagacagccatagtaaatggaacagtatatggaaatccatgcaaaaatccttcccaacatgttagttgggatggcatacactactctcaagcagcaaatcaatgggttgctaaaagaattctctatggatccctctctgatccacctgttcaaatagggcaggcatgtttctgagtatagttcattcagttcacgcgttactagctagagagtgccatacattatgggggtggtcttcattcttcacattgttattatttccataaacaagcactttgtttaagaacaataattggngagctgtgcacatgagtaagacatatatcataattatg

SEQ ID NO: 219247 - DNA, 492 bp, Glycine max
ctcgtttcatatgtctcattcttctctggttttgttttttggcaaaatcattcggattaattcaatttctctgtgtaaatactttaacgtttccaattctcaccttcgcccagtgatttgtagtcagcttttttcttgttcaaagatgcactagtagaagagggaattaccaagtttccaagctttcctttagagtagaagcaaagaggtaaagtgtcataaaaagctgtaggcttccttcaatgggtgctcctaagcagaaatggactgcggaagaagaagcggcactgaaagctggtgtactcaagcatggggcaggaaaatggcgcaccatacttacagatcctgagttcagtgccattttgcatatgcgttcgaatgtagatcttaaggataaatggaggaatataaacgtgacagcgatatggggatcccggcagaaggcatagcttgctcttaaaaggaacctgccagcccccaaaatggacaaat

SEQ ID NO: 219248 - DNA, 803 bp, Glycine max
  unsure (1)..(803): unsure at all n locations
caatcaactgccaaaaacacgaaatactatagaacaagtaacaaganatcaactaccagcatatactatagaaagagacacacacgaatataaaataaatatagaactgaactacacaaaataaatcgaaaatagataaaagaggaacgatacactaaacataaaaagaatactaaaaaaagaaacaaattaataanataataaaaaaaataaaggctgaaatcactgcagaacccnaaaagaataaataccaggatcgacgagacacactaaaacagaggaacgccactattaaaataaaaaaacaaaaaataaaaaaaaaagcaataaaaaaaaaaaccaaaaagaggaaaaaacacaacgcaaaaacaaaaaacaagtaaaaaaacaaaaagagacaacaaaaggaaccccaaaaaacaataaaagaaatacaaacagaaaaaaaaagaaaaatacaaaacgccacaaaaggaagaaaaaaggcaaacattaacaaaaaaaaacaaaaagaaaagaaacaaataaaaaaagggaaaaaaagccataaaaaactagaaaaaaaaataagacacaatggcccaagaatgggaaaaaataaaaaaccaaaaaaacaaagatgtacacaaaaaaaaatcacgaaaaaccacaaaaggaaaacaaaaaataaccgcaaaaaaaaaaaaaaaatggagaaaactaaaaaaaagaaatgaaaaaatgaacggcaagcaaaaaaaaaaaaaaaagctaaaaggacaaccaaaaaaaaaggcgtcccaaaaaaaaccaaacggggaagg

SEQ ID NO: 219249 - DNA, 534 bp, Glycine max
tgaacctctcagaagcaaatgaggattattcacagcctcgcatgtttggttctcaccttcatctccttcaatccttgtaaagcagaacaagcacaaactattttgaattccctcagcattgaccaaatcctacagaaaatatatgaatggggaaatggtgcacaagggttccaagaaggccagattcaaatttcaggccctatagtggtggcaggagtgctgtgtttcatagcttcttcaatatctagtgctggtggaattggtggtggtggacttttcttaccaatattaactattgtggctggcctagacctcaaaacagcttcaagtttgtcagctttcatggtcacaggagggtcaattgcaaatgtcttatgcaatctttgtgccacaagtcctaaatttggtggcaagtcattgattgactatgacatagcacttttgtcagaccatgtatgctgctgggagtgaagtgtggagtcatatgcaacccttgtcttcccagaaatggtgattactattgctgttgctgtt

SEQ ID NO: 219250 - DNA, 541 bp, Glycine max
ctcgtttcatatgtctcattcttctctggttttgttttttggcaaaatcattcggattaattcaatttctctgtgtaaatactttaacgtttccaattctcaccttcgcccagtgatttgtagtcagcttttttcttgttcaaagatgcactagtagaagagggaattaccaagtttccaagctttcctttagagtagaagcaaagaggtaaagtgtcataaaaagctgtaggcttccttcaatgggtgctcctaagcagaaatggactgcggaagaagaagcggcactgaaagctggtgtactcaagcatggggcaggaaaatggcgcaccatacttacagatcctgagttcagtgccattttgcatatgcgttcgaatgtagatcttaaggataaatggaggaatataaacgtgacagcgatatggggatcccggcagaaggcaaagcttgctcttaaaaggaacctgccagcccccaaaattgacaataaccatatggccttgagtaccgtagttcgacatgatgaagttcttgatac

SEQ ID NO: 219251 - DNA, 474 bp, Glycine max
ggtggttgaacttgattttctctatccaagtgagggcatccataaacgttgggataaaggttataggattacagcaaccgcagctacattggatcaatctgctcttatattaagtattccgaggcgcaaactcagtgatgaaactcaggaaactctacgtacatcgcaatttcccggcacacatgttaaggaaaaatggtcaaaaaacctttaccttgcctgtttgtgctacggacgcacagtatgctgatttccatgacattttaaagcattttattgacaagcggattatgagttgtcatctgccccaccacaaaagatctttttgtagaaaggaactaattgttgtgccagcagagaaccttattttgttatgttataagaatattgttctgttccctgtccctccccttctattatatgctttactgggatggggaatgttgcagagtaatgaatgctgtttagctttat

SEQ ID NO: 219252 - DNA, 892 bp, Glycine max
  unsure (1)..(892): unsure at all n locations
gaaatggaaaagaaaaaaaaagaaaagataaagaacaaaagaaaaaaaaaaaaaaaaagaaagaaaaaaaattaaaagaaaaaaaaaaaaaaaaagaaaaaaaagaaaagatttaaagaaaaaaaaataaatnaaaaagggggaatagcccgtggagaagacnagaggaaaaaataangggaaaaaaaaaaaaaaaagaagaggaagaaaaaaaaaaaaaataaaaaaaaagaaaaaaaaaataagaaaaagaaataaaaaaaaaatattggaaatagaaaaagagaaaaaaaaagaaaaaaaaaaaagaaaagaaaaaaaaaggaagaaaaagaaaaaaaaaaaaaagaataagaaaaaaaaaaaaaagaaaaaaaaaaaaaaaaaaagaaaaaaaaaataaaaaaaaaaaaaataaaaaaaaaaaagagaaaaaaaaaaaaaaagtgaaagaaataaaaaaataaaaaaaaaaagatgagaaaaaaaaaaaaagaaaagaataagaatgaagagagaaaaaaagaaaaaaaagaaaaaaaaggaaaaaaaaaaaaaaaagaaaaaaaaaataaaaaagaaaaaagagaaaaaataaaaaaaggaaggagaaataaaaaagaagagagagaaaatgaaaaaaaagaaataaaaaaaaaaaaaaaaaaaaaaaaaaaaaaaaaagagatgaaaaaaaaaaaaaaaaaaaaaaaataataaagaagggaaaaaaataaaaaaatagaagggaaaaaaaaaaaaggaaagaaaaaaaaaaaaagggataaaaaaaaaaggaaaaaaaaaaaaaaaaaaaaaaaaataaaaaaagggaaaaatgataaaaaaaaaaaatattaaagaagagaaaaaaaaggaaaaaaaagaaaaa

SEQ ID NO: 219253 - DNA, 594 bp, Glycine max
  unsure (1)..(594): unsure at all n locations
caatatcacacataatataattccaaaatcactcctattgctatagcaatatgatgggtgacactgagatcaaaccatcagttgaagtagtcatatgtgcttccatgaacaataacaatagcgcaaacaaccacaccctcccaaccgacatcaccaagtcatcacaatcacacttaccaatcttgaccaagctccatgctggttactttttcatatgcctttcctttggtgcacaagctttgctctggaagagtttgagtaaacacaacaaggactcacaaactctctggcatggattcaatttgatgccttccattgcgtttctactactttggtgtgtggcactgctcactgccactactttgtctttactttacgtgctcaagtgcatctttcacttggacatggtgaaggaggagttctcacatcatgttggagtgaactgcatgtatgctccttggatttcttggcttctcatgcttcaatcagcacccatcatcgntcattcaacttcttgctacggagttctttgcttggccttttcgttggaatattgctgcttgacataaaactatatggacaatggttcacaac

SEQ ID NO: 219254 - DNA, 508 bp, Glycine max
gacagcgggataaattccatttccatttttacccttgtgctggctcagttaatcttcttactaatcaattaaagagcacaagagagaagtgccggcctgctataatggattattttattttcagccgcacaatttttgagtttaaagacattttattttcaagtcataatgggagcatttttatggaacagtctttcaattttgagtacagtgatgatcatcaaagcaataaaaaccagctcggagaccatacatataaccagcattaaccatgaggccatgccacttttcacctcttgagcatattcagcacaagctagtccaaggaaggttaaagggaatgaatacgcccaccatgtaacgtttaacctcttcatggatttcttgaacatggctggcctgcaagcctgagacatataaaggaatactgacagaaagaggggcatctttgatggggtgacaaaagcacctgtggatgggttttcagggctagacttgccatgcttgg

SEQ ID NO: 219255 - DNA, 544 bp, Glycine max
tggggaattatggtaattgattttgagggtttgactactcatggattatgatggtatgagaaaaccttccaaaaacttatttcactctcgcttcttcctttttgggttctattgctgggattgggagttcttgaccgctctcctcctttttagttcttccccttaatcttctttcttcacaatttttatttccttccttattagacgtattagatcagattgaacaaaagggtttttctttctttctttcttggggaataatagaaataagaaaagattagtgaggttgaaatgtcgcaacgatcggtgccggcgccgttcttgacgaagacgtatcagttggtggaggatcaggggacggaccaggtgatatcgtggggtgaaagtgggaacacttttgtggtgtggaagcatgcggattttgcaaaggatttgcttccaaaatatttcaagcacaacaacttctccagctttgttcgacagctcaatacctatggattccgaaaaattgtgccagacatatgggaattcgcgaacgagcatt

SEQ ID NO: 219256 - DNA, 333 bp, Glycine max
caaggaccgcgaagctccattatttcgggggaccaaactacagaatgcagccatttaaccattacatgcgttattcgaaagaaaaaataaaaatcttttaaatgctttgccttaaaaagtcctaattgactattaaaacctgtgtaaatttcctaattaatatttatagaggcattgaccttcgtacattacaaattacacaaccctaccatgtgtagaaagcataggtttttgcatttggttctttacccaaaataatttttgcttagccttttttttttttactaatcattatcctatttcttttttaattgcttaaaagattacctgggg

SEQ ID NO: 219257 - DNA, 516 bp, Glycine max
cggctcgaggtttatctggagctattcctcctgagatcagcaacatggctagtctccaagtgttgcagttgggagataaccagttggtggggaatatacctacacagatgggttccttaaagcaccttagtactcttgctttgcaatataacaagttaactggtcaaattcctcttagcttggggaacttggagaagttaagcaggcttaatttgagtttcaacaactttagtggtactgttccagcaacactcgcacatattgagcatttggaagttttagatattcagaacaattatttgtcaggaattgttccttcggcattgaagagacttggcgaaagattccaaggtgcaaacaaccccggtttatgtggggttgggttttctactttgagagcctgcaacaaagatcaagatttaaacgttaaccatattgatacctcagatggagaccaacccgaaaatagtgattcttcaaaggcgctcccggagcctgcatatgttcagtcacatt

SEQ ID NO: 219258 - DNA, 566 bp, Glycine max
ttttcacaaccatcttcagagaaaagtaagggaattccattggcgacgcttttactcattttgttcctttctgccattttcccaacatctttctcgaatcaggttctcaactccaagaaaccaataccttcaagctctgcttcttcccttggttcctctgttgcttttcagattaaaggaaatgtatatccacttgggtattacacggtgagcctcgccattggcaatccccctaaggtttatgatcttgacattgacaccggtagtgatctcacttgggttcagtgtgatgcaccatgcaaaggttgcaccctacctcgcaatcgactttataaaccccatggcgaccttgtgaaatgtgtggatcccttgtgtgctgcaatccagtcagcaccaaaccatcactgtgctggaccaaatgaacaatgtgactatgaggttgagtatgcagaccaaggatcatctctcggtgtgctactccgagataatattccccttaaattcactaacgggtctttagcacgccctatgctggccttcgggtgggatatgatcaaacgcatcat

SEQ ID NO: 219259 - DNA, 577 bp, Glycine max
ctcttttcttctcttcttcttcttcttctacccttcaatattaatattccgtgcaaaaaccaccaacaacaacatcaccaccaacaagaagaacaagattggcgttatgggtctcttcctttctaggaatttggcttgcaaattcatatacccttttcttttctccaagaaggtttccaaggatttgtttcccaagcagttggagaacatgatgtctctgatctctcctcgtactggcaggcatttgcagcgctatgacaatggctgtcgccaagttgtgggatgcattccttatagatacaagaacaatggtacacaggataaggaattggaggttcttgtgattagtgctcagaagggtcatggaatgcagttcccaaagggtggttgggaaactgatgaatccatggaacaagctgctttaagggagaccatagaagaagctggagttgttggcagtgttgaaagtaaactgggaaaatggtattacaagagcaaacgccaacccataatgcatgagggatacatgttccctttgcttgttaagaggaattggataactggccagaaatgacac

SEQ ID NO: 219260 - DNA, 495 bp, Glycine max
acaaaatatagccttttttaggtcctaatttatataacacagtgcccagtgtacaattacacagttgctccactgcctttatattgaattatgcatcatcagtaatatactttggacttctcgttgagcattagcttacagcattaaatattgttgaccttgttcatgtcgcgaaaaaaaaaaaaaaaaaaaaaaaaaaaaaaaaaaaacaaaaaaaaaaaaaaaaaaaaaaaaaaaaaaaaaaaaaaaaaaaaaaaaaaaaaaaaaaaaaaaaaaaaaaaaaaaaaaaaaaaaaaagggggacctccagcacaggcacttttccccccgggaaaaaaaaaaggggggggcccccaaaaaggacaaaattttcccccaggagaaaattaaaaacccttcccgagggggcccccaatttttttttttgggggtaattttaaaccgggggtttcctaccaaattaatttgcccagggaaaaagggtgaaccccgggg

SEQ ID NO: 219261 - DNA, 601 bp, Glycine max
  unsure (1)..(601): unsure at all n locations
tgttttctctctagattctgctcttaaacgccgtcgttttcaaactctttttttccccttcgcttctctgtctttgtaaccgaaaggggggaaaatataattaacaccgatttcgcgaccaattcttcttctgcgttgaattgggacaacgagaaattggatctcagtttttggcaggaaataaaaattgcatttgagtgtaaaataacagagtatagtgtagggccttgttcttgatactgtgctaaatttgttggatggcggagaaatcatgcatcaagcgccttcagaaggaatatagagccctttgtaaagagccagtttctcatgttgtggctcgtccttctccaagtgatattcttgagtggcattatgtgttggagggaagtgaaggaacaccttttgcaggtggatattactatggaaaaatcaagtttcctcctgaatatccatataaacctcctggaatcagcatgactacacctaatggacggttcatgacacagaaaaagatctgttngtctatgagtgactttcatccagaaagggtggaatccatgtggtctgtatcaagcatattaacagggcttctttcatcatg

SEQ ID NO: 219262 - DNA, 552 bp, Glycine max
gaaagtcaaaagtatcaagcatgtaacttcttaacattcaccaccaagaagctggcaacatagacacaaaggagtaaattcagcccatagtaaaacgcagcctccatgttcatcatttcatttccctatacaaattctgttagacatgacaaccttagcagaacatatagtaccagttccaggagaacactttctggaccccttataccctcctatgaagatttctttgcctatcatcacagctgaagcagtggtaatgccattacaaccccaaagatggagaagagtaatagcatcatccacgttggaaatggttttctgtttttcctcacttccttcaacccatctactcttctcatgtcttctccattggattctaatttcttttccaaaactggccttgaactcttgtcgggagacgtatccgatgagaccctctctggagcagcctgctcagaaagctgttgctggttgtactttttaacatactcagggaacatcttcctgaatgtagcattcttacagttgaaagaaagggaagaatttgttaga

SEQ ID NO: 219263 - DNA, 590 bp, Glycine max
  unsure (1)..(590): unsure at all n locations
gatatccttgctcttgcagctgagatatcttctgttctggctcatggccctgactggaaagttccactaggaagaagagatagtttaaattcaagtttttctcttgctcttcaaaatcttccgggtttcaatttcacccttgatcaactcaaatctacatttgatagacaaggcctcaatacgactgatctagttgctttgtcaggtgctcatacaattggtagatctcaatgtagattttttgctcaccgaatatacaatttcagtggcaatggcaacagtgacccaactctcaacactaccctctcacaagcactacgagcaatatgtcccaatggtggacctggaaccaatctcaccaatttggacttaactactcctgatagatttgactccaactactactcaaatcttcaacttcaaaatggcttgcttcggagtgatcaagtgttattttctacangtggtgcagagaccattgccattgtcaatagtttcggtagtaaataaactcttttctatgaacanntttaaggggtcaatgataaaaatgagcattattgaagtgcttacggggtcacaaggagaaa

SEQ ID NO: 219264 - DNA, 434 bp, Glycine max
ggtgaattctaaaaataattttttacaaaataaggggttgttatcccgagctaatacaaggggcaaaccattttttgattccccctttgcccccaacatggtttttcctatttaacccctttattaaagacctttcatttttggattaggaaattttttggtaacctatctagagggggctcaccataccattccttgaaaattttttgggggctagaggaccccaattaaaaaaattccccttgacaaagttacaatggtttcgaatttcttcttgggaccccggtagcccttcaaagggggctcatttttatcattggccccttaaaatgttcataaaaaaaagttttgttaccacccaaacttttggcaatgggcttgggttttgcaccccttggtaaaaataaaacttggtcccttccgaagcagccctt

SEQ ID NO: 219265 - DNA, 509 bp, Glycine max
  unsure (1)..(509): unsure at all n locations
ctcgagccgattcggctcgagcggctcgagccaatatattccattctctctgtgtatttccctacctctcccttcaagatgcagatcttcgtcaagaccctcaccggcaagaccatcacccttgaggtggaaagctctgacaccatcgacaacgtcaaggccaagatccaggacaaggaaggaatccccccggaccagcaacgtctcattttcgccggaaagcaacttgaggacggccgtacccttgctgactacaacattcagaaggagagtactcttcacctcgtcctccgtctccgtggtggcatgcagatcttcgttaagacactcaccggcaagaccataaccctagaggttgaaagctccgacaccatcgataacgtcaaggccaagatccaggacaaggagggtatccccccggaccagcaacgtctcatcttcgccggaaagcagctcgaggacgggcgcaccctcgccgactacaacatncagaaggaatcaacccttca

SEQ ID NO: 219266 - DNA, 505 bp, Glycine max
gacaattaatcatttcatatttcacacattcataacaaacgtaggtgggatattagagtactattattaatgggacacaattgagttcaacacaaaccgaacttattttcaagggacattattacagacccattaaacatcaaagttcttcaaatgttttgggaacacattcaacattacacaacgagcttaaaaccccccacggagacggaggacaaggtgaagggttgattccttctggatgttgtagtcagcgagggtccttccatcctcgagctgcttgccagcaaaaatcagcctctgctggtccggagggatgccttccttgtcctgaatcttggccttcacattgtcaatggtgtcagagctcttcacctcgagggttatagtcttacccgtaagagtcttcacgaaaatctgcataccaccacgaagacgcaacacctagtggagagttgactccttctggatgttgtagtaacaagggtgcgtccgtcctctagct

SEQ ID NO: 219267 - DNA, 529 bp, Glycine max
gctgcacaaaccattgctgttcccatcatcaaagaaatcgatttgtacaagtttgatccatggcagcttccagagatggctctttacggtgagaaagagtggtactttttctctcctcgagaccgaaaatacccaaacggttcgagaccgaaccgggctgccggaagcgggtactggaaggctaccggagctgacaaaccgatcggaaaaccgaaagcccttggaatcaagaaggccctcgtgttctacgcgggcaaagccccaaagggagtgaagaccaattggatcatgcacgaatatcgcttagccaacgtcgacagatccgcctcaaaaaaaaacaccaccaccaacaacttgaggcttgatgattgggttttgtgccgaatttacaacaagaaagggaagattgagaagtacaatggtgttgcggtggtggatcagaaagtggccaagttatcagaaaggaggttcagttccagcacgagaccaagcctcagatcaagatgtacggccacgatgatttcaggaa

SEQ ID NO: 219268 - DNA, 548 bp, Glycine max
gaaacagagcatggctcctctcacattctccttcttcttcatccttatctcttacatttcttcatcatcagaagcgggatcaatcggaataaactatggaagaattgcgaacgacctacctacaccggcgaaagtggtggagcttcttaagagtcaggggctgaaccgtgtgaagctctacgacaccgacgccaccgtcttaaccgcgtttgccaactcaggaatgaaggtggtggttgccatgccaaacgagcttctcgccaacgccgccgcggaacagtccttcaccgacgcgtgggtccaagccaacatctccagctactaccccgccacgcaaatcgaagccatagccgtgggaaacgaagtgttcgtggacccgaacaacacgacaaagttcctcgtacccgccatgaagaacgttcacgcttctctagtcaaatacagcctggacaaaaacattaaaatctcctcacccatcgcactcttcggcgctccaaaactcgttccccgcctcatccggttcctttcaaaaccgactcctcgaaccg

SEQ ID NO: 219269 - DNA, 545 bp, Glycine max
aattgttgtggttctcttcatttgcatttatgtatcagcatttgcctggtcatggggtcccctaggttggttggtgcctagtgagatctttcccttggagattcgttcagctgctcagagtatcaatgtgtcggtgaacatgcttttcactttcttgattgcacaagtcttcttgacaatgctttgccacatgaagttcggcttgttcctcttctttgccttcttcgtgttgatcatgacattcttcgtctacttcttcttgcccgaaacaaagggcattccaattgaagaaatggggcaggtttggcaggcacaccccttctggtccagattcgtggagcatgatgattatggcaatggtgttgagatgggaaagggagctattaaagaagtgtagttagtcctcgtcttggtttatttttctcaatgactagcgttttagcttttgttggtaaatcatactattggtttcaatgtattgaattgttcctaaaaattaaaaagggttatttttcttatgtatcccctgcttcttcatatgaagc

SEQ ID NO: 219270 - DNA, 362 bp, Glycine max
acaaaagatattaaaagaaaataaaggatagaagatcataatatagtaaaatatctaataagacgataatacataatattaagaaaatatgaatatagatatatatgaaatattaatatgaataataaacagtatatataataaaaaataaaagaaaaaaatggaggaatacagcttggggaaaccatgcgaaataaattactgggtagacaagcaactagtaagaggacgaaaaaattaataaaaataataaagaaaaaataattaaaaaatagaaaaaaaataaaagggaaaaaaaaaaaaacagaaaaattgataaaaaaaaaaaaagaagggaaaaaaaagaaaaataaatctttttt

SEQ ID NO: 219271 - DNA, 598 bp, Glycine max
  unsure (1)..(598): unsure at all n locations
gcagcggcaacagaggagagaagatgaagttcaatccacgagtgtcgagcagccgccgcaagagccgaaaggctcacttcacggcgccgtcgagcgtgcggagggtgctgatgagcgcccctctgtcggcggagctccggtcgaagtacaacgtgcggtcgatcccagtccgcaaggaggacgaggtgcaggtggtgcgcggaacatacaagggtcgcgaggggaaggtgacgcaggtgtaccgtcgcaagtgggtcatccacatcgagcgcataacccgcgagaaggtgaatggctccaccgtcaacgttgggattcacccctccaaggtggttgtcacaaagctcaaattggacaaggatcgcaaggccattctcgatcgcaaggccaagggtcgtgccgccgccgataaggagaagggtaccaagttcgctcccgaagacatcantgcaaaccgtgattagtctctttatcatacaaaccaattntatgtatgggttttggtagcctttttctatctctccattttgcaggattttgttttcttttcttatgtaatcaaactggtttatcccatgagcttatcattaactatttt

SEQ ID NO: 219272 - DNA, 460 bp, Glycine max
aaaatagttaatgataagctcatgggataaaacaggttgagtaacattagaaaagaaaacaaaatcctgcaaaatggatagatagaaaaaggctaccaaaacccatacataaaattggcttgtatgataaagagactaatcaacggttcgcatgaagtctttgggagcgaacttgtgacccttctccttaccggtggcggtacgacccttggtcttgcgatcgagaatggccttgcgatccttgtccaaattgagctttgggacaaccaccttggaggggtgaatcccaacgttgacggtggagccattcaccttctcgcgggttatgcgcttgatgtggatgacccacttgcgacggtacacctgcggtacctttcccctaggaaccttgtatgttgcgtgcaccaccttgaccttgatcttcttgcggactgggatcgaccgcacgttgtacttcgac

SEQ ID NO: 219273 - DNA, 494 bp, Glycine max
  unsure (1)..(494): unsure at all n locations
gatgcttgcttgagttgccaactttaagtttgtcaatttccgtgctgcttggttggttgcaattgcaagtgaacaattggctagtgtgtactagttttgaatcacaatggcagaggatgatggttacacgaaagatggaacagtcgattactgtggaaatccagctaataaaaaggaaactggaacctggaaagcctgcccctatatcttaggaaacgaatgttgtgagagattggcttattatgggatgagcacaaacctggtgctttatttcaagaaccggctaaatcagcatagtgctactgcttccaagaatgtctctaattggagtggaacttgctatatcacaccattgattggggcatatttggctgattcctaccttggaagatattggacaattgctgttttttcaataatttatgctattggaatgacactcttgacattgtctgcatcagttnctggcatanaaccaacatgtcatggacatg

SEQ ID NO: 219274 - DNA, 503 bp, Glycine max
tttatttttttttttttttttttgaaggaaactcccaatgtgatgtataatgaaactggttccaatgtacaacttaacccacttttcagcgcagagttcccacaggtctcttatatgtatacaacatagacaccacaaggaatgctatcaagttcactacacttagcaatgccaatagccagaagaaataatctatgtgaccaaagtttagattatcaggtatccaccctggacttccattcctagggctgatctttgtcacaattgtcacaagcagagagctcaagtactgtccaagcgcaacagtggtaagtgagagagcagaacaaaagcttcgcatagcatcaggggcttgctcatagaagaacttcaactgaccaatgaaatagaagacttctgcacagcctatgatgaaatattgaggaacctgccaaaatattgccattggtatctcctcaagttgatagtagttgtgcctcctcaccattttaagccgtatgagc

SEQ ID NO: 219275 - DNA, 485 bp, Glycine max
tatataaccttttctctccggttaccagaaccgtaagttgctgaacatgaacccgcaatcgccggttcgggcggaaccggagcctccggttccgacgttctccccacggttcgcgctcacgtccggttcgcagcggaaaatcgcgatcgcggtcgatctgagcgacgaaagcgcctacgcggtgcgctgggcggtgcagaactacctgcgaccgggcgacgccgtgatcctcctgcacgtgcgtcccacgagcgttctctacggcgcggactggggctccgtggatctgagcgcggcggaggacgccgatgacggcggaggaggcgacgaggagtcgcggcggaagctggaggacgacttcgacaacttcacgtcgacgaaagcgagcgacctggctcatccgctggtggaggcgcagataccgttcaagatccatattgtgaaggaccacgacatgaaggagaggctgtgcttggaggtggagc

SEQ ID NO: 219276 - DNA, 462 bp, Glycine max
  unsure (1)..(462): unsure at all n locations
cagcacagtgacacgcacaagatatcatagtgaaacgtatggaaaataaataacatctaatacacaaaggacagagaataattcatagaatagacaagctaatggaaactgcacaaaccaagtgagcatagatagaagagtaaaaataaaaataattaaaaaaaaaaggcgggaactgcttgggaacnctagcggaaaaattacggagagagagctactagacggtggacgtccttaataattaattttttgaacacgaaaagaaacgtacataaaggtcgaccgaaaatgggaaagcaaggtaagcaaaaatacacaagggaaaaaaaaaaacatggaaggaaaaaaacaaaaagcataaaagggaaaatgcagggatggaaaacaatataagaaacactatctaggaaaaacaaaagccaacgcaagcaaagagaaaatagcaaactcaaaattaaaccc

SEQ ID NO: 219277 - DNA, 812 bp, Glycine max
  unsure (1)..(812): unsure at all n locations
acacgaaaaaaaagaacaagaagaaaaaagaaagaaataaagaaaaaaaaaaacaaaaagaaagaaaatgaaagaaaaaaaagaaagaataaataataaatggaagcanaaaaacacaaaaganaaaaggcgggaacccctgggaacacnaganggaaaaataaccgggaagacgagaacactaagaggaggacgaaaataaaaaacaaaaaaagaaaaaaaattaaaaacaaaaaaaagtaaaaataaaacaaaagggaaaaagaaaaaaaaataaaagctgctgaaagaaaaagggaaaaaaaaaaaaaaccaaaaaaagaaacaaaaaaaaaaacaaaaaaaaaaaaaaaaaagaaaggaaaaaggggcaaaatgaggggaaaaaaaaaaaaagagacatagaagactaagataaaaggaaaaaaaaaataaagggaaggaaaaaatataaaggggaaaaaaaaaaaaaagggaagggaaaaaaaaaaaaaaaagggggaaaaaaaaacccaggaaagaaatgaaaaaaaaagaatcaaaaaggaggccaaaaaaaaagggagaaaaaaaacaagaacacacaagggggaaaaaaccaaaaaacggaaaaacaaatggcagggaaaggggaaaaaaaaaaggacaaagaaggcggggggataaaagggaaaaagaaaaaaacaagagaaaaaaatcgaaaaagaaaaaccgagaggaggcaaaacaaaaaaaattaaaaaagggaaaaccaaaagaaaaaaaagggggaaaagataaacaaagacagggacagggaaaaacacggggag

SEQ ID NO: 219278 - DNA, 558 bp, Glycine max
  unsure (1)..(558): unsure at all n locations
cgaaaaagaagaaaaaaaaagcaaagaaaatcctgtttcccgataaaaaccccgtccgtacatggtctggtcacgcggatcgggttgattgagatgcacaccgcgagcaggagcaacggcggcggcggcggcgtgctggcgtcgcggacgagttcgcggtcggtgacggagacggtgaacgggtcgcacaagttcgtgataaagggatactcgctggcgaaggggatcggagtcggaaaacacatcgcgagcgagacgttcacggtaggagggtaccagtgggcgatatacttctaccctgacggcaagaacccagaggacaactccgcctacgtctccgtcttcatcgcgctcgcctccgagggcaccgacgtccgcgccctgtttgagctcacgctgctcgaccagagcgggaatgggaagcacaaggtgcatagccacttcgatcgctcgctcgagagcggcccctacactctcaaataccgcggcagcatgtgggggtataagagatttttcaaacggctcaactcgaggcgtcaactttnctcaaggatgact

SEQ ID NO: 219279 - DNA, 514 bp, Glycine max
ctcactcgcatttattcaccatgactaagcaacaagctaattggtctccatacgataacaacggaggatcatgtgttgcaattgctggagcagattactgcgtcatcgccgcggatacgaggatgtccaccggttacaatatcctcactcgcgattactccaaaatctcccaactggcggagaagtgtgttatggcttcttctggttttcaagctgatgtcaaagctttgcagaaggttttgtctgctaggcatttgatttatcagcatcaacacaacaaacaaatgagctgccctgcgatggctcagttgctctcaaacactctttattacaaacgcttctttccttattatgctttcaatgttttgggtggccttgacaatgaaggaaagggatgtgtcttcacatatgatgctgttggttcctatgagagggttggatatagctctcagggttctggatccacacttattatgccatttcttgataaccagctgaagtctcctagcccact

SEQ ID NO: 219280 - DNA, 519 bp, Glycine max
aacgctataaatagactcggacaaaaatccaatgcaaatttaagtgaaagcacagtctagttataatgtgagcagactagtacttgttcaaagcaatttcactggaaacgctatttttaatttcacctcatgtgaaaaacccactatgtcatttaaaattctagaagcatttcaaacattctcaatccaagtctggtatctccaacagtaaatttctgtaaagcattaatctttccttaggtccatgtattcacgacgaataccactggcatttaggacgacgatttcaaccttatctccagtgtatatatctctcttagttgcagatgcaaaaacagttttgaccagatcaactgcttctgcttcagacaatggagtaacagcatcctgcgcaggtaacaggagtgggctaggagacttcagctggttatcaagaaatggcataataagtggggatccagaacccttggagctatatccaaccctctaataggacccacagcatcatatgtgaagaca

SEQ ID NO: 219281 - DNA, 574 bp, Glycine max
ccgagttcttgcactccttggaccaattcctcgttttgacattcattcccagaaaacttttccacacaccaaattccaaatataccaaaattccaattttccttcacaaagaacacaacacaaacatgaagactcgcacctctgccaaaatctctgcaacatggattccaattttctctgtcttttccttcattattggtatgctcgtcacaagcaggatgtgggacccaccagaatcaaacgggttgcttcttgcgcagcatcagcgggaccaacaacaactacaagtgatctcaggggattgtgctaccaagaagatgttgcccaaggatgcagtgagcgaattgcagaaaacccatgaagccattcaagctttagataaacaagtttcgatgcttcagatggaactagcagcagctaggagttctcgtgagagtgggatctcggattctaattcttcaaccaccacttctggggaaggtgctccaaagaagaaagcttttatagtgattggcataaacacagctttcagtagcagggaagagggcgtgattccgttagagagacttggatg

SEQ ID NO: 219282 - DNA, 541 bp, Glycine max
agcgtttgggttctcccaatttgagtcctgcgtcgtcccattccaggtctttgtctcagccctcttttttctctctggattccttgcccccattgagtccttccccttacaaagaaccttccttttccgactcaatttcgaccgacgtgtctgctgaggaaagcttgcctacctctcatgcccctttgcctaatcggggtcatgcgcttcagcttggccattctcttcctcctcgtaaaggacataggcgctctagcagtgattcccctttaggaatcgctgattttattcagtctgcccctcagtttgttccctctaagacttggagcaatcgtgaaaattcggcatctaggggagggaactctggttttgagaagccgattcagttagtgttaaaggaaccgattaaggatatggaccgtgttgatggttttggtggagaacctatggttgggaggaaagaggatgatgcactggatgatttggttagtgcatatatgaatttggacaatattgatggtctcaattcttctggtatgga

SEQ ID NO: 219283 - DNA, 561 bp, Glycine max
ttctgtctctgtgtttgcggctgaggattccgaacgagcgaccttcttcgtttctcgcaaagtttaagtcatcatgggtaaggaaaagactcacatcaacattgtcgtcattggacatgtcgactctgggaagtcaactaccactggtcatttgatctacaagcttggaggtattgacaagcgtgtgattgagaggttcgagaaggaggctgctgagatgaacaagaggtcattcaagtatgcctgggtgcttgacaagctcaaggctgagcgcgaaagaggaattaccattgatattgctttgtggaagtttgaaaccaccaagtactactgcacagtcatcgatgcccccggacatcgtgactttatcaagaacatgattactggtacctcccaggctgattgtgctgtccttatcattgactccaccactggtggttttgaagctggtatttctaaggatggacagactcgtgagcatgctcttcttgctttcacccttggtgtgaagcagatgatctgctgctgtaacaagatggatgccactaccccgagtactct

SEQ ID NO: 219284 - DNA, 529 bp, Glycine max
ggcaaaaacttaaaaatataacttaaacaaaacacctaagactctgcggggataaaactactataaaggagtaaccacgatgatgatcacatgtgctagcaaaattgcccaaatgcaatcacttcttcttggcagcggccttggtgaccttggctccgggggggtctttcttctcaacactcttgatgactccgacagccacagtttgacgcatgtgcctcacagcaaaacgaccaaggggaggatactcagagaaagtttcaaccaccatgggcttgggtggaatcatcttaaccatacctgcattaccattcttcagaaatttgggctccttctcaagctccttaccagatcgccttggaatcttggtcaagatttcagaaaacttgacagcaatgtgagaagtgtggcaatcaagcaccggggcgtattcatttccaatctggccagggtggttcatgataatgacttgagatgtgaagttggcagcttccttgggagggccattcttgaggtggatgcacaaaac

SEQ ID NO: 219285 - DNA, 477 bp, Glycine max
tggcaatgctacacattcaatttttgatagatataatgattcatatcttaggagaattggaaccaatgttctgtcttatgtcaatatggtctgtgcaagtctgcgtcattcaattcccaagtcaattgtctattgtcaagtgagggaagccaaacgaggcctacttgatcagtttttcaccgagctaggcaaaattgagcccaagcgtctgtcctcatttctgaatgaggatcctgcaatcatggaaagacgaagtgccctatcaaagagacttgagttataccggagtgcacaagctgagatcgatgcagttgcatggtctaagtagatatgatatagatgtgtatgctacatcgcgttattgttaatattgatcaagaaatctctctctctctctctctcctatttttggtaggcttttgctctgtaaaacgcatattgtaattgtcatctttaatagaaaggtttttggtgaga

SEQ ID NO: 219286 - DNA, 452 bp, Glycine max
tttgtttttttctttttttttttttttatctcaccaaaaacctttctattaaagatggcaattacaatttgcgttgtacaaagcaaaagcctaacaaaaattggagagagagagagagagagatttcttgatcaatattaacaataacgcgatggagcatacacatctatatcatatctacttagaccatgcaactggattgatctcagcttgtgcactccggtataactcaagcctctttgatagggcacttcgtttttccatgaatgcaggaaccttattcagaaatgaggacagacgcttgggctcaattttgcctagctcggggaaaaactgatcaaggaggcctcggttggcttccctcacttgacaatagacaattgacttgggaaatgaatgacgcatacttggccagaccctattgctttagacagaacattggtggcaattct

SEQ ID NO: 219287 - DNA, 584 bp, Glycine max
tgagaaacatggcttccttaagctccttagtgctgctccttgcagctctaattctatcccctcaagttcttgcaaactatgagaatcccccagtgtacaagcctcccactgagaaaccaccagtttataagcccccagttgagaagcctcctgtttacaaacctccagttgaaaaccccccaatttataagcctccagtagagaagccaccagtgtacaagcccccagttgagaaacccccagtgtacaagcccccagttgaaaaaccaccagtgtacaagcccccagttgagaaaccaccagtgtacaagcccccagttgaaaaacccccagtttacaagcccccagttgaaaaacccccagtgtacaagcccccagttgaaaaaccaccagtgtacaagcccccagttgagaagcccccagtttacaagccctcagttgagaagccaccagtttacaagcccccagttgagaagccaccagtatacaagccaccagttgagaagccttcagtgtacaagccaccagtagagaagcctccagtttacaagccaccagtagagaaacctccagtttacaagccc

SEQ ID NO: 219288 - DNA, 580 bp, Glycine max
  unsure (1)..(580): unsure at all n locations
ctcctcattaagccgccactttctctctctttccttttcgtcttctttttcttcttcgttgggtttgttgccacttagtaagaaagagggtgtgaagagagtggggagaagatttggtgttgtggccatggcggagtctaagagtactgtgcttgttacgggagcgggtggtcgcacaggacaaatagtttacaaaaaattaagagagaggccaaaccaatatgtggctagaggtctggttagaacagatgaaagcaaacagaacattggtgctgcagatgacgttattgttggggatataagagatgctgaaagtattgttcctgcaattcaaggtatagatgccctcataatcctcacaagtgcagttccacagataaagcctggttttgatccaaccaaaggacaaagaccagagttctattttgaggatggggcatatcctgaacaggttgactggattgggcagaaaaatcaaatagatgtcgccaaggctgctggagtgaagcacattgtgttagtagggtctatgggtggaacggaccttaaccatccttttgacagcttgngtaatgggaat

SEQ ID NO: 219289 - DNA, 494 bp, Glycine max
aacactagataacatgaaatgaagtgctgataaaaagacattgggttatctcaaggcgtgcaggaacagaactagtgaagtatataatatgccaaaaaacaagtctttactaaaattaaattttgattaagatagcactaatacccatatggataaatccacaaggataatgggaccatgacaacaaaattcaaaaatcaaaagcgagtggtgatctgggaaaaaaaagcctagaaaacatttgatgttgaacctgctccctcaggttttgatgccaagtcaaaagccttgaatatagcctcctcaaaacttagtgcctgaatgcagacttttgcaacattagaactacttatgggtctggattcaggctggagaaacttataattccttcctacaaggaggttaccgaagaccttccatctttggataggaagacaaccagcccctaaaaattaggatatggggatggccggaaataagccaagaaattggtt

SEQ ID NO: 219290 - DNA, 562 bp, Glycine max
gggcttttatctctttccctctagcacttcttggcacagttgttggaagaaactggagtggtgctccaaataatccatgccgtgtgaagaccattcctcgtcccattcctgagaaaaagtggtacctcacaccatctgtagtttctctgatgggaggactgcttccctttggcagcatattcatcgagatgtattttgtattcacttccttctggaattacaaggtgtactatgtctatggcttcatgctactggtttttctgattcttatcattgttactgtttgtgtgacaattgtggggacatactttttgttaaatgctgagaactaccactggcaatggacttctttcttttcagctgcctcaacagctgtttacgtgtatttgtattcagtatactactactatgtgaagacgaagatgtcaggcttcttccaaaccagcttctattttggatacactttgatgttttgtcttggactgggaattctgtgtggagctgtgggttatcttggttcgaatctgttgtgaggaggatctacagaaacatcaagtgtgac

SEQ ID NO: 219291 - DNA, 690 bp, Glycine max
aaaatagataaaaatagaaaaatataaatagaaaaaataataaagatgaataagagaaaatagagaatgaataaaaaaaataaaaataaaaaataaaaaaataagataagtaaaaaatagaattaatgtaattataaagaaaaaaggaggaatactgcttggagaaaacaaacagaaataatttaaggataaaagagaaaaatagtaagaggaacgaataaaaaaaaaattattaaaaaaaaattataaaatatataaatatatataaaataatagggagtaaattaaaatataaaaaattttttataaaaaaaaaaagaaaaaaaaaaaaaaaaaaaaaagaaatgggaaaaaaaaaaagggaggataaataaaaaaaaaaaaaataaaaatggggggaaaggaaatataaaaaaaaaaggcgttaaaaaaaaagaaaaaaaaaaaaaaatacataaaaataaaaaaaaaaagaaaggaaaacatgaataaaaaaaaagaaaaaaaaaaaaatatggggattaattttgaaaaaaggaaagggaaaaaaaaaaaaaaatttaaaaagggggggataggaaaagggaaaaaaaaaaaaaataaaaaaaaaaaaaagggggggaaaaaagaagaaaacaaaaaataaggggaaaaaaaagagggggaaaaaaaaaaaaaaagcgtttattt

SEQ ID NO: 219292 - DNA, 520 bp, Glycine max
  unsure (1)..(520): unsure at all n locations
atttcattgaggctagagaaagtggtgatcaatatgtcaaagaatccaaaagttttctttgatattctaattggaaagatgaaagctggacgagtagtgatggagttgtttgccgatgcaaccccaaaaacagctgaaaacttcagggctctctgcactggggaaaaggggattggacgatctgggaaacctttacactacaaaggttctgtatttcatcgtattattccagaatttatgtgtcagggaggagatttcacaagagggaatgggaccgggggtgagtcaatctacggttccaaatttgaagatgagaatttcaatttgaggcataccggtcctggtattctctccatggcaaatgctggagctcatactaatggttctcagttcttcatatgtactacaaagacaccatggcttgatgggaaacatgttgtgtttggaaaagttgttgatggatacagcgttgtgcaggagatggagaaagtgggttcangaagtggcaggacatctgaac

SEQ ID NO: 219293 - DNA, 518 bp, Glycine max
agtgcttcatccttattcattctaatttaccaatcaactacggatattcgagcctattgcttccacaattctatcaacgtaatctctgaccaactacagacagctacgcatttttagttggaacaaatgtaaaagcagatttaggagtacaaatttgagagttacattaatactggacaattgactcctagttacacaaatcacttattataatactagtgatttgcattgaatagcaacaaacatgtctcgaaacatcgttgtatcaagactcacttctctacaatctggccacaatcttctattactaccggttcagatgtcctgccacttcctgaacccactttctccatttcctgcacaacgctgtatccatcaacaacttttccaaacacaacatgtttcccatcaagccatggtgtctttgtagtacatatgaagaactgagaaccattagtatgagcttccgcatttgccatggagagaaaaccaggaccggtatgcctcaaattgaaatc

SEQ ID NO: 219294 - DNA, 540 bp, Glycine max
agaaaagcgtgaatcatgtcggacgaagagcatcacttcgattctcaggcggatgcgggagcgtccaagacgtatcctcagcaggctggtaccattcgcaagaatggctacatcgtcatcaaatccaggccttgcaaggttgtagaggtctctacgtcaaagacaggcaagcatggacatgcaaagtgtcactttgttgcaattgatatttttaatgggaaaaagcttgaagatattgttccatcatcccacaactgtgatgttccacatgtgaatcgcactgactatcagcttattgatatctctgaagacggctttgtgagtctgttgactgataatggaaataccaaggatgatctgaagcttcctactgatgaggcattgcttgctcagattaaagatggattttctgaaggaaaagatcttgtggtttctgttatgtctgcaatgggagaagaacagatctgttcactgaaggacatcggtcccaaaaattaatatgatgctatggctgtagctatagctgatagcacgcttttt

SEQ ID NO: 219295 - DNA, 729 bp, Glycine max
  unsure (1)..(729): unsure at all n locations
aaaattggttaatatattaacaaataatatatatataaagaataaaaaaagaataaatactaaataaagagaatatataatttaaataataaataataatatataataaaaaaaataagaattattaaataatatataaataaaaaaagaaaaaatggagaatagcatatggagatacnatagaaaataatttagggataaaaagataaataatatgtggttgaaatttattattttttataaaggagaaaaatttataaatgtgaaaacaaaaaaagaaggcgagaataaataaataaaatatttgggtaaaaatatggtaaaaaaaagtgatattaaaaaatttatataaaaataataattaaaatgaaaaaaaaaaaaaaaaggggtaataaaataaaaaataaacaaaaaataaaaaaaaaatgaagattgtttatagaaaattttaaattaaaacaaaaaaagaagagtattattaaaaaaatggaaaaaaagataaaatataataaaaattgtttatataacaagtaatttgaattataagaaaagaagaaatataaaatttatgaaattaaaattagaaaaaatgaaatggaaaaaaaattatattgttagtaataataagaaaaaaaaagggtggttataaggttaaagttaaaaggtaaaaaaataaaaataaatttatgggaatagaatgaattttaaaagaaaaaaaattggttatat

SEQ ID NO: 219296 - DNA, 512 bp, Glycine max
gttgattttgcaggtggttttgactcccacacatttagcaatagtgatggagtatgcagcagggggagagctctttgagaggatatgcagtgctggcaggttcagtgaagatgaggctagatatttctttcagcagctgatctccggtgtccatttctgtcataccatgcaaatatgccacagagatttgaagctagaaaatacccttctagatggaagtcctgctcctcggttgaaaatttgtgacttcggttattccaagtcatctttgctgcattcgcgaccgaaatcaactgttggaacaccagcttatatagcaccggaagttctttctaggcgagagtatgatggaaagttggctgatgtatggtcatgtgcggtgactctatatgtcatgctggttggagcatatccctttgaggaccaggatgatcctaggaattttaggaaaacaattcagcgtataatggctgttcaatacaaaatccctgattatgttcacatatctcaag

SEQ ID NO: 219297 - DNA, 847 bp, Glycine max
  unsure (1)..(847): unsure at all n locations
aaatagagggataaataataaaagaaaagaaagaagaaaagagagagaaaagcgagaaaaaagaaaaaagagagaaaagagaaaaggaaaaagaaaagaaaaagaaaaaaaaaaaaaaaaaaaaagggggaaccactgggaaaccaagggaaaaataaagggaagaagagntaaaagnnggaggangacaaaaaaaaaagaaaaaaaaaaaagaaaaaaaaaaggaaaaaagaagaagagaaggggagaaaaaaaaagaaaagagaaaaaaataaaaggcaaataaaaaggagaaaaaagagaaaaaaaaaaaaagggggagatataaaaaaagaaaaaaaaagaaaaaaaaagaaaaaaaaaaaagaaaaagggagaaaaaaataaaatggaaaaaaggaaaaaagggaaagaacataaaagagaaagaagaaaaaaaaaaataaaataatagtgaaagaaaaaagtaagaaaacaaaaaatgatgagaaaaaaataagaaaagaaaaaaaagggataatgagaaggataaaaagaaaaatggggagagagaagataaaaataaggaagaattgaaaggaaaaaaaaaaatataaagaggggaaaaaaaaaatattgaaagaggagaaaaggcattgggtaaagaatacaaatgggaaaagaaaaaaaagcgtggaagcatgaaaaaaaggagagagaaaaatggggaaagaggactaaaaaaaaaaaaggggtggaaaataaaaaaagaataaaaaaaaaaagaccataaaaggaagggaacaaaaaataaaaaaaaggggggaaaaaaaaaaagaaaaaaggaaaaaaaaaaggaatggggaag

SEQ ID NO: 219298 - DNA, 602 bp, Glycine max
  unsure (1)..(602): unsure at all n locations
gtttgcgagatagaagcgtaagcagcggctaccctaacctcgtcttcctctctactaatttcagctatggccgacgaagctgtggttgttccagatcccacccagatcgatgtcaagctctttaaccgctggagcttcgaggatattgaggttactgacatttcactggctgattacattggagttgcggcatccaagcacgccacatatgttcctcacaccgccggaaggtactccgtgaagcggttcaggaaggcgcagtgccccattgttgagaggctcaccaactctctcatgatgcacggtagaaacaatggcaagaaactcttggctgttaggatcatcaagcatgctatggagattattcatttgttgactgaccagaaccccattcaggttattgttgatgctgtcatcaacagtggtcctcgtgaagatgcaacaagaattggttctgctggagttgtaaggaggcaggctgtggatatttcaccccttcggcgtgtgaatcaggctatatatcttctaacaactggtgcacgcgaagctgctttcagaaatattagacaatngctgaatgcttggctgatgaacttataatg

SEQ ID NO: 219299 - DNA, 483 bp, Glycine max
cgtccaagcaacaaaatcattcattcgcaacttgagaagccagcaggcaaaaaactaaaaagtatctaatgcaagcaaaagatttaaaatatcattaaatgaataacatcgaccaaaacaaaatctccacatatcgtaatattgcttccacaagctgctcaacggtttgccttggcaactctctcaatttcatccttttttttgatagcatagctgttggacgacccttttgctgcattaataagttcatcagccaagctttcagcaattgtcttaatatttctgaaagcagcttcgcgtgcaccatttgttagaaaatatattgcctgattcacaccccgaaggggtgaaatatccacagtctgcctgcttacaactccagcagaaccaattcttgttgcatcttcacgaggaccactgttgatgacagtattcaacaataacctgaatggggttttggtcagtcacaaatgaataattctc

SEQ ID NO: 219300 - DNA, 601 bp, Glycine max
  unsure (1)..(601): unsure at all n locations
ctcctctgattcattcacccagtttttttttttctgtcctcttttcctctcagaggagcctctgagtctgctcaggtctcaaatttaaaggcttttaacaaaagggtgttccttgtgaagagatccttttgtttttgaggtgtgaagggaaagagaaaaaaaaaaagatgaatcagtgtggttatcagcagaagaatgctttgacaagctgtgaggagatgaggatggaatcagtggtgtgccctaaaccacgaagattgggcctgttgaaccactcaacctttgatgaccacatcagacccttgaggccaccctttatcaactaccaatcagaaattgaagattcaggagttggggctgagcttctggacatcattctccccaagagatctggagggcaagtggcttcatcacccccatttttctgtggatctccacctagcagggcttcaaaccctgtgatccaagatgagcaatttggtagtaatggtaatgagaattttggtgcattttccttggcacccccttcaccatcttcctcagcaagaggctgtgttaggatgaaagttggtcacaccccanctgcagtgaggattgaggg

SEQ ID NO: 219301 - DNA, 511 bp, Glycine max
  unsure (1)..(511): unsure at all n locations
ctcttcctcttctccgaccatgctgcttccttcccactcccaccctcaaaccctcactcacaagacccacacccttcttacctctcaaatcgaagaagaaccctcaaaacggcgccgttgggactcgcatgtcgaacaccgcaactccaccaccgacggagcggctaatctcaatcgcatcctacgcactcccattcttcaactccctccagtacggccgctacctcctggcgcagaaccctaccctcgccgtcctcttcgaccccatcgtgcccctcctcgccttctacagatccatcccttactcctccttcgtcgccttcttcgcgctctacttggggatcgtcagaaaccctagtttcccccgctacgtcaggttcaacgccatgcaggccgtcaccctggacgtnctnctcgtcctccccctcctcttccaccgcatcttctcccccgcccgcggcggccccatcctcgtctggtccagcaacgccattttcatcttcagcctcat

SEQ ID NO: 219302 - DNA, 575 bp, Glycine max
  unsure (1)..(575): unsure at all n locations
gccggcttcgcccagaccaacaacaacgtgcaactcttccttgcctccttcagaacaaacggctccaggaccttgtctgagctcatcagaaaacaccaacaaactccctcccccgtcacctgcattgtctatgactcatttttcccctgggttctcgacgtggcgaagcagcatggcatttacggagccgcctttttcaccaactctgctgcggtctgcaacatattctgtcgcctacacaatggtttcattcagctccctgttaagatggaacaccttccccttcgtgttccggggcttcctcccttggattcccgcgctctccccagtttcgtcaggttccccgaaagctaccctgcttacatggccatgaaattgagccaattctccaacttgaacaatgcggattggatgttcgtcaacacctttgaagcattggaaagcgaggtgttgaaaggcttaacggagctctttccggcaaagatgataggaccaatggtcccttctggttacttggatgggaggattaaaggggacaaaaggtatggagcangtctatggaagccgctaactga

SEQ ID NO: 219303 - DNA, 500 bp, Glycine max
agatactgaaaaaggatgtcatacattcacatagggttttatgttgaaaaaatgaacacaaatgcacccagaatacatgcttccactaacaaataacaacttatgatgagcattggcactcagtttacattcaaacttccatttttatctgcattcatcaaatgatccacaatatgattaatgtgcttatcagagctgccttcttcaccaactggttccctagccaacttcttccatttattggcattccttctaatctcttggcttttttgacccttcatcacattcttcaaactttggacaaatttttgctttctcacaattcctttctcatccttcttaggccacacaccaacctcccagatttcatccaaaaatttagcatcaggcaactggtcagcccactgtggcaaacacaccatcggaacgccgaggcttagactttcgagggtggaattccagccacaatgagtcacatagcattctagtggtttggtgag

SEQ ID NO: 219304 - DNA, 520 bp, Glycine max
atcatgcattatacaataacagcagcaaaggtcctatcattgggaacattcaaacttacacaagttttcactaattcaataattttaaagggatatatcatatatatgaaatttattttcttcttttcactttcacaactagaaagagaactcagtccctcacagggaccatgtcatcattggtttgatagatttactcccccatacgaatgatgcatctgatggactcccctttcagcatgtaatcaaaagccttgttaatctcagagaatggaactgtgtgagtgatgaatttctccagttccaattccccattcatgtacttctccacaacaaaaggaaggtcagtgcggggtttgtagtttccatagaaggtaccctttagagtcctctcattcaagaaattcactggatgagttttgaatgcatcatctttgtttggcactccaacaagtacagtaacaccccaacccttgtggacgcattccaatgcttgaaaacatgggttggatgctgccag

SEQ ID NO: 219305 - DNA, 572 bp, Glycine max
  unsure (1)..(572): unsure at all n locations
gtcctcctaaggttggagatgagtcctatgagtcattcaatgctgagaaggagaatattttggagtcccttgctaggcgtgccaagacactagaagatgcattcaacaaattagagggtgtaacatgcaacaaagcagaaggggcaatgtatctgttcccccaaattcgcctgtcccaaaaggctatcaaagctgcaggagatgcaaatacagcacctgataatttctattgcaaacgcttgcttaacgcgacaggagtagttgttgttcctggttctggttttggacaggttcctggcacatggcattttaggtgcaccatattgcctccagaagaaaagattccggccattgtcacccgcttgacagagttccatgaaaaattcatgaatgagttccgtgactaagtcctagttgaattttatccgtcatttttacgggtacccaattgatatttgatgagcgatggattttgtagttagagaaaatagtctctctttgttttctggaataaagttngtaactccttattatagttgcattctgaatatgcagggcgtgaaaagatattt

SEQ ID NO: 219306 - DNA, 499 bp, Glycine max
  unsure (1)..(499): unsure at all n locations
gagagagagaaagtggagcgagaaaaatactgaaaccctccttcgccattctcgttctgctccgtccctctcgatcttcgccagggattctctggcaggtattgttgatctgttcggttctagatcttttcgggcgggttttgttgacggctccgtcatgtcttccctcagcagagagcttgtttttctcatacttcagtttctcgatgaagagaaatttaaggagactgttcacaagttggagcaagaatcgggatttttctttaacatgaggtattttgaggatatggtgacgaatggggagtgggatgaggtggancaagtacttgtctggttctacgaaggtggatgacaatagatactccatgaagatcttctttgagatacggaagcagaaatacttagaagcattggacaagcaagatcgagctaaagcggtggatattttagtgaaggattcgaaagtatttgctgcatttaatgaagaactttttaagga

SEQ ID NO: 219307 - DNA, 550 bp, Glycine max
tgaagacagagattctttttatggtggtgagtcaatgtctagcagaggtcaactaagtttgcgaatgcaaaaagaaggtaatttgtggcgtgaattgtgggaaacatctaaatcagttccagctgttaaacagacacctctctatgatgaggatttagcagtggagggcattctagatgcatttgaggacatccagccttcagagctttacagacagctgtttgtttctcttctcggtttaggatttgcaattgctgaaactatgctgtctggcgacattgacacctcaaagttgttcaatgattgcaaggagtacatagttaccacttctcaaagtgacggattccatgagaaagtcaatgaacttgttcagatgtatgaaacggtggagaaaatgttgctgaatccagacaaggcactgaagatgatgaagcacatggaagaatcaactatgactactgatgaaccaaagcgcaggttttctactggtgagccatagcaccggtttaagcgatttagccatatctttggtggcaaaagataactgttg

SEQ ID NO: 219308 - DNA, 625 bp, Glycine max
  unsure (1)..(625): unsure at all n locations
ctttcaagcgcaggaatggaggtcgcaacaaacacggccgcggccacgtcaagttcattcgatgctccaactgcggcaaatgctgccctaaggacaaggctatcaagaggtttctggtgaggaacattgttgaacaggctgcagtcagagatgtgcaggaggcttgtgtctacgaacaatacacgcttccgaagctgtatgtgaagatgcagtattgtgtttcctgtgctatccactctcatgttgtgagggttcgatcccgcactgataggagaaagcgtgagcctccacagcgattcatcaggcgcagggatgatgcaccaaggcctggtcagcctggtcaagccccacgtcctgctggagtaggagctcctgcccgagcttaaaagaaaattccaagtttttggggcttgtttgttcagttttatgttgcaaacttaaattccatttgctgtttatttttgaaatttcagttttgtgtagggatattatattctcttctagttgtttgcttcagtggtcggagaaaattttctatcgttatcatttgatggctctgaggagaatgtaacctgatatatgatatantttagcgttttgaagtaaaaaaaaaaaaaaagggcgg

SEQ ID NO: 219309 - DNA, 497 bp, Glycine max
acttcaaaactctaaaatatatcatatatcaggttacattctgctcaaaaccatcaaatgataacaatagaaaattttctccgaccactgaagcaaacaactagaagagaatataatatccctacacaaaactgaaatttcaaaaataaacagcaaatggaatttaagtttgcaacataaaactgaacaaacaagccccaaaaacttggaattttcttttaagctcgggcaggagctcctactccagcaggacgtggggcttgaccaggctgaccaggccttggtgcatcatccctgcgcctgatgaatcgctgtggaggctcacgctttctcctatcagtgcgggatcgaaccctcacaacatgagagtggatagcacaggaaacacaatactgcatctttacatacagtttcggaagcgtgtattgttcgtaaacacaagcctcctgcacatctttgactgcagcctgttcaacaatgttcctcacccagaaacc

SEQ ID NO: 219310 - DNA, 598 bp, Glycine max
  unsure (1)..(598): unsure at all n locations
gccttcgccacctctgtctccggccgccgtgacctcgtcggagactttctccggctgccctccgaaactgataacgacgacaacttcaagggcacccggtgggccgtcctcctcgccggttccaatggttactggaattacagacatcaggctgatgtttgtcacgcctatcaaatattgaggaaaggtggtctgaaagaagaaaatattattgtttttatgtatgatgacattgcattcaatggggaaaacccaaggcctggagtcatcattaacaaaccagatggaggtgatgtttataaaggagttccaaaggattacaccggcgaagatgttactgttgataacttttttgctgctttacttggaaataagtcagcactgactggtggcagtgggaaggttgtggacagtggtcctgatgatcatatatttgtatactatactgaccatggaggtcctggggtgctcgggatgcctgctggtccttacttatancgcgatgatctgattgaagtcttgaagaaaaagcatgcttctggaacatantaaaacctagtattttatctggaggcatgtgaatctgggagtatctttg

SEQ ID NO: 219311 - DNA, 583 bp, Glycine max
aaatacaagttgtcattaatattaaacaataattttggcatcataaattcttccggaataattatacaaaagtgaccagggaaaacccgatctgccagttgcccactgaataaaaacacacattatattactatgtgttgtcatacatgcattgtaatgagtggatattccaaagcaattggtccctttatccctccttaatccttatgccgtaaatggcaccatcccttgtaaattgtaattgcttcttcagaaatagaattatacaaaggtagttgcaatatctatttgccaaactataaatgtaaagacccttcttcccaatcctagtagtgtcccaattgtatttacaaaggcgggacaagatatgtatatacaagtacaaccatgtaacataatgtaacaataatcatactttggtctttactagtgcacattacagggagttattatgcactgaaacccctttgcagagaactccagggattggaaggaatactgacacaagcttgtgctgaagcctcagccatttggtcatttcttatccctacattgcagatgtttgcaaaggacctcatgtgtt

SEQ ID NO: 219312 - DNA, 600 bp, Glycine max
  unsure (1)..(600): unsure at all n locations
acacaacctacgaaagcaacgaaacatcaaacttgtacggagcaatgagctctcatgctttaaacaccaatgtgaatgctcttgatcactttgagatacccgtaacgacgccgtttcaggacgtttctgcatcggtgccgtccatagcagcgttctgccggagttctagcttccggaacattttcttgacagagaattgggcggagctgccgttgaaggagaacgacaccaatgacatggtcatctacggtgctttgcgtgatgctgctgccaccggatggttccccgccaatggaaatgaggtgagtaatgttagtgtagctgtgaaaatggaaaatgagggtcaaaatagtaaaactacagccgcgcgtggcactcgcacgcctccaaagaaggggttgagctaccgaagcgtgcggaggaggccgtgggggaagtatgcggcggagattagggacactaacaggaatggtgtgagagtgtggcttggaacctacgaaaccgctgaggatgcagctttagcttatgatcgagctgcatttaagatgcggggctcaaaagctaagctgaattttcctcatttaatnggctcggatcatg

SEQ ID NO: 219313 - DNA, 547 bp, Glycine max
aattatattaataattataaatataatttttatataaattaaaaatatatttaaatagggataaatataaaaaaaaaataaaataatttatatgttatagaaaaaaaaaaaaataggaataatagggtaataaaaaaggaaaaaaaaaatagagataaaaatagagaaaaaaaaaagaaaatagggaaaaaaaaaaaaagaaaaaagggttatgaaaaaaaaaaaaaggaaaaaaaaaataaaaagaaaaaaaaaggtgtataaaaaaaaaaagaaaatattctgttgcgttaaaaaaaaaaaaaaaaaatggaaaaaatggggaaaaagggggttttaaaaaaaaaaaatttaggtaaaaaaaaaaaaagtgttttaagtggggaaaaaaaaaaagataaaaaaaatattaaaaaaaaaaaggggaaaaaaatgggagaaagaaaagggggtctaaaaaaattttaaaaaaaaaaaaaaacaaaaaaaaaactcttcttgggggaattaaaaaaaatataaataattaaaaaggagaaaggaaaaa

SEQ ID NO: 219314 - DNA, 537 bp, Glycine max
caaaatccaatattcaccatattcttgaaccaaattaacaagcaaggctagtgtactctacttgcagcctgaagctactagcaagcatcgtataggaagatggagaagaacaaagttgatgaaaatcctgaagaatttaactatgagatgaaatgggttcgtgattcttcattggatcacaaaggaagagttcctctccgagcttcaactggttcttggaaagcttctctcttcatcattgcaattgagtttagtgagagattgagctactttggaatagctactagcttggtcatttaccttacgaaagttcttcatcaagaccttaagacagcagttaaaaatgtgaactattggtctggtgtcaccaccttgataccattgttaggaggattcctagctgatgcttacttaggccgttacaccgctgtgatagcatcatgcattggttatctcatgggtttggttctgctttctttgtcatggttcttaccaggtttcaaaccttgtgatcatcccagtacatgcaccgaacct

SEQ ID NO: 219315 - DNA, 572 bp, Glycine max
tagggtttttccatggccaccgtgatccgcaaccctatcctcttcccttccacctctcaccaccccaaccaaaaccacacattcctcactctccgcttctctcaaaccttacgctcttctctccgctccaaatcccgattcgccgtttcctgctcccaatcggaacctcctcctcctcatccttcttcttctcggcggcgtcctccgtacatccccaacctcattccggacccttcctatgtccgcattttcgacacgactctccgcgacggcgagcagtccccgggcgcctccatgacctcgaaggagaagctggacgtggcgcggcagctcgccaagctgggcgttgacatcatcgaggccggcttccccgccgcctccaaggacgactttgaggccgtgaaaatgatcgcccaagcggtcggcaacgccgtggaaaacgacggctacgtccccgtcatctgcggcctctcccgctgcaacgagaaggacattcgaaccgcctgggaggccgttaagtacgccaagaggcccaggattcataccttcatcgccaccagccccattcacat

SEQ ID NO: 219316 - DNA, 413 bp, Glycine max
atgaagcacatttataatttataatttcaaataaagggcacggaagaaaatgaaaagggaaagaatccctgtagtctgaatatttaaaacggacttaagttacattctttgcaaaggctacttgggtgaatcaataaattacaggttgcaaatatatttcggtcaaaatacagggacaacccttaatatggagaactgctagaggcaaggatgctgctgcaacattgtcttcctcttcgcggtttaacacaaacaattgttaccaaagaagcaccacacaattctcaaatcttcaatgaagaaactgaaattttttcagcagattgagaggattccttgaaacccgacattttgtttagtgcaacaatataggccttgacactggaaacaacaacatccatttcccggtccag

SEQ ID NO: 219317 - DNA, 594 bp, Glycine max
ctcgagccgaatcggctcgagtttaccctcagttctgttgttgtgttgtgttgtgtgtcttcccttggtgttccagtttttatttgcagccgccatgtgcggaatcctcgcagtgttgggttgcgtcgacaactctcagaccaagcgcgctcgcatcatcgaattgtctcgcaggttgcggcatagaggtcctgattggagtggcatacattgctatgaggattgttaccttgctcatcaacgccttgctattgttgaccctacttcgggggatcaacctttgtacaacgaagacaaaactgttattgtcactgtaaatggggagatatacaatcacaagcaattgaggcagaaactgagttcccatcaatttcgaactggtagtgattgtgaagtgattgcccatctttatgaagaacatggagaagaatttgttaatatgctggatgggatgtttgcctttattcttcttgatactagggataaaagttttattgctgctcgtgatgctattggcattacccctctatacttgggctggggtcatgatggatcaacatggtttgcatctgaaatgaaagctctgagtgatga

SEQ ID NO: 219318 - DNA, 554 bp, Glycine max
aattacaaaatttaaatataatttatttaaaataacccacaaacagtggaaaacctacatattaatttgacctgaaaataaaaacaatcccacttctcattagttttgcctacttgaagtttaaatccccactagacagttgttgcatacatttttttctcttgacaatcgattatgggccttaaagggttccatttttgggctcgtcaattttggtatccactgcatcatatgcagcatcatgaataccaagtgcggcacgaccagaaggatcaagattttttgaccatgctgcatcccattccacagcttttgcagtactgcatgccacactaggacctcctggcactgttgcctttgctgcattctttggaaagaacttctcaaaaattgtcctgtagaggtatccttcttttgtgggaggagtgttttcagggtaaataaaattggcagccatcatcgttccatctgcgacttgtttgttggcgtgatccttcaagccatcaatcccggtggaaccaacccccatcactggaattggtccttctgcctgt

SEQ ID NO: 219319 - DNA, 309 bp, Glycine max
gaccgctatgtaaagaactgcagaaatggcagatcacccaaggagacaaggtggtggttccatgatgacaaagtataataaaccagtttctctaataagtccacaaaagtagagtagaggattatccttttgaaaacaaaatgaagaaatgggaaaatgcattttgagaaaccaggatccctttaaattaaatggataataactctgctgtaaattggcattgcctggcatttgtaaaggaaggggaaactatgtgtcttaagcaacttaaggagcaaacaaactcaacattgtggttaatctcacagc

SEQ ID NO: 219320 - DNA, 372 bp, Glycine max
gaagcaacgaagcagtcgtgtggtgcctggcgaacctggcccgaaccgctgtaggcctgggggcctacccagaacctattgacctgcgacgtgtacaccgctgacggcgggcagtgcagccgaactctacaaccgaatgctgggcatactcgacgagaccgggggcgaggggacccactttctcatacacaggggccagaaaccctacgttgtggacagacgaacccatcccgacacctgctactgccgctgcggaagaagagaccatcggagggacaacctaaccctacgagtactctgcatgtccagacaacgacaagctctaccttaatgaacagaacctgagccttgaggactaccagaaaggactcc

SEQ ID NO: 219321 - DNA, 554 bp, Glycine max
ctcccgctgcgacgccctctccaacgacgccttcggccgaagcgccgctgcgctcgccggaatcgtcccggaggatctcctcccggcgtggcactggactgaccagttcgtaaccgaaatcatattccacaacagattaataaaccacaagtgtagggttatggaacctgaatccgctacggcgttctacatgccgttctacgctggactcgcggtggggaagtacctctggttcaactccaccgcagaggaacgcgatcgccactgcgacatgatgctgcaatggattcaggaccaaccgttttttaaaagatcaaacggttgggatcattttattagcatgggccgcatcacgtgggattttcgccgctccaaggacaaggattggggttctagctgcctctacaagccagggataagaaacgtcacgcgccttctcatcgagcgtaacccttgggactattttgacgtaggtgttccctatcccaccggattccacccccgctccaaatccgacgttacgcgctggcagagctttcttcgagagcgtcagc

SEQ ID NO: 219322 - DNA, 591 bp, Glycine max
atcccagttgagtttcatggagttcctgtttttgctccaaatgtgacaagggaaatgcttgatatcaggccaggagaggccttggctgtgaattttcccttgcaactccatcacacagctgatgagagtgttcatgtgagcaacccaagggatggacttctgagattggtaaggtcactttctcccaaggtgaccacactggtggagcaggaatcaaacacaaacacaacccctttcttcaacaggttcattgaaaccttggattactacttggcaatctttgagtccattgatgtcaccctcccaagagatagcaaggagaggattaatgtggagcaacattgtctggccagggatattgtgaatatcattgcttgtgaaggcaaggaaagggttgagagacatgaactgttcggcaagtggaagtcgaggttaacgatggccggcttccgtcagtgtcctttgagttcttatgtgaattctgtcataagaagccttttgatgtgctattcagaacactatacactggtggagaaggatggagccatgttgttgggtggcaggacaagaattgatatcagcttcagcatg

SEQ ID NO: 219323 - DNA, 573 bp, Glycine max
  unsure (1)..(573): unsure at all n locations
attgaattctccagagagaagaagaaacttaatcgatcatcacttcacttcactaatacatcatggcagacgagacccagaacaagtatgagagctctgaggttgaggtccaggatcgtggtgtttttgactttctcggtaagaaaaaggatgaagaagacaagcctcatcctcaggaggaggtcatcgccaccgagtttcaaaaagtcactgtctcagaccaaggagagaacaagcacagcctcttagaaaagcttcaccgatctgacagcagctctagctcttcaagtgaggaggaaggagaagatgcagagaaaaggaagaagaagaagaaggaaaagaaagggctgaaagagaagatcgaggagaaaatagagggtgatcatcatcatcacaaggatgaggacacaagtgtccctgttgagaaagttgaggttgttgaaacagcacatgctgaggaaaagaaggggttcctcgacaagattaaggagaagctaccagggcacaagaagacagaggaggccacagntactactnctnctncaccaccacctgttgcatcattggagcatg

SEQ ID NO: 219324 - DNA, 438 bp, Glycine max
tttattttttctcttataaaacacaaaaaaaacacactattattccattttcagtacggatacaataccattatacttcaaagaaggaaacctacacaaacttttttttttgaaaatggaagagataaatacacaacaataaagcaaataaagtatgcatcaagaaacaccaaagaaacccacaaggctgtcatatgaggaaaagaaaacaaagcacaccacaatcatgcatctccaaccaacaaaaaagccttgtctcaatcttaaaaataaaggagcaccactctcctcttacttgtccattacctcctctgtcttggagggataaccaggaagcatctctttcatcttttctaatataccaatcttttccttggcctctccttcatgatgagcaccttcaccatgctccaaagatgcaacaggtggaggtggagg

SEQ ID NO: 219325 - DNA, 513 bp, Glycine max
aaaaaattcacgaatttgttagcgtctctcctccaaatggaatagaaaaacgcactaaagattccatccatttggaacttgggagagtagagtaccattgctccactgtcgccggccaccatgtctttctcggagttccgaccactcgacgacacgtccctcatcgaatacataaagtccgtccccgccctctcctccaaactcgccgacaacctcgacgacttatcagtcaaagaagtcggagatggcaatcttaacttcgtcttcattgtttccaaccccgcaggttcttttgtcatcaaacaggctctgccgtacgttcgttgcataggggaatcgtggcctatgacgaaggagagagcgtattttgagtcgctggcactgaaagaagagggtcgtttaatccccgaacatgttcctgaagtgtatcactttgaccgtaccatgtctttgatcggtatgcgttacttggagcccccacatataatcctcagaaaaggggtgatgctggga

SEQ ID NO: 219326 - DNA, 564 bp, Glycine max
ctaatttctaacaaaatattttaatttgctcctcctctttcgcccccttctccctctctctattttttttttctttcccgctttttcatagcaaaacgaaaaagaaaaccctagaacgggagagatttcattccccaaaaaatctcttccttctctctcctcatttctgagttcccaactttcctcacctgaggtcagaatcatacaataattcctttctgttttcagtttcttattacaattcaattggatgatgattattgagtctaataattttgaacagatctggtgtgacgtgcatcacaattgaatcgaattgaaatttgttgtcgtggttgcagcaaggaatgccgctggtattagcgaaaagcgattcgatccagattcgcgaggtatggaacgataacctggaagaggagttcgcgttgattcgcgaaattgtggacgattacccttacatcgccatggacacggagtttccagggatcgttctccgacctgtggggaatttcaagaacagctacgattaccattaccaaacccctaaggacaacgtcgacatgc

SEQ ID NO: 219327 - DNA, 445 bp, Glycine max
ttattttttttgtttatttgtttatttcttccttcccaatgagaaccctgtccattttcaacacgtatcccatacaagacaactgcttacttctccaaggagccactaaagaaattgtccttcaattttctgaatgtacaggaagggagcaagcttttggaaccggcctgatggtaaatcccaaccctcttgaccttcaacaactcggtaagctggttcaagcctccatggaggctggtgcaaaaccttcatgaggtgtttcatgtcgtacacagtcgggaaatacatgtttatcaaattgaagaaccccacttgtgtatcgggcaaatcctgacacgtcaagagcttcaacaatgacccgaaatctgaacccctgtggaaagtaacccaatgaacgttgacattcaagacccatcccggaggacatgagtaaactccccaaaac

SEQ ID NO: 219328 - DNA, 595 bp, Glycine max
  unsure (1)..(595): unsure at all n locations
ctcgagccgctcgagccgattcggctcgagagcgacacgtatcttcatcaataatcgcagaagcagtttccggtgcatctcatcgtcttccaaaatgaacgacgcagatgtctcgaagcaaatccagcagatggtgcgtttcatccgccaggaagctgaggagaaagccaacgagatctctgtatctgccgaagaggaattcaatatcgagaagctgcagttggttgaagccgaaaagaagaagatcaggcaagaatacgaacgcaaagagcgccaagtcgaaattcgcaagaagattgagtactcaatgcagctgaatgcttctcggattaaagttcttcaagctcaagatgacgtgatcagttccatgaaagaagctgcatccaaggaacttttgaatgtcagtcatcaccatgatgatcatgtgtatagaaaccttctgaaagatctcattgttcagtgtttgctaagactgaaagagccttctgtcttattgagatgtcngaaagatgacctgcacttggtagagaatgtgctggattcagctgctcaggagtatgctgagaaagcaatgttgatcccccaagatcattgt

SEQ ID NO: 219329 - DNA, 557 bp, Glycine max
aaataattatagctttactgtcagtaatgctgctgttgagggccaagaaaagtctaattctcttgaaagagggatgatttcagatgacacatacattgtttttgaaacatcacgtgatagtggaattaagattgtctatcaacgagagggtgccactagcaacattttcaagcagaaagaatttaaccttcagtcactgggtattggtggcctgagtgcacaatttgcagatatattatgaagagcttttgtctctcgtgttttcccaccccatgtgacatctaagaatcaagcatgtgaagggcatgcttctttatgggcctcctggaactggaaagacacttatggcacgccaaattggaaaaattttgaatgggaaggaacccaagattgtaaatggccctgaagtcttgagcaaatttgttggtgaaactgaaaagaatgtgagagacctttttgctgatgctgaacaggatcagaggacccgatgggttgaaagtgatttgcatgtcataaatctttgatgaaaattgatgctatttgcacgtcaagaggtt

SEQ ID NO: 219330 - DNA, 545 bp, Glycine max
caaggaacctccaacttcagatcgtctagcagctatgcagatactgtttgaggtttgcccatgtttcaaatttggattcattgctgctaataatacaattacagaagcagtgaaagatgacatgaagattcatataatagattttgacatcaatcaaggaagtcagtacataaatctaatccaaacacttgcttcaaggtcaagcaagccaccccatgttaggttgactggagttgatgatcctgagtctgtgcagcgatctgttggaggcctacagaacataggacaaagactagaaaaacttgcagaggcacttggtttgccattcgagtttcgagcagtggcatcaaggacttccattgtcaccccatcaatgctcgactgtagtcctgatgaagcacttgtggtgaactttgcattccagcttcatcacatgcccgacgagagtgtttcaacagcaaacgaacgggaccaacttcttcgcttggtgaagagcttgaatccaaagcttgtgacagtggtggagcatgatgtgaacacaaaca

SEQ ID NO: 219331 - DNA, 574 bp, Glycine max
  unsure (1)..(574): unsure at all n locations
aaacatactagttggcaaatgagtcatgcagatacagattttgcatggaaaaagattgctgaacctgtgatgagatcttatatggaggctacagacggctcctctgtagagaccaaagagagtgccttggtatggcattaccgtgatgccgatcctgatttcggatcttggcaagccatggagctgctggatcaccttgaaaatgtacttgcaaatgagcctgtagttgtaaaaaagggacaacacattattgaagtcaagcctcagggcattactaaagggtcagttgcacaggaagttctttcttccctaaccaagaagggtaaatcgccagattttgtactgtgcattggtgatgatagatctgatgaggacatgtttgagagcatattagccaaaccttatagtactacctcatcctcagcaccacaaatctttgcatgcactgttggacaaaaaccgagcaaagctaggtactacctagatgacactgtcgatgtgatggcattacttgagggtcttggtgctacttcanggcctaaatcaagatattctacagaaaacccctttgaga

SEQ ID NO: 219332 - DNA, 559 bp, Glycine max
caaaaatacatagaaatggcctcttctcttgcatcctcatcaactgttctctggatcctttttctaaccattgcaactcttcatttgagttcagccaggaagttgtccgggtcagacccgcagttgcagtttcaataccacagaggccctctcctcaaaggcaaaatctcagtaaacctcatttggtacggtaaattcaaaccttctcaaaaagccatcgttgctgatttcatcacctcgctctcctctcccaaacccgtcaccgcccaaccatccgttgccacgtggtggaaagccaccgataaatactacaaaaactcgtcccccaaactcgctctttccctcggcaccacccaaatcctggacgagaattactccttaggcaaatcgcttacgaataaccaaatcttaaaacttgcatccaagggtccacagagaaacgctatcaacattgttctcacttctgctgacgtggcagtggaggggttctgttccagtaggtgcggaacacacggatcctccgtgggggcgcgcgtgaaccgaagagatcaagtggcgt

SEQ ID NO: 219333 - DNA, 575 bp, Glycine max
acggcctatattaataataaaaacaaaaaaagagcaataaaaacgaataataacggtgtaacgggggtcagaacaacataactgaaaacaatataaaattagaaaaaaagctataacaaaaagaaggaagaaaggaaagaatctcgggaatggacaaagaagaaaaaagaaagtagggaggaaaacaagatcgagggggggaaaaaaaaagaggggagcaagcggaggataaagggtaaaaaagagcgggaaaaagaaaacatagcatgcagaggaaaaaaaaaagcggaggagaagggaacagaggtggggaaaaaaagaggaaaactgaaaagaaagggaacgggcacctacaaaaaaaccaaggaaagccgaacctgaaaacaaggagggacagggggaccaggaaagaaacaacttaaaaagggggagggacagagcaaaaaggaaaaaaaccaaaatgaaaagaaggcggaaagaaccaaaaggggaaggggaaaaaaagggggaatgggggaacgaaaagggtgggggaaaggtaaggggaaagaaacgggaacgggctgtgaaaaacc

SEQ ID NO: 219334 - DNA, 562 bp, Glycine max
ctgtgcttttactctgctaccttgtgacaatggtgagggttagtgtgttgaatgatgctcttaagagcatgtacaatgctgagaaacgggggaagcgccaggtcatgattaggccatcctcaaaagtgattataaaattccttttggtgatgcaaaagcatgggtacattggagagtttgagtacgttgatgatcacagagctggaaaaattgttgttgaattgaatggtagactgaacaaatgtggggttattagtccgcgttttgatgttggtgtcaaagagattgaaggttggactgctaggctgctcccctcaagacagtttgggtatattgtgttgactacctcagctggcatcatggatcatgaagaagctaggagaaagaatgttggtgggaaagtgctgggtttcttttactagtttaattagtttcctttgaagattttgctctgatttcagttcttgaaactcaccggttgtaatgatcaatgtgttagacccgtagtttatcaagtatagcattagcaggagatgtttttctggtgtgctttgttttgttt

SEQ ID NO: 219335 - DNA, 635 bp, Glycine max
  unsure (1)..(635): unsure at all n locations
aatcgaacaaaaaatgagagaagagaaaaaagaaagaagaaaaaaatgaggagaaaaaacttaaaaataaaaaaaaaagttataaaaaaagaaaaagagaaataaaataattaaaaaataaaaagggggaatactccttgngaacacnagaggaataaattaaagggaaaacgagaaaaatagacagagaacgaacaaaataaaaaaaatgaaaagaaaataagaaaaaatcagataaaaataagggaaagagggaggaataaaaaaaaaaaaaaagaatacaagaaaaaaataatgagaaaaagaaaaataagataaaaaaaggatataaaaaaaaggaaagaaaaacagatgaattaaaagaactgaaaataaagaaaaataaaaaaaggaaactaaataaaataagaaaagaaacataaaagttataaaaaaaaaaagaatataaaaagaaaaaaaagaaaaatgaaggaagaagaaggaagaaacataaaaaaaataaaatgaaatgaggggagaagaatagaaagacaaactaaaaaataagggagaacaaaagaaaaaagagggaaaaaaaaacaaaaataagtgaaaggaaacaaaaaaagtaaaaaaaaataaataaaataatgggg

SEQ ID NO: 219336 - DNA, 566 bp, Glycine max
  unsure (1)..(566): unsure at all n locations
gttttcttttcgttcgcatcttctctctctctcagaaagatgaaggtggtcgccgcgtatttgctcgccgtcctcggtggcaacaacagcccctccgccgatgtcatcaaggaaatccttggctccgttggagtagaagcagatgaagataggattgaatcgtttttgtctgaagttaagggtaaggatatagttgagcttattgctgccggtagggaaaagttggccacggttccttctggtggtggtggtgccgttgccgtcgccgcagctcctgggggaggtgctgctgctgctgctcctgctgctgaggcaaagaaggaggaaaaggtggaggagaaagaggaatctgatgatgatatgggtttcagtctcttcgattaattggtgtagtctattcagcttttttgttcagaacatattcttaattaacactagagcatgagtttgtcaaagttttgttctaaggagtaatttactgtgttttttaatatcaatgaccaacccaagtggatgaatttggtttgatattntagtgttttgatgttatggaatttcattttggt

SEQ ID NO: 219337 - DNA, 486 bp, Glycine max
accaaaatgaaattccataacatcaaaacactaaaatgtgaaaccaaattcatccaacttggttgggcattgatattaaaaaacacagttaattacttcttagaacaaaactttgacaaactcatgctctagtgttaattaagaatatgttctgaacaaaaaagctgaatagactacaccaattaatcgaagagactgaaacccatatcatcatcagattcctctttctcctgcaccttttgctccttctttgcctcagcagcaggagcagcagcagcagtacctcccccaagagctgcggtgacgggaacggcaccaccaccaccagaaggaaccgtgggcaacttttccctaccggcagcaataagctcaactatattcttacccttaacttgagacaagaaccgattcaatcctatcttcatctgcttctactccaacggagccaaggattcccttgatgacatcggcggaggggctgttgtt

SEQ ID NO: 219338 - DNA, 495 bp, Glycine max
gcttcttgcatgcccttcagcagcttgggggtgcagatactgccacaccaaagcaaattagagagataatgaatgttgatggcctcacaaatgatgaagtcaaaagccatttgcagaaataccgtttgcacactagaaggccaagtcccatggttcacaacagttccaatccacaagcagcaccttttgtccttgtaggaaacatttttgtccaatcaccagaatatgcagctgtagctacctcaacagcatcaagagaagtggccacagttgcagcacctgctggaatttatgcaccagtggccacacaccctatacctgtttcacacccaccagctgattcaattaagaatccacagtttaagaaggtacagctgtttgagcattcaatttcagatgaaagggctaatcacagtgaaggagctgttcattcaaattcccctacctcatgctcctccacacatacctctacttccctggctattgagtttaaga

SEQ ID NO: 219339 - DNA, 539 bp, Glycine max
cgtttattgtcaaagagacttgttgctggggaagctaaaggcgatctgggatttattcttgatggttttcctcgaacaattaagcaagcagaaatattggaaggggtaactgacattgacttggtaatcaatctgaagctccgagaagatgttctgcttgagaaatgccttggtaggagaatttgcaatcagtgtgggggtaattttaatgttgcttctattaacatcaaggccgagaatgggagccctgaaattattatggctccacttcttcctcctgagaattgtatgtcaaagctcattactcgatcagatgatactgaatcagtggtcaaagaaaggcttcgaatatacaatgaaatgactcagcctgtggaggaattttaccgttcgagaggaaaattattggagtttaacctgcctggaggaatcccggaatcttggcctaagttgctacatgctcttaatcttgatgattacgaggacaaacgatctgctgcagcataaagatataataatgtatcataacagtaagtatt

SEQ ID NO: 219340 - DNA, 546 bp, Glycine max
caaatcacacatacacacactcaaatacatacactagtagtgtggtgtgtgcccttcctttatccttttgctttttgtgtgcaattaacacacactcacacaaaaatgacggcatgccaagattggccagagccagtgattcgagtccaagccttggctgcaagtggcttagccacaatccccgaacgtttcataaagcctaagtcccaaagacccactaatagtaacaattatgctccaaagaccaattcctctcaaattggtcatcataagaacaataccaccaacagcaacatcccagtgattgacatgaagcacatctacggtggtgacgagggaaagagggctgagacgctccggctcgtgtcggaggcgtgccaagaatggggttttttccaggtggtgaaccatggagtgagccatgagttgatgaaaggggcaagggaggtgtggagggagttctttcaccagccacttgatgtgaaagaggtgtatgctaatacacccctcacttatgaagggtatggaagcaggttgggagtgaaa

SEQ ID NO: 219341 - DNA, 579 bp, Glycine max
  unsure (1)..(579): unsure at all n locations
ttttccttcttctcagtcncgatagcaggtagccngtgttgaattaatttgccgggtctgacgatgctcactagtgcggtcggtcgccctttttttttttttttgcaattactcaaccatatattatatttgagataagaaaaatacagagtaaagtgttacataaaatttaagtgggatatgatacttgattaattgagtctgatattgagacaaacacaaagatgataaattattcatatgcaaattaattttgtgcactgcaaactactgctcaatgggaatctcatctcatttggaagtcaaagattcaacttgagcttttccacttggtccttttgtcctaatgtaaagtctatactcatcaaatgtcattggcgggtatagagctggcctatccttagtcacaagctccttggctggttggatcggtatatcgctcctggggttatagaaaaaggccaatgaaacacgatctttgtgtgaggttacgatcaccctgggctctatacttttgtaagttgcattgctcagcacctgaatttggtcacccatgttgattgatgaagcatttgggac

SEQ ID NO: 219342 - DNA, 584 bp, Glycine max
tgggattctagagtcttcaattattggaagtgaggttgcttcaagtgtttttttttattgtattttttttcttctttttttttatcctaaagtctgaaacttgtgggaattttgaacatgaaaagttctttgtaagagttttgtggaagatggggtttaggaataatgcaattcaggctgggagtttggatgtgggaaagtcaaagggaaggatgcaaaaggatggtgctgagaaggaaattgggtgctgtgttaaattctgtttcattgggggctgtataccttcaagatcaaaggtggataactccataagtggcactagtgctaacagtgtggaaaaaacatctgcatctgagaaaagcaagaaggaaacaaatgctcctccagggtcctctacaacaaccagtaatgcagaaagtgtcccttcgactccaaaattcagtgaggagttgaaggtttcttctcgtttgagaaaatttacattcaatgagcttaagttggccactaggaatttcagaaccgagagtcttcttggccagggagggttcggttgtgtgttcaagggttggattgaggaaaatgga

SEQ ID NO: 219343 - DNA, 529 bp, Glycine max
gaaaataaatgctaaatcctgcaaaagaaagtctcccaatgtttgtggtttagataatgctgatgatgtgtggtaccaaaaaatggaggtctgtaaaacccctttacctgaggtaaccagcaaaaatgaagttgccggaggagagttacagaagtttcctgctagactttttgcagtccctcctcgaatagcccagggagctattccaggggttacagctgaatcttatcaagaggacaacaaattatggaaaaagcatgttaacgcttacaaaagaatgaataaattgattggcactactagatatcggaatgtgatggacatgaatgcaggccttggaggatttgcagctgcacttgaatcacaaaagtcttgggtgatgaatgttgtgccgtcaattgctgagaacactttgggtgttgtctatgagagaggtctgatcggcatttatcatgactggtgtgaaggcttttccacatacccaaggacatatgatcttattcatgctaatgttttattcagcatatac

SEQ ID NO: 219344 - DNA, 477 bp, Glycine max
ctcgagccgggcagtgcgcagagcagggcaaattgtcacctgggtcagtgatcctatgcatggaaacaccattaaggctccatgtggtcttaaaactcgccccttcgatttcatcagggctgaagtgagagcattctttgatgtgcacgagcaagaaggaagccacccaggaggggttcatctagagatgacgggtcagaatgtgaccgagtgcattggtgggtcaaggacggtcacatttgatgacttgagctcacgttaccacacacactgtgacccaaggctcaatgcttcacaatctcttgagcttgctttcatcatcgccgagcgtttgagaaagagcaggatcagatcgcagcaacctcttgcccctctaggagtgtaaaagtgccttcaaaaccaacaagagaaagatatttttgttctttttttttttttgtcctacatatttattattaatcgatggttgtcactttg

SEQ ID NO: 219345 - DNA, 457 bp, Glycine max
caaagtgacttccatcgattaataataaatatgtgggacaagaaaaaaaaaagaacaaaaatttctttctcttgttggttttgaaggcacttttacactcctagaggggcaagaggttgctgcgatctgatcctgctttttttcaaacgctcggcgatgatgaaagcaagctcaagagattgtgaagcattgacccttgggtcacagtgtgtgtggtaacgtgagctcaagtcatcaaatgggaccgtccttgacccaccaatgcactcggtcacattctgacccgtcatctttagatgaacccctcctggggggcttccttcttgctcgggcacataaaagaatgctcttacttcagccctgatgaaatcaaaggggcgagtgttaaaaccacatggagccttaatggtgtgtccatgcataggagcactgacccaggtgacaatttgccctgttt

SEQ ID NO: 219346 - DNA, 518 bp, Glycine max
  unsure (1)..(518): unsure at all n locations
aacaaaacaaggttcagagacttttccgattcctggaagaagagaagagaaaacctaaatcacagatccatggcggaagaacaccgatgtgaacctcccgaaggtcaccgactctgcgtcaacaactgcggcttcttcggtagcaccgccacgatgaacctctgctccaaatgctacagcgcgatccgtttgaaggagcaagaagaagcgtcgacgaaatccacaatcgaaaccgcgctctcttctgcctcctcggcgaaaccgtcgtcgtccacgtcacctccgccgtcggcggtcgatgtgctcatggaatctccaccgccgtctgcggcggaggttgaggttgctgtcacggtcacggtcgcggtggcgtcgagttctatttccataaactcaggttcggttgcgcaaccgaaccggtgtgccacgtgtcngaagcgcgtggggctgaccgggttcaagtgcaggtgcggagtgacgttctgcggggcccacaggtacctcgaggagcacgcgtg

SEQ ID NO: 219347 - DNA, 526 bp, Glycine max
ggagtagaataatttcactttcacattcattacaataaaacgctccaccgtactgcatcgttgccctgagactcttatcacaaatcatttcaactttcaaccacccccgacagtggaccaaagccaaataaatatgactcgttcatttcatcatcccttctagaccagacaaaccgacttttcaagctttcgtcttaattaaaacacagatcatcataatcataatgttacataataaccgcattttccctctcactctctctttttctttctctcgcatacacgaggacggtggagattaaatcaccaagctccggtcccatcgaacggcccagattgaaatcatcaaatcctccgcagcttctccgctttgatcacggggttggcacgtgcaatctcctctctttccactgtcttgaaatcgaacccgcacgcgtgctcctccgggtacctgtgggccccggagaacgtcactccgcacctgcaccttgaacccggcagtcccacgcgcttgcacacgtggcac

SEQ ID NO: 219348 - DNA, 610 bp, Glycine max
  unsure (1)..(610): unsure at all n locations
ctcgagccgaatcggctcgagagcagagggagtagcggcattaaaaatgcagatcttcgtgaaaactctgacagggaagactataaccctcgaggtcgagagcagcgacaccatcgacaatgtcaaggccaagattcaagacaaggaaggcattcctccggatcagcagcgtttgattttcgccggaaagcagcttgaagatggaaggaccctggccgattacaacatccagaaggaatcaacccttcatctcgtcctcaggcttcgtggtggcatcattgagccttccctcatggctttggctcgcaaatacaaccaggacaagatgatttgccgcaagtgctatgcccgtctgcatcctagggctgtgaactgccgcaagacaaagtgcggtcatagtaaccagttgaggcctaagaagaagatcaagcgaattctgtgtgatattgttggtctcatccttcgcgttgctggatttggaacagggactggtttgatatttatagctctggctttgattaatgataattgttttgagacaatagtttngaagtagcccattatatggttatgacgacattntgatctctcgtaagctgtatttcatgtt

SEQ ID NO: 219349 - DNA, 515 bp, Glycine max
gaacattgcaaaaacatgaaatacaacttacgagagatcaaaatgtcgtcataacaatataattggctacttcaaaactattgtctcaaaacaattaacattaatcaaaaccagaactataaatatcaaaccagtccctgttccaaatccaacaacacgaaggatgagaccaacaatatcacacagaattcacttgatcttctttttaggcctcaactggttactatgaccgcactttttcttgcggcagttcacagccctaggatgcagacgggcatagcacttgcggtaaatcatcttgtcctggctgtatttgcgagccaaagccatgagggaaggctcaatgatgccaccacaaagcctgtggacgagatgaagggttgattccttctggatgttgctaatcggacagggtccttccattttcaagctgctttccggcgaaaatcaaacgctgttgatccggaggaatgcccttcttgtcttgaatcttggccttgacattgtcgatggtg

SEQ ID NO: 219350 - DNA, 555 bp, Glycine max
taaaaagaatattcagagaattccaaagacagagatgactgtcattaaggaagagcaacaaccaaaccaaatagctggccacaaagaacttggtcacaaaagtctccttcagagcgatgcactctatcagtatatacttgaaaccagtgtgtacccaagagagcatgagagcttgaaggagctacgagagttgacggaaaaacacccttggaacctgatggctacaccacctgacgaaggacaacttctaggcatgctccttaagcttatcaatgccaagaacaccatggaaataggcgtcttcactggttactccttgctttccactgcccttgccctcccttctgacggaaagatcttagctatggatgttaaccgggaatattatgaattggggttgcccgtgattgaaaaggctggagtggctcacaagattgacttcagagaaggacccgctcttcctcttcttgacgttctcattaaagacgacaagaataagggagctctcgatttcatctatgtggatgctgataaggacaattacttgaactacca

SEQ ID NO: 219351 - DNA, 467 bp, Glycine max
atatcttatactattttgattcaaaacatgtgtttgttttaaggaagagaaacattatgaatattattgcgtagaagacaaaaactcaacaacagagtaactatccaagcagacacacattatgtttatttaaggattaggtaaaatagtaaaaggttgtgttttttccatatgtggtaggtgaagtaggtaaaaggggagggaaggagcacaatgatcatatgatgcggtggcacagggtaatcccatcacctacgggaagctggctaatcttgacccttgaatcaagtgcaagagctctgttgagctccataacaaaatccgcgataatacttaacataatccatgagaggagcatttggtggggccaccacggacccatttcatagggtgttattgttgctgatcaattccccaagcttcacaagctcaatcaccctcttgtggtgagttaaagtaattgttct

SEQ ID NO: 219352 - DNA, 588 bp, Glycine max
ctccgatcatgaccgcgctggaggttctggatcactcgtcgaggcttgtgttggaggtggcgcagcatttgggtgaaggcgttgtccgaaccattgctatggatgccaccgaaggtgtcgttagaggctggcgcgttctcaacactggctcccctattaccgttccagttggtagggctacccttggccgtatcataaatgtcattggagagcctattgatgccaagggagaaatcaatactgagcattatttgcccattcatagagaagctcctgcttttgttgagcaagaaactgcacagcagattcttgttactggaatcaaggttgttgacctgcttgcaccatatcaaagaggaggaaagattgggttgtttggtggtgctggtgtaggaaaaactgtgcttattatggaacttattaacaatgttgcaaaagctcatggtggtttctctgtgtttgctggtgttggagaacgaacccgagagggtaatgactcgtacagagaaatgattgagagtggtgtcattaagcttgatgataagcagagtgaaagcaagtgtgctcttgtgtatggtcaaatgaatg

SEQ ID NO: 219353 - DNA, 472 bp, Glycine max
cagtaaggaactcaaattacgctggccatggaccaggtggaacagttgcagagtttttaacattaatgcatccaacgttctcaaccagaaagtaaaaaatgtacttccttttgcccttttccccttattaaataacacaacttaaaaacaggggggcagtttggccacagacattgaccgtagttcatctcacagtcggcaacattaaaatggaaggaaggaataacctgatacatttttatacccaaaaaatggaaaattttgttgtttggcattgccaagagttcctaaattattaaatttagcaattacaaaaaaaaaagggattaaaatgagaacagggctgtgtgtgattaagacgctgcagattccttagcaattttctcggcctttgcaatgacctcctcaataccgccaaccatgtaaaacgactgctctggaaggtcattgtttttttcattcaacacaccct

SEQ ID NO: 219354 - DNA, 468 bp, Glycine max
atacctcagtgcacccttgctgccattgtgatctctgctgtgataggtctggtagattatgatgaggccatttttttgtggcgtgtagataagaaagattttcttctttggaccattactagcactacaacattggtccttggtattgacattggcgtccttgttggggttggggtttcacttgcttttgtcattcatgagttagcagatccacatattgatgttttgggtcgtttgccagggacaactgtttataggaatgttaaacagtaccctgaagcatatacatatgatggaattgtaatcgttcgtgttgatgctccaatttattttgcaaacacaagttacataaaggacaggttgcgtgaatacgaagttgatgttgattgctctaaaagacatggacctgaggttgaaagaatttattctgtgattctagagatggcacctgtgacctacatagattct

SEQ ID NO: 219355 - DNA, 500 bp, Glycine max
atcaaatcttctttctttttcttccgcagtcccaaccttcatggattctcactcacacatcattgcttggggctctggtgaagatggtcagctaggaatcggaagcaacgaagagaaagaatgggtctgcctcgtcaaagccctccagccccaccgtattcgctccgtcgtcgccggcagcagaaactccctcgccatcgctgacgacggcaaattgttcacttggggttggaaccaaagggccacacttgggcaccctgctgagaccaagtctgagaacaagactgagaacactcccagccaggtcaaggctctttccagtgttaaaattgttcaggcggctattggggggtggcactgttcggccgttgatgatcagggcagagcttatgcttggggtggaaatgaatacgggcagtgtggcgaagaacccgagcgcaaggatggcactggtagacctttaaggagagatatagagatccctcagcgctgtgctccta

SEQ ID NO: 219356 - DNA, 588 bp, Glycine max
aagaggaatgccagagattcccatgtgccggttttggctccacttcccattggatttgctgtgttcatggttcacttggccaccatcccagtcactggtactggtatcaaccctgctaggagtcttggagctgctgttatctacaaccaagataagccatgggatgaccattggatcttttgggtaggaccatttattggggcagccattgcagccttctaccatcagttcatcttaagagcaggtgcagctaaggctcttggatcattcaggagtaacccccataattgagttgtctttctcttccttatgatggctctagtggaaagaagataattggagagatggaggttgatatggcaagtttaataataattgggaatgcttttggcttgtgttttgcaacgtttctttgaccctctcgattatgtcttcaagattgtggataagtgtagattaaagtctctctcatgacagggggagccttttgcactttcctctgtggtgttcttccctttagtgtgtcatttttttcttttaagttattctcttcagctgtcatctctgtactcaaaaatatattatggg

SEQ ID NO: 219357 - DNA, 458 bp, Glycine max
aattaaaattaaaatggaacattttccataaatatattttgaggacagagatgacagctgaagagaataacttaaaagaaaaaaatgacacactaaagggaagaacaccacagaggaatgtgctaaaggctccccctgtcatgaaagagactttaatctacacttatccacaatcttgaagacataattgagagggtcaaagaaacgttgtaaaacacaagccaaaagcattcccaattattattaaacttggcatatcaacctacatctttccaattatcttctttccactagagccatcataaggaagagaaagacaactcatttatgggggttactcctgaatgatccaagagccttagctgcacctgctattaagatgaactgatggtagaaggctgcaatggctgccccaataaatggtcctacccaaaagatccaatggtcatcccatgggt

SEQ ID NO: 219358 - DNA, 517 bp, Glycine max
ctttgcttccccttagtcaaacaaagtaacacaccatccatcctctctctcttctcttcttctgttctctagtttcctgctcttgtttcttagaatccgtacggtctaatcaacacaacaaaatggatgcaattagttgcctggatgagagcaccaccaccgagtcactctccataagtcaggcgaagccttcttcgacgattatgtcgtccgagaaggcttctccttccccgccgccgccgaacaggctgtgccgcgtcggtagcggtgctagcgcagtcgtggattccgacggcggcggcgggggtggcagcaccgaggtggagtcgcggaagctcccctcgtccaagtataagggcgtcgtgccccagcccaacggccgctggggctcgcagatttacgagaagcaccagcgcgtgtggctgggaacgttcaacgaggaagacgaagcggcgcgtgcgtacgacgtcgccgtgcagcgattccgcggcaaggacgccgtcacaaacttcaagcc

SEQ ID NO: 219359 - DNA, 564 bp, Glycine max
cggctcgagacgatggtcatcacaaccgcattccaccattgcacacttacaagagtcaaggcccttgcatagaacatctttatatcctgacaagcagcaggaatttcctcatttttctagtgaaccaattttggtaccgaactcctcatttacttcttatcctccacctggtggtagatctcatcaggcttctccaagtcagaattcaggccacttaaaccttccttatcatgctacgggagctcagatggcactatcaccaccaaatcgatctcatttccccaattctgcattacagttgagtggaataaaccatgggccaccttttggtggaaacatgcgtcaatttcctactggttcccctcttaatcagatagtacagaatcaattggtaaaccaggcaggattatatcctggagatcatcccaatatttcatcaggtttacccatgattaacaaatatgaccagatgcttgggctgatggacatgagggatccaatgccaaaatcagctcatttaggtagacagaatcttcggtttcccccacagggttttgatatggg

SEQ ID NO: 219360 - DNA, 611 bp, Glycine max
  unsure (1)..(611): unsure at all n locations
agaagttcctgcgaaaattccttctcagcaagtgcctagcttcacatcctcttgggcagttgatgacttgttggaattaacagactttgaatcaccagacaaagttcagaagcaatcccttgagtttggagaacttgaatggctagcagatgtaggcctttttggtgaacagtttcctcatgaagctttagcggcggctgaagttcctcagcttccaatgactagcagtgttggctcacacaaagcccccaaatccttgttgtcttacaaaaagcctaggattgaagtcctagatgaagatgatgatgagcacttcaccgtaccagatctcggataaagcacatggtcatgtaaacaattgcctgaatcagtaggcagtaggttgacgagttgtatatgcatactaggtgcagatgttaatgaactcttcaatgtgcctggtctagctgaagctcaggaccatgaggactattgcatgaatctgtagattgatgagctgtatatgcatacttctcttaggacagtaagtaatgaagtatgttaactagcttgtggagttgataaatatctcattntaggagctatgaatggtttgattttagaatatagca

SEQ ID NO: 219361 - DNA, 663 bp, Glycine max
  unsure (1)..(663): unsure at all n locations
agaagttcctgcgaaaattccttctcagcaagtgcctagcttcacatcctcttgggcagttgatgacttgttggaattaacagactttgaatcaccagacaaagttcagaagcaatcccttgagtttggagaacttgaatggctagcagatgtaggcctttttggtgaacagtttcctcatgaagctttagcggcggctgaagttcctcagcttccaatgactagcagtgttggctcacacaaagcccccaaatccttgttgtcttacaaaaagcctaggattgaagtcctagatgaagatgatgatgagcacttcaccgtaccagatctcggataaagcacatggtcatgtaaacaattgcctgaatcagtaggcagtaggttgacgagttgtatatgcatactaggtgcagatgttaatgaactcttcaatgtgcctggtctagctgaagctcaggaccatgaggactattgcatgaatctgtagattgatgagctgtatatgcatacttctcttangacagtaagtaatgaagtatgttaactagcttgtggagttgataaatatctcattttaggagctatgaatggnttgatttttagatatagcatanataaaccttaggggataaattttccttgtctttggatcatactgttaca

SEQ ID NO: 219362 - DNA, 609 bp, Glycine max
  unsure (1)..(609): unsure at all n locations
aatcaatcaaattctttgagttgaacacaggggccaagattccttctcttgggttagggacttggcaagctgaacctggtgttgtagctgaagctctcaccacagccattcaggttggatacaggcatattgactgtgctagtgcgtataagaatcaagcagagattggttctgctcttaagaagctttttgatgatggtgtggtgaagcgtgaggacttatggatcacttccaaactctggtgttcagatcatgcaccagaagatgtgccaaaagcattggataaaacattacaggaattgcaacttgactatcttgacctctatctgatccactggccagtccgcatgaaaagtggaacatttggactcaataaagaatatcttgagcaaccagacattcccaatacatggagagcaatggaggcactctatgactcagacaaggctagagccataggagtgagcaatttctcttaaagaagcttcaagatttgttagatatagcaagagtggttcctgctgttaaccaagtggaatngcacccaggatggcagcagccaaaagtgcgcgcattttgtgaatctaaaagaaatcatctatctggata

SEQ ID NO: 219363 - DNA, 431 bp, Glycine max
ccacgcaacccactttatttttttgaaaaaaagatcccttccttaaaggaaaaatacctctgggcttcttattgggggtccccatcaatggtaccccttttcaaaatttcacttgaatcactccacctagggggtttaaggcaaaataattttgctttaggagcaatgtttttttcaccgtctcaaagaggcatattgcccagagctcaccatcccaaaagtcttcaaggctcctttaggccccattggtctcgggaacaaaaaaacgggccttaactagcctttcctgcttaaattcaaaaatcttggtcatcaaatcttggggaattgacccgccaaagatatcaaaattccccttgattctggactcattagggcttttaggaagcacactttgacctggttgcaagccccattgaagggcaacctgg

SEQ ID NO: 219364 - DNA, 573 bp, Glycine max
gaaagaatacatcactcacactagtctctgtgaaaagcgacacgacacaacacaacacaagctttattctttttcttcgcttcttctgtacagcacccaagattgaagatgatagaccttgcgcgcgtgcagaaggagcttgtggaatgcagcaaggacgcggagggatcgggcatcaaagtcagccccaaaaacgacaaccttgttctcttgatcggcaccattcctggccccgtcggaactccatatgaagggggcattttccagattgatatcacattgcctgatgggtacccgtttgaaccccccaagatgcagtttaaaaccaaagtttggcatcctaatatcagcagccaaagtggagctatttgcctggatatcttgaaggaccagtggagcccagcactcactctgaagactgcacttctttctgtgcaagcacttctctctgctcctcagcctgatgatcctcaagatgccgtggtggcacagcagtatctgaaagactatcagacatttgttaacactgctcgctactggacagaaagttttgccaggcttcgtctcgtggga

SEQ ID NO: 219365 - DNA, 455 bp, Glycine max
gaagcagaaaccttgccaacaaggtatttaatttcatagctgatatatataataatcaggaaatagtccagaactgtagcttccaaggaggagaaaagtccaaccataggactataccatttttcaagtagatttatatgactctattcaatttaaaacctattgtctatatggctccatcatattatggagacacgtcttcctaaacttgaccatgatctacagcaacctttcaagggccatgttttcatcaccaccaacagcttccaaaatgctccttacttgagcttctggaaatcccatctcaacgagtttctgtaccttatcttcaatcccacgagacgaagccttggcaaaactttttgtccagtagcgagcaatgttaacaaatgtctgatagttcttcagatactgctgtgccaccacggcattttgaggatcatcaggctgaggag

SEQ ID NO: 219366 - DNA, 512 bp, Glycine max
ggaaaaaaaatgaaactcatctgcattattattcaaaaaaaaaaacatttctttaattgatattttcagaatttaatctatacataagggatccctaattatacctttatgttcaaaccaccatttacaccaggtgtaccatcagatatacccaaacagccaaagcctaacacctacccaggaattcccaccaaaaacaataactacaacctaatataagttaaaaacaaacaaaaattccgaaaccattaatcattcaccataactagttatcgtcgtgtcatcgcaattgaccaccctccgggtccttaataatgtagccgccaccccaatctccgggtcctcccgcgctgacccgacccggacgcgatccgggtcttgacccgttcaaactcggggagtggacacggaatcttgatcccaccggggtgttcaaacccgaactttttttctgctctcctcagcaaatcactgaacaaagggtgggtgaagtaaatcaccggaatcaacac

SEQ ID NO: 219367 - DNA, 451 bp, Glycine max
caaaaacccattcacttttccacaagccttagttcttctcatttattctctttttcaaaatactttcactctctctaaccttccagttctcactaaacctcgtgaagctcgtgatggacaccaagataggttcactagacgcgcccaagcccaacagcaacgacgtcgtatcatgcaacctcaccagcagcgccgccatccagccctgcttgccggcgacggtgatcaacggcgccggctgtagtgactccaccttgggcggccacctggcccgccggctggtggaaatcggcgtcaccgacgtgttctccgttcccggggacttcaacctgacgctgctggaccacctcatcgcggagccggcgctgcacctggtcgggtgctgcaacgagctcaacgccaggtacgccgccgacggctacgcacgcgccaggggagtcggcgcgtgcgt

SEQ ID NO: 219368 - DNA, 528 bp, Glycine max
ctttctcagtttctctttcttagggttttctccaccgtccattgcaaagtcttgcgcccaatttccatggaactgtaaagagaggatagttagaagattaaatcttaaagcagtaagtcatcatggataaatcagagcagactcaacagcagcagcagcaacaacagcatgtgatgggagttgccgcaggggctagccaaatggcctattcttctcactacccgactgcttccatggtggcttctggcacgcccgctgtaactgctccttccccaactcaggctccagctgccttctctagttctgctcaccagcttgcataccagcaagcacagcatttccaccaccaacagcagcaacaccaacaacagcagcttcaaatgttctggtcaaaccaaatgcaagaaattgagcaaacaattgactttaaaaaccatagccttcctcttgctcggataaaacagataatgaaagctgatgaagatgtccggatgatttcagcagaagcttccgtcatatttgcaaaag

SEQ ID NO: 219369 - DNA, 477 bp, Glycine max
cagagctcaagagattgtccaatccatcgttgccaaggcagtggcaaaagaaccccgcatggctgcttccttgctcagactacatttccatgattgttttgtcaagggctgtgatgcatcggtgctgctagatagcagcggaactattatcagtgagaagaggtcaaatcccaaccgtgattcagcccgaggatttgaagtcattgatgaaattaaatctgcactagagaaggaatgcccacatacagtgtcatgtgctgacattttggctctagctgctcgagattcaactgttcttacggcgggaccaagctgcggagtacctttgggcagaagggactctcttggtgcgagtatttagtggctcatataacaacattcctgctcccaacaacacattccagaccattttaactaaattcaagcttaaggggcttgacattgttgatctacgtgctctatcttggagccacacta

SEQ ID NO: 219370 - DNA, 586 bp, Glycine max
  unsure (1)..(586): unsure at all n locations
gttctacgcgggcaaagccccaaagggagtgaagaccaattggatcatgcacgaatatcgcttagccaacgtcgacagatccgcctcaaaaaaaaacaccaccaccaacaacttgaggcttgatgattgggttttgtgccgaatttacaacaagaaagggaagattgagaagtacaatggtgttgcggtggtggatcagaaagtggccaagttatcagaagaggaggttcagttccagcacgagaccaagcctcagatcaagatgtacggccacgatgatttcaggaacgaccaattgtacatggacacgtcggattcggggcccaggttgcacacggactccagctgctccgagcacgtggtttcgcccgatggcacgtgcgagaaggaggtgcagagcgagcccaagtggaatgatcttgagttgggccccgacccagccttgggcttcgattntaatttcatggacctgacctcagatgacgcttttgcccctcaggttcaataccaaatcaaccatctctcaccgtggcaagaaatggtcacgtacctaccaaagacattttgattttttagggtcatggga

SEQ ID NO: 219371 - DNA, 563 bp, Glycine max
  unsure (1)..(563): unsure at all n locations
gaaagatgagtccaacatgggtttttgtgttaggtgttgcagcaatgttggtggttgtgagtggacaatcatcagtgaagcctttggtgaagacagtgaaggggaagaaggtgtgtgacaaagggtgggagtgcaaaggttggtctgcatattgctgcaatgagactatctccgactacttccagacataccagtttgagaacctcttcgcgaagcgcaattcgccggtggcacatgctgttggtttctgggactaccgttctttcatcaccgctgctgcactgtaccagcctcacggctttggcaccactgggggaaagaccagtggccagaaggaacttgctgctttctttggccatgttggcagcaagacctcttgtggttatggggtggctacagggggacccttagcctggggcttatgctacagcaaggaattgagtcctgataaattctactgcgatgactactataaattaacctacccttgcactcctggcgcagcatactatggccgnggtgccatcccactttactgggactatcactatggaaaaagccgg

SEQ ID NO: 219372 - DNA, 358 bp, Glycine max
acagaaaaacaagtaatcgattttattgaaatcagaataattaatctgatgaaaccaactttgataggcatatgcttataatggttgaaaggtgaaattggaaagtcacacaaacacacatgaaaatacgaatacttatcaaagtatgaaatcgacttagacagtcatttgcttatggttgcaaggtgatagtggagagccacacaaacacttgttgtgagagtacaaagacttattgatcttttgcaattctccacccttcggtatgagaccgcataactgattatagctgacgtcgaatagctgaaaatgttcgactctggtcaaccccacaggaaggctcccataaaattttatt

SEQ ID NO: 219373 - DNA, 528 bp, Glycine max
gatgaggacccttcgcctccttacaacatgttcagaaatgtgctagacatgaatgctcattttggtggctttaattctgcattgttgcaggctagaaagtctgcgtgggtgatgaatgtggtcccaataagtggacccaattatcttcccttgatccaggacagaggatatgttggtgttttgcatgattggtgtgaggcttttccaacgtaccccagaacctatgacttggtgcatgctgcaggacttctatcccttgaaactgagcagcacagatgctccatgcttgacctgttcattgaaattgacaggatacttcgcccagagggttgggtaataattcgcgacacagttcccttaatagaatcagctagacctctaacagcacagctgaagtgggatgcaagagtgatagaaattgaaagtgacagtgatcagagactcctgatctgccagaaacctttcttcaagagacaggcaagctaaaaagaattgatgggcctgagaaactagaccatatatacatat

SEQ ID NO: 219374 - DNA, 559 bp, Glycine max
acaatttaccagctatacttgttccttttgaaggttagaagtgctacaatacaaacaatggcagctactcaggaagatgtgaagcttttgggtattgtgggaagcccatttgtgtgcagggtccagattgcccttaagttgaagggagttgaatacaaatttttggaagaaaatttgggcaacaagagtgatttgcttctcaaatacaaccctgttcacaagaaggttccagtgtttgttcacaatgagaagcccatagcagagtctcttgtgattgttgaatacattgatgagacatggaagaacaaccccatcttaccttctgatccttaccaaagagccttggctcgtttctggtccaaattcattgatgataagattgtgggtgctgtatggaaatctgttttcacggttgatgagaaagagcgtgagaagaatgctgaagaaacatatgaggctcttcagtttcttgagaatgagctgaaggacaagaatgtttttggaggagaggaacttgggttggtagatattgcttgctgcttcatagcattttggatcc

SEQ ID NO: 219375 - DNA, 492 bp, Glycine max
atcgaaaaatataatttctttattaactgaaatggtcaaaacgaaaactagatcctaggattttttttttttttttttgggattaacatataggtagtatcatttgacatgaaatttaaacatcaataactcaccaagacacaagttgttcaacaaatatccttaaataagtctattttgaagcagaaagacttttatagcgggctttgaagaagggtataagggggtctctaggaggaaggactttttgcacaaaagggtggttaagggattcttggctccatttgtagagtataggaaatttcttactggtgaataactgcaaccctgctattttctgaaaaattgggatccaaaatgctttgaagacagcggccatatctacctacccaaattccttttctccaaaaaacttgttgcgccttagcttattcttaagaaactgatgaggcctcatatggtttttaaacattcttttcacgctctttctta

SEQ ID NO: 219376 - DNA, 546 bp, Glycine max
gtgatggtgagccaactgataatgccgcgagattttataaatggtttacagaggtgagtttgagactgttccggtggcattaaggttgagagcttatgtgttgactttgtgtgcttttgtggaggatttaggggggtgagaaaggagaagggtggcttcagaatcttcactatggtgtgtttggccttggaaacaggcagtatgagcattttaacaaggtggcgaaggtagtggatgacatgctcgttgagcaaggggggaagcgccttgtgccagtgggtctaggtgatgatgatcaatgcattgaggatgactttactgcatggaaagaagaactgtggccagcattggatgaattgcttagagatgaggacgatgcaactgtgtctacaccttatactgctgcagttttggagtaccgggttgttattcatgatccattggaagcatctgtcgacgaaaagaagtggcataatgtaaatggtcacgccattgtggatgctcaacatccagtcagggcaaatgtggctgtgagaaaggagcttc

SEQ ID NO: 219377 - DNA, 480 bp, Glycine max
acctccaaacatttttttatagttcatacagtacaaggaattgtctgcgtctctgaacctttctttgaggttcatcatacattacaaaaagaaaactgaagttaaatagttcatagtctaggtataaacagtatataataaattacacgaaccaaaaagaatcctttagaaaatatagtgaaaaagaatcgtaggaaatgtcgtcgtgatggcaacaagcgccccccctcaattttgagggcactaatgaaaggtggcacaaataaggccctttcaaaatcctctagccacaactcctatgttttattaatatcttcgtcacccccacggcttgcattcagatatcatcaccatacatcgcgcaaatatctgccagtagtttgtagattctttaccatgctctcagccttggaactatcgagagaaccctgctcttgcaaaattgtgtgcagggcgcggtgtacatccctggccatgccc

SEQ ID NO: 219378 - DNA, 661 bp, Glycine max
  unsure (1)..(661): unsure at all n locations
caagcccaagcccaagcccaagcccgttcataaaatcctcctgcagcagcacccagtacccagccctctgcgtctcatccctctccgtctacgcctccagcatccaacaggaccctcaccaactggttcagacagcactctccctctccctgaaccgcacccaagccaccaaaaccttcgtggctaactgcaacaaattcagaggcctgaaacccagagagcacgctgcactcaaggactgcgccgaggaaatcagcgacagcgttgaccgcctcagccggtcgctgaaggagctcaagctatgtaaggttaagggtgaggacttcacgtggcacattagcaacgtggagacatgggtcagttctgctttgaccgatgagagcacttgcggcgatggattctccgggaaggcgctgaatgggaagatcaaggactctattagggctaggatgctcaatgttgctcaggttactagcaatgctctctcgcttattaaccactatgctgcacaacactagttgggaacaatgatcttggntgctaatggctttactttcttctttatgtgctctatgtaattattatatatgtgagtctttatagatatatgggatctctcatgcctcttaaatgtgaaatatgacgtgtgttttctatgatt

SEQ ID NO: 219379 - DNA, 510 bp, Glycine max
aatcatagaaaaacacaacgtcatatttcacattgaagaagcatgagaagatccatatatctataaagactcacatatataataattacatagagcacataaaagaagaaaagttaagcattaatcaaccaagatcattgttcccaactagtgtcgtgcagcatagtggttaataagcgagagagcattgctaggaacctgagcaacattgagcatcctagccctaatagagtgcttgatcttcccattcagcgccttcccggagaatccatcgccgcaagtgctctcatcggtcaaagcagaactgacccatgtctccacgttgctaatgtgccacgtgaagtcctcacccttaaccttacatagcttgagctccttcagcgaccggctgaggcggtcaacgctgtcgctgattttctcggcgcagtccttgagtgcagcgtgctctttgggttttaagcctttgaatttgttgcagatagcccacaaaggtttgggtggtttgggtgc

SEQ ID NO: 219380 - DNA, 617 bp, Glycine max
  unsure (1)..(617): unsure at all n locations
ctcgagccgattcggctcgagccgttcggtagttgcccttgttcatcaccaattccatttcgatttttggctcacccaaccatcacaaatagaaactcactatcgcaaaacaaacaaactacaaacccagataagggaaaaagggtgttatctctgttaagtttccgtgtgtgagattttcagaatttgaatatggcgttagggtttgagggttatagttatacaacaacacttggaaggaaaagggttgtgttattacacagtgaagcttcttctctcaactgcaattcaccggtgaattcattgaagagaatgtgtagcaagaaattcacatttgactctgaaaggtctcgccttgaggcccttcctcttgatgttctgataagggtgttgtgtggtgtccatcatgaagatttgaagcaacttgttcgagtctcaaaaactgttaaagatgccgctgatgctgctaggaggatgcattttgagtatagcactcccaagaagaaaaattttgctattcctaaaccgtttgatatagagggtgctggtgggtttgacgaaatngatactaccaaagccccatcgaaaaagctaagcaaagctgatgggtagaatct

SEQ ID NO: 219381 - DNA, 542 bp, Glycine max
cttggttagttattcttcagttagaggtgtgacttgtgaaaggtttgtggaattgggtttggttgatgcggtgttggaggttcttgttgatgcggagagaggggtgtgtgagaaggctttgggggtgttggattgcgtttgtgattgcaagcaaggggtgcagatggcaaaggctaatgctttgactttgcctcttgtgattaagaagcttttgagggtgtctgagttgagttcaagctttgcggtttcggttctttggaaacttttttgtgacaagaatgaagaaggggtgttgattgaggcgcttcaaatgggagtgtttcataaactacttgttttgttgcaagtgggttgtggtgagggaaccaaagagaaggctacggagttgttgaagttgttgaatggttgtaggagcaaagccgagtgtgttgattcgtccttggatttcaagcatttgaagaagcccttctaatttgatctggctaggatatgagatttcattccactttttttttgtataggtcatattggtagaaacagaa

SEQ ID NO: 219382 - DNA, 542 bp, Glycine max
ttgggatcatatcaggcctaactggtgcatgtggaaactttggttctggtttgacccaattgatcttcttttcaacctcaaggttttctacttccactggtctctcccttatgggtgtcatgattgtgtgttgcactcttcctgtgactcttgttcacttccctcagtggggtagcatgttcctccctccttcaaaggatgtcaacaagtccactgaggaatactattacaccgctgagtggaacgaggaagagaagcaaaaagggttgcaccagaatagtctcaagtttgctgagaatagccgttcagagagaggtaagcgtgtggcctcagcaccaacaccaccaaacacaactccaactcatgcctagcttctccactttgcactctcattcatgcgccttcagcgtatttttaaccattggatgaagatcagacaattgaagttgatcgaacgagataaaatatgagtggtctgatcttcatcagacgggtttaaattgctgaatgtgggtgaatgtgttgaagagtgaatggagtga

SEQ ID NO: 219383 - DNA, 558 bp, Glycine max
cccatttcctctcagaaccctcgatcactcccacgcgctcctatatcctctccttcaccgtcgctctctccaacgatcacaacaacatcgtcatcccatggcaaacgccgcatctggtatggcagtccatgatgactgcaagttaaggtttttggagctgaagacaaagaggacacaccgtttcatagtttttaagattgaggagcagcagaagcaggtcattgtggagaagcttggtgagccagcccaaggctatgaagatttcactgccagccttcctgctgatgagtgccgctatgctgtttatgattttgagtatctgactgaagggaatgtccctaaaagcagaatttttttcattgcatggtcccctgacacatcaagggtgaggagcaagatgatctatgcaagctccaaagacagattcaagagggagctggatggaattcaagtagagctgcaagcaactgatcctactgagatgggtcttgatgtgttcaaaagcccggccaactaaaatgattatagaaaatagtaggctttctggtgggagcagca

SEQ ID NO: 219384 - DNA, 418 bp, Glycine max
ggcactcaaacgcaaggtcgtataaatcacaaatcataataaaacacactggaacaagcaaagcttgttaaaaggtgcaataaaatttatgccacaacttggaaaattgtaaagttgggaccataactacccaagttgaccatcccacaaactaggatattttccatgagtaactaaggcttaaggagtgctgctcccaccagaaagcctactattttctataattattttagttggcccggcttttgaacacatcaagacccatttcagtaggatcagttgcttgcagctttacttggaattcattcagctccctttgaatctgtctttggagcttgcatagatcatcttgctcctcacccttgatgtgccagggggaccagcaaggaaaaaaattttgtttttagggacatttcct

SEQ ID NO: 219385 - DNA, 455 bp, Glycine max
tgagaaggagtttttgaagactattactggcaagaaggagaccctcattgaccttacagttatagaaatcttgtcaaggcacgcatctgatgagttctaccttgggcagagagatggtggtgactactggacttctgatgccggtccattagaggcatttaagaggtttggaaagaagcttgaacagattgaaaagaagcttatagagaagaacacagatgagacattgagaaaccgctatgggccagctaaaatgccttacactctgctctatccttctagtgaggagggattgactttcagaggaattcccaacagtatctctatctaaagaccctatggctgcttaagtactgctcctggctttaaataaatgtgaaactgaaggaaccagattccttaatcagctgtgtatgcttaagtcatgtatctggagcggctgaatgtatttgtat

SEQ ID NO: 219386 - DNA, 348 bp, Glycine max
ccattatactaacacaactctttttattaatgacaaatacaaatacattcagccactccaaatacatgacttaagcatacacaactgattaaggaatctgggtccttcaatttcacatttatttaaaaccaggaacagtacttaagcaaccatagggtccttagatagagatactgttgggaattcctctgaaagctaatccctcctcactagaaggatagagcaaagtgtaaggcattttagctggcccatagcggtttctcaatggctcatttttgttcttctctataagcttcttttcaatctcttcaagcttcttttcaaaccttttaaatgcctttaatggac

SEQ ID NO: 219387 - DNA, 511 bp, Glycine max
gcgacacgtatcaacttcaataatcgcatcgcagaagcagtttccggtgcatctcatcgtctccgaaaatgaacgacgcagatgtctcgaagcaaatccagcagatggtgcggttcatccgccaggaagctgaggaaaaggccaacgagatctctgtctccgccgaagaggaattcaatatcgagaagctgcagttggtcgaagccgacaagaagaagatcaggcaagaatacgaacgcaaagagcgccaagttgaaattcgcaagaagattgagtactcaatgcagctgaatgcttctcggattaaagttcttcaagctcaagatgacgtgatcagttccatgaaagaagctgcatccaaggaacttttgactgtgagtcatcatcatgatgatcatgtgtacagaaaccttctgaaagatctcattgttcagtgtttgctaagactgaaagaaccttctgtcttattgagatgtcggaaagatgacctgcacttggtagagaacgtgct

SEQ ID NO: 219388 - DNA, 527 bp, Glycine max
gacacgacaacggttactatattcctgtcacaatattgacagtaatgttcaatatatattacatctgctactttattgccaagaagctcaaagctgaaaacacttgtcctcataacaatcataagtaaatcaaatctataacgccggacaactggactaccgaaaatgacgtaatttaagggacaataattataagttcacagaagcaatggcttgatagctattcaggtccaagacatgaagacaagcttatgcttcgggatatagttccaggggtaaccaaacattacaatcaaaatcttcaagcaacaatttgtccaaagagctgctttcggatctctggaagctttttacggaaaactacatcaagacgtgcatcaagagtattttcacacacaatctttccatcacgagaagccaacaccaccccaccgggacagtagagatcgtgagaattgtgacgactgggtccaggtggaagatagacttggttgcaacaatgatctctgggggatcgaatttgcttt

SEQ ID NO: 219389 - DNA, 442 bp, Glycine max
gcctcgcttctaacgtcaccgactcagttgttgtcagcgagtgagtgagtcgtttctctgcagcaacaaggtttagccactccaaacagacgagaaatgggtcgtggggtcagtgctggtggtggtcagagttccttaagttaatcttttgacagtggggtgcctgccagcagtgcacacagtcagcctgcaaatggtgctcgcactcaaaatgctagggctccttcaccaccagtggataagccaagtgcagcaccagcaccagcaccagcgccagcgcctgcatcatcaccaattgataagcagatgccagctggaattcctggaagtctcaaaaacacttaccatcgtgctgatgggcaaaactgtggcaactttcttactgatcggccatctaccaaggttcatgctgccccacgtggcggatcttacttgaattacc

SEQ ID NO: 219390 - DNA, 641 bp, Glycine max
gttacacggaggccactagtgctgcaacttcacaagacggaagaagggacacatgagtatgctgagtttcttcacataccgagaaggagattcaccgactttgctgctgtgaggaaggaaatagcagatgaaacagatcgtataactgggaagacaaagcaaatttctaacattccaattcatctcagcatttattctccaaatgttgtgaacttaacccttatagatcttcctgggttaacgaaggttgcagtagagggacaacaggagagtattgttcaagatattgaaaatatggtccgttcttatgttgagaagccaaactgcattatcttagctatctctcctgcaaatcaagatattgccacttcagatgccataaaaatcgccagagaagttgacccttcaggtgaaagaacatttggtgtcgttaccaaacttgatcttatggataaaggaactaatgcagctgatgttctcgagggaaggcaatacaggctgcagcatccatgggttggaattgtgaaccgttcacaagctgatattaatagaaacgtagacatgatcgctgctcgtaggaagggagcggaatattttgagacaagtccttgatatggacatctggcgcataaaatgggctc

SEQ ID NO: 219391 - DNA, 461 bp, Glycine max
ggaaaaagtccttcgaaaataatcaatatgggcgtaaaaaccaaacatctgaaccactcgtaagttacataaaatcacaacatagaactccaatgcttttgtacactgtggtctgtggaccaaaagaatcattcgcaagtgcgaattcaacttcttgccataaccgtagatttttctgttcgtgtttgattaaaaaaaaatagtaagaatgatcaaatctataacaaatcttcctcgaaacatctgttgcaaactctgggattttattatttccaagccacggagtcaatatcatccctagcttgcttgtataattcaagccttttagctatttgatttctcctatccataagggctgggtcttcgtctaacatagcacccaatttctccttcttcttcctcccaacatgaacataaaagtgggttagcaatgatctcttagcctctctaacttgacaatg

SEQ ID NO: 219392 - DNA, 579 bp, Glycine max
ccatggttccagttcgtgtccacactgtcctaatttccacccaacatgatgagactgtgagcaatgatcaaattgctgcggaccttaaagagcatgttatcaagcctgtcattcctgagaagtaccttgatgagaagaccatcttccaccttaacccttctggccgttttgtcattggtggccctcatggtgatgctggtctcactggaagaaagatcatcattgatacctatggtggctggggtgctcatggtggaggtgccttttcagggaaggaccctaccaaggttgacagaagtggtgcctatattgtaaggcaggctgcaaagagtgtcgtggcaaatggccttgctagaaggtgcattgtgcaagtttcctatgccattggtgtccctgagcccttgtcagtgtttgtggacacttatggaactgggaagattcctgacaaggagattctgcacattgtgaaggagaatttcgacttcagacctggaatgatcaccattaaactggaccttaagaggggtggtcataggttcctcaagacagctgcttatggacacttttgaagggatgatg

SEQ ID NO: 219393 - DNA, 386 bp, Glycine max
ttcttttttttttttttttttcttttttttttttttgggacaaaactctgataaaatgtccatgggatcaacacagtaacattgcatagccaaacaataaattgggagtttagggagaaaaaaaaaaaccgaacagtttatgttttggtgaaatggcatttgacattgaatggagtagtaggagtagtagtcttgaaacacgcaaattattcatccccccccagcaagacatctcactggagggggggattaacttaacaacacttttaagcttggggcttctctgacttgagtgggttcacaacttcccaggggaaggctgcatcatcccttccaaagggtccataagcagctgttttgaggaacctatgaccaccccttttaag

SEQ ID NO: 219394 - DNA, 467 bp, Glycine max
gctgtggttatcatcttcttcttcctctttcttagatctcttctttctctacgccgcacgccgaaaccatggccggaaaaggagagggtcctgctatcggaatcgatctcggaaccacctactcttgcgtcggtgtgtggcaacatgaccgcgttgaaatcatcgccaacgaccaagggaacagaaccacgccgtcttacgtcggattcactgacaccgagcgtctcatcggtgatgcggccaagaatcaagtcgccatgaaccccatcaacaccgtcttcgatgccaagaggttgattggtcgtagattcagtgattcctctgttcagagtgatatcaaattgtggcctttcaaggtcattcctggtgctgctgacaagccaatgatcgtggttaactacaagggtgaagagaagcaatttgccgcagaagaaatctcttccatggtgctcatcaagatgcgtgag

SEQ ID NO: 219395 - DNA, 471 bp, Glycine max
aaagtgcataacaattgagtataccatctaataatgaaaataacgcaaataacataatgcttaaagcaacgttcatatcagaagggaaaaatagtttgaatcccatccaacaaaaattatgcgattaaaatccaattaaaaaagcataaagtaaaataagtttttaaaacaggtatctggaggaaagcaactacatttagtccacttcctcaatcttggggccagcaccacttccaccagaaggaggagcagcatactcatcctctgctgcaccagcaccacccacgtctggaccagcaccaccttggtacatcttggcaatgattggattgcagatgctttccaattccttcattttgtcctcaaactcatctgcttctgcaagctggttgctgtctaaccactggattgcttgctcaattgcatccttaatcttctttttgtcagccgggtcaagtttctcaccaatct

SEQ ID NO: 219396 - DNA, 568 bp, Glycine max
  unsure (1)..(568): unsure at all n locations
aggagccgcaatgtttgacatggaatatgcaagatggttagaagaagatcacagactaatgggggagctgaggaacgggttgcaagcaccgttatcagacagtgatatgagagtgatggtggatggatatctttctcactatgatgagattttcaggctcaagggtgtggctgctaaatctgatgtcttccaccttatcaatggcatgtggacttcccaagctgaacgttgtttcctctggattggtggttttagaccctctgatctcatcatgatgctgattcagcagttggagccactagctgagcaacagataatggggatgtatggcctgaagcattcctcacagcaagcagaagaagcactctctcagggacttgagcagttgcagcagtcacttgtggacaccatatctggatgcccagtggttgatggtgttcaacaaatggtcgttgccatgagcaagcttgccaatcttgaaggtgttgttcgccaggctgatnaattgaggcagcaaactcttcatcagctatgtcgattactcacagttcgtcaagcagcacgatgc

SEQ ID NO: 219397 - DNA, 436 bp, Glycine max
agctaaagtaggagcttcctcatcatgcacataaaaactagatttacatttacaataaaacataaagacacaagggagcatagaagattgaaaagaaaaaattaaataaatatttttcttttaggaagacgctgacattcatttgtaaagcagcccaacgaaatccccttaattatggcgagcaaacttctttcaggctaatgggttttaattacatctctcagaaacttgagaaataattctgagaatgttggactatttgcatttccgtagttgtttggcatgagttatcgttcgtgatcaaggactctcgtggtcttgatgcccaaagagaactaagggcacgaagacgtccatagtactctccaataacaataaagcatcgggctgcttgacgaactgtgagtaatcgacataactgatgaagagtttgctg

SEQ ID NO: 219398 - DNA, 540 bp, Glycine max
cttagtcatcttcttctttcatctttctccctaacggtatcgagggaaaaatatggcggaagaacacagatgccaggcaccgcgcttctgcgccaacaattgcggtttctttggcagccctgccacgcagaatatgtgctccaagtgctaccgcgatttccagctcaaggagcagcaatcttccaacgccaagatggttctcaatcagtcgctggttccttcaccgccaccggcggtgatttctcagccgtcgtcttcttcttcggccgcggtagatccgtcatcggcggtggttgatgacgcgccacgcgaggcggaggaggttaaggcgccgcagcagaaccggtgtatgacgtgcaggcggcgcgtggggctcacagggttcaagtgtcggtgcgggatgatgctgtgcgggacccaccgttacccggagcagcacgcgtgcgagttcgacttaaagggatggggagagagcagatcgcgaaagcgaatcccgtggtgaagggcgagaagctcgacatgatctgaaacgaatgaacg

SEQ ID NO: 219399 - DNA, 527 bp, Glycine max
acaataataaatccatatttttataattaaaagtggtagattacagcgatgcacttgagaaacatattaagtggactaattctccctggtcaagcaagaaaaaaaccagctatgacccaaggtagagagagattatacacagaatactagtaattaactaagactggctctgcaattgccaaaaactccattgcagtagcagccacctgagaagacactaagacctagactagaccatacataatgaagattaatacccttacataacaacataggacactaagaaaacacggcttcacagagaatcccagtcgatctcataagaggggtacttctggagattaaaattatccgaatcaccttcccactgcggttcgctgacgtcagcgaaagtcagaaccgaaagcggcgaagaaccttcagaagaggaggaagcagcttcgaccttacaagagttgttgtcgttgtttgttgccttctctggcggagaaacgagtttggatcgcgttttcctcagaggcttttcg

SEQ ID NO: 219400 - DNA, 588 bp, Glycine max
gccgtcatgatcaccgccgacgacggcttcggccggcctctgtacaccgtcagagacgccgtcaacttcctcgccgaaaacaaccgcgaactctacaagccgaaacgcgccggcgtgttccgccgacgccgtagattctccgcgaggagcatggaaaacacgctaaagcgcgttttcaagagaaaagagggagaagaacggttgttgactctgaaggacacgtgtaagccgctacttgtcccttgctttgacctcaagagctctgcgccgttcgtgttctcccgagccgacgcgtccgagtcaccgagtttcaacttcgagctttggaaggcgtgccgcgccacgtcagcgactcctggcgttttcgcgccctttcacttctcctccgtcgacggaaaaacctcgtgcgccgccgtcgacggcggcttagtgatgaacaatccggccgcggcggcggtcacgcacgtcctccacaacaagcgcgacttcccgtcggtgaacggcgtggaggatctccttgttctctccatcggaaacggagctccggcgaagagaatgaaacaatgccgcgagtgctctacgtcaatg

SEQ ID NO: 219401 - DNA, 554 bp, Glycine max
  unsure (1)..(554): unsure at all n locations
cttgagcgtgtccccgccgacatccgtgcccagggcggcgtggcccgcatgagcgacccgcagctcatcaaggacatcaagcgggccgtcaccatccccgtcatggccaaggcccgcatcggccacttcgtcgaggcccagatcctcgaggccatcggcatcgactacgtcgacgagagcgaggtcctcaccctcgccgacgacgccaaccacatcaacaaacacaacttccgcatccccttcgtctgtggctgccgcaacctcggcgaggccctccgccgtatccgcgagggcgccgccatgatccgcaccaagggcgaggccggcaccggcaacatcatcgaggccgttcgccacgtgcgttccgtcatgagcgacattagggttctccgcaacatggacgacgacgaggtcttcaccttcgccaagagcatcgctgcgccctacgacctcgtcatgcagaccaaacagctcggccgcctccccgtcgtccacttcgccgccggcggagtcgccacccccgccgacgccgngctcatgatgcagctcggatg

SEQ ID NO: 219402 - DNA, 554 bp, Glycine max
  unsure (1)..(554): unsure at all n locations
gaataatcgagacacagatcatagtgatcattttttaatttctcagatttatccgacgtcgctgcagatccaccaaccgttatggctgccttcagcggtgatgaaacggcaccgtttttcggcttccttggcgccgcagctgccctcgtcttctcctgtatgggagctgcctatggcacagcgaagagtggcgtgggcgtggcttccatgggtgtaatgagacctgagctggtgatgaagtcgattgttcctgttgtcatggctggagttttgggcatttatggccttattattgctgttattatcagtaccggtattaatccaaaggccaaatcctattacctctttgatggttatgcacatctctcttctggtcttgcctgtggcttggctggcctttctgctggcatggctattggtattggtggtgatgccggtgttagagccaatgcacaacaaccaaaactntttgttggaatgattctcatactcattattgcttgagcacttgccctttatggtctcattggtggtattatcctggtctctcgtgc

SEQ ID NO: 219403 - DNA, 471 bp, Glycine max
ctctcagcagcccaaaaaatacatataaaagtcggatgatgtggcagaatacaatcaataaagtataaaaaagaggaagcttaagaagctttattaagtaaacataaacctaattttacaaacaaacaccacaaatggcgaattgaactttcacaccattgctaaatcctgaaaatgctgcctgaacatcgcttagctcggaacaactaataattacctccctcaccccctttaaaaggaggttaaaacagatgggtggtcaaagaatattttgcagcacaactcctttcttagtcggctttagactggccagcacgagaagacaggataataccaccaatgagaccataaagggcaagtgcttcagcaaaaatgaggatgagaattattccaacaaaaagttttggttgttgtgcattggctctaacaccggcataaccaacaataccattagccatgccagcagaaagg

SEQ ID NO: 219404 - DNA, 484 bp, Glycine max
  unsure (1)..(484): unsure at all n locations
cggctcgagcccacatctctcgtatacccttttgtctttcttcactaaggtatcttattgagagttcaagactagtcctttgatacgttgaatttctttcaagtattgagattcatttaaaaaatcaattttttgatatcttatacatacatctattgggatgtctagaaccgtggagatcacagttttgtcggcagagaacctccaaatgaacaaaaaacccattagagggaacgcatttgtgacggttcaatccgacgctagcaacgacacaagtgccacaacagtggattctgaaggagggagttacccttcctggaacgagaagcttgtgatggacgtgccattgcatgcaaggtttataaccgttgaagtgaagtgcaagacatcatcggcggngtcgaacagtatcggagtggcgagaaataccgtttccgatttcgtcggagggtacgtgcccganaatcaattgcatttcttgagc

SEQ ID NO: 219405 - DNA, 524 bp, Glycine max
  unsure (1)..(524): unsure at all n locations
attgatatattatatattttaataaatgatttatagttaatatattatttatatatagtattataatattattttgattgattatttttatattgttttattatttataaaagttatatggtgttatcngatcngtatncnatgnattatttgggggttgtgagtttatagtgtgtggatgccctttttttttatttttaatcgtaaattttttttgttatattgataatttatatatttatagtattgggaaatttataagttgtaattgaattaataatttggtaattttttttttatcctttaaagattaatttttttggtagtttaaacaaatagttggaatttatgttataaatttggtggattaattataggtgtatggtacatttgttatagttgttgacaatgacatagaatttgaattttacgaatgttgttgttgttgttgtgaaattttaattttattgaaatatttacaaacaggtttttttaaatttatggttaaaaaattgtagtttaag

SEQ ID NO: 219406 - DNA, 517 bp, Glycine max
gtcaaaacactatttgtattttcttagtgtattttatcgattgtatgcttacaatcatcaacctcgtcttactaactatttggtttcaaagttggcatgtgtgtaatgtggctttgttttcatctccccaacacttggacaatgcttctactctgatacaaagttttatggataaaggcaattaattaaagaaaattgaaacagttttatgaatcaagaatcatcctttttggctgctgcatgtttgcatggaatatgttggttttgattctttagctcatctccagccaccaaaaaatatgcagtgtgcctgaaaaagttcatcattttggtctttgagtcatcatctatatctgtagtactgcctaatgcatgttgcatgtgatgtaaccacctctctgcagcttgatgcgtgaccggaaatggtcgatgccgagcaattagagcaggatgtcctcttttctgagaacagagaggaggaccaccctttcgctgcacgaagaactcgtattgggtt

SEQ ID NO: 219407 - DNA, 528 bp, Glycine max
cgggtgtactttcttgcgaaaccgagagagcgaaggggcaaacacaatttttttttatcttcttttttattttttgtagagagagagagagagaaaatgttggggatcttcagcagttcagtggtgtcgccgccggaggagctggtggccgctggcagcagaacgccgtcgccgaagacgacggcggggaagctgctgaaccggttcgtggagagcaaggcgtcggcggtgtcgctgcaggtgggggaacacgtgcagttggcttacacacaccacaacgaatcaccgtggcatcccagatcatttgctgttaaggatgagatattctgcttgtttgagggggctctagacaatttgggcagcctgagacaacagtatggactggccaagtcagccaatgaagtgattttggtgattgaggcttacaaagctttacgtgatcgagcaccctaccctgccaatcgtgttgtatgccatctcagtgggagctttgctttcttagtgtttgacaagtccacttctaccctt

SEQ ID NO: 219408 - DNA, 518 bp, Glycine max
agaaaatctcaagccaaaagcatatattttattgtattagaaagcgcaactgtacatgagaaacacaaaatcctaactaatgaacaccataataaactcttccaccagtcgcacttttgtcatagtcattattaacattatttacatgacccctcatgcatgccttaccgtcacaagcacataaatgcattactccattaatgcatcacacggtactctatttgaaaatgaatcttctactctgtggctgcaagaacagttgatccttccaccttgaaaaatgcaccccagattttctcttcctcagcagggactgcagtaatcttattctttggattttcatagcatctcaatcctccaactgctgtagagtagaaacatccttgagggaaagaagcaagcgactttccacaagaacctttatgcaaatttgcattatcagcaaatgctacgtaaccatcagctgtgattcctcaatagagaggaaccttgccagcttgatcagaacccacaaaagg

SEQ ID NO: 219409 - DNA, 595 bp, Glycine max
ttttatgatgagtgtaaacgaaggtacaatgtgaggctttggaaagtgttcacagagtgtttcaactgcttgccagtggcagctctaattgatgaaaagatactttgtatgcatggtggactctctcctgagttacacaatttaaatcagataaagggtttgccacgtcctattgaagtacctgaaactggtctactatgtgatctcctttggtctgatcctagtagtgacattcggggttggggagaaaatgaacgcggagtttcctatacttttggtgctgacagggtgacagaattccttcagaagcatgatcttgatttgatttgcagggcgcatcaggttgtagaagacggatatgaattctttgctaacagacaacttgtaactatcttctcggcacctaattactgtggagagtttgacaatgctggtgctatgatgactgttgatgagacacttgtgtgctcttttcaaatattgaagccagtagaaaataaaaagcctagtaagtttggctttgggagcacaactacagttaagcagagtacaaacaaaagccagttccagcaatcatttttggtgctaaagcatg

SEQ ID NO: 219410 - DNA, 593 bp, Glycine max
  unsure (1)..(593): unsure at all n locations
gttattacttccacagcttgttgggctgctatgttgggattgcttgttggattggggtttgtaatgggtccaattcaacttcttaagctttatggtgttccctatgttatattcgtcatgtggttggatttggtgacttatttgcaccatcatggccatgaagacaaattgccttggtatcgtggaaaggaatggagctaccttaggggtggtctaactactcttgatcgtgattatggattgatcaataacattcaccatgacattggaactcatgtcattcatcacctatttcctcaaattccacactatcacttagttgaggctactgaggcagctaagccagtgtttggaaaatattatagagaaccaaagaaatcatctcctcttccttttcaccttattggggaattaataaagagcttcaagactgaccattttgttagtgacaagggggatgttgtgtactatcaaactgactctgagattaatggctcgtccaaatcagagtgaagattaaaattcttttttatatagacaagagagacttatacacaattcttattgctctaaagatngtcttgagtttctta

SEQ ID NO: 219411 - DNA, 589 bp, Glycine max
ctcgtttcaggtatcgagggaaaaatatggcggaagaacacagatgccaggcaccgcgcttctgcgccaacaattgcggtttctttggcagccctgccacgcagaatatgtgctccaagtgctaccgcgatttccagctcaaggagcagcaatcttccaacgccaagatggttctcaatcagtcgctggttccttcaccgccaccggcggtgatttctcagccgtcgtcttcttcttcggccgcggtagatccgtcatcggcggtggttgatgacgcgccacgcgaggcggaggaggttaaggcgccgcagcagaaccggtgtatgacgtgcaggcggcgcgtggggctcacagggttcaagtgtcggtgcgggatgatgctgtgcgggacccaccgttacccggagcagcacgcgtgcgagttcgacttcaaggggatggggagagagcagatcgcgaaggcgaatccggtggtgaagggcgagaagctcgacaagatctgaaacgaatgaacgaaggggtgtatggtaatttcgtgtctatcaagttggtggtgatggataacggatgcgaaacgccggtcggatca

SEQ ID NO: 219412 - DNA, 548 bp, Glycine max
ttcttctttcatcattcatcgcctttcaccacgcacgcagatcctttattcctataatccttccttcgctctctccaaatttcgactctttcgatcagatccgcgacacccaccccaccaaaaccttgcgcaacccatccatgacgcttggctcaggaggatccagtgtcgttgttcctaggaacttcagattgctggaggagcttgaacgtggtgaaaaaggaattggagatggcacagttagctatggaatggatgatggtgatgacatttacatgcgctcttggactggcacgattattggcccccataatactgtacatgaaggaagaatttatcaactgaagctgttttgtgataaagactacccagaaaagccccctagtgttcggtttcattcacggatcaacatgacttgtgttaatcatgaaactggagtggttgaaccaaagaaatttggtcttcttgcaaattggcaaagagagtacaccatggaggacatactgacccagctgaagagggaatggccgctcctcataaccggaagc

SEQ ID NO: 219413 - DNA, 465 bp, Glycine max
agaagggaaagtactacttaaaagagttttcgaaatatttgacacacactattttaattaaacagtccctttaacacagttaacaaagacaacaaaacaactctgaagccatggagatagaaacatgaagcttttcggggcattcccctatatgttctagaattcagaaggatggatccacaaagtattacacactatatattgcatacagcaaatatgcaattcgatccaacatctataccatcttgggggctaaaagtaggtaccttctggaggttggacaagcttccggttatgaggagcggccattttcttctttaactgggtaagtatgttctccatggggtactctctttggcaatttgcaagaagaccaaatttcttttggtcaaccacttcaggtcctgaataacacaagtcatgttgattccggaatgaaaccgaacactatggggctattttggg

SEQ ID NO: 219414 - DNA, 563 bp, Glycine max
ctccatagttgcagcaatcatgtcttttgtctattccacaattgggctcgctcttggcattgccaaagttgcagaaatgggtactttcaagggtagtctcacaggagtaaggattggaactgtgaccgaggccacaaaagtatggggggttttccaaggtcttggtgacatagccttcgcctattcatattctcaaattctcattgaaattcaggacaccataaaatctccaccatcggaagcaaagacaatgaagaagtctgctaagataagtattggagtaaccacaacattttatatgctttgtggtttcatgggctatgctgcttttggagattcagcacctgggaacctgctcacaggatttggtttttttaacccatattggctcatagatattgctaatgctgctatcgtaattcaccttgtgggagcataccaagtttatgcccagcccctctttgcctttgtcgagaaatgggcttcaaaaagatggcctgaagttgagacggaatataaaattccaattccttgtttttcaccctacaatctaagcccattta

SEQ ID NO: 219415 - DNA, 604 bp, Glycine max
gcacagttaagctagcttccattcggtttgatcgttctctctgaacaaccccagccatgggaggaggaaatggacagaaggccaagatggctcgtgagagaaacatggagaaaaataaacctgccaaagttagaggccaacaagaaggccatgaacatccagtgcaaggtgtgcatgcagacattcatatgtaccacatcggaaggaacgctctgcatgctttgagaagcaggatttctgatcccaacaatgtgttgcagagttgggacccaacactggttaatccctgtacttggttccatgttacttgtgactccaacaatcatgtgattcgcttagacttgggcaactctaacgtttctggaactctgggcccggaacttggccagctacagcatctgcagtacttggagctctacaggaatgagttaacagggaagattcctaaagaacttggtaacttgaaatcacttattagcatggatttgtatgataacaagttggaggggaagattccaaagtcatttggaaaagtgaagtcacttaaattcctgcggcttgacaacaacaagttgacaggatccatcccaagagaacttactcg

SEQ ID NO: 219416 - DNA, 530 bp, Glycine max
ggcggtacaatcatgttattatataaatagacatgcaaatctgacatttttagattcatattcgggttacatcaataatgttatttacatacaattgttttgagagcattcttacatagctttctttttataataaaatatgaaaaacatagatttcaattcacacttccttttcttttctttttttttaattaagaaaagtgtaaaaatggtgaggaaatattgatgtgaaaataacaccagcttttccctttgtgatactccctccctacgtaaactaagccttttcattgtagtctgtttagatgataataatgcgatttctatctttcttcagcatccaaaatcatatggaacaagtcctttcagctggggaccactaaacctgttgggttcaaaactttccattggaaaagattcaaagttgcctttaactggtattgttccacagagatcattattggaaacattaaagattttgagattagtgggacgagtaatgttctcttgggatggatcctgtcaacttg

SEQ ID NO: 219417 - DNA, 567 bp, Glycine max
  unsure (1)..(567): unsure at all n locations
atttcaccttgtcacaggcaatggccaaggctgatttttgggtcatgttcttctctcttgtcatgggctgtggatcgggcttgacaatcataaataacatgggtcagatttgccaatcattgggagacaacaatgtcaatgtttatgtctcagttatcagcatatccaacttccttggtcgtgttggtggtggctacttctcggaggtcatagtaaggaattttgggtacccaagacttgctgcattggcagtgattcaagcagggatgtctttgggactttgctactatgtcttgggtttggttggacaagtttacgtggtggccatatccaacggttttggctatggtgcccactggtcaattgctttagcagcagcttcagagctatttggcttaaagaactttggaactctctacaattttctcactatggctagcccagcagggtctctctttctatctggatttgtagcaagcacaatatacgactattatcgcgagcagcaagcaaagcaccaaatgctcactggaaataacaatgactngcttctttgcgagggaaaca

SEQ ID NO: 219418 - DNA, 538 bp, Glycine max
  unsure (1)..(538): unsure at all n locations
ctcgtatacttcccctcctcaactttgttttgtttttcatgtacgctttttgaatcatcttacgtgctcctaatcatgattccaacacttgtttgtattggcacaacaatattccaaagcaccctctcttcttactcattgtctttcatctctctttttctctccacgtcactcgcccttcttgctatttccctcaactattggcttgtccccggaggttttgcatggaggaaatatcacagtcgttacaaaggccatgcaaaagtctctggcccaatgggctggcccatattgggaactttacctgcgatgggccctctagcccacaggaaacttgctgccatggccacttcaccaaaagcaaaaaagctcatgacattgagtctaggaacaaatccagttgttatcagcagtcacccagaaaccgcaagagaaattctttgtgggtcgaacttcgctgaccgacccgttaaagaatncgcccgaatgctcatgtttgagcgtgccattggacttgctccatatgggacttattggc

SEQ ID NO: 219419 - DNA, 511 bp, Glycine max
cggctcgagccgctttctaaattctccacccctccgttccactgcttcgtcgcaacacgttacaataatggcttcgaagaattctcaacaagacacgcgcttagcgagaatcgcctctgcaatccgagtcatccccgactttcctaagccaggaattttgtttcaggacataaccacgctgcttcttgatacaaaggctttcaaagacaccattgacttgtttgttgagaggtacagagatcaaaacatcaatgttgtcgcaggagttgaagctagaggctttatatttggtccacccattgcattagctattggagcaaaatttgtccccatgaggaaacccaataaattgcctggggaggttatctcagaagagtattctttggagtatggaacagacaaaatggagatgcatgtaggggctgtacaacctggagaacgagccctaatcatagatgatcttattgccactgggggaacgttaggtgctgcaattaagcttctagaacgt

SEQ ID NO: 219420 - DNA, 486 bp, Glycine max
cagtaaaccttagccacttaggatgttccgcagccaagtgggaagcaagtcctatattatagccatcgtcctctcaatcgtcattaccaaacgggactcacagaagactattctaataataattgtgcagaactgagcgcgctcaaacaaagcacgctttccgtttccgcagcatcaaaatgtatcttatggaaatctaagcagtcatcaataaagctcctaacaagagccagctaataaaaacacaatcacttggaaaaaagatcaggctcccccattaatcaagacaaatagcgacttggctcccaacctttcccgcccctttaactctggcaattcaatcacacatgcacactccacaacatgcaccccaacacgtttctagaagcttaattgcagcacctaacgttcccccaggggcaataagaaccatctatgattagggcttgttctccaggttgtacagcccctacatgcatctccatt

SEQ ID NO: 219421 - DNA, 564 bp, Glycine max
ccgatcttttcctctgagaagacgtgtcggtagctgaagcattttataagcctccactttcctgaactagttttaacatacaatctttcaagtacacctccccagcttccatttaagaatggagatcactagaataggccaatggttaagtcttctgatatgtgtactactattactgcagacagaaggggttcctgtgggaatcacttttgttgaaaatgcagtggcaaaaggggctgtttgtttggatgggagtcctccagcttaccacttccacaagggatctggagcagggattaacaactggatagttcactttgagggaggaggatggtgcaacaacgttactacttgcctttcccgtagggacactcgattaggttcatctaagaaaatggatacatcactttccttttctgggtttttcagtaacagtaaaaagttcaatccagatttctatgattggaacagaatcaaggttaggtattgtgatgggtcatcatttactggtgatgttgaagcttgtgatccgaaaaccaatttgcacttcagaggagcaggggt

SEQ ID NO: 219422 - DNA, 428 bp, Glycine max
acagatataccctttattgataataaaaatgttatgtttacatggtagacaattatcatcctttatcaggttgcctacccttacactttggaaccttttaaatcatcaatcacagcttgttttttgttgatgcaacaatcgaacccatactttgatggtttgagatctcaaaccacaaagccatgagtgcaagtgacacatcttgttcaataaaaactagataactaataaagtatagtttgtagtaataaataaataagcatactcttttaaatgaatctatacgtctggacgctcattctgatcaaaaatacgattatggcaagtagggttgcaagggtaggcacaatctatctcacggaagggccttcgatcataaaaccaatcacccactgcctttgcaattgatgtcttggccaccactgggg

SEQ ID NO: 219423 - DNA, 539 bp, Glycine max
gcttcttcgagtttcacagcctagtcgtaaaagggtttcaagggatggaaaacatgcagagcttctggcaattgggtgatgaactccgtgggcactcaaaagcatcggaggatcacaagtggttaatggttgcctcgaaactggccgaacagacaagattgaagggggagcgtgtgaacaaccttgatctttcaaagggacccattgaaacaaggtcaagggataaatttgggttccaggaagagaacaaatttgattctcttaacttgagcatgttgaacctggactctaaatttactgagaatgtgagcaaaagctcacttcgaaatggtgtttatggtatgaatgcagtgtatcagaaaaacaatgcaaacttggtgagtaatgtgatcagtaacaagtacaatggcagtattcagcataacaaagagatcaacatcaacactggcaacaacatcaacaccaatgaaagcaacaacacatatgccactgacaaaggtttaagaccttgcctgctgcggagacactcccccgcatga

SEQ ID NO: 219424 - DNA, 547 bp, Glycine max
aatggataaaaatagttgaggatggtcttcgtgaactttttattgaatatagcatgcaaatgttccttacaacaacaaatggcgatgaaggggatgacattatgataaaaaaaacatttctagaagggtgaattgactggtcactctttgttgacggggatgaattttctgattatgaattctacatatctgattttacgggtaacccacaatgcaagtcagaattggatgagtacttggacgagcctctgctgaccagagtggaagaatttgatattctgagctggcggagagtaaatggattgaagtacccgacattgtctagaatcgcatctgatatcttgattttaccagttaccactctggctgcagattccattattgacatgcaaattagaaaaatggatagctaccggagttctttaagctccctgacccttgaggcccttatttgtgccatagattggttccagtctgaatgactagaattttcaaatgtaaatgcgaaaatggaaattcaggtataggtttctccatgtaggataga

SEQ ID NO: 219425 - DNA, 525 bp, Glycine max
  unsure (1)..(525): unsure at all n locations
cccccacccgtagtttctaccaccttcagtcacggcgtaatacactaaccaacccaccatgtcgctgcctgcttgtcccgccgaacaactggcccaacttctcggcccaaacaccacagacgcctccgccgccgcctcccttatctgcggccagttcgccgccgtggacagcaagttcgtcgacacggccttcgccgtcgacaacacctacctcctcttttccgcctacctcgttttttctatgcagccatcgtatgcggttttgttgcttctatagtattaatagcttgcaacaaattagcagagaaggttaagttcgacgatcctctggaggcgacgcagttgcacggtgggtgtggcacgtggggggtgatattcacggcgttgttcgcaaaaaaggagtatgtgaaggaggtttacgggttggggagggcgcacgggttgtcatggngggtggtggaaagttgctggcggcgcacgtgattcagattctggtgattgctgggtgggttagtgcgaccatgg

SEQ ID NO: 219426 - DNA, 456 bp, Glycine max
  unsure (1)..(456): unsure at all n locations
ctttgaaggaggttgccctggttctaaaggcactctatgatgctgatgtgttggaggaagagcacatagtgcagtggtatcaaaagggactgaagggcgataacaagaactctaagattttgaagaatgctcaacctttcattgattggcttcagagtgcagaatcagaaaccgaggaagaataatttttcctacattctccgttacttatgtttacttgattgtgtcatgttctttatttccaataaaggttattgtaggccccatgtgttgttgaactactatactgtgcgaatggtgcatgcttgctggaccagtatgtatgcctcagtgcgttttgtgatgtgcggttctaatgtaattttgtttttggttgttgatgattatgttatatgttgtcttgataatataatagtagtactgcttttctgttgtgtctnnnnaaaaaaaaannaa

SEQ ID NO: 219427 - DNA, 541 bp, Glycine max
  unsure (1)..(541): unsure at all n locations
caaacgaatacgttttctctttctcttcaatttcacccttattagcatagcatattcatttccctttcttgaatcgttgtaagcgcattgcgattttgcccttatctttatttcaattttttgttctgtttttgttattcatttgggttaatttcgattcgaagcttaactgcgagaggggatatcagagaagttgattggcctcccattaataatctgaatgatctgatggagtctaaaggtgggaagaagaagtcgtctagtagtaagtcctttttgtacgaagctcctctcgattacatcattgaagacgttcgaccacacggtggaatcaagaagttcagatctgctgcttactccaactgcatccgcaagccatcctgagattccctaggtcgtgtgaggacgtagcccccttagtcctgcatctgctatatttttctagnctcttctcttctcctttttcttggtttcttccttgcccttttgttctctctacctacacagcaagactttgtttctttttgagtcaagatggctg

SEQ ID NO: 219428 - DNA, 558 bp, Glycine max
gaaaaaaacatttgcataatcacacaaattaagtgaagctacacaataagttcattgcttcactctcacatcataacccccaaatttatttattaggtaataacacactcaacagtaaagataaataacagaacataaaaaccagaagtacttatatctccctcacttcatcttcgttctcatcctcactccagcagcatttcagaatagacctgggagatgtactgccatcacagccttgaacaaatgattggtacacaactgcaccacctactccaagctcttcatagctcctctcaccacagtagtatcctttgatgtccaagggaaatttgttaagtttttcgccatgcatgtcaatgtgcaaagcaacagaaaactctgctggacgaaagcatgctaaaactctttccacaagttcacctagagccatctcatcaaagtcataaccaacagcttcgaaacttgcgtaactgaaaccatctttaggagtgacatggatggtggatattgcacccccttctattccattcattgaatattcgcaaggggtcaaat

SEQ ID NO: 219429 - DNA, 554 bp, Glycine max
ccatggctgtgcttggtgggttttgggggctgccccataataaaaatcttgtgaaaagattggaaggagccaaagttagtgcatggattgattcaatgagagcttcttccccaactcgtgccaaatcagaaagccaagaaaaaagatcttggattctttatcacccttcagctctgaacacctttgaacagatagtatatagtgccaaaggaaagcaaattgtagtttttcttgactacgatggaactctctctccaattgttgcagatccgaataaggctttcatgactagaaagatgagagcaacactaaagggtatagcaagacattttcccacagcaatcgtgactggaaggtgcagagacaaggtatataactttgtaaaattggcagaactttactatgcgggaagccatggcatggacatcactggtccaacaaaaagtccaaagcaaggtaataataataataaagcagtgctgttccaacccgcgagtcaattcctgccaatgatcgatgaggtgtacaagatcttgttagaaaaaacgaagact

SEQ ID NO: 219430 - DNA, 392 bp, Glycine max
gggagataaaggtgcagaagctcgtcctcaatatctccgttggcgagagtggagatcgtctcaccagagccgctaaggttttggaacagcttagtggccaaacccctgtgttttccaaagcaaggtacacggctcgttcctttgggattagaagaaatgagaagattgcatgctatgtcactgtcagaggtgacaaggcgatgcaacttttggagagtggtttgaaggtgaaggaatatgaacttctcagaaggaacttcagtgatactggttgctttggctttggcattcaggagcatatcgatttgggaatcaagtatgatccttcaactggtatttatggaatggacttctttgttgttctggagcgtcctggctatcgtgtgggacgt

SEQ ID NO: 219431 - DNA, 472 bp, Glycine max
aaataatcaataaagagaatgcatttaaaagtgtctcacatgttcttgttgcaataaaagtgtcgtttaaaagggctattgttaatacatgtgcttcatcacaaaacctgaattgagaaacattgattcaaaacctgccttaaaattaagatactatcccagaaagatagttgacaaaactgataaaaacactcccctgaaatgaactcaatctaactaaacaatcgcctgagacttgttaaggatcactccctcatatttcacctggaaccacttcatagcatcctcctttgtgacacggtgctggattccaacacgggacttgcaccttcggcgacgtcccacacgatagccaggacgcttcataacaacaaagaagtccattccataaataccagttgaaggatcatacttgattcccaaatcgatatgctcctgaatgccaaagtcaaagcaaccagtttcactgaag

SEQ ID NO: 219432 - DNA, 545 bp, Glycine max
  unsure (1)..(545): unsure at all n locations
ccatctctcacatcatttcccactcccgcgtttcctttatcatattcttattccgccatgtcccagttgaacggagcctactatggcccctccatcccgccggcgaaaacctgctaccaccgcccagggcgcggcggaggctgctgctgcggctgcctcttcagcctcatcttcaagctcatcttaaccgtgataatcatcgttggcatcgccgggttcgtgttctggctcatagtccgtccgaacgtggtgaaattccacgtgaccgacgccaccctgacgcagttcaactacaccgacaacaacactctccactacgacctcgccctaaacatcacggtccgaaaccccaacaagaggctcggaatctactacgaccgcatcgaggcgcgtgcaatgttccacgacgcaaggttcgattcacagttcccggagccgtgctaccagggccacaagagcacgaaggtgctgaacccagtcttaagggtcagcaagtggtgccactcaacgctgagncaagcgcggaactgaagaaggagaacgcc

SEQ ID NO: 219433 - DNA, 490 bp, Glycine max
gaaaataaaattgatttattaacaaataacgacaagagtgtgatataaaggataaagaatggagcaaaaatcccctcgagcgaagggataaccctgaaggacctatgtccaaaagtaaccaatcaataaagaaatatgaaaaggaagaaatgagtgaaaacagatgcgaatccatcagcgatcccaggggcacttggtggactcaaaggcggcgcttcctttgaaaggaacacgcaagacgcatgatactttgggcttgagcgttttggtcttcaacacccccagcttgaacctcaccctaaggtacatcttcacgtcgatctcgtacaccccagtggcgatctccttcttaaaatccgcgctttgctcagcgttgagtggcaccacttgctgacccttgaagactgggtttagcaccttcctgctcttgtggccctggtagaacggctccgggaactgtgaatcgaaccttgcgccgtggaacattgca

SEQ ID NO: 219434 - DNA, 422 bp, Glycine max
tgttgggtgtgagtcttgggtgtgaaaatgtcgcacagcgataccataccccttcacccatgttgccaatccgacatcgacgagatcgagaacctcatcaatgccagcgttcaccaatcagtcccttcggcgagaccccccagtcccccacgcgcctccatccccgtttccgtctgcgtctacactgccccttaccgcttcatctgttacaacctccctgcgccccctccactggccatgtcctgccggatacatcgtcatatgctgacccacctccgactggacccggggttgggaccatccgggatagcaccagctccaacacgcttaccgtgcccgtgagggacaccgtgttgcgctggctctcgaaaatcttgagcctgccgtgactgggggtgattctccgccctcaccgtgaggac

SEQ ID NO: 219435 - DNA, 507 bp, Glycine max
aatagaaagagaaaaacaatacttatgtagcaagtttgatccgaccgtatactttccacgtaatattatacaactgtctgtcttcaaatatatctaaccaaattttaaacagaaaaaaaggaggggtagaaatgaattaaaaagaaaaggttgatcattaaacaaaaattcctatttagatgaagattccaagtggttatcgaaataaagaaatcagaagcattgatgcatttagccaatggcaatgatgagaaaaccaacagatacatacatgagaaaaactgggtatagtgcaagagcttctctcctggggctgactgcagaactcatgaaaggatatgcagcccaagagctccaagccaatgttacacacaccacaaccactttcacaatgacattgtccttcaacatacaaattaatgcaccaacgtccagagggaacaagcaataacccaacagactcaaactttgaaagaaaataatgtgtccacccagaagaagtacatt

SEQ ID NO: 219436 - DNA, 556 bp, Glycine max
aaaaagcatttggttgcgtgttggacctgggtattcggcatgtggcttacatcttcagttacaggaagaaagcagacaagggatgagaatgaacatagagaaagaaagttcagaagggatgaggatgatcgggaaggaagaaagttcagaagggatgaggatgtttatggagaaagaaagaacttaagggatgaggatgtgcatggagaacgaaagaacttgaggggggaggatgatgatagggaaagaaagcattcaaaggataaagatggtcgtggagaaagaaagcacagaagggatgatgatgatgatgttagtcatgaaagaaagcagtgcagaagggatgaagatgatcgtgaagaaagaaagcagcacagaagggatgatgatggtcgtggagagagaaagcacagaagggaggaggaagagcggtgaaagaaaggttatgagagggaaagccgctccaagagagccagatactaaggttctcctttgagtgaggcgtgaaagtaactcatgaactgtgatccaggcatattgagaatgcttacttgct

SEQ ID NO: 219437 - DNA, 510 bp, Glycine max
gaaaaaagcacgcattaaacatagttcaaacacaaattacatcctctaaaaagcaaatgtataagacaactgacacatctaattcaaatattaaagcagcaagtaagcattctcaatatgcctggatcacagttcatgagttactttcacgcctcactcgaaggagaaccttagtatctggctctcttggagcggctttccctctcataacctttctttccccgctcttcctcctcccttctgtgctttctctctccacgaccatcatcatcccttctgtgctgctttctttcttcacgatcatcttcatcccttctgcactgctttctttcatgactaacatcatcatcatcatcccttctgtgctttctttctccacgaccatctttatcctttgaatgctttctttccctatcatcatcctcccccctcaagttctttcgttctccatgcacatcctcatcccttaagttctttcttttccataaacatcctcatcccttctgactt

SEQ ID NO: 219438 - DNA, 441 bp, Glycine max
atttggctaccaacagcacctgatggctacaaaaccttaggccatgttgtcaccaccacacctgagaagccttcacttgacaaaatcaggtgtgttaggtcagatctcacagaccagtgtgagagaagctcatggattggggaccagacaagagcagtgatgagaaaggtttcaatgtttatgaagtgaggccaagcaatagagggactcaagctcctggtgtgcttgtaggaacattttttgctcataatggtgaaattccttcccctctccctattgcttgtttgaagaacaccaacatgaacttctcctgctccatgcctaatttgcctcaagttaaggcacttgtccaagcctattctgcattcatgtacttgcatcctgatgaagagttccaacctgcttgcaccaagtggtatttcacaaatggggcattgcttg

SEQ ID NO: 219439 - DNA, 501 bp, Glycine max
gcaaatacaaattagaaacaactttgtcagttattattaagaagatacatgtttgttgtgaaccctataaaaatacaaaacagatagtgcaaaccaaccaaattaaagtcctccttttttaattgcatggtgtcaataatgccaccattctccaagtcttccatttcaaacctcatcaccttgccaatttcttttgagcttaggtcctgtgggtccctcctgtcccaacaactcatttggcaaaccatcttcaagggcttccaaagcagggaacaccttcgccaaattgtccagctcctttgcaatgtcataagtgatttttggaccccattgcctcaaaaagtataaccaaggtggttctacaattgctgaccccaaatactcaccagaaacaacttcaaaaccaacacccatgttaatcaccttctcactttcttagtttcattctttattccaatcccatcaaggccttgcatgacaagtccttgtttttggataaat

SEQ ID NO: 219440 - DNA, 546 bp, Glycine max
agggtttcgtttcgggtttgacgttgttcacaatcactttctgcgcttcactcactcccttcgtgcggttttctttctttgtcgaactcgtgcgaaaatgcgtgagattcttcacatacagggagggcaatgcggaaaccagatcggagcgaagttctgggaggtggtgtgcgcggagcacgggatcgattccacggggaggtaccagggggacaacgagttgcaactcgagcgagtcaacgtctattacaatgaagcgagttgcggaaggttcgtgccgagggcggtgctcatggatctagagccagggaccatggacagcgtcagatctggtccctacggtcagattttgcgacctgataacttcgtcttcggccagtccggcgccggaaacaactgggccaaaggtcactacaccgaatgcgctgagttgattgactctgttctcgatgttgtcaggaaggaggcagaaaactgtgactgccttcaagggttttaggtttgccactctcttggtggcggaactggatctggaatgggaacact

SEQ ID NO: 219441 - DNA, 488 bp, Glycine max
ataagaatatatcaactacgtttcaatcaaagggcgaccaccgtgttaacaataatgaaaacatgcagaaaaataaaatccctaaactagaagagataagccacgaagccagagagtgcccccaaagcaatccaaaatcccgaaaaagatattcaggtcaagggatgatgaaaaaaaacacaacgttaaacagagtatcacaacaaaacacacaaacaagaacaccctgcaaaacactactacactgttttaagcctcatcttcctgaggttcttcctcatcttcatactcatagccctcgtcatcagcagttgcatcttggtattgctggtactcagacacaaggtcattcatgttgctctcagcttcagtgaactccatttcatccataccttctccagtataccaatgcaagaaggcctttctgcggaacatagccgtgaattgctcgctcacctcctgaacatttcttgaatagaggtagaatt

SEQ ID NO: 219442 - DNA, 580 bp, Glycine max
ggggttttagcagtatccgatccattgaaaccaggtgctcaagaagtcatttccattctgaagtcaatgaaaatcaagagcatcatggtgactggggacaacttcggaactgctagttctattgccagggaagtaggaattgaaaatgttattgctgaggccaaaccggatcaaaaagcagagaaagtgaaagacttgcaggcttctgggtacactgtggctatggtgggggatggcatcaatgattcacctgcacttgtggcagcggatgtgggaatggcaataggagctggtacagacattgctattgaggctgctgatattgtcctcatgaagagcaacttggaggatgtcataactgccattgacctttccagaaaaacattttcccgtatacgcctgaattacttttgggctttgggttataacttgcttggcatcccaattgctgctggagctcttttcccttctacaaggttcagattgccaccctggattgctggggctgctatggctgcctcctctgtcagcgttgtttgctgttctcttgtgttgaaatattacaggagaccccagaagc

SEQ ID NO: 219443 - DNA, 601 bp, Glycine max
  unsure (1)..(601): unsure at all n locations
catagttggtgtagctagcgagggagggatatagggggaagcgtttattcattcattaagatggcatcggagcttcaattgcccccaggcttcagattccatccaacggaccaggagctggtgttgcactatctctgccgtaaatgcgcgtcgcagcctatcgccgttcccatcatcgccgaaatcgacctctacaaatacgacccctgggacctacccggtaacattatcttcaacttctgatatattcttattcttaattcttaattcattcattttttgaattgttattgtacaggattggcttcctacggagagaaagagtggtacttcttttcaccacgggaccggaaatacccgaacggttccaggccgaaccgggcggcgggaaccggttactggaaggcaaccggggcggataagcccattggccaccccaaaccgttgggataaaaaaagttgtggtgttntacgcagggaaaggctccgaaggggacaagaggcattggatcatgcacgagtatcgtctcgccatgtagatcgctccgttcgcaaaaagacagcctaagttagatgattggggcttgccgtattacacaag

SEQ ID NO: 219444 - DNA, 509 bp, Glycine max
agaaatttcaaattttttttttgttatctaggtttggctctatgtttaagtcccacattctaggttgtccctgcgtgatgatttccagccccgaggctgccaagtttgtgctgaacaaagctcaactcttcaagccaacattcccagcaagcaaagagaggatgttgggaaaacaagctatcttctttcaccaaggagagtaccatgctaacttgagaaggcttgttcttcgcaccttcatgccagaagccatcaaaaacatcgtaccggacattgaatccattgcccaagattgcttaaagtcttgggaaggccgtttgatcaccactttccttgaaatgaaaacgttcaccttcaacgttgctctgctttcaattttcggaaaagaagagattctgtacagagatgctctgaaacggtgctactacactctggagcaagggtataactcaatgccaattaacgttgccggaacactgttccacaaggcgatgaatgcaaggaaggag

SEQ ID NO: 219445 - DNA, 564 bp, Glycine max
gagtgatatctacttgttcttgggaaataatgtgatgggtgagccgttttggggaagagcaaaagggccgtattgaatcccattctttgcacccacaacagaccacctgcaccagaaaaaaatagaagcagcacacgctagtttagaaaccccctaatttggaataatatgtctctattcaaagcctatggctaaaaaagggttgttgaaattactcgtgattaagtttaccaacctgtactttgtggtcagatgatgtaggaggaccaaaatctccaacttggctaattcgttccctggacacatgtggatcccactgccaaatggcataaaagtgttgggttttggagcagcctcaaatcttgagggatcaaatttttctggctccttgaagttgtctggactgtggtgtatgttcctaaatagaggtagcactttccacccttttggaataagatacccttgatattctacatcctctactgctcttctgaaagtaaaagacaaatctgaagcaactcttagagtctcctgaatgacccttgaagttattggcatcttttt

SEQ ID NO: 219446 - DNA, 529 bp, Glycine max
  unsure (1)..(529): unsure at all n locations
ccgagaacaaaaaaaaaaaaaaaaaaaaatccgcgattcgctcttctcttggaaaagtgaaaaccagaagtacgaacgaaagagaagagcgatttagaagtgagagaagatggggttgtcgttcacgaagctgttcagcaggttgtttgcgaagaaggaaatgaggattctgatggtaggtctcgatgctgctggtaagacaaccatcttgtacaagctcaagcttggagaaatcgtcaccactatccccaccatcggatttaatgttgagactgtggagtacaagaacatcagcttcactgtgtgggatgttggtggtcaggacaagatccgtccactgtggaggcattatttccagaacactcagggtctcatttttgtggttgatagcaatgatagagatcgagtggttgaggcaagggatgagctgcacagaatgttgaatgaggatgaacttagagatgctgttttgctttgtttttgnncacagcaagatcttcctaatgcaatgaatgctgcagaaataact

SEQ ID NO: 219447 - DNA, 478 bp, Glycine max
caagaacaaaacgcatggaaatatattcaatcaaaaatcaaacaaacaagatgtaagcaacacagcacgcacgcacaagagggtgcaagagttccaattatagctaaaagtattagctaatttaagcaatcatacaaacccaagttacacaaaagagaatacttctagcaagcattctgctattacaacattcgctagaaaagataagcatttttctccaagaaccgccagactcgcatgaaatcaccagacaagaccaaaatttttcaaatgtctcatgctttgctggcaatgttgttagaaagccagtccaaaccctcatagagaccctctccagaagttgcacaagtgctctggatataccagtggcgttgacggagtgaatgaagtccaagcttggcagttatttctgcagcattcattgcattaggaagatcttgcttgttggcaaaaacaagcaaaacagcatctctaagtt

SEQ ID NO: 219448 - DNA, 572 bp, Glycine max
  unsure (1)..(572): unsure at all n locations
aatttccaataatttcacgactccttcggagatctctctctcgcccataatccaaccatggcaaatacgggaaatttagacgcggcgatagagcaattgctgaacgtggagaagcagatgaggctcgccggtgacgtggcaggtaccagaaaggcggctaccgatattttgcagctctgcttcgatgcacgagcctggaaaaccctcaatgaccagattgtcgttttgtcaaaacgacgtggccagctcaaacaggccgtaacagctatggtgcaacaagctatgcaatatattgatgagacaccagatatcgaaactcgcatagaactcatcaaaacgttgaacaggtgtgtctgcagggaagatatacgtggaaattgagagagctagattgatcaagaaacttgcaaagattaaggaagaacaagggcttatagctgaagctgctgatttgatgcaagaaattgcggtggaaacttttggtgccatggccaagactgagaaaattgcattcattctcgaacangtncgtttgtgtctagatcgccaggattatgttcgtgcacaaatac

SEQ ID NO: 219449 - DNA, 550 bp, Glycine max
acgagaggaaaaaacatcaaccaggcaaaagaatataaatgagcaaacactcaatttctagccactgcttcaatcaagatcttataggatccagtcataagtcagtggtaaggtatgtaccagtagtatacaacaatgctactttcagtactatgatgcatatatccagctctaccctgaacgcatgagtgacaaaatataaaaaagaaaaagcgataatcgtttagcgaaattcttcaccaactcagtcagtgacagttcaatagaacattcctgaaaaggcaacttcagtacaaaatcacatcaatattgagatgccctgtgacagtatgtgaaccttcttaaaccttcaaagcagctttatggaccatggtttccttgtgtatttgatgacaactcttctccacaagatcaagcaatttctccaagtttgctgcccatgaattaagaatttcattgctatcctttgctgtttggaaacagactatccccatttggcctatcaatctttgccaccagcgccttagacacaaccatatctgagagatgc

SEQ ID NO: 219450 - DNA, 568 bp, Glycine max
tgcaaagcctccctcactttctacagacctaatttacgagaccaatcggtgaccatcgattgtgctcgcgattttctggggatatcgatgctggagcagccgaacaaatactacttaatcattcgcggtcagaagattggtctcgaggccgattcttctatcttgcttatcatggagaaactccagtcctacaagtccaaagtcgcccttcatttcgagggagtgctgtataagttgggtgactttcacatcagggtgattaaagttgttcccagtcaagcggagagtctcagaggaattatgattgagattgagtatctccctatctcgtcaggtgaaaaatccaagcaaattttggaagagttcattgatatatggaaagaagtcgtgtctaaaaaatcattagccggtcagttcatgcatacagaaccaaattatgcagaatatgggctttctgacaattatacctctcagcatacagctgttcagtatgctgctgcattggcccaactgattcaatctggacaggtacggaactaggaactatgaccttttgagggtatgtaag

SEQ ID NO: 219451 - DNA, 430 bp, Glycine max
ggcaaaggccgtcagaatagtgaccagcttgttagccattttgaagttttattattttcataaagatttgaagtgattaagagctggaagcagtttccatttttacaataaataccatatgcttgtgcgtggtttcattgactggccattggaaatattaaacattgaaccattgcagaattctgtattttttttgaaacgatttatccagaatcattggttatgcaaaaaaaaaaaaaaaaaaaaaaaaaaaaaaaaaaaaaaaaaaaaaaaaaaaaaaaaaaaaaaaaaaaaaaaaaaaaaaattaagaacaaaaaaaaaaaaagaaacacagaaaaaaacaatgacaaagggggtccccaccataaatagtgtgtgaaacaagggaaaaatgggtgggggggcgccctttgggtagacctgtccccc

SEQ ID NO: 219452 - DNA, 592 bp, Glycine max
  unsure (1)..(592): unsure at all n locations
ctcgagccgattcggctcgagggaacactttctcagcacttgcaaagagagaggagtaaaggactaccgtggacaataagacttaccattgctaccgaaactgctaatgctatagcatatctccattctgcaattcatcccccaatttaccacagagacataaaatctactaatatactcttggattatggcttcaaatctaaaatagccgattttgggctttctaggcttgcattgacagaaacatctcatatctcaaccgccccacaagggactccaggttatgtcgatccccaataccaccagaactttcagctttctgataaaagtgatgtctacagttttggagtggttttggtagagataataactgccatgaaagtggttgattttgctcgacctcgaagtgagattaatttagctgcacttgctgttgataggattaggagaggtgctgtagatgagatcatagaccccttgcttgaaccacatagagatgctnggacactgtattctattcataaagtggccgagcttgcatttagatgcctngcttttcatagtgacatgaagcctactatgatggaagtag

SEQ ID NO: 219453 - DNA, 526 bp, Glycine max
cattctttcagcctcccttcaacacccttttggcccttcattcttccaagtctcaaatcgaagctcgaagacctgcgaagaacaaagggttgtttaaattctgtgtggttgttgttggaggttgaaatacaagttgccgcctcaagtgtgtgttaatcttaaatttcacaagcaagttgtatttttggagtattgtattatatgaccaaatattttagtgttttaggactagatattttgcttctggtggcaatttttctcttctccttctggttctcatcttttgtgttcttctttgtttctcacctttctgaggatttttccatcttagttcctggaggcaccaggaacctgaccaaataaataaaccttttttttcttctaatttttctgaagtttcattttttagtccaatggcaacttggatattatcagaatgtggcttgaagcctcttgctccagtaattcctagacctagaactggggctgctttgtccagcacctcaagggttgaatttttggacac

SEQ ID NO: 219454 - DNA, 530 bp, Glycine max
actgtcattttctggaggaatggattctctgtcaatgatggtcctctacggaggttggatgatccgcagaacgcaccgtttctggagagcattaagaagtctgaatgtcccaaagagcttgaaccagcagataggaggactgctgtccatgtcaacctcacaaggcgggatgaagactaccctgaaccagtgaagccacgccaacgtgcttttcagggcgttggaagaactttaggtagcaccagctccagcaatgatgaacctattcaaacaactggtgcttcaccaaatactgcaccaatgccaacaatgggtttagttgtagatgagtcgcagccagtgacatcaatccagctgaggttggctgatggcacgcgcatggtttctcgcttcaatcaccaccatacaatcagagatgttcgagcattcattgacgcatcaagacccggtggagtaagaagttaccaactgcagacaatgggttttcctgccaaacaactcactgatttggaccagtctatagaacaagc

SEQ ID NO: 219455 - DNA, 428 bp, Glycine max
gggcgcaacaattcttttataaaagcaaattcgggatttggaatatcctaacaacgaacattttatcaaattcactaataaaatataaggggatcaatcaatgtttaagcctaaaaatagtaatttcaagtcgactaaaaatagaatttgggaaacaacctacaacttttggatgacaactgagttggctataccagcttgttctataaactggcccaaatcagtgagttgtttgggaggaaaacccattggctgcaggtggaaacttcttactcccccgggtcttgatgcgtaaatgaatgctcaaacctctctgattggatgggggtgattgaagcgagaaaccatgcgcgggcctatagccaacctcagctggattgatgtcactggttgggacttatttacaactaaacccattgttggcattg

SEQ ID NO: 219456 - DNA, 501 bp, Glycine max
cttccttttgatcaccgtatgctggttcaaaatcttactgcacagggttttaacaatggttctgtaccagcctcagcacaagctactttcccatatttatttgcagtcagtaagttcttgcaggcaggaacttttgaccttgtgggcactattatatacgagatagatgaacatccatatcaaagcaccttttttaatggcactgttgaggttgttgaatctggtgcttttcttagcatggaatccgtttttcttgttactcttggggttgcactccttgtcctcctggggctatggattcatggccaaatacagtacctatctaagaaaacagagagggctccaaaagttgaagttgggactaagactactgatgcttgaacagatgaatggctacagggaactgcttatactcagtctctgtcaagcaagtcaaagaagaagaagtagataaacaatttctcacgttcagccactcactagactctaccatggatatgg

SEQ ID NO: 219457 - DNA, 461 bp, Glycine max
tttttctttcttttttttttttttttttttttttttttttttttttttttttttttttggttttttgggtttttttttgttttttgggggaaaaacaaaaaaaaccttatctataaaaaatgatgccaccattttaaagaggtgtcccctccttagcagacaccttggaagggaaaaaaaacccctactttttctcaaaggccaaaaagaaaacttttgaaacggcaaaaaaaaggcggttttttaaagcaaaaatctcacaacactcctctcggggtccctttttctcccccctaagttgaaccagggtttggttttccctatcccggggaaggtctagagggggggctacccataaaaaaaggtgttctaccttttttcctttaaagtgtttgtccaacacgggagattatccactgcccctttccttttgtgtgtgcgaaacaaagacaggtttatcc

SEQ ID NO: 219458 - DNA, 504 bp, Glycine max
  unsure (1)..(504): unsure at all n locations
ctcgagccgattcggctcgaggtccacgccttcaattcaaagcaaagatgtgcactttggagaagagaggcagcatattcatcctaacactcaccggcgatggcgagcaccgtctcaacccaacactcctcgattgcatgcaatcctgcctccgccgcgtccgccaagaagccaccgactgctgcagcctcgtcaccaccgcgcacggcaaattcttctccaacggctacgacatcgcctgggcccgatcctccgatgaggtcaaagagcgcatgatcctcatggactccctcctgcgctccgtcgtctgcgatctcctcaccctcccgatgccgaccatcgccgccgtcaccgggcacgcctgcgccgacggctacaccctggccctggcccacgaccacgttctcatgcgcagcgacaggggattcctctacatgagcgagcttgacatcaacctcgttattccccgcgtggttcgtggctctcnctcgaagccaagaatcg

SEQ ID NO: 219459 - DNA, 583 bp, Glycine max
actgcacaattgcctcatgaatcatcattagtcagggtttatcctctaagaaaataaacatactatagcaatgagtgcgtccaggttcatcaagtgtgtcactgtgggtgacggtgccgttggcaagacttgcatgctcatctcctacaccagcaacacttttgctacggactacgtgccaactgtctttgacaatttcagtgcaaatgtcgttgtggatggaagcactgtgaatcttgggttgtgggatactgctggccaagaagattacaatagattgagacccttaagctatcgtggagcagatgtattcctgcttgctttctctctcataagcagggccagctatgaaaatgttgccaagaaatggattcctgagttgaggcattatgctcctggtgttccaattattcttgttggaacaaaacttgatcttcgggatgataagcagttctttcaagaccatcctggtgcagtgcctatcaccacagcacagggtgaggaactgagaaagctgatcgtgctccaatttacattgatgtagttcaaaaacacaacagaatgtgaaggctgtttttgatgc

SEQ ID NO: 219460 - DNA, 560 bp, Glycine max
aatcaagccaactatatatccaagctgttaaaagcagctaacataattaatgacatatacttagttcacatccaaagccacatatgcaagcacttcctagattagattacaacatgaatacaacccgcgtccactgctggaaatggtcatttaataatcaatacaacaggtaaacagccaacagtaacgcaagtgttgtgtgcacaccaaacatattgaaattacgactgtacagatcctacagccagagacaattagacagatagctcgatgcttatgagcgaaccttgatgcggtcagttggacatgatgattccttcatctaggttggaaatagtataagatatagaatgatgaagactacagtcatgtcatcctccacaaactactatattaagaactgaagatcacaaaatggaacaggccttttgtccctttctcttctttatcttctgctatgggggctggagaactaccttgatggctgcatcaaaaacagccttcacattctgttgtgtttttgaactacattcaatgtaaattggagcaccgataagctt

SEQ ID NO: 219461 - DNA, 556 bp, Glycine max
ctcgagcctgctgaaatgcgcagcttgtggttttgtgtctgatgttgatatgagagacaagctgactaccttcatcattaagaaccctccagaagttaagaaaggatccaaagacaagaaggccatgaggagagctgagaaggagagactgaaggaaggtgaattagctgatgaggaacagaagaaagtgaagaaagaggttaagaagaaaggctcttcatcttctaaggatggcactaaatccacctcttcaaagaagaaagcaagtggctctgatgaagaccgcacttgacctactcacagtcaaattgatgagaaagaggaggctctagatgaggatgatgacgatgatgtgcaatggcagacagatacgtcacttgatgctgctcgtcaacgtatccaagaacaattaagtgctgtgacagctgatatggttatgctttctacagatgaaccagagaagaaaaaagacgcaagtgatggaaatgatggttctcagaatggtaactcaatgcactgcaggaccttggttggtgaagtgaaagcatatttgaag

SEQ ID NO: 219462 - DNA, 452 bp, Glycine max
caaagcgacaagggctgaagctcagtggggcgtggtaacaaggccactctgccacttacaataccccgttgggtatttaagtcgtctgcaaaggattctacccgccgctcgatgggaattgcgcttcaaggcgtctcgtatggctaatccgcctcacgagggtcaccaacggcacgtgcctttggggggccgaggccccctactgctggtcggcaaacggacggtgggcgcacgcgtctcttctagcccggattctgacttaaaggcgttcagtcatattccaacgcacggtagcttcgtgccactggcttttcaaccaagctcgaagaccaattgtgcgaatcaacggttccttccgtactaggttgaattacctattggcaccctgttatccatagggttaaactaacctgtcttacgactgttttaacccaacttacgttccctattgg

SEQ ID NO: 219463 - DNA, 373 bp, Glycine max
gcaagcatagagaccattacaatgacaatgggggtgacgttatctgtttcactactatccttcccaaattcataattcctcgtacctaattatatcaccaagtcacaaccatacaactgttttctttcagtccttatcaaagtctgctcatatattatgcaactggcaaaaggatatgcgaacaactgaatccacaaagtggacttgcttgcttgcacacaatggcccccgtagcctgctcctcactctcaaatctgaacaagtgcctgtttttttccattcatctcaaaaaccttgcttgtgacaatggttccatgctcctccaaaaggcttacaacctcctcttcagttatgttttgcgggaaggtggaca

SEQ ID NO: 219464 - DNA, 511 bp, Glycine max
  unsure (1)..(511): unsure at all n locations
aaaaaagagccggctgtctcagctatctnccggaaacctttcccgggacgacgcgctcactagtacggcggctcgccctttgtttttctttttttttttttttttttttttttttttttttttttttttttttttggggtttttttggtctttcttttttttttttttaaaaaaaaatgcaaaaaagccttaatcataaaaatcttcgcccgaccccgtgaaattattaaaaatagtgggcccggggcccccaaaaagcgccacctctctttggggggggctaaaaataaaaaggcgccccccgggaacgtggcaaaaaaaaaactgcacccgcctcattcttggggcttagggggaaaaaaaacccgttctttttgtcgaaccccccaatgtgggaattgggaaaacccccaaagagaggggaagctccaacacctcgggtggcccacccttctgttcctttgaacatggactaaaaacccccgcccttgaggaggtgcccgaattcaaa

SEQ ID NO: 219465 - DNA, 619 bp, Glycine max
cgaaagtttcaggcgaatgccgagggagattccgacgagcttgtagatccacccaaggtggaggacaagatcggtgctgtgcctcatggcctttcaaccgattcagatgtcgtcaagagggaggcggagtcgatctcgaagagatctctccggagcaacgcggagaagtttgagttccaagcggaagtgtcgcggcttatggatatcatcatcaattctctctacagtaacaaggatatcttcctcagagagttgatttccaatgcttctgatgctttggacaagattaggttcctctccctcacggataaggaggtgttgggagaaggtgataacaccaagcttgatattcagattaagttggacaaggaaaagaaaattctctcaattcgagacagaggtatcggtatgacgaaggaggatttgataaagaatttggggacaatagcgaaatctggaacttctgcatttgttgagaagatgcaacaagtggagatctcaatctgattgggcagtttggagtcggcttctactctgtttatcttgtggccgactatgtcgaagttattagcaggataacgatgataagcagtatgtatgggaatcaaaagctgatgga

SEQ ID NO: 219466 - DNA, 522 bp, Glycine max
acctaacccatcgttcgcacggagccgtggtggttctggctctgtccttttttcctttctctcgttaccagaaccagaagaaccatttgtggccaacatggatttggaccagtggatctccaaggtcaaagagggccagcatcttcttgaagacgagcttcaacttctctgcgaatatgtaaaagagatccttatcgaggagtccaatgtgcagcctgtcaatagtccagtgactgtttgtggtgatattcatggtcaattccatgatctaatgaaacttttccagactgggggtcatgtgcctgagacaaattatatttttatgggagactttgttgatcgaggttacaatagtcttgaagtttttaccatccttttacttgtaaaagctagatacccagctaatattactcttttacgtggaaatcatgaaagtagacaattaacccaggtctatggattttatgatgaatgccagaggaagtatggcaatgccaatgctgggcggtattgtacagatgt

SEQ ID NO: 219467 - DNA, 526 bp, Glycine max
aagaaaaaaaatatttttcaataaaaatttaaacataaaattgtctgtgcgacccagagctaagatatagtttgattggtaatcttgtgaccaataaaatccacctttaaaaggcaaagcataaatacatgagtgtctaattttacaataaattcaaaacaaaatttgcaccaacttataagaaatatggaacgcctgtcctgggccctctcatctgattgttctcctctgcttcggtgaaaaatttaacttctctttccatattttcattgaaactcagaatagaagctacatttccacatcggtaacagtaattaggtgcagaccatacagttacaaggcctttatcttggaacatatacttaaggccttcctgaacgagttggtgcgctcgacaaacaagatcaaggttatttatgtgattgaactccgaagtgaccctggatccaaaaagccaacctgctccacggtgactgactgcccatgtttcaatatcttcaggatcactccacattagatcacagaa

SEQ ID NO: 219468 - DNA, 494 bp, Glycine max
aatacataaaaaaggttaattagtaaagtcacacgtgctttctaacggtggcgcaccagaggggtttaggttcaggttcggggaagttcttggcggcggaacaaggcggcgatgaggaaacggaagagagtactgtaggttcggttccgagccatgtggtctctgcagcttcggcccaaaccaataatcagtgggtcccggcaagtggttctccaatgatgtcacgttttatgaatgctccttcctctccaggattgtctcctctgtttggcgttggccacaagagagcccgtgaagacgacacgggtgcgggtgcaagtgtgggtcttggtgttgttgcagcagcttcttcacaaacacaagggaatgaaagtggcggcggcgagaggaggaggagatacagaagagtgaggcagaggccgtgggggaaatgggccgcggagattcgcgatcctcacaaagcggcgagagtgtggcttgggacattcgacact

SEQ ID NO: 219469 - DNA, 558 bp, Glycine max
ctcatctgtcctgatcctagaattgttactgtttgtctggaaggccttgaaaacatcttgaaggtgggagaagctgataaaaacataggaaatactggtgatgtgaatctatatgcccaaatgattgatgaagctgggggattggagaaaattgagaacctccagagtcatgacaacacagagatttacgaaaaggcggtcaagattcttgagacatactggttggaggaggaagatgagactatgcctccaggggatgcttctcagtcagggttcaactttggtagcagtgacgctcctgctgtgccgtccggtggattcaactttaattagaagatattcatgctctactggggagttttggttggtctatctgtgaagtcctcctttatgacacgacagcagttggtggacatgtcaacgtcttgtcattgtcctaatgtccttgggttgtacgaggtccagcaagtaaatacatggttgctggactgccttgggtttttgcaatgcctgatatttcatatctcatggtgtaaaatgctttgtggctatattttt

SEQ ID NO: 219470 - DNA, 497 bp, Glycine max
cagcaacatcaactcatcttttattaatcaagcataagggaaccaaaatgtagaaaacccagaagaaagggtaagcattctcctcttacgatctcttctacataatgtacaaagatcatatcactctacatagaacccaacaaaagcagcaacaaaaatgaacactgcaaaaacaaatatccagaaaggacactccaacgtgtagcatgagaaggagaaggagagggagctgaagttgtagtagtagttgccttttcctgagagcaagcataactgcagcgacttggacgaacaactcgataaacaccggtgcttgcaaggatgtaaacgtctttgttgttgtcttcgccaaatgagaagatatagcctaacgcaagaaggtttccaggtgcagagtcacactgtataggagaatcacgcgcacagctgaagggaattctgctggtgctgaaatttccactgttttgcgggtcctcggtggctgcccatattgcacc

SEQ ID NO: 219471 - DNA, 558 bp, Glycine max
cttcttcttctttttcatcaatcatcaccagtggttcttttccttctgagaagatcgaattgtgttttgcaaaaatgggagttccagagaaagaccctctttcccaattgagtttgcctcctggttttcggttttaccccaccgacgaggagcttctcgttcagtatctgtgccgcaaggtcgctggccaccatttctctcttccaatcattgccgaaattgacttgtacaagttcgacccatgggttcttccaagtaaagcgattttcggtgaaaaagagtggtactttttcagccccagagacaggaaatacccgaacgggtctcgacccaacagagtagctgggtcgggttattggaaagccaccggaaccgacaagatcatcaccaccgaaggtagaaaagttggcataaaaaaagccctcgttatctacgttggcaaagcccccaagggcaccataaccaattggatcatgcacgagtatcgcctgctcgactcttgccgaaagacactggcaccagcttgatgattggttcgtgtcgatatacaagaagact

SEQ ID NO: 219472 - DNA, 580 bp, Glycine max
cacttttcatccttcgatcatacacttagttgcttccaattaagatggttctgctagagaagctctgggatgatgttgtggctggccctcaacctgagcgtggccttggcaagctcagaaaactcaccaccctcaaaactattgatgaaggagaaagtagcaagctgcagaagacgttgtcgatgccgtcgacaccaacaaccccgatgactccgacgactccaacgacaccgggatcggcccgtaaagctgacaacgtttggaggagcgtcttccatcctgggagcaactgccgcacaaagaccatcggtgctcagatgtttgacaaaccacttgccaacactcccactgtctatgactggctgtacagtggggagaccagaagcaggcaccgctgaagctgaagtctttagctaagatgaccgcgggttgcatgtaaatatttgtcgttttcgttaagcatctgccacgtttgcagctactattactattatgtgtcgggaatttattgctccgttgctgactcaaacataatattactagcgtgtttggtttttttgagccagtgaatgtaaaaatg

SEQ ID NO: 219473 - DNA, 398 bp, Glycine max
tttgtttttttttttttttttttttttttttttttattttttttacaaaaaaatcaccaggttttctttgttgcccaaaaaaatatcgctaactttcaacatatcacaattttgaacatgggattattttttaggggtaaatacagagggacctaacaactagttcccacataaaattttagcaaaagtttttttattttaatactaatcatttaacagagggggaaaaagattcacccatccccaaagttcatgggaaatgtggcttaacaaaacttagcctcctaacgcagtagtttagccttttacattcacttgctcaaaaaaaccaaacccgctggtaatattatgtttgggtcagcaccggagcagtatattcccgacccataatagtaata

SEQ ID NO: 219474 - DNA, 596 bp, Glycine max
  unsure (1)..(596): unsure at all n locations
gaggattctttctctccaactatagaagctgctgtgcgattgcaacctcggtgcagtgagaaagtggaaagagattcagggattgtctctttcactacccgtcttctggtgccaacctcccgaattggttgccttattggtaaaggagggacaattgtgactgaaatgaggaggcttacaaaagcaaacattcgcatcctgtcaaaggataatcttcctaaaattgcgtctgaagatgatgaaatggtgcagatttccggagaccttgatgttgctaaggatgctcttgtgcaagcacttacacggctaagagcaaatctttttgataaggagcgtgctgtctcaggatttcttccggtgcttccatatcttcctgcttcagttgatggatcagatggtttgaactatgacagtagggatggtaaacgactggacgtggtggatattccggtgggattngaggttcaagtgatttggatctggtgatggttatggaagctatggaaattcacagcttggtagcagtggtggtgcttatggaaattattctttgggacgaactagtgcctatgggtcttctcaaatggttcttctcg

SEQ ID NO: 219475 - DNA, 381 bp, Glycine max
cggctcgagaagaaagaaagaaaaccctatcttaccttttcaactttcaagatgcaaatctttgttaagacactcactggtaagacaatcacccttgaggtggagagttcagataccatagataatgtaaagtccaagattcaggacaaggaagggatcccaccagaccagcaacgtctcatttttgctggcaagcagcttgaggatggacgtacacttgctgattacaacattcaaaaggagtgcactctacacttggtgctccgtctccgtggtggaatgcacatctttgttaagaccttgaccgggaagacagtcacccttcgaggtcgagagctctgacaccattgacaatgttaaggctaagattcatgaacaaga

SEQ ID NO: 219476 - DNA, 441 bp, Glycine max
gattgcaaattgtacacattcatagcttttcaagggccgctaatggacccgggatgcacacatacacaaagttcaggaacatataaaaagaaaagaccagattatagacttttacatacttcagttcacaccaaacaagggacctgcagaccattctcaaactcaaaacccaccacgaagacgcaagacaaggtgaagagtagactctttctgaatgttgtagtcagcaagagtccttccatcctccagttgcttcccagcaaagatcaacctctgttggtctggggggataccttccttgtcctgtatttttgccttgacattatcaattgtgtctgaactttcaacctccaaggtgatagttttccctgtcaaagtcttcacaaagatctgcatacctcccctcagacgaaggacaaggtgaagggtaaactccttttg

SEQ ID NO: 219477 - DNA, 591 bp, Glycine max
tgcaaagcctccctcactttctacagacccaatttacgagaccaatcggtgaccatcgattttcctcgcgattttctggggatatcgatgctggagcagccgaacaaatactacttaatcattcgcggccagaagattgttctcgaggccgattcttctatcttgcttatcatggagaaactccagtcctacaagtccaaagtcgcccttcatttcgagggagtgctgtataagttgggtgactttcagatcagggtgattaaagttgttcccagtcaagcggagagtctcagaggaattatgattgagattgagtatctccctatctcgtcagttgaaaaatccaagcaaattttggaagagttcattgatatatggaaagaagttcgtgtctaaaaaatcattagccggtcagttcatgcatacagaaccaaattatgcagaatatgggctatctgacaattatacctctcagcatacagctgttcagtatgctgctgcattggcccaactgattcaatctgcacagttacggaactaggaagctaggacctttgagggtattgtagggatatttattttatgaaatct

SEQ ID NO: 219478 - DNA, 544 bp, Glycine max
gaaaaaaccaacaaaaaagatctagtcctagaatccaacaggggcgacctcacctgcaagaacacatagccatgtcaagaaacttgcttcttgttctttttgcagtagccaccttcctccatggctcagaagcacaaaccagacacgtggtaggtgatgccacgggctggatcatccctcccggcggcgccgccacctacaccacctgggcttgcaacaaaacattcaccgtaggcgacactctcgtgtttaacttcaccaccggccaacacgacgtggccaaggtaacgaaatcagcctacgacgcgtgcaacggcgggaacgccgttttgaccctgacctgcggtccagccaccgtaaccctgaacgaaacaggggaacaatactacatttgctcctttggatcacactgttccggcggtcagaagctggcaattaacgttaacagagcttcttctagcactccttgccctgctcctgaagcacaagcaccagcaccagaagccactagccccatttctccaccaagggtctacaccagcac

SEQ ID NO: 219479 - DNA, 614 bp, Glycine max
  unsure (1)..(614): unsure at all n locations
ctccaacaacacccaaggctgatgctctgttcattcctagggaaaatccaagggcgttgataatttgtcccgtggagcagtggccaggaaaggcttctgagaaggcatcaacatttaaggatagatccatcccagtgaatgagaatgagagtgctgtagaaaatggttttgtcaaggagcaagctcagcctatatcgacaaagccaacatccaatgggagcaatgaagatcattctccacaaaaggcggacgtgtacaagacactcagaggtcacagagctggtgaggctgccattgtatatgaacatggagctgacgttgaggcactaatgccaaaactgcggcgatctgattactacacactgcctcggatacatgaactggcagccaaagaaagagctgaacctggattctgcagtcatgttaaggacttcgtggttggaaggcaaggttatggcagcatcagattcttgggtgagacggacatacgagggctgcgatctcgagtccctcattcagtttaacaaccgngaggtgattgtatacatggatgattcaaagaaaccccctgtgggacaaggggctgataagnctgctgagggtacactactcaa

SEQ ID NO: 219480 - DNA, 615 bp, Glycine max
ctcgagccgcttttactgatgttgctatgtgggtgttttgccctttcaatggaccctccactctgaaaattggaattacaagtagggcttttagtaaggttggagagcatgttggtgactgggagcattttacacttcgtatatgcaactttactggagaattgtggagtatatatttctcacagcacagtggtggaaaatgggtggatgcctatgaattggagtatattgatggcaataaagctgttgtctactcatccaaaaatggacatgcaagctacccccaccctggaacatatctccaagggtcttcaaaacttgggattggcattaggaatgatgctactcgtagtcatttgtatgtggattctagcattcaatacgagcttgttgcagccgagtatctaggagatgttgtcagagagcctcaatggttggcatttatgagagagtggggtccaaaaattgtttatgattcacaaactgaacttggataagataatgaatgctccttcctcgcgggcttctgaaatgcatttggggtacttgattaataaggctttccggtagagctgtatggtgagggaagggtcctacaggggcccaaaagagaaa

SEQ ID NO: 219481 - DNA, 529 bp, Glycine max
gtctctcccatcctttcgcattctcaatacccttttgatttgtgaaaggaaagcaaacatgggtgatcaggtccaacaccctacaatcatggacaaggttgctggtcagctccatctccgttctggtctttcatctggtattagaagttatgatggagcctaccgccacccagctatgtaccagagaccctcttttgggaattactcgaatgctgcattgcagtttcctgtgatgcccacatgcaaagctaccatggatttgtctgctactgcaacatctgcctcacccgtctttgttgctgctccagcagagaaaggccattttcttttagactttctcatgggaggtgtttcagcagctgtctccaaaactgctgctgctcccattgaacgtgttaagcttgtgatccagaaccaggatgagatgatcaaaactggtaggctctctgagccctacaaaggtattggtgattgtttcaagagaaccatggcagatgagggtgctatttctctatggagaggaaacact

SEQ ID NO: 219482 - DNA, 357 bp, Glycine max
gaaatcataaaattggaattccaagtgacagctttgccctgccactcaaataaatcatattctcaaatgtaaaatttccatcatgatgaaatttaaaaacggtttttgggacaatatcccatctagtaaatttattaaacaaaatttgcggcagcaattagtctaagactcttggaactcaatggtttttttcatcgccatctaaaaacaaataatagtactgactcagcattagaacttaagccccaccagagccgtactttttgccgaacacaagaacctgcaacttgtcataaccagccagcacaccagcaccggcaacggcacggaggatgttggcacccggcccccttgaac

SEQ ID NO: 219483 - DNA, 558 bp, Glycine max
ccgaaacccaatgacccacctagccatggtttggcttcaaacatggctccctgaaccctagcgtttctccctcttcgccaacaacgctgatccgatcccgatctgtttctgattccgatccgatccaatccaatggctggggcagcctctgctctgttcctccttgacatcaaaggccgcgtgctcatctggcgcgactaccgcggtgacgtcaccgccgtcgaagctgaacgcttcttcaccaaactcatcgaaaaagagggggatccgcagtctcaagatccggttgtgtatgataatggtgtgacctacttgtttatacagcatagcaatgttttcctcatgatggctaccagacaaaactgcaatgctgctagcctgcttttcttcctacaccgtatcgttgacgtgtttaagcattattttgaagaattggaagaggagtctcttagggataactttgttgctgtgtatgaattacttgatgaaataatggactttggctaccccgcatacactgaggcaaagattcttagtgagtttatcaagacggatgcc

SEQ ID NO: 219484 - DNA, 562 bp, Glycine max
ttgttgtgcaagagacagagggagtgagatggaaggcatagaacacagaacagttgaagtgaacggcataaaaatgcatgttgcagagaaaggagagggtccagtggtgttgttcctccatggctatcctgagctctggtactcatggcgccaccagattctctctctcagctccctcggctaccgcgccgtcgctcccgatctccgtggctacggtgacaccgaggcaccaccttcaatcagcagctacaactgctttcacatagtgggtgatctcgttgcgcttattgactctctgggtgtccaacaagttttccttgtggctcatgactggggagccatcataggttggtatctctgcatgtttcgccctgacaaagttaaggcctatgtctgcctcagtgttccttttctgcgcagagacccaaacatcagaacggtagatggcatgcgtgctttgtatggagacgactactatgtctgcagatttcagaaaccaggcgaaatggaagctcagatggctgaagttggcactgggtatgtttctcaagaacatccttac

SEQ ID NO: 219485 - DNA, 593 bp, Glycine max
gcatgataagattgaaaattaatttagaggctatgccatatatgattattattacatacaactttaacgatttaaactgtatatatatatgatcctgcaactatattcaggatgaattcgtttttggatgagattaaaacttcttgataaaatcgtaaatgtgagtattgatttcctcggcggcttcttgattattgaagtgagccactcctttctgcacaatcacttgttctaagtttggcacatcttgcttgaaccctccaccgaggatatactccttcaagtttagcgaggtatataccgagtccaactcacctgtaatgaattttacgggcaccttgatttgcactcctgtccatggagctgtcagctcccaatctaagttgaaatttctgtagtagttcaagcctccagtgaagccagttttttcgaatttggagacataataagcaagatcatcttctgtgagccaagagggtaaggaatcaaacatatttggattgaatccagttccaaactctccatgcggaaggaatggaggaccagttttgcgacttgtaggatgtttttgagacatacccagtggcaactta

SEQ ID NO: 219486 - DNA, 569 bp, Glycine max
  unsure (1)..(569): unsure at all n locations
ctcgagccgaatcggctcgagcattggtggccctcatggtgatgctggtctcactggaagaaagatcatcattgatacctatggtgggtggggtgctcatggtggaggtgccttttcagggaaggaccctaccaaggttgacagaagtggtgcctatatcgtgaggcaggctgcaaagagtgttgtggcaaatggccttgccagaaggtgcattgtccaagtttcctatgccattggtgtccctgagcccttgtcagtgtttgtggacacttatggaactgggaagattcctgacaaggagattcttcaaattgtgaaggagaatttctacttcagacctggaatgatcaccattaacttggaccttaagaggggtggccataggttcctcaagacagctgcttatggacactttggaagggatgaccctgacttcacctgngaagttgtgaagccactcaagtctgagaagcctcaagcttaagattgntgtgaagttaatcactcccttcatggatgtcttgctaggtgtggatgaataatgtgcgtgttccatgactactactact

SEQ ID NO: 219487 - DNA, 510 bp, Glycine max
ggtacaaaattctgataaaatttccattgcatcaaaacggtaacattgcataaccaaaaaataaattgtgagtaaaaggagaaaaggaaaaaaaaaaacagtttaagtattgatgagatgacattagacctatgaatgaagtagtagtagtcatggaacacgcaaattattcatccacacctagcaagacatccattgaagggagtgattaacttcacaacaatcttaagcttgaggcttctcagacttgagtggcttcacaacttcccaggtgaagtcagggtcatcccttccaaagtgtccataagcagctgtcttgaggaacctatggccacccctcttaaggtccaagttaatggtgatcattccaggtctgaagtagaaattctccttcacaatttgaagaatctccttgtcaggaatcttcccagttccataagtgtccacaaacactgacaagggctcagggacaccaatggcataagaaacttggacaatgcaccttttggc

SEQ ID NO: 219488 - DNA, 610 bp, Glycine max
  unsure (1)..(610): unsure at all n locations
gtttggaatgaggagctgaatttcactctgacagaacccttgggagttctgaatttggaagtgtttgataaagatcttctgaaggctgatgacaagatggggaatgctttcctgaaccttcaaccaatagtctctgcagccagattaagagacatcttaagagtgtcctctggtgagacgacattaaggaaggtcatacctgatggtgaaaactgtcttgtccgtgaaagcagtatcaactgtgtgaatggtgaggtggtgcagaatgtttggttaaggcttcgtggagttgagtctggggaactagaattgaccatcaagttggtcacacatgttgctcctgcaatatagtgcaacaattgcatgtgtcataagtgtagatctctaactaacattttatgtctagtcgagtcttgcttttgattaactcctgcatagatgtttctacccaaaaatgaaaaaaaaaagaagctnttataggtttttggtttctcagtcccagtcantnttggttctggtncgttttttaatttctcaatttaaaanaatactcttttagtccttctgactgatnttagcagtttggatcataatatagcagatcactgaa

SEQ ID NO: 219489 - DNA, 478 bp, Glycine max
tttttttttttttttttttttttttttttttttttttttttttttttttttttttttgggtttttttttttttttttttttttttgggccccaaaaaaaaatttttttgggcctaacggcaaaaaaaaacaaggccctaaaaacccccccaaaacccaaaggaaggcccatagccaaaaagaaaattaaaccggcctttttgggggggggggggttgtaaaacaaaaaaacccagggggggccccccaaaagcccaaaaaagcccaaaaaccccccttggggatttgaaaacgccccctccagggggtttaatcaaacggggggggggggcccccccaaccacgggtaaatttcatggggaaaggcctccataaaggggtttttttttttctaaaaaaaagggtgggggccccaaaaccaggagcctctggggtttaaacacccaaaaaaaaaattggtttcccaacccccccaattt

SEQ ID NO: 219490 - DNA, 607 bp, Glycine max
  unsure (1)..(607): unsure at all n locations
gttcgattaacgtttggcgatcacagaagagaagggaatggagttttctcaagatgattttgatcggttactgttattcgaacacacgcgaaagactgctgaagcaaactacgcagagaatcctcaagacgctgataatctgaccaggtgggggggagctttgatcgagttgtcgtcattccaagctcctagggatgccaaggcgatgattgatgatgccctttcgaagctggaggagtctttgctgatcaatccaactaagcatgacactctttggtgcttgggaaatgcaaacacgtcttatgcttttctaatccctgatataactgaggcaaagggttattttgacaaggcacttgagtatttccagaaagctgcggaggaggatcccgagaatgacctctatagaaagtccttgcaagttgccgtgaaggccccagaactacacatggaagatccataaaaatgggcttggtctgatgagtaatgccggatcctctgctacttcaaaagaaaaggaatctaaaaagcagaagagcaatgactgtaagtatgacatatttggatggattattcttgcagcgngtatagtagcatgggtgggaat

SEQ ID NO: 219491 - DNA, 458 bp, Glycine max
  unsure (1)..(458): unsure at all n locations
tatcatgcgtggtgctctgcancctgcgggaatccattccggggtcgacgacgctactagtacggcggctcgcgtttattttttctttttcttaaaaaccattttgttttatgttaaagaaaggagaaaatgataaatagaacgccgtatgtaaaaaccacaaatgcaatacctagttcacaacttccagtcctaagtgaataactcctcaatcatatgtttatcttggaggcggcgggggaatgttagatttggccattcccacccatgctactatacccactgctagagttatccatgggaatatgtcatactctaaggcatagctctaccgccttgttacattgcttttctttggagggagcggaggatcccgtattacttatctgaccaagcccatgttcatggatctccacgagtggctctggggccttcacggtaacttgcagggactttct

SEQ ID NO: 219492 - DNA, 579 bp, Glycine max
  unsure (1)..(579): unsure at all n locations
aggagacaacacaaagtgcaaaaaaacagaaattaaacactactagtagctagctagggtgagaaaatgggtgaagctaaggaaatatggtctgcaccaataacccctagaacagcttcagtagtaggaacacctgttgtggcatctccacctgtgtcatgtccaccctctcagcttcactcaccatctctaacaaggtcacctctacttcaccctgaggatggagatgcaccacgtcgtaaaacatctaagactccaaagactccaagaacccctagaacccctagaaccccacttagaatctctaatttgactccaaagttcatcacccctttgggaagccctatgagaaaagctctgaggttcaccaagcttgatcctcaggatgcttggcttccaatcactgagtcaaggaatggtaacaagtactatgctgcttttacaccctttgtctggattggaattaggcccttgtctccctgtggccttcactatcttggtggacggnggaatcataacatgacttggcttcatatggcacttacacctatgctgctgtcaccttatgagcgtagagca

SEQ ID NO: 219493 - DNA, 562 bp, Glycine max
aaactcttaagtatttttcaatttgcagaacaagaaaatttatacaatcttgatttaccttcccctccccttatgcagttaatgatatttatacaaatatcactattaggcaaaatcaacctagaactacaaagtggggtcacaaatttgaatttctcaaaaaaagaaagaaagaaaaccttagcaattctcttactaattaattacctcccaacatcattttcctagtacattttcccactctatatgtgagactactgaggattgaaaaagctcacattaacaccagtatcaatgatgacatataaactagccgcaaccaatatggcactcaaagccactcccaatgtccccaagaaccaattgagccaccacatggcactatacttctttggcttctttgtcttaagccacatgaaacatgggtacgcgaatgtcactggcaacgccactcctccaatcaaaccagccttttgagacaaaaacggaacagccactcctatgaagaagcacaagaacccaaagaacaccctaataaatgcacgcagccaccacgggcatg

SEQ ID NO: 219494 - DNA, 530 bp, Glycine max
taacactagaactcacaaaggacagaagaaacgcgaatgccaggagaactccaattaccacccgggttcagattccaccccactgacgatgagcttgtgaatcactacttgtgtagaaagtgtgctgcacaaaccattgctgttcccatcatcaaagaaatcgatttgtacaagtttgatccatggcagcttccagagatggctctttacggtgagaaagagtggtactttttctctcctcgagaccgaaaatacccaaacggttcgagaccgaaccgggctgccggaagcgggtactggaaggctaccggagctgacaaaccgatcggaaaaccgaaagcccttggaatcaagaaggccctcgtgttctacgcgggcagagccccaaagggagtgaagaccaattggatcatgcacgaatatcgcttagccaacgtcgacagatccgcctcaaaaaaaaacaccaccaccaacaacttgaggcttgatgattgggttttgtgcccaatttacaacaagaaagggaagat

SEQ ID NO: 219495 - DNA, 522 bp, Glycine max
  unsure (1)..(522): unsure at all n locations
ctcaagacaaggagttggcggaaaatagaggggatgtatccatatgttaacgtgggtgttcaggcacctccacttgtggctgttgtggataatcagctatatgcagttgagcatctaactaacatggtgaagaaatatgancaggaaaggaacacctggaatgaattggggaggcttccagtccgagcagattcttctaatggttgggggttggctttcaaggcttgtggagagcaacttttggttgtgggtggacaaaggggtccagaaggtgaagctattgtgctgagttcatggtgtcctaagtcagggatcagcaatggcaccatagattggcaggtacttggcgtgaaggagcatgtcggggtgttcgtgtataattgtgctgttatgggttgttgagatgattttagattgactcaacagagaatgttgatatccacaatctgacttagccttgaagggtgccttcatgttcaatcacctcatttactgagaagtaaatngttgctgggatagctt

SEQ ID NO: 219496 - DNA, 561 bp, Glycine max
cacttaccagtatggctatccaacaatctctgttagacaggcctagaaaatctgtttccaaaactatctgcttaatcttttctatagctgctgtcatgatctcatcagcctttgttggttcttatctcatcaaatccacctccttcttcaaccaatcctctcctcaacatctctgtgatcatgcacttgatagggcaacatgtttaacccatgtctcagaagtggtacaaggtccgatcttgacccccacaaaagaccacaaattcaatttgttacagtcattcctaatgaaatacacctcacacattaagagagttatgaacacagccagttctatcaaacttaggatcaacagtcccaaagaagaagaagctttgcacgattgtgtggagttgatggacttatctatcagcagagttagggactcaatggtgaccctaacagaacataccattgagtcccaacaagatgcacacacatggctaagtagcgtgcttactaaccatgcaacttgtttggatgggttagaggggtcagctcgcgctctatgaagacgaactc

SEQ ID NO: 219497 - DNA, 521 bp, Glycine max
ggtcagcaagttgcatcaaatcaacccattaaattttgtgaggaaatcaaagaagcattttggaagtcacaaacaagtttattttacatatatgtaacgttacatagaccctacaggatacaaggccatcgccatagcaacttcctacaaacgaaaaagtccaaacctcattgtgctgcctacatatcaaaaaccacccatatcagatataagcacacatcagttttccaaaggccatatttagaggccttcaatgaagttgaccccagtgttcttcaaccaaacattgccttggatgagttgtgctaccgtgaacttgctggcctcagctgcagttttgatgatatggtaaccaggccaattcactctcttgctggtaccggcaccggggccattattcatgtactctccataatacaacgtttgcaaaaagtctttactttgggcattccattcagcccatcctgttgggtcaatgtggctgtccaatgtcgactgcatcacaacagttctggagtact

SEQ ID NO: 219498 - DNA, 602 bp, Glycine max
  unsure (1)..(602): unsure at all n locations
ctcgagccgattcggctcgagcacgctcttcgccgggctcaatacggtgtttgtggggatgcaaacgagttatatcttatggacgtggctgattgaaggacgccccagagccacgatttcagcattgttcatgttcacatgccgtggaattttagggtactccacccagctcccattgcctcagggatttttgggctcgggtgtggatttcccagttgggaacgtgtcgtttttcttgtttttttcggggcatgttgcgggttcagtgattgcttccttggacatgaggaggatgcagaggtgggaactggcttggacttttgatgtgctcaatgttttgcaagctgtgaggttgctgggtacaagaggacattacactattgatttggccgtagggggttggtgctggaattctctttgattctttagctggcaagtacgaagatagcaaaaggaatgctgctctatccacaacccacagagcacaatttgattggcgtcacaatgtggatatagctaanaaaattaacanatgatcatggaaaagtacacatggagtgtnaaagtacaagggtgagtgagagggcaagagtctgaattgt

SEQ ID NO: 219499 - DNA, 478 bp, Glycine max
acaattcagactcttgccctctcactcacccttgtacttttacactccatgtgtacttttccatgatcatttgttaatttttttagctatatccacattgttgacgcaatcaaattgtgctctgtgggttggggatagagcagcattccttttgctatcttcgtacttgccagctaaagaatcaaagagaattccagcaccaacccctacggccaaatcaatagtgtaatgtcctcttgtacccagcaacctcacagcttgcaaaacattgagcacatcaaaagtccaagccagttcccacctctgcatcctcctcatgtccaaggaagcaatcactgaacccgcaacatgccccgaaaaaaacaagaaaaacgacacgttcccaactgggaaatccacacccgagcccaaaaatccctgaggcaatgggagctgggtggagtaccctaaaattccacggcatgtgaacatgaccaat

SEQ ID NO: 219500 - DNA, 641 bp, Glycine max
agcctctatcattcctgaggttgatgtttgcaagtctgatccttgggatttgccaggtgatttggagcaagagagatacttctttagcaccaaagaggccaaatatcccaacggaaatcgctctaacagagccacaaattcgggttattggaaggcaactggcttggacaaacaaattgttacttcaaaagggaaccaagttgtggggatgaagaagacacttgttttctacagaggcaagcctcctcatggatccagaactgattggatcatgcatgagtatcgcctcaacatccttaacgcctctcagagccatgttcccatggaaaattgggttctatgtcgcatatttttgaagaagagaagcggtgctaaaaatggggaggagagcaacaaggtgaggaactctaaggtggttttctatgacttcctagcgcagaacaagactgattcctcatcctcggccgccagtggaattacacatgaacatgaatcagatgaacatgaccatgaagagagcagtagctccaacaccttcccttatactattagaacgaaaccttaacaaccaagtcaacaaccaccttccttaaaaagggtgatatcaccctagttttttttttttaatctctttcccttcc

SEQ ID NO: 219501 - DNA, 538 bp, Glycine max
ccgccccgccggagaataagaagaaggatccgtgtcacagtcactgctcatcgccatgtctcgggttgataacagaaattcctcagccaccaagcgtgctaggactgatggtagtcgtagggaagatgattggacatgccccagctgtggtaatgttaatttctctttcaggacaacttgtaacatgcgtaattgcactcaaccaaggccggctgatcataattctaaatctgctgccaagcctctacaagctccacagggttattcatcctcagctccttacttaggttctaataccccctcttcaatatatcttggtgtgccaccatatgggtcttctctgttcaatggatcatctgttcctccctatgatgttccattttctggaggatcagcatatcactacaactatggtagtcgcctttctgctgggagtccttatagaccgttgcatttatctggaccaacaccctacactggtggaccagtgatgggaaatggtgggatatatggaatgccccaactgttggatcgatat

SEQ ID NO: 219502 - DNA, 554 bp, Glycine max
cagacactttatgaggatgaaaacaagaacagaatgatggagactaaggaactttttgagtgggtcctaaggcaaccatgttttgagaaaacatccttcatgttatttttaaacaagtttgacatatttgaaaagaaggtcctgaatgtaagaaccatccagatgagtacactttgtcataggtggagtgtattatcatttcagtttaataccttgcattgtgcaggttccgctcaatgtatgtgagtggttcaaagattaccagccagttttcacaaggaaacaagaaaatggaacatgcgtacgagttttgtgaaaaaaaagtttgaggaattgtatttccagagcactgctcctgactgggtaaatcgcgtggtcaagatctatcaggcgactgcccttgatcagaagcttgtgaagaagactttcaagcttgttgatgagactttgagacggaggaatctctttgaagctggctcattatgaccatgcaacagtatgtatgtttaagagggatatgatatttttacattgagaaactaaaggtcatctga

SEQ ID NO: 219503 - DNA, 511 bp, Glycine max
  unsure (1)..(511): unsure at all n locations
gtttccatctctctcacaaaatgacaacaatatcaaattgctcccttctcttcctcttcctcttcctctccaccctccacatagcttccaccctctcaacccccaccaacttcatcaagtcctcctgcagcaccacccagtacccagccctctgcatccagtccctctccgtctacgcctccaccatccagcaagacccccacgagctcgtccagacagccctctccctctccctcaaccacaccgaggccaccaaaaccttcgtcgcaaaatgcaacaaattcagaggcctcaaaccgagagaatacgctgccttgaaggactgcgctgaagaaatcagtgacagcgtcgaccggctcagccggtcgctgaaggaactcaaattgtgtaaggggaagggtgaggacttcacgtggcacatcagcaacgttgagacgtgggtgagttcggctttgaccgatgagagcactngcggcgatgggttcgccggggaggcgcctgatgggaagat

SEQ ID NO: 219504 - DNA, 577 bp, Glycine max
gtacgaacagagtttctctgtttttgacgatggccataaaggcgattgaactttgaaagggtgcggatcacaagaagaaataatggaagtgcttgctgcggtggcttcggatttgggggatgtgatcgatgatgtgaacaccttgcaggtgattccactgaatggtgcaatgaccaatgaggtttttcagataaactggccaaccaaaaatggtggtgagatcagaaaggttctggttcgtttatatggggaaggtgttgaagttttctttgacagggaagaagaaattcgaaactttgactgtatttcaaagcatggtcagggtccacgccttcttggccgattcacctctggcagagttgaggagtttattcatgcccgaactctctcagctgctgacctccgtgaccctgaagtatctgctttgatagcatctaagatgagagagttccataatcttcatatgcctggtgcaaagaaggttcagatttggcacagaatgaggaagtggctccgtcaagccaaaagtctgtgctccccaaggatgaacaaaattttggcttggacaatctggatg

SEQ ID NO: 219505 - DNA, 571 bp, Glycine max
ggctaaggctgagaagaaaggttcctttaggttgttgaaggctgatgtttctgctcagacttacgtgaagatgggttttaaggcggagaagaaggtgaagaaaggggaattggagggttactatccttcgtggaggactaagcccgagactgtgacgacgcactttgaggtgctggctaaggttgatggggagaaagttgtgccggagaaagttatgccggtggagcctgttattgcggtggacagtgtggcgccgaatttgctcacccagaatgtgtccatgtccaagacacaagtagttcaccctccacccaaccccttttacttgtaatttgtggaaaggaaaagggattgactgaactctaccgagaggattcgtaacagagagaagagggaacattcttgtttcacttttgattttggtatatagtatagacacaacagttaagatacttgtttgaaattgtaattaatgagaaacttgttttatttgtccatcataagattgctttcttagactattcaaattaactactttaacacatctattataaagcgctgggattcatgc

SEQ ID NO: 219506 - DNA, 448 bp, Glycine max
ctcgagccgattcggctcgagcggctcgaggtcccccaacaccgttaatttggacgtgagaacccccgtgaagttcgacaacatgtattacatcaacctcttgaaccgccaaggagtgttcacttctgaccaggacatcgcgggcagccccaaaaccaaggaaatcgtgaaccagttcgcttcagaccagaaactgttttttaagaaattttccgatgcttttgtgaaggtgagccagctagatgtgataacggatcgtattgggaaaggggagattcgtgataagtgctttgttgcaaataagagaagatcttctatggcgtctgtggtggaagaagtagtggaattggctcaggagatataattgtattgggtccttctgctcagggtgttctttcttgtttttctgaatggattgtgtaataaacgttgatatgtgttctctttt

SEQ ID NO: 219507 - DNA, 544 bp, Glycine max
  unsure (1)..(544): unsure at all n locations
atttacatcttcgtatttccctttcctcgaaacttaattagaactcaaaatatagaaaaataagacaacatattaattcgtcgtgttcctcatcatgttcctatttgaggatctctggtccctcccgcgcctcttctcaggtacgttacgtttgccgttaatcttgcagaattgaaaattctaacctaaaaagagagagagagagagagaattgaagttccaattcaagttttgcaattcgaaagcgattctaaagtctaacgaagtcgcttaatttacagtctttacgcgaatcctttacgagctcgagctgtgacagaacggagtcggagcaatgccgcgacgagtcggcggcgatggttctgaaattcgtggcggtggcgtcgattctggtcngccggattcggggagtctcgattccgctggtcgggaagtcgcggcggtttcttcgaccggacggcgacgttttcgcggcggcgaaggcgttcgcggcgggggtgattctagcgacggggttcgtccacatgctgagggactcgtggga

SEQ ID NO: 219508 - DNA, 375 bp, Glycine max
gaagaagaagaagaagaagaacttggataattgttaattataactaattaattctctcagttcttcttcttcttatttctatgattatggatcgcccaacactatcattattttcattcctactaacactccatctatcactatcaggggtaatttcaaccactttcactctagttaacaaatgtgagtacacggtgtggccgggaattctttccaatgctggtgttcctcctctttccaccacaggcttcgttctccaaaccggcgcgtccactacaatcgccgcacccgcgtcttggggtggccgtttctggggcagaacattatgctcccaggactcaaccagcggcaagttctcctgcgtcacccgcgact

SEQ ID NO: 219509 - DNA, 505 bp, Glycine max
  unsure (1)..(505): unsure at all n locations
agatgttcttagcgacattagccccatacctgtcttcaaggaaatcttccgcagtgatggggaaagtgtccttcaatttccaccacctcatgtagtccaagttagtaaatctgcatggatgactgatgatgaatttgcaagagagatgattgctggtgtaaacccaaatgtaatccgccttcttaaagagatcccaccacaaagcaagctggaccccactctctatggtgatcaatctagtacaatatccaaagaacatttggagattaacatgggtggggttacagtagaagaggcacttaatggtcagagattattcatattagattatcacgacgcattcatgccatatttgacaaggataaacgccctacccactgcanaggcttatgcaacaaggacaatcctgttcttgaaagatgatgggactttgaagccacttgctatcgaattgagcaagccacatccaagtggagataatttgggtgccgagagcaaagtggtc

SEQ ID NO: 219510 - DNA, 595 bp, Glycine max
atggggtaaggattcttgatactcgaagaagccacaatgacggggggatgcatacgtgcgtatgcttgagaatcggttcgagataatgttcaattggtgaatgttataaagctgacgaagctcatcacaaatcacttcaacttgacaaaaatttccttgaagcatgggcacatctgactcagttctatcaagatttagctaagccaacaaaggctcatgaatgtataaataagatgctacaaattgatgggaggtttgcaagagctaatcatttgcgtggccttctgttccatgcaatgggtgagcacaggaaggctatcaaggatttgacaatggggtcgagcattgatggcagcaacattgaatgcttgtatttacgtgcttcctgctaccatgctgttggacaatacaaagaagcggtcaaggattatgatgctgcattggatttggagctggattcaatggacaaattcgtgctgcagtgccttgcttatttatcagaaagagattgctctgtacacagcttcaaaatttaatggtgaattttgctggtttggatattgcagggggatattgatgctcctttttaaggaat

SEQ ID NO: 219511 - DNA, 574 bp, Glycine max
  unsure (1)..(574): unsure at all n locations
tgcctttaaggcatataaagctgcccgagaggaacatgaacacgctactgagtcgggtgaaggggataaggtgtcatcagcactcattgggagagttgatgctatgcttcaaaatcttgagaaggaaatagatgacgttgatgcgaaaatcggtgaccgttggaggctgctggacagagattatgatgggaaagtaactcctgaggaggtagcctctgctgcaatgtacttaaaggatacattgggaaaggagggtatccaagaactcatcagcagtctttccaaagatagagatgggaaaattcttgttgaggacattgttaagttgggcagttggagggaagatggtaatgcacctgaagatgataccagggagagggtatgatcccatcatttgacttccagatacatcctatttgagttccatgccacanaatatgttgcgcaaatgtactctaggccattcgaattttccagtcattgatttttgtattcatgtattaataaatagttcaattgtagcagtcagacgaaaatgaagtgtgtgcaagctcttgtaattttgacagctgag

SEQ ID NO: 219512 - DNA, 659 bp, Glycine max
  unsure (1)..(659): unsure at all n locations
ctcgagccgcagagagaaaagagaaaccagtgtcaatgaatgcttttgagctcatatctaggtcacaaagtttcaatcttgaaaatttgtttgagaagcagacacaggggattgttaagagagaaacacattttacctcacagcgccctgcaaatgaaatcatgtcaaaaattgaggaagctgcgaagcctctgggatttaatgttcacaagcgaaattataagatgaagctgcaaggtgataagagcggaaggaagggtcacctttcagttgctacagaggtttttgaagtggctccctccttgcacatggtggaactgcgaaagaccgggggtgacacactagagtttcacaagttctacaaaagcttttcatcatcatcagggttgcaagacatagtgtggcattctgaagcaaaacaatgaagaatcaagatgtgcatgcatggaagatatcatgcacgtatttttgttggaagatatcaggaactttttttgttcatggaagatatcgtgcttagctaaaactggagcatgttgagttgggagagtctgctctaatgtttgatagggtaaaaacanaacctagatcgtacaaaacttagagtgtatatttccttgaacttttattcataatatttcatgacccttattaattca

SEQ ID NO: 219513 - DNA, 513 bp, Glycine max
aaagaatccaaaaacaaggggagggatttgaaatccaaaccggagagtaaggatgtagcagaaactgatgaatatgaatttaaaaatccccaaaaggaggcccctgccaaagagtgtgaaatcgatccagcaaagctgaaagagatgaaaagagaggaggagattgcgaaggcaaagcaggccttggaaagaaagaagaagttagcagagaaagctgcagccaaagcagccatcagagcacaaaaggaagctgagaagaagcttaaggaccgtgagaagaaagcaaagaagaaatcaggtgctgcagctgtggccaaccctgaggatgaaccaaaagatgaagttgtcgaggctacagagccagaaaaggttaacgatgatgtccaagtcctggctccagtgaaggaaaaggtccaaaaggagagtggcatcaggtccaggggccgagcaagaggccagactcgattccaaagctatatttagcgagaagttacattactgatatgctgagct

SEQ ID NO: 219514 - DNA, 534 bp, Glycine max
gctgatcaggttcagaagaccaacaactcgcaggatgtggtggctgcacaagatgattctgcaaaaaccctttccgaagagcttgcagacattgaatcccagctcaagttctttgagaccccttcttttcttgatgaagcctgggctgatgctacattggcgtctttgctcggcggagacgcaactcatgacgccgccggaaaccctatgaacctttggagcttcgacgacctgccttccatggcaggagtcttctgaacaccctttatctccccttttatgtaaataaagctacaagaattgtgatcgtgatgttggtgatggagtccacagcaagaaacctgcttaaagcttatgtggagtttattttatcttgtagctaatgcagtagtataggactatatataggttcttattatagggtatccttttgtgaactcaaagacctcgttttcaggggattttctgtttgatgtccttaaggattatcaattatgttatatatggtcttggatacagtcttgactgctgata

SEQ ID NO: 219515 - DNA, 523 bp, Glycine max
ttcgcttgcagtcacacaagaggccaatcctattcatagctcgagatgggtgaagaagtgaaggtagttgttccagaatcagtgttgaagaagcgcaagagggaggaggaatgggcgttggccaagaagcaagaactcgatgctgccaagaagaagagagccgagagccgcaaactcatctacaacagagctaagcagtacgctaaggagtacgatcaccaggagaaggaattgattcggttgaaacgcgaggccaagctgaaaggtggtttctatgtggatccagaggctaagctgttgtttattattcgcattcgtggtattaatgccatggaccccaaatcaaggaagatcctgcagttgttgcgattgagacagattttcaatggtgtatttctcaaagttaacaaagccacagtgaacatgctgcacagagttgagccgtatgtgacttatggatacccaaatctcaagagtgtgagagaacttatttacaagagagggtatggaaagctaatgaagc

SEQ ID NO: 219516 - DNA, 497 bp, Glycine max
gccggcataattcaggtgatgctgaaacctccgagcgatgaacctcttttaggaagttctgatgatacaaggctcattgacctgactgatattgatatccgtcttccccttcttgtttatgtttctcgagagaagcgcccaggctatgatcacaacaaaaaagccggggccatgaatgcattggttcgagcctcagctataatgtctaatggcccttttatactcaatcttgactgtgatcactatatctacaactcaaaggcaatgagggaaggcatgtgctttatgatggatcgtggaggtgaccgcctttgttatgtccagttcccccagaggtttgaaggaattgatccctctgatagatatgctaaccataatactgttttctttgatgtcaatatgcgagcccttgatggactccaaggaccagtctatgtgggaactgggtgccttttcagacgggttgcactttatggttttgacccaccacgttctaa

SEQ ID NO: 219517 - DNA, 520 bp, Glycine max
gcacaacgaaccactctgaagccgctcacgttatccacaacactctcaaccctccttaaaccctaaccaatccaaccatggcttcttcttccaccttcactgcaatgtccgcctgcaagctctcctcctccgccgccatctcctccttcccctcccgccgccgctccaacgccgtcgttctgtcgaggcgcagccgcgccgccagggtctccgccatggccaaggagttgcacttcaacaaagacggcaccgcaattaagaagctccagagcggtgtgaacaagctcgcggatctggttggggtcacgcttggtcccaagggaagaaatgttgttctcgagagcaagtatggctcgccgaaaatcgttaacgacggtgtcactgtcgctaagaggttgagttggaggatcccgctgagaatattggtgccaagttggtgagacaagcggctgccaagacaaacgaactggctggtgatggaaccacgacctcggttgttcttgctcagggtcttatagcg

SEQ ID NO: 219518 - DNA, 604 bp, Glycine max
ctgcattgcaccacaataataacaatattaatagtgctgtagtcatggcaaccaaagctaaaggcaaggagctgccaaatagcaccggtaagatggtgcagattataggcgagattgttaatatgctcatcaccgcccacaaagagggcaagtcgatcaatctgtctaaaattaaaatcgatgctgcgcgtgagaatggcttaccacgccaaccaaaaacgatcgatattattgcagctattccagaacaatataaaagcgctatattgccaaaaatcaaagctaaacctgtgcgaaccgcatccggtatcgcagtggttgcagtcatgtccaagccacatcgctgtcctcacattgcactcactggcaatgtgtgcatttattgcccaggaggtcccgacagtgatttcgaatacagcacgcagtcctacactggctacgagcccacatccatgcgcgccattcgagcgcgttacaatccctatttgcagacacgcaatcgtgtggatcaactgaagcgattgggtcactctacagacaaggtggagttcatcgtgatgggtggcacattcatgtccctcgcagcagactaccgagactactt

SEQ ID NO: 219519 - DNA, 334 bp, Glycine max
ctctcacgcagtcgcagtgagtgaaaaggaaaaccctaattgcggtattctcagtgccttcgagagaaagaaaaaatggcagataatcttgttctccgtggcaccatgcgcgcccacaccgacgttgtgacggcgattgccactcccatcgacaactccgacatgatcgtcaccgcctcacgcgacaaatccatcatcctctggcatcttaccaaggaggacaagacttacggtgtcccccgccgccgcctcaccggccattctcattttgtccaggacgtcgtcctctcttctgacggccagtttgccctatccggctcctgggacggcgagc

SEQ ID NO: 219520 - DNA, 511 bp, Glycine max
  unsure (1)..(511): unsure at all n locations
gcgatccccagagtgtaacaatggctgggaaaactcaaactcactactttcttctcttgtttctcttcttaatctccatcaacgccaaacttgatctctacccttcagactacaaggcactcctaactctgcagaaggacctcggagtcaacggtcaagtctccgcaactctggcttgcgaaacagagggcgtgttctgcgagcggaggaagctctccggcaaggaaacctacgccctccgaatcaccagactcgtcttcaaatccaacaacctcaacggtgttctgtccccttccattggacgcctcacggagctcaaagaactctctctctccgacaacaacctctttggccgactccctccccaaatctttgactgcagaaagctccaaatcctcgacctcgccaacaacctcttctccggcccagtccccccagagctctcctccctcacgcgcctncgngtgctggacatctccaccaacaggctctccgggcacctcaatttcct

SEQ ID NO: 219521 - DNA, 505 bp, Glycine max
  unsure (1)..(505): unsure at all n locations
ctcaattcatcatcagcttgtggccatagtctcattatttatccttttgcttccaaatatccatgggtggggagacgatgggcatgtcattgtttgcaagattgcacaggctcgcctcagtgaagcagctgcagaggctgtgaagaaactgctgccaatatccgcaggaaatgatttgtccacaaagtgttcttgggcagatcatgttcatcatatctatccttgggcctctgctttgcactacgcaaataccccagaggccctctgcagttacaaaaacagcagggattgtgtagattacaaaaaaggaattaaggggcgatgtgttgtggctgcgattaacaattacacaacgcagctccttgaatatggcagtgacactaaatctagatataacctcacgcaatctctattcttcctttcacattntatgggggacatccatcagcctctacattgtggctttctctcagacaatggaggcaatgcaattactgttcgctgg

SEQ ID NO: 219522 - DNA, 548 bp, Glycine max
gatcaactgaggagagtgagagaaaagagaagagaagatgacaacacgcttcaagaagaacaggaagaagaggggccacgtcagcgctggccacggtcgaatcggaaagcacaggaagcaccctggaggacgcggtaacgccggaggcatgcaccaccacaggatcctcttcgacaaataccaccctgggttcttcggcaaggtaggaatgcgctattttcacaagcttcgcaacaaattctactctccgatcctcaacatcgacaagctgtggtccctggtcccgcaagaagtgaaggacaaggcctccaaggagaacaaggcgccgctcatcgacgtcacgcagttcgggtactttaaggttctcggaaagggcgttttgccgcagaaccagcccgttgtggtcaaggccaagcttatttccaagatcgctgagaagaagatcaaagaggctggcggcgccgttgttctcaccgcttgaatctgacggtatcacttttttgaacgattaggttttggtctgatacgttttggtttggaatatgttg

SEQ ID NO: 219523 - DNA, 473 bp, Glycine max
  unsure (1)..(473): unsure at all n locations
ccccgtctgccggcgtcgcacctcgccaccgacaaccagcgtcggcgcaccactgcaccagagcagtaggccgtcgcagtcgcacgcggcaaccaccagccaccaagtcttcgtagcagatctgtgctttggctatggaaaattcagagaaggtggtcgctgtgatcatggtgggtggacccacaaaagggaccagatttcgacctctttccttcaatattcccaaaccgcttttccctttggctggccagccaatggttcaccatcctatttctgcttgtaaaaagatacccaatttggctcaaatatttcttcttggattctatgaggagcgagaatttgctctatatgtctcttcaatctcaaatgagctgaaattaccagtaagatatttgaaggaggataaaccgcatgggtcagcaggcggcctttacntacttagagatattatcatggaagactggccatcacat

SEQ ID NO: 219524 - DNA, 422 bp, Glycine max
tcaagaacaacagagccttcttaaaacgtatgaggtcatggtgaagaaattccaatctgaaatccagaataaagattcagagatccatcaattgcagcagcagatcgaagaggctagacagaagcgagcaaaactagagaaaaatctgaagcttagaggtttgtcaaccaaagaatcggaagatgaaattggctttttccctgtcgatctaactccagatctcttcacctctgccgtggaagcagctgcaaaagccattcatgatttttctaaacctttgatcaacatgatgaaagcagctgggtgggaccttgatgctgctgccaactcaatcgaacctgatgttgtttatgcaaagagagctcataagacatatgcatttgagtcttacatatgccaaagaatgttcagtgggcttgagc

SEQ ID NO: 219525 - DNA, 581 bp, Glycine max
  unsure (1)..(581): unsure at all n locations
gtttccttctctctttcaccgataaaacaaactaaattcttcttctttctactgaaaacgatagtaatggcgacgaatccaatcgaagcggggaacggcgacgccgctcctaaccctaacgcgactaccaaaccctccgtctacctccaagacacggaggagctgaagcgagtcttcagccgcttcgacgctaattgcgacggcaagatctccgtcaccgagttggacaacgtcctccgctccctcggatccggcgtcccgccggaggatatccagcgcgtcatggacgacctcgacaccgaccacgacggattcattaacctctcggagttcgccgccttctgccgctccgacaccgcggatggcggcgacgccgagctccacgatgctttcaacctgtacgatcatgacaagaacggccatatctccgccacggagctctgccaggtgctgaaccgcctcggaatgaagtgctccgtcgaggaatgccacaacatgatcaaatccgtggattccgacggcgacggcaacgtcaacttccccgagttcaagcggatgatgagncacaatcgtgaaaatgc

SEQ ID NO: 219526 - DNA, 557 bp, Glycine max
gttgtaaacgacgtcgctaatgagatgatcaaacagagaatagaaatggggttcaacacgcggaacgaccttctctcgcggttcacgggatccataaacgacgacgtttatttaagagacattgtggtgagttttctcttagcgggccgtgacaccatcgcctccgggttaacgggcttttttatgttgttgtctaaaagcccggaggtggaggagttgattagagaggaggcgggccgggtggtgggcccgggccaggagtttccttcgtttgaacaaatccgcgaaatgcattacctgaacgcggcgattcacgagagcatgaggctgttcccaccgattcagttcgattcgaagttcgccacggaggatgacgtgttgccagatggcacttttgtgagaaagggtagtagggtaacttaccacccttacgcgatgggccgaatggagaacatttgggggcccgattgtctcgagttcaggcccgaaagatggctgcgtgatggagtgttcgtgccaacgtgtccttttaagtaccctgtttttcaggctggggt

SEQ ID NO: 219527 - DNA, 592 bp, Glycine max
attctcccttctcttccctcgtagatcgaaagggaatattcttccatggcctccaagcggattctgaaggagctcaaggacctacagaaagaccctccaacctcttgcagtgccggtcccgtagcagaagatatgtttcattggcaagcaactataatgggtccccctgatagcccttatgctgggggtgtttttctagttactattcattttcctccggattatccattcaagccacccaaggttgcatttaggactaaagttttccacccaaatatcaacagcaatggtagtatttgtcttgatatcttaaaggagcagtggagcccagcattgacaatatctaaggtgttgctctccatttgctccctattgaccgatccaaacccagatgaccccttggtgcctgaaattgctcatatgtacaagacagacaggtccaagtatgaaacaactgctaggagctggactcagaagtatgcaatgggctagcatgttggaataaggcattgtattataggataggacgtgatccttccatttttaaaagacattaatgtataatctatcttttcattcccgctgttgacat

SEQ ID NO: 219528 - DNA, 492 bp, Glycine max
  unsure (1)..(492): unsure at all n locations
tggacaaaagaagtgttgatgatgttgtccttgttggtggttctaccagaattcccaaggttcaacaactgctgcaggacttctttaatggaaaagagctttgcaagagcattaatcccgatgaggctgttgcatatggtgcggctgttcaggctgcaatcttaagtggtgagggcaatgagaaggttcaggatcttctcctcctggatgtcacccctctgtctcttggtttggagactgccggtggtgtgatgactgtcctgatccctaggaacactacaattccaacaaagaaggaacaagttttctcaacatactctgacaaccagcctggtgtgcttatccaggtctttgagggtgaaagagcaaggaccagagataacaatttgttgggcaaatttgagctatctggcattcctcctgcacccagnggtgttcctcagattacagtgtgctttgacattgatgccaatggtatcttgaatgtctctg

SEQ ID NO: 219529 - DNA, 489 bp, Glycine max
gtattaataggtgagaagggaaggagaataagggaacttacctctgtggttcagaagaggttcaagtttcccgagaacagtgtcgaactttatgctgaaaaggtcaacaataggggtctttgcgctattgctcaggctgagtctcttcgatacaagctccttggtggactcgctgtgcgcagggcctgctatggtgttttgaggtttgttatggagagtggtgctaagggatgcgaggtcattgtgagtggaaaattgagagcccagagagccaaatctatgaagtttaaggatgggtacatgatttcttctgggcaacctgtcaaagattacattgactctgcagtgagacatgtgctcctgagacagggtgttcttggcattaaggtgaagatcatgcttgattgggatcctaaggggaaacagggtcctaaaactcccctccctgatcttgtcacaatccattctccaaggaagaagaagaataca

SEQ ID NO: 219530 - DNA, 507 bp, Glycine max
  unsure (1)..(507): unsure at all n locations
ctgttctctccatcaatttcccaaatctcagaaacaaaccgaaccaaaccaccgctaccattataacacactcctccccgtgcaaaccctagaaaacccaacaatttggggggaacctcaacccaatcccagaaaccaaaatcggccttgcaattcgtcgaaaccgaggaagagaaatcgtgggcacctttcaaaatccgagatttccccgacaaaatgtcccaactgaagcaaatgtcgcacatagacagtgcccctccgaccccagggaagttcaagatggataaagcttcgtacttcaaccgcgtgcggtggcacacctcgctggcgaagctcgcagtgtggtccctcgtgttcctgggcgcgatcttgatctttttcctccgctcgccggcatcgtctccggtcccggcggacctctcccggcggtccctgcgaacctacaactgnggcggacccgtttgggagaaacgggtccgggcatccgcccaggtccggtcccgaaac

SEQ ID NO: 219531 - DNA, 602 bp, Glycine max
aggaaccctagctagggtttggaagaagctgatccgagaagatggtgcagcgtctcacctaccgcaaacgccacagctatgctaccaaatccaaccagcacagagtcgtcaagactcccggtggcaagcttgtttatcagaccacgaagaagagggccagcggacccaagtgccctgtcactggaaagaggattcaagggattccacatttaaggccagcagagtataatagatcaaggttacacagaaaccgaaggactgtgaaccgtgcatatggtggtgtgttgtctggcagtgctgttagagaaagaatcattcgagctttcttggttgaagagcaaaagattgtgaaaaaggtcttgaagatccaaaagacaaaggaaaaacaagctttgaagggctgagttttgagaaagagtgataaagatctttttggagggattctaggtttgggtgattatagtaaagcatgaaatttgttagagctgtttctgtgttaattttgtgcttacttggctttgttaaactcattctagtgcaactggtaactttgtcgacaactccattatgatacagtttttgatgtcatgattttctcttgc

SEQ ID NO: 219532 - DNA, 540 bp, Glycine max
atgcaattgacgaggctaacttggtatacgactacagcatagtgggagggacggggttgcatgaaagtttggagaaggttacattccaaacaaaggtggttcctggcactgatggtaatggctctatcgccaaggccactctcacattccacaccaaagacgatgcaccactctcagatgcagtgcgtgatgaaacaaaggccaggggtgctggaattttcaaggccattgagggctacgttttggcaaatcctgctcaatgattatccttcaaaccacttgcatgcatgcaataataattatataagcttatgatctggttgttggagttaatttgtatcatgtggctttgtttggtttaattaatttcctttgtgagcaagtgtcggttttatttatgtaacatttttaaagtgttactattataattcggtgaatttggttgagtatacgtatgaaaatgtgcgtgtgttggtgttgacgtgtttggtcatttgtattctgcagtaaatatattactataatggagaggaatcttta

SEQ ID NO: 219533 - DNA, 430 bp, Glycine max
cttagtcccaattttctagggttttattcattttccgatggcttctgcagatgttgagtaccgttgctttgtcggtgggctcgcttgggccactgacgaccatgccctcgagagagccttctctcagtacggcgaaatcgttgaaacgaagattatcaacgatcgtgagactggcagatccaggggttttggatttgtgaccttcgcctcggagcagtccatgaaagatgcgatcggagcgatgaatggacagaacttggacggccgtaatatcactgtcaatgaagctcagtcccgcggtggcggcggcggcggcggcggaagaggaggaggatacaatcgcggtggcggtggatatggtggtcgtagtggcggtggcggtggcggtggtggataccgtagccgtgacagtggttatggcggtggctat

SEQ ID NO: 219534 - DNA, 545 bp, Glycine max
  unsure (1)..(545): unsure at all n locations
tcttgtttcacctttcaacacttaattagagacgacccactttccttgcagatctttttccagggaaaagtttggatgttttgtggtaagagttagatgttgagtgatagacggaaaggttgaggtggagctggattatatggatagtctttgttgcttcagctctgtcagtcaggtggtcggagggcgttcttcatgtaactctggcaaaggcaagagcagtcagtcctcagtcaagtatggctatagcctagttaaagggaaagcaaaccatccgatggaggactaccacgtagcaaaatttgtgcagttcaaagggcgagagcttgggctttttgctatatatgatggacacctgngtgacagtgtaccagcctatttacaaaagcatctgttttctaacatcttgaaggacgaggacttctggaatgatccattcatgtccatttctaatgcgtatgagacaacagatcaggcaattctttctcacagtcctgatttggggcgaggaggatccactgcagtgactgcaattctcttaaata

SEQ ID NO: 219535 - DNA, 585 bp, Glycine max
gagccgcgaaggcctcgaagtcaccgactcagactccgactacgaaaacgaagaagaaacagagcactacgaagacgcgaaaaccacccactccaccgagctcgatgacgtggacgcgaaactcaaagccttaaaactcaaataccaaacgccgtcttcctccgccaaaccgcttccccaaaacgccgttaagctctatctccacatcggcggcaacactcccaacgccaaatggatcctctccgacaaacacacctcctacgctttccacaaagacaccgacgaaaacgaaaacgacgatgtttggctcctcactgtaggttccaaggtccgcgctagggtttcctccgaaatgcaattgaagatgttcggcgaccagcgccgcgtcgatttcgtcgccgacggcgtctgggccctcaagttcccctccgatgacacctaccgccgattcgtcacggaatttcagagctgcatgttcgagaacgtgtacggaatcgagtgcacggaagacaacaagggtcaaatctacggtaaaagagtcatcggctgggtgaagccggaaagccgcgacgattccgtctggga

SEQ ID NO: 219536 - DNA, 564 bp, Glycine max
aaatattatgtgttccatttgggagaagcccctgatggtaacacaaccaattggataatgcaagagtatcgtctattagattctgattcctctagcagatcatctaaaagaagatcacaacctaaaccggaccataataaatgggtgatatgtcaagtttatgaacaggataacgatgatgatggtgatggtacagaactctcttgtttggatgaagttttcttgtcattggatgatcttgaagaaataagtttgccaaattagatgattatgcaagtgatctagttagctgcattttatatccaaataggatattagtttaagctaattgttgttatcattattattaatattgttatttactggttgtagttaaatgcattagcagtttttagctgccattgtaatcagtgaagtcgctatagctagatttctatatagcagcctttcaagtggggcactagatgaaattcgtggccaaacaatatgcagtgtgacgttatgctttcaaagatcccattcactactacaagcagaggtcaatcttggaaaattctacgctct

SEQ ID NO: 219537 - DNA, 543 bp, Glycine max
  unsure (1)..(543): unsure at all n locations
ttcccaaccactactactcactcactgcagatctcaattgcatcgctgtccatggctaccatcgttagcatcaaggcccgccagatcttcgacagtcgtggcaatccaactgtcgaggtggatttgacttgctccgatggtacttttgccagagctgctgttccaagtggtgcatccactgggatttatgaggcccttgaattgagagatggaggatctgactaccttggaaagggtgtatcaaaggctgttgacaatgtgaacaccgtcattggccctgctttgattggcaaggacccaactgagcagactgctattgacaacttaatggttcaacagcttgatggaactgttaacgaatggggttggtgcaagcaaaagctaggagcaaatgccatattggcagtgtctcttgcagtctgcaaagctggtgctagcgtcctgaaaattcctctttacaagcatattgctaatatcgcgggtaacaaaaagttggttttgcctgttcctgctttcaatgtcattaatggtnggatcacatgc

SEQ ID NO: 219538 - DNA, 534 bp, Glycine max
  unsure (1)..(534): unsure at all n locations
gcaaaaagctccaccaatggcgggttacagagccgacgacgactacgactacctcttcaaggtggtcctcatcggcgactccggcgtgggcaagtccaacctcctctcgcgcttcaccaagaacgagttcaacctggagtccaagtccaccattggcgtcgagttcgccacccgcaccttgaacgtcgattccaaagtcatcaaggcccagatctgggataccgcaggccaagaaaggtatcgtgcgatcaccagtgcttactatcgtggggcagttggtgcacttcttgtgtatgatgtcactcgccatgcaacatttgaaaatgttgacagatggctgaaagaattgcggaaccacacagacgccaacattgttgtgatgctagttggcaacaaatcagaccttcgtcacctcgtagcggtgtcaactgaagatgggaagtcctatgctgagaaagaatcactntacttcatggaaacctcagctctggaggctactaatgtagagaatgcatttgcttgaagttctgactc

SEQ ID NO: 219539 - DNA, 576 bp, Glycine max
  unsure (1)..(576): unsure at all n locations
cccatgtcaagaagttaatggtagcaaagcagcaatgttgttcattggcctctatctggtggctctgggggttggaggaatcaaagggtcactgccagcacatggtggtgagcaatttgatgaaaccaccccatctgggaggaagcagagatcaaccttcttcaactacttcgtcttctgcctatcatgcggtgcccttattgcagttacttttgtggtgtggattgaagacaacaaagggtggcaatggggttttgcaatatctactattagcatatttgtgtctatcccagtattcttggccggttcaccaacctacaagaacaagatcccttcaggaagcccacttacaaccattttaaaggttcttattgctgctttactgaatagctgcacctacaaaaacactagcagtgcagttgtgaatatgacttcaagcccttctaatccacactcaggtagaacagaatcacaacaagaaactgttaaagcaagcacaacaactgaaaccccaacaagcacctcaagtttctcacanagcagttacaaacaagccagggtatcatcactagaatg

SEQ ID NO: 219540 - DNA, 550 bp, Glycine max
  unsure (1)..(550): unsure at all n locations
agcatatgtctcaaaggcccacggttcctcactcctcttccatagcctgcggccttcactctcatctcctggtctccagtgagatgaaccctagctccaattggtccctttaatcaattacctcttaattagtaattacttaatctcaattagcctttcactctcccacacaacaacatcatgggcgtcaaaggttttgtcgaaggaggcatcgcttccatcattgcaggatgttccacacacccacttgatctcatcaaggtccgcatgcagcttcagggcgaaaacaatttgcccaaaccggttcaaaatctccgacccgcactcgccttccaaaccggttcgaccgtccacgtggcagcggctattccgcagacccgcgtgggtcccatcgcggttggggttcgcctcgtccagcaagaaggccttgcggccttgttctccggcgtctccgccactgtccntcgccagacgctctactccaccacccgtatgggcctctacgacgtcctcaagaccaagtggaccgacttcgtcaccggcaccatgc

SEQ ID NO: 219541 - DNA, 469 bp, Glycine max
cggctcgagcggctcgagaaacaaacaagcatgactcgagcctactctttcctcgtctctttggtgttcatcactatgaccccttcaacaccgcaggtggaagccttctcctaccacatcaactgcggtgcttccaccgactccaccgactccttcaacaccacctggctctccgaccgcttcttctccgccggctcctccgctctcgtctccgagcctctccatttccctctcccctccgagaaaaccctccgcttcttccctccctcctcctccggcaagagaaattgctacaccttcccttctctcccttccccctcccgctacctcctccgcacattcaccgtctacgacaactacgacgccaagtcccgccctccctccttcgacgtctctctctcctccaccgtcctcttcagctggcgctccccctgccggagtccaccgcccgcaatggcgcctactccga

SEQ ID NO: 219542 - DNA, 572 bp, Glycine max
  unsure (1)..(572): unsure at all n locations
cacaaacaaacgctgaatctctcgtcgttctttttatttgcggtttcttcttcttctcacgttctacctaacattttctaaaacatgtctggggaagaggaagaaaacgccgcacagctcaaaattggagacgagtttttgaaggcaaagtgcttaatgaactgtgaagtttcattgattcttgagcacaagtatgagcagcttcaacagacatccgatgatcccatgaatcaagtttctcaggtatttgaaaagtcactgcagtatgtgaagcgtttcagccgctataaaaatcctgatgctgttagacaagttcgagaaattctcgcaagatatcaattggctgagtttgagctgtgtgtccttggaaacctttgcccggaaactgtggaggaagctattgccatggttccatctatcaagtcaagaggacgggctcaggatgatgaagccatcgagaaaatgttaaatgacctgtcattgattaagaaatttgaataaatacgcagagtgtgtgacatagtgttgttggtaccgtataacatatcactagactgcancatacattcatg

SEQ ID NO: 219543 - DNA, 474 bp, Glycine max
aagggaacagaataattgcattcactaaataaaaaaaatggatacaaaagatctaggagaataacacaaggaatattaaacatccttaagagcactttgttgtcaacattccaagtgccctacctcttgatgctgcagctcctctcctttgtgcagggatcacagtgtatggtcctttgagatattttgggcttgacaaacctggcatgcatctgggtgtggttggacttggtggactaggccatctggctgtcaaatttgcaaaagcccttggcttgaaggtcactgtcatcagtacctctcctaaaaagaaaaatgaagccatacaacatcttggagctgatttttttgtggtcagtagagaccaagatcaaatgcaggctgcaatgtgcaccttggctggtataattgatactgtctctgcagtccaccctctcatgcacttgattgatctattgaagtctcatgggaaac

SEQ ID NO: 219544 - DNA, 494 bp, Glycine max
caaatatcatcacaatattcatcatctttaaaaaaatgaggaggggcagaaagtgaagagacattaacattacaaccctttttttggataaaattacaagacaaactaagaaggttcagttccactacagcctagtagcaggacttgccactaattgacattttaaggttggattcaaaacccatcaaataaaaatgtaggaagaagaaaggtcaaggactactacatcactgttataccacccaaacccttggccttcctcctacccctttttttgtcgtttccttttaatcaacatttcttcatttaggtttttgcggccataatgtgatgatcacttggccatcatcaccttaacgaactcctggtagtttatttggccatcgccatcaacatcggcctcgcgaatcatctcatcaacctcttcatcggggagcttctccccgaggttggtcatcacatggcggagctcagcagcagagatgaaccaattc

SEQ ID NO: 219545 - DNA, 480 bp, Glycine max
aagaccacactcttccttggatttcccacttgtatatgtgagacatactttcagaaattacaccctacataaccaacatggacttagtagttttctgatcctatacggaagaaaatcttaccagaaccaaatgataaagttcacaacataaatatttatacaaactccccttagtccagtatgacatcacaaccacaaacaggcatatttttgtatttaatggctggatggatatatagcagctacaggtgagaccatggaatctactccacacacatttcgacctctgcagatctcgttatattcattctcttcccagctttcgccccatgaattcttaatgatccagataggattgttcttaaaacgaaagggagcatatgcacctttaccataaccaacttgaataaccccatgatccaaatgctttccacagatgtatgggcatgaaacgccaccaacatatgtttgcataaaaac

SEQ ID NO: 219546 - DNA, 491 bp, Glycine max
acgctcaaagaaaactgtgttcgtccggactaaggaacattactttactgaatcaaaggtagagagaagagcaacaaagaaaatcatacaaaaacagaactcatatttcacatttgatcagaagcaacacaagatccatatctctataaaaactcacaattacatacaccacacaaaacacaaaattaaccattaaccaaccacatagaactgtttgttctttttttttttcccctcaaaggaaaaaacgaaaacaaaaaacaaaaactttcttcccaactccccctagtgttgtgcagcatactgattaataagcgagagagcattgctagtaacctgagcaacattgaccattctagccctaatcgcctccttaatcttcccattcagcgcctttccggcgaacccatcgtcgcaagtgcttttattggtcaaagccgaactcacccacgtctcaacgtttgttgatgtgccacgtgaagtccttaccc

SEQ ID NO: 219547 - DNA, 625 bp, Glycine max
  unsure (1)..(625): unsure at all n locations
ggaaggatgagacccttggacgagaaggagacgagcgcagtgttcgagaagctgttcaagttcgtcggaaacaacctgaagaacatcgtggagaacccctcgcacgaaggtcccgattcgaaccccgggcgctactgcttccggctccacaagaacaagatcttctacgccagcgagtccctcgtgaagcgcgccaccaacgtcgcccgccccaacctggtctccctcggcacctgcatcgggaaatacacccacggcggcagcttccacctcaccgtccaggccctcaacttgctcgccgccaacgccaagcacaaggtctggctcaagccccagtccgagatgtccttcttgtacggcaaccatgtcttgaagggcgctctcgggaaactctccgaaaacatcgctgccggtgacggnngttgtcgtcttctccatggccgacgtgccgttgggtttctggtgtcgccgccaagtccacgctggattgtaggaagctggatcccaacgggattgttgttctgcaccaggccgatgtgggagagtacttgaggatggaagattgagcttgatgcatnttcctagtctggtaatgggtttgatccatcttatcaaatacattatc

SEQ ID NO: 219548 - DNA, 523 bp, Glycine max
  unsure (1)..(523): unsure at all n locations
ccataattggcctcgttcttggaattaccaaaattgcagaaacgggaactttcaagggtagcctcactggaataagcattggaactgtgacggaggcccaaaaagtttggggtgttttccaagctcttggtaacatagccttcgcctattcatattctttcgttctcctagaaattcaggataccatcaaatctccaccatctgaagtaaaaacaatgaagaaggctgcaaagttaagtattgcagtgaccacaacattttatatgctttgtggctgcgtaggctatgctgcttttggagattcagcacctgggaacctgcttgctggatttggtttccataaactatattggcttgtggatattgctaatgctgctattgtaattcaccttgtgggggcataccaagtgtatgctcaacccctctttgcctttgtagagaaggagacagcaacaagatggcccanaattgacaaggaattccaaatttctattcccggttngcaatcctacaatcagaacat

SEQ ID NO: 219549 - DNA, 566 bp, Glycine max
gaacaatggcagataactccattaccttattttctccatacaagatggggaaattcaacctctctcatagggtggtattggctcccatgaccagatgcagagccctcaatgggattccattgccatcgcatgctcaatactatactcaaagatcaacactaggtggattcctcatcactgaaggcaccttgatctctcccacttcttctggatttcctcatgttcccgggatatattcagatgaacaagtagaggcatggagaaatgtagtggacgccgtgcatgccaaaggcagcattatcttctgtcaactctggcatgttggccgtgcttcacatccagtgtatcagcctggtggggctgcacccatttcgtccaccagcaaacccatatcagacaagtggaaaattctgatgcccgatggctcccatggcttctacccagagcctcatgctcttaccacctctgagatatctgaaatagtgcaccattatcgccaagcagctattaatgcaattcgagcaggttttgatggaatcgagattcatggagcacatgggtatctc

SEQ ID NO: 219550 - DNA, 508 bp, Glycine max
gaaacataattgacatcaacacgaataaaaccgcacaaccattgaatagtgggaaagtaacaaaacgctttacttgaagcggacaatttcccatttatattgtatcactatcgtctaaataaatgactccataaagcacatttacagcagcacaaaatgcacagccactgccttttattaatccataaatcacttcatacatagcactgcattactaactatgacgttcacacttcaatggctgaccaacttaagagagtttgccttctcttgcagagaatccaggaggctgtcaaagctcttcttaaacgagtccactccttcaagttcaagctgggaaccaacaaagctccagtcaatacccaatttctggagagcattgtatattccttcagcttcagatgcatttgagtctattgtcctggatacgggaccatgatcgataaatgcttgaaaggcttggtctggcattgttgatacagtgtcgggtccaataagaggagcaaca

SEQ ID NO: 219551 - DNA, 380 bp, Glycine max
gggacgacaaaagtcataaacattttatttgggaacaaaatgcaaaaaacaataactgactgaccctgtttttatcctgcattgcatccaggacaaaactaaaaacagggaaaacgggtttttattaaaaaaaaaattgaagaccttaacgaccccgacgttcaacaagaagaagaagaaccccccagccggcaacaaaaacaaagggaatgatgacttgggcgagactttttgaattgaagcccattctttaataaaaccactgctcccccaaattttgagcagaaggaacagcagggggaacattgttcgccccaaaggaagacagagaccgcatataaggctttttgtcaaaggtgcgagcaaggccaacaaccaaa

SEQ ID NO: 219552 - DNA, 405 bp, Glycine max
ggggcataggggtggggctgaggctcttccgaaaggcattgcgatctcatttcctttggcttcaggataggcctaataagaaaacaaataattccaattcatatatgaacatttttgcctccttatttcttgaaaatgtggaattggaattccccgaggaattccgatctcatttcctttggcttcaggataggcctaataagaaaacaaataattccaattcatatatgaacatttttgcctccttatttcttgaaaatgtggaattggaattccccgaggaattccgatctcatttcctttggcttcaggataggcctaataagaaaacaaataattccaattcatatatgaacatttttgcctccttatttcttgaaaatgtggaattggaattccccgagg

SEQ ID NO: 219553 - DNA, 299 bp, Glycine max
ccaggctccaactgaagacacccacctgattttgaattaagttaagggatgtattaagtatatgctaaataagaggtgtatctacaaccattgactttgtcatgctcaaaaatttagtttaatttacaaattatggcaagggttacacctggctagcttccgcgtttagatcatttgtttatagtgctatggccacgacaagagtgttatgggtgcatgaatgtaaaacgaaaaaaaaaaaaattgtgtttattttgtacttcaagttatgaataaaagaatttcactgtttgtttgtt

SEQ ID NO: 219554 - DNA, 554 bp, Glycine max
gggttggtgaagctgccaagatgttaggtgagatgatccagataggcttagttcctgatgctgtttgttacaatgaaattattaaaggtctctgcgatgttggtcttttggatcgagcacgatctctccaacttgagatttctgagcatcaagggtttcataatgtttgcacacataccattatcatctgtgacctgtgtaagagaggaatggctgagaaggcacaggaaatatttaataagatggagaagcttggatgttttccttccatagtgaccttcaatgctcttatggatggactgtgcaaggctggtaaacttgaggaggcacaccttttattgtacaagatggagattgggagaagtccttcgttattctttcggctttctcagggttctgatcaggttttagatagtgttgctctccacaaaaaggtggagcaaatgtgtgaggctggacaactttggatgcataccagcttttcattcaacttgcttgtagtggggttatgcctgacatttggacgtacaatgttctaataaatggcttttgca

SEQ ID NO: 219555 - DNA, 453 bp, Glycine max
ggggcaataacaagatataacacattgataagcagagcattgccctgaaattaagcatcttacaaacatcactgtgcacaaatttttatttcttcaaactacatccccagttcataatttattgtgcataaaatcaaattcaaggacacctcctacagatagaattattcaaagagatacacttgatcatatcctttcccagccgttccaccaaaagtaggtttgtaattgtagatgagattatctcgcactttttgagcatcaggtgtgtttgtggatttcctagcttcacttatgaaaaagtttgctgtggactgagtaacccgaattgcatcctctgtgtgaggggctttcaaagatgtagcccattcaaaagcatttttctctgggtgccataggttgacagtcacgggatatttcctaccacgtgctgtggaaacgaaagtctttcca

SEQ ID NO: 219556 - DNA, 512 bp, Glycine max
aatagtaacgaatatataatcttcatagacaataaccaggataactgagaaaaccattctgtcccatgaacgtctaaacagtaagaaaaattctcaaaagttgacagacgacaacaaaattatagaaaatgaaacaaaaatccttgtgcctacaaatcagctgggacttctactgagcgttttatcacctgaatctcatatgttgcttggatacatgaatactcttactcgggctcccattgatttgggtggaaggttcgacttgaattttgcacggacaataccactgttaccatgaggccttgtaaccttgccccatatgcagcggtaatggcttccattcttcttcaccttagccttgtagatataggccattttcttgccagcataccatgctacttcttctttggcattcacaccctcaatttggatcagggatgtatttggatactggtttgacttggaccttttgtaccaaggattgtacccctcacgtagagtctgacacgttc

SEQ ID NO: 219557 - DNA, 524 bp, Glycine max
ggggagaaacatctatgggggagtttatcaaaagcaagactcgactagacataaaatgttagttagagatctacacttatgacacatgcaattgttgcactatattgcaggagcaacatgggtgaccaacttgatgggcaattctagttccccagactcaactccacgaagccttaaccaaacattctgcaccacctcaccattcacacagttgatactggtttcacggacaagacagttttcaccatcagggatgaccttccttaatggcgtctcaccagaggacactcttaagatgtctcttaatctggctgcaaagactattggttgaaggttcaggaaagcattccccatcttgtcatcagccttcaaaagaactttatcaaacacttccaaattcagaactcccaagggttctgtcagagtgaaattcagctcctcattcaaacaggattcaagcagctattaattaccttggtctttgcagcctgattccctagcttgagcacaacataaggatcact

SEQ ID NO: 219558 - DNA, 528 bp, Glycine max
aaatactagaaaaaacataatattataaaaactaaagtactgagaaaataacataaccgatgaaagcacaaagctacaacggagcaaagaaaccaaaacctttgaacatacaagaaggattcacattcacactttttaacttaagcaacacattaacctatgatcttccgctcctttttatcacacacatagcaaaacgcaaagtaaccaaccaaaacgacagagaaaccattactattcccatttggcggttataactataagttattagcgaaaccgttaaccagcgccaaggcattgctggtgaacttcttgaccctagtgacgcgatcgcatacgctcgtcttcacgggaccttcctctacaccctcgaatccgtcagtacacgtttcctcgtcagtgagcgcggcgctcatccacgtcagcacgttgctgagcccaaaccggacggagctggagtcagagttttccgctccggctggtttgagccggcgcatctgcttaagagagccacggatctcgttcaca

SEQ ID NO: 219559 - DNA, 533 bp, Glycine max
actaaaagaaattccataaagtaattttcccgatgatcccagaaatatttcactctggaagaaaatatttgagcagaggataggcaaaacgagtgttacaaatgtcaaaccaacacagcagttctaagtgatacagtaattaaccagaaaactcaactaagaaaaaattgattcaaatagattattcaacaattggttattaacccttaaatctgcttcgtgcctttataattttcttccaacagtcattcaccacgcgtatggcaacttaaaaacatattggaaatgaagaattgtgatctcaaccaacaatcaaaattctactccatgactgcaactcctccagcagcttttattttttctattatttcatttgcctcctcttttgtgactccttgttttagcacaactggaaccttttaacaagatctttggcctctttcaatcctaggttggtaaatgctcttacctccttaatcaccttgatctttgcagcagcatcaaatttctccaacttcacatcaaaagctgtt

SEQ ID NO: 219560 - DNA, 564 bp, Glycine max
  unsure (1)..(564): unsure at all n locations
gagaaacatggcttccttaagctccttagtgctgctccttgcagctctaattctatcccctcaagttcttgcaaactatgagaatcccccagtgtacaagcctcccactgagaaaccaccagtttataagcccccagttgagatgcctcctgtttacaaacctccagttgaaaaccccccaatttataagcctccagtagagaagccaccagtgtacaagcccccagttgagaaacccccagtgtacaagcccccagttgaaaaaccaccagtgtacaagcccccagttgagaaaccaccagtgtacaagcccccagttgaaaaacccccagtttacaagcccccagttgaaaaacccccagtgtacaagcccccagttgaaaaaccaccagtgtacaagcccccagttgagaagcccccagtttacaagcccccagttgagaagccaccagtttacaagccctcagttgagaagccaccagtatacaagccaccagttgagaagcctccagtgtacaagccaccagtagagaagcctncagtttacaagccaccagtagagaa

SEQ ID NO: 219561 - DNA, 511 bp, Glycine max
  unsure (1)..(511): unsure at all n locations
tatacttgttccttttgaaggttagaagtgctacaatacaaacaatggcagctactcaggaagatgtgaagcttttgggtattgtgggaagcccatttgtgtgcagggtccagattgcccttaagttgaagggagttgaatacaaatttttggaagaaaatttgggcaacaagagtgatttgcttctcaaatacaaccctgttcacaagaaggttccagtgtttgttcacaatgagaagcccatagcagagtctcttgtgattgttgaatacattgatgagacatggaagaacaaccccatcttaccttctgatccttaccaaagagccttggctcgtttctggtccaaattcattgatgataagattgtgggtgctgtatggaaatctgttttcacggttgatgagaaagagcgtgagaagaatgttgaagaaacatatgangctcttcagtttcttgagaatgagctgaaggacaagaagttctttggaggagaggaatctgggttggt

SEQ ID NO: 219562 - DNA, 534 bp, Glycine max
ctcgatcaactcaacacaaaccaaaactcaagctaaaattctcactctctctctcatctcgagatcatagtatcatattcaatatcatttcataccaaacacatggctttggaagctctcaactcaccaacaacaaccgctccatcttttccctttgacgacccaactattccatgggcgaaacgaaaacgttcaaagcgttctcgcgaccatccttctgaagaagagtacctcgccctctgcctcatcatgctcgctcgcggcggcaccaccaccgtcaacaaccgccacgtcagccctccaccgccacagccacagccacagccgacaccagatccttccaccaagctcagttacaaatgctccgtttgcgacaagagcttcccctcttaccaagcgctcggtggacacaaggccagtcaccggaaactcgccgccgccgccgaagaccaaccccccagcaccaccacttcctccgccgccgccaccagctccgccttcggaggtaaggcccatgagtgctccatttgccac

SEQ ID NO: 219563 - DNA, 524 bp, Glycine max
gaacacaagcgtataattttactgaaattgaatcaacatttcatttccaaattttggcacacaatcaaataaaattgttgagagctgaattttccacccaaaaataattttaaaaaccagaaacaaaacgattagataaagaactaattgaaatgagtttcacaacagaacaggggaatctactaaaagcaagttccactagaaataacagttcagactgttgaaggccccctgacaagaacgaacaccatatcacaacaagcaccagcaactcaatgtgcacgagttctactactttctgcatttctaactggattgaagtatggatgggccatggcttcttttgctgtgggacgttcttggtgatcatagcgtaataacttgtcaacaaagtcaacagcctcaggaacagccatgtgatgattttctacattaatgaactttgcccatggcttgcggctatgcctcccgataagtgctgcaagatgtgggtccaactctattcgatacttatctaaatatgc

SEQ ID NO: 219564 - DNA, 517 bp, Glycine max
gtaaatcacagtcgaattttttttcttataaataaaataagttggctgttttgcagcaattcttctattacaacatattaggtgtaattacaagtcaaataaggaattgagccaataatataaccaaaccaggtgttcctttataaattaaattcatctgtacacgggcatagaaaaaaatacataaaaattatttgttcagaacttggagagtagaccaaattgagtttcgggatatacacgagacgagattatattataacaattcttctcaccttagcagtcgatgtcgtgcacacttgttttccaaagacctccaagaaagacaaatttctttggctagagatcagacttgaacaaatgttcgtgttcttcttttagctctctctccaatcgtgtatttccatagcgagatttctggtctatccaaccaataatatcggagaatacaatctgcaaattttgtggtggctctccatacaatagaccgtgccacatttctggatacgactttagt

SEQ ID NO: 219565 - DNA, 609 bp, Glycine max
tttttttttttttttttttttttttttttttttttttttttttttttttttgggttttttttttttttttttttattttttctattctaattttttttttaatattttaattttttaattttaaaaaactcacatatctctcccaccccaaaaaaacaaaaaaaaaaaaaaaaaccctccccccccaaaaaaaaaaaaaaaaaaaaccatctcccccccccccacgggggggggaaaaaaaaaacacaaaattttaaaaaaaaaaaaaaggggcaaaaaaacccctcccccacaaaataataccctcctctgggagaaaatacaccccaaaaaatctaaaaaaaaaaaatttggggggggaaaaaaaaaaaaaaaaagagcgccccccccccccaaaaaaaaaaatcccccccgccttcaaaaaaaaaaaaaccccgataaaactaaaaaaaaattcaaacccctcaaaaaaaaaaacccccacccgggggttcggaggggggaaaaaaaaaaaataaccctattctcctccacaacaaaaaaaaaaaaaaaaagtggttcaaaaaacccccccacaacaccacaaaaaaattttttggggggccccac

SEQ ID NO: 219566 - DNA, 362 bp, Glycine max
gggttaccgttcttgggggtatcaacacggcactggggcgggattttttatccatttctccgggaaaaaaaatttccccggaaaaaattttaaattcaatcttttttttttttttttccaatgggaccaatccccttactcgactttttatatttaaagggattagggtttttacttcaacgatactattgttccgccccattatggaaaaaaattctggtaaaatatgcacttcctcgggaatgaaaaaaaattgatctactttaattggggattttgccttaaattctttaactccttggtactcaattaaaaaatccttttttttaaaaagggaatttatacctataggcctatattta

SEQ ID NO: 219567 - DNA, 561 bp, Glycine max
cttctttctctctcccttagtcaaagggactcgttgttcttctcccaggttatttagaaaagcaaaatggtgaagatttgctgcattggtgctggatatgtggggggtcctactatggcagtcattgcacttaagtgcccatccattgaagttgctgttgttgatatctctaaatcccgcattgcagcctggaacagtgaccagcttcctatctatgaacctggccttgatggtgttgtgaagcaatgccgtggcaagaacctcttcttcagcactgatgttgaaaagcatgtctttgaggctgacatagtgtttgtctctgtcaacaccccaaccaaaactcagggtcttggagctggtaaagcagcagatttgacatattgggagagcgcagctcgcatgattgctgatgtttcgaagtctgacaagatcgttgtagagaaatccacagtcccggttaaaacagctgaggcaatagagaagattctgacccacaatagcaagggaatcagattccagattttatcaaaccctgaattccttgctgagggaactgcaatc

SEQ ID NO: 219568 - DNA, 486 bp, Glycine max
gtcgctccgcaccagtttcaccgcacgaatatcttgttgtttggagcgatccgagaaaaactctgtaaacatgttggtttaccaggacctccttacaggtgatgagcttctctctgactccttccgttacaaggaaattgagaatggaatgctgtgggaagttgaggggaagtgggttgttaaaggagcagttgatgtagacattggtgcaaacccttctgctgagggtggaggagaagatgagggagttgatgatgcagctgttaaggttgttgacattgttgacacattcagacttcaggagcaacccgcattcgataagaagcagtttgttaccttcatgaagaggtttatcaagaatttgactcccaagctcgatgcagagcaacaggagttgtttaagaagcacatcgagggagcaactaaatacctgctctctaagattaaagattttcaattttctgttggtgagagcatgggtgatga

SEQ ID NO: 219569 - DNA, 595 bp, Glycine max
acaaacgaaaactcaatttaatatttgcctctcatcaataaacaactgaaacagataaatagcttgactcaatcaaaagtacttactgcccaaattatatatataataaagaagtacaataaggcagaggcataggcacaacacccccttgaagctaacactaacaaacaccattcatcttgtcattggtcttcttcctctccaacacaaacttcttccaaatggcagtgatttccctctgagtctccataggattcttcttagcaaccactaccttgccattttcttctgcactgagtgtcacagtggtgctgctgatgacccttgcaggaagtgaatcaagctcatgcagcaccttctccacatcggacacgagacgctccgcgagggtccttgagaagtcctccctgatgacaacacgaagcactgtgacatgttgagcatctgggggcatggtgtatgctggcactatccacccaaagcgccttaaaaagtctgagatttggaattcgtcaaagtgggtgtggtctttcagtgtgaaagccaccaaaggcacaccattgtctttggacacaaatgaaaatcggcctgtttt

SEQ ID NO: 219570 - DNA, 524 bp, Glycine max
cagaaggaaaaaaaattgtattaggatgtcttgggaaataatttcttggacaataatgctacagggtttggttgctaaaatcgtctgagatatcaaacactaaatatgtttagacccgcacaaacggctaaaaaataagatgatcgagatcatcacatgtctactctagcgctcctgtggctcattactgctgagcgcactgcactctctgagcaccaccatgcatatcctcatcctcatcatatgcctcctgctgagcttgttgcctcctccttggctcttcctccatgtgcacatcatggagtgtggtctcctcacactcatccagctccatgtctgacaactgtgatgttggctttgatggcagaacagcctccaaagccttcacctgatcaagactcagggtatcaggaaattccactgagaaatgaatgtaaagctttccctttaggaagcgcctctggtagttaggcattccctcatcatttattgccttgaatgactcaggcttaacaaccttccca

SEQ ID NO: 219571 - DNA, 477 bp, Glycine max
gttgcgttaattcatttactataatacaaaggaggatcggcatagagaatataggaggactgaaggagaagaaaagtaacacctcagtcctccatttgtatttgacaatattgcttaaggggcaactatgccagcagaagaaagaattattcacctatccctaaaaggtaaagcgaagataatctccattattcttcatagttcttgggttgtatcgatagttgtactcttccttcacattgaagagaacactgataaaactttttccaagtcaactttggctaccaaacatttaataattgtactcacgctcattaagtcatgctttagtaccaaaaaatgattgctggaacttggtttttgttggagtactatgcttaactgtagttgtgctcccaaaggcaaaacttattaggctttttattttctacaggctttaatctttgaaaagatccaacaagtgtcttatcaacaatt

SEQ ID NO: 219572 - DNA, 550 bp, Glycine max
gatcctgcctgcacagggaatatgcatattgattactgatgatttatgcatataatctttggaagctgttagtaaagcagaaacctaatgataatcatacacaaaaatagctatggcctatagcaacaagtgcgaacgaggaaagcaaggggctatatgcctttagtattcacattgatggaggctatagaccccaagtatgtatatgtcaagggatgacatttcccaacaagctgtttgatgaaggtgagctgtgtccacttgaccaaggaattggatcatgcactgatacaggggagctgtccttcacctccatagattgcaaaaagctctccgtcttctgcggaacaatcaatctctcactcccttggccttgccgagcttttttgataccacccagtgacttctcacttccatgacgaggtgatgaactagtggacccaatcggtgaagccgtgagagtttcctccatagatgcccatccactgcgtttaatgtgttctagctcttctgctacttccatcataataggcctcatgtcactatgaaa

SEQ ID NO: 219573 - DNA, 507 bp, Glycine max
  unsure (1)..(507): unsure at all n locations
atctatctcacttcttagttctttgtggctctttccatgatggcctctcctacatctccaagagttctcttcttgagtctctttgtaactctttccatgattttacatttgagttcagccaggaagttgtctgagtcagacccccaattgcagttccaataccacagaggccctctcctcacaggcaaaatctccgtaaacctaatttggtacggtaagttcaaaccttctcagaaagccattgttgctgatttcatcacctctctctcctcttccaaacccctcaccgcccaaccatccgttgccacgtggtggaaagccaccgacaaatactacaaaaactcgttccccaaacttgcactctccctagggtcccaaatcgttgatgaaaactactctctaggaaaatcactcaccaccaaccaaatcttaaaactcgcgtccaagggtccacagagaanacgccatcacatcgttctaacttctgctgaagtggcagtggagggg

SEQ ID NO: 219574 - DNA, 414 bp, Glycine max
cttcccttctcttcacatctcatctaaatctcaatctctgtctctgtctctgtccgcctcagctttcactccaaaccctaaccaaccgatctctttcgcctatcccggaaaccttccgaatcgtttaattgacgctacgccgtggaatctgggcggaacaaatccacgatggcggcctccaccaccagccaggtctacatccaggtaatcgacgatgtcatgaacaaggtccgcgacgagtttgtcaacaacggtggtcccggcgacgaagttctcaaggagcttcaatctatatgggaatcgaagatgatgcaagctggtgccattgttggtcccatagaaaggtccggggcgcctaagccaacgcccggtggtccaattactcccgttcatgaatcttaacatgccttatga

SEQ ID NO: 219575 - DNA, 486 bp, Glycine max
cgagcagtttcagacacagagagaggggtttgggattggagggattgacgctgcgtctcttcctcttctctttcgatccatccctcattcctaatcctccaatccaaccacctcagcctcacactcacatatacacatatctgaacgcgtatcgtccctcctatggcttcaaagcgcatcctcaaggagctcaaggacttgcagaaagacccaccaacttcttgcagcgctggtccagtagctgaggacatgttccattggcaagcaccaataatgggtcctgctgatagtccttatgctggaggtgtattcctagtcactattcacttccctccggattatcctttcaagcctcctaaggttgcctttaggactaaggtggttcacccgaacatcaatagcaatggtagcatttgtcttgatatcctgaaggagcagtggagccctgcactcaccatctctaaggaactgctttctatctgctca

SEQ ID NO: 219576 - DNA, 517 bp, Glycine max
aacttaaactatgtattaaattaaataaaatcaacaacactaagtaaatgggatacaatacaatacaaccttacaaatacaaacaatcaatgcctaattactagtaattcctaatattatcggttggttgcctgactagtgtgactactgcctagcactagcactaactaaatatcatacaaaaaccgaaccggttcaaaccgggtttgtattcctaaactgcaaatttttccctagactctaataaaatatcagcaggtgggaaccatttgagtctgggccaagccggtatccggttcagccacctctttcctcttccgaatctctaacactttacggtgactattggagtgaatatcgctgcagaaggtgggactacacgccggtctatactccgaaaataaccgacctgacttgtaccgaaccccgcacgcgttgcaaagggttttggcgcccagtgggccggtcctccactgcggcgtcttctgcacctggcagtgactgcaccgccgctgaa

SEQ ID NO: 219577 - DNA, 550 bp, Glycine max
  unsure (1)..(550): unsure at all n locations
agagcagaaaaggcatttatatatattacataacttatataagtgatttctatgtcttgattatttggtagcttacatcatccccaaatgcaggcaaaattttgaatagcctataaaagcgtgatgcctatgtatgtcttaatcacatgaataatcatcatcccaaaaatgagaatcaaaagaaggaaattagatgaaaagaaaacatgtaatgctacaaaatgaagttgttttactttactgcttcacaccttaggacgtgcttcgatcccttgaagcagcagataataatttataagaaaatgaaaatgcaatggttatcctattctgtgtccctaaagctttcactagtcagccacattttcttctggatgataaaaacaacttcgtcaccatcttggacagagtcagaactggaatcaattgcttcccagtgcaaagcacttaggtacttctttataaaatcaatcactggctgtttatctcggatgatcacganaccagtaggtcgaagcatgcgatccatctcaattaatagatcctctggact

SEQ ID NO: 219578 - DNA, 535 bp, Glycine max
ggctcaaatacttgaattatcaggtcaaacaacaatacaatgcttcaaatgcaaacacaacacttcaattttacttaagtgtacacatgtagaattgtagatggatcaaacaagttgtgtcattctattatgacaaactagaacacaagtttgctaacgcatcagaaaaataaatttatttgaaaaaataaatcaattgtgacaaattaattattatgacaacaagatggtgatttggtagtaatacaaagaaatggtagacgaatttgtaaagaatgggaccaagttggtccctacatagctaggttgttgataaacatctttgttatgagggatttgattctcatagagatcacctggttgtcctgcctgcagctttgccacaaagaagagcattcttgggaattggatattcatccctaatggatccaactggtgaatacactctcaaatagaattgttgtccaaggtattggcgtgcccaaaattcactcctcatgttccacatacccacattatctaatgccatgtaaat

SEQ ID NO: 219579 - DNA, 504 bp, Glycine max
gcggcacccaccatgaaagccggcaagttgccaccaccaaacaaagcatcccaaggaccacttaatgtagacaccaccatctgtggcaccacaattgcaagattgaggactcccaaagataaaccttggcctgctcctgaagcgctgcagtatattgatgctagagcaaatggaacactgaaagtaatcgcaagaggaactccgagaaccccaaagaaaaccatggacccaaccaccaccccttcggaggggtgacccacggcggcgggattcatcttgcgctggtgctccgccaccttggtgatcaccaccgtcattccgaacccaattgccagaataaagttcacaatcgcccacagcctcttcactcccccaaccatcttccccaacggctccaccgccagcgacatgaagcccaaaacgacggcgtttaccatcagccctagcgacccaacgcgcactccattggcgtacgcgttctcccccacttgaccaccgtacacc

SEQ ID NO: 219580 - DNA, 500 bp, Glycine max
agaaaagaccatttagcatatttatataaaatctaaacatattcaagtcaattatacagcatgcacaaaaggaggcaatgtgacaatgtacacactttctgaataaaccaactggttgaatttaacccccaaaccttatcttgccatttcatgtggggggaacattttctgaataaaatccaggaagcgacgcgagtagaatgttgggtccaccgccgagatagataatgaatcaaactgaatagatttgtatgcatgttcaatcttcttagtcatgttgtactcttgcaatatgtcaattataccaaggtaaagtacaacatcgtaagcctcatggaacatttgaacttcctcttttccaggaatctgctctgccctagcaggcatgttcacacctagctggatttgtagtcttgctgtaccgggtagaggtagatccaccttctcatcctcagcagcttgaaatctgctacccctaatgtgtgaccctacaacaacac

SEQ ID NO: 219581 - DNA, 521 bp, Glycine max
aagaaaatcctcaattttctgagcagccaaacactctctctctgtctctcgaaaattctcagtttgcagagaaaatctgaatcatgtcgtggcaagcgtatgtcgacgatcaccttctgtgtgacatcgaaggtaaccacctcactcacgctgctatcatcggccaagacggcagcgtttgggctcagagtaccgacttccctcagttcaaacctgaggagataactgccatcatgaatgactttaatgagcctggatcacttgctccaactggattgtatctcggtggcaccaaatatatggtcatccagggtgaacccggtgctgtcattcgagggaagaagggtcctggtggtgttactgtgaagaagaccggtgcggccttgatcattggcatttatgatgaaccaatgactccaggtcaatgcaacatggtcagttgaaaggcttggtgattatctcatcgaacagggtctctaatctctgcttaatgtcttggtatcgtgcatatttcattggct

SEQ ID NO: 219582 - DNA, 355 bp, Glycine max
  unsure (1)..(355): unsure at all n locations
tttnttttttttttttttttttttttttttttttttttttttttttttttttttttttgtggtttttttttttttttttttttgttttttttttttttttttttttttttttccccggaaaaaccccccgggggaaccattggtattttttttctcccccgggtaaaaaccccccccccccggggggaaaaaaaccgggaaaaaaaaaatcttgtaaaaaaagaaaaaggccttttctagggggggggaaccagcccaaaaattttgtttaaaaaaaaaaacacccccggcccccccccggtttttccaaaaaaaaccaaaaaatccgggggacccccccaaaagggtccggggg

SEQ ID NO: 219583 - DNA, 484 bp, Glycine max
ggagggaaaatgtctgctatcagaatcaataaagcccgagtacatctgcaaggatataagaatccaaaaaactccatcccctacacagaagaggcaacaaaaaagagcttaatgctcgtaacagggtaacaacactggttccggaaaccgatttattcatacttctcaatttttgcacgagcaagacactaaatcgcagcttgaccagcacataatgttagaaccaccttaattaaaaagacttcttggcaacgattacaagcaggtcaatgacacgtgaactgtatccccactcgttgtcataccaagagacaagcttcacaaaattcttattcaatgcaattccagcctttgcatcaaaaatacttgatctgttatcaccaacaaagtcggtggagaccacatcatcttcagtgtaaccaagaattcccttcaacttgccctctgattcctccttgatagcatttttaatttcatcatatga

SEQ ID NO: 219584 - DNA, 482 bp, Glycine max
cccactaaggaataattattttaaaaaaagtcttcacacaacaaaggagtaaggtaaaagatttgagctcttctacccctaatatttaagacttttgcccaaaagaacatcacgaaccatgttgtccaaattagcaaatgaagatccaacagagcgaaaagcagcactttctgccaattccttccattgcaaagcttttttcttcatctttttacccttttccccatccatcaactccctcacaagggtctctattttttccctctcaacatcttcaatctccaacccaatcccccaatccttgcaacaaaaccgacaattggtctgttgctctgcaaagaaaggccaacaaatcattggaacacctccacacatactttccaacgttgaattccaaccactgtgtgtcaaaaatcccccaactgaagggtgagccaacacttgctcctgtgagcaccaactaaacaataggcctctatttt

SEQ ID NO: 219585 - DNA, 402 bp, Glycine max
aatatggttcaaaacaatttatataaaagtattcttagtaccacaaattacgtctgataattaattagatgaaaaaagaaagtctcaagtttcttcaaacataacatcctcaaaacatcctagtgccagaacacaatattggtccgtagttgacaactgctcttttagcgatacttgatgaagccaatttccttggcattgctacggaagcactgcctgcagcacataaggccatacttcctgatcagtccatgtggattcccacacacacggcaagtgcgagaaccaggaccgtagttttttgggtgagagttccaaacgttggagtgtcccattgctacgccgcagaagaggttccgatccaaaaacgcagtcgctgaactcgagccgaatcggctcgag

SEQ ID NO: 219586 - DNA, 486 bp, Glycine max
  unsure (1)..(486): unsure at all n locations
gtgggacaattgattacggcgagttccttgctgcaacgttgcaccgcaacaaaattgaaagagaagataatctatttgcagccttttcttactttgataaagatggaagtggctatattactcaggaagaacttcaacaggcttgtgatgagtttggcataaaagatgtccgtttggaagagataatcaaggaaattgatgaagataatgatggacgcatagattacaatgagtttgtggctatgatgcagaaaggaaatcttccagcggttggtaagaagggcctagaaaatagcttcagcgttaagttcagggaagcattaaaattgtagttttcattgtcatcattgagttttttttttttttggtgctctttattaccacacatccctccttttcactttgaaggttcaagattttattcatagtgcaaaagtgtttgcatggngatatttaggggggccttttcatctctgcagttatttt

SEQ ID NO: 219587 - DNA, 445 bp, Glycine max
atttaaacctcagggcgtggcaagtttcaacctttttcgagcacccattaacattaacatggccattccctacccccatttcatcgccaccgagaaagccgccatggacgccggcctcctccacccctcctccccctcctgcgtcatcctcacccaagacgacctcaagaaaatcgccgcctacaaggccgtcgagtacgtcgagtccggcatggtcctcggcctcggcaccggctccactgccaagcacgccgtcgaccgcatcggcgagctcctccgccaaggaaaactcaaagacatcgtcggaatccccacctccaccaaaacccacgaccaggccctctccctcggcatccccctctccgatctcgactcccaaccccaccgtcgatctcgccatcgacggcgccgacgagggtcgatcccttcctcaacctcgtcaagg

SEQ ID NO: 219588 - DNA, 468 bp, Glycine max
ggcggaatcaaggattgcattgataaagctatatctggaaggggacatgatgaggagattctgcagtttctgaaaactgcgatgaattgtgtggtttctcgccccaaggatagatggtctatgtaccaggtttataattccttaaagagcatatccaaagaccagagtttctttgaacatgatgatgaatttcccttgatctttggtaagccagaaaacgaggttgtggcgtagttcttgaggaagcattgcagcatgagaagatgatgagagattgttctcactgaattgctattttatagtggagagttctcacaatggtgttaatgtttatggtttgagcatgtcaatgggtgaccctaatcaggtatagttgtattgtattgtatgatatataataaactttctggcaggttaggttttttgagatcttatctgtttcactgtttgttgcatgcaaatgcaatc

SEQ ID NO: 219589 - DNA, 377 bp, Glycine max
tttattttttttttttttttttttttttttttttttttttttttctttttatttttttgggtacttttgggacctaaatatactaaaaacccgaccactaaaattacaatcaaaaataagccccaacccctaaccaacgcaccacatccagtaccccgggtgctacccacaaaccaacaaaacaaagggtactctaaaaaaaaagcccgaggaaaaaaaaaaataacaataataaatcaatcctaaaaaaccaaacacacccagcattgaaaaaagcaacaacaaagaacccccctccaagaacgggaaaggttaaaacaaatgcacaatattgaaaataaaaggctaaaaaaaatgggggtcccccacaagagagg

SEQ ID NO: 219590 - DNA, 403 bp, Glycine max
ccattaattatatattttttaaggcaaaaaacttaatattattttattcaaaatgaaagactgaatacaaattgaaatgaaatcaaaatgccggagactaattaacctaagatctaaataccctaacaagtgaatgaaccacttaatttgtttgtctgaggataaactcaactgaagagttttgaatgttatgaacattattattcaaaaagccatatggagattaaaattaaagggcatgcatggccttagctagttacttaattttgtctcagttgttccattaaagaaaggataatctgtgtagcctataacaggatcttgggtgtaaaatgtgttcctgttatacttggtaagaggtgcattgagcttaagccttaaaaccaaatctggattggagatg

SEQ ID NO: 219591 - DNA, 401 bp, Glycine max
ggaacccaaaaatctgctctctaacttgggatttaatttaagaaaaaattcccgaacatgatataccatgctattgccgcttcctcctatcaaaaatatacaacaccagttggggcaatttctatttgtttcttggccaaaaaaaaccgcagcagcgggggcaacagccgacaaactccaaaagaaagaattttgttgatgaaaaccgtccacttaaacagggaaactcttttttccttaaagacacatttacagtaacagcataaagcagtagctccaaacaaagagatttatgaagttccaaaaaataatctggcgtctttcgtgtagtggcgggctcaatttgtctgggagctggatcaaactgcagaaaattctgatccatgttctctccaatttcc

SEQ ID NO: 219592 - DNA, 434 bp, Glycine max
gggcacaactgaggtacttcaaaacgctaaaatatatcaataatatatcaggtttcattctcctcaaaaccatcaaataataatagaaaattttctccggggactaaagccaacaacttgaagaaaatataatatccctacacaaaactgaaatttaaaaaataaacagcaaatggggtataagtttgtaacataaaactgaaccaacaagccccaaaaaactttggaatttgttttttaagttcgggcaggagctcctactccagcaggacgtggggcttgaccaggctgaccaggccttggtgcatcatccctgcgtctgataaatcgctgtggaggctcacgctttctcctatcagtgcgggatcgaaccctcacaacatgagagtggatagcacaggaaacacaatactgcatcttcacataaagctttg

SEQ ID NO: 219593 - DNA, 551 bp, Glycine max
cctaacggattaagtatcgtatatattgtagctggcacaatgactagatgccatatagttacagtattagtttatgaattgtcctagcaggaaaaagcaggaaaacaaaatccaaaggctaaagagtaggctatataaactacattttggcaaaggtgcttccaaccgtacactaagggttgagaagcaagggtaataatattaaacatgatagaagaagtacagactattagtagtctaaagaccccacagttgttatcccagtgcttaaatttcttgggtcttgacggctcacatagtcatcacagatgccattagagagcctttgatttggaaccgagttcaacagctcaaggccattgttgcccatttgctgcacttcctgaggagaaagtatctttatgcaccatacactatttacgaattccggccaggggccatcaccaaggagaagaacatcattctctcggtctacaaatacaagctgccagcctgatctcacagggtccttcaactcgcctttcaggccaaacatttgagcgagttcacca

SEQ ID NO: 219594 - DNA, 513 bp, Glycine max
ccatcatatcattcattcagaatcactttccatgcttcccatagccttcaaccctcttggtctcttcttgttacttttcttctccctaacttcatatctctcttggcacatatcagtcaaccacgccccgggactcaccaaaagtaagcttctttgaatgattttggccctctttttgggtcgctgaggaagcttgcaacccttcatggccagaaaatcttcctctttctccttgcttgagagagtgatgtagagcttgggccaaactagggctcgttcttcgccgttgatgccttcgccgccggtgaccttgccgttctcttccgccgaaccccgcgtcgtgtagtaccggtcctccttctccggcgacgccgatttccttgtctcgccggccgatgaccggagaatcgccccgtcggaattccttgtaaggcgattaagttgttgatgatgatgatggtgatgatgttcttttttctgcacagtgaggccagagcgatgatgctccattgc

SEQ ID NO: 219595 - DNA, 471 bp, Glycine max
gcgttttgtgaaatcttattcgacatggcgtcacgggacaacaagaaggcgtcgagcagccgagccggcagaattcgcaccctctccgatctgaaccgtccctccgccgattccgacagcgactccgatggccctcaggagtactacaccggcggcgaaaagagtggaatgcttgtccaggatccttcaaagggaaatgatgtggatgaaattttcaatcaagctaggcaacttggggctgttgaaaggcctcttgatcagcttcaggagcctccaaggtcaactagctttactggaactggcaggttactctcgggggaaactacacgatctactaataatcagcaacctgaggctgttgttcataacattgttttctggagtaatgggttcactgtaaatgatggaccattgaggagtttggacgatcctgaaaatgcctcatttttagagagcataaaaaaatctgag

SEQ ID NO: 219596 - DNA, 548 bp, Glycine max
gagaaaagcgtgaatcatgtcggacgaagagcatcacttcgattctcaggcggatgcgggagcgtccaagacgtatcctcagcaggctggtaccattcgcaagaatggctacatcgtcatcaaatccaggccttggcaggctgtagaggtctctacgtcaaagacaggcaagcatggacatgcaaagtgtcactttgttgcaattgatatttttaatgggaaaaagcttgaagatattgttccatcatcccacaactgtgatgttccacatgtgaatcgcactgactatcagcttattgatatctctgaagacggctttgtgagtctgttgactgataatggaaataccaaggatgatctgaagcttcctactgatgaggcattgcttgctcagattaaagatggattttctgaaggaaaagatcttgtggtttctgttatgtctgcaatgggagaagatcagatctgttcactgaaggacatcggtcccaaaaattaatatgatgctatggctgtagctatagctgatagcacgcttttttttttat

SEQ ID NO: 219597 - DNA, 573 bp, Glycine max
  unsure (1)..(573): unsure at all n locations
ctctcctctcaaacctttcacttcaagctttaagttttcaagctacccacccactgctcatactcacacccaatgaagatccagtgcgacgtgtgcaacaaacacgaggcctccgtcttctgcacagccgacggagccgccctctgcgacggctgcgaccaccgtgtccaccatgccaacaaactcgcctccaaacaccaacgcttctctcttctccgcccttctcataaacaacaccctctctgcgatatttgccaggagagaagagccttcacgttctgtcagcaagacagagcgattctctgcaaagagtgtgacgtgtcaattcactctgccaacgaacacacccttaagcacgataggttccttctcactggtgttaaactcgcagcttctgccatgcttcgttcatcacaaactacctctgattcaaactcaaccccttctcttcttaacgtttcacatcaaactactccacttncattttncaccaccaccaccaccaccaacaacaacaacaacaaggttgctgttgtaggaactggttcaacgagtgctagcagcatatcagag

SEQ ID NO: 219598 - DNA, 588 bp, Glycine max
agatagtgaaagagcttcttcctctaattcgagtgtacaaggatggcagcgtggagcgtcttctaagctctgaaaacgtggcagcctcccctgaagatccccaaactggagtctcatccaaagacatagtcatcgcagacaacccctacgtctccgctcgcattttccttcccaaatcccaccacactaacaacaaactccccatcttcctctacttccacggtggcgccttttgcgtcgaatccgccttctcctttttcgtccaccgctatctcaacatcttggcctcagaagccaacataatagccatctccgtcgacttcagactcctcccacaccaccctatccctgctgcctacgaagacggttggaccaccctcaaatggattgcttcccacgccaacaacaccaacaccaccaacccggagccatggctactcaaccacgccgacttaccaaagtctacgtaggaggtgaaaccagcggtgctaacatcgcacacaacctgcttttgcgtgcaggtaacgaatccctccccgggatctgaaaatatgggtgggatactatgctgcccctcttctgggctcg

SEQ ID NO: 219599 - DNA, 500 bp, Glycine max
gccatcaacagggtgggctgtcaaatggttcagccaaccaatctgaagcagattctactaacacaactatatttgttggaggactggaccctaatgtttcagatgaagatctcaggcagccattctcccagtatggtgagatagcctctgttaagatacctgttggaaagggctgtggctttgtccaatttgcaaacagaaataatgctgaagaggcattgcagaagctaaatgggacaacgattggcaagcaaacggtccgtctttcttggggtcgtaatccagcaaataagcagtttagaatggatttcggcagcccttggactggggcatattacggggcccttatgtatgatggttatggggatgcatagccccctcgtcatgatcccagcatatatgctgctgcttatggtgcttaccccctttatggaggccaccaacaacaagtaagctgaatgaagtgcaatgcaggagtagcattcacaacagtagacagc

SEQ ID NO: 219600 - DNA, 541 bp, Glycine max
gaacaactcttcacacaacaaaacttttttctggcattgtagcatcatgactggcagagaaatcctccatatgatgaaggtgaaagcagggtttggaacaccagacacagggaatggaaaaggcaaaatatcaaaacacattacacatggctttcacttgatgaagggcaaatcagcgcatcctagggaagattatttagtttcagaatttaagcaagaaaaggacagagaattaggcttgtttgcaatatttgatggccacttaggccatgatgtagcaagctatttgcagaaccaccttttccaaaacatcttgcaacagcatgacttttggactgagacagaaagcgcagtgaaaaaagcttacgttgaaacagatgagaaaatattggaacaagaacttgtgttggggcgaggagggtcaacagctgtgactgcaatacttattgatggtcagaagcttgtagtagcaaatgttggtgactcaagagctattatctgtgagaatggaaaggcaagaaactatcagtggatcatgaac

SEQ ID NO: 219601 - DNA, 551 bp, Glycine max
  unsure (1)..(551): unsure at all n locations
gggtgaggtagaacccttccactgtggtgactctgcgatgggtgcctacaagtatgtttcagagctatggcgcaagaagcagtctgatgtcatgcgcttcttgcagcgggtgaggtgctgggagtataggcagcaaccttccattgttcgtttgacaaggtctacccgccctgacaaggctcgtcgcttgggcttcaaggctaagcagggctatgtgatttaccgtgttcgtgttaggaggggtggccgaaagagaccagttcccaaaggtattgtttatgggaagcccacaaaccagggagttacccaactgaaatttcagcgaagcaagaggtcagttgccgaggagcgagctggacggaagctgggtggacttaagggcctcaattcttactgggtgaatgaggactctacttataaatactttgaggtgattctggnggatgttgctcatgctgctattaaaaatgatcccagaatcaattgggtggccaatccagtgcacaagcacagagagctgcgtgggcttacctctgcccggaaaagcaaca

SEQ ID NO: 219602 - DNA, 470 bp, Glycine max
atcagatcctgaaataccccctcaccactgagtctgccatgaagaagattgaggacaacaacactttggttttcattgtcgacctgcgtgccgacaagaagaagatcaaggatgcggtgaagaaaatgtatgacatccaggccaaaaaagtgaacaccttgatcaggcctgatggcaccaagaaggcatatgtcaggttgacacctgattacgatgcattggatgtggcaaacaagattgggattatctagggtagtactagtacttaggcagctctatggttattcttgaagaaaacttttttaaaaagcatagattctatattttgtgttttgttattttgtatcttttgtctcagttgacactaagcagaccttgtgtttcaattttgactagagagtctgttaaattgaagatttaaatgatcatgttaaaattctctctggcaataagaagattgaagacacatg

SEQ ID NO: 219603 - DNA, 430 bp, Glycine max
attttcttgttggatgtgcagaagttttcaccaacattggttccttagagttcttttatggtcaggcaccagatgctatgagaagccttggtatggctctctcactcacaactaatgcgttgggaaattacattagcacccttcttgtcattattgtaactaaggttaccacaagacatggtaagcttggttggattccagacaatctaaatagaggtcatcttgactacttctactggcttttgaccgttctcagctttctcaatttccttgtgtatctctgggttgcaaagaggtacaggtacaagaaggtagctggaaatgctcattgaagataatagcttgaggttggacagctctgtttacttgctgaagatttttttttaagatttgtatatcctgggatctgcattaatctgtatagattggg

SEQ ID NO: 219604 - DNA, 597 bp, Glycine max
ctcgagccgtgaaaagtgaaacaaaaaacagaacaacaatggcgacacttaaggttcctcagcctcttccccccgttgcagatgattgtgagcagctccgaaaagccttctcaggttggggaactaacgaggagctgattgtatcgatcttggctcataggaatgctgctcagaggaagcttatcagagaaacttatgcccagacctatggagaagatctcctcaaggccttggacaaagaactcacgagtgattttgagaggctggttcatctttggacacttgattctgctgaacgtgatgcatttttggcaaacgaggcgactaaaaaatggacttcaagcaatcaggttctggtggaaatagcctgcactaggtcctctgaacaattgtttgctgcgaggaaggcttaccatgttctttataagaagtctctggagagggatgttgctcatcacacaacaggagactttccgtaagctcatactacctctggttagttcttatcgatatgaaggagatgaggtcaacttgacccctggcaaaactgaggcacacatgctgcatgagaagatttccaccaggcttataatgatg

SEQ ID NO: 219605 - DNA, 550 bp, Glycine max
caaaatccaatattcaccatattcttgaaccaaattaacaagcaaggctagtgtactctacttgcagcctgaagctactagcaagcatcgtataggaagatggagaagaacaaagttgatgaaaatcctgaagaatttaactatgagatgaaatgggttcgtgattcttcattggatcacaaaggaagagttcctctccgagcttcaactggttcttggaaagcttctctcttcatcattgcaattgagtttagtgagagattgagctactttggaatagctactagcttggtcatttaccttacgaaagttcttcatcaagaccttaagacagcagttaaaaatgtgaactattggtctggtgtcaccaccttgataccattgttaggaggattcctagctgatgcttacttaggccgttacaccgctgtgatagcatcatgcattgtttatctcatgggtttggttctgctttctttgtcatgggtcttaccaggtttcaaaccttgtgatcatcccagtacatgcaccgaacctaggaggattcatg

SEQ ID NO: 219606 - DNA, 535 bp, Glycine max
gtttctgatgatcaagcaattgtgaatagaaagagtttttatgcaaatagcagcattgttaatggtgctggcaaaataaagaggctctggagacggccaccgaggctccctcctcgattctcgccagatgaaacaggaactggtaatggaaatggacatgtattgggaaatccggatgttgttaggtcaatgtggattgctaggcaaaagaaagtcaaggaagcttttattcatgcttggtctggatacaagaaattcgccatgggttatgatgaacttatgcctctcagccagcatggaattgatggattaggtgggttgggggctacagtggtggatgctctcgatacggctatgatcatgggtcttgatgaggttgtggctgaagctggatcctgggttgaagaacaactttctgagagaatcagtaaaaagggtcaagtgaatttatttgaaaccacaattcgggttctgggtgggcttttaagtgcgtatcatctaagtggtggggaaaaaggaacaaacttaactcatg

SEQ ID NO: 219607 - DNA, 444 bp, Glycine max
cttaacgcaacaaacacatagccacatcttctctttctcttcccatggcattctgactcatacccaaatcattgattgtttgtctatcgaatcggtgagaaaatggcagtggagctgatggggttcccccaaatgggcgaacagaaggcaattgaagaagcagccgccgaaggcctcaagggcatggaacacctcctctgtctcctctcccatcaaccttcccacctccgcactcaccacaccgacgccaccgtttccaacttcaaaaaactcatctcccttctcaaccgccgcaccggccatgcccgtttccgccgcgcacccctcccttccacttccaactctctcgccccatcccctccactggctaacccggtcaccttcgccccttcgcagtcacagagtctaaccctcgatttctcaaaaccctaacatgttcaacac

SEQ ID NO: 219608 - DNA, 523 bp, Glycine max
  unsure (1)..(523): unsure at all n locations
ctcgagccgattcggctcgagggatgatcaatctgttctggttgcaacttatgaaggagagcacaatcatcctcacccttctcaaatggaggtaacaacaggctccaaccgttgtatgactcttggttcagtaccatgttcagcgtctcttagctcttccccaccaacagctacccttgactggacaaaatccaagtccagcagtgagtctaagaatacaagtcccaaaaccgaatcaccagaagtcccgcaggttttggtagagcagatggctacttccttgaccaaggatcctaatttcagagcagcactagttgctgccatctcaggaaaaatgttgcacaataattaagtagaaaatgagtgaagtgtatttaactcattctataagtggatcttgtttagagcataggatctctatgtaaatacaacataggacattgctacatatatattcctcaatttaatcaaatccttttggtgggaatcgagctccactcangagcgatagcatgtctaaaaa

SEQ ID NO: 219609 - DNA, 500 bp, Glycine max
  unsure (1)..(500): unsure at all n locations
atacgtaaaaaataagaaaagtgtatagacaatataagatataagtgaactataatagtaaataattaatataaaaaaaaattataatgtgataagtagaaaaaatataaaagaagagtggggggtagtccgatagcagggcangagtaagngtatgtacgcaaacgtaagattggaatttggagagaggaaaaaacaacaaattaccgcttgtatcaaaaagggcgtgatgagatagaaagaaaggaattgttcgagaaaataaatcatttagtacatctttgaataatttgtcataaaggaggtaatgggtcaaaggaattaatgaaataaatttggacagaaataagtagagttaaaaatggggaaaatataaagatcatagaaaaataaaattagtgcgaagagaagagtatcgcggaaatagaggatagagaagtagacagttatgaagtggttaagtaaaatatagaaaaacggaatatcagaaggtgaaggaa

SEQ ID NO: 219610 - DNA, 495 bp, Glycine max
tccacacccaacattctcacaagtcacagccaaacaccatttcattaattcttgcagaatattgcttagttttgttttatctgaatttggaaacagcttttgaatggctttttcaagagttgcactgctaatatgcacggtcgggtattttgtgattgcctctgccggcaatttccaccaagattttgatatcacatggggagatggtcgggctaagatactcaacaatggagagcttctcactctgtcacttgacaaagcctctggctcgggtttccaatccaagaacgaatacctttttggcaaaattgacatgcaactcaaactagtccctggcaactctgctggcaccgtcactgcctactatttgtcttcaaaaggagcgacatgggatgagattgactctgaattcttgggcaatttgagcggggacccatacatccttcacaccaacgtgtttagcccaggcatgggaaatagggagcaacaattcta

SEQ ID NO: 219611 - DNA, 497 bp, Glycine max
aaaccatgccagtagaggaaatcttgaccattaatgtcaagcctggctggaagaaaggaacaaagatcacattccccgagaagggaaatgaacagccaaacgtgacacctgcagaccttgttttcattatagatgagaaaccgcacagtgtcttcgcccgcgatggaaacgaccttgttgtaacccagaagatttctcttgcagaggcattaactggttacacagtgcacctcactaccctagatggtagaaacctaaccataccaatcaacaatgttattcatcccaattatgaagaggttgttccaagagaaggaatgccacttccaaaagatccatcaaagaaggggaacttgaggataaagtttaacatcaagttcccaactaggctcactgatgagcaaaaagcaggaatcaggaaactcttcaacaatgcctaagcttgagatagtatagtatttgtcagatttccctctgggaattactttttaaattat

SEQ ID NO: 219612 - DNA, 512 bp, Glycine max
cctacttgtgttcttgattatactctgcgaaataatttttgcgtttcattgtcttataattagcatggcctttgccgcagttaaagtgttcatgatattggggcttttagccaccgcgtgtgtagcacaagcccctggacctgcacccacgcaaccaccatcaacaaccccatcaccgtccacgtcagcacccgccccatcaccaaccgcaaacacccctcctcctgcggctgcacctgcacccgcaacacccacacccacacccggtccttcatctccaactccaacaacagctccatcccaggccccaggcccaaccaccttcttccctcccgcgccaggcccatcaggcccagcaccaggcccatcaggcccggctccagaccaaccagcctccgagcctccctccgcagcgttctccataagcaagacatgcattgccgccactgctcttgttggaacccttctcgccgtggctttggcttaattaattaaacctctttcgatgagaa

SEQ ID NO: 219613 - DNA, 434 bp, Glycine max
gcattccactcacacctcatcgtttctctctctagatctctgtttcttctttttctccaaccttcgtttcaccaccacacttacattactttgtcgaaatggctccaccaattgagaccccaaacaaggtttccagctatcaacagtccccaaaccctcgtcttaacgagaggattctttcatccatttccaggagacacgttgctgcacacccgtggcacgatcttgagataggacccgaagctccaaagatcttcaactgtgtggtcgaaatagggaaaggaagcaaggtgaaatatgaacttgacaaaagaactggacttattatggttgatcgtatactttactcatcagttgtttatcctcacaactatgggtttattccacgtactatttgtgaggacggtgatcccatggatgtcttggtattatgc

SEQ ID NO: 219614 - DNA, 548 bp, Glycine max
  unsure (1)..(548): unsure at all n locations
caacacaacacaaaccattcaatttctccttcatggctctcctcacatcccaacctaaaaaccccattctccatcgcttcaccacccttcactgccctcttccacgcttacatagaaccgttcttggtcttggctccttctctcacaacagtgctctctccactaaaaaacttaactttaacccaacgcaaaccaaaatttcccttcaaaacaacccctttacctataatttggcagtgacagccaaagccaatgccaatgctgcatttggagaaggtttcaaggaggaaggggcatcgagacacagaaagattttgttgtcagaggttgaggtgaagagagagaggagagttttctttggcagaaaatggaactctttggattttggcactgctggaattgtgttggcaatgcatctcctttgcgtctttgctccattccatttcaattggccagctntttgggtggctgtggctctctatattgtcactggcccttttggtatcactctntctttccataggaacctntctcaaggagtttcaagc

SEQ ID NO: 219615 - DNA, 542 bp, Glycine max
  unsure (1)..(542): unsure at all n locations
cttatcccttatggacaaaggatgggtttcctctcaatctcttcttcctcccacacccgacaatactatgtttcctctcctcggattccccgtcaaactcagccgccccaccatggaactccaccatgataaccgcaaacttgtcgctgaagtcgacttcttctctcatactccgccacccaacatcgtcaagaaggaacttgatcaaacacctcttcacattaatactggtttacaactccttactgctaacaccaggagtgaccaatctaccgtggatgacgggctttcatcggatgcagaagataagcgagccaaaaccaccgagcttgcacagttgcaagtggagcttcaacgcatgaacgctgagaacaagaagctgaaagagatgctcagccatgtcaccggtaactacaccgccttgcagatgcatcttgtgacactaatgcaacagaaccagcagcgaacagaaagcacggaacatggggttgctcagggaaaggctgaggataaaaaccatggtgctnggtggaggaaaaggt

SEQ ID NO: 219616 - DNA, 487 bp, Glycine max
  unsure (1)..(487): unsure at all n locations
ctcaaaaaaaacaaaaacagaaacaaaagatggttcatcagaggcaaaacaacatccatgttcttgttcttccataccctgcccaaggccacatcaacccccttgtccaattcgcaaaaagattagcttcaaagggtgtcaaagccacagttgccaccacccactacactgccaactccatcaatgcacccaacatcacggtcgaagccatctccgatggtttcgaccaagccggcttcgcccagaccaacaacaacgtgcaactcttccttgcctccttcagaacaaacggctccaggaccttgtctgagctcatcagaaaacaccaacaaactccctcccccgtcacctgcattgtctatgactcatttttcccctgggttctcgacgtggcgaagcagcatggcatttacggagccgcctttntcaccaactctgctgcggtctgcaacatattctgtcgcctacaccatggtttcattcagct

SEQ ID NO: 219617 - DNA, 515 bp, Glycine max
  unsure (1)..(515): unsure at all n locations
ggaagatgagtttgagggcatcagagatagcgaagaagttgaatctgcaacctcacccagaaggtgggttttacgtggagacattccgagaccattccgtccagctttcgacctctcagctcccccccgaatacaaagtggatcgccctgtatcgacctccatctattttctcgttccttctgggagtgtgtctcgcctccatcgcataccctgcgccgaaacctggcatcattacatcggcgaccctctcaccgtatgtatatcttcatctctctctttcttttttaacctaatctgatatgaattgtattgcaggtagtggaattgaatgagaaagatgggagcgtaaaattcacttgccttggatcagatctgactcagaatcaggtgccgcagtacacggtgccctccacgtctggtttggcttttttcctaccaaggactntacctactctgcggacggngtatcnngagtgctgaagctgaactgaagctgaagctgagatagtgagag

SEQ ID NO: 219618 - DNA, 461 bp, Glycine max
gggaaacaacctagaaccgggtccggttgggccgttggccggggttggagtgagacaaaattgaaaggacaaaaataccccccggatgcatatttgtgttgttctgttctaagcgagtggttttggtttcggtggtgttgctctgagatcgaagcgtttgttattgtagaagcagctgatacatagatagataaggatagggatagggttaaggccatggagcgcatcatcggcgccaagtacaagctaggtcgcaagatcggaagcggatccttcggcgaaatctacctcgccactcatattgataccttcgagatcgtcgccgtcaagattgaaaacggtaaaacgaagcatccgcaattgctttatgaggccaagctctacaatattcttcaaggaggaagtggaatcccgagcataatatggtgtggtgtagacggtgaggataatgtgcttgttat

SEQ ID NO: 219619 - DNA, 560 bp, Glycine max
  unsure (1)..(560): unsure at all n locations
ctcgagccgaatcggctcgagcggctcgagcaaaaccgagcgagttgttgtgactgactcagtgagtgagcgagcgagcgagttactcatggcgaacgcggcgcttcggaacgtgaaggtgctcccgaactcggcgaatatggaggaagcgcgtcaccgagtcttcgaattcttcagaacggcctgcagatcgctaccttccgttatggaaatctacaacctctacgacgtcgtttccgtctccgaactccgctcctccgtcgcctcccagatccgcaacaacatccacgtcaccgatcccaaagtgatcgatatgctgcttttcaaggggatggaagagctgaagaatgttgtggaccattcaaagcagaggcatcatattattggtcagtacgtagttggtcggcaagtgcaggattcagccacaaaagacccggacacctctacttttctgaagaatttctacaacaccaattacttcntgaagttggtcatgagctgtgttctggttcctcaaataaagaattatcttaaaacgttttttatgtcaatactggatg

SEQ ID NO: 219620 - DNA, 420 bp, Glycine max
attgaattctccagagagaagaagaaacttaatcgatcatcacttcacttcactaatacatcatggcagacgagacccagaacaagtatgagagctctgaggttgaggtccaggatcgtggtgtttttgactttctcggtaagaaaaaggatgaagaagacaagcctcatcctcaggaggaggtcatcgccaccgagtttcaaaaagtcactgtctcagaccaaggagagaacaagcacagcctcttagaaaagcttcaccgatctgacagcagctctagctcttcaagtgaggaggaaggagaagatggtgagaaaaggaagaagaagaagaaggaaaagaatgggctgaaagagaagatcgaggagaaaatagaggggtgatcatcatcatcacaaggatgaggacacaagtgtccct

SEQ ID NO: 219621 - DNA, 548 bp, Glycine max
atgacatggctcttaagtactttgttgaggctggggcaattgctgtaagacgtgtgcggaaagaggacatgcgccatgttgccaaggctactggtgcaacattggtctcaacatttgctgatatggaaggggaggaaacatttgaaccatcttttcttggatatgctgatgaggttgttgaggagcgaatttctgatgatgctgtagttatgatcaaagggaccaaaactacaagcgcagtcactttgattctaagaggtgcaaatgaccatatgcttgatgagatggacagagctctgcatgatgcattgtcaattgtcaagagaactcttgaatcaaatacggtggcagctggtggaggtgctgctgaggcagcattatcagtttatttagagtaccttgctacaactttaggatctcgggagcagttgggtatagcagaatttgctgagtctcttgtgattattcaaaggtgctttctgttatgctgctaagatgccatgagctggtcgcaaattacggcctaccccatcagcacaactaaagcg

SEQ ID NO: 219622 - DNA, 446 bp, Glycine max
  unsure (1)..(446): unsure at all n locations
aaaacaccaattctccaccctctcattgaaaaaaaaacaaccaaacaaaaaaaatcaatcattttattttatttttctacgaaaatggttgatttacattggaaatcaaagatgcctagttccaaaacaccaaaactctctctctccgacaacaagtccttaccctctttgcaactacccttccgcaccacagatatctctcccgccgctccttccgtttgcgccgcttacgactactatctccgtcttcctcaactcagaaagctttggaactccactgattttcctaattggaacaacgaaccgattctaaaaccaattttgcaagctctcgaaatcacgttccgctttctttccattgttctctccgatcccagaccttactccaaccacagagaatggactcgccggatagaagtctctcatcatgcatcanattgaaatca

SEQ ID NO: 219623 - DNA, 566 bp, Glycine max
  unsure (1)..(566): unsure at all n locations
ctcgcattccgtggagatctagtgcttctgctgcaagacctcgctgaaaattagggtttcgattcggaggtagacgaagatgttcggaagggctccgaagaaaagcgacagcaccaggtactacgaaatcctcggcgtttccaagaacgcttcgccggatgacttaaagaaggcttacaagaaagccgccattaagaaccatcctgacaaaggcggggatcccgagaagtttaaagagcttgctcaagcctatgaggttctgagtgaccctgagaagcgcgagatttatgatacatatggagaagatgctcttaaggaaggaatgggtggtggctggcggtggccatgatccatttgatatcttcagttcattctttggtggaagtccgtttgggtcaggtggtagcagtagaggacggaggcagaggcggngagaagatgtggttcatcccctgaaggtctctctggaggatctttacctcggaacttcaaagaaactctctctttcacgaaacgtgttgtgctcataatgcaatgggaagggctcaaagtctggggcttcatga

SEQ ID NO: 219624 - DNA, 562 bp, Glycine max
aaacgaacaactacatagcatttatttttcgctcttctctcttctattcagccactgctcacaccatgagtgccgagaagaagaaactgattggcagattacgcctatttttcactaatgcaaaaccatacctcttaatgattggcttgcaatttggcatggctggaaattacatcttcggcaaggatgttcttaaccatggcatgagtcgttttgtgttcattgtttaccgaaatgctatggccaccattgctcttgccccttttgcattctttattgaaaggaaaagtaggcctaagatgacactttcagtctttctacagataatagtccttggattcctggagccagtttttaatcaaagcttcaattacttggggatgaaagtatacttcggcttcattcacatctactattgtgaacgctgtgccctctatcacctttgtgcttgcagtcttcgtccggttggagcgtctaagacttgcggagattcggagtcaagccaaagtgattggaaccatagtaacctttggagggtgctttgctaatggcaatttacaaa

SEQ ID NO: 219625 - DNA, 586 bp, Glycine max
aacaaatctcctcccatcccatttttcagcaccaaagtttgaaacttttctcaattgggttgaggagagtttgactcaaatttttatttttctaacgaagcagtagctattagaagtgcaaaaattaaatgtccaacatcttcttgttgatgtttgagattcatgtatccgattctcagtgaaatcttcttttccgggtgtatgatcaattccactgttaggcgcaggacccatttagttcaatccttctcagttgctttcctctattggttgtactacgtttcatgatttctaaaccttccttagtctaataatcatctactactagctattattattattattattattatcatcatcatcatatataataaaatctatctgcaatattatttttctgagtttgtgtctagttagtgtctgggtcctggtcctgccaattgtgtcaattaattgtattgaatcataaaagatggcttcctcacgtggaacatcttcagggtcatctctgcttcagaactctggttctgaggaggatctgcaggcggtgatggatcatagaaagaggaagagaatgatatcaaac

SEQ ID NO: 219626 - DNA, 456 bp, Glycine max
aacgctgagcgcagaaaggggaaaaggggattagggtttaggaagcagcgacaacaatggatttcacagtggagaagaaggaatcagagaacaacgccgaaaatgctcacccaacaacgttagattcttcttctcaattggcatcggcacttgattccaacaacaaagaaatcgaagaacgacaagctcgtgaactcaaagccggacttcaccccctaaagcagcacaagtttgtcttctggtacactcgtcgaacacctggagttcgaaatcaaacatcatatgaggacaacataaagaaaattgttgaatttagtacggttgaaggattttgggtctgctactgccatcttgctcgtcctgcttctttacctagtccaacagatttgcaccttttcaggaaggaatccgtcctcttgggaggactctgctaactgaatgggtgtaaatggatta

SEQ ID NO: 219627 - DNA, 446 bp, Glycine max
ctcgagccgttttgtccgctttcgtgctgccaagtccctagatgcaaccacaatgactaccttccatgatcttattcctacaaaacttgctgctggtgtctgggactgtcttatgaaatataaaaaaactgtacctaatttccctcagactgagtcctgcgagttgctcatcattgatagaactattgatcagattgctcctgtgatacatgaatggacatatgatgccatgtgccgtgatttgttgaatatggagggaaataaatatgttcatgaggctcctagcaagactggtggtccacctgagcgaaaagaggttcttttggaggatcatgatcctatatggcttgaacttcgtcatgcacatattgcagatgctagtgaacggctgcatgagaagatgaccaacttcatttcaaagaataaagctgcacaaatccaacatg

SEQ ID NO: 219628 - DNA, 556 bp, Glycine max
  unsure (1)..(556): unsure at all n locations
caacagtttcttccttttctatctcttgctacttcaatcctcttgcttagttctctgtggttaatgttccacggttattaagataaaatggctgagattgagggttctcctggaagctccatgcatggagtaacaggaagagaacaaacattcgtagcctcaattgcttctccaattgtccccacagacaccacagccaaatttgctctcccagtagactcagagcacaaggccaagattttcaaactcttctccatggccaatccccacatgagaaccttccacctttcttggatctccttcttcacctgcttcgtctcgaccttcgcagcagcccctcttgtccccatcatccgcgacaaccttaacctcaccaaaagcgacattggaaacgccggggttgcttctgtctccggaagcatcttctctaggcttgcaatgggtgcggtctgtgacctattaggtccacgttatggctgtgccttcctcatcatgctctcggccccaaccgtgttctgcatgtcctttgtgaaagatgctgcggngtacataatgg

SEQ ID NO: 219629 - DNA, 511 bp, Glycine max
tccctcagccaccacaaactagagccccaggcaacccttggccacagtggcctcgcatataccgagtagattatgggcaccaagaaggtgcagcaaaatttgggaaagatccaagatcttatgaggtattgactaagcggtttgtgggagatgaaaatggagttgtgaagggacttgaagtaatacgtgtcctctgggagaaggatgaaactgggaggtttcaatttaaggaaattgagggctccgaagagattcttgaggctgacctagttttactggccatgggattccttggccctgagcctacaattgcagagaagttgggtattgagcgagacaacaggtcaaacttcaaggcagagtatggtcgtttctcaaccagtcttaaggggtgtttgcagccggagattgtcgacgtggtcagtccctggtggtatgggcaatttcagagggacgacaagctgcagcacaagttgacagtttcctcacaaatgaagacatagagcacaat

SEQ ID NO: 219630 - DNA, 617 bp, Glycine max
  unsure (1)..(617): unsure at all n locations
ggcggcgacagaggaagaagccgccggttcagaagctcttcgagacttgcaaggttgtgtttgcctctgcggggacaggctttgtccctccccatgaggacattgacgagttgcaatctgttctagatggaataaagccagaagatgttggtttgagaccagatatgccgtatttcaggacaagtgccacacagagagtgccaagaatcacgtacctgcacatttatgagtgtgaaaagttctcgatggggatattttgtttgccaccttctggggtcatccctcttcacaatcaccctggaatgacggttttcagtaagctactttttggcactatgcacatcaagtcatatgattgggtcgttgactcgcctcctgaatctcctacaactctcaaaccatcagaaaaccaaggtcctgagatgaggttagccaaagttaaggttgatgctgatttcactgctccttgcaacccttccatcctttatccagaagatgggggcaacttgcactgtttcacagcagtgacagcatgcgcagttctagatgtgcttggtcctncatattctgatgctgaaggcagacactgcacatactaacacgattttccctttttc

SEQ ID NO: 219631 - DNA, 547 bp, Glycine max
ctgaaccaaatcatcacacacacatactaagaagcaacaattcttctacaatggatctcctccttctggaaaagaccctcataggtctcttcctcgctgcggtggtcgccatcgccgtctccaccctccgcggccggaaattcaagctcccaccgggcccactccccgtcccaatcttcggcaactggctccaagtcggcgacgacctcaaccaccgcaacctcaccgatttggccaaaaaattcggtgacatcttcctcctccgcatggggcagcgcaacctcgtcgtggtttcttcccctgagctcgccaaagaggttctccacacgcagggcgtggagttcggctcccgcacccgcaacgtcgtcttcgacatcttcaccggaaagggccaagacatggtcttcaccgtctacggcgagcactggcgcaaaatgcgccgcatcatgaccgtccccttcttcaccaacagggttgtgcaacaataccgccatggatgggaaatcgaggctgccgccgtcgtcgaggacgtcaagaataccccgac

SEQ ID NO: 219632 - DNA, 544 bp, Glycine max
  unsure (1)..(544): unsure at all n locations
agcaacaccaactgaaacatcttcatcatctacgaacgaccataaattttctctctttccctttccctctctctgtctgtgttttttcttaaaaaattctgtgagaggcatagaggaagatgaaggaaagcagtgatgggtttgtgagagcggatcagattgatctgaagagcatagatgaacagttggagaggcacctcagcaaggtgttgaccatagaaaagaaaaagcgctctgaaggggaagaagatgctgatcatgttcatcttcatgttcacaccaccagtgccactgcttctcccaaattctcacatgcttcttctgctgctagggttaacttcaagaagaaaaagcaggattgggagattgatccttctaaactcatcatcaaaactgttatagctcgtggtacttttggcactgtccatcgtggtgtctatgatacccaagatgttgctgtgaaattgttggactggngggaagaaggtcaaaggacagaagcagacattgccttcctgagggcagcgtttacccaggaagttgc

SEQ ID NO: 219633 - DNA, 565 bp, Glycine max
  unsure (1)..(565): unsure at all n locations
ttggaaccgttcttcgtgttctccattccctctctcactccttcatctactgatatcatatcacaatgtgtggcatacttgctgtgcttggttgctctgattcatctcaagccaaaagggtccgcgtccttgagctttctcgcagattgaagcaccgtggtcctgactggagtgggctccaccaatatggtgataactatttggctcatcaacggttagccatagttgatccagcttctggtgatcaacccctcttcaatgaagacaaaactgttgttgttacggtgaatggagagatctacaatcatgaagaactcaggaaacaattgcctaatcacaccttccgtacaggaagtgattgtgatgttattgctcacctgtatgaggagcacggagaaaactttatggacatgcttgatggtatattttcatttgttctgctggatactcgtgacaacagttttatagtggcacgggatgcaattggngtcacttccttgtacattggttggngtttagatggctctgtctggatctcctctgaatngaangggttgaatgatga

SEQ ID NO: 219634 - DNA, 497 bp, Glycine max
cagcaatcggattgtttggatcagaagtcaattcgaggtgtagatggaacttgaagcaagtgatcaacccaagcaagagcgttcaaggacaagatggacagcatcccttgacaagatatttgcagacttggttgtgaagcacattcagctggggaacagaccaaacaatgtttttgacaagaaaacatggaatcacattcgtgatgagtttaataggcaaacagaccttaatttcaacaataatcaattgaggaagcatctagatgttcttcggactcgcttctataatttgaaatctgcttatgatcaaaataatgactttgtaatggatgattcctgttgcattggctttgaacagtgggaagatataggggtgcagcctaggaatgaaactgttaaagtgaaagattgtccaatatatgagcaactctgcacaatattcatagattcagctgctgatgggaaatatgcccaatctagtcattacgaagagttgg

SEQ ID NO: 219635 - DNA, 506 bp, Glycine max
ctcgaactcaatatccattattaccaaaaaaaaagaaaaaaggatatcaaacaccctttgcatcattaaaactctcagttccctctttccctatcaaaaccctttcccacagcactactcactccagtacaagagaccctttctcaatttggttgcagcagcacagcacacacgcacatatatatatatatagcatgtgtaccttgaatcattcttgtgatttgtaccatgtttcccctgagctctcatcttccttggacacatcctcgccggcttcggagggctctcgtggcgtggcattttccgacgaggaggtgcggctggcggtgaggcacccgaagaagcgggcaggtcggaagaagttccgggagacgcgccacccggtgtaccggggggtgaggaggaggaactcggataagtgggtgcgtgaggtgagggaacccaacatgaagaccaggagttggctggggactttccccacgccgagatggcggctcgggcgcacg

SEQ ID NO: 219636 - DNA, 449 bp, Glycine max
gttttgatgcaacgctgtcactgagaaaggatctctatctacgaaggagcggaataaaacccttctctctgtgattaagagaatggcttcagatcggaaacttcacacttttgaggaggtggcaaagcacaaccagaccaaggattgctggctcatcatttctggcaaggtgtatgatgtcacccctttcatggaggatcatcccggaggtgatgaggttttgttatctgcaacagggaaagatgcaaccaatgactttgaagatgtggggcacagcgattctgctcgagatatgatggaaaaatactacattggtgagattgatgcatcaaccgtcccactaaaacggacctacattccacctcagcaagctcagtacaatcctgataagactccagaatttgtgatcaagattttgcaggtcctggtccctctcctgatcttgggct

SEQ ID NO: 219637 - DNA, 529 bp, Glycine max
ctctctctcaccaaaacaatttgctcacaaaggaggaaaaatggcacctttcgtttccctctctttgttgcttctctttctcaaccaccccctcctttccctctcaaccaaccctgaagggaacgctctgcatgctttgagaagcaggctttctgatcccaacaatatgttgcagagttgggacccaacactggttaatccctgtacttggtttcatgttacctgtgactccaacaatcatgtgattcgcttagacttgggcaactctaacgtttctggaactctgggcccagaacttggccagctacagcatctgcagtacttggagctctacaggaatgagataacaggaaagattcctaaggaacttggtaacttgaaatcacttattagcatggatttgtatgatcacaagttgcagggtaaaattccaaaatcatttggaaaggttgaagtcacttaaattcttgcggctaaacaacaacaagttgacagggatccatcccaagagaactcactcgtctcactg

SEQ ID NO: 219638 - DNA, 534 bp, Glycine max
gctgcagaaaatatgagcgaggtggaagaggagcatggatatgtcttcaaagaagagatccatctcacggtgttcaaaacttctctgttcttcgcgggcgatggcttcaccgtctacgattgcaaaggtcaacttgtgttcagagttgactcttatgggcccgacacccgcgacagagacgaactcgttctcatggatcctaacggacgttgtctcctcaccgttcgtcgaaagaggccgagtttgcatcaacggtgggaaggcttcaaaggggagagaatggacggtgataaacccatcttcagcgtgaggagagcgtcgatcataggacggtcgcgtgcgagtttgacggtggagatgtacgacaacccaggtgaggagtaccagatcgatgggtgcttctcgcagcgttgctgcacggttctcaatgtgacgaaggaatcggtggctgagattcgtcgtaaagtggaccccaccaccagcgtcgtgcttgggaaggaagtgttcttcctttgcgttaagcctggttttgat

SEQ ID NO: 219639 - DNA, 610 bp, Glycine max
  unsure (1)..(610): unsure at all n locations
cacaagccaagtgaaagtgagaaaaaataaaaatcaaagagcataatgtcagggatcattcacaagattggggagacccttcatgtgggagggcacaagaaggaggaggagcataagggtgagcaccatgctggagaatacaaaggggagcaccatggtgaacacagtagtgagtacaaaggagagcatcatggtgaacacaaagctggagagtaccatggtgagcacaagccagagcacaaagaggggttcctagacaaagtcaaggacaagatccatggtgagggcggcgccgccgagggcgagaagaagaagaaggagaagaagaagaaggagcatggccatgagcatggccatgacagcagcagcagcagtgacagtgattaaactgctgcatcacctatatatttaaaagggtttatgggaccatagtagcgagggctgtgccttaatttctctctctctcttctcctctctctctctctctctctctttttcctttntccctatcttgtngatctaattatgagtgagaaaaacaaaagtgagaaaatgtgcgtgtatctggttgctaaatcgagtgctattagtctgtgggtttggtggtttg

SEQ ID NO: 219640 - DNA, 543 bp, Glycine max
  unsure (1)..(543): unsure at all n locations
gtgatcactatttcaataatagcaaagccctcaaagaagccatgtgtttcatgatggatcctgttattggaaagaagacatgctatgtgcaatttcctcagaggtttgatggcattgacttgcacgatcgatatgccaatcgcaatattgtgttctttgatatcaacatgaaaggtcaggatggtgttcagggcccagtctatgtgggaactggttgttgtttcaataggcaggctttgtatggttatgatcctgttttgactgaggaagatttggaacctaacattattgtaaagagttgttggggttctagaaagaagggaaagggtggcaataagaagtacagtgacaagaagaaagcgatgggcagaactgaatccactgtacccatatttaatatggaagacatagaggagggtgttgaaggttatgatgatgaaaggacactacttatgtctcacaagagcttggagaagcgttttggtcagtctccagtttttattgctgccactttcatggagcanggtggcattccaccttcaa

SEQ ID NO: 219641 - DNA, 507 bp, Glycine max
gcagtttcttgagaatgagataaaggacaagaagttctttggaggagaggagattgggttggtagatattgctgctgtctacatagcattttgggtccctatggttcaagaaattgcagggttggagttattcacaagtgagaaatttcctaagctccacaattggagccaagaatttttgaaccatccaattgtcaaagaaagtctgccccctagagatcctgttttctcctttttcaagggtctctatgaaagcctttttggttcaaaatagatttgatgatgtggtgtgagacttagtatttctaagaattatgtgtttgttaaaggcttctatgaaagcctcactgcttcaaaatagattcatgtatgtgagactcagaatctttggggaaaattgtgtgtggtgtggactactcgttttgtttgtcattgagctatatcgctgttaattaggattttgtttcaaaatgatgcttataagttgtaatctaaggatttctccct

SEQ ID NO: 219642 - DNA, 551 bp, Glycine max
ggatatgtctacaagggatggattgatgaacacacatttacagcttcaaaacctggatcaggaatggttgttgctgtaaaaaggcttaaacctgaaggttttcaaggtcataaggagtggttgactgaggttaattacctcggacaactgtaccaccctaatctggttaaattaatcgggtactgcttggagggagagaaccggctattggtgtatgagtttatgcctaaagggagcttagagaaccatctatttagaagaggaccgcaaccactctcttggtcggtgaggatgaaagtggctattggtgctgccagaggactctcctttcttcataatgccaaatcacaagtcatataccgtgattttaaagcttctaacatcctgctggatgctgagtttaattcgaaactctctgactttggtttagctaaggcgggtcctactggtgatagaactcatgtgtctactcaagtcatgggtactcaaggatatgcagcacctgaatatgttgcaactggtcggttgacggccaaagtgatgtctacagc

SEQ ID NO: 219643 - DNA, 384 bp, Glycine max
gcttgatcaaatacaaccggtataaaggtcttccattgaatgatgctagagcggttggcttacgcgttttgactgcaagacactacttacattctgagcgagggcctggccccactgacctaaatactgaagacactcctttattatcaaccatcgatcctggcgacaaccctgtaagggcgggactgtgccccatcattgaacggtctgaggggaacaaacacagtggggcttctggtggtattagaaactggttgacaaggacagccaggacagcagatgccaatatctctggactaagagcgtcattgggcagaagaggacaggcggccataactggttaagcaccaccatgggttcttgggtgatgcgagataattaaac

SEQ ID NO: 219644 - DNA, 399 bp, Glycine max
ggaaaatgaaaaaaaggaatataacagtagagtctattttatgaagcaaactgtgggtaatgcttgtgggacaattgggctgcttcatgctcttggtaacttgacttctgaagtcaagctcgttgaggggtcgttctttgataacttttttaaatctactgcaagcttggatccattgcagcgtgcaacatttcttgagaatgacaaagaaatggaagtggctcatttggtggcagcaactgctggtgatacagaggcatcagacaatgcaactgcacatttcatatgctttgcttgtgtggatgatgaactctatgagcttgatggaagaaagtcagtgccaatatctcacggtccatcatcaccaagtacttttgttaagggatgcagctaaagcaa

SEQ ID NO: 219645 - DNA, 399 bp, Glycine max
ggaaacagcagcacctggaaggtctcagtgcccaattggatcagctaaaaaaggagaacacccaaatgaacacaaacataggcatcagcacgcagctgtgccttaacgtggaagctgagaacgcgattctgagggctcaaatggaagaactgagcacgagattgaactctctgaacgaaatgattagtttgatttactccaccaccaccaccaacaactgattgatgttcgatgaggcacaggagactacgactcaggtgttcattgattgtggacttatggatgctgggaattactgaataccactcaatccacatactatggattacgctgacaatgacatgttgatggtgtattgattggtgaaattaattgtgagttggtgcttttgtgaatcct

SEQ ID NO: 219646 - DNA, 547 bp, Glycine max
  unsure (1)..(547): unsure at all n locations
tgttgactcataagctgactgacaaatgtgatgtctatagcctgggaattgtgtatctggagcttttgacaggcatgcaaccaatatcacatgggaaaaacattgtccgcgaggttaatacggctcgtcaatctggtacaatatattccataatagacagcagaatggggttatatccatctgattgtttggacaagtttttaactctggccctcagatgttgccaagacaatccagaggagagaccatcaatgctagatgtggtgagagaactggaagatatcattacaatgttgcctgaacctgaaactcttttctcagatgttagcttactcaattctggtaacatagcacccccatcatctgcaacaacatcaacatcaaatgtgacaagggaggagcaacacatgtcctcatatgtttcaggaagtgatcttgtcagtgatgtcattccaccgttgttcctcgctgatgctgtactatgctatagtctccttcatatattacaaaaaatttaattataattnttttatactaagaatttgat

SEQ ID NO: 219647 - DNA, 619 bp, Glycine max
  unsure (1)..(619): unsure at all n locations
atcaaaagtaccaagaaactctgtgcggttatgctagatactgtgggtccagaattacagattgagaataagactgatcacccaatcacccttgaagcagacacattagttgtcttaactccagatcaaaataaagaagctagttcaaatctcttaccattaaattttaccgggctatcaaaggctgtgaagaagggtgatactatttttattggaaaatacttgtttactggaagtgaaacagcttctgtatggctggaggtcagtgaggtggaaggtgaggatgtcacctgtctggtaaaaaacactgccacactctctggatcattgtttactgtacatgtctctcagattcacatcgatcttcctactcttgctgataaagataaggaggtaataagcacatggggtgttcaaaacaatattgacttcctttcattatatacccggcacgttgaagatattcgtcatgcacgtgaatttctctctaaattgggtgacctgaagcagacacatatttatgcaaagaatgaaaatatagagggaatgaaacattctgatgaaatatcgagagaagcagatggtatcatccttgctcgtggaaattanggatagaact

SEQ ID NO: 219648 - DNA, 537 bp, Glycine max
  unsure (1)..(537): unsure at all n locations
cgttgctctgcttcaacattgcggaagcagaagaagcgccgcagctatggtgaagtactccagagaacccgacaatcccaccaagtcctgcaaggccagaggcgctgacctcagagttcattttaagaacactagggagactgcctttgccatcaggaagttgccccttgttaaagctaaacgatacttagaggatgttttggcccacaaacaggctattcctttccgacgcttttgtggtggtgttgggaggacggcccaggctaagaacagacactccaatgggcaaggacgctggcccgtcaaatcagctaagttcattctagatttgctgaagaatgctgagagtaatgctgaagtgaaaggtttggatgtcgatgctctgtacatttctcatatccaggttaatcaagcacagaagcaaagacgccgcacctacagagctcatggaagaatcaacccttacatgtcatctccatgccacattgagctgatattatctgagaaggaaagagccgtgaaagaagangctgagac

SEQ ID NO: 219649 - DNA, 574 bp, Glycine max
aaaaaacacagagcaaccaccgatcaaagaagaaacaaccgcaacagatctccgtttctcgccaaacaaacacaaaatggctgccttcagcggcgacgaaaccgcacctttctttggcttcctcggagccgccgctgccctcgttttttcctgtatgggagcggcgtacggaaccgcgaagagcggcgtcggggttgcgtcgatgggcgtgatgaggccggagctggtgatgaaatcgatcgtgccggttgtgatggctggtgtgttgggtatctacggtttgatcattgcggttatcataagtacgggcattaaccctaaggccaaatcgtactatctttttgacggctacgcccacctctcttcaggtctcgcttgtggcctcgctggcctctccgctggcatggccatcggcatcgttggcgatgccggtgttagagcaaatgctcagcagccaaagctttttgttggaatgatactcatcctcatttttgctgaggcgttggcattatacggtctcattgttggcatcatcctctcttttcgtgctggccaatccaaggctgactaataa

SEQ ID NO: 219650 - DNA, 511 bp, Glycine max
ctcgagccgaatcggctcgagtccaaagtatctcacttgggtccggaatcagaagtacttaataaattcttctcagctatgaagaagctgtgtcccaatcttgatcgtgaggatgggctcgaaaccgtgcttgaggtccctatcccggaggagattctcacccacaagagtggaaccaccaaagcttggcacaacatgaagaattggatgaaaccacacgctgaatcgagatcaaattcagcttccatggcagcagttttcggagggaaaaacactgagattcagcttttgttaggcgttgttggagcgccgttaattccttcacctatcgcccctgacaaccaacccatcactcgcaggattaaagaccaacacattgaggcttcaatggctaaatacatagtgaagcactacgtggcagcggtgggaggagagcgtgctttgaatagtgtggacagcatgtatgctatggggcaggtgaagatggcagcatcagagtcttcagcagggg

SEQ ID NO: 219651 - DNA, 519 bp, Glycine max
cagagtcagagacagagacgcagccatggggcggagacctgcgaggtgttataggcaaattaagaacaagccataccccaagtcacgtttctgccgtggtgttcctgatcccaagatcaggatttatgatgttggtatgaagaagaagggtgttgatgagtttcctttctgtgtccatctggttagttgggagaaggaaaatgtttcaagtgaggccctggaagctgctcgcattgcttgcaacaagtacatggccaaatttgctggaaaggatgctttccacttgagagtcagggtgcacccattccatgttcttaggatcaacaagatgctttcgtgtgctggtgctgataggctccaaactggaatgagaggtgcttttggaaagccacagggtacttgtgctagagtggctattggacaggtccttctttctgtccgctgcaaggacagcaacagccatcatgctcaggaggctcttcgccgtgccaagttcaagttccctggtcgtcaaaagat

SEQ ID NO: 219652 - DNA, 471 bp, Glycine max
  unsure (1)..(471): unsure at all n locations
gttagataatcagtttcaggtgcaatcagaggatgatactcatggaatatttggcacatctgtgaagtacgaccaagacactaacagacttactgataagacacaacgacgtctagcacaaaatcgagaggctgctcgcaagagtcgattgaggaaaaaggcatacgtgcagcagttagaatcatgtcgtgtgaagctcttgcagttagagcaagaggtagatcatgcaaaacaacagggattgtatattggcaacggattgggttctaataatttgggttttgctggctctgtaaattcaagaataacccttttcaagatggagtatggaaactgggtggaggaacaaaatagacaaattttggaactgagaactgctntaagttctcatatcggtgacatacagctcgggacacttgtacaaggcataatgaaccactacaccanactctttggcatgaaatctgctgc

SEQ ID NO: 219653 - DNA, 532 bp, Glycine max
cgtttttcgcttacgctgcaaactctgataaaatctctttagactacgcgctattcaaggaaaaccccggcgtggttgattccggtaatggtttaaaatacacgaacttattcgacgctcaaatcgacgccgttttcgctgccatgtcagcactcaaatacgacgacgttaagatcgcggtttcggaaacgggttggccttctgctggggactctaacgagattggagccagccccgacaatgcggcgtcgtataacggaaacttggttaaacgcgtgttgagtgggagtgggacccccttgaagcaaaatgagtcactcgatgttttcctcttcgcgcttttcaatgagaaccagaaaacgggtcccacgtcggagagaaactacgggctgttctaccccactgagaagaaggtttacgatattccgctcacggcggaggaaatcaaggaggcgccgccgtcaggagtagggaagagccaggttccggtgagtggtgagggtgtcaacgacgacgtctaagggccagacat

SEQ ID NO: 219654 - DNA, 533 bp, Glycine max
ttctttttcatcaatcatcaccagtggttcttttccttctgagaagatcgaattgtgttttgcaaaaatgggagttccagagaaagaccctctttcccaattgagtttgcctcctggttttcggttttaccccaccgacgaggagcttctcgttcagtatctgtgccgcaaggtcgctggccaccatttctctcttccaatcattgccgaaattgacttgtacaagttcgacccatgggttcttccaagtaaagcgattttcggtgaaaaagagtggtactttttcagccccagagacaggaaatacccgaacgggtctcgacccaacagagtagctgggtcgggttattggaaagccaccggaaccgacaagatcatcaccaccgaaggtagaaaagttggcataaaaaaagccctcgttttctacgttggcaaagccctcaagggcaccaaaaccaattggatcatgcacgagtatcgcctcctcgactcttcccgaagaacactggcaccaagcttgatgattgggttct

SEQ ID NO: 219655 - DNA, 524 bp, Glycine max
agaaaacatagaacgaagaagaagaacagatcagaaaaatggcgtccaaagttccaaagaaggccaatctcctggatcaccactccatcaagcacatccttgacgagtctgtctccgaggtcgtaacgagtcgtgggtatgtggaagacgtgagattgagcaatgcgaggcttttcattggggcaatcatcatcgtcattgctttattcgctcaattctacaagaagaagttccccgaaaatagggattttctcatcgcttgcatcgccttgtatgtgatcttcaatgggttgttgcagctgatcatatacactaaggagaaaaatgccattctgtttacttatcctcctgttggatcctttactagtaccggtttggtggtttcctccaaattgcctagattttctgacatgtacacactcactatagccagcgcagatccaaaatcaatttctgcaaatgaaccagtacatttcaccaaaagtgtcactcagtggttcactaaggacggaatcttagttgag

SEQ ID NO: 219656 - DNA, 569 bp, Glycine max
gaaggacaagagagccgaaaagaggagcgttgtgttgttaggcttgtttgtattgtgttagtaccattttctaatctcatcatctaacccttccatcgtagtttccacatttctcctaccgaaaagtcaaaactacccactcacccaggtaggcacaggcagcgatggacgtaggagccggcgacgatcattccccggaagccgtcatatcgcggtggaaattcgcggtgtcgcagcagtaccagcacatgctggacaaaacgacgccgcacgttctccggcggtggatcgggtgcctggtggttgccgccgtgtacgtgctccgcgtgtacttggtccaaggcttctacatcgtctcctacgccctcggcatttacatcctcaacctcctcatcggcttcctctcccctcaggtcgatcccgagataggaaaacggtcccaccctccccacccgaggatccgacgagttccgccctttcgttcgacgccctcccgagttcaagttctggtactcgatcacaaagggctttttgcattgcatttgtgatgactctctttagtgcatttg

SEQ ID NO: 219657 - DNA, 551 bp, Glycine max
cacctttgttcactcttcttctcttgcggctagggttttagcgcagcttcttctagatttaaggaagatgggtaaggaaaaggttcacatcagtattgtggtcattggccatgtcgactctgggaaatccactaccactggtcacctgatttacaagcttggaggcattgacaagcgtgttattgagaggtttgagaaggaagctgctgagatgaacaagaggtctttcaagtatgcctgggtgctggacaaacttaaggctgagcgtgaaagaggaatcaccattgatattgctttgtggaagtttgaaacaacaaagtattattgcacagttattgatgcgcctggacatagggatttcattaagaatatgattactgggacatcccaagctgactgtgctgttcttatcattgattcgaccactggtggttttgaagctggtatttccaaggatggacagactcgtgaacatgctctgctttcattcacccttggtgtgaaacagatgatctgctgctgtaacaaaatggatgctactacacccaagt

SEQ ID NO: 219658 - DNA, 505 bp, Glycine max
gagaacttaaactcagactcctaaaatagtttgatcactttcgcattgacctgtaaccttttctctccggttaccaaaaccgtaagttgctgaacatggacccgcaatcgccggttcgggcggaactggagcctccggttccgacgttctccccacggttcgcgctcacatccagttcgcagcggaaaatcgcgatcgcggtcgatctgagcgacgagagtgcctacgcggtacgctgggcggtgcagaactacctgcgaccgggcgacgccgtgatcctcctgcacgtgcgtcccacgagcgtcctctacggcgcggactggggctccgtggatctgagcgcggcggaggacggcggcgacgaggagtcgcggcggaagctggaggacgacttcgacaacttcacggcgacgaaggcgagcgacctggcgcagccgctggtggaggcgcagatacccgtcaagatctacattgtgaaggaccacgacatgaaggagaggctctg

SEQ ID NO: 219659 - DNA, 498 bp, Glycine max
gaggcttttcaacttcaaaaaggataaagatggctactggaaatggtttgctgggaatttagcatctgggggggctgctggggcttcctccctcttgtttgtctattctttggactatgcccgaacacgtttagcaaatgatgcaaaggctgcaaagaagggtggtgagaggcagttcaatggcttgattgatgtttacaggaaaaccattaagtctgatggcattgctggcctttatcgtggtttcaacatctcatgtgttggaatcatagtgtaccgtggtctttactttggaatgtatgattctctgaaaccagtggtcttggttggtggattgcaggatagcttctttgcgagttttctcttgggatgggggatcacaataggtgccggcttggcctcttaccccattgatactgtgcgtagaagaatgatgatgacatctggagaagctgtaaaatacatgagctctttggaagcattcaagataattgtcgc

SEQ ID NO: 219660 - DNA, 484 bp, Glycine max
ggaaaaatgcaaatagccaactgaggattcttgcctgcttccatggtgcaagaaatattccatcgatgataaatttgattgaggcttcaagaggaatacagaagcgtgatgcactttgtgtgtatgcaatgcaccttaaagaattctctgagaggtcctcatcaatgttaatggtacacaaggcaagaagaaatgggttgccattctggaacaaaggccatcatgcagattctaaccatgttattgtggcatttgaggcttacaggcaactaagccaagtgtctattcggccaatgattgcaatctcatctatgaacaacatacatgaagacatttgtgcaaccgctgagaggaagggagccgcagtcattattcttccatttcataagcatcaaagattggatggttcactaaatatcaccagaaatgattttcgatgggttaacataagggtacttgagcatgcaccatgctcagttggaat

SEQ ID NO: 219661 - DNA, 451 bp, Glycine max
  unsure (1)..(451): unsure at all n locations
gtaactgcgtgcactctctctctctctacaacaagaattcatctattcatttcagcccatcagcatggcgaaggagaagaaaaacttgtccaacaagaacaagaagccaagcaatgcagacgaggttcacttccgcggagtccggaagcgcccctggggccgctatgccgccgagatccgcgaccctggaaagaagacccgcgtctggctcggcaccttcgacaccgccgaggatgccgcccgcgcctacgacgtcgccgcccgaaacttccgtggccccaaagccaaaaccaacttccccttcctccccgacaacaacaccaacgttaacctcaacaagaagaacaacaacgttaacgttaaatctgacagtcccagccagagcagcaccgtggagtcctccaccccggagcgtgaattcacgcgccgtngccgccccgccgaatggatc

SEQ ID NO: 219662 - DNA, 544 bp, Glycine max
  unsure (1)..(544): unsure at all n locations
gaaaacgttctccttcgagaagccaaagcaggaattttgaaaccagcttttacaataatagctgatcatgagatgaaatgccttttgttattgattcgtggcacacatagtatcaaggatactctaacagctgttacaggaaatgtggtaccatttcatcacactgttgttaatcaggggggtgtcagtgatttggttttaggttatgcacattgtggaatggttgctgctgctcgatggattgcaaagctcgcaactccttgtctccttgaagcacttggtcactaccctgactataatgttaagattgtagggcactctttgggtggaggaactgcagcaattctaacttatgtgttgagagagagaaaggaactgtccgtcgctacatgtgttacatttgctccagctgctcgtatgacatgggagttggcagagtcaggcgatagttttattacttctattataaatggagctgatttggtacctacattctcagctgcttctgagatgactngcgttctgaggtgacagcatcagcatg

SEQ ID NO: 219663 - DNA, 457 bp, Glycine max
taattttcgacgtcttcaggggagagcttggaaaatggattgctgcatgtgctgttgaattacgccttttccttccaagacacttacctgataggctggaacatgcctggggctctgattcttcttatcgttggggctccttctctaatggcgagcacctttagagacaacattgttggggtgggagggtgcctcatcattgcatgttatttgctgcaggaacacattcgggcttgtggtggtttcagaaactccttcactaaagctcacggcatatcatattccattggcatactacttatgggggcttatcccatctgggcgctggtggtcatacttttgtaggcaccaccatttggacttggttgatatgtgagacataaaccaagtgtcgtctgtatcatccactcggtgccacttgatatctgtagacacccggccattgatttgtgactat

SEQ ID NO: 219664 - DNA, 297 bp, Glycine max
gtcactgctttcatcactgtggctttgacatacttccaacttgctgctgaggatcatgaatggtggtggagggctctcctttgtggtggatcaactggcttgttcatctacaggtattgctggtgttactactatgcacgatcagatatgtctggtgttatgcaaacttcgttcttctttggctacatggcctgtatctgctatggctatgttcctcatgctctgtagcgtatgattccgtgcctccctgctctttgttcgtcacataataccggccatcaagtgtgattagctggg

SEQ ID NO: 219665 - DNA, 526 bp, Glycine max
ggaacacaaaaaatggcagatattcctcgggtgaagcttggaagccaaggcctggaggtttccaagttaggatttggttgtatgggcctaagtggagtgtacaacgatcctgttcccgaagaggttggcatctctttgatcaaacacgcattcaccaaaggggtcactttctttgattctgcagatttgtatggagcacgtgccaatgaagttgtggtcggaaaggctctcagggactttcctcgagatcaatttcagatcgccacatagtttgggattgtcaaaatggaaaatggttatgtgatagtgaacggctcccctgaatatgtccggtcctgttgcgagggtagcctgcatcgccttggtgtcagctatattgatctgtattatcagcaccagggttgacacaactgtacccattgaagacaccatggcagagcttaagaggctggtccatgagggaaaattaaggtacataagcatgtcagaagctagccctgacacaatatgcaggccatgctgtgca

SEQ ID NO: 219666 - DNA, 437 bp, Glycine max
gctgtgtttagtatattctggagacatgtgtctacccaagagaacctgaatccatgaaagaactgagagagttgacagcaaaacacccatggaacatgatgacaacctctgcagacgaagggcagttcttgaacatgctccttaagctcatcaatgccaagaacaccatggaaattggggtctacactgggtattcacttcttgccaccgctctcgctctttctgaagatggaaagatcttggccatggacattaacagggagaattatgaattgggtttgcctgctattaaaaaagctggtgttgaccacaaaattgaattcatagaaggtcctgctctaccagttcttgatgaaatgattaaagatgagaagaaccatggaagctatgacttcatctttgctgatgcggacatggacaactacctcaactaccac

SEQ ID NO: 219667 - DNA, 465 bp, Glycine max
aattgttgttgttcttccctttttgtgctttttgattcagagatttttggttttcgtttttttttttcacaaggagaaagttcggtgtctttaagttgaataacttgtggggacatatttgatttggcgcttgttcttttggtgcttgcctcatgggaaacagtgaggaagagaaatctgttaaaactggaaggccttcttgttcacctgcaacaactgagcagaccaaccaacctaatattcacgtctatcctgattgggctgccatgcaggattatgggccaagagtcaacattccaccatacttcaactcagctgtggcttttggtcatgctccacacccatacatgtgggggccgccacagcctatgatgcaagcttatgggccaccttatgcagcattttattcgcatggaggggtttatactcaccctgcagttgctattgggccacactcacatggtc

SEQ ID NO: 219668 - DNA, 395 bp, Glycine max
gtaactgcgagacctatacgcatctatggggcgggaacctgcgaggtgttataggccaattaagaacaagccataccccaagtcacggttctgccggggcgttactgatcccaagatcaagattgatgatgttggcatgaagaagaagggcgttggtgagctttctttctgcgtgcatctggatagtggggagaaggaaaatgtttggcgcgaggccctggacgccgccgaggatgctggccgcacctacatggtcgacgtccgtggataggatgctctccacttgagagtcaaggtgcactcactccatgtccctacgatcaacatgacgcttacatgagcagcagctgcgtggacgctaactgtgacaggacgagcctgagcagcaccgcgga

SEQ ID NO: 219669 - DNA, 402 bp, Glycine max
atcaccttggctccgctctttggtttgctcaaccgatctccgcaacaatggtgaacgttccgaagacaaagaagacctactgcaagagcaaggagtgctggaagcacacgctccacaaggtcacccaatacaagatgggcaaggacagcatcgccggtcagggaaaacgccgttatgaccgcaaacagtccgggtacgggggccagaccaagcccgttgtccacaaaaaggcgaaaaccaccaagatacttgtgttgaggctccagcgccaaggatgcaagcatgtctcgcagcacgctatcatgaggtgcaagcactttgagatcggatggtgactagacaggaaaaggaacatctctcttctagatgctatattagaatttgcaatttcacacactctct

SEQ ID NO: 219670 - DNA, 522 bp, Glycine max
caattccaaccaagaaggaacaggttttctcaacatactctgacaaccagcctggtgtgttgatccaggtctttgaaggtgaaagagcaaggactaaagataacaatttgttgggcaaatttgaactttctggcattcctcctgcccccaggggtgttcctcagattactgtgtgctttgacattgatgccaatggtattttgaacgtctctgccgaagataagaccactggccagaaaaataagatcactatcaccaatgacaagggtagactgtcaaaggaagatatcgagaagatggttcaagaggctgagaagtacaaatctgaggatgaagagcacaaaaagaaggttgaggccaagaatgctttggaaaactatgcatacaacatgaggaacactgtgaaggatgacaaaattggtgagaaacttgatcctactgacaagaagaagattgaggacgcaattgagcaagctatccagtggctagacagcaaccagctcgcagaagcagatgaatttg

SEQ ID NO: 219671 - DNA, 449 bp, Glycine max
cacaacaaacatatctcttcctcttctgtccctcaatggaaggatcaggatccggtgtggttacagtctacggcaacggcgccatcaccgagaccaagaagtcccccttctccgtcaaagtcggcctagcccagatgctccgcggcggcgtcatcatggacgtcgtcgacgccgagcaggcccgcatcgcggaggaggccggtgcctgcgcggtgatggccctggagcgtgtccccgccgacatccgggcccagggcggcgtggcccgcatgagcgatccgcagctcatcaaggatatcaagcgggccgtcaccatccccgtgatggccaaggcccgcatcggccacttcgtcgaagcccagatcctcgaagccatcggcatcgactacgtcgacgagagcgaggtcctgaccctgggcgacgacgccaaccacatgaacaaacacaac

SEQ ID NO: 219672 - DNA, 458 bp, Glycine max
attgaattctccagagagaagaagaaacttaatcgatcatcacttcacttcactaatacatcatggcagacgagacccagaacaagtatgagagctctgaggttgaggtccaggatcgtggtgtttttgactttctcggtgagaaaaaggatgaagaagacaagcctcatcctcaggaggaggtcatcgtcaccgagtttcaaaaagtcactgtctcagaccaaggagagaacaagcacagcctcttagaaaagcttcaccgatctgacagcagctctagctcttcatgtgaggaggaaggagaagatggagagaaaaggaagacgaagatgaaggaaaagatagggctgaaagagaagatcgaggagaaaatagagggtgatcatcatcatcacaaggatgaggacacaagtgtccctgttgagaaagttgagggttgttgaaacagcacatgctga

SEQ ID NO: 219673 - DNA, 487 bp, Glycine max
cttcttctcttgcggctagggttttagcgcagcttcttctagatttaaggaagatgggtaaggaaaaggttcacatcagtattgtggtcattggccatgtcgactctgggaaatccactaccactggtcacctgatttacaagcttggaggcattgacaagcgtgttattgagaggtttgagaaggaagctgctgagatgaacaagaggtctttcacgtatgcctgggtgctggacaaacttaaggctgcgcgtgaatgaggaatcaccattgatattgctctgtggaagtttgaaacaacacagtattattgcacagttattgatgcgcctggacatagggatttcattaagaatatgattactgggacatcccaagctgactgtgctggtcttatcattgattcgaccactggtggttttgaagctggtctttccatggatggacagactcgtgaacatgctctgctttgattcacccttggtgt

SEQ ID NO: 219674 - DNA, 481 bp, Glycine max
  unsure (1)..(481): unsure at all n locations
ccaatgccaatgcctcatcaaaagttttcctaggaaactattatgggcgtccttgcaatttggtgacactcttgcaaggctttgagggctatgctaaggacacggtttaccacccggggtgtgatgatggcccacaatgtgcttatgctcaaatagaaggggcagtggaagttgcaaaaaaggttgattatgtggtgttggtcatggggttggatcagagtcaagagagggagtcacatgatagagagtacttacggctgccagggaagcaagaagagctcattaagagtgtggctagggcttcaaagagacctgttgttttggtgctcttgtgtggaggcccggttgatatcacttcagctaagtttgatgataaggttggagggatcttgtgggctgggtacccggatgaacttggaggagtggcactggcccangttgtctttggtgatcataacccangtggaaaactaccaattac

SEQ ID NO: 219675 - DNA, 522 bp, Glycine max
aaactaggagtaggagggaagaagggttgaaggaagaaaaaaagaaaaacacagaaatggagggtgggaacaacagcagcagtaacaacaaccctgatgagttggcggtggggtgcttgctttcgatcaggacaacgttgggcgacgaattcgaaggccaggtcgtcaccttcgatcgcccctccaacattctcgtactccaggagccttccaaacctagccctcgtcgaaatcttaggttgctcaaagccaattacatcaaagacttcacctttctcggccatgcccaagaccctcttgatcccaacacctgcttgcttgacctcaccgctctccaacaaagggaagatgttgctgttagacaagcggaggctgatgctgagaggattgggttggtgttaccagcgaggcacagagcatctttgatgctttgtccaaaacgcttacagtccgctgggacaagacagtcatagttgtgatgaatgagggggcgtgtcagcagtccttatcactctgaatctg

SEQ ID NO: 219676 - DNA, 425 bp, Glycine max
ctcgagccgcaaaatgtcgtgtcccaaatcagtaccccaatcttctttgtaaatgcagcctatgactcatggctgatcaaaaacattttggcaccaggtgctgctgatccccgtggccaatggcgtgaatgcaagcttgatatcaaaaactgctcacctaatcaactcagtgtaatgcaaggattcaggacagatttcttaagggcatttagtgtggttggcaacgccgcatctaaagggcattctatagatggttgctatgcacactggcaaactggaatacaagagacatggctgagaaatgactccccagtggtggccaagacatcaattgcaaaggcagtgggtgactggttttatgatcgaaggcccttccgtgagatagattgtgcctacccttgcaaccctacttgccataatcgtat

SEQ ID NO: 219677 - DNA, 479 bp, Glycine max
ctcgagccgaatcggctcgaggaagaagaacatcggctgttcttaattggtctccagaagctaggcaaaggagactggcgtgggatagcacgcaattttgttgtatcaaggacccctactcaagtagcaagtcatgcccagaagtattttatccggcagagtcatgctaccaggagaaagagacgttccattctttttgacatggtttcagatatgtgttcagatcaaccttctgtgccagaagaacaagtgttggtgccaccttcccagaactcacaaccttgcaatggaatatcacagacttcattaaatctgtccctcaaatcagaatttgaacccatggagactacttctcaagataatgcgcagcagaccaatgaaactatgatgggatcaatcggactgacaccaatggctcctcatggattctttcctgcatatttacctgttccattgtccatgtggccatcaactgtggc

SEQ ID NO: 219678 - DNA, 410 bp, Glycine max
gagaaagatgtggttccaaaacatgaagataaagctaattgttctgggtatcataattgccttgattctcattattgatctttccgtttgtggtggcttcaactgtggtaaatgagtcttcccacatcctgacttcaactgtggtatttgtctcctcacttgataagattgttgctagcacattgccattgcctctactgtcaacatagcgcttttgactttttgggatttacattcttacgacttctccgatgatgaatattatatggcattgcttgcatagtgtgaattatttagcccttatcatcttgactcgcatagcataaagctaatctgtcattctctatactttaggagggagtttcagcatttggtgtgaggattatgttctttaattctgcttacatatt

SEQ ID NO: 219679 - DNA, 442 bp, Glycine max
aagatggagatgtatcagatctggagcaggagaatagcgttgggagcgttcgcgtttgttctgcttttcctatcggcctcagcagacgacgtcgctgtgctctctgaagataacttcgagaaggaagatggtcaagacagaggagctctcgttgagttctatgctccttggtgtggacactgcagacagcttgctccagaatatgaaaagcttggtggcagcttcaagaaagccaaatctgttttaatcgggaaggttgactgtgatgagcacacgagtttgcgcagcaaatatggagtctctgggtacccaacaattccttggtttccaagaggatctcttgaacccaaaaagtatgaagggccacgcactgctgattcacttgctgagtttgtgaatacggacggaggaacacatgtgaagattgctacagctccttaca

SEQ ID NO: 219680 - DNA, 435 bp, Glycine max
acaaaaaaaataaactggggagaagcatgttgttgatgttgggactatgcttcctattgttctctgcatttccacttgcgttctctgagagatgccacccacatgacaagaaagcgttgctccaactccagaaggacctcggcaacccttatcacatcatatcctggaacgcaaaggaggattgctgcgagtggttctgctgcgttaagtgtgacgagaaaacaaaccgggtcattagcgctgtcttatcatacccttttccagacaccaatctctcggtccagataccttcctctgtgggtgacctcccttacctggagtccgtcgtcttgcacaaattcgccaaactggtgggcccgatccagtccgcaatcgccaaactcaccaaactcaagtaccttgatctctccaacaacagtctgtctgggccaatac

SEQ ID NO: 219681 - DNA, 514 bp, Glycine max
ctcgagccgaatcggctcgagcattcctagcagcactggagctgccaaggctgttgggaaagtcctccctgctttgaatggaaaattgactggtatggcattccgtgttcccaccgtggatgtctctgttgttgacctcacagcgaggctggagaaagaagcttcctacgatgaaattaaaaatgctatcaaggaggaatcagagggcaagttgaagggaattcttggttacactgaagatgatgtggtctccactgactttatcggcgatagcagatcaagtatttttgatgcaaaggctggaattgcattgaataagaactctgtgaagcttgtttcttggtacgacaacgagtggggatacagctcacgtgtcattgatcttcttgtattcgttgccaagaagtctctttaaggtgttacttcaaagtagcttgacttcacattattaccgtatgtttatgtttagctgcgatttagtgtcttgctcgagcaaacaatgagaggtctgaat

SEQ ID NO: 219682 - DNA, 490 bp, Glycine max
attccctggagtgtgtggtgtggtgttgctgttgcaaattgcaacactcagtcagcactgcaccactgcatttcatttcccagcttagctacaactacaagcccacgtcgctttcataaaaccacacccacctgccaccatcactttccccaaaacgcaacatcatcaaaacttaaactcagagaatcagagagagagagagagagaaatgagtgaagaagccaaaaagaacttcgccggagctctaacggcgaggcccaactccgatgagccgaaaccggcaccggtgccagctgttcccccgaagaaggtcatcatcaagagcgctgatatgatccccgacatgcagaaggagggcgctgatatcgccgtcgccgcgtttgagaagtacaatgtggagacagacgttgcggagcatataaagacggagttcgataagaggcatggccccacgtggcattgtatcgctggacgtaattctggctcatat

SEQ ID NO: 219683 - DNA, 414 bp, Glycine max
cgcaagcaaaaagaaagaatcccaggcgaggagaaagatggaggggaaggagcaggatgtgtcgttgggagcgaacaagttccccgagagacagccgattgggacggcggcgcagagccaagacgacggcaaggactaccaggagccggcgccggcgccgctggttgacccgacggagtttacgtcatggtcgttttacagagcagggatagcagagtttgtggccacttttctgtttctctacatcaccgtcttaaccgttatgggagtcgccggggctaagtctaagtgtagtaccgttgggattcatggaatcgcttgggccttcggtggcatgatcttcgccctcgtttactgcaccgctggcatctcagggggacacataaacccggcggtgacatttgagctgttttt

SEQ ID NO: 219684 - DNA, 364 bp, Glycine max
cgaaatcgcacaagccgattacatgaaattcatccttcactccctcaaacacccagcctccgacgtcaacggcgtctggatcggtcgcatctgcgcttccaacgacgtcgtcaagatcggcgatgccgtccctctcttccactctaacatacctcttcttccccagatggagatatctactatcatgatagaggaatatcggtctgctcaagggatgaacatacagggctatcttcacgcgaacgagagatacgatgacagtgagcttggtggagtggcgaagaacatcggagaccacatatgccgatactttaccgaagccggcgttctattgtgagactgcaagaaggttgatgctgcgaaa

SEQ ID NO: 219685 - DNA, 478 bp, Glycine max
gcttgatcagatacaaccgctataaaggtcttccattgaataaagttagagagatttgcaaatgtgttttgactggtttggattacttacatactgatcgtggtatgatccacactgacctaaaacctgaaaacattcttctatgttcaaccattgatcctgccaaagaccctttaaggtctggactttccccaattcttgagcggcctgagggaaacacaaatggtggagttacaagtcttattgagaaaaggttgagaaggagagcaaggacagcagttgctaagatatctggaagaagagcatcaatgggaggaataggagatgctgcaaagactggtagaaatattgatgggattgatgtgagatgcaagatagtagattttggacatgcttgctgggctgataagcagtttgcagaagaaatacagacagggcagtacagagcacctgtaagtatactgaaagctggctattt

SEQ ID NO: 219686 - DNA, 427 bp, Glycine max
tagttactgagcttggattctcagatattggatccaatgcgaattcacctgatgtgggacagcttatgggcagaaagttcgccggatctgaggagatttatgttgtacctaaaacaaaggaagacttgctgaacagcattagtgagattcattatgttgatgttggtctcaactctgctggggcatacttaactaaccatgatgtgtttgagagaatctccaagaggctcatgcaaggagcttctgaactccgttttatcctacatggaactccgagacaatggagtgacaagcggcgagattggatacgaaacgaaaaggacagaatgctgcgtctgcttgaatctgaagccccaaagagtgggggaaaattcaaagtattagataggttttattatactgatcagccttcaagcatgcagatgca

SEQ ID NO: 219687 - DNA, 350 bp, Glycine max
agctccgctaccaccgaacacgttcgtacaatggcgggggtgacgaggagatggaacggggaaaacttaggtctaccctagcacccatgatcctgaagctcgtgctgagctgcgcaatccaaacggcggcgatctcattctatcgctagccgaacccagcatcgataccgaccctgggcggggctggacggggagagatcggaccagaggagctccaaccacgagcagagcgagacaagaatgtggcccgagtgagactacaaccattgactggttgtgatggagtttccatacggacctgcacacactcgtgaacaacggagtgacacttacgttgacacttgtgccac

SEQ ID NO: 219688 - DNA, 495 bp, Glycine max
gtggtcttgttgccattctgatctaaagcttgtgtctttctgcttcgcttgcatcttctgctgcgtaaagttgattcttttctgattcttccgtagatttcatctctgaaactagttctaatactttatctacagatctctatattctaggtgaaggttcgcttttgatccggcttgggagttttgatagacttgattttaactctttaagagccatatgctcacagtggtcggatatagtacatcagaagttcacacacgagatatatataattattcttgggtaccacctgcagaatgtcattccgcagcatagttcgtgatgtaagggatagcttcgggagcttatctaagcgtagccttgatgtcagacttactgggcatcatagaggaaaatctcaaagatcagcgcaggatttgcatgaccaacctctagtaattcaaaatagccggtgggccagcttacccgcggaattactatttgatatcattaga

SEQ ID NO: 219689 - DNA, 528 bp, Glycine max
cgctcgagccgaatcggctcgaggtgaattcccctgctgggggacgagaggagcgatgtgatatctgctaaagtttcttagggcaagggatttcaaggtgaatgaggccttgaacatgatcagacacacgttgcgatggagaaaggaatttggaatacagggtctagtggaggaagatcttgcaagtgattgggagaaggtggtgttcaaggatggataccacaaagaagggcacccggtgtactacaacgtctttggggagtttgacgacaacgagttgtacagcaagacgtttttggacgaggaaaagaggaacaccctcataaagtggaggattcactccttgcgacaagagcgttagaagccttgacttctcttcgaatgggatatcgacaatagttcatgtgaacgacctttataactctcccttactgtgcaacatggaactgaggcacgccaccaatcatgcccttcaactgcttgaggacaactaccctgagttcgttgccaagcagatattcatcaatg

SEQ ID NO: 219690 - DNA, 499 bp, Glycine max
aaggacttaatgaagaaattaagtaaactagttccacaagagtttctgtcttcatacaagacaaaagaaccaccaaatgtatgtaattcagtaaatattgtgctaccttgtactacttgatctaattggtattgttgcctttacacccatgagttacaagttctcaagtatgcataacaaacgatttcatagggaacaactactaccaatgctggaaactgaaaattcaagaatctgcaatggggaaaacagatccaattcgatcacccaatcgatagcacttgatattaaccccatatggaccaagctgaatgtggttatcctccctaccaacatagaaacacagggtatacaaagcaatttcaaattcagggctcactccaaccaaagtgctggatacagattttaggacaccattccattcaaactgaatagtcagaagctgagcttcagagtcaggagtttctccccgtcgacggggaaaaatatatccttgata

SEQ ID NO: 219691 - DNA, 520 bp, Glycine max
gatcatgaattttgtttcaacaaaagattaaataactttgaaattcattaaacacggataatatagataaactcataaacaaaatttgaaataaacgatcagtcttccctgaaacaaaagtttggccaacttaaggagaaaaaaaactcactacccgagaatccataatatcaaaacagaaacactacaaagtttataagtgatggcaaccaaatagaattccagcatttccatccaattaacataattatgctttgaggcgtccaaagaacttctgcttctcctgtgtggtctggaagcgaccatgcccaaactttgaagaggtatcgataaacttgagtttgatctcctcaagagcaacacgagaagtctgcttaaggagggattgacgcaatgtaatgaccctcttcttgggaccaacacagcatcccttgaccatgataaaatcatccttaacaacaccatagtgagggaaaccacccattggggtaatgtctttctcggtcctatcaaactcagt

SEQ ID NO: 219692 - DNA, 372 bp, Glycine max
tctatttacacttctcttctgtgtttcttagaagaattaagatggctaccttgactggggctccagttcctccttcccccagagatgatgccatgcagctttaccgcgcttttaagggatttgggtgtgaaacaagtgctgtaatcaatatacttgctcatcgagatgctacacagcgtgcctacatccagcaagaatacaaagcaatgtattctgaggaactttccaagcgcttagctttctgagcttagtggaaagttagagactgcagttctgctctggttgcatgaccctgcaggacgtgatgcaacaatcattaggaagtctttaacagcagacaacaaaacccttgaaggggctactgaagttata

SEQ ID NO: 219693 - DNA, 467 bp, Glycine max
agctccactacttaagtacagaatagaagaattggaggttttaagaggagatggaacagggaagagaaaggactttgacagaatctatgattatgatgtctataatgatttgggcaatccagatggtggtgatcctcgcccaatccttggtgggtctagcatctatccctaccctcgcagggttagaacaggaagagaaaggaccaggacagatcccaacagtgagaaaccgggcgaggtttatgttccaagagatgaaaattttggtcacttgaagtcatcggatttccttacatacggaatcaaatccttatctcacgatgtgatacctttgttcaaatctgcaatttttcaattaagggtcacatcgagtgagtttgaaagcttcgaagatgtgcgtagtctctatgagggtggaattaaattgccaacagatattactgagccaaattagccccttaccagcc

SEQ ID NO: 219694 - DNA, 462 bp, Glycine max
caagtacattacaaatacttaattaaaaaaatcaattatttttttagtttactactgcatataatacatgaaaaaagtatatataattatgactttccagaaaaaaaaaagatagttaaaaataaaataaatactgaagtaaaaaatgtaaatagtaaaattattttacccacaatacatgaaaattaaactcctgaatatatacattgcacaaactacacagatgttcatttatgttaacaagatagaatagaaatagacttgaagcagacaagattcatggcttccacaacttcattgtgcagtcttcactaaaagttgcaacaagattcctatggggatgatgagtgacacctataacttccttctcgtggaccttcattagatgctccaatttgccagatagatagctgaagcagtatatattcctatcttcaccaacacagtaaatccattctcctt

SEQ ID NO: 219695 - DNA, 531 bp, Glycine max
tacacgatggagcggttgaagtgggcgcaactgggtgagaggctgaagaccggtggggcccagatggggcgaatggtgagcggaaaagtgaaggagatgcttcaggcgccgacgccggagtccaagatggtggacgaggccacgctggagaccatggaagaacccaattggggcatgaatctcagaatctgtggcatgatcaacagcgaccagttcaacggctctgaggtcgttaaggccatcaagagaaagatcaatcacaagagccccgtcgttcagaccctcagccttgacctcctcgaagcctgcgccatgaattgcgacaaggtcttctccgaaatcgcttccgagaaggttctcgatgagatcattcgcctcatcgataacccgcaggcccatcaccagacccgcagccgggcttttcagttgattcgggcctggggcgagtccgaggatctcgcttatcttcccgtctttcgtcaaacttatatgagtttgaaaggaaagggatgaaccgttgacatggcggga

SEQ ID NO: 219696 - DNA, 532 bp, Glycine max
gcagttaaacaaatacaaacagaaatacaaataacaagcagtcagtacattttttttttgacaatgcatataaatatatttatgttagtaataaaagtctatatttagtccagagtgttgtagaaacaaactattgactataaacatgattctaaatttcggcagcaaaggatttaccacatccacaagtctgtgtcgcgttaggattcttgaaagagaagcctcccgcaatcagagcatcactgtaatctaattgcatgccaaatatgaagagtaggctcttaggatcacaaacaatttcaaaaccttcatactcaatgattgaatcatctggccttttattaaccctgtcttcaaaatccattgtgtatgacataccagagcacccaccctgtttgacacctattcttaaacataaatcttgatttcgttcagacctcatcttattcaagtgcttcagcgcattatccgtaacagaaattgcaggggccagagaccctgatgctggtgcagcaggaatagaaactgatcg

SEQ ID NO: 219697 - DNA, 541 bp, Glycine max
gatggaaaattgaatggctttcttttacaaaatgggttgcttggatgctttcattacaaaattgatgacgatagaaacaatgaagagacagaataataatacaagatgtttaggaatttcagcatttcttcttccaccttggctgcacataaataagagctcagaagcatcaggttgaacaactactccaacgaagtcacctaaaataccaataacttcttagtaaaccactggcaacatgatagcctctcaaatcattcctatcaggcggcgtgccaaatcagtatgcaatgcatggccacccttgtacgcaacgatatgagccactgggagtccttgattcccaaactgggcaaacagtgacagatcaccaataaggtctaagatcttgtgacgacatggttcatcactgaaatgcaaaggtggattcaaccaacctttactggcactgcacacaatggcattttctagagaacctcctttgataagtccagcattgcgcatttgctcaacctcttcataaatgcagaaggttcttgac

SEQ ID NO: 219698 - DNA, 553 bp, Glycine max
aatagacaatttactagttattacggtaaatggtcacatactacaaagggtaataatatcgcaatcgctgaacaatgttatttaacaaaaggatcgaccacaaataaaaacaacccaactccaatcatcatcaccacgtccagcaaaatacattcaaaagctatctaaaaatttgaggaacccacagtggcgcattagaaaccatgaccatagaatttatgagagaaatattatgggcaccgtgcctctccaacaatccccaaaacgttgcttaggcttcagcaaacccaagctcagaaagcttttggtgagcctcagcgtaatcagcgaagaaggcatcttccgccgatgcatatttctcaacaagagggcggaacacagggtcagacaaaagtgccttgtcagaaggtagctgaaggaggccttctttctcaccactcaacaactccttgaagtatgagttgtcgaaaataagaggattagaggtccagggaccctcgaatccagaacgctccttgtgcgcagctccaatagtgtgacccccagacagagc

SEQ ID NO: 219699 - DNA, 359 bp, Glycine max
agtgtggatatcataaacattttcactctcatcggggacagcggtacacgcatacattgacatcttgccatcgatagcagcactcacatgcatacataacatagtaattaacaccatgaacatgcccttctacccaactctaacctacttgcacagtacttattgaaataaaaaataaaaaaacaaactaacaaacaagagtgacatcggaagattaaaaaacaaagcgtcttaatcctcgcatccccatgaacctgctgtggtcttgatcggttcattgaaccaatcaaccaacccatttaaagaaaaacaccttaattattttttgcataatatcttacagatttcttccacataga

SEQ ID NO: 219700 - DNA, 511 bp, Glycine max
ctcttctgtgaattaaggtctaatgccttgattacacaagtgtgctaacctaaaatcttacgcaccttttggttatgggcatatttatttgcaactattgaggttgagcattactttacgtggacacactattaggaatccctctacatgtaacgccgggtcgagaggtaggtgcaagtaactcgtaaggtaaaacccctgcgccacaacggttcctgagtgatggatcgaggttccttctctcaatctccttctctatccgtctgatctctgcggagaagctacagaatgcctcagtgatgtctgcgtcacctgaccaaatggatgagtgtcggcgctctcccaaatactcctcgtcagatgagtgggtagagagtatgtcaactatagacatatattttgtagcctgtaacacgctgggcaacgcatttaggaaatacttttggggatctgctaagaaattggcatattctgcctcatcctctggaaatgggattaatcttctcattaa

SEQ ID NO: 219701 - DNA, 508 bp, Glycine max
  unsure (1)..(508): unsure at all n locations
aacgtgaagatcatcatcacaaataagataaaatcaactcagcccgtcattaacaaggccatggaacaatttcagtgttatacatatgcacattattttctcgaattaagattatcatcacaaattaatgtcccccacaacttattcatgccagattttagaacagcaattcatatcacagctttgaaggcgactgataccagccccacggttcatcagatatgtacttggtcacttgcttcacacttaaatagttctcgagtccccattctcctagttcacgaccaaaaccactacgtttaacgcctccccatggagcttgaatgaagcttggttgagcacaatttatccatacaattccagcctgaatagcctttgatatgcgctcgcatctttctagatcttttgacattacagcagaccctaagccgtagtgtgtgtcatttgctagttcaatagcttcttcttcggtactgaatgttntcacacatagcacaggtccaaaaac

SEQ ID NO: 219702 - DNA, 464 bp, Glycine max
agtatgaaggaaatactctgataaaacttgtttgtaagaatatataaatgaagaaaaacaaaaataaaatgaattaaacttttgtaagataaaattaacttatacatcttattttttgaaaaacttaataacagaacttgtataataacatttgccatagtagcattagtgtgtgaagctgggggagaacctctttatgatcaatcaatcatgatagatagagacataaacatcatcttgagctatataccatcaatctgcatttgcaatgtgtggcgctgctctaattaattttcccgaatatgagagaccattgttgttgatagctggttggtgccccacgaacaaagccacatgacccataagcttgtcttttctagaaaacgaggtgccacacgagcacagccacttgagatccccacagtgcttctcatgtgtcctcagatcagagagcaccgagaact

SEQ ID NO: 219703 - DNA, 514 bp, Glycine max
aatagacaaattactagttattacggtaaatggtcacatactacaaagggtaataatatcgcaatcgctgaacaatgttatttaacaaaaggatcgaccacaaataaaaacaacccaactccaatcatcatcaccacgtccagcaaaatacattcaaaagctatctaaaaatttgaggaacccacagtggcgcattagaaaccatgaccatagaatttatgagagaaatattatgggcaccgtgcctctccaacaatccccaaaacgttgcttaggcttcagcaaacccaagctcagaaagcttttggtgagcctcagcgtaatcagcgaagaaggcatcttcgtccgatgcatatttctcaacaagagggcggaacacagggtcagacaaaagtgccttgtcagaaggtagctgaaggaggccttctttctcaccactcaacaactccttgaagtatgagttgtcgaaaataagaggattagaggtccagggaccctcgaatccagaaacgct

SEQ ID NO: 219704 - DNA, 413 bp, Glycine max
cgaatgcacactgttcttactttttactcttaatttaattttcttgatcgagacccaccgggcgttttagagagaaaaccatgagagatcggataatgggtccgcttcagtaatggagaaaagcctacggtgccctctatgacaccaccaaagtgggtctggcccatgtcaatagcgattacgcggagtgggacgttgccattgtcgaagccacgaaccacgtttagtgtacccccaaagagaggcacctgagaaagattctgtttgccacgtctgctgtgaggcctatggctgatgttggttactgaatacatgcactttcgcggcgggtggcgaagacgcggaattggacgggggctttgcaaacactgatagtcattcgtaggttattgagggaggggggtcctactttt

SEQ ID NO: 219705 - DNA, 485 bp, Glycine max
gttcccggtggtcttgcttgggctttgtccaaattcaagcctgcgattcccgggccttgcggttacccggtggtgggcctggtttgggctttcatagggcctcttactcacagggtccttgcaaagttggctgaaaccttcgatgcaaagcccctgatggcattctcggtagggtttactcgctttatcatctcttctcaccccgacactgccaaagagatcttgaacagttctgcttttgcggatcgtcctgttaaggaatccgcttatgagcttctctttcaccgcgcaatggggttcgcaccctacggtgagtactggaggaatctgaggaggatttcagcgactcacatgttctctccgaagagaattgcggcccaaggagtgttccgggcccgggttggggcccaaatggtgagagaaatcgtgggcctgatggggaagaatgatgtcgtggacgtgagaaaggtgttgcattttggatc

SEQ ID NO: 219706 - DNA, 288 bp, Glycine max
tctatttacacttctcttctgtgtttcttagaagaattaagatggctaccttgactgtgcctccagttcctccttcccccagagatgatgccatgcagctttaccgtgcttttaagggatttgggtgtgatacaagtgctgttatcaatatacttgctcatcgagatgctacacagcgtgcctacatccagcaagaatacaaagcaatgtattctgaggaactttccaagcgcttagcttcggagcttagtggaaagttagagactgcagttctgctctgggtgcatg

SEQ ID NO: 219707 - DNA, 531 bp, Glycine max
aaatgaaaaataagtctcggttactttgtgttatgatgaacgatagctcttctcaaaatctcaaacatacttgaatcactacagctggtagctttaagatcttaacaggtaaaaggcggaatcaatctgcttgaggagcagtgcatttgtcaacatctctatgaagcatattgctcagagttcaccatcccaaagctcttcaacggtcttaaaggcaccataggtctcgtcaacaaaaaaagtgcccttaattagtctatcctgcttaatttcagagaacttatccatcacttcttctggaatagaccagtcaaacacatcaaagtttcccttgattctggactcattagtgctcttaggcagcacactatgacctgtttgcagtccccacctaagggcaacttgtgccggtgtcttccccaatttctctgcaatctctatcacaacaggattcttaagaatgtcacttttgagaactcctggtgagcccagtggagaatatccagacagatgaactcctttagattcaca

SEQ ID NO: 219708 - DNA, 453 bp, Glycine max
gatgggtaggaatttttttattttctttgatatattgaaaaggcagaaagaaacacaaattttagtgtttaataaagcaaaatgcacacatcccccaaacaaaacaagccttattcaacccacattggtttcatatcacagaaaccaacaggatgccgccttccttcttactggtcccacccactcgaacaaaagttctacagaaataaaaatggctacaattcttctaccacaaatctgaaaagtctaacaccaaaaatcaaaataaggaaaattaaacaatcaaatccgattgataaaaccgatttttgtctttccctcactcacttttcaggtgatcatctcaatcacttactacctgtagtgagcaggcttgtatggaccctcaacaggcacactgatgtaatcagcctgtgacttgctaagctgggtcagcttagctacaagtttgcc

SEQ ID NO: 219709 - DNA, 520 bp, Glycine max
catattaaagggcatatgtattgagaaaacctccaaaatggcaaattgaacatacacagctcagaacagttcctctctaattacttgtcactcccatattataattcctaaagcagtaactagtaatttgacaatgctacaaagatgaaattatagggttgaaaatgaagatctcgtcattagggtgatgccgggagtggttcagtaccagaaacatgggaagcagcatcttcttttgatatggccacataattcaccggagcagatagtcggttatccctttttccatcttttgatgtggacctgtttccatttttatgagcattaagcgatagccgtcggttaggagtaccattggctcctccgttagcacgaggacctcctgacttactggaactaactggcctagcagggctgggtcttgaaccaaagatggtttattgttccgcgtttcgctgctcgtgatgctttttctgatccctcatgctacgttgttgctcttcccgttcatgtgtgagca

SEQ ID NO: 219710 - DNA, 477 bp, Glycine max
ccataattattattatttaaaaatccaaaatattcttataatcacataatattagttcacaaaataattaaagaaaattcaaatcaactctatgtaagtaaattacgaactccgaccatcattatttatcgaacaaggtgaagtccaataatgtccaattggggaggcaacaactcatttttctttcagggaattctcaacatctattacaaaccggtacttgacgtccctatttatgagcctctcaagagcttcattggcgtactcgattggaatcacctctatatttgggtgaatctcgtttgcagcacagaagccaatcatctcctgtatatcttttgtaccacctgtaacactgccggcaacagtctttgatcctatattaaggctggcagggataaatttgacttgactagggaaaccaactaggacaaaaacaccatatgtcttcagcagtgacatggtaggatcaaacga

SEQ ID NO: 219711 - DNA, 482 bp, Glycine max
cgcgaatgcacactgttcttattcccaactccgcatatcagctctggaaccaggtccaggaacgaatctccaagccttccttcgacactcctctctacagattcaacatccccaacctccgcatcggaaccctagactctgtcctatccctcagcgatgacctcgccaagtccaacaatttcgtggaaggagttacgcacaagatcaggcgccagattgaggagctcgagagagtttccggcatcgacaccggcgccctcaccgtcgacggcgtacccgtcgattcctacttgaccaggtttgtttgggatgaggcaaagtacccgaccatgtcgcctttgaaggagattgcggatggtattcacagtcaagtggcaaagattgacgatgatctcaaggttcgtgtttctgagtataacaatatgcgcagccagcttaatgctatcaaccgaaagaaactggaagcttagcagtccgtgatc

SEQ ID NO: 219712 - DNA, 505 bp, Glycine max
gggttcaacaggtgagactcagattactccaacccatgtatctgatgaagaggcaaacgttttcgccatgcaactagccagtgcctcagtactccctatggttctcaaatcagctcttgagcttgatctgttggaaatcatagccaaggctggccctggtgttcacctttccccctccgacattgcttctcggctcccaacacacaaccctgatgcacccgttatgttggaccgtatattgcgcctcttggcttgctacaatatcctctctttttctcttcgcactctccctcatggcaaggttgagaggctctatggtctcgcccctgttgctaagtacttggtcaggaacgaagatggtgtctccattgctgctctcaacctcatgaaccaggacaaaatcctcatggaaagctggtactatttgaaagatgcagtccttggagggggtattccatctaacaaagcatatggaatgacagcctttgataccatggacggatcc

SEQ ID NO: 219713 - DNA, 439 bp, Glycine max
gggagatccttcacgtgcagggagggcaatgcgggaaccagatcggttccaagttctgggaagtggtgtgcgacgagcacggcatatatccgacggggaagtacgtcggaaactcagatctgcaactcgagcgcgtgaacgtctactacaatgaagcctcgtgcgggcgcttcgtgccacgcgcggtgctgatggacctggagcccggaaccatggacagcgtgcggaccgggccgtacgggcagatcttccgccccgacaacttcgtgttcgggcagtcaggcgccggcaacaactgggctaaggggcactacaccgagggcgccgagctcatcgactccgtcctcgacgtcgtgcgtaaggaggccgagaactgcgactgcctccaggggttccaggtctgccactcgctcggcggcggaacgggctccgggatggg

SEQ ID NO: 219714 - DNA, 338 bp, Glycine max
acaaagtgtaagtgagaacacactttattatatgaaaaccgagggcatccttatacaatagtgcacaagttcaggcaataattacgcatagacatgcataaagtctatgttattcagaagtacaacatagataaggaaaccacaaactctttttaattagatagagatactgttgggaattcctttgaaagtcaacccttcctcacttgaacgatggagcaaagtgtatggcagctgaactggcccagtccggtttctcagacttggatcactgttccttgcattgatttttccttcaattccagtcagattgctttcaaaccttttgaaagcttcta

SEQ ID NO: 219715 - DNA, 404 bp, Glycine max
gaagaaggcacggcttgaaattggattgatgggtaaaacaccccaattcgaagcttttccaatcaagattcaaatcatgcaaaagaaaaaaagtaaaaggctttttttttttggcctccttttttctctctctctggctctgatcgagcgcttaatcacaaaattaaaatcatcagggacatattatttatagaactcaagtaagacaaactccaaatgagaaacaaaaagccgggtcctccatttgtttatccaactcttcatcctcagtttactcaacagcaaggggcacagactggggcaatttggggtacttgagagcatagaacatctcgagatagcggcggctctcacggcggtcaaggttagacacatgcttccagaagccatagacacccgtggga

SEQ ID NO: 219716 - DNA, 541 bp, Glycine max
aaaagctaacatttgctgattaaaaaaaataacaagttccttaaactaaacaaaccaaattgcctcaaaagtcaaagccacatagtttttttcctcaccaagtaatgggatcaacgaggattaacaagttcatcattcaacagaaacaaacatgacaggtaaacaggattgcaagggaaaataaaccactttgtgccctcatttaaggagagtcttcacaattgatttgacattgagcttcttgaggtcagtataagactgtccacagcccacaaacatgacaggagctccagatatgtaaaccattgaaagtgcagctcccaccttatcatctatggtgtcaaatttcgtgagcaagatcccatcaatcaatcttggattaggtgatgttgcaaggtcagctaatttctgattgaactttgaaagctgatcaacagcgtcattaccaaccagtgcttctccaacaaataagactagatctggattgttaaggtagatgagttttgacagtgctctcataagtggttcattatcctgcata

SEQ ID NO: 219717 - DNA, 512 bp, Glycine max
gataacaatcagtagtaacattaatgggacaatagagttcaacacaaaccaaacttattttcaaaggtcattacagacccattacacatcacatttcttcttaaaatgtttgggaaaatccaacatcgaacatcacacagaaatcagctccagcttaaaaccccccacgaagacgcaacaccaagtgcagagttgactccttctggatgttgtagtcagcgagggtccttccatcctctagctgtttgccagcaaaaataagcctctgctggtccggtgggattccttccttgtcctggatcttcgccttcacattgtcaatggtgtcggagctctccacctcgagggtaatagtcttacccgtaagggtcttgacgaagatctgcataccaccacgaagacgcaacaccaagtggagagttgactccttctggatgttgtagtcagcaagggtacgtccgtcctcgagctgcttgccggcgaagatcagcctctgctggtctggggggata

SEQ ID NO: 219718 - DNA, 373 bp, Glycine max
acacccttttttttttactttttcttatttttttttttcttttattttaatcttcggggtattttgttattttttaccattacccttctatttttgctaattatatcatcatacactaaatgagttaatcacaaaaggcattatttagtaaaaagtgatgggagtagcaacaatattaaaataccgggatcggtgactgaaacactgatccactactcatcattaaacataaccccacaacaaacggtgaaagaaatattagtgacagcaacactattttagaataaattttcgtgcaaaaacctggtgttcaaaattgggcacgacagcctgatgtataatacacttaatcacggcggaaggactatattcc

SEQ ID NO: 219719 - DNA, 520 bp, Glycine max
ccataattattattatttaaaaatccaaaatattcttataatcacataatattagttcacaaaataattaaagaaaattcaaatcaactctatgtaagtaaattacgaactccgaccatcattatttatcgaacaaggtgaagtccaataatgtccaatttgggaggcaacaactcatttttctttcagggaattctcaacatctattacaaaccggtacttgacgtccctatttatgagcctctcaagagcttcattggcatactcgattggaatcacctctatatttgggtgaatctcgtttgcagcacagaagccaatcatctcctgtatatcttttgtaccacctgtaacacttccggcaacagtctttgatcctatattaaggcttgcagggataaatttgacttgactagggaaaccaactaggacaaaaacaccatatgtcttcagcagtgacatgtaaggatcaaacgagtgatcaccagatgctgtgtcgattataaagtccaacgattta

SEQ ID NO: 219720 - DNA, 519 bp, Glycine max
tgggcagtgtctcttcccgtccccaactccgcatctcagctctggaaccaattccaggaacgaatctccaagcattccttcgacactcctctctacagattcaacatccccaacctccgcatcggaaccctagactctctcctctccctcagcgatgacctcgccaagtccaacaatttcgtggaaggagttacgcacaagatcaggcgccagattgaggagctcgagagagtttccggcatcgacaccggcgccctcaccgtcgacggcgtccccgtcgattcctacttgaccaggtttgtttgggatgaggcaaagtacccgaccatgtcgcctttgaaggagattgtggatggtattcacagtcaagtggcaaagattgaggatgatctcaaggttcgtgtttctgagtataacaatatccgcagtcagcttaatgctatcaaccgaaagcaaactggaagctgagcagtccgtgatctttcaacttggtaaacctgaggacattgtaactcagaa

SEQ ID NO: 219721 - DNA, 505 bp, Glycine max
cgatcaatttctatatagctaaagaaagtgatactattaagcataattaatataatgggggacatgtgcattaagatttcgttttgtgtgatgtgtgtgttggggttggtgatcgtgggtgatgttgcctacgctcaagattcagcagaagactacgtgaatgcacacactgcagcacgagcagaggtgggttctcaatcaccaagacaaacagtgattgttccaagtttggcttgggatgataccgttgctgcttatgcagagagctatgctaatcaacgcacaggtgactgccaactgatccactctggtggtgaataccgcgagaatattgcaatgagcactggtgaactaagtggcacacatgcagtgaaaatgtgggttgatgagaaatccaactatgactatgattctaactcttgtcgttggacgagagtgcctgcactacacacaggtcgcttgggctaactacgtgcgtcttggatgtgccaaagtgacatgtgat

SEQ ID NO: 219722 - DNA, 449 bp, Glycine max
gattgcatccattacatgtttattcaatttagggtggccagataggattgagaaatccgtacacagaacatttaacaacatagcggggaggaacataatgtaattccaccagaagttgataatgctatgtcatcatagctttattcagcaaacaacacgcataccactcaatacaattacaacgatgtctgaggatgttcataaatataaacgttaagtgtgacatacacataataaaaatgttcaagggtagacctcaatcagagatctaaaaccaaagatgggaaatattttggagtgtttgaatcctgcttcgatgaagagatgtgtccattcctcttccggcctctctctggcatacatcggaaacataataatgtgcaaactaagctttgtatgcgtcatatccgggtcatgtagcttctcatttatgacggtatctatgataa

SEQ ID NO: 219723 - DNA, 486 bp, Glycine max
agtacgccctggccgccctttttttttttttttcagaaattttacgtattgcatatgtacaaatattgaccaatagaacgatattgtcttccccctgttatggatcaagctgatactcagacttgtcaaaatcaccattttggagtgtgcttcccaccaccccattttcaagtctttctgtttgtagatcaactggaaacaaatttatggctcctgtgttgaatgagaatccacaatgggatagaactagctgccagacatatgggataaaaaactcctctggatgactctcttgttcatatgtgaagcgcagttgagtaaacatcttcattccatcacccctccaagaacgacaatttacaattatgacttggagcacttcatggactgaccagtcaccatcctctctttgagcatccattcgactattgaaaaaatctaatacagtataaatgttatcaatcagttcattgaaacgtggatgat

SEQ ID NO: 219724 - DNA, 429 bp, Glycine max
gataacaaacagaactaacattaacgggacaatagaggtcaacacaaacacagcttattttcaaaggtgattacagacccattacacatcacatttcttcttaaaaagtttgacaaaatgcaacatctaacatcacacagaaactatgtgcagcttaaaacccctgacgatgactcaacaccaagagcagagtcgactccttctggatgttgtgtccaccgaaggtccttccattctgtatgtgtcagccaacaaaagtaagcctgtgctggtacggtgggattccttgcttggcctggatcgttgccttcacattgacaatggtggctgcactctacacctcgagggtgataatcctacccgtaggggtcttgaccaagatctgcctaccactccgaagactcaacagcaagtggagagtggactcct

SEQ ID NO: 219725 - DNA, 472 bp, Glycine max
cgcgagactcatgcataatgtcttcctccaacgctctcagatcatcaaaactggtctcatggaatagaactgggaggctgcagcaaaccctagcggattgcgtggagcggcaaggcaaggcgttgcattcgggaaaggtttcgacggtgagactgtgtcccgaacgcgcttcccgaggcaggtacttcgattttcgttccaatttcgttcccgcctctgttgaattcgctcaggtctcgcccctctgcaccactctgtacaaaggcgggttccgaattcgaaccgtggagcacttgctttcggctttggaggcttcgggtgtcgataattgcaggatcgagattgaggattcggatactcaaggacacgacgcagagattcctatatttgatgggtctgcaagggaatgggtggctgcagtggaagaagttggtttgacagtggccactgatcttgatggcaaaagtgttga

SEQ ID NO: 219726 - DNA, 500 bp, Glycine max
gttctaacagccttgatcaatctattgatagttacaacgtaacagaaaattatctatttatgcagtcactgtatacaacacaaccaagcatgttacagcgcttctccaatagaccagtgaacctttgtgagtgatgtttccaagtagtagctagttccacagtaggaatcatggttagcagcattatcagaggaagcttcaaacacttcatcatgagaataaaaccacctatttcgatactgtttatctttgctgctgcctcttttagagtaactgaccttctggcccttctttccatttttcttttcactcttcttgatcctgggtttttgctgtttcttgtttttaacagtatgtgataacaatgtaggtaccggatcatatacatcaggggcccacttcactgtcaatttcattcgtgatccccgctctttctcgcggctacctttcatggcagatacaagctttcgaggtgctggcaaagatactgagcacgagta

SEQ ID NO: 219727 - DNA, 463 bp, Glycine max
ccaacaatccatgcatcaagttcgaattataattgagcataatgattacaagcggggaataatagataaaggtacagttaaaaatgcaaaaagccatgaagctcgagacatcaaacggggaacaaagatgaaacttgaagggacaggacacacaagtgaatagaacaagaagtcatatttttcaagttgaagctcaagggtaggtttcagaggctgggacagccgtatatgaaccaatgaagacgtctccataaatcaagccagccaaacctcctccaatcaatgggccaacccaatagatccagttggcagcgaagtctccactgaccacagctgggccgaatgagcgagctgggttcattgaaccgccactgaatgggcctgctgctaagatgttggcacccacaacgaacccaatagcaatgggtgcaatgatacccaatgacccctttttgggtctgct

SEQ ID NO: 219728 - DNA, 578 bp, Glycine max
tttgctttaccaaattccaatttccaattcaaaaccctaactccgttcgaagcaccggatcgtgatggcaccaaaggcagagaagaagccagcagagaagaagcccgcggaggagaagaaatcgacggtgggagacaaggctccggcggagaagaagccaaaggccggaaagaagcttacgaaggagggaggcgccggcggagaagggaagaagaagaagagaaacaagaagagcgtggagacatacaagatctacatcttcaaggttctgaagcaggttcaccctgacattggtatctcaagcaaggccatgggaatcatgaacagcttcatcaacgacatcttcgagaagcttgcccaggaatcttctagacttgcccgctacaacaagaaacccaccatcacttcgagggaaattcagaccgcggtcaggcttgtgctgcccggtgaattggccaagcacgccgtttctgatggtacgaaggctgtcaccaagttcactagctcttgaattagctatcttatcgctgttctaagactcttttctgtcccaatttgagattttaatcagagtagac

SEQ ID NO: 219729 - DNA, 374 bp, Glycine max
aaaaaggaaagaaatattgttattaaggggagtaaaatgatgggatactccaacccattacattgcaagagaagatgtaggccttgcaacagctttggtgatgagggagtgtttcatttccatggagagctttaagcactcagacaagtccacaccagaatcattacaaggcgtccatttgaacttttgaaggaacacagcaagccaagggtcaacaggggccaagcccatggttttttcaggggacacttttctaccagcgccaaaaggggccaacctaaaatcagaccccatgattggcacgtccttgtccttcaaaaaccgctcgggcttgaaatgttctggctcggaccacacttgttggtcatgagtga

SEQ ID NO: 219730 - DNA, 477 bp, Glycine max
aatgataaagttaaactcgttcacatttcaagatccgaaaaatccagtttccccatcgaattataagcacaaaatcatctccttaaattaaggttattgtagctaaaaaccgtgttcctgtttgaatcactgaactcctactgaatgagttccttttacacataaatttttaggtactcgtccatgcgtgtgtaattcacttcagggtaaagcttggatgcttcttctccttcctctccaatttcaaaatttgctaaacatccctcgtagaatatatgataaaagtgtccaatccctacttgaagtttataatccaaccctttcagtgttgtaagaaagccttctggaggtatgtatgtcttctctagttcctttccaataagtttctcccaaattccaataagctctgcttgagagataatattttctggaggccttatgtacaatgttttgttaagggttcgtggatcatctatt

SEQ ID NO: 219731 - DNA, 484 bp, Glycine max
aaccttaattacttgattaagtaccagtcacaccttattgaaatgatgattatgaatacataaaaagcaactgcgatggcaagacactactattgtatatgatgattatcttaattaagaaaggagtttagatgcaacgccgatccttgcaagtggaacacaaacgagactatgtgcccttggaaccgtgaggccagctctctcttccatgctaactttggcatcatcacctttcaatatttgtccttgagggcccagcacttgcaggtcaaagcattggataagagatgcaagaagtgttgccattcctgaagtagccaaattgacaccagggcacattctcctcccagacccaaatgggaggagttggaaatgctggcccctaagatcaagaggccctgctttcccttcagcaccagtttctaagaaccttttcggacggaattctgatggtctgtccaagatttggggtcccttctacttg

SEQ ID NO: 219732 - DNA, 505 bp, Glycine max
  unsure (1)..(505): unsure at all n locations
cacatcacaaccacaatcaggcatatctttgtatttaatggctggatggatatatagcagctacagttgagaccatggaatctactccacacacatttcgacctctgcagatcttgtaatatccattctctccccagctctcgccccatgaattcttaatgatccagtaaggtttgttcttaaaacgaatgggagcatatgcaccttcaccataaccaactagaagaaccccatgatccaaatgcttcccacagatgtatgggcatgagacgccaccaacatatgtctgcataaaaactgcattgatagcaactgcaagagggccattctttactaggtttgcagcaatttgttcttcatcaagggaaaccacactgtaattagatacagtagccgcaactttggttttgtcaaatttgcaggtgccatctctcccggtgtatggatagtccttttctttctgtactcccncagactgaagtatgtactcaaatgcgttgttcat

SEQ ID NO: 219733 - DNA, 526 bp, Glycine max
  unsure (1)..(526): unsure at all n locations
caataacatagcatagagtgagaagtgagaagagaaaaatggcaatctccatacccagtagacaacttttcatagatggagagtggaaagtccctcttctcaacaaccggtttccgatcatcaaccccgctactgaagacatcatagggcatattccagccgctactaaggaagatgttgaccttgcggtggatgctgctaaaagagccttttcccataacaaaggcaaagattggtcttcagctcctggctctgttcgtgctcgctatcttcgagccatcgcttcaaagataacagagaaaaaggatgaactaggaaagcttgaagcaattgattgtggaaaaccactagatgaagcactggcagacctggatgatgttattggttgttttaactactatgccgagcttgcagaagggatggacgcaaagcaaaatgctcctgtatcccttcctatggaaaccttcaagagttatgttctcaaggagcccatcggagntngtgcatttaatactncatggaacta

SEQ ID NO: 219734 - DNA, 492 bp, Glycine max
gttaatgaaaagattgtcttcattaaaccggatgatgggtacaaagagaaaaacacaacgatgaaatcaatcaatcttattttccgagcaaacgacgtccacgttggttagcacctatcactcggaaattcaactcatccacatcatcatagagatgattcagggctttgttatgcctctcaatctcggatcccatgtcaacagccatgcctttaagctctcccaacagatcacttaaatctgatagtgcatcatcttgcttatttttctcaacctcaactttttcaaatgcatttgttggttcttgaggtggggaccgtagcttggactgccctttgggtgcagaagtcagccccaacttctctctttgctccaagtgattaccctttctcctgactggatcatctccaacaataacagggccggttattgcacgtgtcttctttggtttccaagttttggagaagaggccaccaaggcttcccaagagct

SEQ ID NO: 219735 - DNA, 542 bp, Glycine max
acttcaaaaacaagtactattatttactgttattagggaaactacgaagtttgatattttacaaatcaattacaataatcatttgaactgatgatagtatgaaagcgtacaacatcacgatttcacattacttgaaagggactacaattttttgatacatgtaagttccatgtatcaaatgcagctagctatataccacccactacaacaaaaaatgatccaactatatataactacagttgccaaaaataataataaataaactgagaaaagaatctaaaaattttctttgtgaaaatcaaacttggtgctggttttcctggaaaagtctaaagaaagctttttcagttccccaaccaatccatgcgccccacagtagaaaacaccaactctttggtcagggtgtttgatggctgcatgtttaaagacattgcgccagttgggtcttgcaaaatgagtcttcacccttgtccctgaaactatatccacaccatttttggcatggtgaagagactgaagcattgtgatcaaagctgacctag

SEQ ID NO: 219736 - DNA, 495 bp, Glycine max
aatacaagccatgtgacattaggaataggggttaatgggcccaatcagaaaaaaactgaaactacatcatcaacaaggactcaggaggagttccaccaagtctcaggtttcactacattcaaatctaatagaataaaatggtccacaagaagggacaatttattttactaaattgtaaaactacttaacaaaaggagctccttgttaatatattaaaacttatttaccgttacaccatctctagtaacctcatatgcttcccttttccttgttttcttcatgccggccgtgaaatggagctttggtccctccgatgaaatggcagtcacttttacccatatcagcactttggtcttgattccttctatttctgctagcttccctttctacaaatagccactcacgctggtggagaaacgcagaactgacgaatccctgttgccaacctcacacacttgaggaatgtaaacaacaagcttttctgtcttttcttaa

SEQ ID NO: 219737 - DNA, 545 bp, Glycine max
cgagaagatcaagcatgaggactaaagctcatcaacccggcctcaacttgaagctcctgattgtagcggtcttggttgccattaccctcctatttgtgctaattagatcatcaaacacgaaaggagtgaagcagcaagaggcattattagtaaagagtgatgggagttgcaacaagatgaagataccgggatcggtgtcggaagcactgatccactactcaacatcaagcataaccccacagcaaacggtgaaagagatatcagtgacagcaagagttctggagaagaagtcgccgtgcaatttcctggtgttcgggttggggcacgacagcctgatgtggaatgcgctgaatcacgggggaaggacgatattcctggaagaagacgagtcatggattcagcaaatgaggagaagattttcaatgctggaggcgtaccaagtgaattatgagagcaaggtgaatgatgctgatagcatgatggacgttgggagaggaagagaatgcatggcacctggagatccgaggtactccatatgcccactt

SEQ ID NO: 219738 - DNA, 387 bp, Glycine max
aaaccaaactaactgatcttatcatatgtgaaagatattactatgggacttatgtgcatgaccaaggctcataacacgtatgctattgggctaccttagtctacagaaaatttgaaacatgcacgggcacaccataccggagaacgctatagagaagcattacatcatcaaccggcttttgatgctgtgacaaaacccagaacaaagccctatatggctcgcttgatgtatgttgtaccccagaatcaccgccttaacaaactggcacacaagcctcttccatggaggcgataaaatcaccggtgttgctaatgttggcgaaagcacgactgtgcttgatgccatactggatcaatgtccaacagagagtgtgagacaccctaacca

SEQ ID NO: 219739 - DNA, 397 bp, Glycine max
  unsure (1)..(397): unsure at all n locations
nggggttcaagcggcacttcgtacagtataccatagcatgacttaccatgtgagtagccgtgagccgccctttggttcgagcacacaccaccttcactcccttgacagacttacaggaaagaaaaaaggagactaaacggcgccaaaagctctctttctcttatttttcctcgccatgctactccttatgctccgctcaaccgacgccggccacaactaccgcgacgccctacgcaaaagcattctgttcttcaacgccagcacttcggcaaactgcccgtcgaccagcgcctccgttggcgccacgactctgcattgcacgacggccccaccgccggaatggacttgactgaaaggtactacgactccggggatcacataaagttctggtttccga

SEQ ID NO: 219740 - DNA, 386 bp, Glycine max
cagagccacattcatgggcttaccagccaacggcgcctctgcgggccgggccctaaagggcctcatgtaccgccgcacgggctggattggcggactactcggctccctctgccgggcccagggcatgtggttccattacagctcgggccgactcgagaaccgggcctccctcgaaaccgacatagccctgctcaagccctcccacgtattaaacgccgccggcagtacgggcgcgcccaacgtcgactggtgcgagtgccacaaagtcgagaccatccgaaccaacgtcgtcggaaccctcactctcggcgacgtctgccgcgaccacggactcattctcatcaactacgccaccggttgcattttcgagtacgactccgatcacc

SEQ ID NO: 219741 - DNA, 306 bp, Glycine max
gcttgcatgtattttaccttatttacttgattaagtaccattcacacgttattgcaaggaggattatgaatacataacaagctacctgcgatgacaagacactactattggatatcaagactatactacgtaagagacgaccataaacgcaacgccgatcctttggagtggcccacagactagactatgtgcccttggtaccgtgcggccatatctctcttccatgctaactttgtcattatctcctttcattatttgaccttgatggcccaggacttgcgctgtcaatgcattgtataagagatg

SEQ ID NO: 219742 - DNA, 434 bp, Glycine max
tcgcgatttctagatctttagcggccccctttttttttttattttttttcgggcaagataccataattaattgaatatacaatcttatggagcccaacatgcagatgcatggactaattaaacaacaacgttagtctgataggcagtgtccatagataaattgggtacccataaaatggccttgcttccaaggaaatggcaaacagggatagttccaggatcaactcccatgagttcatgaagcatgtgatgattcattccagaagaatctgagtggcaaacagcaagtgcctgagttttggttgcatcaccagccaccaatggaaccatgaaagctggtgtttcacggactttatggcagtaaaatactgcagttctgaaatttagcccatgacacatcactgcttagactccaagattctggacttctttta

SEQ ID NO: 219743 - DNA, 402 bp, Glycine max
gaatattcaacttcagcacactctctctatctagggtttttccatggccaccgtgatccgcaatccaatcccctttccctccacctctcaccgccccaaccaaaaccacagcaacaacacattcctcattctccgcttccctcaaacttcacgctcttctctccactccaaatcccgattcgccttttcctgctcccaatcggagcctcctcctccttctccttctgcttctcctcgacggcgtcctccgtacatcccgaaccgcattcctgacccttcctatgtccgcattttcgacaccactctccgcgacggcgagcagtccccgggcgcctccatgacctccaaggagaagctggatgtggcgcggcagcttgccaagctcggcgtcgacatcatcga

SEQ ID NO: 219744 - DNA, 535 bp, Glycine max
acagccatccgcttccaaattttttattttgacagttgacgaatattacattgatccaacaaaatggtgccatagcaccttattatagccacaagacgaaactttgagatgtccttattctggaacggacaggaacactctaatcttaaaggacatttataatttcaaataaagggcaccctataaaatgaaaagggaaagaatccctgtagtctgaatattcaaaatggacttacgttacattctttgctaaggctacttgggtgaatcaataaattcctgactgcaaatacattccggtcaaaacacagggacgacaccttaaatatggagacctgcgagagccaagaatgctgctgcaactttgtcttcctctttgtggttgaacacaaacaactgttaccaaagcagcaacacaaattctcaaatcttcaatgaagaaactggaattttttcagcagatggagatgtttccttgaaacccaacatcttgtttagtgcagcaatataagccttgacactggaaacaacgaca

SEQ ID NO: 219745 - DNA, 492 bp, Glycine max
gcttaatcatgaatcgacgtcgtttaccggagaggacactctcggcatcccccaaaccattttcatttttgaaaaggagttatcctttttgatcgattttccagaaagcgttccgattgtgctgctattccgtgtccgactcggctgagtttggccgatccaaacaagcgagtcagttgttggaggaaagcccctcacccaagaggaaccagttccacccgtatgctccagattggaaaaatggttacactctagaaggttaaaccccttctgtggtccctctagcacactatcgaagatactagatactccatccgcacgtttcgaagctattcatgatattgatttcagtgcttctgacttgaaaacattggaacgaactgaccgaagcaatttgcttcttcataccatcaaaactgaagagaagaaaacctctatcgagaatggcagtcatttgcaaacaaatgaaaagatgctgtctgctccaagtgg

SEQ ID NO: 219746 - DNA, 442 bp, Glycine max
acaaaagaaaattatcacagttaacctgcattgctgtagaaattttgaagctatatattcagttatcacatttcgatctatacaataatattttaactgagcaaaaacaaaattcaccttgtacggatcaagttgaacaatggagtaagctgtctccaaggatgcaagaaagttgagtaatattttgacaaaatgccatgttaggtgggaaaaggagctttagcttgttaagcctttgggtccgactcaatgaacaaatcagtgaagaaggggtcaagaattgcttccttggccgaatcatacttgtcaagacgtttcttcaaggatcgtagatctctctcgtgctttgcagtacgttcaaatgatttcttcatgaggagtatgtctaccaagtagatcaaccataacacgtttggtttgggacagcttcctttgcagcaat

SEQ ID NO: 219747 - DNA, 507 bp, Glycine max
cttctcttgtctcacgatctcaacggagcacctctcttcaggtcgccatctagactgcaatcatggctgatggaccacagcatccatcagttgttcagaagctagctggacagtcttacctggtgtccaggctaagccccaactttaactctgggaattattcctcgactggttcttacttcaatggaggactgcactcttctgggttggctgttgtgtcgcctggatctccagttactgtgcatgctccagcagagaaaggagtgagtggatttctagtggattttctgatgggtggagtgtctgctgctgtgtcaaagacagctgctgctccaattgaacgagtcaaattgcttatccaaaatcaggatgaaatgatcaaaagtggtcggttatctgagccatacaagggaattggtgattgttttgctcgaaccatgaaggatgagggtgtgattgctctttggaggggcaatactgctaatgttatcagatatttccctactc

SEQ ID NO: 219748 - DNA, 510 bp, Glycine max
cttgcgcagatacgtagtactgtccgaattattcccggactactcggtggccgccctttttttttttttttgagcaatcaaaccgagtcttaattatttcaaccggggggggttctcaaacttcaggattataagctgatggcatgaaatgaaacaaccaaaatgaaaattcttgtttccaaaactatgatttctacgtatcaaggtcctaaatttgggaaaatatcaataccaatatttctcatccaaaattattcaaatgacaagggaatcggcatgattatcccaggaaattgtcgtcatcatcttagccacctccaccagatccgtatttctttccgaacaagacaagctgcagcttgtcataaccagcaagcacaccagcacctgcaacagcacgcaatatgtttgcaccagcacctttgaagagtgacttggcaccctcatttgcgacgattgtttggaatgcatgcaaagagctcttgtacttcacagcctctccagaagtca

SEQ ID NO: 219749 - DNA, 574 bp, Glycine max
cgcttatggcgatttcactttgatgtctaagaagcaacctaagcgccaagagattgaagataaggttgtttggattactggtgctagccgtggaattggggagattctggctaaacagtttgcaagtttaggggccaagcttattatctctgcaaggaatgaagctgagctaaaccgagtaaggacacagctgaaaggtaagcatgcacctgatgacgtcaagatcttaccattggatttatcatccggagaggattctcttaggatagctgttgagaaagcggaatccttttttccggattctggtgttgattacatggtccataatgcagcttttgagcgtcctaaaacatcaattttagatgtaactgaggaaggtcttaaggctacctttgatgtcaatgttctggggacaataactctcacaaagctcttggcacctttcatgttgaagagggggcatggtcattttgtggtgatgagtagtgcagcatgaaagactcctgccccaggtcaggctgtatactctgcttctaaatatgcgctcaatggttacttccataccttgcgttca

SEQ ID NO: 219750 - DNA, 605 bp, Glycine max
  unsure (1)..(605): unsure at all n locations
cacagaaacagagaaaaaacaaagaaaatggatgcagaaacggagtctccggcgcgcggaaacatcgccggcggtgatccacccggcagtggcaccaatctcctaccttctgggcacatggagaggccaaggagaaggaggcttccccactatcaattccttctcctatggcgaagagcttcacttctcacattcccccaacaagcccgtgatagggtacactcagaagacatggaaactcagctctggagagcctatgcatgctgagagtggatactggcgtcctaaacctgatggcactattgaagttgtgattgctcaaagcaatggtcttgtggaagttcagaaaggaacatacagcgctgaagagaaagtgatacagcttcagagtgaaatagtggggaacgcttctaaggttaaagagataagaagatgtttccagctggttgatgggaatctttgatatgacgttcagatggctaccaataaaataactcttcaaccacactggaaagcgtcactgaagaagctctaaagcaaacatcttccccaattactngcagaaggatgtacatcagntatatggagccatccaatgtgactct

SEQ ID NO: 219751 - DNA, 515 bp, Glycine max
aaaaaaacactgtttctcttctctgtacctccccctatatattcctccggctttattattagagcacagaaagaatttctgtgcctgttttgattagaagggaggagggagaagaagaagaagggagggaatagaaattaacccagtgtttgatcaatttgtatggttcaagattgaacacaaaaaatggcggttactactcgcactctatctgccacagaaaagaaacactggtggcttaccaaccgaaagattgtcgagaaatacattaaggatgcaaggagcttaatagcgacgcaagatcagagcgagatagcttcggctctgaaccttgtagatgcggcactggcgatttctccgaggtttgaccaagcgcttgagctgagagcgagggcgttgctgtatttgcggcggttcaaggaggttgcggatatgcttcaggactacattccgagcctgagaatgggaaacgatgactcatcatcgtcttcttcttctttcttcttcttctgaca

SEQ ID NO: 219752 - DNA, 126 bp, Glycine max
gttctagatcgcgggcggccgcccttttttttttttattcaaaaaaaagggaaaggaaagaaaaaaaacaaaacaaaaaaaaaaaaaaaaaaaaaaaaaaaaacaaaaaaaaaaaaaaagaaaaag

SEQ ID NO: 219753 - DNA, 484 bp, Glycine max
tgcagtgcgttgcattattgattgccgtcagccattcgtaggtgggcgttctgctcgagatctgaatctgttttcgagggttaccccgacaagctgtgcgaccagatgtctgaggcagtacttgatgcgtgccttgaacaggaccctgacagcaaggttgcctgtgagacatgcaccaagaccaacatggtcatggtcttcggagagatcacaaccaaggccaacgtagactatgaaaagattgtccgtgacacatgccgcgaaattggattcatctctgatgatgttggtcttgatgctgacaaatgcaaggtgttggtcaacattgagcaacaaagcccggaatatcgccaaggtgtgcacgggcactttatcaagcgcccaaatgagggtggtggctggtgaccagggtcacatgtttgggtatgccaccgatgaaacccccgagtacatgcccctaatgcatgtccttgaaacaaaccta

SEQ ID NO: 219754 - DNA, 600 bp, Glycine max
ctctttctctctaccctccaacgtgctctccttccaatcacactcacagtaacaaactggccaattcaaagttcacacacacacacagcttgggaagaaaatcgagaattttccgagaaaatccgaagaaggcgggccatggtttccccggaaaacagcaattggctgttcgattacccgctgatcgacgacgttattcccgtcggcgacgcctccttttccgtctccgcctccgccttctcctggcccccaccttccgccaatgtcagtgttgaaattgatgcttcgcttggggattctgatggccccaaagatactgctttgaagaaaagggctagatgtgattcaagtactgcttctagctctaaagcgtgtcgggagaagtttgcggagggataggcttaatgacaaatttgttgaattgggctccatcttggagcctggaaggactgccataacagacaaggctgccattctgattgatgcttgccgaatggtaacacagctgctggatgaagccctgaaagtgaaagactcaatacgagtcttcaagagaagattaaagagttaaaggctgagaagaatgaacttgtgacgaga

SEQ ID NO: 219755 - DNA, 438 bp, Glycine max
attatcattcgggtaatggacacatcactagtgtttactgtgaggaggagtgaggcagagctgatagctccggcgaagcccacccctcgtgaagtgaagctactctcagacatagatgaccaagatgggttacgtttccaaattccggtgatacagttctatcgccacgacccatcaatggcagggaaagaccctgtcgatgtgataagaaaggctgtggccaaaacgcttgtgttttactatccttttgcaggtaggcttagggaaggacttggtcggaaactgatggtggattgtactggggaaggtgttttgttcattgaggctgatgcagatgtcactcttaagcaatttggtgatgctcttcaacctcctttgccgtgctgggaggaactcctttatgatgtacctggttctcaaggagtgcttaacactccc

SEQ ID NO: 219756 - DNA, 510 bp, Glycine max
aggtaatagtaattgtgattcttctcttggtgccactggcttgttgattatacatacgtactcgatgacatcaaatgctcaattattgattccttaattggcacgaagtaaagtcgaaaagtactggatctacaaggaagaaacaatgaacctagagtttggagcaatggcactaggttggacgatgtggtggttaagcacacagtccaactccttctgaaacctctccatggcttcagaaggcaaacaaaccggtataaccaacccttcctctcctttagcattcttaaagggtatgtaaaagctagcaacaccaggtatggctccaacccctcccttggcgggtcctccataaacagccttcccccacccaaactcaatgtttccaaacccagcacgagtcacatccgacacgagatacgatctcacaacagtgaagtgaggccggcccttggtgaccattaaatcagccaccgagtgcatgtattcctcagtcacatccgctttggc

SEQ ID NO: 219757 - DNA, 508 bp, Glycine max
  unsure (1)..(508): unsure at all n locations
ctcaaactttgtaacttcaaaacatactcctctgttctctctgtttctcttcaatctggctgaaaaaaaacaaaaacacgaaaaatcatccaccctctcacattctctctctctctcctttcaactaatatggcaattgaaaaccaagacaacactgtcagagaaatcaagccaaagaacaggagaatcatgggtgctggaggccctgatgatgacgacaataggtggccaccgtggttgaagccactgctgaaagagagcttctttgttcaatgcaagttgcatgctgactctcacaagagcgaatgcaacatgtattgcttggactgtatgaatggccctctctgctctctctgcctcgctcaccacaaggatcaccgtgcaatccagattaggaggtcctcataccatgatgtgatcagagtctctgagattcagaaggtgttggacatcactggtgtccaaacctacattatcaacagcgcangggtggtgtttttgaacgaga

SEQ ID NO: 219758 - DNA, 514 bp, Glycine max
ctctagctagctttcttctccactctctcaaatggcccaaaatgattccaaccctactccgcctccggaaccccttgtagcggcggaacccattactgaggatttggtccaagacaaagaagaagaggatgatagtagtaagattgttattccagtcccagagagcgagtccttgtcattgaaggaggatagcaatagggtttctgattccgagaaaaatgccattgatgagctgaagaagctcctgaaagaggaattagaggacgaggaggtttccatctggggcgtccctctctttaaggatgacaggactgacgtcattctcctcaagtttctcagagctcgtgagctcaaagtgaatgacgcccttgtcatgtttcaaaacactctacgatggaggaaggactttaacatcgacgcccttctggatgaagatctgggcgaccacttggagaatgttgacttcatgcacggacacggcagagagggccatcccgtctgttacaacgtctac

SEQ ID NO: 219759 - DNA, 438 bp, Glycine max
ccaaaaccaactccaattttaattccatttgctactcccaacattggtcatcaccagaaaataaaagaacaatttagactagcaataaagtgttacatacaacacaacaaacaacatagacagagaaagacaatctgcaaacaactcacgaccaaaactatagatgaaaaatggaccgaacaaatgatgacatgcatatttcttactcttcaagttcaatttccttcatgtacccaaaaccaccaccagaggttattttctctcaatcagagtagggtttgatcttgaacctgtaaagaagcctcttttttttcaaggtaggattgtctatggtgagcaacaattttcccagttcaacaactttaaagctattggtaacaactggttcatcggtaggggacatctttgtggccttctgtatgataaccgtatatgcat

SEQ ID NO: 219760 - DNA, 541 bp, Glycine max
  unsure (1)..(541): unsure at all n locations
atcagcaatagcaagtcggtcgctcagacacgcacagatctgatctgatctgatctatctgaagccgaaaacgccgacggtgatgatgaagatggggtgttcacgttgctccttcttcctcttcctcatcctcttagtggcgctcttcccctcgtcgctctccgagatccgcttctccgagatccgaaacgacgatcgccgcatcatccccttcgatcagtttggattcacccacaagggtcgccttgagctcagcgtttccaaaatctcactctccaattccaatttggacctctcgaaggtcggcttctttctctgcaccctcgattcctggcttcatgtcctccagcaactcgaggacggtgagattcggtgcgcccttcaatccgatctggtcaagtccgtctattccttcaattctctaaacggcaaggactctttcagcacgctctacanagaggaaaccgacgccgatcagtacaacctcgtcttcgccaactgccactggcagcaactcaaggtgacaatggacgttaaatct

SEQ ID NO: 219761 - DNA, 614 bp, Glycine max
  unsure (1)..(614): unsure at all n locations
caaatttactgatcctacctaccatgaatggtgtttctggaaaaaattaagttgcgagtatatgtctggctttactgcacgctggaagtattatttcatctggtcaatttcagaagcttctattatcatctctggcctggggttcagtggctggactgattcgtccccacctaagcctcgctgggaccgggccaaaaatgttgatataattggtgttgagtttgcaaagagtgcagttactattccagctgtgtggaatattcaagtcagcacctggcttcgacattatgtttacgaaaggcttattcagactgggaagaaaccaggtttctttcagctacttgccactcagaccgttagtgccagtcggcatggcttgtaccctggatacataatattctctgctcagtcagcattaatgattgctggttccagagtgatttacagatggcagcaagccgtgcctccgacaatgtctctggttaagaatgtgttggagtttacaaattttgcttatacactnttggttctacattacttctgtgttggattcatggtgttaagtctgcatgaaactcttgcatcatatggaagcgtgtattacattggaacta

SEQ ID NO: 219762 - DNA, 496 bp, Glycine max
attcaaacgaaaacgaaactcgctcgcactcatagttagttacgcatcgcaagcacactgccaaaaatggcggggcgcaagcacgcgccctcctccttcacgcgcctcgacgacgcgcgtcttgcgcattcctcctcctcctccgtcgccgtggtccgcgccctcgaggagcgcgtcgaggcgcgccaccgcgagatccaggccctgctcagcgacaaccagcgcctcgccggcatccacgtggcgctcaagcaggacctcgccgccactcaggaggagctccgccgcctctccgccactgccgccgaggtcaaggccgagcgcgacgccgaggtgcgcgagatctacgagaagtcactcaaggtcgacgccgaggtccgcgccgtcgccgccatgagctccgagctggatcgcgtgcgggcggacgtgcaggagctcgtggcggagcggaaggagctcgccgcgcaactgcatgccgtggagagcgagcttgcaa

SEQ ID NO: 219763 - DNA, 538 bp, Glycine max
ggaacaatggcgggtagggtttcgacgtgcttcttcttcgtgtttgctctttctctccttcttccttttcagatctccgctgaggaatcatcggagaaagagttcgtactcacattggatcactctaactttcacgacactgtcagcaagcacgatttcatcgtcgtcgagttctacgctccatggtgtggccactgtaagaagcttgctcccgagtatgagaaagctgcttctatcttgagtagtcatgatcctccggttgttttggctaaaattgatgccaatgaggagaagaacaaagaccttgcatctcaatatgatgttaggggatacccaacaattaagattctgagaaatgggggaaagaatgttcaggaatacaaaggtccccgtgaagcagatggcatcgttgactatttgaagaaacaaagtggtcctgcttcaactgaaattaaatctgctgatgaagctactgctttcattggtgaaaataaagttgctattggtggaagtttcccgaaattttctggagaggagt

SEQ ID NO: 219764 - DNA, 545 bp, Glycine max
aactgaaaattttatatcataacatacgtcacggtatgagacttaaaattactattaagatatctagagactagagatactgggtgatctaaaaacatccattaatttaactcggatcccagctacacctttccctgcactaaactctactacaccaagcaaaagctcccgtttttattaagtaaaccatacataaaagaaaaccgaaaagaaaagaagatcaaaggaagataggtagcacctaaggttcactaaattctgataacgagatacaaaagggtgtgcagcccacatgtaactttgtgtctatatcccatgtgaggaacagctccctttcaaagctcatcttttcctttttcttgctcatcttggccttgttcttgctgagcaggtttatcttgtccttgttcttgctgagcaggtttgtcccggatcttttcgatgaattctatgatgtcttccttggtcctacccccttcgtattgtgataactgtccacttgctgacctgaagtacacggttggataaccttggacataaaggtt

SEQ ID NO: 219765 - DNA, 529 bp, Glycine max
cacacaccacctcgcactcgcagggacagagagtggggaaggaaaaacacagactaaatggcgccaaatgctctctttctcttctctttcctcgccatgctcctccttctgctccgctcaaccgccgccggccacaactaccgcgacgccctccgcaaaagcattctcttcttcgaaggccagcgctccggcaaactccccgccgaccagcgcctccgctggcgccacgactctgcattgcacgacggcgccaccgccggagtggacttgagtggagggtactacgacgccggggataacataaagttcgggtttccgatggcgttcacgacgacgatgctgtcgtggagcgtgatcgatttcgagaagagcatgggggcggagctaggtaacgcgttgaaggcggtgaggtgggggaccgattatttgctcaaggccacggccaagattggctccggcgttgtcttcgtgcaggttggtgacccttactccgaccataactgctgggagagacccgaagacatggaca

SEQ ID NO: 219766 - DNA, 496 bp, Glycine max
  unsure (1)..(496): unsure at all n locations
cagagccacatccatgggcttcccagccaacggcgcctctgcggcccagcccctaaacttcctcatctacggccgcacgggctggattggcggcctcctcggctccctctgccgggcccagggcatctccttccattacggctcgggccgcctcgagaaccgggcctccctcgaaaccgacatagccctcctcaagccctcccacgtcttcaacgccgccggcgtcacgggccgccccaacgtcgactggtgcgagtcccacaaagtcgagaccatccgaaccaacgtcgtcggaaccctcactctcgccgacgtctgccgcgaccacggcctcattctcatcaactacgccaccggttgcattttcgagtacgactccgatcaccccctcggatccggtatcggcttcaaagaaaccgactctcccaatttcaccggttctttntactccaagaccaaggcaatggtagaggatctgctgaagactatgataatg

SEQ ID NO: 219767 - DNA, 428 bp, Glycine max
gcacttaaaaacgacaagaaatttattcaatcacgagcggtaaaaatacaacatacaaataaaaataagggagagtgacatctacacaaaatccacacaaacttaaatcaaacgaggacaataataataataataataatgatgatgataaaaatgagaaaagcttgaacctttagacttgagctttaaccttctggtttggctcgaagacatacttaataagagaatccttaatagacaacagttctggaaattccttcttcaatttggcagcgtcaagctcattgatgctcctcggagcaacaatcaccttggcctgttcctcgagagtgaagttgttccaggtgaagttcgggtcaacataatctctgtacatctccaagatttcattgtgactaaccactcctgggttagtaaagttccagatc

SEQ ID NO: 219768 - DNA, 385 bp, Glycine max
ctcgcacgcaaaaagaaagaattccaggcgaggagaaagatggaggggaaggagcaagatgtgtcgttgggagcgaacaagttccccgagagacagacaattgggacggcggggcagagccaagacgacggcgaggactaccaggagccggcgccggcgccgctggttgacccgacggagtttacgtcatggtcgttttacagagcatggatagcagagttcgtggccacttttctgtttctctacatcactgtcttaaccgttatgggagtcgccggagctaagtctaaatgtagtaccgctgggattcaaggaatcgcttgggccttcggtggcatgatcttcgccctcggttactgcaccgctggcatctgatggggacaca

SEQ ID NO: 219769 - DNA, 612 bp, Glycine max
cggactacaaaattaccacacatgctgccatcagcggaagcgtttgctgctgctgtttctgctcttggcatagagaacaaagatgatttggttgtttatgatggaaaaggattatttagtgcagctcgtgtttggtggatgttccgagtatttgggcatgacagagtttgggtattagatggtggcctgccgagatggcgtgcatcaggttatgatgttgaatccagtgcttcaagtgatgctattcttaaagccagtgctgctactgaggctatagagaaagtatataagggacaaacagttggcccactcacatttcagactaaatttcagccacatcttgtttggaacattgatcaggtaaagaaaaatatagaggacaaaactcaccaacacatagatgctcgatcaaagcctagatttgatggaactgtacaagagcctcgaaagggaatcagaagtggtcatgtacctggtagcaaatgcatcccttttgcacagttgttagatagttcacagacattgctaccagcagatgagttgaagaagcgatttgcacaagaaggcatctctctggatagcccagctgtgactcatgtggaacagcgtact

SEQ ID NO: 219770 - DNA, 390 bp, Glycine max
gaaccatcctatcattatatttataagccacatgataggatttaatattagtaacatttgaacatattagcaattctcaagaatttcaaccacaactaaaccaaatcaacaaacagtaaagccttcaaaaattggggggttcaaaatgtttgacaaatgaaaacagccccttcacttgcagatactttttgggggcatgcaaatttagctgtattgaattcataaagggtcaacaggggtatttgattgtgctccccattcaggccaagatccatcataaactgcaacatcagactttctaagacgatgaagacccaatgcaagaatgcaagcagttacgcctgttccacatgaagtcacagctgggctttccagagagatgccttcttg

SEQ ID NO: 219771 - DNA, 389 bp, Glycine max
actaacctataggaatactaattatgattgtcattcttgggggtgaacatacaattgtagagaatgagtctacagtctgttctttctatgcagacaattacacagaaaatagaatgaagcacagatacaattagcataccacttttcaaaccaaaggagagcaaaaattttgactaacagaaaaatagctccacattgcaaattctaaaattatcccaagtctgaccatcatcaattaggtagctccataatggcagcaacaatgtcgccattggcagctttgagagccttaacagctcttgatctgaacacaccagcttgagtcatcaccaggtctatattcttgggatctacaccagtctcgtcgacatccttgtcggcttgagcag

SEQ ID NO: 219772 - DNA, 552 bp, Glycine max
aaaaaataaagaaaaatttaccaaaatgccttcttcttccaccaccatagtctccaaatgcgtgatccaccccgaccagaaatcaaacatgaaacccttgagactctctgtttctgaccttccaatgttgtcgtgtcactacatccaaaagggcgtgttactaaccgctccgccctcgtctttcgaggatatgatactctcttttaaacactctctttctatcgcgctctctcactttccggctcttgcgggaaggttagagacagattctcatggttatgttaatattgtctgtaacgacgctggcgtggattttatccatgctaaagcaaaacacctgactctgaacgccgtcgtttcaccgtctctcgttgatgttcacccttgcttcaaggaggagtttttcgcttacgacatgacaatctcctacgccggccacaacacccccctcgccgccgtccaggtgacggaactcgccgacggcgtcttcgtcggctgcaccgtcaaccactccgtcaccgacggcacctcgttctggcacttcttcacacg

SEQ ID NO: 219773 - DNA, 562 bp, Glycine max
  unsure (1)..(562): unsure at all n locations
cttcccaaccactactactcactcactgcagatctcaattgcatcgctgtccatggctaccatcgttagcatcaaggcccgccagatcttcgacagtcgtggcaatccaactgtcgaggtggatttgacttgctccgatggtacttttgccagagctgctgttccaagtggtgcatccactgggatttatgaggcccttgaattgagagatggaggatctgactaccttggaaagggtgtatcaaaggctgttgacaatgtgaacaccgtcattggccctgctttgattggcaaggacccaactgagcagactgctattgacaacttaatggttcaacagcttgatggaactgttaacgaatggggttggtgcaagcaaaagctaggagcaaatgccatattggcagtgtctcttgcagtctgcaaagctggtgctagcgtcctgaaaattcctctatacaagcatattgctaatatcgcgggtaacaaanagttggttttgcctgttcctgctatcaatgtcattaatggtggatcacatgcatggaacaaacttgctatg

SEQ ID NO: 219774 - DNA, 413 bp, Glycine max
gcaacgagtaagaaatatttggggatagcccataaaattggaaataaactgtaagtaggcttcaagtattaaagctaaatatcattaaacacctttcaaagtcttaagacataactgtcctagctctgtgaatcagaactcaaattattggcaaggtctttatcataccaagactaatgttccaactatcaacttatatatcacaccaaaaaccgcgcatccaaatctcaatgctcaaactcgtgtggatctccaggttttttccacttgaaaactttagtagggttcaacgggggtacggaagttagctccggcgtacactgcttcagcaccaagctcctcctcaattctcaagagctggttatatttagcaagacgctcagacctgcatggagctccagtcttaatttgac

SEQ ID NO: 219775 - DNA, 512 bp, Glycine max
  unsure (1)..(512): unsure at all n locations
cttttctcagctgctgttcctgcgcgtgaacaagcctcaggtaagccaaagccatggttaagcataacaatgttatccccaacggacacttccgtaagcactggcagaactatgtgaagacctggttcaatcagccagcacggaagacaagaagacggttggctcgtcagaagaaagctgtgaagattttccccagacctacagctggacctcttagacccattgtacatggtcaaactttgaaatacaacatgaaagtgagagctggaaggggattttcccttgaagaactcaaggcagcagggattcccaaaaagcttgcaccaacaattggtattgctgttgatcatcgccgcaagaaccgttctttggaaagtctgcaagctaatgtgcagaggctgaaaacatacaaggccaaattggttgtgttcccaagacgggcacagaaggttaatgctggtgattctactcccgaggagcttgcanatgcaacgcaagtccagggttctttc

SEQ ID NO: 219776 - DNA, 420 bp, Glycine max
aaaccaacaaacttgaataaaagttcacaataaaaatgggtgaaaatatccatgttttagaccgaacatgttctgaatagagctaatcaatctcgtgcaaaaattgtcttgcaacaactattatatggatggactacaaacgagagacttctaaggtcatcactttttgtcttccttctcagcttcggcagccttcttcagtctggcaccataatggcgtttgtttgtgcgttcaagtcgaagcttgtaataagctttaaaagccttcatgtcatctgtaacctttacaagttcaacagttggcttctccctcacaataggcaagaaagaaccctggacttgcgttgcatttgcaagctcctcgggagtagaatcaccagccttaaccttctgtgcccgtcttgggaacacaaccaattt

SEQ ID NO: 219777 - DNA, 332 bp, Glycine max
gtctcctatattattaccactcaatttctcactccctcttcattctcttggctctgggtcaaaaccctaactataaggtcctccacgccgattcagcgactttcttttgcgtcacaaccactgcgcatgctcatggctcgcaccaccctcggtctcactctcccaggccacaccgaatcccttacggcatctcacgcgaggaaagagctaggacgtggtgaagtggaaaggggacctactggccgttggggtaacgcagaacggcatcgcgagaaacgtggaatcgagattcgagaacgcgattctgaacgcgttggactccaagctaggcg

SEQ ID NO: 219778 - DNA, 535 bp, Glycine max
ggcccttgagcttttctttctttctctgctctcttttcttttaggtttccactctcacacactctccctcttctctttctctgcaataatctctcttctcttcttcactctctcaactcctgccaaacccccatttccgcagttcttaaatttggagtctgatgtctccgccattgctggttaccgaagatgaagggcagtgccatgcctcgatggtagcatctgcatcttcaccatccctgaactgtttctccctaaatgaggccggatttaaagaatgcaattacctgggattgtcagattgctcttcggtggacagttctactgtcccgaatttgtctgatgagaaaaaggagaatctgaatttgaaggctactgagttgaggcttggccttccgggatcccagtcacctgaaagggagacagaacttttctcgttgagctcaacaaaacttgatgagaaaccactgttccctttgcttcctaccaaggatggaatctgctcattgtctcaaaaaactgtggtctcgggcaa

SEQ ID NO: 219779 - DNA, 551 bp, Glycine max
ttcttataattttctgaaaacaatgcactgattgcaacatacattcaaggtatccgaacaaacatgtgcctatcaagattacaagctacacaattactaatattcaaggacgctgcatagggtatgatagtggagacaaatgtctcacaaacaatagacctagacactataatgatacttgtaaccatagacaacatgttgaatagcaggtaaccatcaaaacccggcattcagtcatttatatcataagttctctttccacactctacatggtccaataccaactagcacctgctcctggatttttccatggccctgggagctaagccaatggcatcagaacccttcatgattttcagtcttttgcatgtgtcaatgaacatatcccatggtacatctccgacaagcatccagtcaccatctttatcttcataagtgagtacatattctgaaccatgcaggaggtccttcagcttgctctcactcaacatttctcttcctggagctccatgggaaccacattgacctagagtgaaacagctgaacatttt

SEQ ID NO: 219780 - DNA, 454 bp, Glycine max
ggtggtcatggctaatttgcttacagtgtttttgctaattgaggtgtttgcatatggctacagttaccgacaatatggcttaaacacgaattactacttgatgagctcttgtccttttgttgaacctgttgttaagaacattgacaacagagctttgcaggatgatcccaccctatcagctggtctgattagaatgcactttcacgactgcttcattgatggatgcgatggctctgttctgattgactccactaaggataatacagcagaaaaggattcttcatggaattagagcctgagaggctatgaagtcatagatgccatcatagaagagcttgaaagacaatgccctgtggtggtttcatgcgctgatattcttgccatggctgctagagatgcagttttctttgctggaggcccagtgtatgacataccttagggaagaaaggatgga

SEQ ID NO: 219781 - DNA, 419 bp, Glycine max
atatggaaatatattgatgattaaggattacatcttgaaagtgtaatacacccaacggatacaaaatagagctaggtactagttaagcatacacatttatacatatactatgcatgcaatgtacttttaactagtgtttggagtttgccttaaagctaaaaccatcacaaaccctcaattgattcagtttattttgcggcaattttctcttacttcaccgttggaattgtctttgacatcaagcaggcccatcttgaccatagcttggtggaaatcaaagaagaacatggcttggttgaatgcataagcattcacaaagttcctggttctggggctattgtagagtgttaggtctgatgtaagaaccccatttctcctcaacatagcgttgaagtaaacgttgtcaaaatcgttgctcg

SEQ ID NO: 219782 - DNA, 480 bp, Glycine max
aactcacttttggggacctattgccaactggggatttgtagcagctggattggctgacctgaacaaacctccagaaatgatctctggcaacatgacaggagcaatgtgtgtctattcagcattgttcatgagatttgcatggatggttcagccacgcaactatctactttttgcttgccatgcctcaaatgagactgttcaactctatcatttttcccgatgggcaaaggcacaggggcttctgtcggaaaagaaggaggaagcttcatcccagtgatttgatgatgctaacacattcttgagtggagcgattttaaagattttgcatttgaacttggtgatgtatgaataattgattactgattgtaagaaacggctcgtggaaactgtaaaagattgtggctgtaccagagtattcggattagaaaggatttctcagaagtctaaactatttgttgaaagcatatgggtggttttaat

SEQ ID NO: 219783 - DNA, 438 bp, Glycine max
attaaaaccacccatatgccttcaacaaatagtttagacttgtgagaaatcctttctaatccgaatactctggtacagccacaatcttttacagtttccacgagccgtttcttacaatcagtaatcaattattcatacatcaccaagttcaaatgcaaaatctttaaaatcgctccactcaagaatgtgttagcatcatcaaatcactgggatgaagcttcctccttcttttccgacagaagcccctgtgcctttgcccatcgggaaaaatgatagagttgaacagtctcatttgaggcatggcaagcaaaaagtagatagttgcgtggctgaaccatccatgcaaatctcatgaacaatgctgaatagacacacattgctcctgtcatgttgccagagatcatttctggaggtttgttcaggtcagccaatccagct

SEQ ID NO: 219784 - DNA, 549 bp, Glycine max
caccatttttggtttgagaaacataattagcaagagagttcaaatggggaagagagagtttaatggggtggtgttgatgatgctgtgtttgtgggtttgtggtgtcacagcctctgtgacttatgaccacaaagccattgtggttgatggcaagagaagaattttgatctctggctccattcattatcctagaagcacacctcaaatgtggccagaccttattcaaaaggccaaagatggaggccttgatgtcattcagacctatgtgttttggaatggccatgaaccttctcctggacaatactatttcgaagataggttcgacttggttaaattcgtgaagctcgcgcagcaagcaggcctctatgttcatctccgtattggtccctacatatgtgctgaatggaacttggggggatttcctgtctggctcaagtatgttccaggcattgctttcagaaccgacaatgagccgttcaaggctgcaatgcaaaaattcactgcaaagattgtcagcttgatgaaagaaaataggttgtttcaatccca

SEQ ID NO: 219785 - DNA, 580 bp, Glycine max
  unsure (1)..(580): unsure at all n locations
agtaatattattcttcgaatccattttattcataatgggtgttttcacatttgaggatgaaaccacctcccctgtggctcctgctaccctttacaaagctctagttacagatgccgacaacgtcatcccaaaggctgttgatgccttcaggagtgttgaaaaccttgaggggaacggtggccctggaaccatcaagaagatcactttcgttgaggatggagaaagcaagtttgtgttgcacaaaatagaatcagttgatgaggcaaacttgggatacagctatagcgtagttggtggagttgggttgccagacacagtggagaagatcacattcgaatgcaaattggctgctggtgccaacggagggtctgctgggaagctaactgtcaaataccaaaccaaaggagatgctcagcccaacccagacgacctcaaaattggcaaagtcaagtctgatgctcttttcaggccgttgaggcttaccttttggccaatcctcattacaactgatccaatattcaacttagttatcatcagtgtcttgcttatcatatacaagaagttncttgcgtggagtact

SEQ ID NO: 219786 - DNA, 388 bp, Glycine max
aaaacaagagttcaaatgatgatttcctttattataatttatttattgatgaaggaggtacaaagatatcgaccagctcttacaattctgaggcaaaagaaaataaaaggaaacactcgttacattgaaagccaacttaaaacttgagcacaaagtactaaataacagtacttcacgcaaggaaactcttgtatatgataagcaagacactgatgataactaagttgaatattggatcagttgtaatgaggattggccaaaaggttagcctcaacggccttgaaaagagcatcagacttgactttgccaattttgaggtcgtctgggttgggctgagcatctcctttggtttggtatttgacagttagcttcccagcagaccctccgt

SEQ ID NO: 219787 - DNA, 595 bp, Glycine max
gtcactgctccttattcggatctatctcacaccctttctctcttttcttcttttctttcgttttcccttcgcaagtgagagatggcgcaaattctgcttcatgggactcttcacgccaccgtcttcgaggttgataggctcaatgctggtggtggtggtggcaattttttcagcaagctcaagcaaaactttgaggagactgttggcatcggaaagggagttactaaactctatgcaaccattgatctggagaaagcaagagtaggaaggactagaatcatagaaaatgaacatactaatcccagatggtatgagtcttttcacatttattgtgctcatatggcttcaaatatcatattcactgtgaaagatgataatcctattggggcaactttaattggaagagcttatgtgcctgtttcggaggtcttggatggtgaggaaatagataggtgggttgaaatcttggacgaggaaaaaaacccaatacaagagggttcaaagatccatgtgaaagctgcatattttgatgtcacaaaagaccgcaactgggctcgaggcattagaagtcctaaattccccggcgtccctatac

SEQ ID NO: 219788 - DNA, 301 bp, Glycine max
aaccaaaatctggccccggaatcttcaaaaaaatagcaaaaaaaacctttccccaagacattccaagacttttttaagatttttcccaagggggaaggaaaaccccgattggggggtgagccataaccgggttggaacaaaggcccaaatcaaattaagtagggagaatgggggggggggagtcaggtttgccccccaaaaggggacccctgggggcggggaaaaattcaaaacctggcagctcggggacatttcctttatggggaacccccaggggggacccgaaaaggggccccggaag

SEQ ID NO: 219789 - DNA, 576 bp, Glycine max
ctctctctctctctctctctctgttcactctcactttttgttttcacctcctcctaatttccaagcacactttctttgtttcttatttcttcctgtctcaattataagtaaaagaaaaacatatttttaaggagattactgggacagctagatgacgcgagcgttcagaattctcgggtccgcggacaacgccacctcgctggcagcggtagcggcgccgccggaggcggtggcgcttgagtcggacttcgtggtgattctcgcggcgctcctctgcgccctcatctgcgtggtggggctggtggccgaggcgcggtgcgcgtggttccggcaaggctccggcggcggaagctctccccggcaagccttggcgaacaagggcctaaagaagaaggtgctgcagtcgctgccgaagttcgcgtacgtggacagcaaccccagcaagtgggtggcgacatcggaatgcgcgatctgactcgccgacttcgccgccggcgacgagatccgcgtgctgccgcagtgcggccacggcttccacgttacctgcatcgacacgtggcttgcgtcccactcttc

SEQ ID NO: 219790 - DNA, 601 bp, Glycine max
  unsure (1)..(601): unsure at all n locations
gtggttctagtaattcagtgctgctagaagatggaaactagtgaatggcatatcgagcgaagatctagcttcggctctgaatcccccttagcaagagaggcaggaaatgtgcctgaaactgggtcactctctattgtggtgcttggtgcttctggtgatcttgctaagaagaagacatttcctgcacttttccacctatacctgcagggattcttaccaccagatgaagttcatatttttggctatgcaaggacaaaaatctctgatgatgaattgagaaaccggttgcgcggctatcttgttccaaagaaaggtgcttccccccaacagttggaggatgtagagaagtttttacagctgatcaaatatgtaagcggctcttatgattctgaggatggcttccgcctgttggataaagagatttcagagcatgaatatttgaaaaacagtgttgagggtttatctcggaggcttttctatcttgctcttccaccttcagtatatccatcagtttgcaagatgatcaagacttgttgcatgaataaatctgatcttggtgatggacacgtnngtgtgtgagaaacctttggtaggatctaga

SEQ ID NO: 219791 - DNA, 428 bp, Glycine max
actagtaaatggacttcattttccatttattttgcatttaaaggcaaatcagttacacaaaccgtgccaaacactcttagtctcttatattgttccaaatgcttgatacacatccgtgggagtgcttcaaagggaagaagcctcacaagcttattgtgtattcattagcagctaaaaattcctcatcttattacattagatcactctacaaggtaggagggatccatatgtagccgtgtgtttgaacatagccagctttttcaagtaactgatctgcttctgcaggacctctgcttcctggtttgtaggggagtggcttgaattccccttcatcaattctgtgcagaagtggggtgaagatctgccaggatgccttcaactcatctctgcgaacaaaatgttgctgatcacctctaattgtgtcaaga

SEQ ID NO: 219792 - DNA, 590 bp, Glycine max
  unsure (1)..(590): unsure at all n locations
cgactataaaactgcaaatcccatcaaaatcccaatctttagggtttccatgtccaatccaagggattcgtttatgaagatttagcgaaaagggttgaaattgatcatggatttgggaagcgaatccgtggaagagaacgaagtgaatcatgatgggaatggaaacggtggttcttatgatgacgagaagattgggttgggtttggagggaaattcggatgtcaacggttcggatcaaaagggaacggttggcgaagttgaagtgggtagtgcggaaggtgtgaattccaaagggacaccaacaaaggggtttgggttgaagaaatggaagagaattcggaggaatgttgttaaggatccaaattcgagtgttgattcgggtaaagtcttgaagaggggcttgtctggcaatgccaatttgagtgaaagccagccttttctgcgcgatgttaaggagaagaatgaaggatcttcaaacatgtttgggaatgtagtgttctctgatggcaatgtgatccatggttcaagttcggattctagatatgcacttggatctggtnttgttgntgngactgattctgagaatagcg

SEQ ID NO: 219793 - DNA, 502 bp, Glycine max
tcgtcggcggccgcccttttttttttttttttttttttttttttttttttttttttttttggtcacaatatacaaatttatgttattaaaattaaactcaagaagaacaaaaaaagtaacaattacaattgttttgccaagcccaaattacaaggggctgtgcacaaaatgatattaaaacaacgagagcaaatacacgcttttcccctacccagagaaagaagggtcagttttctataaacgaaattttacattcaaagatcaggaaaagaaaagagaaaaaaagaaaaggaaaaaactattaagattgcccaaaatgaacctaattttgcaggcctaagtgggcacaaccattccagaattgtgcgataactgtgacatgtaaagccaaaagatcaaaactaaaaacataaactgtatgaaaagataaaatgacattttacatacccttctctgcagcacaaaagactccttaactactacactatcaccacaatatttt

SEQ ID NO: 219794 - DNA, 536 bp, Glycine max
aggatatttgagacgaccacaccaaaatggagacaattaaataatacgacacaggtcgcagcaacatttccacctactcttctctctctctttctctcttcttctgcaccatcgatccatctcatcgttctcttagctaccatggcgactgagaaccctttcaatagcattttgaggacgctcgagaagcccggcggcgctggcgagtttggaaagtactttagcttgcccgctctcaacgatcctagaatcgatagacttccttactctgtgaggatacttttggaatctgcaatccgtaactgtgatgagtttcaagttaagagtaacgacattgaaaaaattattgattgggagaatacctctcccaagctggtggagattccattcaagccagctagagtgcttctgcaggactttactggggtgcctgctgtggttgatcttgcttgcatgcgagatgcaatgaacaaacttggtggtgattctaataaaattaaccccttggtaccagttgatcttgtcattgatcactc

SEQ ID NO: 219795 - DNA, 595 bp, Glycine max
  unsure (1)..(595): unsure at all n locations
ctcgtcggcggccgccctttttttttttttttttgaaaaagaaaatcacatttcttcaacaaacgccagtcataactcttcctcgtagcagccatctagttccttggtttattaatacaattgctgaatagcatggatttctttgtagcagccatactagattattaagaccaaagttaagaatcagcgccagtgggtgctatcaattcaacctacaaacttggtttatatctgattcaatgtttagcattgatcaagtttctgatgacatattgtaagatacctccatggttgaagtaagctagttcaacctcagtatcaaatctcaatgtagatacaaatgatttcccggtgtctgtcaccactgtgacatcttgaccgggtcgtatttcattcacattgcttggtagatcaatggtgtaacgttcttgaccagttaatccaagagaatcagcatcctccccgggcttaaaacacaaaggaatgatacccattcccaccaaattacttcggtgaatcctttcaaaactttntgctatgacagctttcacgcccagtagcattggccccttgcagcccaatcacgagagctttc

SEQ ID NO: 219796 - DNA, 463 bp, Glycine max
gagattatgatgctctgtctggctcaaaacgtccttatgctgctatagatgatcttcctccacgatatgctgatactggtgctcgccaatcaagagctcgtctagactatgactatggtgatagtgcttcgcagtatggagatgcttatggtgatagacttggaagatctagtgtgggatatggtggtggcagcagaagttctatttctagtcaagattcacatgggatgtatagcagtcggcagggcatgagttatggaggaggttcttttggtagtggtgatgttggtggcatgtattcatcaagttatggtggtgattacatttctcgtggaagtgatgttggtggcagctcatattcatcagtgtattctggaaggggtgtgggtggtggtagcagttatatgggtgggggggtttcaagaatctattattgagggtaagtcatctgataacttattgg

SEQ ID NO: 219797 - DNA, 505 bp, Glycine max
gtttccaaccttaattctcttatcaaccagaccagattgcagagtatagcggcaacataccaggatcattatgacttgtggctgctttggagccaaatcgataaaggcaaaacgcccttcttatgttcctggtgaaattgatggctatccgctagataatgtcaggcaattttctgataaagaactgagattggcaactgataattataatccaaacaataagataggacgaggaggttttggaactgtttaccagggaacattaagagatggaaggcatatagcagtgaagactctctcagtttggtcaaagcagggagttcgcgaatttttgactgaaattaaaactttgtcaaatgttgaacatccaaaccttgttgaattgattggattctgcattcaaggacctagccgtacattagtctatgagtatgtggaaaatggaagccttaatagtgccctacttgggcacaggaaatgaaacatgaaactagactggagaaaa

SEQ ID NO: 219798 - DNA, 543 bp, Glycine max
cccaaggccaatttcatctccttcaaggactctgcatgccgttgctttggctacatggtctccaagaagaagtacatctacaccattgatgatgactgctttgttgccactgatccatccggacacaagattaatgcacttaagcagcatatagaaaacctgctctgcccatccacaccctactttttcaacaccctctatgaacctttccgagaaggtgcagattttgatcgcggttaccccttcagtctccgggaaggtgtaccaactgcagtttctgatggtctttggctcaacatcccagattacgatgctcctactcagcttgtgaagccacttgagaggaacactaggtatgtggatgctattgtgaccataccacagggcacttcgtttcccatgtgtggaatgaacttggactatgatcgcgatctcataagagcagcaatgtactttggtcacatgggtgatggtcagcctattggacgctacgacgacatgtgggcaagctcgtgcttgcaggtaatctgtgatcacttggga

SEQ ID NO: 219799 - DNA, 452 bp, Glycine max
aaaaattgatcactatggatctatactcagtaataaacaagggatacatcaataacctttctattatttcacatgtaacgaaatgctgccatgtgatctctacccatcaaacaataataaaaagaaagtaacgccctacgggtgtacttattgtttctaagctcaaatgatgaagttattaaacagaattacagctaacaatgctgcaaattttaagccgagaataacagctaagttgaagataaatactaaggaaaaaaaatacagtatataaatagttccatttccaagttctgtggctgttatgcagttaaccaaaaaccgattcacgctttgccattggccactgatgctcccgcagggttaagctcatcccaagcttcaatccaagtgaccatggcatctgccaacttgtcaaagtaaggatctaccttggaaagcttttccttgac

SEQ ID NO: 219800 - DNA, 506 bp, Glycine max
cttccctctttcatccccccgataagaacaagcacccaccgtttaacgctaatttttgagtgtttttgttttttgcagcaacaaacaaacatcttttaccttaaacaacaatggccgatgccgaggatattcaacccctcgtttgcgataatggaaccggaatggtcaaggctggttttgctggagatgatgcaccgagggctgtgttccctagcattgtggggcgtacacgtcacactggggtgatggttgggatggggcagaaggatgcgtatgttggggacgaggctcaatccaagaggggtattttgactctcaaatacccaattgagcatggaattgtgagcaattgggacgacatggagaagatctggcatcacactgtctacaacgagcttcgtgtggctactgaggaacaccctgtgcttctcaccgaggcacctcttaatcctaaggctaatcgtgagaaaatgactcagatcatgtttgagacctcaacacccctg

SEQ ID NO: 219801 - DNA, 421 bp, Glycine max
aatcagaatacttcatgaaaagaatttgttaattcaaccaaaccaaataggtaacaattcacatctcttctacaacagaacgggagaaaaaaaaaaagaatcttacatatcttgctagccttcatgctcttatctcaacataccaaagaaaggaaaacacaaaaacaagatagataaaaggatggtaaagagtaggaaatgaaagttcctcaaccactagatggtatttttgtagtatttgtataaatagtaatttccctggtccagctttcacactccatgattataacttagaagcatttcctgtgtacgattgatggtccagattcatcatactctgccttcgcaatccacatctgttggaaggtgctgagggaagccaagatggagcctccaatccagacactggacttcctctctg

SEQ ID NO: 219802 - DNA, 457 bp, Glycine max
  unsure (1)..(457): unsure at all n locations
taatcggcggccgccctttttttttttttttacattaatacatatgtaatacatcacaacaacataatcactacattatgatgccattaaggtagatcacaatttcaaacatagagaaatacattgtaggctgatatagtacatcagatgcaatatggaaatgcctacttatttaaggacacactaacaaataaagacttaagtaacctatttggcaaaccagagaaggtggccctcagggaagatgtgacacactggagcagctccaggcttggttttaagcatttgtaaaaacacatggtttggatcccattctgatgtgtctttgtggcatacagctgcagctttaactctggttccatcttctccctccaaaggcataaaatgcgcagtagtatttgatatctcatgacacataaacacaacatatgggtaatacatangatgacaaacaatg

SEQ ID NO: 219803 - DNA, 624 bp, Glycine max
  unsure (1)..(624): unsure at all n locations
aaaaccctgaagaaagacacagccattgtttgtttactttccattgattgagcgagaagctttgttttttctgcgatcattttccattgggtggaagaaagtctcaacctttagtcgaaagagcaaggatctgagtgagtgagcgatcatgtgtggtggtgcgattatctccgacttcattccagcgggtcccgccggcggggcgcagcgcgtgaccgccgacatcctgtggccgaatttgaggaagcggttctcgaagtcgctgctggacgatgatttcgaggcagggttcagagaattcgaggatgactcggaaatcgaggatgtcgatgatgaggacgatgaagaggaggaggagttgaagaagaagaagccctttgggttctctcgctccaacaacaaggctgcttctaagcctctctctcgtggagcaacaactgtgaaatctgtggaatcaaaggggcaagctgagaagtgtgccaagagaaagaggaagaaccagtatcgcggaatccgccagcgtccatggngaaagtgggctgctgagattcgcgacccaagaaaggggnggtcgtgttgggcttggactttcagcactgcttgagaagctgcaagagcttacga

SEQ ID NO: 219804 - DNA, 629 bp, Glycine max
gttttcaatatgcagatcttcgtcaaaaccctaaccggtaaaacgattacgctagaggtcgagtcctccgacacaatcgataacgtgaaagctaaaatccaagacaaggaaggcattccaccggatcagcagcgtttgatcttcgccggtaaacaactcgaagacggcagaactctcgccgattacaatatccagaaagaatcgacgctccacctcgtcctccgacttcgcggtggcatgcaaatcttcgtcaaaaccctaaccggtaaaacgattacgctagaggtcgagtcctctgacaccatcgataacgtgaaagctaagatccaggacaaggaaggcattccaccagaccagcagcgcttgatcttcgccggaaaacagctcgaagacggcagaaccctcgccgattacaatattcagaaagaatcgacgcttcatctggtgcttcgactccgcggagggatgcagatcttcgtgaagacgctcaccgggaaaactattactctggaggtggagagttctgatacgatcgataacgtgaaggcgaagattcaggataaggaacggattccaccggatcagcagcgtcttatcttcgctgggaagcagctcgaagactgacgcac

SEQ ID NO: 219805 - DNA, 363 bp, Glycine max
aataagattcaaccaaactagagaaggccaccacggagcctaaggacaacatagacatagaaattttgttatatcatacacattcaaggaagagaaaatctcaatagcaagattcaactgaaactagaaatcgccaccacggagcctaagaacaaggtgaagcgtggattccttctgaatattgtaatcggcgagagtgcgtccggattcgagctgcttgccagcgaagataagacgctgctgatccggtggaatcccttccttatcctgaatcttcgccttcacgttatcgatcgtatcagaactctccagctgcagagtaataggttctccggtgagcgtcttcacgaagatctgcattcc

SEQ ID NO: 219806 - DNA, 663 bp, Glycine max
tccagatcttccatagtaagctgttgagtggaaccatatcgagcacctgagttggcttgttttgtcccttgtccatctccatggccactccacagtcccacttccgctttctcgctttctcactctctatcatccatatctctctcttcctctccacaaccgcaacccaacaaccgctcctcgaagaacaagacactcccatcacgcacttccagcgctacctccgcattaacacagcccacccaacgcctgactacacctccgcggtctccttcctcaaagcccaggcccaaagcctgggcctcaaaacccaaaccctcgagttcgtccaaggcaagcccgtcctcctcctcacgtggccgggctcaaacccctccctcccctccctccttctcaactcccacctcgactccgtccccgccgagcccgagaaatggctccacaatcccttctccgaccaccgcaccgtctccggcgccatcttcgcccgcggcgcccaggacgacaaatgtatcgctattcagtacctggaagccatccgcaacctcaaatcccaatccttcactccacaccgtacaatccacatctccctcgtccccgacgaggaaatcgctgcatcgacggggccgccagttcgtgagtccgagaattcactgactcacg

SEQ ID NO: 219807 - DNA, 356 bp, Glycine max
ttttttttttttttttttttttttttttttttttttttttttttttttttttttttggttttttttttttttttttttttttttttttttttaaaaaccagcgcccccttaaagggccttaaaaatgggggaagctgggtccaaccgaaaaaaacccttgacctttaaaaggggggaaccccggcccaccccaacgtcccccttcaaggttttacggggggaaccaagggtcccttttgaagaccttaccagcacctgaggggggccccttttaaccccccgggggggggggaaccccgggcccaggaggggcccccctcggggtgttaacccggggggcccaagaacctttccag

SEQ ID NO: 219808 - DNA, 518 bp, Glycine max
cccaaattcattttaatcctaattctgcacttcttgatcattcgatttttctcctcaagatgcagatattcgtaaaaactttgaccggcaagaccatcacccttgaggtggaatcctccgacaccattgacaacgtaaaagctaagattcaagacaaggaagggatcccacctgaccagcagagacttatctttgcgggtaaacaacttgaggatggtcgcacccttgccgattacaacatccaaaaggaatcaaccctccatctcgtgcttcgcctcaggggtggcatgcaaatctttgtcaagactttgaccgggaagaccatcacccttgaggtggaatcctcggacaccattgataatgttaaggccaagatccaggacaaagagggcatccgcccagatcagcagaggctgattcttgccggtaaacaacttgaagatggaagaacccttgctgattacaacattcagaaggaatccacccttcacttggtgcttcgtttgagaggtggtatg

SEQ ID NO: 219809 - DNA, 361 bp, Glycine max
cgcgctcactaggtcggcggccgccctttttttttttttttttttttttttttttttttttttttttttctgtttttttgtggtttgttttttttgggtgtttctttatttgattcagggaattcgactatgaacccatgctgaactttaatgtttaaggggaaccgaggcgcatcacggggactaaaacataaaagggggaccctaaaccaaaacgggaaacccttctggggggaaaattggactcgacaaacgggaatcacgaaaacccctgaaaaacaaccccctgaaagcacggcccccggaacaaagacccccttaaaagcccccgtgaaggccaaggtccctttacgcggggggt

SEQ ID NO: 219810 - DNA, 544 bp, Glycine max
aattacttgccttgaggaacgttccagaccacatacagaggtttctctagtgatcttcgttcttctgtggagatcttgttttttcatctcacttttcttctaattaaggaacaagctttccgcagttgaaaaccctagctagctagcttccaccaatttgaatcaccaatggctcgctctttctctaacgtcaaggctctctctgctcttgtggccgacggattctccaacactctcaccaggcgtgggtacgcagcagcgacacaaagcgcaacaagaggaggagctgcctgcatcagcagcaagatagctcccacgtcatgggaagacaaggtatgatgaggtgctgaaaaggtttcgagggtcccagaccctgtcactggttactacaaaccggagaacatcaaagagattgatgatgctgagctgagagccacggtgttgggcaaaaaattcaaccactagctcgctagctagttaatctcaatgaccttcttggtcacttgaatatgctatatcatatatgactctatcgagttcacag

SEQ ID NO: 219811 - DNA, 535 bp, Glycine max
gctgggcgtcctttttttgttttgttagaacgtttcaaactactcgtattattcagcagaagagaatggaactgaagcatagttagagtattcaacatgagatccaatcacactagtagacattaattctggccatatgctagatggcccatgctgaataatccccgaaggttctgcgaacttcgagagagtcatatatgagtataacatattcaagtgaccaaaaaggttattgaaattaactagctagcgagctagtggttgaattttttgcccaaaacgcggggtctcagctcagcatcatcaatctcttggatgttcttcggtttgtagtaaccagtgacagggtctgggacccacgaaaccttttcagcacctgctcctaccttgtcttaccctgacttgggagctatcttgctgctgatggaggcaggtcctactattgctgcgctatgtgtcgctgctgcgtacccacgcctagggagagtgttggagaatccgtcggccacaagagcagagagaaccttgacgttag

SEQ ID NO: 219812 - DNA, 578 bp, Glycine max
  unsure (1)..(578): unsure at all n locations
attgaatgaccctgtagtacaacgacaaagatttgcagaacaactcaaggatcgacaatcaggtgatgatgaagcaatggccttcgatgaaacattttgtacggctctagagtatggtttgccacctactggtggttggggtttgggaattgatcgtttgaccatgttactgacagactcacagaatattaaggaggttcttctcttccctgccatgaaacctcaagactgagccttcagtcaaagctatgtttaaatctcagcagtaaaatcatacacttcaacaggtatgttcttcctcaaactgttatattccacatagcactaactaggttttggtatttctgtaagcttctcaaccacaatagtactgctatttgccgcaattgataaatgattattcagctctgtacatatttatttttaatttttaatgaaaatgactgtagaaaattgttattatttgattatccagagttcaggtgttaattcatatctacttgtataatgtcaatgctttcctgtggtattgattagtgtttgatntacttaatgtggttatgacttanaatcttctc

SEQ ID NO: 219813 - DNA, 441 bp, Glycine max
tccaaaaggagtccactcttcacttggtgctccggctccgtggtggaatgcaaatctgggctaagacattgaccggaaagacaatcacccttgaggtcgagagctctgacaccattgacaatgttaaggctaagattcaggacaaagagggtattccaccagaccaacagaggcttatctttgcaggaaagcagctagaagatggcagaaccttggctgattacaatatccagaaggaatctaccctccacttggtgctccgtcttcggggtgggatgcaaatctttgtcaagaccttgactggaaagacaattacccttgatgtggaaagttctgacaccattgacaatgtcaaggctaagattcaagacaaatagggtatcccacccgaccaacagagactgatctttgctggaaagcagcttgaggatgggcgtaccc

SEQ ID NO: 219814 - DNA, 471 bp, Glycine max
gcgtaaactacgatcaaggatcaggcgtaatgtgagctgctatgggagattcatgcctggcatggcgacaattccacctggtatggagttccatcatattgttccacacgatggtgatatagaaggtgaaccagaaggaaatttggatcatcctgccccccaagatccacctatttggtctgagataatgcgcttctttaccaaccctcgcaagcctatgatacttgctctcgctagaccagaccctaaaaagaacatcacaactttggtaaaagcatttggagaatgccgtcctcttcaagagcttgccaaccttacattaattatgggtaaccgagatggaattgatgagatgtcaagcacaaatgcttctgttcttctctcggtacttaagttgattgacaagtatgatctgtatgggcaagtggcatatcctaaacatcacaaacaatatgatgttcctgacatata

SEQ ID NO: 219815 - DNA, 529 bp, Glycine max
cgttatacgtcgcaggaatctattcccggattaatctaccgggtctacgagctggctgccctttttttttttttttttttaggcacgagaaatgagaagtggccttcattaaaaatgtaatatgttgatacagaaccaacacggagataagtggggaaaccagaggaaatatgtttcatggggaagtttgtgaggaagagaatgatttagaagttacagagaagagaggaggaaataagctttatgaacattgtggataatattcagatatctgcttgctcaaaagttggtttaatagtagacactcactaagaggcatataactagaaatgactttcaaatattttcatccattgagatatcccactttttcgatctaagcctggatatcagcaccgctacttccctgagttgcgctcgacgatgttggggctgtccaatggcgtgacatctgaaagagggtaacttctgttattatggagttgactgattgcacatgcttccactccctttagtatgacacttttgg

SEQ ID NO: 219816 - DNA, 548 bp, Glycine max
cataactccatttttctctccctctcttctctttcttaatttacctattctctcacgtctcaaatattttctcctccatctctcgccagcttcaagatatcactcattgagcaaagtaggtcaaaaaatttgctcaacaaggtaaaacatttattagttagctagcagtatggggagagcaccttgttgtgacaagaatggcctcaagaaaggaccatggacaaccgaggaggaccagaaactcattgattacattcagaaacatggatatggcaattggaggacactcccaaagaatgctgggttgcaaaggtgtggaaagagttgccgtctccgttggacaaactatctacgaccagatataaagcgaggtcggttttcatttgaagaggaagagacaataattcaactacatagcattcttggcaacaaatggtctgccattgcatctcgcttaccaggaaggactgacaatgaaataaagaattattggaacactcacattagaaaaaggcttctgaggatgggaattgacccagtgacacaca

SEQ ID NO: 219817 - DNA, 619 bp, Glycine max
  unsure (1)..(619): unsure at all n locations
gaggattagcttcgtagtttggtccaagcggttgcttttggtttttcttgcactggacatgtttttttttgtaacggttttgggtgtgagagtgaagagcacacttcaactattgagaaccgttgacctccatggctgtgacatcacctcttgtcgtagcaggttctcaacttcggtgtcacaattttagaagaaccagacactgggctcttacactgagttgggaaaaacagcagctgaagagagcacagaagtgtggtggggatgagaatccatggaagccagtgaagatagtgatgcgtgtggttgatcatcatccaagggatggtgatgtctcctatggactgcacaaggatttggtctcccttccaaagccattatccatatctgatattgtggctgcttctgatgatcatgctaaagtacggatatcatataaggggataccgggatcatacagtgaggatgctgcactcaaagcttaccctaattgtgaaacagttttatgcaatgactantgagaagcttttaagcttgtgagatatggtgggctgacaaagtatccttccatagaaaatacatctggnggaagcatcatcgaactatgattacttcttcg

SEQ ID NO: 219818 - DNA, 485 bp, Glycine max
cttacacagcacttacaccttattggactctacacagagagtgcatggtatagatgggaccgggccaaaattctatatgggatacactgcaacagagcaaaccatgcacttaccgcacactggaaccagccgaacgatgacataccaccggcctgaaatcgaagaactccattacagctgaggggagaacgaagaacacatatgtgtgcagaaggaccgtaccaagccaacaatattgaccatggcaaggctggatagagtgaagaacatcacacgactagtggacatggtacggtaagaacgcgaaactgaacgagctgctgaaccttgtgaacggcgctggagacaatgacgaaggacttaaaggacttggaacacaaggcccacatgaagaatatgtacggtgtgttcgacaactacaaggtgaactgtcaattgaaatggatcacagatgatataaaccgagagaggaatggagagctcta

SEQ ID NO: 219819 - DNA, 534 bp, Glycine max
acagggactcggagggttggttattggtctaattacactggattatcaattgtgcctcctgaagcactttattcaaaaccacctaatcgatccagtgcaagccaaaagctactccctgtgctttggccaggagaaacaacccataggccccgtggttgggtttttccaaacaatggaaggatgttaaaaattggagtgccaaaaagggttagatatcgagaatttgcctctcaagtacaaggcactgacatgttcaagggattttgcattgatgtatatctttctgctgtgaactggttgccctatgctgtcccctataaatacggttcttatggggatggtgacagcaatcctagtgacactgagcttgtccgtcatatcacagctggtaggttcgatgctgcagtaggtgacattacagttactacagatagaacaaagatggcggatttgactcagtcatatatcgagtctggcttagcggtagctgcagtcactgagaagacagatggcaatgctggagcttatatgacg

SEQ ID NO: 219820 - DNA, 366 bp, Glycine max
caaccgttcactccttcttctgcgtcaccgacaccatcataatcaccatccctttccttattcttcttctgcaacatccctctccccattttctcgctctcgttatttgtgctctactccattctccatggctactgattacccttcacctgtcaccgctcaaaacatcaaccccaagggtctgaaatgtgagtttgctgatggaggagaggcagtcacactagcccagaacttgcaaaaggatattacaggcccatccaggagctcacccatctgacgagatactatactgcaacattggaaagcctcagtctctgggccaacagacaacaactattttccgagaagcttttgcaccatgtgacc

SEQ ID NO: 219821 - DNA, 442 bp, Glycine max
ggctaccctttttttttttttttgggtattctaatacgaagtttattcgattaaaaagagatttatataggacctaatacaagtataagaatggagaaaatcaaatatcctttcaagtcttgcatattcaaaatgcaactatatggagttgacaaatctattcctgaaaacataagagactattttctctaactacaaaatccatcctcatcaaatatcaattgggtacccttaaattgacggataaaattcaagtaggacttagtcacggaactcatccatgaatttttcatggaactcagtcaagcgggtgacgatggccggaatcttttcttctggaggcaatatggtgcacctaaaatgccatgtgccaggaacctgtccaaaaccagaaccaggatcaacaacgactcctgtggcattaagcaagcgttcgcaatag

SEQ ID NO: 219822 - DNA, 538 bp, Glycine max
aacctagtgatttatgtacacgtcgtgaatatgctcgctggttggtttctgctagcagtgctctttcaaggagcacagtttcaaaagtgtatcctgccatgtacatagacaatgctactgagcttgcatttgatgatgtcactcccgaggaccctgatttttcttccattcaaggcttggcagaagctggacttattgaaagcaggctttcaagacgtgatatacagttgtttggtgatggagatgatagcccatttcacttctcccctgaaagtcctttatcacgtcaagatcttgtcagctggaaaatggccctgcagaaaagacagcttccggaagctgacagaaaggtgctgtaccaactttctggttttatagacactgataagatacatcctaatgcatgccctgccttagtagctgatctgtctgctggggagcaaggaataatagctcttgcatttggttatacaagagtgttccagccagataaaccagtgacaaaagcccaagcagctatggctttgctactggagat

SEQ ID NO: 219823 - DNA, 433 bp, Glycine max
tttattttttctttttattttttaaacttaaaatcgacaaaaaatatattcaatcacgaacggtaaaaatacatcatacaaataaaaaaattggaaagtgacatctacactaaatccacacaaacttaaatcatacgaggacaaaaataataatcataataacgatgatgataaaaatgagaaaagctggaacctttagactagagctataaccctctggttaggctctaagacatacttaataagagaatccataatagacaacagttttggaaattccttattcaatttggcaacgataagctcattgatgatcctaggagcatcaatcaccttgacctgttcctcgagagtgaaaatgttccaggagaagtacgggtaaacataatatctgaacatatacaagatttcattgagactaaacactcctggg

SEQ ID NO: 219824 - DNA, 594 bp, Glycine max
ggctgtggctggacgcagattatcgcgtttatcctatcaagctctttgatgaggggacggtcagggacaatctgctgtatctgtggatgatacattgaagatcatagcctgcagggaacaacataagaagcttgatgcccttgagacggaacttgctggagctaggcaagagggctttgtttcaaatcccttgatagagactaatggaacttactcgacgagaaggccgttggtcgtgataggtatactgacaaagtttggccgccagaagaatagagatgcaatccgcaaggcatggatggggagtggtgcatctttgaagaaaattgaagaaggaaagggcatcattgtgcgatttgttattggtagaagtgaaaatcgtggagacagtcaagataaagacattgatcatgagaataggctgactaatgacttcttaattctcgataatcatgtggaaacaaatgatgcattcccaaagaaggccaaattggtctttgctcatgctgcagacacatgggatgctgaagtttatgcaaaagtcaatgatgatgtctatgtaaatattgatgccttgagagctacacttgctac

SEQ ID NO: 219825 - DNA, 412 bp, Glycine max
caagacgtatgatattgcaaatgacttaaacttctacacaagaacgaacaaaatgctataatgaattcccacactgccacacagttcaaagttattgcataccaataatttcaagaacccttattaacttacactttcaaagggattggcacaacaatattatatgctaataaatataataatcttaagatgatgaagcaggtttggaagatgggttgaaaggaacctgctcagcgcatgtaaggatgtcatggggcccagcctgttctcgaccaacaccaagaaggtcaagataatacaggtaatgggaaacaatattgttcattgagtccacatctccttgtccacatacaccatccccatagagaatgttcattgtagtgccaaatccaggaacccgattctccatagt

SEQ ID NO: 219826 - DNA, 549 bp, Glycine max
cggctcgagcttgttatgtgttgaaatacattggtttatgggaagagagcaaggcaggaagtcagtgtttataaaacgacagtaggagcctggtctggtcggtgtggcactcaaacattgtttgttgtaggaagaggaatcttgagaaatggcaggggacagcaagagcaagattctgttcatcggagggactggttacatcggaaaattcatcgtggaagccagcgccaaagctggccacccaactttccttttggtgagggagtccactctctccaaccccgcaaaatcatccctcatcgacaatttcaaaggcctcggtgtcaatcttgttttcggagatctatacgatcaccaaagtttggtgagtgctataaagcaggtcgatgtggtaatttctactgtaggacacctgcagctagctgatcaagataagatcatttctgcaattaaagaagcaggaaatgttaagaagttctatccatctgagtttggaaatgatgtggaccggactcatgcagttgaaccagccaagtctgcatttgcaac

SEQ ID NO: 219827 - DNA, 532 bp, Glycine max
aataaaggtatcatagcatatagcatagcataggtatttcatacattgttcttttgaggagcacatgcagcaactcagtcttactacatgattctctttatttagaaaacaaagttttaccaattaaacaaacttatcagctaggctttgcatcttagacaaactgattaaggtactcatccacagtgatgtatttcacatcaggatatagagctgaagcttccactccaaaagaagactcaatttcaaagttagtatgatccccctttacataagaagagtggttaattgacaggatcacattcacgggtggtgcggactcttcaatttgcttcaggagttgttcttctggaacatagattctttcaagagttttaccaatctttccctcccagagagtaacaagctcattaaacgacaaggtattagctggtggtctaatgtagagaattttgttcaaggttcttggatcatccacagaattgattggataagttccaatatcctcttccttgttaaaaacagctttggg

SEQ ID NO: 219828 - DNA, 500 bp, Glycine max
gttgataggggttgtggcatgcttggctggtgcagcaacctttgccttggataaaggcccttctttgaaatttctaagccattttcatcttttggattaccatataagcattcaacatcaaggtcatgctcaatccggtgcatggataaagggttgcttcctcatgctcctctccaacacgttcttcgggctatggcttgtactacagactgtaattataaaagggtacccttcaaagctgctcttcacagctattcagtgattgttaagttcaattcagtcttttgtcattgccttggcctgagaaagggacattgaacaatggaagttgggatggaatgtcaggctcctcgccgtactatattgaggaattatggtcaccggtgtctcatattacttacaaacatgggtcatagaaaagataggacccgtgtgactagccatgtcaactccattggctctcattattacaatctttgcctctgcagctgtgaagggtg

SEQ ID NO: 219829 - DNA, 557 bp, Glycine max
  unsure (1)..(557): unsure at all n locations
gatggaaagataattctaattaaattcttattaaaaaaaatactacaccataaaagtaatgaaaagatattgtaagagaatataaaattattcaaaataaaataacaccctagaacaacccaatctatattgactccttgtttttagccaaaacagaagtccgaaacatttatatttaaatttactctttggcacatttggcagcttaaagagctttgatgtatgttattacgatggtattagttggtggcaaaattttggcaacactccgaagaatatatttcctcttctcacatatcatcgcaattgccaattgcattaatcccataactctcattaacccgatgatgcttgctccatgtctaatgtggcttttggcatgtgctccctgttctttccccacaatacgctgtacagtcctagaatcaatacgaacccttctagaagacttcccaaactgattatctcacccaacacagctgcagaggcaaagatcgtaataatgagagccaatggagtngacatggctagaaacacgggtcctttcttttctatga

SEQ ID NO: 219830 - DNA, 605 bp, Glycine max
agtcacctatatgagctaactagagatcctactaaacgatgatcagaagcatgcacattcacgaacactattaactagtaaacgtaaattaatgcactgaagaatataagatgagtacatcagagagcccgggggctcgcgtcaggatcggaattaaatgccggctccaggagcgggctaggcggcgggcgccctttatcatagtaagttgcaaagcggaaccatattaagccaaggagcagggggggggggaccgcggtgcatagcgaaggcccaaaaccataacagtttacgaggaaaggatacaacacgatcaaaggaccatagacctctgacgcgatcgaccggcacagcggattaactctggacgataacaacatgagacttgaatcgaggatacactgtgagcgcagccgacgcgggggcaagcacgcctgtggaaaaccataaccggtacaacgagaacgctagaggtcgggcactctgacaccatagaacccgtgaaagctaagatccaggacacggaaggcatttcaccaaaccaggaatgcttgaaattcatgggaaaacagctcgcagacggaagaactcttgacggttacaat

SEQ ID NO: 219831 - DNA, 483 bp, Glycine max
gtgatcttcacatttcaacaacgtctctctctgttactctgaaaattgacttcaagttggtataactggctgtcaagttgtaatggcattggtctctggaagaagttctgcactgaacccaaatgcacctctattcatacctgctgctcttcagcaggtggaggatttttcacctcaatggtgggatcttgtgaaatcttcaacatggattggtgattattggttgagccaacataaggaggaagaatttgaagttgccaatgactctagtaatgatgatattgagaatatgctctcagaaacttctgatctaagcatggaagaagacttcaatgttctatagaacgagtctgagcagatggtgaatgcctctgaagctctagatcattctgatcctaatgctggaaaagtgtctgctcatggtcttaacaaagatgttaaagctattcttattaacttgacaccaaaatcaccaagggaaag

SEQ ID NO: 219832 - DNA, 473 bp, Glycine max
  unsure (1)..(473): unsure at all n locations
ggggntggagtgccactcgtctctgtaaccctatctaggaatgaccaggcaactactcggaggctcgcccttttttttttttcttgtttacaatttttctaaactttaatgggacaacacagatcaacgggctccaaggggtattttaataggccctttcactcccattacccattacatttctttttaaaatgtttgggaaactccaacatctatcatttcacaaaaatttttctccagcttaaaagcccccccgaatgactgctacaccaagtgcagagttgactccttctggatggtgtagtcaacgagggtcctttcctcctctacctgtttgcccgcataaataagcctctgctggctcggagggaaaccttccttgttctggatcttcaccttcacattgtcactggtgtcggcactctccacctctagggtgaataccttacccgtaagggtcttgactaaaatct

SEQ ID NO: 219833 - DNA, 356 bp, Glycine max
actaataaatggacttcattttccatttattttgcatttaggggcaaatcagttacacaaaccgagccaaacactcttagtctcttatattgttccaaatgcttgatacacatccgtgggagtgcttcaaagggaagaagcctcacaagcttattgggtattcattaacagcttaggattcctcatcttattacattagatcactctacaaggtacgagggatccatatgtagccgtgtgcacgaacatagccagctttttcaagttactgaactgcttctgcaggacctttggttcctggatcgtacgggagtggttagaatgccccttcattaataatgttcctaaccggggtg

SEQ ID NO: 219834 - DNA, 592 bp, Glycine max
  unsure (1)..(592): unsure at all n locations
cactctgtgtctcagtcctatatagtgattcacaaacaagaaaacaatttcaaaatctgagcatacaccttcgaatcatattatactgaagacgaggtggtcacaactanccgaattactagcgactacgaggtggctagcctgcggtcgccctttttagtccatcatactataaaaggaaaaatgataaataaaaggtgcacatgggggccaaccatatacacgagccgtgccaaacactattaacctcttatatagatccaaaggctggatacacatgcgtgacagagcttgagagggaagaagcgtaacaagctaatggaggatcaattaacagctcaaaatatctcatattagtacattaaggcacgctacaagggaggagggatacatatgaagccgagagtctggagagacgcagtgatgccaaggaactgatcggctcatgcaggaccgccgcttacgggatcgtaggggaatggctcgaatacacataattaattctgggcaaaagtggggtgaagatctgacacgaagccggcaactcaaccatgagaacaaacagctgctgatcatcactaaaagtgtcaag

SEQ ID NO: 219835 - DNA, 655 bp, Glycine max
  unsure (1)..(655): unsure at all n locations
cacttaattataataaatttatctagttttgactatatgataataatatttaatagtaatctattaatatattacttctaaattttattgatattgtatcggcttgatgtcgatcgaattacnccgaggtaggagctcactaggcagggggcgcccttgtaatgatgttttgaaaacattacactgattgcaacagacatccaaggtatagggacaaacatgatcctattcagattacgagcttcacgatgactaatattcagggcgattgacactcatgtcatatgaggataaacttactctggacagtcagaactcctagaaactcattgtaaggacgctaccaaaggcatgatgtgcaatatgagattggacaggacaatagcatgaccgctgataatgatgctagaatcgatagacatgcttactatgtgaagatactgttcggatctgcaatgcgtaactgggatgaggttcaagagaagagttacgacattgacaaaatcactgattgggagaatacctctgccgagctggtgcagattccattcaagccagctagagtgcttctggacgactttactgcggtgcctgctgaaggttgacttgcgtgcatgctagatgcactgaagcaacttgctggagactctaatgg

SEQ ID NO: 219836 - DNA, 551 bp, Glycine max
tggtggtcagactggctcgattaatgctcacgggcggagggaattcggctgaagcagaccttaagaacactgtttttaattttgtatctatggcaatgcgtacctaacggggttagggatggttgaaacaggtgagactcttattaccccaacctacgtatttgatgaagaagcataccttttcgacatgctactagccagtgcttatgtccttccaatgatcctcaaaccagcacttgagcctgatctgttggatatcatagccaaggctggccctggtgtgcatcttacctccactgacatggatactcagctcccaacacagaaccctgatgcacccgtcatgatggaccgtgtattgcgcctaatgggtagctacgtatcctctcttttgctatgcgcactctccctgatggcaaggttgagaggctctatgggctcgcccgcgatgccaagtacttggtcaagaacgaagatggcgtctccaatgctgggctcaacctcatgaaccaggacaaagtactcaaggaaagctggttctatatgaaaga

SEQ ID NO: 219837 - DNA, 555 bp, Glycine max
cggttatatagcctgactggaattaccgcctacggtcggtcctaattcggctcctgttgttattcatcttttcattctctgattgtcactcatggctgaagatgggaacgggaacggggtacccttacacaaattcaaagacagcaatccaaactctggagagttcgatgcaaagggttacagcctcagtggaaaaatcatgctttcagcaataatccttctttacttcgacgtcgttatgatgttgtgccttcatatctacgcgcgctggtacctccggcgtgcttgccagacgcagctccggcgccaacgcgagctccgacgcacccagcttgtcttttacaacgacgacgccactctcgcagccgtgtcacgtggactcgacgccggcatacatgccacactccccgtcttcaccttcgacccggagaaaaccgggccggagtgcgctgtttgcttgccggagttcgaacccggtgaaacgggtcgggacttgcccaaatgtaatcactagtttccacatataaatgtatatgacatggtggttccaattct

SEQ ID NO: 219838 - DNA, 580 bp, Glycine max
tgggtatatgatgcttacgtatgatgcacgctgaccgcagacgtaagttcggctttatgaacacgccttaaggatgcgctctatacttaataacataattctgatagggtcacgggatcgagatattctaaacttgtactgacaaatatggagggaaaagaataggacgtacgagttggagccaacaggcacagagagaggcagacaatatggaccgctgctcatgctatagactacagagagtcaccgtcggcgcctatcttagaaccgggaaagttgtaatcgcggtgtctctatagggctggcatagcatagttagaggtcactgtcttggaactctacatcacattgctgactgtgatgggagtgttcaaatctaagagcatgtgttacactgtggatgttcaaggcattgcttgggctattgggggaatgatctatggtcttgtatatatcactgctgcagtattagggggtcatattagcccagcactgactgtttgcacttgttttggcacgcaagctctctctgacaatggcaagttgttacataataatgcattgctagggagctatctgt

SEQ ID NO: 219839 - DNA, 584 bp, Glycine max
  unsure (1)..(584): unsure at all n locations
tgttcttccacccccgtaccgtctctgcctctctgcaatccacagccgagaatggctttcaagaggtacgttgagatcgggagggttgctcaaatcaactacggcaaggaatatggcaggctcgtcggcatcgtcgacgtcattgaccagaacagagcacttgtcgatgcccctgatatggtgaggtcccaagtcaatttcaaaaggctatcccttaccgacatcaagattgacatcaagagggtccctaagaagaaagatcttgtcaaagccatggaggatgctgatgttaagaacaagtgggagaagagttcatggggtagaaaactcattgttagaaagagaagggcatccctcaatgattgtgataggttcaagataatgttagccaagatcaagagggcagcggttgtaaggcaagagcttgctaagctgaagaagagcgcttaggcataacttcacattatagtcttcaaattttaggtatgaatttgcttgccttggttgatatgagatctcaagtatcatcaattgaccacgtttggttactgatanggattatgtcagtactgcaagttcaatac

SEQ ID NO: 219840 - DNA, 452 bp, Glycine max
gcaacctctgggaatataagttaatattgaaaataatatggtaaaatctgcatgaaaatgcaaaagcttgaaacttggagtgctgacataaatccctaacggtaaaccttacgtggttcagtggtgatacttgaaatctcataacagccaatgcaagccaattcataactaaaatctgatgactatgatgtgaaaatatgcctaagcgctcttgttgagcttagcaagctcttgccttacaaccgctgccctcttgatcttggctaacattatctggaacctatcagactcattgagggatgcccttctgtttgtaacaatgagtgttataccccatgaactcttctgccacttgttcttaacatcagcatcctccatggcttagacacgatctttcttcttagggaccctcttgatggcaatcttgatgtccgtaagggaaagccttttga

SEQ ID NO: 219841 - DNA, 534 bp, Glycine max
gagaaagagagagagagagagagagagagagagtcataatcataagtcgtacctgatttccattctctctgagagacagtgcgagattggcataatggcgaaaaaagccgttttgatcggaataaactacccgggaacaaaggcggagctgaaaggatgcataaacgacgtgtggaggatgcaccgctgcctcatcgatcgatacggtttctccgaagacgacatcaccgttttgatcgacacggacgaatcctacacggagcccacggggaaaaacattcggtcagcgctgaccagactcatacgatcggcgaggccggcggacgtgctgttcgtgcattacagaggacatggcacgcgccttcccgcggaaaccggagaggatgatgacactggctttgatgaatgcattgatccttctgatatgaacctcatcactgatgatgacttcagagaatttgtagatggcgtccctagagaatgtaagctcacaatagtatcagattcttgccatagtggtggcctaattgatgg

SEQ ID NO: 219842 - DNA, 438 bp, Glycine max
gaagcaacaactgtcggaaacatttttagaggagggactcactcattctctatggcaacacaattgtgcagtctcattgttagttattattctgtcactaatgaataataactgaaatcacagtcaaagtaaatattgcttttgagcaagcattaattgtccaaaacaagtaatacacaagcatatatcatcatacacaacacaaataactctgattttctgcaccagatgacagaactcatcactcatcagcacacaaaaggaccatcaacatggtcatcactgcagtaaagtcctggccgttgtttgaaacctcccctcttcagcttctcccttgccttcaaaacaatctcttgatttgtgacagcaccatcactctcctcaatcacagcctgtattgcattgctaaaagctccataagcactggcagagttacct

SEQ ID NO: 219843 - DNA, 530 bp, Glycine max
gcaaaaagaaagaatcccaggcgaggagaaagatggaggggaaggagcaggatgtgtcgttgggagcgaacaagttccccgagagacagccaattgggacggcggcgcagagccaagacgacggcaaggactaccaggagccggcgccggcgccgctggttgacccgacggagtttacgtcatggtcgttttacagagcagggatagcagagtttgtggccacttttctgtttctctacatcactgtcttaaccgttatgggagtcgccggggctaagtctaagtgtagtaccgttgggattcaaggaatcgcttgggccttcggtggcatgatcttcgccctcgtttactgcaccgctggcatctcagggggacacataaacccggcggtgacatttgggctgtttttggcgaggaagttgtcgttgcccagggcgattttctacatcgtgatgcaatgcttgggtgctatttgtggcgctggcgtggtgaagggtttcgaggggaaaacaaaatacggtgcgttgaat

SEQ ID NO: 219844 - DNA, 561 bp, Glycine max
  unsure (1)..(561): unsure at all n locations
tgaaccccaagtttattatggctaatggcaatttggtgcgggttctcatacataccgatgttactaagtatctctatttcaaagctgtggatgggagctatgtgtttaataaaggaaaggttcataaggtgcctgcaaacgacatggaggccttgaagtccccacttatggggctatttgaaaaacgccgggcacgcaagtttttcatttatgtgcaaaactacaacgagagcgatcccaagacccacgaggggatggacttgacaagagtgtctactaaagagttgatagcaaaatacggccttgatgataacactatagacttcattggtcatgctttggcgcttcatagcgatgatcgctacttggctgagccagcactggacaccgtgaagagaatgaagttatatgcagagtctcttgcacgctttcaaggagggtcaccttacatatatcctntgtatggtttaggagagcttccccaggcatttgcacggcttagtgcttgttatggtggaacatatatgttgaataagcctgagtgcaagggtagaattgatg

SEQ ID NO: 219845 - DNA, 583 bp, Glycine max
cttagtgagtgagtgaggaagcattgagagttggtggaaattaaggtcaagaatcaaactgaccaaggagtattcaggatatcatggacgagaatggtagctcaagtaatgcacccaagaacaagagaaacctacctgtctcagttttcttcaaagatgcaagacatgttttcaagatggattccattgctaaggagattcttgggattgcattcccatctgcactggctgttgctgctgatcccattgcttctcttatagacacagcattcataggccatttggggcccgtggagcttgctgccgcaggagtgtccattgctttgttcaaccaagcttcaaggataaccatcttccctttggttagcatcacaacttcctttgtggctgaggaaagtaccattgaaaaaatcaatacagaaaagaagttaactgataagaccaagtccaaggaagtaatgcacgatgatcattcgcttcaagacatagagaaaggtgcatccaaagagaaaaatgagactccaacagaatcttctgctgtaggggtaacacaactttgtacctgagaaatgtgaatggatga

SEQ ID NO: 219846 - DNA, 497 bp, Glycine max
cggacgtgcattccagagctatgtttacgcagtgcacgcgctcggaagctgggtcagcataacgctcgtagagagctactgctaacttgctaacaggaatggacgacggaggacgccgtctcgtaaccgtgcagggcatcgacggcgacctggcaaccggagccttcgtcagcgatcccaagcctgacatcatgaaggcctctatccgtcccgacatcgtcaatgtcgtacactcgaacatctccaagaacagacgccagccatacgccgtcagtcgtcgcgctggtcaccagacctccgccgaatcctgtggtaccggccgagccgtctcccgtatcccccgtggtcccagcggcgggacccaccgtgccggccaaggagcctttggaaacatgtgccgcggcggacgcatgttcgccccgaccaagatctggcgccgctggcataggaagatcaacgtgaaccagaagcgctacgccgtcgtctccgtcattgct

SEQ ID NO: 219847 - DNA, 605 bp, Glycine max
  unsure (1)..(605): unsure at all n locations
ctggtttattgaaacctgacaccatagaaggtggatctgaggtggagatgcctgaatttaatgtttcatacaagcctcagaagattagcccgaagttccaatcaactgttaggcacttgctacatcaaaaaatacgtgatgcatatactcatccccagtttgtgtcagatgtgatgaagccacttcttattgaacagttaatggaccaagaagttgtgaatctttctggtggagagttgcagagagttgctctgtgtctctgtcttggaaagcctgcagacatctatctgatagatgagccaagtgcgtatctagattctgaacagcgaattattgctgccaaagtcattaagaggtttattcttcatgcaaagaaaacggcttttgtcgttgagcatgatttcatcatggcaacatatcttgcagacagagttattgtttatgagggccaaccatcaattgactgtattgcaaatactccgcaatcattggtgtctgggatgaaccttttcttatcacatctngatatcacatttagaagggacccaactaattntcgcccaaggatcaacaaacttgattcaaccaggacagagaaacaaagt

SEQ ID NO: 219848 - DNA, 560 bp, Glycine max
cagcaacaccaccctttgtccacgagagaaagaaatcaatcacatcctatccaaattcaaatcacgaagaacaagtaaaaaggaagagatgggaaatgctatggggagtaaaaaagcaaaggtgatgaaaatagacggtgaaacgttcaagctcaatactccagcaagagcaaacgacgtcgttaaggactaccctggacatgttctcttggactctcacgcggtgaaaaacttcgggcctcgggccaagccacttgagcctgactaccagctcaagcccaagaagatttattttttggtggagttacccaaggttaagcccgaaccattagtaacgaggagggtgcgatccagtggaatccgtggcatgaacgcccaggataggcttgatttcttgatgctgtcgaaacgctccgtttcggaccttaccatggtgaagcatgggcccaagccagaaaatggtgggcccacgagggtcaaaatgaggctgcccaagcccacttggagaggcttatggaggagagccacgacgggagcgaggtggctgagaagatcataag

SEQ ID NO: 219849 - DNA, 445 bp, Glycine max
gagcattgttaatagttgtgctagtacgtatcggagtgatgcaatgaccagtgatggcatgcttagtttagacaggaactgtgacagtaataaaggtagtgtaaggggggattcactagagagtgctaaaactagtgttagtcggccaagtgatagcagtggcctcagcgatgacagcaactggagcaacattactggtagtgccaataaacctcacataggagatgatcctaggtggaaggctatgcttgccatccgggtacgggatgggatttcgggcatgagtcattttaggttactcaaacgactaggatgcggcgatattggaagtgtctatctctcagagctgagtggaactcggtgttattttgcaatgaaagttatggataaggcatccctagcaagcagaaagaagctgactagagtacacacagatagggagata

SEQ ID NO: 219850 - DNA, 504 bp, Glycine max
gtgcgagtgatgattttgaattcaaatacctaagcggtggtcgaggccggcctgggccactgcttagtccccgtcggcgaggtggtcttcatcaaaatcatccgcaacgagctcacgggccagcccgagggctacggatacgacgagttcgtctcccacgccacagcggaaagggttctccagacctacaacgccaccgaccagaccttcaggctcaattgggcctccttcgatatcgtcgagcgcaagcccgatgccgacctggaacactccattttagacggagatctcgactttgacataaccgattatcctatccaggaaatgtatcgcgcccattaccctttcgctcgcggcgccaaagtcgttgagcgaccccaacaccggccgattcaagggttaccgtttcctgaagttgtctgatgagaatgaacggaaccgggccatgactgaattgaaccgcgtttattggttcaccaagcccatgcgaaataatgccgttac

SEQ ID NO: 219851 - DNA, 494 bp, Glycine max
cgcttttgttattcttcgtgtcttgttgtgtttttcatctgagatgtgtggaggagctatcatctctgatttcattccggcggcggcgatcgccgggtctcgccgcctgaccgacgattacctgtggccggatttgaagaagcggaagtctgacttggacgttgacttcgaggctgatttcagggattttaaagacgattctgatatcgacgacgacgacgacgatcaccaagtcaagccctttgctttcgccgcctcttctcgtctgtctacggcagcgaaatctgtggcattccaaggtcgggctgagatatctgcaaatagaaagaggaagaatcagtataggggaatccgtcaacgcccttggggaaaatgggcagctgagattcgggatccaagaaagggggttcgcgtctggcttggaaccttcaacactgctgaagaagctgcaagagcttatgatgctgaagcacggaggattcgtggcaagaaag

SEQ ID NO: 219852 - DNA, 580 bp, Glycine max
ttgggtttctcttcctccctggaagaaaaagaagagtcaccgctacgacgccgttcgtgcttttttgaggtgccacagtcatgtttgggcgtggtggaccaaggaggagtgacaactccaaatattatgatattctcggggtttccaaaaatgccagtgaagatgaaatcaagaaggcctatagaaaggctgctatgaagaaccatccagataagggaggagatcctgaaaagttcaaggagttaggtcaagcatatgaagttttaagtgatcctgagaagaaagacctgtatgaccagtatggtgaagatgcccttaaagagaaaatggggggaggaggctcgtttcataatccatttgatatatttgaatcattttttggtggagcaagctttggtggtggtggtagttcccgaggtagaagacagaagcatggtgaagatgtggtgcattctttaaaggtttccttggaggacgtttattacggcacaacaaagaaactatctctttctagaaacgtattctgctcaaaatgtaaagggaaaggttcaaaagtggacagctggtaagtgttttgatg

SEQ ID NO: 219853 - DNA, 503 bp, Glycine max
ggccaggcaagccccactcaaccaccacacctctcctcgttcacgctacccctttctgctcttcttctacctttcaagttttaaaagtataaagatggcagagacattcctatttacctcagagtcggtgaacgagggacaccctgacaagctctgcgaccaaatctccgatgctgtcctcgacgcttgcctcgagcaggacccagacagcaaagttgcctgcgaaacatgcaccaaaaccaacttggtcatggtcttcggagaaatcacgaccaaggccaacgttgactacgagaagatagtgcgtgacacctgcaggaacatcggcttcgtctcaaatgatgtgggactggatgccgacaactgcaaggtcctcgtcaacattgagcagcagagccctgatattgctcagggtgtacacggccaccttaccaaaaaacctgaagaaattggtgctggtgaccagggtcacatgtttggctatgccactgatgaaacccctg

SEQ ID NO: 219854 - DNA, 638 bp, Glycine max
  unsure (1)..(638): unsure at all n locations
cggccgtgcacgtctgacttcgcatgtcacgcgtcacgtaaccgcctcgtgaagtttcggtcnttcgacgattgaaactctcgagatgtctacacancacatgtgtctatgagagtcgaccagcatttgtgtgagcctggagcagtcgtacaatgactataccgggcgagcgatgactctanacgtaactcttactaatctctcacatagtcttcgtgtgatcgcggacgcctcatgctgtcctatataacagcgagaaggcgtcagtaaggcagcctgcaaaccacacggaggccttgaagtccccacttatggggctattcgaaaaacgccgggcacgcaagtttttcatttatgtgcaaaactacaacgagagcgatcccaagacccacgaggggatggacttgacaagagtgtctactaaagagatgatagccaaatacggccttgatgataacactatagacttcattggtcatgctttggcgcttcatagcgatgatcgctacttggctgagccagcactggacaccgtgaagagaatgaaagtatatgcagagtctcttgcacgctttaaggagggtcaccttacatatattccttgtatggtttaagagagctttcccaggcatttgcac

SEQ ID NO: 219855 - DNA, 471 bp, Glycine max
tgcgttcattctgttttccagttgaagtctttccctagccaatggccactgatcggttgacccgggttcacagtctccgtgagaggcttgatgaaaccctcactgccaacaggaacgaaattttggcccttctgtcaaggatcgaagctaatggcaaggggatcctgcaacaccaccaggtcattgctgaatatgaggagattcctgatgagaacaggcagaagctaactgatggcgcctctggagaagtcttgacatctacacctgaagccttctatgaggcatcatgggtatgtctggctagtcgacgccggtctggaatgcgatgtcaaccggaagtgaatgtgcacgctcttgttggtgaggaattgcaacctgctgagtacctgtacttcaagggagaacttgttgatggaagttctaatggctactattatgcttgagctggactatgaaccattcaatgcttgc

SEQ ID NO: 219856 - DNA, 499 bp, Glycine max
  unsure (1)..(499): unsure at all n locations
ctcgagccgaatcggctcgagcctttgttcactcttcttctcttgcggctagggttttagcgcagcttcttctagatttaaggaagatgggtaaggaaaaggttcacatcagtattgtggtcattggccatgtcgactctgggaaatccactaccactggtcacctgatttacaagcttggaggcattgacaagcgtgttattgagaggtttgagaaggaagctgctgagatgaacaagaggtctttcaagtatgcctgggtgctggacaaacttaaggctgagcgtgaaagaagaatcaccattgatattgctttgtggaagtttgaaacaacaaagtattattgcacagttattgatgcgcctggacatagggatttcattaagaatatgattactgggacatcccaagctgactgtgctgttcttatcattgattcgaccactggtggttntgaagctggtatttccaaggatggacagactcgtgaacatgctct

SEQ ID NO: 219857 - DNA, 508 bp, Glycine max
caaattgcggtgatgttagtccaaatgtacttggagctttttgtatagacactgaactaccttgtgacttcaatcatagtacatgtggaggaaagaatgaattatgctatggccgaggacctggttattcagatgaatttgaaagcacacgtattataggggagagacaatttaaaaaagcagtggagctattcaacggagcatctgaacagattaaagggaaggttgattttcgacatgctttcatagatttctcccagcttgaggtaaatccttctaaagtaggagcttctgaggttgtaaagacatgccctgctgcaatgggatttgcatttgctgctggaacaacagatggacctggagcttttgactttaagcaaggtgatgatcaggtaaccactgattagaccttatgcttacctattatcctggccttgtattcttaaatatctttgatactctgcttattatttctaattgtatgtcagggaaatgccttctggatgct

SEQ ID NO: 219858 - DNA, 546 bp, Glycine max
cactaatccttctctgcttggaggcttttttttttttttttgatggatccggcaaagggattggaagcttcgggggagaagacccttcaagcagaagtgaaagcttttttcgattctgctcctcctttgcagaaaagtgatgagataactcagaagttgaatcagttcattcaacgcatttcttctccatcagcgaatgggaaagttaggagaattgtttgtgtgacttctggtggcaccaccgcgccattggaacaacgatgtgttcgctatgtggacaatttcagttcaggtcacagaggggccacatccactgagtatttcctgaaggctggatatggtgttatctttctgtaccggaagagaagtttccagccattttgtagatcccttcctgatgatcccttacttgaatgcttcaagcccaccgatgaggcgaacattcaagtttgcgaggcttattctgaagcagtgaagagggctatcgtggatcatcatactgcagtggcaggcggtctcttatcgaaacttcctttcaacaccata

SEQ ID NO: 219859 - DNA, 406 bp, Glycine max
aacatggcttacttaagctccttagtgctgctccttgcagctctaattgtatccggtcacgtacttgcaaactatgagaatcccccagtgtacaagcctcccactgcgaaaccaccagtttataagcccccaattcagaagccttctgtatacaaacctccatttgaaaaccccccattttatatgcctacagtatagaagccgacattgtacaagcccctagttgagaaacccccagtgtacatgcgcgtcatctgaaaaaccaccactgtacacacctatagttgagataccaccagtgcacatgcccatcacttgacaaaccattattgctcacgccgtcattatgaagaccattagtgtacaagcgcacacttgtaaaaccaccagtgatcatgccctcatt

SEQ ID NO: 219860 - DNA, 499 bp, Glycine max
gcaacccgaagcgattcatggctacaggcaagatggtgcggattgacatacatacggatgttactaacgcactatctatgcgcagaagacgtcgtggactgagtcagcgtcatgctgtactcataagcacgaagacgtacgagtaaagacctctcaataccaccgcgccggcgccgatgtttgaaccgacggagtttacgtcatggccgccttcccgcgcaggtataatagatgtgcaggactactactgagagccattccatgacccacttaaccagtgtcttagccagcggggctactaataagtggatagccgaatacagtctagatgatgacactatccactgcatcgggaacgcttagccgcgttacagcgacgatcgctacttgactggacccataatcgacaccgtgacgataatgacggtatatgcagagtctcttgcacgctttcaaggagggtcaccttacatatatgctttgtatggtttaggagagc

SEQ ID NO: 219861 - DNA, 574 bp, Glycine max
aaagttctaactggcaatgacaatgcttctgacttttctgatagtagtgaagaggacgaggaacttgcattggagggacaagataatggaaaacctgaattaaaagctgaaggtgcgaaggttaccaaaccttctaaatctattcccaagattggtgcaccagcaaaagctgctgatcctaagaaagacgaggatgatgattccgatgatgaatcggatgatgatcttgctggtgaagatgaatctggaagttccgatgagatggatgatgatagcaatagtgaagaggagagtgatggagatgatgaagagacccctgctaagaaggtggatcagggcaagaagagacccaatgaatctgcagcaaaaactcctatttctgccaagaaagctaaaactgctactcctgaaaagactgatggtaagaaaagtgtacatgtagctactcctcatccttcgaaaaagggtgggaaaactcccaacagtacataaggccagactcccaattctgctggacaactatcttgtgcaagttgtaaaaagtctttcaccaacgaagctggtctgcaacaac

SEQ ID NO: 219862 - DNA, 539 bp, Glycine max
gcttccaaaaagcagtgagggctgtgaggcgcttttggccggagttgcttctctcatcgtcagttgtcgttacgttggtcgaccgagtgtctgtgcagctaattctgcaaagcgaagagggaattttgttaggatggttgaatattgacaagagaaataacgggaaacaatagacatggataccggtggcaattctttaccatctgcacctgatggggtgaagagaaaggtgtgctatttttatgatccggaggttgggaattactattatggtcaaggtcacccaatgaagccacatcgtatacggatgacacatgctcttctagcccattatggattgctacagcacatgcaggtccacaagccatttcctgctagagacagggacctttgtcgttttcatgctgatgattatgttgcattccttcgaagcataactcctgaaacacagcaggatcatctaaggcaactgaaacgctttaatgttggtgaagattgtcctgtttttgatggcctctactctttctgtcaaacttatg

SEQ ID NO: 219863 - DNA, 581 bp, Glycine max
ggcttccttaagctccttagtgctgctccttgcagctctaattctatcccctcaagttcttgcaaactatgagaatcccccagtgtacaagcctcccactgagaaaccaccagtttataagcccccagttgagaagcctcctgtttacaaacctccagttgaaaaccccccaatttataagcctccagtagagaagccaccagtgtacaagcccccagttgagaaacccccagtgtacaagcccccagttgaaaaaccaccagtgtacaagcccccagttgagaaaccaccagtgtacaagcccccagttgaaaaacccccagtttacaagcccccagttgaaaaacccccagtgtacaagcccccagttgaaaaaccaccagtgtacaagcccccagttgagaagccctcagtttacaagcccccagttgagaagccaccagtttacaagcccccagttgagaagccaccagtatacaagccaccagttgagaagccttcagtgtacaagccaccagtagagaagccttcagtttacaagccaccagttgagaaaccttcagtttacaagcccccagtgg

SEQ ID NO: 219864 - DNA, 566 bp, Glycine max
  unsure (1)..(566): unsure at all n locations
gttggaaggaaaggtgagagcaaaatcgttggaagaatctggtttttgggtcgtggttgttgttttcgccatcaaaacaatgtcttcgccggacattgtctcgatattggagaactcgaaggagttcgatcgggtgaggaaagaacaagaggatattctgtcggagatcaacaaacttcacaagaagcttcaagcaactcctgaagtagttgagaagcctggggataactcattggctaggctgaaatttttgtacactcaagcaaaagatctttcagaaagtgaagcaagtatttccaacttactgataaaccaaattgatgccctactgcctacgggtccacaagggcaaacacgaagaagaataggaaaagaaggtaatgagcagaaaaggaaacgagtgaagactgagtcagacatttcaaggctaactcctaatatgcgaagtcaacttgaggcttgtgccagtcttaaaggcgaacaggtagcggctagggtcacaccacgaaatgctgataaggacgagtggnttgtcgtaaagtgattcatttgatagggatcaaagg

SEQ ID NO: 219865 - DNA, 593 bp, Glycine max
  unsure (1)..(593): unsure at all n locations
atctgaatctgtaaacgagggtcaccccgacaagctgtgcgaccagatctctgatgcagtacttgatgcgtgccttgaacaggaccctgacagcaaggttgcctgtgagacatgcaccaagaccaacatggtcatggtcttcggagagatcacaaccaaggccaacgtagactatgaaaagattgtccgcgacacatgccgcgaaattggattcatctctgatgatgttggtcttgatgctgacaaatgcaaggtgttggtcaacattgagcaacagagcccggatatcgcccagggtgtgcacggccacttcaccaagcgcccagaggaggttggtgctggtgaccagggtcacatgtttgggtatgccaccgatgaaacccccgagtacatgcccctcagccatgtccttgcaaccaaacttggtgctcgcctcacagaggttaggaagaatggcacctgtgcttggttgaggccagatggtaagacacaagtaaccgtcgagtactacaatgacaatggtgccatggntncagttcgtgtccacactgtcctattttcacccaacatgatgagactgtgagncatgatca

SEQ ID NO: 219866 - DNA, 515 bp, Glycine max
ctcctggctttggtgagcggcgaaaggccctgcttcaagacattgctatattgactggtgctgagttccaagctagtgatctgggtctgcttgttgaaaacacctcagtggagcagcttggcttggctcggaaaattaccatctccaaggattctaccactatcattgctgatgctgcaacaaaggatgagctgcaagccagggttgctcagttaaagaaggagctgtcacagacagactcagtatatgatactgagaaactggctgagaggatagctaaactgtctggtggagttgcagtcatcaaggttggtgctgccacagagaccgagcttgaggatcgtaagctccgaattgaggatgccaagaatgcaacttttgctgccattgaggaaggtattgtacctggtggaggtactgcactggttcatctatacactcatgtaccatcactcaatgacacgcttgatgatgcagatgagaggctaggagccgacattgtgcagaggcactga

SEQ ID NO: 219867 - DNA, 445 bp, Glycine max
aaataaaacacaccctctacgtgtccacactctctgatcacaacacacccgcttaatgaaatctctatatataaaccccttcaggcactccactatgacgggcaaagaaatttttcataagatgaaggaaaaagttttgggatcatctgatcccgattcaggtaaaggaaagagcaagatgaagaagcacataactcatggctttcacttggtaaagggaagatcaggtcatgccatggaagactatcttgttgctcaatttaagcaagttgacaacaaagagttgggtttatttgcaatatttgatggccactctggtcacagtgtacctgattacttgaagtctcatttgtttgataatatcttgaaagagcctaacttctggacagaacctgctgaggcttgtaagagagcatatagtgttactgattctactattttagac

SEQ ID NO: 219868 - DNA, 531 bp, Glycine max
gtgcgagtgatgaaattgaatccaaatacctaagcggtggacgaggcctacctgagccactgcttcgcccccgccggcgaggtggtctccatcaaaatcatccgcaacgagctcacgggccagcccgagggctacggcttcgtcgagttcgtctcccacgccacagcggaaagggttctccagacctacaacgccaccgaccagaccttcaggctcaattgggcctccttcggcatcggcgagcgcaggcccgatgccgccctggaacactccatcttcgtcggcgatctcgcccccgacataaccgattatcttctccaggaaatgtttcgcgcccattacccttccgttcgcggcgccaaagtcgtcagcgaccccaacaccggccgctccaagggttacggtttcgttaagttttctgatgagaatgaacggaaccgggccatgactgaaatgaacggcgtttattgctccaccaggcccatgcgaattagtgccgctacgcccaagaagaccaccagtgcttatgct

SEQ ID NO: 219869 - DNA, 589 bp, Glycine max
gtttcaccgcacgaatatcttgttgtttggagcgatccgagaaaaactctgtaaacatgttggtttaccaggacctccttacaggtgatgagcttctctctgactccttccgttacaaggaaattgagaatggaatgctgtgggaagttgaggggaagtgggttgttaaaggagcagttgatgtagacattggtgcaaacccttctgctgagggtggaggagaagatgagggagttgatgatgcagctgttaaggttgttgacattgttgacacattcagacttcaggagcaacccgcattcgataagaagcagtttgttaccttcatgaagaggtttatcaagaatttgactcccaagctcgatgcagagcaacaggagttgtttaagaagcacatcgagggagcaactaaatacctgctctctaagattaaagatttccaattttttgatggtgagagcatgggtgatgatgcttgcttggtctttgcctactacaaggacggcgctgctgatccaacattcctgtactttgcatatgccttaaaggaggtcaagtgctaagtgactaatgtaccgagctatctact

SEQ ID NO: 219870 - DNA, 583 bp, Glycine max
  unsure (1)..(583): unsure at all n locations
caaaaaccctaggtagagagctcttcctccctttctcacagcaatggccgccgcagcacgccctctcgtcaccgtgcaggccctcgacggtgacatggcaaccgatgcctccgccaccgttcccatccctgacgtcatgaaggcctctatccgccccgacatcgtcaatttcgtacactcgaacatctccaagaacagccgccagccatacgccgtcagtcgtcgcgctggtcaccagacctccgccgaatcctggggtaccggccgagccgtctcccgtatcccccgtgttcccggcggcggaacccaccgcgccggccaaggagcctttggaaacatgtgccgcggcggacgcatgttcgccccgaccaagatctggcgccgctggcataggaagatcaacgtgaaccagaagcgctacgccgtcgtctccgacattgctgcctncgacattccttccctcgtcctcgcccgcggccaccgcatcgagtctgtcccggagctcccactagtcgtcagcgactccgccgaaggagtcgagaagacaaaagaagcgatcaaagtcctcaagcagattcgagca

SEQ ID NO: 219871 - DNA, 513 bp, Glycine max
gccagcgtctctacgacaatctcctttctctctaactcataactcagatgagttccctctctaataactctagtagtagccacggcaattccttcctccagatgccccccatcaagtttaccaagctcttcatcaatggagatttcggtgattccttatctggaaggacattcgagactatagaccccagaacagaagaggtaattgcaagagttagtgagggagacaaagaagatattgatattgctgttaaagcagcacgtcaggcatttgactcaggtccatggcctcgctagcccgcctatgaaagggcataaattatgatgaaatgggcagacctaattgatgaaaacatagaagaactagcagcattagataccgtggatgctggcaagctgaactatattaataaggttgtggaaattgcttcagctacaaatgcgttacgatactatgcaggtgcggctgataaaattcatggtgaagtattaaaaatgaatggggattctcatg

SEQ ID NO: 219872 - DNA, 493 bp, Glycine max
ttctcctctattctcaccactcaatttctcactccctcttcattttcttctctctttctcaaaaccctcactttaaggtcctccacgccgtttcagcgtctttcttttgcgtcacaaccactgcgcaggctcatggctcgcgccaccctcggcctcactctcccagccaacaccgaatcccttaaggtttctttcgcggcaaaggagcttgacgtggcggaatggaaaggggaccttctcgccgttggcgtaacggagaaggacgtcgcgagaaacgtggaatcgagattcgagaacgcgattctgagcgcgttggactccaagctgggcgggttgttgggccaggtctcgtccgaagaggacttcagcggcaaacttgggcagtccacggttctaagaatcgcttccggactcggattcaagcgcgtcgccttgcttggcctcggcgcctccgcgtccaccaccttcgcgttcaagtccctcggcgaggccg

SEQ ID NO: 219873 - DNA, 564 bp, Glycine max
attcattgccgctccaccagcaatggccacgcacgtgagtcacgtgatagtagcggcagcatttcttctacttcttctccctttctctttctccttctccatctcccattctcaccgatccgctgcaatcaacctcttcgctgccactcccacaagcttagaagacgcgtacgaggcgcttagagtttttcagattctcggaatcgaagagaagaatactcctgtgaacgaggacacgtgtcagaaagtagttgaaagtctagcctcgtcttctcctctcaaggatttgttctatgccttgaaagttaacgccattttaaaatgcaatgtcaatgggaacgtttttaaggatattgcttcaagacttaaagccactgttcatgatgcgagtgctttgcttgacatctactattcaattggaggtttggttgttataaaggatcaggattctaatgttgatgtgcttcttgctgatgttgatggggttttccatcaatcaaggttctcagtcaagtgacggaagatggcgctatagttctgataatccagagtctagtacctatg

SEQ ID NO: 219874 - DNA, 519 bp, Glycine max
tgcgttcattctgttttccagttgaagtctttccctagccaatggccactgatcgtttgacccgggttcacagtctccgtgagaggcttgatgaaaccctcactgccaacaggaacgaaattttggcccttctgtcaaggatcgaagctaagggcaaggggatcctgcaacaccaccaggtcattgctgagtttgaggaaatccctgaggagaacaggcagaagcttactgatggtgcctttggagaagtcttgagatctacacaggaagccatagttttgccaccatgggttgctctggctgttcgtccaaggcctggtgtgtgggagtacctgaaagtgaatgtgcacgctcttgttgttgaggagttgcaacctgctgagtaccttcacttcaaggaagaacttgttgatggaagttctaatggcaactttgtgcttgagttggactttgaaccattcaatgcagccttccctcgtccaactcttaacaagtcaattggaaatggtgtgcagttcc

SEQ ID NO: 219875 - DNA, 532 bp, Glycine max
caacacactactttccttcttccaataatgtcttcttcattctctgttcgttttcttgctcctccatcatcatgcttccccagctctcggcccaagacatggctctgcgccgccaccaccccaacggtggctccggcaactgcctcctcggaggtggaggcttcaaggttggagcctagagtgggagagagatgggttctgggttttgaaggaagagtacaggggaggcatcagccctcaggaaaaagtgaagcttgagaaagaccccatgaagctctttatggaaggtgggattgaggacttggctaagatgtcccttgaggaaattgagagctccaagcacaccaaggatgatattgatgttagactcaagtggcttggcctttttcataggagaaagcagcattatggtagatttatgatgaggctgaagcttccaaatggggtgacaacaagtgcccaaacacgatatttggctagtgtgatcaggaagtacggaaaagatgggtgtgctgatgtaacaacgaggcag

SEQ ID NO: 219876 - DNA, 440 bp, Glycine max
atccccttctaacttccaagtttacactgctttattgaaacctcatgagagaattatggcacttgatcttccccaaggtgggcatctgtcgcatggctatcagactgacaccaagaagatatcagctgtatctatattgattgaaacaatgccatacagattgaatgagagcactggttatatcggttatcaccagttggagaaaagtgcagtactttgtaggccaatactcatagtcgatggcgctagtgctaatgctcaccattattactatgcacgtgatctccaggtctgagataagcagaaagcatttctgtaggctgatatggcacatatcaatggatagggagctgcaagcgttatcccttatccttttgattatacctatgttggaacatccacaacacactaggtgacttcgtggaccacgtgttgctatg

SEQ ID NO: 219877 - DNA, 481 bp, Glycine max
taagctcggatattcggctcgaggcacaatttctctttctctctgtttttgtgtgtccaatatggctcctaggtctactcacaacaatgggttctatgtgcttatgctagttgggatagtggttagcgctatggttgctatttgtgctgctagcttatacctagactttgatccaacatgggttggtgaccgtgctaagatattcaatggtggccagcttctatcactttccctagacaaagtctccggctctggcttcaaatcatagaaataatacctatttgggaagatagatatgcagctcaagctcattgccggcaactctgatggcacagtcactgcttactacgtgcgacaatcccttgttgagggcgtagagacccagaatcgatgccgctgtagcctcagtgaagaaagacagcgggagcgacattccttgtgtgggctcactgtggttgggcagaaacgtctgtgacagaat

SEQ ID NO: 219878 - DNA, 420 bp, Glycine max
ctacaaagctgtctgatttttcatctgagaggactgcttcttagtctgtatacccgtcaatccagaacttgtcctcagaaatggctgccggtaaaaccagatttacaatgtgagccaggtccagggtcttggtattccgactatactagtgcatctgtgtctgttccagatcaaaagatagcagaacatgggttcaactgtagaaattatggacagaatctcgtgaaagggagtgaaaatcctcataggtattacaagtgcactcatgctaattgctcagtgaacaagacagtggagaagactttggaaggacaaatgactgaagtagtatataagggccatcataaccaccctaaactgcagtctactagaagaacaaactctcaatcaatgaataaaccttcttcatcgtgcacaaat

SEQ ID NO: 219879 - DNA, 407 bp, Glycine max
cacaagttgaacatcataagaactcgtgagcctcttcttgacaaacccgccgttgagtcaattcaaagtcctgatggtgatgtaatagactgtgcggtatattatcagccaccagcttctgaccatcccatgttgaaaggacacaaaccactggtttctccataatggcctataggttattgccaagtggacatgactgagaactctcagtcctggaccatgttaggcgagtcatgttcagaaggtcacaactacgattagacgaaccacagaacaagacatgttaacggctacctctgccagcagatttggacgaggactatgaggacccgttataggggacaccaccagcttttgacttgaccatgcaattacctgtgcgagtggagatcattgctaccgagcat

SEQ ID NO: 219880 - DNA, 477 bp, Glycine max
accaagaaccgtaatatatatactatttttcttttcagatgtacataagagtccaggtggtaatggtataaccaacgggtgactagttagtaaaaaaaaaaataatcttgatcaacaaacaaatttaaattaaatataagaataaatgacccatgacccaagcttcttgaatgcccttgagacggaaaaccaatgtcacccaaacccaaaaatgcccaaaaaagaaaaaaaaacttctatataattcatccccttaattagggacatctcacatttctcccaggtccaccatagtaaaagtaattcccccaaacattattaatccctccttgaatgtcatagcaattcgggtgatccgctagaacccgaagatttgacaatggtaccaagttgttatcccaatccacaacttgcatgttcctaaaatatgaagcttttccaaaaccttcacttgcaaaatgtccactacccatttgg

SEQ ID NO: 219881 - DNA, 535 bp, Glycine max
  unsure (1)..(535): unsure at all n locations
atagtaaatagtagtttattgcattttcattaaccgacctaagagtagattactagttacaagacactttctggacattgcttaagcaggagtccaagcagaaatggcattcagaatacgccctttccaccccagccaaacccacttgccatcctcagccaccacaaaatctttttgatattccttcttcaccatttctttttcatcattcaccaatagaggatcaaatcggacttgcttgaacccagctctctggttcctaacctgccactgcttataggtctcaggtctctcaaccctctcagccccttcacacgctataacattgatggcatctcttccaaacaacccattctcaagcatcactctttccgggtcttcacgaggcacattagcttcaaacatatcaaacagtgatgagaagtggtagagtgcctccctaaaccgagtcaggaaaaagggtgcattgtaagtgccattgaccaccccatggatgaacatgtttggattgatcctncttatcaacttcaacacg

SEQ ID NO: 219882 - DNA, 489 bp, Glycine max
cttgctccctcagaagcgaagaagaagccacagagaactagtctcctactctcacccgcaagaaaaaaatggcatctcacatcgttggatacccccgtatgggtcccaagagagagctcaagttcgctctcgagtctttctgggatggcaagagcagcgccgaggatttgcagaaggtgtcttctgatctcagggcatccatctggaagcagatggctgatgctgggatcaagtacatccccagcaacactttctctcactatgaccaggttctcgacgccaccgccaccctcggtgccgttccaccaaggtacggctggaccggcggcgagattgggtttgatacctacttctccatggccagaggtaatgctaccgtgccagctatggagatgaccaagtggttcgacaccaactaccactttattgtccctgaattgggccctgatgtgaacttacctatgcttctacaaggctgttgatgaatac

SEQ ID NO: 219883 - DNA, 506 bp, Glycine max
ggaatttcgatgctcagtcatctcttttaccattctcttctctcttgctcttgcaggagagagccatgtccatgcatcgctacctgaggaagattattgggaagctgtttggccaaacactcccattcccactgcactgcgagagcttctaaagcctctccctgcaggtgttgaaatcgatgaactccctaagcaaattgatgatacacagtacccaaaaacattcttctataaagaagaccttcatccaggcaaaacaatgaaagtacaattcaccaagcgtccctatgcacaaccttatggtgtatatacatggttaacggatattaaagacacctctaaagaaggatatagttttgaagagatatgcatcaagaaagaagcgtttgagggagaagagaagttttgtgcaaaatccttgggaacagtaattggttttgccatttcaaagctgggaaagaaacattcagtactttcaagttcctttgcaataagcaagagcaata

SEQ ID NO: 219884 - DNA, 538 bp, Glycine max
  unsure (1)..(538): unsure at all n locations
ggaacatggtgtatccgacatgatgttccatagatgaatcagctcttgaagcaacaacttcttctgttcatgtaccatattcatcactggtggcagataataagcaatcttctctgccagaacaagtatttaatctcactgaggtgtcccctgtgtgggcatcttccaccgagaaaacaaaggtcctggtaactggatattttcataataactatcaacaccttgcaaagtccaacctactgtgtgtctgtggtgatgtaagtgttcctgtagaaattgttcaggttggagtttaccggtgctgggtatcaccacactctcctggattggtcactctctatttgagctttgatggccataagcccatcagcaaagttgttaattttgagtatcgtactcctattttgcatgagccaactgctttaatagaagagaaatacaactgggatgagtttcgacttcagatgaggcttgctcatttgctctntgcttcagacaagagccttaacattttctcaagtaaagtatcaactaatgc

SEQ ID NO: 219885 - DNA, 538 bp, Glycine max
gaagaatgaatcctgagaacaatacactcacaagaacaagaagaagcatttagaatcgaaattggaagagaagcataaggagggtatgaatgattacaaaggaagagaaggagaaagtagtgttgttgttcggaagcgattcaaggagaagcagcaacaacaacaacaacaaccctttccttccacaagggccatcatcaaccaacaacaccgtcgctgtgcctccctccccaacaacactcaatacgaggaatctgaaacagatgtcgaagtgtctgatgttagcgtttcagaaggggatgacacatcttggatttcatggttttgcaatttgagaggaaatgaattcttttgcgaagtggatgatgatttcgtgcaagatgatttcaacctttgtggattaagtagtcaagtgccttactatgattatgcacttgatttgattttggatgttgagtcctcccacggagacacgttcacagaggaccaaaatgagttaattgaatctgcagcagaaatgctttatggtctgattcat

SEQ ID NO: 219886 - DNA, 377 bp, Glycine max
ccgccctttttttttttttttttttttttttttttttttttttttttttttttttttttttttttttttttgttttttttttttttttttttttttttttttttttttttttttttaaaaggaaaaagggcccccaaccctttcaaaaaaaaccttcaaaaaaaacttcccaagggccccctaattttggccaaaaaaaaaaaaaaaacctttgggcccccaggggggggccccccaaattttttcccccccccaaaaaaatggggcccaaaagggccgggttcaaaaaacgaaaaaccccctggttttaaaaaaaaaacacctaaggggggggggcccgaaatcccccttggggaaaggggggaacaccccccccc

SEQ ID NO: 219887 - DNA, 513 bp, Glycine max
  unsure (1)..(513): unsure at all n locations
gctctcctctcactttcatttctacatccctggctctgttccgtcgatgacgatggcgtttagggtgcgaaaccctgacctccgctttctcattcttctctctctcttgtccatcacttccgccaaggtcttcttcgaggagcgtttcgatgacggatggggaaatcgttgggttaaatcagattggaaaaaagatgagaacctggctggggagtggaaccacacctctggccaatggaatggagacgctaacgacaaaggtattcaaaccagtgaggattacagattctacgctatttcagctcagtaccctgaattcagcaacaaggataagacactagtcttccaattttctgtcaagcatgaacagaagcttgactgcggtggtggctacatgaagttgctcagtggtgatgttgatcagaagaaatttggtggngatactccttacagtattatgtttggcccagatatctgtggttacagtacanagaaagtacacgctattcttac

SEQ ID NO: 219888 - DNA, 527 bp, Glycine max
  unsure (1)..(527): unsure at all n locations
gcaattaattagattttcaggaagcgtcataatgggaaactcaattgatcgaaacataaaaagatcaacccaagagagacatctttgcctgttctaatcagtgaaatagtcaaatgtgatcgaagcanaagctccagcttttactagcagttttccacggtctgcttatctagggaaaacaaaaaacactacgactgaaatataactatccggaatataacttccgctcactctttatccgttttgcaaacttcctagagttcatcatgtacaccctcttccttggtgtcttccccagcttccgtctttgattcagcatcggagtcattgccagcttcatcagcatcttcctcttcctcatcagcatcagagtcaactgggtcatcctttgattcctcctcttccctcttcttctcagcctcttcaaatgctgtcttctcaacatccttgtgcttgccccatgtttcttcagccagttgcttggcatattcaggatcatcagtaattaagacattgtcaaacaaagt

SEQ ID NO: 219889 - DNA, 443 bp, Glycine max
agagaaccggaacttaccgccagcttttccacccagagcagctcatcagcggcaaagaagatgccgccaacaactttgcccgtggccattataccattgggaaagagattgttgatctgtgcttggaccgcatcagaaagcttgctgacaattgcactggactccaagggtttttggtcttcaatgccgttggtggaggaactggttctggacttggttcccttctcttggagcgtctctccgttgattatggcaagaaatcaaagcttggtttcacagtctacccctctcctcaggtgtccacctctgttgttgagccatacaacagtgtcctctccacccattctctcttggagcacaccgatgttgctgtcctcttggacaatgaagccatttatgacatctgcagacgctctctcgacattgagcgtcccacctacacc

SEQ ID NO: 219890 - DNA, 460 bp, Glycine max
aaaacaacatagttcaatattgccattcagtttaggtacgtaacaggagcagcgaagcataaaagcaatgcatccaaattaaaaccacatcggtactggtacacatttgaacatcaaacacaacagaaaacagaccacaagaacaagaatctgaagtagattctagtagtcttcatccttttcctggccctcaccagactcagcacccacttttttataatccttctcaagggctgcaaggtcctcacgggcttcagaaaattcaccttttttcataccctcacccacgtaccagtggacaaaagcacgcttggcatacatgagatcaaacttgtgatcaatgcggccaaacacttcagccacactggtggagtttgaaattatgcaaactgccctctgcaccttggcaaggtcgcctccaggaacaacggtaggtggctggtagttaataccacacttg

SEQ ID NO: 219891 - DNA, 488 bp, Glycine max
ggcacgctgagcatggaacacagaaccctagaactcaacctggcttcagcaaaggatctcaaagacttgaatatattctcaaagatggatgtatatgctgtgctttcactctccggcgatcaaaagaccaagactcccgtccacagaaacggcggcaccaacccaacatggaattttccggtcaagttcacttttgatgaatcggtggcgcggcagaaccgtttggccctcgaaatcaagatccgctccgagcgcgccctcgccaccgataaggacatcggccaggtccacgttcctctcatggaactcctcaagcaacctggcgacggtaaatccttccagcacgttagttaccaggtcagaaaaccctccggcaaacccaagggagccctcaatttctcctacaaatttggcgatgaattcacagccccagccaaggtatcagcacccgcacctacctcgccttctacaaggtggaccccgtcacg

SEQ ID NO: 219892 - DNA, 477 bp, Glycine max
  unsure (1)..(477): unsure at all n locations
gaacataaaaaactacccccaaacaaagaaaactaacaagagatttaaaaatcaaatccaccgaaatctccaaaaccagcgtcgtaagaaccggcatcagaaatcatgtccccaattagaagtccacccaaggctcctccaagcaaccccgcacccaatcccattcccaaattgttcttccccggtctttgaactgctgcagcagcaggaggaggaggagcgtaaccgtacccgggttgtggcgcgtacccataagccgcttgtggcgcgtaaccgtatccatgttgtggagcgtatccgtatccgtgagcgggttgaggcggcggaggataggcatattgtggcggcggcggcggaggatacatggcgggatacgcggcagaagaagtggagcccaccgcgggagcaggataagccgtgacggtgtccaccttgtgagaaggcgaggtangtgcgggtgctgataccttggctggg

SEQ ID NO: 219893 - DNA, 551 bp, Glycine max
  unsure (1)..(551): unsure at all n locations
ctctaacctacctctttttcttctctctcaacaacttcaccttcttcctcctcgatcatgtctcacttcaagggcaagtaccatgatgagcttatcgccaatgctgcgtacattggcactcctggaaagggtattcttgctgctgatgagtcaacagggacaattggcaagcgtttggccagcatcagtgtatagaacattgaatccaacaggcgagctcttagggagctgcttttcactgctcctggagttcttcaatatatcagtggtgtcatcctctttgaggaaaccctctaccacagcacagatgcaggcaagccctttgtgaatgtcttgaaagaagctggcgtgcttcctggcatcaaggttgacaagggcacattcgagcttgctggaactaatggagaaaccaccactcacggtctagatggcctcggtcagcgatgtgccaagtactacaaagctggtgcacgctntgccaaatggcgtgcagtgctgaagataggtcccaacgagccatctgagctgtctatacatgagaacgcctatgg

SEQ ID NO: 219894 - DNA, 517 bp, Glycine max
aaataaacacaaagcctcattcacagcacgggggggtctttcaagaaaacaaagttacattcccttccctgttgcacaggtttgaccaaatacactgaattactaaaattgacataaaaggaacactaggaaaacaaaaagcaaaattccaaacgattattctgggaagagtcaaaccacaataatacttatcaacaagaaattcggttgttgtacccataataccgattcctactcgcactagtctcttcaaacaacaccaacttcgattgatcagtagctgtagttcgaaacatggaggctctctgaggcaccatcagcaagctgtgagttacccttgtaggttcccagagttgcctctgagttagccttggctcttaccaaaagggcttcctgagccttcttcacattctcttcttttccgccccatgccttaagggtgctctgttgaagtgcccttccaaaggagaaagagagtgaccatggcttcttcccattgacctggttaatggcgttg

SEQ ID NO: 219895 - DNA, 543 bp, Glycine max
gaattctatggcggtgagacttgtgaagcatctccaactctctgcaccgacctcatcttcattcggtggtgtgccgagaagtggagcgtcatggtattcgacctctctatctggaggtgaatatcagccttcacaagataatgttgcacctaagaatgaagcattggatggtgaacttgatgattttcttggcgaaaaggccgagctacagttgcaaggtgtggatcccaagaagggttggggatttcgtggcgtgcacaaggcaattatttgtggaaaagttggccaagcccctgtacagaaaatactgaggaatggtagaaatttaaccatctttacagttgggacagggggcatgtttgaccagagaattcaaggaccaaaggatttgccaaaacctgctcaatggcataggattgctgtgcataatgatatactgggggcctatgcagtacagaaactctttaaaaactcttcagtttatgttgagggtgacattgagattagagtttataatgatagcatcaacggtgaagttaaaag

SEQ ID NO: 219896 - DNA, 562 bp, Glycine max
  unsure (1)..(562): unsure at all n locations
agaactatatacttccaagtttgaggaccaaagcaagtatgttcttctgcctctctcacatgaaaataaccatgggaaactgaaattcagaatgctatataatgtatattaaaaaaataaaatcgaggaccaaagcattcattacaaatgctgctacaacaaggtgaagtttctcacagaagtatatgcttccgttagatggtcagatttccctaaaacaacccttctcgcaattcatccaaggaagttttatcaatgctctccccactcttgatgaggcaaattttcctcatgtaagttgtaacatgtcataacaccgaaagtaaaaatgagaattcatccgagggagtttcatgacttttatcaatgctctccccactcttgatgaggtgaactctcccgtcgcggcgaacacatatctctggaatgcttttaacttcaccgttgatgctatcattataaactctaatctcaatgtcaccctcaacataaactgaagagtttttaaagagtttctgtactgcataggcccncagtatatcattatgcacagcaatcctat

SEQ ID NO: 219897 - DNA, 447 bp, Glycine max
catcatgaactgataatagaaacacttttattaagacttcaaatcacagcattcaagataatacaatacgctacacttttagaaagccttatatctatatctatacactacaaagctttgccaagataaaagtacactgcaggcaaatttttcatacacgtttagcatagttcattctcccccaattattctttgtcacagctttatattatccctggattgcaacaccaagaggagcagcatccataggtataatcttctcaatttctacacccttgttgttgttctggttttcataggctgaaatgtgcactccaagtgctgctctaccagaaggatcaaggttgttagaccaagcagcatcccactcaacagctttggctgtgctacatgcaacacttgctcctccaggaacggtgagcctagctgagttctgagggaagaacc

SEQ ID NO: 219898 - DNA, 487 bp, Glycine max
cgtcgctccgcaccagtttcaccgcacgaatatcttgttgtttggagcgatccgagaaaaactctgtaaacatgttggtttaccaggacctccttacaggtgatgagcttctctctgactccttccgttacaaggaaattgagaatggaatgctgtgggaagttgaggggaagtgggttgttaaaggagcagttgatgtagacattggtgcaaacccttctgctgagggtggaggagaagatgagggagttgatgatgcagctgttaatgctgttgacattgttgacacattcagacttcaggagcaacccgcattctatgagaagcagtatgttaccttcatgaagagggttatcaagaatttgactcccaagctcgatgcagagcaacaggagttgtttaagaagcacatcgagggagcaacttaatacctgctctctaagattaaagatttccaacttttcgcttgtgatagcatgcgagatga

SEQ ID NO: 219899 - DNA, 546 bp, Glycine max
  unsure (1)..(546): unsure at all n locations
atcccaaaaccaaaaggtggagggcgtgggcgagggatatctatcttcattttcgtcggcgttcatttttttattttttttttctgttttccattcgcttcttctctcagaaaagctcgccaatcgatcttgctctcttctacgcttttcgaattccttccattccattatggacgcagattagattcacgttcacattcacttctcttcgtttgcttcaaccactctgctctgctctgctctactctgagatccgatcgcattttcattcagaaaggaaactcgtgtgactgatttatgcgctaattgcaattgcactgcgagcgtccctgtgccgaatcggaagatgggattagtgtttaccaaattgttttcctctcttttcggtaacaaggaagctcgaatcctcgttctcggcctcgacaatgccggcaaaaccactattctctatcggcttcagatgggcgaagttgtctccaccattccaacaattgngtttaatgtcgaaacagtgcagtataacaacattaaatttcaagtctggga

SEQ ID NO: 219900 - DNA, 534 bp, Glycine max
  unsure (1)..(534): unsure at all n locations
gggagatggcaccacacgttttcatctcatctttctaacaaaatgggaaacacttaacaaaaagagggcaagctacatctaatgattgaagaggtgtatacatgaatgcttctgggtaagagactaataattggaagaatgtttctcaagttttggggcttcagccattccaagcacacaagttcctctcagagaaagtatccaacaataatagaagagctgtgtcatcaattttctctggccgatcttaggaaatcaacgaacaactttgatccaaagagacaagttgaccttagagcatttggtatcaaagtatataaaggttgtcttcaacatgatgatggttctgattatacagtcgccgtaaagcgatttaatgtggatgacagtcaagcacgggaagagttcaagaacgaaatagagttgctctgccagcttcatcaccctaattgtgtctctcttataggattctgcaaccacaaagatgagaagattattgtgtacgagtacatgtncaatggatctctatatgaa

SEQ ID NO: 219901 - DNA, 556 bp, Glycine max
cactcaaactagaacatgcatcaaaactcatagaatgcttacaagaatatttacatatcgtctaccaataagatatatttgatcacattgcaaccatatatcaatctttatttttcagcagcaaggttgctttgtatacataaacataaagcatagtagtacaagggactttgtttgacacaaaccttaattaattgatcaattatcttagtacacactttaaaatgttcattattaattataattatatgatgagttaataatatattgtggttagggtatgggataaacgaccacttttcctgtggctcttgaagtttctaagtaggaaatggcttcaataacctgagaaaatggcactggagtcttggcatcgagtataggcttcaacttaccactctcaaagtaaggtcttaaattctctaagatagatccctttgaggtgagcacaaaaaacatagctggtggatgtccaggtggtactattgtcacaactttcccatcttccttaacggccttaaatgctctatcaccttgccctactacatcatacact

SEQ ID NO: 219902 - DNA, 491 bp, Glycine max
  unsure (1)..(491): unsure at all n locations
gagagttaagaaaacagaaacctttgttgactcctgatataacaataatgtctgtgggaactgagattacatatggtgaatccatggtacctgatgatggttggaaacagtatctagatcataagtggaatagggacatagttatggaggaaacagccaagtttcctgaactaactttgcagtcagaaacagaacaacggcctcacaaggttagcttttatttggaaaaagggaaagccccgaatgtcacgcaaactctctcaaaacgtttggaaaaccgtgggttagatgtgaaaataatttatagcaatggtatagctttagatgtattaccccaagctgctggaaaaggacaggccctagctnttctacttgaaaaattgaaggctgatgaacaaggaccaatcaacactcttgttngtggtgattcagggaatgatgctgaactgttcactgtacctgaagttatggggtcttggtcagtaatgcac

SEQ ID NO: 219903 - DNA, 552 bp, Glycine max
  unsure (1)..(552): unsure at all n locations
agctaaggtattattatggcttatcaagtgttggtgatttgtgtggtctccagcatagtgtttgcatacatagtatggagaaaagaaaggaagaaaaagcttccaccgagtccaaagggccttcccatcattgggcacctccaccttgtgtccccaataccccaccaagatttttacaagctctcactccgccatggacccatcatgcaacttttcctcggctcagtcccttgtgtggtggcttccaccgcggaagccgccaaagagttcctcaaaacccacgaaatcaacttctccaaccgccccggccaaaacgtcgccgttcagttcttaacctacgtgtttggcccttacggaccctccgtgaagttcatcaagaaactttgcatgtccgaactcctcggtgggcgcatgctggaccagttccttcctgtgagacagcaagagacaaaaaaattcatcaaacgcgtcctccaaaagggtatcgcttgtgaagccgttgacttncgaggagagttcatgagactctccaacaacatcatttcgagaatg

SEQ ID NO: 219904 - DNA, 475 bp, Glycine max
gacacattggtaacacctgttatttatttctttttggatcacaacattttcaccattcataatatttatattctctcttttttcactctctcacaaggggtttaatgtcatttggagcgtcaatcacataacagggaatgggttaagccttggaacagggacacaaattatggggggagccctcggaagagtgatgccagactttttttccatgtccaccttgttattgccattatcaaacttccactgaaaacactgaatcataatagccagattcacatgcccaatctgcaatgccagaaaagtaccagggcatgatcttcttccactcccgaatggaataaaatgataatgttgtcccctaacatccaattgactttgtccattttcaaaaaacctctccggcctaaactcaaatgggttctcccaatgattggggtcccttccaatagcccaaacattgacaaataatcgg

SEQ ID NO: 219905 - DNA, 471 bp, Glycine max
ggttttggtttggtgtttttcttaagcttgagatcaggaattaatttcagagggtcagagaatggcaacggattcttctaatggtaatgggcatcaccaaacaacaacaaagcaacctcctttgccgtctcccctgcgcttttccaaattttttcagtccaacatgagaatcttggttactggaggagctggattcattgggtctcacttagttgacagattgatggaaaatgaaaaaaatgaggtaattgttgctgacaactacttcactggatccaaggacaacctcataaaatggataggtcatccaagatttgagcttatccgtcatgatgtcacggagcctttgttgatcgaggttgatcagatctaccatcttgcatgccctgcctctcctattttctacaaatacaatccactaaagacaatagagacaaatgtgattggcacactgaacatgcttgggcttgc

SEQ ID NO: 219906 - DNA, 530 bp, Glycine max
  unsure (1)..(530): unsure at all n locations
ttctcgtgcaccctagacttagcaaaactgatgctgctattttatccactccacaaataatggaagctagagcaatgttaactctggctttagacaaaagaagtaaggaaaagaaagaatctgacttatctgcaggagggaatgttccctcaaaagaggaggaacagcatctctttgtgccaagcactgttcaacttgaatcagcacctctccagacatctgctgctgaagctgccccatctgtggttgtttctaatgttgagatggagaaacatgccactcaaagtattgttccagaggttattgacaagtctgtggttaaagaagcaacggtaaatccatctgcagaacaatcatcatctggttcaaccaatagaattttggatgaatcctatgaggatgatgctgatgattggttgaaagaagaggatacttctgaaatgggtggtcccagtggaactnctgttcacactgggtatgacgaggatgtttcattcagtgatcttgaggaggatgatgtgatgtacatg

SEQ ID NO: 219907 - DNA, 604 bp, Glycine max
  unsure (1)..(604): unsure at all n locations
ttttgcttgatgacacaatcacacttaaaggtgagaaaaacgccgctaccaacatccactctttaaaaggcttgggaattgttgataagatcaagaacatacttgaatcagagtgccctggaattgtttcttgcgctgatattctcactattgcagccagagatgctgttattctggtaggtggaccttactgggatgttcctgtgggaaggaaggattctgtcactgcaaattttgatcttgccaacaccaatcttgccactccagatgagagccttctgtctatcattgccaagtttctttaccaaggactatctgtcacggatatggtagcccttgcaggtatattaatgaataaaactttgaaggtttaaatatgtttttaattttcacaaatatgacaaattttgattttagtcctttaaaaaatcttttgtcaattttagtcctcataaatttatttattttaaatagtatctatcatcatttaatgatgataagacatgcatttagatatgtcacattaacaatcattctaagatctgatatactttagatatatgctcgtcattngtaatgatgatacatatatttttgaactttg

SEQ ID NO: 219908 - DNA, 531 bp, Glycine max
  unsure (1)..(531): unsure at all n locations
gccttacgtaggggatagcaagagagccatggatgagtacacttcagagatattcatgggtggaaagaacaccattgttttgcacaacacatgtgaggattcccttttagctgctcctattatcttggacttggtccttcttgctgagctgagcactagaatccagtttaaagctgaaaatgaggtctgcatgcattgctaaatgattttattgcttgattgtattcgtcattgtatttttttcagccttctgaggtcactatgttgtggtggttgatgcagggaaaattccactcattccacccagttgctaccattctcagctatctgaccaaggctcctctggtgagtttaatctaatcttattcaatgttgagtgcatatccttatttttatataggaattaagttgaaagaaatatgagttttagtattgagatacaattgtgaagttaaatcattgttcagtgaatttcccttttttcccttatcattnttttatcaaaaagttggcaagttactcacacataac

SEQ ID NO: 219909 - DNA, 561 bp, Glycine max
ctttcaaattaagtctctgcattattctcttcccttttctatctccctctgcaaaaacgaagtaaatgggtcggcttaatctcctacttgtgtggtcactctctttaacacttttccttaattatctacacccaacctctgcccagctcagtccaaaccactatgctaacatatgccccaaccttgaaagcatcgttagacaagccgttactaataagttccaacaaacctttgtcaccgtcccagccacccttcgcctattctttcacgattgctttgtccagggttgtgatgcttccgttttgattgcatccaccggaaataaccaggcagagaaggatcaccaagacaacctgtctttggcgggtgatgggtttgacacagtgatcaaagcaaaggctgcagtagatgccgtccctcagtgcagaaacaaagtctcgtgtgcagatattctggccttggccacccgtgatgttattgcactgtctggtggaccttcttacacggttgaattgggaagatttgatgggctagtttcgagagctttcgatgtgaatggga

SEQ ID NO: 219910 - DNA, 569 bp, Glycine max
  unsure (1)..(569): unsure at all n locations
gaaagggggaggagagtacgagggagggagaagcgtagggaagttgatagtgattgcagtgatggtgaatctaaggagcaggacagaaagcggcataggaaagaggatggtgattacaagagagagagggaaaggagtgtcagcaagccaagcaggaaatctgaggaacatgaaggaagcccaagaaaaaagagtggcgaagatgattcagataccaaagatgaagagaaaaaacctacccgtgaagaggagatggaggatgaacaaaagaggttggatgaagaaatggaaaagcggaggaggagagttcaagagtggcaagagctaaggaggaagaaggaagaagcagaaagagaaaaacaaggtgaagcaagtgctaatgaacctgagtctggaaagacctggacacttgaaggggaatctgatgatgaagaaggactgggtactgggaagcagacaggtatggatgtagatgaagatgacaaacctgctgatgaggagcctaaggatgtgatggtggtagatacttgatatgggacaatngcatctgatttacaggatggaactgt

SEQ ID NO: 219911 - DNA, 356 bp, Glycine max
aaaaccctacgtagagagctcttccttcctttataacagcaatggccgacgcagcacgccctctcgtcaccgtgcaggccctcaacggtgacatggcatccgatgcctccgccaccgtgcccatccctgacgtaatgaaggcctctatccgccccgacattgcatatttcgtacactcgaacatttccaagaacagtcgccaaccatacgccgaaagtcgttgcgctggtcaccagaccttcgccgaatgctggggtaccggccgagccgtctcccgtatccctcgtgttcccagcggtggaacccaccgtgcctgacaatgagccttcggaaacatgtgccgcagcggacgcatg

SEQ ID NO: 219912 - DNA, 506 bp, Glycine max
aatataagaaccagaatttgcactaaaatccaacaaacaaaatttccacattgtctgcataattatgatgacaaccttaacccgcaaaacaaaaaaaccaaagataaggatatttagttctgatgagcataaaaaacaaaattctaatacgaaaaaataaatcatgaagtttactgtgaaacacccaaccacttagaaaagttgtcgaattctgtataatcagaatctgacaccatagtgtgataccatgctttcccagcagccttgatggcagacgcttcctccttagagacagtcttcctcttcttgtcgagcttctccttcttgaccttaacccgctgtgcctcagcgagaagggccatcctcttagcagtcttggcataaggattcagcttcagcatcgagttgagattcttaagagggttcttcttgagagtggccctcttcacatccttcttaatgggcctcacaacagattgcacctcatcagaattaataatcctgga

SEQ ID NO: 219913 - DNA, 461 bp, Glycine max
ctgttgcaaaacttatggttgggcctttttttgaggttttcagcgcttctttctcacaatggttcttcataatgatattgatgagctgaatcctccagctgagttggacaagagaaagctcatactcaagcgtgttgttcagtcaccaaactctcctttcatggatgttaagcgccagggatgctttatcataacatctgtgtttagccactctcaaactgtggtggtgtgcggaaactgccagactgattcgtgccaaccaacagggggacgggcgaggtcaaccgaaggctgctcatttaggaagaagggagattgtatggcttgctaaccagacttttctttgtcaatgaattgacattctcggttgttacgtctgtgagatgcgaatcacatagctatggtatattaagttggtgaaattggaggacaatatctctcatccttccacaacgcatagt

SEQ ID NO: 219914 - DNA, 525 bp, Glycine max
  unsure (1)..(525): unsure at all n locations
aaccatcaaactaaaccatatcgatttcagtaaaattaaatatccaacaaaaccacatccacttcaataaagagaaattcaacattggctactatgccttgtggaaggctgagagatattgtcttacaatttaacaaaattaatataccataactgaaattgattccatctcaaaaacctaacaaccgaaaatgtcaaatcattgacaaagaaaagtctggttaacaaaccattcaatctcccttcttcctaaatgagcaaccttcggttaacctcgcccgtccccctgttggttggcacaaaacagtctggcagtttccgcacaccacaacagtttgagagtggctaaacacagttgttatgttgaagcatccctggcacttaacatccatgaagaaagagtttggtgactgaacaagacgcttgagtttgtgctttctcttctccaactcagctggaggattcagcaaatcaatatcattctgaagaaccatngtgagaaagaagcgctgaaaacctcaaaaa

SEQ ID NO: 219915 - DNA, 533 bp, Glycine max
gttccaatataaccccttcttttgaatgtatctatgaacccaatccttgcaaacaggcaagttagaattacatgtatatggtacaaaaggctttgtactttcttgtagctgaaggtataattaatcattgcatatttgagcattggatataatactaaactctggatatcatgtaaaatgaaaaaaaaaatcaatagatttgtttgaacataactccatgacgaaaatcaaagctaaatggacaaatatctcacaccagattctagtgtttgggatttaattgctagtcttgtgtccctaccacctgctactgtccggggttccccaaaagccgctcaactgctgcatgtacgttccctgatgtagcaataagagcccttatgttctcttgcgtgtcaaagaaccccatctcttgaagctgagaaagttgggtggcatacaattgctccggtggctcatttgatctgttaggaacagccaggctaccagcttcaagtccaccaaacatgcttgataacatctccagccccatg

SEQ ID NO: 219916 - DNA, 510 bp, Glycine max
ctctctactactgctagctgtgacttgttttgagttcaatcaaatcgcattggtatctgaaatcaggaaagatggttagcgtagctgagatcaggcaggcacaaagggcagaaggcccagcaaccatccttgccattggaactgcaaacccaccaaaccgtgttgatcagagcacctatcctgattactacttcagaatcaccaacagtgaccacatgaccgagctcaaagagaaatttcagcgcatgtgtgacaagtctatgatcaagacgagatatatgtacctaaacgaagagatcttgaaagagaatccaaacatgtgtgcttacatggcaccttctttggatgctacgcaagacatggtggtggtagaagtaccaaagctagggaaagaggctgcagtaaaggccataaaggagtggggccagccaaagtcaaagattacccacttgatcttctgcaccactagcggtgtggacatgcctggtgctgattaccaactcaccaaac

SEQ ID NO: 219917 - DNA, 538 bp, Glycine max
ggtggttgttgttgttacaaaccccaagcaagtttgaaaagtggtacacaataatgaaataatatatgaggcatctcagatggccacactatgcaaaacaacagtttcaatggtaagtccaggtccaaaaccgaacaacacaccccattcaagtccttcacctgtggttttatgtccattttcagcagatttcctcctcatctcatccaagatgaaaagaacacaagcacttgacatgttcccatattcactaagcacatctctagtggccttcatcttctcaggtttgagacccaacttttgctcaacttggtccaaaatcgcaggcccaccagggtgtgcaatccaaaagatggagttgtaatcagagatgttcaatgggttgaaagcctcaaaaagtgccttatcaatgttctttgagacaatcccgggaacatccttgaggaggtgaaatgtgagtccaacttcacgaaggtgtccatcaatagcaccttcactgtctggagcaattgtttgtgcagtccaaacaagctcatac

SEQ ID NO: 219918 - DNA, 290 bp, Glycine max
ttcacgaaaaaaaaaaaatttcatggtggtctaggtgtatggtccaacctatggatcccccaagagggtcctggtgcgtctgattgagactgaaattgagctcgtaacagtgcatggatatctttccatggtagaaaacaacgcacctgatcctcttaatgtgattacatttgaatccctccctgttatttaagacggcgattatactctctatcaatctattgcagtaatcgaatacttagctgtctaatatatggtccacgggtctgatttctcgggaatgacactgg

SEQ ID NO: 219919 - DNA, 521 bp, Glycine max
attattacttctcaacacaagaggcttcttagataacaagttataactaatggactcaacaactaatcacactgctcaataattttaaatttatgttttcaccatccaatgttattattcaagaagaggaaaagatccaaatccaaaaaaaaactacaggtccacatcttgcagatagcctccattatattctcaaacaggtatcagaaaacactgaaggcacatccctcacaccatcttggaatgttggggtagatcgaactaactagacagggtatttatatagctgaagaaccttctgccaagctggtctgttactaatatcatcccaccaagcactcacatgcttcctgtctctgaccaaatttcctctcccggtttggttcaccaaatagtgaccaaatgggaggtggctaagatcagcaaggctgaagaagtcaccagccaagtacttgctctttgacagcctctcctcataaacatccagcaccttctcaatctttttatcactttcttctatc

SEQ ID NO: 219920 - DNA, 613 bp, Glycine max
  unsure (1)..(613): unsure at all n locations
taagtccgtatggttcctctactcatgctatctgactctatactatctagactcactatctctaataagtaatttttttttattcantanannannnnccggcttgctgcgcagaccgnatctatgatgtcgcacgcaagcgcacgagtccgcggccgtcggctcgaggagcgttctctctctttgtacatctcattctgggatacgaagctcgcaataggggcggcgtaggaataagattggatcatatctgtcttttcgacaccttcactgccattgcgctcttacggattgactttgaagtgttacgtgacgcatataaaagaagaaacaaccatcagcttatcgaagttccggctaaatttgaagaccctagctcattgaaacaggttccttgcccacatattgttgaaccagccacatagcatattccttagactatccctgcctacaatgaggagcataggcttccaagagctcttgaggaaactatgaaatatgtccatcaacccacactaaaggattcttcattaacatatgaagatgtaattctcgtaaatggaagtgctgaccaaacacaaagagtaaattttggaattttgaggaaatccac

SEQ ID NO: 219921 - DNA, 508 bp, Glycine max
tcacaatttcaattgtttttttttttacataatcatggccatgaaacgtgctgttcaatccctgcttgcctcatcttccaccctcaccaggaaccttcatgcctcaggagaaaaaaagaagattgtaggggtgttctacaaagggaatgagtatgcttcgaatcccaattttgtgggatgtgtggaaagagcattgggtatacgtgagtggctggaatcacagggtcaccagcacatagtcactgatgacaaagaaggacccgattcagaactagagaaacacattcctgatgccaatgtcatcatatctactccatttcaccctgcctatatcaccgcagaaagaattaagaaagccaaaaatttggagctgcttttgactgctggcattggttctgatcacgttgatctcaaggcagcagctgctgctggtttaactgtggcagagatcacaggaagcaacgtagtctcggtcgcggaggatgaactcctcagaatccctcgtctg

SEQ ID NO: 219922 - DNA, 440 bp, Glycine max
ttttttttttttttttttttttttttttttttttttttttttttttttttttttttttttttttttttttttttttttttttttttttttttttttttgggcaaaacggggaatttttaacaatcccaaaacccaaaaaagggggccccccctaggggggggctttaaaaaaaaaacccacaaaagggggtaaaaaaattaaaaaaagggggggcaaaagggcccctaaaaaaaatttaaaaccccccagggggctaaatttctccctttccccaaaccagatttgaaaaaaaaaaaaaaaaaattaaatttttcccccaaaggggcccctggttttcccttgtttttgaaaccccccccaaacaaggcccccaagggtaaagggccggggttttatatgcaaaaaaaaccccccccccaagggggccccccctttattc

SEQ ID NO: 219923 - DNA, 537 bp, Glycine max
ttttcattcactcactctcactcatggctgaagatgggaacaacaacgatgtacccttacacaaattcaaagacagcaatccaaaccctggagagttcgatgcaaagggttacagcctcagcggaaaaatcatgctttcagcaataatccttcttttcttcgtcgtcgttttgatgttgtgccttcatatctacgcgcgctggtacctccggcgtgctcgccgccgccagctccggcgccaacgcgagctccgccgcacccagcttgtcttttacaacgacgacgccacccccgcagccgtgtcacgtggcctcgacgccgccatccttgccacactccccgtcttcaccttcgacccggaaaaaaccgggccggagtgcgctgtttgcttgtcggagttcgaacccggtgaaacgggtcgggtcttgcccaaatgtaatcacagtttccacatagaatgtattgacatgtggttccattctcatgacacgtgtcctctttgtcgcgccccggttgaacgcgcgccgaaccggaagt

SEQ ID NO: 219924 - DNA, 595 bp, Glycine max
  unsure (1)..(595): unsure at all n locations
tctctctcttctcttttcctcttcaacattcttctctctcacaaagcaacaacacaaacaccgagcgaggggaattcaactttcagcaatggcggtttcttcttctgcaacaaaatgggtcctcttcttgcttctggcgctgctcattcgagaagaagccatggccatggctactaccccacagatctctgacctcaggaatgttgaagttgaaagacacaggttgccgagcttgacgaactcgtcaatggtggagagggcaaaagaggctgacaaattaaatgaacaagctgctgtggctaacccagaggaagtggtttcaatggttgagatgagcatccagaacagcacagagagaaggaagctgggatatttctcttgtggaacaggcaacccaattgatgattgttggcgttgtgaccccaactggcaacgcaaccggaagcgtctggcggattgtggcattggttntggccggaatgctatcggtggtcgtgatggaaaantttatgtggtgactgaccccagggatgatgaccctgtgaacccgaaacctggcactcttcgccatgctgtgatccaggacaggcccttg

SEQ ID NO: 219925 - DNA, 560 bp, Glycine max
  unsure (1)..(560): unsure at all n locations
aatttcacccttcacacgtggtggtggtgttgttcttcttctcttcccctttctttttcttcttctgagcttgtttaagctctttctatttgattccattaacatatattatcacaatgtgtggtattcttgctgttcttggttgttctgatgactctcgagccaaaagggtccgcgtgcttgagctctctcgcagattgaagcaccgtggccctgactggagtgggctccatcaacatggtgactgctttttagcacatcaacggttagccatagttgatcctgcttctggggatcaacctctctttaacgaggacaaatccgtcattgtcacggtgaatggagagatttacaaccatgaagagctcaggaaacagctgcctaatcacaagttccgtactggatgtgattgtgatgttattgcacacctgtacgaggaacatggagaagactttgtggacatgctggatggtatcttctcatttgttctactggacacccgtgacaacaagtttatagtggctcgggatgctattgnggtcacttccttgtacattgga

SEQ ID NO: 219926 - DNA, 556 bp, Glycine max
gtagggtttgcggtttcagagtttgtgacgcacgcatccatggacaccaccaccaacgccgccgcagccccgccgtgccagctctcccagaaggaagccgacatccagatgatgttagccggcgacgttcacctctgcaccaaatactgcgacttccaaatggaacgttacatcttcaagcgccgcaacgacgggatttacattattaaccttgggaagacatgggagaagcttcacttagcagctagggttattgttgcaattgataaccctcaggatatcattgctcaatccgcatggccttatggtcaaagagcggctctgaagatcgctcagtacactggtgctcatgctattgctggaaggcacactcgcggtaccttcaccaatcagcttgagacttcgttcagtgagcctcgcctccttatcctcactgatccaagaacagatcaccagcctattaaggaagctgctcttgggaatattcccaccattgctttctgtgacactgattcgtctatgaggtatgtggacattggaatttctgcccacaaca

SEQ ID NO: 219927 - DNA, 529 bp, Glycine max
aacattacaaacaataaaattgagttaacaagaataaaaggtatacacgattgtgcgtctaagcatttaccattttatgtccaagctgacctgatattgatgagacatattggtgaatcgaaatctaaacatctaagctgatacaattacagatgaaaagaactacactagtataatacaatttgttgatcgtttatctttgagcctgatcagcagtgtggttgcttgttgtagatgatgatcctgttctaccattcaatattccattgtgcgttggtgggcaggttccccacttaccctctgactcggtcggttctatcactttgacagatccatccgtcaacccaaccgcaaactggttgggttctagaggatgagcagcaaccacaagaggatacacaccttgacttccacttaaagctgccggtgacaagcatattgatggagcaatacgacatctgagcctgaagctatcagcatcaaaaacaccaatgttggcatcacataatgtagcatatattaactgact

SEQ ID NO: 219928 - DNA, 506 bp, Glycine max
gaaattaaactgtacgtttatctaattaaccaagtatatatagctttatgtatggaattaagcattaattgtgtactatataataattttgtacgtagctagctaaaagtgaaaaaaaaaagactaatcttaatttgttgttgattatactcaccattttaatctcaattcctcaaatcaagaattaatatatataatctatcctgccaagtcatgcagaagctgtgctcccatcaaattcctgtaaggcaggttttgtccttcaccgtccaaaagagagtactgatgaactggttgacaatcttcaatttggtcccttggatagtacagtgaactctgtgttgctggcgggaacgctagactcaccccatgttgctgtaaccctagcgtcaaagacaccccactctggttgttgttcccattctgatcactacttccgtaagaaaccatgcccgaggagtggtgtgtgtatgatgaaaaatcaagctccactgacccaaagcact

SEQ ID NO: 219929 - DNA, 497 bp, Glycine max
cttctcttgcggctagggttttagcgcagcttcttctagatttaaggaagatgggtaaggaaaaggttcacatcagtattgtggtcattggccatgtcgactctgggaaatccactaccactggtcacctgatttacaagcttggaggcattgacaagcgtgttattgagaggtttgagaaggaagctgctgagatgaacaagaggtctttcaagtatgcctgggtgctggacaaacttaaggctgagcgtgaaagaggaatcaccattgatattgctttgtggaagtttgaaacaacaaagtattattggaccagttttggttgcccctgaccttagggatttcattaagaatatgattactgggacatcccaagctgactgggctgttcttatcattgattcgaccactggtggttttgaagctggtatttccaaggatggacagactcgtgaacatgctctgctgtcattcacccttggtgtgaaacagatgat

SEQ ID NO: 219930 - DNA, 583 bp, Glycine max
  unsure (1)..(583): unsure at all n locations
gaacactaaaaatagaaagttgacatttaataaaccaaagcaacacaacgcagcaaagtcctgaaactcgctgcgcttaacaaaaatgtaatcaggggttccgacaaacacaacacattaaaacacagataaataaaagcaattttgccaccgtcgatcaagaacccagttctgggaacaacagttgcgagatgatggtggagacttcaaactttgtccgaaaaacaagctacctagaaaagaagacacaagagtacagaaaagaaaccaacatttattgtaaccaacatcccctgatgaaccagcccgcacgattcacttcttcttctgggcagccttggtgaccttggctccggtaggatccttcttctcaacgttcttgatgactcccacagcaacagtttgacgcatgtccccaacagcaaacctaccaagtggaggatactcggagaaagtttcaacaaccatgggtttggttggaatcatcttaacaaaaccagcatcaccgttcttcaaaaacttgggctccttctcaagctcttntgccgatcgcctgtcaatctgggtcatgagttcagcaaac

SEQ ID NO: 219931 - DNA, 522 bp, Glycine max
  unsure (1)..(522): unsure at all n locations
attaagaaataaatttcttagatgatcaatgatacaaaatgtaaataaaagctatttttacaactatgaatacagtcaatacaccaaaaatgaaaagcatactttccctaaccaattatttcagtaccctaccctcccccaacaatatctttggaattttttttatcaagcaaaatatgatgacgaggaggatgtatccgccagaatctcaagttgctcttcagtaaataattctttctgaacattccatgtatcagcatgggtccgccggaactctgcaactgctttagtaactgtagatttcacgggtgatggctccccactgaagcgagcaagtagtgtaacatgatcaggcaaccaactgggcatgtcatatggggctgataatacagaagctaccaaagctagtacagcaccatgaacagatgctattgataatccagaacttgcatttctcgactttcttctcttctgtacaatatttgcctncttataagctctatcatggaaatctctagcaag

SEQ ID NO: 219932 - DNA, 485 bp, Glycine max
ggcttcttctctctccaccaaaccattctcatcaaccgacgctctctccgccttcgcttctctcaatcccgatctccgatccttctccctcggctacctccgtctctcactccgtcctcgtcttcccaagagacttcagatacgggctgctgggagtatctatggaaatcactttcgtgtctcaacatatggagaatcacatggaggaggtgttggttgtattattgatggatgtgctcctcaccttcctctctccgaagctgagatgcaattggatcttgacagaaggaggccaggtcagagccgaattacaactcctagaaaggagactgatacatgtaaaatattttcaggagtttctgaaggacttactactggaactccaattcatgtatttgtacccaatactgatcaaagaggacatgactatactgagatggcagtagcttatatgccttcccatgcagacgctacctatgacatga

SEQ ID NO: 219933 - DNA, 488 bp, Glycine max
tgaggaacgaaacgctgcctttgatctttttcctcttcctatgttcccacctccactccgtcctctcatggaagaaagaggagttccgaacctgccaccaagccccattctgcaagcgcgcccaatcccgcgccccgggctcctcctccctcatcgccaccgagatcaccatctccgacggcgacctcaccgccaaactcaccccataacacgattctcaatccgaagaaaccaaacccttgatcctcaccctctccgtccaccaactcggcatcctccgcctcaagatcgacgaggacccctccctctcccctcccaagaaacgcttcgaggtccccgacgtcgtcgtttcggagttcccctccaccaagctctggctcccccgagtttcctccgaaaaaaacggcgcctactcctccgtctacctcttcgacggccactccgccgtcctccgccacgaccccttcgagctcttcgtccgcgacgac

SEQ ID NO: 219934 - DNA, 498 bp, Glycine max
ggaggaaaatagagtaagattgagttcaatattgagcaacggtgtcaataccaatgtattgagcttttaatattatcttagtaagcaataacactagcatactaccagataaaaagatgatagtaaaccctaccaattatgttatttggtgcgtaaagagcatagtatctcctagaaaagatggagacagtgagagaggccattcaaattttcacaggactcatttttttatgtaacttaaagacaaattgaacatggtctttcttcgtctttatatgtgattttttctcaaaaaagcacggttcttcttgaaacttgtccaagctccttaaactgtatagtgctgctgaatcgtgtcaatgtcaagccccttcagcttcaccactgactcgacatgtccctttagagtatgaagctccctaagccttgcaacttcagcacgtctcttggcttgttctgcaatctctgaaagctccctgtagctatttttgtcattga

SEQ ID NO: 219935 - DNA, 534 bp, Glycine max
gccaaggcgtcagcttagttggtggagtaattgatactgccacttccttcttaggccgtaatatctccatgcaattgatcagtgctactcagactgatggcagtggaaatgggaaagttggaaaagaagtctatttggaaaaacatcttccgaccttgccaactttgggagcaaggcaggatgcgttcagtattttctttgaatgggatgctagttttggaattccaggagcattttacatcaaaaactttatgactgatgagtttttcctcgtcagtgttaaactcgaggacattccaaaccatggaaccattgaatttgtttgcaactcatgggtttacaacttcaggagttacaaaaagaatcgcattttctttgtcaatgatacatatcttccaagtgccacaccagctccactacttaagtacagaaaagaagagttggaggttttaagaggagatggaacagggaagagaaaggactttgacagaatctatgattatgatgtctataatgatttgggcaatccagatg

SEQ ID NO: 219936 - DNA, 525 bp, Glycine max
gaaagtgagaacacactttattatatgaaaaccgagagcatccaaatacaatagtgcagaagttcaggcaataattacgcatagacatgcataaagtctatgttattcagaagtacaacatagataaggaaaccacaaactctttttaattagatagagatactgttgggaattcctttgaaagtcaacccttcctcacttgaacgatggagcaaagtgtatggcagctgaactggcccagtccggtttctcagacttggatcactgttccttgcattgatttttccttcaattccagtcagtttgcttccaaaccttttgaaagcttctaatgccttcttatcagtagtccaatttggagtctccctctctccaaggtatatctcatcagaagcatgccttgacaatatctctatcactgaaagatcaataagggtctcaaacttgggtgtgattgttctcagataagccttttgaggattcttcaccatctcatcatactctggggttccttcagctgggata

SEQ ID NO: 219937 - DNA, 538 bp, Glycine max
gcaacacaagaacactctcttgaacattcatggatccagtgagcgtgtggggtaacacgcccttggcgacggtggatcccgagatccatgacctcatcgagaaggagaagcaccgccaatgccgcggcatcgagctcatcgcctccgagaacttcacctccttcgcagtcatcgaggccctcggcagcgccctcaccaacaaatactccgagggcatgcccggcaaccgctactacggcggcaacgaattcatcgaccagatcgaaaacctctgccgctcacgcgccctccaggccttccacctcgacgcccaatcctggggcgtcaatgtgcagccctactccggctcccctgccaacttcgccgcctacaccgccgtcctcaacccccacgaccgcatcatggggctggatctcccctccggcggccacctcacccacggctactacacctccggcggcaagaagatctccgccacctccatttacttcgagagcctcccttacaaagaaactccaccaccggctacatcgactac

SEQ ID NO: 219938 - DNA, 505 bp, Glycine max
gaggaaaagaaagaaagcacatgtattatttcaattggtaatatgaaaaaaatatgatcaatcagggtaacaaaaacatgaaatcaaagacaaagaaatttcaaacttttgaattgaaacaccatcacgataaaccctacccctcccagaatggaagacacttatttcctttttctccatttctgccctttgtgccgaactttgagtgacacaattaagtagagagcgttatgattgaacctaatccttgtacttcatttcagataccaggaagccaggcatgtcaaatgtggcagagaacttctcaacatcagctttgagatcttcaatggccttgttgttgacgaggcccttgttgaaatccttgagaagtttgccatgctccttctggatctccagtgtgagagtcacagcacggtgaaggaactcaccaatctgctcaaagtccttttcaaccaaacccctagaagtcatggcaggggccccaattcgcactccaccgggg

SEQ ID NO: 219939 - DNA, 504 bp, Glycine max
aacccaaaaatttatttttttcccttttcagaatcgtctcatgtgtgttaagatgacaatacaagtggataagatgacaacaaaaaatgagtatgaataatgaactggaaatagggaaacaatgaataatgacactgctggctctcgtataaacgtgatctgacatacatatatctacttagaccaagcaactgcatctatttcagcttgtgcactccggtataactctagtctctttgcgagcgcactacgttgtttcataattgcaggatcctcattcaataacgatgacagacgcttggtctccattttgcctagcttggtaaaaaagtgatcaagtagacttcgttttgcctcccgcacttgacaatagacgatggacttgggaattgaattccgtagtgtagcacagaccatattgacatatgacaaaattgtggttccaattcgccttagatatgaatcattatatctatcaaaaattgaatgtgtgggattgccacc

SEQ ID NO: 219940 - DNA, 484 bp, Glycine max
atgacattgagccatggatgatgtggggctattatctatctcctatgatgtatgggcagaatgccatagtaatgaatgaattcttagataaaagatggagtaaaccaaatacagaccctagaattaatgcacctacagctggaaaggtgcttctcaaatctagaggcttgtatacagaagagtattggttgtggatctgcattggagccttgctagggtcttctcttgtcttcaatctcttattcattgtcgctttaacttatttgaatcctttgggttattcaaaagcagtcattgccgatgaaagtgacaaaaagaatagcacgtgatcctctatccaacatattcttgaaagaacagacatggcagtgaaagaatcttcagaaatggctaggtctttgaaccacgaaccaagaaggggaatggggctaccatttcaacctttttcactagcattcactcatattagctactatgtagatat

SEQ ID NO: 219941 - DNA, 540 bp, Glycine max
gaaataaattctctcatgacatcatgccatgtattaattgtaagcttgtcacattatcttaaaggttgtgacttctgttctttcacaggtaacaacttgctcaacaatctatatactcatttcctaatccatattggtaggacttactcaaagtggagattcctgaagcactatgagcacatgaactcctacatactaataaataaaaaatttacacgtaatcctaaaactgatatatatataactttgctgagactatctcctttggaaattcaagaatttgatgccataggcaaaaacgaacatgaagaggataacccagcctacatgagcagcagcaacaacgggaaggaaatcatagtcaaaacccaagttttgtttaaggaattccttcaatcccatgcttccagcacctggtatctccaattctgcatttttgtcacccagttgtgaggtaataaggccatatagtgtccaagaaacaggagaagcccaataataccatctccaccacacaggaaattgcgtcctatgaatgat

SEQ ID NO: 219942 - DNA, 566 bp, Glycine max
gaaagtaaggccaaagatgacattctcaattttcatgaagatagcggcgctcagctggatagagccagttattgaccagaatttgtattccttggggatgaagtacacaacagcatcctttgccgttaccataaccaatatgctttctgccattacctttatcttcgcatgcattcttaggcttgagaagattaaaataagaagtatacggagccaagcaaaggtggtgggaaccctaacaactgtttcgggagccatggtcatgacactcctgaaagggccagtacttttcgggtcacacggaagcaatgatcacagccagcataatgggacaagtatgcgacatacaataacaggattcatattgatcacaattggatgcttgtgttgggcttgtttcgtgatactacaagctactacccttaaaacctaccctgctgaactctctctttctgcttggatatgcttaatgggcacacttgaatgcgccgcagtggctatgattatggaaaggtgcaacccttcagtttgtctctaacattggacatgaaactgctatgtgctgt

SEQ ID NO: 219943 - DNA, 529 bp, Glycine max
gaaaagtgcagagatctttggtggagttggagaacattcataataatggccaaggagaaaatttatttttgccttctgctgatggacaaaaccatgataacaaggtgttgaagagccaactatttgcggaaaaatttactgaaagtgtccaatatactttcttggattacttggcggggggatttgaattgaatttcatggtggctgttgactttacagcttcaaatggaaatccacgccttccagattctttgcattatattgatccttcaggacgaccaaatgcataccagagggcaattgtcgaggttggggaagtgttacagttgtatgattcagacaaacgatttcctacttggggatttggagcacgaccaattgatggtcctgtttgccattgtttcaacttgaacggaagttgtcattactgtgaagtggaagggatccaaggaattctgatggcttacacaagtgccctgcttaatgtatctgttgcaggacctacactctttggaccggtcataagcac

SEQ ID NO: 219944 - DNA, 445 bp, Glycine max
cttgagaatctgtcatcacgtttcataagcttactgggacgtttttagcctataataatttgccacgcataataataccagtgttgttactgagacaaaattccagggtacaaagcgagcatcaattcgaacctatgaaatccgtgtctaatatttgaaggaaacacgcacccactctccattgacaaaaattattaagaatttggaacagaagaaaacatataatgggggaaaaaatactaacatatactctctattggtaataactagttgcctgctcatttagagtcagtgaaatctgcatcaatgacatcaccgtcgggtcccttgcctgaggattctgaggggccagagtcggcaccgggtggtggtgttggccctcctgcgcctgcagctcctggttggttgtaaagggactgaccaagctgcatgactttctgattta

SEQ ID NO: 219945 - DNA, 524 bp, Glycine max
ctatctgattgctggtagtacttcattgagagagacatggacactggactaagtactacgctgctactcatggtggcgtgctccatcgcgcatgatcttcgatcactacacgcacgaatgagaagaaaatcatactacactcttccaccaggacactgttttctcaccatcattatatactttaaacaacatctatagaaagccacagctgacaatggccatacttgccgaaacctatggccacctattgcgtttcaccataggccaagcaaccaccatagaaaggtcctcgatggaagccacacaggaggttcttcgaacccatgactcattattctcggacagaacaaagcccgacatcacaaccttgtacaaccacaaccgttacagaatggattttctccctgactcacccctgtggcaagagacatagaaaaacttgccacggaaacttagattggggatagacccttgactcatgctctgaccatagacgcatgaaaaagaaggagctcttaccgata

SEQ ID NO: 219946 - DNA, 505 bp, Glycine max
agtctgtttacaacaacagcagtgatgcagctacagatccatctgttctaagtcaattagctgaaaagttgaaattgatgggaatagctgatcttactcaagaatcacttgctttgcatgagatggtggcatcaagtggtggggatccaggggcacgcattgagaaaatgtcaatgttattgaagaagataaaggatttcgtgcaaatagaaaatctagtcaaggatgataatttaggaggaaaaggcattttctcaaaagtctatggacttgggacaaatgaaaagagtcatcaagctcctgttatccctgatgattttcgatgtccgatttccctggaattaatgaaggaccctgtcattgtttcaacgggacagacttatgagcgtacttgtattgagaagtggttgcaagcagggcatggaacctgccccaaaacacagcagactctcactagtactgttctcacgcctaactatgtattgcgaagcctcatagcacaatg

SEQ ID NO: 219947 - DNA, 628 bp, Glycine max
  unsure (1)..(628): unsure at all n locations
ctcttgtgagaaaatggttaagaaatttctagtatgaaaaagggccgggaggtgtttggtgtgatgtggatgttgtggagttctcctattatggtgcacctgcacaaactcctaaagaacaattatatacggagcttgctgatggcttaaggggaagtgattcatgtgttggctctggttctcaggttgcaagccaagagacatatggaaccttgggtgctattgtcagaagccgaacaggaaatcgagaagttggctttctaacaaatcgacatgtagctgttgatttagactatccaaaccagaagatgtttcacccattaccacccagccttggacctggtgtgtatcttggtgcagttgagagagcaacatcatttattactgatgatctttggtacggaatttttgcaggaacaaacccagaaacatttgtgcgagctgatggggcattcatcccatttgcagaagatttcaatatgaacaatgtaatcaccaactgtaaaggtgtaggggagatcagtgatgtgaacatcatagattngcagtcttcaatcaacagtctcattggaagacaagtggtcaaaagtggagaagtctnggttgactactggactatatgcatatg

SEQ ID NO: 219948 - DNA, 472 bp, Glycine max
  unsure (1)..(472): unsure at all n locations
agaaaaatgcaggagaaaatttattggaaaatcaccatggcttgctaagtttcaaagccaagtacattctgttgtaatggcaaatggaaattaaaaagacacacaagggggagctgttgtgatgtcaccagctattgaaccctaagaattgatccacaagcttagccacacagttggcaagtgtatcacctgcttcctgtgtggatgcctcagcatacacacgaacaacattttcagtgccagatgggcgcacaaagcatcgaccttgggggtccttaacaggttcttcatttatggcttcttgtagacccggagggctcacaaccacagtttctgcatttgttgtaacaacagccgttctgtcaacaactttgaccttgagctggttgctgggtaaatcatgataaagntcattccatttatttattgaccatcccatatgctggaatatgacttccaccaagagcaatcc

SEQ ID NO: 219949 - DNA, 525 bp, Glycine max
gaggaagggtaagtggattcgcgttttgcagagggctatttccaagactctgtctggggggcacaattcaattgtggctccgatcaagggcgtggtggtgaaggagccggagtggatggtggcagcggtggcggcagcggcggagaagcataacgagaatctgagcgtgaatttgagtagcgaggggagtttggaggactatgattcgatggagagtcagaatcttcaatgggcgcaggggaaagcaggggaggatcgcgttcatgttgtggtgtctgaggaacacggctgggttatcgtggggatctatgatggtttcagtggacctgatgcacctgattaccttctctccaatctctacaccgcggtgcataaggagcttaaagggttgttgtgggatgactggtctgcaccggaaaattcaacgataaaagatgacatgttgcgagatgttactgcagatgttacggctactgatgaagatgatgcttgttctcactgtgttgagcatgataatatgataat

SEQ ID NO: 219950 - DNA, 555 bp, Glycine max
atatatatgatagtaatatatatgattttcagtatacttatttatacacagaatctccatatccttccctccaaagaaataacaatgatggaaacatcatcatggtaacggcgcctatcaccctgtggaatttcgagcaactcgtgaaagtccaaaccagctttctttgcagcacgaaacaacacttcttcaaccaaatgctgagccgggtctccctcgggttgcaatgtgatgaaaagctcgacttcagccactgcctcttcgtttgacaagtactgatagagcccatcagagcatagaatcaaaaatttgtcctttgggcctaatctgtggtgttttagatatggtaggcagcttatgtaaggagagtttcctacgtagtctattctaaacatctccagaagtgcgttgttccactttggctgtttgagaaatccggcaccaaatgctcgagtaactttgagagaacccttcacacggtcatttacaacagcaaaaggatcatccgggtgctctttttaattctctggattcttcctcacactagtactatga

SEQ ID NO: 219951 - DNA, 534 bp, Glycine max
gaacaagttcgtggaattttgcacctttttaggtcataatcctttcaaaattccgtgcttcggcttgacatcgatttctctgcacttcccaaagaattggttgtgcagtccttgttttcagacaccgtctttaagttactgtcgacgtttgagttctataatgcccagtgattcttctgtaatctccaatggacacagcaatggcagtgtcaatccactacctaacctgcaaaggacttaccaagtggtagtggctgccactcaagattggggcatcggtaaggatgggaaattaccctggagattgcctactgatctcaagttttttaaggagatcactatgaaaacatctgatcctgggaagaagaatgccattgtaatgggaaggaaaacatgggagagcatccctcttgagtacaggcctctttctggtcgccttaatgttgttcttactcgctcaggaagttgtgatattgcaacagcagagaatgtcgttatatgtggaagcatgtcttctgcattggaactgttagc

SEQ ID NO: 219952 - DNA, 477 bp, Glycine max
ccacataaaaacaccggttttattttaaacatcgagtttcaaatccctcaaaagtacaatagagcgtgtcccttggaaaggaaggaaattaagttaatctaaatcaccttaaaggcataacagggggagccagagaattcccacttaagtaacagtttttatgcgatgaagtatgtgctacaatatgttctttaattgtacacagatttaacataatcttcctaagggtgggcctcatttcaaaaagcaaaaacaacctgagggagtgagaatccccagattttagacagacagcttcatatcaatcttttggtgaggatcatagcctatgagcttgaaatcagcagccacaaaagaatctatatctttcttcttgggattaatcttcaaagttggaaaaggctttggctggttatggagctgctcctgcaaaggcctcacgtgattgcggtaaatatgagcatccccaataacatg

SEQ ID NO: 219953 - DNA, 349 bp, Glycine max
acgagtaaacaacaatatcttagatcgagcttgacgttcagagagacgctgggcgcagcggtcattccgttcataggaataatcgaacctgaggttttcacattcactagttgcttagatttccaatcttccaggaataagaatagacattattctaccttcgacgacattctcaccctcgccgaggattatacatttagcattaatgaaatcctagcatttcgtgagttgtaaaacaaggtgagtaactctatcattgataatggtctgatacacacggaagaactcacattggcactgtgtgaagactaccatcggggagaatgttttacctgacagggtgtttgat

SEQ ID NO: 219954 - DNA, 514 bp, Glycine max
gtgtactctcccggatcctccgccaggaactcttgttttgctgcgctcctgcttccgcttcggatccatcccgaaaacctcacacagaattattcactttctgtgttcggttcaactcttttggattttgctagatccgaagcgccaaccatttccaagatcgttgaagaatggcatcagcggcgagtggggcaaccggatggtacaggggaagagtgaaggcggttccttccggggactgtttggtcattgtggcgatctccagcaccaaacctggtcctttgcctgagaagaccattactctatcttctttaattgcacctagactggcgcgtagaggtggtgtggacgagccgtttgcatgggaaagcagagagtttctgaggaagctctgcatagggaaggaagtgaccttcagagtggactacaacgtgccgtccataagtcgggactttggaaccgtttttctcggggacaagaatgttgccatgctggttgtttctcaaggatgggt

SEQ ID NO: 219955 - DNA, 344 bp, Glycine max
attccattctctctgtgtatttccctacctctcccttcaagatgcagatcttcggcaagaccctcaccggcaagaccatcacccttgaggtggaaagctctgacaccatcgacaacgtcaaggccaagatccaggacaaggaaggaatccccccggaccagcaacgtctcattttcgccggaaagcaacttgaggacggccgcacccttgctgactacaacattcagaaggagagtactcttcacctcgttctccgtctccgaggtggcatgcacatcttcgttaagacactcaccggcaagaccataaccctagaggttgaaagctccgacaccatcgataac

SEQ ID NO: 219956 - DNA, 495 bp, Glycine max
cgctcttcttccatcctttcctctcctctctccgcatttcccaagagcagatattagaagatggcagacgctgaggatattcaaccccttgtttgcgacaatggaacaggaatggttaaggcaggatttgcaggagatgatgccccacgtgctgtgtttcctagcattgttggtcgtcctcgtcacactggtgtgatggttggtatgggccagaaagatgcatatgttggtgatgaagcacagtctaaacgtggtattctgactctcaagtatccgattgagcatggtattgttagcaactgggatgatatggaaaagatttggcatcataccttctataatgagcttcgtgtggccccagaagaacatccagttctgttgacggaggctcctcttaaccctaaggctaaccgtgagaagatgacccaaattatgtttgagacctttaatgcccctgctatgtatgttgctattcaggctgttctttcactgtat

SEQ ID NO: 219957 - DNA, 518 bp, Glycine max
tgagaaggctgatggatttgcaggagtatttcctgaacacaaatatgaaattgttaagaggctgcaagagaggaagcatatatgtggaatgacgggagatggtgtaaacgatgcccctgcattaaagaaagcagatattggaattgctgttgccgatgctacagatgctgctagaagcgcttctgatattgtcctcactgaacctggtctgagtgtcattattagtgcagtgctcaccagcagggcaattttccagaggatgaagaactatactatctatgctgtgtcaatcaccattcgtattgtgtttggtttcttgtttattgcgttgatctggaagtttgattttgcacccttcatggttttgattattgccatactcaatgatggtaccattatgactatatccaaggatagagtgaaaccatcaccacttcctgatagctggaaactgagggagatatttgctactggcgttgtgctaggaagttacatggcactaatgacagtagtatttt

SEQ ID NO: 219958 - DNA, 541 bp, Glycine max
actattaattaataacttagatacattatttaacttaaacaaataaacccaaatacaagctaaattgggaaattctaatgtattatggccatctatatattcttaaaaatcaacttcgccacccttgaacaagtaagcttcttccttttacacattattgtgtctatatatattaaagaaaaaatagatcactaactaaagattgaattaattctttttgcgtgcagaattttcctttttcaacatttcaaacaagcttccatcataaacacttcggattgtttccttctgtagtaagccattcttgtctttggcaagtttgtaaaggactttccattcaaccaagccaccaatccttcctttgaaatctttgggctctctatttgcttttagcatctcctttagctcatcatatgttaaagcatttggatgagtatgtgaatgttttgtgaaaattccttcaaattttgaaggaacaaaccttccttcagtatcataggctccagtgtcactgccgtgtttgccgagttggatattctta

SEQ ID NO: 219959 - DNA, 574 bp, Glycine max
  unsure (1)..(574): unsure at all n locations
gtgaaagatttttatctatcttcaaatggtaatcacagtaatggctgattagcatccttggctcaacaagttaatacgttctgcaggtattcagttaaagacaagtaagaaacaagttccgggaaacaagttgtgggaaacaagtctgatatccttctaacaaattaatcaacctcctcgcatatgtgcaccaagctcgccaaactgatcatcagcctccactgtatcttcagatagcctcacagcatccagcttctgcttgagaatttctatggcatttagaaccaattgagaagctttaaccgctccagtagactccacagtgaatatgaagctatcctgcctcgcaatgatttctacaagcccaggcttgcccatagcttctgctttcttaagcacctcatcatcatatgtgtatgcctcagcatcaaccaccatcacctgtngtgtcactggatcaatttcaaagacacgggttggactactgtcaacccattctcttttctctttcagagtcaagggttccatcaaatacttatttatatgaatcttcggttcatacatgaaagtgaca

SEQ ID NO: 219960 - DNA, 487 bp, Glycine max
gaatgacaattattatttaaaaaaagaagaaaagatagaatatccttcaggtaacttcgcagccaaccaatcctccattccttttactacacttctttccttgttgtcttcccaaaaaatttcaccaaaagaatatgtaccttacgaaattaaatacctatctcaacaagatatgtaaagggtcaattttgactagactacaagctgatccagctgcatttgctcaagccaggctcctaaaacagaatggtcaatggattcaatttgggaatttgaattcggtccatcagcagatgcagtaggcataggagatgcaaacttctctttgatcatctcaggtggggactccttcaccagagattggacccaagagagatcaggctcttgcccattgttcttgcgctcaaacgaggatgatcttcgcatctgacgaccaagggagtctccatttactgaccaatcagctttcccaataggagaaccccac

SEQ ID NO: 219961 - DNA, 582 bp, Glycine max
  unsure (1)..(582): unsure at all n locations
agatcctctctcttcaattcaactttaagccaagccaagcaacatggctcaacaacaggaggacgaaatggagtatgttgctgatgataatgaaatggcggaagtagaagatgacatgtatttccgtggtagagtgtttggcgattcatagtccgaatgagatgacgaagatgaatatgactccatggaaaatcggatgacagatacctctgctgcagaagccaggaaaggaaaggatatccaaggtattccttgggatagacttagcattagtcgtgagaagtatagacaaactatactagagcagttcacgaactattaaaatataccgcaatcaggcgaacagtcagaaaaggaatgcacaccaacacatagaggaggaaagtattatgatttctggcaaaacactcgatctgtgaaatcaacaatacttcatttccaattgaggaacttggcttgggcaacatcaaagcatgatgcatatcttgtttcgagttactcaattatacactggtcgtctttaaattccaagagatcagaaattctgaatgtatcanggcatgtagcttcatgtgagaaaca

SEQ ID NO: 219962 - DNA, 512 bp, Glycine max
  unsure (1)..(512): unsure at all n locations
aacacaacgaagtttatgtaacgaccatatcatcctacattgtataatgaagcatgccaccggtcatttttcttctcagtcaggtggtgccacaattctcaaattcctagacagaagaacataaactgtaggcactttacaaacacaaggaatgcagttacaatttacatgcagtcaagatacatatagtttctccgtcgattgtactgaagaaggcttccataggtgcgatcccagacaccaacaaaaagtgattctgtgtcagggctaaaagatacaccacagatctccccaaaaaaatcgatctcctgctccttctcaaacccactctgtgcatcatatacatgcacaaagtcagctggctcggccattgccatgaaccgaccatcagatgtaaaccgtatagaacgtatagctccaaggttgcccttaagcacagtgacagactttgacaagttcctaacatcccaaacacggcatgttntgtcttggttcccagtagccaaaatgcg

SEQ ID NO: 219963 - DNA, 333 bp, Glycine max
gtcccctatggctcgtcactttttgctcttagcgctcctgcttttcgccgccgtggccaccgacgtgatggaagaagccgattgctacgcccactacatcctgataccgtcatgttggcgccatgatgttgtctatgccgaagaggatgactgctctgctgaacgccgagcaccagtttcaaagcttaaatggcaaggtggtgaagacctacactgacaaggaggagcgcgagcatatgttatgggaattcaagtccaacctgcacagaaccaggctgcacgcctagctggatccatcacccgtacactgtgtcaccaaatgctacgatctaa

SEQ ID NO: 219964 - DNA, 511 bp, Glycine max
gacagtgtcacgtatattagtttaattatgcaataactgagacgtaatcagtggcaagatttcccctgtggcaccttgaaacaaccccaccccgccaatctacatagagaggagcttatcttgcaccatttttaggaccacacattcccttggatatcccacttgtatgtgtcaagcatacatacagaaattacatactacataaacaacatggtcttagcagggtgctgatcctatacggagatgattttaccagtaccaaatgataaagctcacaacatagatatttatacaaactccccttagtgcagcatcacatcacatccacaatcaggcatatctttgtatttaacggctggatggatatatagcagctacagttgagaccatggaatctacttcacacacattaagacctttgtagatcgtggaatatccattgtctccccaggtctcgccctatgaattcttaatgatccagtaaggtttgttcttaaaacgaatgggagca

SEQ ID NO: 219965 - DNA, 513 bp, Glycine max
aatatgaactccacagaatcagattaacggggtgcctgaacatttttgtttgtaccttaatattacatccaaaagacagccactacattctgaaacatacaggaccacatagacaaatatcatctttgtaacacatacatggcagttgagaaagcttgttacaccttgaaagctaatatcacacatacagtacaaggaagaaagaataagaatggtaagtaattaatgaaaaatcataggaggtcccgtgctagagtcattggtttttcttttataatggtgagttcaccaccatttgatgtagttagcagatggtgattggaatcctcgtcttcactctcctctgaatctgagaggccatcagattccagttcttcgtcgtcagaaagtgcaagatgttcaggcagatgtctaacagcagcaacctgaaggctttctggcagaagacaattgcaaaaagaaccaacacgagccagccgatttatccatgcaggaataggctttccagttagc

SEQ ID NO: 219966 - DNA, 469 bp, Glycine max
  unsure (1)..(469): unsure at all n locations
agtttgtggccacttttctgtttctatacatcactgtcttaaccgtcatgggagtcgccggggctaagtctaagtgcagtaccgttgggattcaaggaatcgcttgggccttcggtggcatgatcttcgccctcgtttactgcaccgctggcatctcagggggacacataaacccggcggtgacatttgggctgtttttggcgaggaagttgtcgttgcccagggcgattttctacattgtaatgcaatgcttgggtgctatttgtggcgctggcgtggtgaagggtttcgaggggaaaacaaaatacggtacgttgaatggtggtgccaactttgttgcccctggttacaccaagggtgatggtcttggtgctgagattgttggcactttcgtccttgtttacaccgttttctccgccaccgatgccaaacgtaacgccagagactctcacgtncccattttgcacct

SEQ ID NO: 219967 - DNA, 413 bp, Glycine max
ccgatattttcaccaaacccgtttgcgctgttgtttgccaataaatggcgactaagaggagcgccgtaacgttgaaggagggtgacttgatagcgaagaggggattagcgaggttcgatctgaacgttcctctggatgacaaccttatcatcaccggggacactagagtgcgggctgctgttcccaccataaagtacttgactgcttttcaggctaaaatgatccttcctagccatttgagactttcaatattgttgacacctaaatacaatctaaagcctcttgagccaaggctgtcttaacttgtgaaaatttacgttacaatgaccaataactctattggggacgtagttataaagttcgctacacatctttcagaatgttgggcattgcttctacatgatgtgaagttc

SEQ ID NO: 219968 - DNA, 532 bp, Glycine max
  unsure (1)..(532): unsure at all n locations
agatcgcgagcggcgccctttttttttttttttcttccaaccactgtactatgtgtatgctttctacttaaaatatacatcaacaaatacatttaacagacgaggtgaacaggtagcatgttttagacaatagagaaacaactaagaacaaaaagacctcagtaaaataactttatccgcaatacatgtgtctagtaatttacaacagcaattcagacacagggattcacaaagtaatttatcatattgcatccctcattgctcctcttgcagactcctgcttcatctcagcagccttaccactgccacggaagtacatatatacttgctgaataacccagatactgatcaatgtttcaatgcagaacaatccaaatccaacaaagtagaaaattccaatcactgcatggtcacccaccacatctatggctgacagaatgcctgtcaaggattttcctttgaaaactatgggaggagcaactgcagctaagatacagaatnctaggtgaagcaggtaaaacaagaaaaacca

SEQ ID NO: 219969 - DNA, 394 bp, Glycine max
cacctttgttcactcttcttcttttgttgctagggttttagcgcagcttcttctagatggaaggaagatgggtaaggaaaaggttcacatcagtattgtggtcattggccatgtctactctgggaaatccactaccactggtcacctgatttacaagcttggaggcattgacaagcgtgttattgagaggtttgagaaggaagctgctgatatgaacaagaggtcttttaagtatgcctgggtgctggacaaacttaacgctgatcgtgaaagaggaatcaccattgatattgctttgtggaagtttgacacaacaaagtattattgtacagtcattgatccgcctggacatactggttccattaacaatctgattactgggacatcccaagct

SEQ ID NO: 219970 - DNA, 485 bp, Glycine max
gctgtcaacaaagcaaagacctttgatgagaagcaccagttatcgtcgacagcctcagcaaaagttgcatctttcgatcagaaaattgggcttatcgagaaaataagtgctggtccacttctcgaactctatcactcactactgtagcaccagcacttgctgctgcagaacagacagtgagtaatgctggctctgccctaatgaagaatcgctatgtgcttactggggcatcctgggtaactggcgcttttagtaaggattctaaggcggctggggaagtaggacagaagacaaaagagaaagttgagggtgcagaagaacatcagaaacgaaaagtggaagatcaatatgcacaagttctttctgagtccccaaaagcagcataagcaagtgagcagaaatcttccaagcctgctcctgctcaaggtttgatccttagataaagctcttgtatagatatatatatacttcctcttaaactccca

SEQ ID NO: 219971 - DNA, 478 bp, Glycine max
actaaccacaaaaatgtagaggacttgaggataaaaacaaaggtgggcacagtaatcatcttgaaaaactttgggagtttaagaggaagtatatatctatcaatacaacaagccaaccaaaggatcaaaccctgagcaggagcaggcttggaagattactgctcacttgcttctgctgctttcggggactcataaaggacttgtgcatattgatcttccacttttcgtttctgatgttcttctgcaccctctactttctcttttgtcttctgtcctacttccccagccgccttagaaaccttactaaaagcgccagttacccaggatgccccagtaagcacatagcgattcttcattagggcagagccagcattactcactgtctgttctgcagcagcaagtgctggtgctacagtagtgagtgatagagttcgagaagtggaccagcacttattttctcgctaagcccaattttctg

SEQ ID NO: 219972 - DNA, 504 bp, Glycine max
ctcgagccgcgaaaatgtggaagagaacgggttttgaagaagaagcagttcaattgatcaactcagatttcagggacctaagtctagctgctaatagactcgcccatcatgccatcaaacttggtggcattggctttggagcctcttttttcggattgtttgctgccattgctgctatttatctgttgattttggatcgtacaaactggaaaacaaatattctcacagcactactcattccatacattttcttcagcttgccttcattaattttcgacgtcttcaggggagagcttggaaaatggattgctgcagttgctgttgtattacgccttttccttccaagacacttccctgattggctggaattgcctggtgctctgattcttcttatcgttgtagctccttctctaattgcaagcacctttagagacaacattgttggggtggtagtgtgcctcatcattgcatgttatttgctgcaagaacacattcgggcttctg

SEQ ID NO: 219973 - DNA, 547 bp, Glycine max
  unsure (1)..(547): unsure at all n locations
gagcagcaacaaatgtaaatttatattatatcccacaggtaaaaatacaacgatttcccaaatcatacatgatttatgaatacacgacagctagaaagacaccacatcaatcctcttcatcttttgttttctacattctatgaaaccagaggacttaaactgagattttattccactttttaacacatgctaactttaggtcttaggacaaacatgaatcacaaaacaatggccgggtgtttatagatatcaagttgcaacaaatgaatgatacagaagacacttggtttaattctcacatatcaaccaagtccaaatggtggtgcctaaaaaagtatgaccaccagcgcccagatgggataaaccaacagaagtattatgccaatggaatttgatatgccgtgagctttagtgaaggagtttctgaaaccaccagaagcccgaatgtgttcttgcagcanataacatgcaatgatgaggcacactaccaccccaacaatgttgtctctaaagtgcttgcattagagaagagctacacgatagaaga

SEQ ID NO: 219974 - DNA, 525 bp, Glycine max
  unsure (1)..(525): unsure at all n locations
gtcttccgaagcaggaactaaatatggctgacttgttggaatggtcaaagcaagataagaaacgaatgcttcatgtcgtctaccgtgttggtgaccttgatcgcaccatcaaattttacacagaatgtttaggaatgaagcttttgaggcaaagagatatcccagaggagaaatatgctaatgcttttcttggatttggccctgaagaatcccattttgttgttgaattaacatataattatggggttacctcgtatgacattggcgatggctttggacattttgcaattgcaactcaggacatttataaattggttgagcacatcagggccaagggtggaaacatcacaagggaacctggtccagttcaaggtggaactactgttatcgcctttgttaaggatcctgatggttatacttttggacttatccaaagacctacagtccatgacccattttgtcaagtaatgcttcgtgttggtgaattagagcgctcaattaagtttatgaanaggctttgggcat

SEQ ID NO: 219975 - DNA, 571 bp, Glycine max
gataaactagtagattaatcataggtagcatgcagaatgaggtttcaattgcggttttaagtcaacaaaagaacccataaaagcaagaaaacaagttgatgactggtactgatacaaaacgcacaatgataaaatgcgagacaacttattcatacaaaagcagcaggactacttatttcatataaagcttgctcttcacttcagttcttccaagaaatcaacgttgtcaaccaagacagttttccatccatctggatctaaaaacgaagtggtttttgtattaaggccaggaattggccctggttgccgagtaatcttccctccaacctcttttatgacttggttaactacctcagcactcttatatacatcatcagtaccaatggcaatctgtgcataagcatttcccttagagtattcagtcacaccatagttatatgtcaactccaacacagttgtctcgtgctcctctccatacccgagcatagctatagtgtacttgtactcaggcttatcaaccttccttaacaccttcatgcccaaagccttttcataaaacttaattgagcgc

SEQ ID NO: 219976 - DNA, 475 bp, Glycine max
  unsure (1)..(475): unsure at all n locations
ctacctctcccttcaaggttagtcgatttcttctgtttttcttcttcgttctttccatgaattgtgtatgttctttgatcaatacgatgttgatttgattgtgttttgtttggtttcatcgatcttcaattttcataatcagattcagcttttattatctttacaacaacgtccttaatttgatgattctttaatcgtagatttgctctaattagagctttttcatgtcagatccctttacaacaagccttaattgttgattcattaatcgtagattagggcttttttcattgattacttcagatcccgtaaacgtaaccatagatcagggctttttcatgaattacttcagatccgttaaacaacagccttatttttatacttctgtggntnttcaagaaattgtcagatccgtggacaaaagcctattcgttgatctatatcgtttttcagagatattgtagatctgtagcaa

SEQ ID NO: 219977 - DNA, 401 bp, Glycine max
gacaattaatcatttcatatttcacacattcataacaaacgtaggtgggatattagagtactattattaatgggacacaattgagttcaacacaaaccgaacttattttcaagggacattattacagaacccattaaacatcaaagttcttcaaatgttttgggaacacatccaacattacacaacgagcttaaaaccccccacggagacggaggacaaggtgaagggttgattccttctggatgttgtagtcagcgagggtccttccatcctcgagctgcttgccagcaaaaatcagcctctgctggtccggtgggatgccttccttgtcctgaatcttggccttcacattgtcaatggtgtcagagctctccacctcgagggtaatagtcttacccgta

SEQ ID NO: 219978 - DNA, 484 bp, Glycine max
aagcaagtgcttctaaaggactatgttaccggttttcccaaagaatccgacatgaatattgtcgaaagtaccataacattgaagcttccacaaggttccaatgatgtcttgctcaaaaatttgtacttgtcttgtgatccgtatatgaggaatctcatgaacaagcccgaaggccctcccaatagtcgtgcttacactcctggctctccattaataggatatggtgtgtctaaagtcctggaatctgggcacccagattataaggaaggtgatttagtgtggggctttaccaaatgggaagagtatagcttgttaccctcagctcaaatactcttcaaaattgagcacactgatgttccacttacctactacactggaattcttggtatgccaggagtgactgcatatgcaggtctatttgaagtaggatctcttcagaaaggagaaaatgtttttgtttcggctgcctctggcgcagttggtc

SEQ ID NO: 219979 - DNA, 569 bp, Glycine max
  unsure (1)..(569): unsure at all n locations
aactacatatagaaaaagcaaatgcttttattcaagagaaacaactgtgcattacatttgatactgctctcaggactatcaagaacaaagagcatcatcatacagttgacgaaggtgactgcaaagggtgatgtcaagacagccaatttttcagcanaaaaaccagaaataaaactgataacttcccattgaacacaagaaacaaatgctttttactcatgagaaacaacgagcacttgttttccaacattgcgaccgctaaaaaggccaaccaatgctgaaggtccattctcaagcccctcagctatgtcttccacatacacaaccttcccctctctgatatttggcaggagaaactccaagaacttgggatataggtgaacgaaatccatgaagttaaagccttgcaaacgaatccgcttatatatgatctgtgccaaatttgttacaccttcatgttgagtaagattatactgtgagatcattccacagacgggtatgcgaccacggactctcatgttcaggagtacggcgtaagtgtcttgcccccacattctcaaagtaacatc

SEQ ID NO: 219980 - DNA, 491 bp, Glycine max
  unsure (1)..(491): unsure at all n locations
attttctgaatccctacatttcctcctccagccacgggcgcgtatcgacgacgatgctctcatccaaacctccgcgccggaaagttgttccggcgaacggcgatgactccgccgacaaactcgaccagctcctcctctcctctgccatctccaacaacgaggacctaggcccgttcatccgcaaggccttcacctccggcaagccggaaacgctccaccaccacctccgccacttcgcgcggtcgaaggagtcagagatcgaagaggtgtgcaaggctcactaccaggacttcatcctcgccgtcgacgacctccgatccctcctctccgacgtcgattcactcaagtcctccctctncgactccaactcgcgcctcagcacgtcgcgcgccctctcctctcctcgctcgatgccttcgtcgagacgcgcaacgtctncaagaacgtcaacctcgccatcgactccgtccgcacgtgcgtcaagctcatgg

SEQ ID NO: 219981 - DNA, 530 bp, Glycine max
ccaaaaaacaagagcataagaattatacatttcaaacaaatatcttggaaaatcttaaaatgcatttggaacacagtgacagcctggcctaaagcaaataattttatcgacaactcactattaaataattcatcatcaaaatggaactagagacaaaacaagaaaataaaacaagagaaaataccttacatacagctataagcttaatcagctaacatccctaagtctttttatcaatgtatccaatgatttccttttgggattctgcctcgccccacgactaccaaaggttccaaagagccgatcggaaggatccctcaacttttctgaaacaatcaccactttcttgtggtccaaagtattgtaactcctctccctgatcactggattcaagaagttctctggatgattgcttaacagcaaattaatcagttgctttgagccggcaagtgatgctctcagaacatcaacatccgcatcagagaaaagggaggcctgattatcagcaaatgattctaagagccggatgt

SEQ ID NO: 219982 - DNA, 443 bp, Glycine max
ttggttttttttttattttttgtttttgtttttttttttttttgctgcttttcaagctgctgtcttgtgtgttgatggttatgataaggttcttgatctttttcttcttgatggcacccctctctctcttgggtcggaaactgccggtggggtgatgacagactagaaccccagaacactactatcccaacaaagaaagaacaggatgtctcaacctattctgacaaccagcctggtgtgttgatccaggcctatgaaggtgagagaacaaggactagagataacaactcgtagggcaaatgcgaactttctggcattccaccagctcccaggggtgctcctcaaatcacagagtgctatgacattgatgccaaaggtatcccgaatggctctgccgaagacaaaactacccgccaaaagaacacgatccccattaccaatga

SEQ ID NO: 219983 - DNA, 287 bp, Glycine max
gattagcttctttttattatggactataagcataattttccgtgttgtgaccgccaaagaacaagaagaacactgttaatcatccctcaaagaatctcccgcggttgaaaaaaaaaacaccgctccttacgaaaacggtgacgcccgaaagactgatacccgcgcacaaaaagctgaacgtggaaggagggggaacactacaggtatctttcttctacgaagaaaaaacagatgaatttttttttagatcccccggagaccgcaaagggaatgagccccttttcaaa

SEQ ID NO: 219984 - DNA, 486 bp, Glycine max
  unsure (1)..(486): unsure at all n locations
gtctgagagtgtgtgtgtgacttatggagtccaattcagagttcgacgtgattatcatcggagctggcgtcatgggcagctccaccgcctaccacgccaccaaacgcggccttaaaacccttctcctggaacagttcgacttcctccaccactgtggctcctcccacggcgaatcccgcaccatccgcctcacctatccccaccactactactaccctttagtcatggactcttaccgcctctggcaagaggcgcaggcccaagtcggctaccagatctacttcaaggcccatcacatggacatggcccatcacaacgagcccgccatgcgcgccctcatcgactactgccgcaacctccaaatccccttcaaactcctcggccgccaagagctcgccgacaaattctccggccgcatcgacatcccggagggttgggtgggcctctccaacgagcacggaggcgtcatcaagcccacanaagcag

SEQ ID NO: 219985 - DNA, 566 bp, Glycine max
  unsure (1)..(566): unsure at all n locations
cgtgacaacagttgttttattcttacattaataataataagcaaagcaaaagctggtggctggtaaacaagaattagaaaaggaaagggtggaaggagatgcatttatttaaatagaagaaaagaaggctaaatcatagaggttatacggaaccttgcaatcctaaagtaactgatatcatgggatttagtttctccatggacagcaaggtccgtcaatatcctgccaataaccggagccatcttgaagccgtgaccagaaaagccggctccaagaaccacatccttcccaaagtccccacccaagaaatcaatgaggaaatcctcatctggcgtcatggagtagatgcaagactgtttgatgacgggctcagtggattcaaccatccccttgaacgtaaactccacccattctttgagtttttccatcatcaccgctgctccccacggcctcttatccgggtcgcacggctccnccccgtgcacaccaaccttaatcagccccggaaactccaacgttggcgtgccgtagacgtaaatatctttctggaagctcgcgaatgtcgg

SEQ ID NO: 219986 - DNA, 498 bp, Glycine max
aatcacacaatgaaatacgtggtcatcagcggcggagtggtcagtggcctcggcaaaggcgtcaccgccagcagcataggcgtcgtgctcaaagcctgtggccttcgcgtcacttccatcaaaatcgatccgtacttgaacatcgacgctggcaccatgtctcccttcgagcacggtgaggtttttgttctcgacgacggcggagaggttgatttggatttgggaaattacgagcgcttcctcgatgtcacgcttaccaaagataacaacatcactactggaaaaatttaccagtctgttcttgagaaggaacgtaaaggcgattatctcgggaaaactgttcaggtggttccgcacatcactgatgctattaaagattggattgaaacggttgctgtgattcccgtggacgggaaggagggtcctgctgatgtttgtgtgattgagctgggaggcactgtgggtgatattgaatctatgccatttattgaggctcta

SEQ ID NO: 219987 - DNA, 483 bp, Glycine max
ctaactgctactcgctcatcccgtggaggtttcgctctctcagtttcttttccccaaattggtttttcatctaacaatttactttgcagaaccgtaaccctaaccccttcccctaccttgtaaccttcctttcgatccttcacctcgcagataatgggagaaacaaaggacgaagcatacgaggaagagcttctcgattacgaggaggaagacgaaaaggcccccgactccgccggagctaaagtcaacggcgaagctaccaagaagggctatgttggaattcacagttcgggattcagggacttccttctgaagccagagcttcttcgggctattgtggactcgggatttgagcatccatctgaagtgcaacatgagtgcataccacaagcaattctcgggatggatgtaatttgtcaagcaaaatctggaatgggaaagactgctgtctttgttctctctactctgcagcagattgatcct

SEQ ID NO: 219988 - DNA, 416 bp, Glycine max
aaagcatcaaatatcaaggtcgcagtaagaccaactcaaaacatgaccgttcatgaaaacagcgtaggtgccacacaaaatacagtaagtgaaaacccataaatacataagccattacactgctgctacatctaataccgataaatatccaatggtaaaatggcctagtctgtaaacagactctggtatctatcagcacggttaatcatcagctgcaccgttctgcgtcacgattactcatgccaccaagcacttaacattgttcccaaaaaattctacgatggcatataggtagaggtatcgatctgctcaggaagttgctttatatccaccttaaaccttgactgaacattgttgagaacatcaacatcagtagaacaggaaacaaatgtgattgcaaggcctttggtgccaaa

SEQ ID NO: 219989 - DNA, 516 bp, Glycine max
  unsure (1)..(516): unsure at all n locations
agaaacccaagttaaggttttttgcaatcttcccttctaaaaagaaatggccggaaaaggagagggactcgccatcggaatcgacctgggcaccacctactcctgcgtcggagtctggcagcacgaccgcgtcgaaatcatcgccaacgatcagggcaaccgtaccacaccctcttatgtcgccttcaccgataccgaaagactcatcggagatgccgctaagaaccaggtcgccatgaaccccatcaacaccgtcttcgatgcgaagaggttgattggtaggagagttagcgacccttctgttcagagtgatatgaagttgtggccattcaaggttactgctggtgctggtgaaaaacccatgattggtgtcaattacaagggtgaggaaaagcaattcgctgctgaggaaatctcctctatggtcctaacaaagatgcgggagattgcagaggcttaccttgggtcgactgtgaagaatgccgnntgtactgtgcctgctnacttcaatgattc

SEQ ID NO: 219990 - DNA, 347 bp, Glycine max
gcaaaattggaccctaaaattattttatccagagtaacaatttgcaaaggggggctagttttcaattttcaaaccaatggccaatttgaaaacaggcgtgcaattcatgaaagccaaaatttatttagcctaaacccaaaaaccttaacaaacattattttcctaattccttccaaattctaactaggccacttaattaacctcctaaattttggggccagcaccattaccaccagcagggggagcattattatcgacgttaccaccagtaccaggttcgccttgggacattttcgctataatgggattgcctttgccctcaagcttcttcattttggcttcaaatt

SEQ ID NO: 219991 - DNA, 462 bp, Glycine max
ggccgcccttttttttttttttttttttttttttttttacactttacaacatcatcttttattcagatagtaacactaacacagcttttctacatacaaagaacctttataaaaaatactagaaaaagaaaagtataatagaaatctatttaattggttttctttttaattttaaccgacatcagattacggggttggtctaccacggtaggcttgcttgcaaacagagctaggtttctgcgcgggggagcacagctgcgacgaccctgggcacgcctgcaggcaattgtcccccaggctgccggaaaccgctgttccggccgccaccagccccgccggcgggtttccgacgaaaaagttcccgtcgaggaacagcctcttcatggacttgatctgcccgtactccagcgggatcgcgccacgcagcgcgttgtaccgaatcgacaggaaagacagcgcggg

SEQ ID NO: 219992 - DNA, 597 bp, Glycine max
  unsure (1)..(597): unsure at all n locations
tcgcgatctagaacacccaacaaattaacaacaaaacaacccatctttagtcagaaaccacaccaagaagtttccaacatgcaaaatctcaatttcctctacctaaccatcatttccctcactctcatccacttccactgcatcctagtccaagcacaaacctcaccctcagacattgcagcactcaaagccttcaaggcctcaatcaaaccctcctccatcactccctggtcatgcctcgcctcatggaacttcacaaccgacccatgctcactccctcgccgaacctccttcatctgcggcctcacctgcacccaagactccacaagaatcaaccaaatcactctcgacccagcagggtactcaggcacactcaccccactaatctctcaactcacacaactcaccacacttgacctcgctgataacaacttctttggcccaatcccctcttcaatctctntactctcaaacctccaaaccttaacccttcgatccaattccttctcgggcacaatccctccctccataaccaccctcaaatcactcctatctctcgacctcgcacacaattccctctctggtatctccaaactc

SEQ ID NO: 219993 - DNA, 454 bp, Glycine max
  unsure (1)..(454): unsure at all n locations
gcggctagggttttagcgcagcttcttctagatttaaggaagatgggtaaggaaaaggttcacatcagtattgtggttattggccatgttgactctgggaagtccactaccactggccacctgatctacaagcttggaggcattgacaagcgtgttattgagagatttgagaaggaagctgctgagatgaacaagaggtctttcaagtatgcctgggtgcttgataagcttaaggctgagcgtgaaagaggaatcacaattgatattgccttgtggaagtttgaaaccaccaagtactattgcacagtcattgatgcccctggacacagggatttcatcaagaacatgatcactgggacatcccaagctgactgtgctgttcttatcattgattccactactggtggttntgaagctggaatttaaaggatggacagactcgtgaacatgctct

SEQ ID NO: 219994 - DNA, 463 bp, Glycine max
gacacataaatttgattttttaaaagcaaaccaagcaaaaattgaacacaaatataaagttgacatttaaaaagcaaaccaacaacgcaacggcaaagccctaaaactcgctgcgcttaacaaaaatggtaatcaggggttctcacaaacacaacacattaaaacagaatgataaaaggagtcttgccaccgtcgatcaagaacccaattctgggaacaaaagttgcgagatgatggtggagacttcaaactatgtccgaaaaacaagctacctagaaacgaagacacaagggcaagaaaccaacatttattgtaaccataagaaacgacatcccctgatgaaccaaaccgcacgattcacttcttcttctgggcagccttggtgaccttggctccagtaggatccttcttctccacgttcttgatgactcccacagcaaccagttgacgcatatccctgaca

SEQ ID NO: 219995 - DNA, 406 bp, Glycine max
gtgatttagcatttaccacaccaaaatcaatctgcggagtcagaaagccatggatccctacaagaatcggccatcaagcgccttcaattctcccttctggactacaaattccggtgctcccatctggaacaataactcatcgctgactgttggatctagaggtccaattctgctggaggattaccatctggtggagaagcttgcaaactttgacagggaacggatccccgaacgtgttgtccacgctcgtggagctagcgcaaagggtttctttgaagtcacgcatgacatttctcacctcacatgtgccgatttccttcgagcccctggagttcagacccccctcatcgtccgtttctccactgttatccacgagcgtggcagccccgaaaccctcagggatccc

SEQ ID NO: 219996 - DNA, 463 bp, Glycine max
ctaaccactgggccaaaattctccttcagtcagcgatgactatcataactgacattataaaatttatttgaaatataaatgaagagtaagcccaagtaaacagagaatcatggaactgtccagatcctcatccttatcacaatggacatatagtattaagtggacaagtcaagaagttgagttcatgaaataagcaatatacaatatagcaatactgtaataaaaggaccagtcctttcaaattaatactgtgccacaaacttctcacttgttcctacatctgcatctcttagaagctagggtttccaccaccaatcttagatacttggcttcaagttcaggtgagatgctatcttttgtccaagagaacgatcagcctgagaccagtatgatatccagatgctacggatttcatgggtgacacgtgggtcagacaaagcatcaacccatcggcggacaaacc

SEQ ID NO: 219997 - DNA, 447 bp, Glycine max
cagccggatcgacccgacgaattactccgagtccaatccaagggagggcgcgtgatttactgggacggtccgagagtgcttggtgtgttagcaatgtctcgagccataggtgacaattatctgaagccgtacgtgatttcagaaccggaggtgatggtgacggagaggacggaggaggacgagtgtttgatactggcgagtgatgggttgtgggatgtggtgtcgaatgagaccgcatgtggggtggtgaggatgtgcctcaaggcgcagaagccgccggggtctccggggagtgacgtggcggctgacggttccgaccgtgcttgctccgatgcgtcgattcttgttgaccaagttggcgctggcaaggcatagttcggataatgtgagcgtggtggtggttgatttgggagggatcaacgacaatcatcaactacaacgacgtta

SEQ ID NO: 219998 - DNA, 433 bp, Glycine max
gagagaacatttttttttgtttcatcatataaaatatatatgttctgaaagaacacatacaagtacacaaaaaaaagggggaaattcataaaaaaatacagaaaaaaaaaaaacagaattgagtaagagggaaggaaacatagagaaaattttagcaatcagataataagaagccagtagtagtgcaaaagtcccttgccaagagtgttggaaccccttttagttaagcaggtaccttctcccccttgagtggcttcaccacttcccatgtgaagtcagggtcatttttgccaaagtgtccatatgcagcagtcttcaagaacctgccatttccacccctcttgagatcaaggttgatggagatcatgccaggcctgaagtcaaaactctccttcacaatgctgaggatttccttgtcagggatcttcccagt

SEQ ID NO: 219999 - DNA, 430 bp, Glycine max
aggtgggatattagagtactattattaatgggacacaattgagttcaacacaaaccgaacttattttcaagggacattattacagacccattaaacatcaaagttcttcaaatgttttgggaacacatccaacattacacaacgagcttaaaaccccccacggagacggaggacaaggggaagggttgattccttctggatgttgtagtcagcgagggtccttccatcctcgagctgcttgccagcaaaaatcagcctctgctggtccggtgggatgccttccttgtcctgaatcttggccttcacattgtcaatggtgtcagagctctccacctcgagggtaatagtcttacccgtaagagtcttcacgaaaatctgcataccaccacgaagacgcaacaccaagtggagagttgactccttctggatg

SEQ ID NO: 220000 - DNA, 530 bp, Glycine max
gagagaaagaaaatgccaaagtctcaatttcgaaccccatttcttgtttctttttctcttttgttattcatcttcaacctcaccccttcatacgcactctatggagcatccacacccgtgcttcaactcactccctctaacttcaagtccaaggttctgaattcaaatagagttgttcttgttgaattctttgctccatggtgtggacactgtcaggctctgactcctatatgggagaaggcagctactgtgttgaagggtgttgttactgtggcagcaattgatgctgatgctcacccgtctttggctcaggaatatggaattagaggatttccaactataaaagtgtttgcacctggaaagccacctgttgattaccaaggagcaagagatgtcaaaccaattgctgaatttgcacttcaacaggtaaaggctcttttgaaggatcggttaagtggaaaaagcacaggaggatctagtgaaaagacagaaccacgtctcagtagaataaactctggcactttgatgat

SEQ ID NO: 220001 - DNA, 504 bp, Glycine max
agataaaaaataattcctttgttaagaaggttgaacctgttggctgaatgctcattgatagggaaaagaaaataccaaaacatgctaacattttcctgagatatatcagtaccactaaatgacattattaaaatcctcataagatcactcatcactagactggtctttaaattggaacatggaaaaacagaacagtgatcacaatcatcatgagaaacaagttgccaataacgtaaaaatcggtggttgaaactttaatttggtataaatttcttctaaattgatcatagctcatccttgcttgaagcatcttcccccattagttcttcaagagaaaactcatcctcctcaattatttctccatcttttccatcccatggttctgtctttacaattgttggagttccttcaatgggcaaattccctttgcctccacgtccagcttctttcacaaattctataatttggtcaagttcaaaagcactcttgagaggagcataaaca

SEQ ID NO: 220002 - DNA, 518 bp, Glycine max
  unsure (1)..(518): unsure at all n locations
atcgattaaagacttgcttccaagatggttctgctagagaagctctgggatgacgttgttgctggccctcaacctgagcgtggccttggcaagctcagaaaactcaccaccctcaaaactattgatgaaggagacagtagcaagctgcagaagacgttgtcgatgccgtcgacaccgacaaccccgatgactcccacgactccaacgacaccgggatccgcgcgtaaagctgacaacgtttggaggagcgtcttccatcctgggagcaactccgccacaaagaccatcggtgctcagatgtttgacaaaccacttcccaacactcccactgtctacgactggctgtacagtggggagaccagaagcaggcaccgctgaaaggataagctaagaaaaccgtgggttgcatgtaaatattgtcgtttttcgttaagcacctgccacgtttgaatctactactaccattatgcgtcggaaattaattgctctgttgctgactcanatatatattaactagc

SEQ ID NO: 220003 - DNA, 456 bp, Glycine max
aaccaattgccaaagttgaaggcagatctggcttaacaaaacatagcatactgatgctaattacgggaattatttagcattttacattcacttgctcaaaaataaaacacgctagtaatatatatttgagtcagcaacagagcaattaatttccgacgcataatggtagtagtagattcaaacgtggcaggtgcttaacgaaaaacgacaatatttacatgcaacccacggttttcttagcttatcctttcagcggtgcctgcttctggtctccccactgtacagccagtcgtagacagtgggagtgttgggaagtggtttgtcaaacatttgagcaccgatggtctttgtggcggagttgctcccaggatggaagacgctcctccaaacgttgtcagctttacgcgcggatcccggtgtcgttggagtcgtgggagtcatcggggttgtcggtgt

SEQ ID NO: 220004 - DNA, 469 bp, Glycine max
  unsure (1)..(469): unsure at all n locations
attttgcctacgatgagtgtgcaagagcacgctgggaacgagaaatcctgcgtttggcatgctagggattttgctgatggtgaactcaaggacgagctcttctgcatccgttttccttctattgaaaattgcaaaagcttcatggaaacattccaagaagttgctgaaacacaaaaggcagaggatgagaaggaatcatctgatgcagctggtcttattgagaaattaagtgttgaagagaaggctgatgcagagaagaaagatgaagagaagtctgaggacaaaactgtggagaaagaatctgcatcaggaaaggaaagcaaggcagttgaagagcctgcgtcctcagcttgagtatttcttattcatattctatacttggctatctgacaagggtaggtggttgatgtttttgccgcccatatcttgngatattctcatacttgatggttgcccgattgtgtcactg

SEQ ID NO: 220005 - DNA, 487 bp, Glycine max
taattgtttaaacctaattctcatttcttcatcgttcgattcttctcctcctaaagatgcagatcttcgtgaaaactttgaccggtaagaccatcacccttgaggtggagtcctccgacaccatcgataacgtgaaagctaagattcaagacaaggaagggatcccacctgaccagcagagacttatctttgcgggtaaacagcttgaggatggtcgaacccttgccgactacaacatccaaaaggaatccactctccacctcgtgcttcgcctcaggggtggcatgcaaatctttgtcaagactttgactggcaagaccatcaccctcgaggtcgaatcctcggacaccattgataatgtcaaggccaagatccaggacaaggagggtatccctccagatcagcagaggttgatatttgctggtaaacaacttgaggatggaagaacccttgctgattacaatattcagaaggagtctaccttaca

SEQ ID NO: 220006 - DNA, 443 bp, Glycine max
aactgggaaacgagattgatatttaaaataaaaacataaacaacatactttcgctgaaacgagttcaatacatcattttaaaacataataaacagcagcacttaaaccagagctgcaaagcacaagttcaagggagacactgaacaaaccgataagacatatgagaacacttcataaaagggattccccttagcaaccaccacgaaggcgaaggacaagatgcaaaggggattccttctgaatattggaatctgccaaggtacgaccatcttccaattgcttcccagcaaaaatgagcctctgctgatctggagggataccttccttgtcctgaatcttagctttcacattggcaatagtatcagagctttccacctccaaggtaatggtcttccctggcagagtcttcacaaatatctgcatacctccacgaagccttaaca

SEQ ID NO: 220007 - DNA, 490 bp, Glycine max
caattctggaaaaagtcaaatcattctggaattttcattcatttgagagaaaagagaaaaacaagtgttctttgaatctgttgaaggtggtgatttgatttgatttgaataattcacataaccaattcatctattcattatctctccgatctttcaatggattctgacttctggacctcgcgtcttgccgccgctaaacgccaatacacgcttcagcatcaccatccaaactctcacttagatcggttgggaatcgatgattttgatatggaagaagaggtgagacccgatttcccttgcccctattgttatgaagactttgacatcgcgtctttgtgttctcatcttgaagatgaacattcttgtgaatcaagagtcacgatttgtcctatatgctccgataaagttgcacggaacatgttaagtcacataacgctgcaacatgggcatttattaaagatatcctttgtactggtattttttattgaat

SEQ ID NO: 220008 - DNA, 542 bp, Glycine max
  unsure (1)..(542): unsure at all n locations
gttgtaactcgttcttcttcttttgttgttctgtgtttgtgtttgttttttctctcacctgaaaatgtcttgctgcggtggtaactgtggttgcggaagctcctgcaagtgcggcaacggctgcggaggctgcaagatgtacccagacttgagctacactgagtcaaccaccaccgagaccttggtcatgggagtggcacctgttaaggctcaatttgagggtgctgaaatgggtgtgcccgctgagaacgatggctgcaaatgtggaccaaactgctcctgcaacccctgcacttgcaagtgagggtgttgggagagcaagcttcaagcagagatagcccttaattaggaataatgataaactattaatgtgtagctaaaaacttatgtattatgtctgtgatggttttcgtgcactctggtgttttgtgttaaacaaacatccttagataaagtggtcatgtcttgcctttcagcaagttcaagtgttttggacttgtgatgggtgtgtaagcctcatggtgcttctttntttttttttt

SEQ ID NO: 220009 - DNA, 447 bp, Glycine max
ccagtaatagggtttaatattataagcagagattcataattcaaattagccgaactttatacagaagcgaccaattaccaaacattaaaaaaaaaaaaaaggaagcaaccatgagcttaacacacccatcacaagtccaaaacacttgaacttgctgaaaggcaagacatgaccactttattctaaggatgtttgtttaacacaaaacaccagagggcacgaaaaccatcacagacttaatacataagtttttagctccacattaataggtaatcattattcctaattaagggctatctttgcttgaagcttgctttcccaacacctaacttgcaagtgcaggggttgcaggagcagtttggtccacatttgcagccatcgttctaagggggcacacccatttcagcaccctcaaatggagccttaacaggtgccactcccatgacc

SEQ ID NO: 220010 - DNA, 375 bp, Glycine max
gttgttcccaacttgattaagcatgaacggtttgattgaatcacttggacttgaagggaatggccctgattacgacctggtggtagagtgctgcaagtgcagcaccaatgaaaggtcccacccagaagatccagtgatcatcccaaccaaggtccttgttgaagatgatagcagcaccaagactacgagcagggttgataccagtgccggttatagggatggttgccaagtgaaccaagaacaccgcgaacccaataggcaaaggtgccaaaatggggacgtgagagtctctggcgttaccgttggcatcggtggcggagaaaaacggtgtaacaaagacgaaagtgccaacaatctcagcaccaagaccatcac

SEQ ID NO: 220011 - DNA, 444 bp, Glycine max
caagaacactctcttgaacattcatggatccagtgagcgtgtggggtaacacgcccttggcgacggtggatcccgagatccatgacctcatcgagaaggagaagcaccgccaatgccgcggcatcgagctcatcgcctccgagaacttcacctccttcgcagtcatcgaggccctcggcagcgccctcaccaacaaatactccgagggcatgcccggcaaccgctactacggcggcaacgaattcatcgaccagatcgaaaacctctgccgctcacgcgccctccaggccttccacctcgacgcccaatcctggggcgtcaatgtgcagccctactccggctcccctgccaacttcgccgcctacaccgccgtcctcaacccccacgaccgcatcatggggctggatctcccctccggcggccacctcacccacggctactaca

SEQ ID NO: 220012 - DNA, 597 bp, Glycine max
  unsure (1)..(597): unsure at all n locations
gtcaattgttaatatgaaaaaaatatgatcaatcagggtaacaaaaacatgaaatcaaagacaaagaaatttcaaacttttgaattgaaacaccatcacgataaaccctacccctcccagaatgggaggacacttatttccttttttctccatttctgccctttgtgccgaactttgagtgacacaattaagtagagagcgttatgattgaacctaatccttgtacttcatttcagataccaggaagccaggcatgtcaaatgtggcagagaacttctcaacatcagctttgagatcttcaatggccttgttgttgacgaggcccttgttgaaatccttgagaagtttgccatgctccttctggatctccagtgtgagagtcacagcacggtgaaggaactcaccaatctgctcaaagtccttttcaaccaaacccctagaagtcatggcaggggccccaattcgcactccaccgggggccaaggcactgctatcaccaaaaactgcgttcttattaacagtaatgttgcagagatcacagagtttctncaccttattcccagtcaatccaagaggtctgagatccacaagacaaga

SEQ ID NO: 220013 - DNA, 576 bp, Glycine max
  unsure (1)..(576): unsure at all n locations
ctccactccctccaccaaaatccgagtgttcgagcgcaacggccgcgtcgggggacgcatcgccaccgtgacggtggcgggcgagaccttcgaggccggagcgtccattctccatccaaagaacctgcacacagtggattacgttaagatcctgaagctgaaggtcaaagagccgaccgcgtcggaggattccctctctctcggcatttgggatgggaacaagttcgttttcaaaacggtgtcgccgcttagttccactgttcccctcatcgataagcttctcaaacttccgtttgttaatactctcgtatcgttcgttaattccgcactcatgttcgttcgctacggcttctcgctctttaagatgcagaacttcgttgagattgctgtggataaattcgtaaagtactatgaagatcctggttcaagacctatttttgagactgtggatgagatgctgcagtgggctggtctgtataatcttactaccaggactttgcgggatgaattggtggatgcttggttgtctacctcgntgatcaatgaactnngtactgtcatcacacgcattaatta

SEQ ID NO: 220014 - DNA, 483 bp, Glycine max
aacgaacctcaacaacgctgagcgcagaaaggggaaaaggggattagggtttaggaagcagcgacaacaatggatttcacagtggagaagaaggaatcagagaacaacgccgaaaatgctcacccaacaacgttagattcttcttctcaattggcatcggcacttgattccaacaacaaagaaatcgaagaacgacaagctcgtgaactcaaagccggacttcaccccctaaagcacaagtttgtcttctggtacactcgtcgaacacctggagttcgaaatcaaacatcatatgaggacaacataaagaaaattgttgaatttagtacggttgaaggattttgggtctgctactgccatcttgctcgtcctgcttctttacctagtccaacagatttgcaccttttcaaggaaggaatccgtcctctatgggaggactctgctaactgcaatggtggtaaatggattatacgattcaaaaag

SEQ ID NO: 220015 - DNA, 490 bp, Glycine max
aatgggaatgaaaagccatgattctctccataagcgaggtgaaaagcaacaagacgaacaagtttatttacaaaaactacgacacactacacaaaattagagtgaaccccaagtaaccaaatgaaactatttaaagcagtagcaatgtagctgtcgtacattgaattcaaaagacagaaaccagtccaggaacacccagccccatcactagaccgaagccaatggctgagtgaaaccagtcctggctgagtgaaagctgcaccagtatgcaatatagcttccacggcagggactttggcaagaacacaattggatctctagcctctcaaccaagtgttcctgtaagatgaattgtctcgcagagaggcatcatggggcttgtactccataacatagctgtgaggaagctttaagtgacgtttgattgaatctctcagagccattacagcctgatggtctgaagcattgcgattccagacactcaatatat

SEQ ID NO: 220016 - DNA, 483 bp, Glycine max
  unsure (1)..(483): unsure at all n locations
caaacgctgccaacaacaacactctctctacaaaattgatggtcccaccgacgagcgggtgtcggaatcggaggccatgaacggcggcgccaccaccgccaccttccgatccatcctcgacaagcccctcaaccagcttaccgaggatgacatttctcagctcactcgcgaagactgtcgcagattcctcaaagaaaaagggatgcgtaggccttcctggaacaaatcgcaggcgatccaacaggtcatttccctgaaagcgctgctggaaccttccgacgatgatactcctcctcctcctcctcccgccatgcaccaccgtagccatgctcaacctcaacctcaagtgaatttgagtgaacctcctcctcctccgcccaaggctccgccacctgaagaacccgcttttcatgctgctgaagacattcagaaatctgcgtcgtctggggaaagcctacgngaactaatgacaccaacaccaac

SEQ ID NO: 220017 - DNA, 321 bp, Glycine max
gtaacagagaaagacttccttgatgcagtaaataaagtcatcaaaggataccagaagttcagtgcaactcccaagtatatggtctataactgagttattctttcatcttcttttcccgagaccatagtagaacgtacaatctttattttcccctgaaaattgaatggcatgtgattctttctatttaactcctgtttgaatgcatccttgtagcaaacctttccttgatgttacatccaaaattgtgagcaaaaccttcttttagcccttgaagaatatacttattattatcaatggaagttgttcgtcatttgcatggag

SEQ ID NO: 220018 - DNA, 321 bp, Glycine max
ctccatgcaaatgacgaacaacttccattgataataataagtatattcttcaagggctaaaagaaggttttgctcacaattttggatgtaacatcaaggaaaggtttgctacaaggatgcattcaaacaggagttaaatagaaagaatcacatgccattcaattttcaggggaaaataaagattgtacgttctactatggtctcgggaaaagaagatgaaagaataactcagttatagaccatatacttgggagttgcactgaacttctggtatcctttgatgactttatttactgcatcaaggaagtctttctctgttac

SEQ ID NO: 220019 - DNA, 389 bp, Glycine max
ggagaacgtttcaggggaagttgaattcaaccatgtggactttgtgtacccatcaaggccagacagtgttattctgaatgatttctgcctaaagattccagcagggaaaacagtggctttggttggagggagtggctctggaaaatccactgtgatatcacttttgcagaggttttatgacccaattgagggagagatatttcttgatggtgtggccattcacaagttgcaactcaagtggttgaggtctcaaatgggtttggtcagccaagagcctgcactgtttgcaactagcattaaagagaatatactttttggaagagaagatgccactcaagaagaggttgtggaggcagcaaaagcttccaatgctcataatttcatttcac

SEQ ID NO: 220020 - DNA, 420 bp, Glycine max
cacaagttaccacaaaagagggttaatactaatcaccaataaatgggacattttggttgttttgattagctagctgagatttcatgcgtaaaactaacattcatgtttaatttgctggtcttctttgaaaacttatcaaagagtaataagctccacctgggccatgagccaacaaagatgagggggtcccttttttcaccacttttcccttatttaacacagcaattaggtcacaattttggattgggcttaacctgtgagccaccaccacactagttttccccaccattaccctttttagagcattttgcaccaatttttctgattgggtatttagggcacttgtgggttcattcaacaacaacacttttggattcttcaatatggctttagctattgcaattctttggttttgacccc

SEQ ID NO: 220021 - DNA, 515 bp, Glycine max
gacatgaccatattcaaatttacattgcaaccaaggaatgtatatataaaaataacaaaatcgcccataacgtacatatataccagatacaaatttttcacgacatatgatattacaaatgactaaaacttctagataacaacgaacaaaagctatataatgaattcccacactaccacgcagttcaaaattattgcataccaataatttcaagaacccttattaactttcactttcaaagggattggtacaacaatatcatatgctaataaatataatcttaagatgaagaagcaggtttggaagatgggttgaaaggaacctgctcagcgcatgtaaggatttcatggggcccagcctgttctcgaccaacacctagaaggtcaagataatactggtaatgggaaacgatattgttcatcgagtccacatcaccttgtccacaaacaccatccccatagagaatgttcattgtagtgccaaatccaggaagacgattctccatagtatcattc

SEQ ID NO: 220022 - DNA, 453 bp, Glycine max
agacttaaaaaagcacactgcatattcatcaaagcatgatctaagcacactgcatcctaacatcacacgtacgtagaaaggtgaagttccaggtcttgcacaacatacacaacacaccataatttattttatatacaatcttatggcgcccaagatgcagatgcatggactaattaaacaacaacgttagtctgataggcagtgtccatagataaattgggtacccataaaatggccttgcttccaaggaaatggcaaacagggttagttccaggatcaactcccatgagttcatgaagcatgagatgattcattccagaagtatctgagtggcaaacagcaagtgcctgagttttggttccatcaccagccaccaatggaaccatgaaagcttgtgtttcccggactttatggcagaaaatactgcagttctgaaatttagcccatgacaca

SEQ ID NO: 220023 - DNA, 495 bp, Glycine max
  unsure (1)..(495): unsure at all n locations
aagaagagcccaaagcgaattcgaagttggatcttaatcttcacgtcgttcttcgatctcgcgaaccagtgagctggagtttcaacaatgatggagaaggaagactctgtgcagaagctgtacacgcgtatgcgactctgggaatttccggatcagtatgtgattgagccaacggatggatcttctggttcttctttgtctgttagtcgtgtcgatggatccatgaagctcattgataaggttccagaatgcagcacgcttcgagttcctaagatttatacgattttcggtgttgttgggatgttgaagctcttggctggatcatatctgctggttataactgagcgtgaatctgttggatcttactcggngcatccaattttcaaaatttctaaattgaaggtttttccatgcgacaattctcttaaaatacccctcctgaaaagaagaaaatagagatggaatnttcaggtctgcttaatggtgctgagaaac

SEQ ID NO: 220024 - DNA, 551 bp, Glycine max
  unsure (1)..(551): unsure at all n locations
ctgttgcaaaacttagggttgggcctttttttgaggttttcagcgcttctttctcacaatggttcttcagaatgatattgatttgctgaatcctccagctgagttggagaagagaaagcacaaactcaagcgtcttgttcagtcaccaaactctttcttcatggatgttaagtgccagggatgcttcaacataacaactgtgtttagccactctcaaactgttgtggtgtgcggaaactgccagactgttttgtgccaaccaacagggggacgggcgaggttaaccgaaggttgctcatttaggaagaagggagattgaatggtttgttaaccagacttttctttgtcaatgatttgacattttcggttgttaggtttttgagatggaatcaatttcagttatggtatattaattttgttaaattgtaagacaatatctctcagccttccacaaggcatagtagccaatgttgaatttctctttattgaagtggatgtggttttgttggatatttaattnntactgaatcgatatggtttagtttgatggt

SEQ ID NO: 220025 - DNA, 512 bp, Glycine max
  unsure (1)..(512): unsure at all n locations
aaccatcaaactaaaccatatcgatttcagtaaaattaaatatccaacaaaaccacatccacttcaataaagagaaattcaacattggctactatgccttgtggaaggctgagagaaattggccttacaatttaacaaaatttaatataccataactgaaattgattccatctcaaaaacctaacaaccgaaaatgtcaaatcattgacaaagaaaagtctggttaacaaaccattcaatctcccttcttcctaaatgagcaaccttcggttaacctcgcccgtccccctgttggttggcacaaaacagtctggcagtttccgcacaccacaacagtttgagagtggctaaacacagttgttatgttgaagcatccctggcacttaacatccatgaagaaagagtttggtgactgaacaagacgcttgagtttgtgctttctcttctccaactcagctggaggattcagcanatcaatatcattctgaagaaccattgtgagaaagaagcgc

SEQ ID NO: 220026 - DNA, 520 bp, Glycine max
aacaaataccgattccaccaaacacaacacagaaaatgcaaacaccaaactgcgaagccgagaggcgaatccagaggctaaccctacacctaaaccccacggcgttggtcgcggcgaagcagttggagatggcaacgtgcgctcgcgggaagctgagcgtggacacgccgtcgttgtctagttacctgcgagggaaacacgtggacattcaggagaaggtgttcgattacttcaacgcgaacccgcgccttcaaactcccgttgagatctccaaggacgagcatcgcgacctctgcatgaagcagttaacgggactcgtcagagaagccgggattcgacccctccgttacgtagtcgacgatcccgctaagtacttcgccattttggaagccgttggaagcgttgacatgtcgctcgggatcaagatgggggtccagtatagtctttgggtggttctgttctcaaattgggaccaagagcatagggatagtactttgatgggattgatactggactaccc

SEQ ID NO: 220027 - DNA, 545 bp, Glycine max
cgactgaaacttcatttcattcatttatggttctggtcgtgtgtagtagtttcttggtcaggagcaaccactagcatataaatttcaacaatgagccaagaaaatattttctcatgttaattcccgcaaatacatcaatcttctttgcgttcctttttttaaaatcccacatattgtgtgtactgcgagtaggcccctgaccgcttggcaatgggggcccgtgtaacgtgatccggaagatcaaatgcatcaacaagttcccttgcaatattcctcacttggaaactaagatactccgcgagcttgtggattgccttggctttgttgggagccacatagtcaacatttcggtaggttccaatgtcattccatattctatccagagcataaagatcacagacgagcttcagagcagcttgggagcttggatccggacagctctgcacggcttcaataaatttagcaaggatgactgactcaatatgtgactctgcaagtgtcaaaaggtgattcaaacatctattccatgcaccaaaatccccaag

SEQ ID NO: 220028 - DNA, 493 bp, Glycine max
  unsure (1)..(493): unsure at all n locations
gttattccttgcttcacttgtatgctttagtttctagcatcgatcactcctaattacttgctgcatttctctactccttgtgcttgacacttttgtcatttaaaatggaacttaattttaagtaccaacttagccttttctgtgtcacactgctcttacctgccctgtgtacctctcaagactcttttacgtgctccagagcaacctattatggtagcccagattgttatggaaatccaaggggagcttgtggctttggagaatatggaaaaacggtaaacgatggtagtgtcgcaagcgtgtcttggctatggaagaatggatctggctgtggagcatgttatcaggttaggtgcaaaataccacaattctgcgatgagaatggagcatacgtggtggttacagattatggcgagggagacagaacagactttattatgagtccacgtgcctactcaagattggngagaaatgcagatgcatctgcagaact

SEQ ID NO: 220029 - DNA, 509 bp, Glycine max
cttatgacattagctgagcatcacttttatttattcatattctgtgatgattcatacgggaaatatatgaatccccacagttttagtccccaatacaaagagcactagatcgactcaccacaaagggaacattcttagaatagcacaaaccataaacaataaaacactagtaatctagtcactatctatattcctgaaatcagaaagtgccttttttcattttaaccaagctgaatttcggagtcaaagacagctccaccctcccaatcactagagataacattctcggattgcacccaatacttctctgcattaccactcaattggaacctcaactttatgtcaccccttggagggttctcagcgtcaaacacagtcccaaatgccctgcgcattcgcctccactcttggcaatcttcctgccacaattcaacagcagttacgtcgtaagttccaccaagatagagaatgacaatggctaagtagtgagggtttctgctgtgttcatg

SEQ ID NO: 220030 - DNA, 384 bp, Glycine max
gtgagttttgtttatttgaaattaacaagtagcaaagatgtttggaatcatcggaggaaacaagggtcacaagataaaggggaacttggtgattatgcgaaagaatgtgttggatatcaacagcattaccagtgttaagggtgtcatcggaaccggcattaacatcattggaggagtcgtcgacaccgttactgctttggcgtcccacatctccatccagctcattagtgccaccaaggctgatggacatgggaaaggaaaagttggaaaggctacaaatttaagaggacaagtgtcgttaccaaccttgggagctggcgaagatgcatacgatgttcattttgaatgggacagtgacttcggaattcccggtgcattttacat

SEQ ID NO: 220031 - DNA, 466 bp, Glycine max
acataagatgatgatttattctagtttgcactttgccatgccagctatcattgttgaaacatgcgcgagaacacttaacagcaatttatacaaacagaatttcttcattaacaacttaacagcaaacacgagaacattcaatcaccccaaatacataacttaaccatacataggtagatgaaggaatcatattccttctattcacttttattgaaaaccagggaaagtactgcaacaaccatagagcccctagatggagatactgttgggaattcctctgaaagtcaatccctcctcactagaaggatagagcaaagtgtaaggcattttagccggcccactgcggtttctcaacgtctcgtccttgttcttctggataagcttttgttcaatctcttgaagcttctttccaaacctcttgaaggcctctagtggaccagcatcagaagtccaatagtcaccacca

SEQ ID NO: 220032 - DNA, 444 bp, Glycine max
ctcgagccgaatcggctcgagggcgttctatatattattgaattgacaatgaggcctgctcttgctttgcttcctcttctatttgctttcttgttagctgccactacagaatcaagaaaagatacaggggaatattggaaaatgatcatgaaagatcaggaaatgccagaaggacttcaaggtcttgtttcatttcaatctgaaaataaccctaagactcaagagcagcttggtaaaggttccaaaaaccattgtgaagagtctctagttacaaatacacaagttaatagtgacttcgaacccataccaagtgttaccaaatatgatgatttggaattcaagtcaagcattatcaagaacgatgattttgaatcgagaccaagtgttaccaagcatgatgactttgaactcaagtcaagcgttaccaagaacaatgattttgac

SEQ ID NO: 220033 - DNA, 523 bp, Glycine max
aattaaagcaaatatatatttttatttttccaacttttagcccaacatagccgaagttattcaaaatctataatacttcacaccctatttattcataggatacattgatatggagcacgattttcttcgactgtattatacaattacttgattttcatttaatcactatacttggtagcacttgctttaggttcagaatcgtacttggtatttgacctggatgcaaagtcatcatacttgctaatatttggtctcggttcaaaatcatcgcttttggtaatgcttgatttgagttctaaatcatcatatttggtaacacttggtcttgattcaaaatcatcattctcggtaacgcttgacctgagttcaaagtcatcatacttactaatatttggtctcggttcaaaatcatcattctcggtaacgcttgacctgagttcaaaatcatcatatttggtaacacttggtctgggttaaaagtatcatactttgaacacttggtctcgttcaaaatcatgtcttg

SEQ ID NO: 220034 - DNA, 466 bp, Glycine max
gaagaagcctaacaacatcaaactgtatgtccgccgtgttttcatcatggacaactgtgaggagttgatgccagaatatcttagctttgttaagggtattgtggattctgaggatcttcctctcaacatttctagagaaatgctgcagcagaacaagatcctgaaagtcatcaggaagaacttggtcaagaagtgcattgagatgttctttgaaattgctgagaacaaggaagactataacaagttatgaagccttctctaagaatctgaaacttggtattcatgaggattctcagaacaagacaaaacttgctgaattgctcaggtatcactccaccaagagtggtgatgagatgaccagcctcaaggactatgttaccaggatgaaggaagggcagaatgacatctactacattactggtgaaagcaagaaagctgttgagaattcccctttccttgaaagctt

SEQ ID NO: 220035 - DNA, 474 bp, Glycine max
gctctcgtcaagtttcagggcttccttagtagcagagaccaacttctttccctcaaattccttaagctgaccaacagcatactcgtcaatagcatcaaccatgtagagaacctcgaaccccttcttcttaagcttttcaaggaaaggggaattctcaacagctttcttggtttcaccagtaatggagtagatgtcattctgcccttccttcatcctgggaacatagtccttgaggctgggcatctcatcaccactcttgggggagtgatacctgagcaattcagcaagttttggcttggtctgagaatcctcatgaataccaagtttcagattcttagagaaggcgttataacttggtataggcttccttggtctcagcaatttcaaagaacatctcaatgcacttcttgaccaagatcttcctgatgactttcaggatcttgttctgctgcagcatttctctagaaatgttga

SEQ ID NO: 220036 - DNA, 552 bp, Glycine max
gacaaacacaaagaacaggtattttacatttaactaaagaacttaaaagcttagcagaaaaaaccttaaagtgttactacactaggcaggaagcgtcattcataatcctaagatcagttactagctcaatgaacagaattctcatcactgtcaattctagtgccattggccataggcgacacaagaccacccacaaacctgtatgaggaaggagaaggaggaacttttggagaaaggttaagcatttccaaggcttgtagtctaagctccacagggtagtcagcaacacaaccaattctaggtcctgccccggttgaccatctatgcgaaagttggtgccccaattggtaggattttgtagccttcttggaattgattctttgcaatatcgctttcttcggcacatcagctcttggactctgaagcccacctgagagagtccttttgtaactgccaacagatccaggttgacggtcttacttgattgaggatgccgtgttctcggcttgctcagaaactacaggcttggatatcttaccattgctagaatct

SEQ ID NO: 220037 - DNA, 509 bp, Glycine max
acacaaattattttcataaagcagaaacagtctgcagcgatcatgagcatgttgataaattatgcactacaaaaatgaacagtgataattaactcctctaaaatttactcaatttcatccaacacaacccgataaatattatattgcttggcacatgtttgtatttctcaagataaaagtcaggtctcagggtttccaaccccctttgcaaatgggtagactaaaacttgaatcatggcaaatgcactagctcagtacttttgacaccacaccggcaccaactgttcttccaccttctctcaaggcaaatctttgtcctgcttcaagtggaactgctgaaatcaattcaaacacggcagtaacattgtctccaggcataaccattttaacattttcgggcaactctacttttccagtgacatcagcagtcctcaagtaaaactgaggtttgtagttagagaagaagcagtgtgtcgccctccctcatcctttgtgagtacatatatctc

SEQ ID NO: 220038 - DNA, 516 bp, Glycine max
catattatattcccaagtcgtattcaaatccttatcaataaaaccatgaagccaaattaaaatatttctagtacacacccaaaaattcttcaaaagaaacttccgggaatctagcacgaccaaaaatcataaatttaatgaaattctaacccatcgataattaaatttgatgggaattatgatgtagcagtagcacacgtctcaccattaaaatcaaaataccaggtcaaagtttcaagtaacttaggacagaacgtaaaaaaaaactagataaaatgagtagatagctcggtacattaagtcacttagcacttgacctcctttaaggcatatgcaaagtacaggaatgttggatcagcagcgccgtccttgtagtaggcaaagaccaagcaagcatcatcacccatgctctcaccaacaaaaaattggaaatctttaatcttagagagcaggtatttagttgctccctcgatgtgcttcttaaacaactcctgttgctctgcatcgagcttggga

SEQ ID NO: 220039 - DNA, 513 bp, Glycine max
ctttctacgacgagaatgaagccttgtcagcactctcaagtagtcctaaaggcttccagtgttgccatagtggaggtgagtacaagctgtagccttggaggtttcaaatttcttgagaatgcaaaggacttgcctaccattatgacttcaaaggaccagtgtctgaacaccatgatgaagtgcattgcgcttggtgcacatgagtttctcagtaaaccactctctgaggacaagctcaagaatatttggcagcatgttgttcacaaggcatttaattctggggaaaatgtcctttctgaatcactaaaacctgtcaaagaatctgtagaatccatgctgcagctccaaacagacattggacaagataaaagtaggatttcaattgatttagagaatgtgtcgaggcttagtgataatgaccatgagcagtctgctgtgtgtgataaatatccggctccgtcacccctcaattaagcaggggacaagttactggatgatggagattgcatgagc

SEQ ID NO: 220040 - DNA, 531 bp, Glycine max
  unsure (1)..(531): unsure at all n locations
attttctctcttctctgcttcttcttgttcaaatcttaggagctgaggagaatcaatcgagagaaatatgtctggtatcgctcgtggacgccttgctgaggaacgaaagtcatggcgcaaaaaccatccacacggtttcgttgccaagcccgagactctacctgatggcaccgtaaatttgatggtctggcattgcactattcctggcaagaccgggactgattgggagggtggatatttcccactgacaatgcacttcagtgaagattaccctagcaagcctcccaagtgcaaattccctcaaggtttctttcaccctaatgtgtatccatctggaactgtttgcttgtctatacttaatgaagatagtgggtggagaccagctataacagtgaagcaaattcttgtgggcatccaagacctgcttgatcaaccaaatcctgctgaccctgcccagacngagggttatcatctattcatccaggatgcagctgagtacaagagaagagtccgacagcagtcaaagcaata

SEQ ID NO: 220041 - DNA, 503 bp, Glycine max
ccagggaaggagtcataatatcatataatccatcacagtaaatttatcattcatatagaaatgtaccagcgaacatcaggcatagcaagtgttgccaacaagtattattggtggactttcacattgttatatattaacacgttatccagacctgagagtaagcagaaattgttaaaaccatggagtctgcatattatggcagccaacaatcacataacagttttaacacagaacaagaaataactgacaacaactaacatactataacagttcctaaagtgagcagatataacactagacaagaggtggatattgctttgactgctgtcggactcttctcttgtactcagctgcatcctggatgaatagatgataaccctccgtctgggcagggtcagcaggatttggttgatcaagcaggtcttggatgcccacaagaatttgcttcactggtatagctggtctccacccactatcttattaagtatagacaagcaaacagt

SEQ ID NO: 220042 - DNA, 455 bp, Glycine max
cacgttgctatctttctcaggtacatcatttagatggtatgccgcagttgtgtaaggtctttggttgttcaagctggaaccttcgccaacagagtgagaatcaacggatttgggaggagtttgcaggcagttcagagtttttctcattggccaattcgtgaatacaagacaaccacaaggatgatggttgatacgggttctatgtcaagggctggaccccttgttgatacgatgccagagaaagatgatgatggtcggtttgccagtggagggtggaaaagtgacgatggaagacttagctgtgggtattcaagttttaggggaaagagagtgacaatggaggatttttatgatattaagacattgaagattggtggccaatcaatatgcttatttggaatatttgatggtcacggtggttctcgtgctgctgaatatttaaaggagcttctttt

SEQ ID NO: 220043 - DNA, 532 bp, Glycine max
aaaaaaaaatgcatattgcatttattagatcagaacaaaaataccaacttgatttctctacaaacaggaaaactttaaatatatacggacacacgctgaaatcatcagaagaacacgatgcaaaaatcccaatacaagaacaagagtgacttacataagaaaactaatgaataaacaaattgccttgacatgcagagtgagccatcatgcatatgctgacctcaattcattcaatttaacgcgaatataaccaacacatgcattttgtgctttcacatcatctactcatgctgagcactagctgcttctgctttgtcaggattagctagttctgctttctcatggtggaattgcaccacaatgcatgtaatgttatctgcactcccacgagaaaatgctgcttctgttaactttcgtgcagctgcctcaggctcctcttacgtgcgggcaagagaaacagcatcatcattctgtactacatcccagagtccatcacttgcaagataatcagttcaattggtcatctatctcc

SEQ ID NO: 220044 - DNA, 444 bp, Glycine max
tctccttctcgctctttcagctttgacttttgttggaaactaaggcctaatcaaaatggtgaagttcacagctgaagagctacgtcgtattatggactataagcataatatccgtaatatgtctgtcattgctcatgttgatcacggaaaatcaaccctcactgattctcttgtggctgctgctggtattattgctcaagaagttgccggtgatgtccgtatgactgatacccgtgcagatgaagctgagcgtggtattaccatcaagtctacaggtatctcactctactatgaaatgactgatgaagctctcaagagttttaagggagagcgcaatgggaatgagtatcttatcaatctcattgactcccctgggcacgttgacttctcatccgaggttactgctgcactccgtattactgatggagctctagttgtggtcga

SEQ ID NO: 220045 - DNA, 472 bp, Glycine max
ctaactgctactcactaatccgttgtttgttgcggtctgtcaattggtcttccccggggcgggtccgcatgtaacaattgactttgcctaaccgtaaccctaacccctttccctaccttgtaaccttactttcgatccttcacctcgcagataatgggagaaacattggaccacgcatacgaggaagagcttctcgattacgaggaggaagacgaaaaggcccccgactccgacggagctcaagtcaacggccaagctaccaagaagggctatgttggaattcacagttcgggattcagggacttccttctgaagccagagcttcttctggctattgcggactcgggatttgcgcatacatctgaagcgcaacatgagtgcataccacaagcaattctcgggatggatgtaatttgtcaagcaacatctcgaatgggaaagactgatgtctttaggctctctactctgcaac

SEQ ID NO: 220046 - DNA, 450 bp, Glycine max
ctttctctcgtttcaatcgatttttaatcatgggcagaaaattcttcgtcggtggcaaggggaaatgcaatgggaccactgaggaggtgaagaagattgttactactttaaatgaagctaaagtccctggagaagatgttgtataatttgttgtgagccctccttttgtgttccttccttttgtaaaaagtttgctgcgccctgatttccatgtctcggtccaaaattgatgggttcgcaaaggtggtgcttatactggagaggttagtgctgaaatgcttgttaatttgggaattccttgggttattattggtcactctgaacggaggcagcttttgaatgaatcaaatgacttagtgggagataaagtcgcctatgcacttcaacaaggttctgaagttataagcatgcattgtggaaactcttgaacagcgtgaatcctggtacaac

SEQ ID NO: 220047 - DNA, 521 bp, Glycine max
gcaagcaacgcaactcaaacgcacttccttccttcgccgcgtttcctattctcctcagatcactcccgctgtcccgcaccgttatctcgccgtcgccgtttcaaggaaaaaaggcattaaagaaaagattcccttggatcattcatggcatcaagatcacatgttaatctactagacttagctggaggtttactggatattcctcacatgccaagaactattccaaggattatgacagttcctggagttatttctgacctggatgtttatggtagatatgatggggattctgatgttagctcttctggttatcgggagcggaaaatccttgtggcaaacatgttgccattgcaggccaaaagagatattgaaactggtaaatggtgtttcagtttggatgaggattctattctgttgcaattaaaagatggtttctcttctgacactgaggtgatctatgtgggatccctcaagggtgaatagatgcccatgagcaggaacaagttgctcagaaatactgg

SEQ ID NO: 220048 - DNA, 546 bp, Glycine max
cggcggccgccctttttttttttttttctcaaaccagatcgtcattatgtatagtgaagaaaaatagtgtaactgtacaagctatttggtgcctcatgttcaatgcaaacaactatatgttctacagttctaggaacaactacagctataggtggcaccagcaaatacaacaatttgatgtaaccatttacgtgagaagaatttgtcaagctcattaccgcactactgaacgcaaagaatcctatctgcaacagcaaggtcccaccatatatgtcaggggcaacattaataacctaacattccctgattcacatgtgaagaatattaatcctctcaacaagagaagaagcacaagcaaccaataactcaaaccgtgctctcaaaagaaacttggaattgtgctagatgccttgactatggcttagatgaagcaccaaggccttgaagcaacttcaagacatcagcaggatcatcaagataatatttggccttgctaggtttctgacctacagtgcatgcaaagatctcaggaactactgggcatga

SEQ ID NO: 220049 - DNA, 416 bp, Glycine max
caaaaatggatgattctggaagtaaaactaaactgttgaatccatggatgctccacttccagaaactcgctctcgaactcaagtgccctctctgtttgagtttgttcaagaggccggtgttacttccatgcaaccacttgttctgcaattcatgtttggctgattgcataacggctgggcctggatgtgctgtttgtaaggcaacgtatgctcaaacagatgttaggcatgtgccttttgtggaaaacgtggtggcaatatatagaagcttggatgccactttttgtgctagtttgtttcagccatgttcttctggtgatgggaggggttttggaagccgtgccaagcaattcttaattcaacttctagtagtttaaaagctgccaagcttcctcggaatttaactaattcaatga

SEQ ID NO: 220050 - DNA, 427 bp, Glycine max
ggctcttaacaactttcattatcaaacccaacacttaccttttatatgaagtaaaaaaggaaatcaacaacttctcacttaatttggtcattacataattgctagtttagatttgaaacatcaacttgctatagctgaaacacataaatttggggggtcttagtgtatggaaacagacaaaacatacaaaaaacacaaaaatgaagtctatgtgttcacaaatctgcagttcttcctaacttcccctgtgaagaagctttctgagtttgtgatatttcccattttcaccattgactccgagaattgtcggaaaaaagcaagagggtctgctgcatacttcttcacaagctgtctagtttcaattccaaacacacttgagtacatttcttggtctgagttgagaagtccctccccatttagtagtaat

SEQ ID NO: 220051 - DNA, 550 bp, Glycine max
acacaaaattatactacattcattcatgtccctagaaaacagaatatgtcctgctctaaagcattaatgagaagatgcaatcaattacacttgcaaaatcataagcaaacatattattaacataaaccattcggataggctaccccaacaaaattattattctatcccatgcgtcacttgtactcgagaatcatgttattctctggggccaatccaacacaagccctcattatgttttccagcattgcacgctgctttgacaatgcattcaccactggtgtacccggtggaacctgcaagagttatgttgtgagtaaccttgccaacttttttgataaaaaaatgataaggggaaaaaagggaaattcactgaacaatgatttaacttcacaattgtatctcaatactaaaactcatatttctttcaacttaattcctatataaaaataaggatatgcactcaacattgaataagattagattaaactcaccagaggagccttggtcagatagctgagaatggtagcaactgggtggaatgagtggaatt

SEQ ID NO: 220052 - DNA, 494 bp, Glycine max
aaaagggagggacaaccatgaaagaaaattacgggggaggggaatgcccataagttacagtattaatatttgtgcagcaacaagaattttgtaaaggtaaaggcccatccgctggtttcttacagttctatcctttcagcaacaaaatggagttgtggaacacaagaatgtatcaatttttaacacgccaaggagcatgtgctaaaaaaagcaagaattaatatacctaaagagttttaaaggttgaagcctccatttatactgcatgtgtacttttccaacttataccctagctacttgatgtgttcatgaaatccttaagaagtttggattgacaagaagctcagtgtttctcatttgtgagtcttggaagcatagcatatacatgctcatattcttaaagagacaaaatcatagttagataacaaaaagtgaaaatgtatgtctacattggctattacacaaattctaagagctataggtagttaatctta

SEQ ID NO: 220053 - DNA, 437 bp, Glycine max
gctgggttacacatttatttatgggaacaattcaaagttcttcggaggactttgaattatttggaacattacaacaaataaaaagtcaccttacccttcccttcccgaacacccaaacaactcccgaattattcgcaaacagatttattaacaacaatgaatctaactaccctttgcaaatccccccgcactaaaattgcaacttgtgttgttgtttacctccaaaacatgcactgtttgcgactttacatgatcaaccaaagccttaacttaaagcacagaacaatcggtacgaattttcccatttcttgcagtcttaactccaacgcgacccaatttggtcatagcagccacaaagttggagttgaaaacgttggtactggaagcaaaggaattaacggtgttcctagaccttgggtccgtgaaaaggatttggt

SEQ ID NO: 220054 - DNA, 411 bp, Glycine max
ctattatccgccaccgtagccgccgccgaacggatcgacgatgaagacgaccttctgatccgtcaagtggtgccggatgcggaggaccaccacctgctcaacgcggagcaccacttctccgccttcaagacaaagtgcggcacgacctacgccacgcaggaggagcacgaccaccgcttccgtatctataagaacaacttgctgcgcgccaagtcacaccagaaattggatccctactccgtccacggcgtcaccaggttctccgaactcactccggcggagtttatgccgacagttcctcggcctgaagccgctccgccttgcctctgacgctcagaaggctccgatcctaccgaccaacgacctccctaccgatttcgattggcgcgaacatggagccagtactggagt

SEQ ID NO: 220055 - DNA, 504 bp, Glycine max
ggcaaacaaggagccagaaaagcccaaagaagaagcagaagaggaggctcccaagcctaaagccaagaatccccttgatcttctccctccaagtccgatgatactggatgagtggaaaagactctactcaaacactaaaaccaacttcagggaggttgctatcaaaggattttgggacatgtatgatcccgagggatactctctctggttttgtgattacaaatacaatcaggagaatactgtttcttttgtgacattgaacaaggttggtggatttcttcagcggatggatttggctcgcaagtatgcatttggaaagatgcttgtgattggatcagatccaccatttaaggtgaaggggctgtggcttttccgtgggcaagaaatccctcaatttgtgattgatgaatgctatgacatggagctctacgaatggactaaggttgacatctctgacgaacctcaaaaggagcgtgtcaatcagatgattgaagattgtgaacc

SEQ ID NO: 220056 - DNA, 467 bp, Glycine max
  unsure (1)..(467): unsure at all n locations
cttcacaatcctaccctctcactgtgctatctctcagcatcttcgcaatcacacccttcccagatggccttgcaaacagctactcctccaacaactcccagtgcccaagttgttggtaatgcatttgttgagcagtattaccatattcttcaccattcaccaggttcggtctatcggttttaccaggactctagtgtgataagccgtcctgattccagtggtgtgatgacatcagttacaaccatgaaaggcattaatgagaagattctttcactaaatttcaaggaatttaaagcagagataaagactgcagatgctcaaaaatcatacaaggaaggagtgactgtgttggtgactggatgcttgactggcaaggataacttgagaagaaaanttgcacagtcattctttcttgctccacaagacaatggctanntttgtctgaaatgatgttntaggtatgtaga

SEQ ID NO: 220057 - DNA, 469 bp, Glycine max
cgaatagattgcaatattatgcaataatgtgaaaaaagttgaaatatgcatgcttttcatttttcaatcttcccttgttaaaaggagagactcactcacttccattgtcactgctcctttctcggatctctctcttcttcttcttcgttttctcttcgcgagtgagagatggcgcaaattctgcttcatgggactctccatgccaccatcttcgaggttgataggctcaatgctggtggtggtggcggcaattttttcagcaagctcaagcaaaactttgaggagactgttggtattggaaagggagttactaaactctatgcaaccattgatctggagaaagcaagagtaggaaggactagaatcatagaaaatgaacatactaatcccagatggtatgagtcttttcacatttactgtgcccatatggcttcaaatattgtattcactgtgaaagatgataatccta

SEQ ID NO: 220058 - DNA, 481 bp, Glycine max
gaagaaaaaaaaatctccacaagacatcacagactatattaagattattactaagtagtaataaaaacacaaattaggatgtaagcaatcacaagtttgtaacaaagtacaaaatcaaaactaagtagtgaggataggggggaggtagtcagctttgccaccaagaatgcgagccttggtgtcggggaagaattcaaatcctggcagctcagtgacatctccttcactggcaatcccgatggggtagcggagaaggtgaccaggaaggtcatgctcaagtgactcactagaatacagatcccaatatttgtcagcaacttggttcaccttattaatgcattcttcactttctggctggaggaaggagtcatgaagcatgccaaggtgctcataccacaatgacatgcggaaaccatggatctggccacgtgccggctgcctggtagccaaatgatagggctgataagcacccatggcaatc

SEQ ID NO: 220059 - DNA, 357 bp, Glycine max
gcttatcaaggatttgataaaattgagttttctgctggcaaatctatacttgttctaggaggtgctggtggagttggatcccttgttattcagctcgccaagcacgtttttggcgcatctaaggttgcagccactgctagtactccgaaacaggatttgttgaggagcttaggagcagacttggctattgattatacaaaggagaattttgaagaactggtagaaaagtttgatgtagtgtatgatacagtaggagaaagtaataaggcattgaaggctgttaaagaagggggcaaagttgtgacaatagtaccaccggcgactccaccggctataaccttctctgcagtttcagat

SEQ ID NO: 220060 - DNA, 490 bp, Glycine max
tattcggcggccgccctttttttttttttttgctgaacgataacaccaccttcatttgaactagatatgacaaaatttaccaatacaaccttataaggacaatctgtttctaaatctaaacattcttgactaacaatattcatattacataattaaaaggctgtgctctctccttatatgcttaattaaatatgtttatgggatgggatgtagaactactttcccaatggctctattagtcttcaagtatgcaaatgcttccactgtctgagagaatggaaagggacccttaggatccaatactggcttcacctttccactttctaagtaaggctgtaatttctccaacaccgcaccatctgaaactgcagagaaggttatagccggtggagtcgccggtggtactattgtcacaactttgcccccttctttaacagccttcaatgccttattactttctcctactgtatcatacactacatcaaacttt

SEQ ID NO: 220061 - DNA, 485 bp, Glycine max
  unsure (1)..(485): unsure at all n locations
aaagtatttccttccatttttctcagatctgcgcaacctcgttgccccccgaacatgggaaactgctgcgccacgccgtccacggacgaaacggcgaacaagaagggcaaaaagggaaaaaaggaaaaccccttcgcgatcgactacggtttcaacgccaccgccgcgaacgggtcgaagctcaccgttttgaagtccccgacgggccgcgagatcgaggcccgctacgagctgggccgtgagctgggccggggcgagttcggcataacctacctctgtacggacaaggggaccggagaggagctggcgtgcaagtcgatctcgaagaagaagcttcggacggcgatcgacatcgaggacgtgaggagggaggtggaagatcatgcgccacttgccgcagcatgcgaacatcgtgaccttgaaggacacctacgaggatgacaaatgccgtcatctttgtatggagctttgtgagggcggngagc

SEQ ID NO: 220062 - DNA, 537 bp, Glycine max
tttgttttttttttttacaaataaagcgtgataatttaacatatttacagacacaaatgaaaacctgttcaatgccctctccctccaaccaaccctctcctgtctcctaacacaacctcaacataccatactaatacatacttcacatgacaaacgacaatgttggggccaatatcctatcctttttcacccaaaaatggggtattctggaaaagaattacaattaacagaaaagttcaaattaaaaactagacttctttataaaatctttctttccacagtcaaaattgacattactaaagtagtcatctaccgtcattgttcatcattgtttaaatgcaatgacccgtcccttatcaacgcatggctgacactggcaaacctatctcgcgagcactgtcctgatgcttttatgcaatctatgccagccttcatcatagtagaaaattcgtcgtaacttatccttccatccttgtatgagtacacatcatgcataattgcattgacaacttcttcactgtttgtgtcaagatcatc

SEQ ID NO: 220063 - DNA, 424 bp, Glycine max
ccaacccttccttcataggctggaaagacatattggtcgttaattttcattcctcacatgacaggttttacattcaaattcgaaaaacacaagatcaatccatggaacatggaaagggttccttacaattttatttctgacatcaattaaacgagttcaaattcaacaaagcaggtccattatttaattagagggccctctatataaatctttatttgctaatccggggaactttaaaagggaagattcaaattcaacaaaagcttcacttcaacgatcctggcttgcaagttgaccctccttcacaatgtagttttgttctggaaagtcttcacccttgaagggcctataaagcatgtttttgacaccagcagcataacgtaactgggcatcaatgggggggccaaaaatatgaggagtcatg

SEQ ID NO: 220064 - DNA, 489 bp, Glycine max
aaaaaacaagaagctcaattgtctagttgaagagcttcaaaacaagatttacaagagtgaaaggggaaatgggtattgcttatctcaacatgccaggcttcatgagggcaatgtttattatgttatgtgctatgatgatattgccagaactaacacatgcaaagcatgcaagagtaactaggcactacaagtttaatatcaaaatgcaaaacttcacaaggctttgccaaacaaagagcattgtaactgtcaatggacgatttcctggtcctagaatcatagcaagagaaggagacagaattgtggttaaagtcgttaaccacgttcaatacaatgtcacccttcattggcatggaattcgccaactaaaaagtgcatgggcagatggaccagcctatatcacacagtgttcaattcagacaggtcaaagttttgtgtacaacttcacagtcattggccaaagaggaacattgtggtggcatgcacata

SEQ ID NO: 220065 - DNA, 429 bp, Glycine max
agatacacaaatctttactaaaggagctttagggctttcagaatagagaatgtatatattacaattcagtatgaagataattgaatactgtaacctacataaaactctcccatgcactcataatttttctaacttgagtgatcacataagaactaaaacaaccataacaatctaattcccccaaacattcttttttggctacaaaggatagaaatcccaaaattggaagatgtggacaaaattgaaaacaaaaggcaggagcaaatacttccaaatctaaccccaaaaatagacaaagaaaagcgaaacattaaggttgtcgattttttcaacattttggaagatcagaaggtggaggtggcagcttctgattgcgccgtttaccatcttggactatccatgccattttcaagccccaactagtatgca

SEQ ID NO: 220066 - DNA, 423 bp, Glycine max
atttcttggaagcttaccgtcctgtcagtaaaggagatctatttcttgtccggggagggatgagaagtgtcaatttcaaggtggttgaaacccatcctgtagaatattgtgttgttgctccagacactgctattttctgtgaggcggagccttttataagagatgatgaacagatactggatgaactcggatgtgattatgtgggtggtgtcacgaaacaaatggctcatatatgtgagttgtttgagcttacattgacgcatctcacattttctataataatcggcgcgacaccacccaacggaattttactttatacgacccccaagatttgggtagacattaatagcgcgagctcgagctaatgaaacttgagctttattctgtctgcttaactgaccatacattatttccacacttgct

SEQ ID NO: 220067 - DNA, 444 bp, Glycine max
ccataaaatgaagatacgatccatagggggtatttaaggttaacccggtaacaattcaggataattgagtacaagaaaagcaaaatataagacaggcttcaaagttattccttcctgagaggttaggtagacatgtgatttcatacatcactgggataataaagcctaactatatagatcattttcgtcagccccaccagcagaagctgcaaaggggtcagatccagtagtagtcctatctccagactctggaaacctaaattcacttccaaaccctcttgattgctgtaaggtctgagcaaatgcctgatacttgcgaatatcagcattacttacacttctccgtgcaaactttattgactcctcaaaatgagcagccttgatctccgcaactttgtcgtcgacggtatcttaatccatggcctcagggttttccctactttt

SEQ ID NO: 220068 - DNA, 548 bp, Glycine max
  unsure (1)..(548): unsure at all n locations
gacggaaattttaacacaatctattgtttaacttgtaactctagaactgttataaaatcagactgtaacacaatcaaggcattcccttgatggcgtaggagttgacgagcgccaaggcattgctggtgaaactttttgacgttgctgacgcgatcgcatacacccgttttcatgggacagtccgctacgtcctggaatccatccgtacaggtctcttcgtcggtgagtgcggcactcaaccacgtctgcacgttgctcatctggaacaggaacgaactcgcgccggcgccggcggatccaatctgccgcatctgcttcagcgagccgcggatttcgtccacggcgtcgcccagattcgagaagcagtcgtgcagagcaagagcggcgcgcgtgcttccgccgtagtcggcgtcgcgcgtgaggttggagacgtangacgccgcacggtgaaccttcgagagacttacggcaatggccacacgcgccagatggccggggttctgctgcaccgcattggcgtaacgagagagggatgtgaaacacacttt

SEQ ID NO: 220069 - DNA, 411 bp, Glycine max
attaaacttcgttataaattaaatgcaacttaaaacaggcctgagcagcaaaggaaatggactaaaaccctatagctgcttgtgaaatcctaaatatctcagactcttcttaccatcaaaaccgaacatcagttctcatcatacacaaacagcaatgaaaattgcccaccgccgatcaagaacctacttttgaacgttacggctacatgatatcggcagaaacttaactatgtaacttacacgaaacacctaatactctgcagggatcaccctactatcaatgcacaaccacgatgatgatcacatgtgctagccaaattgtccagatgcactcacttgttcatggcaccagccttggtgaccttggccccggtggggtcttaattctcgacactcttgaagactccgacc

SEQ ID NO: 220070 - DNA, 333 bp, Glycine max
gctactttgatgtatttgtgaatcaatttgtcaacattgataaagcacattgggttggtgcgagcagtacttatgaactggagcacggggttgtggattggctggtaaagatttggccattaaagccaataagagcatgcctgccatcaatctacttggacacaagactccgagatgacagggaatatggcgttaacatgtattacccacactcataatcccgcatccaatggtttgaagaaaaaccaaaagggccaggagcgcctgtctcttttgagagcatggcggggctaagtgaagagcaaactgttgaactggcttgttgtttgggag

SEQ ID NO: 220071 - DNA, 400 bp, Glycine max
ctgcactcttcccaacacaccttacaaatacatcccagagagcgcgacgtatggagggtcttctctgaaaacccccagagcgtgtctgctttcttcttatcgttcgcatgctatcgagcgatcagatcatttgtcgccgaacatgagagagtgcctctgaagccacatcgaccaagaccgcgagttgaagacgaaacgccagccgggagcttgactggctcgaacactggattgagcctgatgagcagatgccaagtgacaagaccgtcggtggaggtgatgatgctttcaacaccttcttgagcgaaactggggcatgaaagcacgtgccccgcgcgatttttgtagatcttgagcccactgagattgatgatggcaggactgggacctaccgcctact

SEQ ID NO: 220072 - DNA, 471 bp, Glycine max
atataattgttgtcaccatacttaacataaagctccaaaagtaccggatcaaggcatgttccacgtaaagtacaacgattcacagagcacgataagaaaaacaacacatactgtaactgtattactgttatcttctaattataattctttctttatgaccatatttagtgcctctgcaccaacttcctaataatccttctgcagggcatcaatgatctttaatggcctaatacaactccccatgtttcataccctgaccaacataccaatgaacgaacgccctcttggcatacatgaggtcaaatttgtggtcgatgctagagaagacctcaacaacactggtgtaattggtgattatgcacactgttcctatgaacattggcaagatcaccacctgcaacatcagtaggaggctggtaattgattccacacttgaacccggtggtgcaccagttaacaaattgaatagtg

SEQ ID NO: 220073 - DNA, 497 bp, Glycine max
ctgccaatagaaatattttcttacctgaaaatcaagcatacatgaagtcttttctgccaaacacattttttaacataaaacaaggcacaagacatacaaacaaagaggaagttccacaaagggtacatggtcatcattgttgagattgacctttattacagaaacccagggaactcattccattcacatgggggcttgtaaaggcttgggaacccacataagatgttttatagggaagaagtggcacactgcatccttcccaggcttgattccaagctgcctaaatataatatgatttgggctccaatcagatgtgtccaaatggcaaatgccaagagcttcaattttgtcatctccattctcgctacctagtgagaccttgaacaccttgctccctgttgctatgaagtggcaatagtaaatggcatagggatatggtaggggatgacaagctacccatttagcagcgttgatatcttcagacacttccaaaatgg

SEQ ID NO: 220074 - DNA, 643 bp, Glycine max
  unsure (1)..(643): unsure at all n locations
tacatcctagtcataaacagcattacccttttggaagatctttctggggtgctctatacttttcagcgtggttaaaaaagtagacttttttttacctcaagattctggttctggttccatttgagtttgattacgtgataaggaagcttgtggttcttgtgattgaggcaaagaacttgccaccgacggatcctaatgggttgagtgatccgtacgtgaggctacaattggggaagcacaggttcaggaccaaagtgatcaagaagtgtttgaatccaaagtgggatgaggagtttagctttagggtggatgatcttaatgaagagttggttatatctgttatggatgaagataagttcttcaatgatgactttgtgggtcagcttaaagtgccaatttcaattgtttttgaggaggagatcaagtcccttggcactgcttggtattctttgcaacccaaaagcaagaagtccaagaacaaggaatctggtgtgttacgctgctgaactgtactttcctctaccttatccaatagtttgctgcttacctaacatttgagtggccatgtnntgtctctctctctctctctcaattagtagtttggttgttgggtatttatagtgcattaaatgttcctaatgat

SEQ ID NO: 220075 - DNA, 579 bp, Glycine max
  unsure (1)..(579): unsure at all n locations
gtttttgaagcaggactaaaacgctttatgcacgagcctgtttatattctcgaatatgctgatttcttgatacgtgtgaatgatgaccatgatatacgtgctttatttgagagggcattaagttcacttacaccagaggaatcagttgaggtctggagaaagttcaccaagcaagatctaacttatggggatcttgctagcatgctgaatgttgagcaaagaaggaaagaagcactatctggagctgaagatggaacatcattagagagttctctgcaagacattgtatcacggtacagatacatggatctgtgatcgtgctcctgtaatgatcttgatcatttagctcagtgacagtggcttgccaaaaatatcaataagaaagtggagaagtctattttgcctaatggaacgactcttttagataagacatctatggcaagcatttgaactatgccatcaagaattgtctatactgatacttcaaagatggcgatatatgatccatagcatacttctagtgctggaacacatgcattngatgaaattcttgaagctacaccacctgctttggtatca

SEQ ID NO: 220076 - DNA, 509 bp, Glycine max
  unsure (1)..(509): unsure at all n locations
ctttctctcgtttcaatcgaaaaaaatcatgggcagaaaattcttcgtcggtggcaactggaaatgcaatgggaccactgaggaggtgaagaagattgttactactttaaatgaagctaaagtccctggagaagatgttgtagaagttgttgtgagccctccttttgtgttccttccttttgtaaaaagtttgctgcgccctgatttccatgtctcggcccaaaattgttgggttcgcaaaggtggtgcttatactggagaggttagtgctgaaatgcttgttaatttgggaattccttgggttattattggtcactctgaacggaggcagcttttgaatgaatcaaatgagtttgtgggagataaagttgcctatgcacttcaacaaggtctgaaagttatagcatgcattgnggaaactcttgaacagcgtgaagctggtacaacaacggctgttgttgctgagcaaacaaaagcaattgcagctaaaatatcaaattgggacaatg

SEQ ID NO: 220077 - DNA, 492 bp, Glycine max
aaaagtacagtcaagttcaacattatttacccaccaaatgttatggtagttacactatttttgcaatcagaaatttaatcaaaatccaattgatcgcctatggatgagatcaaaggaaagcatgtttattcaggtactaaacagagttcaatacattggccacaaagcacagaaccaaaactcaaaaacagcaatttccgaagcagcttgaaaggcagcattatcagttcctaactacgaatttcaattcttcttcacagtagcagcgtttatgatgtccacaaattccgccttgagggatgcaccaccaaccaaaaatccatcaacatcgggctgtgctgccaattctttgcagtttcctccatttacagagcctccatagataattcttacagatgcagcaacttcagcactcacattgtcatgaacccatttccttaaatcagcatgaacctcttgagcctgagcaggagttgcaacctttcctgttcc

SEQ ID NO: 220078 - DNA, 545 bp, Glycine max
  unsure (1)..(545): unsure at all n locations
gtcttttgcttgcgaatctgaatcgaataataatcaatcaatcatcatgtcgtcggcgaagaagatcacactgaagagttcggacggcgaggctttcgaggtggacgaggcggtggcgctggagtctcagacgataaagcacatgatcgaggacgactgcgccgacagcggcatccctctgccgaacgtgacgagcaagatcctggcgaaggtgatcgagtactgcaagaagcacgtcgaggccgcgaatcccgaagacaaaccctccgaggacgatctcaaagcctgggacgccgatttcgtcaaggtcgaccaggccacgctcttcgatcttatcctggctgcgaactacttgaacatcaagagcctgctggaccttacatgccaaactgtagccgacatgatcaaggggaagactcccgaggaaattcgcaagacctttaacattaagaatgacttcacccctgaggaagaagaggaagttcgtccggaaaatcaatgggcatttgaatgatnttgtgagctcataaatatgaatcaagatc

SEQ ID NO: 220079 - DNA, 323 bp, Glycine max
agacaactgaaatagtcttatttattaatcaagcaagtgttttgcataagcaaatctacaaggaagatctttgataaacaaacaagcatagcataaatcctcatggcagagctttgattcatattttatgagctcaacaaaatcattcaaatgcccattgattttcccgacgaactgactctttttcctcaggggtgaagacattcttaatgttaaaggtcttgcgaatttcctcgggagtcttgcccttgatcatgtgggctactggttgggatgtaaagtccagcaagctcttgatgttcaagtggttcgcagcctggata

SEQ ID NO: 220080 - DNA, 527 bp, Glycine max
ggaagaaaccctagcctctcaccctccctgcgacacgatgcagatcttcgtgaaaaccctaacgggtaagacgatcacccttgaggtggagtcttctgacaccatcgacaacgtgaaggccaagatccaggacaaggaaggcatccctccggaccagcagcgcctcatcttcgccggaaagcagctggaggacggccgcaccctcgccgactacaacatccagaaggagtccaccctccacctcgtcctccgtctccgcggtggcgccaagaagcgcaagaagaagacctacaccaagcccaagaagatcaaacacaagcacaagaaggtcaagctcggcattctccagttctacaaggtcgacgattctggaaaagtgcagaggcttccgcaggagtgccccaacgccgagtgtggtgccgggactttcatggccaatcacttcgaccgccactattgcggcaagtgtggcttgacctatgtctaccagaaagccgatgcttaaattcgttggaagtgaaatctct

SEQ ID NO: 220081 - DNA, 321 bp, Glycine max
aatccattgcgaaacagtattcataaaggtttaatcaaagcccaaacagtcataacactaattgaacaaaaacattaaccaaaacttttaaataactaaaattaaaatagaaccacagagaattgacttccaacgaatttaagcatcggccttctgggagacataggtcaagccacacttgccgcaatagtggcggtcgaagcgataggccatgaaaggcccggcaccacactcggcgtaggggcactccttgcggagcctctgcacttttccagaatcgtggaccttgtagaactggagaaagccgagcttgaccttctt

SEQ ID NO: 220082 - DNA, 450 bp, Glycine max
  unsure (1)..(450): unsure at all n locations
agcgtcgttgatagcaagaagaggccagagtcgttttaaatccaatttttccatgtcgttcgcatcatcattctcgatgctccgccaccgcgcggtggcggcatacgcgcccactctcctcctccgccgcttccgctgtctcccaacgatcgccgncagacaccaacaacaacaacaaaccctaacaaacaagctggtggcccgagccggaaccttctgaaggcgaaaccaacactggaagagtgttcctggcttggccctgtgctcttcctctaagacaggccttctctgacggaatcccaggccatcggcgtggtggcggcgtcgcaggccaacttcatgcgcgtcatcgtccccgaaaatgacgaaccttctggaagctttcgcggggtggagattctctgcgtggtgagggcgctgctgaagaagattaagccgagggtgatggtc

SEQ ID NO: 220083 - DNA, 556 bp, Glycine max
cagatttttgccctcaaacctgatattctatctctggccctcaattttgtacctagtaaaatgaatgaggtagatttctggaataaatatttcaaagctgagtatctccatagcaccaaaaatgctgttgcagcagctgctgaggctgctgaagatgaggatcttgctgtttttctgaaagatgatgagatattagaaattgaagctcgaaagaaggttcgaagggttgatccaactttagacatggaagcagatcaaggagatgattacacacatcttcctgatcatgggattttccgagatggtagcaaggatatatctgaagcccaaaattctttgtataagagaacattgttgcaagatcttaatagacaaggggcagttgttcttgaaggaaaaactttagatatggagatggaacacccaagaacagtagcagaaattcttgccccgagaaaacaggaatgtgatggggttgtagatgacgagcgacgaaacagaatttctaaaatgaccccgattgatgatctttaggcacaagataatcatccatatg

SEQ ID NO: 220084 - DNA, 510 bp, Glycine max
  unsure (1)..(510): unsure at all n locations
gcctccactctctcccgcaaaccattcttcttctcttctctccctctgagcctttcatcgctcctcggagagatggctgcgtccgaagaatcatcaaccactcagatgattggcaatgcttttgtgcagcagtattactccatattgcatcaagagccagaccaagtccacagattttaccaggagtctagcatcctaagtcgacctgaagaagatggtaccatgacaatggtgactactactctggaaattaataaaaagatactctctctggattacacaagctttagggtggaaattctgagtgctgatgcgcagccttcattcaaggatggagtaattgttgtcgtgactggctgcctaactggaagtgacaatctgaaaaggaagtttactcagtcctttttcctagctcctcaggacaaaggctactttgttttgaatgatgttttcagatatgttgatgagtataagtcagttgatattggatctgtgccagcanatgatgct

SEQ ID NO: 220085 - DNA, 571 bp, Glycine max
  unsure (1)..(571): unsure at all n locations
gtttttgaagcaggactaaaacgctttatgcacgagcctgtttatattctcgaatatgctgatttcttgatacgtctgaatgatgaccaaaatatacgtgctttatttgagagggcattaagttcacttccaccagaggaatcagttgaggtctggaaaaagttcaccaagtttgagcaaacttatggggatcttgctagcatgctgaaggttgagcaaagaaggaaagaagcactttctggagctgaagatggaacagcattagagagttctctgcaagacattgtatcacggtacagtttcatggatctgtggccgtgctcctctaatgatcttgatcatttagctcggcaacagtggcttgccaaaaatatcaataagaaagtggagaagtctattttgcctaatggaacgactctnttagataagacatctatggcaagcatttcaactatgccatcaaaaattggttatcctgatacttcaaagatggtgatatatgatccaaagcatacntctggtgctggaacaaatgcatttgatgaaattctgaaagctacaccacctgctt

SEQ ID NO: 220086 - DNA, 452 bp, Glycine max
ctagaagcgtcaaacactatacaattgctactttacagtctacattttttcacaagatgaatatatatgtacaaattcaataccatcactggggagataacagagttaatcggagaagaattcttgcacttcagctaattggtccgtgttcattagaagagggagtgaatcaattttagttccattggcattgagcttattatctactacatcataccactcctgctgctcttcaaactcggtaatattgttgtgattttgggggtaggaaatttccccaccaccagagttttgacatatgcaagctgatgggttctcggtaaactcaccactaccgggtctcaactcattcggttctcccataaagcctacctggaaagttcgtactcgagaggcaaattcctcccacgtcctattatttctgttcatgaataacatggtcaacttctttg

SEQ ID NO: 220087 - DNA, 546 bp, Glycine max
ctcattttcctcttgtgtcagatgaggtaacatttctgcgtgttagggacaagatgaagcatagcattcttccttcagttcttcttggaattttggcttgttggggtgttctcccggttactgcacaagaccgatatcagtacttcacatgggaaattactaatggaacaatgtatcccctaggtgttcctcaacagggaattcttatcaatggtcaattcccgggccctacagttgaagccatcaccaatgacaatatcctcgtgaatgtcattaacaagctagacgaaaaattcctcattacatggagtggtatcaaacaacgaaggacatcatggcacgatggagttttaagaaccaactgtgcaatccctaccatacgcaactggacatacaagttccaagttaaagatcatattggaacttacacttatttcccatcaaccaaaatccataaagctgctggtggatttggcggattcaatgtagcccagagatctgtgatatccatcccatatcctgctcctgatggagaattcaccctac

SEQ ID NO: 220088 - DNA, 483 bp, Glycine max
acttggcacttgacagtcacaccctcgttactgaaacttgtaaactaaataatgatacgtatgaaggaaaaatccaaattacaacttatgccaataatcacatcagattataaacccgcttccgagtctatgacttgggtaggtgtttagccttgccacaaatcagtgcattgggcggaagaagagtctccgcgtatacgctctgctcattgttccacaccctcagatacaatgcttggcctaaatacctttggggccagattgcagatctcaagttccacatacccttattgtccaaagataccaatatggcactccaataatttggatacacctgaacagtgtgtctagacatcccatcaaccaagttgtaagtctttctcgaatcatggatccacaggccattgccatatgcaacaacatagaagctagatccatacatgtgccatgactgcatgtcattctcattggattggaagatta

SEQ ID NO: 220089 - DNA, 518 bp, Glycine max
agttaacgtacctagttgttggtctttatatttagttattgacatcaacaaagtcatggaggaagttaatgtggttcaaaccaagaatggaactgtttcagtagcttctgcgtttgctggccataaggaagctatacagcaaagggaccacaaatttttaagaattgctgttgaagaagcgtataaaggggtagactgtgaagatgggggtccctttggtgctattatagtttgtaatgatgaaattgttgctagatgtcacaacatggttctgaggaacacagaccccactgctcatgcagaagtcactgtaataagaaaggcttgtgaaaagctaaaccagatagaactttcagactgtgaaatatatgcttcttgtgaaccttgcccaatgtgctttggagcaatccacctctcacgagttaagaggttggtttatggagcaaaggcagaggcagcaattgctattgggttcgatgacttcatttcagatgcattgcgaggtactggattctatc

SEQ ID NO: 220090 - DNA, 321 bp, Glycine max
  unsure (1)..(321): unsure at all n locations
agaagctcccagtacaatttattcattaggatttaagatacaccatagcatcgagcttatttatatgaagtcaaattccctgaggagtaaatacctaatggcttaggaaacatagagattcaattaatacattcggaatttttcctttgttctctcaaaaacttcttcagcaatgttagcttctttgccatcagcccttttaatctccaattgagccttctgatagaatccagtacctcgcaatggatctgaaatgaagncatcgaacccaatagcaattgctgcctctgcctttgctccataaaccaacctcttaactcg

SEQ ID NO: 220091 - DNA, 540 bp, Glycine max
  unsure (1)..(540): unsure at all n locations
ctccagctccagccccagctcctgctcctatatcttcaggaactgctgtggaagggtctgatatctatgggcaggctgcgtccaatctggttgctggaagcaacttggagggaacaattcagcaaattcttgatatgggtggagggagctgggacagggatactgttgtccgtgctcttcgagctgcctacaacaaccctgagagagctgttgaatatttgtatacaggtatccctgagcaagctgaagctccacttgtagcccgggcgcctgtaagtgctcaacctacaaatcctcctgctgatgctccacaaacagcacaacctgctgcagttacctcagctggacctaacgctaatcctttagacctttttccccagggtctccctaatgtgggttctggtgctgctggtgctggttcattggactttntacgcaacagtcaacaattccaagccttgcgagctatggtgcaggctaatccacaaatattgcagccaatgctactagagctttggcaagcaaaatcccatcttatga

SEQ ID NO: 220092 - DNA, 388 bp, Glycine max
gacagcaaaaagtcaatatatttccaaaaggaagaactgaaccctgaacattaaaccagtaatgcaaggcaaacaactatgtatatgaatactaagaaaccctcgacgggctggaaatgataaatacaagggcaataatatggaggagactaaaacatcccttatccacttgagatttgacattatcaagcattacctcattaaacatagagtgtaacaaagacccatcgagagaaaaagatgacacgaaataatttggcaaattcaaaagtagatctattgttcctcgaactcatgcatgtgatctaaaaagtagcaggcagccaattcctcatttttgttacaagcgaagtacacctccaatacgattgcacgatcaaaacccatt

SEQ ID NO: 220093 - DNA, 494 bp, Glycine max
ctcctcttctgccctccacacaacttctctctcctctctctctctctacaaatccttctttcttctcttcgctgctcactgtagcgtagccatggctttcagagttggaggagcgggaggaggaaatgcctcttctggcatgggtgttgctgagcatagcgtaagcacgttcctggaattgcagaggaagaaagttcatcgctatgtgatttttaaaattgacgagaaaaagaaagaggttgttgttgaaaaaactggaggccctgctgagagctatgatgatttcactgcatccttgcctgaaaatgattgccgatatgctatctttgactttgattttgtgacatctgagaactgccaaaagagcaaaatctttttttattgcatggtctccttcggtagcccgcattcgccctaagatgctatatgcaacatccaaggacaggttcagaagggagctgcagggcatccattatgagattcaggcaacagac

SEQ ID NO: 220094 - DNA, 433 bp, Glycine max
tgatagaagagaagggtttaggattttgcacaactcactcatggaggaggaagaagccccagacgttatatgcgagctggaaaacgttcaaggcttagtggacgccctcaccgccgttcggtggaagcgccagcaggacgccgtgttggagttgtccgaacacggcattgttttgatcgtcgaagaaagcggttgcctccaagccaaggtttatctcaaacgagagttattcattcgttacgattacaacgcacgaggaggacgacctcgttttggagtgagtttggggcatttcgtagattgcttgaacgccttctcggttcctgctggtcaatcaatatcaagccttgttcagattcaatatccgggtcctgacatgcagcttcttctcaaatctgtagattcgctggatgccagtatttgtgcagagatc

SEQ ID NO: 220095 - DNA, 443 bp, Glycine max
  unsure (1)..(443): unsure at all n locations
aagagagagagagatggcatcgttttgtgctgcaaggactttcaacattccggcgatgaacgccggcgttcttcgccgccgggcatcgtgggccgccggaatagtcggagcctcggtggccggcgctgcacttttgcgctcttgttcgtctaagcgctctgcgccattcgcttgcatgagcctctctactgataccggtttaaaggaagctgttcaaactgaaaaggccccagcggcattggggccatactctcaagcaatcaaagccaacaaccttctgtttgtgtcaggtgttcttggccttattcctgagacaaggaaagttcatctctgataaatgtgaagatcaaacagagccgggttctaaaaatatgggagagatcctaaaatctgggggtgccagctattcatcagttggtaagacaactnattttgtggctgac

SEQ ID NO: 220096 - DNA, 571 bp, Glycine max
gagggataagattcaagaaataataaacaacatacaaaaatcaacgtgtgcgcttttcttctctttccttagttttcagattctgaaatcttagtttctgcccgaaactgaaactgaatcgaaattcaatacaatgagttcctcaactacagtgaggaagttgcaggtggtgtcccctgttcctgcggacatagacattgcaaactccgttgaacccgttcatatctcccagattgccaaagacctcaaccttagtcccaatcactatgacctttacggtaaatacaaggctaaggttttgttgtcggttcttgatgagcttcaaggatcagaagatgggtattatgttgtggtcggaggcattactccgactcctctcggggaaggcaaatctactactacagtggggctctgtcaagctttaggtgcttttcttgataaaaaggtagtcacctgccttcgtcaaccatcgcaaggacctacttttggattaaagaggtgcagctgtggtggtatagccagttattccatgatgattcaatcttatctacaggagatatcatgcaatact

SEQ ID NO: 220097 - DNA, 414 bp, Glycine max
  unsure (1)..(414): unsure at all n locations
atactcaagtcaacaggatacaggaacttcaatggctgtgtcacattctcgcaagctttttgaactgcaatgcccaggtcaacggctcctttgccaccattcgcatgatgggtacaaattacagcatcataagctccagcagctaatgcagcacttcgaactgcatttagctcggcttcagagtcagttgaaaacttgttgatggcaactacaacatttacaccataagattttgtatttgatatatgtcgagccatgttcacacaaccagcctcaaccagggcaacattttcagtcaaatatgcatggncaagaagtcttccagcaacaactgcaggccctccaccatgcatttttagtgctctgatagttgccacaataatcgcacatagaggtgncaaaccactataacga

SEQ ID NO: 220098 - DNA, 532 bp, Glycine max
  unsure (1)..(532): unsure at all n locations
agagaagcgtcttaataaacgctcttctctgaaaaacctgatttcttctcttcttctcttctctttcgtttcgatcttcgatctctgaaaatgagagagtgcatttcaatccacatcggtcaggccggtattcaggtcggaaacgcctgctgggagctctactgcctcgaacacggcattcagcctgatgggcagatgccaagtgataagactgttggtggaggtgatgatgctttcaacaccttcttcagtgaaactggggctggaaagcacgtgcctcgtgcgatttttgtagatctcgagcctactgtgattgatgaagttaggactgggacataccgccaactatttcatcctgagcagctcattagcggaaaggaggatgctgcaaacaactttgcccgtggccactataccattggaaaggagattgttgaactttgcttggatcgcatcagaaagcttgctgacaactgcactggtctccaaggttttctggttttcaatgctgtgggtggnggcactggctctg

SEQ ID NO: 220099 - DNA, 462 bp, Glycine max
aaaaccccaaaaggtcccccagcatttccgaaaaaaggggccccccctcccataaagccccaaaagccccggaacaggggggggcccccgagggggacgcccccccccacggcccgggggaaaaaaaaacacccccaacaccggacccttacgggggaaacccctaataaaaaatttccccccttaaaaccattttttaaagggggccctggcccgaccccccaaaaaattttccccaggggggaaagaaccccacgggcccaagagaaccttccctttttcattccccccccaacattccaaggaacaaaagccccctggggttacctgggggcaaatttgggggcgaggggagagaaaaccccccccccccggggggagggggggatcatgccccccgccccctgaaccctgggaagacaccgccaggaaccaccgggggggggtggggattggcccccc

SEQ ID NO: 220100 - DNA, 468 bp, Glycine max
cctacttggtgtcttgcaattcccaatggcctccattttcaagctctcaacgccatctccagctgcttccttatcagaagcgcttcgccccagagattctcgctttctcttctttaattcctcttccacgctattaatacaaattaacccttttcgtttccttcgaatcaatcacttccttcctcttaaaacctccttgcggatcaaatgctcccaaacagatgggaatggaagtcctgcaaagaggacagtgcttcatgatctttatgagaaagaagggcagagtccatggtatgataatctctgcagacctgttacagaccttcttcctcttatagcaagtggtgtcagaagcgtcactagcaaccctgcgatttttcagaaagctatctcatcatcgaatgcttacaatgatcagttcagggaacttgtgcaagcagggaaagacattgaaagtgcatattggga

SEQ ID NO: 220101 - DNA, 566 bp, Glycine max
  unsure (1)..(566): unsure at all n locations
cacgcaactcattgcgcacgataaagaggtctacgacatcgcctggggcggcgtcggagtcttcgcctccgtctccgccgacggctccgttagggttttcgatctccgcgacaaggagcactccactataatctacgagagctcggagcctgacacgcctctggtgcgtctcgggtggaacaagcaggacccgaggtacatggcaacgatcatcatggacagtgcgaaggtggtggtgttggacattcgcttccccacgctccctgtggtggagctgcagcggcaccaggcgagcgtgaacgcggttgcgtgggccccgcatagctcgtgccatatatgcaccgccggggattcgcaggcgctgatttgggacctttcttccatgggtcaacccgtggagggcgggcttgacccgattcttgcgtacactgcgggtgcggagattgagcagcttcagtggtcgtcttcgcagcctgattgggtcgctattgctttctccaccaagcttcagattcttagggtttgaaaatntattaatgattactcatcacttctgcttctggtcc

SEQ ID NO: 220102 - DNA, 453 bp, Glycine max
gacggaaaatttctttaaaatacttgcagactaacttagcagaaacaaactaaggctagttttacgccctaaaccctaatcaaaactactttcgtcccaaagccagaaattaccaaggttaacattggtttcaacaataaaagacacaacaatacaactgtgtcttcaaatctgaagtatccccaattttcgcatgcacatacagggaacagaagcagaagtgatgagtaatcattaataaaatttcaaaccctaagaatctgaagcttggtggagaaagcaatagcgacccaatcaggctgcgaagacgaccactgaagctgctcaatctccgcacccgcagtgtacgcaagaatcgggtcaagcccgcccttcacgggttgacccatggaagaaaggtcccaaatcagcgcctgcgaatccccggcggtgcatatatggcacgagctatgc

SEQ ID NO: 220103 - DNA, 574 bp, Glycine max
gcaagagcatcaatcctgatgaggctgtggcatatggtgctgcagttcaagctgctatcttgagtggtgagggtaatgagaaggttcaggatcttctccttcttgatgtcacccctctctctcttgggttggaaactgctggtggggtgatgacagtcttgatccccaggaacactactatcccaacaaagaaagaacaggttttctcaacctattctgacaaccagcctggtgtgttgatccaggtttatgaaggtgagagaacaaggactagagataacaacttgttgggcaaatttgaactttctggcattcctccagctcccaggggtgttcctcaaatcacagtgtgctttgacattgatgccaatggtatcttgaatgtctctgccgaagacaaaactaccggccaaaagaacaagatcaccattaccaatgacaagggtaggttgtcaaaggaagagattgagaagatggttcaagaggctgagaagtacaaatcagaagatgaagagcacaagaagaaggtagaggccaagaatgcattggagaactactcatacaacatgaggaa

SEQ ID NO: 220104 - DNA, 479 bp, Glycine max
gaaaacataaatcgacatgacatactaccaaatattgtctttcttgagaaactaaatccaaccaaaggacatgaaatcagacatttaaaaataaatagtaaatcaaaagcagaaataaactaaatttagtctacttcctcaatctttggccccgcaccgcttccagcagcaggaacatcatcgtccattgcaccacccacgtctggaccagcaccaccctggtacatcttggcaatgatagggttgcagatgctttccaactccttcattttgtcctcaaattcatctgcctctccaagctggttgctgtctagccactggatggcctgctcaatggcatcctcaatctttttcttgtcagctgggtcaagttttcctccaatcttctcgtctttaatggtattcctcatgttgtatgagtagttctccaatgcattcttggcctctaccttcttcttgtgctcttcatcttctgattt

SEQ ID NO: 220105 - DNA, 562 bp, Glycine max
  unsure (1)..(562): unsure at all n locations
aacctctttctcttctttctctctcactcagaattctcttctcttgggtttttatttcactttcaattttcaatttatagtctatgactatggaggagctatcttctcttagctcggtggagaggaacattcacatagcctctgtcctggaagccatggcggtggacactattttcgccgctgccaaatctctcctttgcttctccattctgactggatctctgctgactgacatcaatcattcagtgtccccaaaattgaccccaatggatggaagatttgcttttgatgatctctgcaagggaaaacatacttatcgtttaaacaaggatgctagtgattcagatgaggacgaggatgaagaagacgatcatgacacanatgatcagaatgatgaggaaggagatgaagacttctcaggtgaaggtgaagaagaggctgaccctgaggatgatcctgaggccaatggtgcangaggaagtaatgatgatgatgatagtgatgaagatgatgatgacgacaacgatggtgatgatgatggagaagatgaggattgagaaga

SEQ ID NO: 220106 - DNA, 448 bp, Glycine max
  unsure (1)..(448): unsure at all n locations
atgggtagctggatgtctcgagttatnccccgggncgacgatgctactattcggcggccgccctttttttttttttttttttgcataaattgaacttttatatgtggagatgggtccacttgaaagtattcatgttccaagaactaagattggccaggacattacatggtagaagaaaaaacagaccctaccaactattacaatttcacttcctcttcttagtaagaggttgaggaacctcctcttcatcttcttcgtcttcaccctctttctcatcctcatcttctccatcatcatcaccatcggtgtcgncatcatcatcttcatcactatcatcatcatcattacttcctcctgcaccataggcctcaagatcatcctcagggtcagcctcttcctcaccttcacctgagaagncttcatctccttcctcatcattctgatcatt

SEQ ID NO: 220107 - DNA, 516 bp, Glycine max
  unsure (1)..(516): unsure at all n locations
aaaaggctgaggaactttatcaaaggataaaggattcaaacctttcctttgatgccgttacttacaacgaaatgatgactctttacatgtcagtggggcagtttgaaaaggtcccatcggttgttgaagaactgaaacaacaaaaggtttcccctgatatctttacttacaatctatggataagttcctgtgccgccattcttaatattgatgaagttaggaggattcttgatgaaatgagtcatggtgctggttctaatgaaagttggataagatatttgaacctggccaatatatatattagtgtaggtcatcttgataacgcaagttccaacacacttgttgagactgagaaaaggatcacccaaaggcaatggataacttatgacttcttaatcattctatacggtgggttgggaagtaaggataaacttgatcagatatggaattccttaagaatgaccaaacagaanatgattagcaggaattacatctgcatcatttcttcctatctga

SEQ ID NO: 220108 - DNA, 523 bp, Glycine max
gccatttgggagttaggttctgcacgctctgcttccagcgagtgttctttcttcgtttcaacaccttaatttgcacacgctgcttcttcagcttgagaaatggcacaagaaacctttctattcacatctgaatctgtaaacgagggtcaccccgacaagctgtgcgaccagatctctgatgcagtgcttgatgcgtgccttgaacaggaccctgacagcaaggttgcctgtgagacatgcaccaagaccaacatggtcatggtctttggagagatcacaaccaaggccaacgtagactatgagaagattgtccgtgacacatgccgcgaaattggattcatctctgatgatgttggtcttgatgctgacaaatgcaaggtgttggtcaacattgagcagcagagccctgatatcgcccagggtgtgcacggtcacttcaccaagcgcccagaggaggttggtgctggtgaccagggtcacatgtttggctatgccactgatgaaacccctgagtacatgcccc

SEQ ID NO: 220109 - DNA, 390 bp, Glycine max
ggtacaaaattctgatttaatttccattgcatcaaaacgggaacattgcatttccaaaaaataaattgagagttattggagaaatggtaaaaataattcaggtgccggcttgaagagatgacattagacctatgaatgaagtagtaggaggcatgaaacacgcaaagtattcatccacacctagcaagacatccattgaagggagtgattaacttcacaacaatcttaagcttgaggcttctcagacttgagtggcttcacaacttcccaagggaagtcagggtcatcccttccaaagtgtccataagcagctggcttgaggaacctatggcctcccctcttaaagtccaagcttatggtgatcattccaggcctgaagtcgaaattctc

SEQ ID NO: 220110 - DNA, 579 bp, Glycine max
  unsure (1)..(579): unsure at all n locations
agacccttctcttccaacaaaatcagtgaggatctgagaagaagaagcattggccagaggcatgactgcaaggggcagcgaccccataaggggtcgtcttcggccgcaaatggccctggccttggccattgctttgatttctatcactttggtttccgttaatgctgatggttacccttactattcccctcctccaccttaccagtacacctcaccacctcctcctccttacctctacaagtctcctcccccaccctctccttcacctcctcctccataccatccccatctccaccacctccttattattataaatcccctccaccaccatccccttctcctcctcccccctactactatcactctccaccaccaccatctccttctcctcctcctccctactactaccactctccaccaccaccatccccatcaccgtcgtctccatattattacaaatcccctccacctccatctccatctgcaccacctccttactactatcaaaagcctnctccaccatctcccacttctcatactccctattactacaaattccctgcaccaccaacgtcatat

SEQ ID NO: 220111 - DNA, 399 bp, Glycine max
  unsure (1)..(399): unsure at all n locations
atttattcagctcgactcagcaancccgggccactagctccctagtcgacaagctgacctttttttttttttttgaacacaaattgaatttgctgttttattactaataattattgcaaacacaacaacagggtacaacacaaaaatgccacaataaatagaaaagcaatcatacacgaccatattagtctattgaacaaatcaattaaagagatcactaaaaatggactgtncttttcacatttacttggcatttacatttcaaatctctctttcctgtttggattggtccgtcacttgaacacaataagatcaagacgtgcaagaaggccatcaaacaaatagaatcaacctgatctgaatcataaacattgcagcatagagatgacacattcagac

SEQ ID NO: 220112 - DNA, 471 bp, Glycine max
ctcctcctctattttggatctgttcatgttcacaggatatggtgtttgctcattacggcaacggtggaagttgcttaggaaactaagcaacttgcacatgcttggaggaaaagctgttgatgattgggcccaagttcgaaatgaagagatagggtacatgcttcgtgcaatgcatgattgtagcaagagaggtgaggccatggtggtggcggtgatgttgacatactccatgaccaatatgatcggttgagtgatactgagccgttgtttgttcgtgacgaagggttcggagtcgaacgagttcaaggacatggtggttgagctcatgaccgttgctgggtacttcaacattggtgacttcataccctttttggcaaagttggacttgcaaggcatagagcgtgggatgaagcagctgcacaagaagtttaatttgatgcgttgtgttgcaatgtcctaagagtttaaaac

SEQ ID NO: 220113 - DNA, 551 bp, Glycine max
  unsure (1)..(551): unsure at all n locations
gtaaggggcaagaggctggtttggtgtttgtttcatttcactttacatgaatacatatacatagaagtttgaagggttttagggatttgcatgatgctaggttcattacctatattgcccctccctgctcctccttctgatggaaatctaggtcctctgcctgagtctcaagtgattgatgataatgaggaggagcagaacaaatcaaattctgcttctgttccggcgccggcaacagttgccacccacaccagaacgattggaattatacatccgcctccggacattaggaccattgttgataaaacctcccagttcgtggccaagaatggtccagaattcgaaaagaggattattgcaaataacacagganatgttaagttcaatttcttgaactcgtcagatccataccacgcatattatcaacacaggttgtctgaatttcgtgctcaaaatcagtcttcagggcagcagcaacctgcagacctcgcggctgttcctgaatcccgtccgtctgatagcaacggcgtaatagcagcagcagcagcagc

SEQ ID NO: 220114 - DNA, 428 bp, Glycine max
aagttaaaataacatttattttgagtttttttttctaatacaattctccgtaactattgcgaaacggaaggagtaaatctcaataatggttcacgaatacgtcgaattccacgatagcgtgtactttggtgaaatcaacagagtaaaatctggcttgagcgtagccacgtgcaaaacgaaaagccccagtgccgccaacaatagccatttccctaacaggttcactcatgatcatgttccttcgcaacacgctgatggtgctgacgacgaaatctccatcggtgaatgccatcgtcatcaccatcattagtcccatctctatttgcgatattgaagtgtaaattacttgggccttgcccacatgtttcgagtcctgttcgggccccacggttaaagggccgtccatcgccacaacggttccgaacgga

SEQ ID NO: 220115 - DNA, 589 bp, Glycine max
  unsure (1)..(589): unsure at all n locations
ctctttcgcttctgaatcttcaacaatggtgctcgaggcgacgatgatctgtatcgacaattctgaatggatgcgtaacggtgattactctccttctcgatttcaagctcaagcagacgctgtgaatctcatttgcggtgctaaaacgcagtctaatccagaaaatacagtgggagttctcacaatggcagggaaaggcgttcgtgttttggtcacccctaccagtgatctgggcaagatcttagcctgcatgcatgggctagatataggtggtgagatgaacctagctgctggcattcaggttgcacaactggctcttaagcatcggcaaaataaaaaacaacagcagaggattattgtctttgctggaagccctgtcaagcatgaaaagaagatgttggagatgataggaagaaagttgaaaaagaatagtgttgcacttgatattgttaattntggtgaagaagatgaggggaagacagagaagctggaagcactcctcgcagctgttaacaataatgataccagccacatttgtcatgttccatctggtcctaatgccctttctgatgtactttatagtacacct

SEQ ID NO: 220116 - DNA, 342 bp, Glycine max
gataatcaagaacattttaagttaaaaatcatccaatattcaatcgagagacatgcattggttccaattaaagggcagagagacacattgaaacatgcggaaataggtcccccgatttgtaacagccgcgaagaatgctaccaagaaaataaaaccatacagggcaaagtggttctcaaagattactttttatcctcctcgttagatggcttgtcgtcattcttctgttgaggctcagactgattttgcatggaagccagcaaatccttgacagaagggtcatttgggtcaaccccaggaagcgatgcagggtttgaaaatccaagggatggatcggccaaa

SEQ ID NO: 220117 - DNA, 482 bp, Glycine max
gaacaattgactgagaaggatgtatacatatcataccttccacttgcacatatatttgatagggtcattgaggagacattcatatggcatggtgcttcaataggtttctggcgtggggatgtcaaattgttaattgaagatgttggcgaactaaaaccaactattttctgtgctgttccccgtgtgcttgatagagtgtactcaggtttgacgcagaagatttcttctgggggcttcttgaagaagacattattcaactttgcttattcatataagcttaataacatgaagaaagggcttagacatggagaagcatctccacttcttgataaaattgtgtttgacaaggtaaagcaaggtttagggggtagagtacgtcttattttgtctggagcagcacctttatctgcacatgtggaaggttacttacgggtggtgacttgtgctcatgtcctacagggatatggtctgactgaaacctg

SEQ ID NO: 220118 - DNA, 426 bp, Glycine max
taacctttctcattccccatctcctcaccttattcagccactgctaatttctagggttccgaaatggacgctggcggaaagatcaagaagggcgccggtggaagaaagggcggcggccctaagaagaagccggtttcaaggtccgtcaaggccggtctccaattccccgtcggaagaattggccgttatttgaagaaaggaaggtacgcccagcgtgtcggtaccggtgctcccgtttacttggccgcagttctcgagtacctagctgctgaagtgcttgagttggctgggaatgctgcacgtgacaacaagaagaacaggattattccgagacatgtgctattggctgtgaggaacgatgaggagttggggaaattgcttgctggtgtcaccattgcacatggtggtgtgcttccaaacattaac

SEQ ID NO: 220119 - DNA, 453 bp, Glycine max
  unsure (1)..(453): unsure at all n locations
atttgtagcagactgtctagagttaagccccaggtcgacatgctcactagtcagaagccgccctttttttttttttttagatagtaaacaagaagtttccacttttcatttattaagcaaactcactcctacaagcaacacaatgggacaagaattacaaagtttaagaaacacatcaaatttcctgttacaccaaaagcatctaagcaccgatatacaacactacttttaaaaaaattaaaataaaggtttatctaagccttcttaagagatttagtagccttggatggagacttaagctccttggcagccctctccgtcttcttaggcaacaaaacagaggtttatgtttggaagcacaccaccatgtgcaatggtgacaccagcaagcaatttcccctactcctgatcgntcctcacaggcaatagcacatgtctaggaataatcctgtt

SEQ ID NO: 220120 - DNA, 550 bp, Glycine max
  unsure (1)..(550): unsure at all n locations
ggccaatcccagaggacttttgtgtatattaaggatgctattgaagctgtcttattgatgattgaaaatcccgccagggctaatggacatatttttaatgtgggaaacccaaacaatgaggttacagttaggcagcttgctgaaatgatgactcaggtttattcaaaggtaagtggagaagcacctctggaaaaacctactattgatgtgagctccaaagaattttatggtgagggatatgatgatagtgacaagagaattcctgacatgaccataattaataggcagcttggctggaatcctaaaacctcactttgggacctgcttgaatcaactctcacctatcagcacaggacttatgctgaagccgttaagaaagtcattgcaaagcccgtggcaagttaaacttgtatggtattgaattgcattgagaagagtgtttctgcctataggggcacttatatatagttcaatggttgattntatttatatacatggtaatttcccccttggttttggtagccaatgtaagcaacgtagcccatgcctt

SEQ ID NO: 220121 - DNA, 571 bp, Glycine max
  unsure (1)..(571): unsure at all n locations
tacctctcaagtttttgaagtatagagatggcagagacattcctatttacctcagagtcagtgaacgagggacaccctgacaagctctgtgaccaaatctctgatgctgtcctcgacgcttgcctcgaacaggacccagacagcaaggttgcctgcgaaacatgcaccaaaaccaacttggtcatggtcttcggagaaatcacgaccaaggccaatgttgactacgagaagatagtgcgtgacacctgcaggaacatcggctttgtctcaaacgatgtgggactggatgccgacaactgcaaggtcctcgtcaacattgagcagcagagccctgatattgctcagggtgtacacggccacctcaccaaaaaacctgaagaaattggtgctggtgaccagggtcacatgtttggctatgccactgatgaaacccctgaattgatgccattgagccatgttcttgcaacaaaactcggtgctcgtctcaccgaggttcgcaagaacggtacctgcccttggctgangcctgatgggaagacccaagtgacccgtgagtatttacaatgacatg

SEQ ID NO: 220122 - DNA, 435 bp, Glycine max
  unsure (1)..(435): unsure at all n locations
gctaattaagaataattttgtatcacgtttaattgatcatgtaaaaaaattacatatgaggattgaagatactaaattgaatggagaggaggaagagaaagagagaagcacacacgaattaagtaaaataaatgaaacaaattatagatatgataagggcaaagctcaaaaaactcccagcacacagcggtgaggaatgaatggccttaagcctcctcccacttgagtggcttgatcacttcccatgtgaagtcagggtcctctcttccaaagagtccatatgcagcaggcttcaaaaacctgttatttccacccctcttgagatcaaaggtgatggagatcataccaggcctgaaatcaaagatctccttcacaatgctaaagatctccttgtgagggatctttccagngccataggtgtcaacaaacacagac

SEQ ID NO: 220123 - DNA, 410 bp, Glycine max
catataaaagattagggatggatgttaaaagataaagaatgattacaatcaaacgcttatagatttatggaccccaaaaaaaccatcgcaattaattagaaaaaatggagacaaatgtgagaagcacttttgtattggagataacacaggcacaaagttagtaaaacaatgattttcggaccatgcttgcaaccccaacaattttaataagagcctaaaactcaagtcaacataagatcattccctccaagaagagggcgaaggcaaacacgaacttcatgctcttgtgatcccacacgaagttttggcaccatgatctcaagcactgatcctggcccatcatagtatagctttatataggcatcttcaagaatacgaggtgaaagagggatttcacgaacaaactcacc

SEQ ID NO: 220124 - DNA, 441 bp, Glycine max
gtcctccctctgcttctttctttcttagttgcagcgcgattgctgcatcgtcctccaataagagctcgctgctagtgaaccctaacacggcggcaacgagaggtgttcggttgaagctcagatcagcgatggcagcagcaacccgcacttctctgcggttcctcctctcagtctccgtaaccctaactctcgctcacctcgccgcctcaaattccgaaggcgacgctctctacacgctgaaacggagcctctcggaccctgacaacgttctccagagctgggatcccactctcgttagcccctgtacttggttccacgtcacctgcaaccaggacaaccgagtcactcgcgtggatcttggtaactctaacctatctggacatttggtacctgaacttgggaagctggagcatctacagtatcttgagttgtacaaaaaca

SEQ ID NO: 220125 - DNA, 374 bp, Glycine max
agtattacatcaatagatattcatgtcttatcatcatcggcagatcataatattgttacaaattccaatgcccttcagtatgtaaatttacatataccagagattacatttaccactgcccattacactatgagggaatacatatatttaattcaacgcagattgagatcctaccacatgacgttattcacgagcagtttgaggcataactcacaagtcccaacaactctggaccttccatacgaggattattctgaaaggtattgaacggaatatgctcgaatggcccggaggtaggaattggaccacataaatcattattggagacatccactactttaaagctagaaacagcagcaagttccttggggatc

SEQ ID NO: 220126 - DNA, 389 bp, Glycine max
gccttttctttcgtagatagctactacttcactttcatcctttgctccagaaaattaactagctaggatggtgagtgttgaagagattcgtaaggcgcaacgtgcagaaggccctgccactgtcatggctattggcaccgccactcctcccaactgcgtggatcagagtacctatcctgactattatttccgcatcaccaacagcgagcacatgaccgagctcaaagaaaaattcaaacgcatgtgtgataagtcgatgattaagaagcgatacatgtacttaaacgaagagatcctgaaggagaatcccagtgtttgtgcatatatggcaccttcgttggatgcaaggcaagacatggtggttgtggaggtacccaaagttggaaaag

SEQ ID NO: 220127 - DNA, 373 bp, Glycine max
agcattaataacacgacttgttcttatttactggtatacaaaaagaagcatttgatgaaatcagggggaaaattcaaaagacaaagaatacatttttcaaactgaactgcaaagaatacataagaaaagagaaagatttgctgtcttaagaaaatactattactgattagacactgactcaattactgattagacagtgacactgcggagcacaacagtctcaacggagagtccagggccgaaaccaaatagcacaccccagtcaaggccttcaccggttgagccaagtccattttctattgatttcttcctcatttgatccaagatgaatagcacacatgcacttgacatgttaccatactcgctgagcaca

SEQ ID NO: 220128 - DNA, 341 bp, Glycine max
gaagatggagatgtatcagatctggagcaggagaatagcgttgggagcgttcgcgtttgttctgcttttcctatcggcctcagcagacgacgtcgttgtgctctctgaagataacttcgagaaggaagttggtcaggacagaggagctctcgttgagttctatgctccttggtgtggacactgcaaaaagcttgctccagaatatgaaaagcttggtagcagcttcaagaaagccaaatctgttttaatcggcaaggttgactgtgatgagcacaagagtttgtgcagcaaatatggagtctctgggtacccaacaattcagtggttttcaaaaggatctc

SEQ ID NO: 220129 - DNA, 382 bp, Glycine max
  unsure (1)..(382): unsure at all n locations
aaagacaaaagctatcgnctcccaaaattttaaaccgctcaggtagactacaatggggagaagaatcgtaagttcggaatttttaaccccaaaagcgccatgcaagataaggtcaatagtacagactcaaattaagcactacaagtatccacgttgaatatctcccagcattttcgatatcaaaggcaaacaatcatcaagagctgcgattgatcacgagcttccatgagagatggttaatgatgcaccaaaaagtcaagccgcatatgtcgacaagatatttttctttagaggtaactcgccggccttggcaggactaaaggacttgtcaagtatgcgctgnaggcgctggatttcgntcttagcataatcagaacctttt

SEQ ID NO: 220130 - DNA, 519 bp, Glycine max
  unsure (1)..(519): unsure at all n locations
gagatagtgtgggagggagagaggagcggaggagagaaaatgacgacgaggttcaagaagaacaggaagaagagaggccacgtcagcgccggtcacggtcgtatcgggaagcaccgcaagcatcccggtggtcggggtaacgccggtggcatgcaccaccaccgcatcctcttcgacaagtaccatcccggtttcttcggaaaggtgggtatgcgctacttccacaaactccgcaacaaattctactgccccatcgtcaacattgataagctatggtccctcctaccccaggaggccaaggacaaggccaccgtcgacaaggcgccattgctcgatgtcacccagttcggttactttaaggttttgggtaaaggggttttgcctcagaaccagcctctggtcgtgaaggccaagcttgtttccaagatcgccgagaagaagatcaaggaggcaggtggagccgtcgttctcaccgnctgatttttttagggtatttntatttaaaggattttgagatct

SEQ ID NO: 220131 - DNA, 356 bp, Glycine max
tttgatattggtttttgttttttttttttttttttttggcatgtagaagctgccatcacataccataacacgcaacaaaaaacgatatagtccagaacattgagaatataaagaaaaacatttaaactaatccgactcagacagattaaagcacgaacccggaccagaaatgaccgcagatctcagaagccttttaaataaaaatgccctaaaaaaatgagggggagagaacgacggctacaactgcctactaggacgtctacttggcgatcttgggaacaagctgggtcttgacgaccagaggctggttttgagggaaaacgcttttacccaaaaccttaaagtagccgaactgg

SEQ ID NO: 220132 - DNA, 561 bp, Glycine max
  unsure (1)..(561): unsure at all n locations
ctcttcttctcttgcggctagggttttagcgcagcttcttctagatttaaggaagatgggtaaggaaaaggttcacatcagtattgtggttattggccatgttgactctgggaagtccactaccactggccacctgatctacaagcttggaggcattgacaagcgtgttattgagagatttgagaaggaagctgctgagatgaacaagaggtctttcaagtatgcctgggtgcttgataagcttaaggctgagcgtgaaagaggaatcacaattgatattgccttgtggaagtttgaaaccaccaagtactattgcacagtcattgatgcccctggacacagggatttcatcaagaacatgatcactgggacatcccaagctgactgtgctgttcttatcattgattccactactggtggttntgaagctggaatttcaaggatggacagactcgtgaacatgctctgctntcattcacccttggtgtgaaacagatngatttgtgctgtaacaagatggatgctactacaccaagtaccttcagggcggtatgatgaatt

SEQ ID NO: 220133 - DNA, 487 bp, Glycine max
  unsure (1)..(487): unsure at all n locations
aaaagcaaaccaagcaaaaattgaacacaaatataaagttgacatttaaaaagcaaaccaacaacgcaacggcaaagccctaaaactcgctgcgcttaacaaaaatgtaatcaggggttctcacaaacacaacacattaaaacagaatgataaaaggagtcttgccaccgtcgatcaagaacccaattctgggaacaaaagttgcgagatgatggtggagacttcaaactatgtccgaaaaacaagctacctagaaacgaagacacaagggcaagaaaccaacatttattgtaaccataagaaacgacatcccctgatgaaccaaaccgcacgattcacttcttcttctgggcagccttggtgaccttggctccagtaggatccttcttctccacgttcttgatgactcccacagcaacagtttgacgcatatccctgacagcanagcgaccaagtggngggtactcagagaaagttcaaccaccat

SEQ ID NO: 220134 - DNA, 461 bp, Glycine max
cactactactactactctgtttcagatatgggcttctggcgctgagcacctggatctgatcttggagctattggatagctcatgcttatgccaagccccacgagctgcaccgacactaccgcccactacaacatcatcatcacttatcacacagatcatctcctgttccagcggcccagcacacaagctgcctaccagacatagccatataccatatagcactactgcactaaaaggacctgccctaccaaattaatcctgagccacagacttatcactagctactacatctgcatctcttacaagctagggtgtacaccaccattcttagatacttggttctcaagtccacgtgagaagctatcttatgaccaagagaacgatcatactgagaccattctgatatccagatgctacggatttcatgggtgacacgtgggtcagacagagcatcatcccat

SEQ ID NO: 220135 - DNA, 423 bp, Glycine max
gagggataagattcaagaaataataaacaacatacacaagtcaacgagtgcacttcgcttcgctttattttttaaattcttacatgtgccatgaaagagtgcatggcaatccactatcggtcacgccggccttcacgtcggaaacgcctgctgggagctctactgtctcgaacacggcattcagcctgatgggcagatgccaagtgatcagactgatggtggaggtgatgatgctttcaacaccttcttcaatgaaactggggctggaaagcacgtgcctcgtgcgaatgatgagatctcgagcctactgtgattgatgaaggtaggactgagacataccggcaactatttcatcctgggcagaatcatagccggtaaggacgatgctggatacaactttgcccatggccagtataccattgg

SEQ ID NO: 220136 - DNA, 471 bp, Glycine max
ttggacttctagaagcacccccatcatgggctccagatgcacttgacgctgctgtgcagcttgtggagcttcttcgagctgctgaagattatgcatctggcataaggcttcctagaaattggatgcatttgcatttcttgcgtgcaatagggactgcaatgtccatgagagctggtatagccgctgatgctgcagctgctcttctttttcgtatactttcccagcctgcattgctttttcctcctcttagacaagttgacggagttgaagttcaacatgaacctttgggtggttatatttcttcctataaaaagcagatagaagttcctgcagctgaagcctctattgaagctactgcccaaggcattgcatcaatgctttgtgcccatggtccagaggttgaatggagaatttgcaccatttgggaagctgcttatggcctgattcctacaagttcctcagctgttgatc

SEQ ID NO: 220137 - DNA, 419 bp, Glycine max
ctataagtctagcaaaaaattgtcacagactaagatggatgatttcatttcacatggaaatagtacagcctaactctttggcagcgatatcaagaaagttaatagacaatccgtttgaaagtcggctgagagcttcccaagtcaagcatttttctatgtcagcttgccagtcaacggcatccaaattgaagtattgataagaagggttgagggtgccatttaatctccgaggtttaggactacatctgattgaaccagtatgcaaaatgtcacgaagaactgatatactcagagctcggacatgtgcacttggatgagaaagacatctaattgtagctgagatgcgacactttaaaaggttagaaaggccatctgccacagccaatccagattctccaaactcgagcactggctgaact

SEQ ID NO: 220138 - DNA, 556 bp, Glycine max
gctttacatataatagcagcatcaatattgcagttgctgtggctatagatggtggactgattacaccagtgcttcagggtgctgataagattgatgtctattcattgtcaagaaagtggaaggagttggttgataaggccagagcgaagcagcttcaacctcatgaatacaacactggtactttcactctgtccaatctgggaatgtttggcgttgatcgctttgatgctattctgccacctggaactggagcaataatggctgttggagcatccgagcccactgttgtggctacaaaggatggtcgcattggcatgaagaaccaaatgcaggttaatgttaccgctgatcatcgagtaatctatggtgctgatttggcttcattcttgcaaaccctgtcccagattattgaggaccccaaagatcttactttctagtctcattttcctaacagtgaaaaagcgtttcttttctggcatgattcctctcatcatggttgtgggattattaattgttgacaaggagaaatcgaggagtcaattgctattcactcggg

SEQ ID NO: 220139 - DNA, 319 bp, Glycine max
gttttgaggtactcttattgatacggatggcagcaccattggcatgtgttgttgggagtggtttatccatacagagtaataaaattggcaaggacgtcaatggaagatatctcttctcatatcataggctttcagtactgagtaaggagtcaaagacaatatgcataaaggcttccttggatcaaaggaagcatgaaggtagaagaggatttctgaaattgttgaatgtgggagttggcttacctgtattattaggaggtgggaaagcttatgctgatgaacagggaccttcctcctccagaatgtcttattctagatc

SEQ ID NO: 220140 - DNA, 475 bp, Glycine max
gcgaagaagaagccacagagaactagtctcctactctcacccgcaagaaaaaaatggcatctcacatcgttggatacccccgtatgggtcccaagagagagctcaagttcgctctcgagtctttctgggatggcaagagcagcgccgaggatttgcagaaggtgtcttctgatctcagggcatccatctggaagcagatggctgatgctgggatcaagtacatccccagcaacactttctctcactatgaccaggttctcgacgccaccgccaccctcggtgccgttccaccaaggtacggctggaccggcggcgagattgggtttgatacctacttctccatggccagaggtaatgctaccgtgccagctatggagatgaccaagtggttcgacaccaactaccactttattgtccctgaattgggccctgatgtgaacttcacctatgcttctcacaagggctgtgatgaata

SEQ ID NO: 220141 - DNA, 552 bp, Glycine max
ggactctttgtgtttcgactctattttctccaaacacaacaacaacaccagaggcagaggcagagagaaacagagagagaaaggagtaacaaatagttgattatttcaaagacaatgaacaataaagatggaaaacccgtcatccaaccagacaagagcaggattgtccctatggcaatcatatttgtggtgctatgtggatcttctttctatatgggtataatcttttgttctgagaaggacagatttgtggcaatgtacaaccagaactccattgaatcccccaaggagtcatcaataagttctctgcaaattaaatacacgagttttcctgaatgcagcgctgactaccaagattacactccatgcacagatccaaggagatggaggaagtacggctcctatcgacttgtgttattggaacgccattgccctccaaaatttgagaggaaagaatgcttagttcctcccccagatgggtataagcctccaattagatggccaaagagcagagatgaatgtggtataggaacgtccatatgactggataac

SEQ ID NO: 220142 - DNA, 536 bp, Glycine max
gttaaaaagaaagaaaaataaaaaaaaaccaaagaaacagaaatgttggagtcaaaagactcgacgatgaagctcttcgggaagacgatccctgcgccggagatctccgccggagctccggcattgtcttctggtgatgctgatgctgttggtgttgttcagaaccatggttcttcaagtgtcaatggggatggtgaagagcacgagattgagcaggacataatgggagaggaaacaactgagagtgagaaggaagatgaagtgaccaatcttgatactgtctcaagaccaggggaagtgtctattaacccctctaccaagaaggaggatcttacattgaaaacttcaaaaaagaccgaacaagaacaaggtgaaaattcccaagataaaacactgagaaagccggacaaaatactgccttgcccccgctgcaatagcatggataccaagttctgctactacaataattacaatgtcaaccaaccccgccatttctgcaagaattgtcagagatactggactggcggtggagtgat

SEQ ID NO: 220143 - DNA, 536 bp, Glycine max
tcacaaactagtaatattattcttcgaatccattttattattcataatgggtattttcacatttgaggatgaaaccacctcccctgtggctcctgctaccctttacaaagctctagttacagatgccgacaacgtcattccaaaggctgtcgaagccttcaggagtgttgaaaaccttgaggggaacggtggccctggaaccatcaagaagatcactttcgttgaggatggagaaagcaagtttgtgttgcacaaaatagaatcagctgatgaggcaaacttgggatatagctatagcgtacttggcggagttgggttgccagacacagtggagaagatcacattcgaatgcaaattggctgctggcgccaacggaaggtctgctgggaagctaactgtcaaataccaaaccaaaggagatgctcagcccaacccagacgacctcaaaattggcaaagtccagtctgatgctctcttcaaggccgttgaggcctaccttttggccaatcctcattacaactgatccaattcgatct

SEQ ID NO: 220144 - DNA, 357 bp, Glycine max
tttctttatgctggattggtgtttgtcttcttttattattataacatattgatgtattgatgaagtgacatacaaagacatcaactggctctcacaattctgtggaaaaaggaaattagaatggaaacactcgttacatcaattgtgagccacaccacacactcaaagtgattgaataacactccacacatcgcaacaaaactcttgaatataatattaaacaaggtctttgcagatcactgaatactgtagatcgaattggatcacttgtaatgaggatcggccaaaaggtaggccttaacggccttgaaaagagcatcatacttgactttgccaattttgaggtcgactgggttg

SEQ ID NO: 220145 - DNA, 440 bp, Glycine max
gttttctttctttctgccgctcatatacggagagagagaaattgttgaagaagcttttctacttcgagcatttttattatttaattttgtttggttttagggtttgagaatcagcactgtgtcacgatgtccaatcatcaccgttcttcctctaagatcggccttccacctcaagaactccttgacgatctctgcagccgatttgtgctaaatgtgccaaaggaagatcttcagtcatttgaaaggatcttgtttcttgtggagaatgcacattggttttatgaagataattccgtagaaaataatccatctctgaagtcattaaatctgaaggagttcacttctttattgatcaatagctgtgatgtttttcagccttatgtggcccatatagatgatattttcaaggacttcacttcctataaggttcgagttcctgt

SEQ ID NO: 220146 - DNA, 556 bp, Glycine max
tagctccattttcatttcctctctctcagttttccaagaattcttaagctatgggaaagtcttacccaaccgtgagcgctgattaccagaaggccgttgagaaggctaagaagaagctcaaaggcttcatcgctgataagagatgcgctcctctaatgctccgtatggcatggcactctgctggaacttacgacgtgagctcgaagaccggtggtcccttcggaaccataaagcaccgctgcgaactcgctcacggcgctaacaacggtcttgacatcgctgttaggcttttggagccactcaaagcggagtttcctattttgagctacgccgatttctaccatttggctggcgtagttgccgttgaggtcaccggtggacctgaagttacctttcatactggaagagaggacaaacctgggccaccaccagagggtcgcttgcccgatgtcactaagggttctgaccatttgagagatgtgtatggcaaagctatggggcttaatgaccgagatattcgttgttctgatggggggtacactattggagcttcgca

SEQ ID NO: 220147 - DNA, 453 bp, Glycine max
  unsure (1)..(453): unsure at all n locations
tggagactcatatgcctcgagttaanccccgggccgatgagctactagtcggcagccgacctttcttttgtcttcctttttctctttcgctgttctttgttatttatctaaaggatcgacctcgaataaaaacaacccaacttcaatcttcatctccataaccaacacaatacattcaaatgctacccaatatttagtggaccccacagaggcgcgtttgaaaccatgaccatcgaatttatgctttttatattgtgggcaccgggcctctgcaacaatcccaaaatcgtggctttggcttcaggaaacccatactcagaaagctttcggtgagcctcagcgttatctgcgaagtatgggtgttcattcgatgcatatttctcaacaagatggcggaacacaagagtggacttaagggccttgtcagaaggtaactgaaagaagccttctttc

SEQ ID NO: 220148 - DNA, 580 bp, Glycine max
agagagagagggcggttgccttttcatatataagagcttagagagcgcttcgtaacggggcactctcacagcctgtctctcaattagctcttttttatttatgtccgatcgcatctgctctcaaccacattcatgccttaccgaagaaaactctcttgaaggtcatcattctcggtgacagcggggtggggaagacgtctttgatgaaccagtatgtgaataagaagtttagcaatcagtacaaggcaaccattggagcggattttttaaccaaagaagtgcaatttgaagataggcttttcaccttacagatttgggatacagctggccaataaagattccaaagccttggagttgctttctatcgtggtgctgatcgctgcgttcttgcatatgatgttaattcaatgaaatcattttgacaaccttaataactggagggaggaacttctgattcaagctagtccttccgatccagagaattttcctttcgttgtcataggaaacactatagatattgatggtggaaacagcagagtggtgtcagaaaagtatgctcgggcttggtgtgcatcaaaag

SEQ ID NO: 220149 - DNA, 418 bp, Glycine max
  unsure (1)..(418): unsure at all n locations
tgggaatatgacgtcgtctggagttaagccccgggnagactatgctactagtcggaagactgccctttttttttttgtttttttttttgaaaaatctaacgctgtttctttcacattatgggaatagcatacatgtagaacaactgttttgggctcttatttcaaaaccaaacaagcacccaactgatagcattggaccattttgttttttgagctaacacttttgtacaatgatgcctcctcacaccctgcaatgactatgatttggaagtaatggacttttttgaattgaaaagaaaacctatatattcagcactcacatgctgttgcccgaggctgactgcttgttccaacatcaattgggtctggcaggtataatggttcttcttctccactttccaaggcattctttgctttg

SEQ ID NO: 220150 - DNA, 545 bp, Glycine max
  unsure (1)..(545): unsure at all n locations
tgaatacagattgctggactaatacttccacagtgaataaatggcttcggaatcacaacatgactgctaaagatgcctatcaatattttgtactgaaggctcaaaacatagctcttacaaaaaattggagtccagtaaactgggaagaaaccttcaatacttttccaactaagctccatccacggactgtagtgcataactggttgggccctggggtttgtccaaaggctgttgcaaaaggtttcaggtgtattttcagtaaccaaggtgtatggtatcttgaccatctagatgtaccttgggatgatgtctatactgccgagccactagaaggaatacgtaaagcttcggaacaaaaacttgtacttggaggagaagtctgtatgtggcgtgagacagctgatacatcagatgttcagcaaacaatatggcctcgagcagcagcagcagcagaacgcttgtggagtcggagagattctacctcangaaatgttaacataattgcattgccgcagttgcattacttcagatgtctcttgaataga

SEQ ID NO: 220151 - DNA, 409 bp, Glycine max
aacaagcgaacaagtattatttattgaattcatcaataacttacaatgtgattgttgtgaattcaccacaaagctctaacgttgactaacccctagccagataaacatgagttacattcacaacagtgtagacatacacagatgaagcatatgataagtttattgttcaaagcatgagcctggaccaacaggagcagttcttgcaataaaattcttgacaggagcagctggaatccctcgtctattcaagagacatctgaagtaatgcaaccgcggcaatgcaattatgttaacatttcctgagggagaatctctccgactccacaagcgttctgctgctgctgctgctcgaggccatattgtttgctgaacatctgatgtatcaggtggctcaccccacatacagact

SEQ ID NO: 220152 - DNA, 481 bp, Glycine max
  unsure (1)..(481): unsure at all n locations
cgcagagaaagaaaaccctagctcaccgtttcaagatgcaaatcttcgttaagaccctcactggtaagaccatcactctcgaagtcgagagttcagataccatagacaatgtaaaggccaaaattcaagaccagggaaggatcccaccagaatagcaacggctcatttttggctggccagcagcttgaggatggccgacccttgcttgatattacaatcaaaaggagttcactttncacttgggttttcgtgtccgcggggggatgcacatattttgttaaacccttaccgggaaaacaaattcccttgaagggctcaagagctccgataccattgacaacgttaaggctaagattcaggacaaagagggtatccctccagatcaacagaggctgatctttgctggaaagcagctagaggatggccgtacccttgctgattacaacatccagaaggagtccactcttcattgtggactccg

SEQ ID NO: 220153 - DNA, 404 bp, Glycine max
  unsure (1)..(404): unsure at all n locations
gctgctaaatcggaagaaattgaacataaatttcatcaaacatgacaacagattgtacttattcatagcaaagaactaaatttcataaaagggagcttcacaaattcacgaaccaaacagaatttataaaaagaccagaacaaacaacagtttttcaaaggccactattgaccatggaaacactttaacaagagtaaacctttcaggaacattaaaaaaaaaaaaacccaaagatcttcggaacttccacatgcttagacttcaagacacctacagaacattctcagacttttaaaacccaccacgaagacgcaacacaaggggaagagtggactctttctgaaagttgnagncagcaagagtccttccatcctccaattgcttcccagcaaatatcaacctct

SEQ ID NO: 220154 - DNA, 345 bp, Glycine max
caattttcaaagccagacagacaaacatgtccgagaatattgagtccaattctccttcgctttccctctttatctgaaaggtatggagtgttttgacttctggaagagataatggtgcagtgcctagacggattaaagcatttgtgtgctgctctggtaaattgttgtgatgccgattcgtcaaagcaacctacaggtttagaaaatccaaaagttctggcagaagaaccatggttaatggtaattgatatggaagccgtatgaattggtcaagaagatcaacagtgcaatgattgatgaccgactaatttattaggaagaattttagatgggattgttcaagac

SEQ ID NO: 220155 - DNA, 389 bp, Glycine max
  unsure (1)..(389): unsure at all n locations
gggaagagatccagcagcaatggtgtacgtcaaggctcagaaatcaaaagcctacttcaagagatatcaagtcaagttcaagagaagaagagagggaaaaaccgattaccgtgccaggattcggttgattaatcaggacaagaacaaatataacactccgaaataccgatttgtggttcgctttagcaacaaggacattgttgcacaaataatatctgctagcattgccggcgatttagttcttgctacagcatattcacatgagctgccacgatatggtcttgaagtaggacttacaaattatgcagcagcttattgcactggtctcctgttggcccgaagagtcctcanaacacttgaaatggatgatgagtatgaaggaaatgttg

SEQ ID NO: 220156 - DNA, 567 bp, Glycine max
agcatctctcacctttcccttggcgacgccgtgagaaacgaaaagcgaacaaaaaaaaaacagagtggggtgggaggcacacgcacaaacgcagagtcagaatctccaatcttcaatcggagacaaagctagctcgaacgaacgaagtagagtagtgtgctacgaaaaatgtggcggtgcatcgcacgtggtctccgtggacctgcttccaccagatccacctccaatcactcacttggatctcaactttctagattcttctctagtggggcgaactcctcgtacaccgtggtggatcatacttatgatgctgttgtcgtaggagctggtggcgcgggattgagagctgctattggactttcagaacacgggttcaatactgcttgtattaccaagctcttcccaactcgttcacacactgttgcagctcaaggtggtataaatgctgctttgggaaatatgactgaagatgactggaggtggcacatgtatgacactgtcaagggaagtgattggctaggagaccaggatgccatccaatatatgtgtagggaagcaccaaaagca

SEQ ID NO: 220157 - DNA, 364 bp, Glycine max
aaaactacaaacgtgcatttgataaataggcaaaatcttgtcaaaatacaaacagttaatgaaactgagttgctgggttgctattattctctgctgcaaatacagagggttattcgaggatgccaggaatatcaatcagcattgatgatgaatgcaacaattatcatcaaaaatcaaaatcacccatctaggaccttttattgcatttttttcctgtcatttaacattgagacaagtctaatccatccattagcaagtatattaatacacccgagccttgggagggaatgattcaacctcatcatccaatacattcaaatgcaccggcctgtagtccaaccggactttctcgttctcccagaat

SEQ ID NO: 220158 - DNA, 467 bp, Glycine max
aaactgctgcttctcgacccacttttgaagttcaaaacttaaaccctagttctctctctctttctttctcctgcatcttcaaccatgtcagcgatgctgcaacctcagatcattctgctcaaggaaggcacggacacttcgcaagggaagccacagctggtgagcaacatcaatgcctgcaccgccgtcgccgacgtcgtccgcaccaccctcggccctcgcggcatggacaagctcatccacgacgacaagggaaccgtcaccatctccaacgacggcgccaccatcatgaagctcctcgacatcgtccaccccgctgcaaaaatcctcgccgacatcgccaagtctcaggactccgaggttggcgatggaaccaccactgtggtgttgcttgcagctgagtttttaagggaggccaagccattcattgaagaacggtgtcactctcaaaacttgataccgagcta

SEQ ID NO: 220159 - DNA, 514 bp, Glycine max
  unsure (1)..(514): unsure at all n locations
gaagaaccttctgcacctgctgagaagaaagaggggccaaaaagacggggtgctgcaaaaaagaagtcaagtgccatagtgttggacgactcagatagtgataatgaagttcacaatgttgacgatgacgatgatgacgaggactttgaaatcatgcagccagttgccccagggagaaagaaaggagggagaaagcctgctgctcaaaatgccaagaaggcacctgctgctgctgccaggaagagaaacgtaggtggcaagcaatctcagtttttgggtcagaaactcataactgatatgttggagagtacagggatatcaccagagaagaaagtgaggaagatgagggcgtctacatttaacatgaaaagcagttctgtattgggaagggttgctgctgctgacaaagatgaaagtgtaagtaaagactagtctggtggctctgatgcttctagttcttctacaagcatcactgangaggtcgttgagattgcaccaccagcagcaagagcta

SEQ ID NO: 220160 - DNA, 422 bp, Glycine max
ggacctatgaaaaatctatttcaatcatcatgaaaaccttttccaaaggcttttccaattagtgcaactcacttataacggtcacaattatcccttggaagttaaaatccccaattagggtttttcaaagcccacacattttcccttcctaggcttcatcttcctcaaaatcggaataatcttcattatcaaaatcattggcactttcagattcactcagtccatatgtggattgcctaccaatggccctttggggcctaactcttgctgctgggggggcaatttcaaccaccttctcagggatgcttggagaaaaacttgaagccttagaaccccccgacaagtttttacctacacttttatctttggcaggaggcggaaccctttccaaacaaaactggtttcttggaaaaggggacccc

SEQ ID NO: 220161 - DNA, 548 bp, Glycine max
  unsure (1)..(548): unsure at all n locations
ctaagcaaattgatgatacacagtacccaaaaacattcttctataaagaagaccttcatccaggcaaaacaatgaaagtacaattcaccaagcgtccctatgcacaaccttatggtgtatatacatggttaacggatattaaagacacctctaaagaaggatatagttttgaagagatatgcatcaagaaagaagcgtttgagggagaagagaagttttgtgcaaaatccttgggaacagtaattggttttgccatttcaaagctgggaaagaacattcaagtactttcaagttcctttgtcaataagcaagagcaatacactgtggaaggagtgcagaatcttggagacaaagcagtgatgtgtcatgggctaaatttcagaactgcagtattttactgccataaagtccgtgaaacaacagctttcatggttccattggtggctggtgatggaaccaaaactcangcacgttgctgttgccactcagatacttctggaatgaatcatcacatgcttcatgaactcatgggagtngatcctggaact

SEQ ID NO: 220162 - DNA, 488 bp, Glycine max
tcttcttaaaccctttttttttttagacttaaaaaagcacactgcatattcatcaaagcatcatcaaagcacactgcatcctaacagcacacgtacgtagaaaggtgaagttccaggtcttgcacaacatacacaacacaccataatcaattgcatatacaatcttatggagcccaagatgcagatgcatggactaattaaacaacaacgttagtctgataggcagtgtccatagatcaattgggtacccataaaatggccttgcttccacggaaacggcaaacagggttagctccaggatcaactcccatgagttcatgaagcatgtgatgattcattccagaagtatctgagtggcaaacagcaagtgcctgagttttggttccatcaccagccaccaatggaaccatgaaagctgatgcttcacggactttatggcagtaaaatactgcagctctgaaatttagcccatgacacatcactggttt

SEQ ID NO: 220163 - DNA, 469 bp, Glycine max
  unsure (1)..(469): unsure at all n locations
aaaaagatcagncgtatagaaaaatcccaaaccagacaagctactagtcagcaagcagcccattacaacaaacacaaaaaaaaaaacaaaaaatcaacaattaaaaaaatacaaaaaaaataaaaaaaacaaaaaaaaaacaaaaacctataaaacaacaaaacccaaataacaagcccttaacaccacgccccgaaaaaacaaaaaacaccaacacccacacaaagagggaaaaaaaaaaaaaaaaaaacccaaaaaaaaaaaaaaaaggagttgaaaaaaaaaaaaaaaaaaccacaacaccaacaccaaaaaaagggaaaaaaaaaaaaaaaaaaaacaaaggcacacaaaaaaaaacacccaaaaaaaaaaattcaaaaaaaaaaacccaaaaaaaaaaaacatccaggaacaaaaaaaaaaaaaccaccaaacaaaaaaaaggctccaatccttatcacaaaaa

SEQ ID NO: 220164 - DNA, 531 bp, Glycine max
  unsure (1)..(531): unsure at all n locations
tttcttttaggtttccactctctctcacacacacactctgcaataatctctcttctcttcttcagtctctcaactactgcctaaccaaaccttccatttccgcaggcagtttcttaaatttggagtctgatgtctccgccactgctggttactgaagaagacgaaggacagagcaatgcctcgatggtagcatctgcatcttcaccctcctcggagtgtttcaccctaaatgaggctagattgaaagaacgcaattacctgggattgtcagattgctcttcggtggacagttctattgtcccgagtttgtctgatgagaaaaaggagaatctgaatttgaaggctactgagttgaggcttggacttcctggatcccagtcacctgaaagggatccggatcttttctcgttgagctcaacgaaactcgatgagaagccactgttctctntgcttcctacaaaggatggaatctgctcactgtcccaaaaaactgtggtctcaggcaacaaaagaggttttgctgacacaatt

SEQ ID NO: 220165 - DNA, 500 bp, Glycine max
gtttgcaactaccaattcctccactttgtcacctttattctctttcagtagaacaacagcaacctctctgccttccaaacccacattctggaatttggttccaatgaaacaatcttcttctccggggcacttggccttagccttagacaatccacgtagaacacttcacgtgtcttgtggctccacatcaccacatgcttcccagagatcatcaattcaggggggtgaagcttttttcaggggtgtgttggaaagtatgcaatctgtttacttgaacagaaatcgtactgctaaggccatattggaccttgttcactctgctgagaataactcattatgctatgatcatcttgcattcaggacatttggggtgaatggttatggaattgattccatggctagattttttctggattatggctatacacaaagggaagagttgaggatgccagccaaaaagttgagggctttgtggattctcctcctgctgattcactggc

SEQ ID NO: 220166 - DNA, 443 bp, Glycine max
  unsure (1)..(443): unsure at all n locations
gctgctagacaaatcccttacgattattttatgtttgagtttgagttaattattttttttgaaattaatcaacccaaattattgatgcaacatccacatgattggaattgtatgaaatccaaacttccagaatacaactgggtataaattgtaatatatttccccaagggaaataaagtatacacattcttggtatggagtgagatgagcctcttatgagcctactctgctcaactgctccttggatgtgctttcaaatatcttggcagcacttgctacctcaaaaccatctcttctatggaactctttaacctctgaggcaaggaaatttttatactgaggcagcaccagtcgctcagcaaattcaaagtatgagcatggaactgattcagntataccatcagaaaatttgaaagaaattgaatctgctacagnagagcttt

SEQ ID NO: 220167 - DNA, 446 bp, Glycine max
gagttatgtgtgtgggttttccactggtagctctcgtagtggtgagcatgtgttatggattggcagatgcagaggtgaaaacaccaaatttgcggtggcattattataaggtgacgaatagatgtcacgacgcagaggagtatgtccggcaccaagtgaacctgttttggaagaatgacagaagcattacagcaaagcttctccgcttggtttatgctgactgttttgtcactggatgtgatgcatcaattctgcttgacgaaggagcaaatccagagaaaaaagcagcacaaaaccgggggcttggaggatttgcggtcattgacaagataaaagctgttctggaatcacgatgccctggaactgtgtcttgtgctgatatactccacctcgccaccagggatgctgttaaacttgcaggtggagcaggttacccagttttaaca

SEQ ID NO: 220168 - DNA, 382 bp, Glycine max
acaacaagaaaatttttttgggacttgatttggtgaaactcaaaattttctaaggacaaagaagggttttttcatggaattattctttaccttaaaaacccaaaacaaatttgtttaaactggggatttcggagtccactcaaaacatctgatttcgcctcctatttatttggggggcccttttttgggtttcgggaatttcgggggatctctccttggggggctggtaaaaccctggaattccccattttggacattgatgtagcaaaagatttccgaaaatttttaaatccaacagggaactcctaggagatctggtcagggtcctcactttttagaaattggggatcaactccaaagacaggttggagggaaaggaccc

SEQ ID NO: 220169 - DNA, 506 bp, Glycine max
gcaaacgctgccgaattcgttatcgctttgcactagcagctttgaaacccggttcatccgaagcccttcaccgaaccatgtcgaggagaaaggttagagagccaaaggaggaaaatgtgactctgggtccagctgttagagatggtgaacacgtttttggcgttgctcgcatctttgcctccttcaacgacaccttcatccatgtcactgatttgtctggcagggaaacccttgtccgaatcactggtggtatgaaagttaaagctgacagagatgaatcatctccttatgctgctatgcttgcagctcaggatgttgctgccagatgcaaggaactgggcataactgctcttcatatcaagctccgtgctactggtggaaacaagaccaaaacacctggtcctggtgctcaatcagctcttcgagcccttgctcgttcaggaatgaaaattggtcgtatagaggatgttactcccattccttcggatagcacacgtagaaagagt

SEQ ID NO: 220170 - DNA, 402 bp, Glycine max
  unsure (1)..(402): unsure at all n locations
gacgaacaacgaatagatttataattcattcatgcttaagagtagccgaaagaggagaaccgaattattaaaaacaataatcaaccaaacctaagaagcaacatgctcaactttaaaaaatctctgacaacaatgattaaatgtgtactcaactaaaattctgttcaacacctcaagaaatgcaatagaagttctgatattaacttaaaaaacatcaaaaggccacaattctctttggcattaaaagtaaaatatagcaactccagaataagaagtttaaagncttctaccccttctaccactctttctacgggtgctatccgaaagaatgggagtaacatcctctatacgaccaattttcattcctgaacgagcaaaggctcgaagagctgatagagcacc

SEQ ID NO: 220171 - DNA, 567 bp, Glycine max
  unsure (1)..(567): unsure at all n locations
ctttctcttcctcccaaacatgtttctctttctctctctctctcttaattcctgaaaagcaagtagctaaggaaaacaaaaacatcatcacagaaactcacaaaggaaaaacaaacaaacaaacaaaatgtcttctccaagcaagcggcgagaaatggacttgatgaaactgatgatgagtgactacaaggtggagatgattaatgatggaatgcaagagttttatgtgcacttccatggacccaatgagagtccttatcatggaggtgtatggaaagtaagagttgagctgccagatgcttatccttataaatctccttccataggctttatcaataagatctatcacccaaatgttgatgagatgtcaggatcagtttgtcttgatgttatcaatcaaacctggagtcccatgtttgatcttgtcaatgtgtttgaggtgtttctaccacaacttcttctgtatcccaatccatcagaccccttgaacggagaagctgcagctntaatgatgcgtgatcgagccacttatgaacaaagggttaaagagtactgtgagaagatgct

SEQ ID NO: 220172 - DNA, 478 bp, Glycine max
gaaagcttgaagcaattgattgtggaaaaccactagatgaagcactggcagacctggatgatgttattggttgttttaactactatgccgagcttgcagaaggattggacgcaaagcaaaatgctcctgtatcccttcctatggaaaccttcaagagttatgttctcaaggagcccatcggagttgttgcattaattactccatggaactatcctctattgatggctacatggaaagttgctcctgctctagctgctggttgtacagcaatattgaagccatctgaattggcatctgtgacctgtttggagctggctgaaatatgcagagaagttggccttcctccaggggtattaaacattgttactggattaggcaatgaagctggtgctcctttgtcatctcatcctgacgtagacaagatttcctttactggaagctctgcaactggaagcaggattatgacagctgcagcaca

SEQ ID NO: 220173 - DNA, 402 bp, Glycine max
aagaaaaaatcaactcagcccgtcattaacaaggccatggaacaatttcagggttatacatatgcacattattttctcgaattaagatcatcatcacaaattaatgtcccccacaacttattcatgccagattttagaacagcaattcatatcacagctttgaaggcgactgataccagccccacggttcatcaaatatgtacttgggcacttgcttcacacttaaatagttctcgagtccccattctcctagttcacgaccaaaaccactacgtttaacgcctccccatggagcttgaatgaagcttggttgagcacaatttatccatacaattccagcctgaatagcctttgatatgcgctcgcatctttctagatcttttgacattacagcagacccta

SEQ ID NO: 220174 - DNA, 435 bp, Glycine max
gctctcgtcaagtttcggggcttccttagtagcagagaccaacttctttccctcaaattccttaagctgaccaacagcatactcgttaatagcatcaaccctgtagagaacctcgaaccccttcttcttaagcttttcaaggaaaggggaattcttaacagctttcttgctttcaccagtaatggagtagatgtcattctgcccttccttcatcctgggaacatagtccttgaggctgggcatctcattaccactcttgggggagtgatacctgagcaattcagcaagttttgtcttggtctgagaatcctcatgaataccaagtttcagattcttagagaaggcttcataacttggtatagtctttcttggtctcagcaatttcaaagaacatttcaatgcacttcttgaccaagttcttcccgatgactttca

SEQ ID NO: 220175 - DNA, 320 bp, Glycine max
gagatagtgtgttaaggacactttttcttctgatacaacatcacgactacttctcaaggggggcattaatatcacacgacaccttagttcccatcactgctctatccgcattcacctctagcatccctgacatcttacttaaccccctttgcatgcactaccaccgtatactcttctactagttccattccagtttcttctgtaaggcggttattctctacttccacaaactccgcaacaaattctactgtcccatcgtcaacatcgataagctatggtccctcctaccccatgaggccaatgacaaggtcaccgtcgac

SEQ ID NO: 220176 - DNA, 500 bp, Glycine max
  unsure (1)..(500): unsure at all n locations
gctctgcttcatatctagtctgttactttctgcattcttagaaacatcttttccaatcttcttctcacactaatttgaataaccatgaccttctgtggtggtgcctttgttaagccaaactattctgtgtccccatgccacaaacacaaagctccaagtccataccaaggtggcagaaacaagttctgtgtgagagtttcagcaagtggctcagctgatgaggagaggactattataaggaaagagaaagatgggtggaagatcaattactcaggagagaaaccagcaacaccattattggacacagtcaaccacccaattcacatgaagaatctgtcaacacaggatcttgagcaacttgcagcagagctgagggcagatattgtacacagtgtgtcagacacttgtgggcatcttagctcaagcttgnaagtggtggagttatcagtggctttgcatcattgtttcaacacccttgaagacaaatatatatggatgtt

SEQ ID NO: 220177 - DNA, 489 bp, Glycine max
  unsure (1)..(489): unsure at all n locations
agagttaattagcagtaatataattaattaattttgatacattacgatgccttgattggttccttgagttgtcagaataaattcatctctttactcactagtgatgacctgagaatccaattatccaaaatatgagagcatcaagatgtaaactccgacaattccagagtagttatttacagcttcctctaaagcacagtaccaacaaaagtcttaaattttttttatgcatcttcggggaaccaggtcaagatccttgttccattttggctttttatttgaacagaagagcttcgnttggcctttccataagagacaagactgaggctgcaatctgctttgatgaaagccctgcttcttctatctgaacttggggtgatccatgctcaatgtatctatcaggaagcatcattgctctccactttagaggcccatctaggatacctgataagctcaggaattgtgatacatgtgatccaaaaccaccga

SEQ ID NO: 220178 - DNA, 375 bp, Glycine max
gcgaaggacatcaacctcagctctcgaacccctctgctcttgctgttatgtatcaccactctcaccgaggctgtatggttaaccatccccagcaagggaaccatttgcatgtcacatagaaattcaaacgcacaaatgaagctaatctagtctacttgctcaatctttggacccgcaccgtttccaacagtaggaacattatcggccattgcaccacccacgtttggaccagcaccaccctggtacatattggcattgatagggttgcagatgctttacaactccttcatttagccacgaaatatatttgtctttcgataatgaacattagaaaggcactggatagaccacaaacagccttgaatggaaaactgg

SEQ ID NO: 220179 - DNA, 366 bp, Glycine max
  unsure (1)..(366): unsure at all n locations
cttcctagttttcctagttagctgattgagcacttcatctgcaataggagcaaaagaagaactatcccctttgggcttggcctcattagcatcttcattcaattgcttttgaagtgcttcataggccttgatgatagaccaatacgctgtacctgctggattaatgtaaactgcatccaaatagtccctagttccttcggggtcgatagtctatggtccaaccagaatccagcagcatctcccttattcgttcacgcagnnnctgtttttctgtaccactaccacgctagatttttccttctttagttcttgagggtgggagtttttcatgcacaggagtctgctcatcctcagatattatttttt

SEQ ID NO: 220180 - DNA, 208 bp, Glycine max
cttcatttaatttgaactaaagagattcctgtctctgaaggtcaaggtgaatttgtgcactacattataaataagcacccctctcggtgttgttcattgctagacatttcctctgaaaattattcatagcatatttctaaccacactcaaaaggcttcccttcctgacttggatttcattacattgctaaactatattatttttattg

SEQ ID NO: 220181 - DNA, 455 bp, Glycine max
caaaaagaaaagagggtgggtattgaagaccctctattaacagtttattgatcatcgaccttacaattgcagtttaagaatacagactttttctggactcttgtaataaaccaataaccttacaaactctataaacttttttcaccttgaacccattttttggttagtgaaaatagaaaaaaataatgcccctaaaaagtgaaggggcatgttgccagtatcacaagttctatgacgaaaggcaaagagacttcgacagttggagacaaaaacaatttcaagcattgcctgttactgctgcgaaaaataacaaactcaagcgctttatgtaccttgccaaaacatcatgtgaaagagccagataaacatcatagatcatgaccttcgtctagaggggtgagagaaatatgccaactcaaattggggctttaaccaaatgtgactgaggtatgggg

SEQ ID NO: 220182 - DNA, 531 bp, Glycine max
aggacaacactacgttgaggtgaccatggacattcatcgtgactctgtggccttacacagtgttaaaactgttgcagctgatgatgttgacatggtggaagaagaagaagaggaaggtgataaattgggtttgatgggaaagaagaggcttgagaaaaaaacatcctttggtgcctctgtggttcagagtgctgccaatcgcatgaagcagctgaagcgtttggcatcattttcaaaaccagcgcccaaacactttgaaaggacaaagtctgcagtgggtcatgctctcacggggctcaagtttatcagcaagaccgatggtggcgcatgatgggttgaggtggagaagcgctttcacaagcttactgctaccactgatggctatcttcctcgtgctctctttgcccaatgcttatggttgaacaaagagtctgaggcttatgcagagaagctttttgatactcttgctaggcagagaggtattcaggggggttccatttacaagatccagatgaaggaattctgggatca

SEQ ID NO: 220183 - DNA, 492 bp, Glycine max
ataaatgaatctcctgaattctgcaattgatcagctaaaaggcatcggggattaatacaaagtatcaagtgcgctccagctagacattattctctcttctgtattactttctagtttctcccaaggtgtttccaaggagtggttatttctccttaaatttacatggacataaagacacgcagagacattaacagacgtccacaccttttataattggtaggcaactctattttaaccatttagctcccacctgccttggtgcttttacaaagccataaataagaaccacatgtagaaacttaattatttataggcaaaaaacaaagtggaatgatctaggtggtggacggcttagctcgatcttgtcagaaattttctttatggaagtcgtacttggtggatgtgttgtgagagaaatccaatgctagctgacgaagctcatgggtgagggctgatggcccacaagtaaataccccaactcgggcatctgga

SEQ ID NO: 220184 - DNA, 575 bp, Glycine max
atcatgttgccacacataaatggctgtgtggattacaggattccatttcatctgatgatgagtatcgttcttcacgcaacatagccatcagcttgttcaggcgatacaggaacttcattgatcgtggtggaggggacaatctaaaagagttcatcactgccggggtaaatgcatatgcgctaggatgcactgatgaaggattaaggaaagaacttgtggatatgaagaattctgggatcgaaattgatgtaatgcaaagttatggcggaagcacaagcttaaaatctaagatcatctcagaggaggttgatgaatgcattctctggctaagcattatattcatcaccatcttgtgtacaccccaaccaactattgttagatggtcatctacaactccagtctcagatgaagttagacttcagtggaaaggcttttgtgctcttatagcaaatgcatattttatgaagggaatggcttggcttcctgtaaagactcttcattagaacagacggctgtgatgggtcatgctgagaaaccgtcagttggtgctagcccgatgcgttagtctttacaca

SEQ ID NO: 220185 - DNA, 506 bp, Glycine max
cggctcgagaaaacctgccatgacagtaataacaatgtctcctttcttatcttactctcttctttccctcgtgttcttcttcactctcaagtaccttttccaaagaagcagaaaagtacgaaacctgccacctggtccgactcctcttcctataatcggcaaccttaacctcgttgaacaacctatacaccgtttcttccaccgcatgtcccaaaaatatggaaacatcatatccctttggtttgggtcacgtcttgttgtggttgtttcatcacccacagcgtaccaagaatgtttcaccaaacatgatgttaccttggccaacagggtacgctccctctcgggaaaatacatattctacgacaacaccaccgtagggtcttgctcccacggcgagcactggcgcaacctccgccgcataacctctctcgacgttctatcgacgcagcgcgtccactccttctccggaatccggagcgacgagacgaaaggttgatacacaggct

SEQ ID NO: 220186 - DNA, 299 bp, Glycine max
ggacatacgacaaatattattaattttaacatgcatagacttacacaccgaaattatgagtattagatcctcacccaaatataccaaataaaatattgttaataactttcaactttgctggcgagtgggcgggctttacacatagcctccaatggaattaaccttgacaaggtgatccaattattctctgtcatatcaagcttcttctcacttactcgtttccagtcaaaacattgaatcattaatcccaaagtatagctaacactttgcatagccatgggtttttctgggcaagccct

SEQ ID NO: 220187 - DNA, 459 bp, Glycine max
aatatatgccaatgcaataatgcatgctggaacaactgtggatactttcctcagggaaaatttggattggttgagcagagctactaattgggccaaatttagtgcaacggctggtcttggtgttatccatagaggccatttgcagcaggggaggtcactgatggcaccatacttacctcagggtgggactggagctggtggtagtccatactcagaaggtggtgctctctatgcccttggtcttattcatgctaaccatggagagggcatcaaacaatttcttcgtgatagcctgcgcagtacaactgttgaggttattcaacatggtgcatgtttaggtcttggtttggcatccttaggaactgctgatgaagatatttatgaagaaataaaaaatgttctctacactgatagtgctgttgctggcgaggctgctggtattagtatgggcttactcat

SEQ ID NO: 220188 - DNA, 517 bp, Glycine max
gtgaggagaaagatcggcaagtatgaggtgggtcggactattggcgaaggcaccttcgccaaggttaagttcgcaagaaactcggagacaggggagagcgtggctattaaagtcatggctaagaccaccattctccagcacagaatggttgaacagattaaaagagagatatccattatgaagattgtcaggcatcctaatatagttagattgcacgaggttttggctagccagaccaagatctacataatccttgaatttgtaatgggaggggaactatatgataaaattgttcagctgggaaagctttctgaaaatgaatctaggcactactttcaacaacttatagacgcagttgatcattgtcatagaaagggtgtgtaccatagagacttgaagcctgaaaatcttcttcttgatgcttacggaaatttgaaggtttctgactttggattgagtgcattgactaaacagggtgctgaccttcttcacaccacttgtgggaccccaaactatg

SEQ ID NO: 220189 - DNA, 577 bp, Glycine max
aattagttcattctctttgcgcagttccctacctctcctttcaagatgcagatcttcgtcaagaccctcaccggaaagaccatcacccttgaggtggaaagctctgacaccatcgacaacgtcaaggccaagatccaggacaaggaaggaattcccccggatcagcaacgtctcatcttcgccggaaagcagctcgaggacggccgtaccctcgccgactacaacatccagaaggagtcaacccttcaccttgtccttcgtatccgtggtggcatgcagatcttcgtcaagactctcactggcaaaaccataaccctagaggtcgaaagctctgacaccattgacaacgtcaaggccaagatccaggacaaggagggaatccccccagaccagcgacgtctcatcttcgccggaaagcaacttgaggacgggcgcaccctcgccgattacaacatccagaaggaatcaacccttcacctcgtcctccgtcttcgtggtggcatgcagatcttcgtaagaccctcaccgcaagactataaccctagaagtcgagagctccgacaccatcgacaacgtc

SEQ ID NO: 220190 - DNA, 557 bp, Glycine max
  unsure (1)..(557): unsure at all n locations
ctgagacccttggacccaacatggtggttgatatgtgcaagggagtccagtatttgaatgaaatcaaggattctgtggttgctggattccagtgggcatcaaaagaaggtgctttggctgaagaaaacatgagagccatctgctttgaagtatgtgatgttgtgctgcacgctgatgctatccacagaggaggtggtcaaatcattcctactgccaggagagtcttctatgcttcccagattactgccaaacccaggcttcttgagcctgtctacctggttgaaatacaggctcctgaacaagctcttggtggaatctacagtgttcttaaccagaagcgtggacacgtgttcgaggaaatgcagaggccaggtaccccactatacaacatcaaggcatacctncctgtcatcgagtcctttggtttctcgagcacattgagggctgcaacatcaggccaggccttcccacaatgtgtgtttgatcactgggacatgatgtcttctgacccattggaggctggatcacangctgcacagcttgtcactgacattcgc

SEQ ID NO: 220191 - DNA, 566 bp, Glycine max
  unsure (1)..(566): unsure at all n locations
atttgtttctatgccagcatgccgagttttctccatgattgcagctccggcggttctactggacttccttctacagattactgcttttgtagctttggttacattagactttatgagggccaaggatcataggattgactgctttccatgtgtgaagctgaatccgccctctgcggagcagaatgaatgtattaggctagaaagagatggattactgacaccatatatgaaggaggttcatgctccatttcttggactatggggagttaaaatcttgggcattgccgtatttgctgcatttaccttagcaagcattgcattatgcacaagaattgaagctggtcttgagcagcagattgctcttccacgggatacctaccttcaaggttatttcagtaacatatctgaggaccttagagttggaccacccttatattttgttgtaaaggattacaactacagtttggaatccaaacacacanaccagctatgcttcattagccactgtggatcaaattgttttttaaaagagatatctagagcatcatttgtggcaacattaagct

SEQ ID NO: 220192 - DNA, 454 bp, Glycine max
acacattaataaatccatatattatctacatggggttcaacattacttattaccacttttaaatcctcttaagggggtttattcggcctgggccagccccaaaaaacattatggtaacgcactgcaaggaacattatttccctgcttgatcattattccctatgactggaaatgcatgggacaaaggccccattgcaggtgaggcctcctgataagacactaagacctatactagaccatacatttggcattttccatctcttaaaggacattatgcgtttctaggaaagtcatctttgacccatacatgactagcttacaatgatatggggatctgcggatacttcacccagagatttccgctcgtcttacaaaattgtttagcttttctactgcattacacggatgataaggtgaaccttcacaagaggaggaagccctttttaccttacaa

SEQ ID NO: 220193 - DNA, 556 bp, Glycine max
  unsure (1)..(556): unsure at all n locations
gaaataaggggaaaaaatggtgtcgctgaaactgcagaagcggctggccgcaagcgtgctcaagtgtggcagaggaaaggtgtggcttgaccccaatgaagtcaacgaaatctccatggccaattctcggcaaaacatcaggaagttggttaaggatgggtttatcatcaggaagccaaccaagattcactcacgctcgcgtgctcgtaggatgaaggaggcaaagaagaagggccggcactctggttatggtaagagaaagggtacaagggaggcgaggcttcccaccaagatactttggatgagaaggatgcgtgtgctcaggcggttgcttcgtaagtacagggaatcaaagaaaattgacaagcacatgtaccatgatatgtacatgaaggtgaaaggtaatgttttcaagaacaagagagtcttgatggagagcattcacaagtccaaggctgagaaggcaagagagaagactttgtctgattcagttgagggctaacgtgcaaagaacaaagctagcanggaaaaggaaacttgctcgagggaggagcgc

SEQ ID NO: 220194 - DNA, 493 bp, Glycine max
cgggaatttaagatagtatttgaaaagcaaagctaagaactgagaagaaatgaaaataaaaaggatagcatagtgccataatggaagcttgagaaggaagtggtccaaagaagaagaaagatgaaggagaactactcataccaatcgtatccagattcaggcgagtcctctccacgctccagagagatcgacttcgagaaccctcctccatgggaccaccaaaactacaaagccaagttcatctgcagctatggcggcaagatccacccacgctcccacgacaaccagctctcctacgtcggcggcgacaccaaaatcctcgccgtcgaccgctccatcaagttccccgccatgcttgccaaactctccgccctctgcgacgcccaagacaacaacatcaccttcaagtaccagctccccggcgaagaccttgacgctctcatctccgtcaccaacgacgacgaccttgaccacatgatgcacgagtacgatc

SEQ ID NO: 220195 - DNA, 500 bp, Glycine max
caatgatacgagatgatgttgagaaagaggatgcttttagaggtctatgtgctatggttaaagctaatccttctggagctctaagttcgctagtttgcatgtgcaaagccattgcaagttggcatgaaataaggagtgaagatttacacaatgaagtctgccaggtcttgcatgggtataagcagatgctgcgcaatggagcatgggaccagtgtatgtctgctttggagcctccagtaaaagaaaagctttcaaaatatcaagtataattcaattgtgagcattgtatctgtattgacctagttggtcattttgtgtgtggtcaagcaatattggagtcgcgattcatattgagcaggagctgagtctcggtccaagttttcagacagggtaccagtacttaatacaattcgtttgagcttgatgattacaggaagttccacaagccttcaagatctcatttgatgggagtttcccatgagaaatgtacaggggaatga

SEQ ID NO: 220196 - DNA, 459 bp, Glycine max
actagctcactagttggaggtcgacctttttttttttttttcacaaaagagacatcttcattaccataaataaaacaatcgagttcctacaagaagcattggctaaaacttttcaattttaaatagtcttttaaaatattagcctgccaatcactcactatgaacagattacatatctaccactgttctgaactttcaagaagaaaatggaactcatgaaggaatgaccacttcatcctttccatagatacgctgaagctcccgagtagcagcttggtatgatgctttccatattcgaaagttcttttggttgatggtagagccagtcacattttgaatagcatcaaaaagcatatcctgattagtatttttcagctcttgaacaacagcatagatggtttttccattctcaaagtatatgtgattggtaggatgttttgtcttacaccagcatgacgc

SEQ ID NO: 220197 - DNA, 469 bp, Glycine max
cagaaattctcaaaggcctgagccaaacccaggcctaagagggggtttggaaatagttttcaaccagcaatagacgcgcctcagttagaacctcactagctgcgtcattgccccaagcgcaaagataagtcaagctaactgatgtgtacttttatataggacaacttctaagtctattgaagcatacgctccggatgtgggactaaagtttgtgtttttatttgccatttaccttgtccttcttgtgtgatcataatcaaaatcattattgaaacaaacagcagtttctggattccaacaatgtgatcctaccaaaatctgaaacttcaaagtgctctctttctttttagagagcatcgtcgagatcatgctggaaatatttggttgccacatcttccttctggacactttatcaaaaagcttatactacctcagtcattccattgttttgcttgacatgaccttatac

SEQ ID NO: 220198 - DNA, 495 bp, Glycine max
cggagccctctcttcaggtcaccatctagactgcaatcatggctgatggaccacagcatccatcagttgttcagaagctagctggacagtcttacctggtgtccaggcttagccccaactttaactctaggaattattctgcaactggttcttacgtcaatggcggaatgcactcgcctgggttggctgttgtgtcacctgtatctccagttactgtgcatgctccagcagagaaaggagtgagtggatttctagtggattttctgatgggtggagtatccgctgctgtatcgaagacagctgctgctccaattgaacgagtcaaattgcttatccaaaatcaggatgaaatgataaaaagtggtcggctatctgagccatacaagggaattggtgattgttttgctcgaacaatgaaggatgagggtgtgattgctctttggagaggaaatactgctaatgttatcagatatttccctactcaagctctgaact

SEQ ID NO: 220199 - DNA, 522 bp, Glycine max
  unsure (1)..(522): unsure at all n locations
ttcagaagctagtgatcaatcatcaacacagagctgagtgtgttgctctgtgaatccaccttcttcttccattggaggaccatttcctcctggaatagaaatactaccacacttttcttttttcacttctctaagttgctaagttaattgctccttcattttttcactcttcgttctcgcgtacccgtgtcacggtaactcgtggtgaagtgttcgaaaatgactgtcacacctaagatctcagttaacgatgggaaacttgttgtccatggtaagaccattctgactggagtgccagacaacgttgtgctgactccaggttctggaaggggtcttgtgactggtgcttttgttggtgccacagcttcacacagcaaaagtctccatgtgtttccaatgggtgttttagaggggctccggttcatgtgttgtttccggttcaagttatggtggatgactcanagaatgggaaacttgtgganggatgttcctcttgagactcaattcatgcttattgagagc

SEQ ID NO: 220200 - DNA, 547 bp, Glycine max
gtgatttcagtgagtgatcggtgttcacttgatctcatcataatcgtcagcgtcaattgaagaagatgccgatcagaaacatcgccgtcggaaggcctgaagaggcgactcaccccgacacgttgaaggcggctttggctgagttcatctcaaccttcatcttcgtgttcgccggctcaggctccggcatcgcctacaacaagctcaccgacaacggcgctgccacccctgccggcctcatctccgcctccatcgcccatgcattcgccctcttcgtcgccgtctccgtcggcgccaacatctccggcggccacgtcaaccccgccgtcaccttcggcgccttcgtcggcggcaacatcaccttcctccgcggcatcgtctacgtcatcgcccagctcctcggctccatcgtcgcctccctcctcctggccttcgtcaccgcctccactgttccagcattcggactctccgctggaagtggagttggcaacgccttggtgttggagatcgtgatgaccttcggtctggtgtacacggtctacgcaac

SEQ ID NO: 220201 - DNA, 469 bp, Glycine max
tctttttttttttttttattttcatttccccccctctagtagtcagtggtgggaagctgctcgtgggtgtggctgataaagacaacctcgtaaacaaggccagcgattccaccaccgatgagaggcccggcccagtagatccagtggttggtccaggtccagctcacgacagcaggcccaaatgtcacagcggggttcatggccgctccagagaaggccccacccaacaaaatgttagcgccgacaatgaaaccaatggcgatgggagcaataattcccaaattacccttcttggggtcaatggcagttgcgtagaccgtgtacaccagaccgaaggtcattacgatctccaacaccaaggcgttgccaacttcaactccagcggagagttcgaatgctggaacagtggaggcggtgacgaaggccaggaggagggaggcgactatggagccgacgagctgggcgatga

SEQ ID NO: 220202 - DNA, 498 bp, Glycine max
cagagtgcagcattgctttgcttcgctgttgatccattctggagagagaaacactttttcagttctctctctctctctctaagatggccgacgatccaatgcccacgcgctggtctctccaggacttcaaattgtgttatgatgctaagtttggtagaaagaaagtcgcggagaacggagatgatgctgccggtaaagcggtcagcaatggaaatggaaattcagtgacagtggccattgtgtccaatggcaacaaaagggcatcggaaatggctgtttatgagcagtttcgaagcgaggggcagaatcagattcacacaaatggctttgtgccgacccttacagatgaaaggccgcagaagtctttgcttccaccctttgaatctgcggaaatgcgagctttagcagagagcttaagtagggatatcattcgtggaagtccagatgtgaagtgggaaagcatcaaggggttagagaatgccacacgtttactgaaag

SEQ ID NO: 220203 - DNA, 370 bp, Glycine max
gtcataataatattttaatgtaaaagcaaagaatgagtgaatttaaaaatataatcacaagcatttgttacttagatatgtaaaaatactcagtactaataatggagaagaacgaatgcaaaaaaaagttgcataaccaaaataatgtttgaagtttactagtcttacaacagtaatcaaattgtggaagaccttacaataacaaatacaacttgtcattgtagtatttgactaccataatcagcattgaacttgtcatatttgtgggcatggagatgagcagatggccttgtgtttctcaaagctgtctctatatcttcagatctgattggcccaacttttggcaactcttcttcaggcaccacatcct

SEQ ID NO: 220204 - DNA, 528 bp, Glycine max
gtggaatgatgtcagtcccttatgacatgggtggtctgccaatccgcgatgctgtgggacagccaatgcccattcaagctttggccacggctcttgcaaatgctccccctgaacagcagaggactatgctcggtgaagctttatacccgcttgtggatcagctggaacacgatgctgcagcaaaggttactggcatgcttctggagatggaccagcctgaagttttacatctgattgagtcaccagatgctctgaaggcaaaagttgctgaagccatggatgtgttaagaaatgttgctcaacagcaaactaacccagctgatcaactagcttcactctctctcaatgacaatcttgtgtcttagattcctttagtcttttgactggaatctgctttccagttattcctattccgtatgcttccccccagtttatttgcaggtgtcttagatgttttggtttagtcagagtactaaggaagtttatgttcttggtacttttggtttcactttttttcgtatctgaatt

SEQ ID NO: 220205 - DNA, 489 bp, Glycine max
aatccaaaccgcaaatgcatatctaataaatccaacaagttatgctaatccatcctacagcaattcagatacgaaaaaaagtgaaaccaaaagtaccaagaacataaacttccttagtactctgactaaaacaaaacatctaagacacctgcaaataaactggggggaagcatacggaataggaataactggaaagcagattccagtcaaaagactaaaggaatctaagacacaagattgtcattgagagagagtgaagctagttgatcagctgggttagtttgctgttgagcaacatttcttaacacatccatggcttcagcaacttttgccttcagagcatctggtgactcaatcagatgtaaaacttcaggctggtccatctccagaagcatgccagtaacctttgctgcagcatcgtgttccagctgatccacaagcgggtataaagcttcaccgagcatagtcctctgctgttcagggggagca

SEQ ID NO: 220206 - DNA, 568 bp, Glycine max
  unsure (1)..(568): unsure at all n locations
ctttgtctctctctctctgtgtgggaagaacgaagaagaagaagcatcacagaaccgaacccattcagaagcaaatccgaaaacccctcacttaatattactggtattcagctgttcatgacaaaagcctgaaccaatcatgtcagaaggtgcagaaattgatgagcgtgtggaccttgatgaggaaaattatatggaagagatggatgatgatgttgaagaacaaatagacgatgatggagtggatggagttgaagaagaaaatgctgaaggtagttttgaagaagatgaatatgaggactcagctgctgaggctggtgggaaagaccagttgcctgaagcagaaaaaagtgacattgctactgaatttggggatgatgagcaaaaattgtctttcattgatgaagatgagaaagagaagcatgatgaacttcttgcccttccacctcatggttctgaagtctntattggtggacttcctcgggatgtatgtgaagatgatttaagggaatggtgcgagcccatgggtgatattcttgaggtgcgattaatgaaagacagggacact

SEQ ID NO: 220207 - DNA, 533 bp, Glycine max
ccctaacccaacccccgccctatggccaccctcgaccaaatccaaaacggcgtttcttccgacaatcccgccgccgctgaacctccctccaccaccgccgacgtccccccgcccgatgccgccgccgagaagcggtggccggggtggccgggccactgcgtgttccgcctcatcgtgccggtgctcaaggtcggcagcatcatcggccgcaagggggagctcatcaagaagacctgcgaggaaacgaaagctcgcattcgtgtcctcgacggcgccgtcggcacctccgatcgaatcgtactcatatcagggaaggaagacctggaggcacctctttctcctgcaatggatgctgtaataagggtttttaaacgtgtctctgggttttctgaaattgatgccaagaataaagcatcagcggttgcattttgttccgtccgtttataggtggcctcaacgcaggctatcaatttgattggaaagcagggttcattaattaaatctatacaggaaaatactggtgcttctggtag

SEQ ID NO: 220208 - DNA, 417 bp, Glycine max
attcaggtcttgtattctgagacagcttcaattggttgccacctcacaatatcatcaccaaataccaccacttattatctccttgcactcttgaggtaatctgcccttattgcccacaattgctcgcccactgatttcatgtcaggtctatctgttcgaatgggggctgcacattgaaacgccaaatcaagcattttcatcagaacatctccgtttacagcttcttccattaaaggatccacaagttccaccacacttccttcattatacttcctgaaggcccatctgagtgtaacccgctctgcaacagttttcttcaactcaacaggacggcgggctgtcacaatttctaaaagcaaaattccaaatgaataaacgtcactcttgggagtgagttggtatgttttcatatactcg

SEQ ID NO: 220209 - DNA, 541 bp, Glycine max
  unsure (1)..(541): unsure at all n locations
ggagattggtagagttagtgatgctatccaggattacatacgggcaattgttgtcaggcccaccatggcagaagcccatgctaatttggcttctgcttataaagatagtggacatgtagaggctgctgtgaagagctataaacaagcattgattcttcgtccagacttccctgaagcaacttgcaatctccttcatacacttcagtgtgtctgctgttgggaggatcgcgataaaatgttcaaggaagttgaatcaataatcaggaggcagattaatatgtctgttcttcctagtgtccagccattccatgccatagcatatcctcttgatccaatgcttgctctggaaattagccgtaaatatgctgcacactgctcggtaattgcatctcgttttgctcttcctccattcaaccatccttctcctattccaatcaagcgcgagggaggatatgaaagactaaggattggttatgtgagtagtgactntggtaatcatcctttgtctcatctcatgggatctgtntttggtatgcacaac

SEQ ID NO: 220210 - DNA, 474 bp, Glycine max
  unsure (1)..(474): unsure at all n locations
cggaatattaacatttaacaccatggaagccgtccaactcatgtccaccacaacaatcaaggcgtcgagtaacaattacaacgataactcagttcagaaaatcgatttaactccgtgggatctccaattcttccatattggaagcatccaaagaggacttctttttcgcaaagaaaaaaacacagaatattgtcaaatcgagcatctccaacactcactttcatccactctcgcattctttccactcctcgctggccgccttgccattgtcgaacatcacgacaacactgtctcctctcacatcgtatgcgacaacaaaagtgtcccttatgtccacgccgatgcacacaacaccactgaggccgacatccttgaacccagatacgttactggcattctacgatcgctcnttgcacttaacggagttaagaactacgaagccacgtcacaaccagtgctggcagtgcaagtgac

SEQ ID NO: 220211 - DNA, 446 bp, Glycine max
cgtccttgtattaaaaactcaatatcaaattctttgtcccacaaaagatggggttcactcccacaagtactgcaacatgctttctcataatagcacctctggttgtgctatggtgttggaagctactaaagtgggtgtggctgaggccaaagagattggagagagcattaagggcacagggccttcaggggaatccctacagcctcttgattggggacactaaggaaatgtacacagtgctcatgcaagctgccagatctcaacaatctacaagttcttttctctctaaggataaggatgcagcaccacatatcacaacctttaaccatcacattgtcaacaaattcggcaagaattcatttttttgggaaggtaccaaaccaaaagtggtaatcactgaccctgagcaaatcaaagaagtcttcaacaagatccaagactttgag

SEQ ID NO: 220212 - DNA, 511 bp, Glycine max
gtcttctttgctgactgaatccgaaaggcggagttttaaagatgagatagagaagcttaaacatgaaaaagaaagacttcttcgggagttagagaggcatgaacaggagtggaaaatgtacgaggtacaattacaacactccaatgattgtttggaaaagttggaaaagaagcaagaaagtttggtttcttctgtttctcaagtgttgcagaaacctgggatagccttgaatctcttactgctgacagaaaacatggatagaaaaaggaggttgccaagaagtggtctctttagtgatgacgctggcattgaagatcatatggaaacttccccagtattaccaagggaaaatgcagatggttcctctattttctcatcgagcacagagcgattggatctgctcgagtcatccatgacgttttgggaggatattacacatgatgttggtgacatctttgttcaaagtcatttaaacctggattttgatgcatctacaagttgtgcagatagt

SEQ ID NO: 220213 - DNA, 534 bp, Glycine max
atagaggaggcaatcatttaaccaaaaatatggtatatgtatatatagcagagccaaaaccatgcatacctacatttattacatgaaaagtgaggagtatcacaagctaaaagtaataatcaattgcaactaagtttgctgtgcttgactaagaatgccccatctgttctggagggttatttacattcctaatgttccaccaaaatttggcattacttctgccatcagaatcctttctttcagactgtgcttcctgcatttcagatgaaccaggattctctgtcaagaatcgttcccagaatatgtcattaacaccagtagtcacaggggcttttcccactggttgttcttttgatgcatcaagatcaggaacagcaactacagatggctcagaattcatgttgattccaggtgacttaggctgatcttcaacttctagttgcacacaagatatagctggactatctgcacaacttgtagatgcatcaaaatccaggtttaaatgactttgaacaaagatgtcaccaacatcat

SEQ ID NO: 220214 - DNA, 495 bp, Glycine max
gcattgataagaatgcacttccatgactgttttgtaaggggatgtgatggatcggtgcttctgaactcaacaaccaatcaggctgaaaagaatgctcctccaaatctcacagttagaggctttgacttcattgacagaataaagagccttgttgaggctgaatgccctggtgtggtctcttgtgctgatatcctcaccttggcttccagagattcaattgtagccacaggtggaccctattggaaagttccaacaggtcgaagggatggggtcatctctaacttggtggaagccagaaataacattcctgctccatttgacaacatcactacgctacagacactctttgccaaccaaggacttgatttgaaggacttggtcctgctctctggtgctcacacaattggtatcgctcattgctcatcattgtcaaaccgcttgttcaatttcactggcaagggtgatcaagacccatcattagacagtgaatatgct

SEQ ID NO: 220215 - DNA, 518 bp, Glycine max
aaacaaaaaaatgcattgaattgagaataacaatgaaaaagtacatcaatacaaaaaaaataaaaataaaagactaaacatacatcaactctgttgtgggtagcacaagaaattctgcttcttattgcaagagcatgatctaccaacgaagttgaaaataagaattacaatggatcccacttattccaacacacatactacaaccataccatatgggatcactcatatgcagccagacaccacatggcatagcataactattcaaaaaacatggcatcgcataaataaccaaacccaaaaaataaatgatacaagattcatccatgaacaagacaagattcttagctattaacaaatgcacaatgctttctgatctctccctctgtccctgtcttcaccttaattcttcccattttctctatggaggttgcaaactcagcaaagaatttttcaactgacccttcagcaattcaatgatttgagcctttgtactgaattagtaacaatgcgcatctgac

SEQ ID NO: 220216 - DNA, 638 bp, Glycine max
  unsure (1)..(638): unsure at all n locations
gagaaagacaagagagaatgaagggtgatggggtagtagagagaaaagttgggagtaatagtgaaaaaagaacgaaagaataggggggatagaaaaaaaacanaattaannnnncgggagtcgatcggaaaacattgnnggataangccggcacgggggacgaagacgggaagacggcnagagcaancaggccgaagtacaacgggagtgagggacaagagcaagaaacaaaaagctgggggagatgggaagaggacatacagagcaggaggctagttcagttgaaaagggcttcaaataataggactgagcgaggtaagagaattgttgacatgggaaaagagaagaagggtgggaagcaaatagggggatgatggaccgggaattacactggatagagcccaaatgggaaacgggccgggataggcggaaacaacggagaagggaaactgggggaagcacaaagaggaaagaaaggcaagaacttgaggaggacactaggaagagggaagaggaggagcgaagggaagagacagccgaatctgaggtagagggagaaaagaaagaacatggcgaagcagggaaggaaggaacaggtgaaaaaaaaacggtgggcggaaaggacaccaaggaagaag

SEQ ID NO: 220217 - DNA, 539 bp, Glycine max
aaacagtgaagtaagaattctgagatctgatgtcggtggaggagaactggttgtgtcaatagaggtagatagacagcgaaacaggctgagagcagctgaggcaatggcggaggctagagttgcagccgaacgcggtgatttgtctactgcagtttcagtcctggatagctgtcacacggcattgtctgaaactgtttctgctaaagccggggatcggttatgtgttgctctttctgcagagttaaaggagatgcaagagaggatggcaaaccaacgcgtgtatgagcagtctggaagagcttatgttctgtcaggattgagttcacattcatggcaaagggcaacagcacgcggcgattccacagacagcaccagccttgtgcaagcataccaaacaccttccatggttgacatggtgacacgttcccaaactatggtttttggagcgccggtgccgcaaaataaacgtgtcctcaggcctgctaaatcatttccggagaggcagagaagacaataaaaatgagtttgggaaaatctac

SEQ ID NO: 220218 - DNA, 487 bp, Glycine max
  unsure (1)..(487): unsure at all n locations
ccttattgttaaaccctttgtttgcacaagaaaagagttacttcatcatcatcatcaacatgagtcgcttcaacaatcagcaagaatcccctgtatcatatcctccagcactgtatgttagtgccccaccacctatgggttatccttccaaaggcgatcctacagctgtagggtacccccaacaaagagttccagaagaaaccacaagcaggggtgatggattttggaagggatgttgtgctgctttatgctgctgctgggtcctggattgttgcttctgattgaatcatagcacagatttgtgtttgtcaccatgttttctttttcacattggcagtttcctatttgtattctttgtagtttagaagaataaggatctttgtcctcttggacagcttgtattttatccatttggatgatgctgttctctntccttggacttcgaattttttatgatgcacgcagatatgattataagattgtttct

SEQ ID NO: 220219 - DNA, 453 bp, Glycine max
aaaaaaaatcttataataataactaaatacatcataaaaaaattcaaagtacaaggaaaaagaacagcatcaaccaaatggataaaatacaagctgtccaagaggacaaagatccttattcttctaaactacaaagaatacaaataggaaactggcaatgtgaaaaagaaaacatggtgacaaacacaaatctgtgctatgattcaatcagaagcaacaatccaggacccagcagcagcataaagcagcacaacatcccttccaaaatccatcacccctgcttgtggtttcttctggaactctttgttgggggtaccctacagctgtaggatcacctttggaaggataacccataggtggtggggcactaacatacagtgctggaggatatgatacaggggattcttgctgattgttgaagcgactcatgttgatgatgatgatgaagtaact

SEQ ID NO: 220220 - DNA, 492 bp, Glycine max
tagcacacaaaacttgctatagcagtaagctataactcatttgaggctctgtgagaattgagaaatggctaaagatgttgaggttcaagagcaaggaggagagtactctgccaaagactaccatgaccctcctccagcacctttgttcgacccagaggagctcacacagtggtccttctatagagccctcatcgctgagttcatagcaacccttctcttcctttatgtcactgtgctcaccattattggctacaaaaggcagactgatacaacggtaggtggcaccgactgtgatggggttggcattttgggcatcgcttgggcctttggtggcatgatcttcatccttgtttactgcaccgccggtatttcaggaggacacataaacccggcggtgacattctggttgttcctaggacgcaaggtgtcgttgataagggcgttgttgtacatggtggcacagtgtgccggtgctatctgtggtactggatt

SEQ ID NO: 220221 - DNA, 410 bp, Glycine max
atgcgctccgtacaccccctcgacatctctcaactctagaaaatgacggggacggagtatatgctcagcgaagttatggagccgcacctgtttgtcattcgcaagcagaagagaaatagccccgacaaagtgacacctatgctctcgtattacatactggatggtttcatttaccaggcaccgcaactgtgcaatgtttttgccgccagaattggaagggcgctttattacatacaaaaggctcttactacagctgcctcaaagatggagaagataggatatgctgggtcagctgattctgaaaatgagactgcattgctggaatcaaagactgctgaggagacaatggacataaaggaagttaagcgagctgatcatattgttgcatccttgcaacgcaagttaccacc

SEQ ID NO: 220222 - DNA, 562 bp, Glycine max
ctgaattctgtgggaagattactttccctgtttccttgaagcagcctgggcatagggatggacccattcagtgtttcatcaagagagacaaatctaagctgacataccacctcttcctttgccttagtcctgccttgcttgttgaaaatggaaagtttcttctctctgcaaaacggacaagaagaacaacttgcacagagtatattatatcaatggatgcagataacatatcgagatctagtagtacttacattggaaaactgaggtcaaattttcttggcaccaagtttataatttatgatacacaacctccctaccacaatgctatgctgtctccacctggccgcagccgtaggttttcaaaaaaggtttctacaaaggtccctagtggcagctacaatattgcccatgtcacctatgagttgaatgtccttggtactagggggccacgaaggatgaattgcacaatgtactcaattcctgcatcatccatggagcctaatggcattgtcccgggccagccagagcttcttccccgtgcccttgaggattctttcggaga

SEQ ID NO: 220223 - DNA, 384 bp, Glycine max
tggttcacttccaaaagaacaatggaaaggaacaagcttcagtgattgcagcattcaacagtcaattgcctggcacacagtccattgctctaacgttgtttgcagcgacgccaccggttccagacaatgtgttaaccaaggcgttccaggtgggtaccaaggaggttgagaaaattaagtctaggcttgctcctaagaaataattaatactaatgtgggatgtggttgtaatgtctctctcattgttcttacttcttacaccttcctctcttgtccttgttcttgttgctttacaattcatgtttgttgggaactcataaattcaaagatttggaatgagagtataaaatggagcatattcatttctttgatgattggaatttg

SEQ ID NO: 220224 - DNA, 384 bp, Glycine max
caaattccaatcatcaaagaaatgaatatgctccattttatactctcattccaaatctttgaatttatgagttcccaacaaacatgaattgtaaagcaacaagaacaaggacaagagaggaaggtgtaagaagtaagaacaatgagagagacattacaaccacatcccacattagtattaattatttcttaggagcaagcctagacttaattttctcaacctccttggtacccacctggaacgccttggttaacacattgtctggaaccggtggcgtcgctgcaaacaacgttagagcaatggactgtgtgccaggcaattgactgttgaatgctgcaatcactgaagcttggtcctttccattgttcttttggaagtgaacca

SEQ ID NO: 220225 - DNA, 451 bp, Glycine max
  unsure (1)..(451): unsure at all n locations
agagaacaaattaaattgttgattgttgatagcatcatcaagaagaagttgcaaagatgttagggctatttgacaagagccacaagatcaagggcaccgtggtgttgatgcccaagaatgtcttggacgttaacgagttgaattcagtaagaagtggaggagttggtggtgttgtctccggcctcttcggcgctgtcgccgacgtaaccggtcaggtagttgatactgcaactgccatcctttcccggaacgtctccttcaagttgatcagtgctacctccactgatgcaaagggaaatgggaaagttggaaaggaaacttatctggagaagcatcttccgacgttaccaaccttgggagataggagagatgcatacggtattcattttgaatgggatgctaactntggaattccaggagcaatttacatcagaaactatacgtatgatga

SEQ ID NO: 220226 - DNA, 473 bp, Glycine max
gatattgaaagcattattattattattatctccaaattaagagcaccaccaaattccaaatatgcattggtacaaaaacacacaaaacataatgacacataaattgacaagcatcatttgtgttattagaaagtacgtagattgatccaaaaggtaaccacatactccttagatagagatactgttgggaattcctctgaaagtcaacccttcctcacttgtaggaaggagcaatgtgtatggtagctgaacaggtccatatcggtttttcttggtggaatcattgtttctcgctgtgattttttcctcaatttctgccagcttgcttccaaactttttgaaggattctaatgcctttgaatcagatgtccaatttggattgtctctctccccaagggagatctcatcagatgcatgccttgacaatatctctatgactgtgagatcaataatgtgctggcgcttcggcgtga

SEQ ID NO: 220227 - DNA, 541 bp, Glycine max
gggaagactaaaactaaaaccccactctctttttccgagtcttccagtgaaagaaaggcagcgatggaagaagacttcgacatccccggcggcgaggaaatggatctcggcgaagacgaggtcggcgaggagagggagatcggctctggcggcctcaagaagaagctcctcaaggaaggtcaaggctgggaaacccccgaagtcggtgacgaagtccaagttcattacacggggactttgctcgacgggactaagttcgattcgagccgcgacagggattctcccttcagcttcacgctcggacaagggcaagtaattaaaggatgggatgaaggtattaaaaccatgaagaaaggtgaaaatgctattttcaccatccctcccgagctagcttatggtgaatctggttcccctcctactattcctcctaatgctacactccaatttgatgttgagctgctgtcatggactagtgtaaaggacatatgcaaggatggcggtatatttaagaagataattactgagggggagaaatgggaga

SEQ ID NO: 220228 - DNA, 449 bp, Glycine max
agttcatggggatatataattaagtcaattatgttaatattccataataaatacgaaatgaatgtccatcaaattttcctagtgcacaaaccatacaaggaagatcaaaccccagaaaaacggggactaaacagattcgtgttccatattggatgacatctagatttagttgtcaaccccggattcaataccgttggtacttcgtagctggtttattgctatcaggaaccaatctttgtcatcttgttgatcatatttccataaaattgcgcctcctttctattattctctttcaccttttccttcaaagtcctgtactccaatttgacatccctgttgttagggtcaatgtcaagagctttcttaatgtcaagttcagccaaatccaagttagtcaactgcatatgtgctttggcccttctatagagggcttttcacatttgtactct

SEQ ID NO: 220229 - DNA, 563 bp, Glycine max
  unsure (1)..(563): unsure at all n locations
tgtgtacactatcccatcccccactatgtagtttgccaactattccccactatataaggctcttaatttttgggtattacatatcacaaacccaacttcagtattcctctcactacgtacacaacctatatataagtgtctgtgttttttcaaaatgttgtacaaatcatctgtgaggcctttaaaggtggtcatggctaatttgcttacagtgtttttgctaattgaggtgtttgcatatggctacagttacggacaatatggcttaaacacgaattactacttgatgagctcttgtccttttgttgaacctgttgttaagaacattgtcaacagagctttgcaggatgatcccaccctagcagctggtctgattagaatgcactttcacgactgcttcattgagggatgcgatggctctgttctgattgactccactaaggataatacagcagaaaaggattctccagggaatttgagcctgagaggctttgaagtcatagatgccatcaaaagagagctngaaagacaatgccctggggtgggttcatgcgctgatattc

SEQ ID NO: 220230 - DNA, 428 bp, Glycine max
ataggaaatatattgatgattaaggattacaactagaaatgttaatacacccaacggatacaaaatagagctaggtactagttaagcatacacatttatacatatactatgcatgcaatgtacttttaactagtgtttggagtttgccttaaagctaaaaccatcacaaaccctcaattgattcagtttattttgcggcaattttctcttacttcaccgttggaattgtctttgacatcaagcaggcccatcttgaccatagcttgttggaaatcaaagaagaacatggttggttgaatgcataagcattcacaaagttcctggttctggggctattgtagagtgtttggtctgatgtaagaaccccatttctcctcaacaaagcgttgaagtaaacgttgtcaaaatcgttgctcgtggcatcgaat

SEQ ID NO: 220231 - DNA, 363 bp, Glycine max
aagcaggggcaaagctaaaatattttatatttggatttggatttgttggcacccagctgagatgccatgccgtgctttacaacatccgtgcatttcctacacatccttagcaaacataaagtttagccctctcttttactcattcacttctgtctctattcaaagtctgagtccatgtttcccattgctttcaaacctcttgggctctttttggatatcttcttctccctaacctcgtatcgttccaagggaagatcgcacaaccatgcgcccggactaacaagattgagggttcgttgaatgaatttaactctcttcttgggtctctgaggcagctttgagcccttaatggcgagaaaatct

SEQ ID NO: 220232 - DNA, 332 bp, Glycine max
cttctatgatctttgttaaatattttaatttggtctaattctttctgtttatttattgaaaaaacccagccacgacccaggggagagggagagtatccacaaagtactaaaccagggccaaaactggtgcgggaactgccaaaaactccatcgcattagcacccaccggagaagacactaagacctagaataaaccatacagaatgaagactgatacccttacgtaacaacataggacacttagaaaacacggattgacagagaaacccagtccaacgcataagagggggacttctggagagaaaaaatagccgaatcaccttcacactgcg

SEQ ID NO: 220233 - DNA, 506 bp, Glycine max
tcctcagtagtgtcatttacgcttctcttctctgcagcaactatgcctaaccctaaggtcttcttcgacatgaccatcggcggtcaatctgctggccgcatcgtgatggagctctacgccgacgtcactccccgcaccgccgagaacttccgcgcgctttgcaccggcgagaagggcgtagggcggagcggcaagcccctccactacaagggctcgtccttccaccgcgtgatcccgagtttcatgtgtcagggtggcgacttcaccgccggaaacggaaccggcggcgagtcgatttatggcgccaagttcgccgacgagaacttcgtgaagaagcacaccggtcccggcatcctctccatggcgaacgccggtcccggaaccaacggatctcagttcttcatttgcacggagaagacagagtggctcgacggaaagcatgtcgagttcggacaggtcatcgaaggattgaacgttgtcaaggacatcgagaaggcggatccagc

SEQ ID NO: 220234 - DNA, 490 bp, Glycine max
attattaggcgaattatagatgtcctaattttattgaaggtagctcatcatgttttttttatgcttctcataacagactccattcactcactctatgaaccccaaccaaccaaccacatgatactgatattgaaaaggaaaggggaagggtttcgaaatgatatccttaacaccacaatcccctaaacgacgacacgagaaagaaaagaagagaaaaaaaaggcaaaaacgacaccgaaagaaataacacagattcagagattaaagccgcgggtcaacgtcgtctaagagagttgaccgcagttggcgatgacaacgggcttggaggtcctgccggagctggatccgaccttctcgatgtccttgacaacgttcaatccttcgatgacctgtccgaacacgacatgctttccgtcgagccactctgtcttctccgtgcaaatgaagaactgagatccgttggttccgggaccggcgttcgccatggaga

SEQ ID NO: 220235 - DNA, 488 bp, Glycine max
tttttcttcaacaaacgccacagtggccggcacgaaaagcctatccatcttcctcttcatcgccataagctgcgtggccgtagctcaggcagcgaacttcaacatcacaaacaattgcacctacacggtgtgggccgccgccgtgcccggcggcggctcaaggcttaaccctggcgaatcgtggaacatcagcgtgacgaacggcacgacaggaggacgcatctggggtcgaacaaactgcaccttcgacaacgcaggacgcgggaagtgcctcaccggcgactgcgacggtgttcttgagtgcaacaaaacaggtacacctccgaacacgttggtggaattcgcgttgaaccagtacaacaacctcgacttctacgacatctccctcgtcgacggtttcaacattcccttgcaggtgagcccgacctacaactgcagctccgtgaaatgcgccgccgacatcatcggagagtgtcccactcagcttc

SEQ ID NO: 220236 - DNA, 481 bp, Glycine max
ataacaacggataacatttttatatatttttggaaaaagtattgcgcatcccctcagagagattcgctcacaaagcccccaagaactcttttatttggtgataaaataataacacacaagccgaggtatacaacattaagactaatttgaatcaccaaactttaaaagcaggtgatgatcaattaattaagggcaaaacacaagcctataatcagatcctcccatgcaagtgaacatgctgattgcgtcatccatagggtaactcaaagcatttggacacctctctttgaggaacttggaataatcagtgggaccgcaacccgcatcaccggggcttcaacagtactgaggtgtattgtaaacctggcacgggatgttgcatccgccggttacctgttactgagtgggacactccttcatgatgtctgcggcgcttttaactgagctgccatgtgaagtcgggctctcctgcaagggaatg

SEQ ID NO: 220237 - DNA, 412 bp, Glycine max
  unsure (1)..(412): unsure at all n locations
ctccttgcttgcaggccaggatacttgttatgggtcagagaaggaaaagagtacaactttcataatccaagtccagcacgaagccaagccttccatattgccaacccacaaacactggtacgactactgcctctcttccatctgcaccaccgcttctgttatccacacctaccacaccgttttccacggcttgtccgcaaagctctcaccttgcgaggcacagaagcttcaatctctcgcccacgtcatcactctcatacacgaacagctttgntcgactcacaccacccgctcacctgagtgtctcggctgaaccaccgccgacagaaccgggtagctgcacgagaccgatttcggctccgatctcgtcatcggagtcatcgacaccggaatctggccggggcgacagagc

SEQ ID NO: 220238 - DNA, 517 bp, Glycine max
gggtagactaaaacttacacctcactctttttttccgagccttacagtgatagaaaggcagcgagggaagaagactggcacatccccgggaggaaggaaatggatctcggcgaacactaggtctgcgaggagagggagatcggctcttgcggactcaacaagaaacttctacagaaggtcacggctgggaaacccccagaagtgggtgacgaagcacaagtgcatttcagggggactttgctacacgggactaagctcgattatagccgagagagggattcttctttgaggttaacgctcggccaagggcaagtaattgaaggatgtgatgaaggtatttagaaccatgatgaaaggtgaaaatgctattatgaccatacgtgcccagctagcttatggtgaatctggttcccctaccactattcctgctaatgctacactccaattggatgttgagctggtctcatagactagtgcacaggacatctgcaaggatggcgggctgtttaataatatc

SEQ ID NO: 220239 - DNA, 512 bp, Glycine max
cttttggccaaaatccctcctctacaaaaacccaacccaagtgttacaagtcttaatttccattatcacgtgaattgttgcacattccttgtttagtcccagcaatgggaagccacaacacaacaaccagctcctcgtctgattctgaactcccttgttctaattatattccgatacccgatggaacccactttcccgcagaagaagctccaagagagctgcttgtgatcttttgtgggttgctggtgcttgtgtccttggtggccttcaatggctacagggcgcatccaaatgatcatcatcacgtgtcgtcatgattgccaacaacgttgttaacagtgacacccaatgaattggaactgagccccgatacagtaccatgttcaacatcggagacgacagattcacgtggcttgtctagaagggtttcggagaagtcaagctggcaattgaacagcaacaatgggagcggagaatcgtatccatggaacaatagcgtgctgtcatggcag

SEQ ID NO: 220240 - DNA, 412 bp, Glycine max
gaattggagaagggtcatatttctttcattatcattacaagcttagcaaaacatgagcaacatatttaaaggctctcattcgagcaaccagtttaacaaatcaaacatacccaaaaatgagggacgagtggacttgtgacttgctgagtccttcatcccttaaatcgaattcctttggtcagggtggagtgggtgtatgaatgcagaattcatttgccaaaccttaactgacgcagtcacagaggcctcggtggcattattaaataaaaacaatctagcagctccatagattgccttggttggataaactcgagatgttacacacgttcttccaccttgagcaaaacttttcactatagaatggtccaccagtatccttacagacaatttttcgtcttttagtactgggact

SEQ ID NO: 220241 - DNA, 522 bp, Glycine max
agtgagtctatcccttaaaggctctctcttgcaggcgcagaggaaaaccctagctagtggtctcagttcgtttgagagagaaaaaatggcagagggtctcgttctccgcggaaccatgcgcgcccacaccgacgtcgtgacggcgattgccactcccatcgacaactccgacatgatcgtgacggcgtcgcgcgacaaatccatcattctctggcacctcaccaaggaggacaagacctacggtgtcccccgccgccgcctcaccggacattctcacttcgtccaggacgtcgtcctctcatccgacggtcaggtcgccctctccggcttctgggacggcgagctccgcctctgggacctcgcggctggcacctctgcccggcgctttgttggccacaccaaggacgtgctctacgtggcgttctccatcgacaaccgtcagagcgtgtcggcctctcgtgaccgcacgatcaagctgtggaacaccctgggtgagtgctagtacacaattcaagatggcga

SEQ ID NO: 220242 - DNA, 347 bp, Glycine max
aaccggagaaaaacaaagatgttgaaatatccatgtaacaagtaaataaccaaaacgaacgttttaaaaataaataaaaggccttagtgccacggtctttaacataaaaatcaattctacagtaaagcaggaactaactttgtgccaaaactcaaaaacagattcggatgtgaaaacactaaaaagcttaacctaataacgaccaatagcccaaactctgaccacaccatcggtatagccactaaacaaagtgcttgcatccgcactccagttcaaacttgtgcaataaataaccttcttcttgttggcgttaccaccaccggaggtggcatcagcctcagtcttga

SEQ ID NO: 220243 - DNA, 523 bp, Glycine max
ctcaacttctgctacccactctcttcttccaagtccaaccacgcttttctctacaggcatgggcaaggtcaagatcggaatcaacggatttggaagaattggccgcttggttgccagagtcgctctgcgcagagacgatgtggagctcgttgccgttaacgaccctttcattaccaccgattacatgacatacatgtttaaatacgacagtgttcacggacactggaagcatcacgatgtcaccgttaaggacgagaagacccttctcttcagtgacaagccagtcactgtttttggacacaggaaccctgaagagatcccatgggggtcaactggagctgatatcattggtgagtccaccggagttttcaccgataaggacaaggccgccgcacatttgaagggtggtgcgaagaaggttattatttctgcccccagtaaggatgcccccatgtttgctgttggtgttaacgagcacgagtacacgccagagcttgatattatttgcattgctagctgcaca

SEQ ID NO: 220244 - DNA, 328 bp, Glycine max
ctggggagggcaaaaatgtctgcaattagaatcaacaaagagccgggtccctcatcaagtgtttaataatgcaaaaactccatcccctacacagaagagacaactaaaaaaagcttaatgctcctaacagggtaacaacaccggttcccgaaaccgatttattcatacttctcatttctgcccgagcaagaagacactaaatcgcaggtagacaccagcacataatgtctagacaagctacttttttttagaacaaccttaaaaagacttcttggcaacaaatacaagcaggtcaatgacacgtgagctgtatccccactcgttggat

SEQ ID NO: 220245 - DNA, 386 bp, Glycine max
tttatttttttttttacatgccaaacccatcatgagatacatacattgaaagaagccaacaacagtatgaaatcatctggcagcactgcacagcaccatctttgtccgaacactcacaaatcataatcagaagagaaggggggaacaatgggaaacaatagtaaatcctcgtatcttagcgacctttatggccattacaaggaaatgacagtcataggctatttagaaaacttgaagtacaggatcacgatgatagctataaccaggaccaatacaatgccaccaataacccatttgtgcttgttcatccttcttgacatgtagggcaaaaatttcttgctcttgcctatgagatcatccactccatggagcgtgttatgtgcatg

SEQ ID NO: 220246 - DNA, 453 bp, Glycine max
acaataataaatccatatttttataattaaaagtagtagattacagcgatgcacttgagaaacatattaagtggactaattctccctggtcaagcaagaaaaaaaccagctatgacccaaggtagagagagattatacacagaatactagtaattaactaagactggctctgcaattgccaaaaactccattgcagtagcagccacctgagaagacactaagacctagactagaccatacataatgaagattaatacccttacataacaacataggacactaagaaaacacggcttcacagagaatcccagtcgatctcataagaggggtacttctggagattaaaattatccgaatcaccttcccactgcggctcgctgacgtcagcgaaagtcagaaccgaaagcggcgaagaaccttcagaagaggaggaagcagcttcgaccttacaag

SEQ ID NO: 220247 - DNA, 475 bp, Glycine max
  unsure (1)..(475): unsure at all n locations
catctcattttcctcttgtgtaagaggaggtaacatttctgcgtgttagggacaagatgaagcagagcattcttccttcagtttttcttggaattttggcttgttggggtgttctcccggttactgcagaagaccgatatcagtacttcacatgggaaattactaatggaacaatttatcccctaggtgttcctcaacagggaattcttatcaatggtcaattcccgggccctacagttgaagccatcaccaatgacaatatcctcgtgaatgtcattaacaagctagacgaaaaattcctcattacatggagtggtatcaaacaaagaaggacatcatggcgagatggagttttaggaaccaactgtccaatccctcccaaaagcaactggacatacaagttccaagtaaaagatcaaattggaacttacactgatgtcccatcaaccaaaatccatanagctgctggtggatt

SEQ ID NO: 220248 - DNA, 537 bp, Glycine max
acttggcacttgacagtcacaccctcgtaactgaaacttgtaaacaaaataatgataagtatgaagtaaaaatccaaattacaacttatgccaataatcacatcaaattataaacccccttccgagtctatgacttgggtaggtgtttagccttgccacaaaacagtgcattgggaggaagaagagtctcagtgtatacgctctgctcattgttccacaccctcagatacaattcttgtcctaaatacctttggggccagattgcagatctcaagttccacatacccttattgtccaaagataccaatatggcactccaagaatttggatacacctgaacagtgtgtctagtcatcccatcaaccaagttgtaagtctttctcgaatcagggatccacaagccattgtcatatccaacaacatagaagctagatccatccatgtgccatgactgcgtgtaattctcattgtttggaagataattcttgcaagtcatggagggtgaatcctatgacagatgtgcctaatttggcaggg

SEQ ID NO: 220249 - DNA, 542 bp, Glycine max
gggagattctttgtttgctaccttctctcggaaaaatggttacgttcaggtttcaccagtaccaggtggttgggagggctcttcccacggaagcagatcagcaccccaagatctaccgaatgaagctctgggccaccaacgaggttcgcgccaagtccaagttctggtattttctgaggaaactgaaaaaggtgaagaagagcaatggccaagtgcttgccatcaacgagatttttgagaagaacccagccaagattaaaaactatggtatatggttgcggggtcagagtaggactggggaccacaacatgtacaaggagtgccgtgacaccactctaaacggtgcagttgaggcaatgtacaatgaaatggcttctcgtcacagggtcaggagcccttgcatccaaattatcaagactgcgaccatcccagctaagctttgcaagagggagagcaccaagcaatttcacaattccaaaatcaagttcccattggtctacaagagagttagaccacctaccagaaaagctgagaccacatac

SEQ ID NO: 220250 - DNA, 481 bp, Glycine max
aaatcaaatattgaagtacgataatttaatttcaaggcttcacgaaattaagagtgaagccaaagagaacgaattcatagacatatagatagagtatagcattagctattacaacaacatatccaaatggaagtctgttttctccacttcaaggaatatccaaatatatgtacagaatgatgatatacgttaaactaaagtataatgaataaattgtttatttgcccttcttatcctcaggcaaagcagaagctgtgcatatgggaggtagtttgggcatagaggggcacttcgtggtggggcgagattgtgatcatgtgcgcaagctttcagcgtgccgacatcgtgcatgttcttgtattcttccaggcagattgcacaagcttcttcttctcgactttgctcagatgaacagtatattgtttctgtcaaatacttggaaatcaaatcctcagacaatcctgtgctcacatggcctatt

SEQ ID NO: 220251 - DNA, 565 bp, Glycine max
aaactacgcaatgtgataattgcattattggtttcatgttttgccttcaacaaattgcatgtatattctctattgttgccatgattgcgggaagcgatgaaattcaagaggcttctcagttgctgtcttgtttggctgactttgtgtactgcacggtctgtgcatgcatgcagactcagcacaagattgagatggacaagcgagacgggaaatttggaccccaaccagcaatggcagtgcctcctatgcagcagatgtcacgcattgatcaacaagttcctccttcggttgggtatgcaccacaaccagcttatggacagcctgctcaaggatatcctgctccgggttatcctcctactggttacccccctgctgcttatcctccaccaggatatcccccttctggctaccctaagtgattggtctacagcgcaccaattgatcgtgcttcatagaacaagggaacatgtttgtggtgaaatacaacagtgcgattgattaattaatttccattagtcttagtactcgtgagtaaccttatatccctatcggatgccatgctgat

SEQ ID NO: 220252 - DNA, 502 bp, Glycine max
gcacataacaagcgaaacatgtgaactatgtatgaacaccaacgggaacaatatacaaacagaagtcgaagtatcagaatggacatcacgatagggattataaggttaattcacgaattataagactaatggaaattaattaatcaatcgaactgttgtatttcaccacaaacatgttcccttgttctatgaagcacgatcaattggtgcgctgtagaccaatcacttagggtagccagaagggggatatcctggtggaggataagcagcaggggggtaaccagcaggaggataacccggagcaggatatccttgagcaggctgtccataagctggttgtggtgcatacccaaccgaaggaggaacttgttgatcaatgcgtgacatctgctgcataggaggcactgccattgctggttggggtccaaattaaccgtctcgcttgtccatctcaatcttgtgctgagtctgcatgcatgcacagaccgtgcagtacacaaag

SEQ ID NO: 220253 - DNA, 411 bp, Glycine max
cagccccggcgatcatcaaaagctcttgcttgcatatataagcacacctcgtcatgagggccccgaggttaatagagaaattgctcagaaggatgcaaagggtctttacaaagcaggggagaagaaactgggaactgatgaaaagacttttatccacatattcagtgaacggagtgcggcgcatttggctgccgtcagttcttattaccatgacatgtatggtcattcactgaagaaggcagtaaagaatgaaacatctggggcctttgaacatgcacttttgacaataatccaatgtgctgttaatccaggaaagtattttgcaaaggtgttgcataaggcgatgaaaggcttggggactgatgattccacactcattagggtcgttgtgacaaggactgaggttgatat

SEQ ID NO: 220254 - DNA, 471 bp, Glycine max
  unsure (1)..(471): unsure at all n locations
gataaattaacactcacaaagcactacaacaacaacaacaacaacaaaggccttattctacaagttgtcggctacattgatcacaaagcactaaaaacagtcaaatttacacatcaagggtgaatttattccacttacatcattgaacatcttggctagtgattagggcccaaaagtgagagaagaaaagtcctgtagtgactggaggtgtctgagtgtacttggtggttcaaaggcttggtgtgtttcttggaaggtgcaaatgtgagagactgcatatcaacctgaggccttgtgacaacgaccgtaatgagggtggaatgatgagtccccaagcctttcatggccttatgcaacacctgtgcaaaatactttcctggattaacaggacattggattattgtgaaaagaggcatgttgaaaggccccacatgtttcattgtttactgccttcttcagngaatgaccata

SEQ ID NO: 220255 - DNA, 505 bp, Glycine max
  unsure (1)..(505): unsure at all n locations
gggttcaacaggtgagactcagattactccaacccatgtatctgatgaagaggcaaaccttttcgccatgcaactagccagtgcctcagtactccctatggttctcaaatcagctcttgagcttgatctgttggaaatcatagccaaggctggccctggtgttcacctttccccctccgacattgcttctcggctcccaacacacaaccctgatgcacccgttatgttggaccgtatattgcgcctcttggcttgctacaatatcctctctttttctcttcgcactctccctcatggcaaggttgagaagctctatggtctcgcccctgttgctaagtacttggtcaggaacgaagatggtgtctccattgctgctctcaacctcatgaaccaggacaaaatcctcatggnaagctggtactatttgaaagatgcagtcctttgagggggtattccaatttaacaagcatatggaatgacangccttgaataccatggaacggat

SEQ ID NO: 220256 - DNA, 508 bp, Glycine max
attcttcctcacaccattttcagttcacagggttaggtttaggtcccttgtctggtctggtgtgcaattctccccatacaataacaatacacccactttatcaaccaatcaatcaatatacctagtagtgattagatttagtgatcgatcctctcctttcgttctcaaaccgtagatttagattttagggtttctctcttaataaaatcttttgacacttccgtaacaaacaaaaaaattacataaattttcccttataattattattatttggcttttatctttggattaactaggcttgagctatcacaaataattgtttcggagaatggaaaagaaaaaggtggcagttcccctcgtgtgccacggtcattctcgccctgtagttgatctcttctacagtcccgttacgcctgatgggtttttcctcatcagtgccagcaaggattcgagtcctatgctcagaaatggagagactggagattggattggaacatttgaagggcac

SEQ ID NO: 220257 - DNA, 464 bp, Glycine max
gagaatccgaggcgaagagaagagaaaaattaagatggaggggaaggagcaggatgtgtcgctgggagcgaacaagttcccggagagacagccgattgggacggcggcgcacagtcaagacgacggtaaggactaccaggagccggcgccggcgccactggttgacccgacggtgtttacgtgatggtccttttacacgagcacggatagcagagttcgtggacacttttctgtatctatacatgactgacttaaccgtcatgggagttgccggggctaagtctaagtgcagtaccgatgggattcaaggaatcgctcgggcctccggtggcatgatcttcaccctccggtactgcaccggtcgcatgtaatggggacacatgaacgcggcggtgacatttgggctgttcttggcgatgacattgtcgttgcccagagcgattttctgcattgtgatgcgatgc

SEQ ID NO: 220258 - DNA, 433 bp, Glycine max
atgactcgggggttatttttgattttgcaaattacacaatcacagccgtacatcacacgtgagctgggcctcttccaacttaaaagcagaggataagattggcccatgacgcaacacatgcaccacctaataatcataattttacatctttacatacaaaatacaaagactttaaattaaaattaaaaaaaaaaagataaacagatcatcttgatgaaatgaaaccgaaacccagaaacattgttttgattttttttgttgttcccaacttgattaagcatgaacggtttgattgaatcacttggacttgaagggaatggccctgattacgacctggtggtagagtgctgcaagtgcagcaccaatgaaaggtcccacccagaagatccagtgatcatcccaaccaaggtccttgttgaagatgatagcagca

SEQ ID NO: 220259 - DNA, 546 bp, Glycine max
acgaaaccctcttcatcttgttctatctgtgacgagcatcatggcctcaagagcagtgttattgttggctatgtgtgtgcttccggcgatggttgtggccattcgcccagcaaagaaccctttttgcgtgaagggtcgtgtctactgtgacccttgccgtgctggttttgagacctcagctaccacctacattgctggtgctgagattatgttgcaatgcaagagcagggttagcaacgaggttgtgtacacgaagaaggggtacaccgactcaaccggagcatacacaatgtacgtggatgaggatcacgcagatcagatctgcagtgccaagcttgtaagcagccctcaccctcaatgcaaggaagtcaccccaggccgcgacgaagccgtcgtgattctcacccgctacaacggcattgcctccgacgataggttcgccaatgccatgggcttcatgtctcaggaggttgcttctggctgtgctgagatcctcaggcaataccaggagttcgacaatgagaattaattacgtaattaaattca

SEQ ID NO: 220260 - DNA, 531 bp, Glycine max
ctccttgcttgcagtcatggatggaatgcctatgtgagggactctcctacacactatgggtggaggactctatcacctggcgagagagtgtcaatctttggtgggagtcatgtttgggtggaccactgttctctctccaattgccgtgatgggctaattgatgccatccatggatccacggccatcaccatatccaacaattacatgacccaccataacaaggttatgcttttgggtcacagtgacactttcactagggacaagaacatgcaagtcaccattgcctttaaccattttggagaagggctagtgcagagaatgccaagatgcaggcatggatacttccatgtggtgaacaatgactacacccattggagaatgtatgccatacgggggagtgctgtcccaactatcaatagccaagggaatagatttcttgctcccaatgacaataccttcaaagaggtgacaaagagggagaattcaccacagagcaagtggaagatttggaataggaggtcaaatggagat

SEQ ID NO: 220261 - DNA, 606 bp, Glycine max
  unsure (1)..(606): unsure at all n locations
ccaaccctgagttcaagggcccatggaaggcagagaaaatcaagaaccccaactataaaggaaaatggaaggcaccattgattgataacccagatttcaaggatgaccccgacctctatgttttccccaacttgaagtacgtggggattgaattgtggcaggtgaaatctggtactttgtttgacaatgtcttaattactgatgatcctgagtatgctaagcagctggttgaagaaacatggggcaagcacaaggatgctgagaaggcagcatttgaggaggccgagaagaagagggaagaggaggaatcaaaggatgacccagttgactctgatgctgatgaggaagaggaagatgctgatgaagctggcaatgactccgatgctgaatcaaagacggaagctggagaagacaccaaggaagagggtgtacatgatgaactctangaagtttgcaaaacggataaagagtgagcggaagttatattccggaaagttatatcttnttcagttgtagtgttttttagttttattttccctagataacagaccgnggaaactgaagtgaaagctgagctttgttcaatacatttgctatttactgttt

SEQ ID NO: 220262 - DNA, 379 bp, Glycine max
aatcagtgaaatagtcaaatgtgattgaagcaaaagctccagctttcacttgcagttttccacggtctgcttatctagggaaaaataaaaacaaaaaaacactacaactgaaaaagatataactttccggaatataacttccgctcactctttatccgttttgcaaacttcctagagttcatcatgtacaccctcttccttggtgtcttctccagcttccgtctttgattcagcatcggagtcattgccagcttcatcagcatcttcctcttcctcatcagcatcagagtcaactgggtcatcctttgattcctcctcttccctcttcttctcggcctcctcaaatgctgccttctcagcatccttgtgcttgccccat

SEQ ID NO: 220263 - DNA, 531 bp, Glycine max
cttttgttctagaactacttatgatgacaatgcaataacaaatgctgttgagatttatgatcatccaagtggggctgttcatttcatggcttcaaataatgactgtggagttagagactttgacatggaaagatttcagctttccaagcatttctccttctcatggcccgtaaatcacacttcattgagcccagatgggaaactggttgtgattgttggagacaacccagaagggatactagtggattctcaaactggaaagactgtcaagcctttatgtggacacttggattactcatttgcatctgcgtggcatcctgatggccgtatttttgctactgggaaccaagacaaaacatgccgtgtttgggatgttaggaacttgtcaaaatctattgctgtgcttaagggcaaccttggagctatacgttctatacggtttacatctgatggacggttcatggcaatggctgagccagctgactttgtgcatgtctatgatgcacagagtgggtttgagaaagagcagga

SEQ ID NO: 220264 - DNA, 534 bp, Glycine max
ggcaatcaatgttatttaacacgacgaagtttatgtaacgaccatatcatcctacattgtatgatgaagcatgccaccggtcatttttcttcttagtcaggtggtgccacaattctcaaattcctagacagaagaacataaactgtaggtactttacaaacacaaggtatgcaattacaaatttacatgcagtcaagatacatatagtttctccgtcgattgtactgaagaaggcttccataggtgcgatcccagacaccaatgaaaagtgattctgtgtcagggctaaaagatacaccagagatctccccaaaaaaattgatctcctgctctttctcaaacccactctgtgcatcatagacatgcacaaagtcagctggctcagccattgccatgaaccgtccatcagatgtaaaccgtatagaacgtatagctccaaggttgcccttaagcacagcaatagattttgacaagttcctaacatcccaaacacggcatgttttgtcttggttcccagtagcaaaaatacggcca

SEQ ID NO: 220265 - DNA, 495 bp, Glycine max
ccggcacttacaatgcgcttatgggtgcttttatgttcaatggtcttcctgataactgtcagtctttgttttgtgatttgaagagggatctgacttgcgatccttctattgccacgtacaatattcttctatctgtttatggtaggctgatgctcgttgatcacatggaagcaacattcagtgagatacaaaggttaaacctcgccatgaacatctgcacttacaatcacttgattgctggatatatcacggcttggatgtgggatgatatggaaaaggtgtttcaaatgctgaagttgagctctgttgagcctaacatgaaaacccaccttctaatgcttcgtgggtatgcaaattcgggtaatcttgaaaagatggaagagatgtattcctttataagggatcatgttaatataaaggaaatttcattaatcagatgtatgatatgtgcctattgtagaagttctcatgcagatagacttaagaagataagag

SEQ ID NO: 220266 - DNA, 492 bp, Glycine max
aacacgttaaaatcatattttattatctacatgtaattcaacattaattattacaactttttaatactcaaataggagtatcagcggcacgagcctctccctagtttcattatggaaatgcactcaaaggaacttcatatccatgcttgaacatttgtcccaatgtttttaaaaccatggaaatctggccacggctcatgtaagctttgtacattatccataatgttttctttgagcatttaagcttgacattttccatctcttcaaggacattatgcatttcgagtaaggtcatctgtgacccatacatgactagcttacaatgatataaggatcggcagatactccacccagagatttccgcacgtctcacaaaattttctagcttttctactgcattacatcgataataagttgcaattatgcgtctcaaaatacccttggttgttatagaagtcccatgctcaaatgcctcatttatagcattctcca

SEQ ID NO: 220267 - DNA, 555 bp, Glycine max
  unsure (1)..(555): unsure at all n locations
tttaattacaactctgtatgtgaattctgcttgcagctgatggcgcaaattctgctccatgggactcttcatgccactatctatgaagtcgataagctcaaaattggtggaggcaactttttaaccaagatcgtacaaaacatcgaggagactgttggtattggaaaaggtgtcactaaactatatgcaaccattgatctagagaaggcacgagtggggaggaccagaattattgaaaaagagattaaaaatccaagatggtacgagtcctttcatatttattgtgcccatatggcatcaaacatcatatttacagtgaaagatgataatcctattggggcaaccttaattggaagagcatatgtgcctgttcaggagatcttgcatggtgaagaaatagatagatgggttgaaatattggatgagcataaaaatccaatacatggacattccaagatccatgtgaagttgcaatattttgatgtttcaaaagaccgcaactgggctctaggcattagaagtccaaaatnttcctgagttccttatactttcttt

SEQ ID NO: 220268 - DNA, 576 bp, Glycine max
cttaactgatcggtacggtacgccataaacttgcacggtcgacgcgcgcactcgtaagctggggcgtcctttttgagcacacccacacataaataactctctcctcatatcaccaaagataaaccgaagttaacataccccgtaaaaatgtataataatgcgcaatcacggatccaagccgagtgcctgtacagcatcagatcgtgaaatctggaaggcaatcttcagaatgaaaccatttctacagaaccattacaattgttgctcactctaacaacataagttctatattttattaacaagcttataaaatgaaacttaagtagtaaggatcgggggaaggtaatcaactttgtcgccaagaacacgagccttggtgtcagggaagaattcaaatcctggaagctcagtgacaactccttcgttggaaaccccaataggatatcggagcaggtgaccaggaaggtcatgctccagtgactcacttgaatagatatcccaatactggggagcaatttgggtcaccttcttaatacattcttcatttcagggtggaggaaagagtcatgaagcaag

SEQ ID NO: 220269 - DNA, 578 bp, Glycine max
  unsure (1)..(578): unsure at all n locations
tcgtgatgcaatgcttgggtgctatttgtggcgctggcgtggtgaagggtttcgaggggaaaacaaaatacggtgcgttgaatggtggtgccaactttgttgcccctggttacaccaagggtgatggtcttggtgctgagattgttggcactttcatccttgtttacaccgttttctccgccaccgatgccaaacgtagcgccagagactcccacgtccccattttggcacccttgccaattgggttcgctgtgttcttggttcacttggcaaccatccccatcaccggaactggtatcaaccctgctcgtagtgttggtgctgctgtcatcttcaacaaggaccttggttgggatgaacactggatcttctgggtgggaccattcatcggtgcagctcttgcagcactctaccaccaggtcgtaatcagggccattcccttcaagtccaagtgattcaatcaaacggttcatgcttaatcaagttgggaacaacaacaacaacaaaaatcaagccaatggttgtgggtttnggttcatttcataaagaagatctgttatctcttttctctttttaaa

SEQ ID NO: 220270 - DNA, 547 bp, Glycine max
  unsure (1)..(547): unsure at all n locations
ctttttctatttttaattgtctctgattttctcgtagaacgcgtttcttgccactccgaaaaacaagaggaaaaaattggaagttttcaaggatgttagaacagttactgatatttacaagaggagggttaatcctctggacttgtaaggaacttgggaacgctctgaaaggttcacctatcgataccttgatccgttcctgtcttttggaggagcgatctggtgcggcagcatacaattatgatgcccctggtgcttcctacaccctcaagtggaccttccacaatgatcttggtcttgtttttgtggctgtttaccaacggatccttcacctcttatatgtggaggatctgcttgctatggtgaagcgcgagttttcgcaagtttatgatcccaaaacgactgcataccccgatttcgatgagacctttaggcagctgaagatggaggccctggctcgcaccgaggatttgaagcggtcgaattcaaatcctgttgccgggaatgcgaagnagcaggtgcangggaatgatanatctggatttga

SEQ ID NO: 220271 - DNA, 512 bp, Glycine max
aaaaaaaataacaagttccttaaactaaacaaaccaaattgcctcaaaagtcaaagccacatagtttttttcctcaccaagtaatgggatcaacgaggattaacaagttcatcattcaacagaaacaaacatgacaggtaaacaggattgcaagggaaaataaaccactttgtgccctcatttaaggagagtcttcacaattgatttgacattgagcttcttgaggtcagtataagactgtccacagcccacaaacatgacaggagctccagatatgtaaaccattgaaagtgcagctcccaccttatcatctatggtgtcaaatttcgtgagcaagatcccatcaatcaatcttggattaggtgatgttgcaaggtcagctaatttctgattgaactttgaaagctgatcaacagcgtcattaccaaccagtgcttctccaacaaataagactagatctggattgttaaggtagatgagttttgacagtgctctcataagtggttcattat

SEQ ID NO: 220272 - DNA, 329 bp, Glycine max
catctccatctatttccatttgatgtttgtctgaagaataagatctccacatttgcagtccaactttttgcaaatcatgacttagaattgtataaaactcaagggtgggacccagaccattgccaacttcaccaaaatattctacttcaagtacagctttttggctagaatacatctccataacttttgcagcaaaatccaggacacgatttctagagacacgaaccttttggcgctgcaatttcccaactttcacctccctctcagttgttgaaccatggccatcaacaccttgctgctgttgaagtcgatacagtgcacgagataac

SEQ ID NO: 220273 - DNA, 517 bp, Glycine max
  unsure (1)..(517): unsure at all n locations
aaaaacacttcactccaattccaaacctgttgctgaaaccccaaaaaaacttagcaacattctatgtttctgttcagaggaaaaaagaaaaaaaacatagcgttgttgtgttgagttgaaaccgattcagctcaagactcaggtcaatccaaatacacatttagaagtttcaattcaatttttcaactcaatgatggtccaagagcgttcacttcccaaatcagtgaacccgaagccccacacgcgaacggcggcactggcctccacgaagagcctcgatttctccgcatgggtctccgacaacctcgtcaggatcgtggcggtgcttctcctggtggccaccgtcgccgccttgttcttcctccgcaacgtcggcgacaccgccgcgctgctctgcttcgagaaccaggcgcgggagctcgagaggatcgcgtacccgcgcgtggactggtccgctatcgcgccgatcgcagacaagacctcgaagttctcgagcttncggtccgagaaatggatc

SEQ ID NO: 220274 - DNA, 500 bp, Glycine max
cactcacacacacacacactctctttccatgggtccgtttcgtaaacccttccttgcatttctctcggttgttgtatttctgggtctctatgaggcagcagcagaacagactcagactcacaagagtacttacattgtacacgtggcgaaatcggagatgcccgagagcttcgagcaccacgctatgtggtatgagtcgtcactgaagaccgtgtctgactcggcggagatgatttacacctacgacaacgccatccacggctacgcgacgagattaaccgctgaggaagcgcgtttgctccagcgccaaacggggattctggctgttttgccggagacgaggtacgagcttttcacgacgcgaacgcctttgtttctcggacttgacaagagcgccgacttgttccccgagtcgagttcgggaagtgacgtcatcgtcggagtcctcgacaccggcgtctggccggagaacaagagcttatacgacaccggactcggac

SEQ ID NO: 220275 - DNA, 454 bp, Glycine max
agatcgccgactctttcaacaataacaatggccgataacgcaacaacgcaaggaagcatcaccctattgtctccttacaagatggccaaattcaacctctctcatagggtggcgttggctcctatgacaagatgcagagcgtttaactggataccacaggcagcgcttgctgaatactacgctcaaagatcaacaccaggtggattgctcatcagcgaaggcaccttgatctcccccactgctcctgggtatccccatgttcccgggatatattcagatgaacaagtggaggcgtggcgaaacatactggatgccgtgcatgccaaacgcagcattatcttctgtcaactttggcatgttggccgtgcctttcatccagagcatgaacctggtggagcttcaccaatttcgttcaccagcaagcccatatcggcgaggtggaggattctgcttc

SEQ ID NO: 220276 - DNA, 354 bp, Glycine max
tagctcgctgccgccctttttttttttttttaaagagatgcatatatatgactctggtgttatttttgattttgcaaattaaattacacaatcacagccgtacatcacacatgagttgggcctcttccaacttaaaagcagaggataacattggcccatgacgcgacacatgcaccacctaataatcataattttacatctttacatacaaaatacaaagactttaaattttaaaaagaagaaaagagataaacagatcatcttaatgaaatgaaaccaaaacccacaaacattggcttgatttttggtggtggtggtggttcccaactggattaagcttgacccgttggatgg

SEQ ID NO: 220277 - DNA, 501 bp, Glycine max
ggttaacagccatatatataaattttgttcaattctactcagttatcaaaatgatcaaaagataatatccaacagaaacataaagataaacccaatgaaaatagtctaaaagaaccttaaacaaaatctggcagtaaaaaaccaacgggtacgtctctactaaaaacgcctgatagacaccaagtatttgtaactcattcatcaaccacgttacataaacaagttgggctttttggccttgtatgtggtcttcagctttctggtaggtggtctaactttcttgtagaccaatgggaacttgattttggaattgtgaaattgcttggtgctctccctcttgcaaagcttagctgggatggtcgcagtcttgataatttggatgcaagggctcctgaccctgtgacgagaagccatttcattgtacattgcctcaactgcaccgtttagagtggtgtcacggtactccttgtacatgttgtggtaaccagtcctactctgata

SEQ ID NO: 220278 - DNA, 526 bp, Glycine max
gtgcttttactctgctaccttgtgacaatggtgagggttagtgtgttgaatgatgctcttaagagcatgtacaatgctgagaaacgggggaagcgccaggtcatgattaggccatcctcaaaagtgattataaaattcctttttggtgatgcaaaagcatgggtacattggagagtttgagtacgttgatgatcacagagctggaaaaattgttgttgaattgaatggtagactgaacaaatgtggggttattagtccgcgttttgatgttggtgtcaaagagattgaaggttggactgctaggctgctcccctcaagacagtttgggtatattgtgttgactacctcagctggcatcatggatcatgaagaagctaggagaaagaatgttggtgggaaagtgctgggtttcttttactagtttaattagtttcctttgaagaatttgctctgatttcagttcttgaaactcaccggttgtaatgatcaatgtgttagacccgtagtttatcaagtatagcattag

SEQ ID NO: 220279 - DNA, 500 bp, Glycine max
gaagaaatccgttgaaattatggcgaccaatttggtttagcaaacaaaacatagcacaccagaaaaacatctcctgctaatgctatacttgataaactacgggtctaacacattgatcattacaaccggagagtttcaagaactgaaatcagagcataatcttcaaaggaaactaattaaactagtaaaagaaacccagcactttcccaccaacattctttctcctagcttcttcatgatccatgatgccagctgaggtagtcaacacaatatacccaaactgtcttgaggggagcagcctagcagtccaaccttcaatctctttgacaccaacatcaaaacgcggactaataaccccacatttgttcagtctaccattcaattcaacaacaatttttgcagctctgtgatcatcaacgtactcaaactcttcaatgtacccatgcttttgcatcaccaaaagggaatttagtatcacttttgacgatggcctaatcatg

SEQ ID NO: 220280 - DNA, 508 bp, Glycine max
cagtcttcgtttgctcagaattgctagttacgttggaaaattaagcaaaagaagatgggaaggggtagggttcagctgaaacggatcgagaacaaaactagccagcaagtgacgttttccaagcgtagatcgggacttctcaagaaagccaacgaaatctctgtgctatgtgatgctcaagttgctttgattatgttctctaccaaaggaaaactttttgagtattcctctgaacgcagcatggaagacgtcctggaacgttacgagagatatacacatacagcacttactggagctaataacaatgaatcacagggaaattggtctttcgaatatatcaagctcaccgccaaagttgaagtcttggacaggaacgtaaggaatttcttgggaaatgatctggatcccttgagtttgaaagagcttcagagtttggagcagcagcttgacacagctctgaagcgcatccgaacaagaaagaatcaagttatgaatgaatccatctcag

SEQ ID NO: 220281 - DNA, 437 bp, Glycine max
gtcaaaataagggcttaataccattgatttcaaagtgaagggcacagttcatgcgaaaagtttgagcagttattaagctcgatcggcatataattggctattctaagttctaacatatatatatagttgagcctttgtcataatatcacatgtcacatacttggcagaatcatgccagcctaactagtcagatatgaagcatccatggtgggatgagagaattgccactagggactgtttgagcctttcccgtttcttccaccaatgctcttccttggaatgtctcacagagagttagagaaggaaccagtctttgtggtggcggatggagctgtggagaagttaagttaagggtccatgaatttgggcctagagtttttgggccaatatgtggacctttagtcactggtttcgctttctccttcaactttgctagc

SEQ ID NO: 220282 - DNA, 494 bp, Glycine max
ccctaattcacacccaaagagaaaagaaaaaaaaaacaacagtggtacgtgatgccaccgaagttcgatccctcgcaggtggtggacgtgttcgtccgagtcaccggcggcgaggtcggcgcggcgagttctctcgccccgaagatcggtcccttgggactctccccaaagaagatcggagaggatattgcgaaggaaaccgcgaaggactggaagggcctccgcgtgacggtgaagctaaccgtgcagaaccggcaggcgaaagtgacggtggtgccatccgccgccgcgctggtcatcaaggcgctgaaggaacccgaaagggacaggaagaagacgaagaacatcaagcacaatgggaacatctccctcgacgacgtggttgagatcgctagggtgatgagcccgcgctccatggcgaaggatcttagtgggaccatcaaggagattctcgggacttgtgtttcggttgggtgcaccgtggatgggaagga

SEQ ID NO: 220283 - DNA, 491 bp, Glycine max
aacaaaattacgatccaaccttaaaattagacaaatggtttggcaacccctacaaatcaccactccatcacaaaattactcaaaattccaacaatgttatatcatttaccaaccagcactcttaagtcttaactaccatactatttctatgactcaatttcctttatccttgtaaaaaaaaaaccaaaattgccgaaaacaaaaacaacataatcgaaacaaataaaaaaaaacactgaaatttcactaacgtcaatgaagaggaacctcaacatctccatcagaaatttcctgctgcagatccttggggtccttcccatccacggtgcacccaaccgaaacacaagtcccgagaatctccttgatggtcccactaagatccttcgccatggagcgcgggctcatcaccctagcgatctcaaccacgttgtcgagggagatgttcccattgtgcttgaatgtcttcgtcctctttctgtccctttcgggtt

SEQ ID NO: 220284 - DNA, 520 bp, Glycine max
  unsure (1)..(520): unsure at all n locations
tttagcgcagcttcttctagatttaaggaagatgggtaaggaaaaggttcacatcagtattgtggttattggccatgttgactctgggaagtccactaccactggccacctgatctacaagcttggaggcattgacaagcgtgttattgagagatttgagaaggaagctgctgagatgaacaagaggtctttcaagtatgcctgggtgcttgataagcttaaggctgagcgtgaaagaggaatcacaattgatattgccttgtggaagtttgaaaccaccaagtactattgcacagtcattgatgcccctggacacagggatttcatcaagaacatgatcactgggacatcccaagctgactgtgctgttcttatcattgattccactactggtggttntgaagctggaatttcaaaggatggacagactcgtgaacatgctctgctttcattcacccttggtgtgaaacagatgatttgttgctgtaacaagatggatgctactacaccaaagtactcc

SEQ ID NO: 220285 - DNA, 519 bp, Glycine max
  unsure (1)..(519): unsure at all n locations
gaccccagaagtggtttctgcagctccaattcaatcttctacagcaagcgtaagcccctcccactccctcccaacaacgccttagacgtcaccaccttcatctcctcccgcgcccaccgcgccaccacagccttcgtcgacgccgccaccgcccgccgcctcacctacacccagctatggcgttccgtggagggcgtggcagcctctctctccgtggacatggggatccgaaagggcaacgtggtcctcatcctctcccccaactccatccacttccccgttgtgtgcctggccgtcatgtccctcggcgccatcatcaccaccaccaaccccctcaacaccacccgcgaaatcgccaagcagatcgccgattccaagcctctcctcgccttcacgatctctgatttactccccaaaatcaccgcagctgcaccctctctaccaatcgttctcatggacaacgacggcgccaataataacaataacaataataatatcgtggccactctngatgagatg

SEQ ID NO: 220286 - DNA, 484 bp, Glycine max
gagagctgcaacacagtctcaggagttttttaggactcttcaacgctattatagcaatgcatacatggatgctatgaaacaggatgcaatcaatgtattcctggggcattttcagccacaacagggtaagcctgctctatgggagttgggttcagatcagctctatgatgcaggaagacatggagatgacgatgctaggtcattcttcaaaagatccttctcagatggaaacattcttaatgaaagttctacaccgatgtcagccccaaaggccaagcatgaaaaattcccaagccaaggcggcttaccagatcgatcagaagaaggaagcaagggactctgtgagtcatcaccagaaatatctactactgagagtgacatctcattttcaaggtacactccctcaatgcctcggagacagctctttggagatatgcacagagagcgctgccttgaaagtgaacatatttactattctgatcac

SEQ ID NO: 220287 - DNA, 393 bp, Glycine max
gtcaatttggctacttcaggaatggcaacacttcttgcatctcttatccaatgctttgacctgcaagtgctgggccctcaaggacaaatattgaaaggtgatgatgccaaagttagcatggaagagagagctggcctcacagttccaagggcacatagtctcgtttgtgttccacttgcaaggatcggcgttgcatctaaactcctttcttaattaagataatcatcatatacaatagtagtgtcttgccatcgcagttgctttttatgtattcataatcatcatttcaataaggtgtgactggtacttaatcaagtaattaaggttacatacatgcacatgtatcatctcccatttgtctttgtttcgtacgtaagacaatttttttttccc

SEQ ID NO: 220288 - DNA, 396 bp, Glycine max
gggaaaaaaaaattgttttacgtaccaaacaaagacaaatgggggatgattcatgtgcctgtttgtaaccttaattacttgattaaggccccgtcccccctttttggaatggtgattatgaatacctaaaaagccactgcgatggcaagacacttctattggatatgatgattatcttaattaaaaaaggggtttaaatgcaacgccgatccttgcaaggggaacacaaacgaaactttgtgcccttggaactgggagggcagctttttttttcatgctaactttgggattatcacctttcaatatttggccttgggggcccaacacttgcaggtcaaagcattggataagagatgcaagaagtgttgccatttctgaagtagccaaattgacctt

SEQ ID NO: 220289 - DNA, 537 bp, Glycine max
ccacagaaaaactcacaatatatagctacaatgtttaaacgtagttaagaaacccgataaacatgtatcataatgcagatagagtcatacaagctgattgccttctcatcatcagattgttaaaatctggaaggcaatcttcagaatgaaaccatctctacagaaccattacaattgttgctcactctaacaacataagtactatattttattaacaagcttataaaatgaaacttaagtagtaaggatcggtggaaggtaatcaactttgtcgccaagaacacgagccttggtgtcagggaagaattcaaatcctggaagctcagtgacaactccttcgttggaaaccccaataggatatcggagcaggtgaccaggaaggtcatgctcaagtgactcacttgaatagatatcccaatacttgtcagcaatttggttcaccttcttaatacattcttcattttcagggtggaggaaagagtcatgaagcaagccaaggtgctcataccacaacgacatgcggaaaccatggatctg

SEQ ID NO: 220290 - DNA, 453 bp, Glycine max
gcaacaaaagttaaatttattaatagtagtaataatagtaacatattaaatactataatcactagccaatcaagacacacccctcttcgagtgagtgatgaaccttgcaatttgcatcaaccttttccaagtttcaaccccaattaaccgaaattggggatccaaccaggtgcttcccatcggaccattctacccttccaaaagcgttttctgtatgctgtggcgaacccgatgacgaaaacgtgacggtgaacgttttcttctcgttctccttgaaactcaacacttgcggttcaaccgagattttaacggacgcagtgtctgacgtcacggaagctttgtaagttcccgcaggccccacgttagtgagagtcctcgtgtgcttaaccacgctccctgatgattcaaacaacaccgcaaacgaagggtagttgaggtcggtcacactgtact

SEQ ID NO: 220291 - DNA, 553 bp, Glycine max
gccttgagtaccaagaccaacatctagaatatcacagggctatgagactgagagttttctcaatctacccaaagctggtaggaagtgcgcgaagcgtgttgatagcatatggggtgcttggtttttcttcagtttttactttaagcctgctttgaatgacaagtccaaggccaagattgtcagggacagcaacggtgtctcagggttcgataagtctgatctgaagctggatgttttcatggttcagcacgacatggaaaacatgtacatgtgggttttcaaggagaggccggagaacgcgctgggtaagatgcagctgaggagttacatgaatgggcattctcgccaaggggagcgcccgtttccgtttagcgctgacaagggttttgctcggtcccacaggatgcaacgaaagcattatagaggactatcaaaccctcaatgcgtgcatggcgttgaggttgtttccacacccaatctgatgaccctggatgaggatgatcgaaaaaggtggatagaactcactggccgagacttgaatttacaattccac

SEQ ID NO: 220292 - DNA, 498 bp, Glycine max
ggtaaattcttataaatcatgagaattagctgttcaatactgcttacaatcagaagcatacagatgcaccggaacaaaaagaaccagggcagtcagtgagctaaaattgctagagacaaacataagacacacaattctattgcaaataacagtgtatggtacaaggttagaaaaacaatgacatacgaaccatactggaatgcctaacaatttttttaagtgcctattatctcaagttaacttaagatcattccctcccagatgagggcggaggcaaacacggacttcatgctcttcaggtcccacgcgatgttttggcaccaggatctcaagcacagatcctggcccatcgtagtatgcttctatgttggcgtcttcaggaattcgggttgaaagagggatttctcggacgaactctccaggagggcagtgctctgacgatggatctgtaagcttgaatgtcctatcatgtctcttgatgagaggctttcgagatgt

SEQ ID NO: 220293 - DNA, 475 bp, Glycine max
gcggccgccctttttttttttttttgatgataaaatagatgaagcttggttacttctaacttcaaagaagaaacacatgaagcttcattaattaataatgataaaatataaatcaagtaagtctcaaagcttccaacaaaataatacaaacaaaattctcaaatcctgcccgtattttaaatctaccttaggcatgctggtaatggcgcagcttatacaataacactttgcctgacgcgtttccgacagccatgaatccaccaccaggactaaaatcaatacagcggggataatgcaggttcgtgtttgacggtggccagttggagaacacagaatacgatgggatatgtattaattttaagctgctcttcttcatgcctgaacagatcgctaatatttgagagtcatgattaaatctcataaaatccacttttgtagtcaaattctctatgggtctgataggctttctcttacc

SEQ ID NO: 220294 - DNA, 542 bp, Glycine max
tactactgctagctgtgacttgttttgagttcaatcaaatcgcattggtatctgaaatcaggaaagatggttagcgtagctgagatcaggcaggcacaaagggcagaaggcccagcaaccatccttgccattggaactgcaaacccaccaaaccgtgttgatcagagcacctatcctgattactacttcagaatcaccaacagtgaccacatgaccgagctcaaagagaaatttcagcgcatgtgtgacaagtctatgatcaagacgagatatatgtacctaaacgaagagatcttgaaagagaatccaaacatgtgtgcttacatggcaccttctttggatgctaggcaagacatggtggtggtagaggtaccaaagctagggaaagaggctgcagtaaaggccataaaggagtggggccagccaaagtcaaagattacccacttgatcttctgcaccactagcggtggacatgcctggtgctgattaccaactcaccaaacaattgggccttcgcccttatgtgaagaggtacatgatgt

SEQ ID NO: 220295 - DNA, 494 bp, Glycine max
aaaacaaatgcctgttattgataattaggctaaaaagccaccaaacacgtattattattttaatataaacgtacacaaacaaactctaaacgagttttttttttttggtggttgttgttgttacaaaccccaagcaagtttgaaaagtggtacacaataatgaaataatatatgaggcatctcagatggccacactatgcaaaacaacagtttcaatggtaagtccaggtccaaaaccgaacaacacaccccattcaagtccttcacctgtggttttatgtccattttcagcagatttcctcctcatctcatccaagatgaaaagaacacaagcacttgacatgttcccatattcactaagcacatctctagtggccttcatcttctcaggtttgagacccaacttttgctcaacttggtccaaaattgcaggcccaccagggtgtgcaatccaaaagatggagttgtaatcagagatgttcaatggggttgaa

SEQ ID NO: 220296 - DNA, 490 bp, Glycine max
gccaaacccaaacacaacaacacaaagaaaaaaagagcacaaacagaccaattccaacggttgaattttttggctgaagacaccccaccgacgttagtcaaataaaacatgtcttgctccgtcgcggtttccaattcgccggtgttctctccttcttcttccctcttctgctcgaagccctccatcatctcttcttcgccggaatccctctcgctctctctctcgcatctcaaaccttccaactcttctacgacgtcgtcttgttcttcaccctctgctgctgcttcttcatcttcttctccttcttctccgtttcggcttcgccttcccaagcctcccaccgtgttctctgcttcttcttctgcttcgtctacctctccgaacggcaccgttttgaagaggaagcgacccgctaggttggacatacccgtttcctctctcacctttgcggttccgcccacgccctccgcggcggcgcgtgacttggtcg

SEQ ID NO: 220297 - DNA, 495 bp, Glycine max
ggtcaccatccccggttgcattcctcttcccgtcaaggactttctagacccggttctggagcgcaccaacgaggcctacaagtgggtcctacaccactccaagcgctaccgagaagccgagggaatcatcgagaacagcttcgccgaactcgaaccgggcgcctggaacgagctgcagagggaacaaccgggacggcctccggtttatgcggtcgggccgcttgtgagaatggaacccggtcccgccgactccgagtgcttgaggtggttggacgagcagccacgtggcagcgtgttgtttgtttccttcggaagcggtgggaccctctccagcgcccagatcaacgaactggctctcgggttggaaaatagccagcaacggttcttgtgggtggtgaagagcccaaacgatgcaatagccaacgcgacttacttcaacgcggagagccacgaggatcccttgcagttcttaccagaagggttcgtggagagaac

SEQ ID NO: 220298 - DNA, 535 bp, Glycine max
gaaccaaaccaaacctttatcatcatcccagataaaataaatacataaagcgacattttataagtgcagataataaaattacaggaagaagaagaagaaaaataaaagctagccactagtagagatggtggttttgttggtccacttgagaaccaaattggagatatggtcggtggaggaaccatttggagagagagccttagccgcagcctccttgagatccttgattcggtaacgaagcttcttcccttcatggccttccatgaggcacttgacaacgctggctatttcctggctctggacaagtccagtgtcctcggcaactttgggcctcagcgccaccttgacttcatgcatgagcataaacgcgttggtcctctgctccgcgaacagaggccaggctattaaaggcacgccgttcaccacgctctccagtatagagttccagccgcaatggctcaagaatcctcccgttgattgatgggccagaacctgtggctgcggagcccatgacttaaccaaaaagcccctttct

SEQ ID NO: 220299 - DNA, 495 bp, Glycine max
caaaatgggattcgaagcagactcaatttccctctgcagctgttagagaaaaaggacattgatgacgtcacggaacaaccttgttccaccaccagcgtggtaactgctactactactgctattactactactactacttcagataacaacgacctccacttggcggagcagtccaagaagcctccgccgaaacggagttccaccaaggaccgccacacgaaggtcgatgggcgaggccgccggatccgcatgccggcggcctgcgctgccagagtgttccagctcacgcgtgagctgggacataagtctgacggcgagaccatcgagtggctcctccagcaggcggagcccgccgtcatcgccgccactgggacaggcaccattcccgccaacttcacctccctcaacatctccctccgcagctctggctccaccatgtcggccccgtcgcactacttccgcggaaactacttcaaccctagcacgttctccacg

SEQ ID NO: 220300 - DNA, 526 bp, Glycine max
gtggtgctttgagtgggtcagcccaagctgctttagcactgaacaactaccaaaatcttctcatgaggcaaaattcaatgaactctagccctggctcacttcagcgcgaagggtcctctttcaataattcaaaccagagtccatcttcagctttgcaaggagctggtcctgctttaattccaggcccaatgcagaattcatctgttagtggtttcccaagcccccgtctacccccacagcagcagcaacaccacctacaacagccctcattaagtgcaaatgctttactgcaacaaaatcattcacagggttcccaaggaaatcaagctctgcagcagcagatgatccatcaactactgcaggagatgtcaaataacaacgggggagtgcaaccacagtctcttggtggacccagtgcaaatatggcaaagaatgcactggggtttgggggccattatccatccttaagtggaggttctgccaatgttacaggaaacaatggacctatgtcaaggaataatagctt

SEQ ID NO: 220301 - DNA, 505 bp, Glycine max
  unsure (1)..(505): unsure at all n locations
aacactcctgagcagctcagcacaatgccgggtctggtctccgtagcggacacccgccaaagatccccttccccagttcccaagaaagcagcctccccatccccttctggctcctccaaaaagaaagccccacttctctccgatgcctctctggacaaccctgatctcggcccattccttctcaagctggcccgcgacaccattgcctctggcgatggccccgccaaggccctcgacttcgccatccgggcctccacttcctttgagcgctgcgccatccagggcgagcccagcctcgacctcgccatgagcctccacgtcctcgccgccatctactgcagcctcggacgcttcgaagaagccgtccccgtcctcgaacgcgccatcctggtccccgacgtcgaccgcggccccgatcacgccctcgcctcgttctccggctacatgcagctcggcgacaccttctccatgctcggtcaggttgaccgatccatctnctgctacg

SEQ ID NO: 220302 - DNA, 542 bp, Glycine max
agaataaaaatttgctttcaacattttccggaaacggaggacacaggtatagaattttgtggtacagctaaaaagatcacaacacaattgataaagcaattaaccaagagaaacaaatgcatgaacaaatatcaagaaacagggaagctccctcccaaattcaaccctatacaagatatcctatgttacagaatgtgcattcaatatatatattaatgaacaaaaatatggttaaattctaaaccccaaaccaggccacctctttgccccctccttctttgtcctctttgagccaggatcaataaggttttccagagattttgcttttctgtcccgtgtcttgcctgcttctttcagaagctcggccagacgacgcttctcatcttcaaaatcaggatttgctattccaagcttttcctccctcaacttgagcacatattctaagatttcaatcgcatctcccactcttcccatagcatcatatgtagctgcaagattgctgtacaccccaagagtatcctgatgacaagggccacactcct

SEQ ID NO: 220303 - DNA, 498 bp, Glycine max
agaataaatttcactactagtttccattatatctcatcttcgttataccaatccaaaaaaaatggaccataatatcgttacatttcattctcttccaccagttcaaacatgtagaacaaaaatgagactcactcactcactgaacctgatatgtatgagacaacaacagttatgttatcaagtttgccaccataataacagaatccagctttttcagcagcagtagaaaatggtgtccgactactcttggacagtgctcgctgacgagccaaagctgctatcttctgagcagttacttggggctctagtccagccctaattgcatgttcaacaactccagtgatcttactgttgtacaaattgtcaaataaaccatctgttccagaaatgaccacatctcctgaagcaacgggtatggtaaaaacctcaccagagctgggtagatcagcgccattcccactcttcaactgatatgggaaattgaagtcatgctggtga

SEQ ID NO: 220304 - DNA, 522 bp, Glycine max
  unsure (1)..(522): unsure at all n locations
atttgtgaaatgtgatgtgagtaatgcaagggatctagctgctgcatttgaaaagcattttttgacatatggaggactagacatttgtattaacagtgcggggattagtagttctgtaccattccgtgatgatcaaacggatggcacccgaacatggagatacactgttaatgtgaatttcactgctgttattgattccactcgccttgcgattaaaatcatggaagcttccaaaaggcctggtgtgattatcaacttgggttctgcttctggtctttatccaatggtggctgacccaatttacagtggctctaaaggtggtgttgttatgttttctagatcacttcgtctatacaaacgtcaaggaattcgagtcaatgtgctttgccctgagtttgttgaaactgagatgggaaataagattgatcccaagatcatcaatttgagtggnggctntgtacctatggaaatggtggtgaaaggtgcttttgagctcattatggatgaaagtaaagcttgtca

SEQ ID NO: 220305 - DNA, 547 bp, Glycine max
  unsure (1)..(547): unsure at all n locations
agcagttattcgattgaacaacagtttcaactttttaagtgacaatgcaaataaaggaaagagtggccagttttcaccgagagtcaaaatatacaattgttcatgatatgaaaggtgttctatagtataaactatgaacgtaaaggtggtataccttgctccattttcttacagatttttattttttaaactcacaattgcataagtaacctaaaaaatgaaaaagcattgagaacgtttcagctttggcattgagctgatgcagcaaatttcagaaacattcgacaaaattacttgcacaagagctgcacgtttaacttatcctttttaatttgaaagagctataatataatctgtgaggtcatttgacatgggttgattcacaatttggccacttgaggaaggaagcttgggttcacggagacgacaaccttcccaacacttttgcctgaatggagatattaacagcgtctgcagcagaatgcaggcctataaanttctttggatcaatagcaacctttaactttcccgaagagtaaagattaaa

SEQ ID NO: 220306 - DNA, 519 bp, Glycine max
  unsure (1)..(519): unsure at all n locations
cttttgtgttgtgttgggaaaccctaaaccccgttttcggtgagatcgagatcgatcgaacatggatgaggagtacgatgtgatcgtgttgggcacgggtctcaaggagtgcattctcagcggtcttctctccgtcgatggcctcaaggttctgcatatggataggaacgactattacggaggagaatccacttcgctcaatcttattcagctttggaagagattcaggggagatgacaagcctcctccacatttgggcgctagcagggactacaacatcgatatgaaccccaagtttattatggctaatggcaatttggtgcgggttctcatacataccgatgttactaagtatctctatttcaaagctgtggatgggagctatgtgtttaataaaggaaaggttcataaggtgcctgcanacgacatggaggccttgaagtccccacttatggggctatttgaaaaacgccgggcacgccagtttttcatttatgtgcanaactacaacgagagcga

SEQ ID NO: 220307 - DNA, 407 bp, Glycine max
actagctcggcggccgcccttttttttttttttttttttttttttttttttttttttttttttttttttttttttttttttttttttttttgcccggggtttaaaaagggtggggaaacctgccattaacatttaacaatttgaaaataaccccttcatttcccaactaaaacccctggcaaaggcaatgtttgtgaacccccaacaaagcttttggccgggaaaaagttccccaaccccacaaattttgttttaaaaaaagaaaatttttattataaaacgttaacaacatccgggggcaagtccattatcacgggacccattagcaacagattataaccgagttttctttacttttttgcagcacttgcaggccttaaatcccccctgggggcaaaaacctttcc

SEQ ID NO: 220308 - DNA, 548 bp, Glycine max
ctcaacgctgttagaccggcaggatcggcacttgttgatgattggcactgccttaaaaccatggtgaggacttttgagacacattgtggatccttgtctcagtatggcatgaaacatatgaggtcctttgcaaacatctgcaatgtagggataaagaatgagcaaatggctgaggcctctgcacaagcttgtgtctctattccttccaatccttggagttctctgcaaaggggtttcagtgcataataattcctgtaatgtgcaccagtaaagaccaaagtatgattattgttacattatgctatatgattgtacttgtatatacatattttgtcccgcctttgtaaatacaattgggacactactaggattgggaagaagggtctttacatttttagtttggcaaatagatattgcaactacctttgtataaatctatttctgaagaagcaattacaactttcaagggatgatagcattttgtggcataaggattaaggaggcataaaggaccaattgcttttgaatattcactcatgacaaggcac

SEQ ID NO: 220309 - DNA, 429 bp, Glycine max
ggaaaaactaaccaacaccacagcccctaatttcctttttctcacaatggcggcttcagtcgacaaccgtcaatacggcacccacataaacgccgtcgttcgcgcttgcggcccagacttcaatacccctctcccgtcggatttcgatctggactcatccagcgacgacgaagaccaaaacgacgacgcttcgtatctcaaggagttgatacaaaaagcgaacgcggaaaccgaggcgtcgctgttggacccgcgagacgagggaaccgcggaccagtggatcccgcggaacgcctccatggtgcggctcacagggaagcaccccttcaacgcggaggccccactcccccgccttatgcaccacgggcttcataaccccatcgccactccactacgtccgcaaccacggtccagttcccaagatcaaat

SEQ ID NO: 220310 - DNA, 446 bp, Glycine max
atataacattaatttatttacactaaagtagtaaaaaaatcttgacgtacctgtctacattaaagcgtgagaagggatgaagagttacttcccaacaatctcggttcatatacaatttttcacttctttttttacccttataaagaatgaaacaaacattaatactccaataacacccgatacacaaacaaatacaatacacaacacaatctagcaatctagctacttctccatgccctaaaacacaagcaaatcgttcttgatatcatatcccattttctccaaattacgctgcactgcaaactgaatcatggcgtggtggcccacatgtcaaagccaaggaatccctcgacgcttttggaaggtgctccctcgcgatactctctgtgatgaaccctacactgcatttccacccttactttgtgatctgcaccacgtaccatagc

SEQ ID NO: 220311 - DNA, 515 bp, Glycine max
ctcggacattgcagtttaaggaaacctggcatgggagttattactgtttctacctcagctgctaggactccattaagattgaatacaaggctgatcagtcatcagcaggagaaaattcctctacccctagaaacagcgaagaaacaccagaaaagagtaggaaagactagtgagtcactgaagagagtgagagccgtctctactgttgaaacctctccatgcaccttggatgtggactacaatgaagctgcagccaaacttgaaaatatatataaactcagccctgtatctgatacctgtaatgtggaagatatagatagtaaaatcgagagagtcttgcggaggaggaagaaggttagtgaggaacgtgatgatggaaattgtgataatgtggttagaaaccagaataagaaggccaaacgattgagtcttgataagaggattgcattgaaaaataatgcaaaggaggaggtgattgatcaaactcagaagaaaaaggatgttaagaatagagt

SEQ ID NO: 220312 - DNA, 493 bp, Glycine max
atgagcaataactccttcatatacaaattacatgacaaatgattataattttgtatacttaaataattgttatgagaattatcaagggcatggctataggtagcgtacgtgggactaaaatgacaccaatggaagcatatatatatatttgttaatttatacaacataacgacgaagataatccaaccgagctggatgcttaagcttcatgagagctttgacttcatgcttccggacaatttccctagaaatattcaagttcccagcaatttctcccaatgttctgtcacccttgccatcaagtccatatctctgcctgatcactaggctctcctttggcttcagggaatcaagcccatcatcaagagcaagtcttagaacagcaagttgcctcctattatcaccattaacaccatcaacatcagtaatcccattaatatactcctcttgcgtggttatatgtctcgaatgaagggatacaatgggttttgat

SEQ ID NO: 220313 - DNA, 561 bp, Glycine max
cgaggagagagaaagtgcaagaattggaagagagagagagagagaggtttggtttgtgatgtggtagctttgaagatctagttcactgttgctcattttagtgtgtatctaatcgaagacgagggggttccgatgtcttctctcagtagggaattggtgttcctgatcttgcagtttctcgatgaggaaaagttcaaggagactgtgcacaagcttgagcaggagtcagggtttttctttaacatgaaatattttgaggatgaagtgcacaatggcaattgggatgaggtggagaaatacctctctggtttcacaaaggtggatgataataggtattccatgaagatattttttgagataaggaagcagaagtatctggaggctttagataagcatgaccggtccaaggctgtagaaatattagtgaaggatttgaaagtgtttgctacatttaatgaagaattgttcaaggaaatcacacagcttcttacattggaaaatttcagggaaaatgagccattgtctaagtatggtgatacaaaatctgcacgagcaatcatg

SEQ ID NO: 220314 - DNA, 581 bp, Glycine max
  unsure (1)..(581): unsure at all n locations
cgactcctttgttgcgttgtattgcctctctcgccgaaaccctcgtttccaacttctacagaatccatttcttcgccatggatattgaggaggacatccgttctttgcagctcgattcggcagaagacaataatggggtggtaaatccagaggatggaaagccagaagaagttgagaaatatgataagatggatgaagatccaaagcaggaggttgaggctgagccaaaggctgttgaggctgagccaaaagtgaaagataaggagattccttctgttcaagatgaagaagatgtgcctgagatgacaaaaagacacttgaatgttgtgtttattggtcatgttgatgctggtaagtctacaactggaggccagatacttttccttagtggtcaagttgatgaacggactatccaaaaatacgagaaagaggctaaggacaaaagtcgagaaagctggtatatggcttatataatggacacaaatgatgaagagagggtaaaggggaaaacagttgaagttggaagagcacattctgagactganactacgagggttactattttggatgcacctggtcac

SEQ ID NO: 220315 - DNA, 387 bp, Glycine max
aaaaacacaatatgccaccttacgggggataattttatatcagctccacaaattgataacaaacaggttgaactttaaggggccaatggaggttaaaacaaaccaattttattttgaagggtgtttacagaccctttacacattaaatttttttttaaaaggtttgggaaaatccaacattgaacattacaaaaaaattagctcctgtttaaaaccccccacgaagacgcaacaccaagggcaaagttgactctttttggatgttgaatacagggggggtccttccatcctttaactgtttgccaaaaaaaaaaaccctttgttggtccggggggattccttccttggccgggatcttcgcctctacattggaaagggggggggagc

SEQ ID NO: 220316 - DNA, 536 bp, Glycine max
attccaaaagacagatgtgaactttttattcagagaaacaaacattgttacatcctcgggtagataacaatattctctctttatccatctaattgatgacatactacaagtctaaaccaaattacatgctacaacaaaaggacttccccaccccatgactactacaacatgccttgtctagctattaggatcaacaaccctttttctccactacatgatactaatactaggtgtcttacaacaaacctcccccctctctctctgcctgactccaacaattccctcaatgcttaattacaacaaaacccttctcctgatacaacaatgcatcaaacaccaagtcttaaaaaggactcaaacttggatctctattgaccatctgtacatctcctctggagaaactggaatggagaaggttgtcaacccggtctctgagtcatagttgaagtcggtttcagcgccacctaccacacacttcagtggtctctgggaggagtaaactccaaatctgcctcttccccttacactaagagcta

SEQ ID NO: 220317 - DNA, 380 bp, Glycine max
gagctagagctcctttctacatatttgctatggacctatgcattggaatagcaccccacactggccacacgtgcatgctctggcacatgtatgtacatgcgagctgtcattggtcaaacacaggcgtttgcctcaattcttggcccgacatctgcttagatatccagctatgggagaaagaatgttcattttagcttgcagccactcttaattgggcttaaaattgactgtgctgccgctaaaccagagacagttgagacagagtgcataataactgagaagctgctggctatgcctgaaactgatgtatgtgactgtggagtcaaaatttgcaactcttggcgctgattcgcttgacacggatgacagcgagatggcgc

SEQ ID NO: 220318 - DNA, 431 bp, Glycine max
tttcgttttttttttggtaattattatcccttgattcatatgctgtcaagagtatcctgtccctgtatgcttggatctgatcgcccaaaacacgttatgcaagaaattcaacgcactcaggacacactttagctcagaaatcctctgtaagcgggagtggttaaggcttgccccagagagccatggtctatgtgaggcagaaccactgacactatttacaattgacacaattgccgaacttaaggaatacccgtctgacaaagaggctcaggatcatgatgactccaaagaccttatgctagaaggagcttctgtgaataaaaactccaataacccagctagggcgaagagatcagcacaaccaatgaacaagtactgacaagcgattcaaaggaatgtgataggtaaaggcttggttgcatgatgaccta

SEQ ID NO: 220319 - DNA, 533 bp, Glycine max
  unsure (1)..(533): unsure at all n locations
caacgttagaatctcagcaattttagatgtttctttctttctgccttgagcctcacctcttgtgatatgcagcattctagactttccagtaaaaaagaaagacgagaattctgcgcaatccgaggagctagcgacacttaggccaaaagacaccaacaaacaaatccagcaccgcttccacgttttcttaataaaatggttacatcggaactctctaatcaccaaaacaacaactctcccatgatggcgaagccccacagaaacaaaacctcctctgtatttctctccgatggatctctcttcctcggaggagcattctccgctctcatcctcgtctggggtttctcctccttcaccaccaccatccctaaggaaacccccaatttcgaatctcttaccaaaaacgacgctgttccgcaccacggtactcccgatttcaacttcgacccccccgacagaacattctacgacgacccgcanatgggttacaccatggacaagaaagttcgcaactgggacgagaagcgcgagga

SEQ ID NO: 220320 - DNA, 472 bp, Glycine max
ctatggcgattaagtaagccaggcccgtctgatcgtctgactccgggaagaacttgtccttgaaagttgaccgcagcgtctggccccacttttcgtaattgggggtctgtgggcccatgctggcccacgcctccatgaagtccaacgaccactggcagtttctgatgaggaagacgccggcgttgagtcccgtccagcttcgcttctcgtgtatgaggtgggcccagccgtgaaccacgagattgtgctccctgtaacgctcaagggggagcttgaactccatgtcggtgaacaacgcgtccgagtcaacccaccagatccactccgcctccgggtgggccaccatcgcggcccgcaccacagggtacttggcccaatacgcaaacatctttgggtccaacagtgcgttgttgtagaaaacgttgcacccgtggagacgacagtagtccaccttgttcttgaaaaccgcagg

SEQ ID NO: 220321 - DNA, 514 bp, Glycine max
ctccttcaataaccctgccgaatgcagagccgtatcctctgcttctcaacgcgtcgtttaccactccatcagcgtcgttttctcagccacttcattcccgaccaccaatacgacccgccgttctccccttccccaaaaccctactacaaatcaaagaagaaccacgcggagaagaagaaaaagaacaattccgaaaacggtgatccgaacaaaaacggagccccgaaacttcctttcaagtcgaaccttccgttcgacttcagatactcttattcggagtccgacccttccgttgggcccatcagcttccgcgaatcgcccaagttctccccctttgggccgggccggatcgaccggaaatggaccggtgtttccgctccggttcagggtgaaccggaccgggagagggtcgaggaggagcggaaccggattctcggagaaccgcttagtgaggtggaggtggcagagctcatcgaacgctaccggcacagtgactgtgccaggcaaatcaatt

SEQ ID NO: 220322 - DNA, 533 bp, Glycine max
  unsure (1)..(533): unsure at all n locations
tctctctctactttggctccatgccaaccgttgttgcctccacaccagaattgttcaagctcttcctccaaacgcacgaggcaacttccttcaacacaaggttccaaacctcagccataagacgcctcacctatgatagctcagtggccatggttcccttcggaccttactggaagttcgtgaggaagctcatcatgaacgaccttctcaacgccaccactgtaaacaagttgaggcctttgaggacccaacagatccgcaagttccttagggttatggcccaaggcgcataggcacagaagccccttgacttgaccgaggagcttctgaaatggaccaacagcaccatctccatgatgatgctcggcgaggctgaggagatcagagacatcgctcgcgaggttcttaagatctttggcgaatacagcctcactgacttcatctggccattgaagcatctcaaggttggaaagtatgagaagaggatcgacgacatcttgaacaagttcgaccctgtcgntgaaagggtcatc

SEQ ID NO: 220323 - DNA, 425 bp, Glycine max
gatgtggcaactcaaaattaatatagggattgatagtttatagtagatgatgtgattcaaaaaaaaaaaaaagattgccttaggtagcaaacgaagacaaatgggagatgatacaatgtgcatggaagggcttatatacttcataaaaagtagatgaacgagaccttattgaaatgatgattatcaacccacaaaaagtaaatattatatatgaggatgatcttaattaagaaaggagtttagatgcaacgccgatccttgcaagtggaacaccgacgagactatgtgcccttggaacagtgaggccggctctctcttccatgctaactttggcgtaaccacccttcaatatctgtccttgtggacccagtacttggaagttgaagcactgaataagagatgcaagaagtgttgccattcccgaa

SEQ ID NO: 220324 - DNA, 495 bp, Glycine max
aacagagcaaaaacccaacacaccacactcttgcaatcaatcaatggcggaaccttcctcctcgaagcccgccgtccctctcctgaaggacgagctggacatcgtgatcccgacgatccgcaacctcgacttcctcgagatgtggcggcccttcttcgagccctatcacctcatcatcgtgcaggacggagaccccaataggaccatcaaagttcccgatgggttcgattacgaactctacaaccgcaacgacatcaacaggatcttgggtcccaaggcctcctgcatctcgtttaaggattctgcttgtcgctgctttgggtacatggtgtctaagaagaagtacatctacaccatcgacgacgactgcttcgttgctaaagatccttctggaaaggacatcaatgcacttgagcagcacattaagaatctcctatgtccatccacaccatttttcttcaacaccctttatgatccttacagagctggtgctga

SEQ ID NO: 220325 - DNA, 537 bp, Glycine max
atcctgaaatacattaatgatatttataatataaatagtaataatgatgatatcaaaatcaataaattggtctataatcttgcattataaaaaaaatatgataacaaaattactctgatttgaaaactaaagtccgcaaccataaaaggttcacttggtagcagcagcaccaccattggctgacttggaagaagcttcttcggatgtggtgctgttaagctcatcccaagcttcaatccaagtcaccatggcatctgcaagcttggtgaagtagggatcaacagccccaagcttctctttgacttgcttggagagttcaatgtagcatttttggacagaagtgcattcttttggaatggtggcactttggaagaatggaatgatctcttcttgccagaaaatgcccttgtactcctttttgagattcacaaaaggattgcttgctttgctgtgccagatgtatggaaggccagtcttcactcccaagcccaaatggtcacagataaccttaacacaccatccagcccacatatcatc

SEQ ID NO: 220326 - DNA, 388 bp, Glycine max
gaaagggtgatgactgaagctgacttctcaagcctgccttatctacaatgtgtgatcaaggaagcaatgaggcttcacccaccaaccccactaatgctcccacaccgtgccaatgccaatgtcaaagttggaggctatgatattccaaaagggtccaatgtgcatgtgaatgtgtgggccgtggcccgtgacccggcagtgtggaaggatccgttggagttacgacccgagaggttccttgaggaggatgtggacatgaaaggccatgactatacgctacttccattcggagcgggtcgccgggtatgcccgggtgcccaacttgaaatcaactagcaacaatcactgtgggaccacctcttgcaccattttggttggaccccacctg

SEQ ID NO: 220327 - DNA, 538 bp, Glycine max
  unsure (1)..(538): unsure at all n locations
gaagaggagaagccaaactcgctatgggtttttccttagttccttgaattgccatttcaaatgtagttacatagacacaaggcaattttcttaatgcaacaaagagtaatccaaggaaaagaaaaagaaagattagatctcagcaggcacacgtttgtacaaatgtgaggggagcctaggagaagccaaagcttgtattggagtcctcatgtatgtgactaaccctggattctctcccatgtcaatttcctcaggcttcattccttcaggtggggtccaacaaaaatggtgcaagaggtggcccaacatggatgttaccaagttgataccaagttgggcacccgggcatacccggcgacccgccccgaatggaagtagcctaaagtcatggcccttcatgtccacatcctcctcaaggaacctctcgggtcggaactccaacggatccttccacactgccgggtcacgggccacggcccacacattcacatgcacattggacccttttggaatatcatagcctncaactttgacattg

SEQ ID NO: 220328 - DNA, 592 bp, Glycine max
  unsure (1)..(592): unsure at all n locations
attgttttttgtcacaatgacttacaatatggtaacataatgatggatgaagagacaagattaatcactataattgactacgaatatgccggttataatcctattgcatatgacctggccaatcatttctgtgaaatggtggcagattaccacagtgacacacctcatgttcttgactacaagaaatatccaggactagaggaacgtcaaagatttattcgcaactatctgagttctgaaggcaataaaccaagcaatgctaaagtgaaccagttagtgaaagctgcagaaaaatacactcttgcaaaccatctattttggggtttgtggggacttatttcgagttatgtgaacaaaattgactntgactataaggagtatggaaggcagaggtttcagcaatactggataaggaagcctactttattggactcaccaagcatcgtttccctagatgaaactgtgaatggatggctgtcatcccttcacgtgatttgcttcagatttcttatagcctgtttggagatgtaggatgtgataccaaacatgcatttactgaagttaggtctagnctctctctctctttatatat

SEQ ID NO: 220329 - DNA, 576 bp, Glycine max
ctaaaaaaaaaccctaagttgttattgattgataaaaaaaaaatcaaattgcaacctaaaccattatttaatgtgtaagtgaagatgagatgacaaatctatctactttctaaatgcatacaccatcgatattgcaaacaacataaactacttattctcagttttatccccgagactcaatcccaaacgagagggattgataaacaaaccttaattaaaatttccaaaactcatcacacattggtagtgattgcatattatttacatatatgatgctgcatattataccttaaggtgttatatatatatatatataaagagagagagagactaagactaaacttcagtaaatgcatgtttggtatcacatcctacatctccaaacaggctataagaaatctgaagcaaaatcacgtgaaggatgacagcaatccattcacagtttcatctagggaaacgatgcttggtgagtccaataaagtaggcttccttatccagtattgctgaaacctctgccttccatactccttatagtcaaagtcaattttgttcacataactcgaaataagtccccac

SEQ ID NO: 220330 - DNA, 524 bp, Glycine max
gggaactagtcatattggaatcatatgcatgaatttctactcctcatttgaagaagtagaaatacagtgggatggagatgccttcaaaaagatgaaaaatctcaagacacttattatcagaagtggtcatttctccaaaggtcccaaacattttcctaagagtttaagagtattggaatggtggagatatccttcacattattttccatatgattttcaaatggagaagcttgctatattcaacttacccgactgtgggtttacttcacgtgagttggctgccatgttaaaaaagaagtttgtgaatctgacaagtctaaattttgactcatgtcaacatttaacactgatacctgatgtatcttgtgtcccacatttgcaaaaattgtcatttaaagattgtgataatttatatgccattcacccgtcagtaggcttcttggaaaaactgagaatcttggacgcagaaggttgctccaggcttaagaatttcccccccatcaaattgacctctcttgagcaac

SEQ ID NO: 220331 - DNA, 580 bp, Glycine max
caaaaccaattgcatcactctcgtccgttaccgccgctgccctagaccaccgcaagcgacgtcgcacaccgccttcatccgttagggcaaaaatgagtcgaggaagtggaggtggatacgatcgtcacatcactattttctcccctgaaggacgtctctttcaagtggagtatgctttcaaggctgtgaaggctgcaggaatcacctcgattggtgtccgaggaaaggattcaatttgtgtcgttactcagaagaaggttccggataagcttttggacaacacaagtgttacacacctctttccaatcaccaagtaccttggattattggctactggcatgacagctgatgctaggacactggtccaacaagcaagaaatgaagcagctgagtttcgctttacatatggatatgagatgcctgtagatgtattagctaaatggattgcagataaatcacaagtctatactcaacatgcttatatgagaccactcggagtagttgctatggttttgggtattgatgatgaatatggacctcagctatacaaatgtgatccagctggtcattactttggtca

SEQ ID NO: 220332 - DNA, 488 bp, Glycine max
ttttgtttttttttttaagcttaaatccctacgcaaggcccaacaaattttaacagtattatgggtatacacacgacttcgttttgttaacaattgttttaataataaaaaataaagtattggtcgaaacatgaaatattttcccaaggaaacttgtactaggaaattaaataccatattcaacatcattcttgagtaactcaccactcaaagattacaaggaaatcaattcgatgattccagatacaagtacataatataatctctaccatcagaaagtttgaacaactacatacttatcaagaactcagtcacgctcacttattgaagtcgagggctcatcaatttcgttggaggttaaaactctgaattctggattatccttccgtagcactccaacctcaatctcagtggccttaaaatcctcctgaagaactgattgcagggcataaatggcagtctgaaccgtctactcatatgtaaatgaa

SEQ ID NO: 220333 - DNA, 566 bp, Glycine max
cttcctcaccgattgctagaatggaatttcgatgctcagtcatctcttttaccattctcttctctcttgctcttgcaggagaaagccatgtccatgcatcgctacctgaggaagattattgggaagctgtttggccaaacactcccattcccactgcactgcgagagcttctaaagcctctccctgcaggtgttgaaatcgatgaactccctaagcaaattgatgatacacagtacccaaaaacattcttctataaagaagaccttcatccaggcaaaacaatgaaagtacaattcaccaagcgtccctatgcacaaccttatggtgtatatacatggttaacggatattaaagacacctctaaagaaggatatagttttgaagagatatgcatcaagaaagaagcgtttgagggagaagagaagttttgtgcaaaatccttgggaacagtaattggttttgccatttcaaagctgggaaagaacattcaagtactttcaagttcctttgtcaataagcaagagcaatacactgtggaaggagtgcagaatcttggagacaaagca

SEQ ID NO: 220334 - DNA, 494 bp, Glycine max
aaaaaccatcacagatatgaaaattaaggacaccgtttttacacaatgtcaactaattttcttaaataacggaaatttagttataatcgagacaacaatcaagcacggtggaagaactaaagtccttatgaaaagagaataaaagaaaataatagacttaaaaaagcacactgcatattcatcaaagcatcatcaaagcacactgcatcctaacagcacacgtacgtagaaaggtgaagttccaggtcttgcacaacatacacaacacaccataatttattttatatacaatcttatggtgcccaagatgcagatgcatggactaattaaacaacaacgttagtctgataggcagtgtccatagataaattgggtacccataaaatggccttgcttccaaggaaatggcaaacagggttagttccaggatcaactcccatgagttcatgaagcatgtgatgattcattccagaagtatctgagtggcaacagca

SEQ ID NO: 220335 - DNA, 546 bp, Glycine max
  unsure (1)..(546): unsure at all n locations
gttgcctcgaactcaaaggatgatcctgccaaggaggctgctaacttcactgcccaggttatcatcatgaaccatcctggtcagattggaaatggctatgcccctgttcttgactgccacacttcccacattgctgtcaagtttgctgaactcatgaccaagattgacaggcgatctggcaaagagcttgagaaggaacccaagtttttgaagaatggtgatgctggttttgttaagatgattccgaccaaacccatggtggttgaaactttctctgagtaccccccacttggtcgctttgctgtcagggatatgcgtcaaactgttgctgtgggagtcatcaagaacgtggagaagaaggatcctactggagccaaggtcaccaaggctgcccagaagaagaagtgaatcgtgcggtttggttcatcaggggatgtcgtttcttatggttacaataaatgttggtttcttgcccttgtgtcttcgtttctaggtagcttggttttcggacatagttngaagtctccaccatcatctcgcaacttt

SEQ ID NO: 220336 - DNA, 508 bp, Glycine max
gaacacaaatataaagttgacatttaagaagcaaaccaacaacgcaacggcaaagccctaaaactcgctgcgcttaacaaaaatgtaatcaggggttctcacaaacacaacacattacaacagaatgataaaaggagtcttgccaccgtcgatcaagaacccaattctgggaacaaaagttgcgagatgatggtggagacttcaaactatgtccgaaaaacaagctacctagaaacgaagacacaagggcaagaaaccaacattgattgtaaccatatgaaacgacatcccctgatgaaccaaaccgtacgattcacttcttcttctgggcagccttggtgaccttggctccagtaggatccttcttgtccacgttcttgatgactcccacagcaacagtttgacgcatatccctgacagcaaagcgaccaagtggggggtactcagagaaagtttcaaccaccatgggtctggtccgaatcactttaacaaaccagcatcaccattc

SEQ ID NO: 220337 - DNA, 555 bp, Glycine max
  unsure (1)..(555): unsure at all n locations
ctcgcaataaagattcactggtgttacgcgttaacatccactctattaagcaaatgtgctcctagtagtacaataaaaatataaaataaaataaaaataacaaatatttatataagattgtgttcttgcaagttccaagttccaagttcatgcacaaccgatcttttcctctgagaagacgtgtcggtagctgaagcattttataagcctccactttcctgaactagttttaacatacaatctttcaagtacacctccccagcttccatttaagtttgtggggctagaagtttctatttctgggcattcagaagattgcaggaaaagttatcagctttatttccatattgaacagagttgttgatctagaatggagatcactagaataggccaatggttaagtcttctgatatgtgtactactattactgcagacagaaggggttcctgtgggaatcacttttgttgaaaatgcagtggcaaaaggggctgtttgttnggatgggagtcctccagcttaccacttncacagggatctggagcagggattaacaac

SEQ ID NO: 220338 - DNA, 396 bp, Glycine max
attagaattacagatataccctttattgataataaaaatggtatgtttacatggtagacaattatcatcctttatgaggttgcctacccttacactttggaacctttgaaatcatcaatcacagcttggaacttgttgatgcaacaatcgaacccatactttgatggattgagatctcaaaccacaaagccatgagtgcaagcgacacatttagttcgctttaaactagataactaataaagtatagtctgtagcaataaataaataagcatactcttttaaatgaatctatacgtgtggacgctcattctgatcaaaaatacgattatggacagtagggttgcaagggtaggcacaatctatgtcacggaagggcctttgatcataaaaccaatg

SEQ ID NO: 220339 - DNA, 515 bp, Glycine max
  unsure (1)..(515): unsure at all n locations
gaccattcaaatgtcttcttttctcttagcttctcttgctgttttctttttcttctcctccttggaggagagttttgcctttcaagcagcaagaaaggaggacacagaaagcaacaatcttcatcaatatactcatcttgttcacctcagctcactccttccttcatcttcttgcagctcttctactaaaggtcccaaaacaaaagcatcattagaagtggtacacaaacatgggccatgctcccaactaaatgatcatgatggcaaagctaagtctacaacaccacacagtgacattctgaaccaagacaaagaaagggtgaagtacattaactcaaggctctctaagaacttgggccaagatagtagtgttgaggaattggactcagctaccctaccagccaaatctggtagccttattgggtctggaaattactttgtggttgtgggtcttgggacacccaagagggactngtcactcatttntgacactggcagtgatctcacttggactc

SEQ ID NO: 220340 - DNA, 432 bp, Glycine max
ctggattgatggccttaaggcccatgctgcaaaacatgtgactgacaaaatgatgcttaatgctggtaacatctaccctcacaacaccccaacaaccaaggaagcatattactacagaatgatctttgagaggttcttccctcagaactcagctaggctcaccgttcctggaggagcaagtgttgcatgtagcacagccaaagctgttgagtgggatgctgcttggtctaacaaccttgatccttctggtagagcagcacttggagtgcacatttcagcctatgaaaaccagaacaacaacaagggtgtagaaattgagaagattatacctatggatgctgctcctcttggtgttgcaatccagggataatataaagttgtgacaaagaataattgggggagaatgaactatgctaaacgtgtatgaaaaat

SEQ ID NO: 220341 - DNA, 538 bp, Glycine max
gaactgattatagaaacacttttattaagacttcaaatcacagggttcaagataatacaatacgctacacttttagaaagccttatatctatatctatacactacaaagctttgccaagataaaagtacactgcaggcaaatttttcatacacgtttagcatagttcattctcccccaattattctttgtcacaactttatattatccctggattgcaacaccaagaggagcagcatccataggtataatcttctcaatttctacacccttgttgttgttctggttttcataggctgaaatgtgcactccaagtgctgctctaccagaaggatcaaggttgttagaccaagcagcatcccactcaacagctttggctgtgctacatgcaacacttgctcctccaggaacggtgagcctagctgagttctgagggaagaacctctcaaagatcattctgtagtaatatgcttccttggtttgtggggtgttgtgaggggagatgttaccagcattaagcatcattttgtcagtcacatg

SEQ ID NO: 220342 - DNA, 532 bp, Glycine max
cgcactccgtcttcatcaatcagcatcaccaccgctccaacacaggggaaaatgagggagatccttcacgttcagggagggcaatgcgggaaccagatcggttcgaagttctgggaagtggtgtgcgacgagcacggcatagatccgacggggaagtacgtcggaaactcagatctacaactcgagcgcgtgaacgtgtactacaacgaagctttctgcgggcggtttgtcccacgcgcagtgctgatggacctggagcccggaaccatggacagcgtgcggactgggccgtacgggcagatattccggcccgacaacttcttgttcgggcagtccggcgcgggcaacaactgggccaaggggcactacacggagggcgccgagctcatcgactgcgtccttgacgtcgtgcgcaaggaggccgagaactgcgactgcctccaggggttccaggtctgccactcgctcggcggaggaacccgcttctggatggggacgcttttgattccaagatcagagaggagtaccctga

SEQ ID NO: 220343 - DNA, 504 bp, Glycine max
aaaattctctctaagatggtttgatctagaatacatctttgttgttttgaatctgtgtcaatcaactttcttttttgcagattaaactacaaaaagtacatcttatgctggttttgatcttgatatgttctgttccgatccggcttctctaaattgattagcaaatcactttagaggataaagtaagtaattttagtgtttgatgagaaaatcaactgtcagtgttatgtacacttgcataacaaatcatgaatgtattggaatattaacggttgattttctcattaacgactgaggttacttactttacagaagccaaatctattttgctcatatgggcatatagctacgttaattgagtctatcttgttttcaaattaaacgtgagaatcaattcagttgacccttttctttaatctggtttattgttatcaactactcaaattgatcaagatagattatcctctaatggccctaatcttgttctcaatgacagccagcata

SEQ ID NO: 220344 - DNA, 531 bp, Glycine max
cagaataacattttccataactaattagtgaatccaataataataacttcaaacaaaataaaatagcactgctcttctaatgtttaactgacgcataaaagataatatatcaagcataatgtactttaatatccaaagggaggaatgcaacctaaaagcacaacactattggatcttcacaccagaaaacacaataatggaaattgcctaaaagtgacaccaaaactgcttatttttcattataaaggtaagtctggccattgaagtatgtaaattcttctttcactttaatattccccactggattctttccatccaccatagctctcttcaggtgcatcataaccctgctcctcatttctctcagcagtgaaagtgagagccaccttaatctcaccacaatattcttcgtccttcacaaccttgtaagcagtttctggaatgctaccggcttcaaacactggatctaaatgaatggttgcctcgccaagacaatcatcttgactaaagttgtctttatccattatcttc

SEQ ID NO: 220345 - DNA, 524 bp, Glycine max
atttccacctactcttctctctctctttctctcttcttctgcaccatcgatccatctcatcgttctcttagctaccatggcgactgagaaccctttcaatagcattttgaggacgctcgagaagcccggcggcgctggcgagtttggaaagtactttagcttgcccgctctcaacgatcctagaatcgatagacttccttactctgtgaggatacttttggaatctgcaatccgtaactgtgatgagtttcaagttaagagtaacgacattgaaaaaattattgattgggagaatacctctcccaagctggtggagattccattcaagccagctagagtgcttctgcaggactttactggggtgcctgctgtggttgatcttgcttgcatgcgagatgcaatgaacaaacttggtggtgattctaataaaattaaccccttggtaccagttgatcttgtcattgatcactctgttcaagttgatgtggcaagatcagaaaatgctgtccaggcaaatatggaac

SEQ ID NO: 220346 - DNA, 502 bp, Glycine max
ctctgcaacgtcaaagactgacaacttctccccagaaggaatatgaatagttttaggtccaacttctccattcaaaaatttgttgacaatgcgaatattggcaaacgttcctcgggccatcacctcatcattaccacggcgacttccataggagttgaagtcccgtctatcaaccccacgttctataaggtatctggccgcaggactgtccttatgtatgctgccagctggagagatgtggtcagttgtgatactgtctccaaagttgagcaaacagtaagcatccttcactccatgagagcctgggggagacatgctcatatctctaaaataaggtggctcatgaatataagtcgatgtagggtcccaagcataaagagtgcccgttggaacagataaattattccacatgggattcccttgggtgattgcattatatgtgtccctaaacatatcaggcagcacacttgattgtacaacatttgctatttcttcactggat

SEQ ID NO: 220347 - DNA, 373 bp, Glycine max
aaaaacaggggttaaggtgctttatttttattaagtattaatccaatacattaagaaggacatatatatactattacatgcatgaatttgaagtggtggatcaccttaattggtggtgttataaatggtgcatggttattcataatatgtaaagaggtagatagcagttaccgattgtggggtctttaaccaaaaaagttgccagggggatcaaagatgcaagtgaagaaagagcctccgttatcacaaggaactttggcacatccaagacgcaccgagttagcccaaacgacctgtgggtagcgcagggccttttattcaacacaagagttagaacccttgtcattatcggatttctctattaacccacatt

SEQ ID NO: 220348 - DNA, 434 bp, Glycine max
agaacataagaaaggaatggagataattaggtgtgcaggatacaaattaatagatgacactacaacttatgtaagatgatatgagcaccaaattttggattaagagtgagcacagtgactggagcatgtgcataggtaggagaaagctcaaatgagaagcgttgtaagagtaatgacaaaaccaacttcgcttctaataaagcaaaattttggcctaagcacactctaggaccccatccaaatgggaaaaacacaacttggccttttgttgcctttgctactccttcagcaaatctttctgggttgaactctgtagcatcatcaccccaaatatcacgatcctggtgaatcaatagtattggtaaggaaacttgcactcccgcaggtagggaaaggtttccaagtttcacatcattcttgatcgctcgagcaaa

SEQ ID NO: 220349 - DNA, 509 bp, Glycine max
ccctaacctaaaccctactcattctccatacctcaacgaagaggttaaagagacggcaacactttgctgtccgccttgaccgagcagagcttcgtcttggccctcgattttgccctaaagtactcccagtcacaacagacaccgtcgtcgttgtcgtcatcatcaatggcaccgaagcagaccaaggctgagaagaagatcgcttacgatgcgaagctgtgcgacctaatggaggagtacggccagatcctcgttgtgaactctgataacgtgggatcgaaccagctccagaacattcgcaagggtctccgtggcgactctgtcgtcctcatggggaagaacaccatgatgaagcgctcagtcaggatgcacgctgagaaaaccggaaacaatgcctatctcaaccttatcccgctccttgttggcaatgtgggattgattttcaccaaaggtgacctgaaggaggtcagtgaggaaggttgcaagtacaaggttggagctcctgctcg

SEQ ID NO: 220350 - DNA, 553 bp, Glycine max
  unsure (1)..(553): unsure at all n locations
aactatggaaattaaaagtagttgaagctttaattaactatggaaattaaaagtagttgcaatgtaacatgaatacactaaaataacacctgaaatgaaaggcaaacacaacttcaattctaaccaaataaactcaacaaaagcattacataaattagtcaaacagactgaaacccatgtcatcatcagattcttcagctggttcttccttcttttcctcttccttggctgcagcaggagcaccagactcagcagcaggagcagcaacagcagcgacagcaaatttacttggatccttcagatactccttgaccttgtctgcctcagggaaagaataatctgtctcaaccgcaacagcaagaacattcttgtaggcattgacaaacatgtgtggtgcagcagcaagtgttgggtatgagatagctaatgaaagtgaagtaaccattgagacaccagcagcaaacttctcaataaggtcatcctcagntagatcaagaacctcanggctgaacactgaaccattatcataaacagaaagaaccacaagcccata

SEQ ID NO: 220351 - DNA, 490 bp, Glycine max
gttgaacaagggtttctctgtctgcttcttcactttctctcgtttcaatcgaaaccaaaacaaaatcatgggcagaaaattcttcgttggtggcaactggaaatgcaatgggaccactgaggaggtaaagaagattgttactactttgaatgaggctaaagtccctggagaagatgtcgtagaagttgttgtgagccctccttttgtgttccttcctgttgtaaaaagtttgctgcgccctgatttccatgtttcggcacaaaactgttgggttcgcaaaggtggtgcttataccggtgaggttagtgctgaaatgcttgttaatttgggaattccttgggttattattggtcactctgaacggaggcagcttttaaatgaatcaaatgagtttgtgggagataaagttgcctatgcacttcaacaaggtctaaaagttattgcatgcattggggagactctcgaacagcgtgaagctggtacaacaacg

SEQ ID NO: 220352 - DNA, 437 bp, Glycine max
aagtacagtcaactaggcgttcaacattatttacccaccaaatgttatggtagttacactatttttgcattcagaaatttaatcaaaatccaattgatcgcctatggatgagatctcaaaggaaagcgtgtttattcagtgctaaacagagttcaaaacattggccacaaagcacagatccaaaactcaaaaacagcagtttccgaagcagcttgaaaggcagcattatatcagttcctaactacgaatttcaattcttcttcacagtggcagcatttatgatgtccacgaactacggcttcagggaggcaccatcaaccaaaaattcatcaacatcgggctgtgcggccaattctttgcagtttcctacatttacagaacctgcatagataattcttacagatgcagcgactttagcactcacattgtcatgaacc

SEQ ID NO: 220353 - DNA, 526 bp, Glycine max
  unsure (1)..(526): unsure at all n locations
gttcacttcaccaagcattctcttatgctctgacagacactctggttggttgacatggattccaattccaaggccattttggattatgctttgtttcaactcactccaaccagaactaggtgagctacgatcagaaaattaaaatctttacttagtggggtgcttttgtttttactctgtgtggttggttgatggttttctttgcagatgtgagttgttagtctttcgtggaggtgttcatcagaaaatagcttctgggttgtttgagcctttcgtttctcatctcaaattcctcaaagatgagatctccaaaggtggatactcaattaagcttctgcctcccaaccacggtggcttctggttcaccagagccacgtttgagaggtcattgctacttttgctcatnnttgaattacctctntggcctcttaatggggtattctcatctcttctttgatctcaagaactttcttgcgtgttttctaattaaaatttgagagtncgtgaatcaataacctcaataatg

SEQ ID NO: 220354 - DNA, 437 bp, Glycine max
  unsure (1)..(437): unsure at all n locations
ggaaaaactaaccaacaccacagcccctaatttcctttttctcacaatggcggcttcagtcgacaaccgtcaatacggcacccacataaacgccgtcgttcgcgcttgcggcccagacttcaatacccctctcccgtcggatttcgatctggactcatccagcgacgacgaagaccaaaacgacgacgcttcgtatctcaaggagttgatacaaaaagcgaacgcggaaaccgaggcgtcgctgttggacccgcgagacgagggaaccgcggaccagtggatcccgcggaacgcctccatggtgcggctcacagggaagcaccccttcaacgcggaggccccactcccccgccttatgcaccacggcttcatcaccccatcgccactccactacgtncgcaaccacggtccagttcccaagatcaaatgggatgaat

SEQ ID NO: 220355 - DNA, 455 bp, Glycine max
  unsure (1)..(455): unsure at all n locations
acaccgtctactgagtttaaacgagcccagaaactaaagcagaagcttgagggcagtcatgttgcgcgggttgtgcttattcttctagctatagtgggaacttccatggtcataggagacgggattcttacaccgtcaatctcagtcctttctgcggtaagtgggatcagtacatctttaggtcaagatgctgttgtggggatcactatagcaatcttggcagtcctattttatgtgcaacgatttggtacagataaagtggggttcgcattcgctccaataattttggtgtggtttttattcattggtggaattggcctttacaatttatttaaatatgacattggcgtattacgtgcttttaatccaaaatatatatatgattacttcaaacggaacggcaaggaaggatggatatcacttggtggagtctntttgtgcataacaggatccga

SEQ ID NO: 220356 - DNA, 512 bp, Glycine max
  unsure (1)..(512): unsure at all n locations
aatgcaatgaaatgagctttgtttagtttaaaaaataaaaaaagtatcaatacacataaatgattcaaagttggcactttctgtgaaagtgtctagctccgactccgatgatgttgggcattgggattgcttatattttggaaagttttgaaggcttattggagcgaaggctttttcttgaacataacttataacttgcatgatttggtggaaaagatacaaaattcaagcaaagtacatatttctttatttttatgtatggacagtgaaactactggaaatcgaggtcatatttcataagtcattccaaccttgagaagtctgttgcgttggattgccatggaattctggccttgtctaaagttctttctgaagaagctataaacatagttgacaacaatcttattcaagatggaggaagatgggtgagcaactacctctgcttctgctagcatatagacgacgcccttctccaatgctntgtctatgaatttgatttcgtcttcagctcc

SEQ ID NO: 220357 - DNA, 535 bp, Glycine max
ttccattagttcctgctgaaagtcctaacacaacaccacccttcttcatcttcttatgtttttgacttgtggccaccactgtgacccatttctgtatcttctggcaaggttctatccgtttcttcttttggatcacccttttcactgttcgactccttcttgctatctgcttcgtcaatctgattattcatgggtgaaaagctaatttgttcacttgaataggtgtacagtgctaaagggttaagtttgaaacctagcctgctagttgcatcatcaggtcaaatccataactttctgggaatcaaacgatgatgatgtttgaagatatgggtttttgtggggatttggatatgttttctgctccccttggagaaggggacattaccacccggcaaactgagccagaggtgatagttgaggatgattatagtgatgaagaaattgatgtagactagctcgagaggaggatgttgagggacaaaatgcgtcttgagcgattgaaggagcaaagtaaacctaaggaaggaattgatgc

SEQ ID NO: 220358 - DNA, 477 bp, Glycine max
accatttgctcccagcactgagcttaaccgagcttcacaaagatgaatcgggaaaaattgatgaagatggccggttcggttagaactgggggaaagggcaccgtgagaagaaagaagaaggctgtccacaagacaacaaccacagatgacaaaaggcttcagagcaccctgaagagaataggggtgaatgccatcccggctattgaggaggtcaatatctttaaggatgacgtagttatccagtttctaaatcccaaagttcaagcatccattgctgctaatacttgggttgtcagtggttctccacaaacaaagaagttgcaggatatactccctagcattatccaccaattaggaccagataacttggaaaacctgaagaagctggccgagcaattccagaagcaggctcctgaaggagccactggttcaaccaccgcccaagaggagaatgatgatgacgatgtcccagagctt

SEQ ID NO: 220359 - DNA, 485 bp, Glycine max
  unsure (1)..(485): unsure at all n locations
gaaggaaagcatatttaataaagtatttgaactgtttaaagtatgacaggagaactgaacaccttaaatacttaaaatggaaaatcaagaagaaaaaaatttaaaaacacgggatatatatggcaatggcacaataacaaaacactctaggaagcagccttggtctcctcagcagctgtctcaaaatcctggcctggaacaagctctgggacatcgtcatcatcattctcctcttgggcggtggttgaaccagtggctccttcaggagcctgcttctggaattgctcggccagcttcttcaggttttccaagttatctggtcctaattggtggataatgctagggagtatatcctgcaacttctttgtttgtggagaaccactgacaacccaagtattagcagcaatggatgctcgaactttgggatttagaaactggataactacggcatccttaaagatatngacctnctcatagccgggatg

SEQ ID NO: 220360 - DNA, 543 bp, Glycine max
gttcccggtggtcttgcttgggctttgtccaaattcaagcctgcgattcccgggccttgcggttacccggtggtgggcctggtttgggctttcatagggcctcttactcacagggtccttgcaaagttggctgaaaccttcgatgcaaagcccctgatggcattctcggtagggtttactcgctttatcatctcttctcaccccgacactgccaaagagatcttgaacagttctgcttttgcggatcgtcctgttaaggaatccgcttatgagcttctctttcaccgcgcaatggggttcgcaccctacggtgagtactggaggaatctgaggaggatttcagcgactcacatgttctctccgaagagaattgcggcccaaggagtgttccgggcccgggttggggcccaaatggtgagagaaatcgtgggcctgatggggaagaatgatgtcgtggaagtgagaaagggtgttgcatttggatcgttgaataacgtgatgaagagtgtgtttgggaggagctatgtgtttggtgaggggggt

SEQ ID NO: 220361 - DNA, 553 bp, Glycine max
ctcctttctccatttttcctctgcgcctttgcatttcagcagcacaccacaatggccaccaatgcattcactggcacatctctctccatgcgatctgtcattcctcaaacacaggcatttgcctcaatttctggcccgacatctgctttaatttccagctttgggagaaagaatgtttcttttagcttgcagccacgcttaattcgccttaaaatttcctgtgctgccgctaaaccagagacagtagagaaggtgtgcaaaatagtaaagaagcagctggctatgcctgaaactgatgtggtgactggggagtcaaaatttgcaactcttggtgctgattcccttgacacggttgagatcgtgatggcacttgaggaagcatttggtattgccattgaagaggacagtgcacagagcatcgctaccgatcacgatgctgcagatcttattgaagaaatcgttcagaagaagagttctttaagtaaacatgtaccagaaggtttgttaaaacatgaactcatcatagtctccatgccgatcaatatttatggtg

SEQ ID NO: 220362 - DNA, 448 bp, Glycine max
gacataaatctacatctattaaaattagcatatcattgacaaaaaccccttaatgcaaaaacacaacttgatataactaacttccagaaacaaacaaaaggttggactaatttgtttttcttctcagacttgttttaatcacgcaacagagttcacaactaaaacactcgagactcagaattgccccacaccataaatattgatcggcatggagactatgatgagttcatgttttacacaaaccttctggtacatgtttactctaagaactcttcttctgaacgatttcttcaataggatctgcagcatcctgaaccgtagcgatgctctgtgcactgtcctcttcaatggcaataccaaatgcttactgaagtgccatcacgatctgaaccgtgtcaagggaatcagcaccaagagttgcaaattttgactccccagtcaccacatc

SEQ ID NO: 220363 - DNA, 523 bp, Glycine max
ctactgttaatgcggacaaagttactgtactttgagtctaactccccattaaatacatctgcaatgtcaacaataaaaagcaaatcttgtttagttgcaaggattagatgtgtgatcacttggtcagccaaatttgagtaaaatgagaagctgctgcagttgttgcaaagtatccccgcattagcatgcagtctgccaatctcatccagtccaaaaagcactgattttgataggccagcactgccaactaacgctacactcatccaagggcaagctgcagaaaaaccttgatgttcttgttctagagatcctctactaatcccaatttttgatacatactcttggatttcccccctagaaaactgaatatatgcagagtgtttactagcaggattggaagcgatgccaataaccagctctttaagggtatttcgatttgaaactgctgcatgccagcctgagcatgtcagcaatcctggaacaagatcctcagaacattcaagttccacttcctgcaaataga

SEQ ID NO: 220364 - DNA, 511 bp, Glycine max
gttcattacacttgatagtaacatatttgctctgtataccttgtgaacagtaaagtttagcataaagtcaataaggattccagagctttatattgaggttcctgaaacttcaactgttggttcactaaagaggactatcgtggaggcagtgatggctatacttggaggtggtgcacatgttggtgttcttcttcaggggaaaaaagttagagatgacaatagaacacttgtgcagactggtatatcttgcaatgaaaatttggataccctgagtttcatgttggagcccacttcactacaagcttctccaactgtttgtgttggtgatccttcttctcaatgtgaaacatcccagcctaccaggtgagccaaattttacgacgatttctttttatcaccacagctgatttatgaagggaaatggccaaggttaatttatggggtagaaataatgattcagttctattcagccgaatttttattgtgatactattgctaatgtcattatttg

SEQ ID NO: 220365 - DNA, 530 bp, Glycine max
gggagagggtgtgccttgttgacattggagagcaagctgtcattcccgaaggcatcagcaagcacgtgaaccggagcaaatattttcttgctggtggaatagcaggaggtatttctcgtacagcaactgctcctcttgatcgtctgaaggtggtcttacaagttcaaagcgaacctgcttccatcatgccagcagtaacgaagatatggaagcaagatggtctgttaggatttttccgaggtaatggattgaatgttgtgaaggtatcaccagaaagtgccatcaaattttatgcttttgaaatgctgaaaaaagttattggagaggcccacagcaacaagtcagatattggtacagctgggaggcttgttgcaggtggtacggctggtgcaattgcacaggctgctatctatccaatggatctcattaaaactaggttacagacttgtccctctgaaggtggaaaggttcctaagctgggaacacttacaatgaatatatgggttcaagagggacctcgagctttctac

SEQ ID NO: 220366 - DNA, 548 bp, Glycine max
  unsure (1)..(548): unsure at all n locations
gcatttcctcgttttttttcccttttctctttctccggcgacgatctcagattccggccactcctctcgccggcgagcccttactcttccctcctccgtcgagccctctccgattcgaatcgttcccagcctcgcaccaccatgaatcccgaatacgattatttgttcaagcttttgctgattggagattctggtgtaggcaagtcatgtcttctcctgaggtttgctgatgattcataccttgacagctatatcagtaccattggagtggactttaaaatccgcactgtggagcaggatgggaagactattaaacttcaaatttgggacactgcgggtcaggaacgtttccgaacaatcactagcagctattatcgtggggctcatggcattattggtgtttatgatgtcactgaccaagagagctttaataatgttaagcagtggctgaatgaaattgaccgttatgcaagtgaaaatgttaacaagcttctagttggaaacaagtgcgatctcacggcanataaagttgtgtcctatgagacagc

SEQ ID NO: 220367 - DNA, 496 bp, Glycine max
aacaatagaatagatgtagaagctgttgaaatgagatgaaagttcgagggacaaagaacaaggcaaatactgctattcaccaatattcctaattttgtacaaatgttttttcttttaaaatcaaatacatagaaaataatggaagttttaacaacggcttaacgataagaggaacaaatcatgacgaacaatcttgatatgaaagcaatgtgaaaagctagttttagatgccactgagacacatgaacttctaagaccccaaatacttcgtctctctctaagtcgagcagcaaccagccttctggttcactggctgtcctcgaatttgaactgttggaggcctcgcattgttcactggctggcttgccattctgtttttaatttcagcagccatggccatgaaagcctgttcaacattggtggcatttttagcactagtttccatgaagggaattccaatttcatctgcaaaagcctttgctgtctcataggacac

SEQ ID NO: 220368 - DNA, 478 bp, Glycine max
aacgatgtaaaagtttattagttattttaggagaaagagagcacatcccgccagagagatgcgcgcacaaagcccccaagaactgttttatttggtgataaaataataacacacaaaccaaggtatacaacaataagacgaataggaatcacgaaatttaaaagcagttgatgatgaattaattaagggcaaaacacaagcctataatcagatcctcccatgcaagtgaacatgctgcttgcgtcatccatagggtaactaaaggcatctggacacctctccttgaagaacttggaataatcagtgggaccgcaacccgcagcaccggtgctacaacagtactgagtcgtattgaaaaccgtgcacgggttgttgcagccgccgggaacctgaagctgagtgggacactttccgatgatgtcggcggcgcatttcacggagctgcagttgtaggtcgggctcacctgtcagggaatgt

SEQ ID NO: 220369 - DNA, 452 bp, Glycine max
aaatgaacatgtttaaaaattaatgtcagatgtagctttgggaacatgaagactcaagttaaccaataacataacaaattggaatactatgacacattacccagttgattatgttctatgatacgcaaccaatacaatagccacgataaggagtaaaaattgcacgggaagaccttacaccattcaactcttgaaagaaattcaatcatcgacactcatgaggaaaatgattgtagcgctctatcaaaactttcttcagctgatgatacccgattgaccaatacatgctctgggtgagaaagtttcagctggctgaatgatttgttagatggattgccgagatgaagacagcatacaactagattggctagagtttctggatccctggcatgcgttgtaagagcttcaaccaatagggtctcagcttcgtagaagctgcccatgtgcatgca

SEQ ID NO: 220370 - DNA, 416 bp, Glycine max
agagaatactaatatttgtttaatattgaagggcgtactggtttgatgccaataaactttcactttctcaagaggcgacttatacctggcacctatgcagctaaatcatgctggctttctgtcgtgtcctggacttaaatttgcaacttgcctgtccttttgctaaacagggaggctagatcttttgagctttagctgaaacgctggctctgaaaaggacatctactgagcatgaaataacgtctactgaagctcaacatccatggcaaatgcaccacctgctccattgctaggccaccaatttcgtactgatccattcttctgcttcagtacccccaaatgcgtgacctgaatgcgagcaccaatgcaaccgatatgatgacccagtgcaacagttccaccatgtacgttcactt

SEQ ID NO: 220371 - DNA, 519 bp, Glycine max
  unsure (1)..(519): unsure at all n locations
aaaatgcccactttttttcttccaacgctcctcctccttctcatagccttcgccacctgtgtctccggccgccgtgacctcgtcggagactttctccggctgccctccgaaactgataacgacgacaacttcaagggcacccggtgggccgtcctcctcgccggttccaatggttactggaattacagacatcaggctgatgtttgccacgcctatcaaatattgaggaaaggtggtctgaaagaagaaaatattattgtttttatgtatgatgacattgcattcaatggggaaaacccaaggcctggagtcatcattaacaaaccagatggaggtgatgtttataaaggagttccataggattacaccggcgaagatgttacttgtgataacttatttgctgctttacttggaaataagtcagcactgactggtggcagagggaaagatgtggacagtggtcctgatgatcatatattnggatactatactgaccatggaggtcctagcgtgctcggg

SEQ ID NO: 220372 - DNA, 440 bp, Glycine max
gcgcattatagcacaccacacataaaagcataacagagagaacaactgttactcacacacgccatgggtaaatgaatggttattgagcaacagcagttaaaagagaaaagggattcaccagatagatgacattcctatggtgtggcaccaacttcaggtttgagagaagccagtgggcatggagcatgcctccagaggctgttgatttggtatcaagactactacaatactcccctaacttgcggtgcacagcttttgatgccttgacgcatcctttcttcgacgagcttcgtgatccaaatactcgcttgccaaatggccgattccttccaccactatttaatttcaaatcccatgaactgaaaggagtcccatctgagattttggtgaaattggttccagagcatgcatggaagcaatgctcgtttctaggctcgtga

SEQ ID NO: 220373 - DNA, 291 bp, Glycine max
gtgaattaacgagatttgaagctagtgatggctgcgaaggaacgagaatcgaatatttgttggacgcttatcctgggacgttacagtggtcttgcccctgtttttgactgccacactttccacatttgctgcacatttgcttaacccatgaccaagatttactggcgatctgataaaaagcttgagaaggaacccaagttattgaataatggtgatgctcggtttgttaaccatgattccgaccatacccatggtggatgaaactttctctgagtaccctccacttggtcg

SEQ ID NO: 220374 - DNA, 479 bp, Glycine max
gcagcgataaatcatgcttacttgcattagggagggtagtcaaagcgtcaagcaaacgcgggggaaaaatcaacagggattggcacgatctaaataaggaaacaaactatgaaatccacaatctatgaaactacaatctagcagtagcagttgtcccaaacaggatgtcctacgtaacaagaacaagaactaggtctctaatgtggcttctgcatttggatttcccgttaaaaacatcagcagtagaaatcagtagcgatcaagtgatgaacgagaacccctgcttgggcggtcatatggaccaggtctacccctataactccttccttcatctcgacctcccattccacttccatacctatcagcacctcctcgtggaccactgtaccggtcatacccttttttcttgccataaccattttgtgggtagtctgagccagcgccatatcgatcacttgcaaatcgatctccactggttg

SEQ ID NO: 220375 - DNA, 492 bp, Glycine max
  unsure (1)..(492): unsure at all n locations
aaacccatcaaagtctttctccctcagcgatcatatattcattcagttctatacaaaatcctcaaaaactcttcctctctgccatgaccatggaatacagaaccttagaactcaacatcatatccgcaaaggacatcaagaatgttaatctcttctccaagatggacgtatacgccgccgtttcgctctccggtgaccctcttcaccctcagggcgccaccacccacgtacacaaagacgccggcagcaaccccacgtggaactaccccgtgaaatcctctgtcaacgaatcgctggcgaaggaaaatncgttatatcttgagatcaagctcatttccgaccgcaccctcggcgacaccgtcatcggcaccgttcatgttcctctcatggaactcctggataaccccggcgatgacagctccttgcgccaagtcagttatcaggtgatgaagcaatcaagaaaatccaagggatccttgaatttcttctaca

SEQ ID NO: 220376 - DNA, 509 bp, Glycine max
agcatgaatccttttctttttttctctcgtttatcaatcaatggaatagaatcgaatagtgaggaaatcacaggctgtatgttatactttatatcatagcagttaaatacagagtcaggtaatgagaggtatctgaaacaaatactaataagcaatctcatagaacatcattacgcaaccgaaaaaggcaaaaagtgaaatccagaaatataaaagaaaaaaaaaaaaacagggttaattgaaaaactgaaaattaaaaatcaaatccaccagcatcatcaaagccagcatcatagcccgcatcatattcagcagcatcagataccatgtctccgatcaacattccacccaaggcaccaccaagcaatcctgctcccaatcccattccaaatttgttcttctttggtttctgagcctgaggtgggtacccatatccggattgttgtggatatccataacccgactgttgtgggtatccataaccggtctgaggtgggtacccatatgct

SEQ ID NO: 220377 - DNA, 526 bp, Glycine max
  unsure (1)..(526): unsure at all n locations
ctcgagcgacgcattgggctcttcgaattcggttcccgatttccgacgagttctatcattcggttcaatcttcggaaatgcctctcagactcgaaatcaagcgaaagcttgcgcaaagatcagagagagtaaaggctggggatctacatgcaacagaaccatggattctagcaagtttgtactctggaactgtctgtatctggaactaccaatctcagaccatggccaagtcttttgaggttactgagttaccagttaggtcagccaagtttattgcacgcaaacagtgggttgttgcaggggcagatgatatgtttattcgtgtatataattacaacacaatggataaagttaaagtatttgaggcacatacagattacattaggtgtgtggcagttcatcctacccttacatatgtgttgtcatcatctgatgacatgctcataaagctttgngattgggaaaagggctggatctgtacccagatatttgagggacattctcattatgtcatgcaagtgacatt

SEQ ID NO: 220378 - DNA, 541 bp, Glycine max
ctgcagcagccatccgttttgtaaggaggttgtaagaattgccggtgagtgattacaatggctcctgctaaggcggacaatgccaaaaaggctgatcccaaagctcaggctttgaagacagcaaaggctgtcaaatcaggtggccaagtgtttaagaagaaagctaaaaagatcaggacatctgttacatttcacaggccaaggacattgaagaaagaaaggaaccctaagtaccctcgtattagtgctccacccagaaacaagttggaccattaccagatacttaaatttcctctaactactgagtctgcaatgaagaaaattgaggataacaacacactggtttttattgttgacctccgtgctgacaaaaagaagattaaagatgctgtgaagaagatgtatgacattcaggcgaagaaagtgaatactttaatcaggcctgatggaacatagaaagcctatgttaggttgacttcagactatgatgccttggatgtagctaacaagattggtatcatctaagatgtactcttgattt

SEQ ID NO: 220379 - DNA, 413 bp, Glycine max
ggggtattaattatcctagcataaaactgaattcataaaaatgttctgaactcaaaatcgaaaaaacaatggctaaaacatagggaaaacaaagagtcctaacttaggacatgtagaacaactattttaaccatgaaggattgggtttgcaaaaatcaagagttcctcttagatgatcccaatcttgttagctacatccaaggcatcatagtctggagtcaacctaacataggctttttttgttccatcaggcctgattaaaggattcacttttttcgcctgaatggcatacatttttttcacaggatttttaatcttttttttggcagcacgggggtcaacaataaaaaccaggggggtggtatcctcaattttttttattgccgactcagttgttagaggaaatttaagtt

SEQ ID NO: 220380 - DNA, 522 bp, Glycine max
  unsure (1)..(522): unsure at all n locations
ggaaggagtaaacaaacgttggagtcagaaatgaaagagcaaaggaaaaaccatgctgctcactgtcttgtcctaccttatccagcccaaggacacatcaatcctatgcttcagttctccaagcgtttggtgcagagaggagtgaaggtaacacttgtaactgttgtgtccaattggaagaacatgagaaacaaaaacttcacttccattgaagttgagagcatctcagatggctatgatgatggagggcttgcagcagcagagagtcttgaggcttacatagagaccttttggagggttggatcacaaacttttgctgagcttgttcagaagcttgcagggtcaagccaccctccagattgtgttatctatgatgctttcatgccttgggttcttgatgttgccaagaaatttgggctacttggtgctactttcttcactcagacatgcacaacanacaacatatacttncatgtttataagaagttgatagagttgcctcttacacaggcagaatatttg

SEQ ID NO: 220381 - DNA, 557 bp, Glycine max
  unsure (1)..(557): unsure at all n locations
cagagagagatccatccatcaattccaatggccgatcagctcaccgacgaacagatctccgagttcaaggaagccttcagcctcttcgacaaggacggggatggttgtattaccaccaaggaacttgggaccgtgatgcggtcacttggccagaacccaactgaggcagagctgcaggacatgataaatgaggttgatgctgatgggaatggtaccattgatttcccagaattcctgaatctcatggctcgcaagatgaaagacactgattcagaggaggagctgaaggaggctttccgcgtgtttgacaaggatcagaatggcttcatctctgcagcggagctccgccatgtgatgaccaatctcggtgagaagctgaccgacgaggaagtcgatgagatgattcgcgaggctgacgttgatggtgatggtcagatcaactatgaggagtttgtcaaagtcatgatggccaagtgaggaccaatcaaccataacaaanaaaaattgaaaacacctgaacagaaaaaagacagggcagataaagtttgatgagaata

SEQ ID NO: 220382 - DNA, 448 bp, Glycine max
gaaacatcaagagatttttttagcttcttttatcgcatcaacaagtttgagttggagtcgaatttggtggctgcggatgtgaacaccataaatggcacatatgacaacatcaacaagtttcacagcattcactacgctcttatggtcgttgaatgaacctgaagcacgcctagctcgttgctccttttatgacaatagaatacgctggaaacatcaagagattgttgccctcggagtttggtactgatccggcaagaatggtgcatgcattggaacctgtgaagagtgacatttgacgacaaaatggttgtgaggaaagccatttaagaggctcacatgccattcacctatgtttctgctaatcgcttcgatggttacttccttggtgggtcgtgtcacactgcctttataattccgcctatggattctgagatcttatttggagatg

SEQ ID NO: 220383 - DNA, 506 bp, Glycine max
gtaaaagttgggaaatccctccaccgctaacgtagtaggaaggaacacgataatagatagagtcgtgaaaaaaacacagaatggagctcatgcgaactgtgtacccaaccaccgctgttcctcttcctctttcaaaccttcccgttaggaccaatttcgccgttcggtgttccaacgttcactcgcaaccgcagctcgactcgcgcaagttgcagttagttcttgcagtgaaggaaaagcttgaaaaagaacatcatagtctccctgttggcagaaatggaagggatgacgaagatatgatactgtggtttctcaaagatcgcaagttttctgttgatgatgctatttacaagttgactaaagccattaaatggcgtcaagattttgaggtgtctaaattaactgaagaagtcgtgaaagatgctcttcaaactggaaaaggatatgtacatgactttctagatatcaatggcccacccgtgctcgtggtggtggatcaaagcata

SEQ ID NO: 220384 - DNA, 457 bp, Glycine max
atgctacgtgactgatccgaaataaatgacggggcgccgagcctactagtcggtgggcgccctttttgaggaatggtcggatttttcattcagggcatttcagacacattctactgatcgtcatggactagggacttatccttcataaacccatgtgctttagttacagtgaaagcaagaaagccttacttgattcttcgacaaggaaggaactcgggacttgtcactgtcacagatggggcagcctaaggttgataatgaggatggagctgatggggttggtgacattactatgtgcaacccacccgataatgcgttggccatctcacttatcatggggctgaagaacagattagatgaggcagctaggatgaatgatgtgaaagctatagttttgactggccaaggtgggagaaattctggtggaggtgatatcacagttaagcaaaaggttcac

SEQ ID NO: 220385 - DNA, 505 bp, Glycine max
agccacccttcttgtaggggcttgcttacaagtgttgcttagggagcttccaaattctctatataatccaaaggtggcaaaaatattctgtagttttgaggcaaaggaaaggttggccaatgtggggtgtgcttctttcttattgtactacttcctgagtcaggtggcaatggaggaaagcatggtatctaaaaccacaatgatgttgctggagagaatgggggagtgtgctgcagaaagatggcagaaggcactagcattccaccaattggggtgtgtgcttcttgaaaggaatgaatacaaagaagctcaacattgttttgaggcagcagttgaggagggtcatgtttattctttggctggtgtggccagaactaagtacaagcagggtcaaccatattcagcctataagttaattagttctctcatatttgagtataaaccagcagggtggatgtatcaagagcgtgcactgtataacatgggaaaggaaaagagttttgat

SEQ ID NO: 220386 - DNA, 571 bp, Glycine max
attgggactcaatctggtgggatggatcaggcaatctctgtcatggccaagactgggtttgcagaactgattgatttcaacccaattcgtgcaacagatgtgcaacttcctgctggtgggacttttgtgatagctcattctttggcagagtctcaaaaggctgttactgctgccacaaattataataatagggttgttgaatgccatttggcttctattgtgctcgctataaagctagggatggatccaaaagaggcaatatcaaaagtgagcacactgtctgatgttgaagggttatgcgtatcatttgctggtatttataactcatctgatcctgtacttgctgtaaaggaatatttgaaggaagaaccatatacagctgaagaaattgaagcagttacaggggaaaagctgacttcatttttgaacaataatgcagcttatttagaagtgttaaaaagtgcaaagcaatacaagttgcatcagagagctgctcatgtgtattcagaagccaagagggttcatgctttcaaggatgtcgtatcttcgaatctaagtgacgaggacatgc

SEQ ID NO: 220387 - DNA, 484 bp, Glycine max
ggtgggtttcagcgttccgcttcaacttcaaattctcagtgaaaccaattcagttcagtccaaatcccaaatccgaagtgagatttgcgatggagaggcttcagcgaatgttcgcaggtgcaggtggagctctagggcaccctcccccagattccccaactctcgattcctccgagcaggtctacatctcctcactcgctctcctcaagatgctgaagcacggaagggctggggttcccatggaagtgatgggtttgatgcttggagaattcgtggacgagtacaccgttcgtgtggttgatgtcttcgcaatgccgcagagtggtactggtgttagtgttgaagctgttgatcatgtttttcagactaatatgcttgacatgctcaaacaaaccggaagaccagagatggttgttggctggtaccattcgcatcctggatttggctgttggctctctggtgttgacatcaatacacagcagag

SEQ ID NO: 220388 - DNA, 554 bp, Glycine max
gggaaagaggtgattgtccactaccttggacctgaaggagagttagattggatgccagcattcgcagaagtaggacacttgcttaatggattaggcaatgtacaaatagtgatggtgggaccagaagttccaacaaatttgtcaggtacaacctcaggaattggtagcagagttagagtgaatcttgtaaggggtgtttatcaggtggaagcctcctacctacctactccacatgtcgtcattgctctgaattctagactagcaatctattctagttggggtggagctcttgatgtaatcaaatcaattggggtgcctgccttcttcactgatcaatccgaagtttcgtgtgtaaatgctaaacaagttcttcggaatgctggactgcacatcacacatccagtaactccaaatcctttccggtcacctgtgaaaaatctcacagcttctagcaatcttccttcatacagcaatggttttgtctttggggtgaatacttgaatgcagtccaagaaaatccaaaaacaagtctgtctactgtcatgcattctcaa

SEQ ID NO: 220389 - DNA, 534 bp, Glycine max
  unsure (1)..(534): unsure at all n locations
ctgattcgttcgttcactttcactttaccaactcctaacaatttctctctgtttccttcttcaccgcatcaatggagttggacggcgttctcctcggcatgtgcaaccctctcctcgacatctctgccgtcgtcgacgacgctttcttgcaaaaatacggtatcaagttgaacgatgcgattctcgctgaggataagcacaaacctatgtatgaagaattggctaacaatcctaatgtggagtacattgctggaggtgctactcagaattcaatcagggttgctcagtggatgcttcaagcaccaggtgccacaagttacataggttgcataggaaaggacaaatttggagaggagatgaagaagaaatgtacacttgatggtgtaaaggttaactattatgaaatcgacaatacacctactggaacttgtgctgtttgtgtggttggcggtgaaaggtcccttgttgccaacttatcagctgcanattgctataagtctgagcatttgacgagacccgaaaatggggcattag

SEQ ID NO: 220390 - DNA, 528 bp, Glycine max
gggcagaccctagcaattttgaggacatttttgatgtgaagcatttcattgattctttaagagatgaagttcggatagtgaaaagagtgcccaaaaagttcagtagcaaacatggattctctaccttggagatgcctcctgttagctggtcaaatgaaaaatattacttggagcagattttacccctttttgaaaaacataaagtgtaacaccttaacaaaactgatacccgtctagcaaacaatggtcttccacttgatttacagaaactcaggtgtcgtgtcaattaccaggcacttaaattcactcctcaaattgagaatttggggcacaaattgattcagatgcttcatgagaagggatcttttgtggcattgcatctgagatatgagatggacatgttggctttctcaggttgtacttgcggttgcactgataaagaagctgaagagctcaagcagctgagatatgctttcccttggtggagagaaaaggagatagtttctgatgagaagagatcacagggtc

SEQ ID NO: 220391 - DNA, 471 bp, Glycine max
caacgaactactccgaagccgctcacgttatccacacaacaacactccttaaaccctaaccaaccatggcttcttccaccttcaccgcaatgtccgcttgcaagctttcctcctccgccgccatctcctccttccccacccaccgccgcaccaacgccgtccttctgtccagacgcagccgcgccgccagggtctccgccatggccaaggagttacacttcaacaaagacggcaccgcaattaggaagctccagagcggtgtgaacaagctcgcggatctggttggggtcacgcttggtcccaagggaaggaatgttgttctcgaaagcaagtacggctcgccgaaaatcgttaacgacggtgtcaccgtcgccaaagaggttgagttggaggatccggttgagaatattggcgccaagttggtgagacaagcagctgccaagacaaacgacttggctggtgatggaacca

SEQ ID NO: 220392 - DNA, 494 bp, Glycine max
atttgccagagaattagaagaataaacataataccccagatggcttcaaaaacttgttcctcccttgcccttttcctcacactcaacctcgttttcttctcacttgtctctgcatgcggttatacaccatgccctggtccaaacccaaagccaaggcccaaccccaaccctaaccctaaccccagcccaagtggctcgtgcccccgtgacgcactcaaactaggtgtatgcgccaatgtgctaaacttggtgaacgccactttgggtcaaccaccagttaccccttgttgctcccttctcgatggtctcgttgaccttgaggctgcagtgtgcctttgcactgctctcaaagcaaacattttgggcatcaacctcaaccttccgatctcactcagcttgcttctcaatgtttgctcaaggaaagccccacgtgatttccaatgtgcctactaagcttatactataagtataacatatcatcttaaatcttcttt

SEQ ID NO: 220393 - DNA, 536 bp, Glycine max
gggagaaagggtgtgagaatggagagcaaagaggaagatgtaagggttggagcaactaagttctcagaaaggcaaccaattggtacagcagctcagggtgacaaggactacaaagaaccacccccagcacctttgtttgagcctggtgagctaaagtcatggtccttctacagagctggaattgctgagtttgtggccactttcttgttcctctacattaccatcttaactgtcatgggtgtcaacaggtcaccctccaagtgtgcctctgttggcattcaaggcattgcttgggcctttggtggcatgatctttgcccttgtctactgcactgctggaatttcagggggacacatcaacccagctgtgacctttggtctctttttggcaaggaagctgtccctcacaagggcgctgttctacattatcatgcagtgtcttggagccatctgtggcgctggtgtggtgaagggatttgagggcaatgctaggtatgagatgttcaaaggtggagcccaatttgtgaattctggata

SEQ ID NO: 220394 - DNA, 428 bp, Glycine max
gaaaaaaaaccagggtatcccttgcggggggcccaaaacccagcccgggacccagacgggcgaaatttccgccccccccacgggacaaaacaaaaaggttcccccgatttccccaagggaaaagccccccgatgcctaaaaaaccgcttattccggggggcccttcccaaaaccagggcccaacccctgtttttgaggggggggggggggatgccaactgggggaaacccccccaccggggccgctccctaggaggggccccccccaaaaaaccctggggcccccccggccggggctttgggggaaaagaaggcggcccccaaacccccaccgggggaaagccccctccccggggggggaaagggggccaaggggcccacaaacccaaaaatatcgggggggggggggccccacaaaggacccggggg

SEQ ID NO: 220395 - DNA, 477 bp, Glycine max
ggagaatatatattatgggaaaaaactctcccttcgcctctccagcttcttcttcttctccgttttctgatgctttttctcgaaggtgtgtatgaggatgttgttttgctgaattgtttgtgggatggcaacagcaatacaagtagtgatgaaggagatgagctaaaataatgggcgatacttctcttctcacttgttgtttgtcaatggagaatcaccacccatccacgctactgtccatggattctagtgcatcttcacatgaggaactggatttagagatgaacacacagatcataccccccgatatcaatttgcccctttcggccgagcgcagccctcctccacagccatggaattctgatccctgtgatattctggatgttggtcttggcactcaaggctatgagactgagacttttctcaaccttcccaaagctggaaggaagtgcaccaagcgcattgatagcatttggg

SEQ ID NO: 220396 - DNA, 469 bp, Glycine max
gagatgcacttttgtattgtagataacacaggcacaaagttagtaaaacaatgattttcggaccatgcttgcaaccccaacaattttaataagagcctaaaactcaagtcaacataagatcattccctccaagatgagggcgaaggcaaacacgaacttcatgctcttctgatcccacacgaagttttggcaccatgatctcaagcactgatcctggcccatcatagtatgcttctatattggcatcttcaggaattcgagttgaaagagggatttcacgaacaaactcaccaggtgggcagtgttcggatgacggatctgtaagtttgaatgtcctgtcatgtctcttgatatatggcttcccagatgggctcacacaagaaaccttaatgataccatgaataagagtattcctccaagaaactttcacacttgaaagatccacacacggaagacttataacaatcat

SEQ ID NO: 220397 - DNA, 560 bp, Glycine max
  unsure (1)..(560): unsure at all n locations
ttcgcatctgaactctcagtcgcttctcgaaccctactttcttccgcggtgattgcatttgaattcctgtaatggcgattgataatatttttaaaaatgaagctagtgaagaaaaaggagagcgtgccagaatggcttcttttgttggagccatggctattgctgacttagtgaagacaaccttggggccaaagggaatggataaaattttgcagtcaacaggtagaggacgtgaagttactgtcacgaatgatggcgctacaatcttgaagtccctccatattgataacccagctgctaaagtccttgttgacatatcaaaagttcaagatgatgaagttggggatggaactacctcagttgttgtgttggctggtgaacttttaagggaggcagaaaagctggttgcaaccaagattcatccgatgacaataatatcaagttttcgaatggcagcagagtgtgctcgtaatgctttgttggagaaggttgtggacaataaagcagattctgagaaatcaggtcagacttattgacatngcaatgactactttgagctc

SEQ ID NO: 220398 - DNA, 399 bp, Glycine max
  unsure (1)..(399): unsure at all n locations
tggcaactatttttccatttaatctcccacttctgagttgtcacataaaaaccctaattcccaattcctttctccaatcgctcctccctccgcgccacgtcgctaggctctgtagggttctgagttccgattcgcgagggaaaatgagcacgcagaagaagcgaccgtaccacatagaagcgttcaagcaccgcgccgtgggggatcccaagtacgccgagaagacatggaaggttctggaacacgctattcatgagatatacaatcacaacgctagtggccttagctttgaagagncttacaggaatgcttataacatggtgttacaaaaaattggggagaaactttacacaggactngtgacgaccatgacttctcatctaaaagaatttctcaatc

SEQ ID NO: 220399 - DNA, 506 bp, Glycine max
cttctctctcctattgcggctagggtttgggtttttcactttcagcctctccatgccttcaaccttcttcttctctttgatctctgatggagacgttccgtgtttagtagcaagggttagttgaggccttgtgtttggaaacgtacggtgtcgttttggagttgggaaaacaaataattctgagagatggcaaccacgaacccttttgatttgttgggtgacgacgctgaggacccttctcagctcatcgccgccgagcaactcaaggcggcggctgctgctgcggctgccaccgccgctcccaagaaggcgccggctcagcagatcaagccggctcagctccctagcaagcctcttcctccggctcaggctgtgagggatgccagaaatgagtctgttcgtggaggccgtggaggtggacgacgtgggggacgtggatttggacgtggtcgtgggtttagtcgtgactcttccaatgacgagaactcattccctaccagcggagc

SEQ ID NO: 220400 - DNA, 481 bp, Glycine max
tgggcagtgtctcttcccgtccccaactccgcatctcagctctggaaccaattccaggaacgaatctccaagcattccttcgacactcctctctacagattcaacatccccaacctccgcatcggaaccctagactctctcctctccctcagcgatgacctcgccaagtccaacaatttcgtggaaggagttacgcacaagatcaggcgccagattgaggagctcgagagagtttccggcatcgacaccggcgccctcaccgtcgacggcgtccccgtcgattcctacttgaccaggtttgtttgggatgaggcaaagtacccgaccatgtcgcctttgaaggagattgtggatggtattcacagtcaagtggcaaagattgaggatgatctcaaggttcgtgtttctgagtataacaatatccgcagtcagcttaatgctatcaaccgaaagcaaactggaagcttagcagtccgtgatc

SEQ ID NO: 220401 - DNA, 472 bp, Glycine max
ctattggtatcttctacaatatcctaaagtgtttttcttcttcttcatcaccatgtctttactttcagacctcatcaacctcaatctctcagaatccacagaaaagatcattgctgagtacatatgggttggtggatctggtatggacctcagaagcaaagccaggactcttcctgggccagtgagtgaccctgcaaaacttccgaagtggaactatgatgggtctagcacagatcaagctccaggggatgacagtgaagtcattctatacccacaagctattttcaaggacccctttaggagaggaaacaatattcttgtcatttgtgatgtgtacaccccagctggtgagccacttccaaccaacaagaggtatggtgctgccaaaattttcagtcaccctgatgttgctgctgaggaaccatggtatggtattgagcaagagtataccttattgcagaaagatgtaaat

SEQ ID NO: 220402 - DNA, 471 bp, Glycine max
agacgagaagcttttgaattacatcaccaaacatggccatggatgttggagctccgttccaaaactagctggtcttcagaggtgtggcaagagctgcagattaaggtggataaattatctcaggcctgatttgaagagaggagcattctcacagcaagaagagaattccattgttgaacttcatgcagtccttggcaacaggtggtcacagattgcagctcagttaccaggaagaactgataatgagataaagaatctatggaattcctgtctgaagaagaagcttatgcaaagaggcattgacccaaacacacaccaacccctttctgagattgagaatgacaaggacaagcctctcacagctgacaaaagcaaccagaaagccttcaatgaagtgatgagtcttgttgagccaccaaaaccaaaggcaatagctactactgcaactacttctatgcctatggatagaca

SEQ ID NO: 220403 - DNA, 511 bp, Glycine max
ctagaccctgttaataatattgttcagcaaacaaactacatgggtcaatgaggccactgtcaattgcccatttggatttactgattgtcatcgcttacataaaatgtcatgcttttaatagctattattctcatcaatcagatgtacgattattgcgtaactcttcatttctgtagagtgatccaatgatggttctttatgcaagaggaaaaaatgcagcactcacagaacttggccggacagaagtaattctgaattcattaaatcctacatggattactaaacacactctcatatataattctgaggttgttcaggttttagtgtaagtttaaatattgatgtttttacttctaacaaggcagagcattttgttgtttcaccatgaattattttggaaaatttctttcttaacaggtttcgtgtgtctgatgttgatactcagtttcacaacatacatgtaaagatgcttaagctagaagagcagcaatatctatgtgaggcaacctgt

SEQ ID NO: 220404 - DNA, 546 bp, Glycine max
ggtgccttgggaattagaatggctctccttggatcaaacataacaagcgaggttggactccgtttgctcctttgtcctcttggttccaacgttgtaattagaacagcatgctgtactgtgggagttgctttgcctgtgtactctacgttcaaggcaatagaaagtaaagatcaagatgctcagcataagtgtcttctctactgggcagcctatggttcattcagtctcgctgaagtgttcacggacaagcttatttcttggtgtcctatctactatcacctgaagtttgcatttcttgtttggcttcaacttccatctaccagtggtgcaaaacaaatatatgcaaaccacttgcgccccttcttgttgaggcatcaagcacgagttgatcaagtcttgggttttgcatattgtgaagtgataaaactcgtgagttcataccaagcagagatccagtttgtcaggagcatggtagtaaagataactggatcagcggatcaaatgttgagaggcggtgctgaatcagatagatcgccgcaacatatt

SEQ ID NO: 220405 - DNA, 476 bp, Glycine max
cttccttcacagttttgcaattgaaatggcttctacttctaatgccatcatccaatgcacctcttcttcttcttcgtttgagtatgacgtgtttgtgagcttccgcggtgaagacacacgaaacagcttcacaggttttctttttgaagctctgaaaaaacaaggcatcgaggccttcaaagatgataaagatatcaggaaaggcgaatccatagcaccagagctaatacgagccattgaagggtctcatgttttccttgttgtcttttgcaaggactatgcttcctcaacttggtgcctgcgtgaactagcacatatctggaattgcattcgaacatcttgcagacttcttctgcctattttctatgatgttgatccatcacaagtgcgaaaacagagtggagactatgagaaagccttttcccaacaccaacaaagttgcaggttccaagagaaggaaattaatacatggagag

SEQ ID NO: 220406 - DNA, 572 bp, Glycine max
  unsure (1)..(572): unsure at all n locations
ctagaataataggaggactttatatttataaattattctaccttattatctgacataactttgtgaaaatctttaatatcccacaacctgctccacttccatggcttcctaggtgatttttctctaacaatatactttcccaaatcgcacaacaagtcatgcattccaatttcctcatccatggttataagtgatttatcaacgagaacttgtaggtcatattcgggattaaatccacgaaaatctagaacttccttcacatattccacatcatcatcgttgaagaaacatgcaatatctagaaatatttccttgtgtgtatcctctaattgatcaaaacttattcgcaacacattcataatacttttacttttattttctcttaacgaaaccaatgcactcctccaatgagagaaatctttatcaaacaaatatgagcctattacttcaattgctaagggatgaccttgacaatgtgatagtacatcagaagtcaacttttcaaaatcactcataatataattattnttgaatgctttttgcanaacaattgaagagcatcattgtcattc

SEQ ID NO: 220407 - DNA, 527 bp, Glycine max
  unsure (1)..(527): unsure at all n locations
aacaatggtttgccttcaaatctcaccgccagcagaaaccccagcttggattatggattcaagggagctgaaattgccatggcatcttattgttctgaacttcaatatttggcgaatccggtgacaagccacgtgcaaagcgcggagcaacacaaccaagatgtgaactctctggggctgatttcatcaaggaagactcatgaggctattgagatcctcaagctcatgtcctccactttcctggtcgccctttgccaagccattgacttgaggcatttggaggagaatttgaagaacacggtcaagaacgttgtgagtcaagttgctaagaggactctcaccacaggtgtcaatggagagcttcacccttcaaggttttgtgagaaggacttgctgaaggttgttgatagggagtacacatttgcatacattgatgacccctgcagtggaacataccctttgatgcanaagctaaggcaagtgcttgtggactatgcattggccaatggagagaacgagaagaacac

SEQ ID NO: 220408 - DNA, 525 bp, Glycine max
aaagaatcaaataagtattatttaagagaaaacatccttcacatggaaggccatgtattgatatttgcacgcaaagctacggcaaacaaatggaattctattacattatgaattacaagttccttgcatggcatacatcaaggaaaactgggaagttgttgtatgtggattgatttgccacagccttatatagacaaaccaaatgcttaatatcaacacaaacacgtgtacagaaaagaaaccactcttcaagaaaacagaaaataagaaaaactaacatattggaagaggtgccccattccactccccaaggcattccaaaagtggatcaatgatcttcccttggcacaaagcagtgaacactttgtcacactcttcacccggtgagataaccctttcaccagttagcaatgctgtccccaactcctctctcacaaacttgtacaaggggtaagacctgcattccttgatcttgtttggaattgcacattggtcattctcatatgcaactcttgcaccttccac

SEQ ID NO: 220409 - DNA, 535 bp, Glycine max
  unsure (1)..(535): unsure at all n locations
gaactgataaaggaaacacttttattaagacttcaaatcacagcattcaagataatacaatacgcaacattttttagaaagccttataactataaactataaaagctttgcccagatgaagttacactgcaggcaaatttttcattcacatttagcttagttatcttcattggcgcccaaattattctttgtcacatctttgtattagccctggatggcaacaccaaggggagcagcatccataggtattatcttctcaatttctacacccttgttgttctggttttcataggctgaaatgtgcacttcaagtgctgttctaccagagggatcaaggttgttagaccaagcaggatcccactcaacagctttggctgtgctacatgcaacacttgctcctccaggaacagtgagcctagctgagttctgagggaagaacctctcaaagatcattctgtagtaatatgcttccttggttnttggggtgttgagggggtaatgttaccagcattaagcatcnatttttcagtcacat

SEQ ID NO: 220410 - DNA, 567 bp, Glycine max
  unsure (1)..(567): unsure at all n locations
gctgagacaacaatggcgatggctttcaaaatggccactactgggatgtgggtgacggatgagtgcaagaactctttcatggaaatgaagtggaagaaggttcatagatacatagtcttcaagatcgatgagaagtcaaggcttgtcaccgttgataaggtgggtggtcccggcgagagctatggtgatctcgccgcctccttgcccgacgatgattgtagatatgccgtattcgactttgatttcgtcaccgtcgataactgccgcaagagcaagatcttcttcattgcatggtctccaacagcatcaaggataagagcaaagatgctctacgcaacatccaaggatggtctgagaagagctctggatggaatcagctatgaagttcaagccaccgatccagccgagatgggattcgatgtaattcaagacagagccaaatagatgccccctttnttaaagtgggaatccaactccttatttatgtgcctgagctaatcaattaatccatcaatcttactctcttttatttgctataattaagtaactatatatagtccaatgact

SEQ ID NO: 220411 - DNA, 569 bp, Glycine max
ctcgagccgattcggctcgagctcgttttttgctagaagcaggaagagaagagaaacaaacaaaccacaaaataatcaattgagctacttactataagatttagatctcccaacagagagtttcacaaaattgccaagtacccttttcaggatcaaggaagagaatcaagaaccaacaaaaggtgttgttcattgttgtagttgtttgtaactgtagcaacaggaagatggttggaaagttggttgtggtgaggcttgtgttggccatatctgtgttgagctctctccttctgacaacctcggcacagacagcatgcaagggccaggccttcaccgaaaacaaggttttcaccacatgccgtgatcttcctcacctatcctcgtaccttcactggacctttgaccaggccacagggaagttggacatagccttcagacacacaggaatctctggaacagacaagtgggttgcatgggctatcaatcccagcaacaacctcaattcagctatgacgggagcacaagctctggtgctatcataccatctagcggtgccccaaatgcatata

SEQ ID NO: 220412 - DNA, 478 bp, Glycine max
  unsure (1)..(478): unsure at all n locations
ctcgagccgaatcggctcgagctctttctctctctagaattctcagatttgcggggcgagatgatgcagcagccaggacccggcatggcacctcccaccatgggccagcagccgccgcaacagtaccagcagcctccgccgcagcagcagcaaccctacgtcatgatgccgccgcaggcccaggccccgcaggccatgtgggccccctccgcccagcctccgcctcagcagcagcccgccagcgccgacgaggtccgaaccctctggatcggggatctgcagtactggatggacgagaactatctctatacctgctttgctcacaccggcgaggttacatcggttaaagtaattcgaaacaagcaaactagtcaatctgaaggttatgggtttattgagtttaatagtcgtgctggagctgagagaattcttcanacatataatggggcaataatgccaaatggggggcagagtttca

SEQ ID NO: 220413 - DNA, 539 bp, Glycine max
  unsure (1)..(539): unsure at all n locations
gttctacgacgaccttcgttctcaattggagaatgacttcgtgcattctcttcgcgatgaggttgttgaaggaggtgaaacggaggctattcggccgttgctgtggtaccctgggaacttcgcttggcattcaaatttttctcggatgcagctcaggaagaaccaaacgcttgagaggttccatgaattcttaaaactagaaaatgagattggaaatatcacaagacaggaagctgtcagtatggttcctcccctcttcttggatgtgcattcagatcattttgtgcttgatatgtgtgctgcaccaggttcaaaaacgttccaattgcttgagattatacaccaatcatctaaagcaggatcactacctgatggaatggttatagcaaatgatcttgatgtccaaagatgtaatcttctgatccaccaaacaaaaagaatgtgcacagccaacctaattgttacaaatcacgaagctcagcacttnccaggatgccgtttaaacaggaattatgaaaggatggagtagatcacgatat

SEQ ID NO: 220414 - DNA, 524 bp, Glycine max
ctttgctctttgcagtgtttactatttttcgctgactccggcgagatccgtgtcacttctccagcatcacttgtctcagttccgtccaccggcgttgcaatggaatcggaatcttcaatctccgattctgaaacacaccctctctcggaccaaatcgacgacgcgtgccacgacatgagctccctggtagagctcgcgagtcgcggcgctcggcgttccatcatcgacaaggtctcacgcgcccgcgctctctctctcctccacaagccccacgaccacctcacctacctcgctttcaacgccctcgccttcacaaaactacgtcgcttcaacgaagcctccgcggaactcgattccctcgaagacctccacagttcccactaccgctacgaaacctaccccaaaatctaccccaatcggattggatccatggtccctttctccctccgctgtgtccacgccctaattcccatcaaattatggcaacgtcagcgaggcatggatcgcttctacattcttctcga

SEQ ID NO: 220415 - DNA, 506 bp, Glycine max
gtcagagaaaccctaggtaataagcaaagatgccggctggtcatggttggagatcccgcaccagagattccttctctcgtcctttcaggaagaagggaaccatcgccctcaccacatacctgagaacctaccacgtcggcgattatgttgacgtcaaggttaacggtgccgttcacaagggaatgccccacaagttctaccatggccgcaccggacgcgtctggaatgtcaccaaacgtgctgttggcgtcgaagtcaacaagcaggttggcaacagaattataaggaagaggattcatgtgcgggtagagcatgttatgccttcaaggtgcactgaggagttccgcctcaggaagattaagaatgatcagctaaaggccgaagccaagggcaagggtgagaagatcagcaccaagagacagccttagggtcccaaaccctgtttcatggtggagggtgcgaccctagagacagttacccccatcccatatgacgttgtgaatgac

SEQ ID NO: 220416 - DNA, 516 bp, Glycine max
  unsure (1)..(516): unsure at all n locations
cttaactttgtactagtagtgggaaaggctaaaaatttagctgatcacaatgttatttatttggttctgcttattctcctacatgacctcaacttccacttcactagacagtttagcagtgagtcaatccattcgagacggcgagactttggtttcagcaggtggaattactgaacttggtttcttcatccctggaaattcagcaagacgatacttgggtatatggttcagaaatgtatcccctttcacagtggtgtgggtggctaaccgaaatacacctcttgacaataaatcaggagttctcaaactcaatgaaaatgggattcttgtgcttctcaatgctacaaacagcaccatttggtcatcatccaacatatcaagcaaaacagagaatgatccaattgctcgtctcttggattcgggaaattttgtagtgaaaaatggggagcaaactaacgagaacggtgtattgtggcagagtnttgatcatccgtgtgatatatccatgccagaaat

SEQ ID NO: 220417 - DNA, 537 bp, Glycine max
  unsure (1)..(537): unsure at all n locations
gcgaaagccaagggtcaccaaaaccatcatcataacccaaacccaacccaacccaacacaacacaacaccacctcctatcacataataacaaccttaaccttaaccttaaaccccccaattttcatgtctcggatcccgtgattcggatccccaacaaaaaaagaaacctcgtatttgttattttcgtcggatccggttgggaacgctcatgacgcggcgttgctcgcattgcagccacaatgggcacaactccagaacctgccctaaccgcggggttaagctcttcggggtccgattaaccgacgggtcgatccggaagagcgccagcatgggcaacctaacccactacgctggttccgggtcggccccgctccatgtcgggttgaataacccgggttcacccggngagacgcccgatcacgccgncgncgncgncgacgggtacgcctncgaggacttcgttcccgggtcttcttctagctcccgtgaaagaaagaagggtgtccatggactgaggaggaacatagaaatgtttt

SEQ ID NO: 220418 - DNA, 515 bp, Glycine max
gcttgcttgagttgccaactttaagtttgtcaatttccgtgctgcttggttggttgcaattgcaagtgaacaattggctagtgtgtactagttttgaatcacaatggcagaggatgatggttacacgaaagatggaacagtcgattactgtggaaatccagctaataaaaaggaaactggaacctggaaagcctgcccctatatcttaggaaacgaatgttgtgagagattggcttattatgggatgagcacaaacctggtgctttatttcaagaaccggctaaatcagcatagtgctactgcttccaagaatgtctctaattggagtggaacttgctatatcacaccattgattggggcatatttggctgattcctaccttggaagatattggacaattgctgttttttcaataatttatgctattggaatgacactcttgacattgtctgcatcagttcctggcataaaaccaacatgtcatggacatggagatgaaaatgtcgtgctactac

SEQ ID NO: 220419 - DNA, 489 bp, Glycine max
aatggtgataataacaattttacatcattttttcaaggatttgacacaagagcttacagtgtaggtgaaaaacaagactacaagtgaaggaaacttccaatgtgatgtataatgaaactacttccaatgtacaacttaacccacttttcagcgcagagttcccacaggtctcttatatgtatacaacatagacaccacaaggaatgctatcaagttcactacacttagcaatgccaatagccagaagaaataatctatgtgaccaaagtttagattatcaggtatccaccctggacttccattcctagtgctgatctttgtcacaattgtcacaagcagagagctcaagtactgtccaagcgcaacagtggtaagtgagagagcagaacaaaagcttcgcatagcatcaggggcttgctcatagaagaactccaactgaccaatgaaatagaagacttctgcacagcctatgatgaaatattgaggaac

SEQ ID NO: 220420 - DNA, 499 bp, Glycine max
gcaacaccaataatatactgaaactgtatatatacataagtccgttagtacagtgaaaagccaggggcatcaacagtttctttaatcgattccgtcacagataaagtgaaacaagagaaaaaactctatagacagacaagttgtaagagctaggaagtttgaggttcacatggagcttcggttgcatagggtgtaaccagagatgagtgagctgatagcaaaggcaacgaaagcgaggaaggccattccaatagaagcagtggccatttctgtgaactcatctttcccccaattcgatatccaatcgtcaacccgtgttgctgcagatgatgatgccgatatcagaagatatgccagaacctgatccatgaagaaatcaaagtggttgcgaaggtggtgactgattaagcgtttccccgtggcaatttgacatgtcagatcacatgcttgtaatgcagagtatgcaaatccaataacattcacagataaacaataccta

SEQ ID NO: 220421 - DNA, 573 bp, Glycine max
ccctcttccgtccctttcttcacacttccttcaaaccacttccttcgtctttctctttccgaacagatcacactatggccacctcaaacgccaaatcagtccatgatttcaccgttaaagatgccaagggaaatgatattaaccttggtgactacaaaggaaaggtccttatcattgtcaatgttgcctcacaatgtggcttgactaattcaaattacactgagctcagtcagttgtatgagaaatacaaacagaaaggtctggaaattctggcgttcccatgcaatcagtttggggcacaggagcctggatctaatgaacagatacaagagtttgtttgtactcgcttcaaggctgagtttcccgtttttgacaaggttgatgtgaatggtgacaaggctgctccactgtacaaatatctaaaatcaagcaaaggtggactccttggggatggcatcaaatggaacttcgccaagttccttgttgataaagaggggaatgttgttgatcgctatgcacccacaacttctcctctgagcattgagaaggacttgctgaagttgttgatgcatg

SEQ ID NO: 220422 - DNA, 536 bp, Glycine max
aaagggttaggtttcgggagaaaaagcaatccactcagagagctagaagaattcaacgatgcctcgctatgatgataaatacggcaatacccgcctctatgtggggcacttatcttcgaggactcgttcccgggatctggagcgtgccttcagcagatatggaagagttcggggtgtggatatgaagaatgatttcgcctttgttgattttagtgatcctcgagatgctgatgatgcaagatataacttggatggtcgggatgttgatggaagtcgtattattgtggaatttgcaaaaggggctcctcgtgggtcccgggaatatttggggcgaggtcctcctcctggctctggacgctgctttaattgtggccttgatggtcattgggcacgggattgcaaagctggggattggaagaataagtgttaccgctgtggtgagagaggacatatataaaggaactgcaagaacagccccaaaaaattgagcacaaggcgaggacggagttattcacggtcaccagtcaggtcacatt

SEQ ID NO: 220423 - DNA, 597 bp, Glycine max
  unsure (1)..(597): unsure at all n locations
ctcgagccgaatcggctcgagcaggcagttactgttactgttattatggaactcaaacaacaaaaactccttcttgttctgattctaacgcttctttttgccactgccacgcctgattctgaatacgttcgacctcttcctcgtaaaaccttaacaaccatcccatgggattcaatttccaaggcccactcctcttaccctcaacaggtacacatttctttggcaggagacaagcacatgagagttacatggataaccgatgataaacattcaccttcatatgtagaatacggaacattacctgggagatatgactcaatagctgaaggagagtgcacctcttataactatctgctatatagctcaggaaagatacatcacgctgtaattggacctttggaagacaatactgtgtacttttacaggtgtggtggaaaaggtgccgagttcgagctcaaaactcctccagctcaatttccaattacttttgctgtggctggggatctgggtcaaactggttggactaaatcaacactggctcacattgatcaatgtanatatgatgtctacctgctaccaggagacctttcatatgct

SEQ ID NO: 220424 - DNA, 518 bp, Glycine max
ctctcatcagattcgggtcgggttagcgttatcggataacttcgcccataaattctctgtttacggggcgaaaatgacagtattcttagccacgaggctcgtgtttcggagatccccgccgcttctctggcggcgcagcttttctcgggcggcggtagaggccgaaaaggacactgttgccgtgccgtcgcttccgttgttcgattactctccgcctccgtatgcggggcccaccgctgacgagattctggcaaagcgcagggagtatctgagtccttccatcttgcacttctacaagaatcccgtgaacatagtggagggtaagaagcagtacctgtttgacgagaaggggagaaggtacgtggatgcgtttggagggattgctacggtgtgctgcgggcactgtcaccctgatgtggtcgaagccatagtcaaccaaaccaaaaagttgcagcactccacagttctctaccttaacaacgccatcgccgatttcgctcaagctttgacttccaagc

SEQ ID NO: 220425 - DNA, 506 bp, Glycine max
aggtgatggctcaaccactatttcgtgtaattgagatgggtgctaacatggcggggccgcgttcagatttcattaacaagagctatcccatcacaatgggctccttaacatgtagcatgaacttggttacgataattaggaggccaatgtatgctgcagtggccacagttattgccatggctctgccacctttcaaggcgtttcttgtcttgcttggagcaataggggtgtgacctctcattgtcttcttacctgcacaaatgcacattgcacagaaacgggccaaatgactatcattgaagcggcggcgtctacaaatattgagcttcgcgtgcttactagctacagtatacgcggcagttgggtctgttcgtggaattagcaacaatataaaaaaatacacacttgtccagtataaacaatagggcatttggttgcacattccagtgactcacatttgagaaatgtgtggatagctatcgctatgcagagaaagtagggagaca

SEQ ID NO: 220426 - DNA, 489 bp, Glycine max
gggtaaaagtgttgtcccaaagaaagaccatctttctcctttctgtcatcaccgttggaagagactgagatgggttcaaaaaccaagacttttacctttgaggaggtggctaagcacaatcacaggaaggattgctggattatagtcaaagggaaggtgtatgatgtcaccccatttttggatgatcatccaggaggtgatgaagttttagtgactgcaacagagaaggatgccaccactgattttgaagatattgggcacagtgattcagcaacagagatgatggaaaaatactttgttggtgaggttgacaccaacactcttccagcacaagttaccatcagcagcagtgtacgcccaccaacacaagcacctgcctataacaatcaatcttatggatttgttgtgaagatcttgcagtacatagagccattgctgatattggcctttgcattcggcctgcagtactatggcaaaaaaaagcaagtc

SEQ ID NO: 220427 - DNA, 576 bp, Glycine max
  unsure (1)..(576): unsure at all n locations
aacgatacgtaataagttctatcattgaggaagtttcctgtgcatcgtctccgaaaatgaacgacgcagatgtctcaaagcaaatccagcagatggtgcagttcatccgccaggaagctgaggaaaaggccaacgagatctctgtctccgccgaagaggaattcaatatcgagaagctgcagttggtcgaagccgacaagaagaagatcaggcaagaatacgaacgcaaagagcgccaagttgaaattcgcaagaagattgagtactcgatgcagctaaatgcttctcggattaaagttcttcaagctcaagatgacgtgatcagttccatgaaagaagctgcatccaaggaactgttgaatgtgagtcatcatcatcatttgaatctactgagtcatcatcatcatgagtacagaaaccttctgaaagatctcattgttcagtgtttgcttagactgaaagaaccttcagtcctattgagatgtcggaaagatgacctgcactnggtagagcatgtgctggattcatctgcacaggagtatgctgagaaagcanatgtngatcccccagagatca

SEQ ID NO: 220428 - DNA, 488 bp, Glycine max
  unsure (1)..(488): unsure at all n locations
ctttgttcactcttcttctcttgcggctagggttttagcgcagcttcttctagatttaaggaagatgggtaaggaaaaggttcacatcagtattgtggtcattggccatgtcgactctgggaaatccactaccactggtcacctgatttacaagcttggaggcattgacaagcgtgttattgagaggtttgagaaggaagctgctgagatgaacaagaggtctttcaagtatgcctgggtgctggacaaacttaaggctgagcgtgaaagaggaatcaccattgatattgctttgtggaagtttgaaacaacaaagtattattgcacagttattgatgcgcctggacatagggatttcattaagaatatgattactgggacatcccaagctgactgtgctgttcttatcattgattcgaccactggtggttctgaagctggtatttccaaggatggacagactcgtgaacatgctctgctntcattca

SEQ ID NO: 220429 - DNA, 572 bp, Glycine max
gcttagtgtaaaagatgacctggcgaacataatagcaccacttatgattagaccaattacgaggtggccttttttcgcatttttagggggtgccatgttttgcttgctagctagcagtatttgccatctcctctcttgtcactctgcacgcatggcatacattatgctcaggctcgactatgctggaattgcagccctgatatctacctctttctatcctccagtatattactcttttatgtgtgacccatttttctgtaacctatacttgggatttatcactgtattgggcatcgcaaccatcttgttttctcttctcccagtgttccaaaatccagaattccgcaccatccgagcatctctcttctttggaatgggtttgtctggtgcagcacctattctgcacaagctttatctattctggggccagccagaagtgtttcacacaactgcttacgagattctgatgggtgttctctatggaattggagcattggtttatgccactaggattccagaacgatggatgccccggaaatttgacattgccggacacagtcaccaattgttta

SEQ ID NO: 220430 - DNA, 571 bp, Glycine max
aaaatgaagacatgactatcaagaagtctccgatgcttacagaactagatatgcaagctataaaagttactgaaaaggaatttggagaggatagtgatacagattgtgaaggacagatggtggatggaattctgtcttctgtttctaaagtaccttatgaacttccttctcaagaggagctcattcggcaagcttttgctggggatgatgtagatgatgattttgaaaaagataagcaggagatcctcaacgaagaaaatcctgagccagagaagcctctattacttcctggctggggccagtggacacatgtacagcaaaagaaaggtttaccatcttggatgctgaaaaaacatgaagatgcccagaaaaaaagggcagaagccctcaaaaaaaggaaggatgctcagctaaaaaatgtgattatatctgagaagatagacaagaaggctgagaaactacatactaaatcattgccatacccttttacttcccaagagggtcttgaacagagcatgcgtgtgcccattcgacctgaattaatccagcaactgcaattggtcctcttaac

SEQ ID NO: 220431 - DNA, 505 bp, Glycine max
ccttcatgagtacaaaccgaaataaaaccaacaattaatcttgttttattacaacacacaagcttgacatttcagtacaatagtttattttcaagcaatgagattctaaaaccagaaccacaaacgaaacaccgttgagattctcaacgagttcactcctgatcaagcagagatatcagagactaaaagttggcaaagttcttttctttcaaagtttccactgtctctctaagactcacttccaaaggaataaattcaatccccaaggtctttgccttttctttggaaacctgaaatgttgggacataaggcttatcgtctgcagacttttctggaatttgatatgtcgggtactgatcacgtaaaatcctggcgagttcagagtagtgtgccactctctcaactaaacaatatcttccactagctgaagcgatctcatatgcctgaatatgggcgtttgcaacatctttcacattgatccatccatatgtatcatttgaaaaag

SEQ ID NO: 220432 - DNA, 579 bp, Glycine max
gactcgataagctagcttcaactagattagatggcaacagaaagttgtccaatacaattcccaaagtggctgcacaaccagaaataaaacgagaaataaaggatccaaaaaaatcaaatacatgccaaatttctaacaaccagaccttcacagagtcttaggcagtatttgccaatgacaattaatatgactaccaagtaaacacctatttttccctaataacctataggcttcaacaaaaagaaaacttagtaacaaaacaccatccgcagccaccaacaattcatcttcacaaacacagaacgcaccaactcaagcacgctcaccacgaatccttcttgccagctgaatatccttgggcataatagtcacacgcttggcgaatggcacacaagttagtgtcctcaaagagcccaacaaggtatgcctcagcagcctcttgcaatgcaagcacagcatggctctggaaacgcagatcagtcttgaaatcctgggcaatttcacgaaccaacctctggaaaggaagcttcctgattaggagctcagtgctcttctggatttctaatctcacgaagagca

SEQ ID NO: 220433 - DNA, 397 bp, Glycine max
ttcgcactctcatgagaaggtgaggagctactacgagtcttgggtgagaaccccaaggctttttgcgataggtcgcctcgctaatagtaactcattggccactagcggttctccaaggttcaacgtttacggcaatgattttgggtggggaaagcccctgaccgtaagaagtggcggcgcaaataaaagtagcggaaaaattactctgtttggtggcgctgaagaaggttctatggacattgaagtgtgccttccttatgtgattctcgaggcaattggaaatgactctgagctcatggatgccatttccaactagcatggtttggtttatctatagttgatttcagattcatgatattatagtattgagtaacgaataattatgtatgtcttaggc

SEQ ID NO: 220434 - DNA, 521 bp, Glycine max
caaaactacaagtgcagtggctttgattttaagaggggcaaatgaccatacgcgggaggagatggatagagctctgcatgatgcattgaccattgtcaagagaactcttgaatcaaatacggtggtagctggtggaggtgctgttgaagcaacattatcagtttatttggagtaccttgctacaactttaggatctcgagagcagttggctatagcagaatttgctgagtctctattaatcattcctaaagtgctttctgttaatgctgataaggatgccactgagctggtggcaaaattacgggcctaccaccattcagcgcagactaaagccgataagaaacattaatcaagtatgggtttggacctttcgcaagggaaaatcagacacaacttggaggccggagtcattgagcctgcaatgagcaaagtggaaattattcagtttgcaactgaagctgctattaccatccttcgaattgctgacatgatcaagcttgtcaggatgaaagtcaaaatga

SEQ ID NO: 220435 - DNA, 604 bp, Glycine max
  unsure (1)..(604): unsure at all n locations
aaacacatttctagattcacgcttctaccactacactacttcccttcactctctctctctctctctgcaaccaaatggcaccttctaccaccgtacctaacggtaccctcccctccggttccgtcaccggacgcttagcctctgtctacagtgaggtccaaaagacgcgcgtggaccacgcgctccctctcccctctgtcctcaagcatcccttcaccattctccacggtcctccaagctccgccgccggaaatccagacgagatcgcgaagctgtttccgcatttgttcggacaaccttccgctgcattggcgcgtagcgatgcggcgcagacgcagaagaagctgaagattggcgtggttttgtccggtggccaggctcccggaggccacaatgtcatttctggaatcttcgattacctgcaagagcgcgcaccaggaagcacgttgtatggtttcaaaggtggacctgcgggcattatgaagtgcaaatacgttgagctcacctctgaatatatgtatccttatagaaatcaaggtggctttgacatgattngcagtgggagggacaagatngaaactncagaagcagttaagcaagcgga

SEQ ID NO: 220436 - DNA, 403 bp, Glycine max
cgggagtcgtcaagctgatttgatgcacgcctcctcagcttgaattcggatcgagctcgagacgaaatcactctatttttttttattgctagccaccttatatgactggggggagaagtgagatcaaagcgaacccagctggatctcctccacgatcggacacagctctgactggcatgtcacccttgatttccacgtacctattgtagacctacgttatgatatcaattataagatcatgacccctttgccttgtgatgcacaaatatgaaaacctcccccttattagatacccttcaaggcctacgattgcctgacactcttaagagccagccatccgacactctatggtcaagaaccatatctatatctgctttgcttacaccggccaggttacataggt

SEQ ID NO: 220437 - DNA, 159 bp, Glycine max
atgccattccagaccctaaggcatcagggcacttgttcagaatgtgaggggcgtggacaggtttaagagctggatcaatctctggggacaaactgtgcaccatcttcacacgaggggtttgagcaatactgcgtgctgcaagaaattcaactactctgg

SEQ ID NO: 220438 - DNA, 422 bp, Glycine max
  unsure (1)..(422): unsure at all n locations
tggcagatantcgaaacatgatgtatgttgcacgctgccctcagcttgggctcggaatcgagcatagaggaaaaccctactctatattttattaggccgctcagatagacaaataacgggaggtggtggcgaactgaagggaaccgtgcgcgcccacacgaaggttgtggctgcatttgctcctcagatcttccgaccgtgaatgagcttcttggccaaaatccagctttagattattcgctggcacttttccatgggggacacgctcttcggtgtgcgacgactgcgcttccacagatattgtgacttacggctcgacagatgctactcactcatcaatcagaggagcttattggggtcttgcgactgcaagatccggatctgactgctttcgtctatgaaaggacacttccgcataggag

SEQ ID NO: 220439 - DNA, 358 bp, Glycine max
aggagatcacgttattattggtcaatgcaggccactttctaagactgtgaggttgaatgtgttgaaagtgatcccagctggatcttctagcggtgcaaagaaggcttttactggaatgtgagctttgatttccagtttttattgaagataaatgttaccttattaattattatatctgatttcttttctggatgataacaaatatgaaaaccttgtcaattttggattttctttgaggtttcgttctggctttatgtttaggatcttgttataatacattatggttttcgaatcttattagcctttcaattttttaaaaaaaaaaatgaaaatgaaactacacattgtaataaccaat

SEQ ID NO: 220440 - DNA, 317 bp, Glycine max
aaaaaaattgaaagggtaatgagattcgaaaaccataatgttttataacaagaacctaagcataaagccagagcgaaaccttaaagaaaatccaacattgacgagggggccttatgcggttgcacccggaagggaaatgtcatgtaataagtaataaggggacatttatattccataaaaactgggaatcaaagctcacattccagtaaaagccttctttgggccgatggaagacccagctgggatcactttcaaaacattgaaccttacacttttaaaaaggggcctgcattgaccaagaataacgggattttctt

SEQ ID NO: 220441 - DNA, 521 bp, Glycine max
aaaatgaagaactactatattccaactaagcaaggccataatattgccacaaatttctataaagatgcgaatgcaattctcagcactcacagagggtgccccctatactacaaattagtgaactgatcaaagcagcgggggaaaatccagagttgattccccttacttcgtatattgagttgtttaaataataactgttaagttctctaaattttcacaacagctccagatgactagtgattacatctgggcaagactgggattgcagaagctccaatcggttgaaaggtggagcaaactgcaaaatataatcttcaccttctttgactgttccatacagccagcataatacctcgtcagcaaacgccaagcagactcctccctgccagtagttcttcattttcactctctgggttatatctttggatctaagactttctgtccgaacaagacgacctgcatcatccctaaatcctatgacaatatatggaacaccagccagaaatgactgaatccaaaac

SEQ ID NO: 220442 - DNA, 532 bp, Glycine max
attcttgaaattttggtctttattcaaactcaattgcattaatgcaatctacgtagctatccaatgtaactgacctcattgggataaagcttttagttacttgtataataggcaaaatcggaatgattgtcatgaaaataaattgccgatgttgtatgcaacttttgagttgaccaattcatactcatcaaccaactcaagaatcattaactgattaatttcacaagtaaactcaaacactagacagtaacagatcaaatatatattgaaagatcccaaaaaacaatatgaattgccaccgtcaaaacaaggacctcatattatgcctaagcttgtgcttcaagctccaagagtagagtgtgagtaattacttcagatcctgggccagagaattgaattggacctggactgatgtagcaattcttcagggcccattcattacgcaaggaggcaaactttttgaagggtgccccttcaagctccaccattgctttcttgatcacgggcttgaattaccatgcctcctttcaca

SEQ ID NO: 220443 - DNA, 563 bp, Glycine max
cagaatattgagcaggctcttgtttactatgaaaaatcagctgatttttttcaaaatgaagaagtgacaacttctgcgaaccaatgcaaacaaaaagttgcccagtttgctgctcagctagaacaatatcagaagtcgattgacatttatgaagagatagctcgccaatccctcaacaataatttgctgaagtatggagttaaaggacaccttcttaatgctggcatctgccaactctgtaaagaggaggttgttgctataaccaatgcattagaacgatatcaggaactggatccaacattttcaggaacacgtgaatatagattgttggcggacattgctgctgcaattgatgaagaagatgttgcaaagtttactgatgttgtcaaggaatttgatagtatgacccctctggattcttggaagaccacacttctcttaagggtgaaggaaaagctgaaagccaaagaacttgaggagtatgaggttattacttgaattgtacctttaatattcctggtggttggacctattgtttgatgaattacattgtactactatgt

SEQ ID NO: 220444 - DNA, 488 bp, Glycine max
cttaactttgtactttttgttttaaaggctaaaaatttagctgatcacgatgggggttatttggttctgcttattctcctacatgacctcaacttgcacttcactagacagtttagcagtgagtcaatccattcgagacggcgagactttggtttcagcaggtggaattactgaacttggtttcttcatccctggaaattcagcacgacgatactcgcgtatatggtgcagaaatgtatcccctttcacagtggtgtgggtggctaaccgaaatacacctcttgacaataaatcaggagttctcaaactcaatgaaaatggcattcttgtgcttctcaatgctacaaacagcaccatttggtcattatccaacatatcaagcaaaacagagaatgatccaattgctcgtctcttggattcgggaaattttgtagggaaaacgtggagcacactaacgagaacggtgtattggggcacagttttgatca

SEQ ID NO: 220445 - DNA, 510 bp, Glycine max
gcttcttcgagtttcacagcctagtcttaaaagggtttcaagggatggaaaacatgcagggcttctggcaattgcgtgatgaactccgtgggcactcaaaagcatcggaggatcacaagtggttaatggttgcctcgaaactggccgaacagacaagattgaagggggagcgtgtgaacaaccttgatctttcaaagggacccattgaaacaaggtcaagggatctatttgggttccaggaagagaacaaattcgattctcttaactcgagcatgttgaacctggactctaaatttactgagaatgcgagcaaaagctcacttcgaaatggtgtttatggcctgaatgcagtgtatcacaaaaacaatgcatacttggagagtgatgtgatcagtaacaagtacaatggcagcattcatcataacaaagagatcaacaacaacactggcaacaacatcgacaccaatgaaagcaacagcacacatgcaactgacaaaaggttgtagacct

SEQ ID NO: 220446 - DNA, 515 bp, Glycine max
atttctcattcgtcatggaacaacacattcactctctctctctttagtgattttttcgatttgattgacaaacacaacgaaccaaagttaactactttagagagagagagagagagagagagagagagatggagagtgaaggaagaagagaaggaggagagagagaaacaacagcagcgacgaggaaggtggagggtgctgagagaagatacaaaggaataaggatgaggaagtggggcaagtgggtcgctgaaattagagaacccaataagcgttcaaggatttggctcggttcctattctacccctgtcgccgccgcacgtgcctacgacacggtcgtcttttacctccggggaccctccgcacgcctcaacttaccggagcttctcgtcagagaaggcccggccgccctagtcgccggctgcgacatgtcagcggcttctattaggaagaaggccaccgaggtcggtgctagagtcgatgctcttcaggcaacccttcaccaccactacgtg

SEQ ID NO: 220447 - DNA, 396 bp, Glycine max
gctttcttgaaagaggaacctcttgggccagaagacatgtggtactgcgctaactgcaaaaatccttaccaagcatctaacaaactagatctttggatattgcctgaaattcttgttgttcatttgaagaggttctcattcacccgctacttaaagaacaagctggcatcatttgttgatttcccaattcatgatctggacttgtcaacatatgtaacccacgggaataaccagtcctcccaccgctatgtgctatatgcaattacgctgtcattatgtgagggttaggaggaggtcactattcagcatttgaccgttatgcctatgataaatgagatgattttcacagacacgcagggccgactctattagtgatgacatgaaaaagactcctgc

SEQ ID NO: 220448 - DNA, 495 bp, Glycine max
aatctattatcaatggtgaattccctgctggttgggagaaagcacttgcgacatacactccagagagcccagcggatgccaccagaaacctgtctcaaacaaaccttaatgcccttgcaaaggttcttcccggtctgcttggtggcagtgcagatcttgcttcttccaacatgaccttgctcaaaatgttcggggacttccaaaaggatactccagcagagcgtaatgttagattcggtgttagagaacacggaatgggagctatctgcaacggcattgctcttcacagccctggactgattccatattgtgcaaccttctttgtattcactgactacatgagaggtgccataaggctttctgcgctgtctgaggctggggttatttatgtcatgacccatgattcaataggacttggagaagatgggccaacccaccagccaattgagcacctagcaagcttccgggcaatgccaagcattttgatgcttcgtc

SEQ ID NO: 220449 - DNA, 289 bp, Glycine max
ctcgagccggtttctaggtccttaccttggagacgccctgcaaatgtggcccgtgttaaagaagatgtccgtccgatcttttgggcaaatcgaccaaaaagcttcatatcaaggaccataggatgggatcaatacccacatgggcgttggggtgattcctgtaatacatcatatggtgcattatcggattatcagtacatgcgggcgcgtgcacggcacacgaagcttgtggaaaaatgggcggttcccttgctaagcagtagatgatatatgggagaggattagactg

SEQ ID NO: 220450 - DNA, 464 bp, Glycine max
acaggtcactcattatatatattaagaaacatccaattcagaggaaggagtaacttgtccttatgtcaacgtacaggttacccatgcgactttgaagaatgaaaatattaagacgttagggacatagcctacaaaaataatttggcacttaaacttaaaaccatgtgttatatgaatcatcatactgagaagaaaacaaaagaaaggaaaagaacatgacaaccaacagaagtgacatagctgaagtactaatatataataagctcatgtcagaaatttgcatagacggggaaaagatcaccattgatgtaatgattgtcgaccaaactaaccgagaagtgactgcccccaacctctataaccaatttcctggatgacttatcctcagggtacaagcttggccatcctattgacgaaatttgaaatgcctcatccttccatacattgaagctgacaggatctac

SEQ ID NO: 220451 - DNA, 586 bp, Glycine max
tccgaattgtgaaagtaagcaaagatggctttcacggaatcgtctctcctccttccttcggtttcaggaaccaacaagaacaagaacaaggttccagaagacaaatggtatttagcctacattgtgtattttaccctgggtctcggttaccttctcccatggaacgctttcatcaccgccgttgattacttctcctttctctaccctgacgccagcgttgaccgcatcttcgccgtggtttacatgatagtcgggctggtggggatctccctcataatcctctacagccacaagtctgacgcctatgtgaggatcaacgttggattggccctattcgtcgtttcgcttctcgtcgttcccctccttgatgccttttacataaagggtcgggtcgggttttatagcgggttctacgtcaccgccggcgccgttggactttccggcgtggccgatgcgttggtgcagggctccattgttggctccgcgggcgagctgcccgataggtatatgcaagctgtcatcgccggcactgctgcttctggagtgcttgttctgccctgaggtatttacaaaagctgttacccac

SEQ ID NO: 220452 - DNA, 559 bp, Glycine max
caaggctttgaggtactattaactacattacttgctcttattttgataattgatacaattaatctcattctaggtttcaaaattgggattcggatgtatgggccttactggagcgtacaatgaccctctccaagaacaggatggcatatctgttatcaagtatgcgttcagtaagggaatcacattttttgatactgcggatgtttatggagccaatgctaatgaacttttggttggaaaggctttgaagcagctgcccagagaaaagattcagatagccacaaaatttggtattgcttcacgaggttttcctgatatgaagatcaagggttcgcctgaatatgtgcgatcatgctgtgaagctagcttgaagcgtcttgatgttgaatacattgatctctattatcagcacagagtggacacatctgtacctatagaggaaacagttaaggatttcttcctctcaatgattttgatcatagtagactttatatatatacctgtgaaaatttagtaatataatgatattatctggcttatctcactagatattagatat

SEQ ID NO: 220453 - DNA, 489 bp, Glycine max
gccttcgaaactgctcataattatctgttgcatataaaaaagtattacagtctaaattaaaaattttaaccaaccaaatatctaggaagtccaacatcaagaagggctacattattgatatttaaatagcatcctgatattagcctttgtcagccttgctaccctcaattcatgatgacttggtagattccctaaccaaagggttggttgggtgcgtcaggttgagatttttgaatcttttggaggtgtgttagcatacttccatgaaaagtgatccaatccattgtagtatctaccacctgctacatcaccaatgggaaccgcctcagaaatttctctcaggtctttttctgacagtttcactgctaaggcacctatgttttgatccaggttcttaatcttagttgttccagggataggtacaacatcctcgccttgctgaagtacccatgctaatgccaactgggcaggagtggcctgatgcttctt

SEQ ID NO: 220454 - DNA, 565 bp, Glycine max
gagagggagaaatgaaggttttttacttcttcgttgtgctattggctttggcatcctccattgcctttgcttatgatccaagccccctgcaagacttttgtgtggctatcaatgataccaaaactggtgtgttcgtgaatggaaaattttgcaaggatccaaagcttgctaaggctgaagatttcttctttcctggattgggacccggaaacacttaaaaccccctaggctcaaaggtgacagctgtcacggttaatgaaatattagggctcaacacacttggcatttccttggcacgcatagattttgcaccaaagggtttgaaccctgcacacactcaccctcgagggacagagattcttgtagtcttggaaggtaccctctatgttggctttgttgcgtccaatcaaaacgataaccgtttattcaccaaagtgctgaacaagggtgatgtgtttgtgttccctattgggctcattcacttccagcaaaacataggttatggaaatgctttggccattgctggtcttagtagccaaaaccctggagttattaccattgcaaa

SEQ ID NO: 220455 - DNA, 347 bp, Glycine max
ggcttgggtattagactttaaattttgaaatttgaaatcaagttcacatccccacaaaacaactgggttacacatataatggccccatgcattccatttatttaatatagtatataggaattgacttttgcatgaagcacaattgaaaaaattatttatccaacctaggcccgagcaagaggttcgcgattgggattctattgtgttcccacctaactattgctgaaccaaaattgcttttgaagggagtccataccttttttgcccacttgaaaagctttggcaaaaacttcatcaaagattggaggtttagatccaaacacaatatttgcatgggtaataactcc

SEQ ID NO: 220456 - DNA, 599 bp, Glycine max
  unsure (1)..(599): unsure at all n locations
gttaagaagtagcaaagatgtttccattcgggcacaagggtcaaaagataaaggggactatggtggttatgcagaagaatgtgttggatatcaacagcatcaccagtgttgacgggatcgtcggcaccggcttagacttcttaggcagtgcactcgatacagttacttttttagcctcctccatctccatccaacttattagtgctaccaaggctgatggtgggaaaggaaaagttggaaaggctacaaatttgagaggaaagataacattaccaaccataggagctaaggaagaagcatacgatgctcaatttgattgggacagtgacttcggaattcccggtgcattttatattaagaacttcatgcaaaacgagttctacctcaagtctttaattctcgaagacattccaaaccatggaaccattcacttcatatgtaactcctgggtttacaattcaaaacactacaagactgatcgcattntctttgccaacaatacatatcttccaagcgagacaccggcttcacttgtcaagtacagagaagaagaatttgagaatgtaagaggggatggnaaactgtgagcgcaggaatgg

SEQ ID NO: 220457 - DNA, 554 bp, Glycine max
gcacaaacgcagagtcagaatctccattctccaatcggagacaaagcgagctcgaacgaacgaagtagagtagtgtgctacggaaaatgtggcggtgcattgctcgtggactccgtggacctgcttccaccagatccacctccaatcactcacttggatctcacttttatagattcttctctagtggggcgaactcttcgtacaccgtggtggatcatacttatgatgctgttgtcgttggtgctggtggcgcgggattgagagctgctattggactttcagaacatgggttcaatactgcttgtattaccaagctcttcccaactcgttcacacactgttgcagctcagggcggtataaatgctgctttgggaaatatgactgaagatgactggaggtggcacatgtatgacactgtcaagggaagtgattggctaggagaccaggatgccatccaatatatgtgtagggaagcacctaaagcagtcattgagctagagaattacggattaccattttcccgaacagaggatggaaaaatatatcaacgtgca

SEQ ID NO: 220458 - DNA, 563 bp, Glycine max
tgtgaactggccaaaggaaaaccttaaactgtctattcatactcctgtcagttttgagcatgactttgttgaagaagaaaatgccactgagcctagagactcctccaacaagcttctggtgggacaacttccaaattcagaacatggaaatacagtttggaatgctaaaataatcttgatgaatggacttagtaggtctgcgttggaggagctgtcatctgataaaattgtagatgatcgcattcctcatttttgcaatttccttagatttggggttcttaagaaggatcattctttcatggcagttggtggtccatgggaacctgttgatgggggtgatccatcgattgacaataactctttaatcaaaactgccctcagatatgcaaatgatgttattcaacttgacttacagaattgccaacattggaatccttttcttgagatacattacgatagaattggcaaagatggtttctttagccacaaggaaatcactgttctttatgttcctgatttgtctgactgcctcccttcattggatgaatggcgtgagaagtggc

SEQ ID NO: 220459 - DNA, 517 bp, Glycine max
cagctggtttcatcatagcataatattttgaatttgactgctaaggaaagcccccatttttctgagttgtaaagtggcttatattttttgagctgaaagtatatctggaatcaaggattgtgtgcttagtcgaccagacttgctatctcagcaatttatgtgagatccacggcataaaaaggagcaacatggccttatactcatcagatgtctgcattctgtagctgagaaaatgggttgttgtgtctcaacaagcagtaggagtacttgtagcagcaagagcaatggagacatggtctctccatcttgcttagaaactggatgctgtgggcaaaagagaacaaggagaacattctctgatcatgttatttctctccaccatttaccatccttacctaacagaattttcaccaatggaaagagccgcagttcatgcatatttacacagcagggccgcaagggtattaatcaggatgcaatgattgtgtgggaggatttcatgtctgaagatactatc

SEQ ID NO: 220460 - DNA, 548 bp, Glycine max
ctctctcttgcataacctaattttcatttcttccctcaaatttcaaaatgcgtgagatccttcacatccagggtggccaatgcggcaaccagatcggcgccaagttctgggaggtggtttgcgcagagcacggtatcgaccctaccggaaggtacggtggggactcggagttgcagctcgagaggatcaatgtctactacaacgaggccagttgcggtcggttcgtgccgcgcgcggttctcatggacctcgaaccgggcaccatggacagcgtccggtccgggccgtacgggcagatcttcaggcccgacaactttgtgttcgggcagtccggggcagggaacaactgggccaaggggcattacactgagggtgcggaattgattgattccgatctcgatgttgcgcgcaaggaggctgagaactgcgattgctcgcaaggttttcaagtgtgccattccctggggggaggaactggatcacgaatgggaaccttgttgatttctaagatcaggggagagtacccagatagaatgatgcttactttc

SEQ ID NO: 220461 - DNA, 573 bp, Glycine max
ggggaatcagaccagcccccttacaattatggtgccaactctgatgttgctgaagaaactgagccagaggaagatgatgactccaagttggaatctaacaaagatttggatcttggccctcaattcactctcaaggaacagcttgagaaagacaaagtaagattttcttttccttttatttttcaaatgtttcttcacaccctttggttttgcagctgccttttttttatgaaagcctttttcttttgcattcaaaggatgatgaaagtttgagaaaatggaaggagcaacttctgggaagtgttgacatgtctgtcgttggaagtgaatgcaaagaccctgaagtgaagatattgagcctcattattacaagcccagataagcctgacctcaccctgccaattccatttactactgatcctaagaagagtctgttcatccttaaggaatgaagcaaatgccaaatgaaatgcaccttcactgttctcaacaacatcgtttttgtctcaattcacatacgtgttttgaaaacttgcgttagagtggacagcaaaaaaaagatgttgggaactt

SEQ ID NO: 220462 - DNA, 394 bp, Glycine max
cctcggggaattccaattccacattttcaatttataagtaggcaaaaatgttcatatatgaattggaattatgttgttttcttattaggcctatcctgaagccaaaggaaatgagatcggaattcctcggggaattccaattccacattttcaagaaataaggaggcaaaaatgttcatatatgaattggaattatttgttttcttattaggcctatcctgaagccaaaggaaatgagatcggaattcctcggggaattccaattccacattttcaagaaataaggaggcaaaaatgttcatatatgaattggaattatttgttttcttattaggcctatcctgaagccaaaggaaatgagatcggaattcctcgggggtaccgagctcgaatt

SEQ ID NO: 220463 - DNA, 579 bp, Glycine max
  unsure (1)..(579): unsure at all n locations
ggattcttcttcttcttcaccaccctgtgatcgcagactcaacactctcgctagacacttccttccgcaaatggcttctcacgacagcatctccgcttctccaacctccgcttctgattccgtcttcaatcacctcgttcgtgctcccgaagatcctatcctcggggtaactgtcgcttataacaaagatccaagtccagttaagctcaacttgggagttggtgcttaccgaactgaggaaggaaaacctcttgttttgaatgtagtgaggcgagttgaacagcaactcataaatgacgtgtcacgcaacaaggaatatattccgatcgttgggcttgctgattttaataaattgagtgctaagcttatttttggggctgacagccctgctattcaagacaacagggttaccactgttcaatgcttgtctggaactggttctntaagagttggngggtgaattttggctaaacactatcaccaacggactatatacttgccaacaccaacttggggcaatcacccgaaggtttcaactagcaggcttgctgtcaaacataccgtactatgctcagcaca

SEQ ID NO: 220464 - DNA, 536 bp, Glycine max
  unsure (1)..(536): unsure at all n locations
tcaaggctttgattatttgccttatagcattaattggatcaactcaagctcaattgcagcttggtttctatgccaaaagttgtccaaaggccgagaaaataattttgaagtatgttgtagagcatatccgcaatgctccatcactagcagctgctctcataagaatgcacttccatgattgttttgtcaatggttgtgatggatcagtgcttgtggactcaacaccaggcaatcaagctgaaaaggactctattccaaatcttacactccgaggctttggtttcattgacgcaataaagaggcttgttgaagctgaatgccctggggtagtctcttgtgctgatatcttggccttgaccgccagagactctattcatgccactggtggaccctattggaatgttccaacaggacgaagggatgggctcatctctagagcagcagatccgttacgcagcctgcctgctccatttcacaacctcactacccaactaacactctnntggcatgttggacttgatgcaaacgaccttgtc

SEQ ID NO: 220465 - DNA, 508 bp, Glycine max
caacatagcaagggagacttttttattgtgcaattgtgtattacaataaatcttctcactcaattctacatcttattaccacccgaggatgatttccattcaaacctaataatcactccccaacccttcccacatcacttggaaaaacaaccaaatcatatgatatctcatatatcaagacaccatagacataacatagaataaataatgagaccaagagtaaattatactgaaaagtagacataaatgcacctagatggtcattattaacgagatccttagttattaactcgtgcacaatgtttccttatctccccttcagttccaagcttgacattaattcgtcccattttctcgatagacttggcaaattcctcaaagaatccttgagttgattgaagttgtctatcgataatagaccttgtgataggactagtaagaaattcagcatctgactgaaacaagccccttctcttaacaacttgtttataaaatccaagatcaaatg

SEQ ID NO: 220466 - DNA, 555 bp, Glycine max
  unsure (1)..(555): unsure at all n locations
ctcaattggcttttctccgcttctcatttattgggccagtctctctgcaatccacagataacttagatttcttcgacatgctcacgtgatcacagcttttcatctgagtgggagatgagaagaactggccgagctttaaaaaaaaaaatggtcttgttttttctctgaatttgggtgtgatggagttcccttcccctactatgcgagtttggacccttttcttgttcctgctactactgaagagtgatgttgtgcaatcggcttctgattacttgattggtcttggaagctatgacattaccggtcctgcagctgatgttaacatgatggggtatgccaacactgaccaaattgcatctgggattcacttcaggctgcgggctcgggctttcattgttgctcagccaaacggtaaccgggtagtgtttgtgaacctcgacgcttgcatggcttcacagcttgtagtcatcaaattaatcgagaggctgaaagcaagatatggtgacctatatactgcanagaatgtggctattagtggaattcacactcatgctg

SEQ ID NO: 220467 - DNA, 593 bp, Glycine max
gtttcagtggtgttagatctgtacctgcctagccattgatttggaaaagtccaagcttcaaagatgagtaagcttcagagtgatgctcttagagaagctatctcaggaatcatgactgattccaaggaaaagaacaggaaatttgtggagaccattgaactccaaattgggctgaaaaactatgatccccagaaggacaagcgttttagtggctctgttaagttgcctcacattcctcgccccaagatgaagatttgtatgcttggagatgcccaacacgttgaagaggctgagaagataggattggactacatggatgtcgaggccttgaagaagcttaacaaaaacaagaaattggtgaaaaaactagccaaaaaatatcatgcctttttggcctctgaagcagtcatcaagcagattcctcgtctcttgggacctggtctcaacaaggcagggaagttccctacgcttgtgactcaccaagaatctctcgagtcaaaggttaatgagaccaaggccatggtgaagttccagcttaagaaggtgctttgcatgggagtagccgtggggaatgtagcatggaggaaaagcaa

SEQ ID NO: 220468 - DNA, 490 bp, Glycine max
cactccccttgctgcggttgttccaccacctaatcacttcccctgtaaatcaagtttagttcgcacaaggttttaaaaaatggctgatgctgaggacattcaacctcttgttgttgataatggaactggaatggtcaaggctggttttgcaggtgatgacgctcctagggccgtgttccccagtattattgggcgaccacgccataccggtgtaatggttgggatgggtcagaaggatgcttacgtgggtgatgaagctcaatcaaaaaggggtatactcaccttgaagtatcctatagagcatggcatagtcagcaactgggatgatatggagaagatttggcatcacacattttacaatgagcttcgtgttgcccctgaagaacaccctgtacttattaccgaggcacccctcaatcccaaggccaacagagagaagatgacccaaattatgcttgagactttcaatgagcctgccatgtatgttgca

SEQ ID NO: 220469 - DNA, 599 bp, Glycine max
  unsure (1)..(599): unsure at all n locations
ctaatacacaaaccccgttcctccgttcacgcactacctcagtcttctcttctcttttactaaaagaaccaacaatctctagaaccctctcagccaaaaaaaacaatgcagacccaccagaaccctcccacactggattccgacccgcagctcccgcagatcaaaatccaccacccctcctccccgcgccatcaccacccctcctccgccgccacccccacccccaccgccggcgcacgccgcaaaatcggcgtggccgtcgacctctccgacgagagcgcctacgcggtccgctgggccgtgcagcactacatccgccccggggacgccgtgatcctgctccacgtcagccctaccaacgtcctcttcggcgccgactggggctcgatcgacctctccatcaacactgaccccaactccgacgaagacgccgtcagcgccgtcaacagtaacgaccacgccaacgccggcaacagcaaacgcaagctcgaggacgacttcgacgccttcacggcgtcgaagggccgggatctcgcgaagcccgtgagagaatcgcanattccgttcaagatccatattgtgaggatcacgacatgaag

SEQ ID NO: 220470 - DNA, 544 bp, Glycine max
  unsure (1)..(544): unsure at all n locations
tctctctctctgaagatggtttcacgcaggctcgtatcttctctgattcgatcgtcccttcgtagatctcaatcgaagccctcaatttccgcatcgacatcgaggctcacgtcatccaaccgtgcctcaccgcacggatacttgctgaaccgcgtcgccgagtacgccaccgccgcggctgctgctaccgctcctccctctcctcctcctccggggaagaaggagctcggcggcggcgggaagatcaccgatgaattcaccgggaagggcgcgatcgggcaggtctgccaggtcattggtgccgtcgtcgatgtcagattcgacgagggtttgcctccgatcatgaccgcgctggaggttctggatcactcgtcgaggcttgtgttggaggtggcgcagcatttgggtgaaggcgttgtccgaaccattgctatggatgccaccgaaggtgtcgttagaggctggcgcgttctcaacactggctcccctattaccgnttcagttggtagggctacccttgccgtatcataaatgtcattggaga

SEQ ID NO: 220471 - DNA, 446 bp, Glycine max
cggaacagcaacgttgtatttggagacttttgggggagagtgagtgagagtaagaagatgtttctgcgtgcggtggcgcggccgttgatggcgaaggtgaaggcttcgacggggatcgtggggctggacgtggtgccgaacgcgagggaggtgctgattgggctgtacagcaagacgctgaaagagatccagaaggttcccgaagatgaagggtaccgcacggccgtggagagcttcaccaagcacaggctcggcgtgtgcaaggaggaggaggactgggagaacatcgagaaacgcctcggctgcggccaggtcgaggagctcatcgaagaggctcaggacgagctcaagctcattttctacatgatcgagtgggatccttggggtgttccagatgattatgaatgtgaggtgattgagaatgatgcaccaattcccaagcatgt

SEQ ID NO: 220472 - DNA, 522 bp, Glycine max
  unsure (1)..(522): unsure at all n locations
tgcttacatccctcacctccaaacatatcctgacccgttgcaagacaatccttcctattctgttgttgcgcaatattacgtgaatgtggatgatacaattgcacaacagatagttgtacacaaaaatagtccaagagggacccattttcgtcgtgctgggcctgctcagaaggtatattttgattcagaggaagtacacgcttgtattgtcacgtgcggtggactttgtcctggtctaaatacagtgataagagaaatagtatgcggcttatatcatatgtatggggtgcacaaagttttgggaatacagggaggatatccaggtttttattctcgaaatacagttcctttgacaccaaaggttgtgaatgatatcccaaacgtggtggaagcatccttgggacatcatatggaggccatgacacctcanagattgttgatagcattcaggaccggngaataatcaggtttatatacttggaggatatggaactcagtatgaagcagctatgattttttgag

SEQ ID NO: 220473 - DNA, 517 bp, Glycine max
ctcaaatcagtgtgagttagcttgtgattgattgattgattgcaaggtttacaaggtcacaaggatggtgtcaaaatcctattcaaacctattggagttggcctctggagaggctccgtcatttgggtacatgaacaggagaattccaaggattatgactgtggctgggttgatatctgatgttgatgatgacccagtggagagtgtgtgctctgatccgtcgtcgtcaaccgcgcaccgagaccggataatcatggtggctaatcagcttcccataagggctcagaggagaccaaatgggaataataggagttgttggtcttttgagtgggatgagaatgcacttcttcagctgaaagatgggttaggggatgatgaatttgaggtcatttatgttggatgccttaaggaggaggttcatccaagtgaacaagatgaagtttcacagacacttcttgagaccttcaagtgtatcccgacttttctccccgctgccagtttactaagtactatcatg

SEQ ID NO: 220474 - DNA, 515 bp, Glycine max
aggaaaggaagagaagagaagagaaggagaaggagaagggtttggtagttggttacttagtttgtttgattaacgacggcgcactacacgatccccacaatccagaggcttgttattatctccatccatttaatttaattcccacaaccacgctcacctaagtttcaatttcaatcccttttctttttcttttttatttaaaattccaatttcgcgaaccccaaattccctccctccttttccctttctctctgttctgtaacgtagcatttacagcgatcagtttatagtgagtcacttagaggagttttaggtatcatcgatcatctatggcagggtacaagggcgatgacgagtacgattacctcttcaagctggttctgatcggcgattctggtgtggggaagtccaacctgctttcgcgcttcaccaggaacgagttcaatttggagtccaagtccaccataggggttgagttcgccaccaagagcttgaacatcgatgctaaggtcatc

SEQ ID NO: 220475 - DNA, 558 bp, Glycine max
taagctagctgcaacacaactctgaaatttttgtgagtatttggatgatgaattcttgtgtcgttcgaagcgtttcagaatgttttatcaaaccgttgggccaagctaaagagtcaaacctaatatgtcatttaacaccatgggatattgctatgatgtctttgcactacatccagaaaggtctactgttcaagaagcctgcaacacttgttgatccacaagatttcatggagaatctgttagagaagctgaaacactctctttctctcaccctcttccatttctatcctttggcaggccaacttgtcacccaaaaaacccaagaccctgcctcttatactatttttgtcgattgcaacaacactagtggagccagattcatctatgcgactttggatatcactatatctgacatactctccccagttgatgtcccacccattgttcactcattctttgaccatcacagagcagtcaaccatgatggccacaccatgccactgttgtccatccaagacactgaactattggatggtgttttcataggctggtccatga

SEQ ID NO: 220476 - DNA, 588 bp, Glycine max
ggattctgattatggtattcccagggaactctcagatcttcaaaagattcggtctttgtaccagccagagctccctccttgtctccagggaaccactgtgagggttgaatttggtgacgcaaccaccactgctgaccccactgatgcactcaccgtctgcagggcttttcctaacacttatggacaccctttggctcactttctcagggccactgccaaagtccctgatgctcagatcataactgagttccctcctattagggtggggattgtcttttgtgggagacaatctcctggagggcataatgtcatttggggtatccacaatgctctcaaaattcacaatcccaacagtgttttgcttggatttcttggtggttcagaaggtctatttgcccagaaaactctggagataactgacgatattctttcgacgtacaaaaatcaaggtggttatgatttgcttgggcggacgaaggatcaaattatgaccacagaacaagttaatgctgcacttgctgcatgcaacaatttgaaacttgatggccttgcataatcggagggggacatcaacacagatgctgacag

SEQ ID NO: 220477 - DNA, 487 bp, Glycine max
gaagggtctttctttacattgattgtcagtttgccactttctactttccatcatcgccttgggacttatccttcttaaacccatttccttcacttccatttcatgcgaaaaagccttacttgattcttcgaaaaggaaggaacttgggacttgtttctctcagagatggcgttgcctaaggttgatttcgaggttggagctgatggggttgctgtcatcactatgtgcaacccacccgtcaatgctttggccattccaattatcatggggttgaagaacagatttgatgaggcagctaggaggaatgatgtgaaagctatagttttgactggcaaaggtgggagattttctggtggatttgatatcagtgttatgcagaaggttcaccggactggggattcctcgcatctccctgatgtctcagtggaactagtagttaattcaattgaagattcgaagaagcctgttgttgcagcagtagcagggc

SEQ ID NO: 220478 - DNA, 542 bp, Glycine max
ggcagcatccagggcagtatgagtactataagaattatgatgacctagagatccacttccgtcaagagcacttcttatgtgaagatgaggcttgccttactaagaagtttgttgtttttcaatctgaagcagagatgaagaggcataatgctattgaacatggagggcggatgtcacggtccaagcgtaatgctgctcttcagataccaactagcttccgatacagacatggtaatgaacatgagcaacgccgtggaagaggtcgtacgtttcgtcgtgatactgaaaatcaactttctatggccattgaagctagtttggaaacagctaatgcagagcgaacatttcgtgatcaatcgacatcaagtattgggcaaattgctgttgatgatgggaatgatgatattgattctctcattcagccatttgaatcattagctgctggaggttctgaattatctgcaagataccttcaagccttggggcatagctctagaaatgggcctctggaagattcttccttttcacctctacccataact

SEQ ID NO: 220479 - DNA, 536 bp, Glycine max
ctcgagccgaatcggctcgagttttccttcaagtcactaagataatggcaagcatttataacattccatcacacataaaagcttgggtctattatgaatatggaaacatagaagagattctcaaatttgaatctaacatacccataccagacatcaaggaagaccaagtgctcatcaaggttgtggctgcagcgcttaatcctgcagattatatgagggctcttgggtttttcaaggacactgatgcacccttacctattgttccagggtttgatgctgctggtgtggtggtgagagtgggaagtaaagtgagcaaattcaaggttggagatgaagtttatggtgatatcattgagtatgcttggaataatccaaagaccattgggactttggcagaatatactgctactgaggagaaagtgttggctcacaaaccctccaatttaagctttattgaagcagctagccttcctgcagccatcatcactgcttatcaagggatttgataaaatggagtttctgctggcaaatctata

SEQ ID NO: 220480 - DNA, 470 bp, Glycine max
agtttttctccattttcttcacaattgaaccgtttctccccctcgactcgatcccatatgtgttgatagtgaaaggcatcgtcctcatcatcatctatcatggcatggtttagagctggagctagcatagcaaaacatgcaattaggagaactctttctaagggtggatccacacaccttgtgtcaagggcaagggtccttccatcgataccatcatcacatagcagaagcttccacagctcggttttcaaggagcaagctgcacctgttcctcgtgcggttcctctttcaaagctaacagatagtttcttagatggcacaagcagtgtgtatttggaggagcttcaaagggcttgggaggctgatcccaacagtgttgatgagtcatgggacaatttcttcaggaactttgtggggcaggccacaacctcacctgggatttctggtcaaacaattcatgagagcatgag

SEQ ID NO: 220481 - DNA, 539 bp, Glycine max
  unsure (1)..(539): unsure at all n locations
cgaagctcagctcagctccagcttggagggtccatggtccactttctggatctgaccgtcacccccacaacaccttcttcttcctaatgctccttcttcattctttctccttccccgtgactcacccgcacgggaagatatcactcgctccccatcccttccatttcgatctccattctccctgacactcctctctctgtatccgagttctagggttttggggatagaaagcataaaacacgtacacgacgtcgtttgatttgagggcggcgcaagatgccggggcaccgctcgaagtcggagaagcacgacgtcgacggcggcggcggtgagaagcagctccggcgggacccctacgaggtcctcggcgtctcgcgccaactcacggatcaggaaatcaaaaccgcgtaccgcanaatggcgctcaaatatcatccggacaagaatgctaatgatcctaaagcagctgatatgtttaaagaggttaccttctcttataatatcctgtcagatcctgataaacggcgtcaatacgactc

SEQ ID NO: 220482 - DNA, 542 bp, Glycine max
  unsure (1)..(542): unsure at all n locations
gtttgtggcctctctctctctctcagccgtcgcagtctctgccaaacactcgctcatccaaaattatgatcatttctgtgccgtaaattcgccggcaacacgagatctcaacttctcgcgccgttttcttttccccctttaaaaaaagtacaagttcaggttaagttggggttccatggcttcggagacgaaggtcgtgaatctggctgaggaagccaagctcgccggagaaggtgtaacgactccctcatatgcttttaccaccatctgcaagtccctcgtcgctggtggagtcgccggaggagtatcacgaacagcagttgctccactggaacgcttgaagattttgctacaggttcagaatccacacagcattaaatacaatggaacaattcaaggtctaaaatatatatggagaactgaaggttttcgtgggctgttcaaaggaaatggtactaactgtgcgcgaatngtcccaaattctgctgtgaagttcttcagttatgagcaagcttncaaggcatactacatctgtaccggag

SEQ ID NO: 220483 - DNA, 550 bp, Glycine max
  unsure (1)..(550): unsure at all n locations
gatttccttctctacaacacaacgctctcttctcttgcaaccaaaatacttgttccagtgtctactctactcataaaggatttgggacatcatgtgcagtgattcgaaaagtaaactttcttccccaaccctcgtcgtcatggagaatagtaacattcagaagcagaatctggatggtctctacaactcggttttgcttgaattgtctgcatctgatgattatgaagctttcaaaagagaggtggaggaaaaaggcttagatgtgaacgaggcaggcttttggtacggtagaagaattgggtcaaagaagatgggatctgaaacgaggacccctctgatgattgcttctttgtttggaagcgctaaggtgctcaattatattcttcttcagaaaggaggaggtgttgatgtgaacagggtctgtggttctgatagggccactngctctccattgtgctgtgctggtggctccgaatcctcacttgagattgtcaagctcttgcttgatgctggggctgatgctgagtgcctngatgcgagtggcaacaag

SEQ ID NO: 220484 - DNA, 565 bp, Glycine max
  unsure (1)..(565): unsure at all n locations
agcgcaaggagtactccatcaaaatcaaacttcttctcaaatccactggtggtgaatactacactgggaatcttatctagtattgaaatactgatagctttccttttcattgtcttcttagcatggacctactactctcgtatttatacagacttcaaaaagttgatgccatacaaatcactgaagttgaatacgtggcaactcaagtatcacagaatagcaacccggttcgggttgctagcagaagcttgcatggctttgttgcttcttcctattctaagggggttggccgtgtttcgcatacttggcattcaatttgaagcttcagttagataccacacatggattggaactgcaatgatactttttgctacaatacatggcgcaagcactttgttggtctggggggtcagccaccatattgaggatgagatttggaagtggcaaaagactggacgcatatacctcgctggggagattgcacttgttgttgggctagtcatttgggtcacttcacttccccanattagaaggagaaagtttgaaatcttctactacacacatc

SEQ ID NO: 220485 - DNA, 502 bp, Glycine max
gaaaacttttttgatccagccacaaagaaattgtttcagcaagaatagtggttctgctacctgcaagggtgggttgtgacagttctgttatgagcccatcaagcagattattaacacttgtatgaatgatcagaaggataagctgtggcctatgctgcaaaagcttgctgtcactatgtaatctgacgatacggacctcatgggtgaagccttgatgaagcgtgttatgcaaacctggctttcagcaagtcgtgctctattggaaatgatgatatttgatgtaccctcttcatcaacagcccataagtattgtgtggagaacttgtatgaggggactcttgatgatcaatatgcttctgctatcacaaattgtgattctgatggatgtttgatgctctatgtgtccaagatgattccagtatgtgatgaggggagattctttgtcttatgccgggtattctctggcagggtaacaactggtttgaaggtgaggattatggga

SEQ ID NO: 220486 - DNA, 387 bp, Glycine max
ggaaccaacaccgatgcagaatcctattagagtaaaaatacatcgatgcaaggaccaaataacagatttacaacattcacgggcaaaacctcagacaaaacttacagaaattaaatctaaagtagcattgttcacaagagaaaataaattcgactaagttcaaagtaaaataattcatgaaacaaatcttaaagcttggcttcaaactcggagagaggagtcatctgttccttcaagcccttcctcttgcgaatgtaagtgacaagctgtgcagcttgggatccagccttcaatgggtcaaaagacatcatgttccaatgatcaaacacacattgttggaaggcctggcctgatgttgcaaccccaaatgtgctcgagaaaccaaag

SEQ ID NO: 220487 - DNA, 603 bp, Glycine max
  unsure (1)..(603): unsure at all n locations
aaagtgattaccatgaaggtcttgatcgctctttgtttattagcagtcgttactcagatcagttgctggtccgaggatctagttcaaaccgaaggcggccttgtgcgaggtgtcgttcaagatgtttatcgttcatttaagggaattcctttcatggctccacccgttggtgaattgcgttgggcagctcctcaacctaaagctccttggtctcctgccgtattagatgcttctcaatactccgctggatgtcctcaaaattgcgttttacctaatatgacttgccctgtattcattagcgaagattgcatgtatttgaacgtttttacacctcgtgtttcgcaaatgacttcgaaagtacccgtgatggtatttttccctggaggtcacttcgatcaaggtgccgctggtactgatctctacaacggaggatacatggtgaacagaagcaatgtcattctcgtcacgacaaactacagattgggtgttcttggctggatcgcacaggcacaatgaagggcaactacngttttcaagatcagctcgcagcactttcatgggttcaacgcaacattgcaaactttggtgtgatccaacacaagt

SEQ ID NO: 220488 - DNA, 523 bp, Glycine max
gaaagtgtctgagagtgtgtgtgtgacttatggagtccaattcagagttcgacgtgattatcatcggagctggcgtcatgggcagctccaccgcctaccacgccaccaaacgcggccttaaaacccttctcctggaacagttcgacttcctccaccactgtggctcctcccacggcgaatcccgcaccatccgcctcacctatccccaccactactactaccctttagtcatggactcttaccgcctctggcaagaggcgcaggcccaagtcggctaccagatctacttcaaggcccatcacatggacatggcccatcacaacgagcccgccatgcgcgccctcatcgactactgccgcaacctccaaatccccttcaaactcctcggccgccaagagctcgccgacaaattctccggccgcatcgacatcccggagggttgggtgggcctctccaacgagcacggaggcgtcatcaagcccaccaaagcagtggccatgttccaaaccctagcctacaaaaa

SEQ ID NO: 220489 - DNA, 560 bp, Glycine max
  unsure (1)..(560): unsure at all n locations
ctcttcccaagctctctctctctctctctctgcgtgttttcccttcttgtccattcatatatatcacaatttcaactgcaaattttgaacaaaacttaattaagaaatccttctccggagccatggcagatctcaagtccacattcttgaacgtctattctgttctcaaatctgaactcctccacgaccctgcttttgagttctccgatgatgctcgtaattgggtcgaccggatgctggactacaatgtgccgggaggaaagttgaaccggggactgtcagtaattgatagctacagattgttaaaagaaggacaggcattaaatgatgacgaaatttttcatgccagtgctcttggttggtgtattgaatggcttcaggcatattttcttgttcttgatgacattatggataactctcacacacgccgtggtcagccatgctggtttagagtgcccaaggttggaatgattgcagccaatgatggagttctactaagaaaccatattccacgtatccttaanaagcacttcaggggaaagccatattacgtgatcttc

SEQ ID NO: 220490 - DNA, 547 bp, Glycine max
gaaaagtaaacactgcaatatgaagagttttcaaatggcagagggaaaaggtagagtttgtgtcactggaggcactgggttccttggttcatggatcatcaagagactccttgaagatggatatgctgttaacaccactattagatctgacccaggacgaaagagagatgttagcttcctcacaaacctaccaggcgcatccgaaaagctaaaaattttcaacgctgatctcagcgaccctgaaagttttgatccagcagttgagggatgtgttggaattttccacacagccacgccaattgattttgcagtgaacgagcctgaggaagtggtaaccaaaagagccatcgatggagcactaggcataatgaaagcaggcctaaaagcaaagacagtgaagagggttgtttacacttctagtggctccaccgtttccttcagcagccttgaagaaaagatgtggtggatgagagtgtttggagtgatgtggatatgcctaggagtgtaaagccctttggtggtcctatgcagttcaaggtgttgactg

SEQ ID NO: 220491 - DNA, 521 bp, Glycine max
  unsure (1)..(521): unsure at all n locations
cctctttgttttctgatctatggctttcaaggagttctctggtctttgctcctgggctccttcactatctgagagcattttgtgcactactgggttgaaaatgtatatgctggagagcaaaggaggtgccatagcatgcatgttcttgtctcttttcttcttggggacatggcctgctcttttgactatgttagagaggcgtggtcgtcttcctcagcatacctaccttgattactcaatcaccaatttcttggctgctttactcattgcttttacacttggtgggataggcaagggcacacatgatcagccaaatttcttagttcaacttgctcaggataactggccctccgttcttttcgcaatggggggtggttagttccttagccttgggaatctgtcctgccaatatgcatttgcttttgttgggctatcggttactgaagtgatcacggcaagcataactgttgtcataggcacaaccttgaattactttttggatgacaaaatcaacanagctg

SEQ ID NO: 220492 - DNA, 507 bp, Glycine max
  unsure (1)..(507): unsure at all n locations
gttttcggttatcacaaagcacatttgacatcactcactcactttctctcttctcttttcttcatccgttctactctcacttccgatccttcaattaatcatgttcataaagaagctcgtggagaaagcatccataaagatgcctcttggaaattcattggatgggttaaaaggtagtgatgtagatccacgtttggtatttcatcaaggggtaccatctggtggtgccaagtttgcctatgacaatattcagaagatactggccctatctaccaaggatggacggattaaactatttggagaggataatgcccaagtcctacttgaatctaaagagcctgtgcctagcaagtttttactgttcattcagaaccaaggcatccttataaatgtcactttcaataaccatattgaggtttgggacatagacaaganactgttgtctgatgtgtacattgttaaggaagaaatcacttgtttctcagtcattaaacatagccctcttat

SEQ ID NO: 220493 - DNA, 508 bp, Glycine max
ccacggacgcccccctttttcctttcctatcctctcctctccgaaacttctagaaacaactacaacctaccgctcatttttccggttccgaccctctttctgccctctcagtaaccttatcagatcgatcaaggtagctaggtttcagtttcagatctggtagagagcttcatcatgaagccattaccggcggagcaaaccggtgaatcagcgccgacggagttgcagagatccattccgacgccttttctgaccaagacgtaccagctcgtcgatgatccctccgcggatgacctaatttcctggaacgaagatggcaccagcttcatcgtttggcgacccgcggaattcgctagggatttgcttcctaagtacttcaaacacaacaactattccagtttcgtccgtcagcttaacacctatggtttccggaaggttgtccctgaccgttgggaattcgccaacgactgtttccggcgaggcgagagagctcttcttcgcgacatac

SEQ ID NO: 220494 - DNA, 531 bp, Glycine max
cggcgcgcgctgaagtttgctaggttcatgagcaggttcgggaagagttaccgaagcgaggaagagatgagggagaggtacgagatattctcgcaaaacctcaggttcatccgctcccacaacaagaaccgcttgccctacactctctctgttaatcattttgctgattggacttgggaggagttcaaaagacacagactaggcgctgcccaaaattgctctgccactcttaacggcaaccacaagctcactgatgctgttcttcctcccacgaaagactggaggaaagaaggaatagtgagtgatgttaaagatcaaggcagctgcggatcatgctggacattcagtacaactggggctttagaagcagcctatgcacaagcatttgggaagagtatctctctttctgagcagcagctagtggattgtgctggcccgttcaacaactttggctgtaatggtgggttgccatcacaagcccttgagtacatcaaatacaatggaggacttgagacagaggaagcatacccc

SEQ ID NO: 220495 - DNA, 507 bp, Glycine max
gcaaagtagcaaagacatgctatcttaattcttataactgataattaaagcggggcgcatcaatacaatacaatacaatatgtaactatgaactatcaatatatgatcgttatttatgtctgtgatacacacaattcaggccatgatattcttacgagatttacagcaacttctaacttatttaatacatcataccaacccaacaggagcaattttcatcatacaatgacacttatctttaaactctgaagcatgacaaggtggtagtcaccagggaccatattcttatgcaatttatgccacaactggataagacgcacaagttgcaacaccacacatgttcttccccaattccattttgaagtagccattctcaccccaactttctccccatgaattttttatgagccaatatgggacgccattctcaactccataccccacagcaaggacggcatggttcacatcctgggaagtgctaccgcaaatgtcactagtgtaaactcc

SEQ ID NO: 220496 - DNA, 587 bp, Glycine max
ctaacatctacggtctgttttcatggcaaacacaacacacatagctattattgcaagtcctggtttcggccacttggtccccataattgagttcagcaagcaacttgtgaagcatcaccaaaattttcatgtcacttgcatcattccctcacttgattcacccccagaatcatccaaagcttaccttaaagcccttcattcattcatagacttcatctttcttcctccaattaacaaagaacaattaccccaaggagtatacgttggacagcaaattcaactcactgtttctctttctctgccatcaatacatgaggccctgaaatccttgtcctccaaagtccctttaactgcgttggtcgcagatcttcttgcattccaagcattggaatttgcaaggagttcggtgccctctcctatttttacttccctttatcagctatgatattgttactgttgctacacatgccaaaacttgatgaggaaagttcaggtgagtacaaggacctaacagaaccctataagttacaagggtgtgtaccaatttttcgggtgatcttcctgatccaatccaaaatcgatcaagc

SEQ ID NO: 220497 - DNA, 536 bp, Glycine max
ctagaatggaatttcgatgctcagtcatctcttttaccattctcttctctcttgctcttgcaggagagagccatgtccatgcatcgctacctgaggaagattattgggaagctgtttggccaaacactcccattcccactgcactgcgagagcttctaaagcctctccctgcaggtgttgaaatcgatgaactccctaagcaaattgatgatacacagtacccaaaaacattcttctataaagaagaccttcatccaggcaaaacaatgaaagtacaattcaccaagcgtccctatgcacaaccttatggtgtatatacatggttaacggatattaaagacacctctaaagaaggatatagttttgaagagatatgcatcaagaaagaagcgtttgagggagaagagaagttttgtgcaaaatccttgggaacagtaattggttttgccatttcaaagctgggaaagaacattcaagtactttcaagttcctttgtcaataagcaagagcaatacactgctggaggagtgcagaat

SEQ ID NO: 220498 - DNA, 526 bp, Glycine max
gaagaagaagaaaacgacgttgtcaaacaacagcagcagcaacagcaagacgaagacgacatcccgatatcgaaacttctggaaccgttgggcaaggaccagcttctgaaccttctttgcgacgcggcggcgaagcaccgcgatgtggaggagaggatccgaaaggcggcggatggagatccggtgcaccggaagatatttgtccacggattgggctgggacactaccgccggaaccctaattagcgcgttccggcagtacggagagatcgaggactgcaaggccgtcaccgacaaggtctccggcaagtccaagggctacggcttcatcctcttcaagacgcgccgcggcgcgcaaaacgcgctcaaggagccgcagaagaagatcggcaaccgcatgacagcgtgccagctggcatccatcggaccggttagcaacccgccgccgacgccgatggcgccttcagcggctccgtcgtcgtcggtttcggagtacacacagaagaagatctacgtgagcaacgtcg

SEQ ID NO: 220499 - DNA, 541 bp, Glycine max
  unsure (1)..(541): unsure at all n locations
tggcaatgttcacgtaccacgttgaaacggttcaatcatggttggcactgagcagacttcacatactgatccacttagtggcagtgttgtcgctgtgttactaccgcataactcacttgttactggaacctccaacagcgccatggcttctgatgaccgtagcggagcttcttctctcggtgctctggttcttcaaccaagccttccggtggcggccggtgtcgcggagcgtcatgacggagaagctgccgagggatgagaagctgccggggcttgacatcttcgtgtgcacgctggatcccgagaaggagcccaccgtggaggtcatggacaccatcatctccgcggtggccatggattacccctccgacaagcttgccgtgtatctctccgacgacggcggctgtgacgttactctctatgggatcagagaggctgctgagttcgcaaggagtgggttccgttctgtaacatttatggngtcaagtcaaggtgtcccaaggtcttcttctctccctttggggaggaggatcaacacact

SEQ ID NO: 220500 - DNA, 544 bp, Glycine max
cgtcactctcttttctaccatggcgactgagaatcctttcaatagcagttttgacgacgctcgaaaagcccggtggtgctggcgagtttggaaagtactttagcttgcctgctctcaacgatcctagaatcgatagacttccttactctgtgaggatacttttggaatctgcaatccggaactgtgatgagtttcaagttaagagtaacgacgttgaaaaaattattgattgggagaatacctctccgaagctggtggagattccattcaagccagctagagtgcttctccaggattttactggcgtgcctgctgttgtcgatcttgcttgcatgcgagatgccatgaacaaacttggtggtgattttaataaaattaatcccttggtaccagttgatcttgtcattgatcactctgttcaagttgatgtggcaagatcagaaaatgctgtccaggcaaatatggaacttgattccaaagaaacatggaaagatttggtgtcctcaaatggcgttctaatgcattcaataatatgcttggcgtt

SEQ ID NO: 220501 - DNA, 568 bp, Glycine max
gagaatggctcccaagggtttaacctttctggctgtgttaatatgcgtttcagcactgtcactgagtccttctgttgcgggggaagggcaaaataatggccttgttatgaacttctacaaggaatcatgccctcaggctgaagacatcatcacagaacaagtcaagcttctctacaagcgccacaagaacactgctttctcctggctcaggaacatcttccatgactgtgctgttcagagttgtgatgcttcactgttgctggactccacaagaaggagcttgtctgagaaggaaacagatagaagctttgggttgagaaatttcaggtacattgagaccatcaaagaagctttggaaagagaatgccctggagttgtttcatgtgctgatatcctcgttctctctgccagagatggcattgtttcgctaggaggtccccatatccctcttaagactggaagaagggatggtagaaggagcagagctgatgtggttgagcagttcctcccagaccacaatgagtccatttctgcagttcttgacaagttggtgccatgggaattgaca

SEQ ID NO: 220502 - DNA, 472 bp, Glycine max
cataagcattgtcactgccatcataacagcactcacacgcatacataacataattaacaccatgaacatgcccttctacccaactctaagctacttgcatagtactacatatataatatccttattgaaattaaaaaaaaaacaacagtaacatcggaagattaaaaaacatagcctcttaatcctcccatccccatgaacctgcagtggtctcggttcattgaaccagcccatttaaaggaaaagaccttaattattttttgcataatatattacagattttcttcctcgatcatagacaaggggaggaaaattcaagggtcctgatcatggtgcttgttggcaacattgcactgctttctgacctcaccctttgtgccagtgagagggttgttctctgagagcaaggtaatggctctagagaactccttgaagaaatagtcttggctcttggccattttcttcacataag

SEQ ID NO: 220503 - DNA, 500 bp, Glycine max
ctcgagccgaatcggctcgagagaagagaaaagagaaaacaaagaagagagagatgggaactccagagacgtcaagggaaccatgtccagaccgcatcctggacgacataggcggcgcgttcggcatgggcgcggtgggtgggtccgccttccacttcctcaagggcctctacaacgcaccaaggggcgcgcgtgtcgtcgccgcgtcacaagcggtacgcctcaacgcgccgcgcgtgggcggaagcttcgccgtgtggggcggcctcttctccagcttcgactgcaccatggtctacctccgccagaaggaggacccctggaactccatcttcgccggcgccgccaccggcggcttcctctccatgcgccaggggcctcccgccgccgaccgctccgttgggttcggcggcgtccttctcgctctcatcgagggcgccggcatcatgctcaacaagtttctcagcgcgcagcagccgatgccgatgattgtcgatgag

SEQ ID NO: 220504 - DNA, 595 bp, Glycine max
ctttgtgaagacccttactgggaagaccattactttggaggtagagagctcagacacaattgacaatgtgaaggcaaagatccaagacaaggagggtattcctccagaccagcaaaggttgatttttgctggaaagcagcttgaagatggacgtacactggcagactacaacatccaaaaggagtccacccttcaccttgtccttcgtctcaggggaggtatgcagatctttgtgaagactttgacaggcaagactattaccttggaagttgaaagctcagacacaatcgataatgtcaaagcaaaaatccaggacaaggagggtatcccaccagaccagcagaggttgatatttgctgggaagcaattggaggatggaaggacttttgctgactacaacattcagaaagagtctactcttcaccttgtgttgcgtcttcgtggtgggttataaaagtctgagaatgttctgtacgtgtcttgaagtctaagcatgtggaagttccgaagatctttgggtttttttttttaatgtcctgaaaggttactcttgtaaaggttccatggcatagtggctttgaaaactgtgttgtct

SEQ ID NO: 220505 - DNA, 496 bp, Glycine max
ttcaacttgctccctcagaagcgaagaagaagccacagagaaccagtctcctactctctctcacccacaagaaaaatggcatctcacatcgttggatacccccgcatgggtcccaagagagagctcaagttcgctctcgagtctttctgggatggcaagagcagcgccgaggatttgcagaaggtggctgctgatctcaggtcatccatctggaagcagatggctggtgctgggatcaagtacatccccagcaacactttctcgttctatgaccagctgctcgacgccaccgccaccctcggtgccgtcccccccaggtacggctggaccggcggcgagattggattcgacacctacttctccatggccagaggtaatgctaccgtgcctgctatggagatgaccaagtggttcgacaccaactaccactttattgtccctgaattgggccctgatgtgaacttcacctatgcttctcacaggcttgtgatgaata

SEQ ID NO: 220506 - DNA, 566 bp, Glycine max
  unsure (1)..(566): unsure at all n locations
ctaggtttcgttttatttggctttgattttcttctgcaaccttatctactgcaaagctttgattactgagtctaacttaccctgccacagtttgccttgtttacctgagctctgtttttaactggtctttgatcaaggatggccataaaggcaattgagttgttgaaaggaagcggaaaccatgaagagatatttgaagttcttgcagcagtggctgcatctttgggggatgtaatagatgatgtgaacactttgcaggtaacacctttaaagggggcaatgaccaatgaggtttttgaggtaaattggccaaccaaaagtgatggtcatcaaagaagggttcttgttcgattatatgtgaaggggttgaggttttcttcacagggtggatgaaatccaaacctttgagtgcatgtcaaagcatggacagggtccacgccttcttgggaggttcaccactggcagagttgaggagttcattcatgccaaaacactctcagctgcggacctncgtgaccctgaaatatctgctttgatagcatctaagatgaggagtttcacaatct

SEQ ID NO: 220507 - DNA, 536 bp, Glycine max
cacactttgtcccttaccgatgccttgtgtggcttccaatttgtgctgactcacttggatagccgtcagcttcttattaaatcaaatcccggggaagttgtgaagcctgattcatacaaggctataaatgatgagggaatgcccatgtatcagaggccattcatgaaggggaaactttacattcacttcactgtggagtttccagattctctaaaccctgatcaagttaaggccttggaggctgttctgccaccaaagccttcttcacaattgacagacatggagctggatgaatgtgaggaaactacactccatgatgtcaacatggaggaggagactaggaggaagcagcaacaagctcaggaggcatatgatgaggatgatgacatgcctggtggtgcacagagggtacagtgcgcccagcagtaatgactttgtgtggaagctagattcagaattgatgaaaatgatgataatactgttgatgttccataactgtagtgtgtggcttaaagataagtagtgtttgatgaaaa

SEQ ID NO: 220508 - DNA, 582 bp, Glycine max
cacaaaccagttagagaaaagcatggattccacttatgataggaaagctgaagtgaaagcctttgatgattcaaaagctggtgttaagggtcttgtagagtctggagtcacaaagatcccacgtatgttccattctggaaagttggatttggatatcattgaaacctcaggtggtgactccaagttgattatccccatcatagacttcaaagacatacattctaatccagctctgcgttcagaagtaattggcaaaattcgaagtgcatgccatgagtggggatttttccaggtgattaatcatggaattccaatcagtgtcttggatgagatgattgatggaattcgtagatttcatgaacaagacactgaggcaaggaaggagttctatactcgggattctaagaaaaaagttgtgtacttttccaaccttggcttgcacagtggcaaccctgttaattggagagatacaattggttttgctgtttctcctgatccgcccaaacctgagcatataccatctgtatgcagggatattgtgattgagtatacaaagaaaataagggatgtggttttacaatc

SEQ ID NO: 220509 - DNA, 568 bp, Glycine max
gcattttccttcttcagcgctgattcatttataaacttgaacagagatctcatgtcacttctcagagattctcaccagtgattggtgatggctcagccgcttgtgaagaaagacgatgaccgcgacgacgaagctgactattccccctttcttggaattggaaaggggtctgttcttcaggaggccagggtttttaatgaccctcaactagatgctaggagatgttcacaggttattacaaaactcctatacctactgaatcagggagagacgtttacaaaggttgaagccacagaagttttctttgctgtgactaagcttttccagtctaaagatactggattaaggagaatggtctacctgatgataaaggagatctctccctctgcagatgaggttatcatcgtcacaagctctctcatgaaggatatgaacagcaagattgatatgtaccgagcaaatgccattcgagtgctgtgtcgtatcactgacggaactctcctttacatattgagaggatttaaaacaagccttgttgataaaatccattgtgcagtgctgtctagta

SEQ ID NO: 220510 - DNA, 552 bp, Glycine max
ctaactaaagccgagcagctagagagagaaaccctagcaaaaatgccggctggtcacggtttgagatcccgcaccagagattccttctctcgtcccttcaggaagaagggtaccatcgccctcaccacatacctcagaacctaccacgtcggcgattatgtcgacgtcaaggttaacggcgccgtccacaagggaatgcctcacaagttctaccatggccgcaccggtcgcgtctggaatgtcaccaaacgtgctgttggggtcgaagtcaacaagcaggtcggcaacagaatcataaggaagaggattcacgtgcgtgtggagcatgttatgccatcaaggtgcactgaggagttccgccttaggaagatcaagaatgatcagctcaaggctgaggccaaggccaagggtgagaagatcagcaccaagagacagcctcagggtcccaaacctggtttcatggtcgagggggcaacgttggagacagttacccctattccctatgatgtcgtcaatgacctcaagggaggttatttagttcattctcgttgt

SEQ ID NO: 220511 - DNA, 573 bp, Glycine max
tgaggtttcaccattattgtgtcctcatttgttgtcatccccctccttgtcctctgatgagtgtgtatttgtgatggctgcttgcttgacattcttgtgattgcaggatattcctgaagcagtatcagctgatgagcttgctcgatatttggatttaaagaagctggatgaaagagtttccatgtttgaagccgtgtcagcgtacgatgggatggggattagggaaagtgcagaatggttggtggaggtgatggagagaagcaagaggactgaaatgttaagagcgagggcaggtgcaatgggtccaggtccctagaagggtcttacattaaactgaagtgatttctcgattcctttatatagctttgtaaatccaaattggattatacgtgatcataaatgcagcgagcagaaaaggtaaaagaataacatcgtgttgcattaaactgagccttgaaatttgatgccatagttgtaatacagccgtttcatatgagaggctcagtctccagtatctcttagagcaattttcttcttacatgccttgataagcaatctgtgaaatgatgggct

SEQ ID NO: 220512 - DNA, 433 bp, Glycine max
gtgtagtacgagggccaatttccaaaaaccttttgtctcgcaacctcacctcttcctccttcaatctctttcggaatttcccaaaatccttagtgggaggaagagatggttctgactcagaagattcacgaagctttcaaaggcaccgtcgagaggatcactggcccccgaaccgtttccgccttcaaagaaaaaggagttctcagtgtctccgagttcgtcaccgccggcgataatctcgttgccaaatgccccacctggtcctgggaatcgggtgatccaggcaagaggaagccatacttgccacctgagaaacagttcttgattactagaaatgtgccttgtcttcggagagctgcatctgttgaagaagaatatgaatctgctggaggggaagttttactagatgatgaagataatgagggctggctag

SEQ ID NO: 220513 - DNA, 536 bp, Glycine max
caagcatgtttaaatttatattatagggacaaccataacattagatagtcgtcttacgaatggatatgtcaattatgtacacatcggaaaggagatttgttcaacattctgatagtcatgactcaaggacataatttacatgacatgtacaccaactgtgtgatgtgacaatcaacgattatacgcagaaaaataacagaaaagtattggtgatttggatcaatgaaaagcaacaatggacaatatgcccgtgttatacccgaacatgcagctaaaatcttagtcaatggctggagctaccaagatcaaagtccatggtataatcatactcaattgttggaattacagaagccataaattttaggaataaaaataggtacttgtcaacttcaggctcaactccgtgtgacatcaacacatcaatgattttcttcatcactgctccatgtcgacatggatgaatagatgcatgcttccctggcaagtgaggatggtcctcaattgttaccgttttgtgtgcatgatcttgactaaca

SEQ ID NO: 220514 - DNA, 531 bp, Glycine max
ctcacaaatctatttccattccattccctcagagagagcaagatcacccttctatagagagaaaacacacacacacacacacaaaacaaaactcaaagagggtgaagattttttggaacagaataagagtatggcccttacaaaacaaatcttgggttcttcattgctagagaggtccatgtttgttccttcttcttccccttcatcacttctcaaccaaactcggttcttagttcctttggagaacaagagagttgtgagggtgaagagagctgcaaagtttcctgtggcagctataagtgaggatttgatgaagggttcttcttcttctccttcatcatcatcatcttcatcctcttcttcttcttcttcttctgtgtccacagaaaaaccagtgaaattcaaggttagagctgtgatcacagtgaggaacaagatcaaagaggatttcaaagagaccatcgtgaagcatattgatgctcttactgacaggattggaaggaaatgtgtccttgaactttgtagcactga

SEQ ID NO: 220515 - DNA, 512 bp, Glycine max
tgaacagagaacagttgagttgaggctaatcaatgctatatagagcgcaatcatagtccctctttcttctcttccgccatcgttttctttgaaacgcacagcttcaatcaccgaccacaccacccatcaacgacatgcttcctctttcccttctcaagactgcccaaggccaccctatgttggtggaactgaaaaatggggagacatataacgggcatttggttaattgcgacacatggatgaacatccatctgcgagaagtcatttgtacatctaaagacggagatagattttggaggatgcctgaatgctacatacgaggcaatacaatcaagtaccttcgagtacctgatgaggttattgataaagttcaagaagaaaccaagagccgtgcagatcgcaaaccacctggtgttgggcgtggaaggggaagaggcagagaggaaggtcctggtgggcgcccaacaaaaggaattgggcgtggtcttgatgatggtggtgctaggggagct

SEQ ID NO: 220516 - DNA, 551 bp, Glycine max
ggttgcatcatgtctgccatcactaatcattggaacaaaatgaaaatgctgcagaggcagctaagagctgtattgatactgttttgctgtgttcaatttcatgtccaaagttgtgatgaaattgaagatgtaatcagcagatctcaatttccagaagggttccttttcggaacaggcacttcctcttaccagattgaaggagcgtattttgaagatggaaagggtttaagcaattgggatgcttttagtcatacaccaggaaagataaaaaaggatgaaaatggtgacattgcagatgatcattatcatcgctatttggaagacattgagttgatgtcgtctcttggggtaaatgtatatcgattttctatctcatgggcgaggattctaccaagagggatatatggggacataaatccaagtgggataatgttctacaacaagattatagacaatctgctgcttagagggattgagccatttgtgacaattcatcattatgacttgccacaagaactggaagaaagatatggtggttggatagtcccctg

SEQ ID NO: 220517 - DNA, 408 bp, Glycine max
ctcttcctcttaccacgctctttcattttatacgcgctgagccaccctcgtgctccggccggcctcaccttgaaggacactatctcccactgcccttcaaaaccgacaacggagacaacgcatagaagcaccacgttgggcctgccaccccttcggatacaatgtggtcaggacatcacaaacattaggctgctgatagacacgccaaccaaaaactaaagaataggtggactgaaagagaacaagattattgtttctggaatgatgacattgcatcccctggggggaacctatggacgggagtcataattaacaaaccagacggaggggatgcttatgaacgagttacaaacgagctcgccagagaagatgtcactgttggtaactgacttgctgatttacttagaa

SEQ ID NO: 220518 - DNA, 520 bp, Glycine max
gggatttccatggaagtctcaaaagaagaagctcgagtggcacccgcaccggccctagtggcgatgctgccatcccctggcatgggccacctaatcccaatgatcgagttcgcaaagcgagtggtgtgctaccataacctggcggtgagcttcgtgatccccactgacggcccaccttcaaaagcccaaaaggcagttctggaggcccttccggactcaatttcccacaccttcctccctccggtcaatctctccgacttcccgccggacaccaaaatcgaaaccctgatctcccacaccgtcctccgctcccttccttccctccgccaagcattccactccctctccgccacaaacaccctctccgccgtcgtcgtggacctcttctccaccgacgccttcgacgtcgccgccgaattcaatgcctccccctacgtcttctatccctccactgccaccgtcctctccttgttcttccacctccccaccctcgaccagcaggtccagtgcgagttccgag

SEQ ID NO: 220519 - DNA, 438 bp, Glycine max
aaccatgtggcagtgcaaaactaaattgtcaaatagttattacaagttcacaaaattctttgatctatgttgcttcttcacttagaatcccaaattcccaatcgaaggatatttaacctttttcttattcatgacatggaatgctctcaaccaaaaccagaaggcaaaaaaaaatcaaaagttctagataagctctttagctgcagcaacaacagcttccttagtgataccaaattctttgtatattcttccagctggagcactagctccaaaacgatcaatgcctattgcttttccctttgctccaacaattttctcccacccaaatgttgatcctgcctcaatgctaactctggctgaaacagcagcagggaaaacactcttcttgtaggcttctgagtgctcatcaaaaagttcccaagaaacaagggaaacaac

SEQ ID NO: 220520 - DNA, 429 bp, Glycine max
ataattaagtgcaaaatttcatcgctaatccactatttatgaacaacttttgacaataatccattgtatacacaagacaccttgcgacaaagcaagccccaaagatttattaattgacaagaatttgtttttcagaacccaccctcatcacagaaaacaaataatgtgcaggcaaggaacggaatatttgaatatgacacaatgatctaactatcagcggctctaaaaatagtgagcagagacaggaagaggttgatgatgtccaaatacaaggagatcgaagcccagatgtattcatcgtacgagtatctcttgatcaggttgtctgtgtcatagatgatgtagccacaaaatataatggctgccaagcaaccatagatcatcacggacaatttacccagtggaaacaaacctgaatcagagcaaaga

SEQ ID NO: 220521 - DNA, 366 bp, Glycine max
gacaatatcaattagctgcacataaaatcaataaggataatatatggcataacactattcccctgagaacagtcaatccccttaaaatgtccttatcaatagttcaaaagtgtaaccaaattgtatggttgcattcaaagttcaaattaaacacaccatacaaacaaaccaagacctacatcagtgtgcgttgccatcacctttgtcttcagtagactctaatgccggtttctttggtgtgcttccttctgccggagtggcatttgatgctcgcttaactcctcttcccaccacaccaaggtgtgtgactccaccagatccattggtgtgggcagttgaaatggttggggagtcaaaaccttcact

SEQ ID NO: 220522 - DNA, 482 bp, Glycine max
cactaatcataagcctctccatctataccatcatatatggctagtagttgtttctccatgacaacaccaatcttcaaaattcgcttcttcttattcttatgctttattgggataagttcatctcaattgtcctctgacttttactccacaacttgtcctaatgcgctttcaaccattaagagtgcagtggattctgctgtgagcaatgaggctcgcatgggggcttccctcctacgtcttcatttccatgattgttttgttcaaggatgtgatgcatcagtgctattgaatgatacatcaagtttcacaggtgaacagacggcagctggcaacgttaattccataggggttttggtgtaatagacaacatcaagtctcaagttgagagcttatgtcctggtgttagttcttgtgctgatattctcactgtagctgcaagggactctgtttgtgctcttggtggacctagttggacagtgcaa

SEQ ID NO: 220523 - DNA, 485 bp, Glycine max
  unsure (1)..(485): unsure at all n locations
aattaatactcgcgagatttttcattgattgcttgatcttttaaatacaaatacacttaaaatcaatggataatagnnatccatcggtcaacttctcattcatttaagagaaataaaacaaaaactataatttataatataaaaatctaatcccattcaatatagtcttttaaccgctttagtttaaagacatgtttagatctacttgggccatcctaaaagtaacagtttgtcccttaactgctattgtactatagtacttagtacgaaaaggaccaagatcttaattggtcttccaacaattggtcctgatttcgccactagagccagtaagtgggctaatgtttcccattttaaccattgcattggcaaagtcagtgttgaagcttgaagggtcgctggcataaccatttacttgagagtctgtggatcctccattgaaaagcacttgatctgtgtgcaagagaccctttggctctgcaaat

SEQ ID NO: 220524 - DNA, 508 bp, Glycine max
ctaaaatatcttcaaaacttgagcttgaactctaaccatcttactggaccaatcccaagtgagattggtgattgtgtcaatctcaagacccttgatatctttgataacaaccttagtgggggtcttcctgtggaactaggaaagctgacaaatctggaggttataagagcaggagggaacagtggcattgtggggaagattccagatgaacttggagattgcaggaatttgtcagtgttaggtcttgctgacactaaaatttctggttcattgcctgcttcactgggtaagttaagcatgcttcagaccttgtctatttatagtactatgctctctggtgagattcctcctgaaataggaaactgttcaaggcttgtgaacttgtttttgtatgagaatggtctctctggcttcctgccaagagagattggtaagcttcagaagcttgaaaagatgcttctgtggcaaaacagttttggtgggggcattcctgaggaaattggcaact

SEQ ID NO: 220525 - DNA, 498 bp, Glycine max
aatcaataatcatgaattatttcaatcctaccgcaaaatatacaaaacattcgccataacgatttagtcatcacaagtaaagctctgacggtactgtatgttgatcttatagatctgtaaatttataaattgcatcacccaaacagtagaaacccagattaaaactaaaatgccacatccgtctgtgtattgtgattcatattttaattttaataaactaaaaacttcaatagcttgttttgtagcaaactgcatcaaggcatcagattaactctaaaaacaaagcttcttgcttgttggttaggccaagttcatccaatgtcgcagcactttctccatcactaaaagcacgcctaggatatggtctcaccagtctgtaattgcctggtttcaccaccctaccaatatctatgtagtcaaaaagagactgtagcctatcagatcttaggaatcgacgtccacgacgattgccatctggcatttttaccatcaagttca

SEQ ID NO: 220526 - DNA, 512 bp, Glycine max
caaaaaaagaaaaagagaacattgttcaacgaagcaagatgcttagcaaccgcatatggcagaggagagctttgatctccgcccggaccttattttctggctctgcttctcactcttcatcatcttcccatgcgatctcgcttcgcttcgccaaagctaatgctccttcttcttcacatgtcattttcaattttgcacgtgtggacagatattggttttctactcaacccgccctagagcttcccgcgagcaagatcgtggacgtgccgttggcacaaactggtgaaggcatcgcagaatgtgagcttctcaaatggtatgtacaagagggggattatgttgaagactttcaaccactttgcgaagtccaaagtgataaagctaccatagaaattactagtcgttacaaaggaaaaatttctaacattctctatgttcctggtgatattgtcaaggttggagaaactctgttaaagatattagttgacgagtctacatttccctctgggatt

SEQ ID NO: 220527 - DNA, 381 bp, Glycine max
atcagaataattatgataaaattttcagatctttatttggatcaattttaaatgcttttgttctatttctcattgtaatcaatatagtgattaaccatctaaattacaatttcaataattcttccttcatgtaatgaaaatttcatttcaaatgcagcgtgaggagctcgggattttcaattaattgcttccactcgttgcaaaatcttgcaacggttgctccatccaagactctgtgatctgcaccaatattaacattcacgagtgatgcaggatacacattttcattatcagcaaaccgtggaactttctgaattctaccaacggcaataatggagacttcaggcagattgataagtggggaaccaaactttccaccta

SEQ ID NO: 220528 - DNA, 575 bp, Glycine max
agcttattgtcaatgctgcttacattggcactcctggaaagggtattcttgctgctgatgagtcaacagggacaattggcaagcgtttggccagcatcagtgtagagaatgttgaatccaacaggcgtgctcttagggagctgcttttcaccgctcccggtgctcttaaatatctcagtggtgtcatcctctttgaggaaactctctaccagagcacagctgcaggtactctcaacagttttgagtatcttaattggtttgaatcataaatcgatgagcattgcatcattgggtttgaacatgcattgattaatattatgttgatctaggttttaaattgtggtcactgcatggtgattcttgatattgtagaaatttgcatcctaatgaagcaggtgttattgcaattggggtttttgacttaaaatttgcgtctacatattcttttttaaaaccatgtttgccaacatggttttttcccgctttaattttcctttgtgccaaacttggattctttgaatgttgttggtgcaattcttcagtcaaaagcttcactatagtaaatccattaattc

SEQ ID NO: 220529 - DNA, 333 bp, Glycine max
gggggaaaagaacattggccctttggaattataattattacaagggcccatgacatccggaacaggcccttgaacataaaatcccaagcccccctcagtcaaagaaagatttttttcggggggaggaaaacgggggggaaaactttttatagagatttgagaaaactggttttcccacccaagaaaaccctaaatttttcgggggttttcattcctcaagcaatcgaaatacttgggttttggggctaacttcaattatgcaacccctttttggagattcttcccccgttttttttttcaaaataaagaacccaaaaaatccgagaattttta

SEQ ID NO: 220530 - DNA, 536 bp, Glycine max
  unsure (1)..(536): unsure at all n locations
cagacaatggtcaaaatatatattgccattccgtttgggtctgtaacagaagcagcgaagcataaaaacaatgcatccaaattaaaacccacaacggtactggtacatctgaacatcaaacacaacaacagaaaaagaccacaagaacaagaatctgaagtagattctagtagtcttcgtcctcatcctggccctcaccagactcagcacccacttcttcataatccttctcgagggctgcaagatcctcacgggcttctgaaaattcaccttcttccataccctcacccacgtaccaatggacgaaggcacgcttggcatacatgagatcaaacttgtggtcaatgcgaccaaacacctcagccacactggtggagtttgaaatcatgcaaactgccctctgcaccttggcaagatcacctccaggaacaacagtagggggctggtagttaataccacacttgaaaccagtagggcaccaatccacaaactgaatcgncctcttggtcttgatggtggcaacagcagcattcaca

SEQ ID NO: 220531 - DNA, 530 bp, Glycine max
caacagcacaaagcgggttactgtctgttcaagctaccatctctctctctctttcttagtgcctccttgccagaagttaaaatggcccaagaaactttcctattcacatctgaatcagtgaacgaggggcaccctgacaagctctgtgaccagatctccgatgctgtgctcgatgcatgcttggagcaggaccctgacagcaaggttgcctgtgaaacctgcaccaagaccaacatggtgatggttttcggagagatcacaaccaaggccaacgtggactatgagaagattgtgcgtgacacatgcaggaacattggttttgtctctgatgatgttggtcttgatgctgacaactgcaaggtcctcgtcaacattgagcaacagagtcctgatattgctcaaggtgtgcacggccacctcacaaagaggcctgaggagattggtgctggtgaccaaggtcatatgttcggctatgccactgacgagactcccgagctcatgcccttgagccatgtccttgccacgaaact

SEQ ID NO: 220532 - DNA, 506 bp, Glycine max
catcatataaaatatatatgttctgaaagaacacatacaagtacacaaaaaaaagggggaaattcataaaaaaatacagaaaaaaaaaaacagaattgagtaagagggaaggaaacatagagaaaattttagcaatcagataataagaagccagtagtagtgcaaaagtcccttgccaagagtgttggaaccccttttagttaagcaggtaccttctcccccttgagtggcttcaccacttcccatgtgaagtcagggtcatctctgccaaagtgtccatatgcagcagtcttcaagaacctgccatttccacccctcttgagatcaaggttgatggagatcatgccaggcctgaagtcaaaactctccttcacaatgctgaggatttccttgtcagggatcttcccagtgccataagtgtcaacaaacacagacaagggctcaggcacaccaatggcataggaaacttgcacaattgccctcctagcaagtccatttgcaacaat

SEQ ID NO: 220533 - DNA, 496 bp, Glycine max
gtcacaagagataattttattccaaggagaaaatatttaatacaagtgggaattttattgattgatcccattgatcctctcaataacagagataatcccttggctgccaagcttcccctgaccattagccagcatgctagaaaacaactgtttagacaaggaagcccctggcaagacaacaagatgagcatcatctcctccttccacaacatcaacccccatccccaaatccttaacctgatactccgcaaaaccccctggtcgaaaatccctctcaatcatcctctccccgaacaattcaagcgccttcgaacccgcagcaccgtcttttatggcttccacgaactccctcaggtccagccccgcacgcttggcgaacaccagcccctcgctcagcccgatcaagttcgcgccaatcgtgatctggttcgcgatcttgcagctcttgccgcaccccgcggggcccatgtaagtggctcttccgaggatcgagaac

SEQ ID NO: 220534 - DNA, 469 bp, Glycine max
aatgtccaaaacattcacattcattcacataaaagctggtccttagttaaggacacaggaaaatgtcacaccttaaaaggtcaccaccaccatgaccatatgagccagtggccaaattctagaaaactggtgtggtgttgatggttaaagtaattaaagtaaaattcaaatcaaagacagctactacaatttcccagttcttgaacaatggcttccatgcttggcctctcaaatggagactcatgggagcaaagtaaggccattctcgctagtttggccgcctcgtattcaaagaacttgccatgcaagttcggatcaataaattctgggaacttgaaggactcagcagcaaggcgcattgcgcttgtgatcttctgcttccccgtgaggatctggaaaagaagcaccccaaacgcataaacgtcacttttctctgtgaaccgcccagtagtggtgtattctggagcta

SEQ ID NO: 220535 - DNA, 594 bp, Glycine max
gatcaatcaatccatcttcaattgctttgtttcgatcggaggaaaatggccgatcagttatcgaagggagaggaattcgagaaaaaggctgagaagaagctcagcggttggggcttgtttggctccaagtatgaagatgccgccgatctcttcgataaagccgccaattgcttcaagctcgccaaatcatgggacaaggctggagcgacatacctgaagttggcaagttgtcatttgaagttggaaagcaagcatgaagctgcacaggcccatgtcgatgctgcacattgctacaaaaagactaatataaacgagtctgtatcttgcttagaccgagctgtaaatcttttctgtgacattggaagactctctatggctgctagatatttaaaggaaattgctgaattgtacgagggtgaacagaatattgagcaggctcttgtttactatgaaaaatcagctgatttttttcaaaatgaagaagtgacaacttctgcgaaccaatgcaaacaaaaagttgcccagtttgctgctcagctagaacaatatcagaagtcgatggacatttatgaagagatagctcgcccatccctc

SEQ ID NO: 220536 - DNA, 511 bp, Glycine max
  unsure (1)..(511): unsure at all n locations
agcaaagcaaagcagagccaacaacaagaagaacaaaaccaacatcaacaaccacaagaagaagaagcttgcaaattagaagaatcttcagttgaaagggaagaacacacaagaacaaagagaggaagaaacgcgaatgaagggagaattagagttgccaccagggttcagatttcaccccactgatgaagaattggtgaatcactacttgtgtaggaagtgcgcgggtcaaccaatcgcggttcccatcatcaaagaggtcgatttgtacaagtttgatccatggcagcttccagaaattggctactacggcgagaaagaatggtacttcttttctctcgggatcggaaatacccgaacggttcacggncgaaccgtgccgccggaagcggctattggaaaccaccggcgccgataaggcgatcggaaaaaccgaagcgctagggatcaagatagctctgngtttttacgccggaatagcccccaaaggagtgaaaaccaatggatcatg

SEQ ID NO: 220537 - DNA, 499 bp, Glycine max
  unsure (1)..(499): unsure at all n locations
aaattagaatgattattttggcacaagcaatacagataaacatcaaatgttttacaacctagtgtttaaatacaaagaagcaaggaagaagcaactttatgctctcaatggaagaatcatagaactctagtgttgtaggaaccacaactagggcatttgtggtagagccagtggaagggggtctctcctttcttttcacaatcattacataataaaacctgagttggactagaaatctcatcaaaaattcttttttcagccaacaacgcatctaacatcctaaaatatacctgcatgtctccaagtgacttgctacatattgggcaggtataattaaagcaggtatattcctgaaaacatgttgagtgcattacatgaccacatgggagggcttttaccggagagcaggatgtgaagatatattcatgacaaattggacangtgtcctctaaatgtttctccctgcatgtatgtgtcataagagaacgagacatacaag

SEQ ID NO: 220538 - DNA, 513 bp, Glycine max
gttatatctgaccccagtacacccaagcctaatccagatccatttttatacattcttgaaggaaagtctgatcattactttgaaatgcgagatggggttattcatgtatatccagatagggatgcaaaagaagagctttttcctgttgctgatgcaactacatttttcactgatcttcatcacatacttcgagtcatagcagcagggaatataagaactttatgccatcatagactcaatcttctagaacaaaaattcaatcttcatttgatgttaaatgcggatagagaatttcttgctcagaaaagtgctccacatcgagacttctataatgttagaaaagttgatactcatgtccaccattcggcatgcatgaatcagaaacatcttttaaggttcataaagtcaaagctgagaaaagagcctgatgaggttgtaatatttcgagatgggacatatctaacattggaagaggttttcaagagtttagatttaactggatatgatctcaat

SEQ ID NO: 220539 - DNA, 504 bp, Glycine max
ttactggtggtttcaaacttccacaaagcaatatcaatggtaattcctctttcgcgctcagccttgagcttgtcaagcacccaggcatacttgaatgacctcttgttcatctcagcagcctccttctcgaacctctcaatcacacgcttgtcaatacctccaagcttgtagatcaaatgaccagtggtagttgacttcccagagtcgacatgtccaatgacgacaatgttgatgtgagtcttttccttacccatgactccaccactggtggttttgaagctggtatttctaaggatggacagactcgtgagcatgctcttcttgctttcacccttggtgtgaagcagatgatctgctgctgtaacaaggtataataaatctaagctttctttgactaaaatgattggatttgatgagaatttggttatttcttatggaatactgcagaacttttaaccatgttctattgttggttcagatggatgccactaccccgaagtactc

SEQ ID NO: 220540 - DNA, 572 bp, Glycine max
aaaccataaacagtttataaaacttcgttataaattaaatgcgacttaaaacatccctcagcagcaaaggaaatggactaaaaccctatagctgcttgtgaaattcgaaatatctcagactcttcttaccatcaaaacaaaaaacagtactcatcaaaaacaaacagcaatgaaaattgaccaccgccgatcaagaacctagttttgaaagttacggctacatgaaatcggcagaaacttaaaaatataacttaaacaaaacacctaagactctgcaaggataaaactactataaaggagtaaccacgatgatgatcacatgtgctagcaaaattgcccaaatgcaatcacttcttcttggcagcggccttggtgaccttggctccggtggggtctttcttctcaacactcttgatgactccgacagccacagtttgacgcatgtccctcacagcaaaacgaccaaggggaggatactcagagaaagtttcaaccaccatgggcttggttggaatcatcttaaccatacctgcatcaccattcttcaaaaattggggctcttctcaagctcc

SEQ ID NO: 220541 - DNA, 587 bp, Glycine max
gaacgttctcacgacacgcctactcattgcactcttcgatcgcaactctctttttcttccaaaagggaaaacgaatctcaaacttcacaagtgtttgaggcgccatggcggatcggttgacgcgtattgccatcgtcagcaacgacaggtgcaagcccaaaaagtgccgccaggagtgcaagaagagttgccccgtcgtcagaaccgggaggttgtgtattgaggttacttcctcgtccaagattgctttcatttcggaggaattgtgtattggatgcggtatttgtgttaagaaatgtccttttgaagctattcagattatcaacttgccgaaggacttggacagggatactactcatagatatggtcctaatacttttaagctgcataggttgccggttccgaggcccgggcaggtgcttgggttggttgggactaatgggattgggaagtccaccgctcttaaagttttggccgggaaactgaagccgaacttgggtcgattcactaatcccccttgatggcaagaaaatttgacctattttcaggatctgactgcaaattatttactcgattctaaggatgat

SEQ ID NO: 220542 - DNA, 399 bp, Glycine max
gtctctcctcacatttttcttctctcttctctctcctcggcgccccaccgcgcgacccctcctttccccctcccccttcgcctccgccgcgacacccaccttccccttccggacctccgtgcgacccccccccctccgccgagttttagttgcaaagttttagagttggattggaagattgtgaacttagaaagatggtgaagttgactatgattgctcgcgttactgatggtcttcctctagctgaaggtctggatgatggtcgtgatcttaaagatgcggaattttacaaactgcaagtcaaggctttgtttaagaatctctcaagaggacattatgaagcatcaaggatgtcagttgaaactggcccttatgtttttcattatattatagaaggac

SEQ ID NO: 220543 - DNA, 364 bp, Glycine max
ctaaaccgaagttgtcaagaaaaagttgacatcatctcatgcataaagggttcccaccaatctgtgcaaatctggataatcatgtgagaaaagcaagaagccacagaatccaggttttaaatttcatactgagctcgatcaccatagtttatttttgatccagaaaagtacgaagacaactccaaaaacaatagcaacaggggcccacttccgaatcagagcctgccggtttaaatctctagccttatcagcatatatgcgagattctgatgataagcgactggacatttggctgacctggtccaactgttcaccaacaccaagaacttcctgcacattccgagtcattatctggtggacttca

SEQ ID NO: 220544 - DNA, 530 bp, Glycine max
aacttaaactatgtattaaattaaataaaatcaacaacactaagtaaatgggatacaatacaatacaaccttacaaatacaaacaataaatgcctaattactagtaattcctaatattatcggttggttgcctgactagtgtgactactgcctagcactagcactaactaaatatcatacaaaaaccgaaccggttcaaaccgggtttgtattcctaaactgcaaatttttccctagactctaataaaatatcagcaggtgggaaccatttgagtctgggccaagccggtatccggttcagccacctctttcctcttccgaatctctaacactttacggtgactattggagtgaatatcgctgcagaaggtgggactacacgccggtctatactccgaaaataaccgacccgacttgtaccgaaccccgcacgcgttgcaaaaggttttggcgcccagtgggccggtcctccacttgggcgtcttctgcacctggcagtgactgcaccgccgctgaatctggactccaac

SEQ ID NO: 220545 - DNA, 281 bp, Glycine max
ggtatgataagcgaatcatattgatacacacctgaccagatgacaacacaaacactctcaatgacactaaatgctctactagagatgaccatcccttaactaaacagttggatgcagaaatgctatctaagagaacagcctttgttaacactattttcgcatgggaaagacgagcatgcaccggagggcggatcagggaaatattctctgccaagagaaatatgttcatagggcaagaaccagaccacctccacggaccatcaaagtcatcgcatcctaca

SEQ ID NO: 220546 - DNA, 419 bp, Glycine max
gctccaaaaagcccaaacgctcaccaacatgagttttctacagctaaaagctttccagaatacagattgagacaagctacaaagtcaaggagggggggctgaactttttgccgttggacctctcttccaagacccaatctgcactactgcagaatttgaaaatctaacctaagagaaacaaaaacaattatgaaacaaacatttgattccattgtggcttcaacatgaactggttagtcaaaacttgaagagcgactccatcttccttgcaaatagtcctccagagagacactctgctcagtgctactgatagaaaccgtatcatcctccaagtctagtaaagcaaggttcaggtgggactgaatgttagttggaactggttcctcatcacatccatcaagttcctgtggagcattaac

SEQ ID NO: 220547 - DNA, 507 bp, Glycine max
atgattctcaagattcttgatttcccaacatgaaaaagtgctttcctgccaaacgtccccttagttaaatgcactaaatatttttatttttatacaagccaaattaagaaaagaaaccttggcattacgccagaagttgtgtagatgacattgatacaagcttgagaaacagtgcatccaagtcaggattacaggaattattaatgacttgtgcacggtatacttctgaaggataataacgtggattagaatttcttgatgaagtcgtatatatgcgcgctgatctcttggggcctttcctgatttataaagtgagctactccttccatcacaaccaattcttgcaagaatggtacgtctctcttaaagccaccattatgtatatactccttaacacctggagtgttgtatgtaatgtcaaggtctcccacaataaacttgaccggtaccttaatctgtactccagtccatgctgctgtgagctcccagttaggtccatagcgcgat

SEQ ID NO: 220548 - DNA, 616 bp, Glycine max
ttcttctcttgcggctagggttttagcgcagcttcttctagatttaaggaagatgggtaaggaaaaggttcacatcagtattgtggtcattggccatgtcgactctgggaaatccactaccactggtcacctgatttacaagcttggaggcattgacaagcgtgttattgagaggtttgagaaggaagctgctgagatgaacaagaggtctttcaagtatgcctgggtgctggacacacttaaggctgcgcgtgaaagaggaatcaccattgatattgctttgtggaagtttgaaacaacaaagtcttattgcacagctattgatgcgcctggacatagggatttcattaagaatatgattactgggacatcccaagctgactgtgctgctcttatcattgattcgaccactggtggttttgaagctggtatttccaaggatggacagactcgtgaacatgctctgctttcattcacccttggtgtgaaacagatgatttgctgctgtaacagaatggatgctactacacccaagtatttcaaggccaggtatgatgaaattgtgaaggaagtctcttcctacttgaagaaagaggatacacccctgacaagattc

SEQ ID NO: 220549 - DNA, 425 bp, Glycine max
gtcttcattcttctcacttcacgaatcacgaccgaaccgtgaaaaacgttcccagcctcccaccgtgccacctcttcaggtgtaaaaatggggttatctgccaagaaatctagaaaaagaggaaaaagggacagtgattcagatgaatacgataatatggagtatgaagaggtggaggatgattacgatgatgatggtgaggaggaggatgaagaggaagaacatggagaggaagtaacagatgatgaagatgggacaggagagcatggtgaatggaagaatgatgagatggaacagcttgagaaagaatatagagatcttcatcaccaggagctagatactctgaagaacttgaagcatcataaagatgaagatcttcttaaaggtcaagctgtgaaaagccagaaggccctctggtacaaaat

SEQ ID NO: 220550 - DNA, 504 bp, Glycine max
cagagttttgtggcaaacttacattccctgtgtccttgaagcagcctgggccacgggatggaatcattcaatgttttatcaaaagagataaatctaatttaacataccacctattcctttgtctcagccctgctttgttagttgaaaatggaaaattcctcctttctgctaagaggacaaggagaacaacttacactgagtacgttatttccatggatgctgacaacatctctagatcaagtaacacttacattggaaagctgagatcaaattttcttggtacaaagttcattatatacgatacacagcctccatactcttctgcccatatatgccctcctgggactgggaagacgagccgcagattttattccaaaaaggtctcgcctaaggtcccatctgggagttacaacatagctcaggtaacatatgaattaaatgtgcttgggactcgaggaccaaaaaagatgcactgcgttatgcattcaataccagcttcagcac

SEQ ID NO: 220551 - DNA, 258 bp, Glycine max
tttatttttttattttttttttttttttttattcaacaaattaaagcgcaattcatataaattaaaattggaccaggtaaaaaaaagcatttttgctggtacttgcctaggattaaaacatacatgcaacaatctcaattaaaaacaaacggtttttcaaattatagcaaaacaaacaacagcagtttcaatcaggacagaagaaagattgtggggctcgacattctttcatggcgaatttgaccatattttcctcaa

SEQ ID NO: 220552 - DNA, 517 bp, Glycine max
attcaacaaacatttaattaataacaaggacaagtttaagttttttttccaccttacatatgtacaattgcaagcaatcgcacggcttgagagtcatatattcacccctccattcttcttcatgctacaaactatattatatttaattcccacatttttgttttccttttttttctattgccactgttacgtacactttgcaataaaaggaacaacaataattatgaaagcctagagccaattaagattgatttttctctaactagcccaaagcatatgtttaatcttaatcacttgcagccaccagcaccaaacccaattcttccaccaccaacatcatacacaacctctattgttttctgctgcacgttcccatatatagtaacatcactatcgtcaccatttgcagcaaaagccaagcaaacttgcttggcactggccacgtagagtatcccttgcggcggaagctgcaccgtgacgccgccggcgaaggaaaaatctatcttgggaatagaaa

SEQ ID NO: 220553 - DNA, 425 bp, Glycine max
catcattgcatatttttattaatataatatatgtgtcattacaatattcaagacaagttgcaacagagtactaaaaacagatatttatagaggtaaaacaaggtgactgactagaggcatttggcctcgatctcctctagtgtaagccccttggtttctggtttaccaaagtttttaattccaaaaaagccccgggttttacacaaaatgggtaaaacaaaaattccacttccaaaaatggcctccagggggaaaaaggaaaagtgaccagggcatttgccccaaaattgacgagtacagctatacttagtccttgacctcttaagcgcaaggggaaaatctctgctatcattaaccaaccaattggaccaaaggaaatctgataactgccaacgtacaacagcagaccaattacagcaacaact

SEQ ID NO: 220554 - DNA, 536 bp, Glycine max
cgtcactctcttagctaccatggcgactgagaatcctttcaatagcattttgacgacgctcgaaaagcccggtggtgctggcgagtttggaaagtactttagcttgcctgctctcaacgatcctagaatcgatagacttccttactctgtgaggatacttttggaatctgcaatccggaactgtgatgagtttcaagttaagagtaacgacgttgaaaaaattattgattgggagaatacctctccgaagctggtggagattccattcaagccagctagagtgcttctccaggattttactggcgtgcctgctgttgtcgatcttgcttgcatgcgagatgccatgaacaaacttggtggggattctaataaaattaaatccttggtaccagttgatcttgtcattgatcactctgttcaagttgatgtggcaagatcagaaaatgctgtccaggcaaatatggaacttgaattccaaagaaacaaggaaagattggtttcctcaaatgggttctcatgcattcaataataatgct

SEQ ID NO: 220555 - DNA, 504 bp, Glycine max
aaaaaatgttcctgatttccttaattctcaagagtcgggaggcagcaatagaaggtaaatgtttcctaaaaactcaactgtaaaaccagtaaaaatgtaacaaggaattttcatcctcaatgaccaatagaatttttgaaaaagaaaatcacatttcttcaacaaacgacagtcataactcttcctcgtagtagccatctagttccttggtttattgatacaatagctgaatagcaatggatttccttgtagcaggccatactagattattaagaccaaagttaagaatcagcgccagtgagtgctatcaattcaacctgcaaacttggtttatatctgattcaatgtttagcattgaccatgtttctgatgacatattgtaagatgcctccatggttgaagtaagctagttcaacctctgtatcaaatctcagtgtagatacaaatgatttcccggcatctgtcaccactgtgacatcttggcccggtcgtatttcattcaca

SEQ ID NO: 220556 - DNA, 295 bp, Glycine max
ttactggtggtttaaacttttatatagcaaaatcaatggtaattcttttttggggggagccttgagcttgacaagcacccaggcatacttgaaagacctcttgttcatctaagaagccttcttttcgaacctttcaatcacacgctgggcaatacctccaagctggtagatcaaatgaccagtggtagttgacttcccagagtcgacttgtccaatgacgacaaagttgatgtgagtcttattcttacccatgacttcaccactggtgggtttgaaggctggattttctaaggat

SEQ ID NO: 220557 - DNA, 392 bp, Glycine max
agcacattgaggtcttcaatcaccaaaaatggtaaccactgtggctgcttacaacgtcactccatatcaaccaactcccaatgatcctttatggctatcagatagcgaccaacttggggccctaggccatgtagccaccatctacatttacaaagcaaaacccaacagcgacaccattgagaggttgagaaactctcttagaaagcttttagtgtactactacccagtagctggcaggttgagcttgacaaaaagtggtcgaatggaagtgaattgcaacgcaaagggagtgacgttgattgaagctgaaacaacaaaaacatttggtgattatggagacttttcagcatccaagtcgaccgatgaacttattccaaaagttgatgatactc

SEQ ID NO: 220558 - DNA, 281 bp, Glycine max
gaaaaaaaggacggacaaatatctactataacaatcaataacaagtacattagcaagtattcaagccaagtacatcagcgagtatataaaaatccaaaaactcgatccccctccacaagagaaaacatcaaaagtccaaaaaagagctaatgctcctccaacaagtaacaccactggtttcagaaaccgatttattcagacctctcattttttgctcgagcaagacacttaatcgcagctaaacataaacatacgcggataatgtgaagacaagctacttt

SEQ ID NO: 220559 - DNA, 521 bp, Glycine max
ggcggactccggcggcgacctcgccggcatcatttgttcgatctcccatgagcccctcaacctcatcagcgaggatcttcaatcggtctccatctgcgtccacgtttttcacgagctctgtctgcggcaatggttggagtactcttcgaaagggaagaagcacacttgccccatttgcaagcagggttgcagggccagcgacgcttgctggctctattttcagtcagtgggagatgcgaacgatagtgtgaagcctcagaagagctttgaattggaggaagatgctggggttcctgcgtagggaggtgaatgtttcggggcttaattctcaggttgaagggcaaacaaaggaattggaaggacttaatgagaagctttgtacttgcaaggagcaggcaaagatagagatagctttaaagaatgaggttttaaataaaaaagcatcaattccagcttcaaatgaaatcagaggtgaaatactctgtagccttctgttttattttggacaagttaactattta

SEQ ID NO: 220560 - DNA, 500 bp, Glycine max
  unsure (1)..(500): unsure at all n locations
cggctcgagcactccccttgctgcggttgctccaccacctaatcacttcccctgtaaatcaagtttagttcgcacaaggttttaaaaaatggctgatgctgaggacattcaacctcttgttgttgataatggaactggaatggtcaaggctggttttgcaggtgatgacgctcctagggccgtgttccccagtattattgggcgaccacgccataccggtgtaatggttgggatgggtcagaaggatgcttacgtgggtgatgaagctcaatcaaaaaggggtatactcaccttgaagtttcctatagagcatggcatagtcagcaactgggatgatatggagaaaatttggcatcacacattttacaatgagcttcgtgttgcccctgaagaacaccctgtacttcttaccgaggcacccctcaatcccaaggccaacagagagaagatgaccccaattatgnttgagacttcaatgtgcctgccatgtatgttgcaat

SEQ ID NO: 220561 - DNA, 479 bp, Glycine max
caaaattaaacgcaacagccattaattatgcaactccggaatataagacattgtcacattatatacttagaaaacatcattctaaatcttaaaacaactcaaactaattaacttcattcttccaatcacggaatactcaatggatcacaaacgtcaaggaacttagtgcattatgaagcacaattaatcaactgtatagtatgcaaagaaacaagatgtcgtcaactatatatttcaaaacgaaaattctaaccattttcaaaaggaaaaatatcacattctaaggctccactgttgtcacctgttgccattccccatctactgcttccttccacaatgtcacattgttgttcccatcagccacagccaatatgtttcctgtcaatgaccatgagaccctccaaacaggggtgttgaaatcattcaaaccttgcttcccactgatcccctctttcgcacggtcatatatcactttaccg

SEQ ID NO: 220562 - DNA, 490 bp, Glycine max
tgaatatcaaggccattaatctgtggtctgcaattcagacaagagaggattggttagacgttagcttcacggatggagttcatctatcagcagagggaagcaaggtagtggtgaaggaaatattaaaggttctaagagaagtagattggaaacctagtctgcattggatgtcaatgccaactgaatatgcagaagattcaccatattatcctccaagtcctgatggaacaacaaccataaatgtgtctcatattatctcccgaaggtgtttgcagtgggatatatagtactttatgtatttatattgcgtaccatataagaggctcaattatgttgtgtggagtggagctcttggaaaagtgatattttccctaccccatacgttttgggggcgctttaattattctattctagttttcatttgttacatgtacttaaatttgtgttaataaattaaaattccactcaatttacactttatattctctct

SEQ ID NO: 220563 - DNA, 491 bp, Glycine max
gtcgcagcaaaaccaagccacccactaacttgtttggtccaagacatggctctgatcctgcatgctaccaaaacaaacaagaatgccttcaagactctgattgcggcagagtacagtggcgtccaagtggaattggcccctaatttcgagatgggtgtctctaacaaaactcctgaatttctcaagatgaatcctattggaaaggttcctgttttggaaacgcccgatggtccagtctttgagagcaatgcaatcgctcgttacgttgctcgactaaagggtgacaacgctttgatctcatcttctgccattgataatgcccacattgaccagaggattgatttttcatccttggagatcgatgctaatctcatgaaattgctcctaccaagacttggatttgccccataccttcctccagttgaggagggtgcaaattctgcgtagaagagagcatttgatgcctttgacactcatcttgcctccaatac

SEQ ID NO: 220564 - DNA, 510 bp, Glycine max
gaaaaaataaagccttgattgtacttattgggcaaatatttatatgtacatatatatttagcagttgagctttattaattgtttcccattagatatatgaagggttaacatagttttgaaaataatcaagaagccaatcagttccatcaatgtgcgaaatattcgtgtaggagtttgcttcgtaatccctgagttgcttggcataagggactctggatgtataatttgctccaggtccaagacaacggtactccccaaagaagacactctggtctctagagggatctctccaatcattccatccattaggagctacgacatcagacatgtatgttcttgagaataccacagaggcataggctccccatgctgtttcaagccacactctcccactcccaacaatgctgcaattcacaaaggaaaatccactttcctcattcatcgattgtctcccttgagcggtgatcgacccgctaatcccatccttctcttgtttgctacacagtttat

SEQ ID NO: 220565 - DNA, 572 bp, Glycine max
  unsure (1)..(572): unsure at all n locations
cttgaattcacatttcaacttccatagccatggctttctccttctccaaagcacttgtccttgcctgctccttctgcttatttgcgtctttggcttttggacgcgatttctccattgtgggctattcatcggaggacttaaagtccatggataagctcattgaactctttgaatcatggatgtcaaaacatggcaagatttaccaaagcattgaggagaagcttcttaggttcgagattttcaaggataacctaaagcacattgatgagagaaacaaggtggtcagcaactactggcttggcttgaatgagtttgctgatttgagccaccaagagttcaagaacaagtatctggggcttaaggtggactactctcgaaggagagagtctcctgaagaattcacttacaaagatgttgaattgcctaagtcagtggattggagaaagaaaggtgctgtggccccagtcaagaaccaaagttcatgtggtagctgctgtgcattttcactgttgcagcagntgagggtataaaccagatagtcacaggaaatttgacatcactggctgagcaag

SEQ ID NO: 220566 - DNA, 496 bp, Glycine max
aatgaatagagttaatcaagtttttattattgtatggaaaacgttacattgttttcaaggaaaagctgaaataggccgacaatagagaattgatcagaagaaggaaagaaattcagaaacaacaatgtagtaagcgatagagggaatgaatcttatttcttcttagtgggataagaagccatcttgtagataccgcagattccctcgggttttccaatgttcctcctcattcttatgtatcctttctctccccacttagatccccatgaattgttcactatgatataatccacacctttcgcagttccgtatccaacagctgccacaccatgatctaagtcacttccgcaatgcccgtcgaaaacacccccactgtaaaattggaaatctctgcctgaagcctctatggccacactgaggggttggtttgcacgtgccctcaataagctctgttcattgttttggggcacatcatggtacccgctaatggtgacac

SEQ ID NO: 220567 - DNA, 527 bp, Glycine max
aaatttctcagtctccggaactcgtttctaccttcacttcgcacatctcgaaccctctctttccggcaactaggttaaagttcatcaatggcaggtcgtggcaaaaccctaggatccagcgccgccaagaaggccacctcaaggagcagcaaagccggcctccaattccccgtcggccgtatcgcccgtttcctcaaagccggaaaatacgccgagcgcgtcggcgccggtgctcccgtttacctcgccgctgtcctcgaatatctcgcagccgaggttttggagttggctggaaacgctgcgagagacaataagaagactcgaattgtgccgcgccacattcaattggcggtgaggaacgacgaagaattgagcaagcttcttggtgacgtcaccatcgctaacggtggcgttatgcccaacattcacaatcttctccttcccaagaaggccggtggctcatccaaaggcgctgctgctgacgatgactcttaaataggattcgcttttcttgattttttattatc

SEQ ID NO: 220568 - DNA, 470 bp, Glycine max
gggaaacaaatttaaaacagtttgaattcgaatattatagattacaaccaggaatcaagtgctagatcgagactgaaaaattacaaattaaaatgattcaaattttcaacaatctttcttgaagaacaagagcattctctattcacatcagtaatgaaaacctaactacaactacagagcataattatcaaaactaaaaaagaaactacaaaacagagaggccaaaagataatctaaatttgataataaaaaaatcaagaaaagcgaatccctatttaagagtcatcgtcagcagcagcgcccttggatgagccaccggccttcttgggaaggagaagattgtgaatgttgggcataacgccaccgttagcgatggtgacgtcaccaagaagcttgctcaattcttcgtcgttcctcaccgccaattgaatgtggcgcggcacaattcgagtcttcttattgtctctcgc

SEQ ID NO: 220569 - DNA, 468 bp, Glycine max
acatctcaagtaaaaatataattttgattaggaagaagtaactagatacactatattgtatatagtagggaaaaagaatatataagaccgtctaaatttttcttaatttacaatattccgtttttatacacttattccttaattttcaatatatcatgtaataaatctataaggccatgtttggtaatccgggggttactcttgaactcacagaagctgccacggccacgtttgaaacgacgtgttgctcggggatgaacatagttgaggtaggtggcttataagacatgggtatgcaagtttacatttgtggtctggtctggacaacatagactttgccatccttgatgacaccttcaatgtcctgaggagtgccatacaactcttcaatttcatttcctgcacgggcaatgctggacaagattgactgggcgaaactaccatcaaggatcagtttgtctgatgaat

SEQ ID NO: 220570 - DNA, 472 bp, Glycine max
cccaagtcaaaagcttctttaagcactttttctccctttttgcaacttgcaaacagcttgtgactgactctgatgcacttaatttagaagcctctaactctgctttgatttcagctttctccgcctcaagttttctgacagctgcagttgcttggtccatttgaccactagtctttctcaaggcattctccatttctgagagtctcatcatggttgggttgtccagctcctcagctgcccctgtctccttcggcagaattttattctcctctctttccatcttgaactttttcagctcaatcagatcactgcttagcttttttgccgcttggattggcttctcatgagcccaatctttccgctccttgacctgtttctcaagatcctttatctgattaactagagtgactatcacctcctccttgtcgtcttctggcacaaactccacattattatcaatatttatatcaag

SEQ ID NO: 220571 - DNA, 539 bp, Glycine max
gtcaacatggctcatcatgaagattcaagtgcatggaattcgagtaaacctcaccctaagctcaatgaaagaattctgtcttctctgtcacggagaactgttgctgctcacccctggcacgacttagagattgggccaggagctccagcagttttcaactgtgtggttgaaattggcaaaggaagtaaggttaagtatgagctggacaagacaagtggacttataaaggttgatcgtattctttactcatcagtagtctacccacacaactatggttttatcccaagaaccatttgtgaagacagtgatcctatggacgtgctggttctaatgcaggaacccgtgcttcctggttccttccttcgtgctcgtgctattggactaatgcctatgattgaccagggtgagagggatgacaagatcatagcagtttgtgctgatgaccctgagttccgccattacacagacatcaaggagcttcctccacatcggcttgctgaaatcagaagattcttttgggactacaagaagaatgagaa

SEQ ID NO: 220572 - DNA, 489 bp, Glycine max
gtcttgtcttgtgtttgttgcagttgcggttgcggttgcgattgcgatggtgaaatcgaacgagaacggttctggttccgtttcggtgcctcctttcctgaaaaaatgttacgatatggtggaagaccgcaacactgattctatcatccgttggagcgatggcggtgacagctttgtcatctccgacatcactcaattctccgtcacgctccttcccacctatttcaaacacaacaatttctccagtttcatcagacaactcaatatctatggtttcaggaaaattgatacggattgctgggaatttgccaatgagaactttgttagaggtcaaaagcatttgttgaagaatatacgtagaaggaaacatccacacagtgcagatcagcaaaaagcattgccacagcaagacaattgtgatgaaccatcacaagaagcaccgtatcatggcctttggaagaaagtgagaatctaaaacttgataaaaat

SEQ ID NO: 220573 - DNA, 456 bp, Glycine max
ttttttttttttttttttttttttttttttttttttttttttttttttttttttttggtttgtttttttttttttttcccctttttttcttttttttttttggggggaaaatttaaaaattttatgggggggcggggccccttttaatgggggcaaaaaaaaaaaaggggcgctttcccctaaaaatttcccaaaaaaaaaaaaagggggccctttaataatggggggccccaattgggccccctcaaaaaaagggcggctttccgcccccatggaggagaacacaaaaattggggttttaaaaaggggccccacccccggggggggaagggggggaaaaaaattcggggcccccaacccttaaaataaatttctgggggaagaatcggggaaaacccccccccccgaaaaaaacggggggggaaaaaacccccccctcccaaaaaaagggggggt

SEQ ID NO: 220574 - DNA, 538 bp, Glycine max
  unsure (1)..(538): unsure at all n locations
gaagatgacccgtacttgggactcaacaatgtcaatgataccaagaggaggagatactatatggggtggtcttgattggtcaccagaagaaggctatcaccctagccagagaaagcacagcaataacaatactcagttgaaagaccacgaaacaaatcaaacaaattttgtcaactatggaagaatgatatcatttggcagagatgtggctgaggcacactcccctgagattcagatgactgacttccggggtgctatcaagggtcgcagtattgcaaataccacttgtcgtgatgtgtggactgaataccatgaaatgggatttgaaggagtgagagcagttgctgaacataaagtttacacagctggctcagtcgttgacctccttcaatttgttgctccaaagatgatggctcgtggtagtgctcatttctcttatggaatngctgacaatttggatgaccctaaatataatcactacaagtattggtcaaacnncctggaaacaanaataccaaatgctnctgatatggaaatc

SEQ ID NO: 220575 - DNA, 477 bp, Glycine max
gacaaatcaaatccttactttaataacaaaaatggtcaatacaagcttttacaatataaccaattcgcatagttcacccctccatggaactggaatttgatcagcagaaccagcaattctaataagggcaacttacagaactttgggggcagggaaaatatactgcaaaaattatatatagcctgatctgatccttaaaggggttcaagagaagtgtctgagtggaactgtggaagtgcattgggcttcattcataggggtaacttgattttctcagaccacttgaagatatcagaatacactttatcacctcctagatcttctcctttggctccagcagccactcttataacatcctcaatcaatgcaaaatttcccatgatgtcaacgtgagcaccactttgtgtgccccttccctctaaaagggtggctggaggagaatgatcatattctctaacgtaggtgcggataccggat

SEQ ID NO: 220576 - DNA, 456 bp, Glycine max
gtgccactctacctatctgaaatggctccatacaaatatagaggagcattgaacattggctttcaattgtcaatcacagttggtatcctcgtggccaatgtgttgaactacttctttgctaaaatccatggtggctggggatggagattgagtttgggaggtgctatggtccctgcccttataatcacaataggatcactagtccttccggacactcccaattccatgattgaaaggggtgatcgtgaaaaggccaaggctcagcttcggagagttcgcggcatcgacgatgtggaagaagagttcaatgaccttgttgcagctagtgaatcctccagaaaagtggagcacccgtggaggaacttgttgcaaagaaagtacagaccccacctcaccatggctgtgctgattccattcttccagcaactcactggaatcaatgtcatcatgttttac

SEQ ID NO: 220577 - DNA, 510 bp, Glycine max
aaaataaccctttttaatttataggaacaattcaatacattgacaccaccaatagtatgatttaccaacaaaagctaaaacgctagtcattgagaaaaataaacaagtaactacacttctttgatagcagttcccctccccatctcaacaccattgccataatcatcattctccacgaatctggaccagaaggggtgtgccttccaaacctggttcatttcttcaatgggaatgcccttggtttcaggcaagaagaagtagatgaagaatgtcatgatcaacacgaaaaaggcaaagaagatgaacaagccgaacttcatgtggcaaagcattgtcaagaagacttgtgcaatcaagaaagtgaaaaacatgttcaccgacacatttatactttgagcagccgaacggatctccaagggaaagatctcactaggcaccaaccaacctaggggaccccatgaccaggcaaatgctgatacgtaaatgcaaatgaagagaaccacaacaact

SEQ ID NO: 220578 - DNA, 518 bp, Glycine max
ctggaacccacaagttgacttgcaggctcaggatcgtgctcataggattggtcaaaagaaagaagttcaagttttccgtttttgtactgagtatacaatagaagagaaagtcattgaaagggcctacaaaaagcttgcacttgatgctctggtgattcagcaagggcgattggctgagcagaagacggtaaataaagatgagttgcttcaaatggttagatttggggctgaaatggttttcagttccaaggatagtacaattacagatgaggatattgatagaattattgctaaaggagaggaggcaactgccgagcttgatgccaaaatgaagaaatttactgaagatgccatcaaatttaagatggatgacactgctgaattatatgattttgatgatgagaaggatgaaaacagatttgatataaaaaaaattgtgagcgagaactggattgaaccaccaaaaagggagcggaaacgcaattactcggagtctgaatacttcaagcaaacaatgc

SEQ ID NO: 220579 - DNA, 606 bp, Glycine max
  unsure (1)..(606): unsure at all n locations
ttttcgtttctgaacccaattaattaagcacacaaggaccataacatacctatacctcaatatcacaagtcttatggaggcagagcgagacaagtacaagatgatcaactttgaagaaaccgagttacgactcggcctgccactcagtggaaacgagacgctcaaaaacacttgcagcactgggaagagggttttttcggatactgccgtggatttgaagcttaacctttcctcaacctcaaacagtgcttcttctgacctggctaaagagaagaacatcactgctgctgcacctcctgctaacgacccagcaaagccacctgcaaaggcacaagtggtggggtggccaccagtgaggtctttcagaaagaacattgttcaaaggagtaacaacaatgagggcgaaaaagccgccacaagtagtagcaacaatgtgaacacgggagcagctttcgtgaaggtgagcatggatggtgctccttatttacgcaaggtggatttgaagttgtacaagagctaccaagagttgttggatgcgctggctaanatgttcagttcattcaccattgacaagtgggatcccaggcatgaaagactcatgacgag

SEQ ID NO: 220580 - DNA, 527 bp, Glycine max
ataaaacatacttcattatttcttgtccctaatttccaaattatatattttctcacatatataaaatacacaatacatatacaagaaaattatttctaagaaatggtaccgacacattatgtaacaacttggctcctatattagactaccccttgctcgagaaattagcattaatgctttccatggacgcccaagagcaacagatagagcagattgttgtcgaaagtggaatttacaaatttgactctagcttctgttcttgcacttttccactgctcttggtgctagcccgattgcctcagatcctttcattatacgcaggcgcttgcgtgattccacgaacatttcccacggtacgtcaccaacgagcatccagtcagcatctttgtcttcataggttggtacgtaatcagagccgttgagaagatcaatcaatttgctctcgttcatgaagtctttcatgccttgggatccacacttgtcaatggtgaatgaactgaacattttagccagcgcatccaacaact

SEQ ID NO: 220581 - DNA, 443 bp, Glycine max
  unsure (1)..(443): unsure at all n locations
gcttccttcttcagtgaagctctttcgcgaaacactcccctttgccgctgttgttgttgctgcaccaccgaacaacttcccctgtaaatcgcgtttcgtttgtgcaaggttttaaaagatggctgatgctgaggacattcaacctcttgttgttgataatggaactggaatggtcaaggctggttttgcaggtgatgatgctcctagggccgtgttccccagcattattgggagaccacgccatactggtgtaatggttgggatgggtcagaaggatgcttacgtgggtgatgaagcccaatcaaaaaggggtatactcaccttgaagtatcctatagagcatggcatagtcagcaactgggacgatatggagaagatttggcatcacacattntacaatgagctacgtgttgcccctgaaaacaccccgtacttcttaccga

SEQ ID NO: 220582 - DNA, 569 bp, Glycine max
cacccacaacacaacaaccgatttctttttttttttgttttgttaaacaaaacagagaaaaaaaaagttgtgaattttccagttgcgtttctgttccatacaatttcgatttcaatggcgaggcctaatcaggaggcagttgagacgttcgtcagcatcactggtttgccagaagcagtagcgctacaaaaacttgaggagcatggtggtaatctcaatgaagcagtcaatgcacattttactgaaggagacagaaatctaacgaccggttctcacaacagctctgctgtatttcctcaagatgatttcatggatatagatgacgaacatgatgcagaaattcccagaagaattccaccactacttccagcttctgcagcaaatgtcaatccgttttctcttcttgatccaacaattgggagaggtatatttggtactcgtttcgattcaacagtcgaggcaccatttgttacacatccaagagaggtaagggagattcctatagaggttaaggatggtagtcaatccactcctcaagctggtcatgttccatccattgaagatgtcac

SEQ ID NO: 220583 - DNA, 510 bp, Glycine max
  unsure (1)..(510): unsure at all n locations
gtaagagtaagagaagagatggaaagagtagcatcagtatctcggccactgaaaatatacttcctcccattcttctcaccggggcacctaatccctctggtccagctggctcgcttggtggcggcacgaggccagcacgtgaccatcatcaccacccccgccaacgctcaactcttcgaccagaacatcgacaaggacaccgcctccggccaccacatccgcgtccacatcatcaagttccccaacgcccacgtagggctaccggaaggcatcgagcacctctccgccgccaccaacaatgaaaccgcctacaagatccacatggcggcgcatctcatcatgccccagctcgagtctctggtcaaacactctccaccggacgtcttcatccctgacatcctcttcacctggaccaaagacttctcccagaaactctccatctcgcggctagtcttcaaccctatntccatcttcgacgtctgcatgatccacgccattaaacccaccctg

SEQ ID NO: 220584 - DNA, 548 bp, Glycine max
  unsure (1)..(548): unsure at all n locations
ctctttttttctaccttagattccttctccaacaatggctctcgccgtttccactacttcttcctcttcagcagctgctgcagcttctagctccttcttctctcgtctcggatcttcctccgacgcaaaagctcctcaaatcggttcgtttcggtttccggagaggtcgcttgtttcgtctgtagttgtcaatgtaactcaacgacgctccttggtgaggccactcaacgccgaatcgcaacggaacgattctattgttcctcttgcagcaactatcgttgctcctgaggttgagaaggaagaggaagattttgagcaaatagcgaaagaccttgaaaatgcatctcctcttgaaattatggatagggccctcgagaaatttgggaacgacatcgctattgcatttagtggtgctgaagatgttgctttgattgagtatgcacatttgacgggtcgaccctacagagtggttagtcttgacactgggagactgaatccagaanacctacaaattttggatgcggttgagaagcattatggaattcaca

SEQ ID NO: 220585 - DNA, 448 bp, Glycine max
ggcaaaactaaaaacgtagattatgatagtgaagaaacaacataatacaaccataactctactcatctaacaaaacaggaaatcacattctcagaatgactactacaattatatttgtgaggaagattatctaaacctatacagggatacttctagctgagaatcttcgttttgctgtcaaaactgccattcccattttcagtgaattgccaaaactgtgaagaaatttattgccggtattgtacgacggaacattgagcaagatactcaattaaccatcaccgtaaagcattcacgaatgccgtcaatgaatcaacatctctcttttccgaagggtacttaattggttgagaagagtgtttggggaagagtagtattgggggggaagcttcccaactgcagttcagtctttgcatattccttctggtctccatcccgctctgaattt

SEQ ID NO: 220586 - DNA, 496 bp, Glycine max
ctctttttttctaccttagattccttctccaacaatggctctcgccgtttccactacttcttcctcttcagcagctgctgcagcttctagctccttcttctctcgtctcggatcttcctccgacgcaaaagctcctcaaatcggttcgtttcggtttccggagaggtcgcttgtttcgtctgtagttgtcaatgtaactcaacgacgctccttggtgaggccactcaacgccgaatcgcaacggaacgattctattgttcctcttgcagcaactatcgttgctcctgaggttgagaaggaagaggaagattttgagcaaatagcgaaagaccttgaaaatgcatctcctcttgaaattatggatagggccctcgagaaatttgggaacgacatcgctattgcatttagtggtgctgaagatgttgctttgattgagtatgcacatttgacgggtcgaccctacagagtgtttagtcttgacactgtgagactgaat

SEQ ID NO: 220587 - DNA, 248 bp, Glycine max
  unsure (1)..(248): unsure at all n locations
aaantattaattttggacgggtaccgttttaaattacagaaaaaaatttttattaataataaaaataatcaaggcatttttttttacatttttacattaaaattttatatatttcatataattgttacattttataaaattcttctatacaattatattttataaataaaacaacactaaataaactattattagttaacatcatatttaaaatgctattaattatacaatatatatttaaatataaa

SEQ ID NO: 220588 - DNA, 521 bp, Glycine max
  unsure (1)..(521): unsure at all n locations
cgaaaccctcttcatcttgttctatctgtgacgagcatcatggcctcaagagcagtgttattgttggctatgtgtgtgcttccggcgatggttgtggccattcgcccagcaaagaaccctttttgcgtgaagggtcgtgtctactgtgacccttgccgtgctggttttgagacctcagctaccacctacattgctggtgctgagattatgttgcaatgcaagagcagggttagcaacgaggttgtgtacacgaagaaggggtacaccgactcaaccggagcatacacaatgtacgtggatgaggatcacgcagatcagatctgcagtgccaagcttgtaagcagccctcaccctcaatgcaaggaagtcaccccaggccgcgacgaagccgtcgtgattctcacccgctacaacggcattgcctccgacgataggttcgccaatgccatgggcttcatgtctcaagaggttgcttctggctgtgctgagatcctcanngcataccaggagttcgacaatga

SEQ ID NO: 220589 - DNA, 521 bp, Glycine max
  unsure (1)..(521): unsure at all n locations
cttggagaagggaaaaatgcacagaagaatatcattactggcagaatctgaatgagaaccggacattatggaaattagggacattgccaccaggtctaatcacatactacgcaacaacaaagccactggacaagtcatggcatgttctgggacttggctataacccaagcatcagcatggatgagattaacaatgcagcagttgtgcacttcaatggcaatatgaaaccatggcttgacattgcaatgactcagttcaagccactttggacaaagtatgttgactatgaattagatttcgttcaggcctgcaattttggtatctaaatggtcaagtttcttgtcacttggtgatgctgtgttaggtgccgctgcagtttatttgctgtttagttttgatacataatgcttatacgtttaacagagttccctgctggtgcaagaaaaaatcctgcttctttcaattgtaaaatactatagtatagntattctctcatgtcttcctcttatntatttcataac

SEQ ID NO: 220590 - DNA, 500 bp, Glycine max
  unsure (1)..(500): unsure at all n locations
gtcgataaagtctttagaagaggaaaagaaatggtcgaaagaacagaaatgggaaatgataagtcgtgtttgggtggagatgttgtgtcatgcagcaagccagtgtagagggtttcatcatgccaagcagcttagcagaggtggcgaattgcttacccatgtctggtttttaatggctcatttaggtataactgaacagtttcagatttcacaaggtcacgcaagggcaaagttgatacacagctaaaattgttttgtgtccaaggttttaaagaacggtcttcgaccaccattttatctacaacattaaggtttatgtgtgtccatgcattgctgttgcaattgtgactgtattgatcatatttaattttccacaatgtcaagaaagtggccacaatttaaaaaaccttntaaccgtatcacactatatantgttgtgttctaatatagtaaccttgtaatntgtgtgtngtatccaataataatgatattttgtatgt

SEQ ID NO: 220591 - DNA, 499 bp, Glycine max
acattacaaaatatcattattattggatacaacacacaaattacaagttactatattagaacacaacatatatagtgtgatacggttaaaaggttttttaaattgtggccactttcttgacattgtggaaaattaaatatgatcaatacagtcacaattgcaacagcaatgcatggacacacataaaccttaatgttgtagataaaatggtggtcgaagaccgttctttaaaaccttggacacaaaacaattttagctgtgtatcaactttgcccttgcgtgaccttgtgaaatctgaaactgttcagttatacctaaatgagccattaaaaaccagacatgggtaagcaattcgccacctctgctaagctgcttggcatgatgaaaccctctacactggcttgctgcatgacacaacatctccacccaaacacgacttatcatttcccatttctgttctttcgaccatttcttttcctcttctaaagactttatcgac

SEQ ID NO: 220592 - DNA, 486 bp, Glycine max
tttctcttcaaattcaaaactctatctatcatgctacgaactacatacaattctcaaatcaaaattcaaacatataatagtagtatcaggcattagcacacttcaactcacaaaccttacgcacattttttgaaacagaaaatgaagctctccgcgttgcagcagacttatctcacgcgccgggcgaacagcttcagaggatcggcgcagttggattcgtccggcgacggctctgtgaagtcgccggcggcgattttctggctggtaatccacggcgtctgctgcctcatcagcttggttctcggcttccgcttctcgcgcctcgtcttcttcttcctcttctccaccagcctctacaccgcgcctttccggagcggttcggaaatcgcggctccgcgtgaggtggcctcggcggtgaaccggacggcgacgtcggtggcgagcacggcgagccgcgtggtggtcgggcggacgggatccgaatcc

SEQ ID NO: 220593 - DNA, 565 bp, Glycine max
  unsure (1)..(565): unsure at all n locations
agacaacacagagagaagcgtcttaataaacgctcttctctgaaaaacctgatttcttctcttcttctcttctctttcgtttcgatcttcgatctctgaaaatgagagagtgcatttcaatccacatcggtcaggccggtattcaggtcggaaacgcctgctgggagctctactgcctcgaacacggcattcagcctgatgggcagatgccaagtgataagactgttggtggaggtgatgatgctttcaacaccttcttcagtgaaactggggctggaaagcacgtgcctcgtgcgatttttgtagatctcgagcctactgtgattgatgaagttaggactgggacataccgccaactatttcatcctgagcagctcattagcggaaaggaggatgctgcaaacaactatgcccgtggccactataccattggaaaggagattgttgaactntgcttggatcgcatcagaaagcttgctgaccactgcactggtctccaaggttttctggttttcaatgctgtgggtgggggcactggctctggtctnggntccctttgctggac

SEQ ID NO: 220594 - DNA, 575 bp, Glycine max
atgttcacaacttcacataaagctccaaaagtaccggaacaaggcaagttccacgaaaagaactaccatacacagagcacgaggaaaaaaaaaacaacacagacaaagtaacataacagtgcaaacttctaatcaataatcttctccttcatcaccatcttcttcagttgcctctgcaccgacttcctcataatctttctccagggcagcaagatcttcacgagcctcagagaactctccctcttccataccctcaccaacataccaatgaacaaaagccctcttggcatacatgaggtcaaatttgtggtcgatgcgagagaagacctcaacaacactggtggaattggagatcatgcacacagccctctgaaccttggcaagatcaccgccaggaacaacagttggaggctggtaattgattccacacttgaaaccagtggggcaccagtcaacaaattgaatagtgcgcttggtcttgataattcccacagctgcattaacatctttaggcacaacatcaccccggtacatgagacagcaagccatgtattttccatggcgaggatcacact

SEQ ID NO: 220595 - DNA, 498 bp, Glycine max
cgcttaacatggttacattaatacatatgtaatacatgacaacaacataatcactacattatgatgccattaaggtagatcacaatttcaaacatagagaaatacattgtaggctgatatagtacatcagatgcaatatggaaatgcctacttatttaaggacacactaacaaataaagacttaagtaacctatttggcaaaccagagaaggtggccctcagggaagatgtgacacactggagcagctccaggcttggttttaagcatttgtaaaaacacatggtttggatcccattctgatgtgtctttgtggcatacagctgcagctttaactctggttccatcttctccctccaaaggcataaaatgcgcagtagtatttgatatctcatgacacataaacacaacatatgggtaatccataggatgacaaacaatgaccttatcttctgctaacaacttcactccatctttcaccgagaattttggggacttac

SEQ ID NO: 220596 - DNA, 542 bp, Glycine max
ctcttctcggcgtccatcggatttttccaaggtaaaaagatgaatctgaagaacatgaagattccgaacgttccaggcggcggtgcgtcctctgcgctgctgaagcttgggcttcttggtggaattggtttatatgcagctgctaacagtctctacaacgttgaaggaggtcaccgagccattgttttcaaccgtctagttggtgtcaaagacaaggtctatcctgaaggaacacactttatgattccgtggtttgagaggcctgttatctatgatgtccgtgcacgaccccatctagttgagagtacatctggtagtcgtgatctacagatggtgaaaattggacttcgagttcttactcgccctttgcccaaccaattacctacgggttatcggacccttggagagaattataatgaaagggttttaccttcaatcatacatgaaactttgaaagccgtggttgcccagtacaatgccagccagcttattactcagcgagaggctgttagtcgggaaatcacgaagatctaactgaaggg

SEQ ID NO: 220597 - DNA, 576 bp, Glycine max
atttatattgtcatgaatgaatgagactacctactttacgtgagtcagtttgccatcaatttaactagtttgagtttacattgtaattaatgttgagagagttcatcgcagtatgtctatttgtgatttccattgcaaaggaggaagccaccaagttggggacggtcattgggattgatcttggaacaacctattcatgtgttggtgtttacaagaacggccatgttgaaatcatagccaatgatcaaggtaaccgtatcaccccatcgtgggttgctttcaccgacagtgagagactaattggagaggctgccaagaatctggcagctgtcaatccagaaaggaccatctttgatgtcaagagacttattggaagaaagtttgaagataaggaagttcaaagagatatgaagcttgttccttataagattgttaacaaggatggaaaaccttacatacaggtgaaaattaaggatggtgagaccaaggtgttcagccctgaggaaatcagtgccatgattctgactaagatgaaggaaactgcggaagcattccttgggaagaaaataatgatgc

SEQ ID NO: 220598 - DNA, 484 bp, Glycine max
agccaaccaaaaacaaattcaagcatttatcttttaaagtattttcggcaccaaaaatacaagagctggggaagcttttctcaacttccacctgttataaaaactttaagactccgcttaaactacactactgctcatcattcattgctacgcaagaacatctctagagctcgtcatgagaatcaccatcctcctcgcctgatgcaccaccacctggggctccacctgatctctgatatagcactgatgattgggttgcaaacagcttccacctctttgagcttctcctcatattcttctttctccacactctggttgtcatccagccattccaatgcttcttttactgcagtctcaattttctccttttcatcagactccaacttgtcagcgagcttgtccttgtcaccgatctggtttttcatgttgtagacataggtttcaagactgttgcgagcatcaatcctctccttcaccttcttgg

SEQ ID NO: 220599 - DNA, 497 bp, Glycine max
attcgggtcgggttagcgttatcggataacttcgcccataaattctctgtttacggggcgaaaatgacagtattcttagccacgaggctcgtgtttcggagatccccgccgcttctctggcggcgcagcttttctcgggcggcggtagaggccgaaaaggacactgttgccgtgccgtcgcttccgttgttcgattactctccgcctccgtatgcggggcccaccgctgacgagattctggcaaagcgcagggagtatctgagtccttccatcttgcacttctacaagaatcccgtgaacatagtggagggtaagaagcagtacctgtttgacgagaaggggagaaggtacgtggatgcgtttggagggattgctacggtgtgctgcgggcactgtcaccctgatgtggtcgaagccatagtcaaccaaaccaaaaagttgcagcactccacagttctctaccttaacaacgccatcgccgatttcgctcaagcttg

SEQ ID NO: 220600 - DNA, 431 bp, Glycine max
ttttttttttttttttttttttttttttttttttttttttttttttttttttttttttttttttttttttttcccaatggccaaattttcagtttgggcaataaaaaaaaaaaaaaaatggggccctgggaaatgataggcattagggaaaaaaattttaagcttaaacccggctccgagaaaagataaccgccaaaccaagaaaccccgggttgtgggctcttttttttggaaagaaaaacctcaaccaagaaacaccggggggggggctcaggcctaccccaaaaacacagtaaagggggcggcttttttagctatataaggccgcctttatgtaatttttcccagctttggggaagaaaaaaaacaggttcatttatgaaataaaaaacttttataaaagctgggatcttgggtcagcttcacatttt

SEQ ID NO: 220601 - DNA, 544 bp, Glycine max
gtcgaaaaaatggtatacaatatacggtaattgcttttacacgcacccgcaatgatttatctcataaatttagtaaaccgctatatctacctcgaatataaatacgtataaagtagacggacgttccagtcaaattttttcgtagaataaaatgtatgcctcacagcgaagaacttcatcaagggaaacttcacgcacatatgcatcacttgcctgataccatgtggaaccctcattctctttatcacccttcccacagttcctctggccccctctcacatacgcaacatagtgaccccctctcatagttccggagtgctccactaagccaaccaagtggtatgcatacttctcttcatttatgcacctgggatcaatatagggtctaatatccattgtttctctgaaattgacatggccatttaatttacttaagcgcccacgggcatcttggctgaatctcttcaagtgaatggtcaagacaggaggcgctctataaatgaggaccctcttagttgcatccctcttcactttcacacttttg

SEQ ID NO: 220602 - DNA, 506 bp, Glycine max
  unsure (1)..(506): unsure at all n locations
ctcgagccgattcggctcgaggttcattctgttttcctgttgaagtctttccctagccaatggccaccgatcgtttgacccgggttcacagtctccgtgagaggcttgatgaaaccctcactgccaacaggaatgaaattctggcccttctgtcaaggatcgaagccaagggcaagggcatcctgcaacaccaccaggtcattgctgagtttgaggaaatccctgaggagaacagacagaagctcactgatggtgcctttggagaagtcttgagatctacacaggaagccatagttttgccaccatgggttgctctggctgttcgtccaagacctgcggtgtgggagtacctgagagtgaatgtgcacgctcttgttgttgaggagttgcaacctgctgagtacctgcacttcaaggaagaacttgctgacggaagttctaatggcgactttgtgcttgagttcgactttgaaccatgcaatgcaaccttgcnccgcccaactctt

SEQ ID NO: 220603 - DNA, 488 bp, Glycine max
gatgaaggttcggcttaaaattgaattgatgggtaagactgccccaatttgaagcttttccaatcaagatccaaatcatgcaacaacaaaaaaaaaagcaactttttttttccttctttttctctcctcttatcgaaagcttaatcacaaaactaaaatcacggacattatttataaaactcaagtgcgacaaactccaaatgagaaagaaaaagccggttcctccatttctttatccaactctttatcctcagtttactcagcagcaaggggcacagactcagccaatttgcggtacttgagagcatagaacatcttgagatagcggcggctctcacggcggtcaaggttagacacatgcttccagaagccatagacaccggtgagagtgagaagcctctgagagtaaatttgccatgtgtacttctcttcaatacgctggagaccagcctttgagatcttggcccagtgagttgggtcaagcttgc

SEQ ID NO: 220604 - DNA, 481 bp, Glycine max
caactttggcttttcagaaaattcctaaatggtgggtgtggtattactggatttgtccagtggcatggacagtgtatggattaattgtctctcaatatagagatatagaggacccactttttgtgcctgggagtactactcaaaatttcactgtcaaaggatatattgaagaccactacgggttcaaatccgacttcatgggtccagttgctgcagttttggtagctttcactgtcttttttgcctttgtattttccttctgcatcaaggcactgaacttccaaacaagataaaagaacttcatcaatgttggaagtacaagttatgctacggcatgttgtaacggtctaaatgacctgtgaatgtaaataactgaggctggagttaatgctcaagatttattatgccacattataagcttaatagatgaccacgatagttttgctagcagagggttcttagcaagtgtaaatctatatca

SEQ ID NO: 220605 - DNA, 635 bp, Glycine max
attatttaatatatttggcatctcctactgtgacgagactgctaaacggcttgcctgctggatctcaatccagaagtgtgacaaggatggagacaacaggcttcgagtgtgccattctgcatgccaatcttataatctagcatgtggagcttctcttgactgctctgatcagacgcttttcagcagtgacggggaaggggagggtcaatgcaccggctcgggtgagatgaaattgtcatggtttaatcgtctgcgaagcagtttttctttgagaaatagttccttgaaaggaatatctgtaaaatataggcagctataacttttttttttctttttcttttttatcttttggggattcttggttgtaattttttaatccttagatttagggggttgttactcatccaaaattgtttaggaaaaaatggatgaggttgcagaattggctttcaaagaggagccttttgtagagaaaattgggaatctagagatagataaagtagaggagggtaaagaagaaaaggaggaaaaacagaagtaattgaaatgttgcatggttgggccaagcctaaatgaaaagggaaaaaatctgtcggtcataccgataataatataatcattgactctacttcctt

SEQ ID NO: 220606 - DNA, 576 bp, Glycine max
tgcttttggaagcaattcattctgctggtttttctggtgccttggcaaatcctcttttagcttcagaatcagctctaaatagactaaatggtacaattctggaggagtttgttgctgagaactatacagcacctcggatagtacttgcagcatctggtgttgaacatgaggaattgttatctgttgcagaacctctcttgtctgatctacccagtgtcccacgtctagaggagccaaaatcagtgtatactggtggtgattatagatgtcaaagtgaatcagggaggacccattttgctctagcatttgaacttcctggtggctggcataagttgaaggatgctatgattttgactgttcttcagatgctattgggaggtggtggatcattctcagctggtggacctggtaaagggatgtattcacggctatatctcaatgttctgaatgaatatccacaagttcattcaatttcagcattcaacaatatttacaatggcactggcatttttggtatccaagttacaacaggctcagatttgtatcaaaagccattgatatagctgctaatgagaa

SEQ ID NO: 220607 - DNA, 685 bp, Glycine max
  unsure (1)..(685): unsure at all n locations
tgttanannatgcacgtcagcgtgcagctgccggaatttaattcgccggagtcccacgagctcacttagtcgtgcggccggcccttttttttttntttttatttcaaatatctcagttcctgagtccattggattattgattgtggtttggtcaaagtgtgattcaactccaaataaatatgttctgtggagaacctatcaagatcaatggtttattgtaccccccgaaatatatgtagatcgtcgcaaatgtgtgcttagtgcacatatcacttaatttatttgacttacatacaaggattatgttaggggaagtttaacttttaattttacanctctttcagccgtacaaagactttgagttggtattcaatagatagacttcatatagtgagntggtatggaaaccaatctcattatggagacggaactttgagggctcacttgattcatagctttggaaccatagagaacatnctccatattgatgcnccattgtgagaggggaagaaatgagntttttgcgaaattgaagtgatatccctttgagggttacttcatccactggccttcaagaaatcctccacaggtttcctctcaccatatgtcaaaatttggcttcctatatcttctgaaacaaccattcttgattccaaattcatcaaaattgcagatttggtagcct

SEQ ID NO: 220608 - DNA, 550 bp, Glycine max
aacccctcaaactaactatatttatccattaagggatattcaatgcaattagcgaatgagagaatgaagagccggtggttcgtgtggcttttggcggtactaggcatcatcggagccacactcttcatagtgagcttgatccaaacctcggagaacaacttcctatgttccataacaagaacgatgcagcagcagcagcagcagttcaccgatggccccacatcgatgcaactcaaagccatcctccactacgcgacctctcagattgtccctcaacaatctctttccgagattacaataaccttcgacgtgctccaaagcctccaccgccccgccaacttcctcgtgtttgggctgggccgcgattctctcatgtgggccagcctcaacccgcacggcaccacgctgttcctcgaggaggaccctaaatggttcgggatcgtcaccaaggaggcgccctacctccgggcccacacggtccgttaccggacacagctccgagaagccgacagcctcatgtcctcgtaccgatcccgaacccgcgtgtttc

SEQ ID NO: 220609 - DNA, 519 bp, Glycine max
  unsure (1)..(519): unsure at all n locations
ccttcttctcttctcttggtttcgttctgtgcatctgccaaattaggattaggattagggctaccaataccaataccaataccaattctattctatggcttgctcaagcgcccaaatacacggtctcggaaccccttcctcccgaaccctatttttaggtcagaggctaaataccaaggccgcctttatcaagctcaagtccacacctagaagactccgccctctcagagtggttaatgagaaagtcgtcggtatcgatttgggaaccaccaactccgccgtggctgccatggaaggcggcaagcccactatcatcaccaacgccgagggccagagaaccacgccctccgtcgtggcctacaccaagaatggcgacaggctcgttggccaaatcgcaagcgtcaggccgtcgtcaaccccgagaacactntcttctccgtcaagaggttcatcggccgcaagatgtctgaggtcgacgaagagtccaagcaggtctcttacagagtcatcagagacgac

SEQ ID NO: 220610 - DNA, 513 bp, Glycine max
  unsure (1)..(513): unsure at all n locations
caaatatggtgttcacaatgtggttgaggcctctgatactagcctctgtttttgtatgggcagtggcaactccttctccacaaggatgtgatttttctcatggcagatggatcattgatgaagcttccttacaccctctctatgatgcctcaagggactgtcccttcattgggtttgattgctcaagatatgcaaggcctgataaggattatctcaagtatagatggatgccctctggttgtgatcttccaaggtttgatggtaaaaagttcttggagagaagcataggaaagaagataatgtttgtgggggactccataagtaacaacatgtggcagtcactcacttgtttgctacacattgcagtcccaaactcaaattacactttaacaagtcaaacacaggaacttttggtgttctcagttccggaatataaagcttcaatcatgtggttgaaaaatgggttcctagttgatttggttcatgacanagaaagaggtagaattttgaaat

SEQ ID NO: 220611 - DNA, 483 bp, Glycine max
aattaaaagctcatattcaaatttatgagagccctatttcctcaagggcaataaataaataaccaaggataacataaataaaggacaaatgagatgaagatactaataatttccaaagagaacagcatacaatatttcattccaagcatcaggaacaccagccagacaccagtgactgcagtcatcaaaagaagtgccacgccctgtgtagatagaggggtgaccatccctcctcagttgtgtgagcagagtgatgtctagcaattctgcaggctttgccatgttacttataacgctcttcacaatgtccgcaccaggatatggtggcattggtccttcatctggttgagtttgccttaggcacccctttttatcaacatgggaagcagcgattccctgaaacaagactctagtctttgaaggatcaatgttagaatcaacccatttagcccaagtactcagcccaatcttgaaagcttccat

SEQ ID NO: 220612 - DNA, 95 bp, Glycine max
aaaaaaaaaaaaaaaaaaaattaaaataaaaaaaaaaaaaaaaaaaaaaaaaaagaaaaaaaataaaaaaaaaaaaaaaaaaaaaaaaaaaaaag

SEQ ID NO: 220613 - DNA, 469 bp, Glycine max
aatttttctctcattcgcttcaaatttcaggaaatcaattatggctcaaccctcaacaagaataggccttgctggactggctgttatgggccaaaatctagcactcaatattgctgagaaaggctttcccatttctgtttataaccgaaccacttccaaggttgatgagactgtagaacgagcaaaacaagaaggaaatcttccagtttatggctaccatgaccccgaagcttttgttcattccattcaaaagcctagggtgataataatgcttgttaaggctggggcacctgttgaccagaccattaagaccctatctgcatacatggaaaaaggtgactgcataattgatggtggtaacgaatggtacgagaacaccgaaagaagagagaaatcggtggctgaattgggtctgctctaccttgagatgggagtttctggtggtgaggaacgtgctcgtaatggtccc

SEQ ID NO: 220614 - DNA, 497 bp, Glycine max
  unsure (1)..(497): unsure at all n locations
tgcctacggctatggtttgacatccacgttgttcatcattctgtcttgcactatcgcagtagggacaaacctcagccagttcatctgcattggtaggttcacggctgtaacgttccaagtccttggtcacatgaagactatcctggtcctgatcttaggattcattttctttggaaaagagggtctcaatctacatgttgttctaggcatgatcatcgcaatagcaggaatggtttggtatggcagtgcttcttccaagccaggggggaaagagcgtcgtagcttttccctccccaaaacacaagattatagttcactacctgtgtcctctgaccagattccgaggaatagaaaataatagaaactaattagagaaaaagtgatgaaacttctggtgaactgcatgaaaaaaatcaggtgcccattaggcgagctggttcattttctttataccaggagtgaattcccaattatttatagatcatggntatatcttt

SEQ ID NO: 220615 - DNA, 465 bp, Glycine max
cccacttggacttccacctctcccctttttctcaacgccatgaaaatagatatcagcaattgatcaaaggtcattttgtttttgtggctctgagaggggagtgattctaaactaaaatatatgggggctggggaagagagtacagctaaatcttctaaagtatcttcggcagctcagcaggagacaccaacagcacttgcatatcctgactggtcaagctccatgcaggcctattatgctcctggaggcactccacctcccttttttgcctcaactgttgcttccccaactccccatccctatttatggggaagccagcattctttgatgcccgcatatgggacttcaatcccatattcaactatatattcttcctggaagtatctatgctcatcctagcatggcagggaatccaagttttgtccaccaaagtacaaaaattgaagggaagggagctgatggaaa

SEQ ID NO: 220616 - DNA, 501 bp, Glycine max
gattccatagtcaactagtgaaagatttgaaaagttgaagcaggattcttaacatcacttgcaaaactaagttctgaacaaaagtgctcaagtagcctacgttttctattctaaggtactggttaatattacaaacaaatgacatgtaaaatcacaagggcaattacaattgagggttaatgacatagagttagtataacaaagaaaaaaactttatatcctattctcaattaagagacctggccattgataagaaaattctagctgcagattcgtcttaattaagaatctatcaaattttgccgttaccatcaaacactaaactgaggaactgaaatgcgttgctttctcatccaaggttagcaactgcttctggaccacacaaccgctccaactcttccttgatagaattattttctgatgtaagcttctcgcattcttcagaaagtctctgaagctcatctctgagagtttgattctcacctcccagcgactccaccc

SEQ ID NO: 220617 - DNA, 531 bp, Glycine max
gctcgcttcttcttctactgcaactgttgttcccactcaacacttcctttttcaatttcaccaacattctcttttcttcttccccaaaactgcgttttccaccttccaccggaaccgcaccgaaccgctctcactgccatgttgcaaaagcagacaccgtcgcctagaagcattatccagcaaacaggatcaactctgggtcagcgaagaagaattggagctagaattggaagaaggagaagattcgtatttggacggtgatgatgacgacgacgactcgtcgtttttgtcgctcagcgacaagcccgacaggaacatggccatgctcgacgattacgagggcgaggagctcgactttgattacggtcccgaccaccgagcgggtatgtggcgttacttgggaagcaaatgtgggaagagtacactggcgaaccaaatgctagggcaaaagttgtcaatagttacagataaacctcaaacgacgaggcatcggattctgtgtatatgttctggcacggattatcagatgat

SEQ ID NO: 220618 - DNA, 486 bp, Glycine max
ccatcttcacattatataacacgtatttggcccccataaccatagggattaaaaagcccttcatcttgtcgccaatttgctctaaccttcacttcaatctcaagataaactttcttctgtaaaaaatcttcaacatcaaggcgggcagctgttgcaagcagtttcaaagcctttccttcttttccaataaggataatcttctgagggtttttctcaaccaaaatctctacttggatgtattcttttgcattgggccgagctttatagtttacaacatttacctgacatgcatatggaatttcatttcgatactgcataaaaatcttttctctaacaatttcagctacaaaaaatctctctggatgctcactgacaatatcctttggataataagctggtccattgggaagctttgacagtatccagtccttgacatcttcaaccccctgaccatattgggcactaacaggtataacctcatcaact

SEQ ID NO: 220619 - DNA, 391 bp, Glycine max
aacgaccggagaccgaacaaccgtttgtgcgtgaaagcctccgacaaagagatggcctttgaccaccattcccgctctgctatgcaggccgtcagtgaccacctcgccgacgctgttgggctcactgttgggcccagagggaggaatgtagtgtagtatgagtatggaagggctagaggggtcaacgatggtgacaccattgctagcgcaatcgagcttcccgatcactatggggaatgctggagcagctcttatcagagaggttgctagcaagactcacgactctgctggtgatgggactaccacggctaagggtctcgctcgcgagataattaagctgtggctcttcagtgtgacttctggggcaagtcctgtgtcccttaagagaggg

SEQ ID NO: 220620 - DNA, 471 bp, Glycine max
atcaaatgagtacgttgttccaatcttaaaggggaaccaaaattaagagcctaaaactacttatgcttacaacattaaaacttgaagaaaaatatcaaatgactaccttattttcaatcattaaacatgccatgactagaatccaatattataatctcttttctttcatcaagcccgacaaatgtaaaactgtttacaaatacattttttttttcgattgaacagaattcgaacacatacgcactttcaattttctgcacaaaactgttctttgccgtagccctacagcctaaaaatgaaacggtatggacttgtggggcaccagctacaggtgccttgggcttaggtttcttcaccacaatggcctgcgaggtcaacaccattccagcagctgaagcaagattctgcaaagcacacctagttaccttggctgggacgataactcctgtctgcactaaattctcatacctg

SEQ ID NO: 220621 - DNA, 437 bp, Glycine max
cagccatgtcgatcttttctattccctcaccaacgtaccgttgttcaatttcaatttcaatttctcggcagccattgccatgttctttcacggctcaagtgagaagaagagggaaagggaaagtggtaatgagcatggaggcaggcattggagtgatgggcaccaagttgggtatgatgagctatttcgaatccgacggagaggttgttcctgtcactgtcgtgggtttcaaagaaggcaacatcgtcacccagatcaaaactgaggccaccgatggatacgacgccgtccaggttggttaccgaagggtcagagatcgcaaattgaccaaacccgaaatcggtcatctccagaaggtcggcgccattcccatgcgccatcttcaggagttccgtcttcaagccgtcgatggcttcgaccttaaccagcgccttctt

SEQ ID NO: 220622 - DNA, 501 bp, Glycine max
gcaaaatctaatttggctaattgattgaaagttttggtttacttgtacttcattctctgtattttgatttccctacctctggcgataaatataaccgcggtgtgggaaatcaaaaattgtatcgagtaagatgatactgaagtcatactagtaaggtgctgtataactcaatgaatgtagtgggttgaaagaagcaatagtagtatacataaacttgcaactaaaaggctaaaaggaaggcacaacaaatacacagacaagttaagagaaaagatatgctaattctttggaatgttcttgccgacaatcttggctggagttatccttagaagattgcctggcttaccagggacagcacctttgatcatgaccacattaagatctttatcaatttttacaatcttaagctttcttatcttcctcttggttcctcccatccggccaggcatcttttttcccttgtacacacgaccaggtgtggttccagcaccaattgatcct

SEQ ID NO: 220623 - DNA, 526 bp, Glycine max
cttcaactacctctcccgcattctcgcttcctcaactgcacaacattcctattcaattccagaggaaagaatcatgagttgtttcagctgttgtgaagaagatgactaccagaaggcttctgaaagtggaggacagcatgtagtaaaaaactcaacaggaaatcatggaaatggtcgtgcatccgaaactgcaaagcagggcactcaagctgtgaaaattcagcccattgaagttcctgaattaccagtggatgaactcaaagaaattacggatggctttggagaaagttctttgattggagagggatcctatggaagagtatattatggtgttctgaaaagtaggcaggctgcggcaatcaagaaattagatgccagtaaacagcctgatgatgaatttttagcccaggtttcaatggtttcacggctgaagcatgacaattttgttcaattgcttggttattgcattgatggaaactcccgagttcttgcttatgagtttgcatctaatgggtctcttcatgat

SEQ ID NO: 220624 - DNA, 491 bp, Glycine max
  unsure (1)..(491): unsure at all n locations
gaattgacttattagaatgtgtatttataacacttaatcaaaactaaactatggtaaagcgtgaaaaataccattgcctaattacagttaaatgaattttaaccgttcacaaaactgatacacaaagtcttcttaattgctaataggtcctacacaagtttgtaattacacaacaataatataaacatgttcaagcaattttccatccgcttctgaagcagtcactttcttatatctcgggtgcagacttagacttatgcacatactcgttgatacatatagacagagattagtttggagtttcaccagcaggcccgtgtcttgcgttcaacaaaggttgaagagctttaactacgatgctcatgtttggtctgaaatcagcttcgtattgcacgcacagggcagcaacagcggccatcttatcaacagctntgggcaggtactctcctcctagtcttgcatctacacactgtctgactttatcctcactg

SEQ ID NO: 220625 - DNA, 517 bp, Glycine max
  unsure (1)..(517): unsure at all n locations
tgtctctctttgacggtggtgctgtcagcattgacctcagcttgagcagtaaaacatcatcagcactactacggtaccatggctgagctgcaatctttcgtttcggtccacccagattctcactttcccatacagaacctcccttacggagtcttcaagccccaatccgcttcgcctcctcgtaccggtgtcgccatcggcgactttgtcctcgacctctccgaaatatcttccgctggtctcttcgacggtcctctcctcaaaaactccgatgcttttctccagcctaatctaaataagtttgtatcacttggaagaccagcctggaaggaagctcgtgctactcttcaaaagcttttatcagcaactgagccaaccttgatggacaatgcggttttgaggcagaaagcacttgtgcctatgagtagtgnggagatgcttctccctgttgctggtggggactacaccgatttctttacgtctgtgcatcacactaaaaactgtgggatcatatttc

SEQ ID NO: 220626 - DNA, 507 bp, Glycine max
ataagtattggtttattgcaatggtggatccacactacagcataaaaaaagaaaaagtttaatactcataaaaaaccagctttattaaagtcatattatgcgccgagtaaattaaacaagcaggctcttgattgtacaactcctcccaccacaactggaaaagactatggaatgatactagcctcatggagctgcgggtacaatcttgcctgagcaagtaccaaacccaacagagtaaccatttcccttgcaatatccagttaagatgacttcgtctccatcttcaagaaatttgcgatttaacccattcactgacactgtgttttgtccattccatgttaattctagcaagcatgcacgggactctggctcaggaccactaactgtcccagttccaaggagatcgcctggcctaaggttgcaaccgttgattgtatggtgagcaagttgttgggtcaatgtccaatataagtgctttagattagtccgtgacaccacacgctgatc

SEQ ID NO: 220627 - DNA, 528 bp, Glycine max
tgatgaacttgatgattttgcaatgggcagaagtcgtggtaatgataatgagagtgcaaatggtcttcctgatgaagaattagagatgaactctgctgctgcggctatgaaggaggccatggatagagctgaagccaagtttaggcatgcaaaggaagttagggagagagagtattcaaaggctgctaggagcaaagaagctgtgcaaatggaaaaagatgagagaactgtgctagaggagcaagaaaaccaggaaaggtttgaccgagaacggcagcaaaaggagaaggaaggaaaggagcagaggagacttatgaaagaaagggaggagaaagaaagagaacaacagcgactagagagggaaagggcaagacaggctgtagaaagagctactagagaagcacgtgaaagagcagctgctgaagcacggcaaagagctgagagggctgctgttgagaaagctaatgctgaagctcgaggacgtgctgaaagggctgcagtgcaaagggcacatgctgaagcccgaga

SEQ ID NO: 220628 - DNA, 567 bp, Glycine max
acaatattattctcctcattccttcatttttaaacctagctccatctccctccactcaccataacatggcatcagaagcaaatgctgccaacaccaacttctgtgtaaatgttagcaacaatggctacattagtgctaatgaccccttgaactggggtgcggctgcggaggctatggctgggagccacctcgacgaggtcaagcgcatgctagaggagtaccggaggcccgtcgtcaagctcggtggagagaccctgaccatctcgcaggtcgcggcgatcgcggcccacgaccagggggtgaaggtggagctggcggagtcctccagggccggtgttaaggccagcagtgactgggtgatggagagcatgaacaagggcactgacagctacggcgtcaccaccgggttcggtgctacctcccaccggagaaccaaacagggcgctgccttgcagaaggagctaattaggtttttgaatgctggaatatttggcaatggtacagagtccaattgcaccctaccccacacagcaaccagagcagctatgctagtgagaatcaacacac

SEQ ID NO: 220629 - DNA, 485 bp, Glycine max
aagagataacatccttcacatggaaggccatgtattgatatttgcacgcaaagctacggcaaacaaatggaattctattacattatgaattacaagttccttgcatggcatacatcaaggaaaactgggaagttgttgtatgtggattgatttgccacagccttatatagacaaaccaaatgcttaatatcaacacaaacacgtgtacagaaaagaaaccactcttcaagaaaacagaaaataagaaaaactaacatattggaagaggtgccccattccactccccaaggcattccaaaagtggatcaatgatcttcccttggcacaaagcagtgaacactttgtcacactcttcacccggtgagataaccctttcaccagttagcaatgctgtccccaactcctctctcacaaacttgtacaaggggtaagacctgcattccttgatcttgtttggaattgcacattggtcattctcatatgca

SEQ ID NO: 220630 - DNA, 484 bp, Glycine max
gagaatccgaggcgaagagaagagaaaaattaagatggaggggaaggagcaggatgtgtcgctgggagcgaacaagttcccggagagacagccgattgggacggcggcgcagagccaagacgacggcaaggactaccaggagccggcgccggcgccactggttgacccgacggagtttacgtcatggtccttttacagagcagggatagcagagtttgtggccacttttctgtttctatacatcactgtcttaaccgtcatgggagtcgccggggctaagtctaagtgcagtaccgttgggattcaaggaatcgcttgggccttcggtggcatgatcttcgccctcgtttactgcaccgctggcatctcagggggacacataaacccggcggtgacatttgggctgtttttggcgaggaagttgtcgttgcccagggcgattttctacattgtaatgcaatgcttgggtgctatttgtggcgct

SEQ ID NO: 220631 - DNA, 442 bp, Glycine max
ggcccatgacgcaacacatgcaccacctaataatcataattttacatttttacatacaaaatacaaagactttaaattaaaattaaaaaaaaaaagataaaccgatcattttggtgaaatgaaaccgaaacccaaaaacattggtttgattttttttggtggtcccaacttgattaaacatgaacggtttgattgaatcacttggacttgaagggaatggccctgattaccacctggtggtaaagtgctgcaagtgcaacaccaatgaaagggcccacccagaagatccagggatcatcccaaccaaggtccttgttgaagatgatagcagcaccaagactacgagcagggttgataccaatgccggtgatagggatggttgccaagtgaaccaaaaacaccgcgaacccaataggcaaaggtgccaaaatggggacgtgag

SEQ ID NO: 220632 - DNA, 546 bp, Glycine max
  unsure (1)..(546): unsure at all n locations
aattaagtgagttacaacaactgggggccacagaaaaggaaattaaagaggttatgaaggacttgggcattagcagggcaaagttatatggatggccaaacacatatgtattcaccaaggcaatgggagagatgcttgtggagcaactaaaaggaaacttatccgttgtgaccattcgtcccaccattgttaccagcacattcaaagaacctttccctggttgggctgaaggtgtaagaaccattgacagtttagctgtagcttatgggaaaggaaaattaacatgcttccttggagatctcaaagcaattgttgatgcgataccagctgacatggtggtgaatgcaatacttgtggccatggtggctcatgcaaatcatcctagtgatgatgttatatatcatgttggttcctctgttagaagaccactaagatatggcaatcttcaagagtatggctntagatatttcacagcanaaccatgcataaacaaggatggaaggccagttaaggtttgaaaagttacagtgttgagcaacatggata

SEQ ID NO: 220633 - DNA, 508 bp, Glycine max
aagcaaattaaaattaaaatatgtgatgttgggtacacttgatcaaagttttgaaacacatttggcagctagctaacacaattatactgcccttgagaaacaaataacataactataatgtgactcttctagctagtacaaatttgaacataataaaattactagtttcaaagctctatatatcacttcaaaatgtacttcaccacaccaggaagatggatgttcaaaaagtaatcttcccaatcaatcagttcggggtcaaaataaaacaaatctgtctccaccccaccttgtcttgctgccattctcaacttctctgtgttcatatcatcaaatgcagctttaaagaacaagtaaggcttgtaaaggtccaccaaccgcatcacaatctgaatcttcctattgagattaagatatgttccttggaaatactggcaaaatgcagtattggccagctcaagtccctttaacacaagcaggtagcgaatgaacatatatcttctgaagc

SEQ ID NO: 220634 - DNA, 565 bp, Glycine max
cttccctttccccttcttcttcctctacaaatatccaatagcagactaaaccctagcatagcagtagcagtggaaaatggatgacgaggagagagagaggcttctggagagggagagattgcaaatccaggtcattcgccagctcgatctcgaggacctcgtagtcgaagaagtcgaccactccgacgaagaagacatcgacggcgatcccgacgaggagtatgcgcttttcctttcgcaataccatttggatgcttctcttcctcctccctcatctgccgaattcaatttcgatacctatatcgcgcctttgcatacctatctcggtgatgtcgaagacacgcgccacaggactgcgttcttggacggtggcgccatattgaaccttcccctcttttgtctcggaggagttgtactttttcctggggctactcttccccttagagttattgaacctcatttggtggctgctgttgagagagctttaactcaagatgatattccttgtaccattggtgtggaggttaactctttgtggttattcatgcctggaatctgtttaatt

SEQ ID NO: 220635 - DNA, 543 bp, Glycine max
atttggttccaatgaaacaatcttcttctccggggcacttggccttagccttagacaatccacgtagaacacttcacgtgtcttgtggctccacatcaccacatgcttcccagagatcatcaattcaggggggtgaagcttttttcaggggtgtgttggaaagtatgcaatctgtttacttgaacagaaatcgtactgctaaggccatattggaccttgttcactctgctgagaataactcattatgctatgatcatcttgcattcaggacatttggggtgaatggttatggaattgattccatggctagtttttttctggattatggctatacacaaagggaagagttgaggtttccagccaaaaagttgagggctttgtggttttctcctcctgctgattcactggctagcaatggcagtggcattaatgggcctttgccaagaatatttatatcagagctactggtagatcaaatgagtccacaaactcaggaaataattaaaaaatacaccgaatcatctgtggatggaaacaagtatg

SEQ ID NO: 220636 - DNA, 507 bp, Glycine max
acaaattgaaagggagaacacactttattatatgaaaaccgagagcattcaaatacaatagtgcagaagttcaggcaataattacgcatagacatgcataaagtctatgttattcagaagtacaacatagataaggaaaccacaaactctttttaattagatagagatactgttgggaattcctttgaaagtcaacccttcctcacttgaacgatggagcaaagtgtatggcagctgaactggcccagtccggtttctcagacttggatcactgttccttgcattgatttttccttcaattccagtcagtttgcttccaaaccttttgaaagcttctaatgccttcttatcagtagtccaatttggagtctccctctctccaaggtatatctcatcagaagcatgccttgacaatatctctatcactgaaagatcaataagggtcttaaacttgggtgtgattggtctcagataagccttttgaggattcttcaccaattcatcata

SEQ ID NO: 220637 - DNA, 317 bp, Glycine max
taaatttgctgtcgctgctgttgctgctcctgctgctgagtctggtgctcctgctgcagccaaggaagaggaaaagaaggaagaaccagctgaagaatctgatgatgacatgggtttcagtctgtttgactaatttatgtaatgcttttgttgagtttatttggttagaattgaagttgtgtttgcctttcatttcaggtgttattttagtgtattcatgttacattgcaactacttttaatttccatagttaattaaagcttcaaaaaagaagaataatttcactttaataagaaaatgtatgaataaattaaaag

SEQ ID NO: 220638 - DNA, 249 bp, Glycine max
ggaaattaaaagtagttgcaatgtaacatgaatacactaaaataacccctgaattgaaaggcaaacacaacttgaattttaaccaaataaactcaacaaaagcattacataaattagtcaaacagactgaaacccatgtcatcatcaaatttttcagcggggtcttcctttttttccttttccttgggtggagcaggagcaccaaacttagcagctggagcagcaacagcagcgacagcaaatttactt

SEQ ID NO: 220639 - DNA, 549 bp, Glycine max
ttctaaagctagtaagtagtaagtagtaagccactatcgtttctctctaacagcaaaaaagttctaacctcaccaaacccacactaccatgggtaatgagaatcgcgagcttcacgtattattcttccccttcccagctaatgggcacataataccaagcattgacttagccagagtctttgcttcaagaggaatcaaaaccaccgtagtcaccactcccctcaacgttccactcatttcaagaaccataggaaaagccaacatcaaaatcaaaacaatcaagtttccttctcatgagaaactgggttgcccgaaggttgtgaaaattccgattctgccctctcctctgacttgatcatgacgttcctgaaggccaccgtgctcctgcgggacccactggagaatctgatgcaacaagaacatcctgactgtgtaattgccgacatgttctacccctgggcgacagactctgccgccaaattcggcattccgagggtcgtgttccatgggatggggttctttccgacatgcgtgtcggcgtgcgtgcgg

SEQ ID NO: 220640 - DNA, 433 bp, Glycine max
aaaacaacccccgggggtttttttagcaaatcgatcatcacaatttcccacaaaccggcctaaggttacatgcctacctgacccaacaattattaacgggccccccaccccaaatcctcgatcaaagagttgaaatcggtggaaaaaaaaccttcttccttcacaaaacgctttgccatttgagcaagcctttttgctctggtcctaatttccttgggctcctttccaaccatgaacctcctcacagcctttttaaccgggttcttttttacaggggcccttcccattatcccaatccacgtttgaacccctaccctccccccaattttaactatggccggcaaaaacttaacattggaaaattgctttgggaacattggccatgtcaccattgggacccctgcacaccccccctccaatactgagttccacc

SEQ ID NO: 220641 - DNA, 506 bp, Glycine max
gaaaagaaaagtcgcataacatggttacattaatacatatgtaatacatcacaacaacataatcactacattatgatgccattaaggtagatcacaatttcaaacatagagaaatacattggaggctgatatagtacatcagatgcaatatggaaatgcctacttatttaaggacacactaacaaataaagacttaagtaacctatttggcaaaccagagaaggtggccctcagggaagatgtgacacactggagcagctccaggcttggttttaagcatttgtaaaaacacatggtttggatcccattctgatgtgtctttgtggcatacagctgcagctttaactctggttccatcttctccctccaaaggcataaaatgcgcagtagtatttgatatctcatgacacataaacacaacatatgggtaatccataggatgacaaacaatgaccttatcttctgctaacaacttcactccatctttcaccgagaatttttgggac

SEQ ID NO: 220642 - DNA, 518 bp, Glycine max
agtacatcccttttttttttctttccattattcaacaaaagtatttacatatctggaaggttatttccgtctatagagacgttaatacaatagataagagatgaactagcctaagaagtttgaggcctggtttattcagcaaatatctgctcaaacaaacagagactccccacataagttctaatcacatattactgctgagtttttccatatagcttgatcagatatagctactcaactctattttcttcctactaaatcagttttaagtcattcattccctcttgacatcagattcttcagtccttgcaaatcttccacggattcttggctgactgtcagcaagtgccttcctgcaagcatacttgattttcctcccaaaattcctctttggcttcttattcctgtatctggagagcttttggaagcgttcctcactggtgcagttgctgataagaaggggcctctcaaggggtgattggacgatgttcatgttaccattaccaagagtctttata

SEQ ID NO: 220643 - DNA, 508 bp, Glycine max
attgaatctcagaattctctaaaagagatctttttctgctctttgaagaaagaagggtctttgcttgattttggagatgtctctgctctcagatctcatcaaccttaacctctccgataccaccgagaaggtgatcgcagagtacatatggatcggtggatcaggaatggacctgaggagcaaagcaaggactctcccaggaccagttagcgacccttcagagcttcccaagtggaactatgatggttccagcacaggtcaagctcctggtgaagacagtgaagtgattttatacccacaagccattttcagggatccattcagaaggggtaacaatatcttggttatctgtgatgcctacactcctgctggagaacctattcccactaacaagaggcacgctgctgccaaggttttcagccatcctgatgttgttgcttgagtgccatggtacggtattgaacaagaatacaccttgttgcagaaagatatccaatggcctcttggg

SEQ ID NO: 220644 - DNA, 454 bp, Glycine max
catatattattattatacttcacaatcagcatttctttgttcaagactgataataaccattaaattattgtcattgtaacaatcggaaaacgagggaaaggaatagaagaaaacaatgaacaacccttgccagttagttgcaccaaccaacaaggcaccaaccatagtaccaatcaaaaggtaaaaagagagagagaccaaatcctactaagaaaagcataactgttcctttccatccaaagggagaaagcatgcaggttttgctcatggcttccacagaatggttgtgtctgcaatcatggaagtaaccacgtatgggtccatgttggaagctggccttctgtcctcaaaatatcccttccctgctttctctgtgtctctcccaaccctaacagaagctccacggtttgcaactccccataagaaggtgttgatgtcagcggtttcgtggcgt

SEQ ID NO: 220645 - DNA, 552 bp, Glycine max
gttggtgtcatgatggttagcaccaccttggtgacccttgtgatggttttaatttggcagaccaacttatttttggcattttcttttgctcttgtatttggtacagtggagttaatttacctgtcttctgtgctatccaaaatcattgagggtggctggcttccacttgcctttgctacctttttcctctctgtgatgtacacatggaactatgggagcgtattgaagtaccgaagtgaagttagagagaaggtttcagtggactcaatgcttgagcttggctccaatcttggaacagtaagggtgccaggaataggattgctatataatgaacttgtccagggcattccctccattttcttgcagttcctgctcaaccttccagctcttcactctactatagtttttgtctgcattaaatatgttccagtccctgtggttcctcaagaggaaagatttctatttcgacgagtttgccccaaagattaccacatattccgctgtgtcgcccgatatggctacaaagatgtaagggaaggaagatcaccatgc

SEQ ID NO: 220646 - DNA, 465 bp, Glycine max
ctcgagccgaatcggctcgaggaaagttgaaagaaataagcattggattgggtatgagtgagtcggagaatagagagatagatggcgaaatcggggaataagaatatgggatcaaccgcaaaagttcacccttccaatgatcccgaactggatcccgattcttacgccctggagaagttcagactctacgaaaccagagcgaggttttacctaatcggaagtgatcggaacaagaggttcttccgggtattgaaaatcgatcgatcagaggcgtgggatctgaatatcagccaagaccccgtgctgtattctccccaggaaatcaagagcttgctccagcggattgctgaaggtaacagggccactggcggcctcacttttgtcgtaaggttttcgggattgctggctgcatcaagtttctcgagtcctactatttgattctcgttactaagcgcagacaaattg

SEQ ID NO: 220647 - DNA, 500 bp, Glycine max
aacaaaaaaagaatcaaatttctaaggcctggggattgataagaaaacttgcaatgacttttgtacaaggaactacgagttaaaatggtacagaaataagttttatacatgtcaaaacaatgacccatcatatccttggtactttttcgtccccagttaaccatctcgtcagccagctcggatcatcaacatagaatttacaagatttgggaataatcccaaggtcagcaccaacttggtcatactcctttagagctgcttccatttctgctgcaacgacagcatcattaacaatttcatatgaactcgtgcttaaagcatctgcatagtgttgctccttctcagggtcattttggaaaagttccaaggcaggtccctgacataactcagcataatgtttatatatctcactgctttcatcttgatcgccgaggagactacctccataccaaccgttggcctcatttgttgaggtcattgtaaggtacctttggaaaaca

SEQ ID NO: 220648 - DNA, 513 bp, Glycine max
gtcaggagatattcaaattatagtaaatgggaagtcatgccttttgagagtttgaggaaagaagcacgggatcattataaccagatgcaaggggtctctgtatataaaatggatggcaataagttggatgatctagtctgtgtgagacattccttaaaatccgaggtgtaaatgggtgcctttgctgtctatattgtttttctctgatcacaccctactgtattctaaatggaatctgggatgaagatactttccgagggcttcatggctcctcatccatcgttctgtctcatcacttattgcagagcacaacacgaatctcaactccaaggaaaatgaggtagtcaatatgcgtaatttcatcgatccatatgattcatattttaaagtgattcatggtaaggggtctagaaatcttaatacaggaattctgaccagagatttgttgtaccatttttttcaggtttacaatggatagtgcttagtccatagtataatagatatctggctttt

SEQ ID NO: 220649 - DNA, 493 bp, Glycine max
  unsure (1)..(493): unsure at all n locations
gttgttgtatactataatagcagaatcgtgagtaacagcagagcagaacaccgataaatcgctatgactgctcagacccaagaggagcttcttgcggccgaccttgagcaacaaaagatccatgatgatgagcctgtagttgaggatgatgatgaggatgacgaagatgacgacgatgaggatgacgacaatgttgaaggtgatgcatctggtaggtccaagcagaccagaagcgaaaagaagagtcgcaaggcaatgctcaaacttggaatgaaacctgtcacaggtgtcagtcgtgtgactgttaagaagagcaaaaatatcctgtttgttatatcaaaaccagatgttttcaagagcccgacttctgacacatacattatattcggcgaagccaagattgaagacttgagctcacagctacanactcaggcagcagagcaattcaaggcttctaatgtgagcaatgatggatcgaagcctgaaacctctg

SEQ ID NO: 220650 - DNA, 507 bp, Glycine max
ggggttacagctgaatcttatcaagaggacaacaaattatggaaaaagcatgttaacgcttacaaaagaatgaataaattgattggcactactagatatcggaatgtgatggacatgaatgcaggccttggaggatttgcagctgcacttgaatcacaaaagtcttgggtgatgaatgttgtgccgtcaattgctgagaacactttgggtgttgtctatgagagaggtctgatcggcatttatcatgactggtgtgaaggcttttccacatacccaaggacatatgatcttattcatgctaatggtttattcagcatataccaggacaagtgcaacctagaagacatccttctagagatggatcgcatcctaaggcctgaaggagcaatcatcatccgggatgaagttgatgttcttaaccaggttaagaaaattgttgggggcatgagatgggatgccaaactggtggatcatgaggatggccctcttgtgcctgagaagatattg

SEQ ID NO: 220651 - DNA, 396 bp, Glycine max
ctcgagccgctcgagccggttgtcttcccttactggcttatcactgttctcatcatcattctcttcatagggacttcttcaaggtcattctttaaaggaattgagatgtggagggaagagactattttcaagagagaaaagaccaagcaacgggcgacgttggttgattctcatggtgaagataagacagttagaatcgacacaaaatatgaaccgctgattcctaaagaagagaagtcaactatacaaattttatgtctcaaccttaggtggaagaggattctggtactgattgtggtgtgggttgctttccttctagttcaagtcatcaagaatgatgtagaggcatgcagtccatggtattgggtgctttttggcttgcagtttccaattgca

SEQ ID NO: 220652 - DNA, 554 bp, Glycine max
ctgagattggatgctagagttttgagaagaaaagagaagatcggtgagtgaggaagcaaatagcaatagcaccgccaccgtcaccactgccactgccactagcaacagcagaatgggaaccttgggcagagttttctacgccgtcggattttggatccgcgagaccggccaagccatcgatcgcctcggctctcgtctccaaggcaactacctctttcaagaacagctgtctaggcatcgacctctgatgaatctgttcgacaaagctccctcggttcacagggatgcatttgtggcccctagtgcctccctcctcggcgatgtccacgttggccccgctttctccatttggtatggatgcgttctcagaggtgatgttaacagcattactattggatctggaactaatatacaagacaattctcttgttcatgtttgccagtctaaattgagtggaaaagtcttgccaactattattggagataatgtcacttgaggtcatagtgctgtgttacaaggatgtaccagtgaggatgaggcatttattggcatgg

SEQ ID NO: 220653 - DNA, 540 bp, Glycine max
  unsure (1)..(540): unsure at all n locations
cagtacattgctgccagtggagggcagaggcttcagaattcgattaacaatgcgtatgccatggggaaggtgaggatgatagcctctgaattcgagaccgcaaacaaggtcacgcgcagccggaactcctccaaggccgcggaatctggtgggtttgtcttgtggcagatgaacccggacatgtggtatgtcgagctcgctcttggcggcagcaaggttcacgccggttgcaatgggagactagtgtggcggcacacgccctggcttggtgctcacgcggccaaagggccggttaggcccttgcgacgtgcccttcagggtcttgacccaagaacaactgcaagcatgtttatcaatgcaagatgcattggggagaagaagataaatgaagaggactgtttcatcctcaagctttttgcagacccctcgacgttaaaggcaaggagtgaaggtccagcggagatcataaggcatgttntgtttgggtactttagccagaaaacgggactcctttgtcacctggagggactccattgacac

SEQ ID NO: 220654 - DNA, 480 bp, Glycine max
  unsure (1)..(480): unsure at all n locations
cttcattcctctcattccctctgaattcttctcactcttcagatctctctcccttccttccatcccaaccacaaggttgctgagaagacataaaaaatggtgaagatttgctgcattggagctggctatgttggtggcccaaccatggctgtaattgccttgaagtgtcctgagatcgaggtggtcgtggtggacattgctgcaccgcgaatcaacgcgtggaacagcgaccacctcccgatatatgagcctggccttgatgatgtggtgaagcagtgcagggggaagaatctcttcttcagcactgatgtagagaagcatgttgccgaggctgacattgtctttgtctcggtgaacaccccaacgaagactcanggtcttggagccggcaaggcagctgatctcacatattgngagagtgcttgccagatgattgctgatgtatcgaaatcagacaagatcgtggtcgagaaatcgact

SEQ ID NO: 220655 - DNA, 488 bp, Glycine max
ggtccaggtttctcttattatatttctctcactttttccttgcattgctgcagtaactattgaaaaattgcaactcctcaaatacgactttcgcagaacattgcatactatagcagtcgagaagaacaactaacaataatgcctgtaaacagtggtcgaacgcaatccgatggtgtccttatttaacaacgaaagtctacatgtatgaccaacataagcaccatgggtccaaaagacaaaaacacaagcttcataacagtaggaggagattgcattcagcgaagtttacaggatgctatcctacaatcccaccttcgttacttagtgcgcactacgcataattccatgcaagtaaccaccagtcattatgagggacacaagtgacacaacacctgctggaaagacctttcctgatttcttgaaacgagaacccatcaccccaagaagtgcagcagatatgccaaggccaacagatgatgcgaaaacag

SEQ ID NO: 220656 - DNA, 508 bp, Glycine max
  unsure (1)..(508): unsure at all n locations
cacgcagtctcgcctccgttttcaaacttcagcaccagacagcttccgccacctctcagacatggcgagcgagggtggcaacaagagcttcgcgcgtcgtgaccggctgcgcgagatcgaatcgaatgtacagaaatggtgggaagagaaagatgtcttcagagccgaaccgggcgagaagcccccttcgcccggcgagaaattcttcggcaacttccccttcccttacatgaacggctacctccacctcggccacgccttctccctctccaaactcgagttctccgccgcctttcaccgcctccgcggcgccaacgtcctcctcccctttgccttccactgcaccggcatgcccatcaaggcctccgccgacaaactcacccgcgagatccagcgattcggcgacccgcccgtcttcccatccttcgaaatcgaagaagagccacaacaacaacagcaagaacaagatgaaccttcttctggcgatggtgctcctnctgataaattc

SEQ ID NO: 220657 - DNA, 466 bp, Glycine max
ggaaaaaaaaaaagatttaaacctcaaattaagccaaaaagaatttaacactaaggttcagaaactcatccatgtctacatatataacaaataaaaataaattacattcgtgtttagatgaccaaaaaatgaagtaggaattgggaactagtttaagaaaagaaaagtttccagaaactcacccagtagctactgagttaaaaagatagcagttggttttcccggagatggaggattttgatttagtaaagaagctagtggtccagctctggccaaggaataaacatctgctgcagataaaatttccacatcttctaaacctatctgtctcttgatcaagtccaagttttccttaaaaaccttaatttcaccaaacggcaatttcaaatccagggcttgaggcccaagtgcaattgcttcctttttcttaaacctcaagaaaggcatacaacgcttttggatttgt

SEQ ID NO: 220658 - DNA, 547 bp, Glycine max
gataatgtgaatcaataatatattgctcctgtccatgtatgcaatgacataattaccaccgacttttggtgaacatctgaccataacttttccagaatctcaactactattaattaccaaaagcctctacatttgaaagaatgtgatcaaatttccttaactatggcagcatgttacacaaagacaccaacccgtaaacagagataaaaaataattaccaaagaaaaaagacgaacacataattacctaactacaattatatatgataatggcggacgtacagttacaaagaattttgagcagccaaaacccaaaaaatcacctataacaataatcttgctggcgtcttaaccaatagcatactcgagtgtctccaattctttaggccgccacatggacttctggacacataaaaatcccaccttatccttagagtaagtcatgcgaatctcccacttcatggacttcaccatactttcaatctcgctaatgatttcaacagtgtcccggacaataagctttccctcaggcctaagaatccgatcaa

SEQ ID NO: 220659 - DNA, 378 bp, Glycine max
atttctctctgtctcgttacacatttttccaacctttcactttcgtttctcaggtttagtcgaatccctctctcaatctcctttccaaatggccagcgttgaggttgctcagcaaacaccaacaacagttccagaaaatgaaacaaccgaggtaagcaagacccaggaaacaaccccagtcactgaggctcctgcaacagaacaaccagcagctgaggttcctgcaacagaacaaccagccggtgaggctcctgccccagaatcaaccaccgaagcaccaaaggaagaaaccaccgtggcaccaacagaaacagtggaaaaaacatcttcagaagtagccccagaggaccctaaagaagttccagttgaaaccgagga

SEQ ID NO: 220660 - DNA, 604 bp, Glycine max
gtcatctacaactagtaacatagatccaacaagcagatcaatctctctctctgtctcccaatcaaaacagacatgggtttgaaggaggattttgagcagtatgctgagaaagcaaagactttgccaccgactcaatcaaacgaagacttgcttatcctttatggattgtacaagcaggccaccgttggacctgtcaacaccagccgtccgggaatgttcaacatgagggacagagctaaatgggatgcatggaaggctgttgaagggaaatccaaggacgaagcaatgagtgattacatcactaaggtgaaacagctgctggaagcagccagcatgcctgcttgataacattgtcatgccttgctttcttattctgtgctagaagttcccaacagtttggaaataaacaattgcagtgtttgaagcttttattatcataatcttaattatttctgatgatttagacatgttgctttgagttcagttatctgtatcactattatttgaaatgcctgtagacagatgcagaggacctgaaaaattctgtcaactttttacttaagtgcttgatcgcactttccttctcaaaaaaaaaaagggcggc

SEQ ID NO: 220661 - DNA, 460 bp, Glycine max
gagaggtaaagtgcgaatcaagcaacttaagtaaaaagttgacagaaattttcaggtcctctgcatctgtctacaggcatttcaaataatagtgatacagataactgaactcaaagcaacatgtctaaatcatcagaaataaataagattatgataataaaagcttcaaacactgcaattgtttatttccaaactgttgggaacttctagcacagaataagaaagcaaggcatgacaatgttatcaagcaggcatgctggctgcttccagcagctgtttcaccttagtgatgtaatcactcattgcttcgtccttggatttcccttcaacagccttccatgcatcccatttagctctgtccctcatgttgaacattcccggacggctggtgttgacaggtccaacggtggcctgcttgtacaatccataaaggataagcaagtcttcgtttgattgagtc

SEQ ID NO: 220662 - DNA, 546 bp, Glycine max
gaaattttcgctgctcataaattggttctagcagctcgctcacctgttttcagggctcaacttttcggtccgatgaaaaatcagaatacccattgtataaaagttgaagacatggaggctccagtctttaaggcattgcttcatgttatatattgggactcactacctgacatgcaagagcttactgggttgagctcaaaatgggctactaccttgatggctcagcatctgctagcagcagctgatcggtatggcttagagagacttaggctcatgtgtgaaacaagtctctgtgaagatgttgcaataaacaccgttgctacgactctagccttggcagaacagcaccattgtttccaactgaaagcagtctgtctgaaatttgttgcaaggcctgaaaatctcagagctgtgatgcaaactgatggttttgagtacttgaaggaaagttgcccatctgttttgactgagcttttggagtatgtggctagatttactgagcattcggacttcttgtgcaagcataggaatgaattgatacttgat

SEQ ID NO: 220663 - DNA, 477 bp, Glycine max
aagtcaaaactaagatcatagtttttcctctcttaaatctagcattgcctgctcaataatgtagcattctaattacgcaatggtaaacatagatatcaattaaaacatgtcctacataagcctccttataaactaaataagaacatggaagtttagtacccaaaaaagtaaaaacatggaagttagaagccaaattcgtacacaacaatacaaagaggaggctttactaaactaaattcacttctttcttttctttgggggctgcaatgcttcctcatcttcctcgtcctcttcattctcctcatcctcagcaccatcttcatcctcttcttcacctgcctcgtcctcttcgtcatcatcatcgtcatcctcatcgtcgtcatcttgatcatcaccatcttcatcttcatcctcttccccattctcttctgcccctcctgcgccaccttcgggtgccttctttgagttgctcttgtt

SEQ ID NO: 220664 - DNA, 539 bp, Glycine max
  unsure (1)..(539): unsure at all n locations
agtgtggtctctctcactccaactccaaccacagagacaacaaattcaacaacgttgtttccatgacaatggaatctgcgcttacagcttctaactggaaccgttctttgattcggattcgccacactaagccacgcttcggtgcaattcgccccacagcaatacggtgctccatcaactcgtatcgcttgtccaacctcactccctctgagcttcagagcctcaagagccgaccccgcatcgatttctcttccattttcggtgttgttaatcctattgtcgatgatgttcacaaaagaggggatgctgcggttaaagagttcgtctcttctttcaaatcttcttattttcatctatgaatatgatcttgttattgtttcattcactcttgttgtgtgtggtttcttaactttttctttttttggtaaccatgtcagtatggagtatcactgactntgtcaatgactaatctccgtcgggtacctggctgaccacctttagttgggttctcccctcccaccatgtttttncattcatgg

SEQ ID NO: 220665 - DNA, 530 bp, Glycine max
agcaaatacatcggatgcattattccaaagatcaccgacaaattaggcacttgtatatgtttgttattacagaatatgaatccatattgttacatgaacttgaaatggcaacttctagctactaataccacctaaatctaggtaatctcgccaggcaaatggtcctagacttgccaaaaactaagagctagtagcttacaagagataaagagaacaatgagttgaagcatcatctcatcttgaaacctgcctggcttctatgtactgaagtctcaaggtaactgctcgcttgtgggcttcaaggccttcaacttcagccatggttgctacatatggcccaagccttcttagaccttcctctgagagagactgcacagttatgtacttcaggaaggagtccaatgacacaccaccatacattcttgcataaccgtaagtaggaaggacatggtttgtcccacttgcataatcaccaacactctcaggagtccaaggccctaaaaacacagaacctgcattctcaataaact

SEQ ID NO: 220666 - DNA, 405 bp, Glycine max
ctacaatgtgaaggtgcgcccccgcatatcaaaggaatctgcagaggcaagcaaatcagctgatgaacttataaaactgaacccaacaagtgaatatgctcctggtttagaagacaccctcattctcactatgaagggtattgctggtggcatgcagaacactggttaagtttgtttgagtcatttattacttgcattttccttttttttattactatcaagatagcatgaatatggttgcagcactgaaagttagtgctctagttttgttctcagatacactttgttttgttttgttttgttattatgctacaccacctttctgcactggaagagtcagctaccacacaaatgaggcatgccattgatgtgttatgtttcaagacggaaattatgcttagtact

SEQ ID NO: 220667 - DNA, 512 bp, Glycine max
cttctccacaatattttatgtattttcgtaacaaaccaaacccaacaaaaacttcttcactcttagtttctcatggcatcatctcagaacgtagccagcattgagccatggatgcttcgcccacctgtcaccgattcatggctcgcagagttcttcgctcgcgacgccgataccctaaccagggctcttcagaagtctctctccggcgctgttctgccgcaggacaaccacctttctccgtttctgcaccagcccgccgccgccgccgccacccccaccgtgtccagcctctccggctccgaccaggaatcggcgccgcgccgccgtgcggcgcctccgccctctgggaagatctccaagaggaagtcgcgcgcctcgaagcgctcgcagacgacgttcatcaccgcggaccccgccaacttccggcagatggtccagcaggttaccggcgtgcggttcggcggcgcgccaattgcgccggcggcggtagtgaagcccgagccgcagcgcgc

SEQ ID NO: 220668 - DNA, 452 bp, Glycine max
aatagattccattatttatatataacaataaactactatgtacacatacaatgtattctagtttagtcccctaaaacacgagcaagttattctgggtgtcgtagcccaacttctccaaattcggctggactgcaaattgaatcataggtggtggtccacaagtcaatgccaaggtatcaggagatgcatttggaatatgctccgtcaggatactttcagtgatgaatcccacactgtattcccacccttctcttatgctttcttgtgtcacgtaccacaccttcaacctatcatacttcttagcccactcatcaagctctttcttcagcaatatatcatcctcggttcggttcgcgtaaaccacatgcatctcggtgcagtcctttggatcctttagaatggcttgaaccacttggtaaatgggtgtgattcctgtgccaccagccaacatg

SEQ ID NO: 220669 - DNA, 515 bp, Glycine max
ggaagctggtctggagggtttctacggccagtcaaagcctcagtctaacccaaacttcaatgtaggaaccgatttcattgccaacaaccaaatcccaggcattgatttcgcaacagtgcactcctacccggaccaatggctatcaagttctagttatgaggaccaaatctcatttttaggccgttggctggatgagcacatccaagatgcacagaacacccttcacaagccacttctatttgcggagtttggtatttccacaaagagttatggtggcaactcaacaccaagggatcggttattcaacacagtatattctgcaatatactcatcagcaagcagtggcggggctgctgttggtggcttgttttggcaacttatggttcaaggaatggattcttatcgagacggttacgaagttgtcttagatgagagcccttcaacggctaatttgatcgctcaagagtctcaaaaactaaaccgaattcgcaagatgtacgccagacttagaaaca

SEQ ID NO: 220670 - DNA, 522 bp, Glycine max
  unsure (1)..(522): unsure at all n locations
tcgcaagcaaaaagaaagaatcccaggcgaggagaaagatggaggggaaggagcaggatgtgtcgttgggagcgaacaagttccccgagagacagccaattgggacggcggcgcagagccaagacgacggcaaggactaccaggagccggcgccggcgccgctggttgacccgacggagtttacgtcatggtcgttttacagagcagggatagcagagtttgtggccacttttctgtttctctacatcactgtcttaaccgttatgggagtcgccggggctaagtctaagtgtagtaccgttgggattcaaggaatcgcttgggccttcggtggcatgatcttcgccctcgtttactgcaccgctggcatctcagggggacacataaacccggcggtgacatttgggctgtttttggcaggaagttgtcgttgcccagggcgattttctacatcgtgatgcaatgctngggtgctatttgtggcgctggcgtggtgaagggtttcgaggggaaaacaaaata

SEQ ID NO: 220671 - DNA, 567 bp, Glycine max
cttcattcctctcattccctctgaattcttctcactcttcagatctctctcccttccttccatcccaaccacaaggttgctgagaagacataaaaaatggtgaagatttgctgcattggagctggctatgttggtggcccaaccatggctgtaattgccttgaagtgtcctgagatcgaggtggtcgtggtggacattgctgcaccgcgaatcaacgcgtggaacagcgaccacctcccgatatatgagcctggccttgatgatgtggtgaagcagtgcagggggaagaatctcttcttcagcactgatgtagagaagcatgttgccgaggctgacattgtctttgtctcggtgaacaccccaacgaagactcagggtcttggagccggcaaggcagctgatctcacatattgtgagagtgctgccaggatgattgctgatgtatcgaaatcagacaagatcgtggtcgagaaatcgactgtgcctgtgaaaacagctgaggcaattgagagaattctgacccataataggaaaggcatcaatttcacaattctgtcaaaccctgag

SEQ ID NO: 220672 - DNA, 555 bp, Glycine max
caatgatggacatggagcaagctttatggctgtttcttctccagaagacactgaagggctttcaactccacgtgacaggatgggtacagaagtaagttctgatgaatcagataggctgtctaggatgagtccttctggcttgtcaacatgctctgacagtgcagtcgaactagcattgaccccaagtttgataaacgaaagcagtgagaatgcattagagttgactttgagtcacctgattatagaggatcttcatcattcatctcctcccagtacactggatggtggaatggatgatactatctacgaccagcttgaacaggctagggctgaggctgagaatgctacactaaatgcatatcaagaaactgtaaggcgtatgaaagctgaaaaagatgcatttgaagctatacgcaagattaaagcttctgaaagcttatatgcagaggagttgaaccagaggaaaatggcagaggaaaaacttaggatagaaaaagaagaacttgagaatatgaagagcctgagagacacagttaaggaagaactccgccttgc

SEQ ID NO: 220673 - DNA, 527 bp, Glycine max
  unsure (1)..(527): unsure at all n locations
gaaagctcatggaaaaagtgctagagacagctttctgatgaatggttatgctctaaatactggccgtgctgctcaaggaatgcctctcagggttgcccctgcaagaattgcttgtcttgatttcaatcttcagaagacaaaaatgcagttgggtgttcaagttttagttactgatcctagggaactagagaaaattcgtcaaagagaggccgatatgactaaggaacgcattgaaaaactgctgaaggctggagctaatgttattctgacaactaaaggaattgatgacatggctcttaagtactttgttgaggctggggcaattgctgtaagacgtgtgcggaaagaggacatgcgccatgttgccaaggctactggtgcaacattggtctcaacatttgctgatatggaaggggaggaaacatttgaaccatcttttcttggatatgctgatgaggttgntgaggagcgaatttctgatgatgctgtagttatgatcaaagggaccaaaactacaagtgcagtca

SEQ ID NO: 220674 - DNA, 505 bp, Glycine max
tcgagatcataattgttctagtgaataactaaagaaaatagattaaattaaagaaaatataaaatagatagctgtgagatagaagagaacaaaactcaatagaaacatctctaataagttcaaaaattctgttttatgttggcaggtctctttgtatgtgttgtctggaaagaggaggactcaatgattattcgttcaccggaaccagaagtgaaaattttggtagatagagatcccataaaaacttctttcgaggaatgggcaaaaccaggtcatttctcaagaacaatagctaagggacctgatactactacttggatctggaacctacatgctgacgctcatgattttgatagccatactaatgatttagaggagatttcccgaaaagtttttagtgcccatttcggccaactctctatcatctttctttggctgagtggcatgtattttcatggtgctcgtttttccaattatgaggcatggttaagtgatcctactcaca

SEQ ID NO: 220675 - DNA, 468 bp, Glycine max
atactaacacaactctctttattaatgacaaatacaaatacattcagccactccaaatacatgacttaagcatacacaactgattaaggaatctggttccttcaatttcacatttatttaaaaccaggaacagtacttaagcaaccatagggtccttagatagagatactgttgggaattcctctgaaagtcaatccctcctcactagaaggatagagcagagtgtaaggcattttagctggcccatagcggtttctcaatgtctcatctttgttcttctctataagcttcttttcaatctcttcaagcttctttccaaacctcttaaatgcctctaatggaccggcatcagaagtccagtagtcaccaccatctctctgcccaaggtagaactcatcagatgcgtgccttgacaagatttctataactgtaaggtcaatgagggtctccttcttgccagtaatagtc

SEQ ID NO: 220676 - DNA, 528 bp, Glycine max
tgatcattcaccacatttcatttacacaaatcatcaatggcctcacaaaagcaaagatcaaacaaaccaaggacgagaacacgatgttgcttgaacttgcacttggtttattggttttggctctgtttctgcacttgcgtcccacacccactgcaaaatcaaaagcacttcgccatctcccaaacccaccaagcccaaagcctcgtcttcccttcataggacaccttcatctcttaaaagacaaacttctccactacgcactcatcgacctctccaaaaaacatggtcccttattctctctctactttggctccatgccaaccgttgttgcctccacaccagaattgttcaagctcttcctccaaacgcacgaggcaacttccttcaacacaaggttccaaacctcagccataagacgcctcacctatgatagctcagtggccatggttcccttcggaccttactggaagttcgtgaggaagctcatcatgaacgaccttctcaacgccaccactgtaaacaagttga

SEQ ID NO: 220677 - DNA, 449 bp, Glycine max
  unsure (1)..(449): unsure at all n locations
acttaacaggacagaaaacatgcaaaatatatttaggaaagtctatgacacatttgacaaagtctaatggagatgaaaaaaaacaaaaaaaaaccacgaaatcagtgttcttccttcagaacctcagggaagaaaattcccacgatgttctattggtataaacttcaattcgcttgacagagtagcaacaagttgccactaaccaataacagggtgttcccttcttttatgctgaactgcagcaagggattatagcaccgcttatgattttggatggtttcatacttcaaaagtatttcttttcataagaaaccagcccatgaactccaccttcaacctgtgctgctccactccggacctccagtcttaactccctggatcttanaaagtcatgagcagactgtagagaggaggcaccgatatcctgaaacccttgcctgactgcttgc

SEQ ID NO: 220678 - DNA, 450 bp, Glycine max
atttatcactcacgttcttcaacatgaaacgtttcgtgtttgctttggccagggcttttgctctttttctagcatgttccttggcttctggtgctgttgtggaacacattttcaatgtggaaaacattactgtgcaacgtttgtgtcgtcaacaagtgatcactgccgtcaatggaaccctgccaggaccaacaattaacgctcgagagggtgacactgtagtcgttcacgtattcaacaagtcaccctataatcttactattcattggcacggaatttttcaatttttaacaccgtggtcagacggtcctgaatttgcaactcaatgcccaatagcttctggtagcagttacacatacagatttaacctaactggacaagaagggactctttggtggcatgcacactcatcttttctacgtgctacggtctatggtgctcttctaattc

SEQ ID NO: 220679 - DNA, 447 bp, Glycine max
gggcccgctgggaggactggaccgtggaagtcacgggcctggtcaccaggcccacatgcttcaccatggagcaactcctccacgatttccccagtcgcgagttcccagccacactcgtctgcgctgggaaccggcggaaggaacagaacatggtgaaacagagcatcggcttcaactggggggcagccgccatctccacttcggtgtggcgcggcgtgcccttgcgcaccctgctcaagagctgcgggatctacacccgcaccaagggcgcgctccacgtgtgcttcgaaggggccgaggatctgccaggtggaggtgggtccaagtacggaaccagtatcctgagggaggttgcactggatccctcccgcgacatcattctcgcctacatgcaaaacggggagcctttgtccgcggatcacggcttcctcgttagaatgataatac

SEQ ID NO: 220680 - DNA, 600 bp, Glycine max
aaagaattaaagctacaggggagactagtttgcagtatgttataattgatatgagtgctgttggaaacattgatacaagtggaataagtatgcttgaagaggtgaagaagattacagagagaagagagctacagcttgttttggtcaatcctgtaagtgaagtgatgaagaaactgaacaaatcgaagttccaaaatcatttagggaagaaatggatctatctgactgttgaagaggccgttggagcatgcaacttcaatctacgtgcaagcaaaacgaacccaaagaaagatgaaacagagggttggaacaatgtgtgactgagtcatatgccaaagagtattctaaataactcaaaaagcttattcgttttcgtcttagtaatgttaccactacaatgtgtggcatgagaatttctgaatcacgccgaagaagttttaaaggcataggaaaatgaaagatgcaagggtcttctaatttctcaactctgcattcttagttagaagaaaatctcctatgtataggctggttgaaataatcttacgtatcatgctttgatatatattcaagagaaatgctagcacacactctcagacacac

SEQ ID NO: 220681 - DNA, 401 bp, Glycine max
  unsure (1)..(401): unsure at all n locations
aagcagcggcaaagctaaaatattttggatttcgatttggattcgttggcacctagctgagatgccatgccatgcatttcctacacatccttagcaaacataaagcttacttagcaccttcactcattctctattcagagtccgagtccatgtttcccattgctttcaaacctcttggtctctttttggatatcttcttctccctaacctcgtatcgttccaaggtaagatcgcacaaccatgcgccaggactaacgagattgagggttcgttgaatgaatttagctctcttcttgggtctctgaggcagctttgagcccttaatggcgagaaaatcttcttccttctccttgttggncaaggcaatcacgaacttgggtggccacaccggcggagcagcc

SEQ ID NO: 220682 - DNA, 538 bp, Glycine max
aaaaaatgaaatcggcaaccttgtgtgtccgttacctgagctcattgcagagcctaccgatgcccggtccatgtcatttgttggaactcacgaatacttggcaccggagatcattaagggtgaaggtcatgggagtgcagttgattggtggacttttgggatctttctatatgagctgttgttcggtaaaacgcctttcaagggatccggtaaccgagctacattgtttaacgttgtcggtcagccactgcggtttccagaagcacccgttgtgagttttgcggcaagggatcttataagggggttgcttgtaaaggaacctcagcacagattggtatataaaagaggcgctactgagatcaagcaacaccccttttttgaaggtgtgaattgggcattgatcagatgtgctaccccacccgagatccccaaggctgtagagttttgagaagataccctcaccagcttcatcaagtggtggtgaaaaggctgttaaccatatgtcaatagctaatcagaaaggtctgatgattatctg

SEQ ID NO: 220683 - DNA, 444 bp, Glycine max
gtatgcaactgcagtagacccaaagaaggggtcattgggtatcattgcacccattgctattgggttcgttgtgggtgccaacatcttagcagcaggcccattcagcggcggttcaatgaacccagctcgctcattcggcccagctgtggtcagtggagacttggctgctaactggatctactgggttggcccattgattggaggaggtttggctggcttgatttatggagacgtcttcattggttcctatgcccctgtcccagcctctgaaacctacccttgagcttcaacttcacttgtgtgttccttcaagtttcatctctgttcaccgtttcatgtcatgagcctcttggcttcttgcattttaaactctactttatctattatccaccgcttgcaataattatgtaaattataattcgaacttgatacatgaattgttgg

SEQ ID NO: 220684 - DNA, 189 bp, Glycine max
acacacaggagagaagagatggcgacgagggtggtggcggaacagaagccgaagacgaagattgtgtgcacgctggggcccgcatcgcgctctgtcccaatgatcgagaagcttctgcgggcgggcatgaacgtggctcgcttcaacttctcccatgggtcccacgagtaccaccaggaaaccctcgac

SEQ ID NO: 220685 - DNA, 554 bp, Glycine max
  unsure (1)..(554): unsure at all n locations
ttttgttctagcacttcgctgtctgaggttctggattctcagtgtttgcggagcgcagcgtcatcttttagggaagaatggatcatcaagggcatagccagaacccatctatgggggttgttggtagtggagctcaattagcatatggttctaacccatatcagccaggccaaataactgggccaccggggtctgttgtgacatcagttgggaccattcaatccaccggtcaacctgctggagctcagcttggacagcatcaacttgcttatcagcatattcatcagcaacaacagcaccagcttcagcaacagctccaacaattttggtcaagccagtaccaagaaattgagaaggttactgattttaagaaccacagtcttcccctggcaaggatcaagaagattatgaaggctgacgaggatgttaggatgatatcagctgaagcaccagtcatttttgcaagggcatgtgaaatgttcatattagagttaaccctgcgctcttggaatcacactgaagagaacaaaaggcgaacacttcagaanaatgat

SEQ ID NO: 220686 - DNA, 548 bp, Glycine max
  unsure (1)..(548): unsure at all n locations
ggcaaacaaacatggatgcatcttctatgcacatagcaatgtttccatggtttgccatgggacacctaactccatatcttcacctctcaaacaaattagcaaagaggggacacagaatctccttcttcatccccaaaagaacgcaacacaagttagagcaattcaacctgttcccacatctcatcaccttttaccctatcaatgttcctcatgttgaaggccttccccatggcgcagaaaccacttctgatgtctctttctctttaggtccactcattatgacagccatggatcgcactgagaaagacatagagcttcttctcattgagttaaagccacaaattgttttctttgacttcacatattggctaccaaacttgactcgccgcttgggaatcaaatcttttcaatacatgattgttagcccagcaacagtagcttacaatgcatccncaccaaggatgcaaaacagtgttaacttaactgaagttgatcttatgcaaccccctctggggtaccctgtctcatccatcaagcttcatgcacat

SEQ ID NO: 220687 - DNA, 542 bp, Glycine max
  unsure (1)..(542): unsure at all n locations
gatgaaaccaatgaccaatataagaaccacctcaaatgttacaacacaaaggttaattttgtaactcgtagctcttacttgaaaatcctttttcaatcctccactatgatgctaagaagaataacatacagtagtatttatagtacacgactacaagactacaattttgtgataatcaaaacattgtattttaattttaattacactacaaatacacaagaagaactagtagcagcttcaccttcactttcggctaccagttgatccactgcttccctgaaacaaaccattgagtcttgcttgaatttcctccgttccatacttaatatacttatcagcatgctttccaagctcaggaacactctgaaaccttgcaacaaagtttccatacgcaggaagcaagattttctcaagcgaaattcttatttcttccctaagctgctcatcaaagacaaaccatgaagactgttccttgcatatctcctcanaaactgtgttaaacgacttgagtttctccttcattgactntgccaagttaatat

SEQ ID NO: 220688 - DNA, 560 bp, Glycine max
  unsure (1)..(560): unsure at all n locations
caggaacttgtttgctagctctatgacgcacaatgactcaggaacagttgcatgcttaggaagcagtgtctgtcaagaaacgttatattctcttcatataaattgtggtggaaagatagtaacagacaatggaagcacatatgatgatgattcagatactggaggtccagcaagatttcaccgaagtggaacaaaaaattgggcatatatcaatactggtaactttatggataatgacgctggcgcctattatatcgtgcaaaataaaactttgctttctatggacaatgttgacctatacatggatgctcgagtttctcccatttctcttacttactatggattttgcctgggaaatggaaactacacggttaatctacattttgcggaaatcatgttcattgatgatcaaacatttaacagcttaggaagacgagtatttgacatctatattcaggtatatatatactcaacatttttttacccttgtcatggcgttttttcatatataaaatgaaggtggtagcttgatttattanngaaacttttgaatatttcat

SEQ ID NO: 220689 - DNA, 491 bp, Glycine max
ccatcataagtaccgttttttattttatacaaaggaagttagaaaatacaaatcgtttcaacattttcttattaaaataataaaaaaaagcattgagctttattcataaaattggagaaggaaagaatgctactatggttgtgcagtgggttttgcgatgttaggacggaacttgcagctagttttgaggtcttctcctggcttgttcccggcaaatccagcatccacccacgcagagtagcctccccccatgttaacaatattcttaaatcctgaatcaagcagatcaacggaggctcggagtgatcttcctccactattgcaagccacaatcaaatgatcctcagtcttgcatattgctgccacctggtcaacaaaatctggatttttcacccgtcctgcttctgtgatgaagacataggggacattatgagcattctcaacatggcttttgttgaattcctcaactgacctaacatccagataacgat

SEQ ID NO: 220690 - DNA, 542 bp, Glycine max
  unsure (1)..(542): unsure at all n locations
aatcaatcttctgagagtgtttggttgaaagtagcaaagatgtttcctttcgggcaaaagggtcaaaagataaaggggactatggtggttatgcagaagaatgtgttggatatcaacagcatcaccagtgttggagggatcgttgaccaaggcttaggcttcataggcagtgcagtcgatgcacttacttttgcagccaccaaaatctccatccagttgattagtgctaccaaggctgatggtgggaaaggaaaaattggaaagagtacaaatttaagaggaaagataacattaccaaccttgggagctggcgaacaagcatacgatgttaattttgaatgggacagtgacttcggaattcccggtgcattttatattaagaacttcatgcaaaatgagttctacctcaagtctctaattctcgaagacattccaaaccacggaaccattcacttcgtatgcaactcctgggtttacaattcaaaaaactacaagactgatcgcattntctttgccaacaatacatatcttccaagcgagac

SEQ ID NO: 220691 - DNA, 468 bp, Glycine max
ctcgagccgaatcggctcgagttcagcactgctgcgtttcccatttttttttttctagaacagtaaatttcaagtaaaccaaaaaaccataaatagtagtattaattaccaatattgtctttttctttttattttttttaaatactctgaaaccgcgaaaccctagctgaaccctctttcccttctccggccaccgcaatggacttcactacgccgccgatcgaggacggtttcaccgccgagaagctcttcacgcagggcttctcctacacctacgatgacgtcatcttcctcccccactacatcgacttcgccgccgacgccgtggacctctccacgcgcctcacgcgccgtctccccctcgccgtgccgtttgtggcctctcctatggacaccgtgtcggagtccgccatggccgccgccatggcctcgctcggcggcatcgccgtcgtccactccaacgtcccc

SEQ ID NO: 220692 - DNA, 524 bp, Glycine max
aacacgttaaaatcatattttattatctacatgtaattcaacattaattattacaactttttaatactcaaataggagtatcagcggcacgagcctctccctagtttcattatggaaatgcactcaaaggaacttcatatccatgcttgaacatttgtcccaatgtttttaaaaccatggaaatctggccacggctcatgtaagctttgtacattatccataatgttttctttgagcatttaagcttgacattttccatctcttcaaggacattatgcatttcgagtaaggtcatctgtgacccatacatgactagcttacaatgatataaggatcggcagatactccacccagagatttccgcacgtctcacaaaattttctagcttttctactgcattacatcgataataagttgcaattatgcgtctcaaaatacccttggttgttatagaagtcccatgctcaaatgcctcatttatagcattctccattttcgctaccagtcttcctggcatagagtta

SEQ ID NO: 220693 - DNA, 501 bp, Glycine max
  unsure (1)..(501): unsure at all n locations
ctgaaatgagtttcttcgatttcatcctgttgatgatagggtcgctctttctgttcaaagctttcgattttactttctgggtctccttcttctgcttcttttgattcccccaattcttcagctttcaaaaccctaatctgctgccatgaggaagaagctcgatacccgtttccctgctgctcggataaagaagataatgcaagctgatgaggatgttggaaagatagcactcgctgtgcctgttttagtttctaaagctctagaactatttttgcaagatctttgtgaccgcacttatgaaataactcttcaaagaggagcaaagaccatgaattcattgcatttaaaacattgtgtacaaagctataatgtctttgactttctgagggacgttgttagcagggttcctgactacagccatggccatggccatgctgaggctggtcctgatgatcgggccattgcanaaagaaggaaagctgttggtgatgatggtaatga

SEQ ID NO: 220694 - DNA, 559 bp, Glycine max
gctttggactatgtgtatgagtttcacttgaacaagggtggccaaaagggtcgcgagattcctgatggtgattttccatttgttgggaagatgcatgtatcaacgagtttcaccctttgcccgaacaattgtagaataagggagacggagtttacactattccataacatggaaatttctgacaaagaaatgtccacatcagagcattctcacaggaagagcaaggggctgtcgatggtgtcgaaagtttttaaaactagcccatcatcaaaacgcagaacactctcaaggtttggtggatcaagtgccataaaggagagttgtccgtgggagccatatgctcttggcgggaccaatttattagatactgatgttcctccaaattttgaaatggctaccattgttgtgaaaaaccatcttccttgtaaaaaaccagagaaagtaggagggtggggtttaaaatttcttaacaaatctggtgaaaatcaaatcacgttgccatctgaaagtagtaatcaaaataatggcgactgctcaagtagcacgagcattctaattc

SEQ ID NO: 220695 - DNA, 544 bp, Glycine max
  unsure (1)..(544): unsure at all n locations
ccactgtgctcatttattcactcacttagaaattaaggtcaagtgatatttgcttcttccttcggttaaattgccggatactgctttacatcaatgagcaatagttaaatctgatccctagcaagccgaagcatcaatccaagattgcagagacaaagaaggacccagaaattgtttgaattaatggcaaattcatcttccggagcttctcaaatgaaatttgttcttgttctttttctcctgtttatttccggattgatggatgtagcatcagagcaaatgccagcagatagcgttcctcagataaagtatgatgtctttgtaaactttaggggcgaggacatccgtcacagttttcttggttatttgactgaggctttttatcaaaagcaaataaatgcctttgtagatgataaacttgagaagggagatgaaatatggccttcacttgttggagcaattcagggatcatcgatttcattgaccatattctccgaaaactatacttcttcancgtggtgtttggatgaacttgtgaaaatac

SEQ ID NO: 220696 - DNA, 447 bp, Glycine max
atcaaaattaaactctctaagtaatcaacatcagtattcagtgttgtcccgtggatacaaatttgatgttcgaccaataacataaaacagtggcattggaaatatatgaagtaacattttcattctagtcttgtcttggcatgttagtatcatcttctccacgtccatgtaagttcttgcagatttcagcaagttcaaacaactttgaaaccagcagttgtcacatctttgcttctgacatactgctcactcaagtcttgtttattgctgtggattgtgtcgttgagaaaactagaaaaccattgaacagaacgtttgggaatccgttcgagagtgtgtctatccacataataaagtccatatctcacgccatagccgcttgtccattcaaagttgtccatcaatgaccatatcatatatcctcttacatctgcgccttttcttatg

SEQ ID NO: 220697 - DNA, 528 bp, Glycine max
ctccgatccgcgccactctcttccccggcgacggcatcggccccgagatcgccgattccgtcaaacagatattccaagcagctgatgtcccaatagaatgggaagagcactatgtaggaactgaaattgaccctagaacgcagagctttctgacatgggaaagtttagaatctgtaaggaaaaataaggttggcttgaaagggccaatggccacccctattggaaaagggcatcgttcgttaaatcttactctgagaaaagagctcaatttgtatgccaatgttcgaccttgctacagtcttccaggctacaaaactcgatatgataatgtcaatctaattacaattcgtgaaaatacggaaggcgagtacagtggacttgaacatcaggttgtgagaggtgttgtagaaagtctcaaaatcattacacgtcaagcaagtttaagggtagctgagtatgcttttcactatgccaaggctcatggaagagagagggtttctgccatacacaaagccaatattatgcaaa

SEQ ID NO: 220698 - DNA, 469 bp, Glycine max
gaggggtaagaacactagtttatgaacatatcagaactccaatcgcgaccacatgatttatacatggacatctggagcattatatggtaagatcaaggtggtagccacttcacaataattctccatatacatagacttcagaactccatattgtctaatttgaagatatgtaatggaataattcatagtattacttttcgttagtgcataatgtaccaaaatttacagagaagaataaattggtacacctggtaaggtgcctccataatcgacaataaaattgttgcccgtgacgtactcagaagaatcatgaataagataacgagctagagatgttaatgctggatctgaagtacctaatcttctcaaaggcattattttcctgaccacatcattcagccaatctttttgtaataaattttcagttatttcagaattgagaaattcaggggatatggaagttactcta

SEQ ID NO: 220699 - DNA, 547 bp, Glycine max
gaaaaatgtccgaaaacggagaagagaaattactcgctgtggcgcggcacatagccaaaacgctgggccacaacaacaccatgtctgatgacatattccaaatactatcgaacttcgatggaagattctcgagagagaatctttctgagaagggcgcagatgtggatcccagaggctgcgccgcactggatcattccctcaaatccctagaccgccggatctctccctacgtctcctccgaccgcacaatctgggccgacgccgccgattctgctgccttcctcgacgccgtggacgagctcgtcgccgtcgtcgccgagtggaaccacctcgcctccgacaagtccgtcgccgcctgcctcgtccgcgccgaggacatgctccagcacgccatgttccgcctcgaggacgagttccgctcgctcatggagcgcggcggcgaggccttcgacctcactcggagccaccggaaaggcgactcagcgtggaattgccgttcgagtcagacgaagacgtcgacgaagaagagaagaaaagcgcgacgttg

SEQ ID NO: 220700 - DNA, 499 bp, Glycine max
gaaattctgaaatagtgaactttgcattcaaagttaactgaacattttcttagaaatccagtacattatgatagtgctcagatgacataaatagaaaacgaagacaagatgtggatggcacaaagacgactagatagagagccttatctatttatatatagccttgcctgaataaactacacagcaggccaaattttcatttatgatgattaatgagtgattgatgactagtataataatatattttggttctagggcaactactagtttttgctatggctcatactagctctatatggcaactcctagtggggaaacttccatctttggtatgatcttctctggttctacagctttgacctgatttccataagctgatgcatgcactccaagtgctgccctaccagatggatcaaggttgttagaccaagcagcatcccactctacagctttggctgtgctacatgcaacacttggtcctccaggaacactcagcctg

SEQ ID NO: 220701 - DNA, 554 bp, Glycine max
  unsure (1)..(554): unsure at all n locations
ctttgttccatagagaaaggaatggattcccccaaggatcatcaaaatgttgtaaccatagatgtccatgctgccaaagatctgctcaattcatctggttatcgttatctggatgttaggtcagttgaggaattcaacaaaagccatgttgagaatgctcataatgtcccctatgtcttcatcacagaagcaggacgggtgaaaaatccagattttgttgaccaggtggcagcaatatgcaagactgaggatcatttgattgtggcttgcaatagtggaggaagatcactccgagcctccgttgatctgcttgattcaggatttaagaatattgtagccatgggggggaggctactctgcgtgggtggatgctggatttgccgggaacaagccaggagaagacctcaaaactagctgcaagttccgtcctaacatcgcanaacccactgcacaaccatagtagcattctttccttctccaattttatgaataaagctcaatgcttttttttattattttaataagaaaatgttgaaacgatttgattttctaac

SEQ ID NO: 220702 - DNA, 476 bp, Glycine max
gaaatcccagcaaaatgcaaattgatgaaaaatcattaattacagaatagctaatttttccaaagaaaagcatcatatgaaacccatcttccatgcaggaggtatagagaagcacaacatcaggtgaatacaaactaagtatacacatcaacaatgacaatacactatctatacccaaaacccaagtctagctcttgaccatacatcccctggctgtgacctgaagcatggattggctttgggttttttgacctcagctccatctcaaaaagcctctgaagtgcttctggatgatttcttccaccaccaacatcaggagcttgtaattgcattccagggccaccaaaagtaggatgctggtgaccactaaatgggaagccttggccttgcattgggtttggttcctgcatgaagccagtcattggattgctagcatgagatggcataggtgcaccccttgggaatccacgtaataa

SEQ ID NO: 220703 - DNA, 512 bp, Glycine max
attgattgtgtatggttaattaaaaggtccatgtaaccagtagtttggataaaccaccgaaacgtcattactggaatctgtcttaacatggacaagtatacgagaaccacgtggaaaaatagaggacggccaaatatctactataacaatcaataacgacaagtacattagcaaatatataaaaatccaaaaactccatcctcctccacaagaggcaaagtccaaaatagagctaatgctcctaacaaggtaaatccactggttccagaaaccgatttattcagacctctcattttttgcacgagcaagacactaaatcgcaactagacaagcacataatgtgtagacaagcaactttgcagtacaccaccttaaaaagacttcttggcaacgaatacaagcaggtcaatgacacgtgagctgtatccccactcgttgtcgtaccaagaaacaagcttcacaaagttcttattcaatgcaattccagcctttgcatcaaaaatacttgatct

SEQ ID NO: 220704 - DNA, 558 bp, Glycine max
  unsure (1)..(558): unsure at all n locations
ccggcacttacaatgcgcttatgggtgcttttatgttcaatggtcttcctgataactgtcagtctttgttttgtgatttgaagagggatctgacttgcgatccttctattgccacgtacaatattcttctatctgtttatggtaggctgatgctcgttgatcacatggaagcaacattcagtgagatacaaaggttaaacctcgccatgaacatctgcacttacaatcacttgattgctggatatatcacggcttggatgtgggatgatatggaaaaggtgtttcaaatgctgaagttgagctctgttgagcctaacatgaaaacccaccttctaatgcttcgtgggtatgcaaattcgggtaatcttgaaaagatggaagagatgtattcctttataagggatcatgttaatataaaggaaatttcattaatcagatgtatgatatgtgcctattgtagaagttctcatgcagatagacttaagaagatagagttattggtgaagtttattccacaaaaagagtacaggccatggttaaatgttntgtgataaactc

SEQ ID NO: 220705 - DNA, 563 bp, Glycine max
caaaacacttgctccattattattttctcattcattcgttcatcatggttcgggtcagcaacaacgtgatcggactcctgaacttcctgaccttcctcctctccatcccgatcctggtggccggagtgtggctgagcaagcagggcgccaccgagtgcgagcggtggctggagaagccggtgatcgcactcggcgtcttcctcatgctcgtctcactcgccggcctcgtcggcgcgtgctgtcgcgtgtcgtggctcctctggctctacctcctcgtcatgttcgtcctcatcgttcttctcttcgccttcaccatcttcgccttcgttgtcaccaacaagggcgctggcgaagttgtgtctaatagagggtataaggagtataggcttggggattactcgaactggttgcagaagagggttaacaacactaagacgtggaacaggatcaggagttgcttggcatctgggaaagtctgcactgagtttcaatccaagtttctaaacgacaccgttactgagtttactccgaaaccctgccgcgcttcaggttctttctttctc

SEQ ID NO: 220706 - DNA, 424 bp, Glycine max
aaggctctcaacgccaaaagggatccaaattttggacatagaaaataaacagtacaggcaaataacatagtttctacttgggcagctatgagacagcatccgcaatgaactttcactcatcatcttcatcattatcagcagcagagttgatggctgccacgcgtgcaaccaacttagccttcctttccttataaggcagcttcttcatgttggaccttttgggctccttcgggggctggttatcagatttcctgagagtaggatcagcacggatggcagcatgaacctttttgtaaagtgcctcaataccatcagcctctatcccacgtttgatgtattcgctgaagggtgactgggatttctctgggtcatcttctgccaagatcttcatataggcgagaacatgtccaccaaaaacatattt

SEQ ID NO: 220707 - DNA, 478 bp, Glycine max
  unsure (1)..(478): unsure at all n locations
ggctatgccaaggttcgcaatcttgacgaatctcatcaacaacatctcaatgcagcgcgagtttctctgggggttcttggagttatttcccaggttaccctgaaattagagcctctcttcaagcgatctcttacatatttgaccaaagatgattctgatttaggtgatgaattggttacttttggaagaaagcatgagtttgctgatgtaacatggtacccaagtcagcagaaggccgtgtatagaattgatgatcgtgtctccattaataaatctggaaatggtttatatgatttctttccatttcgccccacactctcggccgcactaactgttgtcagagctacagaggagcttcaagaagcaacccgcgatgctaacgggaagtgcgttggtgcaaagntgataactgcaacactgtcaggcattggttacggattgtctaacaatgatgataaaggtatctttcttgggtatc

SEQ ID NO: 220708 - DNA, 541 bp, Glycine max
gcgaaatttcttcgtctctgtctctgacctcctaacgccttctcgattcctaactccttcaaccctttgcaccattcaacacgtcgtcatcatgctcccttcaactctcgcctgatcagattttccgtttcgtcggcgatctctctctctctctctctcagttcgcgatccatcaccggttggaggttttagggcacagagaccaaggtcgccgccatgtcaatgtcggattccgattcgtcctcctcttatggcgctgaatacaagagtctcaaacaagttagccgcgagcgattattacatgaaatgcttaggtcagcgaaaacaggggattcaaaatctacatggaaggtactaataatggacaaacttactgtaaagataatgtctcattcttgcaagatggctgatatcactgatgaaggcgtttcattggttgaagacatattcaagcgaaggcaaccattgcccaccatggatgctatatacttcatccagccaaccagagagaatattattatgtttttgtccgacatgtctg

SEQ ID NO: 220709 - DNA, 546 bp, Glycine max
  unsure (1)..(546): unsure at all n locations
gggaaggagtacgggaagagcgtgtcggtgaatcagtttcaggtgaaggacgtgcgctgggatccggagctcggtggccagcacatggagctgcggttggtggagtattttgcggatcagttcaatgcgcaggttggaggtggaatcgatgtcaggaagttccccaaggctatggctaagttgaagaaacaggttaaaaggactaaagagatacttagtgctaacacagcagctcctatttcagttgaatcgcttcatgatgacgtcgacttcaggagcacaataacccgtgagaaatttgaagagctttgtgaagacatttgggaaaaatcgctcttacctgtgaaagaggtgcttgagaattctggcctgtcattggaacaaatatatgcagtggagttgattggaggtgccaccagagtgccaaaattacaggctaagcttcaagaattcctcaggagaaaagaacttgataggcatcttgatgctgatgaagcaatagttcttggcgcagctctgcatgctgcaanattaagtgatggaatc

SEQ ID NO: 220710 - DNA, 495 bp, Glycine max
aaattataaatagtgatgtcatcaaggtttcatatttcagcagaatgatcttgacataaaagttaacatggctaatctgaatattcctggggtaacgccaacacctacaatgatgatggacttgacataatatacagaaggatagcatttatgctccaagtgacttacattggcttcctcaattacattgttgaggttttgctaagttgaaaatacaagcacttaatagtttacagagccacatttccttctaatttgcccttgtattcctgtaagtactccaacattactaagcttcaccatggatgcagcaaaatcattatagaaggaatattggtcggtgctgtaaaaataagccatagaagaagtccttcgatccgcaagtagtgccatgtcagattctagaagccctttgttgtataagagatttctataatactcattgtcgaaggtcaaagtagtattagaatcaagaggtgcaatgtagctgtttga

SEQ ID NO: 220711 - DNA, 585 bp, Glycine max
  unsure (1)..(585): unsure at all n locations
gctgcgccttgtgttgacactactttgctgtgttcattttcatgtccaaagttctcttggatttgaagatggaatcagcagatctcaattcccagaagggttcctcttcggaacatgcacttcctcataccagattgagggagcacctcttgaagatggcaaaggtttaagcaactgggatgtttttagtcatataccaggaaatataaacaatgatgagaatggtgacattgcagatgatcactatcatcgctatttggaagacatcgagttgatgtcctctcttgggataaatgtgtatcgattttctatttcatgggcaagaattctacctagagggatatatggggacataaatccaagtggggttatgttctacaacaagatcatagacaatctgcttcttagagggattgagccatttgtgacaattcatcaccatgactacccgggagaattggaagaaagatatggtgcttggcttagtcccctaatacagagagatttcgttcattttgctgaagtttngtntaagaagcttggagacagggtaagtactgggctaccatcaatgagccccacctg

SEQ ID NO: 220712 - DNA, 524 bp, Glycine max
  unsure (1)..(524): unsure at all n locations
gccgcgacatctgaattccttcttgtcactcataatcaccaaatagaagccataaacaaatgaatgccatagcagcagaacaagtgctggagccatggcacaagctagacgacaaagtcgttttggtgacgggtgcttcctcggggctcgggcgagatttctgcatcgacctcgccaaagctggctgctgtgtcgtcgcggcagctcgtcgcctcgatcgcctcacttccctctgccacgaaatcaaccaccgatggccctcgaacgtcggaatccaccgcgcggtggcggtggagcttgatgtcgccgccgatggccccgccatcgacagggctgtgcagaaggcctgggacgcctttggccgcgttgattccttgattaacaacgctggtgtcagaggaagtgttaaatcacccttgaaattgtctgaagaggaatgggatcatgtcttcaagactaacctaactggntgttggttggtgtcaaaatatgtatgcatacgcatgtgtgatatccagcttagg

SEQ ID NO: 220713 - DNA, 480 bp, Glycine max
aaataatagcagttttatattgtcttccctaggaacaggttatacataaaaacggaaacaaaccagaatcagttttatagaacagtaatagaaactagatctagccggaacaaaaccatcccctcaaaagagacaatcatcaaccggcaacaggaagttgcagcttgttatccatcttcttgtctaaagccaccgcaatacaccacacccaagttcaaattcacatatcatgttgggcaaactcctcctcctcctcttcctcttcatactcatcctcatcagcagtggcatcctggtactgctgatactccgacacgagatcgttcatgttgctctcagcctctgtgaactccatctcgtccatgccttccccggtataccaatgcaagaaagccttccttctaaacatagcagtgaattgctcactcactctacggaacatttcctgaatgggggtagagttaccaatgaatggtgaag

SEQ ID NO: 220714 - DNA, 505 bp, Glycine max
attttatacaggcagaaagatcaattcagtgatggagttggctatggttggattgatggccttaaagctcatactgagaaacatgtgactgacagaatgatgctcaatgctgctaacattttccccttcaacacaccaaccaccaaagaagcatactactatagaatgatatttgagaggttcttccctcagaactcagccaggctgagtgttcctggaggaccaagtgttgcatgtagcacagccaaagctgtagagtgggatgctgcttggtctaacaaccttgatccatctggtagggcagcacttggagtgcatgcatcagcttatggaaatcaggtcaaagctgtagaaccagagaagatcataccaaagatggaagtttccccactaggagttgccatatagagctagtatgagccatagcaaaaactagtagttgccctagaaccaaaatatattattatactagtcatcaatcactcattaatcatcataaatgaaa

SEQ ID NO: 220715 - DNA, 469 bp, Glycine max
aaccgttaacttgagtataaatatcaggaatttcagaaaggttcagaaaaaaatataaactccaccctccaaaaacaaaccaagtcatgtagccaaaataattgtgatcactatccatgttcagaggatgtctggttttggttttgaggtgaatgtatagaattttgagcgacattaattgtctctccttttgtttatgtcagtttccctgccatccaactttgcaacatctgaagtgcagcttttggttgatccatagggaccaagtgtccagcctcatgtaccttgaggaaagaaagaggtccatagctattaagagaccctgcttttgaaccatcaaccacaaatttcactgtaggagatttttcaaaggcctttttgcctgaccacttcattgcatgtacccaccttgaattcccaagccaattgcatatgagatcttctttccctacatacacaagcaacttga

SEQ ID NO: 220716 - DNA, 485 bp, Glycine max
ctttcttttttcccgcagtcttgggcaaggtcaagatcggaatcaacggatttggaagaattggccgtttggtggccagggtggctctgcagagagacgatgttgaactcgttgccgttaacgatcctttcattaccaccgattacatgacatacatgtttaaatacgacagtgttcacgggcactggaagcatcacgatgtcaccgttaaggatgagaagacccttctcttcggtgacaagccagtcactgtttttggacacaggaaccctgaagagatcccatggaagtcgactggagctgacatcattgttgagtccaccggagttttcaccgataaggataaggctgccgcacatttgaagggtggtgcaaagaaggttattatttctgcccccagtaaggatgcccccatgttcgttgttggtgttaacgagcacgagtacaagccagagcttgacattatttccaatgctagctgcaca

SEQ ID NO: 220717 - DNA, 578 bp, Glycine max
caaaggcatattaatttgtgcaattggattaatatagaaaagtgtcctgtaaacttgcttcatatgaagaagcaggggatacataagaaaaataaccctttttaatttttaggaacaattcaatacattgaaaccaatagtatgatttaccaacaaaagctaaaacgctagtcattgagaaaaataaaccaagacgaggactaactacacttctttaatagctccctttcccatctcaacaccattgccataatcatcatgctccacgaatctggaccagaaggggtgtgcctgccaaacctgccccatttcttcaattggaatgccctttgtttcgggcaagaagaagtagacgaagaatgtcatgatcaacacgaagaaggcaaagaagaggaacaagccgaacttcatgtggcaaagcattgtcaagaagacttgtgcaatcaagaaagtgaaaagcatgttcaccgacacattgatactctgagcagccgaacgaatctccaagggaaagatctcactaggcaccaaccaacctaggggaccccatgaccaggcaaatgctgatacataaatgc

SEQ ID NO: 220718 - DNA, 604 bp, Glycine max
  unsure (1)..(604): unsure at all n locations
ttggaggacaaaacaaagtagtgtacaattacttggtgctatggcatactgtgctcctcaacagttgtctcagtgtctccctaagattgttcccaaattgactgaggttttgactgatacacatcctaaagtccagtcagctgggcaaatggcccttcaacaggttgggagtgtgataaagaatccagaaatatctgctcttgtccctactctacttaagggacttagtgatcctaatgagcatacaaaatactcccttgatattcttcttcaaacaacctttgttaattcaattgatgccccttcacttgcattattggtaccgatagtacatagaggtttgagggaaaggagtgctgacactaaaaagagggcagcacaaatagttggaaacatgtgttccttggttacagagccaaaggatatgattccatatataggattgttgcttcctgaagtaaaaaaggttcttgtggatcctatccctgaagttcggtcagttgctgctagagccatcggatcccttataggaggaatgggcgaagaaaatttccctgatcttgtnccatggttgttngacacacttgaatctgataatagaatg

SEQ ID NO: 220719 - DNA, 496 bp, Glycine max
  unsure (1)..(496): unsure at all n locations
cttcaagagatatcaagtcaagttcaagagaagaagagagggaaaaaccgattaccgtgccaggattcggttgattaatcaggacaagaacaaatataacactccgaaataccgatttgtggttcgctttagcaacaaggacattgttgcacaaataatatctgctagcattgccggcgatttagttcttgctacagcatattcacatgagctgccacgatatggtcttgaagtaggacttacaaattatgcagcagcttattgcactggtctcctgttggcccgaagagtcctcaaaacacttgaaatggatgaggagtatgaaggaaatgttgaggctactggagaggattattcagtggaacctgccgagagcaagaggccattccgtgcactccttgatgttggtcttgttaggactancaacaggaatcgcgtctttggtgcccttaagggagctctggatggnggtttggatattcctcacagcgacaag

SEQ ID NO: 220720 - DNA, 359 bp, Glycine max
tgcacatgtgaactctcagtcttttctcgaaccctactttcttccgcggtgattgcgggggaattcctgtaatggcgattgataatatttataaaaatgatgctagtgaagaaaaaggagagcgtgccataatgtcttttttttggtggagccatggctattgctgaactatcgaacacttctctttgtgccatagggtaaggataacaatttgcagtcaacaggttgaggacgtgaagttactgtcacgaatgatggcgctacaatcttgaagtccctccatattgataacccagctgctaaagtccttgttgacatatcaaaagttcaagatgatgaggctggggatggaactacct

SEQ ID NO: 220721 - DNA, 534 bp, Glycine max
  unsure (1)..(534): unsure at all n locations
ataattgttgaaactgaaactgaatcttaattctgagataacattcaaaatcaaaccgatacatgaaggatcagctataacatattaatttatagctgtgctggtgcaggacacttagtagtgtgccatgaaattattctaacagaaaacaacaacctaatgacttatacgtggaattagctacaactacaaacattgagcttaacctaaccgtttttaggtgctgcatagctttcaaacggtgggtctaacactagtttcttttcagaaagttcttgtaccattgagcagaaagcttagggtacctttttaagccatctttgtaatctacaaagtttaatccaaaccgaacagtgaaccctgcaaaccattcattacagtccaaaaatgaccatgcaaaaaatcccttaacgtttgcgccagccttaattgctgatcgaagataaaagaaatgacgataataataatcaattcgataaatatccatgagagcttcttccacggaaaggggtggatcatngaattcgttcatac

SEQ ID NO: 220722 - DNA, 505 bp, Glycine max
gataatataaaagaacaagttgaaaggcaatgtccatcaacagtttcttgcgctgatatcttatccttagcagttagggaagctattgatctggttggaggaccttcttggcctgttgcattaggccgaagagatgcaacaaaagccaatcggatggaagctaatcaacaaattccttcaccgttcgagcctctagataacatcattgcaaagtttacttcaaagggtcttaacttgagagatgttgtagccctttcaggggcacatacaattggttatgcccgatgcttgaccttcaaaaggagactttttgattttcaaggctctggcagacctgatcctgtgcttgcctcttcacttctctcaaaattgcaaagcaccgtgtccaaatggagacacttcaaacagctacattgcacctcttgattctaatactactttgaccttcgacaatgagtattatagaaatctcttatacaacaaagggcttctagaatctgacatg

SEQ ID NO: 220723 - DNA, 450 bp, Glycine max
agtacaagctacttcaaataaatttcagtgactacaggaatcaaagttaaatcccatggttccaaaaacttcctcaagtgcaagcctgtgcagttatagagatagcatgacaccaattcatgaatagagtctaagcttctctagtttccaggtacacactatataacctaccttatgacagcaaaagaaaaaaataataacagacccttttctcttctcctaacagaaataatatgaactttaccaacaccttcaaaccccagctactcacacttgatggaccggtatatgtgacgaacaaagagcagggaggcacggaatcctacgctaccgagcatgaggaagaagccatagcagatacaggccatgtaaccaaagaagaacgaagtttgcataaaaccagacatatctgatcgtgcatagtagtaatacaagcaatagccgtagatg

SEQ ID NO: 220724 - DNA, 556 bp, Glycine max
attccattccatattcacaattgcacacacaaactcactctgttttgtgttctaacaatggctcctgtgccgagcagaaccgtggccacggcctctctcgcctcgctccttccttcttcccccttcgcgagggcttctcttctcagaagcgcttttctgccgccgcaaatagggcgcgacaggaagtgcttctcccccgccgcagggctgcggtggacgcagcggcgccaggggaggagggacgggctcgccgtgcggtgcgaggccgccgtggcggagaaggacgaggccaccggtgagaagtttgagtaccaggccgaggtgagtcgattgttggatttgattgttcacagtctgtatagccacaaggaagttttccttcgtgaacttgtcagtaatgctagtgatgctttggacaagttgagattcttaagtgtgactgagccttctttgcttggagatgctggagatctagagatacatatcaagtctgatccagacaatggaactattactataacagatactggtattggaatgactaaagaagagctca

SEQ ID NO: 220725 - DNA, 443 bp, Glycine max
aaagggctcgctgaaaataaattttattgaaccagatggtaaaaatagctagaaagtctcgagacagcaaaggctagatatcgttttgttaaaaaatttacaacaatgacttagtgataaccaataggagctggagcctcttttaattccttcccttgatgatgaatatcagaagcaaagtggttaacatccctgtgatgagccttatcagcgcgaatcacagtgacaacatccttgagagttgcatccttgggaagcctccagtagtcaatagcactggcaggggcaggggacaattttaacttttaccactctcaatggcattcaaatgctgagtgtatgaaatcacagcttcttcctccaagtaaccaacaaatctatgtgccgcctttggcgagaggaggtagaacacgaagaaggcgttgaagaaaacaccctgcgcg

SEQ ID NO: 220726 - DNA, 560 bp, Glycine max
aaaaaaaccctctctttctctctcttccaaaacctaattttcattttttgtcttgaaacaaattttcaaaatgcgtgagatccttcacatccagggtggccaatgcggcaaccagatcggcgccaagttctgggaggtggtttgcgcggagcacgggatcgaccccactggaaggtacggtggggactcagagcttcagctcgagaggatcaatgtctactacaacgaagccagctgcggccggttcgtgccgcgcgcggttctcatggacctcgaaccgggcaccatggacagcgtccggtccgggccgtacgggcagatcttcaggcccgacaactttgtgttcgggcagtccggggcaggaaacaactgggccaaggggcactacactgagggtgctgaactcattgattctgttctcgatgaggtgcgcaaggaggctgagaactgcgattgcttgcaggttttcaagtgtgccattctctgggaggaggaactggatcaggaatgggtaccttggtgatttctaagatcagggaagagtacccagataggatgat

SEQ ID NO: 220727 - DNA, 548 bp, Glycine max
  unsure (1)..(548): unsure at all n locations
gttctactttttctttgaatcacggaacaataaggatgatcctgtagtgatatggttgactggaggaccagggtgtggaagtgaattagctttgttttatgagaatggtccttttcatattgccaataacttgtctcttacatggaatgattacggctgggaccaggcatcaaatattttatttgttgaccaacccactgggacagggtttagttactcttctgatgatagtgacattcgtcatgatgaagccagcattagcaacgatttatatgacttcttgcaggagtttttcaaggctcatcctaagttcgttaagaatgacttttatattaccggagaatcatacgctggacactatattccggctcttgcatcccggataatccaaggaaataaagaaaatcaaggaatttatataaatctcaagggtttagccattggtaatggggcaacaaatcctgcaattcaataccaagcatatccagattttgcatttagacacannaatattacaaggcttattacgatgaaatcaacaagttaat

SEQ ID NO: 220728 - DNA, 515 bp, Glycine max
aaccctttcttccacatgttgagtttcagcatcgtcctctcttgagtccccatatcaaatacccaccgaattcaaccccccatataacaaatctcctcccatcccatttttcagcaccaaagtttgaaacttttctcaattgggttgaggagagtttgactcaaatttttatttttctaacgaagcagtagctattagaagtgcaaaaattaaatgtccaacatcttcttgttgatgtttgagattcatgtatccgattctcagtgaaatcttcttttccgggtgtatgatcaattccactgttaggcgcaggacccatttagttcaatccttctcagttgctttcctctattggttgtactacgtttcatgatttctaaaccttccttagtctaataatcatctactactagctattattattattattattattatcatcatcatcatatataataaaatctatctgcaatattatttttctgagtttgtgtctagttaatgtctgggtcctg

SEQ ID NO: 220729 - DNA, 595 bp, Glycine max
  unsure (1)..(595): unsure at all n locations
ctctgttctcttcaccattctctttcttctttgtttcaagtttcaacaacccagattcactctctctctcgtaattttctctcttattgaggctagaaaaagagagcaaaaaaactaaaaaatgcctgcggtcggaggtataaacaccggagggggcaaggagtaccctggaagcctcactctatttgtgacggtaacatgtatagttgcagccatgggtggtttaatcttcggttacgatatcggaatttcaggtggagtgacgtccatggatccgtttctgctcaagttttttccgtcagtgttccggaagaaaaactccgacaaaacggtgaaccagtactgccaatacgacagccagacactgacgatgttcacgtcgtccttgtacctcgccgctttgctgtcgtcgttggttgccgccaccgtcacgcgtaaattcggccggaaactctccatgctnttcggaggctnngctttcctcgtcggtgccctcatcaacggtttcgcccacacgtttggnatgtaatcgtgggtcgatcttgctcgggtcggtatcggcttcgccaatcagctgtgcactctactatctgaa

SEQ ID NO: 220730 - DNA, 416 bp, Glycine max
ctctgcgattttttctttaatttccagatcacgaaactaaagaagatggagaaggcgatcagcagacagaagattttgcttcatcatctcaacccttcattgtctacccacgtcaacgaatcatcctccctctatgcttcagcatgtgtggcgggggacagcgctgcttatcaaaggacatcgacattcagggatgatgttgtgatcgtggctgcttatcggactgctcattgcaaaggtaaacgtggtggtttcaaagatactcttcctgatgatctactggctcctgttttgaaggctgtaattgagagaaccaatgtgaaccccagcgaagttggggatattgtcctagggagtgtattggctcctggagctcaaagagctagtgaatgccgaatggctgcattttatgctgg

SEQ ID NO: 220731 - DNA, 490 bp, Glycine max
ctcacttgcagcgcgcgcagccggttttgctgcagcatcttctcttggcttatgttgaggagattgagcgtgatgctggtcgtttggtagattgtagggctaggatgaatttctgccccttaggagcttgtgccttggctggtacagggcttcctattgatcgattcatgacttccgaagctttagggtttacggctcctttgaggaatagtatagatgctgtttcagaccgagattttgtactggagtttctttctgctaatgccatcacagctgtgcatctttctcgacttggtgaagagtgggtattgtgggcttcggaggaatttggattcatcacaccaagtgactctgtttcaactggaagtagtataatgcctcagaaaaagaatccagatccgatggaacttgttcgtgggaagtctgccagagtcataggggatcttgttactcttctcacattgtgcaaaggacttcctcatgcttacaa

SEQ ID NO: 220732 - DNA, 488 bp, Glycine max
ctttgacagattcagttccattattttcgcctgttcatgacgctgcttctttgactcgcaactctttccctgctggcttcatctttggggctggatcctcagcctaccagttcgaaggagcagcaaaggaaggtggaagaggaccaagcatatgggataccttcacacataaccatccagaaaagataagagatggagccaatggagatgtcgccgttgaccaatatcaccgctacaaggaagatgttaagatcatgaaggatatgaatttggattcatacagattctcaatctcttggcctagaatactacccaaaggaaagctcagtggtggtgtaaatcaagaaggaatcaattattacaacaacctcatcaatgagctattggctaatggtgtactgccatatgtgactctttttcattgggatcttccccaagctttggaagatgagtatggtggtttcttaagctcccatatagtagatgat

SEQ ID NO: 220733 - DNA, 521 bp, Glycine max
gagaaagagagcagcaaaataaattttcacatgtaataaacttagaagcaacggttgagtgagatttttcccatccttagaaggacataagcatgattagaaagcttaacactactgcgacataggcttgtagatttcctttactggttgatgaagctgagaagtctgatgaatgttgtgctagaggtgaagtagaagcaggaaattcagtggaaggaatgactggagagaatgtaggactttctagatgtgtctggaacaatggacttggggatgaggagataatgacttcaggagattctgcaggtgaagtagtagaatcttcaggagatgctgctggtgtgacagaatttgttgcactggcaagagtgtctatttcaaccttcattccttggctgcaatgtcctattgtcccacagatgaagtatcttttccccggtaaagtgagagggatggttgtggcgccatcattgtaagactgaattgggttagttggctggcaagagtcataatctggcttt

SEQ ID NO: 220734 - DNA, 532 bp, Glycine max
actttatgaagtatgctcaagatgaggaagctgctgatgatcaagaggagacaggatggaagtacattcatggggatgttttccggtttccaaagttcaagtctttcttttcagcagcccttggttctggtactcaattattcacacttacaatcttcatttttatgcttgcactggttggtgtgttttatccatataaccgaggcgctttatttactgcactggtggtcatatatgctctcacatctggcatcgctggctacactgctacttccttctatattcaacttgaagggactaattgggttaggaacttattgctgacaggatgcctcttttgtggccccctattccttatgttctgtttccttaacacagttgcgattgcttatagtgcaactgctgccctgccatttggcacaattgtggtgattgtcctaatatggacattggtaacttcaccattgcttgtgttgggtggtattgctggtaaaaatagcaaaactgagttccaagcacctgtccgcactac

SEQ ID NO: 220735 - DNA, 518 bp, Glycine max
aaaaagaacaactaaatatagtaaagtatttaggatgtcagaacggaagttaccccttcgacaataataaaaacgcaagtgatacactgttcactttctcacaatcatttcatcaaacactacttatctttaagccacacactacagttatggaacatcaacagtattatcatcattttcatcaattctgaatctagcttccacacaaagtcattactgctgggcgcactgtaccctctgtgcaccaccaggcatgtcatcatcctcatcatatgcctcctgagcttgttgctgcttcctcctagtctcctcctccatgttgacatcatggagtgtagtttcctcacattcatccagctccatgtctgtcaattgtgaagaaggctttggtggcagaacagcctccaaggccttaacttgatcagggtttagagaatctggaaactccacagtgaagtgaatgtaaagtttccccttcatgaatggcctctgatacatgggcattccctcatcattta

SEQ ID NO: 220736 - DNA, 487 bp, Glycine max
ctcacctcccaactcgccctcgactcacatccttgtccgattccgcgaacgagtcgagtgaatcgggttggtaaggtaagatctattctgtttcttcgtcatggcaaccggacaactattctcgcgtactacacaggctttgttttacaactacaagcaacttcccatccagcggatgcttgattttgacttcctttgcggcagggaaacaccatcagttgctggaataattaaccctggttctgagggatttcaaaaacttttttttggtcaggaggaaattgccatcccagtgcatgctaccgctgaagcagcttgtgctgcacatcctactgccgatgtcttcatcaactttgcttcatttagaagtgctgcagcatcatccatggctgctttaaaacagccaacaattagagttgttgctattattgctgaaggagtacccgagtcagacactaagcaattgattgcatatgcccgatcaaac

SEQ ID NO: 220737 - DNA, 601 bp, Glycine max
aaaatattgtacacataaatttagcttcaattcctaatcacctggttaatttcttcacatagagctatcaagatccaacgttaacatgaagaatgttttagtaaggtcagctgcgcgagctctgcttggcggcggtgggcggagctactaccgccagctctcaacggcggcgatcgtggaacagagacaccagcacggtggcggcgcgtttggaagcttccacttgcggaggatgtccactcttccagaggtaaaggatcagcactcagaggagaaaaagaacgaggtcaacgacaccagtaacgccgtcgttacgagttactggggaatcacaaggcccaaggttcgtagggaggacgggacagagtggccgtggaactgcttcatgccatgggatagttaccactctgatgtgtcaatagacgtgaccaagcatcatacaccaaagtcattaactgacaacgttgcttttagggctgtgaagtttctaagggttctctctgatatctacttcaaggaacggtatgggtgccatgctatgatgctggaaacaatagcagcagttccaggaatggtgggagggatgctgctgcacttaaag

SEQ ID NO: 220738 - DNA, 280 bp, Glycine max
ggaaaaaaaattaagtgtatgtttataattacccaaaatatatcacaatttaatacaagtctaatatgaatagaaaggattacttgagcagtggttgacattatcactaccatggaacaaagctcttgagatttcttatttgatgaccaaatatagagagtgtgaagtaactaattctagcgagcatccttggataaaagaagatcatccactttccgggcattgcatagctcatcagcacaatcaccactctcaaaaacagcagctgcccccattccag

SEQ ID NO: 220739 - DNA, 465 bp, Glycine max
aattatgggcactataatatttagtttatttacaccgaaaccacattattaaataatccaaaacatcacgcatcatcatcatcatcttcttgttcttgttcctcatcatgttctttcagatccgagaggctcctagacttgaagctcccaaatcttgctctcatgtgatcaacataagacttaggaaccaaaacatgatcttgtttattttcttctgatgaataagaagaagaagaagatggtgacacttttttgggcttctcttcctcttccaaataattgtcttcatcttcatgaacaggcaaaaggggcatcgattttgggttggaccaagcgtaaaaagaagattttcttgtcaacttcgtggctatttgaacccttcttctcttgttgaaagggttcttttgcttttgaagctccttcactgtgttgagcgtgttcacttgtgatagatccgtgaatgac

SEQ ID NO: 220740 - DNA, 532 bp, Glycine max
  unsure (1)..(532): unsure at all n locations
catgtatcaagttcgaattataatttacataattattgcaagcggtggataatagataaagtagagtttaaaatgcaagaagccaagaggctcatgacatgaaacggtgaacagagatgaaacttgaaggaacacacaagtgaagttgaagctcaagggtaggtttcagaggctgggacaggggcataggaaccaatgaagacgtctccataaatcaagccagccaaacctcctccaatcaatgggccaacccagtagatccagttagcagccaagtctccactgaccacagctgggccgaatgagcgagctgggttcattgaaccgccgctgaatgggcctgctgctaagatgttggcacccacaacgaacccaatagcaatgggtgcaatgatacccaatgaccccttctttgggtctactgcagttgcatacacagtgtaaaccaacccaaatgtgataacaatctcaaacactacagctngcaaatcgttcacaccattagccggcgagtggcttggaatgctcttag

SEQ ID NO: 220741 - DNA, 440 bp, Glycine max
aatctaaaataataaagtgatagataaaaaaaaaaaaagggatggatagctcaaggcgaggcacgagataaccactttttaccatatatatatagagagagagaatacgaagcacactgatcacaggatgatgctctctttaagtagggaagcagatcttatcagtacacataggtaggttgaaattctagctctagcaatctagctagagaaggtagtacttgcacaacacacagcacatgataatttattttatacacaatctcattctcatggtgctcaagatgcatggactaattaagcaacaatgttggtctgataggcagtgtccacagataaattgggtacccataaaatggccttgcttccaaggaaatggcaaacagggttagttccaagatcaactcccataagttgatgaagcatttgatgattcattc

SEQ ID NO: 220742 - DNA, 430 bp, Glycine max
aacgggagaaaaactggtactattctttacgggaattggaatagcagttgtgtttaatgggggatgaaaggaaaatgaccatgcggccccattttaatcactggtgccccctaaacacccccctttttattatatatatatatatgaaacaatatttgaactggcactgaggaataatgctaactctcacttctctctagttttggttcagggtcaacttgtcagtttgaaaaggacttttttgctggtacactggactgagcaggttttttgaactgcaccacaatcatgggcatgttgtcacatccttcaccactggcaggtgatggggccaaacaccgatcaagtactttttcacacacgggagaaagttttgtttcccagtgcaattgttcatgaacaaaatcaaccaggtgttgacttgacatgc

SEQ ID NO: 220743 - DNA, 512 bp, Glycine max
acagacttattgagaccaaactagttaaaaaaaaaccatgtgattatttcattagccaaaactacaaaccacagtatgcacaccaaaaacaaattacaaaccacactatgttaaagccacagttgcaggcacgcttgtaaaactaagttattccactacacactcttgaagagtaagtgggtagctttaggctatggagaacatgtactaatgtgcctcactcttttaacacaaaccttaaatcacagacagaagcatgtagattgtaggggagcttatgcatgttcatggaatgggatagacaactatttttccagttgctctgtttgtttccagatgggcaaacgcttcaacagtctgagaaaatggaaacgggctcttcgggtcaagtattggcttcagcttaccactctcaaaataggggtttagtttctctaagatcgccccatcagtagagagtatgaaaaggatagctggatgaaatccaggtggaactattgtcacaacttttc

SEQ ID NO: 220744 - DNA, 544 bp, Glycine max
ctctggttgattcggatctatagtcttcagtttctcctcgttgttcttcgctttcctgttttcaatttcgattctttcgttaatttaataagatgtttgggagggcaccgaagaagagcgataatacgaggtactacgaaatcctcggcgtctccaagaacgcttcgcaggatgatctgaagaaggcttacaagaaagccgccattaagaatcaccccgacaagggcggtgatcccgagaagtttaaagagctggcgcaagcttatgaggttctgagtgaccctgagaagcgtgagatatatgatcagtatggtgaagatgcgcttaaggaaggaatgggtggtggcggtggccatgatccatttgatatcttttcatctttctttggcggggggagtccctttggatcaggtggaagtagtcgaggtaggaggcagaggcgcggagaagacgtggttcaccctctcaaggtctctttggaggacctttatcttggaacttccaagaagctctccctcttcagaaatgttatatgctccaagtg

SEQ ID NO: 220745 - DNA, 514 bp, Glycine max
gtcagtggactcatcaggatcctcatcagcaatcctacggatcatatcaagggctttcctaataagtttcttcttgattgtctttagactactatgttgctgaagcatttctcgcgatacattaagtggcaatgtgtcagaatcaacaagacccagcaaaaagtttaggtacttaggcaacagttcattaaattcatctgaaatgaacacacgtctaacatacaacttcaggttggatttgtttgcgttataatagctctcgtataaatcttgaggtgccttaggtggtacaaacaggactgccttgaactcgacatcgccctcagcagtgaaatgactccatgctaaaggtttctcatcactgaaatccttggcaagagagtgcgagaatttggtgtattcttcttctgtaacctcctttggattcctcagccatatagctttcacatcatttaaaagttcccattcataagttggttccttcaccggctgtcgcctgggctttttttcttcg

SEQ ID NO: 220746 - DNA, 280 bp, Glycine max
ctggaatgggggcagctgctgtttttgagagtggtgattgtgctgatgagctatgcaatgcccggaaagtggatgatcttcttttatccaaggatgctcgctagaattagttacttcacactctctatatttggtcatcaaataagaaatctcaagagctttgttccatggtagtgataatgtcaaccactgctcaagtaatcctttctattcatattagacttgtattaaattgtgatatattttgggtaattataaacatacacttaattttttttcc

SEQ ID NO: 220747 - DNA, 477 bp, Glycine max
cttgcggggaaggaaaggccaaagtagcattagcaatagcatgtttgttgctcccatttgagtttcaagtttgagcatttgcttttgtttttttcctagagcgcagttatggttcagcttcctccaaacgcgagccccctcaagtgactgctttataagccaacctctttcacaaacaaacatcacaatctctagagttctacacacaagcacgttctagagagagataggaaattattaaattaagcaaatgggtcgcaatagcatagacatggacagggagagattaacggctgagatggacttcaaggactcatcctccgccgtgatcagaatccggcgccggctgccggatttccttcagtcggtgaaactgaaatacgtgaagttgggattgggatacggttactcatactcatgcaaagcagccagcattgtgatgctagccatcaccctccctctcgtgttctctctaac

SEQ ID NO: 220748 - DNA, 539 bp, Glycine max
gatcgctgctggaggcggcatgcactagcttccggggccttgcttgcagataggtcttcgtttttttgctgaagattctttgcaaaatggatttggtagccagttgcaaggaaaaattgcaacatttccgtataaaagagctcaaagatgtgctcactcatttgggactctcaaaacagggaaagaagcaggatcttgttgatagaatattagctatcctctcagaggaccaagtttccaaattgtggaccaagaagaatgctgttggaaaacaagaagtggccaaattagtggatgacacgtttagaaagttgcaggtatccggggccattgatcttgcatcaaagggacagggtgcctcagatagcagtaatgtgaaaattaaaggtgaaattgacgattcctatcaatcagatacaaagattcgctgtctctgtggaaatgtattcgatacagagccattggtcaagtgtgaagatacaagatgccatgcgtcacagcacatcagctgtgttattattccagagaaacctatggat

SEQ ID NO: 220749 - DNA, 533 bp, Glycine max
  unsure (1)..(533): unsure at all n locations
ctcgagccgtgctggtcttctgtgacaagaaatctgaaggtcagctaaattctgttgttttcacttttcaatgtcactggatcaactttatggtcatcatctattattgcatatacttgttggctttttaatgttatctatctggactttcaattggcatttgttatgtcttggctaaagttactgttgtgtaaagatttaaagttatacattccttgtgcttccagccttgtactgccacatgtatatttgtttaatcaaacagcaaccattttctgtgtgaataaatggttacgtagcaaagtttaaaaatctgttctgaatattctttttgtaaatatatgttgctccttactgttttgggtgtggaagtgcagggtcaactggttcctgatcataagacatttccatctggaatcaaagctctagcagattatgtacatggaaagggactcaagcttggcatatattctgatgctggggtttttacatgtcaagtcccgccaggatcaattntccatganacagatgat

SEQ ID NO: 220750 - DNA, 570 bp, Glycine max
  unsure (1)..(570): unsure at all n locations
cggctcgagctaactctcattaattgcaagaatggcacttcgttgcttggtgatgtccctttctgttctcttcactcttggtcttgcgagagaaagccatgccagagacgaagatttttggcatgctgtttggccaaacactcccattccaagttcattgcgagatcttctaaagcctggccctgcaagttagttttgtgaattatcaactctagattcttgattatgggtttatatcttcctagaatgctcaaggttaccccataattggaatggaaaggttgaacgaagaaagagaataaaataaaaagaaaagaagaagaataactatatataaattaccttttattttaaacactccagcacctttttttatctatttatatcatatgatatcataaattctattatatttatatttgtctatttatttactcaactcttagtatttaataatataataagtatttatcagatattttcctttaacaaaacgaagaaagaaaatatatttttatatatgaaaaatnaaatttggacatctcttttggtgttatatctatgggagac

SEQ ID NO: 220751 - DNA, 189 bp, Glycine max; identical to SEQ ID NO: 220684

SEQ ID NO: 220752 - DNA, 397 bp, Glycine max
ctcctatagaatcctctggttattccatatccccgtttgccttcactctagaagcgcgattcatttctaccaacacaagaagcatggctgccatatcaataccttttgacatgaaagcttggacatactatgagtatggaagaaccaacgaagttcttaagaataatcagagagtggctatgcctgatgagaaggaagaccagcctctcgtgaaggacgatgatgctttccttaacgccattgatcataagataatggcaggctattttaagaacagggactgctatttacctactgctccgtgctatgatgctgctggagcggtggataaagtgggaagagaagtgaataaatgtaaaggtggagatgaagaatatggggatatcaatgagaaagc

SEQ ID NO: 220753 - DNA, 451 bp, Glycine max
aaaatccaaaagtggctagttttttggttcaccaaaagcctcatacaaaatcttaacaaatgaaagcaggtggctgctcgccacaatgataaggcaaatgtaacaaaaaaaaaaaaaaaacagtattataagatatgtgaaaaacaggtaacccatcctgataaatgcttttgattgaagtttgcatccaatgtagatatgaagaggtataacgagacctcttttgcaccatctaaaaaatttgccaaaaacagcagaagaattccctgtaatggggtgatcatttcacagtcaagatcttgatgacagaagcagtgcccacacgatgaagtgccacaaccgaatccccgttgtggcagagacccttggacttggcatgttgcatggcgaattctattgcttcttcagttgtttcagcatgagaagctctagcagaagctgcactcaatac

SEQ ID NO: 220754 - DNA, 542 bp, Glycine max
  unsure (1)..(542): unsure at all n locations
cataggctaaataacaataacaacttaacaaattttatttcacccccttaatatttgcacatatctgcagccatggttattcttagagaaattgacttccttatttctgaggggaaggcatcacagaatgatggcaactcaacttctcccttgttaggtttggtggacctttccttgtactatacatgtttctacaaactccagagttttttcgtaagtttctgggtttttcttctgtgccaacttttttctaatgactcaagggtgaggggagaggagcaggtatcaaagcctgaggagtttagccaccaagagaatgagtcaaagagaagcttagatagtgagaattatcttgagacggatgaggtcacaatggtgatggcaaaacttggatttttttgcagctcagaaagtgaggaacttcaggagaagtatggttccaaggagctttctaaactgtttgaggagcaggagccaagtttggaggaggtgaagcaggcttttgatgtntttgatgagaacaaagatggctntattgatgc

SEQ ID NO: 220755 - DNA, 550 bp, Glycine max
tgatttttgtgttggcctttcgtttgtttgtttatttaggatattgtaagagttagtatgataaataacagcacgtgcatcggaattttcattaagttttttttttttttcagttgatagtttattgcctcagatccgccatggacgcagctccgaaggcctttgtctgatttcctctttctttcacttgtcatgggactgaatcgaactccaagacataaccctgttcttccaaccaaatctccaattctcagtcgttcacattctcgttctcagaccatgaaaacaacacagatctttggtgtgtctctctcactcattcttatcaacctggctgctataatggagcgtgcagatgaaaaccttcttccatctgtctacaaagaagttagtgaaacatttaatgctggaccatcagatttgggttacctaacattcgtaaggaactttgttcagggattatcatctcctctagctggtatacttgttatcaactatgatcgcccgacaattcttgccatgggcactttctgctgggctttatctactg

SEQ ID NO: 220756 - DNA, 540 bp, Glycine max
ccggagcaatgcggagaagtttgagttccaagcggaagtgtcacggcttatggatattatcatcaattctctctacagtaacaaggatatcttcctcagagagttgatttccaatgcttctgatgctttggacaagattaggttcctttccctcacggataaggacgttttgggagaaggtgataacaccaagcttgatattcagattaagttggacaaggaaaagaaaattctctcaattcgagacagaggtattggtatgacgaaggaggatttgataaagaatttggggacaatagcaaaatctggaacttctgcatttgttgagaagatgcaaacaagtggagatctcaatctgattgggcagtttggagtcggcttctactctgtttatctcgtggctgactatgtcgaagtcattagcaagaataatgatgataaacagtatgtatgggaatcaaaagctgatggagcatttgcaatttcagaagatacatggaatgaacctctagggcgtggaactgagaatagattacacct

SEQ ID NO: 220757 - DNA, 571 bp, Glycine max
  unsure (1)..(571): unsure at all n locations
aaaactcagcatcacattcactcgcacaacacagtacaggagctcaaatatggataaagcaattcaaagacagagagtcctgcttgatcatcttcaacccatttcttcaagttcaaatttttcttctcaaacccatcaatctacggatctctcagcttcattatgttttgccaagaattcttcgcacggtcaaataggtggatcagatgacgacgtggtgattgtagctgcatatcgtactgccatctgcaaagcaaagcgtgggggctttaaggatacccttccagatgacctgcttgccacagttctgaaggctgtaatagagaaaacaaatgtgaacccagcagaagttggagacattgttgtgggcactgtactggcacctggatcagatagaggaattgagtgcagaatggctgccttttatgcaggtttcccagagacagtgcctcttcgaactgtcaataggcaatgttcatctggacttcangcggtttctgacgtagctgcttatataaaaactgggttctattgaaatgggatgggngctggnattgagtctatgacagta

SEQ ID NO: 220758 - DNA, 556 bp, Glycine max
ggaagaactaggaattccttttgttgttgttggcgttgatgttgtccttgcccctctcctcttctttgatgggttccgaggtctccaaacaggttgtgagacgaaaggctatccacacagagggaaaaactctgtctgatcttataaactctggggaagattaccctggctcagattatcatccctcagacagaaaaaaatggatgtctgagctcaaccctgagaaagctgtgataaaacaaattgtttggcctggaacccatgattctgcaaccaacaagattgtcatcccatgcatcactcggccttttgctcaatgccaatccttgtccatctaccagcagcttgtgttggggacaagggtgattgacattcgggtgcaggaggatcgtaaagtgtgccacggagtcctcgttacatacagcatcgacgttgtcatcaaagatctcaagaagttcttatcagaaactcagtccgagatcatcattctcgaggatagaaccgagtttgggcactaggaccctcaggaattcgacatgtagcttgaggaacaact

SEQ ID NO: 220759 - DNA, 570 bp, Glycine max
caacgctgttagaccggctgtatcggtacttgttgatgactggcactgcctgaaaaccatggtgaggacttttgagacacattgtggatccttgtctcaatacgggatgaaacacatgaggtcctttgcaaacatctgcaatgtagggataaagaatgaacaaatggctgaggcttcagcacaagcttgtgtcagtattccttccaatccctggagttctctgcaaaggggtttcagtgcataataactccctgtaatgtgcactagtaaagaccaaagtatgattattgttacattatgttacatggttgtacttgtatatacatatcttgtcccacctttgtaaatacaattgggacactactaggattgggaagaagggtctttacatttatagtttggcaaatagatattgcaactacctttgtataattctatttctgaagaagcaattacaatttacaagggatggtgccatttacggcatatggattaatgagggataaagggaccaattgctctggatatccactcatacaatgcatgtatgacaacacatagtaatatgat

SEQ ID NO: 220760 - DNA, 477 bp, Glycine max
ctcacttgcatttcgcgcatttcggttttgctgcaccatcttctcttggcttatggggaggagattgagcgtgatgctggtcgtttggtagattgtagggctaggatgaatttctgccccttaggagcttgtgccttggctggtacagggcttcctattgatcgattcatgacttccgaagctttagggtttacggctcctttgaggaatagtatagatgctgtttcagaccgagattttgtactggagtttctttctgctaatgccatcacagctgtgcatttttctcgacttggtgaagagtgggtattgtgggcttcggaggaatttggattcatcacaccaagtgactctgtttcaactggaagtagtttaatgcctcagaaaaagaatccagatccgttggaactttgttcgtgggaagtctggcagagacataggggatcttgttactcttctcacattgtgcaaaggact

SEQ ID NO: 220761 - DNA, 465 bp, Glycine max
acgaaggagaacatggtttcctttagtattgatagacatggtgaacaagtttggaattccatgcaagaaaatgaagcagctaatgaagaagagagtagtaaaatcggggggtaatagagttaattagaagatgcggagggaagatgaacgggatagttattgatggagtcatcccaggggttgccacgccagtcctttaagaatggcatgtccctaacggccttccagacggcgctgttacacttgaaacccgacccgaaggcgatctgccagacccgatcccccttggagacccgacccttggcctccgtgtaggccagctcgtaccagagggagctgctggaagtgttaccgaatctgtgcagggtcatcctggagggctccatgtgccactcgctcagctcaagattcttctgcagctcgtccagcaccgctctccccacgcgtgtatgcaaaaatgctcca

SEQ ID NO: 220762 - DNA, 514 bp, Glycine max
cagggagcatctgtacaagactcagaaacctccacgcccatggaagcaaaggcttgagatatgcattggagctgctcggggtttacactatctacacactggtgctaaacacactatcatccaccgtgatgtgaagacaacaaacattttactagatgagaagtgggtggctaaggtttctgattttggactgtcgaaaactggtccaacattggataatacccatgtaagtactgtggtaaagggtagttttgggtacttggatccagaatacttcaggaggcagcaactgactgacaaatctgatgtttactcgtttggtgtggttctctttgaggtattgcgcgctcgaccagcattgaaccccacccttgctaaggagcaagtgagtctggctgagtgggcagctcattgctaccagaaaggcattcttgactcaattattgatccttatctaaagggaaaaatagctccagaatgcttcaagaagttcgccgagactgcgatgaagtgc

SEQ ID NO: 220763 - DNA, 547 bp, Glycine max
gtatcgtatcgtattggtaggttgaaaaacaaagagtgtgtgttgttgttgtgtggtttggttttcacttttgttcatcgtttgcgagacacacaggagagaagagatggcgacgagggtggtggcggaacagaagccgaagacgaagattgtgtgcacgctggggcccgcatcgcgctctgtcccaatgatcgagaagcttctgcgggcgggcatgaacgtggctcgcttcaacttctcccatgggtcccacgagtaccaccaggaaaccctcgacaacctccgcgccgccatggagaacaccggtattctctgcgccgtcatgctcgacaccaaggggcctgagattcgaactgggtttctcaaggacagtaagcctatccaactgaaacaaggtaatgaaataaccatttccactgactatgacctaaagggtgatgagaagacgatttgtatgagctacaaaaagctgcctgaggatgtgaggcctgggatggtcatactctgcgcggatggcaccatatcatttacagttttatcatgtgac

SEQ ID NO: 220764 - DNA, 525 bp, Glycine max
gaggcggatggggttttggtttacgagaaccaaaatgagattcgtgtgcggctggtttccgatcaacgctagcattggcaacaacagcaagtccatcgagatcagaaatttcctcggcgagaagaaggtgaggaaagtagacatgcttgagggcgtgtcggttgttagatctgaaaaggtcaaagatgaattggtcttggatggaaacgacattgaacttgtttctaggtcatgtgctctcattaaccagaaatgtcatgttaagaataaggatatccggaagtttcttgatggtatttatgtcagcgagaagggaacaatattggaagagtagaggatgaaaacatttgtgttggtttttggtttggagaccctttttgtttacttgttgagatatgattttacaatttgtgttggcaaacttttccttttgggatattctaaaaacaaaattattcttatatatgctttggtgttgaatatcttctggaataagtaatctttatgcatatctatatatgcttt

SEQ ID NO: 220765 - DNA, 536 bp, Glycine max
  unsure (1)..(536): unsure at all n locations
tcgtaacagaaacggtcactggaagttgtctctaccaccctctcagccatggcaacaattccccctagccgatcatcatcacacgcgtttgttgccatggcaaccttcacgactctgttgttgtgcacggcggcggcgaaggagagcgtgtacgagatactccccaagtacgggctcccgagtggtctgttaccggataccgtcaccgactacaaactcgacgaggatggccaattcgtcgtcgttttgccgaagccctgctacatacagttcgattacttggtttactacgagagcaagatctccggcaagctcagctatggctccatcaccaatctcaagggcattcaggtccagcgcctcttcatctggttcaacgtcgacgagatcagggtcgatttgccaccctccgacagcatctacttccaggtcggcatcatcaacaagaaactcgacgttgaccagttcaaaaccgttcgttcctgccgcaaatccctctcgtgcccncctttcctttcacgtccaattcagcttcc

SEQ ID NO: 220766 - DNA, 472 bp, Glycine max
caatactacaatttttgattctcttaaatgaattgaattatctttggaatgagggaaatttttcatgttcaagcccgccaatgtggcaaccaaattggaggcatgttttgggaggtgatgtgtgatgaacctgggattgatgccactggaaattacgtaggcaattcccatcttcaacttgagagggttaacgtgtactacaatgaagcaagtggaggacgctatgttcctcgagctgtgcttatggaccttgaaccagggaccatggatagctcgcgttctggtccttttggaaaaatattcacacctgataatttcgtgttcggcctaaatggagctggtaacaactgggctaaagggcattatactgagggagctgaacttattgattctgttcttgatgttgttcgaaaagaagctgataactgtgactgcttgcaggggttccaaatttgtcctcactgggaggaag

SEQ ID NO: 220767 - DNA, 426 bp, Glycine max
aattaatcaaacatggctagggttagtgctttgtttcactctttgctcttgattgcttcccttgtattggcttctcaaatccatgtttcctctgggaaactagtccctggactatcatggaattactatttgttgacatgtcccaagcttgagaggattataaggaagcatcttgaggatgtcttcgagaaggacagtggagtagctcctggcatacttcgactcttcttccatgactgctttcctaatggatgcgatgcgtctatattgttgaatggagacggtgacgagaagcaacaccgtgctaactttggtttaaggcaagaggccattgacgccattgaaaaccttcgggttctcatttacaagcagtgtctaccagttgtctcatgctcagacatccttgttatcgcagcacgtgaagct

SEQ ID NO: 220768 - DNA, 544 bp, Glycine max
  unsure (1)..(544): unsure at all n locations
ttttcacttttgttcatcgtttgcgagacacacaggagagaagagatggcgacgagggtggtggcggaacagaagccgaagacgaagattgtgtgcacgctggggcccgcatcgcgctctgtcccaatgatcgagaagcttctgcgggcgggcatgaacgtggctcgcttcaacttctcccatgggtccaacaagtcccaccaggaaaccttggacaacttccgggccgccatggagaacaccggtattctctgcgccgtcatgctcgacaccaaggggcctgagattcgaactgggtttctcaaggacagtaagcctatccaactgaaacaaggtaatgaaataaccatttccactgactatgacctaaagggtgatgagaagacgatttgtatgagctacaaaaagctgcctgaggatgtgaggcctgngatggtcatactctgcgcggatggcaccatatcatttacagttttatcatgtgacaaacaagcgggtttggttcaatgccgatgcgagaactctgccactcttggtgagagga

SEQ ID NO: 220769 - DNA, 552 bp, Glycine max
  unsure (1)..(552): unsure at all n locations
caacagcactgaagactgcaggtctgacctcatttcctgattacctggtgttacatatgcggaggtttgttatggaggcaggacgggaacctaaaaagcttgatgtgcacattgatgttcctgatatcatagatatcagtcacatgcgcagcaaaggtcagcagtctggggaagagctattacctgatggtgttcctggagagcaagattctaacaaaatttcggccaacgaagaaattgttgcccagctggtttccatgggctttaaccatctccattgtcagaaagctgctataaatacatcaaatgttggagtagaagaggcaatgaattggttgttatctcacatggatgatccagacattgacaatcctatttccaaaggccatggctctgagacaattgttgaccaatcaaaagttgatattctaatttcttttggatttgaagaagaaattgctaggaatgctctgaagggcatcggtggtgacattgagaaagcaacagattggatatttaacaatcctgatgcatcagtcntcagtatggatg

SEQ ID NO: 220770 - DNA, 523 bp, Glycine max
  unsure (1)..(523): unsure at all n locations
caacttcatttcaaagaattatagctgcacaaatccaacatggttcaagaggtagtggtgaaatgtcaacaagggacttgcagaagatggttcaagcacttccacaatacagcgaacaaattgacaagctctccctccatgtagagattgcaggaaaaattaacagaattattagggagtcaggacttcgggaacttgggcagctggagcaagatcttgtttttggagacgcagggatgaaagatgtgatcaaattttttactacaaacgaagatacaactcgtgaaaataagttgcgcttgttaatgattcttgcgtccatatatcctgagaaatttgaggctgaaaagggtctgaatttaatgaaggtagcgaagttgacagatgaggatgcaattgcaataaataatttgagaatgcttgggggagaacctgataccaaaacgacttcgacgagttcttttgctcttaanattgatatgcacaagaaaaagcgtgcagcaaggaaagatcgatctggtga

SEQ ID NO: 220771 - DNA, 504 bp, Glycine max
aattaagcattgctcctgaaggatccaagagctttgattgcagaacctctaagaatgtattgatggtagattgcagccaccgcagctccaacaaacggtccaacccagtaagatctcattggtcggcccacgctttgtcgttgttgaagatcacagctggtccgaaacttcttgcatggttaatgccggttccagtgacagggattgtagccaagtgaaccatgaagacggcaaacccaatgggaagtggggctaacacaggaacatgagagtccctaacgttcctcttaggatcagtggcggagaaaacggtgtctacaagaacaaaggtaccaatgatctcagcacccaaagcggtacctttgttgtaaccatcgctgacagtgttaaccccacctgcgtacctgttgtagaacgatttctggaaccctctggccaacccagcaccgcagattgcaccggcacactgtgctatcatgtacaacaacgccctcaccaaagaca

SEQ ID NO: 220772 - DNA, 419 bp, Glycine max
caaacccacctttctatcttttccatcagagcattatttgataccctctctgcagcaacgcatttttcctcattctcttaaacactttctcttttctccttcgtttgatctgcattaaaattgcataaatatataaaaaatgaagaagtttgtactcaagttagatttgcatgatgacaaggataagcagaaggccttgaaaacagtttcaactctttcaggaattgatgccatcgccatggatatgaaagagaagaaattaacagtgattggaacagttgatccggtaactgtggtgagcaaattgcgcaaaaactggaaggcagacatagtagcagttggaccagtgaaggagcctgagaagaaagaggatcccaagaaagtagaggcaaagaaagagggagaaaagaaagaggagg

SEQ ID NO: 220773 - DNA, 543 bp, Glycine max
  unsure (1)..(543): unsure at all n locations
ggcttttatcttttgacttttattattgctgacttcctctttgttttctgatctatggcttccaaggagttctctggtctttgctccttggctccttcactatctgagagcattttgtgcactactgggttgaaaatgtatatgctggagagcaaaggaggtgccatagcatgcatgttcttgtctcttttcttcttggggacatggcctgctcttttgactatgttagagaggcgtggtcgtcttcctcagcatacctaccttgattactcaatcaccaatttcttggctgctttactcattgcttttacacttggtgggataggcaagggcacacatgatcagccaaatttcttagttcaacttgctcaggataactggccctccgttcttttcgcaatgggggtggtttgttccttagccttgggaatctgtcctgccaatatgcatttgcttttgttgggctatcggttactgaagtgatcacggcangcataactgttgtcataggcacaaccttgattacttttggatgacaaatca

SEQ ID NO: 220774 - DNA, 542 bp, Glycine max
ctccaactcaacccagctgtctacagccgctacaactaaaaaagccctttgctttctcttgcattgctcttttcaactcgtcacattggctcatttatcacccatcagatttagggtcccttctgccatactgcgcacattgaagatgacaacaacatcattttctggcttgcaatttgcaatgtcaagatcatgcattccttcatcacaaaagattgcagatgcaggggctgtggttcttggcggcaagtccaagattgggtcgtggaataaacttgcaagtgcatgtcatattgcatcagtgcaaccttttgggcggggcttcacttcatcgtccataaaatctgtcaaaagtgtcacaaaggctatgactgagtccagtgcacaaagtgcagtctcaggattgccaattaatctgaaaggtaaaagggcttttattgctggtgttgctgatgacaatggatatggatgggcaattgcaaaatctcttgctgcagccggagctgaaattcttgttggcacatgggtacctgctctgaata

SEQ ID NO: 220775 - DNA, 555 bp, Glycine max
  unsure (1)..(555): unsure at all n locations
cctttctcctaaaacatctccagtgggttcttcttcttctattacaacaacgtcgtccaagaccatgaccatggccatggccacgatcctgctcctgttcacggtcttcgcggtttcatcggccctagacatgtcgataatctcgtacgacaacgcccacgccgccacgtcgcgcagcgacgaggagctgatgtccatgtacgagcagtggctagtaaagcacggcaaggtgtacaacgcgctcggagagaaggagaagaggttccagatcttcaaggacaacctgcgattcatcgacgaccacaactcccaagaggaccgaacctacaagctcggactgaaccggttcgcggatctcaccaacgaggagtacagggccaagtacttgggaaccaagatcgatcccaaccggaggctcggcaagaccccgagcaaccgatacgcgccacgtgtcggcgacaaactacctgaatcggttgattggaggaaggaaggtgctgttcctccagtcaaagaccaacgaggctgtgggagcttgtgggcattnctcagcat

SEQ ID NO: 220776 - DNA, 536 bp, Glycine max
  unsure (1)..(536): unsure at all n locations
gttttgcttttgccacttctataccatattttcttcgttcgtccttctgtgatggcttctggcaccatgagcaggtcagggcaaccaccggatttgaagaagtacatggataagaagcttcagatcaagctgaacgcaaatcgcatggttgttggtactctccgtggctttgaccagtttatgaatttagttgttgacaacactgtggaagtgaatggcaatgagaaaaatgacatagggatggtggtaattagaggaaatagtgtggtcactgttgaggcgcttgaacccgtgaataggacttgatttctgtttgttgtaaacatttatatgagtatttcctggttttaacggttgtgtatttgaacaatgtagctatggagagtcacatgtaattgtggatcttaagaagagggtcatgttggccactcatttgggttctttgggctaaattgttcgggaaggatacctatagtgttntagtgtgatggctgtgactagactcaatcgaaatgttacgtatatccttttagccg

SEQ ID NO: 220777 - DNA, 474 bp, Glycine max
cgtctaaaagggatatacgtaaacatttggggtgaggctagtctcagccatcacactaaaacactataggtatccttcccgaacaatttagcccgaagaacccaaatgagtggccaacatgaccctcttcttaagatccacaattacatgtgactctccatagctacattgttcaaatacacaaccgttaaaaccaggaaatactcatataaatgtttacaacaaacagaaatcaagtcctattcacgggttcaagcgcctcaacagtgaccacactatttcctctaattaccaccatccctatgtcatttttctcattgccattcacttacacagtgtggtcaacaactaaattcataaactggtcaaagccacggagagtaccaacaaccatgcgatttgcgttcagcttgatctgaagcttcttatccatgtacttcttcaaatccggtggttgccctgacctgctcatgg

SEQ ID NO: 220778 - DNA, 502 bp, Glycine max
  unsure (1)..(502): unsure at all n locations
caatactacaacttctgaatcacttagttgaattgaattatcttcaaaatgagagaaatccttcatgttcaagctggtcaatgtggcaaccaaattggaggcaagttttgggaggtgatgtgtgatgaacatgggattgatgccactggaaattacgtaggcaattcccatcttcaacttgagagggttaacgtgtactacaatgaagcaagtggaggacgctatgttcctcgagctgtgcttatggaccttgaaccagggaccatggatagcttgcgttctggtccttttggaaaaatattcagacctgataatttcgtgttcggccaaaatggagctggtaacaactgggctaaagggcattatactgagggagctgagcttattgattctgttcttgatgttgttcgaaaagaagctgagaactgtgactgcttgcaggggttccaaatttgtcactcactgggaggaggaactgngtctggaatgggtaccttgctta

SEQ ID NO: 220779 - DNA, 477 bp, Glycine max
ctattcccttacctttacctttaccatttcatggggactctaacacaacacccccttatcctgcgccattaccctccttcatatccttcaccctataaaatcacccccacacacaccacttacctaaaaactaaaaacccaatcttgttttctctacaccaccaaccatggactacccttattccaccaccgactaaaacccaccctatgccagacacctaccaattccggcgcctacaggcacctactcccgccgccttcctccgtgctgctgtacccaggaggaaaccgccgccctcattgacgcctaccgcgacaaatgagactgcctcggccgcaccaacctgaaggctacccactggcaagaggtggccgacgccgtcaccgcgcagtgccccaacgcctaccccacggagaaaaccgccgtgcagtgccgtcacaagatggagaagctgcgcaaacgctaacgtaccgaaa

SEQ ID NO: 220780 - DNA, 459 bp, Glycine max
  unsure (1)..(459): unsure at all n locations
tctctctgtctctcccctgcggctagggttttgtctttcactcactctcttctctttcttttcttctcatttcccttctctttcgatctgaacaataataattaaccatggaaccgtcgctgagttaacctttntcttctgcgcggtgctgttctcttttgttgtttgggtttttttttttctttctgagaagggcttgttgttgttgtgtttcgaaataatggcgactacgaatccctttgatttgttgggcgacgacgccgaggacccctcacagttgatcgcggcggagcaactgaaggccgcggcagccgcggccaccgcgccacccaagaaggaccaggccaagcccggagctcgcagcggcgcgccggcccagttgccgtcgaagccgcttcctccctctcaggctgtaagggaggctaaaaatgaaacttcttacggcngtcgtggtggtgg

SEQ ID NO: 220781 - DNA, 562 bp, Glycine max
  unsure (1)..(562): unsure at all n locations
aaatcaaaactgagaattcaatctataaataaaacgaaactcaacaacatttgtcttatccgccaccatataacccccccggaatgtccaaccatagtaacagaaaaacacaaggaaaaggctacaacgtatgaagaacaacctaaatttacattttaaggcatagaagtcaaaataataacccttctaattcaggaaatccaattaccaaagtttttttcctgcttttaagtccaaatccaagaacccaaaattgacaaaaaaaggacagggaaatgtcagaagggttcaggaaaacctcacttgccacccaaggatgggaagtgcccaggatcctcaattgatggagctggagcattgctgtatgcatttccactgtaacctcctctagaaccacggccacgtccccgaccacgcccaccagggtagtacctttccccttcagctggcttcagaaactcagtgatgttgacagacttcttggatttctcctccttctncaaagcatctttgcgcttatccttgtcagatcccaatttaataaagatctcatcattttctt

SEQ ID NO: 220782 - DNA, 559 bp, Glycine max
gaaaaaccaacatcgagtgttgtttttgtttggtccaggctggaccagggaatgaatagagatgagaggctttcggttgaagagaactgagttaagcggcgaagccaaacgcagaatcggcggcagaaattgccaccggaagcacgtcgaagacgggtgaaccaaacacaaaattccatccaccacttctcttttcaatccccaactcaaatctgtgaagaaaatctcaatttctaaattgtaattcttagcactactgctagtagtagtaaaaaaaaacaattagaaagtagtagagtgtttttttttctttttttcgtttgttttacttttaagatgggtgagaagagcaacgttggcggcgacgcgattaacacgactctgcttcacgggaagtacgagctgggccggctgttaggccacggaaccttcgcgaaggtgtaccacgcgcgccacctgaagacgggaaagagcgtggcgatgaaggtggtgggcaaagagaaggtggtgaaggtaggcatgatggagcagatcaagagagagatctcagcccatgaca

SEQ ID NO: 220783 - DNA, 531 bp, Glycine max
tgatcatggctacatatgaagatccacttctcggtgatgttcaggtctatccagagaaaggaacagttgctttttctgctggtttgcacggctgggcttttaccctgactaactttgccaagatgtatgcatctaagtttggagttgatgaaggaaaaatgatggaaaggctctggggtgaaaacttctttgatccagccacaaagaaatggtccagcaagaatactggttctgctacctgcaagcgtgggtttgttcagttctgttacgagcccatcaagcagattattaacacttgtatgaatgatcagaaggataagctgtggcctatgctgcaaaagcttggggtcaccatgaaatctgaggagaaggacctaatgggcaaagcattgatgaagcgtgtcatgcaaacctggcttccagcaagtagtgcattactggaaatgatgatatttcatctaccctctccatcaacagcccagaagtatcgtgtggagaatttgtatgagggtccccttgatgatcaatatg

SEQ ID NO: 220784 - DNA, 550 bp, Glycine max
aaacaactcagtttattgttaatataatttgtccctgagtcagctagtgtctgcccgacttttcttttgtgtgtgtttttctttttctcaacacaattttagagaagttctgtaaaataaagtaacttttctttttgttctcttacaattaattatatcaataattttaacatattaataatattcatgaaatttcagtgactgtggtatgtaaagtcagtcatattatgagtactttgtatcagaattattactattattatactttaacccttcctaaatggaagtgttaatcttttattaacctttcttttttgttgtgcagggtttttatcttccatgggctttgctagctctggatttaatatttggaaatcctataaagccagacattgtgggtatgattgcaggacatctatactacttcttaacagtgcttcaccctcttgctggaggaaagttcaagttcaagactcctctctgggtgtatccttttttaccacgttcctatggccactatgattaaatcaaattgatgttatttttatca

SEQ ID NO: 220785 - DNA, 533 bp, Glycine max
  unsure (1)..(533): unsure at all n locations
tgatcatggctacatatgaagatccacttctcggtgatgttcaggtctatccagagaaaggaacagttgctttttctgctggtttgcacggctgggcttttaccctgactaactttgccaagatgtatgcatctaagtttggagttgatgaaggaaaaatgatggaaaggctctggggtgaaaacttctttgatccagccacaaagaaatggtccagcaagaatactggttctgctacctgcaagcgtgggtttgttcagttctgttacgagcccatcaagcagattattaacacttgtatgaatgatcagaaggataagctgtggcctatgctgcaaaagcttggggtcaccatgaaatctgaggagaaggacctaatgggcaaagcattgatgaagcgtgtcatgcaaacctggcttccagcangtagtgcattactggaaatgatgatatttcatctaccctctccatcaacagcccagaagtatcgtgtggagaanttgtatgagggtccccttgatgatcaatatgct

SEQ ID NO: 220786 - DNA, 558 bp, Glycine max
gaatcatttaagagtagctctatagaagaagaaaaaaaatatgaaggttgtgtacttgcttgttgccatcttggctttgacatcctctcttgtctctgcctctgaccctagtcctcttcaagatttttgtgtggcagccaaagaaaaagatggtgtatttgtgaacggaaaattttgcaaagaccctaagcttgtcaaacctgaagatttcttcctacatgtggaacccgggaacactgacaacccaaataatgcacaagttactcctgtgtctgttgatcaactaccgggactaaacacgcttggcatatctttggctcgcatagattttgcaccaaagggtataaaccctccccacactcaccctcgagccaccgaaatccttttagtccttgaaggaactctctatgttggatttgtcacttccaatcaagatggaaatcgtctctttaccaaagtgttgaacaagggtgatgtgtttgtgttcccaattggtctcattcatttccaactcaatgtgggatatggcaatgcttgtgccattgctgctcttggcag

SEQ ID NO: 220787 - DNA, 530 bp, Glycine max
  unsure (1)..(530): unsure at all n locations
ggcgacgagggtggtggcggaacagaagccgaagacgaagattgtgtgcacgctggggcccgcatcgcgctctgtcccaatgatcgagaagcttctgcgggcgggcatgaacgtggctcgcttcaacttctcccatgggtcccacgagtaccaccaggaaaccctcgacaacctccgcgccgccatggagaacaccggtattctctgcgccgtcatgctcgacaccaaggggcctgagattcgaactgggtttctcaaggacagtaagcctatccaactgaaacaaggtaatgaaataaccatttccactgactatgacctaaagggtgatgagaagacgatttgtatgagctacaaaaagctgcctgaggatgtgaggcctgngatggtcatactctgcgcggatggcaccatatcatttacagttttatcatgtgacaaacaagcgggtttggttcaatgccgatgcgagaactctgccactcttggtgagaggaagaatgttaatttgcctggagtgatagtggatc

SEQ ID NO: 220788 - DNA, 558 bp, Glycine max
cttttccctcgttgaaatgaatatgggttcttctttgtggactttgtgtctaattttggcttcactagcctcttctgcattctgtgcctttccacggaggccagtggatgttccattcggcagaaactacgttcccacttgggcttttgatcacatcaaatacttcaatggaggttctgagattcaacttcatcttgacaagtacactggtactggcttccagtccaaagggtcatacttgtttggtcacttcagcatgaacataaagatggttcctggcgattcagctggcacagtcactgctttttatttatcttctcaaaatgcggagcacgatgagatagattttgagttcttggggaacagaacaggacaaccttacattttgcaaacaaatgtgttcaccggaggcaagggtgacagagagcaaagaatctttctctggtttgatcccacaaaagcataccacagatactctgtgctgtggaacatgtatcaaattgtgttcctagtggataacatcccaataaggggtgtcaaaacctaaagggcttggga

SEQ ID NO: 220789 - DNA, 538 bp, Glycine max
tgaatgtagacgcaggagttggctgcctcagcgttgaacactgttccatgctgttaaagcctccgttcacactctcacaccgattcaatttcagattttcctgtcaaactcgcattttccgggcacgaaactcgaggaattcgcgcatggcgcctcccatcctctccctcgctcttccctcaaacaccggtcgagttctcagcattcaatctcacaccgttcaggggtatgttggtaataaatccgctgtcttccctctgcaattactgggatatgatgtggatccaattaattctgtgcagttttcgaatcatacaggcaagctgagtctttaatttttcattcagcttctcaggattctgtggcttgatatacggtgtgacgctgtctgtcaatgtgaataagtttaggtgtggtatggtatgcttgattaagtaattctgcagttgtggtttgataaatttgatggttataatgcacgatacccaacgtttaagggtcaggttttgaatggacagcaactctgggatctaataga

SEQ ID NO: 220790 - DNA, 468 bp, Glycine max
tcgccctcgactcacatccttgtccgattccgcgaacgagtcgagtgaatcgggttggtaagatctattctgtttcttcgtcatggcaaccggacaactattctcgcgtactacacaggctttgttttacaactacaagcaacttcccattcagcggatgcttgattttgacttcctttgcggcagggaaacaccatcagttgctggaataattaaccctggttctgagggatttcaaaaacttttttttggtcaggaggaaattgccatcccagtgcatgctaccgttgaagcagcttgtgctgcacatcctactgccgatgtcttcatcaactttgcttcatttagaagtgctgcagcatcatccatggctgctttaaaacagccaacaattagagttgttgctattattgctgaacgagtacccgagtcagacactaagcaattgattgcatatgcccgatcaaa

SEQ ID NO: 220791 - DNA, 561 bp, Glycine max
  unsure (1)..(561): unsure at all n locations
gcggatggcggcggaggttttacgagaaccaaaatgagattcgtgtacgctcattttccgatcaacgctagcattggcaacaacagcaagtccatcgagatcagaaatttcctcggcgagaagaaggtgaggaaagtagacatgcttgagggcgtgtcggttgttagatctgaaaaggtcaaagatgaattggtcttggatggaaacgacattgaacttgtttctaggtcatgtgctctcattaaccagaaatgtcatgttaagaataaggatatccggaagtttcttgatggtatttatgtcagcgagaagggaacaatattggaagagtagaggatgaaaacatttgtgttggtttttggtttggagaccctttttgttaacttgttgagatatgattttacaatttggtgttgtcaaacttttccttttgggatttttntaaaaaaaaaattatttttatatatgctttggtgttgaatattctcttgaattagtaatctttcatgcatttctatatatggcttggtggtggatatatgatgcattggtgccccttct

SEQ ID NO: 220792 - DNA, 463 bp, Glycine max
agaaggggcaacaatgcatcatatattgcacaccaaagcatatatagaaatgcatgaaagattactaattccagagaatattcaacaccaaagcatatataaaaataattttttttttaaaaaatcccaaaaggaaaagtttgacaacacaaattgtgaaatcatatctcaacaagttaacaaaaagggtctccaaaccaaaaaccaacacagatgtttgcatcctctactcttccaatattgcacccttgtcgctgacataaataccatcaagaaacttccggatatccttattcttaacatgacatttctggttaatgagagcacatgacctagaaacaagttcaatgtcgtttccatccaagaccaattcatctttgaccttttcagatctaacaaccgacacgccctcaagcatgtgtactttcctcaccttcttctcgccgaggaaatttgtgatctc

SEQ ID NO: 220793 - DNA, 485 bp, Glycine max
  unsure (1)..(485): unsure at all n locations
aatttttacaatcagagggtgaagagtttgatgggtcagcgaaagaacgacaacaacatcaatcagtgctcctcaagcaaggaagacgctgacatgaataacaaccaccttcgctttgaagaggctgtcgacgagagttccaacctcgaccaatccatgtgcgacatcgaagaatccgatgataaaaccagcgccgactattacttcgattcctactctcattttggaattcacgaagagatgttgaaggacactgtgagaaccaagacatatcaaaatgttatttatcagaacaagtttttattcaagaataaagtagttcttgatgttggtgctgggactgggattttatcactattttgtgccaaagcaggggcagaacacgtctatgcggttgagtgctcccacatggctgacatggcaaaggagattgttgaagctaatggttactctaatgttgtaacangtntgaaggggaagattga

SEQ ID NO: 220794 - DNA, 482 bp, Glycine max
  unsure (1)..(482): unsure at all n locations
cggctcgagcaacacagcataaccctaatttccaactccgatttcgtttctcctccgaaaacaccctaatttccccttcgctcttccccatgaccaccgcgtagtttgcttcccccactccgaaaatgtcgctccagggaagcgaccgccgcgatgcaccatcttcgggcagcgccggcggaaacggcgccgtggcggcggcagcggcgagcctgaggctgcggctgaaccctaacaaggagcacaagcccgacgggtacgaggacatgcaattggatttcagccctaacattttcagctcgctggagaggtacctgcctccgagcatgctcaacgtgctgcgtgacgagaaggccaatttcatgcgcgaganttctctcaagtatctgcccctcggggaacgcaacagagctcaaaagcatagagaatatagagagaggataatagcaaattatcagcctctacatcgggagttgtactct

SEQ ID NO: 220795 - DNA, 480 bp, Glycine max
  unsure (1)..(480): unsure at all n locations
gccgcagcttgaaacagagcatagcgaccttgaagagctatggctgtcggaaagaataagaggatttccaagggaaagaagggtggcaagaagaaagccgctgatccctttgccaagaaagactggtacgatatcaaggccccttccctcttccaggtcaagaatattggcaaaaccctcgtctctcgtacccagggaaccaagattgcatccgaaggactcaaacatcgggtttttgaggtctcattggctgatctccaaggggatgaagaccactccttcaagaagattcgtttgagagctgaggacgttcaagggaagaatgttctgacaaacttctggggaatggatttcacaactgacaagttgaggtctttggtgcgaaaatggcanactttaattgaagctcatgtggatgttaagaccactgantaatatacatngaggatgttctgcattggctttactaagaggcgtagt

SEQ ID NO: 220796 - DNA, 520 bp, Glycine max
cacgcacgcagatcctttattcctataatccttccttcgctctctccaaatttcgactctttcgatcagatccgcgacacccaccccaccaaaaccttgcgcaacccatccatgacgcttggctcaggaggatccagtgtcgttgttcctaggaacttcagattgctggaggagcttgaacgtggtgaaaaaggaattggagatggcacagttagctatggaatggatgatggtgatgacatttacatgcgctcttggactggcacgattattggcccccataatactgtacatgaaggaagaatttatcaactgaagctgttttgtgataaagactacccagaaaagccccctagtgttcggtttcattcacggatcaacatgacttgtgttaatcatgaaactggagtggttgaaccaaagaaatttggtcttcttgcaaattggcaaagagagtacaccatggaggacatactgacccagctgaagaaggaaatggccgctcctcataaccggaagc

SEQ ID NO: 220797 - DNA, 146 bp, Glycine max
tttagcttacctgtctttcttttaagttaaatatggatttttttttgtagcaaaggagcttgtttttctattttgttatgagtggcagaaatattattattaacatggtatattcgggtaagattttattatgttttgatgcagtc

SEQ ID NO: 220798 - DNA, 520 bp, Glycine max
  unsure (1)..(520): unsure at all n locations
ggggctccaagacaccagcgggagcgtgaaggaccaaatgattgataacttaaaggacttgtctgaactcgtgagcaattgtcttgcgatattctcggcgagtggaagtggcgatttctcgggggtgccgatccagaacaagagacgattaatggaaaacaaagaagaagaggaggagaatgttaatcgcgatatctcgggaaaatttccgggttggttgaataagcgagataggagattattgagtttaccagtgtcggcaattcaggcagatataaccgtttctaagactggtaacggaacagtgaagaccattgccgaggcgattaagaaagcgccagagcatagtactcgccggttcataatttacgtgagggcaggaaggtaattaaataaatactgtgcgaatattaaatagataaaatatgcctgctntctgtctctgagaaaagtgtacgctnttcgagataacgaactntgcatttttttttaattattttcttattntaataaactagtt

SEQ ID NO: 220799 - DNA, 443 bp, Glycine max
gaaagcaccattcatgatgaatcatgttctagttttcatcgaggaataaaggcaagctctattttgagccaagtgaaacatctatcttcctgtctaagttctttgaataaaagtctgaatgtgtcatctctatgctacaatgtttatgattcagatcaggttgattctatttgtttgatggccatcttgcacgtcctgatcttattgtgttcaagtgacggacaaatccaaacaggaaagagagatttgaaatgtaaatgccaagtaaatgtgaaaagtacagtccatttttagtgatctctttaatttatttgttcatagattaatatggtcgtgtatgattgcttttctatttattgtggcatttttgtgttgtaccctgttgttgtgtttgcaataattattagtaataaagcagcaaattcaatttgtgttcatgcatc

SEQ ID NO: 220800 - DNA, 299 bp, Glycine max
ccaaagtttgatcttggaaaactgatggaggttcatggggattactctgaagatgttggtgccaaggtggacagacctgccgatgaaacattggctgaggaagccactgaagtagttggggcttgatctggctcataatgcatttttgttattttagaattcctgtttctcttacaaatattaattttcagttttgttttaatatttagaaacacatttgttgcaaatctaaatctggatttttgttttgtcaaggttttttggtacaacccaataactaaacacggtatgaagacgag

SEQ ID NO: 220801 - DNA, 299 bp, Glycine max
ctcgtcttcataccgtgtttagttattgggttgtaccaaaaaaccttgacaaaacaaaaatccagatttagatttgcaacaaatgtgtttctaaatattaaaacaaaactgaaaattaatatttgtaagagaaacaggaattctaaaataacaaaaatgcattatgagccagatcaagccccaactacttcagtggcttcctcagccaatgtttcatcggcaggtctgtccaccttggcaccaacatcttcagagtaatccccatgaacctccatcagttttccaagatcaaactttgg

SEQ ID NO: 220802 - DNA, 499 bp, Glycine max
  unsure (1)..(499): unsure at all n locations
gtagggttccacgtgtgggtgacatacatagaattgagacctcgacctcgacctccactgtcactgtgagaagaagaagaagaagaaacgcagtgactactgcaatgagagcggtggttcagcgcgtggcctctgcctccgtcgaggtcgaaggccgcatcgtctccgagatcggccccggccttctcgtcctcgtcggaatccacgactctgattccgacgccgacgccgattacatatgtcgaaaggtcttgaatatgaggctgttcccaaatgaaaatacgggcaaagcgtgggaccacagtgtaatgcagaaaaattatcaagttttgttggtgagtcagtttacgttgtatggattcctgaagggtaacaaaccggattttcacgttgcgatggcacctcagagagccaagccattctatgcctctttagttgacaggtttaggaatgcctataacntctgatgcatcaagacggtgtattccgagcaatgatg

SEQ ID NO: 220803 - DNA, 503 bp, Glycine max
gtccattagggatccaaactctattcccatatggcagaacgaacagggacaatctaaggcattctttgaactaaatagtgttacaaaatggggtcactactacattggggaacaaagaacttcaactagaatgaataaacacataatgcgaatgtcttgcatttggtctttctgacggaagagtcaaaattcaagctcaacttcatcaagccagatcaaccgctgatcaagattctgctgcatcaatttggtgaatttgaatcaagctgcatggtaactggtccatcattaaccaaatctaccttcatcattgctccgaatacaccgtccttgattgcatcagagttataggcattcctaaacctgtcaactaaagaggcatagaatggcttggctctctgaggtgccatcgcaacgtgaaaatccggtttgttacccttcatgaatccatacaacgtagactgactcaccaacaaaacttgataattattctgcattacact

SEQ ID NO: 220804 - DNA, 458 bp, Glycine max
gttacaaagagactacagattcttacacgatagctgctgctccaaattttgagtcagttctacgggggccaagtttcatatattcaagttttgacaatcgttcaaagagtaacttagacatcgatggaaagacaccttttctatctgctgcagaaggcattagacaatcaacttggtgggagaaagcctcggtacaacggcttgtttctggagaattgcccattggatatggatgcagcttcactcaaacaattttcaatggcattaatgtgatggctggagttggtcttctatctacgccatacacagtaaatcaagctgggtggatgagcatggcagtgatgcttctttttgcagttatgtgttgttatacagccacccttttgagatactgttttgaaaatagggaagaaatcattacctacccagatataggagaagccgcatttgggagatat

SEQ ID NO: 220805 - DNA, 521 bp, Glycine max
gtctgaacctccttttttatttctcccccgtagatctctctcgcttttctctttagagggtccaacttgcttccagatctcgcaccgatttggatcactcttttgactcttcttcttccaattcaaagatgttgttgtcaaagttgctaatgtagagttgtattacaaggctgttcatttctatttacaagagcatccggatcttatcaatgatgttttgaatgtccttgcacttcgtgttgatcatgcacgtgttgttgacatcatgcgaaaggctggtcatctccgtcttgtcaagccatacatggttgcagttcagagtaacaatgtgtctgctgttaatgaagcccttaatgaaatatatgttgaggaggaagactatgatagattgcgcgagtcgattgatttgcacgataacttcgaccaaataggcctagcacagaagatttgaaagcatgagcttcttgagatgagacgtgttgctgcttatatttacaagaaggcaggtagatggaagcagt

SEQ ID NO: 220806 - DNA, 502 bp, Glycine max
ccagatgctgatggtccatctttttttttacaagcacttcagcgacaggaggagagagggtggcttcctgtaccgcgagtccctccatgtggcctaaatgaaaactcaaggaagcagttgcagcacaagcgtgattccacaaaccaaatattaaaggctgcaatggccattaacagcatcactttagctgaaatggacatccctgagtcctatttggaatctcttccaaagaatgctagagtaagcttgggggatgttatttatcgttatatcacatcggatcatttctctcctgagtgcttgctagcttgccttgatttatcttctgagcatcaagctatagagattgcgaaccgagccgaggcttccatgtatatttggcgtaaaaggacaaactccaagcctgccagtatcagtgccaggtctagttcaagaacatcatgggaaatggtcaacgatctgatggctgatgcagacaaaagggatatgtttgcagagagag

SEQ ID NO: 220807 - DNA, 524 bp, Glycine max
cgggccctggagatcctatagtaacagtaataatggaaacaaaagaagtggttgaagatattgtgattgtgggagctggaattgctggcctttcaacatccttaggacttcacaggttgggtatccgaagtttggtgttagaatcttcagatagtttgaggatcactgggtttgctttgtcgatatgggaaaatgcttggaaggcattggatgctgttggtgttggagacttcctccgacagcaacatccccagctcaatagggttgtgactacttcattggttacagggcaacaaacatcagttatgtctttcacagaaacaggaaatcagcaaagagaccgtgaaattcgttgtgttaaaagaaagttactgttggaagctcttgccaatgagcttccaagtggcaccatcagatacttgtcaaaggttgttgctcttgaggaatctggattctataagatactccatcttgctgatgggacaaccatcaaaaccaaggtattgattgggtgtgatggagtg

SEQ ID NO: 220808 - DNA, 517 bp, Glycine max
gccaggatatatccgaacaatttaatctctcaaacaagctcaagttaattgctagagctcatcagctggttatggatggatttaactgggctcatgaacaaaaggtggttaccatttttagtgcacctaactactgttatcgatgtgggaacatggcttccattttggaggttgatgattccaagggccatacgtttatacagtttgatcctgctcccaggagaggagaacctgatgtcacccgtagaacgcctgattacttcctatgatgttgctgccgcatatcatactcctggcacagttacatctcattctgcacaaatttctagtactttgtgcatcctcatcctcgttgatgagattgctgtaagcacttaaaatctttgggtatgcactccaaacttttttggtcattgcccaaataccgcattaatgtaaattaggtaggtaacattccagttttttgtgacgctcaagaacttgctggaggtccaattggagaagtctcctagatgat

SEQ ID NO: 220809 - DNA, 509 bp, Glycine max
ctcgagccgaaattgtcatcattgtcctcttctgcatcaatagaatctctaatcaaggtcccacagtcacctatactcccgttcttcaaacctgttgattatgtggaagttttagctcaaatccatgaagaacttgagtcatgtcctcctcaggaaaagtcaaatctgtgtttgttacaataccaggtctttaagggcctgggggatgtcaaactaatgcgtagaagcctccggtcagcttggcagagagcaaacactgttcatgagaaaattatatttggggcatggctgaagtatgagaagcaagaagaattagttgctcagttgctcacagcttgtggtaaatgtgaaaaggaatttggacccatagatgtagaatctcagattcctttcgatgagaatgtgagatcccaggatagagcttcgatgaatgggaacaatgcttcagaatatgttatctttaacactggagatgagaagatagtctgtgatagacaatagatttctga

SEQ ID NO: 220810 - DNA, 517 bp, Glycine max
ctctcttcttctgcaccatcgatccatctcatcgttctcttagctaccatggcgactgagaaccctttcaatagcattttgaggacgctcgagaagcccggcggcgctggcgagtttggaaagtactttagcttgcccgctctcaacgatcctagaatcgatagacttccttactctgtgaggatacttttggaatctgcaatccgtaactgtgatgagtttcaagttaagagtaacgacattgaaaaaattattgattgggagaatacctctcccaagctggtggagattccattcaagccagctagagtgcttctgcaggactttactggggtgcctgctgtggttgatcttgcttgcatgcgagatgcaatgaacaaacttggtggtgattctaataaaattaaccccttggtaccagttgatcttgtcattgatcactctgttcaagttgatgtggcaagatcagaaaatgctgtccaggcaaatatggaacttgaattccaaagaaacaagg

SEQ ID NO: 220811 - DNA, 463 bp, Glycine max
attcattttaatcctaattttgttcttcttgatcattcgatttttctcctcaagatgcagatattcgtaaaaactttgaccggcaagaccatcacccttgaggtggaatcctccgacaccattgacaacgtaaaagctaagattcaagacaaggaagggatcccacctgaccagcagagacttatctttgcgggtaaacaacttgaggatggtcgcacccttgccgattacaacatacaaaaggaatcaaccctccatctcgtgcttcgcctcaggggtggcatgcaaatctttgtcaagactttgaccgggaagaccatcacccttgaggtggaatcctcggacaccattgataatgttaaggccaagatccaagacaaagagggcattcacccagatcagcagaggctgatttttgccggtaaacaacttgaggatggaagaacccttgctgattacaaca

SEQ ID NO: 220812 - DNA, 537 bp, Glycine max
  unsure (1)..(537): unsure at all n locations
cttcttcaaactcagaaattctctttttttagcctcacttctcattttcctcatctgggtcttcaaccttttcgatcattcacactttgcattaattgtactttgaatttcagtttttcccgttaattttgatcttcttccctttcagtttttctcattaagcgttgggaggaagaagaagaagaagaagaagaagaagatgatgggtgcaaagctgggtcttttgttgtgtgtttgtgttttgctgttggggtgttgtgtcggtagatttgtggtggagaagaacagtttgaaggtgacttcgcccaagtcgttgaagggtacatatgaatgtgcaattgggaattttggggttcccaagtatggaggaacattggttggttccgttttgtacccgaaggtgaatcagaaagggtgcacgaacttcagtgatgtcaattntcagtccaagccaggagggcttcccacttttcttcttgttgatcgtggagattgctacttcactttgaaggcgtggaatgcacagaatggtggagc

SEQ ID NO: 220813 - DNA, 493 bp, Glycine max
ctcgagccgaatcggctcgagcggctcgaggttggattggaatcggagagaaatggagagcagcgccgtctacggaagcattcgaccaagttacccgatctgcccctctcgacgttcttcctctcttctctctcaccaatctcccttcctattcgagccttctctttctctcaagcttcgcaagcagtttcctctcatttcgcagaattttctggaagccgcttctcctctcaggccttctgccactttgtcttctgattcctaccgtgagacgattgaattagctgatatagaatgggacaaccttggttttgggcttcaacccacggattatatgtattccatgaaatgcacacgaggtggaaccttctcaaaggtgaactgcagcgttttggtaacattgaattgaacccctcacaggagttttaaactatggccagggattatttgagggtttgaaagcgtatcggaaacaagatgggagtatactcct

SEQ ID NO: 220814 - DNA, 539 bp, Glycine max
  unsure (1)..(539): unsure at all n locations
ccaaaactaaaactaaaggagttagaaacatcaagagagtcactgacaaccaacctggcatgccaagtcctaacttcattctttgttaatttctttcccttccatccactcctctctatcttcttactatctcaccttaccaaaacaaattgtttactttcattcacgtccaaaacttgaacatgaaaccctacacgtcatcaccatcatcctccaagtccaaaaagaagccaacaacaacacaacaagatcatgaaacagcatggggaggaaggtaccttggagtgaggaggaggccatggggaaggtatgcggccgaaattcgcgacccttccactaaggaaagacattggttgggcacgtttgataccgcagaagaggccgccctagcatatgataaggcggcccgctccatgcggngctcacgtgctcgaaccaacttcatctatccggatactcctccgggttcttctgtcacctccatcctctctccagacgagcaaacccaaacccaaatccaccaggcccaagaagagctc

SEQ ID NO: 220815 - DNA, 479 bp, Glycine max
ctctagttcattttcttagtccaccaaaatcttataagtagtgccaaggcaaaccaaccacacctacaacgcacctttctttctcttttccctttttcttaggcacaccacacacccactcaaataatagaaactgagatgaatcctgatcagtttcagaagaacagcatgttcgtagaaacccctgaagatggtggcaaaaacttcgacgatgatggacgagtcaaaagaactggtacatggataactgcgagtgcccatatcataacggcagtgataggttctggagtgttgtcacttgcatgggcaattgcacaaatgggttgggtggcaggccctgcggttctctgtgccttctctttcatcacatacttgacctccactcttattgccgactgatatcgctcacctgaccctgttcatggcaagcgaaactacacctattcagatgttgtcagatccgtgttaggaggtaggaa

SEQ ID NO: 220816 - DNA, 570 bp, Glycine max
aggatcaccactgtgcatgatcaccaagtggaagttgttcgttcttccgtttttggcggacaaattgagaaaaagaatacaatttcagctcttcttttggtctctgaaacgtttttttccccttcatgggtgaacacgcaattcctcaatgttttcagcatctaatggcgaaaaaattgctctttttgttgacccttttggaaattctcctttgtgggcaatccaagtttatggtgtacaacacttcccaaggcatagtccctgggaagctcaatgttcatctggtagctcacacccacgatgatgttggttggttgaagaccgttgatcagtactatgttggttccaacaattcaattcagggggcttgtgtgcaaaatgtcttggactccatggtgcatgctcttctggctgacaagaacagaaaatttatctatgttgagatggcctttttcaagcgatggtggagagatcaaagtgaagctgttcaggatgtagttaagaaactcgttagttcgggtcaactagagttcataaatggtgccatggctatgcatgatgagggcagta

SEQ ID NO: 220817 - DNA, 522 bp, Glycine max
  unsure (1)..(522): unsure at all n locations
ggaaaagatggcgcggttgatcacagtggtgtggtgcgcggtggcggtgctattatgcgccgcggccggtgcgtcgtgggtggaggaggcggcgaacccgatacgaatggtgtctggcgtggaggcggaggtggttcgggtgatcggggagtgccggcgtgcgttgaagtttgctaggttcgtgagcaggttcgggaagagttaccaaagcgaggaagagatgaaggagaggtacgagatattctcgcagaatctcaggttcatccgctcccacaacaagaagcgtttgccctatactctctctgttaatcattttgctgattggacttgggaggagttcaaaagacacagactaggagctgcccaaaattgctctgccactcttaacggcaaccacaagctcaccgatgctgttcttcctccaacgaaagactggagaaaagaaggtatagtgagttcagttaaagatcaaggcagctgcggatcatgctggacattcagcacaactggngctttagaagc

SEQ ID NO: 220818 - DNA, 550 bp, Glycine max
  unsure (1)..(550): unsure at all n locations
gaaaagaagagaagaaacaaagaaagacgaagaagaagaagactagagaaagagtttgggagagatcttgtaaataaggaaaccctagtttttcctttttttgggttaattttcccattaattttcagctccaacctgctactgttaccaataaggaatctcttgtcattgcttcaatcgaacaagagtgaacgagttttgtgggattgtgtattgttagaaagctgcaaagatgatgtccaggtcgtatacgaatcttttagatttggcctctgggaatttcccggcaatgggggggagggagactagggagcggaaacggatgccgagagttatgagtgtcccggggtttctcactgaggtagatgatgatcaggcagttagtgtttcctctgataatccatcaactgttactacggatagaatgatcattgtggctaaccagctaccgttgaagggcaaagcgaaagaggaccaacaagggtggagtttcagttggaatgaggattcattgcttttacagcttaaggatggactcccngatgacatg

SEQ ID NO: 220819 - DNA, 563 bp, Glycine max
  unsure (1)..(563): unsure at all n locations
agcgatgcggatgaggcgccactcgatgtttccatttgcctgcatgcctttggtattgtggggtgtggttcgtttagtggtgtcaagtcttgcgaacgtgagggtgcatgagtggtaatcgggatgtttttgttgcacggctccatgcttgcgcatgcaacgtgtgacatgcatccttttcattgtcaccttagccttcgtggcttaggtgctgacgattggttcctgtgttgcctacctaccaaacggtattcgtgtggctagtcagacccattccatccaggcctctttgttggggacgctggaggatttcaaagtcccacacgtgaaccacgttagtcgtccatcataacggcttcctgtggcacacgtgtggtgattgttctctcggatgcggtgcatgcagtgaacgtgggtggtctagtgcccncacattgttccttataatcggttgtctcggatgacgcttgcccttgcgcttgctttgttcaacgcgatgctactactcttagttagctagcgctgggcatgctcgtggcangtgcttggtcattaacggatgc

SEQ ID NO: 220820 - DNA, 444 bp, Glycine max
  unsure (1)..(444): unsure at all n locations
gttctagcacctttcatttttccatttcctttttcaacttcgcggtgtgagtgagacggagagtgctaagcaatcgtcttctcttctcggagcttggctttgcttatcgattctctctcctctcgtttctctaattccaaggtttgtaaaagatggcagatgccgaggatattcaaccccttgtttgcgacaatggaactggaatggtcaaggcaggatttgctggtgacgatgctcctagggctgtctttcccagtattgttggccgacctcgacatactggtgttatggttgggatgggtcaaaaggatgcctatgttggtgatgaagcccaatccaaaagaggtattcttactctcaagtatcccattgagcatggtatagtcagcaactgggatgacatggaaaagatctggcatcacaacattntataatgaacttcgt

SEQ ID NO: 220821 - DNA, 467 bp, Glycine max
gattcatatgactattaacatcaatgattcagggctccaaggggaaaaaatccttcagatataaactttaaaaatacaaaaagaaaatggaggaaaaagagatcatcacaatcactcccttgctacaaacaacctactaagaagatgtagatgaaccacggatagccaaacgcaacaaatgccttattaactgcctggcccccacacaaaacatgatgcatcaagctaagaatagaccctatcctttaatgatgcttcctcacctctttatccatggcaatattgttaacatgacacgacacacacccataacaacccccggagcgaaaatgattcaccattgaagcctattgtgtacttagaagttagaagcacttcctgtggacaatggatgggccacactcagcatacccacctttacagatccacatatgctgtaaagagctcacggatacaaggattgatcc

SEQ ID NO: 220822 - DNA, 522 bp, Glycine max
ccttctctctcttctacctcttcgcagttcccagttcccaatctcctaacaaaaacaaaaaaacagcactctctctctctctatgcaatgtaggtcgccggaggatggcaaactaccaccgcaacaacgtcgaaaacgtcgtcctcggccgccaccaccaccacagccaccgttccaagtccgcctccgtcgccggccacaccttccgcctatggaatgccgcctccttccgccgcatcatcttcgacgccgtcagctgcggcgccagctcccgctacgccgcgagatccaacatctccgacgagaaacaacacctccaacaaaaacaacaacatcataagacgacgtcgatgaagaacaatgcgaagtcggagaagctctcggatctgctgagcattgcggaagccgaaaccgacgtggaaacgaagaagaaagaagagaagctggaagacttgaagcgcctcgtgaaggagcttcagcagcacgaagaagattcgacgaagaaataaaaaagtgaagctg

SEQ ID NO: 220823 - DNA, 594 bp, Glycine max
gtctgatatgtttgtggataattggggtgattttttagtattctggtgttttacttgtttggtttagttctgccccttgtttggggacttagttttttttttattaattttttttagaggctaatatggaagaggttgagcaagctaatagagtagctgttgaaagctgtcatagggttctgagtttgttgtctcaaccaagggatcaggttcagcataggaatttaatggtggaaactggggaagctgtggtgaggttcaagaaagttgtttccttgcttcacagtggtatgggtcatgcaagagtgaggaaggttaaaaaccctcaaatccccttttcccaccaaagcatcttcttagacaaccccaattgcaaaaccatcaacaaccatcacttcaaaaatctgcagtttccccaaaccagcttccctgacaattcaattcaggaacttggttcaaccattaagaattcactctctcttggacaaccctctttggaattgagctccaatgggaaaagtgctcttcacctcacacagcaggctttatcaaatcactatcacttctttcagcagcagcaacaacagcaacagc

SEQ ID NO: 220824 - DNA, 521 bp, Glycine max
cggctcgagaaattagttcattctctttgcgcagttccctacctctcctttcaagatgcagatcttcgtcaagaccctcaccggaaagaccatcacccttgaggtggaaagctctgacaccatcgacaacgtcaaggccaagatccaggacaaggaaggaattcccccggatcagcaacgtctcatcttcgccggaaagcagctcgaggacggccgtaccctcgccgactacaacatccagaaggagtcaacccttcaccttgtccttcgtctccgtggtggcatgcagatcttcgtcaagactctcactggcaaaaccataaccctagaggtcgaaagctctgacaccattgacaacgtcaaggccaagatccaggacaaggagggaatccccccagaccagcaacgtctcatcttcgccggaaagcaacttgaggacgggcgcaccctcgccgattacaacatccagaaggaatcaacccttcacctcgtcctccgtctccgtggtggcatgcagatct

SEQ ID NO: 220825 - DNA, 535 bp, Glycine max
tctcactgatctccattcccattccatggcttccactgaatcatcccctttcaagaaaattcagattcaaagggatgacactacatttgacgcatatgtggttggaaaagaggatgctcctggaattgttgtgattcaggagtggtggggtgtggattacgaaattaagaaccatgccgtgaagatttctcagcttggtagtgggtttaaagctcttattccagatttatacagaggaaaggttggtctggatgttgctgaagctcagcatttgatggatggtcttgattggcaaggtgctgtgaaggatattgctgcttcggttaactggcttaaagcaaatggctcaaagaaggctggtgtaactggattttgtatgggaggtgctctctctattgccagttctgtcttggttcaagaggttgacgcttctgtagcattctatggagttcctgcttctcaacttgctgaccctgcacaagcacaggcatctgttcacgctcattttggagagctggacaactttgttggcttt

SEQ ID NO: 220826 - DNA, 634 bp, Glycine max
  unsure (1)..(634): unsure at all n locations
cttcagagaagaaactttcgttcccaatgagggagataaaagtgcagaagctcgtcctcaatatctctgttggcgagagtggagatcgtctcaccagagccgccaaggtgttggaacaacttagtggccaaaccccagtgttttccaaagcaaggtacactgttcgttcctttgggattagaagaaatgagaagattgcatgctatgtcactgtcagaggtgacaaggcaatgcaacttttggagagtggtttgaaggtgaaggaatatgaacttctcagaaggaacttcagtgatactggttgctttggctttggtattcaggagcatatcgatttgggaatcaagtatgatccttcaactggtatttatggaatggatttctttgttgttctggagcgtcctggctatcgtgtcggacgccgccgaaggtgcaagtcccgtgttggaattcagcaccgtgtcacaaaggaggatgctatgaagtggttccaggtgaaatatgagggagtgatccttaacangtcccaggcaattgtttagttagattgagttcactttagtttgaacgcaagtttgaaacattgttcgccattcagttcatgatgaacatatggttaacatgaccctgttaa

SEQ ID NO: 220827 - DNA, 509 bp, Glycine max
ctcgagccgccaaaacaaaatgaagagcctcctcttctctctcttcctctgcctcttgttagcctcctccgccgtcgccaccgtccccgcccacaacatcacccgcatgctggccgcacaccccggcttctccaccttcaaccactacctctccgtcacccacctggccgaagagatcaaccgccgccagaccatcaccgtcctggccctcgacaatgccgccatgtcctccctcctcgacaagcacctctccctccccaccatcaaaaacgtcctctccctccacatcctcgtcgactacttcggcgccaaaaagctccaccagatcaacaacagcaccaccctcgtctcctccatgttccaggccaccggctccgcctccggcaccgccggctacgtcaacatcaccaacctcaaggccggcaaggtcggcttcgccgccgaagacaacgacggctccctccactccttctacgtcaaatccgtcaaggaaatgccctactacatct

SEQ ID NO: 220828 - DNA, 559 bp, Glycine max
atttaccactattgatgatgttttaataggattggtaaaatggctttgtgaacagttgaagaaaccttctcatcctattcgtggagtcccaactgctatcaattgcctagcaacactacttaaggaacctgtggttaggtcttcctttgttcaggctgatggggtcaagttacttgtgcccttgatttcgccagcatccactcaacagtcaattcagcttctttatgaaacatgtctctgcatatggctcttatcctattatgagccagcaattgaatatttggctacttcaagaacccttccgcgacttattgatgttgtcaggagttctacaaaagagaaggtggttagagttgttgtcttgactcttaagaatttgatgtcaaaagggacattgggtgctcagatggttgaccttcagctggcacaagttgtcctgagtttaaaagcacaagcatggagtgatgaggacttgttggaggccctgaattccttggaagaagggcttaaggataatatcaagagactaagttcttttgatatgtacaagcaagaagtc

SEQ ID NO: 220829 - DNA, 517 bp, Glycine max
ctctcttctcttccatggaatcgtaagatttgaggacaagagcttccacgtttatcaggttgtgatctcaaaatggggaaatcaccaggaaaatggatcaagaccgtactatttgggaaaaagtcatccaaatcaaatatttcaaaaggaagagagaagtttgttaataaaaaagaagcagtggtttcttccaacgagttggaaaatggtttgtctttagatccaacccccgatgagattgctacaaatgaggaggaccatgaactggagaatgaagaatcagaaaatattttacctgacaatcaagaaagagacattattggatctgttgacccggatgcaccacctgatccagagaaaatcaggctggagcaagcagcatcaaaggcacaagctgctttcaggggttacttggcacgaagggcatttagggccctgaaaggcataataaggttgcaagctcttattcgtgggcacttggttaggaaacaagccgttgttacattatgctgcatgt

SEQ ID NO: 220830 - DNA, 561 bp, Glycine max
aggatcaccactgtgcatgattaccatttggaagttgatcgttcttccgtttttgggagacggattgagaaaaagaatacaatttcagctcttcttttggtctctgaaacgattttttccccttcatgggtgaacacgcaattcctcaatgttttcagcatctaatggcgaaaaaattgctctttttgttgacccttttggaaattctcctttgtgggcaatccaagtttatggtgtacaacacttcccaaggcatagtccctgggaagctcaatgttcatctggtagctcacacccacgatgatgttggttggttgaagaccgttgatcagtactatgttggttccaacaattcaattcagggggcttgtgtgcaaaatgtcttggactccatggtgcatgctcttctggctgacaagaacagataatttatctatgttgagatggcctttttcaagcgatggtggagagatcaaagtgaagctgttcaggatgtagttaagaaacttcgtagttcgggtcaactagagttcattaatggtgccatggctatgcatgatg

SEQ ID NO: 220831 - DNA, 435 bp, Glycine max
gcaagatattaacttgacgaaatgaaacgcttgtgtgcgcaattaagtggatcgcaaagaagggaagagaatggagtttaaacgtcattccatttttcccattccgaggcatcaacttggattgggaccttttaccattcccactaaacaaactacccttctaattcacacttggctccaaactactttcaaaaagttgaataagaagactttggtgggagaagattaagattcccctgtaatataatcttttcttttaataatgtcagatttacattgcaaccaccctcacgttgactcgaatcccaaacccactcccccggaaatgttctcctgcatcgagtgccggtgctccccttcatatgtcacaatcaacatcgtcggatcgtacggagcacgctccacgtgtttcctcgccggacaccctctaacgct

SEQ ID NO: 220832 - DNA, 459 bp, Glycine max
  unsure (1)..(459): unsure at all n locations
gagaatccgaggcgaagagaagagaaaaattaagatggaggggaaggagcaggatgtgtcgctgggagcgaacaagttcccggagagacagccgattgggacggcggcgcagagccaagacgacggcaaggactaccaggagccggcgccggcgccactggttgacccgacggagtttacgtcatggtccttttacagagcagggatagcagagtttgtggccacttttctgtttctatacatcactgtcttaaccgtcatgggagtcgccggggctaagtctaagtgcagtaccgttgggattcaaggaatcgcttgggccttcggtggcatgatcttcgccctcgtttactgcaccgctggcatctcagggggacacataaacccggcggtgacatttgngctgtttttggcgaggaagttgtcgttgcccagggcgattttctacattgtaatgca

SEQ ID NO: 220833 - DNA, 457 bp, Glycine max
atgactcgggggttatttttgattttgcaaattacacaatcacagccgtacatcacacgtgagctgggcctcttccaacttaaaagcagaggataacattggcccatgacgcaacacatgcaccacctaataatcataattttacatctttacatacaaaatacaaagactttaaattaaaattaaaaaaaaaaagataaacagatcatcttgatgaaatgaaaccgaaacccagaaacattgttttgattttttttgttgttcccaacttgattaagcatgaacggtttgattgaatcacttggacttgaagggaatggccctgattacgacctggtggtagagtgctgcaagtgcagcaccaatgaaaggtcccacccagaagatccagtgatcatcccaaccaaggtccttgttgaagatgatagcagcaccaagactacgagcagggttgata

SEQ ID NO: 220834 - DNA, 546 bp, Glycine max
ggggaaccaatcctcttcaaacaagatagaaactcttcccatcgacacaacatttaagcttccagcaaatataccagtttggccacaaggtggtggatttgctactggaaccatcaacataggagggctaaaattgtttcaaatttcaacattcaacaaagtttggaaaaccttagaaggtggaccaggtgatgcaggggcagctttctttgagccagcaggaatacctgagggattcttcacactaggccactacagccaacccaacaacaagcctctttttggatcaattctggtggcaaaagatgagacatcatcaggtgacaataatggagctttgaagaaaccaattgattacacacttgtgtggagcagcaagtcccaaaagatcaagcaagacaaagatggctatatttggctaccaacagcacctgatggctacaaaaccttaggccatgttgtcaccaccacacctgagaagccttcacttgacaaaatcaggtgtgttaggtcagatctcacagaccagtgtgagagaagctcatg

SEQ ID NO: 220835 - DNA, 535 bp, Glycine max
atcggccgccctttttttttttttttttttttttttttttttggaataaagtacacgttccatttggaggacgctgttgattgtcctgaatggattgtccccttccatgtattcaagtcattagctgaagagaatgactttgagcttgttttcgcaaagaactcacatgaatttgtgcatgagtatatgaaaaaaccggaatttgtggagctcatgcgaagacttggtgcattgggagatggcaaccaagatcaaagtacactctctgctgatgaatgggaggcagcatatttatacatgtcatttgtattgagaaagcgaggtcaacctgacaaaacccaacagagtggcagaaggaaccgagggtcaatgcacatttcagaggaagacatcatgtacattagcactgatgattaaacgtgaataagaaacagccagtgactgaattttatacaatggcatagggcatgaatcggcttgtattgccatgtgccagtaccattgatctcacaaccttgagcctcagcaatttttt

SEQ ID NO: 220836 - DNA, 559 bp, Glycine max
  unsure (1)..(559): unsure at all n locations
gataaacacttttaacactaaaaagatgaaatcctctcttatcttgttatttatgatctgtggtggagtgattgcaactcctccagaggatccaattcggtgttcttcaaagaacacagactgcaccatcacaaacacctatggcgtctttccggaccgaagcatttgccacgccggtgaggttatgtacccaaacacagaggaggagctcatatccgcggtggcctcagcttcgaagaacaaaagaaaagtgaaagccgccacgcgcttctcccacagcatcccgaagctggtttgccctgatggcgaaaacgggttgctaataagcactaaaaatctgaacaagatattgaagattgacaaggaggcaaggacgatgacagtgcagagtggcgtgtcgctgagagagataatcagcaagggtgcagaggctggattggccttgccatatacaccatattggtggggtttaaccattggtggactcatgggtacaggtgctcatggaagcactttgtggngcaaaggaagcgcggttcatgagtatgtggntgagcta

SEQ ID NO: 220837 - DNA, 573 bp, Glycine max
  unsure (1)..(573): unsure at all n locations
aacattaccaaccttgggagctggcgaacaagcatacgatgttaattttgaatgggacagtgacttcggaattcccggtgcattttatattaagaacttcatgcaaaatgagttctacctcaagtctctaattctcgaagacattccaaaccacggaaccattcacttcgtatgcaactcctgggtttacaattcaaaaaactacaagactgatcgcattttctttgccaacaatacatatcttccaagcgagacaccagctccacttttgaagtacagagaagaagaattgaagaatgtaagaggggatggaactggagagcgcaaggaatgggataggatctatgattatgatgtctacaatgacttgggcaacccggatagcggtgataaatatgcacgccccgttcttggtggtccagccttaccttaccctcgcagaggaagaaccggaagaggaaaaactagaaaagatcccaacagtgagaagccgagcgattntgtttaccttccaagagatgaagcatntggtcacttgaagtcatcagattttctcgcttatggaatcaaatc

SEQ ID NO: 220838 - DNA, 586 bp, Glycine max
tcgaaacgatatcgtttggattcatcatgaaggcctcaatctccagcaatggcgattttctcaagatcgcgttcttcttcctcttcgtggccttcacgttcttcttcgtcggcaagcacttctccgacagctcctcccagcagctaatcttcttctccgccaccaccgccgccgtctccactaccaccaccgccgaggtcaccatatcccccaacttcaaccaattctttaacgtcgccgcgctaatcgaagcccagacccccaaaaccaacccctcccaacaacctcctccccctccccctccgccggagcttctcgacacgatcaagcgcttcggcatcctcaacgacaacggcaccatgtccgacgacttcgagatcgggcatttcgaggaggggttgccggaggattggggaaacgacaccgtcgtcgaggattccgtctccgctcccagaatcgctgtgagcaagttcgggatgtgtccgcgcggcatgagcgagcatataccgtgtttggataacgcccgcgcgattcggagactcaagtcgacgcagagaggggagaatttcgagaggcattgtccgga

SEQ ID NO: 220839 - DNA, 531 bp, Glycine max
gatccatctcttgtttcttgctttctttcttcaccatgtcacttgctgggaaaatcaccactgaaatcggggttcatgcaaccgctacaaagtggttcaacctcttcgcaacacaactccatcatgttcaaaacctaactgatagagtgcatggaaccaagctgcatcaaggtgaagactggcatcacaacgagacagtcaagcactggacttataccatagatggtaaggttacaacatgtctggagagtattgaatccattgatgaacagagcaaaacaatcacctacaagctcttcagtggtgacattgatcataattataagaactttaagttcatctttcaagccattgatgataatgatcatggcggtactattatcaaatggaccgttgaatacgagaggcttcgtgaggaggttgatcctccatatggccacattgaatacctgcacaaatgcactaaagatattgatggtcatcttctcaaagcatagctagctctaaaagtatgcactaaaaaataatggg

SEQ ID NO: 220840 - DNA, 542 bp, Glycine max
  unsure (1)..(542): unsure at all n locations
gtttgagagaaaggttgagctatagcctaaagggagagacacataaatagtttctactttctattcatagatagatggctggcccaattatgagacctcagattgtgctatttggctcctccataattcaaatgagcttcgacaatggtggttggggtgctattctagctaacttgtacgctaggaaggcggacatcatcttaagaggatactctggttggaattcaaggcgggctttggaggttttggatgaaattttccccaaggatgcttatgtgcaaccatcattggtaattgtgtattttggtggcaatgattctattgatcctcacccatctggccttggtcctcatgtaccccttgaagaatatgttgaaaacatgaggaaaattgctaatcatcttaagagcctctcggaccatattcgcattatatttctcacttctcctccgatcaatgaagaactaatccgcanaaagctcagtgcaacgcaatcaggaagaaccaatgaatcctgttgagagtatgcagatgggttaatg

SEQ ID NO: 220841 - DNA, 378 bp, Glycine max
acaaaacttgctatagcagtaagctataactcatttgaggctctgtgagaattgagaaatggctaaagatgttgaggttcaagagcaaggaggagagtactctgccaaagactaccatgaccctcctccagcacctttgttcgacccagaggagctcacacagtggtccttctatagagccctcatcgctgagttcatagcaacccttctcttcctttatgtcactgtgctcaccattattggctacaaaaggcagactgatacaacggtaggtggcaccgactgtgatggggttggcattttgggcatcgcttgggcctttggtggcatgatcttcatccttgtttactgcaccgccggtatttcaggaggacacat

SEQ ID NO: 220842 - DNA, 531 bp, Glycine max
  unsure (1)..(531): unsure at all n locations
cagaatcgcatggtgttggtgctagtgttcaaattgccaaaaacatgcatgccataaaagcatccttggctttgtcaaggctcagtggcttgtgcagtgatgagagtgcaacaccttacaatcaggcagccgctgatgccctcaaagttttgctaactcccaagttctctagcatgttaaaagatcaaatgtccaaagatttactgtccaaattaaatgcaaacctggagtcaccagagattatctggaactcttcaacacgagcagagttgctgaaatttgtggatcagcaacgtgcagctcaaggtcctgatggtttatatgatattaaggattcacatgactttgtctataaagcactatccagagaattattcattggaaatgtttacttgagagtctacaatgatcagccagactntgaaattagtgaaccagaaactntntgccttgctctgattgatttcatatcttatcttgtgcacaatcaatgtgttgaagatgccgatctttagaatgaagatgctgatc

SEQ ID NO: 220843 - DNA, 493 bp, Glycine max
  unsure (1)..(493): unsure at all n locations
ctctgcgattttttcttcaatttccagatcacgaaactaaagaagatggagaaagcgatcagcagacagaagattttgcttcatcatctcaacccttcatcgtctacccacgtcaacgaatcatcctccctctatgcttcagcatgtgtggcgggggacagcgctgcttatcaaaggacatcgacattcagggatgatgttgtgatcgtggctgcttatcggactgctcattgcaaaggtaaacgtggtggtttcaaagatactcttcctgatgatctactggctcctgttttgaaggctgtaattgagagaaccaatgtgaaccccagcgaagttggggatattgtcgtagggagtgtattggctcctggagctcaaagagctagtgaatgccgaatggctgcattntatgctggttttcctgaaactgtgcctgttaggactgttaataggcaatgttcatctgggctccaggctgttgctgatgtagctg

SEQ ID NO: 220844 - DNA, 551 bp, Glycine max
ggaaaaaaaattaagtgtatgtttataattacccaaaatatatcacaatttaatacaagtctaatatgaatagaaaggattacttgagcagtggttgacattatcactaccatggaacaaagctcttgagatttcttatttgatgaccaaatatagagagtgtgaagtaactaattctagcgagcatccttggataaaagaagatcatccactttccgggcattgcatagctcatcagcacaatcaccactctcaaaaacagcagctgcccccattccagtacctatgcacatagatataactccaaatcgacagtccctgccacgtttcttcatttcatgcaacagcgttgcaacacatcgagcacctgttgaacccagaggatgtccaattgccattgcacctccattaacattgatcttttctggatcaagccctagattgttacaacaatatacgaactgggaagcaaatgcctcatttatttcaaaaagatcaatatcatcaagctctagacctgcagccttaacagcaacaggaattgcagcagc

SEQ ID NO: 220845 - DNA, 565 bp, Glycine max
gctcggaattcggctcgagcgaaaagcatttgatcatttaccatggcctaagatgacggcttatgaacggcggaggatcttgttgcgcgcagctgatctgcttgagaagcataatgatgagcttgcagcacttgagacttgggataatggaaagccttatgaacaagctgctaagattgaagttccaatgcttgttcgcctgattcgatactatgctggttgggcagataagatccatggtctaacagttccagctgatggaccatatcatgtgcaaacattacatgaaccaattggtgttgccggtcagatcattccttggaacttccctcttctcatgtttgcctggaaggttggaccggcattggcctgtggcaacaccattgttctcaaaacagctgagcagacaccgttatctgctttatatgcagcaaaactatttcatgaggctggacttactgctggtggtttaaatgtagtatctggctttggtccaactgctggtgctgctcttgctagccacatggaaagtgacaagcttgcttttactgggtgcactgatact

SEQ ID NO: 220846 - DNA, 508 bp, Glycine max
  unsure (1)..(508): unsure at all n locations
tagagagagacgcttcgcaaatctcaatcgaatctcagaaaaatgagagaaatcatcagcattcacataggtcaggccgggatccaggtcggaaactcctgctgggaactctactgcctcgaacatggcatccagcccgacggcatgatgccttctgactccaccttcggtgtagcccacgacgccttcaacaccttcttcagcgaaaccggatctggcaagcacgtcccccgtgctgtcttcgtcgacctcgaacccaccgtcatcgacgaggtccgctgcggcacctaccgtcaactcttccaccccgaacaactcatctccggcaaggaagacgccgccaacaacttcgcccgcggccactacaccgttggcaaagagatcgtagatctgtgcttggatcgcgtncgcaagctcgccgacaactgcaccggcctacaaggcttnctcgtcttcaacgcccgtcgcggtggcaccggttccggtctcggatctctcttactcgagc

SEQ ID NO: 220847 - DNA, 568 bp, Glycine max
  unsure (1)..(568): unsure at all n locations
tgaaaacaaccaacctcttcattgatctttgattagtactaagctaaaccatttcttattccctcaaaatcaaaacctttttctttctagctatttcccttttcaaatcatgccacctaacatcaccaccgttgttgccaatgtcaccaccgagcaattacccaaggctcgtggaggaagtgggcgtgccttcgtgacctttcttgctgggaacggtgattacgtaaagggtgtcgtgggtttggccaaaggactgagaaaggccaaaagcatgtaccctttggtggttgctgtgttaccagatgttcctgaagaacatcgtgagattctcaaatcccaaggttgcattgtcagggagattgaacctgtgtaccctcctgagaaccagacccagttcgccatggcctattatgtcatcaattactccaagctacgtatttgggagttcgtggagtacaagaagacgatatacctagacggtgacatccaagtatttggaaacatagaccacttgtttgatctgcctgantaatatttctatgcggtgatggattgtttctgcgagaag

SEQ ID NO: 220848 - DNA, 567 bp, Glycine max
  unsure (1)..(567): unsure at all n locations
gccgcacatccctccccactttaacaacaaccatgcccttacccttaccctcaccatttcactctcaccctcacccaacacccccttatcctgcgcccctcccctcctccttatccttcaccctattctctcacccccaccacacccttacctaaaaactaaaaacccaatctttttctctctccaccaccaaccatggcctccccttcttcccccaccgactccaacccaccctctgccgtccccctccctctcccggcgcctcccgccacctcctcccgccgccttcctccgccctgctggaccccggaggaaaccgccgccctcatcgacgcctaccgcgacaaatggtactccctcggccgcaccaacctgaaggctacccactggcaagaggtggccgacgccgtcaccgcgcagtgccccaacgcctcccccacggcgaaaaccgccgtgcagtgccgccacaagatggagaagctccgcanacgctaccgcaccgaaatccaacgcctncgcaacctccccttcctccgcctcaacaacgccaacaccaattccccttcc

SEQ ID NO: 220849 - DNA, 498 bp, Glycine max
  unsure (1)..(498): unsure at all n locations
ctttatgcttccgtttaagattaactccgaaattgtagagagagagcgtttttgtgttgtgtgtgttttcttctgtcacaacgtaatactattattattgttgtttgggacacaacaactcagagagttcttgcaaatttgcaatctctctctctctctctctctctatcccctttctgccgacgattttgtttgtcccctttggatcagttcgtgcccttgttgttggtttgtagcttttgctgaaatccagcaataatgaagaaggttattggtcaaactgttagggaccttaaaagagaagtaaataagaaagtgctgaaagttcctgggattgaacagaaggttcttgatgctaccagcaatgaaccatggggtcctcatggatcacttcttgcagatattgctcaggcaaccagaaaccctcatgaataccagatgatcatgtcagtaatctggaagcgaattaatgacactggcaagaatnggcgacatgtc

SEQ ID NO: 220850 - DNA, 529 bp, Glycine max
cggcaaagcaaatctgcatagcgatggcgcctccgaagctcttcgtatttgcgctttcagtaaccctgatttttgccatcgttggggccgaagccgatgtttccgtcgaaggagccactccagagcctgatacctccgccatcaagatccaattagatcaactcaattccaagatccaaattctcgagtctcaaatcagtgaaaagttggaagaagtgaagaagaaggacaaaattatagcagaaaaagaaaattccattgaagataaatcaattaccatacaatccttgcagaatgagattgcttctctccagaaaaaagggtcactggatgctgaggagcaggttggaaaggctcatgcacgtgctggtgaactacagaagcaggtggacaaacttaaaagggaactagaaacacaaaacaaggagaaagtgaactgggaaactcgagtacctgagttagagaataagattcatgacttgaactcaaaattagaagatcttcaaaagataaatgaggaacagaagac

SEQ ID NO: 220851 - DNA, 331 bp, Glycine max
gaaaagcaaacaagatatcctggtgattcgcaaacgcagaaacagcattgttttcagctaagaacataagacgaaataaaatccaacaaaatgtatcaaaacatcaaaaaggagagaccagggccactaacaactgggggtcctatttgacaacataagcaattgtaaaagcaacggaaacaaactaggtttaacgcactacttggatctctgtctcatctttcggggcttcctcttcagcctcctcatacgcttattcttccacttggccctcatcgcgaaaagaaaacagaacccttctttgtttccgaaccctagccgaggcggcctt

SEQ ID NO: 220852 - DNA, 500 bp, Glycine max
aaaaaacaaaaagaaatagtaggcagcattctgtattcattggcctgattaactcctttaaattattaggcagcattagagaaatggacgggaataactaccaagccaccacttatttccataaataatatacccctgccaccaagtttacagaagcaacgctacttcccaaaacaaatactagtgccacaaagtaagcaaaaataaggtaaaaatatagagtaggtaaagcacacacaactagagaaaccattccattcacagtcttcaggcagcgaacggagtgaaacgcggaacaggcttgcacttgagtggcttggccaaaaacacagtcaccctcccttcctcagacatgtcaacatgatggtttttaccatcattaacgatccagtcgaagcactggatcaaactcgctagcgttgcttgcatgacaagcaacgctagcgaggctccggggcagcttcttctcccgctcccaaagggcaggagctgatagtact

SEQ ID NO: 220853 - DNA, 516 bp, Glycine max
  unsure (1)..(516): unsure at all n locations
catgtaatctatgattctgtaagaagattaatattgacactagcaatcattcataagttacaattagacaaaaaaagagaaaattaacacagtttctcacgcttaaacaatggaaaaacttactaattatcccctctcgtctctccctaccccccaagacacaaacacacagacatatttgttataaaagaaattgaagatctctgtggatagagactatataacaggccatatattgatatatcatgtctcaacatgcactctttcactttttaagatgaggaaaacaaacatggagatcagatttggggtgtttggcttcagcatgctccttgcacttcacttctgatgtggtgcatataaatgtttgcatgcacaccttgcactgaatagacatggctttcttgtttgaatccaactggcttcccttagcggcagccctctgcttctcgaggttcttctcgcgagccatctttgacttctgggcattgcctnctcccatgtctgagtctgtct

SEQ ID NO: 220854 - DNA, 580 bp, Glycine max
  unsure (1)..(580): unsure at all n locations
caccacgctcttcctcactcgcaacggcttcgccgagttctggaactggttcgactcggaatcatggtacccgcttggccgcatcatcggcggcaccctctaccccggactcatgctcaccgccgccgccatccactccctcctccgcttcctccgcctcttcgtccacatccgcgaggtctgcgtcctcaccgcgcccttcttcgcctccaacaccaccctcgtagcttacttcttcgcgaaggaggtctgggactccggcgccggcatcgtcgccgccgcgctcatcgcgatctgccccggctacatctcccgctccgtcgcggggtcctatgacaacgagggcgtcgcgatcttcgcgctgttgctcaccttctacctctttgtgaaggcggtgaacactggctcgctggcgcgccctgagttcggcgttcgggtatttctacatggtgtcggcgtggggaggttatgtgtttataataaacttggtgccgctntatgtgctggtgctgcttgtgacggggaggtactcgatgaggctctatgtggcgtataactgcatgtatgtgttggggatgct

SEQ ID NO: 220855 - DNA, 403 bp, Glycine max
tttttttttttttttttttttttttttttttttttttttttttttttttttttttttgttttgggttattttttttttttttttttactttttttatttgtttaacttttttttttggttacaccccaaaaagaattttattaaaaaaaacctaaaaactctgttcctgctaataaaaaacgggggggggaacaataaaccactaaaaaactgaacaaaactaagtcgattggagccctcggggaaaaaacctggaaacttccaaaagactaacacgcccccagaagaaactttatgtgaaacagggaccgccaccgctaaagggtgttccagagaagaccaaaaggagcaaaaaaaggagcccgtgataaaacacccaagatggccgtgacggatatccagc

SEQ ID NO: 220856 - DNA, 524 bp, Glycine max
gtttggttgaaagtagcaaagatgtttcctttcgggcaaaagggtcaaaagataaaggggactatggtggttatgcagaagaatgtgttggatatcaacagcatcaccagtgttggagggatcgttgaccaaggcttaggcttcataggcagtgcagtcgatgcacttacttttgcagccaccaaaatctccatccagttgattagtgctaccaaggctgatggtgggaaaggaaaaattggaaagagtacaaatttaagaggaaagataacattaccaaccttgggagctggcgaacaagcatacgatgttaattttgaatgggacagtgacttcggaattcccggtgcattttatattaagaacttcatgcaaaatgagttctacctcaagtctctaattctcgaagacattccaaaccacggaaccattcacttcgtatgcaactcctgggtttacaattcaaaaaactacaagactgatcgcattttctttgccaacaatacatatcttccaagcgagac

SEQ ID NO: 220857 - DNA, 482 bp, Glycine max
gtcactcttgtcttggtaccactggcttgttaataattaattatacgtactcgatcacatcaaaatgaaatgctaaattatttctttattccttaattggcacaaagtaaaaactggaatagtattgaatcgatctacaaggaagaaacaatgatgctaggttggacgatgtggttgttaagcacactgttcaactccttctgaaacctctccatggcctcagacggcaaacaaaccggtataaccaacccttcctctcctttagcattcttgaaaggtatgtaaaagctagcaacaccaggtatggctccaacccctcccttggcgggtcctccataaacagccttcccccacccaaactcaacgttttcaaacccagcacgagtcacatctgacacaacataggatctcacaacagtgaaggaggccgtcccttggccaccattaaattcgccaccgagtgcatgtattcctcagtcacg

SEQ ID NO: 220858 - DNA, 482 bp, Glycine max
agcaacatctaagcagtacctgttatacaaaatagaagcacccgtctatatgacaagcctgaaaatatagcatcttattttctcaaagaattgtatattgaaaactcttctattacatttgaaacataattggctggcatatgtaaaaaactccaaagattctcttaaatacagagcatacacattttagaggattcggtcctgaagatctgtcatcaatgtggaggccaatgagctcagcttctttccagtctctcctgcaatgttcttaagggaagagagatcctgttgtgcctggaaagataatcgattgatgaggtcaccagcagtaagatcaatgttgttgtctcttgagtcaccaaaaagatcagcactggagatggcacttgaacccgaaaacttagacaatgtagcttgagaatccacatctgcagccttggtctgatctccaaaatattgggatgaagaaatagatttagcat

SEQ ID NO: 220859 - DNA, 476 bp, Glycine max
ggcggggctacccgctgagtttaagcatatcaataagcagaggaaagcccttgatgagctcaagaggcttgttcaagaagcgctcaacaaccatgagctaactgctcccaaaccagaaccagagaagaagaaaacggaactcaaagcactggagaagaaggaggaagaagtctctgaagagaagaaggaagttgaagtgacggaagagaagaaggaagcagaagtgacggaggagaagaaggaagcagaagtgacggaggagaagaaggaagttgaagtggcggaagagaagaaggaagttgaagggacggaggagaagaaggaagttgaagtggcggaagagaagaaggaaacagaagtgataaaagagaagaaggaagttgaagtgacggaagagaagaaggaagcagaagtgatagaagagaagaaggaagttgatgcgacggaagagaagaatgaagttgaggtgacggaag

SEQ ID NO: 220860 - DNA, 537 bp, Glycine max
ctcggttgaaatagttcatttgtagaataagcttcgtttcctcaaggggaaatcccattcatccacgcttgttaacaaccaggcaaataaatgataagcacaagaaatagtaactaaaaaaaattattacggatctctgctcgaacaaaaatcataaccttttaatgtaatactactacacaccggcagcatccacactcgtattgtttcagtcagataaacccgccttcgactttagatgcgccttgaattccataatgtcaccctcccatctggtcacagattgattagcacatacccatatctcatgcgccacctgatttatgagcctaaaatcatggctgacaagcaccaagccaccgtcccattcattcaatgcctcggccaacgagtcaattgtctcaatatccaaatgattagttggctcatccaaaagaagcatctgaggctgtctccaagctaaccaagcaaatatcactcggctcctctgtccatctgacaagttcttcattggcatcacctgcgctttacctgaca

SEQ ID NO: 220861 - DNA, 491 bp, Glycine max
ttccgctcgatttttttttattaaaacattaagaacttttgataatcgtattaacaaaataagacatgtgtccagaataaagaatcaatcatctataagggaaaagtcaataaaattttcacacaaaaaatgaaagaatacatgtgtccagaaacaggtaaaaaatgtagaaaagttaataagaacaaagaaaaaggagcttgggtgacttggtagttcagtcattcattctctacaggtgtaactccaagtccaagcacataactctggtgctattcgaccttttcagaaccgggattttcgcaataacttggtcgatagaaggaattataggaaacccttcgttgagagcagctctgtgttttctcatgtggccacccagagcctggcccagagagaattcaagtccacaaatggagcactcgtgcatttttggtttgttccacaagctaagagttttggcttggtctttgagttcttccccctctagc

SEQ ID NO: 220862 - DNA, 552 bp, Glycine max
  unsure (1)..(552): unsure at all n locations
ggaacaaatcaaaccaaaactttcttatgaatcataaacaattaatattatatatatagcattctactatatactatatataatttctctttccctctctaacatctaaaatccaatatcttctatattttcccttcatccacccccgcttgagcgtgaccttgggtttacgttgtacgtacagttagagcaacatatccttctttttctatatattgcttttgtctcccaagacatattagactccaagcagcacgtagtagagtatggttatgggcaatgcaattagcatcccaaatataaccgcagtactaagtatatctgcatggagattgtattctttggcgaacacaaagggaacgataccttggggaagtgcagcctggacaattgcaacatgcaaaagaactccacggagtccaatgcctattgaagttgcagcaatcacagctggacctgtcaagaacctaacagccatagaaaatgctgccacagattntccacaggcaatgatcttgggttgtaatgccatgaacagacctagactgaaca

SEQ ID NO: 220863 - DNA, 450 bp, Glycine max
ttcgactcttactcctttctccgcatagctgcgtattccgaatcgaaaggtgacggttgtaagtaacaatggtggacaaggccaagggtctgaaggaggaggttgtcactctagagtacaccattaacctccacatacgcttgcatggctgcacatttaacaagaacgctactaaagcaattaaggagataaggatgtctgctcacactgcgatggtgacgaatgatgtaagagtggatgtgaaactcaacaaggctgtgttgatcctgaggatccggttcgtccccaggaggatcacggttcgcattgttcgcaagaggaacgaccattatgatgcaacggaagagctctattcccttgatactgtcgtcgagatccccgaggaggagctgaaatgttgtggaaccaacgttatcgatgatgcacattgactatgtgtaggctatatat

SEQ ID NO: 220864 - DNA, 535 bp, Glycine max
gatagaaaaatcaagataagctgacccatcatcatgacatgacttgagccacaaccaaaaccaatagttgtcccagcagcaattttaatcttaatcttctagaagctttcattacatggaaatgaaaaaagagagaataagcaatagtagtatttgttttcttttcagctcctactactttgatagctacgcctgtgacactgaaaaggattgagaaaacaggcttcttatttttatttatttatatctataagatatgagatagagagagttgtgattactattactattgagacatccaatacttgctcatctcaaagccattcctgccatagtgatagtcttcaattgtgttctcaatctcagactgcgtgttcatcacaaaagggccatgctgaacaactggctcattaagtggttggcctccaatcagaacaaatctcaaaggctttgaagagttattccatacgctgaggccatcaccttgagtcaaaacaaggacatggtgtggcacagttggggatgatgttggaga

SEQ ID NO: 220865 - DNA, 494 bp, Glycine max
  unsure (1)..(494): unsure at all n locations
gattatgtggagtcagttagcgattattcccggtcgccacncgcntgntttgtggtcgccctttttttttttttttatttaaactataaatatgtaattaaattttgacatatttccctgtcctcgcataaaactaatagccctgaaagaaaatacgcatgcagaacttgtcaatagaactagtatttgctcaagttgtttttagtaaattgacttgacacaacttgtccacatattacgacaactatactatgaggttgtttggatacaagctataagttacgggaaaaaactatattttcagtaagaaagctctcaaagtgcttgtatccaaacagatcctatatgtagtctgaatcagcatctcttcggaaatgttgcaaatctggatgagcgtcgtatcctggcctcctaggattccttgcaaatttgttgggttcaaaaccaggaacaccaggaggtccatagggatcaaatcgtgcaccgggaggaac

SEQ ID NO: 220866 - DNA, 541 bp, Glycine max
  unsure (1)..(541): unsure at all n locations
gtgttctggccatcttcttcatcttcactgtactcactctcatagtcatcatcatactcttcatcctcgttgtcctcatcctcctcaactccatcctccatgataggtccttcatcagccaaaacagcacccctggtgccagcccgagttcgtttcaaaactttgagctttaaatttgtccttctgtcacagcccaaccaagaatcacacaaacaatagcaagtcaaattgtagttaccctctgatggggcctggaacttgcccaatactaatctagagccccctttcaccttctcaactgcttctgcaactaccttactggtctccttcacatttgctcctgacccctccatagactcctcaattgccttagatgcagcagttacagcagcagcttcatccatgaaactaaccttctgagaaaaccacacgttgtttgaaacagaatccgcangcaaaaaccagtagttttcttccttatgaaatgggtagtagggggcatgtggaagagcaccaatcaggctattacccctttaacatt

SEQ ID NO: 220867 - DNA, 526 bp, Glycine max
ggtatttatttaattggcattagacggtgtttgggtttcacagacagacacacactcggttctgccttcacaaaaaaattatcgagatcccctttttctcctaagaaaagccatggctaagggtcccggtctctactctgacatcggcaagaaagccagggatctgctgttcaaggactaccacagtgaccagaagttcaccatcaccacctactcacccactggagttgctataacagcatcaggaaccaggaaaagtgaactgtttgtggctgatgtcaacacccagttgaagaacaaaaacatcactactgatatcaaagttgatacagattctaatctcttcacaactatcactgttaatgaacctgctcctggtctgaaagctatttttagcttcaaagttcctgaccaaaggtctggaaaggtggaagttcagcacttgcatgactatgctggaataagcaccagtgttgggttgacagcaaacccaattgtcaacttctgtggtgatataggaactaat

SEQ ID NO: 220868 - DNA, 448 bp, Glycine max
cgcatcatatgatttaagggaatattgcagaaaatatccatcaaatcagatcagaagatataaaatttctcatgtcaaaacctcaataaagagtgccaatcctcattcaacaaaagaggcttgctaagctttgggcatttaaaaagtcacatgtggtttatagaaagcctatttatttttacaaggttgaattgctcaaatgcaacgaaaactccatgaacacttcttacccaagaagagaaccaacttcaaggaaataatttagtctcacagactatacgcttcctaacacctactcaatgctcttgccaggatggatcaaaattcttagggtttgagaaccaaacccaatccaaccttagcactcttttcaatggccttggtgtctacctcaccagatatggtaaagaacgatttgggacgccactcatgctggatcagagcactt

SEQ ID NO: 220869 - DNA, 490 bp, Glycine max
atcgacaaaacacaacacggtgtaatggggaggttgggtgtggtgaatctggaaggaaagatctatagctgcaaacactgccatacccatcttgcgctttacgatgacatctactccaggacattccattgcagacatgggaaagcttatctcttcaataatgttgtgaatgtttctgtcggcgaaatggaggacagaccgatgatgactgggttacatacggtggctgacattttctgtgtgggttgcggatcgattgtgggttggaaatatgaaactgcatatgaaaaaaaccagaagtacaaggaaggaaaatcggtgcttgaacggaacaaagtgtcatgtcctgatggaagcaattatttgatcagcagtgaggcacatgatggaggaagtgatgcagatgatgcttagacatactaccatgctcaatctttgtagcaccgaatttggatgaagaaagcctttcaagtgccctgtgtctgactct

SEQ ID NO: 220870 - DNA, 505 bp, Glycine max
atgaagagtaaaatgagaaatgactaaggatgcacaagacagaaaaggaacactcaaggaatacatacatggaaattaaaaaaaagaaaaagaaaaagaaaagacacaaaagggatacaaaatacacccttggacacaagcatgcttatctacaatttgatgcatgcccccatggttttggccttctcttccaaacacccccaacaactgtagctgatgagaggaaaagacgaaaaagcctaaattagggaactgcatagacagatcactagcactcctcaacatagaaattattattcttcgggggaaacaccatgcatagcccttgttggcaaattaatcaaggtagctagcttaattgattaattaattaagcgttgctcctgaaggatccaagagccttgatagctgctgctctaaggatgtattggtggtaaaatgcagccactgctgctccaacaattggtccaacccagaatatccactgatcatcccagattttgtc

SEQ ID NO: 220871 - DNA, 505 bp, Glycine max
cggccaataaaaatattttcttacctgaaaatcaagcatacatgaagtcttttctgccaaacacattttttaacataaaacagggcccaagacatacaaacaaagaggaagtccacaaagggtacatgggcatcattgttgaaattgacctttattacagaaacccagggaactcattccattcacatgggggcttgtaaaggcttgggaacccacataagatgttttatagggaagaaggggcacactgcatccttcccaggcttgattccaagctgcctaaatataatatgatttgggctccaatcagatgtgtccaaatggcaaatgccaagagcttcaattttggcatctccattctcgctacctagggagaccttgaacaccttgctccctgttgctatgaaggggcaatagtaaatggcatagggatatggtaggggatgacaagctacccatttagcagcgttgatatcttcagacacttccaaaatggtgaactttt

SEQ ID NO: 220872 - DNA, 504 bp, Glycine max
accccaaagctaagaaccaaatagtacaggaggtatgaaactgggatatgcaatcgttattgcgcgccttgtaccaaaacatttaattttcatatattacaacaaaaaacagactttagaaatctgccaagactaaataacgttaccagccaaaacctaaagggtaaatttatcacgcagttataactgcattatgcaaacaaaagataaaaaccatgcagaaattatagaacctctactaccataaattgcactactgttgagcacattgcactcgttgaccagatggctcatcatcatcttcatcatatgcctcgcgatattgctgttgctgctttcgtctcatctcctccttaaagttgacatcatgcaaagtggtcttcttacaatcatccagctccatgtctgacacatgcttgctgctcttttgaggtaacaccttttccagtaactggcattggtcaggggaaagaaaccctgagtctgggaaatcaacattaaact

SEQ ID NO: 220873 - DNA, 535 bp, Glycine max
  unsure (1)..(535): unsure at all n locations
agnggccgccctttttttttttttttttttttttttttttttttgaacacaatgaatattttgaataatggagtatctgaattccccaccgaatcactccatgacttggcaagcaataaaataaatgacacctaactaacactattgtagccatggcacgaaattgaagtcaattttggccaccttggttcttggctttggtagggaccttgaataataatgtaaatacgacaaaataatcttccaatatgtgctatgacccgtatttgcagagatcctcaaatcccatgtattcatgattatcgatcttgtgtaccatatttacaatgccaacttcacctaatgagactgcactgacaaatattgtagaggctagaataaagatgataagagatgctctcccaaataagatgattagttttctcacaatgtgctgtccaacgaaggcagcaatagtagccacaaggacgaagttaagagcataaggaattggaaaacgtttcaacaggtagtattctataacagacatagatga

SEQ ID NO: 220874 - DNA, 371 bp, Glycine max
  unsure (1)..(371): unsure at all n locations
cagaaatttgcgccatcgtcgagagaagcgtgagagacttctcgtttatgatgagagctaagatagtttagttgtcaagtcataaagcagtatcatcactttaaatttcattagaagctgtcaaaatgtcacggaagggtttgatggagcaagacctgagtaagttggatgtaacaaagttgcatccactttctccagaagtcatatctcggcaggctactattaatatcggcactataggtcacgtggcccatggcaagtcaacagttgtgaaagcaatatcaggtgtccagactgtgcgtttcaaaaatgagttggagcgtaacattacaatcaagcttggctatgncaatgcaaaatatacaagtgtg

SEQ ID NO: 220875 - DNA, 572 bp, Glycine max
gcgaggcaacgcatcgcaactagattctccaagctctgcatccctcggcgatgccgtccacaacctactgtcttgaaggagaacaaattaaatctccttcaattatgaaacaggatgttgcacaagataacaccaactcatattcaaagaattcaatcccaccctacatgaaggctatctctggctcacttggagggattatggaggcttcttgcctgcagcccattgatgtgatcaagaccagattgcagcttgataggtcagggaattacaagggaatactgcattgtggtgccacgatttcacgaacagaaggggtacgagctttatggaaaggattgacaccttttgccacacatttgaccttgaagtatgcacttcgaatgggttcaaatgctgtacttcaatcagcgtttaaggaccctgagactggcaagcttagtggttatggacggatcctttctggctttggtgctggggtgcttgaggctattattattgtcactccatttgaggtggtgaagataagattgcagcagcagagaggtctaagcctcgagcttttgaaatac

SEQ ID NO: 220876 - DNA, 578 bp, Glycine max
gagaggtatagcaatttggttgtaggccttaatgacaccatggagaatctcttggctgctgtggacagaaatgaggctgagatttctccttccaccttgtatgctattgcctgtgtgatggaaaatgttcctttcattaatggaagtcctcagaacacttttgtaccagggctgattgatcttgccatcgcgaggaacactttgattggtggagatgacttcaagagtggtcagaccaaaatgaaatctgtgttggttgattttcttgtgggggctggtatcaagccaacatctatagttagttacaaccatctgggaaacaatgatggtatgaatctctcggctccacaaaccttccgctccaaggaaatctccaagagcaacgttgttgacgatatggtcaacagcaatgccatcctctatgagcctggtgaacatccagaccatgttgttgttattaagtatgtgccttacgtaggggatagcaagagagccatggatgagtacacttcagagatattcatgggtggaaagaacaccatttgtttgcacaacacatgtgaggattccctttagct

SEQ ID NO: 220877 - DNA, 532 bp, Glycine max
aaaacatatgactatttctacattacttcatagagtaacaccacagccatgacacaaataacatcttgttcatgcgttcgcatcatgataaaaacatcacagtggttgttgaacatagttatttttatcaaattaagacaccgcccttccctatcccctcataacaaacataatcttaccccagaaaaacaggaagagaaaagcaaacccacaaaagttttcatagatgccatccatttcaatatacattatctaaacacaaatcagcccatggcatacttctgggtccagctgcgtgcagtggcctcatacttggcccggtcagttttgtacatgtgagcgatttccggaacaagtggatcatcaggatttggatcagtcagcaatgagcagatagaaagcagtaccttagagatggtgagtgcagggctccactgctccttaaggatatcaagacaaatgctaccattgctgttgatgttcggatgaaacaccttagtcctaaaggcaaccttgggaggtttgaaaggat

SEQ ID NO: 220878 - DNA, 604 bp, Glycine max
  unsure (1)..(604): unsure at all n locations
gttattgattgcatccattacatgtttattcaatttattttggccaaataggaatgagaaatccgtacacagaacatttaacaacatagcggggaggaacataatgtaattccaccagaagttgataatgctatgtcatcatagctttattcagcaaacaacacgcaaaccactaaatacaattacaacgatgtctgaggatgttcataaatataaacgttaagtgtgacatacacatcataaaaatgttcaaggatagacctcaatcagagatctaaaaccaaagatgggaaatattttgtagtgtttgaatcctgcttcgatgaagagttgtttccattctttttccgttctctctcttccattcatcgtcaacataataatgtccaaactaagctttgtttgtgtcatatccgggtcatctagcttctcatttattacggcatctatgataatcacttttccactgttgcctttgcttgaaatagaatctctacacttttgcaggatctttatgcaattntcgtcggccaattatgtaaaacccacntagtagcactgcatcagcttgagggatagagtgaacatgttaccacaacaaaac

SEQ ID NO: 220879 - DNA, 424 bp, Glycine max
ggggaaacaaaaaagggggcccaaattttatttccaaacattcatgaattatgactgctttaaaacaaaataaaattttaccgaatataccatgttaaaaataattttttgccccttataacaaacttaaaaaaaaaaaaaacccagttgttttgctacaaaaaaactgatccatattttacttttaaaaaagacaacttaattgaagggccgggcaaaatctttgccttaaaaaacactttttttttcccaccccgttggttggacagagtcaattcccaagggaggaaccgggatttgttgtggtggtggaacaactttaccccaattttcttttgaaacaacagcaggtgcttttggaggggccccccagttgacaccaagtgctttttgaaaaggttggggaactgcatcactccatgat

SEQ ID NO: 220880 - DNA, 495 bp, Glycine max
  unsure (1)..(495): unsure at all n locations
aagttaggccaacatctagcaagaacaattcacgagctaaataaaagtgacataaaatcatgtctccttagaaagggtattctttgcagcctcagcagccgttttctttgcatcaatctcagacacaatggcatcaattattagcttcagtgattacagccaatacctagcaagaacaatgctcgcataacacaaaacagaaaattatgtctccttaggaggggctttcttagcagcctctgcagctgccttctccgcttcgatctcagcaacgatggcatcaatttcggcttcctccagttgacgcagaccctgctccttagtcatcaccgcaacttctatgttcttccctccactctcaacaacttcaagcaatgcgcgaatagccaacttgacagtcttctggccagaagtgtccttatagttcttctccaggaactnccgaatcgaattcgagttccttcccgtggcgttcgcctttcacgccgagaacgt

SEQ ID NO: 220881 - DNA, 516 bp, Glycine max
  unsure (1)..(516): unsure at all n locations
agaaaaagccaaaatggttgaatctcagcccaagttcttcatcccggactcaatcaacggcgtgaatttcgacgtagcggcgcagattaagatggtgtgggaagtgatgaaggcgccactgatcgtgcctctgctgaacctggcagtgtacattagcctcgccatggcgctcatgctcttcatggagagggtctacatgggcattgtcatcatcctcgtcaagctcttctggaagaagccacaccagcgctacaagttcgagccactccaagacgacgaggaactcggcaactctaattaccccgtcgtgcttgtccagattccaatgttcaatgagaaagaggtgtacaaggtgtcgattggagcagcttgtaatctttcatggcctgcggatcgtctcgtcatccaagtgcttgatgattctactgaccctaccgncaagcaaatggtggagatggaatgccagagatgggcaagtaagggcataaacatagtgtaccaaatcagagaaacaag

SEQ ID NO: 220882 - DNA, 435 bp, Glycine max
gtagggatagggttaaggccatggagcgcatcatctgcgccaagtacaagctaggtcgcaagatcggaagcggatccttcggcgaaatctacctcgcgacgaatattgataccttcgagatcgtcgccgtcaagatcgagaacggtaaaacgaagcatccacaattgctttacgaggccaagctctacaatattcttcaaggaggaagtggcatcccgaacataaaatggtgcggcgtagacggggaggataatgtgcttgttatggacttgctgggacctagtcttgaggatctttttgtctactgtggaagaaagttctccctcaaatctgtgttaatgttggccgatcaaatgatgactagaatagaatatgtgcattctaaaggattcctacacagggatataaaacctgacaactttctcatgggacttg

SEQ ID NO: 220883 - DNA, 518 bp, Glycine max
gtctccactttctgagaagagggccaaattagagttagattattagggtttaaccgttcctccccttccttttcaccataatcaacatcaacctcttccaaatcccaatggatccgaccaagaagcgcaagctcgacgagaacggcttcatcaacaacgactcctccgagcccctcaagctctccccctccgacgcccgcaagctcatcgagcgcttcaccactgaccagctcctcgacatcctccaggacacggtggcgcgccaccccgacgtcctcgctgccgtgcgcgctgtctcagaccccgacgtctcccagcgtaagctcttcatccgcggcctcggctgggacaccaccaccgacggcctccgctccctcttctccacctacggcgacctcgaggaggccgtcgtcatactcgacaaggccaccggcaagtctaagggctacggcttcgtcaccttcccgcacgttgacggcgcgctcctcgcccttcgcgagcccagcaagcgcatcgac

SEQ ID NO: 220884 - DNA, 527 bp, Glycine max
  unsure (1)..(527): unsure at all n locations
ggtagttggaaatctttttatttacaaatctaaacagatacatacactgggagttttatatgggaaaaaattagagtgaaaacatgtcaactgtggatccacgagtgtagtttctataaatctgtgattataaacatggtataggtcagtccgtgcaatgtagtccattaaaaggaatcattcttctgtcattaaaaggaaccattcttctgttatgcgtctcttcccaccaggtcagagccactagttgtcgaggattctattgatttgtccaagataatcccttctttaatctcatctgaagctgccagctgttctaccgtcctcccaccctcaagacaaaccatgagatcaccaagctgcatttccaggtccgctactctatcacccatcagtctcgtggtttttttctccctctcttcaatcgcaagtatcttagttttccaaatgtcctcatttttcacaagattctcattaagatcatccagaaatttcttctctttcttacatctgncaatcttggactg

SEQ ID NO: 220885 - DNA, 557 bp, Glycine max
  unsure (1)..(557): unsure at all n locations
accaaagcattcaattttcatatacttgaaatctgccaagaactgtaaactaaataacattaccagccaaaacctaaaggtaaatttatcacgcagttataactgcattatccaaacaaaagataaaccaagcagaaattatagaacctctactaccataaattgcactactgttgagcacattgcactcggtgaccagatggctcatcatcatcttcgtcgtatgcctcgcggtgttgctgttgctgctttcgtctcatctcctccttaaagttgacatcatgcaaagtggtctcctcacaatcatccagctccatatctgagacgtgcttgctgctcttctgaggcaacaccttttccaataactggcattggtcaggggaaagaaaccctgagtcggggaaatcaacattaaattggatgtaaaggcgacccttcatgaatggcctattgtgttgnggcattccctcatcatttaatgctttatattgacctggcttgatgacttccccaggatttgatttgatcaatagttgcctaccatcaagatgtttgac

SEQ ID NO: 220886 - DNA, 467 bp, Glycine max
aagcataacacaaaatgagacaatatagaaaaggacctggttacagcgtttttcgttactgtacaagactgttctatcgagagcagactcacaagcaagttcagggtgaaacttagtttagctacagtacatacatgatacaaaatgagctttctataaacatactagaattatgactgcagctcttttcaacaggactagcagaattatgcttatttgcaaacccgttagttcaataagcatatcaataacttttttttttctatacgtctagtaaaaaattgtcacggactaagatggatgatttcatttcacatggaaatagtacagcctaactctttggcagcggtatcaagaaagttaatagacaatccgtttgaaagtcggctgtgagcttcccaagtcaagcatttttctatgtcagcttgccagtcaatgacatccaaattgaagtattgataagaggg

SEQ ID NO: 220887 - DNA, 530 bp, Glycine max
aaaggaatcatcataaattattatttgaaatttgaagacactaaactgaaggtgatgatttacaaagaactcaagctaacaaaaccagctacggtttcaagttacagttcaagcaaggatgatgatgatgatgaaaatgttacaagtaaacaacaaccattcttttggcagaagtgtacacaaagtaaaaagagagactcacacttaagacgtactctacaaccaattatatccttcttctttcggttcttttctttttcttttcatttcaattagtctgtccactctcaacacctaaaccatacaagacaccagcatatttctccgtggagccactgaagaacgcatccctcaactttctaaatgtacaagaagtgagtaaactatcagacccagcctgatggcacacgccaaccctttcaacctccaacaactccgcaagcttgttcaaccctccgtggaggctgttgcagaacttcatcaggtgcttgatgtcatacaccatcggaaaatacatcttgatcagatcg

SEQ ID NO: 220888 - DNA, 328 bp, Glycine max
aggggggaaattaaaggccttttattaatgggacccaattgagttcaacacaaaccgaacttattttcaagggacattattacagaccccttaaacattaaagttttttaaaagttttgggaacacattcaacatttcccaacgggcttaaaaccccccacggggaccggggacaaggtgaaggggtgattccttttggatgttgtaaccaacgaggggcctttcatccttgagctgtttgcccgcaaaaaaaaacctttgttggtcccgggggaagccctccttggcctgaaaattggccttcacaatgtcaaaggggttaaaactt

SEQ ID NO: 220889 - DNA, 581 bp, Glycine max
  unsure (1)..(581): unsure at all n locations
cggattcggaattccaagtgttccacgacgacagcaccccgccggtcagagcccaaaccattcacgagctccattctctgcagaagaaaaagtcaaccccttccactcccctctcagcaacgcaaggccccttcgccactgtttccgatgaggaacgccagaaacagcaactccaatcaatcagtgcgtcgttggcgtcgttgacgagggagtcagggcctaaggtggtgaaaggagacccagccactaaggcagagaaggggacacatgttcatcaccatccgcaaccacattactttgcttcaacggcgtttgatgtcagtgacagtgcgctcaaattcacccacgtcctctacaatctctcccccgctgagctgtatgagcaagcgattaagcacgagaaaggatcattcataacggcaacgggagcgttagctacactntctggagcaaaaacgggacgctctccccgagacaaacgggttgtcagggacgacaccaccgagcatgacctctggtggggaaagggctcgcccaatattgaaatggacgaacataccttctaatcaacagagaaagag

SEQ ID NO: 220890 - DNA, 477 bp, Glycine max
ggactgtagcctgacaaggccgaaaatttcaataattaaacgctcgcaaaataacagatttgtgtattgtctcggaagtgtcaataataaagggatcgtcttatagtcaagcaagctaaatacagtgaaaacctttaagtagaaataatcaaccgaatgcttttggacttcattttttttttcgctaaataggaaatgctctcatcagaatataggaccagcagagacaatctcttcagtcaacttctgatcccctcctatcttgtaggtcgtgaatccatcaaaattcttcttgaataagcttgctagtttcaagcgtgtatcttgataggccttcttgttagaccaagtattcacagggtccaagatttcagaagggactccctctagtgctgttgggatctcaagcccaaacactttagtcttagtgtactgtgcattcaaaaggcttccagagtgaatagcatcaatgatttt

SEQ ID NO: 220891 - DNA, 587 bp, Glycine max
attaattccaaaatcacacttctatatatcttcctatagcaatatatatgatgggtgacactgagatcaagccatcagttgaagtagtcgtatgtgcttccatgaacaataataatagcgcaaacaaccacaccctcccaaccgacatcaccaagccatcacaattaccaatcttgaccaggctccatgctggttactttttcatatgcctttcctttggagcacaagctttgctctggaagagtttgagtaaacacaacaaggactcacaaagtctctggcatggattcaacttgatgccttccattgcatttctacttctttggtgtgtgtcactgctgactgccactagtttgtctttactttacgtgctcaagtgcatctttcacttggaaatggtgaaggaggaattctcacatcatgttggagtgaactgcatgtatgctccttggatttcttggcttctcatgcttcaatcagcacccaccatccttcattcaacttcttgctaccaagttctttgcttggccttttcgtttgtaatattgctgcttgacataaaactatatggacaatggttcacaact

SEQ ID NO: 220892 - DNA, 532 bp, Glycine max
gcagctataatggagcattttattttcagccactcaattttgagttgaatgacatttcattttcaagtcataatcggagcatttttatggaacagcctctcaattttgagtacagtgatgatcatcaaagcaataaaaaccagcacggagaccatacatataaccagcattaaccaagaggccatgccactttccacctcttgagcatattcagcacaagctagtccaaggaaggttaaagggaatgaatacgcccaccatgtaacgtttaacctcttcatggatttcttgaacatggctggcctgcaagcctgagacataaacaggaataaagacagaaagaggagcatctttgatggggtgacaaaagcacctgtgatggatttccaggctagacttgctatgcttggtgcagcaaaaaacaacaagtaagttggccttagcactgtggggaactggctgccacttgtcagacgctgatacagcgttacaaatataattagataatataccaaaccgagtgagaacatta

SEQ ID NO: 220893 - DNA, 531 bp, Glycine max
gcacgttttgccaagtggcgttttgtgctgaagattggtcccaacgagccatctgagctggctatccatgagaatgcctatggcttggccagatacgctgtcatatgccaggagaatggcctggttcccattgttgagcctgagatccttgttgatggatctcatgacattcacaagtgtgctgccgtcaccgagcgtgtccttgcagcatgctacaaggctttgaatgatcaccacgtccttcttgagggtaccctattgaagccaaacatggtcacccccggatccaattctgctaaggtttcccctcaggtggttgcggagcacactgttagagcccttcagagaaccgtgcctgctgcagttcctgctatcgttttcttgtctggtgggcagagtgaggaggaggcatccgttaacctcaatgccattaaccaggtcaatggaaagaagccatggtcactctctttctcctttggaagggcacttcaacagagcacccttaaggcatgggagtggaaagaggagaat

SEQ ID NO: 220894 - DNA, 593 bp, Glycine max
  unsure (1)..(593): unsure at all n locations
ctttttcttgtgtgtgcgttcctaacattattgtttcctaccaagttctctgtctggggagttcttagcaccaccaccagcttctgcagtagctttaagctacgaaagattttccttgaccatggggcaaaagcatttagtgacggtgttctgtttatgggctttaacatgttcccttcttccatctttctcctttggaattctgagaattggtttgaagaagagacctctagatcttgatagtattaatgctgctagaaaggcaagagaaggtctaagatctgtaagaccaatgatgggtgcacatgatcagtttattggtaagtcaaaaggtgaagatatagtacctttgaagaattatttggacgctcaatattttggtgagattggaattggcacaccctcacagcccttcactgatgtgtttgacactgggagttccaacctttgggttccatcatcaaagtgctactttactctggcttgctatactcataattggtacacggctaagaaatcaaagacacatgtcaaanatggaacttcatgtaaaataaactatggaactggatcaatatctgtttcttcagtca

SEQ ID NO: 220895 - DNA, 522 bp, Glycine max
ctcttctcctaagctctagcacttaactagcaatattaattagcatttgctagagagactaggagtataaacataccccagtttaagatggcttcaaaaacttgttcctcccttgcccttttcctcacactcaacctcattttcttctcacttgtttctgcatgcggttatacaccatgccctggtccaaacccaaagccaaggcccaaccccaaccctaaccctaaccctagcccaagtggctcctgcccccgtgatgcactcaaactaggtgtatgcgccaatgtgctaaacttggtgaacgtcactttgggtcaaccaccagttaccccttgctgcacccttctcgatggtctcgttgaccttgaagctgcagtgtgcctatgcactgccctcaaagcaaacattttgggcatcaacctcaaccttccaatctcactcagcttgcttctcaatgtttgctcaaggaaagtcccacgtgatttccaatgtgcctaagcttatactatcacatatcatctt

SEQ ID NO: 220896 - DNA, 460 bp, Glycine max
aattcaataataatttctcaatcgaattaaatgaataacacaatagttcatcatcttgttggttcccttgcgatttacataagccagcatcgggaactttatttatcgcaacactccaattaacgcatacaattaaaattccaccaaaaaggaaggaataacgatcggaagttaacccttcatgcacgtacaaattaatcagaatcacacactgatgaatagaatttgaaaaataaaaattaaaaatggaaaagcacaactagagcaaacccgaagcagaagaaggatataagatgatatgtgatagtataagcttaggcacattggaaatcacgtgggactttccttgagcaaactttgagaagcaagctgaatgagataggaaggttgagggtgctgccgaaaaagtttgctttgagggcagtgcataggcacactgcagcttcaaggtcaacgagac

SEQ ID NO: 220897 - DNA, 518 bp, Glycine max
  unsure (1)..(518): unsure at all n locations
atttggagtttggagcgactgaactaatcattaatttgcactcgctgtttcagcttcatcacccttcttttgcatcatttatatctcttgagaaatggcacaagaaacctttctattcacatctgaatctgtaaacgagggtcaccccgacaagctgtgcgaccagatctctgatgcagtacttgatgcgtgccttgaacaggaccctgacagcaaggttgcctgtgagacatgcaccaagaccaacatggtcatggtcttcggagagatcacaaccaaggccaacgtagactatgaaaagattgtccgcgacacatgccgcgaaattggattcatctctgatgatgttggtcttgatgctgacaaatgcaaggtgttggtcaacattgagcaacagagcccggatatcgcccagggtgtgcacggccacttcaccaagcgcccagaggaggttggtgctggtgaccagtgtcacatgtttgggtatgccaccgatgaaacccncgagtacatgcccc

SEQ ID NO: 220898 - DNA, 538 bp, Glycine max
gggacaaaattctgataaaatttccattgcatcaacacagtgacattgcatagccaaacaataaattgtgagtatagggagaaaaaaaaaaacgaacagtttaggtattgatgagatggcattagacattgaatggagtagtagtagtagtagtcatgaaacacgcaaattattcatccacacccagcaagacatgcactgaagggagtgattaacttaacaacactcttaagcttgaggcttctctgacttgagtggcttcacaacttcccaggtgaagtctgcatcatccgttccaaagggtccataagcagctgtcttgaggaacctatgaccacccgtcttaaggtccaagttaatggtgatcattgcaggtctgaaggcgaaattctccttcacaatttggataatctgattggaaggaatcttgcctagttgcataagtgttcacaaacactgactagggctcagggacaccaatggcttaggaaacttgcacaatgcaccttctagcatgccatttgccacgacactcttt

SEQ ID NO: 220899 - DNA, 532 bp, Glycine max
acattttctaactcctctctctttatatatagctgctttgtttggtacattcatttcatatcatggctccatcattggaaaccagtaacggtgaagccatgcaccttaaacaggttgaagaagagcaagatggtatacttttcgccatgaacatgatgtctaccatggtgtatccgtttgtggttcggaccgcgattgagttagggatctttgacatcatagcgaaagccggtgaaggtgcgaagctatcagcagaggagattatagagcaacttggcacaaagaaccctgaagctcccacgatgttggaccggcttctcaggttattggctagtcactccatgctatcttcctctcttgatactgaagatctccaacatggccaaaactctcctaagaggctctatagtcttacctatgcttccaagtattttgtcactgatgctgatggtgtctcgttcggagctaccttgaacttacttcttgacaaggtcttcttggaaagctggactgaactgaaaggagccatctt

SEQ ID NO: 220900 - DNA, 557 bp, Glycine max
attggctaatatcttttatatatatatatatataaataacaacaacaaagattgaacatatgtccttagataattggtaaataatgttcgagcatgatactattttttcaagcaacaagcaaggataatagaagaacaatttgagcaacactcgataagtgtgtttacttataaaattccataacccagaagccagagacactgcaaacgattttgatgccactgaatccagaacttaatgccaattccatgaattcatgttgggttctctcttttcctcctgagttttgagtcatcattaagaggtcagcttggaaaccactcttagcagtaactgtgctctcgggcaaaatgggaagaattaagtccacaacaatcacttttccatcactaggaatagctttatgacaattcttcaacaacttcaagcattggtcatcactccaatcgtgaagtatccacttcataaaaatgggcgtctccgtgggaacactctcaaacatatctgcttctacatgttcgataccggggtatgtaggagcatgctctatgacatg

SEQ ID NO: 220901 - DNA, 552 bp, Glycine max
atgacattgagccatggatgatgtggggctattatctatctcctatgatgtatggtcagaatgccatagtaatgaatgaattcttagataaaagatggagtaaaccaaatacagaccctagaattaatgcacctacagttggaaaggtgcttctcaaatctagaggcttctatacagaagagtattggttttggatctgcattggagccttgcttgggttttctcttctcttcaatctcttattcattgttgctttaacttatttgaatcctttgggttattcaaaagcagtcattgccgatgaaggtgacaaaaagaataacaagtcatcctctagccaacatattcttgaaggaacagacatggcagtgaaagaatcttcagaaatggctagttctttgaaccaagaaccaagaaggggaatggttctaccatttcaacctctttcacttgcattcaatcatattagctactatgtagatatgcctgcagtaagtctctaaatcctagaaagtggtttcatttctgctttccttacaactggcatgtatg

SEQ ID NO: 220902 - DNA, 526 bp, Glycine max
  unsure (1)..(526): unsure at all n locations
caacaagcagccatccacattcatactaagatttcttatcatggctacgggatcaccttcctcttcctcttcctccaattacgatgtgttcctcagcttcagaggggaagacacacgtcatgcttttactggccatctctacaaagctcttcatgacaagggaatccgcactttcattgatgatgcggagcttcaaagagggaaggaaataacaccagaacttatgaaggcaattcaagattccagagttgccatcactgtgctctcagaagactatgcttcttcctcgttttgtttagatgaacttgcaaccatccttgaccagaggaaacggttgttggttataccggtcttttataaggtggatccttctgatgtgagaaaccagagaggtagttatagagaagcattggcaaagcttgggggaaagttccagcatgacccggagaagttgcanaaatggaagatggttctgaagcaagtagctaacttgtctggccatcatttcatagagggagatggatat

SEQ ID NO: 220903 - DNA, 525 bp, Glycine max
  unsure (1)..(525): unsure at all n locations
cacacaccacctcgcactcgcagggacagagagtggggaaggaaaaacacagactaaatggcgccaaatgctctctttctcttctctttcctcgccatgctcctccttctgctccgctcaaccgccgccggccacaactaccgcgacgccctccgcaaaagcattctcttcttcgaaggccagcgctccggcaaactccccgccgaccagcgcctccgctggcgccacgactctgcattgcacgacggcgccaccgccggagtggacttgagtggagggtactacgacgccggggataacataaagttcgggtttccgatggcgttcacgacgacgatgctgtcgtggagcgtgatcgatttcgagaagagcatgggggcggagctaggtaacgcgttgaaggcggtgaggtgggggaccgattatttgctcaaggccacggncaagattggctccggcgttgtcttcgtgcaggttggtgacccttactccgaccataactgctgggagagnacccgagacatg

SEQ ID NO: 220904 - DNA, 458 bp, Glycine max
gatcaatgatcatgcctttattatcaacgaagtccagttttttggcctgctttgttaggacgtgaattccatatgcattaaaactttagaccataaactttatattctatatatagacttgccccgttacataaaatactttagtatacaaaaattggcctatcacttcacttacgaaaagaaaacccccacaaaccagaattctactattagggacacttggttccattttttttccccttaggagcaatgcagggggaccaattttgggccccacatggaaatcatagatacactttttgcaaagtcaacagggagctgaaaagaaagaaagaaggcccaccagcggggcattgatatatgtagggggctcaaactgctgaaagaaaggcctggaatcagggaaggaatctgggttattggtgggcccacccaccacgggcccaaccaacacattt

SEQ ID NO: 220905 - DNA, 560 bp, Glycine max
gttctccggtgagaaacagaaacacacagaagacagagtgagacgcttctcacgatggagggaggagtatcctacgcgcgcatgcctcgggtcaaaatccgcgagctgaaggacgactacgccaagttcgagctccgcgacaccgacgcgagcatcgccaacgcgctgcggcgcgtgatgatcgcggaggtgccgacggtcgccatcgacctcgtggagatcgaggtcaactcctcggtgctcaatgacgagtttatcgctcacaggctgggcctcatccccctcactagcgagcgcgccatgtccatgcgcttctcacgtgactgcgacgcgtgcgacggtgacggacagtgcgagttttgctccgtcgagtttcatcttagggttaagtgcatgactgatcagaccctcgatgttacgagcaaggacctctacagttctgaccctactgtcagtcccgttgatttctctgacccctctggcactgactccgacaacaacagggggattatcattgtgaagttgcggcgcggacaagagctgaagctgagagcgatagc

SEQ ID NO: 220906 - DNA, 565 bp, Glycine max
  unsure (1)..(565): unsure at all n locations
atcttcaaatggtaatcacagtaattactaattagcatccttggctcaacaagttaatacgttctgcaggtattcagttaaagacaagtaagaaacaagttccgggaaacaagttgtgggaaacaagtctgatatccttctaacaaattaatcaacctcctcgcatatgtgcaccaagctcgccaaactgatcatcagcctccactgtatcttcagatagcctcacagcatccagcttctgcttgagaatttctatggcatttagaaccaattgagaagctttaaccgctccagtagactccacagtgaatatgaagctatcctgcctcgcaatgatttctacaagcccaggcttgcccatagcttctgctttcttaagcacctcatcatcatatgtgtatgcctcagcatcaaccaccatcacctgttgtgtcactggatcaatttcaaagacacgggttggactactgtcaacccattctcttttctctttcagagtcaaggtttccatcaaatcctcaattatatgaatctncggttcatacatgaaagtgacagttgcagc

SEQ ID NO: 220907 - DNA, 553 bp, Glycine max
  unsure (1)..(553): unsure at all n locations
cacagggcaaatttatcagcttacaagagttaactttggttaagtgggcggctcaagattgtattatacaacttcaaaataaattatctaatgtatcttgcatatataataataacaagaaacttgtagacagactgatctagaaacttctgaaaggagggaatacacagaagttggacattaattaccaaaaactgcaggtcaaatgctgctttaatcagttctgatgagcagatagagcgaaattggagacattagtgtctattgcccaatagaattctcatgtagtaatacatattctcgactactgttaccaaatttaatggtgtccttttccttaagttcgtaatatcgttgaggttcaatgggactatcanttatgaaagttttgtttgtgcttccaaggtccataacgtaaggccttacttgctttaataatgtaccatcaggttgctccttttcaacttgccggaattgaataacagcatgttgcttgctgcaagaggaatgatctgtagggatatcagcaaccctttttccctttcaaaagata

SEQ ID NO: 220908 - DNA, 586 bp, Glycine max
ataacatctttctctctccgaacagatcaaactatggccacctcaagcgccaaatcagtccatgatttcaccgttaaagatgccaagggaaatgatattaatcttggtgactacaaaggaaaggtccttatcattgtcaatgttgcctcacaatgtggcttgactaattcaaattacactgagctcagtcagttgtatgagaaatacaaacagaaaggtctggaaattctggcatttccatgcaatcagtttggggcacaggagcctggatctaatgaacagatacaagagtttgtttgtactcgcttcaaggctgagtttcccgtttttgacaaggttgatgtgaatggtgacaaagctgctccactgtacaagtatctaaaatcaagcaaaggtggactctttggggatggtatcaaatggaacttctccaagttccttgttgataaagagggaaatgtggttgatcgctatgcacccacaacttctcctctgagcattgagaaggacttgctgaagttgttggatgcatgaatgaagctatgaatgactggagctgccataaatgaatgtgatagaattaaat

SEQ ID NO: 220909 - DNA, 538 bp, Glycine max
  unsure (1)..(538): unsure at all n locations
gtccattgtgttcaaagaaccacgatttgttgagtatttccgcctggccacacctgagttggagtacgggaggatgaacattggaagtcgaccagcaaagaggaggccaagtggaggtattgagacactccgtgctataccttggatctttgcctggacacaaacaaggttccatcttccagtgtggctaggctttggtgcagcattcaaacatgttattgagaaggatgttaggaatattcatgtgctgcaggagatgtacaatcaatggcctttctttagggtcactattgatttagtggaaatggtgtttgccaaaggagacccagggatagctgctctttatgataggctccttgtttcagaggatctgtggtcatttggggagcagttgaggaccatgtacgaagaaaccaaggaactcctncttcaggtggctggccatagggatcttcttgaaggagatccatacttgaagcaaagactgcgcttgcgtgattcttatattactacccctaacgtgtgccaagcctacacg

SEQ ID NO: 220910 - DNA, 544 bp, Glycine max
aagtctataaatcagcataatttcgtattggaacataagaatcagttgcatacttgcattgtctcattttgcggcagctatctctctgtaatatcttataatggaaacatgggtacaggggagggaaaaacaccctttggtgcatgcagctaaactcgttatttctgataaaggaaacagaaaataaaagtggaaccaaagagaagacaaaaactcagatttagccagtgttttgcaagccagcagcaatacccttcatggtgagaatgagggtgtcttccaaaccaggtgcatattcacttgttgggttaagtgttataagttcatcagcaggtttacttatctctatagactctttggagatgtgagggcgcagcttcacattatagttcggatcacggatacgtttcaacgtgtaggcttggcacacgtttagggtagtaatataagaatcacgcaagcgcagtctttgcttcaagtatggatctccttcaagaagatccctatggccagccacctgaaggaggagttccttggtttcttc

SEQ ID NO: 220911 - DNA, 487 bp, Glycine max
ctccctcagaagcgaagaagaagccacagagaactagtctcctactctcacccgcaagaaaaaaatggcatctcacatcgttggatacccccgtatgggtcccaagagagagctcaagttcgctctcgagtctttctgggatggcaagagcagcgccgaggatttgcagaaggtgtcttctgatctcagggcatccatctggaagcagatggctgatgctgggatcaagtacatccccagcaacactttctctcactatgaccaggttctcgacgccaccgccaccctcggtgccgttccaccaaggtacggctggaccggcggcgagattgggtttgatacctacttctccatggccagaggtaatgctaccgtgccagctatggagatgaccaagtggttcgacaccaactaccactttattgtccctgaattgggccctgatgtgaacttcacctatgcttctcacaaggctgttgatgaatac

SEQ ID NO: 220912 - DNA, 521 bp, Glycine max
gcacaaaactggtaaaattccagatcaataaggattgcggcgaagccgcaaagatacaacattcattagggaaaacaggagtggggaaaaataaggggggaggggttgaggaagaattaattgctcacagagcatgctaagacacctaaatattccacacacagttattgaaacaacccaatatagagaaaatttttctttggtgtattataatataaagcagaaccaaatgatttggaagattctactttcttataccattcacttggcttgttcgatgcggatgagttttgctgcggcaaccatgtttgtgagggctggcttcacctcagtgtacttacgggtcttgagcccacagtcagggttcacccacaagatgttcttctcgagcactgccagtatcttgttgattctgtcagaaatttcttcagttggtggaattcttggtgagtggatgtcatagacaccatggccaattccagcaccatacttcacaccttcgtggaagactgacagaagct

SEQ ID NO: 220913 - DNA, 555 bp, Glycine max
  unsure (1)..(555): unsure at all n locations
cacaaatcaatttcatgatcataacaaacatgcttgcaatgaagtaacaaatatcataaatcctgtaaacaatgaaggtaagtattctcaactttgtgacaagtctgggcgttatgaccgacttttgaaattgagtcaagatgatttggagacggtgataagaagggtgtctcgtgactcttgcttggatcctcagaaaaagtcatacataatacagaacctactaatgagtcgttggattattaggcagcagatctcttctacagaagccaatataaaaaatgatgaactggaatttcctgggaaacatccatcttacagggaccctctcaaactaatctacggttgtaaacactacaagaggaactgtaagctttttgctccttgttgcaaccaacttcatacctgcatacattgccataatgaggaatcagatcattcagttgacagaaaatctattacaaagatgatgtgtatgaagtgcttagtgattcaaccaatcagtgccacatgctcaacanattcatgtaatttatcgatgggcaaatatttact

SEQ ID NO: 220914 - DNA, 500 bp, Glycine max
aaattagaatgattattttggcacaagcaatacagataaacatcaaatgttttacaacctagtgtttaaatacaaagaagcaaggaagaagcaactttatgctctcaatggaagaatcatagaactctagtgttgtaggaaccacaactagggcatttgtggtagagccagtggaagggggtctctcctttcttttcacaatcattacataataaaacctgagtttgactagaaatctcatcagaaattctctcttcagccaacaacgcatctaacatcctaaaatatacctgcatgtcttcaagtgacttgctacatattgggcaggtataattaaagcaggtatattcctgaaaacatgttgagtgcattacatgaccacatgggagggctgttaccggagagcaggatgtgaagatatattcatgacaaattggacagttgtcctctaaatgtttctcctgcatgtatgtgtcataagagaacgagacatacaagca

SEQ ID NO: 220915 - DNA, 448 bp, Glycine max
actcacaactcacccacaatcctctatttatagtaagcaatacacctttcagaaactgaaaaatacgatgccactaagcataaaccacttatgtcttacgttgttacgcatatataatgagcctgatgagaatatcaactatgttttgctggcaaaatacacgctagaaaatcaaaacaaaactcagccaaactagggcacatgacgtcaatttaactaatgaattcatcattacacaacattaacaggttgcatgggagccattctttgagttttgcacctgttacactgtagtcttgaagcataattatgattgttgcaatttgagcacatccaatctccacttcgccattgccttgctccttttccaaggagggcaggtgcagaagcttgaggtggaagccatgtggccaatggcaaacttggagcttgtagtgagttcatgctg

SEQ ID NO: 220916 - DNA, 529 bp, Glycine max
tttgaatccgatttggaatgaacactttgaatttgttgttgaagatgtgtccactcagcacgtaactgttaaagtttatgattctgagggtttacagtcatctgaattgattggatgtgctcagctacagcttagtgaacttgaacctggtaaagtaaaggatgtttggttgaagttggtcaaggattcggagattcaaagggatacgaagaacagagggcaggttcattcggagctcttgtactgtccatttggcatggagaatagctttacaaacccatttgctcccaactactcaatgacatctttggaaaaggttcttaaaaatgcgaatggagtagagtctaatggaaatgaaaacgcagttacccaaaagaaaaaggaggttattattagaggagtcctttctgttactgtaatatctgctgaagacttgcctgcaacagatttcatggggaaatctgatccttttgatgctcttacctttgagaaagctgaatcatgtaacataaccacagttgtgaatgac

SEQ ID NO: 220917 - DNA, 585 bp, Glycine max
  unsure (1)..(585): unsure at all n locations
acagctaaaagacaattatccaaccacgagctgttaattttacatcccatcatcaatggagcatttataggataatctgatagagaaattcatatatccttaccattattaccatgcctgacaagacgtatgtacatttgctaactgtaattgctattaagatacacgatgtctgtctgagaaattatggtccagatatccacagccacaactacatcctctataaacttatatatagcgagggataggaaaacctaagaatcacggaaaattggttgcggcatccacttgagatgcaaattcaaaaagccagatttggctccatctagcacaaaacgttctttgtattccccttccagtattaccctggtaagcgtcaatatgcatctgcccatatagtcctttccgaatgtgtcgtggtcccaaacttcaacaattagcatatcatgtaatccatcctcaacaacaaagtcaaatgtttgattccaaacaggattcaagctgtcattcacaaccctggttttggtttttgtttctgcttttttcagggtagaacaacanaaggatcagattttcccatgaaat

SEQ ID NO: 220918 - DNA, 612 bp, Glycine max
cgggcatcgtaacatgaaatcatttatttatttcttgactggatatgaaatttactatttgaagattgcaattttgcaggtgaatattcaatataatgaggtgcagtctgaatccttgtataaaagaaagaagaactaaaattatttgatacattgctcgctcgccagaataattatctatcaatctcctcaaaaccttggcttgaattcaaatggttcaccatctaaccttggcagggaaatacttctcaatgagtgacacatagtatggcttaactttctccacatcaactagaactttgctcttgctgtagagatcatatttgttaaaaattttgagccacttcaaattctcaacgtcttcttcattcatgaagtgagtatatgcaccttccttgtgtaatggatagaaagaatgatatctgataatgaacaatcctgcagatggcaaagtggtgtcatttgccttggcaaccatatacatgtaatcatcatgtccccatgacatcactatgttgtctaatccacacccttttgtgagatcccatttttagtgctataagcagggcatttgtaatcccggttgtccttgaaatacttatgatgaacatt

SEQ ID NO: 220919 - DNA, 543 bp, Glycine max
  unsure (1)..(543): unsure at all n locations
cactctaccaccacctagtatctctctaactttgagaaagtgtgtgttgtgtgttctcttctctcactaaaaaaggtttcattaattctatattatggctcagaccacagcgaatcacacagtgaccgtatctgggtgggcagctcatgattcttcgggcaagattaccccctacactttcaaaagaagggagaatggtgtgaacgatgtgacaataaagatactgtattgtgggatctgccacacggacctccactatgctaaaaatgaatggggcattactatgtatcctgtagtacccggacacgagatcattggggtggtaactaaggtggggagagacgtgaaggggttcaaggaaggagacagagtgggtgtggggtgtttggcggcttcatgtttggaatgtgagcactgcaagaccgatcaggaaaattactgtgaaaagttgcaatttgtctacaacggagtattctgggatggcagcatcacctatggnggctactctcaaattttggcgcagattacagatatgtggacaca

SEQ ID NO: 220920 - DNA, 561 bp, Glycine max
aatattataaatacatttagattgattcattttattaaataaaacgagagtaccaaacatacaaatgtttaaattataatttttttctctaaaagcttaaaaaattaattcagacttaaacgatagatcagtttaacaagtaaaaagtcattgacataaatatatgacttattcgtccaattgcagaggtaaaatcacgggtctattaaacagtaaatatcgaaacaagtaaaatttgatccgaattgaaggctagtttagttgttggaagcggcagcattagcaatatcaatgacgaaacggtagcgcacatcattcttagcaaggcgctccatagcctcgttgattctgtctggtgtgattaattcaatgtcactcgttatattgtactttgcacaaaccttcaacatttcctgcgtctcttttattccccctatgatcccacctttcactgatctcttgccaaatatcaatgggaaagctggcaattgtaagggcttgtctggtgcacccacgagatataatgtcccgttgactttgagcaatttcaagatgggcaac

SEQ ID NO: 220921 - DNA, 536 bp, Glycine max
cacgtaacttcatctgggtttcaggaaaaaagaaaaaggaaaacaatgggttccgataatcaccagaacttggagttcttgaaggagatcggtttgggctcttccaacattggctcttacattaatggccagtggaaagccactggttcttctgtcacttctgttaatccttctaacaatcagagtatagctcaagtgaccgaagcaactttgcaagattttgaggaggggttgcgagcttgcagtgaagcagctaagacatggatgactataccggcaccgaagagaggtgagattgtgagacagattggtgaagcattgagggccaaattggatcctttgggtaggctggtgtctcttgagatgggaaaaattctcccagaaggaattggggaagttcaggaaattattgatatgtgtgattattgtgttgggctaagcagacaattgaatggatcaattataccatcagaacgtccagatcatatgatgtttgaggtatggaacccacttggaaatagtggtgtaatcagtgc

SEQ ID NO: 220922 - DNA, 530 bp, Glycine max
gggaaaagaattctcagcttattcatttaacatttatttaagatatcttatacattgaaactgtcatatcaaggtgccatccttacagcaagcatgtcttgttaagacaacactttgaacccatgtcagccagactaacatctcggtatatatagaactctcttcagactgcaaaatcgcattattttgtgcagcctcatgtgctaggatagctttctagccaaagtttatcccctgagctaatggtagttcacttccataattgatggtacatgtagaacgccgcatgtattgcttccatgagtcacttcccgcttcacggccaccacctgtcgccttttctccaccaaaggcaccaccaatttcagctccatttgtaggtatgtttgcattcactataccacaatcactacctcgtggcccgatccatttgaatatagttccaggtctttgggtaaagattgaactacttaatccttgaggtacagaattgttcaaggcaattgcttcttctagagtctgaaatttca

SEQ ID NO: 220923 - DNA, 547 bp, Glycine max
caacaatgcctcctttgactttgtggctagtgctgccttttctcgtgttgctagcggcggcaacaacgtctccaacacgcgccacgacggtcgcctcgtcgttccacggtcaacgagagtttgactatttcgctttcgcgttgcaatggcccggcacttactgcaaacgcacccgcagttgctgccccaccaacggttgctgcagaggctccaattttccaacagtgttcaccatacatggactctggcctgactataatgatggaacctggccgtcctgttgctctggatctagtttcgatccaaaagagatattgacattgactaatagtttagagcaatattggccatcattgagctgtagcaagccatcattatgccatggtgggaaaggaacattttgggctcatgagtgggagaaacatggcacatgctcttatcctgtgtttcgaaatgaatatgattattttgtggcagttctgaatctctatttcaaatataatgttacgagcgttctaaatgatgctggatatgttccgtctaatac

SEQ ID NO: 220924 - DNA, 551 bp, Glycine max
  unsure (1)..(551): unsure at all n locations
gctctacttagcaaatcaaaatggcactttcttcttcatcttcaacatccatatttgctttagctttgttcactactcttttgcttataggaagttcttcagctcaactctctgagaacttctatgatagtaaatgtcccaaggttttctatgccgtaaaatccgttcttcaatctgctttggctaaagaacctcgccagggagcatctatcgttcgcctcttctttcatgactgctttgtcaatggttgtgatggatcagtgttacttgatggcccttcctcggagaagattgcacttcccaacaagaactctttgagaggttatgaagtcattgatgccatcaagtctaaggtggaggcactatgccctggagtggtgtcatgtgctgatatcgttaccattgctgctcgtgactctgttgcaattcttggagggccaaattggaaggttaaacttggtagaagggattccacgactggctttntcaaccttgcanacagtggtgtgctttcaggaccgaattcttccctcagcagccttatccaaaga

SEQ ID NO: 220925 - DNA, 526 bp, Glycine max
  unsure (1)..(526): unsure at all n locations
tttgcatccttcctttggtcttatagttattagttagaccttgcacagtaaataacaatgaagcggccatttagttcgagcggttatcacttttgtctaatgaatatgttcctgttgcttttggcagtaaggtcccaactgacaacagacttttataaatcatcatgtcctaacgtttccaaaatagtaaggagagaagttcaaaaagctctaatgaatgagattcgaatggctgcttctttgcttcgccttcactttcatgattgttttgtgaatggttgtgatggatcaatactactagatggtggtgatgatggagagaaatctgctgctcctaacctgaactctgctagaggatatgaagtggtagatacaatcaaaagttcagtggagagtgcatgcagtggggttgtctcctgtgctgatatattagccatcgctgccagagattctgttttcctaagtggtggtccttcttggaaggttctgctaggacgaagagatggaacagtctcnaacggaacac

SEQ ID NO: 220926 - DNA, 570 bp, Glycine max
gttgggtttcaagatccaaacctcttcccaatgaagaacctctctttcttcctcatcaccaccctattcgccgccttctccgccgtcagatctgatccctcagatcaccgctacaaagaaggcgactccgtccctctctacgccaacaaagttggccccttccacaaccctagcgaaacctaccgttacttcgaccttcccttctgtgaaccaggtgatttgaaagagaagaaggaggcgctcggggaggtgctgaatggggaccgtttggttagcgcgccatacaagctggagttccagcgcgacaaggagtcgatttccgtgtgcaataggaagctctccaaacaggacgtagcgcggttcagatccgcggtgaggaaggactactacttccagatgtactacgacgaccttccgatttggggtttcatagggaaggtggacaaggaagggaaggaccccagtgattataggtacttcctgtataagcacattcacttcgacgtgttctacaactaggacagggtcatcgagatcaacgtgcgcaccgatcccaatgcgctcgggatc

SEQ ID NO: 220927 - DNA, 511 bp, Glycine max
ctggaatacagaaacatgagtttcaaactctactctttcattcataccatggaactcagaccttccttcctggttcttacttcattcctcttgttgctgctttggcttgcaagaatttacaagcagaaaatcaaagtaaggagtgtggttcataagcttcccccagggccatggaagttgcctctaatagggaacctgcatcaactggcaggggcaggcacacttccacaccacacccttcaaaatctatcacgcaaatatgggcctctgatgcaccttcaacttggtgaaatttctgcagtggttgtgtcatcctctgacatggccaaggagataatgaagactcatgatcttaattttgtgcagaggccagaactcctttgtcctaaaatcatggcctatgattcaacggatatttgccttgctccatacggtgattactggagacagatgaggaaaatatgtacgctagagcttctcagtgccaagagggttcagtctttctccttca

SEQ ID NO: 220928 - DNA, 505 bp, Glycine max
tttgttgttgttttttgagcacatatgtggccgatcctttagggtcaccattgtctgcattatgagttatgtaatccgacaaactgactggaagaaaataaataatgaagaagagagatgatactatgtactgaggaggaacaagagagccaactgactatgaaatgatctactggaatgatcatactgggattgcgtactactacggctgttgacccttcccactgcagctccaaagccttgaggcatatccaagcactgtgggagcattccattggggagtgctcagtcgaagtgatagagcaatgcaacaggaggaagctgaacattaggtatgccatgtgatatgccaggacgcattcttctgactgccccaaaaggaatgtacgtgagattactacatgctaaatgatgacttgcgccatcaaacctctggggtataaacttctacgcatcataccgatgcttgcgatctactccaagtagccatgcatgtacaatcact

SEQ ID NO: 220929 - DNA, 515 bp, Glycine max
  unsure (1)..(515): unsure at all n locations
attttctgcattcccctagctgttaccgttgttctctcttccgctgttccgtttccttcctccgccgccgccaccgcagcattctctcaccaccgccgtctcgtcgcctccgcatcgccgatgaatccgtcgtcgcagtctcagtccccgcctcctccggtggcaaagaaggtggagcatgcgatggaaatgttcggcgacgtgagaatcgacaactactattggctccgtgacgattcccgcaccgatcccgaagtgctctcgtacctccgccaggaaaatgcctacaccgattccatcatgtccggaactaaggaatttgaagataagctttttgctgagataagaggaaggattaaggaggaggatgtctctgcacctttacgcaaagggccttattactattataagagaactttggaagggaaggagtatgttcaatattgcaggcgccttatatctgataaccaanaggtgccatctgtgcatgacatcatgcccacaggaccctgagc

SEQ ID NO: 220930 - DNA, 512 bp, Glycine max
aaaagataagcaatgataccaaatccaaacacacaaatgcaccatccttaattgccacatcatccattagtaggatattactaatagaattgcaccaatgacatgctttctgaattgcaaaggtaatttcagattttattctgaagttgttggcaatgtagttcctaagatgatggtatttacgcagatgatctcactcaagccatgaatgtaataattggtctatctcaattctcaattatcaattgcatctgcgcctcacgcactgaaagactaaagccgactagtcatgtttagagtcttcatgatgtatgcataagtgaaggcatcttcctggagcttctcaaatcttcccgacttggaaaaatgtccagcaccgagctcgcatttaaacagcagtatgttatcatcagtcttcatatccctcagttttgccacaaacttcgcaggttctgaatacaaaacccgtgggtcatttaatcctgcttgaacaagaatgtgtggataattct

SEQ ID NO: 220931 - DNA, 580 bp, Glycine max
ggtttggacaagacttatctcttgtttggttaaagggtctagtggatgttgaaaaggatgccatcctcaaatgggaatccatcaaaccaactgttataactgtccctcgcaaagccttggccattgttataatcaacagccaaacccacgagatcttaattgatctaaaggcaaggcgcattgtctccgacaatattcactccgggaatggcttccctaccctttccgttgatgaacaagtcgttgccatagagctgccactgaaatacggtccattcattgagtcagtgaacaagagagggctgaacctctctgaggtggtgtgttccacattcacaatggggtggtttggagaaaccaaggacagaaggacagtgagagtggaatgcttcatgaaagaaagcagccccaatatctgggtgaggcctatcagtggactcacaatggtggttgaccttgaactcatgaagatcgttcagtatcacgacggtggcattataccagtaccaactgccgacaacactgaataccgcttttcacatcagaacccaccattcgtccaagacacatagtctagcaa

SEQ ID NO: 220932 - DNA, 513 bp, Glycine max
caagttcaagtaaacttttcattgatataataataagcaatacatatcaaatcattattcttgcacatgcaataagcagatcgcatttcacattatccaaggaacacatctagttgtagcactcgaagcacactaatataatggaaatggctggctagctagttttacttggggcaaccaggccattggacatccgggggagaaagtgttttaagaaccggattcctctcgaagaaattggttggcctgagctcgaatgcagtgctcaataatggcattatggggaagtcttcctgtgctggaacatgatgaattcccacaacgtgccacagcacaatgtccttgttgttaatgtctctattcctgcaatcattttcaattaaaatataataaagtcagtgtgtaagttgttgagttcaatcatacatatatatctgatcaattaagacactaaaaactaatttgaaagtttaaaaataacttataaataattgatcatcatatatacttttt

SEQ ID NO: 220933 - DNA, 556 bp, Glycine max
cttcttttctcttctttcttcttcttccatctctttttttctgcttaaggtctacaaaagttctcttcttcttctcctcctattgaactttggtcatcacacgagaaaacccacgtctggatcttctggtgtaaaggccattagaagcctgttagaaattttcaaattgagttggcgtatagtgttgaagggggtgaaatttggagcccagtttgttacttcatttgaaaggtcatagtttgaaccctctgtttctggagatttacctgggaaaagatgatgatgtttgaagatatgggattctgtggcgatttggatatgttatgtgggtctcttggggatggggatattgctgtgagacaaactgaaccggatcctggagttgaggatgactacagtgatgaagaaattgatgtggatgaactcgagaagaggatgcggagggacaaaatgcgtctcaagcgattgaaagaacaaaccaagtgcaaggaatggactgatgcagcaaagcaaatgcaatcccaagagcatgccaagaggaaaaagatgtctagag

SEQ ID NO: 220934 - DNA, 550 bp, Glycine max
gtggatattataaacattttcactctcatcgataacaggactacacgcatacattgacatcttgccatcgatagcagcactcacatgcatacataacatagtaattaacaccatgaacatgcccttctacccaactctaacctacttgcacagtacttattgaaataaaaaataaaaaaacaaactaacaaacaagagtgacatcggaagattaaaaaacaaagcgtcttaatcctcgcatccccatgaacctgctgtggtcttgatcggctcattgaaccaatcaaccgacccatttaaagaaaaacaccttcatgaataattgtatcatctgttacagatttcttccacatagagaaggggaagaaaattcaaggcccaaattaagcgggaagcaattaaggctcctcatggtgcttgatggcagcattgcactgctttctgatctcaccctttgtgccagtgagagggtttgtctcagagagcaaagtaatggctctagaaaactccttgaagaaatagttctggctcttggccaatttcttcacat

SEQ ID NO: 220935 - DNA, 616 bp, Glycine max
  unsure (1)..(616): unsure at all n locations
acaatttcaacgccacaccaaaaattccactgcaccaccaccctccccatttgtacttttcttctcattctctttccactcccctgcattctgcacacaatctagctttacgtgcttctgggcaaccgcataaggttaaactgttaagcatatcattgaaatccttttgggattggaacttgatatgatcatttgtattggggagtaagaccttgttacttttgcaaatgctaaattttaataggatcagaagtcagcccaggacaaccagatctatgtctttgggaggcatggattacgtggatccaaaaaggaaaggcaattttgttggaaaagtttttcttgctgcagcattaacggcattatcatgatcaagagatctccatctttgaatcccccgagtccgttttccatccatgaaccaggtgtcactcatgttttagtgacaggaggtgcaggctatatcggctcacatgctaccctacgacttctgagggaaaattatcgtgtcaccatagtggataacctgtcacgaggaaaattgggtgctggcagggttcttcaagactaatttcagaacctggaanggctcaattatatatgctgacttggagat

SEQ ID NO: 220936 - DNA, 556 bp, Glycine max
agaagaaaagttataccaaccagaggctgggcattatattatttattattattgactcattgtatgttgaatacacatgtaagtataacgaatcaactaccaaactccctaaggacgaccaaaaagaaaaagaaaaaaaaaatcctgagcaccatgtaaaagagcagttgatggccaactgcttggctgaatggctagaaactcagattgcagatgaaataccgtaaccgttacgatgagctttttgccatttccatgcaacctgcaaactcttctcaaggtcagtgtattgtgcggtccaattcagttccctgttgatcttagaagggtcactatacacctcggcataatcgccgggtcgacgtggaaggtagtctactttgatgtccacccctgtggcctttttgcaagcattcacaaactccttcactgatctaccctttccagttccaacattgtagatccctactttagcaggttgtgccttctcaagagccttcacgtgagcattaaccaaatcagttacatcaatgtagtctcgtatgcatgttccatc

SEQ ID NO: 220937 - DNA, 554 bp, Glycine max
ctcaaacccatttccttgatatcttagttatctaattacctcaattaatcccttaatggcaagcatcatggctgatgagaagcaccaccaccacttccaccaccacaagggcgatgatgtgcctggcgaggttgattataagaaggaggagaagcaccacaagcatcttgagcaccttggggaacttggtgctgcggctgccggtgcttatgccttgcatgagaagcatgaggccaagaaagacccagagcatgctcacaggcacaaggtataagaggagattgcggcagcagctactgatggtgctggtggttttgtcttgcatgaacaccatgagaaaaaggaagttaagaaagaagatgaggaagctcatggaaagaagcaccaccatctgtttggctgaacatgataaatattcatatataattaatattcaagctcctaagtatcaccatgcctgtgtatctctatcaatatctacatttctagtgtgcctttgaatagattctgcgcgagcttgaagagtgtttaattaattatgcctatggcgtact

SEQ ID NO: 220938 - DNA, 460 bp, Glycine max
attatcaatatagccaacatagcatacattatatatacgcagatatatatatgaagtaacaccataggcataattaattaaacactcttcaagctcgcacagaatttattcaaaggcacactagaaatggaagatatgatagagatacacaggcatggtgatacttaggagcttgaatattaattatatatgaatatttatcatgttcagccaaacagatggtggtgcttctttccatgagcttcctcatcttctttcttaacttcctttttctcatggtgttcatgcaagacaaaaccaccagcaccaacagtagctgctgccgcaatctcctcttctaccttgtgcctgtgagcatgctctgggtctttcttggcctcatgcttctcatgcaaggcataagcaccggcagccgcagcaccaagttccccaaggtgctcaagatgcttgtggtgcttct

SEQ ID NO: 220939 - DNA, 492 bp, Glycine max
  unsure (1)..(492): unsure at all n locations
cgctgcaccaccgctcatcatccctcctgcagctgcagcaggtccacttccataaactgggtactgtgctgttgctcctccatacaccccatagtagctcgtagggtaagtgtaatccggcgagtaaggagagtacccataaacattataaggtatcccttgctggatggcgtaatgagggaaggttgctgctgaaggaaaagctgatcccactccccctccaaatcctgtctggaaagaacccattactctaaagttcctccctgctcctccatgctttggggttgaaggcttagatctctggacacccaaagaagcaaggttgcagttagctctcctgccgtcgattacaggagcaggatccacacaagctctcatggcagcttctggttcacgaaaagtaacaaatccgtagcctttagatcttncagtagctttgtcagtgatgacaacggtctccaagatctcaccanattgctcaaaatacttctt

SEQ ID NO: 220940 - DNA, 558 bp, Glycine max
tcgcgattatgtctcttgctccttcccctgccttgcaatcagtctgttttgctgtgccgcaggcgtgaccatgcctcttcaagctccaattcctcatagctgagagctgactctagctagaggataataagattacaagagagaggaattgtttttgattggatccacaaaattcaagatgactccagttaatttggcaggccagtttggtgacacgacatacactaaggtgtttgttggaggcttggcctgggagactcaaaaggagacaatgaagaagtattttgagcaatttggtgagatcttggaggccgttgtcatcactgacaaagctactggaagatctaaaggctacggatttgttacttttcgtgaaccagaagctgccatgagagcttgtgtggatcctgctcctgtaatcgacggcaggagagctaactgcaaccttgcttctttgggtgtccagagatctaagccttcaaccccaaagcatggaggagcagggaggaactttagagtaatgggttctttccagacaggatttggagggggagtggg

SEQ ID NO: 220941 - DNA, 511 bp, Glycine max
  unsure (1)..(511): unsure at all n locations
ctcaaggagactctcaaggccctccactaccttcaccgccacggccacattcaccgcgacgtcaaggccggcaacattctactcgacacctccggcgctgtcaaactctccgacttcggcgtcgccacttgcttgtacgacgccgtcgacaggcagcgttgcagaaatacttttgttgggaccccttgctggatggctcctgaggtgctgcaaccagctggaagtggctataattccaaggctgatatttggtcttttgggattacggcacttgagttggctcatggccatgcaccattttcaaaatatcctccaatgaaggttcttctaatgacaatgcagaatgcccctcctggacttgatgatcgagataaaaagttctctaagtcttttaaggaaatggttgctatgtgcctggtgaaagatcaaacaaaaaggccatcagcagagaagttactgaaacattccttcttcaaacatgctaagcctnccgagctctctgtaaagaaat

SEQ ID NO: 220942 - DNA, 497 bp, Glycine max
ctatcctcgaagcatttgccactgctgggagagtccacgtcatcgatttcggcctcagacaagggatgcagtggcctgcactcatgcaagcccttgcattgcggcccggcgggcccccgactttccgtctaaccggaatcggcccgccgcagcccgacaacaccgacgcgctgcagcaagtgggctggaaattagcccaattggcccagaacatcggcgtccagttcgaattccgcggcttcgtttgcaacagcctcgcggatctcgacccgaaaatgctcgagatccgacccggagaagccgtcgctgtcaactcggttttcgagctccatcgtatgctggcccgcccgggatccgtcgacaaggtcttggacactgttaagaaaatcaagccgaagattgtcaccatcgtggaacaagaagcgaaccacaacggaccgggttttcttgaccggttcactgaggccttgcattactactccagcctattcgactcg

SEQ ID NO: 220943 - DNA, 535 bp, Glycine max
tttctttttcttttatttacagatagtgtttgaatgataaacatatactagatggcgccaaatgctctttttcttttttcttttcttgccatgcttcttcttctgctccgttcaaccgtctgcgggcacattttccgagacagcctcaagaaaagcacccacttgtgtcaaggccaacgactacggcaaactccccgccgaccagcgcctccgctggcgccacgactctgcatagcacgacggtgccaacgacggaggggacttgaacggaaggtactacgacgccggagataacagataagaaagatattaccagggagaaaaaaacacgatgctgacgaggagcgtgaacgatatctagaagagcatggaagaggaactaggaaacgcgttgaaagcggagaggtggcggaccgagtatttgctcaaggccacggccaaaattggcttcggcattgtcttcgtgcaggtcggtgacccttaatacgaccataactgccgggagagacccgaagacatggacacgctgcgcacc

SEQ ID NO: 220944 - DNA, 564 bp, Glycine max
  unsure (1)..(564): unsure at all n locations
ggctcgagcggctcgagctcactgccatctgtatctgcatagcataaataccgcacgcacgcgattcctatgatttgttttttcactctgggcgattttccctattctttttgagtgccgagcaaaaccctaatcgagttcgattgcaacacacctccgttgctgtattccaccttctccgacgaatggcaaccaaacctcttacaaccgaggctattgcgcttacagaaaagaagatggacatgacattagatgacataatcaaaatgtctaaaaatacgaagaataagaagccaagaagggttctgaacaaaagtcaaaagttttcaaataattttactcaagataagtctgcaaaggtccaacgttatatggaatcaagatcttctcttagacagggggctcttgcaaaaagaaggtctaatttccagggaaaccaatttcctgctgcagttgaagttgcacgaaaagctgttactgctcctctgcacaatagagtccctaatcgtaatagggtggctaactggaataaaacaaggtanaacacgggccaacttaacatgc

SEQ ID NO: 220945 - DNA, 339 bp, Glycine max
tttgtttttttttttttttttttttttttttttttttttttttttttttttttttaggatttggttttttttttctaaccttacaacgaattaccatgtatgagcctttcattttacatgagtgactaagaaagtagcaatcatttgagaaccagatctggctacaaaaggagtaatataaaaggtaaaaaaaaaacaatattaagaaaaccagaaccagaccaagaacttaaaaatatagacaaaggaaacaaaaaggaaaaccaggagaacacactagcggaatctaccaaaacgaaaatcgcaggacaatgtaagaccctgaaaccctaaccccaa

SEQ ID NO: 220946 - DNA, 498 bp, Glycine max
accaagcgaagcgaaaagcgctttctaacttaagtgatggcgaacgcagctgaagtttcagccttgaaccgcatcaaactgcatcttttgggtgaactctctccactggccactcccctaaactattttgatgaatcaaaccctagcccctctgaatcttccaattcccaatcttcttctgtttctcttaaccactacttcactgacctcttcgaattcgactccaaaccccaaataatcgacctccaaactcccaaaacactaacttcagctcagaagaaacctcaattgaatcggaaaccgtcgctgctaatcgctgttccaaagaagaccgagtggatccagttcgggagcccggatccgaacccggtgatggctgcgccggagaacctgccgcagaagaatcactacagaggtgtccggcagcggccctggggcaaattcgccgccgagatccgcgacccgaacaagcgcggctctagggtttggctcggaacc

SEQ ID NO: 220947 - DNA, 300 bp, Glycine max
ccgagtagccggcctttcgtcttttttttttctttccaattttaatttattttctatggtcctttgtggggcatatggactcacttaatgcatttttcttctcttttaaattatttacatgtatgccaatcgctccgattgggaataacacttaccaaatattcctaattgagtttcatttgtcattatgatatcactcaacaatagcatccactcagaattcaaaatacccacgggtctacactagcaacgtgacaacccccccggtttggaaaagatccaaggctgatattgggaacc

SEQ ID NO: 220948 - DNA, 564 bp, Glycine max
  unsure (1)..(564): unsure at all n locations
gaaaagctccttgcgctctctctctctctccaccaaattgcattgcagctaaatttcgcagaactatccttctctctctctctcatccacgccccaaatcttagggttttcaccaaataaaacaaccccaattcctcgaactcttcgattcgattacccaaccccacacgctgattccacatcctccatgagatttggttgattggatcgtacgatggcggcgccgaggaatgtgacggcgacgagggacgaagagaagggcgaggacgatgattcgccctccgcgaagaagcccaaatcggagaggttcccgctgaacacgtgggaattcgccgtcgccgtcgccgtcttcttggtgttctccaccggcctcttctgcatttacctcaccatgccctcggccgcttacaccaacctcaaactcccccgcaccctctccgatcttcgcctnctcaaggaacatctntcgacgtatgcgagtaaccaccctgcgcagttcattcttgggtactgctccacctacatcttcatgcanactntcatgattcctgggacaatcttcat

SEQ ID NO: 220949 - DNA, 418 bp, Glycine max
aatcctggatccttggtggagaaccattctgcttgcagaacaaatagggctggtcagagagtattgccaaatggccaggtttggaaacctgatctggaacttctatcttgggccttcgaaattctgactgaagcatatgcatgtttcaaggaacatgatacgccacctgggaagccatatgtagctcgagcatgagcgcctgcattacctgtcatttgggctacccttgtccaatcacgaccgcagtcatagttgtcacaggagcaatatggtgatgaggacagtcttgatgatgaccttggtgaatcattacagtctgatgatgacaatgaccatgatgactcgccgtcatttaaacctttcactaatgcccaggcggcagagctgaccatagctcatcagagagcatatctggctg

SEQ ID NO: 220950 - DNA, 604 bp, Glycine max
agaaaagtactgctttatgatcaaataagacaaacttttgagtataaaaaacataacgaaattcagtatcactcatttcatgaaagatgccatcttgaaatcattccctaataccatgaaagtgctccagctcaaataaactaaaactatcattatcagtattgtccaaactgcgtttgttgatgataaccaactagcttctttaggagagggatgagaccaatcaaagcaatttgaagctgttctgaactatttaatcgaatacttatttgccctgcccctcgattattcaaatttgcccgggcaacaaggtttgtatgtcgtcctactgggatctgagattgcacattgcacccaacagcaagatctccatgccaatccataacagaaaggccaagcgtagttaagaaacgaccaagaggataatccttatctctcagttgggcctccaaactgccaccataagcaatgtcgccccgccctgtcattgcaccaccactgacaacatgcttgaatcgcttactagcaaccaatttgtcttcaatcttcaacccagatgataaggcatcaccagtaaagttaatgagagaccagcagttgctta

SEQ ID NO: 220951 - DNA, 514 bp, Glycine max
ctcgagccgaatcggctcgagcgggcatgcagttgtgcttccaattatttcatgtattattgatggtacgctggactatgataagactagtcctccatttgcttctttcatttctttagtctgcccaaaaaatgagaatgaatattcagaacaatgggctatggcatgtggtgaaattttgcgtattttaactcattacaatcgccccatatacaaaatggaaaggcaatattgtgaaccagaagtaagcagtggcaaaagtcatgcaacgactaatgattctgtagatggggagtctggccataattctttgatgcagcaggagaagaaacctataagacccttgtccccttggattactgatatattacgagctgcacctttaggcattagaagtgactattttcggtggtgcagtggtgttatgggtaaatatgctgcaggagaactcaagccacctactattggttctgctcgcggttctgggaagcatcctcaactcgtgccatcaact

SEQ ID NO: 220952 - DNA, 528 bp, Glycine max
actaacaaaaactagcagaatgagaaggtttacttatttgcaaaccatttaagttcctaaacatagattacatcaaggttttatacaaatcttgagataatatctgtcatgaaaagcttaatttaagttcctaaacataaattactaagatgattacatatggtctcatttcatttcagatagaaatagcaaagcctaaatcatccgcagctgtgttaagatattcaatagacaatccatttgaaagccggctgtgagcttcccatgtcaagcagttttctacgtcagctcgccagtcaatgacatcaaaatttaagtactgatcatggatgccattcttttgcagtggcttaggactcgatccaattgaactagtatgcaaaatgtcacgaataaccgaactgctcagagcacggacatgtgcacttggatgagaaaggcatctgattgtagctggtaggcgacactttaacaggtttgaaagcccatctgccactccaagtccagattctcccaactcaatcactg

SEQ ID NO: 220953 - DNA, 535 bp, Glycine max
  unsure (1)..(535): unsure at all n locations
ctctcaactcccaactactttgttgcattacacgcaccaaccagagagtgagagagagagaagagactcttccttccttcaatttcttcaaccaccaccagcatgcaagactccggctccatgaagatctcccctctggatctcatgtccgccatcatcaagggcaagctcgacccctccaacgtctcctcctcctcctccaacgccgcagctgccgtcctcctcgagaaccgccagttcctcatgctcctcaccacctccgtcgccgtcctcgtcggctgcttcgtcgtcttcatctggcggagatcctcctcccccaaggccaagcctctcgaaccaccaaagcgcgttatcgagaagcttcccgaaatcgaggtcgacgacggcaccaagaaggtcaccatcttcttcggcactcaaaccggcaccgccgaaggcttcgccaggccatagcggaagaggccaaggcgcgatancgatagggcacgttcagagtagtcgatatggatgattatgctgccgatgacgatgaata

SEQ ID NO: 220954 - DNA, 505 bp, Glycine max
cactctaccaccacctagtatctctctaactttgagaaagtgtgtgttgtgtgttcgcttctctcactaaaaaaggtttcattaattctatattatggctcagaccacagcgaatcacacagtgaccgtatctgggtgggcagctcatgattcttcgggcaagattaccccctacactttcaaaagaagggagaatggtgtgaacgatgtgacaataaagatactgtattgtgggatctgccacacggacctccactatgctaaaaatgaatggggcattactatgtatcctgtagtacccggacacgagatcattggggtggtaactaaggtggggagagacgggaaggggttcaaggaaggagacagagtgggtgtggggtgtttggcggcttcatgtttggaatgtgagcactgcaagaccgatcaggacaattactgtgaaaagttgcaatttgtctacatcggagtattccgggatggcaggcttacctatgggggctac

SEQ ID NO: 220955 - DNA, 545 bp, Glycine max
  unsure (1)..(545): unsure at all n locations
gcaaaacaaaagccataggttgttacttctcttcgccttttgctttgcaattgtcaccaaacaattcttgcttagctctcacaagcaagcattatcaacaatgaagaaaattgtgttaaaggtggacttacatgatgacaggatcaagcgaaaagctatgaagacagcatctggcctttcgggggttcaatcagtttctgttgacattaatgacaagaaaatgaccttattgggggatgttgatccagtgagtgcagtgtcaaagctacgaaagtggtgtcacactgaaatagtctcagttggacccgcaaaagaggaaaaggagaaagagaaagtggagccagcaaaagaacctgttcctctcaagctctatgatgcctatcccttttattatcatatgacaccaccactgtatctgtatagttaaaattaataggttagatgttntgaagagaatcttatatagtggctgtgtcatctactanatnttagaatattattaggggatattattgcagagggtggcgtaacttttttgataaatt

SEQ ID NO: 220956 - DNA, 528 bp, Glycine max
ctttgtttttctctcagatagctgtatacctttatacaacttcagctatacatatgactacatcatgtcaacatcaacaagttttgtcgacagctttgctgacacgaaagaaggccgttacaatccaaaaatggatcctgttattcctgtctataattggaggaaaggatctgaatgggctgttctgaccagaaagcatgccacggttgtaatgaaggatgaaactgcctttccaatgtttcaaagatactgcaagaaaaagccactaccagaattttggagggctcattacattcctgctgacacatctaaggtgcataactgtataccagatgaacactatgtacagacattactggctcaaaaaggccttgaagaagaaatcacacgaagatcgttgacacatacttgctgagatatttccgactacagggaacatgagctccggagatggcatccagtgacttacaagtactcagatgctacacctatgctactgaaatttgtcaaggaaatagagtatattta

SEQ ID NO: 220957 - DNA, 368 bp, Glycine max
acaaaaaatataaaatacaattgaggggtccatacaatatctgacatgtacttatacttgacacaattacaacacgacatgacgtgaccactatttagaagtgtccctacttctcaatattattctgaaaaaaaaattaggacatcttttgtacatccttgggccaaagatcttaccatttccaaagtagctagacttacatctattttttcatttcaattcaagagttctcatatgtttccaggccccttggagactccaaaaaaaatggacaaattgcactcttaaatttgtaaatatacaactcattgtacatatcaatatggtgccgatactcttcaactgcttttactttattccttttcttc

SEQ ID NO: 220958 - DNA, 444 bp, Glycine max
aaccagaaaatgaaagtttttctttatagaaacaaagtttcttgtttctgaatctcaacccacggaaaagagagaataaatagaaaagaaaattttaaaagagggaaaaattttaaacagccgtagatagaaaacaattagaaggtaccgtcaaaacttttgaatttatcatatccttaggtcagttgtgcttggcatcgtcaacctgttttgctccaacagagaagaactcaatgatcacttccagtggcatgcccttggtttctggaactttcaaaaagacaaacacccatgctatgaagcacgcgacagcataaataccaaaaacaccagcgaggcctaaagaattgagcataactgggagtgtgtaggtgacaatgatatcacagatccaaaaggtaagagcacaaattggaatgcagaggccacgaactcgagtgggga

SEQ ID NO: 220959 - DNA, 548 bp, Glycine max
gctgtttggccaaacactcccattcccactgcactgcgagagcttctaaagcctctccctgcaggtgttgaaatcgatgaactccctaagcaaattgatgatacacagtacccaaaaacattcttctataaagaagaccttcatccaggcaaaacaatgaaagtacaattcaccaagcgtccctatgcacaaccttatggtgtatatacatggttaacggatattaaagacacctctaaagaaggatatagttttgaagagatatgcatcaagaaagaagcgtttgagggagaagagaagttttgtgcaaaatccttgggaacagtaattggttttgccatttcaaagctgggaaagaacattcaagtactttcaagttcctttgtcaataagcaagagcaatacactgtggaaggagtgcagaatcttggagacaaagcagtgatgtgtcatgggctaaatttcagaactgcagtattttactgccataaagtccgtgaaacaacagctttcatggttccataggtggctggtgatggaaccaaaac

SEQ ID NO: 220960 - DNA, 455 bp, Glycine max
aaaaaagcccactggatattcatcaaagcatcatcaaagcacactggattctaacagcacacgttcgtagaaaggggaagttccaggtcttgcacaacatacacaacacaccataatttattttatttacaatcttatggggcccaaaatgcagatgcctggactaattaaacaacaacgttagtctgataggcaggggccatagataaattgggtacccataaaagggccttgcttccaaggaaatggcaaaccgggttagttccaggatcaactcccatgagttcatgaagcatgggatgattcattccagaagtatctgagtggcaaacagcaagtgcctgagttttgggtccattaccagccaccaatggaaccatgaaagctgttgttcacggactttatggcgtaaaatactgcagttctgaaatttagcccatgacacatcactggtt

SEQ ID NO: 220961 - DNA, 586 bp, Glycine max
  unsure (1)..(586): unsure at all n locations
gctcaaaaagtttgagactgagggaaagccacctgttaatactcttgtttgtggtgactctggaaatgatgccgagctgttcagcattccgggagtttatggagtcatggtaagcaatgcccaagaggaactgttgcagtggcatgcagaaaatgcaaaagataaccccaagattcttcatgcctcagagcgttgcgcatctgggataatacaagccataggtcattttaagttaggcctaaacctgtcccctagagatgtttcagacattggacaaaacgttgaaaatggatctccaggccttgaaatggttaactttagtttgttactcgaatcatggaggcgtgcagaagttgagaaaacggagctgtttatttctggtttaaaggcaaccactctcccatctggtttctttatccatccttctggtgctgaccataatattaaggagtatgtaaatattcttagaaaggtgcatggtgacaaacagggaaaacagttcaggatttgggtggatgatntattggctacaccgttaggttcagattcatggctagtgaaatttgacaagtgggagttatctgac

SEQ ID NO: 220962 - DNA, 585 bp, Glycine max
  unsure (1)..(585): unsure at all n locations
accctcctcacatggatgctagtctctcttgtgcacatgtaacaagccctgaggattttgatgaggaaatggacacttttccaaccacaaagagcatggatatcgttcgttggaggtatgataggttgagaagtttggcagggaaggttcagagtgttgttggacagatagcaactcagggagaaagattacatgctcttataaattggagggatccgagagccacttcgatattcatggtgttttgccttgtgactgctatagttttgtatgttacaccaccaaagatgttgtttattctatctggattttacctaatgaggcaccctatgcttcggggcaagacaccaggagcaccagtcaatttcttccgtaggttgccttctctcacagatagcatgctgtanaatgtatatattgaaccttgcttgttttggaagctttttgtgctgccaatactttgatctggtttaagcctcttntgcagtgcttgtacaagtcttttgttccttagtcatgattgtgatacacagtgtacacatgcttttgaaatttcacagtgtatttattaaaatgggtttggtc

SEQ ID NO: 220963 - DNA, 494 bp, Glycine max
gaaccaaaaaccaatgtaaataaaatacacttgtgaattttcaaaagcatgtgtacacttgtgtatcaacaatcatgactaaaggaacaaaagacttgtacaagcactgccaaagaggcttaaaccagattcaagtattggcagcacaaaaagcttccaaaacaagcaaggttcaatatatacattttacagcatgctatctgtgagagaaggcaacctacggaagaaattgactggtgctcctggggtcttgccccgaagcatagggtgcctcattaggtaaaatccagatagaataaacaacatctttggtggtgtaacatacaaaactatagcagtcacaaggcaaaacaccatgaatatcgaagtggctctcggatcccttcaatttataagagcatgtaatctttctccctgagttgctatctgtccaacaacactttgaaccttccctgccaaacttctcaacctatcataccttcaacgaacgatat

SEQ ID NO: 220964 - DNA, 535 bp, Glycine max
  unsure (1)..(535): unsure at all n locations
aaacaattcagtggtttgtgttactacgtagaatgggttcgtcgccgaattcaaagcccaagatcattagaggctccgcaggctatgtgttggaggatgttccacatatggccgattacatccctgatattccaacatattctaatcctttgcaaaacaatcctgcttactcagttgtcaagcagtatttcgtgcacgtcgatgacagtgttccgcagaagataattgctaataaagatagtccaagaggggtacattttcggcgtgcaggacctcgtcaaagggtgtatttcgaatcagatgatgttcaggctgcaattgtgacatgtggtggtctatgccctggcctcaacaccgtcattagggaactagtatgtgcactatatcacatgtatggcgtcaagaaaatcttgggaatcaatggaggatacaagggtttttatgctcacaatacaatcactctaactcctaanagcgtgaatgacatacataagcgtggnggaactattcttggntcatcacgaggtggacatga

SEQ ID NO: 220965 - DNA, 394 bp, Glycine max
aataaaagaataatagaatatcttcctcatgttaatgctgagttcttcgcagccatcttttcatcgtgtaagggcaaaaagataaactcaaatatattacttacaatgcaagatataagataaaatgaatacaataaacatgtacatatatagcagggtgaaaaatgctgtcgacttctttctaagccaaatggttatttgaacaatgcccttattcagagatatgaccgtttgcttcttcttccctcttttcttcagagacagtcttagcaatggtaaagctgggctgatttgttgaagacagaagcctagcccacattctatcagtaattatcactttattctgtccctcagtgattctataaaagggtatgtacgtttgtcttccattgac

SEQ ID NO: 220966 - DNA, 504 bp, Glycine max
aatcaaactccagcaagtaagatacataatgaggcggtctcagaatagcttatccggtacaatttaagcaattggtatacaaagtatgattttcaataaggaacctccgtaccaaatatttagtcacatttatttgtaacctattaaaaacttttgcgaatacgcgaatagctcccctaataaaaaaaatgccgcatgattaatcattaacaggaaaaggctatctcacttgatgtcatgaaaagatggcaacacagcaataagagggtctccataaccaacaggctctccatcctcaacaagtagtttcaacacttctccagccacatcagacttaataggaagtccagtgccaaattgatccaaataccctatgacttgcccttctttgattacatcaccctctttacagataggaggttgcttcttccctttcactggtctacctcttcggaataagcccaaccgtggagatgatactaagacataggtattggtaccaga

SEQ ID NO: 220967 - DNA, 475 bp, Glycine max
attgtttgttgttgtaactcgttcttcttcttttgttgttctgtgtttgtgtttgttttttctctcacctgaaaatgtcttgctgcggtggtaactgtggttgcggaagctcctgcaagtgcggcaacggctgcggaggctgcaagatgtacccagacttgagctacactgagtcaaccaccaccgagaccttggtcatgggagtggcacctgttaaggctcaatttgagggtgctgaaatgggtgtgcccgctgagaacgatggctgcaaatgtggaccaaactgctcctgcaacccctgcacttgcaagtgaagtgttgggagagcaagcttcaagcagagatagcccttaattaggaataatgataaactattaatgtgtagctaaaaacttatgtattatgtctgtgatggttttcgtgcactctggtgttttgtgttaaacaaacatccttagaataaagtggtcatgtc

SEQ ID NO: 220968 - DNA, 449 bp, Glycine max
ccagtaatagtatttaatattataagcagagattcataattcagattagccgaactttatacagaagcgaccaattaccaaacattaaaaaaaaaaaaaaggaagcaaccatgagcttaacacacccatcacaagtccaaaacacttgaacttgctgaaaggcaagacatgaccactttattctaaggatgttggtttaacacaaaacaccagagggcacgaaaaccatcacagacataatacataagtttttagctacacattaatagtttatcattattcctaattaagggctatctctgcttgaagcttgctctcccaacacctaacttgcaagtgcaggggttgcaggagcagtttggtccacatttgcagccatcgttctcagggggcacacccatttcagcaccctcaaattgagccttaacaggtgccactcccatgaccaa

SEQ ID NO: 220969 - DNA, 530 bp, Glycine max
gtccatctttcgataaacaccattttttctcttcctcttttgaccaaacatgaaacccacggcaacattcttctttctcctatccacaacaacactccttgtttgtctttgcctcggaacaacaacgttccaaaccactctctttataaccttcttcactatttcccttaactatcactcttatcacaccaacgaaaaaccaaacaaaaaacttactgggtgacgacatggtgaagagcgcgtggaaggagatggagatgaaaggcgtggtggaggttcgcggtgtgtttcaggaagggtctctttgtaatattctggagagtgtttttgggagtaatgataagagtgaagagttgggggatatggttagggaaaggtacgagctgattgcgatgttgaacttggaggattattttcctttgaagtttatggactttcatggggtgaagagaaggtgccacaagttggcggctaaggttggtagcgtggtggggcaaattgtggaggatcgaataagagaaggggagttt

SEQ ID NO: 220970 - DNA, 525 bp, Glycine max
aaagagacataagaccttcttaatcgatccaatcttttcttacattcacctctagtcctggcactagatatttattttaataatttgatacccttaaaaataaagtgaaataaagcttagagataagttccataattatacgataaactcatctctaaatatttcactaaatatttgagtaccatctttaacatcaaacatcagatacaagctcgatcattctataattgcacatcaaacatagttcagctaaaaggcttactttattatattttttatctacgaacaactagacattgcagaggtggcttcatttccatggaaagcctaagacactccgaaagatccacgggttgcgcgggaagccatttgaagtggcgaagaagttgcgcgagccagagatgggtcgtggccaaacccaaggcccggtccggacacaccctacgttcagccccgaagggtgcaagcctcaagtccgatcccatgatagaaacatcttttttgaagaacctcttgggcttgaaa

SEQ ID NO: 220971 - DNA, 530 bp, Glycine max
aaaaaaaaaaaaaaactatatctgaagtttattggggatcgggtattgggaaatgcctcgagacttgtcacgatcccgatcgcctccctataggcggaggcattcaccatctcctgtgggacacaggtatagcaggaggagcagaagagacagaagcagatctccttattcgtcctactcttacagcaggtgaccccgtttatatgtttatttgtttgatatattttgtaaattatttgctatgtaacttaaacattttatttatctatattttgctgctgatctttcttataatgtcattgtaaactgtactcgttggacataccgaggacattaaacagttataatatttgatatctacaaaattggaaatctggattagacttgaacttgagatcatggtgagggttatgttattgacttgagaataataatgtgtaaaacaatgtggtttggcttacttttccctactatccattatgttaatgctgcatttaaatgtcaatttaagaataaaatgattttccttg

SEQ ID NO: 220972 - DNA, 566 bp, Glycine max
cagtggcacttttgtgctctactgacacaagacttggactggaagatttacgagtaggagacaatgaggaactcctacttctatgtcttctgtatcgtttagcagatggagatcggcttctaccacgtcttggagttgtagaaggacttctgtgacctcttggtgaaatagaacgactttttcgcctgtatgatgacaaatgatcataagcaatgaacctcagcaactaaacagctatctttagagaatataaatgcttcccaccatctagcacactaaatacaaaaacatgtacagttacctcagaaattgctaagattaaccattgtgtgctccatcttttatcacatgaagaagcaaatgtcacaatcgagcaatgaaaaaacaccctatcagcacccaccacctgttcatatccctcacttcccatgttatgggaagaaactgatcttttttattgttacaaatagcatatatcctatcttgttctctaaattatgctctatatgtggtattttgatgaagttctgcctccacatataagtgggaaatcccacaaagaaaga

SEQ ID NO: 220973 - DNA, 531 bp, Glycine max
gcagcttctctctcttaccttcactttctccttattcttcattagatcctcagttcccaatcgaccctccatttctgtgaactgagatggctggaggtgttattcggcagttatttaggaggaaactccaatctcattctcctcagaattcttcttttaagtcattcattatcacaaagaaagatggtgctgactctattggcaacaactccttaagagtgcttgcattagttggagctggtgtctcacggtttctaggttttgcaacaacagcatttgctgatgaagctgagcatggcctggcatgtcctagctatccatggcctcataagggcatccttagttcatatgatcatgcttcgattcgtcgtggtcatcaagtttatcaagaagtctgtgcttcttgtcattctatgtctttgatatcataccgtgatttggttggtgttgcttatacagaagaagaggtaaaggctatggcagctgagattgacgtggttgatggccctaatgatgaaggtgagatgttta

SEQ ID NO: 220974 - DNA, 516 bp, Glycine max
ccaaaaagacccttttggcctagtctctttcttataataaggtaaccaaaataaacccaaatcacaggtcaattaccgaataatccagattgagggggaaaacaaataagagtacaggggtcctggagaatgtaacaatacgtaggtctgagaaggaagaaaaagtgaaaataattatatctcacatacacggagcagctttatttctatctcaaacaaaaatagaacaagcttcagttactccttcaatgaatttgacatgaagagacaactttagcatctgacaaaattattgtcaacaataatctttcctgatgtaaaaaatgaaatgaaactggaaggcagctagttgacaacatcaagaaccagcttgcgagactttagaacggaccacctaagccgacggtaataggcagcttgaagtaatgccagtgatagaacaaatattcatttgaatcccatcagttttctctcttccatctcaggttccgcagcccaagtcaggaatgatacaat

SEQ ID NO: 220975 - DNA, 537 bp, Glycine max
ctcctcttccgcccactgtttccttcatcttctatctctctacaacacacttttttaagtgattcgttcgcagaaacatggcttcttcgtttctatccgcagcttcgcacgctgtctcaccctcttgttctctgtccaccacgcacaagggaaagcccatgcttggaggcaacactttgagatttcacaaaggacccaattccttctctagttcaaggtctagaggtcggatctctatggctgttgcagttaatgtatctcggtttgaaggcatacctatggctcctcctgatccaattctcggagtttccgaggcgtttaaggcagacaatagtgatgtcaagctcaatcttggagttggggcatacagaacagaagaactacagccatatgtgcttaatgttgttaagaaggcagagaatcttatgctggagagaggggataacaaagagtatctcccaattgagggtttggcagcatttaataaggcaactgcagagttgttactctgagcagacaacccagcaatcaaacagc

SEQ ID NO: 220976 - DNA, 523 bp, Glycine max
caaagttaaaaaatttcctagggtactttgaggtacatatgtacacacttaatgcatacataaattattctaaattattttcatgtatgccaatcgctccgattgggtataacactcaccaaaaatatctaattgagtttcagctgacattatgatatgaatcaataatagcatcggcaaggtattcacatttagccaacgacaatcctgccagggaaatccttccatcctttgtcatgtatacgtgccacttgtttgtcatgttgtcactctggttcttgttcaagccagtgaatgagaacatgcctatctgcttaagtatgaatgaccaatcctttccacttttgtcttttgaagtaatactatcatatagctgctgtctaacattctttatccttccagccatcatttccatctctgctttccattcattaaagagaactgggttttcaacaacatcggcaactatcctagccccgtgtaccggtggattagagtacattggtcgggcaatcctttcaac

SEQ ID NO: 220977 - DNA, 556 bp, Glycine max
catgtctttgtccaaagagtgcaagtgacttgacgataaacaagcattttcatcaagtgaagtgatgattgggagtggaaaaaatggagagttgaagaagatctttcaaattgctgacttgcactttgcccactgcttggatgtgctgccttctcagtatgcttcttgctctgacctcaacaccaccgccttcatccaaaggatcatcctttctgagaaacctaaccttattgtcttcactgctaaatcaatgggtgcggcatttgcacctgcaattgcatcatacattccttgggtagctgttttgggcaaccatgaccaggaaggatccctctctaaggaaggggtgatgaaatatattgctggaatgaaaaacactttatctgtagtcaatcctacggaagtacacataattgatggttttgggaactataacttacaagttggaggagttgaaggccctgattctgaaaataaatcagtgctcaatctgtacttctctgacagtggagattactccaaggttcctttcattcctggctatggctggatcaaa

SEQ ID NO: 220978 - DNA, 523 bp, Glycine max
aaataatattgaaaatgtccttctttttttttttctcagattaattttgccgtgaatgatgaaattaatatactcaaggtgggttatgatcttatgcacaaatgggattattacctgaacttacattcatggcatctaaaacttaaataggtgtcggcacgttggattatgatattatgtgcatatatgacatagaagtagccatattacaagcttaatttctacagacatatataaacactcctctcatcccaaacagctggtaatctgattgttgatcttagccttttcacttaggggtgaaagcagcaaaaatggtagcatggccaggatctgcaaggtgggcaaagaggttgtcaataggaccggtggcagcgtagatgtgctggaaccatgcacccatgacagcaagcatggccagtctgccattcttgatctccttagttctcaagtccttgatcttctgaggagaacctgttcctcaccaagggggtcaaaccaaaggccaccagggttacccaca

SEQ ID NO: 220979 - DNA, 557 bp, Glycine max
ttctactatgacatctgggtcgatggggaaaagtttttgacttcagaaccacctgaagtagttcaggcacgaaatgacaattctcatggtacaaactttccagattcccccgagcctatctatggaactcagttcttgccaaggaaattcaaaattgccgttactgtgccaactgataactcggtggatattctcacgaatgatattggtgttgttgttgttatggatgatgatggggagcctcaagggttcaacatatatgttggtggtggaatgggaagaactcataggttagaaaccacttttcctcgcttggccgaaccattaggttatgtaccaaaggaggatattttgtatgcagtgaaagccattgttgttacacaacgagaaaatgggagaagagatgaccgcaagtatagtagattgaaatatttgataagctcttggggaattgaaaagtttagaggcgtagttgagcaatattatggcaagacatttgaacctttccgtgcattgccagaatgggaattaaaagttattttgggtggcatgaacag

SEQ ID NO: 220980 - DNA, 510 bp, Glycine max
  unsure (1)..(510): unsure at all n locations
attctgtaattaatcactaactaaccaaatgattgcaatatacaaatcctgactaatgaactttattggagcaagcgcgaaattggaaaaaggtcttacctagtaacaagattattgtgaagaaaaaccaagctgtcgaacacccaaaattggatacagaaatgacagaaaggcttattttgtgttcagaaactcgatcaaaatgatgaaccaaaagattctagggaaagccgtttcaaataaaaaataataaataacccaaacattagtttagcctaaccccagagttactacacagtaacaacagagttgtgttcagtagcctatccacccttcctgtcaaccataaagcagcatcacatacatcttccttcgctaagtaaatggaattattcaccctttccattttggttggtagcaacataattacggataacttccatggccaactgatgagcattcttgntttgaagctttgctaattcatccattgcttcatatgtctcctta

SEQ ID NO: 220981 - DNA, 487 bp, Glycine max
caaatctcacactctctcacttacagccatgtccatggattctatggccacttccatcggagtctcggtccccgtgctccgcttcctcctctgcttcgccgccaccgtgcccctcagcttcctctgccgcttcctcccccgcggcctccccaagcacctctactcctccgtcgtcggcgtcgccctctcctacctctccttcggcttctcctccaacctccacttcctcgtccccatgttccttggctacgcctccatgctcctctatcgtcctcgatgcggcatcctcaccttcttcctcggatttggctacctcattggctgccacgtgtattacatgagcggtgatgcatggaaggaaggtggcatcgatgccactggggctttaatggttttgacgctcaaggttatctcctgtgcggttaattacaacgatggtttgctgaaagagggagggttgcgtgaggctcagaagaagtaccgttga

SEQ ID NO: 220982 - DNA, 521 bp, Glycine max
  unsure (1)..(521): unsure at all n locations
cgaaacagaaggagcttgagagaggagaaaaaggaaaaagagaaagagttttgcagagttgaatcgtgaaagaggaatggcgaagcacgaggagcttccgatcccgatttacaacaacctagaacctgtctatggcggaagttccgcactcgaagaagctcagcttcgtttcgacattttgaagtccaaattcatcgatatcttcggccatcatcctcaaatctttgctcgctcacccgggagagtgaacttgattggggagcatattgattatgaaggttattcggtgctgcctatggcaattcggcaagatacgatcgtggcgattcggaaaaatgatgccgaaaaggttctcaagatcgctaacgtgaatggtgaaaaatattcactttgtacttatcctgccgatcctctccaggaaatcgacttgaagaaccacaaatggggacattatnttatttgtgggtacaaaggtttccatgactatgcaaaatngaaaggagtggatgttggcaaacctg

SEQ ID NO: 220983 - DNA, 557 bp, Glycine max
gttccaaaatcaatatatattaaaacattaaggatttttacaattatctaatcatagcaactacgtaagagtttaaacgctgttttcgtgataacacgtttatttttccattacagaagatgacttagccattcggcaataacattatttgttttcattgtatcaactaaaataacttaacgatgagggtaccatttaatcttactccatcagaaattgcatctaatttgtgtttagatctcgggaagaaagttgcagccataagaagggaagcgggttaaagaacactaaaacttgaagatagccgcaccacttgatggcttggaagcaaatacataaaggccaagatcgttcttcttaataacgcccttgtctattctagactggtagaaacattccttcaaattaaggataaattgtggaactatgctctctttcaccaaagcaacagcacaaccaccccatccagcttcagtaagccttgccccaagagcaccattgttacgacaaatatttacaaggttcttcactccggacagctgattcatataaacgct

SEQ ID NO: 220984 - DNA, 375 bp, Glycine max
cttcaatgaacaagaattttgacaaattatacaacgaatctttccattagattgcgttcttaaactaccaattgggtaccaaccaattcccctaacaggtattttgaagcgcacccaaggttgatggcaacagtggcatagcaatgatatcttgattgggtttccctgaagaaaagaattagctggaagaacaaattgcgttttacactgaatctactgcttgaacttgttgccgggccaagtacttttcccttctctctttccattcatcaattacaagccctttggcagcaacccgaggacctgcctccacgggaggctttttccgagccttaactgcggcatcagctttagccaattggcttttcaggtttt

SEQ ID NO: 220985 - DNA, 541 bp, Glycine max
  unsure (1)..(541): unsure at all n locations
gggaaggctcttctctaccatagtgatgattttgttaattggaaactgcatcccaatcctttgtatgcatcagacaatactggaatgtttgagtgtccagatttctttccagtgcacataagtggctcaaagagtggggttgatacatcaatccaaaactccagtgtcaagcatgtcttgaaaataagttatcaaaacaaacaactagaatactattttcttggtgaatattttcctgatcaggaaaagtttattcctgatgctgattgggcaagaactggtttggacttgatattggaccatggaatgttttatgcttccaagtcattttttgacaatgccaagaaaagaaggatattgtggggatggtcaaaggagtgtgacaccacacaagatgattatgagaaaggatgggctggtctacagagtattccaaggcaagtttggcttgataaaaatgggaagtggttgatgcagtggccaattgaagaggtagaanaactacgtgacanacaagttagcataacggtagagaaaacta

SEQ ID NO: 220986 - DNA, 560 bp, Glycine max
cgcgtctataagctttcttgctttgctattgcttgctccgcaatcataatttcatcatctaatcaaatcaatttcgaaggttcattactctggcggaagagattaccaagaacgacgtaagagtaacctgcctatccacctgaagcagttccagggtctggcctttactgattaccaattccaccgatcatatcatcgatggcgagatgcgcctgctttacgtcgtcaacacgtggttactgatcacatagcactgttgaacatgtgtcatctaggtacgtacctgtgtccagagctgagagctgctccagcttatccagcatccagccacagattagtaacaccgtgacatttgacagcaaacccgattatccttcacttgtcatgattcatggttatgctactgcacaagaggaccttattggactcatgactggctcgcatatcgatctagagtcaatgctgttgatcaacttggatgtggtggttctggcagacctgagattacatgctacagctctgaagatactgacgcatgaatgatgcttctttgatgaatg

SEQ ID NO: 220987 - DNA, 548 bp, Glycine max
gaagtcatattatcttatgagcaacaagatttaaaatagaacaatttccagggaagaaatttctcctacaaatcgatttttgttgaagttgctattacaaatattttcagtaaattccactttactgaaacaatatacatatgatttcattcaattatgaaatttaattagtaaaaaaaaatattaaaatacatatagacaggaatagcacaaaattaagacctaacctatgcagaggttagccctttaggaagagattcattgtctggatcaggtgtaagaaaccttcgacaagcataaaaaacagctgaatggaaggcagttgggttgtcaatgaacgcaaagtgcccaccctgaggaatcctgatgatttcgcatggaaccttcatatgcttgcgagcttcttgggcaccttgataattcatccagtcttggaaaccatacatgaaagtggtgggcaccttccactctgcggcactgagaagaaggggcatcctagcaaatgctccaaatgaaaaaatatattttaagcacagctcttcactagc

SEQ ID NO: 220988 - DNA, 581 bp, Glycine max
  unsure (1)..(581): unsure at all n locations
tgaagacctcatcgtccaaaacctccgagtcctcgactcagttcgactcgccccactcgcctctccgatccttcccgctcttcgacaacgccgaccccttccactcgccgcaaaatgacaactcccgcgccatcgtcatcgtcgagacaacttcgactcaattcgcccaggccgcgccccccgcgccggagtccgagcaccggaacccgccttcggaggccgtggtcacccgccccgtttggccggagacgaagtcgtcggccaccgttggtcggacgcgaccgaagccggtggcgccgcccagttcggtggtgccgaagagagaaatgatggcgaaaaaagttgcattagggtttcgggtaagcgaagtagtgctgtgtctgatttcgttgtcggctatggccgcggacaaaactcgtggttggagcggtgattcttgtgatcgctacaaggaatacaggtattgttcgactgcgaatgtaatcgcatttgtatacgctgcgtatcaagcgtgtgatctggcgtatcanggagtaacgggcagacgcatgatcaatcagcacctgcggtaccacttttga

SEQ ID NO: 220989 - DNA, 567 bp, Glycine max
ttatggtagtatttgtcattcatttcacaaaaccggttcacctttggacccatggcttctaaaacccctaccttattccactctcgtttcttcctcttcggcttctattgctgggactgggaatttctcaccgctctcctcctctttagttcttcttcctaattaattaaattacatacaccttttcttttttttttttttacctaaatttctcattactacaacatcaacaaaagaggcataggtttttcttttcttttcttcttttattaaaataataatagtttctgtgaggtaggtggagggtagatcgggaagaaaaaaaatgtcacagcagcagcgttcgacgccggcgccgttcttgacgaagacgtatctgctggtggatgaccccgccaccgacgacgtcgtttcgtggagcgaaggtggcaataccttcgtcgtttggaaacacgccgatttcgctaaggacttgcttgcgaagtacttcaagcataataatttctccagcttggttcgccaactcaacacctatggattcccgaaaacttgtcccgacaaatggga

SEQ ID NO: 220990 - DNA, 568 bp, Glycine max
cactctctcacttacagccatgtccatggattctatggccacttccatcggagtctcggtccccgtgctccgcttcctcctctgcttcgccgccaccgtgcccctcagcttcctctgccgcttcctcccccgcggcctccccaagcacctctactcctccgtcgtcggcgtcgccctctcctacctctccttcggcttctcctccaacctccacttcctcgtccccatgttccttggctacgcctccatgctcctctatcgtcctcgatgcggcatcctcaccttcttcctcggatttggctacctcattggctgccacgtgtattacatgagcggtgatgcatggaaggaaggtggcatcgatgccactggggctttaatggttttgacgctcaaggttatctcctgtgcggttaattacaacgatggtttgctgaaagaggagggtttgcgtgaggctcagaagaagtaccgtttgatcaagttgccttccttgattgagtacattggttactggctctgctgtggaagtcactttgctagtcctggttatgaaatgaaggatatc

SEQ ID NO: 220991 - DNA, 534 bp, Glycine max
ctacctctttttcttctctctcaacaacttcaccttcttcctcctcgatcatgtctcacttcaagggcaagtaccatgatgagcttatcgccaatgctgcgtacattggcactcctggaaagggtattcttgctgctgatgagtcaacagggacaattggcaagcgtttggccagcatcagtgtagagaacattgaatccaacaggcgagctcttagggagctgcttttcactgctcctggtgttcttcaatatctcagtggtgtcatcctctttgaggaaaccctctaccagagcacagctgcaggcaagccctttgtgaatgtcttgaaggaagctggtgtgcttcctggcatcaaggttgacaagggcacagtcgagcttgctggaactaatggagaaaccaccactcagggtctagatggccttggtcagcgttgtgccaagtactacgaagctggtgcacgttttgccaaatggcgtgcagtgctgaagattggtcccaacgagccatctgagcttgctatccatgaga

SEQ ID NO: 220992 - DNA, 503 bp, Glycine max
gcaaaaataaacacaaagcctcattcacagcacggtggtgtctttcaagaaaacaaagttacattcccttccctgttgcacaggtttgaccaaatacactgaattactaaaattgacataaaaggaacactaggaaaacaaaaagcaaaattccaaacgattattctgggaagagtcaaaccacaataatacttatcaacaagaaattcggttgttgtacccataataccgattcctactcgcactagtctcttcaaacaacaccaacttcgattgatcagtagctgtagttcgaaacatggaggctctctgaggcaccatcagcaagctgtgagttacccttgtaggttcccagagttgcctctgagttagccttggctcttaccaaaagggcttcctgagccttcttcacattctcttcttttccgccccatgccttaagggtgctctgttgaagtgcccttccaaggagaaagagagtgaccatggcttcttcccattga

SEQ ID NO: 220993 - DNA, 516 bp, Glycine max
agaaagaaacacaaattttagtatttaataaagcaaaatgcacacatgccccaaacaaaacaagccttattcaacccaaattggtttcatatcacagaaaccaacaggatgccgccttcctccttactggtcccacccactcgaacaaaagttctacagaaataaaaatggctacaattcttctaccacaaatctgaaaagtctaacaccaaaaatcaaaaaaaggaaaattaaacaatcaaatccgattgataaaaccgatttttgtctttccctcactcacttttcagttgatcatctcaatcacttagtacctgtagtgagcaggcttgtatggaccctcaacaggcacactgatgtaatcagcctgggacttgctaagctgggtcagcttagctccaagtttgcccaagtgaagtgcagccaccttctcatcaaggtgcttgggcaaaacgtaaaccttcttctcgtacttgccggtactcttctccttccacaactcaagctgagcaatga

SEQ ID NO: 220994 - DNA, 545 bp, Glycine max
aaaagcatacttcttgaacattactaaaacaaaatagaaataaatcgttatcatcataaatcactgaaagaaaaccttggtacaacagttagatttgcagccaagtgactaggaggtcacatatttgcatacgaaattagcctcttacaaatgcaaggtaatactggctacaatagatccataatggattcaaccccatgctggaccatgtcatggcgagagcctggagttttatagcaccaattttccctttgtcatcataattcattatccattgcctacaaacaggtcctaaagaagacagcttccatgtctagttcatcaagatattatgcttctacatctcacccacaattagtataatcagatgcttctactagcacttcattctcttttgatatgttgtgatctaccacaagcaagaacaaagcccaatgatgcaaccaatgccaccaggtaaccagctacggtcccatagctcacagaaatgggccattcctgccatggcctttcccagtcaagaggcattggccaagccacaaacc

SEQ ID NO: 220995 - DNA, 522 bp, Glycine max
ctatggcttccaaggagttctctggtctttgttccttggtttcttcactctccgagagcattttgtgcactactgggttgaaaatgtatttggtggagagcaaaggaggtgccataacatgcatgttcttggctcttttcttcttggggacatggcctgctcttttgactatgttagaaaggcgtggtcgtcttcctcagcatacctaccttgattactcaatcaccaatttcttgtctgctttactcattgcttttacacttggtgggataggcaagggcactcatgatcagccaaatttcttagttcaacttgctcaggataattggccctccgttctttttgcaatggtgggtggtctgttccttagccttgggaatctgtcaagccaatatgcatttgcttttgttgggctatctcgtactgaagtgatcacggcaagcataactggtgttataggcacaaccttgaattactttttggatgacagaatcgacaaagctgagatcctttttccaggag

SEQ ID NO: 220996 - DNA, 520 bp, Glycine max
gtgttcaatcacgtaatttgtttcaactattattttgaaagcataggacacgacaaatagtacacaatataaagccagaacaaacattggagatattatatatatatatatatatatatatatataatcgtacaatttttcattttggaagtccaaatatacagaaaaataaaaaacataaaagcatttcaataagaatatatcaactatgctccctgctttatttctttttctgcactcttttcttaatagattttttcttcttctcttattcacaccaatgaacaatgagaatttttctccctttgcactaggcaatctataaacaacttgtgtgttgtccaattattccttggcagtgctgtttctttgccctgatgatgccattagcacagcaacagccactataaacataaacaacatactccctagcagtatatatgttctttctgatgatttcctgtactctccaaacagaatcacgccccaaaaagtgcttacaagtggaagtgcctggact

SEQ ID NO: 220997 - DNA, 525 bp, Glycine max
agtcatgtgcaactttttgtgtcagttattaataattaaaaataatttttacaacatttacttttttacatatttgcccctttctttgagtaggtgagtaggaggccaaactcagttgctctctaattgtgcatccacacatctctcatttttataacacattctaatttttatataaattttcttactaaatacgacttgttaaatgaaacaaaaaaagaagaagagagaaacaaactaaccaaagcacacctgaaaattttatctgcactcaaaagaattttcgtgggggaaattaattattaattaccagtaaacgagagcttcgagattggcattagtgagattccgataaaattctactgtgtttagccgagttgtggtgtatgccatggttctgttgcatctcaggaattcctctttagttccctctcttacatgaagggccttccgcacattttcatcatttgcccatgtgtcaacaaggatatgataatagcttctacaccaaaatgttggaggatc

SEQ ID NO: 220998 - DNA, 551 bp, Glycine max
caagaatggcacttcgttgcttggtgatgtccctttctgttctcttcactcttggtcttgcgagagaaagccatgccagagacgaagatttttggcatgctgtttggccaaacactcccattccaagttcattgcgagatcttctaaagcctggccctgcaagtgttgaaatcgatgatcaccctatgcaaattgaagaaacacagtacccgaaaaccttcttctataaagaagaccttcatccaggcaaaacaatgaaagtacaattcagcaagcctccctttcaacaaccatggggtgttggtacatggttaaaggaaattaaagacactactaaagaaggatatagttttgaagagctatgcatcaagaaagaagccattgagggagaagagaagttttgtgcaaaatccttgggaacagtaattggttttgccatttcaaagctgggaaagaacattcaagtactttcaagttcctttgtcaataagcaagaccaatacactgtggaaggagtgcagaatcttggagactaagcagtgatgtgtcat

SEQ ID NO: 220999 - DNA, 503 bp, Glycine max
accatatatatatagagagagagaatacgaagcacactgatcacaggatgatgctctctttaagtagggaagcagatcttatcagtacacataggtaggttgaaattctagctctagcaatctagctagagaaggtagtacttgcacaacacacagcacatgataatttattttatacacaatctcattctcatggtgctcaagatgcatggactaattaagcaacaatgttggtctgataggcagtgtccacagataaattgggtacccataaaatggccttgcttccaaggaaatggcaaacagggttagttccaggatcaactcccataagttgatgaagcatttgatgattcattccagaagtatttgagtggcaaatagcaagtgcctgagttttggttccatcaccagccaccaatggaaccatgaaagctgttgtttcacggacttcatggcagtaaaatactgcagttctgaaatttagcctatgacacatcact

SEQ ID NO: 221000 - DNA, 522 bp, Glycine max
  unsure (1)..(522): unsure at all n locations
gttgcaagaaaatattgtttctattaaagcagatcttaacttccattcaatttacggattcttacagtacatttctaacctacatacaagtttccttataacctccatgtttcccatgttctggcatgctaagatatgacactcacgacattagagaacaaataaagaaacaaaacaaccaagtcggggcaaggttactaccaaggctttcttgcctcacgattgacaatgaatgctactgcctttttgctcattttattgcaacagaagtaggccttcataagatccagaaccagccaagaactgaaccaccaactaagccaaacccaaggaaccctgtcatgacaatagcagataactcagattctgacaaaggcactgacttgggtgctagaatcataaggacactagtaaggtaaccattgctaaatcctagcagaaaagtcagaaccaccataggtacttcagttttcagccacttcggtccatgaagacacactacanagagtggatagaatagta

SEQ ID NO: 221001 - DNA, 597 bp, Glycine max
gtgcagtgttaaacatgaatttgaagggaagtgggatgaaaagaccacccgtttgacaacctgtgaccctcatgctaaacacacagttgtcaattccaacagtcctcaagaggttgaagagaaccaggaaattatcttcacatatgatgttgatttccaggagagtgatgtgaagtgggcttcaagatgggatgcctatttgctgatgagtgatgaccaaattcactggttctcaattgtgaactcattgatgattgttctcttcctctcaggaatggtagcaatgataatgctgcgtacactttaccgtgatatttcaaagtacaatgagttagagacccaagaagaagcccaagaagagactggttggaagcttgtccatggtgatgtttttaggccaccaaataactcagatttgctgtgtgtttatgttggaactggtgttcagttttttgggatgattctagtaacaatgcttgttgctggtctggggttcctttctccttcaaaccgaggcgggctaatgacagccatgctcttgctttttgttttcatggggatttttgctggttatgcctctgcccgcatatataaaat

SEQ ID NO: 221002 - DNA, 635 bp, Glycine max
  unsure (1)..(635): unsure at all n locations
tggaccaatcncctgnattcggatagcacaattnacggttacacgccgacactcggcggtgggctcccgtgtgctttgttaaacatgaatttgaaggtttgtgttttgaaaagaccacccgtttgacaacgtgtgaggctcatgctaaacacacagttgtcaattccaacagtcctcaagaggttgaagagaaccaggaaattatcttcacatatgatgttgatttccaggagagtgatgtgaagtgggcttcaagatgggatgcctatttgctgatgagtgatgaccaaattcactggttctcaattgtgaactcattgatgattgttctcttcctctcaggaatggtagcaatgataatgctgcgtacactttaccgtgatatttcaaagtacaatgagttagagacccaagaagaagcccaagaagagactggttggaagcttgtccatggtgatgtttttaggccaccaaataactcagatttgctgtgtgtttatgttggaactggagttcagttttttgggatgattctagtaacaatgctgtttgctgagctgcggtttctttcttcttcaaaccgaggcgggctaatgacagtcatgctcttgcttattgtttcatggcgattttgc

SEQ ID NO: 221003 - DNA, 81 bp, Glycine max
aaaaaaaaaaaaaaaaaaaaaaaaaaaaaaaaaaaaaaaaaaaaaaaaaaaaaaaaaaaaaaaaaaaaaaaaaaaaaaaag

SEQ ID NO: 221004 - DNA, 592 bp, Glycine max
  unsure (1)..(592): unsure at all n locations
ggtgcttgtgttgtgttcggtgaagtgagtagtgaaggtgctgaatcgaatcgaatctccgaagatggccgcgagcgatcgcacagtgttgcaattctcttcatcatcttcttcttcgcagagcttgtccgcgaaggtccaccctctggtcatcttcaacatctgcgattgctacgttcgacgccctgaccaagccgatcgcgtcatcggaaccctactcggctccgtccttcccgatggaaccgtcgatatccgcaattcctatgctgttcctcacaacgaatctatcgaacaggttgcgttggatatagagtaccaccacaatatgttaatatcccaccaaaaagtgaatccaaaggaaatcatagtaggatggtattcaaccggtcttggagtaacaggtggtagtgcattaattcacgagttttattctcgagaagtccccaatcccatacacttgacggttgatacaggatttacaaatggagcgggtactattaaagcatatgtgtctaacaatntatctcttggagaacggcaaatngctgcacagtttcaagaaatccattggatcttcgtatggtggaagctg

SEQ ID NO: 221005 - DNA, 564 bp, Glycine max
  unsure (1)..(564): unsure at all n locations
ctgacttaagttcgntgatntcntanantcncnattannngttaannggcaaganccnctcactaggcagnggcctcccttttattttccttttcaaagcattttacaataaatcaagccaccactacacttcgtggctgggggaatatttcaactcacctatccaaaccaccacaaaccacaaaaaaataatctatgtaaaagtgaattataaaacaatgaccttcctcgtttcttgaaatatgacaagaaaggaaactttcacaaaaatttgtctttgtcgataacacaagcgcaataatcacataatctcatcagctttgtacaatttttaagccaagctaagctgctttcttgtaatactaaataaatacacaaaaagcaagtgatcctgccaactgtcattcacaagcttatcaaaaactgatggggacactttgggaagggaacctactgctgttgatataacaactccgattatcatgtctggtgcaactagcccttccacaacatctttaacatatttgtagatgtcatcaatcaacactagcatatgtagcattg

SEQ ID NO: 221006 - DNA, 484 bp, Glycine max
gaagaagatggctttaggtgttcctgctcttccgttgacatacgtggctcacgttctggcagttgttgccagcgtcttggtcgtggtctgggtcgtcaatttcaggggtggcttggcttgggattctgataacaagtccctcatcttcaacattcatccagttcttattgttattggcttactagttcatgggggtgaagctattataagttacaaagcttttcccctaaagaaggaagtgaagaaattgatacaccttgttttccatgccatcgcattaatacttggaatagttggaatttatactgccttcaagtttcacaatgaaagtgggattgccaatctctacagcttgcattcatggcttggaattggggttattgtcctttatggcattcagtggatatatgggtttgtgatctttttcttccctggtgggactccagacattagacgcgcctcacttccttggcacgcgctattt

SEQ ID NO: 221007 - DNA, 558 bp, Glycine max
  unsure (1)..(558): unsure at all n locations
cactaatcataagcctctccatctataccatcatatatggctagtagttgtttctccatgacaacaccaatcttcaaaattcgcttcttcttattcttatgctttattgggataagttcatctcaattgtcctctgacttttactccacaacttgtcctaatgcgctttcaaccattaagagtgcagtggattctgctgtgagcaatgaggctcgcatgggggcttccctcctacgtcttcatttccatgattgttttgttcaaggatgtgatgcatcagtgctattgaatgatacatcaagtttcacaggtgaacagacggcagctggcaacgttaattccataaggggttttggtgtaatagacaacatcaagtctcaagttgagagcttatgtccctggtgttgtgtcttgtgctgatattctcactgtagctgcaagggactctgttgttgctcttggtggacctagttggacangtgcattgggcagaagagactcaaccactgcaagtttaagttctgcaaactcagacttgccccgttttgatttaagtct

SEQ ID NO: 221008 - DNA, 571 bp, Glycine max
tttcaacctctctgattttgtaattgagttcgattataatagctcccagtactttaattgaggtctgaatatcatcacttaatttgaaggaaagatggtgagcgtagctgagatccgccaggcacaaagggcagaaggcccagcaaccatccttgccattggaactgcaaacccaccaaactgtgttgatcagagcacctatcctgactactacttcagaatcaccaacagtgagcacatgaccgagctcaaagagaaattccagcgcatgtgtgacaagtctatgatcaagaggagatatatgtacctaaacgaagagatcttgaaagagaatccaaacatgtgtgcttacatggcaccttctttggatgctaggcaagacatggtggtggtagaggtaccaaagctaggaaagaggctgcagtaaaggccataaaggagtggggccagccaaagtcaaagattacccacttgatcttctgcaccaccagtggtgttgacatgcctggtgctgattaccaactgaccaaacaattgggccttcgcccctatgtgaagaggtatatgatgt

SEQ ID NO: 221009 - DNA, 562 bp, Glycine max
  unsure (1)..(562): unsure at all n locations
gtnggtggggcagccttgaagcatncgctgtaaattaaggccaaacccagctcgaattcgctcaggaatcttacaaggttgatgaatttgatttggagagactcactggaacatagggagggggctaatcatggttgccttgagaccattgataggaaaaaggacatatttaatctacagcatggagaatatgtgttctttggaaacgtttgaggcagctgtttctgccattcccttcgtagacaatatcatgttccatgctgatccttttcatagctactgtgtggcactcgctgtagtttctcattctgctttggagcaatgggcttcaaagcaagggatagcttattctgatctttcacaatcgtgcagcacagaagaaactgagtaggaggagcatgcataacttgtaaaggaaacacataccgctcgtctggagataaccgagaatactgccaagttaagttgctctctgaaccatggacttctgaatctggcctagtcactgcagctcttaagctcaaaagagagatacttaaagagactcttcaagcagatctct

SEQ ID NO: 221010 - DNA, 459 bp, Glycine max
  unsure (1)..(459): unsure at all n locations
gttggatttcattaaccttttcatttcttaagcacagaaaccaccaacagtggttgggctgaggtgttacgatagttgctgaaacttgcacttgggtcgttttgtgttatcttggtatatgcactggcttcccaacaccagagcactatcataagcacttcaccatctttcaaacccttcaagcccaaagcctggtcttccatttattgtccaccttaacctcttaaaagataaacttctccactatgcactcatcgatctctccaaaaagcatggcccattattctctctatccttcagctccatgccaaccgtttatgcctccacccttgagttgttcaagctgttactccaaactccacaatgcaactnctcttcaacacaacgttccatacctatggcataagacacctcacttacgacaactctgtgggcatggttccattccttccttactgg

SEQ ID NO: 221011 - DNA, 569 bp, Glycine max
  unsure (1)..(569): unsure at all n locations
catcacttcattcaacatttctctctcttttagtttttttttaccaatggctgctgcggttggtgctgcagtctcttttccatccaccaagtctacctctctcccaagcaggacctccatcattaccccagagagagttgtattcaagaaggcttcattgcaatacagagatgtttgtagcagtggaagggtagtttccatcatagctcaagtcaccactgaggctccagccaaggttgaaaaagagtccaagaaacaggatgaaggtgtggttgtgaacaagttcaaacccaagaccccttacgttggtagatgcctgctcaacacaaagatcactggggatgatgctccaggagaaacttggcacatggtcttcagcaccgagggagagattccttacagagaaggacaatcaattggggtaattccagatggtgttgacaagaatggcaaaccttataaactgagattgtattctattgctagcagtgccattggtgattntggagattccaagactgtttctttatgcgtgaaacggctagtgtacacaaatgaaaatggagaaa

SEQ ID NO: 221012 - DNA, 531 bp, Glycine max
caagttaatagcattccgcaaaatggctgccaccaccttagtctctgaagtcactgtcccctcctcctccggccagcggaagatgccgctgatgggcctcggcaccgcgccggaagcaaccagcgcggttaccacaaaagatgctgttcttgaggccatcaagcagggctacaggcactttgatgctgcttctgcttatggtgtggaacagtctgtgggagaagccatagctgaagcacttaagcaaggactaattgcatccagagatcaactcttcatcactaccaaattgtgggtcactgataaccatgcccatactattcttcctgccctgcagaaatctctcaggacacttcaactagaatacatagatctctttctgatccactggcccattgctactaagcctggaaaagttgtgtaccccattgaagtatcagaagatagtggaatctgacatgaagggtgtgtggggatccatggaggagtgccagagacttggccttaccaaagccattggagtcagcaact

SEQ ID NO: 221013 - DNA, 515 bp, Glycine max
gcgagtcactcactcatggcattcttcgctcttatctccgacacccagcaatggaaggaccggaaggcacatgtggaggacatcaatcaaacacatcttcgcgatctattgagcgatgataagcggtgccagtccatgctcgttgaattcgatgacattctgttggactattcaaggcaacaagccactcctgaaactatccagaagctatttgaattagcggaggctgcatcgctcaaagaaaagattatccgcatgtacagtggggaacatataaatagcacagaaaatagatcagcgcttcatgtcgctcttcgagcttcaagggatgctgtcatacagagtgatgggcagaaagttgaccctgaaagttggaaagtttttgacaagatccaggagttctttgatcagattcgcaatggatcttgggttggcgctacatgaaaggctttgaacgacgttgtttcaattggtattgggggaagcttttttaggtccactgtttgttcacactg

SEQ ID NO: 221014 - DNA, 668 bp, Glycine max
  unsure (1)..(668): unsure at all n locations
cgggacggaggatcagaanagcatgnccncntnttnnngttnaaaggacaaagccccggggagggnangatagtaaaggaaaaagcaaaattctcttccgtttcattattagggtttcaccgttacagtgaagcatggcggaaccaaagcgaatctctctgcgtatctttgcgctgctcctcttgatttccacctcttcgtttcaccttctccgcgcttccgatgacgccgatgatgatgcgatcttctatgattcgttcgacgaggattttgaagaccgttgggttgtgtctcagaaagatgagtacagtggtgtctggaaacatgccaagagtgagggacatgatgattatgggcttcttgtcagtgagaaagcaaggaaatatgctatagtaaaagaacttgatgaggccgtgagtctcaaggatgaaacagttgttcttcagtttgaaactcggcttcagaatggccttgagtgtggtggtgcatatctaaaatatctcccaccacaggaggctggatggaaatccaaggaatttgataatgaatcttcatattctatcatgtttggtcctgacaagtgtggtgccacatacatagtacactttatttttaagcataagaatcccaagagntgggagtatgttgaacaccatcttaagaatccc

SEQ ID NO: 221015 - DNA, 401 bp, Glycine max
aatgaattgttattttcaaatgcattacgagtacacgtaatgacacagtatcgaacaaatattgaattgaaaaattaaaaagaaacaagaactgttgcagaaatcaaacacagttggctttgaatagtcaaagcagctcttgcatcacacaaattcgtactataaataacacattaacactaatcggaatgaagccccaccagaaccatacttatttcccaggacaagtacctgaaggttgggataaccagaaagcacacctgcaccagcaactgcacgaaggatgattgctgctgcgcccttgaacacagattttgaaccttaattcttcacaatttgcgagaatgcattgaaagagctattgtacttgacaggttgaccagatgtaatcatcattcttc

SEQ ID NO: 221016 - DNA, 545 bp, Glycine max
  unsure (1)..(545): unsure at all n locations
gccattcgtattgtcgcagagaaagaaatccctatcccaccgtttcaagatgcaaatcttggttaagaccctcactggtaagaccatcactctcgaagtcgagagttcagataccatagacaatgtaaaggccaaaattcaagacaaggaagggatcccaccagatcagcaacggctcatttttgctggcaagcagcttgaggatggacgtacccttgctgattataacatccaaaaggagtccactctccacttggttcttcgtctccgtggtgggatgcaaatctttgttaagaccttgacgggaaagacaatcacccttgaggtcgagagctccgataccattgacaacgttaaggctaagattcaggacaaagagggtatccctccagatcaacagaggctgatctttgctggaaagcagcttgaggatggccgtacccttgctgattacaacatccagaaggagtccactcttcatttggtactccgtctacgtggtggaatgcaaatctttgttaagactctgaccggnaagacaatca

SEQ ID NO: 221017 - DNA, 531 bp, Glycine max
tgtctttttttttgttcatcaaacatgattacagatcgcacttattcataacacagaactaggtttaataaatggttgcttaacaaattaacgaaccaaacagaatttataatacgaccagcacagacaacggctttttaaaaggccacttgttggccatggaaacactctaacaagagtaaaccttgctggaacattaaaaaaagaaacccaaagatctgcggaacttccacatgcttagacttcaagacacctacagaacattctcagactttgaaaacccaccacgaagacgcaacacatggcgaagagtacactctctctgaatggttgagacagcaagagtccttgacatcctccaatggtttcccagaagacataaacctttgctggtcagatgggataccgcccttgtcctggatttaggctttgacatgatggattgcgtctgagctttaaaccaccaaggaaataggtcacgcctgacaaagtcctcacaaagatctgcgtacctcccctgagacgaaagac

SEQ ID NO: 221018 - DNA, 540 bp, Glycine max
  unsure (1)..(540): unsure at all n locations
ctcggcttgtctttcactttctcaaccacccaacacaacacaaattccctttcttcttcttcttcttcttctaaatagatagaaggaatttagattaattaaaacaacctttcattcattctgttgtgttgggaaatatgatgttcgactttgccaggatttggacccgaaacacgttaataggtctcggcttgggtcagtttctttctcttctcatcacttccaccggcttcacttcctctgaattggctaaaaaaaggaattaatgctccaacttcacagtcgtttctgaattatgtgttcttgacgcttgtctatggaactgttctcctatatcgaaggaaagcactcaaggcaaaatggtactattatataattctcggattggttgatgtagaagcaaattttcttgttgtgaaggcataccaatacacctcactcaccagtgtgatgctgcttgactgctggtcaattccgtccgtcatgcttcttacacggctnttcttgaaaacaaaatatagattcaaaaagaatactggt

SEQ ID NO: 221019 - DNA, 490 bp, Glycine max
ggagctttgtgaggagatgaatatcaaggccattaatctgtggtctgcaattcagacaagagaggattggttagacgttagcttcacggatggagttcatctatcagcagagggaagcaaggtagtggtgaaggaaatattaaaggttctaagagaagtagattggaaacctagtctgcattggatgtcaatgccaactgaatatgcagaagattcaccatattatcctccaagtcctgatggaacaacaaccataaatgtgtctcatattatctcccgaaggtgtttgcagtgggatatatagtactttatgtatttatattgcgtaccatataagaggctcaattatgttgtgtggagtggagctcttggaaaagtgatattttccctaccccatacgttttgggggcgctttaattattctattctagttttcatttggtacatgtacttaaatttgtgttaataaattaaaattccactcaattta

SEQ ID NO: 221020 - DNA, 595 bp, Glycine max
  unsure (1)..(595): unsure at all n locations
gctgacttcctctttgttttctgatctatggcttccaaggagttctctggtctttgctccttggctccttcactatctgagagcattttgtgcactactgggttgaaaatgtatatgctggagagcaaaggaggtgccatagcatgcatgttcttgtctcttttcttcttggggacatggcctgctcttttgactatgttagagaggcgtgggtcgtttcctcagcatacctacccttgattactaaataaccattttcttggcggcttaactcatggctttaacactgggtgggataggcaagggcacacatgatcagccaaatttcttagttcaacttgctcaggataactggccctccgttcttttcgcaatggggggtggtttgttccttagccttgggaatctgtcctgccaatatgcatttgcttttgttgggctatcggttactgaagtgatcacngcaagcataactgttggcataggcacaaccttgaattactttttggatgacaaaatcaacaaagctgaaattcttttcccangagttggttgctttttgaatgcagtttttttaggttctgctgttcattca

SEQ ID NO: 221021 - DNA, 537 bp, Glycine max
ctcggcttgtctttcactttctcattcacccaacacaacacaaattccctgtcttcttcttcttcttcttctaaatagatagaaggaatttagattaattaaaacaacctttcattcattctgttgtgttgggaaatatgatgttcgactttgccaggatttggacccgaaacacgttaataggtctcggcttgggtcagtttctttctcttctcatcacttccaccggcttcacttcctctgaattggctaaaaaaaggaattaatgctccaacttcacagtcgtttctgaattatgtgttcttgacgcttgtctatggaactgttctcctatatcgaaggaaagcactcaaggcaaaatggtactattatataattctcggattggttgatgtagaagcaaattttcttgttgtgaaggcataccaatacacctcactcaccagtgtgatgctgcttgactgctggtcaattccgtccgtcatgcttcttacacgggtttttcttgaaaccaaatatcgattcaaaagattactg

SEQ ID NO: 221022 - DNA, 602 bp, Glycine max
  unsure (1)..(602): unsure at all n locations
tttagctttttatttcaaaatcttttcatttcagtaactgtcttcctcacgacaccggccgggctaaccccactttctatcctttcctttccccttcataaaaacaaacacccaacaaaagcatccaatccacacacaccacagtcccatcccatggccatagccatgcctgagtcgtcttcttcttcttcttcttccacaaccaaacgccaaaaacaagaacaacatattcatcaacaagaagaacaacctttgatcccaggtctccctgaccacatagcccaattatgtctctcatccatcaacccttgtttgttattctcaatctcccactcttggcgccgtctcatatactccccttctttccctccctttttttctctctacgccattctctcccactcccactcttccgccgtcatccagttccacaccttcgatcccatctccgccacgtggcgtcccccttccctccccacccacccctncaccaccttctcctccgtcgtcacccctccttcctctcccgcaacctctccgtgcagtccgtcttcgccgataaccgctngttctcctcgtcgcaccacccacacctttccccg

SEQ ID NO: 221023 - DNA, 562 bp, Glycine max
  unsure (1)..(562): unsure at all n locations
gagattgcaaaattctcttccgtttcattattagggtttcaccgttacagtgaagcgtggggaaaccaaagcgaatctctctgcgtatctttgcgctgctcctcttgatttccacctcttcgtttcaccttctccgcgcttccgatgacgccgatgatgatgcgatcttctatgattcgttcgacgaggattttgaagaccgttgggttgtgtctcagaaagatgagtacagtggtgtctggaaacatgccaagagtgagggacatgatgattatgggcttcttgtcagtgagaaagcaaggaaatatgctatagtaaaagaacttgatgaggccgtgagtctcaaggatgaaacagttgttcttcagtttgaaactcggcttcagaatggccttgagtgtggtggtgcatatctaanatatctccgaccacaggaggctggatggaaatccaaggaattngataatgaatctccatattctatcatgtttggtcctgacaagtgtggggccacanacaaagtacacttcattttcaagcataagaatccaagagtgggagt

SEQ ID NO: 221024 - DNA, 450 bp, Glycine max
  unsure (1)..(450): unsure at all n locations
cggagttatcattatgtattcaanatttannttaaagaacaagaactaggaattggtctccagttcttttttatttactaatacaacattttttattttttccattcaaaatatgcattttggggggggggaaattatataaagcatttctatccaaataaaacaagatggtatctagttcatatatgctcattaaaaacaataatgaatagaccacaagatcaagaatctaaaatcaattgctaatatacaaaatatcatgtctgtccttaacatgactcaaatactatttatatataaaccttttcaaggaatcacatgtccttaccaacttcagtaaatttatcttcttccataaacttttagattaacaaattggacataatcgaccacttttttacattaaaaaaaactatttgatttaatcaagataaccctttaaagctttct

SEQ ID NO: 221025 - DNA, 545 bp, Glycine max
ctaaaacatctcaatgggttcttcttctattacaacatcgcccgcaaccatgaccatggctgcgatcgtgctcctgttcacggtctttgccgtttcctccgccctagacatgtcgataatctcgtacgacagcgcccacgcggacaaggccgccacgttgcgcaccgaggaggagctgatgtccatgtacgagcagtggctcgtgaagcacgggaaggtgtacaacgcgctcggcgagaaggagaagcgcttccagatcttcaaggacaacctgcgattcatcgacgaccacaactccgcggaggaccgaacctacaagctcggactgaaccggttcgctgatctcaccaacgaggaatacagggccaagtacttgggaaccaagatcgatcccaaccggaggctcggaaagaccccgagcaaccgctacgcgccacgtgtcggcgacaaattgcctgattccgttgattggaggaaggaaggtgctgttcctcctgtcaaagaccaaggaggctgtgggagctgttgggcattctcagcaatcg

SEQ ID NO: 221026 - DNA, 402 bp, Glycine max
ctattcttaccttgcgcggtggaccgagttgacggtgataagctcctcccttctcctccgccagatctcatcgtcgccgtcgccgaatttctccttggcgttttgtctccgcctctcactctcgttgaagcttattaagtaccgatagcatgtgccggcaaaattctccggtacaccatgccggtgaagaagaaattgcagctgatgaaagccttttgatttattggcagcctggtgaactttacaatattctctaccgccgtgctcttcaaaatccttcttttcttaggagatgtttgcgttataaaataagagcaagccgtaaaaggaggttgagagcaggaattgtgattttcaattatagggaccgctacaacattcttcgaaagactgaagtgaccg

SEQ ID NO: 221027 - DNA, 517 bp, Glycine max
  unsure (1)..(517): unsure at all n locations
ctcaggaagtatcccaccccaacaatgttttccatcgcccaataagaatacattgctgatgacatccttaccacaagactcacagtttcagcaacaaatagatcagcaagctagtctcttacagaggcagcagctgcagcagcagcagcaacagacacagttgcaatcatctccgttgcagttattgcaacaaagcttgtcacagagggcaccacagcaaccacaaatgactcaaatgtcacagcaaaacagctcagaccaacaaccacagttacagatgctacagaaattgcagcagcaacaacagcagcagcagcagcaacaacaacagaaacccctttccacttctagcccacttttgcagtctcagcttttacagcagcaaaatactcatcaacaaaaccagcaattntcacagctgcctctatacagggtcatcagcctcaacagcttggcaacaatgctttctcatggagaagcttctcaatgcaacaactactcttttcatctctgatgc

SEQ ID NO: 221028 - DNA, 539 bp, Glycine max
gtctatgaagtattccaccccatttttgtttttcatcgtccaataagaatacattggtgatgacattcttaccacaagactcacagtttcagcaacaaatagatcagcaagctagtctcttacagaggcagcagctgcagcagcagcagcaacagacacagttgcaatcatctccgttgcagttattgcaacaaagcttgtcacagagggcaccacagcaaccacaaatgactcaaatgtcacagcaaaacagctcagaccaacaaccacagttacagatgctacagaaattgcagcagcaacaacagcagcagcagcagcaacaacaacagaaacccctttccacttctagcccacttttgcagtctcagcttctacagcagcaaaatactcatcaacaaaaccagcaatttccacagctgcctctatcacagggtcatcagcctcaacagcttggcaacaatgctttctcaatggagaagcttttcaatggcaacaactactcttcttcatctctgatgcaaacacagcagctttcg

SEQ ID NO: 221029 - DNA, 350 bp, Glycine max
cttaggtgggctcactgtttagcattctatccaaaacaagaagttgttcatgttagatcaccatgactatctcattccttatttgaggaaaataaatgcaaataccacaaagacttatgctacaagaaccatatttttcttgaaagatgatggaactttgacaccattggccattgagttaagtaagccacatcctcagggtgaagaatatggtcctgttagcgaaatctacctgcctgccaacaaagggatggaagcttatatttggttactggcaaaggcttatgttgatgtgaatgatgcatgctaccatcaaattattagccattggctaagcactcatgctattg

SEQ ID NO: 221030 - DNA, 490 bp, Glycine max
ctttctttctttcgtagaacggagagcacactattttcactgcagcagcaacaatggcggagaccgagatcgagaagataacgacaatagacccagagacggagtttctggcgtcgaagataaggaacgggaacgagtgggagaccttcaaggagaacgtgaggccgctcaagagaggccgcaacgtcaacctcttgaaccacgccctcaactcccacaccgataacgaactcaagaaatccctcatggaacaacgaaggaagctgattgaagccatcgaagaataccaaggtgatgaccctcttcttccctggatacagtgtatcaagtgggttcaggaggcgtttcctcctggcggagacagctcggggctggtggtgatttatgagcagtgtgtgcgtgccttttggcactcagagctctttaaggatgatcttcgctacctaaaagtgtggcttgaatatgcagataattgctttgatgcagacgt

SEQ ID NO: 221031 - DNA, 572 bp, Glycine max
  unsure (1)..(572): unsure at all n locations
tgacaatgacttatnaactctcttangataagnggcagagcctgcggttgggctcgagggacgctttccttcatcacctgttgctatacanatgtccaaggggttaaagggcttccaggagtccgtaccaatgaaatgccaaaagaaaacactctacacaagccagaaaagcctgagagcacttcttcacctagagcttcacattcagtaatttcaggtactgataagaaacctatcggagctaaaaaaacagtgaagagtggggggcttggtgctcgtaaactcactaaaaagccaagtgagtctctctatgagcagaaacctgaggaaccccctgctccagtaccatcttcaacaaacagtatgcctgctgggccatctccgacatctaggtttgaatatgtagaaaatgtccaatcatttgacttgaacactggaagttctcatgatcttagtcatgtgtctccaccaaagtcatcaagcttctttgccaactttggaatggatggtggcttatcaaaaaaatctgggccaaataccttcaaagtgaaaatcaagaaactgacaaaaca

SEQ ID NO: 221032 - DNA, 542 bp, Glycine max
cctagatacatatgttcacgctgctgattgtacttcgttactcatcaagaacgcaatctgtgtctttgaacaatatggcagcatcatgtggcgtcacaccgaaacaggcattcccaatgaatcgttcgaagaaacgagaacggaagtcaacttagtggtaagaactgttgttaccgtgggcaactacgataacatcattgattgggagtttaaaacaagtggctcaatcaaaccctcgattgctctctcgggtatattggaaattaagggagtggatattaagcacaagagtgagatcaagagcgatcaacatggtatcttggtgtcggcaaacagcattggtgtttaccacgaccacttctacatttaccatcttgaccttgacattgatggtgttgccaactcttttgagaagacaagtttgaagactgtaagagtgacagatggaagttcgaagaggaaaagctattggacaactgaggttgaaactgccaagactgaaaatgatgcaaagataatacttgggttgagccctggtgagc

SEQ ID NO: 221033 - DNA, 515 bp, Glycine max
  unsure (1)..(515): unsure at all n locations
agtntttgggaaaagttcgggatatgcagccccactgtataatgactgcgcccacgccgctactagtcggtgggctcccgtcctttattcatttgcggaggcttgtgtttgtactccgctaatcgttataatcacaagcagtgcatatgaacaaattgttcttgcacatgcgataagcacatcgacttgcacattatccaaggaacacatataatcgtggccctcgaggcacactatggtaatagctagggctgcctagctcaacttacttggcgcaaccgatcgatagtacataccggggggatagagctaaccgaaccgtgctcttttcgaaaaattggaaaggcctggactggattgcaagcgcaagaatgggaacaatagcgaagaacatctgttctggaacatgatgaacagccacagcgtgcaccacgaccacgtccacgttgaccatgtcgacattgacattggtggagacggctactgtatcaagaacacgggtgtgaacaccgtaa

SEQ ID NO: 221034 - DNA, 486 bp, Glycine max
cactaatcataagcctctttatcttctccatcatatatgggtagcagtggggtctggatgacaacaccaatcttcaaaattcgcttcttcttattcttatgctttattgggataagtttatctcaattgtcctctgacttttacttcacaacttgtcctaatgcgctttcaaccattaagagtgcagtggattctgctgtgagcaatgaggctcgcatgggggcttccctcctacgtcttcatttccatgattgttctgttcaaggatgcgatgcattaacgctatttgaatgatacatcaagtttcacaggtgaacagacggcagctggcaacattaattccataaggggtgttggggtaattgacaacattaattcttaagctgagagcttatgtcctgctgttggttcttgagctgatatacttactgttactgcaagggactctgttgttgctcttggtggacctagttggacagagcaatt

SEQ ID NO: 221035 - DNA, 465 bp, Glycine max
ggcgtcttcataaacgcctttcttcttctattcctattcctcgttcgaattcgctttttggggtgcgggaatgagagagtgcatctcgatccacattggtcaggctggtatccaggtcggaaatgcttgctgggagctctactgcctcgagcacaggatcgggcccgatgggcaaatgccaagtgacaagacagttggcggtggtgatgatgctttcaatactttcttcaccgagactggtgctggaaagcacgtgccacgtgcagcgtttgtagatcttgagcccactgttattgatgaggtgagaaccggaacttaccgccagcttttccacccagagcagcttatcagcggcaaagaatatgccgtcaacaactttgcccgtggccattataccattgggaaagagaattgtgatcttgtgcttggaccgcatcagaaagcttgctgacaattgcacttgac

SEQ ID NO: 221036 - DNA, 535 bp, Glycine max
ggagctctgtgaggagatgaatattttggccattaatctgtggtctgcaattcaggcaagagaggattggttagacgttagcttcacggttggagttcatctatcagcacagggaaccaacggtagcggtgaatgaaatattaaaggttctaagagaagtagattggaaacctagtctgcattggatgtcaatgccaactgaatatgcagaagattcaccatattatcctccaagtcctgatggaacaacaaccataaatgtgtctcatattatctcccgaaggtgtttgcagtgggatatatagtactttatgtattcatattgcgtaccatataagaggctcaattatgttgtgtggagtggagctcttggaaaagtgatattttccctaccccatacgttttgggggcgctctaattatttctattctagttttcatttggtacatgtacttaaatttgtgttaataaataaaattccactcaatttacactttctaagtcccccccaattccctggaatcacttaactcct

SEQ ID NO: 221037 - DNA, 653 bp, Glycine max
  unsure (1)..(653): unsure at all n locations
gtttatgggaaactggacgcattcactgttaatnaagaacaacccagctataattcgctcaggtaaattttcttcagccttttttttttttcaaccgctctgaactaccacctggaggggtgttctcaaccctaaacttacatggtaattcacctaggccaatcaagcaaaagtcaaggagattttgtctcactatccatccaactataagcaatctgctacaattcctcttttagatcttgcccaccaacagcatggaggctggctacctgtttctgcaatggatgcggtagctaaaattgtagaggttcctcccatacgggtgtatgaggttgccacattttactccatgttcaatcgatctaaggttgggaagtaccatctgttggtttgtggaacaacaccttgtatgataagaggttcacgaggaattgaagaagccttattgaaacacttgggagtgaagcgcaatgaagtaacaccagatggtttgttttctgttggagaaatggaatgcatgggatgctgtgtgaatgctcctatgattacagtggctgattattcaaatggatcagaaggatatacttataattactttgaagatgtaaccccagaggaagtagttgagatagtttaaaagctgaaaaagggtg

SEQ ID NO: 221038 - DNA, 586 bp, Glycine max
  unsure (1)..(586): unsure at all n locations
gattatgggctactatcctgatgcagacagcagttnattgataggccacaaccgcagctagtaattcggctccagggccttgtttgattatttgcactttatttttctgagaggaacaagaaacccaaacaacgagggctgtaaaaagattaccacaacaggaggacattatattatacactacactcactctgctttaaaaataattctctgtttctgctcttcaacacgttagtcacaaaaacattaattccaccaccgttgagacaacccaaactagttttcttggtaaagacatgaactttttgtggagctcatctggctctggataccaacatacttggccggatatagaatttggatggagaataataacgggtacgataattggattcctgggatctgcatttggaaccgtgggtggcgttggtgggggaggcatctttgtcactatgctctcccttattattggatttgatgcaaaatcagctactgcaatctccaagtgtatgattacgggtggagcatcaacaacagatttctacaatttgaagcaaaaacattcaacactcgacatgccagtgat

SEQ ID NO: 221039 - DNA, 537 bp, Glycine max
gcttaagaagaaaaggtgactgttctgtttattggtggagggggacgtgaacacgctctttgccatgccttgcaacgatcaccatcctgtgagactgtactttgtgccccgggcaatgcagggattgctagctcaggaaatgctacttgcatctctgaccttgaagtttatgatggagcagcagtaatctccttttgccggaaaatgggggtgggacttgttgttgtgggacctgaggctccacttgttgcaggtcttacaaatgagttagttaaggctggaatcccaacttttggtccatctgcagaggctgctgctttggaaggttctaaaaatttcatgaagcatttgtgtgacaagtatgatattccaactgccaaggtatgtcttcttattctgaatctcaccaaccagatcaacatttatcccttattctgttgtaatgatatttgcgaatattttcatgtattgcatcttataagtagcttctctgtgaattttgtaacatactattatactcattagtaatgagtaaat

SEQ ID NO: 221040 - DNA, 459 bp, Glycine max
tgtttttttttttttgaaataaagattattttaacaagggagcactacactgcataccttggacaataagtgaacttacctatgcaaaccagcacaaaacacaaaaaaataagcaaagtaaaagtgaagtataaaacaatgacattccacgtatcttgaaatatgacaagaaaggaaactctcagaaaaatttgtcttcggcaataaacaagcggaagaatcacataatctgagcagctgggtacaatttttcagccaagctaagctgcgttcttgtaatactagataaatacaccagaagcaagtgatcctgcaaactgtcattcacaagcttattaaaaactgatggggacaatttgggaagggaacctacagcatctgatataaatcttccgattttgatgtctggtgcaactagcccttccacaacattgttaacatatttgtagatgtcatcaa

SEQ ID NO: 221041 - DNA, 474 bp, Glycine max
taatgatccttcattaaatgaattttcatatggaagaaatccaagattcactgcggaagaagttgaacaacttgacaaaaataagccgtggtctagggctcttgatggttctagttaccttcccggaatggtgggacttaataatatcaaggagactgactttgtgaatgtaacaattcattccctaatgagagttacccccttgagaaattttttttttatccctgaaaattataaacactgcaaatctccactggttcatcgattgggtgaactacctaggaaaattgggcatgcacggaactttaaaggacaggtaatcccccaccagttcttacaactgtgaatgaaagccattaaaaaaagtgttcggtttgtggcacattctgacccgaaagagttcatgtgatggctacttaatacgctacatgcagattttaaaacttcaaagaagaattcaagcctaatatttga

SEQ ID NO: 221042 - DNA, 451 bp, Glycine max
ggaggcttgccttcatcacctgttgcttttcagtctgcccagggggttaatgggcttccagaagtcaagaccaatgaagtgccaaaagaaaacactctggagaagccagaaaagcctgagagcacttcttcacctagagcttcacattcagtaatttcaggtactgttaagaaacctatcggtgctaaaaaagcagtgaagagtggggggcttggtgctcgtaaactcactaaaaagccaagtgagtctctctatgagcagaagcctgaggaaccccctgctccagttccatcttcaacaaacagtatgcctgctgggccatctccgacatctcggtttgaatatgtagaaaatgtccaatcatctgacttgaacactggaggttctcatgttcttagtcatgtgtctccaccaaagtcatcaagcttctttgcagactttggaatggatg

SEQ ID NO: 221043 - DNA, 465 bp, Glycine max
  unsure (1)..(465): unsure at all n locations
ctgacaatctacctgattcnanancaccnttangattnanggcnagaggcgctcactagtcagngggctccctttttttttttatttaaagaatttttcttttattatgcaccaccaatacacgtgaggacacagtatcttacaaatatcgtattgaaaaattaaataaacacaagaactgatacataaataaaacacagttggctttgaatagtaaaagcagcatttgtatcacacaaatttcttctataaaaaacacattaacacttatcgtatttaatccccaccagaaccatacttttttaccaggacaagtacctgaaatttgtcataaccagaaagcacaccatcaccactaactgcacaaaagatgtttgctcccgcacccttgaacaaagattttgaaccttcatttttcacaatttgtgaaaatgcattcaaagagctcttgtacttgacaggttt

SEQ ID NO: 221044 - DNA, 522 bp, Glycine max
ctcgggctgactttcacttactcattcaccctacacaccacacattccctttcttcggcttcttcttcttctaaatcgatagaaggaatctagattaatgaaaacaacctttcattcattctgttgtgttgggaaatatgatgctcgactttgccaggatttggacccgaaacacgttaataggtctcggctagggtcagtttctttgtcttctcatcactaccaccggcttcacttcctttgaactggctaaaaaaaggaattaatgctccaacttcacaagggcttctgaattatgtgctcttgacgctagactatggaactggtgtcctatatcgaaggacagcactcaaggcaaaatggtactattatataattctcggattggatgatgtagaagcacatgttcttgttgtgaaggcctaccaatacacctcactcaccagtgtgatgctgcttgactgctggacaattccgaccgtcatgcttgctacacggctttctttgaaaacaaaatataga

SEQ ID NO: 221045 - DNA, 571 bp, Glycine max
ggtaaatccatctggtgatgaaaataattcagacatctcaccaataaagagaattgaatcgcaatctcaggaagatctgagtaaatcaattggaaagataattgagattgttgaaagaatcagcctgcctgctgtggattatgatagttcagatcccttggacaaaggagatggggatatcatttcgtacaagaatgtaggaatgccaacaggctacatggttcgtgttttccagtggaaaacatctgaactcagtaatgttttacggaaatttctacatgtgtgttatgatttactgagtggcaagactgattatgaaaattttgccaaagaactaacaacagcattggattggattatgaatcactgcttttcacttcaggatgtttctagcatgaaggatgccatcaagaaacaatttgattgggatgagacacggagtgaaggtgaaacagagaatgagataagtcattttgcagaggaagacaagttgcatcttttgagaggaagcttgtcaactttacctcaagtaactactttggatggtcatgatcttcagaatggagagata

SEQ ID NO: 221046 - DNA, 597 bp, Glycine max
ctaaaacatctcaatgggttcttcttctattacaacatcgcccgcaaccatgaccatggctgcgatcgtgctcctgttcacggtctttgccgtttcctccgccctagacatgtcgataatctcgtacgacagcgcccacgcggacaaggccgccacgttgcgcaccgaggaggagctgatgtccatgtacgagcagtggctcgtgaagcacgggaaggtgtacaacgcgctcggcgagaaggagaagcgcttccagatcttcaaggacaacctgcgattcatcgacgaccacaactccgcggaggaccgaacctacaagctcggactgaaccggttcgctgatctcaccaacgaggaatacagggccaagtacttgggaaccaagatcgatcccaaccggaggctcggaaagaccccgagcaaccgctacgcgctacgtgtcggcgacaaattgcctgattccgttgattggaggaaggaaggtgctgttccttctgtcaaagaccaaagaggctgtgggagctgttgggcattctcaacaatccgtgcagttgaaaggataaataagatagtaacaggcgaactgatttcgttatc

SEQ ID NO: 221047 - DNA, 453 bp, Glycine max
  unsure (1)..(453): unsure at all n locations
tgaacattgcctatntnanctccttangattaagccaagcccgagtggggctcagcctaatgctattttactctgcgatttttcttgttctcatcaagaaaccaatctgggcttgggacatattgagcatcatgtggcgtcacacctaacaggcatttccaatgaatcgttctaagaaacgagaacggaagtcaacttaatggtaagaactgttgttaccgtgggcaactacgataacatcattgattgggagtttaaaacaagtggctcaatcaaaccctccattgctctctcgggtatattggaaattaagggagtggatattaagcacaagagtgagatccagagcgatcaacatggtatcttggtgtcggcaaacaacattggtgtttaccacgaccacttttacatctaccactttgaccttaacattgatggcgttgccaacttttt

SEQ ID NO: 221048 - DNA, 490 bp, Glycine max
ctaaaacatctcaatgggttctttttttattacaacatcgcccgcaaccatgaccgggggtgggatcgtgctcctgttcacggtctttgccgtttcctccgccctagacatgtcgataatctcgtacgacagcgcccacgcggacaaggccgccacgttgcgcaccgaggaggagctgatgtccatgtacgagcagtggctcgtgaagcacgggaaggtgtacaacgcgctcggcgagaaggagaagcgcttacagatcttgaaggacaacctgcgattcatggacgaccacaactccggggaggaccgaacctacaagctcggactgaaccggttcgctgatctcaccaacgaggaatacagggccatgtacttgagaaccaagatcgatcccaaccggaggctcggaaagaccccgagcaaccgctacgcgccacgtgtcggtgaccaatcgcctgattccagtgattggatgaaggaaggtgctgtt

SEQ ID NO: 221049 - DNA, 610 bp, Glycine max
  unsure (1)..(610): unsure at all n locations
tgggagtagtcccataagcaggcncntnttaggtnataggacaaaacccagcgtgatataaagagaggagaaaattttccgtcaaccttctttggttttctcaaccgctctgaactaccacctggacagaccggacaacaaccctaaacttccatgggaattcaccgaggccaatcaagcaaaggttaaggagattttgtctcactatccatccaactataagcaatctgctacaattcctcttttagatcttgcccagcagcagcatggaggttggctacctgtttctgcaatggatgcggtagctaagattgtagaggttcctcccatacgggtgtatgaggttgccacattttactccatgttcaatcgagctaaggttgggaagtaccatctgttggtttgtggaacaacaccttgtatgataagaggttcacgaggaattgaagaagccttattgaaacacttgggagtgaagcgcaatgaagtaacaccagatggtttgttttttgttggagaaatggaatgcatgggatgctgtgtgaatgcttctatgattacagtggctgattattcaaatggatcagagggatttacttataattacttt

SEQ ID NO: 221050 - DNA, 458 bp, Glycine max
  unsure (1)..(458): unsure at all n locations
gggtaaccggcagntgacctgnatgncatttccgnttttaagttnaaggnccaaagccgagctgggtttttatttattgcttacatctcttctacactcactttttttttactcatccatatctccttactagcgtgccggcttctttttacaagtgtgcgaacggttttccttgattcatgacactgcctatacaccactccttcttccattgaaaaaaaactctgtaatccattcttctctagtataacacacccaactcttaattgaaggaaaatttgtacatgctgcttctggtaaaactcttccaacattaaatcctatcacacgtgaagtaattgctcaatttgctgttggtcactctgatgatctctatcgatccacttcagctgcacaaaaagcatttgatcattgaccatggcctaagatgactgcttatgaacagcaaatgatcttgt

SEQ ID NO: 221051 - DNA, 587 bp, Glycine max
gtctattagtagtggcattgttttttgtttttgctatgcatgcaggtttttcaggggctggtgctcagcttactcctacgttctacagagaaacatgtccaaatctgttccctattgtgtttggagtaatcttcgatgcttcttttacccgatcccccgaataggggccagtctcatgaggcttcattttcatgattgctttgttcaaggttgtgatggatcagttttgctgaacaacactgatacaatagaaagcgagcaagatgcacttccaaatatcaactcaataagaggattggacgttgtcaatgacatcaagacagcggtggaaaatagttgtccagacacagtttcttgtgctgatattcttgctattgcagctgaaatagcttctgttctgggaggaggtccaggatggccagttccattaagaagaagggacagcttaacagcataccgaacccttgcaaatcaaaaccttccagcacctttcttaaacctcactcaacttaaagctttctttgctgtccaaggacctcacacccttgatttagtttcactctcaggtggtcatacgtatggaagag

SEQ ID NO: 221052 - DNA, 581 bp, Glycine max
  unsure (1)..(581): unsure at all n locations
gagattgcaaaattctcttccgtttcatgattagggtttcaccgttacagtgaaacatggcaaaaccaaagcgaatctctctgcgtatctttgcgctgctcctcttgatttccacctcttcgtttcaccttctccgcgcttccgatgacgccgatgatgatgcgatcttctatgattcgttcgacgaggattttgaagaccgttgggttgtgtctcagaaagatgagtacagtggtgtctggaaacatgccaagagtgagggacatgatgattatgggcttcttgtcagtgagaaagcaaggaaatatgctatagtaaaagaacttgatgaggccgtgagtctcaaggatgaaacagttgttcttcagtttgaaactcggcttcagaatggccttgagtgtggtggtgcatatctaaaatatctccgaccacaggaggctggatggaaatccaaggaatttgataatgaatctccatattctatcatgtttggtcctgacaagtgtggtgccacanacaaagtacacttcattttcaagcataagaatcccaagagttgggagtatgttgaacaccatctt

SEQ ID NO: 221053 - DNA, 551 bp, Glycine max
gaatcttacaaggttgatgaaagaggattgaggtggttctacactggtgacatagggagatgccataaagatggttgccttgagatcattgataggaaaaaggacatagttaaactacagcatggagaatatgtgtccttgggaaaagttgaggcagctgtttctgccagtcccttcgtagacaatatcatgttgcatgctgatccttttcatagctactgtgtggcactcgttgtagtttctcattctgctttggagcaatgggcttcaaagcaagggattgcttattctgatctttcagaattgtgcagcaaagaagaaactgtgaaggaggtgcatgcatcacttgtaaaggaagcaaagacggctcgtctggagaaatttgagattcctgcaaaagttaagttgctttctgaaccatggactcctgaatctggcctagtcactgcagctcttaagctcaagagagagatacttagaaagacttttcaagcagatctctcagagttatatgcctcgtagactagaccaaaattggatctggttactcg

SEQ ID NO: 221054 - DNA, 532 bp, Glycine max
ctgacatggcttcttcactcattttttttactcatctctcgctccttttcttggccggcttcttttacgaggtgggaatggtttccttggttcaagacactgcaaatacagcacttcttctgccattgaagaagaacccgttaaaccatcagtgcaagtagaacacacccaactcttaattgatggaaaatttgtagatgctgcttctggtaaaacttttccaactttagatcctaggacaggtgaagtaattgctcatgttgctgagggtcactctgaggatgttgatcgagcagttgcagctgcacgaaaagcatttgatcatggaccatggcctaagatgacggcttatgaacggcaaaggatcttgttgcgcgcagctgatctgcttgagaagcataatgatgagcttgcagcacttgaaacttgggataatggaaagccttatgaacaagctgctaagattgaagttccaatgcttgttcgcctgattcgatactatgctggttgggcagataagatccatggtcta

SEQ ID NO: 221055 - DNA, 477 bp, Glycine max
tagtacaaagtgtatgaatggggcttatatctctcatatacgtgcaagagattctcagaggcttggggccattccttgtattctctgacgatagctcactcttcttgtgctatatataacaacacaactcaccctctcttcattccctacacatcacttctctttcctccttccacctagcagtggtgacaaccaaaccaagtgtcccctcctttctcttgttaacaggtaacagagttagtgagtaatgtcacgaggacaactaggagtgcttaatgcactctatgtggcaaaaacacaatggtaccacttcactgcttttgtgataactggaatgggattcttcactgatgcctataatcttttctgcattttccttgttacccaaattgtggggaggctatattacacatacataacgaaccccaagcctgatgctcttctcctatgtgcaagctactttgactgctgtttctc

SEQ ID NO: 221056 - DNA, 583 bp, Glycine max
atttctctttctctctttttttttgttttcaaaaaggctcctagttctgctcacagcagggggttctatgtgcttatgctacttgggatagcggttagcactatggatgctacctgtgctggtagcttctaccaagactttgatctaacactggggtggtgaccgtgctaagatattcaatggtggccagcttctatcactttccctagacaaagactctggctctggcttcaaatcaaagaaagaatacctatttgggaggattgatatgcagctcaagctcgttgccggcaactctgctggcactgtcactgcatactacttgtcatcccaagggccaacacatgatgagattgatttcgagtttttgggaaacctaagtggggacccttatattctccacacaaacatcttcacccaaggcaaaggcaacagggagcaacagttctatcttttggttcaccccaccagaaacttccacacttactctatcatttggaagccccagcccatcatatttttggttgataacacacccataagggttttcataaatgcttgaccctttggtgttcctttttca

SEQ ID NO: 221057 - DNA, 625 bp, Glycine max
ggccttggttgagtatttgcaccgcagtgacagagaggaaaaagaaacgcaaacaacgatggctgtgaaaggatcaccacaacggtgggacatgagattagttttgacaattactcttcttttaatctcggtctctgtttctgctcttcaacacgtaagtcacaaaaacattaatcccaccaccgttgagacaacccaaactagttttcttggtaaagtcgtgaactttttgtggagctcatctggctctggataccaacatacttggccggatatagaatttggatggagaataataacgggtacgataattggattcctgggatctgcatttggaaccgtgggtggtgttggtgggggtggcatctttgtcactatgctctcccttattattggatttgatgcaaaatcagctactgcaatctccaagtgtatgattacgggtggagcagcagcgacagttttctacaatttgaagcaaaaacatccaacacttgacatgccagtgatcgactacgacttggcacttcttttccaaccagtgctggtgctttgaatagcattggagttgccttcaatgtgatttttgctgattggatgatcacagtcttgctactaataattt

SEQ ID NO: 221058 - DNA, 580 bp, Glycine max
gggagttgaaggatatctctctcattttttgatcgatcattcatagcatagtgtgaaatgggagcgataccctaagaagaagaagaagaagaagaagaagatgccgaagaagatgggggtgaacacgaaggcggaggcggcgagggctcgtaagagcgcggcggatacggagcggaaggagaaggagagtcgagagaaggaggaccagtactggcgagaggcggagggttcaaagtcacgcgccgcgaagaagaaggaggaagaggccgaaaagagggcggaggcagccgcgcggaaagcggaggcgcgacggttggcggagcaggaggagaaggagctggagaagtcgatgaagaaggtggacaagaaggcgacacgggtgtcgatcccggtgccgaaggtgacggaagtggagctgatgaggcggagggaggaggagcatgcggaggctgagaagaaggcggaagatgctaataagcagcagagtcggacggcggcagaggaagagtacgagagaatggtgcttatttcgaacactattcgcgacgattcgatcatcgaagcaagaacattggatgat

SEQ ID NO: 221059 - DNA, 548 bp, Glycine max
cttggatagtaattaacctcactcaatttcgggatcacagaaaccaacaacagttcttgcactgaggtttcacgatgttgctggaacttgcacttggtttgtttgtgttagctttgtttctgcacttgcgtcccacaccaagtgcaaaatcaaaagcacttcgccacctcccaaaccctccaagcccaaagcctcgtcttcccttcattggccaccttcacctcttaaaagataaacttctccactatgcactcatcgatctctccaaaaagcatggccccttattctctctctccttcggctccatgccaaccgtcgttgcctccacccctgagttgttcaagctcttcctccaaacccacgaggcaacttccttcaacacaaggttccaaacctctgccataagacgcctcacttacgacaactctgtggccatggttccattcggaccttactggaagttcgtgaggaagctcatcatgaacgaccttctcaacgccaccaccgtcaacaagctcaggcctttgaggacccaacagatccgcaag

SEQ ID NO: 221060 - DNA, 606 bp, Glycine max
  unsure (1)..(606): unsure at all n locations
gtcagattttccgtcagccttctagggttttctcaaccgctctgaactaccaccttgacagcaccggacaacaaccctaaacttccatgggaattcaccgaggccaatcaagcaaaggttaaggagattttgtctcactatccatccaactataagcaatctgctacaattcctcttttagatcttgcccagcagcagcatggaggttggctacctgtttctgcaatggatgcggtagctaagattgtagaggttcctcccatacgggtgtatgaggttgccacattttactccatgttcaatcgagctaaggttgggaagtaccatctgttggtttgtggaacaacaccttgtatgataagaggttcacgaggaattgaagaagccttattgaaacacttgggagtgaagcgcaatgaagtaacaccagatggtttgttttctgttggagaaatggaatgcatgggatgctgtgtgaatgctcctatgattacagtggctgattattcaaatggatcagagggatatacttataattactttgaagatgtaaccccagagaaagtagttgagatagtagaaaagctgagnaagggtgagaagcca

SEQ ID NO: 221061 - DNA, 461 bp, Glycine max
gtagtgagtgactctgggttgtttttcttctcaactcaacaaacgtcgtcgttcggccgggtgcaatctttctccaatggcttcttctgcttccttaatcaactcgttgacttgctcttcgcctgcacccactcactactgttttgccttcacccgcaccaccgtcaccgctaccgccacgtcactgagactattcaacagccaccgttcgcccccactcaccacgaggatctccttgtcgccttccaccgttgtctgcaaagctgtctccgttaagccccaaaccgaaaccgaaggtctcaacattgctgacgatgtcacacagctcatatggaaaacgccgatggtttacctcaacaaaatcgtgaagggttctgtggccaatattgctgccaagcttgagactatggagccctgttgtagtgtccatgacaggattggttttagtattgataaatgat

SEQ ID NO: 221062 - DNA, 379 bp, Glycine max
atgaacactgcatggttcaaaattaaaaaaagaaagtgtaacacaaacccagtacacaacaagtagtggcgggcacatggcattgaatgtgcctatagcttctttatttggggtctctaatcacaccattttaagggaaaactattcatcctaatccatttagattggggtaaccataccctttggtgatgattcttctgaggccacacttgcaatatcaactttaacagatttcttggtaacaaagttacaatggtttctgatttctcctttttttccagtgagcacaccaatgttacccatcttaatcattgaagcctcaaaggcgtcaaagaaaactttctgggcactggtgaacctgttgacaatggggatggta

SEQ ID NO: 221063 - DNA, 505 bp, Glycine max
ctttttcacgcgacgccctagttcatttttcttctccgttctcttctctctctgttcttcagctcactctcattcattcaccatgacgaaacaacatgccaattggtctccttacgataacaacggaggatcatgtgttgcgattgctggagcagattactgcgtcatcgccgcagatacgaggatgtccaccggttacaacatcctcactcgcgattactccaaaatctcccaactggctgagaagtgtgtgatggcttcatctggctttcaagctgatgtcaaagctttgcagaaggttttgtctgctaggcatttgatttatcagcatcaacacaacaagcaaatgagttgccctgcgatggctcagttgctctcaaacactctttattacaaacggttctttccttattatgctttcaatgttttgggtggccttgacaatgaaggaaagggatgtgtcttcacatatgatgctggtggttcttatgagaaggttggatat

SEQ ID NO: 221064 - DNA, 478 bp, Glycine max
  unsure (1)..(478): unsure at all n locations
ctcacctattagaagtaacaaaagacccttcctctcaaaagaataaacaagtataaaaaagaaggcacttccctcaaacagaaactaccctctatctctctcttttcaagccttaaatgagtaaaaaagagtgaagaaaggaaagaaaggagcaccatttttggtttgagaaacataattagcaagagagttcaaatggggaagagagagtttaatggggtggtgttgatgatgctgtgtttgtgggtttgtggtgtcacagcctctgtgacttatgaccacaaagccattgtggttgatggcaagagaagaattttgatctctggctccattcattatcctagaagcacacctcanatgtggccagaccttattcaaaaggccaaagatggaggccttgatgtcattcagacctatgtgttttggaatggccatgaaccttctcctggacaatactatttcgaagataggttcgact

SEQ ID NO: 221065 - DNA, 513 bp, Glycine max
cattctgttcttacttaataattataatgggagaacacaattatttctggcagaatatagcaaatatactctccgacacattttgcgtgtctacagattctttccattgtatcatagtaaattaaataaatgtgtaagggctcaatcttcattgatacaagccctgtaatacatggggcaatattcagcacaatagcctgacttgactatgtacagtatacacagtctttgcgcatccaaattctcttatataaatctttgtttttggccaggcagtgcatgattaggccttggcaatcttttgaggtatacttgaacaaccagaagacaaggagcaccaattatgaacttcaaatattttttatatactgaacctaatatgatctaaaccacacgtatttggtaaattgctgcatcataaggtcctaaccgcataggactcacttgacagcttctttgcatttcctagacatttgttacatgatatatattgcctgtcaatgctgctccttt

SEQ ID NO: 221066 - DNA, 480 bp, Glycine max
  unsure (1)..(480): unsure at all n locations
aaaaaactctgctctgtcatttcactccaactctctctctctctgcaatatgaaacactcagatggcaactcctccacacagccacttctcacggccagggccgacgaaccccatcaaatccaccctcacccagcagaaacaaccgcagtttttagcgccggcacccctgacatagctccgatcaccggcgccggcgacttctatagggaattcatggtggagtcaaagaagctctggtacctcgccggccccgccatcttctccttcgtctcaaaggactccctcggcgccttcactcaaatctttgccggccacgtcggcaccattgacctcgccgccgtctccgttgaaaactccctcatcgccggcttctcctacggcataatgctagggatgggaagcgcgttggaaacgctgtgcggacaagctgtgggggcagggaagctggacatngctggagtgtacatgcaacgatcatg

SEQ ID NO: 221067 - DNA, 447 bp, Glycine max
aaccaaaaagaaattcttctactatttcatgttcccttcttgtgtgttttctaaaataaataagaagttgaataatggccttgcaacaattttttatagaatattctaaagcaactaaagcttttctgtcaacaattcaagtatcatacttcatatcgtaccaattctcctactgcaatttcatgtttcttgtgtgttttctgtgtcattcacagtcgcttttttatgtccaccccaagtccgtatcctatcttcggcaagggaggcctcttcgttccaattagttttgtaaatcagcaccaaaagaacacatgtttggaggatagtccctgatatcattcctaaccagattcccttgactccccagtcaagcttgtaacccaatacaagacccacaggaattccaaaaaggtagtagcatgcaatgtttacataggcaacaagagc

SEQ ID NO: 221068 - DNA, 482 bp, Glycine max
gaggctgctgatcagatgcatcttacagttcaccaacaaagaacatctgaaaatgatgaagagttagaccactcgaagggatcaagacctgtagatgatatagttgttgatgaccaggacagaccattacggacttctcagctgcatactaaagatgttcaagctaaacctctcagtggttctgctaggagttgcactaaagttcacaagaagggcattgcacttggtagatcagtggaccttacaaagtacagtggctatgatgaattagttgctgaattggatcagctgtttgaatttgggggtgaattattgtcaactaaaaaagattggcttatcgtctttactgataatgagggtgatatgatgcttgtaggcgatgatccatggcaggaattctgtgccatggttcgcaaaatttatatctaccctaaagaggagatccagaaaatgagcccaggtaccttgagctcgaaaaatga

SEQ ID NO: 221069 - DNA, 496 bp, Glycine max
  unsure (1)..(496): unsure at all n locations
cgcaagcaaaaagaaagaatcccatgcgaggagaaagatggaggggaaggagcaggatgtgtggttgggagcgaacaagttccccgagagacagccaattgggacggcggcgcagagccaagacgacggcaaggactaccaggagccggcgccggcgccgctggttgacccgacggagtttacgtcatggtcgttttacagagcagggatagcagagtttgtggccacttttctgtttctctacatcactgtcttaaccgttatgggagtcgccggggctaagtctaagtgtagtaccgttgggattcaaggaatcgcttgggccttcggtggcatgatcttcgccctcgtttactgcaccgctggcatctcagggggacacataaacccggcggtgacatttgggctgtttttggcgaggaagttgtcgttgcccagggcgattttctacatcgtgatgncatgcttgggtgctatttgtggcgctggcgtggtg

SEQ ID NO: 221070 - DNA, 395 bp, Glycine max
aagacccggggggtatttttgattttgcaaattaaattacacaattacagccgggcattaaacatgaattgggccttttccaacttaaaagccgaggataacattgggccttgacccgacacatgccccacctaaaaatcataattttacatttttacctacaaaaaacaaagacttttaatttttaaaagaaaaaaagagataaaccgttcttttttatgaaatgaaacccaaacccccaaacattgggttgatttttggtgggggggggggtccccacctggttaaacatgaaccctttgattgaatcacttggacttgaagggaaaggcccttattaccacccggtggtaaagtgcttcaaaaacttcccccataaatggtcccccccaaaa

SEQ ID NO: 221071 - DNA, 545 bp, Glycine max
atttcaggaagaaagaagtgcaatggacatcggaacctatggctatcctacaccagcggtgaaaaagattgagtcttactatgatgtgccagagggagtggatattcggggaagatatgatgcagagtttgcaaaaatcctcacaaaagatgctttgaaattcgttgctgacttgcaacgtgagttcaggaaccatatcaagtatgcattagagtgcagaagagaagcaaagaagaagtacaatgaaggggctcttccagagtttgatcctgccacaaggtacatcagagagcaagagtgggtgtgtgcacctgttccaccagcagttgctgatagaaaagttgaaatcactggccctgtggatagaaagatggtcatcaatgctctcaactctggagctaaagtctttatggctgattttgaagatgcactgtcaccaggctgggaaaatcttatgagaggccaagtgaacttaaaggatgctgtggctgggaccataagcttgcatgacaaagcaagaaacagggtttacaagctcaatgatc

SEQ ID NO: 221072 - DNA, 504 bp, Glycine max
atatcaaatttttagtattattgttttcattgctagtaaacatgaggcaaggtatatcattcaaaatatagctacaatgacgaactttattcttctcttccacgcacaattatatgacgtcccaggcccttcatgaaacgatgaagtgatggtaaaaagacaaagacaacttaggagaacaaacaagacagaatctaaaggacccaattattatgcataataaagaaccacttccttagttcaaacttcaaagctttgatgtttccctcgggtgatgcacgacaatgtaattataagcatccagagtgagaaaatcatcaagcattggtgacgtgcattggcgagtgaagatcttgcaagcctccttgtacattcccttcttgaacttctctgtccccacttccttttcaatcctagccatctcttctttaacaaccctaccaaaaagttctttgttcactttcactccaagaccatccccattgagcttcactccatacttga

SEQ ID NO: 221073 - DNA, 473 bp, Glycine max
gaattatttaaaatattcagaatcttgggtaccccaaatgaagacacatggcctggagtaacttcattgcctgatttcaaatcaacatttcccaaatggccatccaaggacttagcaaatgtggttccaaatcttgatgcagctggtcttaatcttctttctagtatgctttgcttggatcccagcaaaagaattaccgccaggagcgctgtggagcatgaatacttcaaagacattaaatttgtgccctgattccatatcttgatggcaaacgtgtttatagtaatattgtgcagaatttatgggttttgactcttcgagaaatgcgtgttgtcttttgctactatttttgcgacttgggggttgggactgagtcatacttctattttatggtccttatagaatgtttcagattcaacttgagtgattgattatattgcatattactttttctactaaaaaaagaaaaataa

SEQ ID NO: 221074 - DNA, 457 bp, Glycine max
agttgaaaatttaatatgcaatataatcaatcactcaagggggatctgaaacattctataaggaccaaaaaatagaagtatgactcagtcccaacccccaagtcacaaaaaaagtagcaaaagacaacacgcatttctcgaagagtcaaaacccataaattctgcacaatattactataaacacgtttgccatcaagatatggaatcagggcacaaatttaatgtctttgaagtattcatgctccacagcgctcctggcggtaattcttttgctgggatccaagcaaagcatactagaaagaagattaagaccagctgcatcaagatttggaaccacatttgctaagtccttggatggccatttgggaaatgttgatttgaaatcaggcaatgaagttactccaggccatgtgtcttcatttggggtacccaagattctgaatattttaaataattc

SEQ ID NO: 221075 - DNA, 552 bp, Glycine max
gttgttccgaagcttatgtacttcaagatatgtagaataatgcacgggatacgaccagctcactagtactgcttgcctgctcctttgattcttttattttttttttcctaatttatgcctttaagcctaatctctttttattatggggtaaccaaaataaaccccaatcacaggtcaattaccgaacaatctaaattgaggggaaaaaaatacgagtactaggatcctgtataatgtaacaatacatatgtcttagaaggaagaaaaagtgtaactatatctcacataaacggagcagctttatttctatctgaaacaaaaatagaacatgcttcatttactccattaacaaaattgacatgatgagacaaccttagcatctgacaaaattattgccaacaataatatttcctgatgtgaaaaatgaaatgaaaccggaaggcagctagttgacaacattaataaccatcttgcgagactttagaacggaccacctaaggctacggtaataggcagcttgaagtaatgccagggatagaacaaatatccatt

SEQ ID NO: 221076 - DNA, 518 bp, Glycine max
  unsure (1)..(518): unsure at all n locations
ccctacttgtgttcttgattatactctgttaaatattttttgcgtttcattgtcttataatgagcatggcctttgccgcagttaaagtgttcatgatattggggcttttagccaccgcgtgtgtagcacaagcccctgggcctgcacccacgcaaccaccatcaacaaccccatcaccgtccacgtcagcacccgccccatcaccaaccgcaaacacccctcctcctgcggctgcacctgcacccgcaacacccacacccacacccgctccttcatattcaactccaacaacagctccatcccaggccccaggcccaaccacctgctcccctcccgcgccaggcccatcaggcccagcaccaggcccatcaggcccggctccagaccaaccagactgcgagccttcctccgcagcgttctccataagcaagacatgcattgccgccactgctcttgtttgaacctttctcgccgtggctttggcttaattaattaaacctcttnccatgagaaatttt

SEQ ID NO: 221077 - DNA, 562 bp, Glycine max
gtacattgctggaggtgctacttataatttaatcagggttgctcagtggatgcttgaagcgccaggtgccacaagttacataggttgcataggaaaggacaaatttggagaggagatgaagaagaaatgtacacttgatggtgtaaaggttaactattatgaaatcgacaatacacctactggaacttgtgctgtttgtgtggttggcggtgaaaggtcccttgttgccaacttatcagctgcaaattgctataagtctgagcatttgacgagaccggaaaattgggcattagttgaaaaggccaagtatttctacatttctggcttttttctcactgtatctcctgattgcatacaattagttgctgaacatgcagctgcaaataacaagttcttcatgatgaacctttctgccccatttatctgtgagttcttcaaggatgcactgaataaagttctgccatatatggactacgtttttggtaatgagactgaagcatgacattttctaaagctcaaggctgggagacttgatatgttgaggaaatagcttttgagattc

SEQ ID NO: 221078 - DNA, 466 bp, Glycine max
atctcttgctgcaactgtttgacgctgttttccctagccggggggttaaaaaaccccacaccagttagagtgtggctattaaaaatcttctcaatgatatatagaaaaaaattcatagcagtaacagaaaaagaggaattactcaatgaaaatcaggcgtcggtgggtatgtgcagccaggcctttggatgataacattggctgcataacacccagctctaatgcattcttcaatgggcttatgcttaaccaattgtgaaagaaatcctccaactaaagcatctcctgctccatttgattcaactaatttctctttaggtaacgggatcacggggtaaatttttacttttccatacttggtaactcatacaggatctgcaccttgggttgattaccgtaattcttttatgtgtttaccatgcctttggcaactgagaaatttttaaagcttttacctcaacattat

SEQ ID NO: 221079 - DNA, 570 bp, Glycine max
  unsure (1)..(570): unsure at all n locations
ggttgactgaagttgtgtttctgggtcatctaaggcatccacatctcgtgaagctgattggatattgctgtgaagaagaacacaggcttctggtatatgagtatttaccacgaggcagcttagagaatcaactatttagaagatatacggcatcgttaccatggtcaacaagaatgaaaattgcagctggagctgcaaagggtctagcctttctacatgaagcaaagaaaccagtcatctatagagattttaaagcttcaaacatcttgttagactcggattataatgcaaaactttccgattttggcttggccaaagatggtcctgaaggagatgacacacacgtttcaactagagtcatgggcacacaaggctatgcggccccagaatacatcatgacaggacacttgacagcaatgagtgatgtgtacagttttggagtcgtgctcttggagcttctaacaggacgaaggtcagtggacaaagggcgcccacagagagaacagaacctcgtggaatgggccaggtctgctttgaaatgatccccganacttagcagaataatggatc

SEQ ID NO: 221080 - DNA, 541 bp, Glycine max
tgacttgggcctggtccaggctagttggtcctttgtgaacaaggatgagaatctactcacgaggctccagaacatcaacttgtgctttcactttgaggtggaacaacaagttaatggctacttcctaaatttctttggattcaatggaacagctggtgtttggaggataaaggctttggaggaatcaggagggtggttggagaggaccacggttgaggacatggacatagcagttcgagctcacttgaatggatggaagttcatcttccttaatgatgtcaaagttctatgtgagttaccagagtcttatgaagcttataagaaacaacaacatcgttggcactctggcccaatgcagcttttcaggctatgtcttcctgctatactaacttccaagatatcagtatggaagaaggctaatttaatatttttgttcttcctgttgaggaaacttatacttcccttctactccttcaccttggtttgcatcatactacccttgacaatgttcatacctgagtctgaactgcccctttgggtg

SEQ ID NO: 221081 - DNA, 502 bp, Glycine max
tggcaatgtaagctttgttgatgagcgatatcggtttagatatgaggttaatcctgacatgagatcaccgctagagaatgcttgtctatcttttagcgccaaaaatgaaaatggtaggcggttatgagggagtttttactagtgaatatttggagaagcctaatgggttaggatacaaaccttgcttgagttttagcagggattattgaacagcaagccaaggggttctgaaggataggagaaagtaccttatgggggtggattctggaggggtgaatcagcacaggacacagaaagctgatgcgctcttcttatgtatgcatattggagctgatctgttggtcctataacgcatgtaattgatgttggattggaagaatgagagcttatggatataggtgtgactttttctatgtaaagagctattaattttacttttgtacttcgatttagtcattgggttgggggatcactgtggatttcttctcatttttattattat

SEQ ID NO: 221082 - DNA, 491 bp, Glycine max
gctgggtggactgaaatcggtggagaactcgcacgatgattccgtgtgggcggtcacctgggtacccgcaaccgccaaccgaccaccgctcctcctaaccggttccctcgacgagaccgtcaggctctggcgctccgacgacctcgttttggaccgcaccaacaccggccactgcctcggcgtcgcctccgtcgccgcccaccccctcggctctgtcgccgcctcctcctccctcgacagcttcgtccgcgtcttcgatgtcgattccaacgccaccatcgccaccctcgaggctcctccctctgaagtttggcaaatgcgcttcgatcccaagggtgccattctagcagttgctggcggaggtagtgcatctgtcaagctttgggacacttcctcatgggaacttgttgccactctgtcaattcctcgtccagaaggacagaagcccacagacaaaagtggcagcaagaaatatgtgctatcagttgcgt

SEQ ID NO: 221083 - DNA, 592 bp, Glycine max
  unsure (1)..(592): unsure at all n locations
ggccggatcgtgatagcggcgatatnctggacaccgctcactgtcggggccgccttttttttttttttttgacgtttacaaatcatgcataaatgatacagaatcaaaacactgatacagcatgtacaaccatgcattttcttcaattcaaaatcaatttgtagacaaaagagtgaataacattccacaaagagtacaaatacagcacacaatatctaaatcatgaataatcatacagtgatatgctcttgtcatctgatacactagcaagtcgaccacctcgcacatcactccctccaggtggtctaaatgcgactccccatacctggtctgaatgattgctcattgtctgcacagatgccctcatgttaagatcccatagccttacagatctatcacttgaacctgtagcaatggctgccccatctgggctcacgtccacacacagttcccaactagcatgacctgacatggtcccaattaaagcttttcccttagcatcatacatgtggacgtttccatcatccgaagctgtaaacagcagccttggaacataaggagaataaacaagagatcgccaagcatgaaatga

SEQ ID NO: 221084 - DNA, 523 bp, Glycine max
ccaggcgaggagaaagatggaggggaaggagcaggatgtgtcgttgggagcgaacaagttgcccgagagacagccaattgggacggcggcgcagagccaagacgacggcaaggactaccaggagccggcgccggcgccgctggttgacccgacggagtttacgtcatggtcgttttacagagcagggatagcagagtttgtggccacttttctgtttctctacatcaccggaactggtatcaaccctgctcgtagtcttggtgctgctatcatcttcaacaaggaccttggttgggatgaacactggatcttctgggtgggaccattcatcggtgcagctcttgcagcactctaccaccaggtcgtaatcagggccattcccttcaagtccaagtgattcaatcaaacggttcatgcttaatcaagttgggaacaacaacaacaacaaaaatcaagccaatgtttgtgggttttggtttcatttcattaagaagaactgggtatctcttttcttctttttaaa

SEQ ID NO: 221085 - DNA, 472 bp, Glycine max
atatatatgactctggtgttatttttgattgtgcaaattaaattacacaatcacagccgtacatcacacatgagttgggcctcttccaacttaaaagcagaggataacattggcccatgacgcgacacatgcaccacctaataatcataattttacatctttacatacaaaatacaaagactttaaattttaaaaagaagaaaagagataaacagatcatcttaatgaaatgaaaccaaaacccacaaacattggcttgatttttgttgttgttgatgttcccaacttgattaagcatgaaccgtttgattgaatcacttggacttgaagggaatggccctgattacgacctggtggtagagtgctgcaagagctgcaccgatgaatggtcccacccagaagatccagtgttcattccaaccaaggtccttgttgaagatgatagcagcaccaagaatacgagcagggttga

SEQ ID NO: 221086 - DNA, 393 bp, Glycine max
gtagtgccacccacacccatcagggtttatgatcttttcctccaaatgctgaatcttccatgggcatttttcacccgatttctttgccagggttccagaaatgtttaattttaaacaaagatgagtacgactgaattatctaatatgaagcaacctcctgttccgctggcaaccctgattggccaggagctacgaaatggaaaaattgaaaaaccttttgtgaagtatgggcaggctggcttggcaaagaaaggagaagattactttttaatcaagacagattgccagagagttcctggggattcatcaacactcttttctgtctttgcgatctttgatgggcacaacggtatatctgctgctatttttgcgaaagaaagcatactaagtaat

SEQ ID NO: 221087 - DNA, 470 bp, Glycine max
caaactacagaatgagggaggaagtataacataatttatgcttggatccttgtactggagtataaaaattcttgaaaagataagacacttcaaaaaatctgaccacgtctaagccaatgaacactgcatactaggtactcaggtgctatgatttctacttaagaagcaacagggacctcaatatcggttgccaaaacagcagcaggacgggcatattcttcctcttcctttggagtgtggattgtgacaagatcaggaaggggagttttaggaccctgtttccctttaggatcccaatcaagcatgatcttaaccttgataccaagaacaccctgtcttaggaggacatgtttcactgccgagtcaatgtaatccttgactggttgtccagaagagatcatggtacccattcttgaattttcatggatttggctctcttggcccttaactattcaattacaattacctta

SEQ ID NO: 221088 - DNA, 561 bp, Glycine max
attaaaataattattcaaaatttagcaaaagaaaatatgttaggcaaagattgccccattatccaagattgtcactacactaatgacttggtttttcaattctgtatccatcaagaacacaatatatcattgcaatttactaatgcagaacagctacagttactcagctgcttaatgaattttattgactaaatgcaccaaacgcaaaatgttcttttttgttttgtttcctttcagagacagaaggggactactactctgcaaatcctgcactagagaatctcaatagacttcaacatgccattgtttgttcttcttaagttgtgaaagcttctcttcccaactttctcctctttgctcagcaaccttctttagtgtatcttggatcccaggcatcatccctttcagaccacagaaataaatgtgggccccattatccaggagtttgaagatttcatcacttgactcctctatcttatcctgaacatacattttgcccccatttttggtcttttggtctctgctgagggctcgatcatagcggaaattgtccgaatagtc

SEQ ID NO: 221089 - DNA, 490 bp, Glycine max
atgaacggtatttatacctgtctatgaatgcatgagttgcagcgggcaagcaaatatctctgcatcgtcacaataatgcacgtaacataagcccaataatcataatacatgtacttgtgcacgtgagcatcactgcttaaaaaataatgcaagtctcgctctgcaataaaaatatgaatgtcgcaacccacaaatgaagattctggtaggatgcatccattcttctataggaattaaacattgcttctgattaagcatcttctgatctttggacacacccaagctagtcaatcactcttatcttgttgtaaaccaacattttgtaggtaatgttctgcatccaaagctgccatgcatccagtgccagcagcagtaatagcttgcctatacttcttgtcctgaacatccccagcagcaaacactccctcaacactggtcttcgtcgtccccggcttcgtcactatatattcatcagaatccaattcaagct

SEQ ID NO: 221090 - DNA, 541 bp, Glycine max
gcggcagacaatgattggaggaatgtatgtctgaaacctctagtgttccttgtgttccgtaccatctcaacaatgcaacacaagcagtgataattaactgaataccaaagttgttattggaatgctttgaattccatgacatgtgatatctttctcatctttggaattgagtttaaggctagtttttgaggagtgagtgagtgagtgagtgagaaatgggttttgttggaggggaagaagccattcaagagcctacagggcatgatgagaggattcttgtttcggttcgtcttcgtcccctcaacgaaaaggagcttgcaagaaatgatgtttcagattgggaatgcatcaatgacactgccatcatatacaggagcaacctttcagcttctgacaggtcactctacccaacagcatattcctttgacagtgtgtttcgaacaaattcttctacaaggcatgtgtttgaaaaagcagctaaagaagttgctctttcagttgtcggtggcatcaacttaagcatttttgcatatggacaaac

SEQ ID NO: 221091 - DNA, 496 bp, Glycine max
aaaaataaaatgacttatattttggtctgggttttggaacttgttgactcggtaataaactcgagagtctaccgaatttacttagaatttataaagtttgctcagaatctactaaaaacagaatttactcaaaagtcaattcgcagagaacaagtcaactcggaagaatttgatatccatgcctttagggacacttcctacttcgctggtcgctcgctcctcaaactaatatcttcatcccatttacttttgaatagcttaggctgggttgtttgttccttaactcaggtgtgagggttcgtccatcttccacagtttgattgccttgggaaaaagtttgcgtaagggatgatagttttctcaactctacctccatataaatagaatctgatggctcccctttgaatagaaggaaaaagtatgtcctgtgaaccaatgaaacatttcacgcatcccagaattcaatgatctttctttgtagcccctggaattttga

SEQ ID NO: 221092 - DNA, 416 bp, Glycine max
ccttagcctcacttttatttattcatatactgcgacgattcatacggacactatatgaatccccacagtcttagtccccactacagagccgcctggatccacttacaacataggaacattcttagaataacacatgccataaacaattaaaacactactagactaaccactctctatattcctgaactcaacaagtgcctctttcattttaaccactctgaatttctgagacataaacaactacaacttgccaattaccggagattacattcttggattgatcccactactgctgtgcatcaccacccaattgagacctcaactctatgtccccccttgccggctcctcagtatcaaacaccgtcccaaatgccctgcgcattcgactccactctcggcactcttcctgacacaac

SEQ ID NO: 221093 - DNA, 529 bp, Glycine max
ctcattctcattcgttcactgtcactttttccaatcctaacactttcttctctctgttttccttcttcctcgcatcaatggagttggacggcgttctcctcggcatgtgcaaccctctcctcgacatctctgccgtcgtcgacgacgctttcttggaaaaatacggtatcaagttgaacgatgcgattctcgccgaggataaacacaaacctatgtatgaagaattggctaacaatcctaatgtggagtacattgctggaggtgctactcataattcaatcagggttgctcagtggatgcttcaagcaccaggtgccacaagttatatacgttgcatacgaaaggacaaatttggagaggagatgaagaagaaatgtacactagatggtgtaaaagttaactattatgaaatcgacactacacctacaggaacttgtgctgtttgtgtggttggtggagaaaggtcccttgttgccaacttatcagctgcaaattgctacaagtctgagcatttgacgagaccggaaaa

SEQ ID NO: 221094 - DNA, 498 bp, Glycine max
aaagaattaaagtagcaacaaatactctttcctacacttggcagaaaaaaaatggttcaacgggaaatccgaaggggtccctggacagaacaggaggactacaaattagtgtattttgttaacatgtttggagatcgtagatgggactttatagcaaaggtatcaggtttgaaggtggagggagactgtaaataggtttgaatagaacaggtaagagttgcaggttacggtgggttaattacctccaccccgatctcaaacgagggaagctcacaccccaagaagaacacctcgtcatggaccttcattccaaatggggaaataggtttgagaaccatgcagaaataattaaactataagctacctaccttccaatcatcattactcataattttaaattaattttttcctaccatacaagactattagtattaattagttctttggccttatgttttttttttatagaataggatatcaaaaagattatattaatta

SEQ ID NO: 221095 - DNA, 350 bp, Glycine max
tactctatccctagacaaggagtttcatttttgcagcaggctgtctcagaaaagaaggcacgctgaatatttgccccatacgggccagcaatgccaggggtcccccaacggtagccactgcacagaaatgcccctcaattgatgcggccgttgatgacatctctaacgccaatacttgcgacatggaacagtgaccacatgcctatttatgatccaagccataatcacaagccgaagcaaagtcttggcaagaaccttctgtttatcactgctgctgacaaacatgtctctgaggtcttcctagtgagcgtctccgtcatacacccccacaaaaactcgcaaacttggtg

SEQ ID NO: 221096 - DNA, 444 bp, Glycine max
gcgcgttgcatctgctacctatcatacatattttcgccaaaccgccgattccgttgagcgtttctaccgtagcgctcaggaaggaggcagtggctggtggtgttggttgtggtggaggtggttttgctgatcatttgtggtagagggtaggaaagaaaaaaaagttgaaaatgagttcagacagccgcagcaggagcagaagcaggagcccaatggaccgtaagatccgctctgatcgattttcctatcgtgatgcaccttacaggagagattcacgtcggggtttcagccgtgacaatctgtgcaagaactgcaagagacctggtcattatgcaagagaatgccctaatgtcgcaatttgccacaactgtggcctccctgggcatattgcttctgaatgtacgacaaagtcactgtgctggaactgtaaagaacctggccaca

SEQ ID NO: 221097 - DNA, 565 bp, Glycine max
catacaatattatgcattttcataattctcaatttttatcatgtatatgtaatgaggctttcaccatcgtccagcccccaagactggacaaaagaaagtttttgttttacaaaagaaaaaactgactaataattttccttccacaaatcatcagcatgttcagccatagtgtgcaaaacttaatggtttaaccgtttaatttaaacaagctgcactacagcaatgacccttagggcaccgttttgaagaagatcagcaagctcatcaaataacagggcagttcgccatccccatcccttaggagctttaggtagaagagtgcctgtttgtttaaagcttccaaacaccgtcatttctctcttggatgggacggtcaactggtagcgtgcagtcaccttttcccgcgagtcaacatacatatgcacctttctatgtatatcagttacctctgccttccgacggtgaagaaacaacccaagggttcgccgtccctgggggtcttcatcattaaaagcttgtacactgaccttccacagagaaccagcttagaaaacttttggagaat

SEQ ID NO: 221098 - DNA, 540 bp, Glycine max
cgagaacgaaagagaggaagaaaaaatgttcagcagtggtggcgctgaagccgaatcggaatctgaatctgagcgcaatagaatgggtgatgataaggaagaacagggctcctcgttcaagagctgggccaaacaaacggaggagagttatcagctgcagctcgctcttgctcttggactttcttctcattcagcttcttcttcggatcacccctcttcttcggcccagacgctcacgcaccggatttgggtagatggttgcttgcaatactctgataaaattatagatggattctacttaatccatgggatggatgtatatacatggactataagtactgatctgcagaatgttggtatgattccggcatttgaatcactgatgtcaattgaacctagcgatgactttgtaatcctagaggttgctgttgataaatctagagatcctggtttgagagaactgcaaaatatggtagcaagtctttcaaataactggattaccacgaaagatgcaactgatcagcttgcaaatcttgtttg

SEQ ID NO: 221099 - DNA, 579 bp, Glycine max
gaaaggaaactttattattatttcttttaaaagataaaaatgggtcttatatgtataaattagaatcccagtgtcatacgattattataggtacatccaaagcaaatagtaatatatatgacaatgtgagtaatgattatataaatagcatatacaacaaaaattcgtaggttactctataaaacggtatatggtaattcttcagcaatttcctgaataaactggaatcccatttatttttctgtacaatattgctgtttcttggctgtatacagggtgaagattatcagggtaaacttgttcaccctttaacatcagcaattatttgctgcaaacatttcataacataggagaaagaaggtcgtctccagtgttccgaggcccagcagagctcaatcaaggcagccacttgaggattcacatgccctggaatctctaaccttttgcccataaaaccaacagatgcgacaacctgtgaaggatttaatagtctccatggctggtgcagggtcactagttcccacaggatacagcaaagctgaatacattacatttttcgttgacagttttctcaatgac

SEQ ID NO: 221100 - DNA, 500 bp, Glycine max
actaaacaaaaaaataaagaaaatttacctaaatgccttcttcttccaccaccatagtctccaaatgcgtgatccaccccgaccagaaatcaaacatgaaacccttgagactctctgtttctgaccttccaatgttgtcgtgtcactacatccaaaagggcgtgttactaaccgctccgccctcgtctttcgaggatatgatactctcttttaaacactctctttctatcgcgctctctcactttccggctcttgcgggaaggttagagacagattctcatggttatgttaatattgtctgtaacgacgctggcgtggattttatccatgctaaagcaaaacacctgactctgaacgccgtcgtttcaccgtctctcgttgatgttcacccttgcttcaaggaggagtttttcgcttacgacatgacaatctcctacgccggccacaacacccccctcgccgtcgtccaggtgacggaactcgccgacggcgtcttcgtc

SEQ ID NO: 221101 - DNA, 531 bp, Glycine max
gtgcaagtgatcttgaaaggaacaacaatggtgaagtctataaactttctcctgcttctgtctctactagcctttgttccctcctgtcactgcaaaaagaaaataggaggttacctctacccttaattttacgacggttcatgccccagagctcaagagattgtccaatccatcgttgccaaggctgtggcaaaagaaccccgcatggctgcttcgttgctcagactacatttccatgattgttttgtcaagggctgtgatgcatcggtgttgctagatagcagtggaactattatcagtgagaagaggtcaaatccgaaccgtgattcagctcgaggatttgaagtcattgatgaaattaaatctgcactagagaatgaatgtccacatacagtgtcatgtgctgacattatggctctagctgctagagattccactgttcttaccggtggaccaagctggggagtacccttgggcagaaaggactctcttggtgcgagtattagtggctccaataacaacattcctgct

SEQ ID NO: 221102 - DNA, 442 bp, Glycine max
aattccatgttccagctatcaattcaaatttgaagcctgaccttgaaacatctaagcacataaatttaatttaaacacacagcaacgctatcaaaaggatattcaaggaacatcacgacactgcttatgacttcctcaactcaccacagaattgatcaattgacactcctgttttttaatgcagtaaacaagaggaagaaaagtaaaatgtaggtgcaactttcacacgtgtcacatgacaatgatatcactacatcacttgttaattcctctgcagttctttctgatctctccccttgaccctgttaaaggagtaatgtttcccatcttaaccatggacttggcaaattgttcaaagaaaagatcgttgttttctgcatactgcttcactaaatccgctgatacttgattttttgtcaagagaatttcgtcagaacttaag

SEQ ID NO: 221103 - DNA, 513 bp, Glycine max
agcagaaaattaaaattttgtagatgctgtcggattaagcgcagcgacccaagaaatgtaagtttaatggtcaacaaattgtataatttgtatggttgttacacggcactaggccgttcttctgttccctacatacacgtcggggtaattacacgaatgctagtcatgaagagagtaagttacagttgtacaaggttataatcacacgtccataaataaaattagacgaggtattcagaccatgtccgcgatgatatcattatgtccattgtcactccaaccagatccagctcgaaatttacatacagggcatgtcccttgttggcgcagccagggatcgatgcaatttgcgtgaaactgatgcaagcaaggtaagcttcgcagtacgtcaccaacattaacttgctccaagcatacactgcaagagaggtcatcattagaggctttcatgctcccaacagcatttgaattatcttgcttcttcttagcaagagcggaagatgatgcttgttg

SEQ ID NO: 221104 - DNA, 518 bp, Glycine max
tctttataccccccctctcttttttgcgttcattctgttttcctgttgaagtctttccctagccaatggccaccgatcgtttgacccgggttcacagtctccgtgagaggcttgatgaaaccctcactgccaacaggaatgaaattttggcccttctgtcaaggatcgaagccaagggcaagggcatcctgcaacaccaccaggtcattgctgagtttgaggaaatccctgaggagaacagacagaagctcactgatggtgcctttggagaagtcttgagatctacacaggaagccatagttttgccaccatgggttgctctggctgttcgtccaagacctggtgtgtgggagtacctgagagtgaatgtgcacgctcttgttgttgaggagttgcaacctgctgagtacctgcactttcaggaagaacttgttgacggaagttctaatggcaactttgtgcttgagttggactttgaccattcaatgaagccttccccgcccactcttaacaagtaa

SEQ ID NO: 221105 - DNA, 492 bp, Glycine max
gaagaaggcatttcttaaaattgaattgatgggtaaaactacgccaattcgaagcttttccaatcaagatccaaatcatgcaacaacaaaaaaaaaagcaacttttttttttccttctctttctctcctcttatcgaaagcttaatcacaaaactaaaatcacggacattatttataaaactcaagtgcgacaaactccaaatgagaaagaaaaagccggttcctccatttctttatccaactctttatcctcagtttactcagcagcaaggggcacagactcagccaatttgcggtacttgagagcatagaacatctcgagatagcggcggctctcacggcggtcaaggttagacacatgcttccagaagccatagacaccggtgagagtgagaagcctttgagagtaaatttgccatgtgtacttctcttcaatacgctggaaaccaacctttgagatcttgtcccagtgagttgggtcaagcttgcact

SEQ ID NO: 221106 - DNA, 277 bp, Glycine max
cacacattcacagtatactctctctctctttgtcgcttggatcactgatctcatctcaattgtcagatatgtcgacatctgataagccagaagtggtggaaaggggtagcaaggatgaaaaacacaaggaagatgatcaagaggaggggaagggtggattcattgagaaggtgaaggatttcattcatgacattggtgagaagattgaggaagctattgggtttgggaagccaactgctgacgttactgcgattcacattccatcgattaatcttca

SEQ ID NO: 221107 - DNA, 333 bp, Glycine max
tgtacacataaatctagctccttttcctttttacctgggtaaattctacacatagggctgggaggatccaactttaacctgaagaacgtattcaaaacgtcagctgcgccaaccatgattcgcggccgtgggcggagcttctaccgccagatctcaactgatgcgatcgttgaacagagacactagcacggttgcggcgcctttggaagctttctctttcagaggaagtgcactcttccataggtaaaggatcaggacttactatataaaaaaaacgaagcctacgacaccattaacactcgagttactagttactggcgaattacaaggccc

SEQ ID NO: 221108 - DNA, 483 bp, Glycine max
  unsure (1)..(483): unsure at all n locations
aaaaagctcatgctgaggctgaaattgatcttctcaagggtaacattgaatcatgcgaaagagaaatcaattcactcaaatatgagcttcatgttatttccaaagagcttgagattcgcaatgaagaaaagaatatgagtatgaggtctgcagaagctgctaacaagcagcacatggagggtgttaaaaaaattgctaaattagaggcagaatgccaaagattacgtggtctagtgcggaaaaagttgcctggtcctgctgcacttgcacaaatgaagctagaagttgaaagtcttggtcgagaatatggagaaacacgattaaggaagtctcctgtcaaaccttctagttctcacatgtccacattgcctgggttcctcccttgataatgcacagaaattccacanagataatgaatttcttacagagcgtttattggcaatggaagaagagacaaagatgctgaaagaagctttggcaaac

SEQ ID NO: 221109 - DNA, 539 bp, Glycine max
  unsure (1)..(539): unsure at all n locations
cttctttcctctttccactcttggtcttatcttcttcacaatcccacaaccactccttgttataaatcagatttttttttttctcttcttacagatccaaacatggccgaagaacaccgatgccaagctcccgaaggtcacagactctgctccaacaactgcggcttcttcggtagccccgccacaatgaatctctgttccaaatgctacagagacatccgtttgaaggaagaagaacaagccaaaactaaatccacaatcgaaaccgctctttctggatcttcctccgccaccgtcgccgttgcctccgccgtggattctcttccggcgccggttgaatccctccctcaaccgtcggtggtgagttcgccagtgtgnngccgcaccggttcaggcgaaccggtgcggcgcgtgtaggaagcgcgtgggattgactgggtttaagtgcaggtgcggaaccacgttttgtgggactcaccggtaccccgagaaacacgcgtgtggcttcgatttcaggcggtggggagagaggagatagc

SEQ ID NO: 221110 - DNA, 533 bp, Glycine max
taaaaataaagctaaatcatagtagtgaggagtgactagtacaaacagaatccaaagcttttttttcttcttcttcttctttctaacgccatgtctgggagccaccaagagcagccactgttagagaactcgttcatagaagaagacgagccgcaagaaacagcttatgattcgtcggagaagatagtggtggtcggagtcgacgagtccgatgacgaggagaattgggggagagtgccccgattctcgtggaagaagctatggctgttcaccgggccgggctttctgatgagcatagcgtttctggaccctggaaacttagagggggaccttcaggcgggtgccattgcagggtactcattgttgtggcttctgatgtgggccacagcaatgggcctcctgatccagctcctctcagcgcggctcggcgtggccactgggaagcacctcgccgagctctgccgagaggagtatcctccgtgggcccggatagtgctctggatcatggcggaactcgctctcattggctccga

SEQ ID NO: 221111 - DNA, 541 bp, Glycine max
attaattgcaagaatggcacttcgttgcttggtgatgtccctttctgttctcttcactcttggtcttgcgagagaaagccatgccagagacgaagatttttggcatgctgtttggccaaacactcccattccaagttcattgcgagatcttctaaagcctggccctgcaagttagttttgtgaattatcaactctagattcttgattatgggtttatatcttcctagaatgctcaaggttaccccataattggaatggaaaggttgaacgaagaaagagaataaaataaaaagaaaagaagaagaataactatatataaattaccttttattttaaacactccagcacctttttttatctatttatatcatatgatatcataaattctattatatttatattgttctatttatttactcaacttttagtatttaataatataataagtatttatcaaatattttcctttaacaaaacgaagaaagaaaatatatttttatatatgaaaaataaattttgtacatctcttttggtgtttata

SEQ ID NO: 221112 - DNA, 453 bp, Glycine max
gatcacaggatgatgctcggtttagggggggaagcaaatcttatcaatgcacatacgtaggttgaaattttacctctagcaatctagctagagaaggttgtacttgcacaacacacagcacatgataatttattttatacacaatctcattctcatggggctcaagatgcatggactaattaagcaacaatgttggtctgataggcagtgtccacagataaattgggtacccataaaatggccttgcttccaaggaaatggcaaacagggttagttccaggatcaactcccataagttgatgaagcatttgatgattcattccaaaagtatttgagtggcaaatagcaagcgcctgagtttttggttcctcaccagccaccaatggaaccatgaaagctgttgttttacggacttcatggcaataaaaaactgcagttttgaaatttagccta

SEQ ID NO: 221113 - DNA, 362 bp, Glycine max
aaaaaactctgctttaccatttttctttttttctctctctctcaacaaaaggaaggggtgagggtgggtactgctctacacagccacttctcacgggcagggcccacgaaccccatcaaatacacccttacccagcagaaacaaccgcagtttttaacgccggcacccctgacatattcttctagcaccggcggcggcgacttttatagggaattcatggtggagtgaaagaatctttggtacctcaccggaccctacatattttccttcatctaaaaatactccctctgcgccttcacttaaatctttgccggccacgttagtaccatttacctctccgccgtctccattgaaaaccccct

SEQ ID NO: 221114 - DNA, 415 bp, Glycine max
taccgcacgcaaaaagaaagaatctttttcttttataaaaattgaggggaacgaaccgggcgggggggtgggaactaacaagttccccgacatacatccaattaggacggcggcgcatagccaagactacagctaggactaccaggagcccgctccagcgccgctggttgacccgacagagtttacgtcatggtcgttttacaaagcagggatagcagactttgcggccacttttatgtttctctacatcactgacttaaccggtattggagtcccccgggctaagtctaagtgtaataccgctgggaatcaaggaatcccttgggccttcggtgggatgatcttcgccctcctttactgaaccgctggcatcttagggggacacataaacccggcggtgacattttggctgttt

SEQ ID NO: 221115 - DNA, 567 bp, Glycine max
aaagacttctcgggtaccatcacattgttttggtccaagtctctgtccaatcgaattttgcttcttgctgctctctctgagggaacaactgttgtagacaacttgttgtatagtgaggatattcattacatgcttggtgcattaaggacccttggactgcgtgtggaagatgacaaaacaaccaaacaagcaattgttgaaggctgtgggggattgtttcccactagtaaggaatctaaagatgaaatcaatttattccttggaaatgctggtactgcaatgcgtcctttgacagcagctgtggttgctgcaggtggaaatgcaagctacgtacttgatggggtgccccgaatgagagagaggccaattggggatttggttgctggtcttaagcaacttggtgcaaatgttgattgctttcttggcacaaactgtccacctgttcgtgtaaatgggaagggaggactttccttcggaaaggtgaaactgtctggatcagttagcagtcaatacttgactgctttgcttatggcagctcctttagctcttggtgatgtggaaattgag

SEQ ID NO: 221116 - DNA, 430 bp, Glycine max
  unsure (1)..(430): unsure at all n locations
cacattcaaagtcaaaccttggtgttgttttgagagagaacaatgaccaaaaaagagatgaggtcttgttgactcatgtggagctgatagcacagggattggaaaaggtggaaggtgatgagggtgttgagaatagtgagttttgggagaagccagatgggttgggatacaaaccttgcttgagttttagcagggattattgaacatcaagccaaggggttctgaaggataggagaaagttccttatggtggtggattctggaggtgtgaatcagtacaggacatagaattgtgatgcagttgtcattgctaggatacttggagctgctttggttgtnactatatcgcatgtaaatgtcatttggtgtgatgaaagagagcttggggatatatgtgagacggagcacatgtagagagctcttgccaatga

SEQ ID NO: 221117 - DNA, 524 bp, Glycine max
aaacaatttgcccaattgtttgttatgtttaatatgagatttgtatctcaagattgggtggggtcatgtgcactaatacttctggtgtcatgcacaacatactcatcagcttctttggggaaacctgagaacaacataaaaacatctgtttttagatcacccaacattgagctaggtccagggttagtttcaaacaaattttattttgatgttgactttccaagaggccatattgcactcaagagtttcaatgctgaattggttgatgagtcagagaaatcagtgcctttccaagaaacctatctccatcactggcttataataaaataccaccagccaaaaaatgtgacacacaataaccaaacagatattgcttttgtgagaaacaatggcttttgccaggatggtactcttatccagtattttggtcttggatcagaaacaagacgaaccgccactgatattccagacccttttggaatagaagatgcagacccttcacaaattccatatggatatgatga

SEQ ID NO: 221118 - DNA, 459 bp, Glycine max
acttactatgtttatcatttacagagtacaatcaacacacgggatcatgcatttcagataagaaccagctattcttaatctgattaattactatatattcttcggcgtgatgaaaaatatgttgacaggatatatatctaaagatgtgcgactatagtataatacattaatactagacctattattacaagactcagagctggctttatttttcatcacaacacatattgacttatatagataccatataatattatagtctcttggatccacttccaagatgaatttagttaggacacataataatgtcaaaggtggtgttggtgtggcagttgttctgccaccaagatgtagaaaagccccattactccactgtgcatttcgctgatgctgtagataatctctagagttaggggttcaccatcttttattttgatagtacctggtcgagggtaacat

SEQ ID NO: 221119 - DNA, 543 bp, Glycine max
  unsure (1)..(543): unsure at all n locations
nnnnttggctgtctcagctcgttgcattcngnannacnnnttnnnnggttaanagccgcgagagctcgtaaggctcgtacattctctctatgtggcgttatgtgattggctctttttatgtttttgcataaacctcctccttttagggtgtgggggccatatcaatataaacgggatggtcatcataagaataacgcagcttcatattacgacttcaccaatacctgaaaatcaacactgccctacccaccctcgcgttaactcgaagccgccgttttcctgatatcccaaggtaaagccctctccctggaatcccaaatcatttgacttgcggcaggcaacccacttgctcttctgaaatgggaaggctcataccctaacctcccctccatcctcctctattgccacaccagacctcgacccatcggagctacttcaagtggacccaccactccctttaatgcccacctagacatttccggccgcattttctccccaggctctcacgacatgaagtgcgtagggatgcactcctcttttagg

SEQ ID NO: 221120 - DNA, 481 bp, Glycine max
cgagaaacgtccatccaaaattgcgttcctaaatcgccgctaccgaacacagccgtagacttttaattcattccgctgcgtttctttctctgcacttcaaagttcaaaccctagcgaagcatccactgtcgccgtcgcacactcgcacgccgctcacaggtttatgggctacgctgatgtcctgaatttgttgttggccgtggtggtttggtgcactgcttacgttactgttgtagttctcgcttcctttcgagccgtttgcactttctgaaaccttgcaatttcattgataacatgggttatgcacagcttgtcataggtcctgctggtagtggcaagtccacgtattgctcaagtttgtatgaacactgtgttgctgcacggcgatcgatacatgttgtgaatcttgaccctgctgctgaaaattttgactatcctgttgcgatggatataagggaactcatttccctagatgatgtta

SEQ ID NO: 221121 - DNA, 496 bp, Glycine max
cacaacaacactctctcttctcgctcttggcttttcgctcttcactcactctcattcattcatttccaccgttcatggatccagtaagcgtgtggggtaacacgcccttggcgacggtggatcccgagatccatgacctcatcgagaaggagaagcgccgtcaatgccgcggaatcgagctcatcgcctccgagaacttcacctccttcgccgtcatcgaggccctcggcagcgctctcacgaacaaatactccgagggcatgccgggcaaccgctactacggcggcaatgaatacatcgaccagatcgaaaacctctgccgctcacgcgccctccaagccttccacctcgacgcccaatcctggggcgtcaacgtacagtcctactccggctacccggtcaacttcggcgactacaccgccgtgctcaacccccacgaccgcatcatggggctagatctacgctctcgcggccacctcacccacggatactacac

SEQ ID NO: 221122 - DNA, 434 bp, Glycine max
tttcttttttttttttaaaggaaatgaattttgcagcactgtatgtatttcaatacgttaagataggaaaaaaaatatgatatcaatcaggctaacaaaattaaacatgaaatcaaagacaaagaaactgcaaacttttgaattgaaacaccatggcgataaaccctatcactcccaggaaaggaagacacatatttcctttttctacatttctgcactttgagtcgaacttgagtgacacaatttactagaaagtggtatgggtgaacctaatccttgaacttcatttcagataccaggaagccaggcatgacaaacaaggcagataacttcttaacatcagctttgagatcttcaatagccttgttgttgacgagaccctagttgaaatccttgataagtttgccatgctccttttggatctccagtgtgag

SEQ ID NO: 221123 - DNA, 489 bp, Glycine max
ctgactcctatagtttcctctgctaattttatattcccgttttccttcactcttgaaccccgattcatttccaccagcacaagaagcatggctgcaatatcaataccttctcacatgaaagcttggacatactctgagtatggaaaatccaaggaagttctcaagtttaatcagagtgtggctttgcctgaggtgaaggaagaccaggtcctcatcaaggtcgctgctgcttcccttaaccccattgatcataagagaatggaaggctatttcaagaacagcgactcccctttacctactgctccgggttatgatgttgctggagtggtggttaaagtgggaagtgaagtgaagaaatttaaggttggggatgaagtttatggtgatatcaatgtgaaagctttggaatatccaaaggtgattggttctttggctgagtacactgctgcagaagagaggctattggctcacaagccacagaatctgagc

SEQ ID NO: 221124 - DNA, 419 bp, Glycine max
gaagcccatacttgtgggagatagatggcacgcttgtcactgctcattttcgcgttctgcgccgtcgccgtcgccgtcgcgggctcctccttcgatgatgccaaccctatccgtttagcgtcggacttggagtcgcaggtgctggacgtgatcggacagagccgccacgctctctccttcgccgcttcgctcgccgccacggcaagcgctaccgttccgtcgacgagatccgcaaccgcttccggatcttctctgataatcttaaactcatcagatccaccaacaggaggtctctcacctacacgctcggcgtcaatcattttgctgactggacttgggaggagttcaccagacacaagctcggcgctcctcagaattgctctgccacgctcaaaggcaaccacaggctcaccgatgct

SEQ ID NO: 221125 - DNA, 400 bp, Glycine max
ggacttaccaaataaactttactccattgggactgaggataactcaagtgtgcgcagattttacacagcacgctatccttacattgctagagattggggagcataacacagtttataatttctatgatacctctatgtgacaaatgatttacagtacgattttgtaatgtgattcagctcaaggagaatgaacatcccaattccaaacttattttacagataaacatcaacatatactgtaaatttttatcgcagtacaatgtttcaccctttaagatggacgatacgaagcatgacgtgcaaggtgcagttacacgggcatatcgggcaccacatctctctgcatacatttaagccacaacaggataagatgcacaaggtgcaacaccgcacatattct

SEQ ID NO: 221126 - DNA, 373 bp, Glycine max
aaattctcctacaccgacaaattatggatctttcaccacaagaattcattttccgggcgcccgctccccgatattcccatccccacacacctcccattgtactcttactgcttccaaaagttgtcacagttccatgaccgtccatgcctcatcgacggcgacaccagcgaaaccctcacctacgccgacgtcgatctctccgctcgccgcatcttcgccggcctccacaaaatcggcatctgccagggtgacgtcatcatgctcgtcctccgcaactgcccgcagttcgcactcgccttcctgggcgccactcaccgcggcgccgtcgttaccaccgccaaccccttctacactccggaggagctcgcgaagc

SEQ ID NO: 221127 - DNA, 476 bp, Glycine max
gcaacaactttctgatttttaattgctcatgctgtaatacggagtgtggtctccgagatatatacaacattatacgttacacatgaataaattcatacaatacttgcattatatatattttgagaacgagatataaaattggaacaaaaaccacaactggaagggcctgtggtgcggtaagtaaaacagccacgattttctattgtcacaaggacctaattggccaccactaaaccttctttaagtcttgcagtgaatacctttcggataattttgccggagggtggtttaggaatacagtacgggaaaaaaactctacctattttcttgtaaaataccacctgttgtgaaatgtatgtctttatttcatccacgggaatcttagaaccatttgaccttacaacaaatgcacctgggaattttttctgcaggttcatattttatacctacaacggcagaatcagacatgtttgggt

SEQ ID NO: 221128 - DNA, 510 bp, Glycine max
  unsure (1)..(510): unsure at all n locations
ctcagccgctcgagccgccgttcagtttcaatcgctgccaagtgctaacaaaggcctgtgagtctctgacaccaacgcaactctctctgctacatacacgtgtgatcgcagttttgaaggagatggtgaacgtgatggagtggcagaagcagcgttggcaaccgaatgggaacgcggaaatgatgtacgtgaaagtgatgaccgacgaacagctcgagactctgcgcaaacagattgcagtttacgcaaccatctgtgaacaactcatcgaaatgcacaaaaacatctcctcgcaccaagatcttgcagggattaggctggggaatatgtattgtgatccattgttggggtctggtgggcacaaaatagcttcaaggcagcgggggactccgttcgctatgcagctttagattcttgagcgaatatttgatcaagggaactggaacccccaccaaggaaaagatcanggagatcactaatgagcttcagcggcatggccagatttctgag

SEQ ID NO: 221129 - DNA, 531 bp, Glycine max
ctggttcagacggaatcactgatgtccccatttttcttatacaggtgacccgtttgaagtgcggtggtttcatcttggcaattcgtttcaaccacgtcatggttgacggagttgggctcattcatttcacactcaccgtggcagggatagcacgcggagccatgaaggagcctccattccaacccgtgtggagcagggagcttctcttcgccagggatccgccacgtgtcaccttcaaccaccgcgagtacgaacaactcacagactccaacgatgccgtttcaacagacttcgagcagcgttccttcttcttcggccccaccgaaaccgcctccatccgcgccctcctcccccgtgacctcgaccaacgcgccacaacgttcgaggtgctgacgtcatacgtctggcgctgccgcacgaaagcgcttcaaatccctccaaatgaagatgtgagaatgatgtgcatcgtcgacgcgcgtggaaagttcgatccttcctttccggcggggttctacggcagctgcttcgcgt

SEQ ID NO: 221130 - DNA, 529 bp, Glycine max
attgttaacattcaatttttatttggcacacaggggtaatactccaaggttcaagtaacttgataatacgtaaacagcactggatgagtccaaccaaagatctcatgtcataattaattaattaattaattaatgaagttgcttctgaagcatgcatgttatgatccaactctttagcaaaggctttcatgacttggctaggcaagcaaatcaaaaccagaattccttcttcgcccttggcattctgactcggcacatgaaagttcaccgcagggaaagcaccagcaccagcaacagccattccaccatacagcgcattcccccaaccaaagtccaaatttctgaacccagcctccgtcgtatccaacaccagacacgaccttaccacagtgaacaaaggccttccctcactcgccatcaaatccgccaccgaatcaatatactcttcgctcaccttgccgcgcgctttctgtatcaactgcaccgcgtactccagcggtttctcgcagagatctccggcgcccgtcac

SEQ ID NO: 221131 - DNA, 583 bp, Glycine max
  unsure (1)..(583): unsure at all n locations
gcgttaaggatggtgtttaattgcttaagcaaaaacatcctccttttagttttgttagccatagcaatagaaacgggatggtcatcagaagaagaaagcagcatcatatcacgattccagcaatacctgaaaatcaacactgcccaacccaccccgcgttaccacgaagccgccgatttcctgatatcccaaggtaaagccctctccctggaatcccaaagcattgagtttgtggcaggcaagccacttgtccttctgaaatgggaaggctcaaaccctaacctcccctccatcctcctctattcccacaccgacgtcgtcccatcggagcactctaagtggacccaccaccccttcagcgcccacctcgactcctccggccgcatcttctcccgaggctctcaggacatgaagtgcgtcggcatgcagtacctcgaggccctccgactcctcaagtcccacaacttccgccccctccgctccctctacctcgctntctcccccgacgaggaaatcggtggccacgacggtgccgagaagttcgctgactcctctatcttccaaagtatgaacgttggcgttg

SEQ ID NO: 221132 - DNA, 557 bp, Glycine max
  unsure (1)..(557): unsure at all n locations
aaaagaagagagtacagatctgtttgaccaaaacctcttacaaacacatacaaatcagacagaagactaaaagagtgaagagaacaaacagagcaatggaaggaggaggagctgctccgccggccgacaccgtgatgtccgacgcggcgcctccgccgcagcaagcgatggctatggggatcgagaatattccggcgacgctgagccacggtggcaggttcatccaatacaacatattcggaaacatattcgaagtcaccgccaaatacaagccacccatcatgcccatcggaaaaggcgcatacggcatcgtttgctcggctttgaactcggagacgaatgagcacgttgccatcaagaagattgcgaatgcgtttgataacaagattgatgcaaagaggaccctccgtgaaatcaagctgcttcgtcacatggatcatgaaaacgtggttgcaatcagggatatagtgccaccacctcaaagggagatattcaatgatgtttacattgcatatgagtngatggacactgaccttcaccaaattattcgttcaaac

SEQ ID NO: 221133 - DNA, 480 bp, Glycine max
atcagttggtttgagcttatgaattggacaataataatatgaagcaaataagccaatacaaataccttacgattgttccagtctaccaatcatgtctctgatggaaataattcaactccaagatcatctggtttcagatgatagatatatatacacaatgaaatcccttgatctatggacacaaacatcacacgatccaaatccaatgacaacaagactatcactactactgctgatactcagggttaaatgctagagcctctcggtatatcagttctttcatctgttcctccgtcaaagcatgttgttcaaagtcaaagttgaagggagtcatgcacactggttcatcactgatgtcatgcagagatgtcaagtacgggtgcgccagtgcatcttcaacagtaatcctttttctaggatcaaaaagtaacattttttcaacaagatctatagcttcaggatggacatgtggaaactttt

SEQ ID NO: 221134 - DNA, 379 bp, Glycine max
ggaatcctattttccggccatattttcggctgcctgcaattccccttcaccttccgaactcaatcaatcttttcaattcgaagctgttgctatcttttgcagcgatattggagcagagagagggaagatggcaagtcaaagcggtgcctctagaaggagtatttcgtcgtcgacgaggagagcctctgaatcaggggcgcctcgaaaatcaatttcctcttcgcgacctttggcattggccggagagcggactgtgaaatcattgcgacttacaaaggccctgacagtacctgaaacaacaactgtctatgaagcttgccgtcggatggctgcccgtagagttgatgctctattgctaactgattctaatgctttgctc

SEQ ID NO: 221135 - DNA, 424 bp, Glycine max
gaacttatcttgcatttattcatcactggtgtgaatggcactatttagttaatacaaatggacttcgaaccatatatttgccgttactccaagtaatagatccaaacagatcttccttcaaagaggtcaaagttgaggaaaaaataacttggtagccaagttttttactactcttagcaaactgaagtttatctggagtcactgagacttttactccactgggagcttccacaacgggagagtacgctgattcatcttcttcaccaacgtttgtaacagttctactcacgctcacgggtgctttgccggagaaagttactgctatggaagggtagttgatgttggagatgagaacaaaacttgaatccttaaggcatctgaaattagcagggacagatctggagaagactttaaccgtggttat

SEQ ID NO: 221136 - DNA, 479 bp, Glycine max
ataatataagtcgaatttccaagagcgaggactgtattaatctgcacctgagaagcatcatggcaataaggaaaagcataaattcccctgcagtggggtttcttaggcaggaacccctgatcagccttcacaggtgcaggttatttacttgataaatgacaagtcagctaatttacgagaaataggtcgaaacagacagggatcatagtagaaaaactaaagggtatcatcagtcaacatcattccctgaggcctcagatattctaactacatcacctagacacaagcctcttgtgtaggtgactgctcagtttgcacgttctctgaggacttcaagatccatctctgttgggtctgttgcctgaatcttataatggatgcccttgcagctccttttgaacctgtccttggatgttgcatataagaatcttcgggcgaaatgcgggccacttgaagggagcccatgcaataaaaaaaga

SEQ ID NO: 221137 - DNA, 500 bp, Glycine max
  unsure (1)..(500): unsure at all n locations
ctcttccgatgaagttaatcggcgacggtgccggtggccggaaagttctcgtcggcgttaaattagatcctcgcagccgcgaattgctgacgtgggctctcgtcaaggtcgccgagcccggcgacctcgtcattgctcttcacgtccttgacaccatcactgagggaacggcgtcgctgttatctcttgtgaagacattcgattccgttctcgccgtctacgaaggtttctgcaacctgaaacaggttggtctaaggcttaaagtttgtcgcggtgactcggttcggaaggccttggtgcaagaggcgaaagcgtttggcgtttccaccgtgattttgggaacttcgaaatctcatcacactattcggtcttccgcgttngttgcaaagtactgcgcgaagaaattgcccaagtgtatctctgtcttcctccgtgataatggcaaaatcgcgttccggagagaaagctatggaaattgcagtgatcgagagaaattgtgt

SEQ ID NO: 221138 - DNA, 407 bp, Glycine max
gtggtttcagtgagtgatcggtgtttacttgatccttcataagtcgtcatcatcatcatcatcatcaccgttgattgaagaagatgccgatcagaaacatcgccatcggaaggcctgaagaggctactcaccccgacacgttgaaggcggggttggctgagttcatctccaccttgatcttcgtgttcgccggttcaggttccggcatcgcctacaacaagctcatcgacaacggcgccgccactcccgccggcctcatctccgcttccatcgcccatgctttcgccctcttcgtcgccgtctccgtcggcgccaacatctccggcggccacgtcaaccccgccgtcaccttcggcgccttcgtgggcggcaacatcaccttactccgcgacatcgtctacgtcatc

SEQ ID NO: 221139 - DNA, 404 bp, Glycine max
cgagacgatgagggcactgtttctgttcttcattctcttctctctcagctatgcctccgaacaaatcttccccgctcatatcggtagcatatttggtggtggcggtggtggccgctctcgcgaaccaaaatacaagattgaatttcatcccgaagatttcccttttcaccctgatgatgatcaggaatctatagtcatgccagataaaaccggacagaaatatatgtgttacttacctaaagtggaaaaggaaaaaagtggaaagcctgttatccaacacaatattagcagcatgattgtagaaactgagaaaaggattaagcagaagacaccagatgaactgctagaagtattaaagggtccatgctttgtcagacaagaaggttggtggtcatatgaatttt

SEQ ID NO: 221140 - DNA, 458 bp, Glycine max
acagcctaaaataatggactttgcattcattatgaactgataaaggaaacacttttattaagactttaaatcacagcattccaagataatccaatacccaacattttttagaaagccttataacttttaactataaaagctttgcccaaatgaagttaccctgcaggcaaatttttcattcacatttagcttagttatcttcattggcccccaaattattctttggcacatctttggattaaccctggatggcaacaccaaggggagcagcatccataggtattatcttctcaatttttacacccttggtgtgctggttttcataggcttaaatgtgccctccaagggctggtttaccagagggatcaagggtgttaaaccaagcaggatcccactcaacagctttggctgtgctacatgcaacacttgctcctccaggaacagtgagcctagctgaa

SEQ ID NO: 221141 - DNA, 549 bp, Glycine max
gaatcaatctttaacattgcagtaaatgttgtagcatttcattggaaaaggaaatacacccaccataagcaattctcatcaatcaaatcccccagagactggaggaaacggattgggaatgaaataggccatttccagacaccacacaaataaaaacataccataaatatagcacaaatggagtatctctttcccctatcgggaagtattgggcaatccaacaggaaacaaagaggaaacaatagaatccctatctctagctaatacacagataagtaatcggccctcatgtttcattcccaaacgcatgcatcgaatcctatggaagattccatcatccatcggactcactctgcatcctcacctccaccaagcttggcagtgccattcactttctgggcatcttctccatcttctgggatgtcagaagtccacaaagttaggttgtccctgagaagttgcatgattaaggtgctatctttgtatgactcctcattcaaggtgtcaagctcagaaatagcttcatcaaaagcttgcttcgcaagatga

SEQ ID NO: 221142 - DNA, 279 bp, Glycine max
tttttagcgcgttaactaatgctggtttctctttttcacaacatgcatcttattttgtgcactggaacatgctatgtagacccctaggacctaattctgtgaaccctgggatacggagacttcagggaccgattgcatgctccggttatacatagactgattgcttgggcgccaaggttctctatgatcatgtcaacttttgataccggccgctgttgatcagattatatgctggaaaaagttgagatcacaaggattggatatggacgcgtggaaatt

SEQ ID NO: 221143 - DNA, 537 bp, Glycine max
gcgagggaatcaaacataccttgttctactatttatcttcatcctcatttttgtcgtcgtcgttcttcctttttccgtttttcatctggttcttctctcagaaaaagctcgccaatcgatcttgctctcttctacgcttttcgaattgctttcattccattatggacgcagattagattcgcactcacattcccttctcctcgatttgttcaaactctctgctctgagatctgatcgcattttcattcagaaaggaaactcgtgtgactgatttatgcgctaattgcaatttcactgcgagcgtcactctgccgaatcggaagatgggaatagtgttcaccaaattgttttcctctcttttcggtaacaaggaagctcgaatcctcgttctcggcctcgacaatgccggcaaaaccactattctctatcggcttcagatgggcgaagttgtctccaccattccaacaattgggtttaatgtcgaaacagtgcagtataacaacattaaatttcaagtctgggatttaggtgggcaaa

SEQ ID NO: 221144 - DNA, 428 bp, Glycine max
gaactgataatagaaattcttttattaagacttcaaatcacagcatgggagataatacaatacgctacacttttagaaagccttatatctatatctatacactacaaagctttgccaagataaaagtacactgcaggcaaatttttcatacacgtttagcatagttcattctcccccaattattctttgtcacagctttatattatccctggattgcaacaccaagaggagcagcatccataggtataatcttctcaatttctacacccttgttgttgttctggttttcataggctgaaatgtgcactccaagtgctgctctaccagaaggatcaaggttgttagaccaagcagcatcccactcaacagctttggctgtgctacatgcaacacttgctcctccaggaacggtgagcctaactgagttc

SEQ ID NO: 221145 - DNA, 446 bp, Glycine max
acaagttaacagtgacttcgaacccataccaagtgttaccaaatatgatgatttggaattcaagtcaagcattatcaagaacgatgattttgaatcgagaccaagtgttactaagtatgatgattttgaactcaagtcaagcgttaccaagaacaatgattttgaaccgagaccaagtgctaccaaatatgatgattttgaactcaggtcaagcgttaccgagaatgatgattttgaaccgagaccaaatattagcaagtatgatgactttgaactcaggtcaagcgttaccgagaatgatgattttgaatcgagaccaagtgttaccaaatatgatgatttagaactcaaatcaagcattaccaaaaacgatgattttgaaccgagaccaaatattagcaagtatgatgactttgcatccaggtcaaataccaagtacgattctg

SEQ ID NO: 221146 - DNA, 411 bp, Glycine max
cacacaccttacctattagaagttttaaaataccctccctctcaaaagaataaacaggtataaaaaagaatgcacttccctcaaacagaaactaccctctatctctctcttttcaagccttaaatgagtaaaaaagagtgaagaaaggaaagaaaggagcaccatttttggtttgagaaacataattagcaagagagttcaaatggggaagaaagaagtttaatggggtggtgttgatgatgctgtgtttgtgggtttggggtggcacagcctctgtgacttatgaccaccaagcccttgtggatgatgggaagagaagaattttgatctctggctccattcattattccagaagcacacctctaatggggccagaccttattcaaaagggcaaaaatggaggccttgatg

SEQ ID NO: 221147 - DNA, 549 bp, Glycine max
gataaagaaggatgttccttgtgatactgaccaacttactcatgtttacacatttatcctccgtccggatgcaacctacagcatcctgattgataatgtggagaagcaaactggtagtctctactctgattgggatcttctccctccaaagacaatcaaagatcccgaggctaaaaaaccagaagattgggatgacaaagaatttattcctgatcccgaggataagaaaccagaggggtatgatgacatcccaaaagagctcccagatcctgaagccaagaagcctgaagattgggatgatgaggaagatggtgagtggacaccccctaccattgccaaccctgattacaagggcccatggaaggcaaagaaaatcaagaaccccaactataaaggaaaatggaaggcaccattgattgataacccagatttcaaggatgaccccgactatatgttttccccacttgaagtacgtgggcattgaatgtggcagggaaatctgtactttgttgacaatgcttaatactgatgatcctgatatgccagcac

SEQ ID NO: 221148 - DNA, 399 bp, Glycine max
ccttaattacttgattaagtaccagtcaggcgcttattgaaatgatgattatgaatacataaaaagcaactgcgatggcaagacactactattgtatatgatgattatcttaattaagaaaggagtttagatgcaacgccgatccttgcaagtggaacacaaacgagactatgtgcccttggaactgtgaggccagctctctcttccatgctaactttggcatcatcacctttcaatatttgtccttgagggcccagcacttgcaggtcaaagcattggataagagatgcaagaagtgttgccattcctgaagtagccaaattgacaccagggcacattctccttccagacccaaatgggaagagttggaaatgctggcccctaagatcaagaggccct

SEQ ID NO: 221149 - DNA, 486 bp, Glycine max
ttttgtgctttttttggtggtggtgttggagttgagtggtactagtatggctcatgtggacgagaccattgaaggaaggtcttgccgaggccattgacgatggcaagattggaccaagggatgaccccaagattcgcttccaagatcttgtcataagagtttggttgggacaaggatctcgccaagaaaatctggtgctttggccctgagacccttggacccaacatggtggttgatatgtgtaagggagtccagtatttgaatgaaatcaaggattctgtggttgctggattccagtgggcatcaaaagaaggtgctttggccgaagaaaacatgagagccatttgctttgaagtatgcgatgttggtctgcacgctgatgctatccacaaaggaggcggtcaaatcatccctactgccaggagagtcttctatgctttccaaattactggcaaacccaagcttcttgagcctgtctacctggtt

SEQ ID NO: 221150 - DNA, 359 bp, Glycine max
ctcgagccgctcgagcctaattttttctacattctccgttacttatgtttacttgattgtgtcatgttctttatttccaataaaggttattgtaggccccatgtgttgttgaactactatactgtgcgaatggtgcatgcttgctggaccagtatgtatgcctcagtgcgttttgtgatgtgcggttctaatgtaattttgtttttggttgttgatgattaaaaaaaaaaaaaaaaaaaaaaaaaaaataaaaaaaaaaaaaaaaaaaaaaaaaaaaaaaaaaaaaaaaaaaaaaaaaaaaaaaaaaaaagggcctcgagccgttcaagccgctcgagccgttcgaggttttaaatcgc

SEQ ID NO: 221151 - DNA, 454 bp, Glycine max
gcgatctagaacctcgagcggctcgagcggttcgagcggctcgaggcccttttttttgttttttttttttttttttttttttttttttttttttttttttttttttttttttttttttttttttttttttttttttttttaaacccccacacccaaaaaaaaaatttcttttaaaccccccattaaaaaaagccctgggggtttaattttgggccaaaaaggattccccttttgcaaaatttagttattaaaaaaaaaaggggggccacaaaaaccttttttggaaaaaaaaaaaatggcccaattaagtaaactttatttacgggaaatggtggaaaaatttgggttgggggggttgagctttaaccaaatttccaggtttcgtccccggggatggaagaaaattattttttttttgggggcccaaaaataaatttactgggcgggtgtttat

SEQ ID NO: 221152 - DNA, 437 bp, Glycine max
  unsure (1)..(437): unsure at all n locations
tgcataatctntntgacttgtanacnantangaggtaaatcacgcgccgtagctcgaattcggtcagcgttattgaggagatcttataattttgatgagggaggatgggaaacgggaggggtgcattgttggcttgcaagaatatacagtatctaaagttgagacaatcaaggaatttattgagagaggtaattccacaagaagtactggtacaactggagcaaatgaggaattctttcgatcgcatgctatacttcagctttgtatcaagagatcagctgatgggactgaatcaaagcctacccgacttgtgggcaaactatcttttatagatctggctggaagtgaacgtggtgcatatacgacagataatgataagcatactaggattgaaggggcagaaataaataaaagtttacttgctctgaaagaatgca

SEQ ID NO: 221153 - DNA, 529 bp, Glycine max
gttgagatccactgctgtagaatcctatttgtgaccctaaatacaagttactatgactgctcagacccaagaggagcttcttgcgcaacacctcgaacagcaaaagatccatgatggtgaacctgttgtcgaggatgatgatgatgaggaagaggatgatgatgatgatgatgatgaggatgatgaccatgccgaaggactaaaaggtgagccttctggtaggtcgacgcacaccaaatttgaaaagaagagtcgcaaggcattgcttaaacttggaatgaaacctgtcacaggagttagccgagtgacagtcaagaagagcaagaatatcctgttcgttatctcaaaaccagatgttttcaagagtccaacatctgaaacttacattatatttggggaagccaagattgaagacttgatctcacagttactaactcaagcggctgagcaattccaggctgctaatttgagcaatgctaggatgaagcccgaatcttctgctgatgctcaagatgatgaggaagtggat

SEQ ID NO: 221154 - DNA, 470 bp, Glycine max
attaatatcagataattgttaattatgactgacattcttggcattgaacatgcatttgttgcaaatgaagtctacagtcttttccttccatggggacaattacacagataattgacaaacaagtacttcaaattcaaggagcaaaaatttcgatcaacaatgaaaaatagctacactttctaaaattcaaacaaactggaccattaattagttagctccataatggcagcaacaatgtcgccactggccgccttgagagctttaacagctttaggccttgacacgccagcttgagtcatcaccaactctatgtccttgggatctacgccagcctcatccacttcctcatcatcttgagcaacaacagaagattcgggctttaatccaacattgctcaaattaggagccttgaattgctctgccgcctgagtttgtaactgggagctcaagtcttaaatcttggcttcccc

SEQ ID NO: 221155 - DNA, 409 bp, Glycine max
caagccaacaatacctgctggaggttaatcagcacccaggataggatgcattggacacataacccgtatatctaacaaactgatccagttagggaataacaacagagtgattcaagaacatttgcagggaaatagtgactggacagataggcacttgagtgttttatcaaatcgcaatgctgtggaaaatgtctatcaatggtcgtgtgggagaccaacagcgttgcatgacagaaatagggatagtgacgaggatgaatatcaagatcgggactatgatgcggctacattatcaaataatttgagtcagagccttccgatatggcatttacaataatgaagacattgaagaggatcatggctctcttgaacgagatgatgaggatagttattttgatgatgaatctgc

SEQ ID NO: 221156 - DNA, 430 bp, Glycine max
gccatttgggagttaggtttttgtttctctgcttccagcgagtgttctttcttcggggcaacaccttaatttgcacacgctgcttcttcagcttgagaaatggcacaagaaacctttctattcacatctgaatctgtaaacgagggtcaccccgacaagctgtgcgaccagatctctgatgcagtgcttgatgcgtgccttgaacaggaccctgacagcaaggttgcctgtgagacatgcaccaagaccaacatggtcatggtctttggagagatcacaaccaaggccaacgtatactatgagaagattgtccgtgactcatgccgcgaaattggattcatctctgatgatgttggtcttgatgctgacaaatgcaaagtgttggtcaacatttagcagcatagccctgatttctccaaggtgtgcacgg

SEQ ID NO: 221157 - DNA, 431 bp, Glycine max
gtttcttttcatatatcacacacactcacactctgaagaattaaacaggcagagattacaatagccaagcttcaaaaccgtgtgcatgtttatgctgtggaaggaggctttccaatgtttttcgatggtgatggccggggctcatacattttccctacagtttatgcactgtggatgggccctgagctactgtcagtttatccgctaaagggtggcgaggtatcccggttcgctatcggaggagcagacttgatgttccctggcataactgtgccttccgaaggtctttcttactttctggctggggaaccttgggctgtcaaagtacccggaaattctgctcccattgcagatgggagtactacaatgagcaacgctgaagcattaaaagctggattacgtggaaaggcgctgagaataactcattacta

SEQ ID NO: 221158 - DNA, 508 bp, Glycine max
  unsure (1)..(508): unsure at all n locations
attacatggtcatagtctacacctaattagccaaacacaccacagcaccaaactagttggctcaattctctttgaatggctttggaggctttgaattcaccaacagcagccaccactcccttccgtggttaccaagaagaggaggaggaggttgaccttcacctacgcgagccttgggccaagagaaaacgctccaaacgacctcgttttgagtcggaggaagagtacttggctctttgcctcatcatgcttgcacaaagcggtaacaacaacaacacccaattaccgtcttcgtcacagtcacacaaagaaagcgtcaccgccgctgaaactatcacacaggtgcaccgtttgcaacaaggcttttccttcttaccaagcactcggtggacacaaggccagccaccgcaaggcctcgtcggaatcccaacaccaccgcttcgncgtnngncgtctctgccacagcccaacgacagcgtttccgcttcgaccgtcggcggcggaagga

SEQ ID NO: 221159 - DNA, 502 bp, Glycine max
caaaacaagaagaaggaaacgcgcaacgcaacacaaattaccacactttcaattgcatttctctctctttctcacaatttccactttccgggttttcgattcgatattcgttgttccaatgagcgatcacttggtggtgttcgttgaccgtctcgcgcgccctgtccccgttgatccggtggcgcagacggcgcaggtgccttccgaaccatctccacctccggccgccgtggatgccgacgccgccgggagctccggcacctcaccgtcggaggattgcgacggcgagggcggcgacgaggaggagccgctgatccagatggcagagtgccgcatctgccaggaggaggatggcgtttccaacttggagaccccctgcgcctgtagcggcagtcttaagtatgctcacagaaagtgtgtccagcattggtgtgatgagaaaggagacataacttgtgagatatgtcatcagccatatcaacctgggtatactgccccccca

SEQ ID NO: 221160 - DNA, 582 bp, Glycine max
ccatataaatttcttactatatagtgtggatggattcagttacattcatagatagatgtgaattgaatggataccaatggattcacttactatatcgttttaccaccccctagtatgtacatgtacataacgttacagctgcgaaagtaaagagtaaaaatgcacggcatttcaacaaagccttcttaatattcattcatacataaaaaataaaaataaaaaagcatacaaattattagacttgttcctggggtacagtgggtgatcctggtgctattgcaaactgtaaacctctacgctgcccagattgtagaacgaaagcaacttgggttgctgctagtgctgcagcctcttgtctttgtcgccgacgctgcagaatactgattgcccaagccatgatgtagcaaggtaatagaaatccagcggcacgaagcaagaaaagggagaaaaaattggatggatcatcatcagaattatcaccatctgagacagaaagtgcatgccccaagagtaaaaaggccattaaaattaaagcagctgaaccgcaaaatgcagctccactggcgttggaagcagcatact

SEQ ID NO: 221161 - DNA, 540 bp, Glycine max
gaaaagagaattagggtctcgaggttttcatcctgcggcatcagacatgggaggaggcaatgggcaaaaggcaaagatggctcgcgagaagaacatcgagaagcagaaggccgcctcaaagggaagccagctggattcaaacaagaaagcaatgtcgatccagtgcaaggtgtgcatgcaaacatttatgtgcaccacatcggaagtgaagtgtagggagcatgctgaagccaaacaccctaaatctgatgtttatgcttgttttcctcatctcaaaaagtgaacatattggagagtgcaaatggagaaaaactttatatcatcatggcctcttccttaaacctattgacagagatcttccccattttctatctatataaaatgtgtttttctgtgtttgtgccttgggaatttaggagggacaaggagaggaagactattttattatgatttcccttgatgacaggacaagaaactgtgtgatgcttgtcaaggtgtaacttgtttatgatgggtcgtgttaatatttaagtgttacag

SEQ ID NO: 221162 - DNA, 420 bp, Glycine max
atattaacacgaaccatcattaaacagtggcaccttgacaagcatcacacagtttcttgtcctgtcatcaagggaaatcataataaaatagtcttcctctccttgtccctcctaaattcccaaggcacaaacacagaaaaacacattttatatagatagaaaatggggaagatctctgtcaataggtttaaggaagaggccatgatgatataaagtttttctccatttgcactctccaatatgttcactttttgagatgaggaaaacaagcttaaacatcagatttagggtgtttggcttcagcatgctccctacacttcacttgcgatgtggtgcacataaatgtttgcatgcacaccttgcactggatcgacattgctttcttgtttgaatacagctggcttccctttgaggcgggct

SEQ ID NO: 221163 - DNA, 527 bp, Glycine max
  unsure (1)..(527): unsure at all n locations
agggacgccaactgancagatnctgangcanttnngggtacgacagctactagtcggggccgccctttttttttttttaaaaagtaatttttttttacacagttaataactcattacagggcgaaatacaaacatttttgcaacaagaaagaagttaacagcacagcatataagagagagagagagagagagagaggctagtatgccagataggcagtgagctgcaacagagtctggacaccgtcagtgttatgttgctgaccgccgataacaggaaaagtcttaataatggcaaagccttctgcgttgagaaactttccggtgcctccaacgatggcaatttgagactccgaaacctgcgttagatgaacgccaaagaaactaagactgtccacgtaaccattcttttcaaacttagcggtgaaagccataagctgacttgctccatcgacagcgctggcaatgtaaaatccctgcgccttccctaccaaacccgaacccaactcttgccctttagtgagctcatc

SEQ ID NO: 221164 - DNA, 523 bp, Glycine max
gcactaaaatttgttttttttaacaaatatccaaatcattgaaaaaaaacaaatatatgcaaatccccaaaattcgtattacagttgctacaaataaatgaaaagtataatcatcaccattgaagtttactccaacacacccaacgtaatactggaaagtattgttgccggtctaacaagcatgcaaaatgggtgaccaataaattgcatatattaagaagtgtacagttttgcaatactttttacacacggctatctatgaggctgctaaactccaatctcagtaacaaaaagaaaggccgagttgagtcaacatttcttgatcgagtgcactagccactagccacaatctcatggattgtatcgctgacaggttcatcctcggatctgacagaaagtttcaatcgaacatcctttggaccatcaagtccaaaagacaaccgcacaagaaccttcacatttcctatgaatacacccgacaacagcatgtgtgtgaccttgaattgggcgggactacctcagt

SEQ ID NO: 221165 - DNA, 536 bp, Glycine max
gtctagatgttttgcaaacagtagcacagattatattattatttttcaggtataacattacattaatggggataggttcttcagaacaggacaaacaccagcaaccaccacgaaacaaacaatgccacaatggtagtgttgcaaaaaggccttttctgaaagaaaaggaaaaactgcattaattttattaagcattttgcagagtgataacatcataaaagtgctttggttcctaagatttcggaaatcagacaaactgatccaaatattcagaaacagtggtgtatttcacgtcaggataagcctcagaagcctcaaggtctttggcagggtcaatctcatacactgcatctccctttatctgctgtgagtggtacaaagccagcaggtaattatttgggaaagaagtctccttaatttgcttaagaacttgttcctctggaacataaattttctcaagagtcttccctattttttttctcccacaaagagatgatatcatttaaggacaaataattgttagggagtcttatgtg

SEQ ID NO: 221166 - DNA, 409 bp, Glycine max
gaatgaaaattttattgaattaaaatcgttgttgagattcaaagcccctaaaatacaactgacatttgttcgcagaatacaaatgaattggcatttgttcgcataactagaacgttaaaagaaagacaagagggccagagataatagaggatagtttttcacatatacagcccttcaggcaccccttctttcttcttaaacatcactttatccttggccttcttaaagtcggcatgagtcaccttcattcgacgttctcgtagagcaagtaaaccagctttagtacatattgcctttatatcagctccggagaattcgtctttagtcataacaaattcttccaagttgacatcatcagctaatgtcatccttgacgtgtgtatctggaagatgcgtcttcttgttttga

SEQ ID NO: 221167 - DNA, 375 bp, Glycine max
aaggggggaagcggatcttatcagtacacatagggggggtgaaattctagctctagcaatctagctagagaagggagtacttgcacaacacaccgcacatgataatttattttatacacaatctcattctcatggggctcaagatgcatggactaattaagcaacaatgttggtctgataggcagtgtccacaaataaattgggtccccataaaatggccttgctttcaaggaaatggcaaacagggttagttccaggaacaactcccataagttgatgaagcatttgatgattcattccaaaagtatttgagtggcaaatagcaagtgcctgagttttggttccctcacccgccaccaatggaaccatgaaagc

SEQ ID NO: 221168 - DNA, 420 bp, Glycine max
  unsure (1)..(420): unsure at all n locations
caatttcacccttcacacgtggtggtggtgttgttcttcttctcttcccctttctttttcttcttctgagcttgtttaagctctttctatttgattccattaacatatattatcacaatgtgtggtattcttgctgttcttggttgttctgatgactctcgagccaaaagggtccgcgtgcttgagctctctcgcagattgaagcaccgtggccctgactggagtgggctccatcaacatggtgactgctttttagcacatcaacggttagccatagttgatcctgcttctggggatcaacctctctttaacgaggacaaatccgtcattgtcacggtgaatggagagatttacaaccatgaagagctcaggaaacagctgcctaatcacaagntcccgactggatgtgattgtgatgtt

SEQ ID NO: 221169 - DNA, 341 bp, Glycine max
ataaggtaacctaaagggaaaaaaataaaataaagacccatcttttttctttaaacaaagatttccctcatatttacaaatgaatctataccctctttcaagattaaaaaaaggaaaggaaaaagaccttcctttaggaccccagacctgcaggacaaatctaccataccttcaaaccagctgtccttgcatgatccacagctgctgcaagatcactgtctgaagccaatacaactttatcatgatcttcggttttatacaaaatttggggtatgttgttaggatcgatatcatcaccaagtctttgaaggattgaaggtataaccttcatcatgctccgg

SEQ ID NO: 221170 - DNA, 462 bp, Glycine max
ggaactgtcaagcaaaattatgtctttattttgctgatgcttctgcgccttagacaagcttgtgatcaccctctgcttgtcaagcgatacaattcaaactctctatggagatcttcggttgagatggcaaagaagcttcctcaggaaaaacaaatctctcttctgaaatgtttagaggtttccttggccctctgtagcatttgtaatgatcctcctgaagatgcagttgtctcagtttgtggccatgttttctgtaaccaatgcatctgtgaacatctttctggtgatgacaatcagtgccctgctgcaaattgcaaaagtcaactgagcacatctatggtattttcaaaagccacactgaacagttgtctttctgaccagggttgtgataattcacccagttgctctggtcctgaagccgaagaagctgaaccttggtccgaaagtaagccatatgattct

SEQ ID NO: 221171 - DNA, 581 bp, Glycine max
agatatattgtgcatttgttttatttgaaatcagatagacattagaagtcataaaccatcattcaccaagttaacattacaattccaatcaaaatttctaaggagggattaggagcaaagttgaatctcctctttccaggggttaatgatcctcaatcttcttcagacccttcatgtctgttgtttcaactgttgtaccatgcagcacgatcttctgaacttttgtgatctctgaacctgactgattggcctcaataaaaattgtcaagctacgaacattttggaatttgacatacttcaaaagtaccggtttccccttaaggttttcttcagacaaatttgccacatcacttgggggaaaatcattgacattactaaatcccatgtgctccttgttagaaaagagctttactgtcttggggccttctttttaggacctttgataacaaaggagtaaagtttaacgacttgagtgataggaatttagagcaaaagctgctcgtctgcatcactcttcagatgcaaaccatcggcttctctataaccccgtttgatagcattggggatagagtgggtggagc

SEQ ID NO: 221172 - DNA, 511 bp, Glycine max
tagtaattaacctcactcaaactctttatcacagaaaccaacaacagttcttgcactgaggtttcacgatgttgctggaacttgcacttggtttgtttgtgttagctttgtttctgcacttgcgtcccacaccaagtgcaaaatcaaaagcacttcgccacctcccaaaccctccaagcccaaagcctcgtcttcccttcattggccaccttcacctcttaaaagataaacttctccactatgcactcatcgatctctccaaaaagcatggccccttattctctctctccttcggctccatgccaaccgtcgttgcctccacccctgagttgttcaagctcttcctccaaacccacgaggcaacttccttcaacacaaggttccaaacctctgccataagacgcctcacttacgacaactctgtggccatggttccattcggaccttactggaagttcgtgaggaagcttatcatgaacgaccttctcaacgccaccaccgtcaacaagct

SEQ ID NO: 221173 - DNA, 579 bp, Glycine max
  unsure (1)..(579): unsure at all n locations
ctttcttctcttcgctgctcactgtttccatggctttcagagtaggaggagcgggagggggaaatgcctcttctggcatgggtgttgctgagcatagtgtaaacaccttcctggaattgcagaggaagaaagttcatcgctatgtgatttttaaaattgatgagaaaaagaaagaggttatcgttgaaaaaactggaggccctgctgagagctatgatgatttcactgcatccttgcctgaaaatgattgccgatacgctgtctttgactttgattttgtgacatctgagaactgccaaaagagcaaaatcttttttattgcatggtctccttcagtggcccgcattcgcccgaagatgctatatgcaacatccaaggacaggttcagaagggagctgcagggcatccattatgagattcaggcaacagacccaacagagatggatcttgaagtcctcagagaacgtgcaaactgagcagtcacctacacaagaggcttgtgtctaggtgatgtagttagaatatctgaggcctcanggaatgatgttgactgatgataccctttagttttctactatg

SEQ ID NO: 221174 - DNA, 552 bp, Glycine max
gcccaaactttcaccaacatgagttttctacagctaaaagctttccagaatacagattgagacaagctacaaagtcaaggagggggggctgaactttttgccgatggacctctcttccaagacccaatctgcactactgcagaatttgaaaatctaacctaagagaaacaaaaacaattatgaaacaaacatttgattccattgtggcttcaacatgaactggttagtcaaaacttgaagagcgactccatcttccttgcaaatagtcctccagagagacactctgctcagtgctactgatagaaaccgtatcatcctccaagtctagtaaagcaaggttcaagtgggactgaatgttagttggaactggttcctcatcacatccatcaagttcctgtggagcattaacttcttgatctgcccatcttatcacctgctcatcaccatgccgaagtttcaatataaggttgatttgaggccgcaatctaggaatgcgtctaatgcatagagtagcggccaaaatcattctcttgatctggcaagtgttgtatt

SEQ ID NO: 221175 - DNA, 533 bp, Glycine max
gcctaatgttaatatatcaacagaagtctgtacaacttggtacatacaatgttttgatgccaacaaataaatgagttggacaatgcgactgtctatatgtacgagtgttcatatacacaacaaaatatgaattcgttagaaaaatgtagtagcttagaagtgtgcatgtaggaacaaagagacatgtaaatctcattgttttttatacacacttctctccaggagtcaatgcttctgatttgcatatggggcagacatttttcacaagtaaccatttctttaaacaatctgcgtgatattcgtgcccacattgaagaattccaatcttttcttggcttttatattcatcctggcatattatgcaagaatcattttcctgttcctcagaagctgcctcctccaagttaatagcattagtaggtagtaataaataagtttttgtcttcatttgacttgtaatcatttcctctgacaaacctgtgtttactttgccaatccggtcccctaatgcaagaagcttcttattagacata

SEQ ID NO: 221176 - DNA, 572 bp, Glycine max
  unsure (1)..(572): unsure at all n locations
agagcagcgactcacactggtcttcgcttctcattcatcatttctcacctaaccttgtcttcctctcagtctcagatcagaaacctccgccagccatggcagcgttccagaagatcaaggtcgtcaaccccatcgtcgagatggacggagatgaaatgactagggttatctggaagtcaatcaaggacaagctcattttgcccttcttggagttggacatcaagtattatgacttaggccttccttaccgtgatgagaccgatgataaagttacaattgaaagtgcagaagcaactctcaagtacaatgtagcaatcaagtgtgcaactatcactccagatgaagctcgtgtgaaggagtttggcctgaagtcaatgtggaagagtccaaatgggactattaggaacattttgaatggaactgtcttcagagaaccaattctttgcaaaaacattccccgccttgttcctggttggacaaaggcaatatgtattggaggcatgcgtttggtgatcaatatcgggctactgacactgntattaaaggagctggaaagctgaagctggtgttgt

SEQ ID NO: 221177 - DNA, 548 bp, Glycine max
  unsure (1)..(548): unsure at all n locations
caatcggccagcaccaacagcatcggcggcgacagtcactctccgacaacaacacttccgcggcgaaaaatgtctctggtggcgaacgaggatttccagcacattctgcgtgtgctgaacaccaacgtggatgggaagcagaagataatgttcgctatgacctccatcaagggtattggaaggagattcgccaacatcgcttgcaagaaggccgatgttgacatgaacaaaagggctggtgagttgagtgctgcagagttggatagtgtgatgactgtggtggcgaaccctaggcaattcaagatcccggattggtttttgaacaggaagaaggattacaaggatggaaagtactctcaggttgtgtctaatgctcttgatatgaagctcagggatgacttagagagactaaagaagatcagaaccaccgtggtttgaggcactactggngccttcgtgtccgtggtcagcacaccaagactactggccgcaggggaaagactgttggggtctctaagagcgttaagctattatgttttggcttggat

SEQ ID NO: 221178 - DNA, 459 bp, Glycine max
cccggatcaaacttaattcgtaatttcaaaaatactatgcaagggtctctacaactaagaaaaccaacatcatttaactaatcggaatctcagatgcaaataacaaacaaaattgaaattgtcaagccatttaacaacggatacaaagttggtatgatgcaaaacatgtagtgtacttcaaacatgcctcctaaacaaaatctaatatccaagccaaaacataatagcttaacgcttcttagagaccccaacagtctttcccctgcggccagtagtcttggtgtgctgaccacggacacgaaggccccagtagtgcctcaaaccacgggggtttctgatcttctttagtctctctaagtcatccctgagcttcatatcaagagcattagacacaacctgagagtactttccatccttgtaatccttcttcctgttcaaaaaccaatccgggatcttgaa

SEQ ID NO: 221179 - DNA, 199 bp, Glycine max
ctcgagccgttcaacttcacccattcatacgtggtgttgttactgctgctcttttctcttttcttttctctttagttctctcttcccctttctttttctttttcttcttcttctgagcttgtttaagcttttcttccattaacatattatcacaatgtgtggtattcttgctgttcttggttgttctgatgactctcga

SEQ ID NO: 221180 - DNA, 524 bp, Glycine max
cttgaagcgtcataatgggaaactcaattgatcgaaacataaaaagatcaacccaagagagacatctttgcctgttctaatcagtgaaatagtcaaatgtgatcgaagcaaaagctccagcttttactagcagttttccacggtctgcttatctagggaaaacaaaaaacactacgactgaaatataactatccggaatataacttccgctcactctttatccgttttgcaaacttcctagagttcatcatgtacaccctcttccttggtgtcttccccagcttccgtctttgattcagcatcggagtcattgccagcttcatcagcatcttcctcttcctcatcagcatcagagtcaactgggtcatcctttgattcctcctcttccctcttcttctcagcctcttcaaatgctgtcttctcaacatccttgtgcttgccccatgtttcttcagccagttgcttggcatattcaggatcatcagtaattaagacattgtcaaacaaagtaccagatttcacct

SEQ ID NO: 221181 - DNA, 379 bp, Glycine max
gataaagaaggatgttccttgtgagactgaccaacttactcatgtttacacatttatcctccgtccggatgcaacctacagcatcctgattgataatgtggagaagcaaactggtagtctctactctgattgggatcttctccctccaaagacaatcaaagatcccgaggctaaaaaaccagaagattgggatgacaaagaatttattcctgatcccgaggataagaaaccagaggggtatgatgacatcccaaaagagctcccagatcctgaagccaagaagcctgaagattgggatgatgaggaagatggtgagtggacaccccctaccattgccaaccctgattacaagggcccatggaaggcaaagaaaatcaag

SEQ ID NO: 221182 - DNA, 520 bp, Glycine max
ctctagccgctcttcaaatttgattttattttttttcttctctcttcctggctttggaattgaattcagcatcagcatgaacagcaggtctcaagatcaacgctcaagacctgccaagccagccacaatccatggctgcgccctctccggcgacctcgttggactccagaggctacttcgagacaacccttctcttctcaacgagagaaaccctgttatggcacagacaccacttcatgtctctgctggtcacaataggactgagatagttaaatttcttcttgattggcaagggacagataaggttgagatggaggccaagaatatgtatggagaaactccattgcacatggcagctaagaatgggtgcaatgaagccgcacaattacttcttgcttgtggtgctactgttgaaaccagagcaaataacgggatgacacctttacatcttgctgtttggtactcactaccagcagaacaattcttaactgtgaaaacattgcttgagtccaatgctgat

SEQ ID NO: 221183 - DNA, 549 bp, Glycine max
gagggtttgggtttctttatccctttggagaaaaagaagagccaccggggcgacggcgttcgtgcatttctgaggagccgctgtcatgtttgggcgtggtggaccaaggaggagtgataactccaaatattatgatattctcgggataaccaaaaatgccagtgaagatgaaatcaaaaatgcctatagaaaggcggatatgaagaaccattcagataagggaggagatcctgaaaagattaaggagttaggtcaagcatatgaagttttaagtgatcctgacaagaaagaactgtatgaccagtatggtgaagatgcccttaaagaagggatggggggaggaggctccttttataatccattcgatatatttgaattatatattggaggagcaagtttttggtggtggcgtgtagctcccgatgttaaagacaaaaacttggtgaagatgtggtgcatttctttaaatgtttccttggaggacgttcataatggcacaccatacaaacatattgttttagaaacatattttgcccaaatgtaaaggaa

SEQ ID NO: 221184 - DNA, 441 bp, Glycine max
tggtcctcgtgtgccaatgttttcttctggtggtccaggtattggtcaacaggtgatggtatagccaaggccctcctgctatcattccttcccagcctggatttggctatcaacaacaacttatgcctggtatgaggccaaatgcaggtcctgtgccgaattttttcgtgccaatggttcagcagggacaacagggacagcgttccggtggaaggcgttcaggtgcagtttagcagtcccagcagccagttcctatgatgccacagcagatgcttcctaggggacgtgtctatcgttatccttctggtaggggtattcctgatgtccctataactcgggttgctggaagtatgtcttctgttccatatgatgtgggtgggatgccgctgcgtgatgcataaatctcccaccaaaaacctgttggggtcttgcaaccgcttt

SEQ ID NO: 221185 - DNA, 407 bp, Glycine max
caagatatgaagaagcagcttcagtttgagaaacataagaagcaaatggtcgatgaagaatctaagaagaaggagcgtcacattgtgacgtggactcaagaggaagatgacatactgagggagcagattggtgtacatggaactgaaaattgggcaattattgcttctaaattcaaggacaaaacaacaagacagtgcagaagaagatggtacactaattggaattcccgtttaaaaaaggagggggggcccccagggaaacatctttttttttgagggggaaaaaaattttttaacacgggggcaaaaaaaaaaataggggtgggtgggtacccgaaaacccgtataaaaaccataaccccttttttctcctggggggggcaaaaggagagtttttttgattcctt

SEQ ID NO: 221186 - DNA, 548 bp, Glycine max
  unsure (1)..(548): unsure at all n locations
nagggcgacatgctatgacttgtactcaaaaccgnattgnaggttaaagccaacgccctactcgctagtcgtcctccatccttttttttcaaaaggattttttttttttacaggccagaggtccttacaaggggaaaggctctcaattattgccacaagaaccacgataacaacccaccatataattgagacagagagagagatagtggcttgtatgccacataggcagagagccacatcagagtcgggccaccgccagcgaaaagttgctgaccgcccataacaggaaaagtctcaataacggcaaagccttctgcgttgagaaactttcccgtgcctccaacgatggccatttgagactccgaaacctgcgttcgattaacgccaaagaaactaagactgtccaggaaaacaaactctaaatactgagcgggaaaagccataaactttcttttttcatcgacagcgcaggcaatgtaaaatccctgccccttggctaccaaacccgaacccaactcttggcctttaaagagctcatcgtggaaaac

SEQ ID NO: 221187 - DNA, 394 bp, Glycine max
gggggtcagagtgagaaagagaaagagagaattcgtaaaccctaatttcggaaagatcggcgatgactgcctccaaggatcgcgagaacttcgtctacatcgccaaactcgccgagcaggccgagcgttacgaagagatggtggaatcaatgaagaacgttgcgaatctcgacgttgaactgacggtggaggagcggaatttgctttctgttgggtacaagaatgtgattggtgctcgcagagcgtcctggaggatcctgtcttccattgagcagaaggaagaaacaaaagggaacgagttgaatgcgaagcggattaaggagtacagacagaaggttgaattggagctatcgaacatctgtaatgatgttatgagagtgattgatgagcacct

SEQ ID NO: 221188 - DNA, 464 bp, Glycine max
aagaaaatgaaagtccttgttttctttgttgctatagttctagcagcatggcattgccatggctcagaccatgaccatgaccatggccacacctaccaaattttccctctgagaatgaaaactggccatggtggccactacattccggaggtatcatgccaaagttggaggcttggtgtggaagcacacaacgtcattgactggaaaaccgttcctcaagattgcgagggatatattgggaactacatgcttggcgaacaatatagatcagactccaaaatagttaaccaacaagcttatttctatgctaaaaccctcaatatcactgccaaaaccgcatgggtgttcgacatagatgagactacactctctaatctcccttactatgctgaccatggatttggggtggagttatataatgaaacatccgttaataaatgggttgaccttggcgaggcaccggc

SEQ ID NO: 221189 - DNA, 563 bp, Glycine max
  unsure (1)..(563): unsure at all n locations
gcaagaaaaacacactcacacacagtgcttgtttagactagtgatcttccatggctgtgaaggatagaatcctggtcttgggacccacaggagccattggaaggcacatagtttgggcaagtttaaaggcagggaatcccacttttatattggttagggacacccctgcctctgttaacaagccaaggcttgtcactgctgctaatcctgaaaccagggaagaactcattcagagcttccaaaattctggagttactctaatccagggagatctgaatgatcatgaaagtctggttaaagcaatcaagcaagttgatgtagtaatctgctcatttggtagactaatagaagatcaggtcaagatcgttgcagcaataaaagaagctggaaacgttaagagattttttccatctgaatttgggctggatgtggaccgtcacgatgcaactgagccagtcagagaaaagtttcgaggaaaaagcananatccgaagagtaattgaagctgaaggaattcatacacttacctatgttgccatgcctttactggttacttcttacgt

SEQ ID NO: 221190 - DNA, 467 bp, Glycine max
  unsure (1)..(467): unsure at all n locations
attaattgcaagaatggcacttcgttgcttggtgatgtccctttctgttctcttcactcttggtcttgcgagagaaagccatgccagagacgaagatttttggcatgctgtttggccaaacactcccattccaagttcattgcgagatcttctaaagcctggccctgcaagtgttgaaatcgatgatcaccctatgcaaattgaagaaacacagtacccgaaaaccttcttctataaagaagaccttcatccaggcaaaacaatgaaagtacaattcagcaagcctccctttcaacaaccatggggtgttggtacatggttaaaggaaattaaagacactactaaagaaggatatagttttgaagagctatgcatcaagaaagaagccattgagggagaagagaagttttgtgcaaaatccttgggaacagtaatnggttttgccatttcanagctgggaaagaaca

SEQ ID NO: 221191 - DNA, 598 bp, Glycine max
gtggtttcagtgagtgatctgtgtttatcttgatccttcataagtcgtcatggtcatcatcatcatcaccgttgattgaagaagatgccgatcagaaacatcgccatcggaaggcctgaagaggctactcaccccgacacgttgaaggcggggttggctgagttcatctccaccttgatcttcgtgttcgccggttcaggttccggcatcgcctacaacaagctcaccgacaacggcgccgacactcccgccggcctcatctccgcttccatcgcccatgctttcgccctcttcgtcgccgtctccgtcggcgccaacatctccggcggccacgtcaaccccgccgtcaccttcggcgccttcgtgggcggcaacatcaccttactccgcggcatcgtctacgtcatcgcccagctcctcggctccatcgtggcctccctcctcctcgccttcgtcactgcctcccctgttccagcattcgggctttccgctggaatcggaattggcaacgctttggtgttggagatcgtgatgaccttcggtttggtgtacacagtctacgccactgcccttgaccccaaaatggccatttgggaat

SEQ ID NO: 221192 - DNA, 579 bp, Glycine max
ggaatttgggaggtcatgtaagctggttcgaatcgtatgtttactaaactaaactgattatgcgacattgcgactcactcacgcactcaccgacccaccctcgatagtcaatctattcttgattgccaattcgcatcgcatcgctgactcaactcaatttgcaaaacactgattaatcaattatcagatagacagagaggaaatacatcgcatcgctgattgattttcaattccatagaaatccaatagaagaaatacgaaagatgaagaggtctcttagaaagttgggagttctggcagtagagaagcatgagcgtgaccgcagaaacattatgcctttgtcccagctagaggagctcgctcaggctacccaggagatgcaagacatgagagactgctacgatagcttgctttccgcggcagcagcgaccgccaacagtgcttatgaattctcagagtccttgggagatttgggctcttgccttctggagaaaaccgccttgcatgacgacgaagaaagcggcaagttctcataatgctcgggtaaatacagtttcaactccagaagcttattgataa

SEQ ID NO: 221193 - DNA, 328 bp, Glycine max
aatgatacagtcatttttttcaattgtggaccaggtgagagcgagagcatgcacaaaatgataattaaattaacttaaaagaaaacttcaggatcatcaaccatccaaccaaagatcaacggccaccgattcaacaggaaagaaaacacaaaggaaggaaaaccatacacagaagaagattccggagaaattcaataatacacattttttttttttattatttcatttttcccctctagtagtcagtgctgggaagctgctcgtgggtgtggctgatgaagacaacctcgtagataaacccagcaattccaccttcgatgagagggcc

SEQ ID NO: 221194 - DNA, 496 bp, Glycine max
ctaaagttaaaaagcactgtggttaaccactgtctggaaagaggattagtagaaaatacatgttttctttcgctgtagaaattacatgctggcaactttcgctattgcttttttcccattgtcattatgtatatttacatcagtgttctgactaagtcactattttctaagtctgggaccataacaatctccgtgttttcattttcttgtctcactttggcacccacgtgatcctttggaagcacattacagtcgatgatgtgccatactggtctctcctcttgaaacaatgggtgcttgcatagtgatggacattgcactgtaagtgcatacttgcaagtggaaatctctgtgattgaactaatcattggtctaggttcggagcatacaaacctcaccttggtctctcgtggcttatttgtaagatcacatacggtgccgttagtatattgatgagcatgatacccttgagatgcatcttttgaccggggatctt

SEQ ID NO: 221195 - DNA, 481 bp, Glycine max
gggaaaaacaatggggtctctaatggcctctgttacatttactcttgtattggctatagtgtctgtaagcttgccaacacaaatcttagctgataactacttgtactcatcacctccaccacccaagaagttcccaccggagtcttctccataccactatccttcaccacctccaccaccaaaatattactaccactctccaccaccacctttttcttcaccaccaaagaagccatattattatcactctcctcctccaccttcttccactccacctaagaagccatattactaccactcgccaccaccaccttcaccaaagaagaagccatactactatcactctccaccaccacctttacctccttcaccaaagaaaccatattactaccattctccttcaccacctttacctttttcaccaaagaagccatactactatcattccccacccccaccatcaccttcttcaccttacaag

SEQ ID NO: 221196 - DNA, 483 bp, Glycine max
  unsure (1)..(483): unsure at all n locations
acattgtatttttgaaatcaaattaagcaaatcaaagacaaactaaattaaaccacgaccatgatggatcatagaaagtactagtactataaaaaaaaaagacacagaaatgagaaatgacttagtaactactgttggagttattattagtatcaatcaccctgccagctccaaacaatgtctttgagggaaggcctcacttgctcctcacagaacttaacatactccaacgtatctccggcagacttagtaaactccgccaccgccaccttcggcgccacctcgaaaacctccaccgtcatcgccagcttccccttcctcccctcctccgtcccctgcatcctcaccacaaactccttcttccccgtcaccctaaagttcatgcttttcgccaccgccttcaccttcgccaacaccgncgaagccgaaaacttgcatatgaacatcgacggcgaccgcttcctcgtctcaaacaaactccta

SEQ ID NO: 221197 - DNA, 466 bp, Glycine max
gaggttcccaaaaatgaaggccaagtaaacaagccagaacaacaaccagttttcaccccagaaacagaaaacagctatggtctatatggtcatgagactggtctgcaccctcccaccactacaataactaatgctgctccctacaccaccgccaccacctacaagccatacaaaactaccacagctgaagaggacactgccaagtactccaacaacaacaacttctacaacttcaagaaggatgcctacaacaccaaccaaaatgaattgagtgaaacaacaagactcacaggcacttcttacaccaataacaacaacgatggcaacaacaacaattacttctacaacggcaaggatgcttttggtaagcagaatgaattgagtgacacaaagtacactgaagtaggatacaacaatatggaaaatcagaacagcaacagcaactacttctacaacggcaaggatg

SEQ ID NO: 221198 - DNA, 456 bp, Glycine max
agaagttcgagccgtcggctccgccggcgcgcgtggggcggaaacagcggaagcagaaaggtccggaggcggcggcgcggttgccgacagtgactccggtgacgaagtgcaaactgcggcttctgaagctggagcggatcaaggactaccttctgatggaggaggagttcgtggcgaatcaggagcgactcaagccgcaggaggagaaggccgaggaagacagatccaaggtcgatgatctccgaggctctcccatgagcgtcggaaacctcgaagagctcatcgacgagaatcacgctattgtctcctcctccgttgggcctgagtactatgtcggaatcctgtctttcgttgtaaggatcagttggagcctggttgtgctattttgatgcatataaggttctttctgttggtgggcttcttcagatgaagttgatccaatggtctctgtcatga

SEQ ID NO: 221199 - DNA, 577 bp, Glycine max
  unsure (1)..(577): unsure at all n locations
cacacacctcacctattagaagtatcaaaagaccctccctctcaaaagaataaacaagtataaaaaagaaggcacttccctcaaacagaaactaccctctatctctctcttttcaagccttaaatgagtaaaaaagagtgaagaaaggaaagaaaggagcaccatttttggtttgagaaacataattagcaagagagttcaaatggggaagagagagtttaatggggtggtgttgatgatgctgtgtttgtgggtttgtggtgtcacagcctctgtgacttatgaccacaaagccattgtggttgatggcaagagaagaattttgatctctggctccattcattatcctagaagcacacctcaaatgtggccagaccttattcaaaaggccaaagatggaggccttgatgtcattcagacctatgtgttttggaatggccatgaaccttctnctggacaatactatttcgaagataggttcgacttggttaaattcgtgaagctcgcgcagcaagcaggcctctatgttcatctccgtattggtccctacatatgtgctgaatggaaactgggggga

SEQ ID NO: 221200 - DNA, 483 bp, Glycine max
caaaggatattttattactttcaatctgttcttacttaataatgataatgggaaaacacaattatttctggcagaatatagcaaatatactctccgacacattttgcgtgtctacaattctttccattgtatcatagtaaattaaataaatgtgtaagggctcaatcttcattgatacaagccctgtaatacatggggcaatattcagcacaatagcctgacttgactatgtacagtatacacagtctttgcgcatccaaattctcttatataaatctttgtttttggccaggcagtgcatgattaggccttggcaatcttttgaggtatacttgaacaaccagaagacaaggagcaccaattatgaacttcaaatatttttatatactgaaccctatatgatctaaaccacacgtatttggtaaattgctgcatcatagggtcctaaccgcataggactcacttgacagcttctttgcattt

SEQ ID NO: 221201 - DNA, 440 bp, Glycine max
ttcggcctttgatcttcgattctctctctttttctctcgcgaaaaccgtatcagcaatgtctggagaatcagccagcgctattcacaagggtcaagtcgatctcttagacttcattgactggtctggggttgaatgcctcaatcaaagctccacccactctctccccaatgctatcaaacagggttatagagaagacgatggtttgcatctggagagtgatgcagacgagcagcttttgctctatattcctttcactcaagtcgttaaactttattcctttgttatcaaaggtcctgaagaagaaggccccaagacagtgaagctcttttctaacaaggagcacatgggatttagtaatgtcaatgattttcccccaagtgatgtggcaaatttgtctgaagaaaaccttaaggggaaaccggtacttttgaagtatgtc

SEQ ID NO: 221202 - DNA, 353 bp, Glycine max
gataaagaaggatgacccttgagtctattgttttatctgaacaacggaaacacattagggctaggttcggatgcaacctacagcattctgattagcaatgtgtagaaacatacttgtagactctactctgaatgggatcttcttcctccaaatacaaataaagatcccgaggcttaattaccataagattaggatgacatagaaatttattcctgatcccgaggataaaaaacccaaagggtattgattgacatcccaaaagagctcccacgattcttgaaccccaaaaattctgaaaatttggtatgaatgaggataattggtggagtggacaccccccctacccatttgcc

SEQ ID NO: 221203 - DNA, 320 bp, Glycine max
ctttcaaattaagttctcttttttatttttttcccttttctatctccctctggggaggtgaactaaatgggtcggcttaatcccctacttgtgtggtcactctctttaacacttcttcttaattatctacacccaacctctgcccaacttagtccataccactatgctatcatatgctccaaccttgaaagcatcgttagacaagccgttactaataagactccaacaaacctatgtcaccgtcccactcacccttcgcctattctttcacgattgctttgatcagcgttgttgatgctttccgtctgattgcttccacc

SEQ ID NO: 221204 - DNA, 426 bp, Glycine max
actaaaactgtcggtttctgcatatgtcaattttttttccgggtcagttcagtgtgtttgtttgtttcacaaataaacttcttaatttcaacaatacaggattggaaaaatttattccacgtctattatgaaattataaaataattaattgtagataatatggctttgtgcaatctcaatgcgttcaaggttgtccaagaagtgaaggcatgtagaaagcatggctttgtgcaatctcaatgcgttcacggggatcattcagattttcatccctaagagcttggagaatagcttctgatgactgttccctggatattaatattttatacagtgtctttacgatggggcatagtttaacaggagcaaccggtttgttcttcttctgggtgcaacacattcaggcttgaatggctcataagttctaat

SEQ ID NO: 221205 - DNA, 536 bp, Glycine max
ctcgagccgaatcggctctagcttttttcttcgttccgccggagaaatcggaacccgccggcggcatcacacgacgagccacttcacagtaaaccctaaacacttaacagagaaagagagactcacgttgatactctagaaagttcactatgggaaactgcaacgcctgtgcgaaagctgatgtcgtagaagacagcaccaacaacaggaacaagaagtctaatgaaacgaaccgcggtggtaggaagaaagagcagaaccagaaaaaaccgaacccgttctcagacgaaccggcccggtcggcggctccgatccgggtcttgaaggacgtgattccaatgagccaccggacgcgcataagcgacaagtacatactgggccgggaactgggccggggcgagttcggcatcacctacctcttgcacggaccgcgagaccaaggaggccctggcctgcaagtcgattttccagcggaaactccgaaccgccgtggccatcgaagacgtgcgccgcgaggtcgccatcatgtccacgct

SEQ ID NO: 221206 - DNA, 338 bp, Glycine max
gtgacttccatgccatgtgttgttattcccgttaaagagttgattcagatttgcagggaggaaggggtagatcaggtttttgtcgacgctgcacattccattgggtgcactgatgttgatatgaaggagattggtgctgatttttaatcctagaaatttgcacaagtggttcttttgtccaccttcaattgcgtttttgtacactcgtaggaaccttaagggtactgatcctggttctgatttgcatcaccctgtggtgtctcatgagtatggaaatggtttggctgtggaaagtgcttggattgggaccagggataatagtgctcagttggtggttc

SEQ ID NO: 221207 - DNA, 312 bp, Glycine max
ctttgatgcactgcaaaggataatgatgcgagcaccttaattatcggatttgggtattggatcatttgtccgtgatccagaatcagaggcctacataaagcttaagaataccattctcaagcgcaagtccataaccagtttgtcaggatttttggaagttgctcctcattgtcttgcagcaatatatcctatttgcccgaacttaacatccttgaacttgagctatgcagcaggcattcagggtagtgatctgataaaactgattcgtcactgtgtgaaacttcagcgcttattgataatggattgcattgg

SEQ ID NO: 221208 - DNA, 483 bp, Glycine max
  unsure (1)..(483): unsure at all n locations
gaagaataaaaattagggcgaagcgggtcataggtgtgaagtgaaagagagattctgcgtgcaggaagagcgaagctagtgagtgtggcaatggcggaggagcaaggtgaattcaggatttacaattccatgactcagcagaaagagatcttcacaaccaaagtccccggcaaggtttccatgtacgtttgcggagtcactgcctacgacttcagccatctcggtcacgctcgcgctgcggtttctttcgatatcctcttcaggtaccttaagcacttgggctatgagattacatatgtgcggaatttcactgatgttgatgacaagataattaagcgagcaaatgagacccgggaggatcccttgatgttgacaaccgtttttgtgatgaatataatgctgatatggctgatctccagtgcgagacaccatctagggaccctcgtgtttctgaacaccttaacgagatnaaggacatgataa

SEQ ID NO: 221209 - DNA, 401 bp, Glycine max
gacctgtcctcttcaataagaaatgcacattattgagccaacagagaagattgcatgtaggattgactgagagcccttccagcactatataaggaaaggtggagatggaaagtggtgaactgagagtggcaagtggaccccttagggagctccagcgtgtggaggagcagtggtggcgttgatgtgttttcagggtcttcaagaagggatgatgatgaacaagagcttaaatgggctgcaattgagaaactccccacttatctacgtatgactaggggcattctcaccgaggctgaaggccaacctacagagattgatataaacaaactctgtccacttcagaagaagaacttggtggaaaggctcgtcaagattgcagaacaagacaatgagaagttctt

SEQ ID NO: 221210 - DNA, 370 bp, Glycine max
  unsure (1)..(370): unsure at all n locations
tttcattgcaggactgggtttttcctcttttcacacagcttcaaaatcctctgtggagcttcactcacaagaagaggaagtagtgattgctttgggaagtaatgtaggtgacaggctgcataacttcaaggaagccctggaaattgatgaggaactcaggcattaacatcacangacatgcttgctngtatgagacagacccagcatatgtaccggatcaccttgctttaataacctaacaggtagaggttgtacttaacttgggccacatgaactattggctggacttaaaaaaattgagaaggacttgggccggacagggtggataccggatggtccaagggccattgacttagacattttattctat

SEQ ID NO: 221211 - DNA, 469 bp, Glycine max
agaatgtaactatgatacgatattgatatttaattcttttggcgaaacgagctcaatacatcatattaaaacataaaaagcagcacctaaaccagaacagcaaacaagttcaagggagaaattgaacataacagacatgacatacaagaacacttgaaaaaagacacgcttaaaacaagaacacttgaaaaaaaacacgcttaaaaaccaccgcgaaggcgaaggacgagatgcaaggtggatgccttctgaatattgtaatctgccaaggtacgaccatcttccagttgcttcccagcaaaaataagcctctgctgatcaggtggaatgccctccttgtcctgaatctttgccttcacattatcaatggtatcagaactttcaacctccaaagttatggtttttccagtcaaagtctgaacaaagatttgcatgccaccacgaaagccgtacaccaagcgcaggggag

SEQ ID NO: 221212 - DNA, 476 bp, Glycine max
caggattccggacaaagttgtagacaaagctgactataattcagcgtagatttttatggggtggagatttggaatagcgtaagattgcctgggtcaatttgaagaccgtgtgtcttccaaaagacaaaggtggtcttggcatcaaagatctacgggcttttaacacagcgctgctaggaaagtggagctgggagctatttcagaatcagggagacatgtgggccagagttctaatttcgaaatatgaagggtggcagatccattgctgaagaaagaatgagtagtcattttccctcttggtggaaggacttgctgcagattaatcagcagcagaatgcaattctaattagaaaccagacagaatgtagagttgggcgcgaagatttattcagattctgggaggatccttgggtagggcgtggcggctcatttatgacaaagtatcccagattataccacatattcaatctctacac

SEQ ID NO: 221213 - DNA, 453 bp, Glycine max
ttcgaaagagcgaaacgcagtgtgcattgttcctcaacaaaaaaaaaaaaaaggaagaaggactcagttgtgtatcgttgcagctctactagctagggtttcgcaagtgcgatcgaagaagaacgatggcgatggctgctgctctgcgtcgcgaaggaaggcgtttgacccaaccaatcaacgccctccgttcctctctcatctctcaagaccaatcccctcatggcgcgcgcttcatttccactcaagtggtgagaaaccgaatgaagagtgtgaggaatatccagaagatcaccaaggccatgaagatggttgccgcgtccaagctgagagccgttcagaccagagctgaaaattcccgcggcctctggcaggcgatcaccgatcttctcggcgacaatcccagtgcttgatgttaagaaaacggatgttgttaccatctcttcggcaaag

SEQ ID NO: 221214 - DNA, 398 bp, Glycine max
cggatctagagtcttcagtttctcctcgttgttctttgttttcctgttttcaatttcgattctttcgttagtgtaataagatgtttgggagggcaccgaagaagagcgataatacgaggtactacgaaatcctcggcgtcttcaagaacgctatgcaggatgatctgaagaaggcttacaagaaagccgccattaagaatcaccccgacaagggcggtgatcccgagaagtttaaagagctggcgcaagcttatgaggttctgagtgaccctgagaagcgtgagatatatgatcagtatggtgaagatgcgcttaaggaaggaatgggtggtggacggtggccatgatccatttgatatcttttcatctttctttggcggggggagtccctttggatc

SEQ ID NO: 221215 - DNA, 407 bp, Glycine max
  unsure (1)..(407): unsure at all n locations
ggggnttnnaagggaaggccggcattcgtactcgtanacctctanacaatatacagcagacggcaaagagggtacagcatacatacacagatacatgcatacttaggcagatattttcagagaattttcacaatgcatgcaactaatagcgtggatttcaaagttagagagatagggacaggttgactaacatgttttgcaaattattgaagacaagactatttggccgtccttgatccttgagattctgagaatttcaaaagattcgccagtttgatcaattcatttttattaatattatcattattattattaatttttttttttaaaaattttttttgcgattgaatttctgtggaaaaaagttaaattaattattggtgcattaaatttaattttctgaaatt

SEQ ID NO: 221216 - DNA, 356 bp, Glycine max
  unsure (1)..(356): unsure at all n locations
cttttacaagccggaacagattttaaaactctagtttcagctcaccatgaagcaatagaggctatggatatgcctaatcactcagaagattcagatgaaaatgtacccttggatgacactattatgaccagtaagacatccatttcttctgcaaatgatattgagagtttggctaaggaagttcaggagggatcatcagatcagaaagtaattaaggagaagaagaaagcaaaacgctcgagaaaaaaacagcttgttcaggaagaggagaggngtagaggtagagtcagcatgaaaggtgtacttgtcatacatggctgcagcatacaaaggtgtattggattcactcataatca

SEQ ID NO: 221217 - DNA, 354 bp, Glycine max
gaaaatttggatttggattttgctctaaatcacattctttgcttcttttttcttactttcttgttccttctgcagcttggatttttggcgtaacgaggaaggggttattgttgagaaaccctagcctaaacctaaaccatggcgcataggttgctgagagaccacgaggccgacggctgggagcgctcagatttccccatcatctgcgaatcctgcctcggcgacagcccctacgttcgaatgacaaaagcagagtatgacaaggagtgcaagatttgtacacggccattcactgtttttagatggagacctggtcgagatgcaagatataagaaaactgagatctgtcagaca

SEQ ID NO: 221218 - DNA, 379 bp, Glycine max
gtcgcagcaaaaccaagccacccactaacttgtttggtccaagacatggctctgatcctgcatgctaccaagacaaacaagaatgccttcaagactctgattgcggcagagtacagtggcgtccaagtggaattggccccctaatttcgagatgggtgtctctaacaaaactcctgaatttctcaagatgaatcctattggaaaggttcctgttttggaaacgcccgatggtccagtctttgagagcaatgcaatcgctcgttacgttgctcgactaaagggtgacaacgctttgttctcatcttctgccattgataatgcccacattgaccagtggattgattttttcatccttggagatcgatgctaatctaatgaa

SEQ ID NO: 221219 - DNA, 498 bp, Glycine max
attttgaacagtgatgaagcgtcatcataggtcaccacaccaccaacagctcttctgggcaagggtggtcagtgcgcaagtggtttaacatggggagctatgagtctgattacagtgctgaccctgttgatgatgattctgaaagtggttcagacaatgaagagcgaggaagacagtcgcagtttgcggacaacagatgtaatgaagatgaagcttcatctgaatcatcagaatttcttccaaagttaaggaggcaaaagtcatcaacttatagatctcagtatataaacaaaaatgagctgagggtatgtgtggggacgtggaatgtcgaaagaaagcttacacctgatgaccttgatattgatgattggcttggcatcaacgaaccagctgacgtctatgtcctgagtcttcaagagatagaacccttaaaccctgttaacatatggggtgctgaagatacccgaactgttccaaaatgggagaatattattcgag

SEQ ID NO: 221220 - DNA, 538 bp, Glycine max
atttaatttgatgtattttacacatgagaatactctttaactggtgatctaaccgaacaatcgcatatttgtgttctgccttcttctactcaatacattacgcgcctctagtctcgtttccaggtttgtaataataataattttagtttcttcgttacgcctgcgttgtgcgtgagaaagtgcgcgtggtgaaaaccatggcttctcagctcctgagacgaaccttcggaagtcgcatccttgcaaaccctagggccttctccttctcctccgctgcttccactccgatccgcgccactctcttccccggcgacggcatcggccccgagatcgccgaatccgtcaaacagatattccaagcagctgatgtcccaatagaatgggaagagcactatgtaggaactgaaattgaccctagaacccaaagttttctgacatgggaaagtttggaatctgtaaggcaaaatggggttggcttgaaaggaccaatggccacccctattggaaaagggcatcgttcattaaatcttactctgag

SEQ ID NO: 221221 - DNA, 349 bp, Glycine max
aggatggggagaggaacatagattttgttgtggctgctgatcaaggtgaaagtatgatggataaagaagagattgttagcagtgaaagtgagcaggaagaggaggacgaggatgaggaggatgcagggaagaacaaaaaggcttgatgccaaaagcaagggttggttttcatccatgttccagagtattgcagggaaggcaaatttagagaagtcagacttagaaccagctttaaaagctctaaaggataggctcatgaccaagaatgtggctgaggagatagctgagaaactctgtgattcagtggcagcaagtcttgaaggaaaaaagctggcttcatttacaagga

SEQ ID NO: 221222 - DNA, 489 bp, Glycine max
  unsure (1)..(489): unsure at all n locations
agtatcaaaaggcttaagctactcctttaccaaattttgttacatcctgttcttttaagaagaaattattttcctcattatccacagcaacaaaaaaagaaggaaaaagagtgtctaaactcaaaagcatgcattgatgccttttaaccattctaagaatcaaaacagaggaaggcaaacaattatcaaactacatatctccaatgtctcaacaaaataaaagatattcgcaaatccacatcaactataaaaaaaacagatatataaccaacacataatcaatcttcatcatcaataaccttggtttccaaacctttgagctcctccttggggatttcgacgacagtaacaagggaatagagctcttcctttgcatcctcatcgtcgntcctcttgcgagcaatgcgaaccctaatcctgcttgggacgctcccgatcccctggctccacacagccttgttgagcttcacatgcactcttacatcattc

SEQ ID NO: 221223 - DNA, 594 bp, Glycine max
  unsure (1)..(594): unsure at all n locations
cgtcaaagcaaagaaacagtgtttcatcatttgggtttcgcagaagagagagaaacccatttctagagagagaaactcgcagtcgcagacatgtcttccttcgatgccttcgccgacgacttgaacgtcaactcttcttccactcgccagcacgacgatgacgaggacaacttctctggctacggcggctactcctccttcaccggaggattctccgccgacggagatgtcgccgtcgatcactccgccgccgcgtcgccggagatctacggcttcactgattcgaatcccgcttactctcagtctcccttcgaatcggccaccgtagagaacgaaaacggaaacggatacggcgacgggacggggtnttttgtctccgacggtccggtgcttcctccgccgacggagatggagccggaggaaggttacgctcttcgcgagtggcgccgtcaaaatgccattcagctagaggagaaggaagaaagggaaaaagaaatgagattgaagattattgaagaagctgaggagtataaggtgctttctatgagaagaggnaagctaatgttgagactaaacaggttcagaatagagaaa

SEQ ID NO: 221224 - DNA, 508 bp, Glycine max
  unsure (1)..(508): unsure at all n locations
ctgggctgaagcagtctacactgctgtttacatactcaacagatgtccaactaagtctgtaaaagacatgactccaattgaagcttggaacgggaagaagccatcagcaaagcacctaagggtctttggatctatatgctacattcatattccagacgtgaagaggcacaagcttgaagacaagactatacgaggtatcttccttgggtatagcaatatctctaagggctaccgtgtctacaacttgcaaactaagaaactcgtcatcagtcgagatgttgaagttaatgaatctgcttcatggaattgggatgaagaaaaagtggagaagaacgttcttatacccgctcaactacctcaagaagaagatgaggaaaaagacccaagtgaaccaccttcaccttcatcacaacaacaagatcaagaactatcatcancagagtctactccaagacgagtaagaatctttggtggacatatatganacttgtaacttgggcatacttga

SEQ ID NO: 221225 - DNA, 458 bp, Glycine max
ctcattacaaacggagttagttagttatagtttagttcgttactttgaagaatctcaaactttcctttcgaatctcagaagaaaccctagctagctctagctccgatggcggtggcgggaggcgccgctcctctcggctcgtcggtgatctcgctggtgaaccggctccaggacatcttcagtcgcgtggggagccactccgccatcgacctccctcaggttgcggaggtcggcagccagagcagcggcaagtccagcgtcctcgaagccctcgtcggccgcgacttcctccctcgcggcaacgacatctgcacgcgccgacccctcgtcctccagctcgtccaaaccaaacccccttctcaagatgagttcggcgaggttctccacttgcctggccgcaaggtccacgacttcatccaaattcgcgccgaattcaggttgagactgatagggaagct

SEQ ID NO: 221226 - DNA, 511 bp, Glycine max
  unsure (1)..(511): unsure at all n locations
ctttttcaccttccccctttgtttctcaacatcattctcctcattcccctacctacccccaattttcccttctgtatttctctttttcaattctcgatttcccttctcccttttgtggcttcataatccagatcctctactggctctacgtcttgtcatgaactaactccctctcaatcccctaccctaattcctccaatttccccatttttttttctaattaatcagatttgcaaaatcctaatttctctatcctaacaaaacccccaaattcaaacaaatccaatggcttcgattccgcgtccggctgcgatggacgagagaaagaggaagcggatggagtcgaaccgcgagtccgactgacgatcgcggatgaagaagcagaagctgctcgaagacctatccgacgtancgagtcgccttcaaggcgagaacgtgcgcttagcgcagagcataaaggcgaaggagggagcgtacgttgagatcgaagccgcgaacgacatcctcagag

SEQ ID NO: 221227 - DNA, 438 bp, Glycine max
tgctggcggtacgtacgaaaccataccgttgacctagctcgcacaactgcttagctagaaaactaactcacacttctatctccccaagcattttcttttgtttctttttgaacaagtctgtctctggactaactcttctcactatgcaccttcgtgagtgtaaccccaagcattctcttctgcttctttttgaacaagactaatttgttgacttactttttcacactatgcaccttcgtgagcgtctccccaagctttctcttccgtttctttttggacaagtctatctcttgacttactcttctcactatgcaccttcgtggtgggcgttttggacaagtctgcctcttcacttattatgctcactatgcaccttagctagcgttgtgggttttcaaacacacatggcgaggtccggaatcttaccaagaaataaca

SEQ ID NO: 221228 - DNA, 599 bp, Glycine max
  unsure (1)..(599): unsure at all n locations
ctttaacatacaccttccaacattattttttttctcctctagcttccacactatgtctaaaacgaatgtgagaagacatgctcttgagaagtgcaggagtgtgaaagagacacagaaaatattgaaccacagttttttcaccagaaacctcaagaaagtgtaccctatagggcttcagaaaagcacttcatctttgtctctgtcttcaatttcattgtctttgtcacaaaactcaaatgactcttcccaggctgattctttgactccactggatgaaaagatttcgctggcattgcgtttgatttcgccacgggaaagaagagaacctacaatagctgcttctaataagcctcttcagcagcaacaccaacaaccaccacacactactgagcctgnggaattgaaaagatgtaactggatcacaaagagctgtgataaggcgtacatagaatttcatgatgaatgctggggagttcctgcttatgatgacaacaaattgtntgagttgcttgcaatgtctggattgctcatggactacaactggacagaaattctaaaaagaaaggagactctaagagaagttttcgctggatttgatg

SEQ ID NO: 221229 - DNA, 589 bp, Glycine max
gtgctcttgtcatgcttacaccgcttgttgttggaattctttttggtgttgaaacactttctggggtcctggctggatctttggtgtctggtgtacagattgctatttctgcatccaacaccgggggtgcttgggataatgccaagaagtacattgaggctggtgcttctgagcatgcaagaagccttggtccaaaagggtcagattgtcacaaggcagctgttattggtgacaccattggagaccctctaaaggatacatctggaccttcacttaacatccttattaagctcatggcggttgagtctcttgtgtttgctcccttctttgctacacatggtggcctactcttcaagatctaaaggatttgatagaaaaagagtatccgccatcatttttctacaacgacagaacaaggaaaagcctgccctttaccaatgccttctcgtttgtgtgttagactttaactcatctgtcatgtcaattccattggttttgaaacctttttcttccccaccttgaaacaaaggattattttgtctcatgtagttttaagacaacttgattaggctgagtctgctgccaaaat

SEQ ID NO: 221230 - DNA, 406 bp, Glycine max
gactgatgcatgttgggcactgtcatatctttctgatggcacaaatgataaaattcaagctgtaattgaagctggtgtttgtccccgacttgttgagctgctgctgcacccatccccttcagtgctaattcctgctcttcgaactgttggaaatattgtcactggagatgatatgcagactcaggttatcatcaatcaccaggctcttccttgcctttttaatctgttgaccaataattataaaaaaagcatcaagaaggaagcttgttggaccatatccaatatcacagctggtaataaacagcagattcaggctgtgattgaggcttaactaattgctccttttggcaatctgcttaaaatgctgagtttgatatcaagaaagaagctgcttgggctttttaaa

SEQ ID NO: 221231 - DNA, 404 bp, Glycine max
  unsure (1)..(404): unsure at all n locations
agcactcagtagggtttgcggtttcagagtttgtgacgcacgcatccatggccaccaccaccaacgccgccgcagccccgccgcgccagctctcccagaaggaagccgacatccagatgatgttagccgccgacgtccacctcggcaccaaaaactgcgacttccaaatggaacgttacatcttcaagcgccgcaacgacgggatttacattattaaccttgggaagacatgggagaagcttcagttagcagctagggttattgttgcaattgagaaccctcaggatatcattgttcaatccgcaaggccttatggtncaaagagcggttctgaagtttgctcagtacactggtgctcatgctattgctggaaggcacactcccggtaccttcaccaatcagct

SEQ ID NO: 221232 - DNA, 274 bp, Glycine max
  unsure (1)..(274): unsure at all n locations
ctcgagccgcctgacccctaaggccaggggtttttctcggcttcttcagattcctgaaatggcgtctgtttcagctttagccaagtacaagctcgtcttcttgggtgaccaatccgtgggcaaaaccagcatcatcactcgcttcatgtacgataaattcgataacacctatcaggctacaattggtattgattttctatcaaaaactatgtatctcgaagatcgaactgttcgactgcagntgtgggatacagctggccaggaaaagatttag

SEQ ID NO: 221233 - DNA, 527 bp, Glycine max
gctcctcacacaccctatcatatcatatgaatgaatctgcactctctttgaaaactgtcacgctttcaccggcgtcggaaacatcgtccggttagggttccggctatcgctaagggcacggatcgtaaaatcttccagaagcttctatgctattactcagtattattaccatttgccaaggtgttgttaggcaccatttttatcacttgaagtcagtcagcaacaacttttctgcgaatttttcaggaatattttcgcctgaaaaagttggagcaaatgtctttgcaaaacaagggattttggatggtaaagggttctggacacattaatgacagagatacagtatttgataatcccaccaaaattgaaccaaaacgacctcatcaatggtttgttgatgctgctgaagtagatttttttccaaacaagaaacaagccgtagaagatgcagatgaaaaatctagtcctggagtttcaaatgtaaatattcctccctgggagaacaatcccaattttcattcagtccc

SEQ ID NO: 221234 - DNA, 612 bp, Glycine max
  unsure (1)..(612): unsure at all n locations
cgtagcccaattgcaacaaatgtgcccaagaaacgtggatcctaggattgccatcaacatggacccaacaactcctcgtaaattcgacaatgtttattaccaaaaccttcaacaaggaaagggcctcttcacctcggaccaaatcctcttcacggacccaaggtctaggaacaccgttaattcctttgcttccagtaccaacgttttcaactccaactttgtggctgctatgaccaaattgggtcgcgttggagttaagactgcaagaaatgggaaaattcgtaccgattgttctgtgctttaagttaaggctttggttgatcatgtaaagtcgcaaacagtgcatgttttggaggtaaacaacaacacaagttgcaattttagtgcgggngngatttgcaaagggtagttagattcatttgttgttaataaatctgtttgcgaataattccggaagttgtggggtgttcgggagggaaaggtaaagtgactttttatttgtgtaatgttccaaataatcaaagtcctccgaagaactttgaatngttcacataaataaatgtgtaacccagcaaaggaaaatcaataaatggacctagattactttaagag

SEQ ID NO: 221235 - DNA, 444 bp, Glycine max
  unsure (1)..(444): unsure at all n locations
atttcttgcttcttaatttcttgatcatgtcacttgctggtaaaatcagcattgaaattggggtgcatgcaagcgctgcaaagtggttcaacctctttgcaacgcaacttcatcatgttcaaaaccttaccgaaagagtgcatganaccaagctacatcatggtgatgactggcatcacaacgaatcgatcaaacactggacttgtaccatagatggtaaggttacaacatatcacgagagtattgaatccgttgatgaacctaacaaaacaatcacttacaagatcttcggtgaagatatcgatcaccagtataaggtctttaaggtcatctttcaagcaattcataaggatcatgggggtgcattcatcaaatggactattgaatatgaaaggtgtggggaggaaagatgatcttccatttggcttcatcgaatacctcaac

SEQ ID NO: 221236 - DNA, 441 bp, Glycine max
cttttccactgaaaatcaaattagggtttggatttcggaattgccacagaatcatggccactctgaaagagcttcttcctcctgcaaaatcctcctccaccgcctactacgaccacaccaacgatccatggttcaagccggggtttctccttagaagaggaggagaaatccgccgccgccgccgccgccaagcagaagcccgttcccccctacctgaagcgcgccggcttcgttcctcggaaaatcgaggacttcggagacggcggcgccttccctgagatccacgttgcacagtatcctctcgacatgggaagagaaaagtccggcgccaaacctggatccaaaatcctccctgtcaccgtcgacgctaacggcaacgttgcctacgatgccatcgtgaggcaaaacgagaacgcaagaaaaattgtctacacgcagcag

SEQ ID NO: 221237 - DNA, 389 bp, Glycine max
ccattctctctctctctctctctctccgacctagcgagaccgagcgatccgaccctaatctcgcgatgctccgccgcgcaacctcctccctcctcaccggcgcctcccgccgccgcctctcctccgacgtgccggcgacccccgccgcggattccgccttcgcggaggcgtggaagaaagtgagccccaacatcgacccgccgaagacgccgctggcgtacatgaagccccgaccacccactccctcggctctcccttccaagctcacagtcaacttcgtcttgccctactcttctcaattggccgcaaaagaggttgatatggtcatagtaccagcaacaactgggcagatgggtgttccttcaggacatgtagcaacattgcagagt

SEQ ID NO: 221238 - DNA, 438 bp, Glycine max
ttcaggagcttgcataagctgctgatggatactgctacttcagaatataatttctgtggtgatttctttggagaagaatctatattttatgaaatcttttcaggtccatgtggcgtcattgatgagcacttcgattctatacttccaaattgttatgatgctataggcctcatgcttatgattcaaataatacacaagcatcagctcattatgtctcgaagacggattccatgcttggattcatatttagacaaggtcaatatatccttgtggcctcgatttaaattggtatttgacatgcacctcaacagcttgcgtgatgcagatgcgaagacattatgggaagacgatgttcatcctcactatgtcatgaggcgatatgctgagtttactgcttcgcttattcatttagacgctgaatgtggagatggtcagctt

SEQ ID NO: 221239 - DNA, 540 bp, Glycine max
  unsure (1)..(540): unsure at all n locations
atttaagataagagtgcattactactaagaggagaaaaaatgaaagttgtatacttccttgttgctatcttggctttgacatccactgtggtctctgcctatgaccctagtcctctgcaagatttttgtgtggcggccaaaagaaaaagatggtgtatttgtgaatggaaaattctgcaaagatcccaagcttgtgaaagctgaagatttcttcaaacatgtggaacctgcgaatactgcgaatccactaggttcacaagtgactccggtctttgttgatcaactacctggactaaacacactgggcatatctttggctcgcatagattatgcaccaaagggtttaaaccctccccacactcatcctcgtggtactgagatccttatagtacttgagggaactctttatgttggatttgtgacttctaatcaagatggaaatcgcctcttaccaaagtgctgacaagggtgatgtggttgtcttcccaatggtctcattcatttccactcaatgggngtatggaatgctgtgccattgct

SEQ ID NO: 221240 - DNA, 434 bp, Glycine max
gcaaattaatcaaacatggctagggttagtgctttgtttcactctttgctcttgatttcttcccttgtattggcttctcaaatccatgtttcctctgggaaactagtccctggactatcatggaattactatttgttgacatgtcccaagcttgagaggattataaggaagcatcttgaggatgtcttcgagaaggacagtggagtagctcctggcatacttcgactcttcttccatgactgctttcctaatggatgcgatgcgtctatattgttgaatggagacggtgacgagaagcaacaccgtgctaactttggtttaaggcaagaggccattgacgccattgaaaaccttcgggttctcatttacaagcagtgtctaccagttgtctcatgctcagacatccttgttatcgcagcacgtgaagctgttcg

SEQ ID NO: 221241 - DNA, 498 bp, Glycine max
atggagttagttctaaacagcacaacaattggagttggagttgtttctctgatcctcctcttgtacttgtttttgcgtggtggttcatggaagagtggggaagagggtcctccaacagttgcaggtgcatggccaataaatgggccacctcccattgttgcttggttcaaagacacctcataaaacattgggtgacttggctgacaagtatggacccatattctcgatcaagattggtgccaaaaacgcaggggttgttagcaactgggaaatggctaaagaatgctacaccacaaacgacatcgccgtttcctccctccccgatcttatctccgctaacctcttgtgctacaaccgatccatgataagtcgtagcaccctacggtccctattggcgccaacttcgaaagattttaatgtctgagttcctatctccttcccgagtagagcaactacaccatgttcgcgtctctgaagttcaaagttccatcacggagc

SEQ ID NO: 221242 - DNA, 464 bp, Glycine max
tgccggcgttcccaagaagcggctacgcaccaccgccgccaaccgttcctcctcggcagctggcaccatctcctccctctccgacgtaaccctaatcgaaatctcccaaaaccctcgaccttcctctgccatgaccgacgaccgcccctctcccgcggcggaagacgctctccattataacgacgcttccaccgccgacgtcgtcctccgcctcttcatcgacgctccctctccgctcgattccgtttccaactccgaccaccacgtctacctccactccgacgtcctccgccgctccaaatacttctccgcgctcctctccgaccggtggatcggccgcgtcgcgccggagctctcgtcctcctcctcctgcaaccgcgaccgcgacctcgacctcttccgcctcaacctcggtgtggctcccaccggcggctcgatccaatcgcatctcaccgtcctggagc

SEQ ID NO: 221243 - DNA, 592 bp, Glycine max
  unsure (1)..(592): unsure at all n locations
ggcttcctgcaggatggcactcctccttggcttgctgctgctagtagtagcttcgcccgcgatcgctgatgacgactccggtatctactaccagctggctcttatgtggccaggagcatactgcgagcagaccagcgctgggtgctgcaagccgaccaccggcgtctcgccggcgcgcgacttctacataacgggcttcaccgtccttaacgcgaccaccgacgctgcagtgacgggatgcagcaacaaagttccttacgaccctaacctgattaccggcatccaaggcctgaatcagtactggagcaacatcaggtgccccagcaacaacgggcagagcagctggaagaacgcctggaagaaggccggcgcctgctccggcctcagcgagaaagactacttcgagactgccctctccttccgtagccggatcaacccactcgttcgcctcaaagccaaaggtatcgagccggacttcgggctctacggcctcaaggcgatcaccaaagtcttcaagagcggcatcaacgcgacgccggtgatccagtgcagcnaggggcccttcgacaagtacatgctgttccagctctac

SEQ ID NO: 221244 - DNA, 564 bp, Glycine max
agtaaagaaagcccatcattattaaaattagaaaatcctatggcgggtcatttcgggttaaaaaagacagactccatctttaattcaaaaacataattgcagaaatatctagcctcaactaggaaaatcctcatcatgggtttgaccttggaacacttattacagaagtcgaggtaagatcaaaaaaatgtggcaccaacaaatttcaaaagaacacaacgatattataatgatattataatatcgccactgctgaataattacatattgctctcctgcaattagccttccagtgctgaagctccagagataatctctatcaattcagtggtgattgatgcttgacgagttctgctataggtgagcgtgagacgatcaagcatatccccagcattcctgctagaactgtccattgcaaacatttttgctccttgctcacttcaggcattctccaacacgggtttggtcatcacacaagaaaactggaactcagccagattctgaagaatttcagcttttgtttcccccccttcaatctcatatgaatccaattccccgagcttt

SEQ ID NO: 221245 - DNA, 391 bp, Glycine max
ggtgacgttagtaagtaacaatggtggagaaggccaagggtaggaaggaggaggttgtcactcgagagtacaccatcaacctccacaaacgcttgcatggctgcacatttaagaagaaggctcctaaagcaattaaggagataaggaagtttgctcagaaagcgatggggacgaatgatgtaagagtggatgtgaagctcaacaaggctgtgtggagccaggggatccggagcgtcccaaggaggattagggttcgcattgctcgcaagaggaacgacgatgaggatgcaaaggaagagctctattcccttgttactcgtcgtcgaaatccccaaggaggagctcaaaggtttggaaaccaaggttattgatgatgaagattgattatgtg

SEQ ID NO: 221246 - DNA, 570 bp, Glycine max
  unsure (1)..(570): unsure at all n locations
ctgaatcctatcatcttgtggctttgatgtctagagcattggaacatgattacatagggttggcagagaatccgtcaatggatggtaaaaactcatcatcactgaacttgaaggagacagagctgaggcttggcctccctggttgcgagtctccagagagaaaatcaggttctgcactctgtctttttggcaaagagttgcagaacaacaataacaatgtttgttctttgaaggctggggccaagaggggcttctctgatgccattgacacctcttctgtcactgagggatctcaaggagcttctgctttgttctctccaagaggtggcaatgttgggaagcctcttattggtttagacactcaaactaacaccaccatcaaagaggttggtgcagttcctcaatcagccaaaccggttcaggaaaacaatgatcagtttgctgcaacaaatgcccatgcaattgctcctgctgctaaggacaagttgtgggatggccaccaattcgatctttccgaaagaacacgatggcctctaaattgacanagaacaatgatgaagctgagggaaa

SEQ ID NO: 221247 - DNA, 389 bp, Glycine max
  unsure (1)..(389): unsure at all n locations
tggggnnnnnnnnaagcnnanaaactgaccagatgctctctngctataaaacctgtactaccaaactgcgaataactcaaccaatttttttccaaatccagttctgtaaactgtagactaacgacaaaacgacttgggaataactcgataaaatttcgttacttttgaccacgatttgatatgacgaaactgaacaaaccataacgattctgctccttctctttctctatctttttctcctttataaaacgaaaagtggctaactaaatctctaatttcgagtttccttcttttctaggcacaggctaaggtttccaattaacccaaccaattaaagcggatgatttaaaaacaaaacctaaccgattttccggttcacgggcgttaca

SEQ ID NO: 221248 - DNA, 467 bp, Glycine max
  unsure (1)..(467): unsure at all n locations
aggggtnnnnatnnaaggcngagtacctaccagtacctctttacataatattcaacatatgtacaaatatgtaacaatatacatacacagatacatgcatacttaggcagttagaccagagaattttcacaatgcatgcaactaataggagggatttcaaagttagagagatagggacaggttgactaacatgttttgcaaattattgaagacaagactatttggccgtccttgatccttgagattctgagaatttcaaaagattcgccagtttgatcaattcatttttattattattattattattattattattttttttttttaatattttttttgcgtttgatatcgttgtaaatagttaattagttatggtgcatgaatatgattttcggaattgaataatgtgttaacataggttataaatttaagaatccaaactaggaccaaactcattataatatttt

SEQ ID NO: 221249 - DNA, 330 bp, Glycine max
tagggttatcatttctccatttccattttctctctcacttttcaagaatcgtaagctatgggaaagtcttacccaactgtgagtgctgattaccagaaggccgttgagaaggcgaagaagaagctcaaaggcttcatcgctgagaagagatgcgctcctctaatgcttcggttggcatggcactctgctggaacctttgacaagggcacgaagaccggtggacccttcggaaccatcaagcaccctgccgaactggctcacagcgcttacaacgggcttgacaacgctggtaggcttttggagccactcaagggggagttccctattttg

SEQ ID NO: 221250 - DNA, 559 bp, Glycine max
  unsure (1)..(559): unsure at all n locations
atcacttttgcttccttaacctattttgttatcctcaattttcaatggctcaatcccattctggaaaaacctcttccatgacttcaatactcctcctgtttatgcttcttatcagtaatacaggcacaacaggtgcacaatctggtgtatgctatggaagagttggcaacaatctgccatcgccacaagaagtagtttccctttttaaacagtacggcttccaaaggatgagaatctatgatcgaaaccatgaagtcctccaagctctgagagattccaacattgagttgctgctagatcttcctaacatcgacctccaatatgtagcttccagccaagacaacgcaaacagatgggtgcaagacaatgtcagaaacttttggaatgtcagattcaggtacattactgtgggaaatgaagtgaagccttgggactcatttgcacagtttgtagtgcctgcaatgcanaacatccaaagagcaatntctaatgctggcctttggaaccaaatcaaaagttccactgccattgagtctggtgcatnggcagaatcataccc

SEQ ID NO: 221251 - DNA, 369 bp, Glycine max
tgtgttcataattggggcaactaacagacctgacatcattgacccagcacttcttcgaccaggccgtctggatcaattgatctatattcctctccctgatgaggattcccggcatcaaatctttaaagcctgcttgaggaagtcacctatcgcaaaaaatgttgatttgagagcattggctaggcacactcaagggttcagtggtgctgatattacagaaatatgccagcgagcatgcaaatatgccataagagaaaacatagagaaggacattgagcgagagaggaagagtagggaaaaccctgaggccatggatgaagataccgtcgacactaagttgccgagatcaaggctgctcattctgaggag

SEQ ID NO: 221252 - DNA, 392 bp, Glycine max
atcattgatacctatggtggctggggtgctcatggtggaggtgccctttcagggaaggaccctaccaaggttgacagaagtggtgcctatattgtaaggcaggctgcaaagagtgtcgtggcaaatggccttgctagaaggtgcattgtgcaagtttcctatgccattggtgtccctgagcccttgtcagtgtttgtggacacttatggaactgggaagattcctgacaaggagattctgcaaattgtgaaggagaatttcgacttcagacctggaatgatcaccattaacttggaccttaagaggggtggtcataggttcctcaagacagctgcttatggacactttggaaagggatgatgcagacttcaccggtgaagttgtgaagccac

SEQ ID NO: 221253 - DNA, 551 bp, Glycine max
tcgcagttcccaaattcattttaatcctaattctgcacttcttgatcattcgatttttctcctcaagatgcagatattcgtaaaaactttgaccggcaagaccatcacccttgaggtggaatcctccgacaccattgacaacgtaaaagctaagattcaagacaaggaagggatcccacctgaccagcagagacttatctttgcgggtaaacaacttgaggatggtcgcacccttgccgattacaacatccaaaaggaatcaaccctccatctcgtgcttcgcctcaggggtggcatgcaaatctttgtcaagactttgaccgggaagaccatcacccttgaggtggaatcctcggacaccattgataatgttaaggccaagatccaggacaaagaggggcatcccccagatcagcagaggctgatttttgccggataacaacttgaggatggaagaacccttgctgattacaacattcagaaggaatccacccttccttggtgctttcgttgagaggtgggatgcagattttcgtaatactttgaccgga

SEQ ID NO: 221254 - DNA, 558 bp, Glycine max
ggacgagaagatatttttaaattagaatgattattttggcacaagcaatacagataaacatcaaatgttttacaacctagtgtttaaatacaaagaagcaaggaagaagcaactttatgctctcaatggaagaatcatagaactctagtgttgtaggaaccacaactagggcatttgtggtagagccagtggaagggggtctctcctttcttttcacaatcattacataataaaacctgagtttgactagaaatctcatcagaaattctctcttcagccaacaacgcatctaacatcctaaaatatacctgcatgtctccaagtgacttgctacatattgggcaggtataattaaagcaggtatattcctgaaaacatgttgagtgcattacatgaccacatgggagggcttttaccggagagcaggatgtgaagatatattcatgacaaattggacagttgtcctctaaatgtttctccctgcatgtatgtgtcataagagaacgagacatacaagctttgcaattatacagtgaagtaggctacacccaaaccctt

SEQ ID NO: 221255 - DNA, 558 bp, Glycine max
tggatggcgaagtaggtgggtgaaatcagactggaaaagcagtgagggcaaagcaggttcattcaagcacacagctggaaaatgggctggtgatccagatgacaaaggtattcaaacatccagtgatgccaaacactttgccatctctgcaaaaataccagaattcacaaacaagaacagaacattggtccttcagtattctgtaaaatttgagcaagagattgaatgtggtggagggtacatcaagcttctctccggatttgttaatcaaaagaagtttggtggggatacaccatatattttaatgtttggaccagatttatgtggcacggatacaaagaagctccatgtgatactctcctaccacggtcaaaattaccccataaagaaggacctgccatgtgaaactgacaggttaactcatttctacacattcattttcaggccagatgccacatacagtgtcctggttgataatagagagagagattcttgaagcatgtatacagattgggtattcttttctcacaaaaataaagatgtcaaggccaaaagcct

SEQ ID NO: 221256 - DNA, 408 bp, Glycine max
tcttcttctcttgcggctagggttttagcgcagcttcttttagatttaaggaagatgggtacgggaaaggttcacatcagtattgtgggcattggccatgtcgactctgggaaatccactaccactggtcacctgatttacaagcttgcatgcattgacaagcgtgttatcgagaggtttgagagcggaagctgctgagatgaacaagaggtctttcaagtatgcctgggagctggacaaacttaaggctgagcgtgaaagaggaatcaccattgatattgcttcaggggagtttggaacaacaaagtattattgcacagttattgctgcgcctcgacatatggatatcattccgaatatgaatactggcacactccaagctgactgggcgtggcttatcattgaatc

SEQ ID NO: 221257 - DNA, 436 bp, Glycine max
cgtagcccaattgcaacaaatgtgcccaagaaacgtggatcctaggattgccatcaacatggacgcaacgactcctcgtaaattctacaatgtttattaccaaaaccttcaacaaggaaagggcctcttgacctcggaccaaaattcatttcacggacccaaggtctaagaacaccggtaattccttttctttcagtaccaacgcttttcaactccaactttggggtggtattaaccaaattgggcttggtagaaattaaaattgcaagaaatggaaaaattcgaaccaatggttcggggttttaagttaaggctttggttaatcatgtaaagtatcaaacagtgcatgttttggaggttaacaacaacacaagttgcaattttagtgcggggggatttgcaaagggtagttagattcattgttgataataaatct

SEQ ID NO: 221258 - DNA, 420 bp, Glycine max
gttctatatattattgaattgacaatgaggcctgctcttgctttgcttcctcttctatttgcttgcttgggagctgccactacagaatcaagaaaagatacaggggaatattggaaaatgatcatgaaagatcaggaaatgccagaaggacttcaaggtcttggttcatttcaatctgaaaataaccctaagactcaagagcagctcggtaaaggttccaaaaaccattgtgaagagtctctaggtacaaatacacaagttaatagtgacttcgaacccataccaagtgttaccaaatatgatgatttggaatgcaagtcaagcattatcaagaacgatgattttgaatcgagaccaagtgttaccaagcatgatgattttgaactcatgcaagcgttaccaagaacaatgaatttgaac

SEQ ID NO: 221259 - DNA, 564 bp, Glycine max
  unsure (1)..(564): unsure at all n locations
tgaatgaccggggagtcgtatctagaacngctcattacttgctagttcttagcttttacaactttcttagcttgagaactatctcacacttctatctccccaagcattctcttttgtttctttttgaacaagtctgtctcttgacttactcttctcactatgcaccttcgtgagtgtaaccccaagcattctcttctgtttctttttgaacaagtctatctcttgacttactcttctcactatgcaccttcgtgagcgtctccccaagctttctcttccgtttctttttggacaagtctatctcttgacttactcttctcactatgcaccttcgtggtgggcgttttggacaagtctgtctcttcacttattattctcactatgcacctttgcgagcgttgcgggttttcaaaacacttggcgaggtccggaatcttaccaagtaataacatttaacctcgagagacgagctcgtgtaaagttgggaattcgttaaggagctgttgctttgttagtgtagaaacacttgtgtagaattggggattgttttttttggagtgattt

SEQ ID NO: 221260 - DNA, 494 bp, Glycine max
  unsure (1)..(494): unsure at all n locations
tggtntaaaagaatgccgaaagttanccgnagnncatntnnnacattagaagacaanacacctgctnggcgaaagtgtaattgactaattgatatcatcatataatattatttatttagattgaaacttgtcaattgtgattaatgcgaagattacattctgcatcattgagcgttcaataattagtctctggttgattgaataatacttaaaagaaatatcacattattacgatcgttgtacaatgagaggatccttgcaaaaagagtagaggtacaacggtacaaggaatcaaacgattcaaaccactaatgacatcattacaaacagactacatttatcataccaaaaaaacaaacaaactacattttcgtaatttattctggagactgctctctctgttctttgatgttcttgaacatcttagaactcttgtcaaaaatctttgctcttctgttataatctttatggtccttcccatcatcagcccccat

SEQ ID NO: 221261 - DNA, 440 bp, Glycine max
aatccaaaacataaatgaaacttttgtttctaatttcaaggtcttgcccaacatccttgagctagatggaagctgttgaaatattattttatcaagtcactttcaacatagaaattcatggtgaaaatgttcttttagcaactttgattacaccgagacaaatcaatgccacatagtggggggaaataaacaaatacagaaggaaagacttaacactacagtacttattattagcctgtaagagcagagttcagagcactatggacatcaaccccaatctgagcttcagctttctccaaatcagttgtggctgagttcagcttctgggtgaaatcttgaagacccttctggactagattcgcatcaattcggtccaccggcacagcctcaacagctattatatcagcaacagagtttgcatggatgaatgcaaagccact

SEQ ID NO: 221262 - DNA, 434 bp, Glycine max
gactgatgcatgttgggcactgtcatatctttctgatggcacaaatgataaaattcaagctgtaattgaagctggtgtttgtccccgacttgttgagctgctgctgcacccatccccttcagtgctaattcctgctcttcgaactgttggaaatattgtcactggagatgatatgcagactcaggttatcatcaatcaccaggctcttccttgccttcttaatctgttgaccaataattataaaaaaagcatcaagaaggaagcttgttggaccatatccaatatcacagctggtaataaacagcagattcaggctgtgattgaggctaatctaattgctcctttggtcaatctgcttcaaaatgctgagtttgatatcaagaaagaagctgcttgggctatctcaaatgctacatccggtggttctcatgaac

SEQ ID NO: 221263 - DNA, 327 bp, Glycine max
ggaacacaaaaaatggcagatattcctcgggtgaagcttggaagccaaggcctgaaggtttccaagttaggatttggttgtatgggcctaagtggagtgtacaacgatcctgttcccgaagaggttggcatctctttgatcaaacacgcattcaccaaaggggtcactttctttgattctgcagatttttatggagcacgtgccaatgaagttttggtcggaaaggctctcagggactttactcgagatcaatttcagattgccacatagtttgggattgacaaaatggaaaatggtcatgtgatagtgaacggattccctgaatat

SEQ ID NO: 221264 - DNA, 252 bp, Glycine max
ctcgagccgcctgacccctaaggccaggggtttttctcggcttcttcagaatcctgaaatggcgtctgtttcagctttagccaaggacaagctcgtcttcttgggtgaccaatacgtgggcaaaaccagcatcatcactcgcttgatgtacgataaattcgataacacctatcatgctacaattgggattgattttctatcaaaaactatgtatctcgaagatcgaactgttcgactgcagatgtgggatac

SEQ ID NO: 221265 - DNA, 430 bp, Glycine max
cgtatcccaattgcaacaaatgtgcccaagaaacgtggatcctaggattgccatcaacatggacgcaacagctcctagtaaattcgacaatgtttattaccaaaaccttcaacaaggaaagggcctctttaccttggaccaaatcctgttcacggacccaaggtctaggaacaccgttaattcctttgcttccagtaccaacgttttcaacttcaactttgtggctgctatgaccaaattgggtcgcgttggagttaagactgcaagaaatgggaaaattcgtaccgattgttctgtgctttaagttaaggctttggttgatcatgtaaagtcgcaaacagtgcatgttttggaggtaaacaacaacacaagttgcaattttagtgcggtgggatttgcaaagggtagttagattcattgttgttaataa

SEQ ID NO: 221266 - DNA, 455 bp, Glycine max
ctctctctctctctcatccttatatttccaacggaaccttctagaaccaccataacatcattctgcgttccctcgcgtttcaacaccgataacccgcaaaaatacccattgatctgcgcctcctcttccatggctccaccgacgccggtggaacacaacggcgactccgtcgctaccgccttcgcctccgactgcgcggagtctcagagatcaattcccacgccctttctcaccaaaacctatcaacgtcggcgacgaccaatccatcgacgacggtatatcctggaacgacgacgggtcaacgtttatcgtctggaaccctaccgttttcgccagagacttgcttcctaaatttttcaaacacaataatttgtctagcttcggtcgccaactcaacacttactgattaggaaaagctggcctgatcgggcggagttctcgaacgattatttccg

SEQ ID NO: 221267 - DNA, 414 bp, Glycine max
caagattctaagagagattttgctgctctttgaagaagggtgtttgcttgattttggtgatgtcgctgctctcagatctcatcaaccttaacctctcagacactactgagaaggtgatcgcagagtacatatggatcggtggatcaggaatggacctgaggagcaaagcaaggactctcccaggaccagttagcgacccttcaaagcttcccaagtggaactatgatggttccagcacaggccaagctcctggagaagacagtgaagtgattatatacccacaagccattttcagggatccattcagaaggggcaacaatatcttggttatctgtgatgcttacactccagctggagaacccattcccactaacaagaggcacgatgctgccaagggtttcagccatcctgatg

SEQ ID NO: 221268 - DNA, 391 bp, Glycine max
cgggactagacagctcccgctgacgtaggtggacccgctccggtggaagaatactacaccttccatgggcgtggcggcaccaagaacaagtgtgaaaacggaactgcaacatttgcacgcagaccgtccttccttggaaccctccaccattacgactggaaagacaaacgcctttatgaccattgcgtacacgttgctgcaccggctggctccatcatgatcgatcaagaaagctgcccaacacgcactgcgtgctagcaactgggaaacggcttaagaatgctacactcacaaacgacatcggcggttccttccttcccgagcttatatccgcttaccttttgtgctacaaccgatccatgataggcgtagcaccctaccggtcctattg

SEQ ID NO: 221269 - DNA, 298 bp, Glycine max
aaacaaaaaagggggcccaaatatttttaccaaacatttatgaatcatgactgccttaaaacaaaaaaaattttttccgaatttcccctgttaaaaataattttttgccccttctaacaatcttaaaaaaaaaaaaaaccaggtttttttttttcaaaaaaacggatccattttttacttttaaaaaagacacctaatttgttggcccgggcaaaatccttgcatcaaaaaacactttttttttcccacccctttggttggacacatgtaattcctaaggggggaacacggttttttt

SEQ ID NO: 221270 - DNA, 406 bp, Glycine max
tccttgtgcaccgtaagggttgtgaagcaggcagagaagagccatggtgcacgtttccttctaccgaaactatgggaaaaccttcaagaagcctcgtcgtccgtacgagaaggagcgtttggacgccgagttgaagctggtcggtgagtacggacttcgctgcaagagggagttgtggagggttcagtacgctctcagccgcatccgtaacaacgccagaaatcttttgaccctcgacgagaagaacccgcgccgtatcttcgagggagaagcccttctccgaagaatgtttcgttacggacttctcgatgagactcagaacaagcttgattacgtgttggctctcaccgtcgagaactttctcgaacgccgccttcaaaccctcgttttcaagtctggcatgggc

SEQ ID NO: 221271 - DNA, 424 bp, Glycine max
ctcaacggatctaaggtttcagtgtagcctgcaatcatgtcaggcaaggatatcattgctgctattcttgcatcatccggagctgcatgggtttgagattattatggttcacacagaatgctatttggaggtttctcccgtggaactatttcaaacaatgagagggcagaagagactgacaaaaaattgtacgcatgggctggtactgtcggtccaccagtgggcatgaatcccataagtcgccaaaattccattgtcaagtctcgtcctgagtaataatacttgctgactgattttgagttaattgatgcttggccatgccatatgtttccatacatgatgataatgcttgaggaaaaactcttacagtttaatgtagtgttcgaagcttaaacatgttaatgtgtgtactcgctaaataaaa

SEQ ID NO: 221272 - DNA, 482 bp, Glycine max
ttcaggagcttgcagaagctgctgatggatactgctacttcagaatataatttctgtgatgatttctttggagaagaatctatattttatgaaattttttcaggtccatttggtgtcattgatgagcacttcgattctatacttccaaattgttatgatgctataggcctcatgcttatgattcaaataatacacaagcatcagctcatcatgtctcgaagacggattccatgcttggattcatatttagacaaggtcaatatatccttgtggcctcgatttaaattggtatttgacatgcacctcaacagcttgcgtaatgcaaatgtgaagacattatgggaagacgatgttcatcctcactatgtcatgaggcgttatgctgagtttactgcttcgcttatccatttaaacgcttaatgtggagatgttcagcttgatttgattttgaacgacttagatggctgttgatgccttactta

SEQ ID NO: 221273 - DNA, 474 bp, Glycine max
atgcgacaaataaaccacttttatttaaaattaaaaagtttcccttggaaagtaacatgagatggactatcaatgtaactataattcataacaagtcttgagatgtgtcaaccatataattgagaacgacgttttatcccatcaaagctcgtcatgaccatcgtaatcatagcgatgccttctatatttgtctctatatctgtcccgatatcgtcgatcatgacctatctctcgtctacgcctttcaccttattatcttgctttttgagcctcctcctcctctatggcttttctcactttatctgcttgctcaaaaccttccttttcaatttccctgatggtaatacaccttctcaacaacttgttttgcataatcagggtcgtcacaaatcaaaacgttgtcaaaaactgaaccgcctttaacctgccaaactttaatacctacatactttgttggtcttaagcacataaaga

SEQ ID NO: 221274 - DNA, 413 bp, Glycine max
gattatcctaagtctttgggaatagtgctgcaatggcttcaagtcaggaggaggtgacccttttgggagctactggaagcccatttgtgtgcagggttcatattgccctcaagttgaagggagttgaatacaaatatgtcgaagaaaatttgaggaacaagagtgaactgcttctcaaatccaacccagttcacaagaaggttccagtgtttattcacaatgagaagcccatagcagagtctcttgtgattgttgaatacattgatgagacatggaagaacaaccccatcttgccttctgatccttaccaaagagccttggctcgtttctggtccaaattaattgatgatcaggttgttggtgctgcatggaaatcccgtttcacagctgatgagaaagaacgtgagaagaat

SEQ ID NO: 221275 - DNA, 403 bp, Glycine max
gcctttacaagccaccatgtgaatgcttgggaaccagagtaagagggggtagggagggctatcgcggtgcatggtggcgctggtgtcgaccctaatctcccactcgagcgccaagaagaagcgaaacaacttctcacgcgctgtctcaatcttggaatctctgctctaaattctaatcttcccgccatagatgtcgtcgaacttgtggtgagggaattggaaacggatccgctgttcaattcgggccgtggatctgccctgacagaaaaaggaacggaggagatggaggctagcatcatggatggtccaaaacgacgatgcggcgccgtttcgggtcttaccaccgttaagaacccgatctcgcttggtcgtttggttatggacaaattcccgcattcctacc

SEQ ID NO: 221276 - DNA, 523 bp, Glycine max
gtttggttttgtagtaagtgaggtgaggtgccaaaatggtgaagataactcttggtactttcgatgactcttttggtgttgcctctcttaaggcttatttggcagagttccatgcaactctgattttcgtgttcgctggtgttggttcagccatcgcttacaacgagcttacaaaagatgcagccttggatccaacggggctggtggcagtagctgtggcccatgcatttgcactgtttgtaggtgtctccgtcgcagccaacatctcgggtggccatttgaacccagctgctacttttggattggccattggaggcaacatcaccctcattactggtttcttatactggattgcccagttgttgggttccattgtggcatgcctcctcctcaatttcatcaccgccaagagcattccaagccacgcaccggcaactggtgtgaacgattttaagctgtagtgtttgagattgtaatcacatttgggttggtttacactgtgtatgcaactgcagcagaccca

SEQ ID NO: 221277 - DNA, 571 bp, Glycine max
cggacgcgtgggctgcaggagcgctagcatggcaagttcgcgctgctttgagaacccgccggtgctggagccggccagcggaggaggcgaggtggttgacgacttcggcgggcagaaggcctacgtcagcggctccgccgggtccaaggccgccgtcgtcctcatctccgacgccttcgggttcgaagcgccaaacctgaggaagatagccgacaaagttgcttcgctcggttacttcgttgtggtgcccgatttcctgcatggggatccatatgaccccagcaataatgcccatagcaatcctggaacgtggatacagtcgcacaatccgcaaacggcattcgaagaggcaaaaccggtaattgcggctataaaggagaaggggtgtgtcgagcatcggagctgcaggttactgttggggcgcaaggtggttgtggaactggcgaaagttcacgagatccaggctgctgtgttggcacacccttctttactaactgtcgatgatatgaaagatgtcaagtgccccatttccatacttggagctgaaatcgacaggtcagccccgcctgaa

SEQ ID NO: 221278 - DNA, 542 bp, Glycine max
  unsure (1)..(542): unsure at all n locations
tgccggcgttcccaagaagcggcaacgcaccaccgccgccaaccgttcctcctccacagttggcaccatctcctccctctccgacgtaaccctaatcgaaatctcccaaaaccctcgaccttcctctcccatgaccgacgaccgcccctctcccgcggcggaagacgctctccattataacgacgcttccaccgccgacgtcgtcctccgcctcttcatcgacgctccctctccgctcgattccgtttccaactccgaccaccacgtctacctccactccgacgtcctccgccgctccaaatacttctccgcgctcctctccgaccggtggatcggccgcgtcgcgccggacttctcgtcctcctcctcctgcaaccgcgaccgcgacctcgacctcttccgcctcaaccttcgtgtggctcccaccggcggctcgatccaatcgcatctcaccgtcctggagcttctctacacgaacgacttcgccgcggcggtggcccgcgcgtcgacggcgctggatctgtacncggtggcgctggagc

SEQ ID NO: 221279 - DNA, 437 bp, Glycine max
  unsure (1)..(437): unsure at all n locations
cccacgcgtccgcggacgcgtgggcggacgcgtgggcgcgccggatggggagtgatggcaagccacaggagtggcgagacagaggacaccttcattgctgacctctcagttggcctgtctacgggccaaatcaagacgggagctccttgccggtctgagcgcctggccaaatacaaccagctgctcaggatcgaggaggagctcggtgatgccgcggtctacgccggagcaaagttcagggcaccagtggagccctactaagaaaggaagaggatgaggatgttttcttgtggagctatactagctcgctgctgccttttgttacaatgtttgtacggtcgcaataaatgtatggtcgtgtttgctcgagagctactcangtgattttgtcgtgggagcaccaaaagcagaaagaactggnntttttcttctctctc

SEQ ID NO: 221280 - DNA, 396 bp, Glycine max
aatggcttctgtgcctcaaccaaaaatctcccttctaaccttattcttcttctcgtccttcaccatcattgcgcatgcaattgttcctcaaaacgaaaccttcaaatttgagaactcaggtgaacttggaccctacatcgttgagtacggtgcagattacagaatgataagcatcttcaactctccattccaagttggtttctacaacaccaccccaaatgccttcactctagctttgcgtgtagggctccaacgctcggagcagctatttcgttgggtttgggaggccaatagggccaacccagttggagaaaatgccactttttcacttggcactgatgggacctttgtgttggcagatgctgatggcagaattgcatggcaaactaacacttg

SEQ ID NO: 221281 - DNA, 566 bp, Glycine max
  unsure (1)..(566): unsure at all n locations
gaaagagaagagaagttgatgtcaacagcagaagctcctcccccgttccaagaagcagcgcgatgcgttgtgtgcaattgcagtttcaacaccttcagaagaaggcatcactgtcgatcctgtgggagaacattgtgcaatgaacattcatcagatcaaatggctttaccacaatttggcatttactcaaatgtccgagtatgtgctgattgtttcaacaactcacggtctgggaaggatgaaccacagacttcttcagatggagtaaacagtgtgacagatacaatttctaaattagatatcaacacaaatgttgattcaaaatccataccaactgcagagaataagcttgtgttgggcattaaagagtgtnaatgtggaatgccactttgcatttgtgaagctccaaccccttcctctgatgcactcccncagcagaaacccaatccagttattgcagctccatcaaatcctaaatctaagaagacagatactgntccgaaaaatgaagctccagttcaactagcaaatttagttctattgttaaccgtggtcatgtaactaat

SEQ ID NO: 221282 - DNA, 393 bp, Glycine max
cccacgcgtccggactagttctaggcccgagcgaagaagaaaggagggtgctctgccggcggcggagcggagatgtccgagaggaggcgcggcgccggcgccggcaccggcacccgcaaggatgaggtggtgacccgcgagtacaccatcaacctccacaagcgcctccacggatgcaccttcaagaagaaggcaccgaatgccatcaaggagatcaggaagttcgcccagaagaccatgggtaccaccgatgtccggatcgatgtgaagctcaacaagcacgtctggagcagcggtatccggagtgtgccgaggcgagtccgtgtcaggattgcccgcaagaggaacgacgaggaagacgccaaggaggggcagtactctctggtcacagta

SEQ ID NO: 221283 - DNA, 424 bp, Glycine max
agagatgtaaatggaagaacatcagcaacacagaaggagacattgaatgttttggctacaaacggaaaagaatccatgttccccaatcttttatcttcgctactacaggctcaattctttcggcgctggtggccattgttgtctttaagatagcactctattttagacagaaagaagacgaccaagcaagagtggccaagtttttagaggattacagggcagaaaagcctgcaagatttacctatgctgatttgaaaagaatcaccggtggctttaaagaaaagttaggggaaggagctcacggggctgtattcagaggaaaactttcaaatgagattctagtggctggtgaagatcctcaataatacagagggagaagggaaggagttcattaatgaagtgggaatcatgggaaaaattcatc

SEQ ID NO: 221284 - DNA, 352 bp, Glycine max
gactagttctagcaaggacaagcgtgccctgaagcttgctaagagaaagcttggaactcacaagagggcaaagaagaagagagaggagatggcgggcgtcctcaggaagatgaggtcggctggtacgcacactgacaaaaagaaatagagagcatttcaagttcatggagctggctgccagagattatgttccagtgtctgattttccatacatgtagaacctaatagacatgtcaaagtattatgtatcgaaccagctcatgggattttgctccttccaatgcatccagggtttatgtatcgaaccaatttatgggatcttgctcttattctaatgcatccatggtttgtg

SEQ ID NO: 221285 - DNA, 536 bp, Glycine max
cggggaagaagaagcagctcttttggccctatgtcctcaaccgtcccttgttttctcctccttttgttctgtctctcaggatctgctgaggcctacaagaattatacagttggagactctataggatggtttgacaatactgagaagtccaatgtcaattaccagaagtgggctgacagtaaagaattcagcttgggagatttcctcattttcaactcggacactaaccactcagtggttcagacatacaatttcaccacatacaaagaatgtgactatgatgatgcacaagacaaggacacaacccaatggtcagcttctgatccatccaacacccaaacacatcctgtgacagtggctgttcttttggtgaaggaaggcatgacatacttcttctcaggtgattagcatggtgaccaatgcgagagtggacaacacttcaaaataaatgtgacctatggcaagggttgcaaagagtcttaaatccgcagagatgctccatctcctgctagtcctgttgctggagatgatgattc

SEQ ID NO: 221286 - DNA, 548 bp, Glycine max
accaaccagccgggagagggagcgcacgcactgcgagaatggccacggccggcggaggggccgggcatctgaagctgctgggcgcgtggccgagccccttcgtgaaccgcgtacgcatggcgctgcacctcaaggggctggagtacgagaacgtggaggaggacctcaccaacaagagcgacctgctcctcgcctccaaccccgtccacaagctcgttcccgtcctcctccacggcgacaagcccatctccgagtcactcgtcatcgtggagtacctcgacgacgccttccccggcgctggccaggccgtcctccccgccgacccctatgaacgcgccgtcgctcgcttctgggccaaatacgtcgacggcaagttgcacggcatgatggtgaaggcgctcatggaggcaacagaggaggagagggcgacggcgacagtggacgcgctggccgctatggacacgctggagggcgcgttcgccgagtgctccggcgggaaaaagttcttcgccggcgacgcgcccgggtacctggacgtcgcgctggga

SEQ ID NO: 221287 - DNA, 558 bp, Glycine max
  unsure (1)..(558): unsure at all n locations
ngtccctgccggnngacttgaccgtatgcntccgaattttnggtcgaccacgcgtccgattgggttcgcggtgttcctggtccaccttgccaccatccttattactggcactggcatcaacccagctaggagccttggcgctgccatcatctacaacagggatcacgcctggaacgaccattggatcttctgggtcggccccttcattggtgctgccctggctgccatctaccaccacgtgatcatcagagccatcccgatgacgagcaggtcttaagctgccgcgtccgttccgagacatgccagctctaagaacgggcgtatgcctgtgatgtgttgttggatggccacgcctagtgcatctggcaatcactatacgctatctgttcacggatattgcttactgctgcgaccgtactggtgaccgaagcaagagctctgtgatttcctgtaccgagctgtgcatgatgattattcttaccatcgcggagatgtgaaaacattatacgtctgtggcaaggcttgacagctcattatatgcgacgacatggtggaaca

SEQ ID NO: 221288 - DNA, 535 bp, Glycine max
  unsure (1)..(535): unsure at all n locations
cttcttcccttcctccccaagcataacatagcttcctcgattcttcgttctagggtttgaaaagatgaacatttgtggttgttgggtttcatcaatgaaattgcccttcctcgggtggcgcttttcaaggccttttacctctctctgttcttcttctttttcgccacgcattatgaccattcaaagttgttcttctccttcttcttcagcctccttatcaacgtcagagtcgaaagagatgaagaaggaagcttcaccttggttaattgttggcctcggcaatccaggcaaaaagtacgctgccacccgccacaatgtgggctttgagatggttgataccatagctgaagctgaagggatatctatgaccactgtttccttcaaatccttatttggaaaaggttttatagggtgatgtaccagtcatacttgcaaaaccacagacttatatgaattcaagtggtgaatctgttggggccatagtttcatattacaagattccactgangcaagtacttgtgatctttgacgactt

SEQ ID NO: 221289 - DNA, 457 bp, Glycine max
cttcctccaattataacacccaccaaagaaccatggctacccagttcctcaaatccctccttctcctctccaccttaaccctaaccatctcagcagaatacacaggctttgtgggcacaatagacccaaagtccataggcataaagcacaagaaaaccctaagccacttcagattctactggcacgaagtcttcagcggagaaaaccccacatcggttagaatcattcccgcactccccaaatacaacacaaccacaacctttggttcggttgggatcttcgacaacgctttaactgtgggacccgaggtttactccaaggttgtcggaaaagccgagggcttgtttgcctccacgtcgcaaacgcagttggatcttttgctgattttcaacttcgcattgacacaggagaagtacaacggcagcaccatcacgttcactgggaggagccccctctc

SEQ ID NO: 221290 - DNA, 487 bp, Glycine max
  unsure (1)..(487): unsure at all n locations
gttcagtatttatacaaataaaagttttttctttttttatttctggttttcgttttggaatggctgggatttgctgtggagttgttggagaagccgccgagacttcttctcccatcgaacccacctcacgcccttccgcacgccggagtttggaccttttgcccttgaaatacatagctgctgacgtgtcagtcccgccgctggagaacagccggaagcgccagaggctggataggcgcgcttctccggcaagggagtgcgataacgcggttcatagttccaaatcgaaggtagttgaggttgttccgaattattcttcgaagagtccaacgttggactccacaagtccaacagttgtcgaggagtatccgaggtatggngtaacgtccgtttgtggaaggaggagggacatggaagacgccgtttcggtccatccatcgttttgccaagaaactttatctcatgataaagaattagggtttcattt

SEQ ID NO: 221291 - DNA, 441 bp, Glycine max
ggaaattattaaattaagcaaatgggtcgcaatagcatagacatggacagggagagattaacggctgagatggacttcaaggactcatcctccgccgtgatcagaatccggcgccggctgccggatttccttcagtcggtgaaactgaaatacgtgaagttgggattgggatacggttactcatactcatgcaaagcagccagcattgtgatgctagccatcaccctcctctcgtgttctctctaaccggtggtatcaagctctccaaactctgctcccacaaccaccagctcgacgccgagaccgtggcggcggcttcggcggcgctactctccctggccgccctgtaccggtggaagcggtctcggcggtgtacctggtggccttcgcgtgctacaagccggagaaagaacgcaaaattcggtggggggggttctgaag

SEQ ID NO: 221292 - DNA, 379 bp, Glycine max
cccacgcgtccggccttaccagatccatcgactcgcttgggccgcccctgccgatgtgcccgttcgaaggtgcggtacctggcaagcgagccatttgattcgacatgaatacctggtgcgagtacgttttggaacttttgcttattggagattctggcgttgacaaatcatgcttgcttttgagatttgcagacgattgttatttggacaggtatatcagcacaattggggctgatttcaaaattaacacagtggagcacgatggcaagaccatactgacttgatattcgcgatactgctgagtgagagcgcttcaagacactcactagctcctactaccgccgagatcatggaatcattattgtctatgacgtgacag

SEQ ID NO: 221293 - DNA, 508 bp, Glycine max
gtgcttatccagatatccaaattatttcaaattgtgatggttcttctcgacctttagatcatccagctgatatgtatgattatcatgtttatacaaatgcgaatgacatgttttctagagctaatgcatttgatcatacatctcgaaatggtccaaaggcttttgtaagtgagtatgctgtgactggaaaagatgctgggacaggaagcctcttggcagccctagctgaagctgggttccttattggactggaaaagaacagtgatgttatccaaatggccagctatgctccactttttgttaatgccaatgataggaggtggaacccagatgcaattgtattcaactcctttcagctctatggaactcctagctattgggtgcaagtatttttctcagagtcgagtggagcaacacttctaagtacaatcacttaagcacctttctaaattcacttggtgcatcagcaattacatttcaaagttctgtagataagaaaaattacata

SEQ ID NO: 221294 - DNA, 483 bp, Glycine max
cggacgcgtgggtttgacaatctatacaacaatgagataagtggtgttatcgttgaagcgctcagggttggacttgaacctcaagttgcggcacaaaaaattgctgccctggctcgacaaagagccacagacaaaaataggcagtcaccatttgcatcggccgcccaagaagctgggtaccggtactacggtgggaagctcgacgacataacggatggggtgtcctatgtgaaaagcgcttgattcgagcctttctttttattagatgtaatggcaaaatcttaatcccgaatttaatggcacatgtgttctcaaggggtgaaatcccctgagatactagaagcacttctggtgggtttagccctggattacgttagcaaaccattacaccattttacttgtttgccactgtgagtaatcttctttttatatataattctctaaaaccagggcgggtcgtttcgcccttggagttggaggggg

SEQ ID NO: 221295 - DNA, 499 bp, Glycine max
  unsure (1)..(499): unsure at all n locations
cggcttggagagggtttggaatcatggtgtggattttaccaaagcataaggcctactcagatgggtctttccctcaatattgatatggcttctgctgcgttcattgaacctcttccagttgtggaatatgttgaccagctattaggaaaagatatcctgtcgaggcaattgtccgacgctgatcgcattaaaattaagaaagtccttagaggtgttaaagttgaagtaacccacagagggagtgttagaagaaagtatcgagtttctggtttgacttctcaaccaaccagagaacttgtgtttcccgttgatgagaattcaactatgaagtccgtagttgaatacttccaagagatgtatggtttcacaattaaatattctcaccttccttgccttcaagtaggaaatcaaaagaaagcaaattatttacctatggaggcctgcaaattgttgagggacaacgatatacaaaaggttgaatgagaagcanatcactgct

SEQ ID NO: 221296 - DNA, 558 bp, Glycine max
  unsure (1)..(558): unsure at all n locations
cccacgcgtccgcccacgcgtccggccgccgcacgagtgcggctacccgggcagcgtcttcaacccgctcaacttcgcgcccacgctcgaggccaaggagaaggagctcgccaacgggaggctggcgatgctggcgttcctgggcttcctgatccagcacaacgtcaccggcaaggggcccttcgacaacctgctgcagcacctgtctgacccatggcacaacaccatcatccagaccttctccggttgagtcgaggtcgaggagggatacgatccatcgctggtgagctgatatggactggaaggcaaacattgaaaccttaagttcctttctggatcagtttgtgtgtgttgttaatctatctggagggtacagattcgtgccgtgttgcaatgcatgcatggtctgaagggagcgagggctgaggagtgactggtatgtacattagctgaaggggatattaagggtagagatcgtttgatcagtatcatctgtatatccccatgcatggngttntcgctatgtgcgcttacttctggcttgccagcgtatggttc

SEQ ID NO: 221297 - DNA, 418 bp, Glycine max
ctcaacggatctaatgttttagtgttttctgtaatcatgtcaggcatgtatatcgtggctgctattcttggaacatctggagttgcatgggttcgtgattattatgtttcagacaaaaagctttttggaggttctacccctggaactattacaaacaatgagtgggcagaagagactgacaaaaaattgcaggcatggtcttgtactgccggtccaccagtggtcatgaatcccataagtcgccaaaatttcattgtcaagtctcgcgctgagtaataatttttgttgattgattttgagttaattggtgcttggtcatgccatatgtttccataaatgatgataatgcttgaggtaaaactcttacagttcaattagtgttttgaagtttaaacatgtgaaatgtggtttacttgct

SEQ ID NO: 221298 - DNA, 405 bp, Glycine max
ctctttctctagtcctgttatttctcagcgcgtaaagcatggctttgttggtggagaaaaccacgagtggtcgcgagtacaaggtcaaggacctttcccaggccgacttcggccgcctcgagatcgagctggccgaggttgagatgcccggcctcatggcctgtcggaccgagttcggcccctcccagcccttcaagggggcccgcatcaccggctccctccacatgaccatccagaccgccgttctcattgagaccctcaccgcccttggcgccgaggtccgctggtgctcctgcaacatcttctccacccaggaccacgccgccgtcgctattgcccgcgacagtgccgccgtcttcgctggaagggtgagaccctcaggagactggtggtgcaccgagcgcg

SEQ ID NO: 221299 - DNA, 574 bp, Glycine max
ttcttttgcaattgcatttctttgagtgccagcgagtaaacgagttggtatgacaagagattcttcatcatagatgagatggcagcccggcaccggcacaaatagacctgatggagcttggaaagatatatctatggattgagggccggactaaatcggaagggctctctgttctatttatattagtagtggtagacagacaaataggcccatttttgacctcttaaacatccttacattgctgcttcagttgctaccactttcctaaacaatattgggaagttgcatggagtgccagccactattgtatctgacagggacagggtgttcactagctccttttggaggggcaagctattggacactaagttgcagttgagctctgcctatcaccctcagactgaggggcagactgaaagagtgaatgaatcagtgtcttgagatgtatctcaggtgctcagtaagttctactccaaacagtgggttaagtggttgccattggcttggtacaattcggctcatcacttctgcaatcctctccagttaaagcactctatggtatggccatgaaccc

SEQ ID NO: 221300 - DNA, 457 bp, Glycine max
ctcgagccgaatcggctcgagcgctctctgcatcctttcttttctctctcctccgctttatctatgcctcttgcaccatatcaggatcctcctcctcttcgtaccgatcaaacacaagcaaagctctttcgtcttcttcggtgaatgattgatccctcatcatcatcatcatgggggtgttacaggagaagctctcgtcgttctacaagagccgctggctggttttcgtggccgcaatgtggctgcagtcgtgggcgggcatcgggtacttgttcgggagcatttcgcccgtcataaagagctctctgggctacaaccagaagcagctcgcatcctcgggcgcgtcgccaaggaccttgtcgacgccgtcggcttcatgacgggcctgctctgcgagattttgcccatctggggcgcgcttctcgtcggcgctgctatgaacgtcgtgggatatggc

SEQ ID NO: 221301 - DNA, 495 bp, Glycine max
gcgccactgtccagtgcgcgcgtcaagcttgcttagctagccgccatggcctccctcgccgccgtctccgtgaagcccgtggccatcaagggtctcgccggcagctccatctccggaaggaagctcgccgtccccaggccgacggcccgctccatccgcaggccccgcgcagccgccgtggtggccaagtacggcgacaagagcgtctactttgacctcgacgacatcggcaacaccaccggacagtgggacctctacgggtctgacgcgccctcgccctacaacccgctacagagcaagttcttcgagacgttcgcggctccgttcaccaagagaggtctgctgctcaagttcctgctgctgggcggcggctcacttctggcctacgtcagcgccgtggcgtcaccggaccttctgccgatcaagaagggaccttatgagccgtcgtagccgggcccccgcgggaagatctaagctcagcttctccatttgcat

SEQ ID NO: 221302 - DNA, 585 bp, Glycine max
  unsure (1)..(585): unsure at all n locations
gactagttctagatcgcacatattattgagaccaactagcaacatagaaagcacaatagtgtaccaacaatggcagccaaaatattttgcctccttatgctccttggtctttctgcaagtgctgctacggcgaccattttcccgcaatgctcgcaagctcctatagcttcccttcttcccccgtacctctcaccagcggtgtcttcggtatgtgaaaacccaattcttcaaccctacaggatccaacaggcaatcgcagctggcatcttacctttatcacccttgttcctccaacaatcatcagccctattacaacagttacctttggtgcatttattggcacaaaacatcagggcacaacaactacaacaacttgtgctagcaaaccttgctgcctactctcagcaacagcagtttcttccattcaaccaactaggttcattgaactctgcttcttatttgcaacaacaacaactaccattcagccagctacctgctgcctacccccagcaatttcttccattcaaccaactagcagcattgaactctcctgcttatntacagcagcaacaactactaccattc

SEQ ID NO: 221303 - DNA, 544 bp, Glycine max
ctttctatatagtaagggtgacctggcaagctatcttcaaaagaaagggcgtttgtctccatcaaaagttctacgctttgctcttgatattgccaggggcatgaactatcttcacgaatgcaaaccagatccggttattcactgtgatttaaagccaaaaaatattttgctggataatggagggcaattgaagatagctggatttggcactgtgagattttcgctaatctcacctgatgaagcaaagctggtacagccagagcctaacattgatctttcaagcttgtacgtggcaccggagatttacaaagatgaagtttttgatagaagtgtggatgcatattcttttggtctcattatatatgagatgatagagggtacacatcccttccatcccaagtcctcggaggaggcagttagactgatgtgcttggaagggaaaagaccagcattcaagatcaaaacaaaacattatccttcagagttgaaagagtttgatcgaggaatgttgggatccaacacctgttgtcaggccaacattttc

SEQ ID NO: 221304 - DNA, 399 bp, Glycine max
gctggtacacatactagccagcctgccagccagcttgccatggcgcccaccgtgatgatggcctcgtcggcaaccgccgtcgccccgttccagggtctcaagtccgccgccagcctccccgtcgcccgccgcagcaccaggagcctcggcaacgtcagcaacggcggaaggatccggtgcatgcaggtgtggccggcctacggcaacaagaagttcgagacgctgtcgtacctgccgccgctgtcgacggacgacctgctgaagcaggtggactacctgctgcgcaacggctggataccctgcctcgagttcagcaagctcgggttcgtgtaccgcgagaactccacctccccgtgctactacgacgggcgctactggaccatgtggaagctgcccatg

SEQ ID NO: 221305 - DNA, 462 bp, Glycine max
cccggagagcctgcggtggaacgtgcaggcggagctggtgcactgccggtgggcgatgctcggcgcggcgggcatcttcatcccggagtttctgaccaagatcggcgtcctcaacacacccttctggtacaccgccggcgagcagcagtacttcaccgacaccaccaccctcttcatcatcgagctcatcctcatcggctgggccgagggccgccgctgggctgacatcatcaagcccggaagcgtcaacaccgaccccatcttccccagcaacaagctcaccggcaccgacgtcgggtaccctggtggcctctggtttgacccgctcggctggggcagcggctcgccggagaagatcaaggagctgcgcaccaaggagatcaagaacggacgcctcgccatgctcgccagtatgggcgcctggttccaagccgagtacaccggcaccggccccatcgacaa

SEQ ID NO: 221306 - DNA, 466 bp, Glycine max
gcggcggcggcggtggtgaggtggaaactccaagggccactgggaagagagggttctctgagactgttgatctgaaacttaatcttcattccaaggaagatctgaatgagaatctgaagaatgtctcaaaggagaagaccctccttaaggatcctgccaagccaccggctaaggctcaagtggttggttggccaccagtgaggtcatacaggaagaacatgatggcagtacaaaaggttagcactgaggatgtggcagagaagacaacaagcagcactgctaattctggggcatttgtcaaggtttccatggatggagcaccttacctgcgcaaggtggacctcacaatgtacaaaagctacaaagagttatctgatgccttggcaaaatgttcagctccttcccatgggtaactatggggcccaaggaatgataggacttatgaatgacaggcagtgatgggatc

SEQ ID NO: 221307 - DNA, 458 bp, Glycine max
caatcttctgagagtgtttggttgaaagtagcaaagatgtttcctttcgggcaaaagggtcaaaagataaaggggactatggtggttatgcagaagaatgtgttggatatcaacagcatcaccagtgttggagggatcgttgaccaaggcttaggcttcataggcagtgcagtcgatgcacttacttttgcagccaccaaaatctccatccagttgattagtgctaccaaggctgatggtgggaaaggaaaaattggaaagagtacaaatttaagaggaaagataacattaccaaccttgggagctggcgaacaagcatacgatgttaattttgaatgggacagtgacttcggaattcccggtgcattttatattaagaacttcatgcaaaatgagttctacctcaagtctctaattctcgaagacattccaaaccacggaaccattcacttcgtatg

SEQ ID NO: 221308 - DNA, 595 bp, Glycine max
cgtccgggagcagctggagggctgctacctcctggctggtatcaagtacgagggcctgacggtgaagcagctgcagggaatccgcgacgcgctcccagagacctgcagactgctggtggcgaagaacactctggtggggaaagccatcgagggcaccccctgggaagcgctcaagccgtgcatgaagggtatgaatgcctggctcttcgtccacaccgaggaggtaccagccgcgctcaagccctaccgcgccttccagaaagaggagcgcgtcgaggagaccaacgacttcgtcggggccgtctttgagggcaagttttacgggcccggagacttcaaggcgctcgagactatgcccagccgcgccgaggtgtacgccacgctgctcggcgcgctgcagggacccgctacgtcgctcgtcgccacgctgcaggcgccagccaggatgtcgttgcggtgctctccgcgtacgtacgcaagctcgaagaggaggctggagccgcctagtggggttgtgaaatggttgtcatctccctttcactccctactttctgtttgtagaattctgtgtaccttaactggctcccagtcacat

SEQ ID NO: 221309 - DNA, 422 bp, Glycine max
ggaattccgagttgcaatatggactaagctttcgagatatgagcattgaagatctttgtcttgattttactcttcctgggtttcctgatattgttcttgcttcagggaccgatcataccatggtaaatatgagaaacttggaggattatgtttctcttattgtcgatgcaactgtgaggtctggagtttcaagacaagtggaagcttttaaatctggctttaaccaggttttctccattgatcatcttcggattttcaatgaagaagaacttgagcgaatgctttgtggagagtatgactcttgggctgtcaaacgagtttggagatcacattagttctgatcatgggtatactgctagcagtcctccattgataatttgttggagattgtccgaaagtttgataatggacagcgacgagca

SEQ ID NO: 221310 - DNA, 560 bp, Glycine max
  unsure (1)..(560): unsure at all n locations
gcaacgacgacgacgacggcgctcaggactcaggtgctttcggttcaggcggaggagggcatggagcgcggcgactgccagttcacggtggtgccgccgcggcagtacgacgaggcccagttcatgcaccagctgatggtggccggcgaccagcaggaccccgcgggcgcggggcggggagctgccgccgccggcggggagaggaagcggcggttcacggaggagcaggtgcggtcgctggagacgacgttccacgcgcggcgcgccaagctggagccccgggagaaggcggagctggcgcgggagcttggcctgcagccgcgccaggtggccatctggttccagaataagcgtgcgcggtggcgctccaagcagctggagcatgactacgccgcgctccgggctcagttcgacgcgatgcacgcccgcgtcgagtcgctcaggcaggagaagatcgcgctcgccgcgcaggtagacgagctgcgngggaggctgaacgagcggcaagaccagagcggcagctgcgaggtcaacgacgcggaggcggctgcggacgacaa

SEQ ID NO: 221311 - DNA, 498 bp, Glycine max
aagagactcaggcgctgctgcccttcagtccttcagcaatggtttacgtgaagtcacagaaatcaaaagcctacttcaagaggtatcaagtcaagttcaagagaagaagagagggaaaaaccgattaccgtgccaggattcggttgattaatcaggacaagaacaaatataacaccccgaaatatcgctttgttgttcgtttcagcaacaaagacattgttgcacaaataatatctgctagcattgctggcgatattgttcttgctgcagcatatgcacatgagctgccacgatatggtcttgaagtagggcttacaaattatgctgcagcttattgtactggtctcctgttggcccgaagagtcctcaaaacacttgaaatggatgaggagtacgaaggaaatgttgaggctactggagaggacttttcagtggaacctgctgagagcaggaggccttttcgtgctctcttgatgttggtcttatagggactacact

SEQ ID NO: 221312 - DNA, 590 bp, Glycine max
cccacgcgtccggtcccagaggagtccatgggatcagttgttgagcttttagggaaaaggcgtggacaaatggttgacatggaagctaacgggacggagggaacaacattgctgaaatacaagattcctaccagaggccttatcggacttcggaatgcaattcttacagcttctcgtggcagagctatattgaatacaatctttgacagctatggcccatgggctggagatcttagctcacgtgatcagggatccttggttgcttttgaagatggaagcactacttcttatgcacttcttaatgcacaagaaagaggtatgttgtttgtccaaccagggcaggatgtttacaaaggtcaaattgttggtatccatcagagacctggtgatttagcaattaatgtgtgcaagaaaaaggctgctacaaatgttcgttccaacaaagaaactacagtggttcttgatgaacctttaagctacagtttggatgactgcatagagtttatccaagaagatgagatagtggaggttactcctgcaagcatccgtatgtgcaagaacccaaagtctcgaaaaaaagtacataatcg

SEQ ID NO: 221313 - DNA, 471 bp, Glycine max
  unsure (1)..(471): unsure at all n locations
agaatacaacatttcatttctcatcgatggctttctcttgtaaacttgactgcttcattctccctgcctataaaccccaaaactccattctcccactttcaatccaaccttcctccttcctcccatctccttcttccttcaagcctcaaaagcttcccttcggaatccgctatggttctaccatcagagtcacttcatcatcctcaaccccttccacaaccattgccgaacctgaaggcattaagattaaatcgattccaaccaagcccatcgagggacaaaagactggaaccagtgggcttcgaaagaaggtgaaagtgtttatgcaagacaattacctcgcaaattggatccaggccctgtttaattcattgcctcccgaggattacaagaatggcttgttggtgttgngagagtgaatgggcgatactctaatcgggaagctgcacagataataatcaaaattgctgc

SEQ ID NO: 221314 - DNA, 550 bp, Glycine max
ggcttggagcccagatggcctgacattcgccactggtaaccaagacaaaacttgtcggatttgggatgccaggaatctcaccgagtctgtccatgtcttgagaggcaacgttggagcaataagatctattcgttttacatccgacgggcacttcttgtcgatggcagaagcagcagactttgtccacatctttgacatcaaaagtgactacaataagagacaggaattggatttctttggcgaggtatccggtatgtccttcagccccgacacggacacactttatgttggaatctcggacaggacatatggcagcctgcttcagtttggccgcctctacaactattcatacctcgactcactactatgaaggtcaaagaaaatatgtgttttccctcggcttataatcaacccagattaggcatcccaaatgaaatttaatttagcctggtattcctcgtaaagaatcctgtaccctggtgtatgtgtacataaaaaaaactgtattttatagacaccagtagtctgctatcctgctttcagattaggt

SEQ ID NO: 221315 - DNA, 524 bp, Glycine max
  unsure (1)..(524): unsure at all n locations
cgccagcgtctctacgacaatctcctttctctctaactcataactcagatgagttccctctctaataactctagtagtagccacggcaattccttcctccagatgccccccatcaagtttaccaagctcttcatcaatggagatttcgttgattccttatctggaaggacatttgagactatagaccccagaacagaagaggtaattgcaagagttagtgagggagacaaagaagatattgatattgctgttaaagcagcacgtcaggcattcgactcaggtccatggcctcgcttgcccgcctctgaaagggcaaaaattatgatgaaatgggcagacctaattgatgaaaacatagaagaactagcagcattagataccgtggatgctggcaagctgaactatattataagggttgtggaaattccttcagctacanatgcgttacgatactatgcaggtgcggctgataaaatncatggttgaagtattaaaaatgaatggggattttcacgcatatacac

SEQ ID NO: 221316 - DNA, 338 bp, Glycine max
ggatctggatttggccaagttcctggaacatggcacgtaagatgcacgatcctgccgcaggaagacaaaatccccgcggtgatcacccgcttcaaggctttccatgaggcgttcatggctgagtaccgcgactgaactgttacagtggctgagtaccatcgtgtagaccgaaacaaaataaagctccactctctctctctctgtctctgtgcgtgtgtgtgaactgatctctgaatggaagaacaatgtactctgttggcgcctttaatggcaattgaggaaaattttgatcaaatttctgttgtgctaggagccaagctgaaaagccacgtttttct

SEQ ID NO: 221317 - DNA, 399 bp, Glycine max
aaaaaaaaaaaaaaaaaaaaaaaaaaaaaaaaaaaaaaaaaaaaaaaaaaaaagggggggcgctctataaggagcccagctgttacacacgcgcatgcgccacgatatatcttttatatagggaccccaatttacttttctgggcgcgggtttatacaacggcgagtgggaaaaccccgtggtgtccccaatttaaagccttgtggaacatatccctttttccacagggggtaatatcgaaaaggggcccaccgagagcgcttttccaaacatgtgcacactcaatggggaatggggcacgccctctgtaggggcatataaagcgcggggggtggggggtttacgcacagtgtcacttatactttgtggagccctatagccccctcctttttctttttt

SEQ ID NO: 221318 - DNA, 547 bp, Glycine max
  unsure (1)..(547): unsure at all n locations
gttacctgcgtgaactttctcataaaactcaagctgcagctgcagttgcttcatcaatagctgaggaatcctttggtgcaataagaacagtaagatcatttgcccaagaagattatgaagtaacacgctactcagagaaagttaatgaaacacttaatcttggtcttaaacaagctaaaattgttggactcttttctggaggccttaatgctgcatctacactttcagtcattatagttgttatatatggagctaatttgacaatcaagggttccatgtctcggngtgatcttacatctttcattctttatagtctctaggtgggttcttctatatctggtctgtcaggattgtatacaggagttatgaaagtggcaggtgctagcagaagggtatttcaacttttggatcgtacctcatccatgcctaagtcgggagataaatgtccctgggtgatcacgatgggaaagtagaactagatgatgtgtgggtttgcctatccatcacgccctagtcatccagtgctcaagggcattacattgaaact

SEQ ID NO: 221319 - DNA, 583 bp, Glycine max
  unsure (1)..(583): unsure at all n locations
cggacgcgtgggggaaacaccgccgccgccgcgccttccattccagtactcgcggaggaaaggaacaccagccagcgccatggtcacgtcgacgaccgccgccgccgtgctgtccccgccgtccgtggccgggcttcgcctggcgccgtctccccgggcgcgcgtggcgttccgcgcggcgccggcgcggcggtccgtggcggcgcgcgcggagctgagcccgtcgctggtgatcagcctgagcacgggcgtgtcgctcttcctgggccgcttcgtcttcttcaacttccagcgggagaacgtggcgaagcaggtgcccgagcagaacggcaagacgcacttcgacgccggcgacgagcgcgccaaggagttctcgggcctgctcaagtccaacgaccccgtgggcttcaacctcgtcgacgtcctcgcctggggctcgctcggccacatcgtcgcctactacatcctcgccacctccagcaacggatacgaccncaacttcttctgagcggccggctgcgggcatgttcttgagcctgcctgtattctactncgtgtgtgttgagccatatatctgatgctc

SEQ ID NO: 221320 - DNA, 411 bp, Glycine max
  unsure (1)..(411): unsure at all n locations
aagaaatcaggcggctatataccatcacttcttttagctccaagaatggataacactgaaagttcggtgcaaacacaagaattaattgttggaagtaaacctcaactgtgcccagaaccatccaatgctgtaaattactcccttggtactgtatctgggccccaggatacagggataactccagagaaccgaacatgcaatcctaagagatgtagattttttggctgtacgaaaggagctcgaggtgcttcggggctttgtatcgggcatggtggtggacagagatgtcagaaacctggatgcacaaaggtgctgagagccgaactgcttattgtaaggctcatggtgggggaaagaggtgccaacattgnggatgtactaaaagtgctgaggggaagacagattattgca

SEQ ID NO: 221321 - DNA, 272 bp, Glycine max
atcgactgatagatttaaaacctggcgagaaaggctaggactgtccaacagggcaacgcctggattctggtactgcccatggtttggagtatttacatgagcattgccatgccaagaatatacatcgagatctacaggctgcacatatcctactagatgatgaatctgaagctgatctacgagattttggtctagccaagctggatgatgcacggatgactcatgtcaccactcaagataggggcacactgggtcacattgccccagagtat

SEQ ID NO: 221322 - DNA, 402 bp, Glycine max
  unsure (1)..(402): unsure at all n locations
nagcggaaaatgtcatgattcttgattcnanngctanncngggnttacccacgcgtccgcggacagcacagcctaaacacagatgggatgttgatcgatacggtgatgtagcgacagacgtattgaaatcgggtgagggagcggtgagacgagccgcataaataggtgtcaagtggaagtgcagagatggatgtcagctggcgcattctaactaactgaacgatttgaaccttgttcctacacgacctgatcaaatcgatcaggcacttgccatctatcttcattgttcaactctttgatgaacaacacctggtacccgaaagactgctgcattgttaccagatcaaaaagggcatggcgcgtgtctcgttctcgaggttgccaactccggtacgcgcgctt

SEQ ID NO: 221323 - DNA, 565 bp, Glycine max
  unsure (1)..(565): unsure at all n locations
agcgaaacaaacaatctctgaattgatgggctaaaagggaataaaaaagaaagagcttcaaatctggcaaatctcgtgggattgagggctcggtctgcgtcgaagcaagcttctccccatttgcacgacgacgaggaggagtgtaggccttggcgtcgaaggttaaccatgtctttgtcttgggcctccgccctcaggatcaccattctccttctcctcctcgccgcggtcatcgtcgcatgcttcactctcccaatcgaaaagatgatgaaggacttcttattatgggtcgatcacgatcttggtccctggggcccacttgttctggctgttgcttacattcctttgactgtcttggctgttccagcttcagtgcttactcttggtggaggttatctttttgggcttccagtgggatttgttgctgactctattggtgcaactgttggtgccggagctgcatttcttcttggtagaacaattgggagatcatttgttgtttctaggttgaaggattatccacaattcanatcagtggcaattgcaattcgaagatctggcttta

SEQ ID NO: 221324 - DNA, 587 bp, Glycine max
ggcctgcctctcgtcgtcgtcgtcgtcgtggtggtgcttgcggcagctccggagtccaggcagcacgctagtcggggggcgcgggggaggagatatggatcggtcgtatctccccgtggcggcggcggccgtcgccctggtcctcgtgtgctgctccggcctctgccgcggcgagcggctcggggcgagggagtgcgaggacctggggttcaccggcctcgccctctgctccgactgcaacgcgctctccgagttcgtcaaggaccaagagctggtggaggattgccgtaaatgttgcaccgaggattcagatgattctatcagcaagctcacattttctggtgcaattattgaggtgtgcatgaggaaactggtattttatccagaagttgttggcttcctcgaagaagataaagacgacttcccatatgtggaaacccgttattcctatggttcgccaccaaagctcataatgcttgacacaagggtgaacagaaggagaccataaggattgataactggaagcgagagcacattcggcagtttctcaggagaaagtgaagccagtgaaattagacagctgagtt

SEQ ID NO: 221325 - DNA, 495 bp, Glycine max
atgaaagggttgaagcagaagaaagcccatatcatggaaattcaggttaatggtggtactattgcacagaaggtggactttgcatacagtttctttgagaaacaggttcctattgatgccgcgttccagaaggatgagatgattgacatcattggtgtgaccaagggtaagggttatgagggtgttgtcactcgttggggtgttacccgccttccccgtaagactcacagaggcttgaggaaggttgcttgtattggtgcctggcatcctgcaagagtttcattcactgttgccagggctggtcagaatggataccaccaccgaactgagttgaacaagacggtttacaagctcggcaaagctggagatgaatctcactctgctcttactgagtttgataggaccgagaaagacattaccccaataggtggcttccctcactatggtgttgataacgatgattatatcatgggcaagggatgctgcgttggtccc

SEQ ID NO: 221326 - DNA, 540 bp, Glycine max
ctttcttctcttcccccattttttcctctttcttcctcgcctagctagctccagaaaattaggatctgcttcagatctagtgtttccctgtcccaaatcacgagtccattgagtttgattttgtggatgaaaagcatagatagggcttttgcaaaactctccaatgtttcttgaaattatatgaccatgcgtcgaattcgtatgctgcactccttctccgtcgtgttcctctactggttctacgttttctcatgaactccctcttaaatccgtgattaattagatctatctccttagttaatccttgtcttttccaataattaattagatctgcgtctcctttttggattagtttcttttttgggtctgttatcaaatcaaataaaaaatctccttctcggaaatggcatcaccgatccaacaacaacaacgctcgactctacaagtcttggatctgaaggaggagatccgcatatcatcgatgagaggaaagcggagaggatgctgtcgaaccgcgagtcggcgcggcgatcgcggatg

SEQ ID NO: 221327 - DNA, 572 bp, Glycine max
  unsure (1)..(572): unsure at all n locations
cctgtcccagccgccggacaccatcaacgggtccatccgtgtgacggtgcagggcgaggtcatcgagttctgcttcggggaggagcacctgtgcttccagactctgcagcgcttcacggccgccacgctggagcacggcatgcacccgccggtctctcccaagcccgagtggcgcaagctcatggacgagatggcggtcgtggccacggaggagtaccgctccgtcgtcgtcaaggaggcgcgcttcgtcgagtacttcagatcggctacaccggagaccgagtacgggaggatgaacatcggcagccggccagccaagaggaggcccggcggcggcatcacgaccctgcgcgccatcccctggatcttctcgtggacccagaccaggttccacctncccgtgtggctgggagtcggcgccgcattcaagttcgccatcgacaaggacgtcaggaacttccaggtcctcaagagatgtaccacgagtggccattcttcagggtcaccctggacctgctggagatggttttcgccaagggagacccccgcattgccggcttgtatgacgagct

SEQ ID NO: 221328 - DNA, 515 bp, Glycine max
  unsure (1)..(515): unsure at all n locations
ggcacgcatcgtatagaaaagatagaggaaagtcgccttgtcatcattaacagtgtttgtgtatatcggagaaattagggtattgaagaggtcgctcatggacggagatggagcgacgacgatcgcggaggcgcagtacgcgacggcgaagacatcggtgtggtgggacatcgagaactgccacgtccccaagggttcggatccgcacgccatcgcgcagaacatcagttctgctctcgttcgcatgaactactgcggccccgtctccatctcctcctacggcgacaccacgcgcatcccagcatctgtacagcacgcgctctccagtaccggaatctccctcaatcacgtcccggccggtgtgaaagacgcaagagacgagaagattcttgttgatatgctgttctgggcactggacaatcccgcacctgctaattatttattaaattcgggtgaccgagacttctcgaatgctctncatcaacttcngatgaggagatataatattcttcttg

SEQ ID NO: 221329 - DNA, 187 bp, Glycine max
cccacgcgtccgcccacgcgtccgaaaaaaaaaaaaaaaaaaaaaaaaaaaaaaaaaaaaaaaaaaaaaaaaaaaggaaaaaaaaaaaaaaaaaaaaaaaaaaaaaaaaaaaaaaaagggggggccgttttaaaggaaccaagggttcgccctcttgggtgcccacgtttttttttttttttagggc

SEQ ID NO: 221330 - DNA, 485 bp, Glycine max
cggctcgagctcgagccgaatcggctcgaggtttactatatttcacaaacacacagattattgaagaatggagatcacaaaaagaagttccctcctgatattcttcctagtgtttgtctcaagcttgatccatgccaaggcatatcaaaacctatactgcggcagaggaacccgatgctatggaaagcacatcacatgtcctgctgaatgccccgacagtgaaacaaacaatcctaagactaaggtttgccaaatcgattgcaacaaacctatttgcaaggcagtctgcagaagtcgcaagccaaactgcaatgcaccaggatcaggatgctacgatccccgtttcattggtggggatggtacgagtcttctacttccacggaaaaaccaacgaacacttcaccttagtttccgattccaaccttcagatgaatgcgcgcttcatcggacacaggcctgaaggaagaagccgtgactaccatgga

SEQ ID NO: 221331 - DNA, 536 bp, Glycine max
cgttttggtcatgacacacttgttgatgccatgcttaaggatgggctttgggatgtatacaatgattgtgccatgggaatgtgtgccgagctttgtgctgacaatcatgccctcacaagagaagaccaggatgcatttgctatccaaagcaacgagcgtggaattgctgctcgtgacagtggtgcttttgcatgggagattattccggttcaagttcctgttggtagaggaaaacccccaacattaattgagagagatgaaagcctggataagtttgacccagtaaaactaaagaaacttcgcccaagtttcaaggagaatggtggtacagttacagctggaaatgcttctagtataagtgatggagctgctgcattagttttagtgagtgggcagaaggctcaagagcttggccttcaagtccttgcaaggatcaaaggttacgctgatgcagctcaagcttcggagctttttacaaaccactcagcacttgcataccaaaggctatcgcaaatgctggattagagtcatcccat

SEQ ID NO: 221332 - DNA, 442 bp, Glycine max
ggaactcttgcagcaaagttccgtaacagtggacaaacatgtgtttgtgcaaatagaattattgtgcaagaaggtatatatgagaagtttgcaaatgctttacgtgatactgttcagaatatgaaagttggggatggtttcagtgaaggtgtggcacagggtcctctaatcaatgaagctgctgtcaaaaaggttgagtccttaattcatgatgctacatcaaagggggcaaaagtaattcttgggggtaaaagacatagccttggatttactttttatgaacccacggtcatcagtgatgtcaacagtgatatgcgcatatcaagagaggaagcatttggacctgttgcaccccttttgagattcaaaactgaagaggatgctatcagaattgctaacgacactaatgcaggtttgggttcatacatatttacaaacagta

SEQ ID NO: 221333 - DNA, 234 bp, Glycine max
caatcttctgagagtgtttggttgtatgtttcaaacatgtgtcctttctggcagagggggctaaagatcaaggggactatgggggctcagcacaatactgtggcggatatcaacggcattatcactgatgtagggatccttgcccaatgctaaggctcaataggttgtgcacacgatgcacttgcttttgcaaccgccgccatctccatacagctgattagagctcccaaggct

SEQ ID NO: 221334 - DNA, 309 bp, Glycine max
cggacgcgtgggcacggcgacaagaaggacgagccgtggtggcccgtgctggacacccgcgacagcctggtggagacgctgaccaccatcatgtgggtcacctccggccaccactcggccgtcaacttcgggcagtaccacttcgccggctacttccccaaccggccgaccaccatccggaagaacatgccggtggaggagggcgggccgggcgaggagatggagaagttcctcaagcagccggagacgacgctgctggacatgctgcccacgcagatgcaggccatcaaggtcatgacgacgctggac

SEQ ID NO: 221335 - DNA, 542 bp, Glycine max
gtcaagtacttcttagttcttacattctcaagccatgagttgtagaattgtgatctacttcactttcttcttctgtttgttttttacctcggttcctcttgttcatatgtatccctcgtatccctatagtagaaattaccagcttgaccttaatttctatgatagatcatgccccaatttgcataagattgttggatatggtgtttggttagccttaagaaatgacaacagaatggccgcgtccctccttcggttgcactttcacgattgcatagtaaatggctgtgatgcttctgtgcttcttgatgatacaccatatttcacgggcgaaaagaatgctcttcctaatcacaattcacttagggggtttgaagtcattgatgacataaaagaacatcttgaaaggatatgtcccatcaacagttcctgtgctgatatattggccttagcagctagggaagcaatcgatcagattggagggccttcttggcctgttcaattaggcccgagagatgcaacaacaaccagtaaggaagcagctg

SEQ ID NO: 221336 - DNA, 560 bp, Glycine max
  unsure (1)..(560): unsure at all n locations
cttgatgactgcgctgcagctcgtgatgaagaagtcaagtgctcatgatggacttgtgaagggtcttcgcgaggctgccaaggccattgagaagcacgctgctcagctttgcgttcttgcagaggactgtgaccagccggattatgtcaagctggtgaaggcgctctgtgctgaacacaatgttcaccttgtcactgttcctgctgctaagactcttggcgagtgggctgggctttgcaagattgactccgagggcaaggcaaggaaggttgtaggctgctcctgtgtcgttgtcaaggactacggtgaagaatctgagggccttaacatagtgcaggagtatgtcaagtcgcactagatgtaacacgtttcagtaatactctacatttggatctgggcttaatattatgcttgcgtcttgcgcttgctaggagattaggacaatttactacaagagcccatgaggatatgagcaatttggaattctaaatgttttggttatggtgctgtcatctggttntaattcaaatcgataagagatgagcatattcttgcttaag

SEQ ID NO: 221337 - DNA, 610 bp, Glycine max
tgaataatgtttgttgagcaatctgaatctctgcttacacacccaattcatccacaggtcatgatgaacaagaggccattaaccgccgtctacaacaaggcgctccccgatctttgcaatcgagaactcggccacctgcccccaaggaatttcgctctccgtcttggcgcctccgaggatcttgtccttcgacttgaattactgaggaatctgcaaaaacacagaggttgtgtcaacactgtgagcttcaatgcagatggtgacactctagtctccggttccgacgattggggggttattctctgggactgggaaactggccgcattaaactctccttccattctggtcattctaacaatgttttccaggccaagttcatgcctcactctatggatcgtaccattgtcacctgtgctgctgatgacaggtgagacatgctcaaattcttgaaaatggacgagtcgaactaagtgtctggccaagcatagggaagggctcataagtggcttgtgagcctggtagccctcatatcttttatacctgtggtgaggatggattagtgcagcattttgatttgagaactggggctgcaacagaactttttacatg

SEQ ID NO: 221338 - DNA, 589 bp, Glycine max
  unsure (1)..(589): unsure at all n locations
caacgaagtgcgagcgacccacgtccacacgacacgaaccaccaccaccaaccagcagccgcaccacgcacccagcgcaaagcgatggcgtcgctcaccatgatggcgtccttcgccgccgtggcggtggccgcgccctcgcgccgcggcaccttcgccgtggtcaggtccgccaaggtcgaccgctgccaggagcccgccacgctagcagcaaccgaggccaggcccgccgccgacggacgccgcgccgtcatgctcgcggctgctgcggcggccgtggcagccatcggcggcgccggcgccgccatggcgggccccaagaacgggacccccgaggcgaagaagaagtacgcggccatctgcgtcaccatgcccaccgccaaggtctgccacaactgagcacgcccgcgttgcatgcacctgcagggccggcgggtggtatataatcaatgtacgtgccacggtgatgatgtccctattgntggttcgagctttagatgcatgcatgacgtgaggccgcttaattgctttctgacggcctcggagctggtagaatatcaagtgcactgcanaactgaattcggttgag

SEQ ID NO: 221339 - DNA, 549 bp, Glycine max
tccttcccctgaggctggtcctgtttgtccaactcctgctctttccaatggctttgttacatttggtagttttaacaatcttgctaagattacacccaaggtactgcaggtctgggcaaagatactatgtgcaattccaaattctcgtcttgtggtaaaatgtaaaccgttttgctgtgatagtgtgagacagaggtttctttcaacactagagaagttaggtctcgaaccactacgagttgatcttctgccccttattcttcttaaccacgatcatatgcaagcttattctctaatggacatcagtttggacacatttccatatgctggaacaacgacgacttgtgaatctttatacatgggagttccattgtgttacaatggctggttcagtgcatgcacacaattttgggtgttagtcttcttatgcaagttggtttgggcaatttgattgccaaaaatgaagatgaatatgtaaaattggccttgaagttggcttctgatatttcggcactacaaaatttgagaatgagtcttcgagagctcatg

SEQ ID NO: 221340 - DNA, 617 bp, Glycine max
  unsure (1)..(617): unsure at all n locations
gtggcgccgtgcacggcccagaactcgccgcaggactacgtggacccgcacaacgcggcgcgcgccgacgtgggcgtcgggccggtgtcctgggacgacaccgtcgccgcgtacgcgcagagctacgcggcgcagcgccagggcgactgccagctgatccactccggcgggccctacggcgagaacctcttctggggctccgccggcgccgactggtcggcgtccgacgccgtgggctcctgggtgtccgagaagcagtactacgaccacgacaccaacagctgcgcggaggggcaggtgtgcggccactacacgcaggtggtgtggcgcgactccaccgccatcggctgtgcccgcgtcgtctgcgacaacaacgccggcgtcttcatcatctgcagctacaacccgccgggcaacgtcgtcggcgagagcccctactagactgtcatgcatactacaattatatatatatacgcttaatattaacttcagcatgcatgcatattataaatagtggntgtcaactctgtatatcattatattacgatgattatattggttgatgaacattaatagtcaatanaaccatgcaggcgatttgtgagccatatttaaaa

SEQ ID NO: 221341 - DNA, 515 bp, Glycine max
  unsure (1)..(515): unsure at all n locations
cacaaactcagggtagggcagagagagagagagagagagagagagagagagagaatgggagggtgggctatcgcggtgcatggtggcgctggtgtcgaccctaatctcccactcgagcgccaagaagaagcgaaacaacttctcacgcgctgtctcaatcttggaatctctgctctaaattctaatcttcccgccatagatgtcgtcgaacttgtggtgagggaattggaaacggatccgctgttcaattcgggccgtggatctgccctgacagaaaaaggaacggtggagatggaggctagcatcatggatggtccaaaacgacgatgcggcgccgtttcgggtcttaccaccgttaagaacccgatctcgttgctcgtttggttatggacaaatccccgcattcctacctcgccttctccggcgccgaagaatttgctaggcacagngggggggaaggttgtggaccacgagtactttatcacacctgacaacgttggcatgctcaagctggc

SEQ ID NO: 221342 - DNA, 349 bp, Glycine max
gaacgacagcccgacgttgaagaaccggaaggggccggtggagatgccgtacatgctgctgtaccccaacacgtcggatgtcaccggcgagaagggcgaggggctcactgccatgggcattcccaacagcatctccatatgagcctcctcactgcctgagcggatggtttgtagatgttctgttacgctgtgtgtaatgtgtcgtttattcgttggttttgtcagtctcagggtagggaatggagatgttgattggatccatgatctgtagggttgagagaggagtcacgtctggagaatgttgtcaatgtgtgtttctttcttgttaagaataaaagttcgtcagctc

SEQ ID NO: 221343 - DNA, 609 bp, Glycine max
  unsure (1)..(609): unsure at all n locations
accaaatcgaggaatccggaaagggaagaagaagaagaagaagagagtgggttgggttgcgtgccccgttccgttcgttcttcccctttcctttcaattctttcttttcaattctttttcttctgaacacagaaaaaacagaagatgggaatgaaacaagtcattaaaaacctcgacgcctttcctcgcgccgaggatcacttgttgcagaaaacccaatctggggctctcgtatccgtaattggtctcattataatggccacattgttcgttcacgagctcggttattatcttacaacttacaccgttcaccagatgtcagtggacttgaagcgaggggaaactcttccaattcatattaacatgacgtttccttctttaccttgtgatgttttgagtgtagatgccatcgatatgtcgggcaagcatgaggtggatcttgataccaacatatggaaacttcgcttgaacagttatggccatatanatggcactgaatatatatctgatcttgnttgaaaggaacatacccatcacaagcatgatgataataaaaatcatgagcattcagaacagaagattcatttgcaaaacctgatgaatctactg

SEQ ID NO: 221344 - DNA, 559 bp, Glycine max
gcttctttcaacaacttagcattgtattgtcttcaaactttgcttcttccatactttcttctttttccttagccatcattgattgttgcctttcttggctttaaaatggagttcgaggaccgcttcagacaccaggctcagagaccaaaatatgactgccttctttttgatttagatgacactttgtatcccctcaaatctggtcttgcaaaatcatgtctccaaaatattaaagactacatggttgagaagcttggcatacaccctagcaaaattgatgacttgtccaacctcctttacaagaattatggaacaactatggctggtctaagggcaattggatatgactttgactatgatgaatatcacagttttgttcatggaagattaccttatgagaacctaaaaccagaccaagttctgaggaacctgttgctgagcctaccctatagaaaacttatcttcacaaacgcagacaaagttcacgcggcgaaggcgcttacaggcttggattagaagactgctttgaaggaatcatatgctttgagacccttaatcc

SEQ ID NO: 221345 - DNA, 440 bp, Glycine max
cgctactgagctcctccttcgccatgcccgccgccgcccgtagggcctcctccccttcctccgcctcattgagcttcgccacgtcgcagctcgccggcctctccctctccgccggcgttgcaactccaaccgccgtcgccctcctccccaagaggcagcagctccagcccattgtcgcgcggcgtgtgtgcccgttcacggacaagaagacgaaccgggcgaacaaggtgtcgttttccaaccacaagacgaagaagcagcagttcgtgaacctgcagtacaagaagctgtggtgggaggccggcaagcgcttcgtcaagctgcgcctttccaccaaggccctcaagaccatcgagaagcacggcctcgacgccgtcgcgcgcaaggccggcatcgacctcacaagaagtgagcaagaagtgagcccatccgatgagcag

SEQ ID NO: 221346 - DNA, 391 bp, Glycine max
caaacacaacatcactctctattgtcgctcttggctatgcgctgttcactcactctcattgattcatttgcaccgttcatggatccagggagcgtgtggggtaacacgccctaggcgacggtggatcccgagatccatgacctcattgagacggacaagcgccggccatgccacggaatcgagctcatggcctccgagaacttcacctccttcgccgccatggaggcccttggcagcgctctcacgaacaaatactccgagggcatgccgggcaaccgctactacgggggcgatgaatacatcgaccagatcggaaacctctgtcggtcacgcgccctgcaagccttgcacctcgacgcacaattctggggcgttaacgtgcagcgcctac

SEQ ID NO: 221347 - DNA, 474 bp, Glycine max
cggacgcgtgggctcttgtaacctcttggccgttgcttggggccctaggttttttcttcaggaaaaggttgagtaattctctgttatctaggaagctgaagaaatcgtgaacactgtgctaacacagatttatttggtatgtaagagcatgtacagtgatgtttaatatagaggctcttgagattatctaaagagagcatttgcaaaaaaaaaaaaaagaaaaaaaaaaaaaataaaaaaaaaaaaaaaaaaaaaaaaaaaaaaaaaaaaaaaaaaaaaaaaaaaaaaaaaaagaaaacaaaaaaaatgcaatgattaggaagaaaaataaaaacaataaaaagatttggggggggcccttttttgggagcaaaatttaaagacacggggctggaaaaggatgtacttttttttgggggacacaaaaaaaaatagtgtggccggtatttcaccaccgggaagggggaaaacccg

SEQ ID NO: 221348 - DNA, 558 bp, Glycine max
  unsure (1)..(558): unsure at all n locations
cttcttcccaaccactactactcactcactgcagatctcaattgcatcgctgtccatggctaccatcgttagcatcaaggcccgccagatcttcgacagtcgtggcaatccaactgtcgaggtggatttgacttgctccgatggtacttttgccagagctgctgttccaagtggtgcatccactgggatttatgaggcccttgaattgagagatggaggatctgactaccttggaaagggtgtatcaaaggctgttgacaatgtgaacaccgtcattggccctgctttgattggcaaggacccaactgagcagactgctattgacaacttaatggttcaacagcttgatggaactgttaacaatggggttggtgcaagcaaaagctaggagcaaatgccatattggcagtgtctcttgcagtctgcaaggctggtcgtagcgtcctgaaaattcctctttacagcatattgctaatatcgcgggtaacaaaagttgggtttgcctgttcctgctttcaatgtcattaatggtggatcacatgctgnaaacaaacttgc

SEQ ID NO: 221349 - DNA, 449 bp, Glycine max
cccagacagcctgccgtggaacatgcatgatgtactttggcactgccgttgggctgatgctcggtcgaaggcgcggtgtccattcttgcgatccatacgattctacatgaatccctagtacgactacgttttaccgcctgtgattataagtgctttacccgtctgcgccatcatgcttgtgattgagacttgcctacgagtattatttggacagctatgttagcacaatattatttagtctcaaaattgagacaccgtagccagatggcacgaccactatgcttcctacttcggctactgttgcgctgagagcgctcttagacgatccctttcaccttcttccgcggagctcacggaagaattatggtctatgtcctgacggactcacaaagctacgaccctgcgaagcacttggtgtacgcgatagactgcaatgcgagtgctcatgc

SEQ ID NO: 221350 - DNA, 579 bp, Glycine max
  unsure (1)..(579): unsure at all n locations
cttgtcccgcccctgcccctataccatagtacattagtacccccacacacccctctatctgtcactattattgccacacacaaatcaattaactgaattcttagacagagaaagaggagtagtactagtgataaggtgatcataatagagcataatataagagagtgaaaactcatggaggttggcctcaacaagaaggagaacatggggtttgaggaaactgagctaaggcttggactgcctggaaacgtaggaggcactggcactgaagaagtgctcatcaggaagagaggtttctctgagactgaaactgaaactgaggaggatgagtctgctaccactgtggatttgatgcttaatctttcttctaaggaagctgctgctgctgcagatccaactgataagcacaagactttgcctaaggagaagactcttctgcctgcagatcctgctaagcctccagccaagggacatgtggtaggttggccacctgtgcggtcctttccggagaacatgntagctgtacaaaagagcgtcggagaagagaacgagaagaacagcagcagccctaatgcaagc

SEQ ID NO: 221351 - DNA, 565 bp, Glycine max
  unsure (1)..(565): unsure at all n locations
ctcatatatcatggctaccttcatggcgaagcttatgcttttctctgctctcatactcttgaccttgcaagcaggtgtgtctgtaacaccactgcattttcaacatccactagaccctttaaccaaacaagagataagtcttgtccaaaccatagtccaaaacaagtacccaagctcaagtaacaggatgagcttccactacattggactcgacgaacctgaaaaggatgccatcctcaaatgggaatccatcaaaccaactgttataacgtgtacctcgcaaagccttggccattggtataatcaacagacaaacccacgagatcttaattgatctaaaggcaaggcgcattgacttcaacaatattcactgcgggaatggcttacctaccctatccgttgatgaacaagtcgttgtcataaagctgccactgaaatacggtccattcattgagtcagtgaacaagagagggctgaacctctctacgtggngtgttccacattcacacgtgggtggtttggagacaccaangacagaangacagggacagtggaatgcttcatg

SEQ ID NO: 221352 - DNA, 593 bp, Glycine max
  unsure (1)..(593): unsure at all n locations
actaaaccctctctgtgtccctctccgttaaacccttgacggcgttcggacctgcttcgacggtggcggcaccatggttctcactaccgagggcgcgacgaactccgtcgaggcggtggcgttcagcttcctaaccgacgacgagatacggcggagcagccgcgtgaagataacgagtcccattctcgtcgattttttgctgcaccccgtgcctgatggactatacgacgccgctttgggccctttcgatgacaagtctctttgtaagtcgtgtggtcaaacttctaaacattgcccaggtcattttggtcatattgagctcgtttcccctgtctacaaccctctgatgttcaatattcttagcaatattctgcaaagaacttgtttcacttgccatcattttcgggcccccagcaagaggttgatattcgtacatcccaattggagctcataatgaaaggggatattatcagggcanaacgtttggaatctattatccctgggaaagtgtggattcttttaatccagatgaattcatacatccaggtgatggagatgagagccagtgtatagtgctgagcaactgggagaaa

SEQ ID NO: 221353 - DNA, 240 bp, Glycine max
agctgcagctcaggtgcttgtctgaggctgcctcctcgttggcaaccggattgcctgctgctggtggatgtggtgatcaacagtattattacagagccatgctatgtgaacattactagtagcagtgctcataaaagctacaatcccatctccctttttttttccagtcatgtaaaacttccaaactgctccatggttcaaaactctgttcttcaatacatcatcaattatcgattatat

SEQ ID NO: 221354 - DNA, 527 bp, Glycine max
  unsure (1)..(527): unsure at all n locations
ctcaacggatctaaggcttcagtgtagtctgtaatcatgtcaggcaagtatatcatttctgctattcttggatcatttggagttgcatgggtttgtgattattatgtttcagacaaaaagctatttggaggttctacccctggaactattacaaacaatgagtgggcagaagagactgacaaaaaattgcaggcatggcctcgtactgccggtccaccagtggtcatgaatcccataagtcgccaaaatttcattgtcaagtctcgcgctgagtaataatttttgttgattgattttgagttaattggtgcttggtcatgccatatgtttccataaatgatgataatgcttgaggtaaaactcttacagttcaattagtgttttgaagtttaaacatgtgaatgtgtttacttgctaaataaaatgttacttaagcaatcatggattgattaatgcatantcatgtattcaaattctgttagtctttaccttggtatgaatgggaatcaatgcccaaaattatgttt

SEQ ID NO: 221355 - DNA, 524 bp, Glycine max
  unsure (1)..(524): unsure at all n locations
cgaacgtgtcacaaaattctcgccttctccgaatatggcatcgcgcgtcagcattggcaaccttacctcctccgcgccgtatattaattcccctcactttcgctcaccacttaagatttccaacaacccctctctgcaaaacgcttcgcataaggtacttatgcgcgataagactgtactggtaaccggcggagccggttacatcggcagccacaccgttcttcagctcttgctcggaggtttcagagccgtcgtcctcgacaacctcgaaaattcctccgaggttgccatccacagagtcagggagctcgccggcgaatttgggaacaacctctcctttacaaggtggacctacgngacagagctgctctagaccaaatattttcttccacacaattcgatgctgtcatacattttgctggactgaaagcagtagaggaaagtgtgcaaaaacctttactatactataacaacaacttgactgggacaatcactcattggaagtcatggctgcccatggatgc

SEQ ID NO: 221356 - DNA, 612 bp, Glycine max
  unsure (1)..(612): unsure at all n locations
atcctgtgagagtcgactgctctcatgcaancnagnnaannttcaggaacaccacgctncgatctaggatcccagaaggtcttacatttccatttgtatcttttacaaaacttgtcggattcgcgaggccgggagtatcacctagtctgtccctgtctagagaggcaacggtggagcaatactatctattcgttatacattcgacgggcactttttgtcaatggaacaagcaacagactttgtccacatctttgacatcaaaagtggctacttttagagacaggaatcggattactttggcgaggtgtccggttatgaacttcagccccgacacggacacactttatgttggaatctttgacaggacatatggcagactgctttcagtttggccgcctctacaactattcatacctcgactcactactatgaaggtcaaagagaaatatatgtttttcccttggcttaataatcaacccacatttagcattccaaatgaaatttaattaatcctggttttcttcgaaaagaatctttaccctggtgcttgtgtccataaaaaaaactgtattctatagacctcagtagaccgaaatcctgttttagatatgg

SEQ ID NO: 221357 - DNA, 421 bp, Glycine max
attttatcatcctttcgagaagcttctccactggccttctcacttgtccattttctctcttcgcttctcttcgctcctccgtcactccactgccgcgtcgctccgccgttggtcgcgtgtttgcggcgagatctacagccttagtgtgaatctgcgattcttcgaatcgaatcaggtgagagcgtggtgtgtgtttgagttttgagtatggcagcggcggaagataagtggtgcgtggtgaccggaggtcgtggtttcgcagctcggcatttagtggaaatgctaatccgtcacaacgagtactgcgttcgcatcgccgatttggaggccaacattgttctcgagcccgccgagcagttagggcttctcggccaggccctgcactcgggccgggcccaatatgtctcccttgatcttcgca

SEQ ID NO: 221358 - DNA, 308 bp, Glycine max
agggtgggaacggacaagacactgagtcaccttccaaggacaccaggactgagagggtggaatcttatgctgcaaagccaagcacgaagaaatggttttgttgtgtgacagccagccctacgcaatcctgaggaagacaactgcatgcgctttggaaatactgtccctttaattttctatacatactatccataagacaatgtaggggtacccaggcctctccgggctccaggatgggctatctcgtaaaactcttgcgtgcgtgtatgtatggtgtgagagaattcgcaaagtggacttctggttgt

SEQ ID NO: 221359 - DNA, 586 bp, Glycine max
gcctcttcttcttcttcttccttgtgtgtgttgcagtaagtacccaaatcaatgttcacactcacttctccttcttccagggccttacccatggattctcttcccaaattgcgccacccttctccatttcccactcccttatcctcttccctctccttccgctctttaccgccaccccattttccttcgtcgtcgtttaggttaccctccatcagagcctcctcctcaccctcccaaaacgaccccgcttttcgcaccccagaaaacaccggccctccctcccccccctcctccaaaccctaacctccttcctctcccccctcctcgaaaccacctgcatcgtcatcgccgccgccgccttcttcttcatgcgcttccaccacacgccctccgtcatcgccgctccgctcacttcccccgccgcggaaaccgacaccgccttcacccaggaggaagccgagaggcttctcgaggagcgtctgagcaccaaccctcgcgataccgaggcgctccacgcgctcatggaggtcaaaatcaagcgcgtaagatggcgaagcgttcgaggtttgaaccgtctgattgagct

SEQ ID NO: 221360 - DNA, 557 bp, Glycine max
cttcctctctagctagggtttccttctttatacaaaacacaacctaacaagtaacaaccttctttatatgtacttattccttaaccctcctgttaccctttttagctatttctatttgtgctgctttcatagaattgctagttacgtgggagaattaagcaccaagaagatgggaaggggtagggttcagctgaagcggatcgagaacaaaacaagccagcaagtgacgtttttcaagcgtagatcgggacttctcaagaaagccagcgaaatctctgtgctatgtgatgctcaagttgctttgattatattttctaccaaaggcaaactttttgagtattcctctgaacgcagcatggaagacctccttgaacgttacgagagatgtagccatacagcacttgctggagctaacaatgtcgaatcaccgggattttggtctttcgaacatatcaagctcaccgctaaagttgaagtcttggagaggaacataatgaatttctttggaaatgatctggatccctttgagttgaaaagagctcacagtttggagcagc

SEQ ID NO: 221361 - DNA, 335 bp, Glycine max
cgaattcgtacgctttgctgatgaggcaaaatcaaacagagtcatggcgagcctcaaggcatctggattacttcatgccgcagggatagcaacttccctgacaaacacgagccaacaatgggatttcccgaatggatgggccccactgcagcatcttatagctgaggggctgctgcattctggatcagaggccaaaaaactagctgaggacattgctacgaggtgggtgagaacgaactacgccgcttacaaagcaacgggtgcgatgcatgagaagtacgatgttgaggcttggggagaatctggaggcggtggagaatacaagccccagactg

SEQ ID NO: 221362 - DNA, 562 bp, Glycine max
  unsure (1)..(562): unsure at all n locations
ctccatttccattttctctctcacttttcaagaatcgtaagctatgggaaagtcttacccaactgtgagtgctgattaccagaaggccgttgagaaggcgaagaagaagctcagaggcttcatcgctgagaagagatgcgctcctctaatgctccgtttggcatggcactctgctggaacctttgacaagggcacgaagaccggtggacccttcggaaccatcaagcaccctgccgaactggctcacagcgctaacaacggtcttgacatcgctgttaggcttttggagccactcaaggcggagttccctattttgagctacgccgatttctaccagttggttggcngttgttgccgttgaggtaacgggtggacctgaagttccattccaccttggaagagaggacaagcctgagccaccacgnagggtcgcttgcccgatgccataaagggttctgaccatttgagagatgtntgtttggcaaagctatggnggcttactgaccaagatatncgntgctctatctgggggtcacactattggagctgcacacaaggagcg

SEQ ID NO: 221363 - DNA, 551 bp, Glycine max
caccagattgctgcacttgctgttgctctacagcaaactatgtcgcctggcttcaaggcctatgcaaagcaagtgaaggccaatgctgttgcaattggaaactatctcatgagcaagggctacaagatggtgactgatggaactgagaaccaccttgttctctgggatctccgcccccttggcttgactggaaacaaggtcgaaaagctatgtgatctttgccacatcacattgaacaagaatgctgtcttcggtgacagcagtgcattgtctccgggtggtgtccgcattggcgcgccagcaatgacctcgaggggtctactggagaaggatttcgagcagattggggagttcctccaccaggcagtgaccatctgcctgaacatccagaaggagtacggcaagctcctcaaggacttcaacaagggcctggtgaacaacaaggacatcgagaacctcaaggtccaggtggagaagtttgccgactccttcgacatgcctgggttcacgcttgagagcatgaaatacaaggagtagacatgcctcccatg

SEQ ID NO: 221364 - DNA, 447 bp, Glycine max
  unsure (1)..(447): unsure at all n locations
gaggtttttcttctctcaccgtagaatcgaatcgagttcactttgatcgtgtgtgtctccgatcttcaaatccgcaacaaccatggtgaggggattgctcaacaagctcgtctctcgcttcctctccgtcgccggaaaatggcagcacaaccaactccgccgcctcaacatccacgagtaccagggcgctgaattgatgagcaaacacggagttaatgttccgagaggcgtggctgtttcctctgttgaagaggtcagaaaggccatcaaggaccttttccctaatgaaaatgagttgngtggttanagagtcaaatttagnccggtggaaagagggtttgggaactttcaaaagcggccttaaggaaggagtgcacattgttaagactgaccaggttgaagacatagctgggaagatgcttgggcaatactagttaccaacagact

SEQ ID NO: 221365 - DNA, 570 bp, Glycine max
cctagctctatagctcgagtattgcttgctctccacaagaaacaaagcagagcaccaacaatggccgccgcctgctcgtcctcggtcctcctgctgctcctggccgccgccgccgacttggctggcatgagcgccaacgccgccaccttcaccatcaccaacaactgcgggttcaccgtgtggcccgcggccaccccggtgggcgggggcacgcagctgaacccgggcgggacgtggaccgtcaacgtgccggccggcaccagctccggccgcgtgtggggccgcaccggctgctccttcaacggcaacagcgggagctgccagacgggcgactgcggcggcgcgctggcctgcacgctgtcggggcagccgtcgctgacgctggccgagttcaccatcggcggcagccaggacttctacgacatctcggtcatcgacggctacaacctcgccatggacttctcctgcagcaccggcgtgcggctggtgtgcacggaccctggatgccccgacgcgtaccaccaccccaacgacgtgaagacccatgcctgtggcggcaacagcaactac

SEQ ID NO: 221366 - DNA, 417 bp, Glycine max
ccggtagcacagccgagacagcgacgggttctccacccatacggggatggagcgacagaagtatggaaataggataaggtagcggcgagacgagccgtttaaataggtgtcaagtggaagtgcagtgatgtatgcagctgaggcatcctaacgaacgaacgatttgaaccttgttcctacacgacctgatcaaatcgatcaggcacttgccatctatcttcattgttcaactctttgatgaaaaaaaaaaaaaaaaaaaaaaaaaaaaaaaaaaaaaaaaaaaaaaaaagggcggccggtctgccggtttcaaggttccatgctcacgcatgcgagcatacaacgctttaattgtgttatctagatacaaaaaactggtcgacgggccgcaactttacaactgggaaaccggtaaaa

SEQ ID NO: 221367 - DNA, 438 bp, Glycine max
ggtttcttgcaaaaaagtcctagctaaagcgcttcctggtgctccaaatgagattttactggttctcgatggaacgactggcttgaacatgttacagcaagcaagggagttcaatgatgttgtaggagtcactggattcatcctgacaaagctcgatggcactgcgcgcggtggctgtgtggttagcgttgtggatgagcttggcatcccggtgaagttcattggggttggtgaagggatggaagacctgcaaccttttgacgccgaggcatttgttgaagccatcttcccatgattttgggttttggagagataattcatgcttctactgtaaagctttggactctgccgttgctttggctcgttgtgcgagtttttttttttggttggaactacgatagtggtaggaaagcacatgccccgtgtcaagatgaactg

SEQ ID NO: 221368 - DNA, 559 bp, Glycine max
  unsure (1)..(559): unsure at all n locations
gaagcacttggacgatcttgtttcccaagtggctcagctcagaaaagagaaccaacaaatactcacaagcgtcaacatcaccacgcaacagtacctgagcgttgaggctgagaactcggtgcttagggctcaggtgggtgagcttagtcacaggttagagtctctgaatgagatcgttgacgtgttgaatgccaccactgtggcgggttttggagcagcagcaacatcgagcaccttcgttgagccaattaataataatagcttcttcaacccgttgaatatggggtatctgaaccaccctattatggcttctgcggatatattgcagtattgagatccatggtctctgagtctgagatttgatgaggatttcttcttcttttctaggtttgagtctgttgagaaattgtaatcactaccatatggtgataaggaataataataatgaatgtgtatcgtaaaacggatgggatgnttgggtgctggttctggaaatgtggcatgggccattactgtgatttgtcacccttcttttctatattattataataataatatt

SEQ ID NO: 221369 - DNA, 529 bp, Glycine max
  unsure (1)..(529): unsure at all n locations
cgaaagagatcgatcgtatctgcggaacaagcagcgaaggatcggagcctatccaatggccgagggcaacagcagctccggcggcgacctgttctccagcggcaagctggtggcgggggccgccgtgtcggtgttccagcagaagagcgtggagaacgtcgacaagcaggaggtcgccggcgcggcggccgagctcctgcacgcggcgtccgtgtacggtaagctcgacgacaagccggccgggcagtacgtcgagaaggccgaggggtacctcaaggagttcagcgcgggacacgccaccgagcaggagcagcctgcggcggcaccaggcgacgacgcggcgcccaagccaccggcgccggaggcgcccaaggagccggcggcggtgcctgcgccggccgcggaggaaggcagcaagtcgtcggagggcttcggcctcggcgacgtcatgaagggcgccgagcagctggtgggagggaagcancanggcggcggggaagagagcgcccgcggcggtgggctgtttaag

SEQ ID NO: 221370 - DNA, 429 bp, Glycine max
ctcgagccgaatcggctcgagctcccatcaacagcaacgatggtgcagaggctcacttatcgcaagcgccatagctatgctaccaaatccaaccagcaccgggttgttaagacccctggtgggaagttggtgtaccagaccactaagaagagagcaagtggacctaagtgccctgtcactggcaagaggatccaagggattccacacttaagacctgctgaatacaagaggtctagattgcctaggaaccgcaggaccgtaaaccgagcctatggaggtgttttatccgggggagctgttagagaaaggattattcgcgctttccttgttgaagagcaaaaaattgtgaaaaaggtattgaagatccagaaggcaaaagaaaagcaggcatcaaagagttaagctgttgaagtattcgtgagtgaaaaa

SEQ ID NO: 221371 - DNA, 498 bp, Glycine max
  unsure (1)..(498): unsure at all n locations
tcgggttcttcttactcacctacggaacacaggaaaagcctccaaaaccaacccaccgttggcgcgatggctttcccctccaaaggcgatgacgagcaggttctggtgcagcgtaaatcaaatgcgagagttttgacactaaacaggactaaacagttgaatgccctctctttttatatggtttctcggctacttgaaattttttctgaagatgagaaagattctgatattaaattggttgtcgtgaagggaaatggaagggctttttgtgctggtggtgatgttgcagctgttgctcgtgatggaagtaaaggtgactggaggtttggtgcaaatttttttcaaagtgaatttaaattgaattacttgatggcaacatatagtaagccccaggtttcaattctaatggaattgtatgggaggtggggctggtgttttctgtacatgaagatntcgtgttgntactgaaatacggtctttgcaatgccagaacagttt

SEQ ID NO: 221372 - DNA, 413 bp, Glycine max
  unsure (1)..(413): unsure at all n locations
ttcctgtggatactgcattctgtaangcaancnaanntaanttcngagnacacccacgcgtgcgatatacgtatgcataggtcattttactgagaccatctatctttatcgaacccacagcagaggaccggcagaggttcgaaccatattctgcctccttacgctcctaggggtatctgcaactggccgcttcctgaaccattttccctcaatgctttcatgatcacatagatgaccttcatctcccccacctgatgaccatcaagagcctctaagttcgtgcaaaaacacaagaagaacccctcacgaaccaactgaaagagcagctaggaaccctacctttatccacccctgttctgccaacattcataatgacaatattacaaaaccttctttttggggcatcttaatgg

SEQ ID NO: 221373 - DNA, 527 bp, Glycine max
  unsure (1)..(527): unsure at all n locations
gctgatgcgtgtggtggggttggcattcttggcattgcatgggcctttggtggcatgatcttcatccttgtctactgcactgctgggatttcaggaggtcacattaacccagcagtgacatttgggctgtttttggctcgcaaggtgtctttgatccgagccatcatgtacatggtggctcagtgcttgggtgctatctgtggagttggtttagttaaggctttccaaaagtcttacttcaacaagtnatggtggtggggctaattccctcgctgatgggtacagcacaggtactggattgggtgctgagatcattggcacctttgttttggtgtacactgtcttctctgccactgaccctaagaggaatgctagagattcccatgttccggttttggctccacttcccattggatttgcttgtgtcatggttcacttggccaccatcccagtcactggcactggtatcaaccctgtanggagtcttggagctgctgntatctacaaccaagattagccatgggatg

SEQ ID NO: 221374 - DNA, 560 bp, Glycine max
acaccatcgacaacgtgaaggccaagatacaggacaaggagggcatcccgccggaccagcagcggctcatcttcgccggcaagcagctcgaggacggccgcaccctcgccgactacaacatccagaaggagtccaccctccacctggtgctccgcctccgaggtggcgccaagaagcgcaagaagaagacgtacaccaagcccaagaagatcaagcacaagcacaagaaggtgaagctcgcagtgctgcagttctacaaggtggacgacgccaccggcaaggtgacccgcctccgcaaggagtgccccaacaccgagtgcggtgcgggtgtcttcatggccaaccacttcgaccgccactactgcggcaagtgcggcctcacctacgtctacaatcagaaggcgtaatcccatgcgccgctttgcttcacccgcctacctatcaagcattcacctgttggttactcgatttgaatatcatttagatctggttgaggttggaacataaatgcagcagtagtttctgtcttattatattggtacctctgttactgagttgat

SEQ ID NO: 221375 - DNA, 414 bp, Glycine max
ggacacaagggctagaaatagaacgaaagcgggcgaccagaagacagaaaaacaaacacgaaagagccggcatgggagccttatgtatagatgaggttagactggttgtgcagggtaatagcactaggctattcggtctgcacgcactcagcttgtgatcgatgaccacgataggctcgtgacctgattggagattttttcggtatactggtacagacggtggaggaaaacccccaactattaattgagagagatgaaagcctggataagtgttgacccagtagaactaaagaaactttcgccaagtttcaaggagaatggcggggcgggtgcagttggaaatgctcttagtatagccgatggagctgctgaattaattttatttagtgggcataaagctcaatagcttggcct

SEQ ID NO: 221376 - DNA, 579 bp, Glycine max
  unsure (1)..(579): unsure at all n locations
tcgctcttcctctcccagacaaacacatggctttgcccaatcagcaaaccgtcgattaccccagcttcaagctcgtcatcgtcggtgacggtggcacaggaaagacaaccttcgtgaaaagggcatctcactggtgaattcgagaagaaatatgaaccgaccattggtgtggaggttcatccgttggattttttcactaactgcggaaagattcgattctattgttgggatactgctgggcaagagaagtttggcggcctcagagatggatattatatccatgggcaatgtgcgattatcatgtttgatgttactgcccgtctaacatacaagaatgtccctacctggcaccgtgatctttgcaggggtctgtgaaaacatcctaattgttctttgcggtacaaggttgatgtcaagaacggcaagtgaaggcaaggcaggttactttccacaggaagaagaatntgcagtactacgagatatctgctagagcaactacaattttgaaagccacttttgtacttggccaggaaacttgcaggcgatactaacttgcactttgtagaatctcctgcattg

SEQ ID NO: 221377 - DNA, 570 bp, Glycine max
  unsure (1)..(570): unsure at all n locations
cggacgcgtgggcttcaacacaggtgtcatggtgcttgacctcgagcggtggcggcgagcgggctacacgcagcgcatcgagcgctggatggagatacagaagtcgccgccggggcgcatctacgagctggggtcgctgccgcccttcctgctagtgttcgcggggcacgtggcgccgatcgagcaccggtggaaccagcatggcctcggcggcgacaatgtcctgggcagctgccgcgacctacacccgggacccgtcagcctgctgcattggtccgggtccggcaagccatgggcgcgtctgggcgcggggcggccgtgcccgctcgatgcgctctgggcacccttcgacctgtacggccccgccggcgccggcgccggcggcgaggagtcccggtaaccataacacccgaaaaaaaagagagaaagattcttttccttctttggcccaccccgtacaaattctgagcttctttctaaatttcactccataaattactctacattaccatntaaagagtgatttacataaaaagaatcgttctctgtattcatttaaaaaaaanaaaa

SEQ ID NO: 221378 - DNA, 572 bp, Glycine max
  unsure (1)..(572): unsure at all n locations
gtaaaacctcacaatcacaaacacactcttttttgttctttgctcacttcccttgttcgtttcactctcacaatggactccctctctctcttctgcaccggagcccttctcgccggcggcctctactggttcgtctgtgttctgggccccgccgagcagaagggcaaacgcgccaccgatctatccggcggctccatctccgccgagaaagtccaagacaactacaagcagtactggtccttcttccgccgccccaaggagatcgagaccgccgacaaagttcccgacttcgtcgacaccttctacaatctagtcaccgacatctacgagtggggctggggccagtccttccacttctccccctccatccccggtaagtcccaccgcgaggccacgcgcctncacgaggagatggccgtncgatctcatcgaggccaagcccggcaacaaaatctngnacgtgggctcgggcgtgggccggcccatgcgggccatcgcggcccactcccgcgcgacgtggtgggcatcaccatcacgagtaccaggtcaatcgagcaaggatgcacaacaga

SEQ ID NO: 221379 - DNA, 594 bp, Glycine max
  unsure (1)..(594): unsure at all n locations
gctcagttagcaggatcgttgcaagaaaaacaccagagagcaggtgtcctgcaatttcattagcagaagttcctagcaaacaagcaagaaatgatcatgaggcagcagagaagcttaagtttgtcatttatcaaaggcccaaagcattccaaaatggaagcactgatttgggaaacaagaatggtgcaccaaaaactgttgaagagagaatagaggaatataataaagcacgagcacgcatcttcaatggttctgtttctgcagattctgatgctgcaagtgttttgggaactctttgcactggcagagatgagtcagtaaatgttgaaccttctgttgatgaaatcaaagtcagcacgatgaacaaccgttccagagttgctgttttcaaggatactcaaaaggatcgcagtgacccagattatgatcgaaactacaaaggtatgttaggagcccagttcctgacttcaacttgagcccaggtgccttcaactttgtgcctcagtttatgcagntatggcgtggttatgtgcaatcntctggcatgtctacaaaccagcctgctgtctactttggccagcctgatctaacaat

SEQ ID NO: 221380 - DNA, 442 bp, Glycine max
caaagatttgggttccctcaaatccaagaggtgcagaaagattacctcctggcattgttgaagccgagtcagacttttatttgcgtagattgtggggcaagcccagtgaggatctaacgtacaggccatattaccttgtaaccttgactgttggctatgatcagaaaaataatattgatgcagctgtgaaaaagttctcaaggaacttcactatcctgctatttcattatgatggccgaactactgaatgggatgagtttgaatggtcaaagaaagctattcatgtcagtgttcacatacagaccaaatggtggtgtgccaagcggtttctgcatactgacattgtggcaccatatgactatatattcatatgggatgaaaacctgggtgttgagcattttaatgcggaagagtacatacaactggtgaggaatcatgggtt

SEQ ID NO: 221381 - DNA, 562 bp, Glycine max
gagatgaaaaataagaatcagaattagaccgtagacaacggcaaaacaaacagttgacacgacactggaccaacaaggcaaaatcacaatgtaaagagataactttgactttcagcagaaaattcttgaattccaattgttactatacaccattttgcctaataagcccacaaaaccaacaacttgtaaaacacttttaacttttaaccgatatcgtacacacgtgctgttggttgtgcatgccaatgcaagaaataattaccttggcatctaatgattgctttgatctcactatgttgtgtaatagtgtaagtcttatgtcatgcaaatagtaccctttttttactaactaaagagctctgggaaagaccacattatgaacttgacaaaaatgtcacactccaagaattcaatgtgagcagcacgtccaataagtgtgttgaagctcctcctgccgtaggaggaggtttcgaagttaatgtcgcagcgcatgacgacacgatgttcagagtgagttctcacttggtccaagcaattgtttaacatctccaggaacactttc

SEQ ID NO: 221382 - DNA, 553 bp, Glycine max
acaatacaatatgtatttatgaactatcaatatatgatcgttattatgtctgtgatacacacaattaaggccataatatacttatgtgatttacaacaacttctagcttattttatacatcatgccaacccaactaggagcaattttcatcatacaattacacttatctttaatcatcattcatcaatactggcatcagcaatacgctctaaactctgaagcatgacaaggtggtagtcaccagggaccatattgttatgcaatttatgccacaattggataagatgcacaagttgcaacaccacacatgttcttccccaattccatcttgaagtagccattttcaccccagctttctccccatgaattttttatgagccaatatgggacaccattttcaactccatatccaacagcaagaacggcatggttcacatcctgggaagtgctaccacaagtgtcactagtgaaaactccattctcgtagaaatggaacccattcaccacctgaaaggccacactaacttgccgaacaaatgcaacttgcatgttt

SEQ ID NO: 221383 - DNA, 582 bp, Glycine max
gaaaaatagcagaaatgttgctgttttccaagcaaatccgcttatgaatgggctttcaccttctgactatgttctaagtgcattttcagatgttcactccaatgatttggagcaaacattattggctttaccattttcagatgctttgaagcttctgtcgtacttgaaagactggacttcatactctgataaggttgagcttgtttgcagaataggcacgctgctgttgcagacacattacaaccagcttcttgccacgccagctgcccgacctatcttgacagttttcagtgacattttttatgaaagggtcaagggatggaaagacatctttggttttaaccttgccgccatggatcatattcagcaaatgatggcttcaagatcagatgctctttttcatgatgcaagatcaaaactgctagagatacgtgctcggcaatccaaacgcttagaagaaaggtctgatactggggaagtgaagcggaagaaaaagaagacataaagtatcgtgtatatttggacatggttacgcacttagattatgtcaatgacctgagtatttcaaccacggtgggagaa

SEQ ID NO: 221384 - DNA, 548 bp, Glycine max
  unsure (1)..(548): unsure at all n locations
ggaaacgcatgtttgaaacttaattgtcaccggtacaaatcagaccaagaatggcttctttcagtacttataccaatcttgatttaagtcttatttaatagtaagtttgttcagaagcatgagcatcacaagccaagtgaccaaccacacaaggtttctattattaacgttttctcctctaggagatatcacaaattaaaagttggtaaacttcttttctttcaagctatccacagtctccttgaggctcacttccaaaggagtatattcaatccccaagctctttgccttttctttggatacctgatatattggcacatatgggttatcatctgcacacttctctggaagttgtaatgtcgggtacaaatcacgtaaaatcttcacaatttctgagtagtgtgccactctctccaccaaacaataccttccattagctgaagcattctcatatgctagaatatgggcatttgcaacatctttcacattgacccaaccaaaagatgcatttggaaatgttngtgcaccattaattacgtttaaaattg

SEQ ID NO: 221385 - DNA, 554 bp, Glycine max
gttcttaagtatgccatgacccttgatggaaaaattgctgctaccactggccatgcatcatggataagctgcaagcagtctagaaatctagtttttgagttaagaggccgaagcgatgctgttattgtgggaggaaatacagttcgaagggacaatccaagactaactgccagacatggaggggggcatatgccaatgcgcattgtaatgacccagactcttgatcttccagaggaagcaaacctgtgggatatgtctgaggtttctaccatagttgtaacacaaaggggtgcaaggaggagtttccagaagctgcttgcatcaaaaggagttgaggttgtggagtttgacatattgaatccccgagaagtaatggagtatttccatgattgtggatatctttcaattttatgggaatgcggaggaacattggctgcatctgctatttcatctggagtaattcacaaggtttatgcttttgttgctcctaaaattattggtggaaagaatgcaccatctcctgtgggtgatcttgggatggttgcgatgtcaca

SEQ ID NO: 221386 - DNA, 464 bp, Glycine max
aggcatatataacattaatttatttacactaaaggagtaaaaaaatcttgacgtacctgtctacattaaagcgtgagaagggatgaagagttacttcccaacaatctcggttcatatacaatttttcacttctttttttacccttataaagaatgaaacaaacattaatactccaataacacccggttcacaaacaaatacaatacacaacacaatctagcaatctagctacttctccatgccctaaaacacaagcaaatcgttcttgatatcatatcccattttctccaaattaggctgcactgcaaactgaatcatgggtgggggcccacatgtcaaagccaaggaatccctcgacgcttttggaaggggctccctcgggatactctttgtgatgaaccctacactgtatttccacccttcctttgcgatttccaccacgtaccatagcttgaaccgggcat

SEQ ID NO: 221387 - DNA, 490 bp, Glycine max
  unsure (1)..(490): unsure at all n locations
aacaaaatgaagagcctcctcttctctctcttcctcttcctcttcttagcctcctccgccgtcgccaccgtccccgcccacaacatcacccgcatgctggccgcacaccccggcttctccaccttcaaccactacctctccgtcacccacctggccgaagagatcaaccgccgccagaccatcaccgtcctggccctcgacaatgccgccatgtcctccctcctcgacaagcacctctccctccccaccatcaaaaacgtcctctccctccacatcctcgtcgactacttcggcgccaaaaagctccaccagatcaacaacagcaccaccctcgtcttctccatgttccaagccaccggctccgcctccggcaccgncggctacgtcaacatcaccaacctaaggccggcaaggtcggcttcgccgccgaagacaacgacggctccctccactccttctacgtcaaatccgtcaaggaaatgccctacta

SEQ ID NO: 221388 - DNA, 417 bp, Glycine max
ttttatgtgtctgatttgaggttggagcgtagttagcttctcttttctgccgaaagctgcagaattgtgttgttttctctcctttgggggtcaaacaagcggttctcttcatgatgccaagtgttaaccctgacaaagattccgagccatttgttgagaccgatccaaccggtcgctatggtagatacagtgagttgctcggatgtggtgctgtgaagaaagtgtaccgtgcatttgatcaagaagaaggaatagaggtggcatggaaccaggttaagctgaggaacttctgtgatgaccctgccatgttggataggctttactctgagtgaggttgctcagaagcttgaccaacaagaacatcattgcactttacaatgtgtggaaggatgagcagagaaacactttgaatttcat

SEQ ID NO: 221389 - DNA, 562 bp, Glycine max
  unsure (1)..(562): unsure at all n locations
cccttttccccttattttcaaacaccaccgcgtaacacaacacttgcccattcccttataatagacaaacgaaacacacctcactcacactttccgtgtaaacagaacagagcaacactgaacaatggcgcaaccttcctcctcctcgaagcctgttgtccctctcctgaaggacgagctggacatcgtgatcccgacaatccgaaacctcgacttcctcgagatgtggcggcccttcttcgaaccttaccacctcatcatcgtgcaggacggagaccccaacaggaccatcaatgtccccgaaggcttcgattatgaactctacaaccgcaacgacatcaatcgcatcctcggacccaagcctnctgcatctcgttaaggattctgcgtgtcgctgctttggttacatgggtctcaagaagaagtacatctacaccatcgatgacgactgctttcgtctgaaggatccttctggaaaggatatcaatgcacttgagcagcacattaagaatctcctttggccatccactccattntttttcaacaccctttatgaccctta

SEQ ID NO: 221390 - DNA, 406 bp, Glycine max
gagaaatagaaagatgctatatatttattcttagaaatagcaaatgtcaagaacaacctatgatttcaaagggagaaatcctagatttcaacttataagccttattttggaacaaaatcctaattaacagcgatgtagctgattgacaaacaaaacatgtagtccacaccacacacaattttccccagagattctgagtctcacatacatgaatctattttgaagcagcgaggctttcatagaagcctttaacaaacacataattcttagaaatacttagtgtcacaccccatcatcaaatctattttgaaccaaaaaggctttcgtggacacccttgaaaaaggagaaaacaggatttctaaggggcacacattatttgacaattggatggttcaaaaatacttg

SEQ ID NO: 221391 - DNA, 591 bp, Glycine max
acttactatgtatatcatttacagagtacaatcaacacacggaatcatacatttcagataagaaccagctattcttaatctgattaattactatatattcttcgtcgggatgaagaatatgttgacaggatatatatctaaagatgtgcgactatagtataatacattaatactagacctattattacaagactcagagctggctttatttttcatcacaacacatattcacttatatagataccatataatattatagtctcttggatccacttccaagatgaatttagttaggacacataataatgtcaaaggtggtgttggtgtggcacgttgttctgccaccaagatgtagaaaagccccattactccactgtgcatttcgctgttgctgtagataatctctagagttagggtttcaccatcttttattttgatagtacctggtcgagggtaacatgtggacattcctacaacataccctttctcatttcctgcttcacttccagtaccatattttggtattgaagaacaaataactcccccatcctgtccgtgtagcgttgatgcaaatgcacctgcatgctgatg

SEQ ID NO: 221392 - DNA, 543 bp, Glycine max
  unsure (1)..(543): unsure at all n locations
gcaaagggtgtgatgagattagttttgagaagaaaccagcaatcggcgattaggagtgagagagatatggagggaattgaaggaaatagcagcagatacagtctgaaaccctcgcgaatttgcaacgaagatgttctgatctgcgtcgacgtcgatcctcagtgcctcgtcgaaatgaaaggtgccaccggtcccaatggcagacccctcacccgtttggactccatcaaacaagccatcgttctcttcgtcaatgccaaactcaccatcaaccccgaacaccgttttgccttcgccactctctccaacaccctcgtctcttgggtttctttctttctagttctgttctccttcaattaattttggtttagggcttttctttcttatttcctaacaatatctaattacaggtcaggaaagagtttagcagtgaaattgagtcaacacttgcacagatgcgtgttctttcagcttcttcttcttcttccaccaccgnctgccaacccgatctcactcatntgttccgtcttgccgctcatgaag

SEQ ID NO: 221393 - DNA, 592 bp, Glycine max
gaacaataatgtgtaacattttaaaatcattaaattggaattccaagtgacagccacttatccctgccactcaaataaatcattctcaaatgtaaaatttccatcatgatgaaatttaaaaacggtttttgggacaatatcccatctagaaaatttattaaacaaaatttgcgcgggccattactctaaaaaactcttgaaactcagaacggtttttatcatcgccatctaaaaaacaatgataataacactgactcagcactgaaattaagcaccaccagaaccatacttcttgccgaacacaagaacctgcaacttgtcgtaaccagcaagcacaccatcaccagcaacggcacggaggatgttagcaccggcacccttgaacaaggacttggcgccctcattcttgaggatctgtgtgaatgcgtccaaggaactcttgtacttgacagcttcaccagaggtcatcatcattcttcttctaacagtgtcaattgggtatgatgcaagacctgcaccattggtgatgagccatcctagggcaaagcttgcaaaaaagctatcctgcaatgatcccgtgaggacactggtt

SEQ ID NO: 221394 - DNA, 335 bp, Glycine max
gatttttccctcggcgttgccatgacggaaccaacagagccatccacgtcatcttcattggcgagggacccaaccaccgtggttcacccaaggcgcgagcccttcgagcacggcctcttgccaatcccgcgcctcatcttctccgacccggcgcaaaccctaattccgttgaagcagaagcttctcgagttatcctccaaccagcgagtcgacttggcggcaatctccgagtcactgcagatctccattgagcacgccaggctcgtcctcgataccctcgcctcgattctgcactccgactccgaacctttcgtcgtcgccaatctcgtcgaaat

SEQ ID NO: 221395 - DNA, 532 bp, Glycine max
cacaaacataaaaaaaaaaaaaaaaacacacacacactctcatacacacgttgtcgcgcacacattccttcattccgcagcaacaaacaaacatcttttaccttaaacaacaatggccgatgccgaggatattcaacccctcgtttgcgataatggaaccggaatggtcaaggctggttttgctggagatgatgcaccgagggctgtgttccctagcattgtggggcgtccacgtcacactggggtgatggttgggatggggcagaaggatgcgtatgttggggacgaggctcaatccaagaggggtattttgactctcaaatacccaattgagcatggaattgtgagcaattgggacgacatggagaagatctggcatcacactttctacaacgagcttcgtgtggctcctgaggaacaccctgtgcttctcaccgaggcacctcttaatcctaaggctaatcgtgagaaaatgactcagatcatgtttgagaccttcaacacccctgctatgtatgtcgctatccaggcc

SEQ ID NO: 221396 - DNA, 464 bp, Glycine max
ggggggaaaagaaacaatttaaattccccaaaatatattttcaaactttgggggagctttttaaaaataaacccatgctgaaaaattgttcctaaggggccaataaatgaagtgtgacctacaaacacatttaacaccttcttgtttttttcccagctaaggaatgaaaaggtttaaactttacgagcccgggccccttggtttgttccatgctggactaccttttcctccacaggaaggcccttaccccgggggactggattaaaaaatttttttgccggttttggaaaaaccctaaaaccctttccaaacttttaaatttccttttccgttttagggacaaaaaaagggtccccaggaagggcttcccaggggctaaggacaaaaagtgcacttgcggcaccaaaaatccaccttttaagctcatccgcaaaaccaaagcttttaaaaacaggaaaattccc

SEQ ID NO: 221397 - DNA, 571 bp, Glycine max
  unsure (1)..(571): unsure at all n locations
gacggaagcaataaagaagacgcgcttgtgcggttatataaatggatggaataaaatgtttagtgaacaaaaagaaaaagaaaacatgagaatttgatattaagcctgttacaagaattaatcatcccagagctgatcttgtcatctcatatgccaagaaacatgctgcatttgcaggaacacttcgagccattgcaggaccaaaacccttatacaagcctttgaacccttctgtagctcgaatctttctgaatgcatcaaatgaaccagaaaattttgggtttctgtgatcatctacttgaatcacactcttaataacatcagttgggtaaactaagaaccagaaggaagctccagccaagcctccggcaacaatcagagaacctctacttagcccagaagtatcagtgcctcctgcaaacttttgctttaatgcttcgtatacaccaaacatgatagcatttccaggtatctcacgccccatagtgggaaccaagcccttgaaagacctctcatgcccncttctgacttgagaacatgcctggccacatccatgggtccttcatactta

SEQ ID NO: 221398 - DNA, 599 bp, Glycine max
catacactcaacaacaggtgctgatccattctattggatgcgtgttatccttgcttcaaaccgtggaactgttatggagctgggaatcacccccattgtgacttctgggctggtaatgcaacttttggctggatcgaagatcattgaagtggacaacaatgtaagggaggatcgtgctctcttaaatggtgcacagaagctacttggcattttgatagctgttggtgaggcagttgcatatgttctttctggaatgtatggtagtgtgggtcaacttggagtgggaaatgccatcctcatcatcctccagctatgttttgcgggtattattgtgatatgtttggatgagctccttcaaaaaggctatggcttgggatctggaatttctctgttcattgccactaatatatgtgaaaacatcatatggaaagcatttagtcccaccaccattaacagtggacgtggagctgaatttgaaggtgctgtcattgctctattccatttgttgataactagaacagacaaggttcgtgcccttcgtgaagcattttaccgggcaaacctttccaatgtgacaaatctgcttgctaccatctgat

SEQ ID NO: 221399 - DNA, 511 bp, Glycine max
ggaaaatagaggtttctctttcaagtttcacctcctcaccaccgccaagcttcgtctccgagaatgtcaccatcgcacacttttttgtttccaagcacagcaccgatgatattagcaaccaaaccctaatcgtgtccacgctttctttcttctttcctggcacactttctccctctccactttcagcacacactttttcgttttctgttctagttatttggttctgaagcttttgtttcaatggaaaaggacaagcctgtttctgtcaaagatgctgttttcaaattgcaaatgtcgctccttgaaggcattcaaaatgaagaccagctgtttgctgctgggtctctgatgtcaaggagtgactacgaagacattgtaaccgaacgatccattcaaacgtgtgtggttatccgctctgcagcaatgctttgccatccgatcgcccacggaagggtagataccggatttcactgaaggagcacaaggtctatgacttacacgagacttacat

SEQ ID NO: 221400 - DNA, 519 bp, Glycine max
acttcataaaaagtagatgaacgagaccttattgaaatgatgattatcaacacacaaaaagtaaatattatatatgatgatgatcttaattaagaaaggagtttagatgcaacgccgatccttgcaagtggaacacagacaagactatgtgcccttggaacagtgaggccggctctctcttccatgctaactttggcgtcaccacccttcaatatctgtccttgtggacccagcacttgcaagtcgaagcactgaataagagatgcaagaagtgttgccattcccgaagtagccagattgactccagggcacattctcctcccagacccaaatgggagaagttgaaaatgttgtcccctaagatcaagaggccctgcttccccttcagcccctgtctctaggaacctctcaggacggaactccgatggtctgtcccagtatttggggtctcttcctacttgccatacattgaagagaatcaatgctccctctgggatcacatatccattaatctcacac

SEQ ID NO: 221401 - DNA, 430 bp, Glycine max
ccagaatccaaggggattcctgctagtgtacagatatttgcttgtggaaatgcgtctcaaagtcaacctgttgctcgacgtagttttttccgatgttcaaccacccaacttaaatggaatcatggctcaactgggcttctagtggtggtgcagtcagacgttgacaaaactaatcagagttactatggagaatcaaaattatgctatctgaccacagatgggatgcatgaaggacttgtgcctcttcggaaagatgggcccattcatgatgctcagtggtcatattctggcctggaatttgctgttgtatatgggtttatgcctgctaaagcaactctgtttgacaagaagtgcaatcctctactagagcttggaactggtccttacaacactattcgctggaacccaaagggaaaattttgtgtttggc

SEQ ID NO: 221402 - DNA, 411 bp, Glycine max
  unsure (1)..(411): unsure at all n locations
cggctcgagcagagagagagaaaaatgaagtctttccatctcacagtgacagctttgtgctgtgtagtggttgtgcttggagtgcttccactctccctagatgcacaactagatccctccttttacagagacacttgtcccagggttcactccattgatcgtgaagtcgtcaggaacgtttcaaagaaagatccccgtatgcttgctagtctcattagacttcactttcatgactgctttgttcaaggatgtgatgcatcagttttgttgaacaacactgccaccatagagagcgagcaacangctctgccaaacaacaactcactagaggtttggatgttgtgaacgacattaaacagcagtggaaaggcttgctcggcgtggtncttgtgctgatattcttaccttgca

SEQ ID NO: 221403 - DNA, 465 bp, Glycine max
cctgaaatacatatttataataagaatataatataaatagtaataatgatagcatcaatatcaataaatgggtctataatcttgcattataaaaaaaatatggtaacaaatttgataatcaattaaaactgacaaggaagaaactactccaattgaaaactaaaatccgcacccataaaaggttcacttggcagcagcagcaccattggttggctttgaaggaacttcttcaaatgggttgttgttaagctcatcccaagcttcaatccaagtaaccatggcatctgctagcttgatgaagtagggatcaacagccccaagcttctccttgacttgcttggagagttcaatgtaacatttttggacagacgtgcactcttttgaaagagtggcactttggaagaatggaatgattttttcttgccagaagatgcccttgtcctcctttttgagattgacaaaagg

SEQ ID NO: 221404 - DNA, 448 bp, Glycine max
gcttatgctcacactcactttaatttgaatttacacgacacgccaagcagggatacgcgcacacaatgaaaatcgactgaccgatatccctaccttggttagaaccacagagccccatgatatcatgctaaattttgcccgtggcgagtgcataacagcacagaaagcttctgcggtaattaagaacacattcgatgccttacagcacgatctgttggaagctttcttaaccataatggcacctgtgtattccatccgccctataaattttctcttgaatgaggtcaaggataaggacttgaatgcaatcgggtccaacttatggaaggaggagccagggtgtgtggaatggctcgacacagaagaagtcaacacagtggtttatgtgaacttaggaagcgtcacggttatgacaaatgaccaaatgaatgagttagcatggggactt

SEQ ID NO: 221405 - DNA, 460 bp, Glycine max
gttaaacattatttttatttgggtacaataagggttgaattaagaccttagacaaaaaactctcttatcccctcccccattagactgaccctagtggggaatgggttcaagacatgttaaacattacttatataacattatcaccaaatcaataccctttgcatatataagaagcaatcaccacatacatacacatgaaaccaacaacttaaatgacacgagagaagtaactgtgcaattacatagtattattggcttgatatgggagcactatcttcagtagccataggctccacctggggaggcttctttgcaattgactttggtatgtcaacatactcttggatgcaacgctgctgaggatgtgacaatagtatcagcacatgacggaatagaacacgtgccgacccctgtccactctccaagatataacccttatattcactaacatgttcaagtg

SEQ ID NO: 221406 - DNA, 560 bp, Glycine max
agcaactgcaaaacaacaactcaattaagaaattcttctccggagccatggcagatctcaagtctacattcttgaacgtctattccgttctcaaatctgaactcctccacgaccccgccttcgagttctccgatgatgctcgccattgggtcgaccggatgctagactacaatgtgcctggaggaaagttgaaccggggactgtcagtcattgacagctacagattgttgaaagaaggacaggcattaaatgatgacgaaattttccttgctagtgctcttggttggtgtattgaatggcttcaggcatattttcttgttcttgatgacattatggataactctcacacacgccgcggccagccatgctggtttagagtgctcaaggttggaatgattgcagccaatgattggagttctactaagaaaccatattcaccgggatccttaggaagcacttcaggggaaagccatattacattgatcttcttgatttggttaatgaggttgagtttcagactgcttcaggacagatgatagatctgatcaccacattggaag

SEQ ID NO: 221407 - DNA, 500 bp, Glycine max
gagggaaggggtgtaacggctccttcttccgcgcgtttgacatggacgacaatggggatgagtgcatggacgagtactttcatcaacccgagaagaagcgacgtctctctgcgagccaggttcagtttctagagaagagcttcgaggaggagaacaagcttgaacccgagagaaagaccaaactagccaaagaccttggtttgcagccacggcaagttgctatttggttccagaaccgtagagctcggtggaagaacaaacagctggagaaggattacgagactctgcatgcaagttttgagagtctcaagtccaactatgactgtctcctcaaggagaaagacaagttaaaagctgaggtggcgagcctcatgagaaggtgcttgcagagggaaacaagaggggcacatgaagcaggtggaagtgaaaatgaagaaacaaaggattattgcatttgcaggaacggaaccacccagaggcttttactgcaatcagtttcg

SEQ ID NO: 221408 - DNA, 493 bp, Glycine max
  unsure (1)..(493): unsure at all n locations
catgaaaagaatttgttaattcaaccaaaccaaataggtaacaattcacatctcttctacaacagaacgggagaaaaaaaaaaaagaatcttacatatcttgctagccttcatgctcttatctcaacataccaaagaaaggaaaacacaaaaacaagatagataaaaggatggtaaagagtaggaaatgaaagttcctcaaccactagatggtatttttgtagtatttgtataaatagtaatttccctggtccagctttcacactccatgattataacttagaagcatttcctgtgtacgattgatggtccagattcatcatactctgccttcgcaatccacatctgttggaaggtgctgagggaagccaagatggagcctccaatccagacactgtacttcctctctggtggtgctacaaccttaattttcatgctacttggtgccaatgctgnaatctccttgctcatcctatcagcaatgccagggaaca

SEQ ID NO: 221409 - DNA, 529 bp, Glycine max
caagaaaactaataatattaaatagcaagtaatttctagaactgacaacttaaattaacgcaagtgtattcagagaaactccataacgtttacagtgatattatactagggcttcctcggttgagaaaagtgatacaaaactaatctaagttcttccttactgtgttaaacaacctaccaaccagtcctcattacacaacaaaactgtgggtgcggtagagccgaattgcgtcaccaacagtgaatgtgctaagcagagcttagaaaccgaagaagccaagctcgcttgctctctccttctcaaatgtttcgaagtactgatagatgattgttactgcaagcaatattcctgtccctgaaccaattgcccccatgaaatctgccaacacagtcaatgcaccgatacatatgcctccaaatgctgccgcggtgggaatgtatcggttcagttctttctgcaagtttgattcccgatgtccaggcattaccatttgttgttccttcagctgctttgcaacatctctagcag

SEQ ID NO: 221410 - DNA, 590 bp, Glycine max
catcaacctcagtcgtcattgccgtcgcacggtgagactcgcaccaacaccagcacttcaaagaagacagaatcaagcagaacttggagttggagagagagaattccgaccctaattgtaaaatggaggacgagacagagactatggtggagaagagggagataatcaacaacgtaatgtgtcttttgacagaccctgatggaactcctttgggtgctcctatgtacctacctcagaatgctggtcctcaacacctcatccagattgttaataagcttctaaacaatgaggagaaattgccgtattctttctatatatcagatgaggagctcctcgtgccacttgaaacatacttgttgaaaaacaaagcctcggtggagaaggcattgcctatagtttgtcaacctcaagctattttccggattcgtcctgtgaatcgctgtacggcaactatttctggtcatgctgaagctgtactaagtgttgccttcagtcctgatgggcgacaactgggcagtggttctggtgatactgctgttcgattttgggacttgaccactcagacaccattgtacacttgcacaggacac

SEQ ID NO: 221411 - DNA, 580 bp, Glycine max
gaatatcaattttgcattcatcactctctagctagcattagagaatatagaaatctggttcccgtgttgctagaggcctagcataattgtcattgcatattttttatgtttataaacaagcactccaatgcttgacaggtaaattttccccaaataaaaaaaaaatgcactatttgttgtcatgccccactttgggcagagatgtgaggtgctcggcccagtggcactgcaagatccttcaaaacctcatattcttccatacctatttgagaaccactcaaaaccctgtgaaatgaagccctcctatccgtcatgtatgagataagagcaggtaatctacatacggacaatgcatcaataaacaaaagagcaaccacttgccattgttttgttctgaaagctggaagtgcgtccacaaatgacattgtctccagcaagcatgccatcccttgctccatggtagatactggtattggcagccggagcacagcaacaagtgtaggtaaagctcgagcaagacaactggctaaagtttgttttatttcagatgagcgaccatctgccaagacaactttgcagg

SEQ ID NO: 221412 - DNA, 572 bp, Glycine max
  unsure (1)..(572): unsure at all n locations
tctgaaccttccggatttcgttttgctttgttcaggtagccagccagtcatggtgctcttcaatgtttcacgcgtagagaccactcccttcgatggccagaagcctggaacctctggtctccgcaagaaggtgaaagtgttcgtgcaacctcattacctccataactttgttcagtcaacattcaatgcattaactgtggaaaaagttagaggtgcaacgctagttgtatctggtgatggtcgttatttttcaaaggaagctattcagattataactaaaatgtcagcagcaaatggagtaagacgtgtttggattggtcaaaatggattgctttctactcctgcagtatctgctggtatacgtgaaagagttggagctgatggatccagggcaacaggtgcatttatactgacagcaagtcacaatcctggtggccctcatgaagattttggaattaaatataatatggaaaacggtggacctgcaccagagggaattactgacaagatatatgaaaacacaacaacaattnatgagtacttgattgcatcagatctgccagatgtggata

SEQ ID NO: 221413 - DNA, 551 bp, Glycine max
  unsure (1)..(551): unsure at all n locations
gccaaatcaaatcatcattcaatgtatgctgcacaacagtcagtaaaatttcctatgtacaaaatgacaccaaccccaatcaagccctcccctggtaacccccatattcatcaaccaaaccttatccaatttcacaactcgccaaatggaaaataaaaacaatttaattttcacacttctatctaggctgcccaaattgacattgcatactgaaaaggtaggtgaatcaaattaaaaaaccaacactgtaagaaatattattctattgatatgaacaagaacagtcatcattttcgtcatcatcatcaacaatctcatcaaagaaaggatctcttagaagctcagctgcagaaggcctagcccttggctgagcaaggcacttctcaatgaaagccttaacctcaggatctttgaccttgttcaaggcagcaggtctaactccagaagacaccttcttgtatatcttagcaacattgtcacattcactataaggaatctctactgtcaccatctctaacacacacatnccaaatgagtatatgtccaccaat

SEQ ID NO: 221414 - DNA, 501 bp, Glycine max
  unsure (1)..(501): unsure at all n locations
ctccattccgggaagctctgggtatctggacatatacccagagaggaaagtctctgcctttcaaaacccttacattatgggcttcactgctgtcgctagcattggtggattgctctttggctacgacactggtgttatatctggagcccttctctatatcaaagatgattttccggaggtcaggcacagtaattttctccaggaaacaattgtcagcatggcagtggctggtgcaattgttggggcagcagcaggtggttggattaatgacgtttatgggagaaagaaggcaaccctcattgcagatgttatctttactctgggagcaattgtaatggctgctgccccagatccttatattctcataatggcccgtgttttggttggttngggtgctgggtataagcttctggtactgctcctgtgtatattgcagaatcatcaccatcagaaataaggggagcattagtaggcataaatgtgcttatgatnactggtgga

SEQ ID NO: 221415 - DNA, 350 bp, Glycine max
gcagcgcattatagcacaccacacaaaaaagcaaaacagagagaacaactgttactcacacacgccatgggtaaatgaatggtttttgagcaacagcagttaaaagagaaaagggattcagcgaagatgacatcggttggtgtggcaccaacttcgggtttgagagaagccagtgggcatggagcagcagctgcggatagattgccagaggagatgaacgatatgaaaattagggatgatagagaaatggaagccacagttgttgatggcaacggaacggagacaggacatatcattgtgactaccattgggggtagaaatggtcagcccaagcagactataagctacat

SEQ ID NO: 221416 - DNA, 552 bp, Glycine max
agagagaaaatactgaaaatatattatataaatagcagaactctaataataatgacccaaaagtttcagaagaaaatagtcaaacaatattacaagataaaatacaacaagatcttaacactgaaaaaacaaaattagaaaaaacaaaggcaagaagaaaatcaatttttaaaagattccaagccacgaaacatgatactgctctagatactagatagaaatcagaactctagtttctattgcatgttaaacaattttgggcctcgccttaagttgactctacttctgccttttgtaaattttagccaaaaaggacttcaatacagcttgaactgctttgataggatgagcttcaatggaggatacaagcttcgcatagctcccactatcgtactcctcaaatacaccctgaagattaagctcattgtacagggcctttactttagcaacattatctggatctggcttaccatagatctcttgtagaactttcttttgatgttcattactaagttccaaggctttcacaattaaccaagagcacttgaaatc

SEQ ID NO: 221417 - DNA, 485 bp, Glycine max
  unsure (1)..(485): unsure at all n locations
cacctttgttcactcttcttctcttgcggctagggttttagcgcagcttcttctagatttaaggaagatgggtaaggaaaaggttcacatcagtattgtggtcattggccatgtcgactctgggaaatccactaccactggtcacctgatttacaagcttggaggcattgacaagcgtgttattgagaggtttgagaaggaagctgctgagatgaacaagaggtctttcaagtatgcctgggtgctggacaaacttaaggctgagcgtgaaagaggaatcaccattgatattgctttgtggaagtttgaaacaacaaagtattattgcacagttattgatgcgcctggactanggatttcattaagaatatgattactgggacatcccagctgactgtgctgntcttatcattgattcgctactnnggtggtntgaagctggtatttcaaggatggacanactcgtgaacatgctctgctttcat

SEQ ID NO: 221418 - DNA, 540 bp, Glycine max
ggaagacatgaaaagcagtacaccagatgctggcagctggaatttttcacaaagaccattaatttaggctaacaaaatactactacattacagtaattattttcacaaaaaaatattacaatcagattagcaactgtatttttcattggattctgtgcaccggggatgtcacggcataaatatgtgggcactctaattcacgttatctgataatgatctcagctacctatgcgggcaatagaattgtcgagaggaattgaagaggaagttcaaaaaggaagccagaaaccttgttcctgtaccatcattcactgagccattgcattgcctgacaaagatcaatcaccttgtagacagtaaagctgacgaatgtttaccgaagcatataaccagtccttgaagtagacatggagcgcagatgacaatactcgtttgcgactttcttctaaagatgcttatcgtaagagttgccttatctcctctaaatttctgtgatttttatgctgagatgccatatacgcatctggtaacgtgaatgga

SEQ ID NO: 221419 - DNA, 466 bp, Glycine max
attgattgcattcattacatgttcattcaatttatggtgggcgaataggaatgagaaatccgttcacagaacatttaacaacatagcggggaggaacataatgtaattccaccagaagttgataatgctatgtcatcatagctttattcagcaaacaacacgcaaaccactaaatacaattacaacgatgtctgaggatgttcataaatataaacgttaagtgtgacatacacatcataaaaatgttcaaggatagacctcaatcagagatctaaaaccaaagatgggaaatattttgtagtgtttgaatcctgcttcgatgaaaagctgtttccattctttttccgttgtttcttttacattcatcgccaacataataatgtccaaactaagctttgtttgtggcatattcgggtaatctagcttcttatttattacggcatttatgataatcactttttcactg

SEQ ID NO: 221420 - DNA, 540 bp, Glycine max
tgattatatcacatatactcaccatggaggctaaattggtcaccaccataatacttattttctccgtaatttggcttatgagggtgaatggcatagacccttgtgcctctcaagcggataattccgacctgaacgtgattcccatctacagcaaatgctcaccgttcaaaccaccaaagtcagactcatcgtgggacaacagaattataaacatggcctcaaaagacccactccgattcaaatacttgtccaccttagtgggccaaaagaccgtgtccacggccccaatcgcttcgggccagaccttcaacatcggcaactacgtcgtcagggtcaaattgggaacccctggtcaacttttgttcatggtcctcgacaccagcaccgacgaggccttcgttccatgctcgggctgcacgggctgctccgacaccactttctcgcccaaagcctccaccagctatggcccattggactgctctgttccccagtgcggtcaggtccgcgggctttcgtgccccgccacaggtacccgcgcgt

SEQ ID NO: 221421 - DNA, 504 bp, Glycine max
caacggacgaggagctggtgttgcactatctctgccgcaaatgcgcgtcgcagccaatcgccgttcccatcatcgccgaaatcgacctctacaaatacgacccctgggacttacccggattggctacttacggagagaaagagtggtacttcttttcaccacgggaccggaaatacccaaacggttcgaggccgaaccgggcggctggcaccggttactggaaggcaaccggggcggataagcccattggtcagcccaaaccggttgggattaaaaaagctttggtgttttacgcagggaaagctcctaaaggggacaaaagcaattggatcatgcacgagtatcgtctcgcagacgtagatcgctccgttcgcaaaaagaacaccctaaggttggatgattgggtgctttgccgtatttacaacaagaagggcacgatcgagaaactgcaaccaagcagcgatgttgctcatagccgaaatatcgaatcctcggagatcgaag

SEQ ID NO: 221422 - DNA, 553 bp, Glycine max
ggttatgaacactgcatgattcaaaattaaaaaaagaaagtgtaacacaaacacagtacacaacaagtagtggcgggcacatggcatgaatgtgcctatagcttctttatttgtgggctctaatcacaccattttaagtgaaaactattcatcctaatccatttagattgaggtaaccataccctatgttgatgattcttctgaggccacactagcaatatcaacttcaacagatttcttgttaacaaagttacaatgttttctgatttctcctttcttcccagtgagcacaccaatgttacccatcttaatcattgaagcctcaaaggcgtcaaagaaaactttctggtcactgctgaacctgttgacaatggggatggtatcggcaccaggtgtcgagaacagctcttgatcactctgaagcaagcccttcttaacctgaagattggagaagtagaccctgtcaattttatcaggagtgacagggtcaaaattgacaaggttgttaggttcaccattggggcatatttggcgcaattgttgcaagtaagtt

SEQ ID NO: 221423 - DNA, 582 bp, Glycine max
aaaggtaaatcacttcatgtcgattttggcacaattgattagatactgaagaaaacatgaaaataaccctcttttcttcatgttggaatagaaaaagaaaaaatgaatactttacaagattacatttttaacataatgtccgcgttgcaatcttgtcacacactccacattcacaatggtctgaaataaaagaggtgtacgccaagtttgagtgcaaacttgtggcatccaaactaataatagtgactaaaaaaaaaaaaatagtttatatcactttatagcataatatcaatcatagcagaacatgatatagacatgagccacactaaaatgctttgcattcctaggaatgattttcagtccgaacaagaaggctttgagcatcagggttcttgccccaagctctctccttccataacagctccacttcatcaaatgtcaatcccttggtttcaggaacatagacaaccacaaacataaacgcaagcacggctataatagcaataattaagaaagtagggccagtgcctacagctgcagcaaccgacagaaatgactgtaccacaatgagatttgagaccc

SEQ ID NO: 221424 - DNA, 362 bp, Glycine max
gccgatgacattgcctatggattgttacatgaaaggtggcgagaagaacattctagtctttgatcttggtggtggcacctttgatgtcagtatcttgacaattgataacggtgttcaagaagctcttgctacatatggagatactcatattggagctcaggattctgatcaaagaataatggactacttaattctcttgatcaagaataagcatggaaaggctcttatcaaggacaacagatcacttggaaagctgaggatagaggctgaccgtgcaaagagggctctcaccagccagcatcaggttcgagtcgaaattgaatcactttttgatgccgttagataattgtgagtcactcact

SEQ ID NO: 221425 - DNA, 553 bp, Glycine max
ggctcaacaaatacaaatattgatgcaacatttagataattgcagacattttgtcctctattgtatgttacaatctgctgtgatacaggaaacagggtattctacataaccatcgggggttgggtgataatgagtagcatgtatctctaaatctgcttttacagggcaaccgaatacaataaagattccaacaaaaatattatattaaatagaaaaggaaagcgcagcattctcatatggaaacaacacttcacgagcctagaaacgggcattgcttccttgcatgctctggaaccaatttcaccaaaatctcagatgggactcctttcagttcatgggatttgaaattaaatagtggtggaaggaatcggccatttggcaagcgagtatttggatcacgaagctcgtcgaagaaaggatgcgtcaaggcatcaaaagctgtgcaccgcaagttaggggagtattgtagtagtcttgataccaaatcaacagcctctggaggcatgcgcttatggaagatcttgtgccatggatgtgctttaatctgtgggaa

SEQ ID NO: 221426 - DNA, 545 bp, Glycine max
  unsure (1)..(545): unsure at all n locations
ctcgagccgctcgagccgaatcggctcgaggcttgcttgagttgccaactttaagtttgtcaatttccgtgctgcttggttggttgcaattgcaagtgaacaattggctagtgtgtactagttttgaatcacaatggcagaggatgatggttacacgaaagatggaacagtcgattactgtggaaatccagctaataaaaaggaaactggaacctggaaagcctgcccctatatcttaggaaacgaatgttgtgagagattggcttattatgggatgagcacaaacctggtgctttatttcaagaaccggctaaatcagcatagtgctactgcttcaagaatgtctctatttggagtggaacttgctatatcacaccattgattggggcatatttggctgattcctaccttggaagatattggacaattgctgntttttcaataatttatgctattggaatgacactcttgacattgnctgcatcagttcctggcatanaaccnacatgtcatggacatggagatgaaaattgtcgtgctactac

SEQ ID NO: 221427 - DNA, 514 bp, Glycine max
aaaaatagaaagttgacatttaataaaccaaagcaacacaacgcagcaaagtcctgaaactcgctgcgcttaacaaaaatgtaatcaggggttccgacaaacacaacacattaaaacacagataaataaaagcaattttgccaccgtcgatcaagaacccagttctgggaacaacagttgcgagatgatggtggagacttcaaactttgtccgaaaaacaagctacctagaaaagaagacacaagagtacagaaaagaaaccaacatttattgtaaccaacatcccctgatgaaccagcccgcacgattcacttcttcttctgggcagccttggtgaccttggctccggtaggatccttcttctcaacgttcttgatgactcccacagcaacagtttgacgcatgtccctaacagcaaacctaccaagtggaggatactcggagaaagtttcaacaaccatgggtttggttggaatcatcttaacaaaaccagcatcaccgttcttcaaaaact

SEQ ID NO: 221428 - DNA, 457 bp, Glycine max
  unsure (1)..(457): unsure at all n locations
ctgacttcctgtttgtttctgatctatggcttccaaggagttctctggtctttgttccttggtttcttcactctccgagagcattttgtgcactactgggttgaaaatgtatttggtggagagcaaaggaggtgccataacatgcatgttcttggctcttttcttcttggggacatggcctgctcttttgactatgttagaaaggcgtggtcgtcttcctcagcatacctaccttgattactcaatcaccaatttcttgtctgctttactcattgcttttacacttggtgggataggcaagggcactcatgatcagccaaatttcttagttcaacttgctcangataattggctcttcgttctttttgcaatggggngtgggtctgatccttagccttgggaatctgtcagccaatatgcatttgcttttggtgggctaatctgtactgaatgatca

SEQ ID NO: 221429 - DNA, 399 bp, Glycine max
attgagtgggtttggggtgtctttttcgcttaaaaaaatacctttactaattcagaatatgagcagcggcgctggaaaggttggagcgcggcacccccgcttccggttacaaagcaaccagggggggaaaaaacccccccatctctgttacaccgaaaaggacaccgttcgcgacacacgtgggccgaaaaaaagggaccatttgaaaggccccaaaaaagagggggagaggctgaacctctacaaggcgaaactacccccccaaggaaacaaaaactctgtcgtttaaggccgccatgcaggggagaacactgcttcggggaagcaccacaaccccaaggcccccggggggggggggaaacccccacctttctacggggcgggaaaagggcccaaagg

SEQ ID NO: 221430 - DNA, 449 bp, Glycine max
ctgaaacttgggtgcgattccttcactcacaacaacaacacatcactatggctcttctgagtcgagcctcttcacgcttccctcagctggtttcccctcaaagggtagtttcactccacacaacgctcccatctctgaacgcatccccatccacagccacgcctacaccatatgccccgccaccgcctccgtccgcttcctctcccgccggcgtttcgaaggcggcggagttcgtgatctcgaaggtggacgatctgatgaactgggcccgccgcggctccatctggcccatgaccttcggcctcgcctgctgcgccgtcgaaatgatgcacaccggcgccgcccgtaccgatctcgaccgcttcggcatcattttcaggcccagccctcggcagtctgatgcatggatcgacgacggcactctcactcaacagatggctcccgctctt

SEQ ID NO: 221431 - DNA, 568 bp, Glycine max
  unsure (1)..(568): unsure at all n locations
gtcgttacgacatgctctggacccttatcagacttgctaggccggcgtcctatgttgatcatctcctctatcctttattttgttggttctctggtcatgctatggtctccaaatgtttatattctcctctttgcaaggcttttagatggattaggcattggtttggcggtcaccttggtacctctttacatatccgagacagctccacctgagattaggggattactaaatactcttccgcagttcactggttctgctggaatgttcttttcctactgtatggtctttgctatatcactcaccaaggccccaaactggagactcatgttaggtgttctttcaattccctctctcatttattttgcactcacactattcttcttgcctgaatctccaagatggcttgtcagcaaaggccggatgctagaggccaagaaggttttgcaacgacttcgcggcagacaagatgtcgctggtgagatggctntactagttgagggtcttggagttgggggtgatacccgtatagaagagtacataattagtccagccaatgaattcagtgatg

SEQ ID NO: 221432 - DNA, 485 bp, Glycine max
aagcaaattaaaatagcatgtgaatatgggacaaatccaaatattgctgctgcattgtcacataatctacagaaccttgaaaactaacagcaatcaaatatgttcgccatttggaatttgaatacaaatacagtgcatcgataatataaccctatgtacagagccaatgtctgactgaaatttgatacagaacattatctattttgtatcataataaaatggtaaagatctttatgttacgtgcagcattatgtgaaaaagggggaagtgcatccagctggtgctttagtccttcgtcttcccttttacttcatcattggctccttctggacgttcacattttcttaaactgcttaagcactgctgaccttgttcttacgtccgaaggtccaatggggtttcgctggagtacgccttaatgccttcactccaaaggggttgttcttgctcctgagacaagttccagcgtaagtgttgcatatggg

SEQ ID NO: 221433 - DNA, 440 bp, Glycine max
gcagatgctagttatctcacaaatgggtatttggagactagcattgattggatacccggcatcaaggaaattcgactgaaggatatccctaccttcattagaaccacagatccagatgatatcatgcttaatttcgcacgtggcgagtgcataagagcacagaaagcttctgcaataattttgaacacatttgatgccttagagcacgatatcttggaagctttctcaaccattttgccacctgtgtattccatcggccctttaaattttctcttgaatgaggtcaaggataaggacttgaatgcaatcgggtccaacttatggaaggaggagccagggtgtttggaatggctcgacacaaaagaagtcaacacagtggtttatgtgaactttggaagcgtcacggttatgacaaatgaccaattgattgagtttgcatg

SEQ ID NO: 221434 - DNA, 564 bp, Glycine max
gaacaatcaccatgatgattatcgttcttggatttaaccaatcttaaacatggaaacaaattaaagaggaatccttacacagttgggattttgtgttgagacatacagtggaataaatgtacaacaatggcacaaatcctttgcaactatgtttgcaatgaatgatgatgatatttttgtattctaaatcaatgcaaacttgggtctcctttccttctcttctggcatcagattcatctactctcttacaagaaacaaattgttgagtctatcttgaatgtcaaacattccatactcaatgtgctcataagcttggttaccaagaaaatcctgcaacctcccaatgaagtttccatatgctggcaacaagatcttttctatggattctatcattattctccttagctccttagtgaagacaaaccacgcagactgaacgttgcatatatcatcgaagtgtccgttgaaggaacgaagcttgtttttcattaactgtgccgcaacattaggctctgactcattgatgtccagcttcaaaatatccaagatcttattccatgagct

SEQ ID NO: 221435 - DNA, 536 bp, Glycine max
atcaaacatggctagggttagtgctttgtttcactctttgctcttgatttcttcccttgtattggcttctcaaatccatgtttcctctgggaaactagtccctggactatcatggaattactatttgttgacatgtcccaagcttgagaggattataaggaagcatcttgaggatgtcttcgagaaggacagtggagtagctcctggcatacttcgactcttcttccatgactgctttcctaatggatgcgatgcgtctatattgttgaatggagacggtgacgagaagcaacaccgtgctaactttggtttaaggcaagaggccattgacgccattgaaaaccttcgggttctcatttacaagcagtgtctaccagttgtctcatgctcagacatccttgttatcgcagcacgtgaagctgttcgccaattaggaggccctgattttgacgtgccactgggaagaaaagacggtctaggaccaaacgccaccgcgccggacaacctaccggcaccattcttccgaaccgacgatc

SEQ ID NO: 221436 - DNA, 328 bp, Glycine max
agacccaacttaatttttttccattttaaattaaaaaactccatttaaacccttcttttggggcgggggcaacaaaaaatcattctggggcaaaatgcccaaaaatttctggggtcatactaaggaaccctatgcaatattcatccaaaaattagcctagcccatccacaactttaacactttattcttaccaccagggggtacctttttttcatttgggctccaatcgacagaaaaaactttatcagcatggccaggaagatcttggtttaacttacgagttggaatttcccaaaccttaaggggggaatttttggtgccgcttaaa

SEQ ID NO: 221437 - DNA, 552 bp, Glycine max
aaactggaatgaggaaatacacaattaggttgatatattcaagtatcaccaaacaatttattataaatgtgaatttatttacaatatttcatcttgttcttgttgggcgtaaaaagaaccatcttcaacaggcaacgatggtggggttccgggaggtatgcgagcagcaccgttctcaccagcacatatgcatagagcctctgcatctctgagggttgcatcaaggttgatgtgaccacttagctcattaataaacttcaaaagggtgtcgaagtccatttcctctccaattattttaccacgatatcgtttcaagattgccacacatacatacaggtgcagatgctcagacggataatgtgtccataaaacttcccacaagcgcattgttttctcgtactcaaactcccttttaaattgaatcaaaatccagcggaaacaaaagaaataattcaagcagtcacgctgcttaaaatagttatgcaatggactatccagcaactccaccaactttgatagtgcaaaaagtgagagtgcatgccgttttgatca

SEQ ID NO: 221438 - DNA, 552 bp, Glycine max
agagagtgatttcagtgagtgatcggtgttcacttgatctcatcataatcgtcagcgtcaattgaagaagatgccgatcagaaacatcgccgtcggaaggcctgaagaggcgactcaccccgacacgttgaaggcggctttggctgagttcatctcaaccttcatcttcgtgttcgccggctcaggctccggcatcgcctacaacaagctcaccgacaacggcgctgccacccctgccggcctcatctccgcctccatcgcccatgcattcgccctcttcgtcgccgtctccgtcggcgccaacatctccggcggccacgtcaaccccgccgtcaccttcggcgccttcgtcggcggcaacatcaccttcctccgcggcatcgtctacgtcatcgcccagctcctcggctccatcgtcgcctccctcctcctggccttcgtcaccgcctccactgttccagcattcggactctccgctggagttggagttggcaacgccttggtgttggagatcgtgatgacctttcgtctggtgtacacggtctacgcaac

SEQ ID NO: 221439 - DNA, 554 bp, Glycine max
tggagactcatgatggtgccagtaaagggaagtataccattggacttggccaagactgcatgtcattctgtaccgaagtagaagatgtcatctcaatgagtttgacagtgggtacttctcttcttgagaagtatgggattgatcctaaacaaatcggtcgtctggaagttggaagcgagaccgtgatagacaaaagcaaatccatcaagacattcctgatgcagatcttcgagaaatatggaaatactgacattgagggtgatgattcaactaatgcatgctatggaggaactgctgctctggtaattgtgtcaattgggtggagagcaattcatgggatggacgctatggacttgttgactgcactgacagtgcagtctatgctgaaggaccttgccgacctactggaggagctgctgctattgccatgctaattggtcctgatgctcccatttcttttgagagcaaattgagaggaagtcatatgtctcatgtttacgatgtttacaaacctaatcttgcccagtgatatccagttgttgatggaaagcttt

SEQ ID NO: 221440 - DNA, 348 bp, Glycine max
  unsure (1)..(348): unsure at all n locations
gaaaaagntgggtcctaaaactacccaaaaaaacaaagtaaaagtaatttcacaagtattttatcatgggcaccaaaaaagcaagcgcagagggcaggggaattcttaatttcccatatttgataaaaatttaaactaatttagagctcatggggggaataatccttgttttagcctttgccacctgcaccatctgggggttctcctgatttttgaaacacaaaattgatgattgggttgcaaacggtttcaacctcttttaggttttttataaaatcttttttctccacactctgggtgtgatccagccattccaaggcgttttttactgggggctaaaatttttcc

SEQ ID NO: 221441 - DNA, 480 bp, Glycine max
ctcagccgcatcccccaccactttctctctcctccactccgccaccccttcctcctcctccaccgccacctccgcctccccctccccctcgcgcgtgcagctcacctcctccctccgcgcccgcccgctgcgccgcctgggcttcgccgcggcggacccgctgctcgcggcgagtgtagcggcgcgcgtggcggcggtgagaggaggaggaaagggcgcgaggggggtggtgtcgatggcgaagaagagcgtgggggacctgagcgcggcggacctgaaggggaagaaggtcttcgtcagggccgacctcaacgtcccgctcgacgacaaccagaacatcaccgacgacaccagaatccgcgccgtcattcccaccatcaaacatctcatccaaaacggcgccaaagtcattctctccagccacttggggcggccgaggggtgtcactcccaaatacagcttggcgcctcttgtaccccg

SEQ ID NO: 221442 - DNA, 485 bp, Glycine max
attggttaactttaattcctgcatgttgatgagaaagatcagacacataatagcaatggtgataataacaattttacatcattttttcaaggatttgacacaagagcttacagtgtaggtgaaaaacaagactacaagtgaaggaaacttccaatgtgatgtgtaatgaaactacttccaatgtacaacttaacccacttttcagcgcagagttcccacaggtctcttatatgtatacaacatagacaccacaaggaatgctatcaagttcactacacttagcaatgccaatagccagaagaaataatctatgtgaccaaagtttagattatcaggtatccaccctggacttccattcctagtgctgatctttgtgacaattgtcacaagcagagagctcaagtactgtccaagcgcaacagtggtaagtgagagagcagaacacaagctttgcatatcatcaggggcttgctcatagaagaact

SEQ ID NO: 221443 - DNA, 535 bp, Glycine max
ataagttaaagacattcgacctgaaaccttttattttttgggtcgaagaaattagacctgatatctagatcacttgccaaaatttggcaatgtttaacaacgagacgagtgaaagcttacctactaaaatgtacttaaacaaagctagctccaatattcctgcatcccattacagggaaatcttgtatagagccgtgcaggtgaggaaaactttacgaagaatagcatttttggaattgttgttctccattggaatgcatataaaacaatcattgtgtccaccaatactctccactttttccaccagatttatgcataagtcttacatctgtaatggctatatcttttgaagcagccttacacatatcatacacggttaagcctgcaatagagactgctgtcattgcttccatctcaaccccggttttaccggttgatgcagcttccccttctattgttacactgaagtcctcatgattcaatctcaagtccacttgcacgtgtgaaaggcttatattatggcacaacggaataa

SEQ ID NO: 221444 - DNA, 552 bp, Glycine max
gattcaaaatgattttatattaaaaaaaatccaatgggtcgtttgtaaagtcaggtattattggcaacttgagcttgctttgccccgacagagaagaactcaatgataacttccagtggcatgcccttggtttctggaacttttaagaagacaaacacccaagctatgatgcacacaaccgcatacataccaaagacaccaccaaggcccacagaattaagcataactgggagcgagtaggtgactatgatgtcacatatccaaaatgtaagagcacatatagctatgcatagaccacgaactcgagtagggaagatctctgaacaaaggatattaggaattggcccaaagcccatgacgaaacaacagaagtagacaataacactcgaagttgagataaaagcatttatagtactgtccaattccacaagactccctattactaatatgagaagtgatactatcaagacggggattgtagtcagcagcaaggttcttctgccagatatatccatgagcctcatggccacagctatacagggtaacatcaac

SEQ ID NO: 221445 - DNA, 594 bp, Glycine max
gatatcctccatggttcttatgaagatgaaggagattgcggaggcgtatctaggttccaccataaagaatgcggttgtcactgtgcctgcttacttcaacgactcacaacgtcaagccaccaaggacgctggtgtcatttctgggctcaacgtgatgcgaattatcaacgagcctaccgcggctgccattgcttatgggctcgacaaaaaggccactagctctggggagaagaatgttctcatttttgatctcggaggtgggacttttgatgtctctcttctcaccatcgaggagggtattttcgaggtgaaggccactgctggtgatactcacttgggaggtgaagattttgataacagaatggtgaaccattttgttcaggaattcaagaggaagaacaagaaggatattagtggaaatgccagagctctgaggaggatgagaacagcatgtgagcgggcaaagaagactctctcttgcactgctcaaaccaccatagagattgattccttgtacgagggtattgacttctacacaaccattacccgtgcccgttttgaagagctaaacatggatttattcggaagtgcatg

SEQ ID NO: 221446 - DNA, 548 bp, Glycine max
acttaattgatcttacattattaatttaatcaaacatcattacaatgatcgacaacgatcgatctaagataaaatagtactagctaggtcctatttcacattgcatatcttccaaaggcacacaaggcaagcttattcaccgtggccacacacccacaccatcacgtttttgaacccaacgaaagatccaaacctagttagctaatcaagaaagccactggtacacattaataaataaataaataaaaatgtagccaaccagctagttacaaacctcacgggctatgccaaccttattattgacggtatcaaacaaaatcctaaggttctgttgctgaaagttggcgatgacgttcaacaccgagttcacattgtcgggtgccgccgccattgcaagacacgccagcgaacccgcgctgctgtggatcaagctgttttccaacggcagtttcaggtccaacccctcgaagtgcagcgtaattggcggcgccagagtttcgtaggttttcacaaaacacgtatcgaaggctccaatgctcgtgaatgta

SEQ ID NO: 221447 - DNA, 494 bp, Glycine max
cctcactcaaactcgggatcacagaaaccaacaacagttcttgcactgaggtttcacgatgttgctggaacttgcacttggtttgtttgtgttagctttgtttctgcacttgcgtcccacaccaagtgcaaaatcaaaagcacttcgccacctcccaaaccctacaagcccaaagcctcgtcttcccttcattggccaccttcacctcttaaaagataaacttctccactatgcactcatcgatctctccaaaaagcatggccccttattctctctctccttcggctccatgccaaccgtcgttgcctccacccctgagttgttcaagctcttcctccaaacccacgaggcaacttccttcaacacaaggttccaaacctctgccataagacgcctcacttacgacaactctgtggccatggttccattcggaccttactggaagttcgtgaggaagctcatcatgaacgaccttgtcaacgccaccaccgtca

SEQ ID NO: 221448 - DNA, 545 bp, Glycine max
ggaacacagcagcaatatttatatcaattattctcgtactacttttgccttgtttatgttatactggttaaactttgaaccaatccaaagcaatgatctttgagaagacaacaagaaaagaaaacacatatcaacgtttattacacaatccattcagaaaaacaaaaaagaacaccctgagcaaaaggacccaatacaattatatttcctgagccaattccactactttttccaccacagacgccatagaagatcttttcttatttgcaacaaagcacttatcacgaatctcccctttcccaatacgatccgttatcacatttagctggctcaccttcacaaaagcatcggaaaatttcttaaaaaacagtttctggtctgaagcgaactggttcacgatttccttggttttggggctgcccgcgatgtcctggtcagaagtgaacactccttggcggttcaagaggttgatgtaatacatgttgtcgaacttcacgggggttctcacgtccaaattaacggtgttgggggactcggcattggga

SEQ ID NO: 221449 - DNA, 579 bp, Glycine max
  unsure (1)..(579): unsure at all n locations
tgcttcttcattcagtttttcacccaggaagttctcgcctcagtagtctctaagttcgatctatactgaagggtacgttcaaatcaaatgggttcattccagacacccattggaatgagaagttcaacattgctagagacttcatgtggattcctgttgcaggaactgcagataatatgggatgaagttggagaagataagtttgaaagggagaaagttctgttagatttggagcaagagtgccttgaagtttacagaagaaaagttgacagagcaaatatatctagagctcatctgcatcaggaattggccgaggctgaggctgaatttacccaccttcttttgtcccttggtgaacgatctctaccagtccggccagagaaaagggcaggttcactaaaagagcagctagattcaatcactccagcacttcgggaaatgcgtctgaggaaagaagagaggttaaaccaattccgaactgtgcaaggtcaaattcaaaaaatttctgctgaaattgcaggtaactcagacaatgaaccctcatccattgntgtaaatgagaatgatctttcactaaaa

SEQ ID NO: 221450 - DNA, 483 bp, Glycine max
cacttgtcttgattttctacaaattatctaagcaattatccatttctaaaattgctgaagaatgaagataattaatatgacaaacaaacgtgaacacaaatttatgagtcaaaccaataaagcttagcactcctcgtggtgctgaaatcttgaaagcccaactttatagcctagggccttgatatcttgttgcacttgtgctctgaactcattgtaagtaaagggcttgtacttgtagctctcaattgcaacgtcttcacccgggaaaacaaagtagcatattgaaatcctctctttgtgtttgtttatactcactctgtgtgtcacacttttgtatctgtcgtcgctaattgcctgcatcatgtctccaaggttgacaatcagtgtgttgggaatgggtcttactgttagccattgatcatctttgagcacctgaagtccactgacttcatcatcttgggtcaatatggacaacactgaact

SEQ ID NO: 221451 - DNA, 471 bp, Glycine max
ccccccctctagtagtcagtggtgggaagctgctcgtgggtgtggctgataaagacaacctcgtaaacaaggccagcgattccaccaccgatgagaggcccggcccagtagatccagtggttggtccaggtccagctcacgacagcaggcccaaatgtcacagcggggttcatggccgctccagagaaggccccacccaacaaaatgttagcgccgacaatgaaaccaatggcgatgggagcaataattcccaaattacccttcttggggtcaatggcagttgcgtagaccgtgtacaccagaccgaaggtcatcacgatctccaacaccaaggcgttgccaactccaactccagcggagagtccgaatgctggaacagtggaggcggtgacgaaggccaggaggagggaagcgacgatggagccgaggagctgggcgatgacgtaaacgatgccgcggaggaaggtgatg

SEQ ID NO: 221452 - DNA, 376 bp, Glycine max
gttaccattccattgggtgcacgctcttcccaaaaccctagattccctccaaacagaaagctacgatgccaaccctcaccaatttctactccatcaaagatttatcccagcacactaccaaagacgattgctggatcctcgttgatggaaaggtatacgacgtgacacagtatttggatgatcatcccggtggagatgatgtaatcctcgccgcaaccgggaaagacgcaacagaagaatttgaagatgctggccacagcaaaagtgctagagaacatatggagcagtattgtattggtgagcttgacacatcttctccaatttccaccaaagaaaagttcatacaactcactaagcaatattgggttgttccggc

SEQ ID NO: 221453 - DNA, 401 bp, Glycine max
cttgaatatagattaaagcactctacatatatgatggctagctagccaataaatcgacctttgcctgcggtctacaagccggagtacgatttttggacatagagttcatcagagtcgcgatgcacaattgatgcctgagtgtaaaatggactggctacagaatattgcaatgcaccatcacttagaagatggtacatcccatgctggctgcttactacgtaatgtgagtcacattaaaactgaagatgggcgaattgagaaatgggcacatgtgagggccacacgtgatgaagaacatccttatctgccaagggtactatgtgactcgaagcattgctgaactgtgcaaaattcatgtgttaaactaacatgttagacttcaattactatgcatcacattt

SEQ ID NO: 221454 - DNA, 571 bp, Glycine max
  unsure (1)..(571): unsure at all n locations
cttctcacgacaaattcacatcctccttctttcatctctctctctctctctctctctctgtcttttcctttgcccgtgcgtgtgaaagatcgcagcaactccaccaccatcacaacagcaccgtaaccgatttccaaggttgagttatttgctggtctaacttaaccatactgtctattttgactcctgagattgctagtgagtcatggggcatagacatttatatagctcatctccaatatttgagggtgaacctgaccagaactggaatcatatgcantatggatcaacaatatgtgaaccatggtagngagtaccacttcagacaatggttcttttatttatcctttggaaaatatgtccatagatagcatttcttttccatctcattggaacactgccncaaggtcaaacggatatgcatcacaagtctcaacattgaagcacccnctcatcaacagatgtatcaggcacttctcatgatcattttctgccttcatcagtgctggaatgtntatgcagtgcctgaaaatatgtacaccagccttctattctattatgacagacagca

SEQ ID NO: 221455 - DNA, 569 bp, Glycine max
gccagcaactaaaagatttatttgaatttatggctctcagccagggtttacagttacacgcaatttatgtgtgaagccaataataactcaagcaagataaaatttacactaacagacttcgaagggtcctacaacatatgctcttttacaagattgacaacactgacacctgaggatgggaaaattttccaagatgaaaagtgtcttacacagcgactgggacggcttcatcaagagcaaggactcctggaagctctttgccttccaataactccaaactggcaccaccaccagtagatatgtggctcatgacactagcaactcctactttctccacagctgcaacagaatctcctcctccaataattgtggtcaccccctttccactgaggtcagccagcttctttgcaatagcctctgtaccaacagcaaacttgtcaaactcaaacactcccattggtccattccatatgatggtttgggtagtatccaatgcttcactgaatgatttaacagaatctggaccaatatccaatcccatccagccatcagggatggcagatgctggc

SEQ ID NO: 221456 - DNA, 466 bp, Glycine max
ttcaggtactgcgtttcggaagcagacacagatggctcgtacgaagcaaaccgctcgtaagtccacaggaggaaaggctcctaggaagcagcttgcaaccaaggctgcacgtaagtctgcaccaactactggtggtgtgaagaagccccaccgttatcgtcctggtaccgttgctcttcgtgaaattaggaaataccagaagagtaccgagcttttgatccggaagctccccttccagaggctggttcgtgaaattgctcaggacttcaagactgatctgcgtttccagagccacgccgtgcttgcattgcaagaagctgctgaggcataccttgttgggctctttgaggacactaacctgtgtgccattcacgctaagcgtgtaaccattatgcccaaggatattcagctggcaagaaggatcctggtgagcgtgcttacttgggtgttggaagatgaagatgat

SEQ ID NO: 221457 - DNA, 523 bp, Glycine max
gagcaaaaacttatatcattgttcaagtagaaacggggaaaagtacattaaaaaaaaaaagagaaaaataaaatcgcaataaaaacataatgacacgctgttatctaaacttcaaaagggtctttgacaaaatcaagaacaacccatgagaatcttctgcttaatcgacttcctcaattttgggtccagcaccgcttccactgccagctgcaggaccatcctcatccatggctccacccgcatcaccaccagcaccctggtacatctttgctatgatgggattacaaatgctctccaactccttcatcttatcctcaaattcgtcagcctcagcaagttggtttccatctagccattggatagcctgctcaatcgcatcttcaattttcttcttatcatcagaagacagtttggaagcaatcttgtcatccttgattgtgttcctcatgttataggcataattttccaatgcatttttggcctccactttcttcttatgctcctcgtcctcagacttgtattt

SEQ ID NO: 221458 - DNA, 543 bp, Glycine max
atcacatagatatgtttcaatgggaaaaaaaacctaaaaagaaacattttttttcttaagaaatccttggaaaaacccgttcaaaatgctataagaacttcacgaatcattttctcaaattgaaccaacgagtacccacttggactagaagctgccacttttgccaatcttttccactccaaagctttctttttcatctctttacccttttcaccatccatcaactccctcacaaggctctctattttgcccctctcaatatcctcaatctccaacccaatcccccactccttgcaacagaaccgacaattggtatgttgctctgcaaaaaaaggccaacatatcattggaacacctccacacacactttccaacgttgaattccagccgttgtgtgtcaaaaaccccccaattgctggatgagccaacacttgctcttggggacaccaactagacaataggcctctatttttcgtttgtgccacaaactctttaggtaaaatagcgttttcaccaatcacaagatctggtcttataacccac

SEQ ID NO: 221459 - DNA, 533 bp, Glycine max
ttccattttcctcccaacttttcctaactccaccacccacattgcaattctcttctgaacctttacattttccatgtggggatgagtaagttgcttccttttttgttctggacttgtggggtttttgctcatctttcattgaaatgctaagggatgatcatttggccattcattcagagtatttctgtgtctgctagcactacaatacactacatatgtttcggagattaggatggttcgtgggtctgaatcaaaccaatttgtcaaccaaaaggttgctcaatgcagaccaaactgcctctgctaggccaaatcaccaacttcctatgctcgatgctgttcatgaagttgctgtttacattcataggtttcacaatcttgacctttttgaacaaggatggtacagaatcaagattactttgagatgggaggacggtgatgactcccatcccggggttcctgcacgggttgttcagtatgaagcttctgaagtgggtgctgacaatttatgtggagtttggatgattgatgat

SEQ ID NO: 221460 - DNA, 222 bp, Glycine max
agcaaacataacttgcagtaatggcttcaatgaataaccaaaaagaaattgagctctttgagggccaatctcttctgtacatgcagctatatgggcacctaagacctatgtgtcttaagtgggctgttcaactaggtattccagacataatacagaaccatgccaaacccatttctctttctgacttggtctctactcttcaaattccacccagctaacgct

SEQ ID NO: 221461 - DNA, 577 bp, Glycine max
  unsure (1)..(577): unsure at all n locations
aaaagttattgcaacttttttttattcaaagactaatttccattcactaaaatgcaaaaaatacacagaaaaagataaaatttagacttgagtaacttttttttttgtgtgtacaagacttagactagagtaactagctacatcttaaaagaatacaataaaatgtttgaatcgataacacttgccaccccagaaacaatttaccaacagaacttcgcaaataacaatacccttcctcattctaggcgaagttgactgctgattgtacatgctcaacatcagtggccattagcaacgccattagcaatcacaccgttctcagcgtgagtcaaactgctttctttagttttctttgaatagaatctccgatacatggagtcaacttcagtgagatagaatgtgcccggagataaaaggctactgtccttgcttgtcacaaattccttcgcaccatatctatgctccattaacttcaagttttcaacaaactcctccggnggaaactcatgtcttgacttcaattttccatcgacattcatcactctagccatgttngacaagctaaacggatgttgac

SEQ ID NO: 221462 - DNA, 519 bp, Glycine max
  unsure (1)..(519): unsure at all n locations
gaagccaaagagaacgaattcatagacatatagatagagtatagcattagctattacaacaacatatccaaatggaagtctgttttctccacttcaaggaatatccaaatatatgtacagaatgatgatatacgttaaactaaagtataatgaataaattgtttatttgcccttcttatcctcaggcaaagcagaagctttgcatataggacatactttcttcatagacaaccacttcctaatgcaacccacatggtaatcatgtccacaagctttcagcgtcccgacatcgtccatgttcttgtattcttccaggcagattgcacaagcttcttcttcttgactttgctcagatgaacagtatattgtttctgtcaaatacttggaaatcaaatcctcagacaatcctgtgctcacatggcctattctctctccaagtgcaagtagttcctcataactcatgttgnctaatgccatcctcatgtctctatgtcgatcaagcatattcctaggtccata

SEQ ID NO: 221463 - DNA, 383 bp, Glycine max
  unsure (1)..(383): unsure at all n locations
aaagaagttgcacctgagaaccctgcatattcaacctgtgatatggagtgcctcaattcacagctgtcctctacaagccaggctcatgctgcataagattcacctgacactggacggggcctcactctgaatggaaaagccagctatgggaatgctagctcccctggcaagagatcttcaatggaagatctttatgagacttgaattgatggtggtgatggtgcaatatgtggcctcagtgcagatttggatggccatggtggtgctcgtgctgtcgagtatgtcaagcctaacctatttagcaatntgatcagtcatactaccttcattgctgacgccaaatctgcaatcactgatgcatatgaccacaccgactctgaatg

SEQ ID NO: 221464 - DNA, 413 bp, Glycine max
gtttcgaatagattatactaagtctttgggaatagtgctgcaatggcttcaagtcaagaggaggtgaccctattgggagctactggaagcccatttgtgtgcagggttcatattgccctcacgttgaagggagttgaatacaaatatgtcgaataaaatttgaggaacaagagtgaactgcttatgaaattcaacccagttcacaagaaggttccagtgtttattcacaatgagaagcccatagcagagtctcttgtgattgttgaatacattgatgagacatggaagaacaaccccatgtggacttctgatccttaccaaatagtcttggcttgatgctggtccaaattcattgatgataaggattttggagctgcatggagatccgatttcacagctgatgaaaatgagcg

SEQ ID NO: 221465 - DNA, 571 bp, Glycine max
  unsure (1)..(571): unsure at all n locations
catttccaacctctccaatccattctcccttttgacttccccatatggctcgctactccttcctcttggccctcctcctcctcctcttcgccgccgtgtccagcgccgacgacgacatcctgatccgttaggtggtgccggatgccgtcggcgaagcggcggagaaggaggaggaccacctgctgaacgcggagcaccacttcgcgagcttcaaggcgaagttcgggaagaagtacgcgaccaaggaggagcacgaccgtcgcttcggcgtcttcaagtccaacctccgcagagcgaggctgcacgccaagctcgacccctccgccgtccacggcgtcaccaaattctccgatctcactccggtcgagttccgccgccaattcctgggcttcaagccgctgcgcttgccggcgaacgctcagaaggcacccattctccccaccaaggatctcccanaggatttcgattggcgagacanaggagccgtcactaacgtcaaggaccaagtggcgtgtggttcgtgcctggctttcagtaccacgggagcgttgaaggagctcatatctgccac

SEQ ID NO: 221466 - DNA, 531 bp, Glycine max
  unsure (1)..(531): unsure at all n locations
attctaagtatcagaatccactgacatacatcttattgatttattattatcaattgttacaaattaaggatgatagattcaggaaatttagggtagctagccagttacccggattaagattccctaaaattatggcattcatgcattcacttgataaataactaataatcaaaaacatgaaactcgaatcaatgtaatattcattcagtgatcgatattcccattcccattcacatgattaggcacaagagtcttgaaatgatgaatcagagccgtgagactgtcgtaagaagaaccaccttcttgaacagctttccaagccttctcctgcatctctttggccttacttctcattctcttccctttctctccatcatccatcaacctcttcacggcactctctatactctccccactcaccacctgcttcttcccctcgtacggcaaaatgctccacttcgncgnccccaccttcaccccgaacccgtgcacctncgttatcagcttctcgttatagtactggtccccgaa

SEQ ID NO: 221467 - DNA, 357 bp, Glycine max
cccttttgatttgtgaattgaaagcaaacatgcttgatcaggtccaacaccctacaatcatggacaaggttgctggccagatccatctacgttctggtgtttctggtcttaggagttatgaaggagcctactgccacctcacaatgtaccaaagaccctcttttgggaattactctaatgctgcattgcagtatcctgtgatgccctaatgcaaagctactatggatctgtctgctgctgcaacaactggctaccccgtatttggtgatgctccagcagagataggccatccacttatcgactgtctcatgggaggagtttcagcagctgtatcaaaaactgcatgatgctcccatt

SEQ ID NO: 221468 - DNA, 391 bp, Glycine max
gttctagatcgcgagggccgccctttttttttttttttttttttttttttttttttttttttttttttttttttttttttttttttttttttttttttttttttttttttttatttcttcttttttattttttttttatctgttggggggaagaacaacaccgcaccccaaaaaatagttaaaaaccccaaggccctctaattgaaaaaaaaaacgacaatgaaacaccccacccgacaaacttttttttaaaaaaaaacaccccaagactgaaatagattaatcaaagctcgtgcttgaatatgaaaaggataccttacaaagagcatagaaaagaggacaagctgtaagaaaaaaactgaaacacaaataaaacataagggcggggccc

SEQ ID NO: 221469 - DNA, 548 bp, Glycine max
atgtaaccttaattacttgattaagtaccagtcacaccttattgaaatgatgattatgaatacataaaaagcaactgcgatggcaagacactactattgtatatgatgattatcttaattaagaaaggagtttagatgcaacgccgatccttgcaagtggaacacaaacgagactatgtgcccttggaactgtgaggccagctctctcttccatgctaactttggcatcatcacctttcaatatttgtccttgagggcccagcacttgcaggtcaaagcattggataagagatgcaagaagtgttgccattcctgaagtagccaaattgacaccagggcacattctcctcccagacccaaatgggaggagttggaaatgctggcccctaagatcaagaggccctgcttccccttcagcaccagtttctaagaacctctcgggacggaattctgatggtctgtcccagtatttggggtcccttcctacttgccaaacattgaatagaaccaatgctccctctgggatcacatacccattaatctcacac

SEQ ID NO: 221470 - DNA, 569 bp, Glycine max
  unsure (1)..(569): unsure at all n locations
cattaatcccgctctctactgcttctgcgttttgagattcgaaaaatggaggaggaaagttccaattgcatcgacaacgagagggatctcatccgcaacatctgcatcctagcgcacgtcgaccacggcaagaccaccctcgccgaccacctcatcgccgccgcgggcggcggcgtcgtccacccaaagctcgccggccgcgtccgcttcatggactacctggacgaggagcagcgccgcgccatcacgatgaagagctcctccatcctcctccgctatgccggccgctacgcggtgaacctcatcgactcccccggccacatcgacttctgcagcgaggtctccaccgccgcccgactcagcgacggcgccctccttctcgtcgacgccgtcgaaggcgtccacatccagacccacgccgtcctccgccagtgctggatcgagcgcctcacccnctgcctcgtnctcaacaaactcgaccgcttaatcaccgagctcaaacttacccnctctgaggcctacacgcgcctcttacgaatcgttcacgaggtcaacggaatagtcagcgc

SEQ ID NO: 221471 - DNA, 534 bp, Glycine max
attatgcgccgcggccggtgcgtcttgggtggaggaggcggcgaacccgatacgaatggtgtctggcgtggaggcggaggtggttcgggtgatcggggagtgccggcgtgcgttgaagtttgctaggttcgtgagcaggttcgggaagagttaccaaagcgaggaagagatgaaggagaggtacgagatattctcgcagaatctcaggttcatccgctcccacaacaagaagcgtttgccctatactctctctgttaatcattttgctgattggacttgggaggagttcaaaagacacagactaggagctgcccaaaattgctctgccactcttaacggcaaccacaagctcaccgatgctgttctttctccaacgaaagactggagaaaagaaggtatagtgagttcagttaaagatcaaggcagctgcggatcatgctggacattcagcacaactggtgctttagaagcagcctatgcacaagcatttgggaagagtatctctctttctgagcagcagctagtggactgtgc

SEQ ID NO: 221472 - DNA, 556 bp, Glycine max
  unsure (1)..(556): unsure at all n locations
attgattgcatccattacatgtttattcaatttattttggccaaataggaatgagaaatccgtacacagaacatttaacaacatagcggggaggaacataatgtaattccaccagaagttgataatgctatgtcatcatagctttattcagcaaacaacacgcaaaccactaaatacaattacaacgatgtctgaggatgttcataaatataaacgttaagtgtgacatacacatcataaaaatgttcaaggatagacctcaatcagagatctaaaaccaaagatgggaaatattttgtagtgtttgaatcctgcttcgatgaagagttgtttccattctttttccgttctctctcttccattcatcgncaacataataatgtccaaactaagctttgtttgtgtcatatccgggtcatctagcttctcatttattacggcatctatgataatcacttttccactgttgcctttgcttgaaatagaatctctacacttttgcaggatctttatgcaattntcgtccgtccaattatgtaaaacccactttagtagc

SEQ ID NO: 221473 - DNA, 591 bp, Glycine max
  unsure (1)..(591): unsure at all n locations
gcgaaacacctgattcccctccccagacgccgtagagtcagagagagagattcactgaaacagagcgcagaagaaaatacataaactaatccagaaaatgagcagcggcgctggaaaggtggtgtgtgtcaccggcgcttccggttacattgcttcctggatagtcaaattcctcctcaatcgcggctacaccgttaaggccaccgttcgcgacacaagtgatccgaaaaaaataaaccacttggttggcctcgacggtgctaaggagaggctgcacctctacaaggcgaatcttctcgaagaaggttcctttaactctgtcgttcaaggttgccatgctgtgtttcacactgcttctcccttttatcacaatgtcaaggacccccaggctgaattgttagacccagctttgaaggggactctcaatgttctgnagtcgtgtgtaaacttgccgacgctggaacgcgttgttttaacctcttctgttgctgcagttgcgtacaacggaaagcctcgaactcccgatgtagtagttgatgagacttggttttctgacccgggtttctgtagggaatcacagatgggtataca

SEQ ID NO: 221474 - DNA, 510 bp, Glycine max
gaccaagagatatggttattaccatttaataacaaaatacaaatgttcagtatgtataatgaaaataaaatacatgaagaaaattcagaatagttatagagggaaacagggaaaagcacaacaagcaattcttttatacagcaactagaatccaaggatacacaaaatagagaaacaaacaaaatatgtgtatatattgtctggatgtctccagttgaattctactgataaaacttgtcatactatatatattaatgcacaaaaactgagacactgaatagcatatgtttttgattttgaacagaatcataaactcaaacacccttggaaatctttatatgcttcaatgaataccccccgctttggtctaatggggttttttctgcattagttttggctcctagatttttccatggcccttggagctagcccaattgcctcagagcccttcatgatccttagtctccgacatgaatcagtgaacatctcccaaggaacatcacccacaag

SEQ ID NO: 221475 - DNA, 392 bp, Glycine max
gcctcacaaaagcaaagatcaaacaaaccaaggacgagaacacgatgttgcttgaacttgcacttggtttattggttttggctctgtttctgcacttgcgtcccacacccactgcaaaatcaaaaagcacttcgccatctcccaaacccaccaagcccaaagcctcgtcttcccttcataggacaccttcatctcttaaaagacaaacttctccactacgcactcatcgacctctccaaaaaacatggtcccttattctctctctactttggctccatgcccaaccgttgttgcctccacaccagaattgttcaagctcttcctccaaacgcacgaggcaacttccttcaacacaaggttccaaacctcagccataagacgcctcacctatg

SEQ ID NO: 221476 - DNA, 556 bp, Glycine max
gaaatagtgaaccatgcattcaaatttaactgataacatttggttggaactccagtacattatgatagtgttcaggtgacataaatagaaaataaagacaatatgtggatggcacaacacttaagacagctagattgagagccttatctatttatataccattgcctggataaactacaaagcaagcaaaattttcattttatgatgactagtataataatattatatgctggttctagggcaactactagtccttgctatggctcatacaagctttatatggcaactcctagtggagaaacttccatcttgggtatgatcttctttggttctacagctttgacctggtttccataagccgatgcatgcactccaagagctggtctacctgatggatcaaggttgttagaccaagcagtattccactcaacagcttttgctgtgctacatgcaacatttggttcttcaggaacagtgagccttgctgagttttacaaaccaaattaaggggcacagagatctggatcagcccttggtacatcgacatgaatatttt

SEQ ID NO: 221477 - DNA, 505 bp, Glycine max
  unsure (1)..(505): unsure at all n locations
ctctaattaacatggcttccacatgtacaccctccacactcattctcctcaccctcaccacattcctcattgcccaagcccaagcccaagccccggcaccgtccccgtcgggcgcggtgaacctcaccgcgatcctggaaaagggtgggcaatacaccaccctaatgaaactcctgaaggacacacagcagctcactcaaatcgagtcccagctcaaatcaaactcacaaggcttcacgctcttcgcgccgaccgacaacgccttccagagcctgaaacccggtgccctaaacaagctcagcgacgaccagaaggtgaagctcattctcttccacgtcactcccaaatactacaccatctccgatctggtaaccgtgagcagccccgtgaggacgcaggccacggagaaagaagggacctgtgggctgaacttcaccggccagggcggtaaccaggtgaacatctncacagggtggtgcagacgcagctcaacaacccactgagg

SEQ ID NO: 221478 - DNA, 511 bp, Glycine max
  unsure (1)..(511): unsure at all n locations
ctctaattaacatggcttccacatgtacaccctccacactcattctcctcaccctcaccacattcctcattgcccaagcccaagcccaagccccggcaccgtccccgtcgggcgcggtgaacctcaccgcgatcctggaaaagggtgggcaatacaccaccctaatgaaactcctgaaggacacacagcagctcactcaaatcgagtcccagctcaaatcaaactcacaaggcttcacgctcttcgcgccgaccgacaacgccttccagagcctgaaacccggtgccctaaacaagctcagcgacgaccagaaggtgaagctcattctcttccacgtcactcccaaatactacaccatctncgatcttgtgaaccgtgagcagccccgtgaggacgcatgccacggagaaagaagggacctgngggctgaacttcaccggccaggctcgtactcaggtgaacatcntccaggggtggtgcagacgcagctcaacaacccactgaggagaag

SEQ ID NO: 221479 - DNA, 447 bp, Glycine max
  unsure (1)..(447): unsure at all n locations
gaaattaccagttactatactctctctttctgaaacaatttgcccaattgtttgagatgttcaatatgagatttgtatctcaagattgggtggtttcatgtgcactaatacttctggtgtcatgcacaacatactcatcagcttctttggggaaacctgagaacaacataaaaacatctgtttttaaatcacccaagattgagctaggtccagggttagtttcaaacaaattttattttgatgttgactttccaagaggccatattgcactcaagagtttcaatgctgaattggttgatgagtcagagaaatcagtgcctctccaagaaacctatctccatcactggcttataataaaataccaccagccaaaaaatgtgacacacaataaccaaacagatattgttntttgtgagaaacagtggcttttgccaggatggtactcta

SEQ ID NO: 221480 - DNA, 407 bp, Glycine max
tacttaccctatggctcgtcactccttgctcttagccctcctcctcttcgccgccgtggccaccgtcgcgatggcggtggccgcgtccgacgccgacgacatcctgatccgtcaggtggtgccagatgttggcgaagccgaagaggaggacaacctgctgaacgccgagcaccacttcgagagcttcaaggccaagttcgccaagacctacgccaccaacgaggagcacgatcatcgcttcggcgtcttcaagtccaacctccgcagagccaggctgcacgctcagctcgaccgctccgccgttcacggtgtcaccaaattctccgatctaactccggtcgagaaacgccggcagttactcggctctaagccgcttcgcttaccggcgcacgcccagaaggcgccca

SEQ ID NO: 221481 - DNA, 539 bp, Glycine max
cataacaaacgtaggtgggatattagagtactattattaatgggacacaattgagttcaacacaaaccgaacttattttcaagggacattattacagacccattaaacatcaaagttcttcaaatgttttgggaacacattcaacattacacaacgagcttaaaaccccccacggagacggaggacaaggtgaagggttgattccttctggatgttgtagtcagcgagggtccttccatcctcgagctgcttgccagcaaaaatcagcctctgctggtccggtgggatgccttccttgtcctgaatcttggccttcacattgtcaatggtgtcagagctctccacctcgagggtaatagtcttacccgtaagagtcttcacgaaaatctgcataccaccacgaagacgcaacaccaagtggagagttgactccttctggatgttgtagtcagcaagggtgcgtacgtactcgagctgctttccggcgaagatcagcctttgctggtctggggggattccctccttgtcctgaatcttag

SEQ ID NO: 221482 - DNA, 460 bp, Glycine max
tatattatggcattctctatcttcaaacatgttctgtcggtattccttctttgcattttcttgcaggaacctaccaatgcccttagaaagacctacattgtgtacatgggaggacattctcatggtccataccctttgcctagtgatcttgaaacagccacaaattcccatcatgatttactcgcttcttacttaggaagtcacgagaaggccaaggaagcaattatatactcgtacaataagtacatcaatggctttgctgccctacttgaagaggaagaagcatcacagattgcaaaacatccaaatgtagcttctattttcttgagcaaagagcgcaaattgttcactaccaggtcttgggattctcttggactggaaaaaaatggacaagtcactgcaaactaccgttggaggaaagcacgatatggagaaaatatactcattgctgatattgata

SEQ ID NO: 221483 - DNA, 563 bp, Glycine max
  unsure (1)..(563): unsure at all n locations
attcaggtcttgtattctgagacagcttcaattggttgccacctcacaatatcatcaccaaataccaccacttattatctccttgcactcttgaggtaatctgcccttattgcccacaattgctcgcccactgatttcatgtcaggtctatctgttcgaatgggggctgcacattgaaacgccaaatcaagcattttcatcagaacatctccgtttacagcttcttccattaaaggatccacaagttccaccacacttccttcattatacttcctgaaggcccatctgagtgtaacccgctctgcaacagttttcttcaactcaacaggacggcgggctgtcacaatttctaaaagcaaaattccaaatgaataaacgtcactcttgggagtgagttggtatgttttcatatactcggggtccaaataaccaactgttcccttcactttggttgaaatgtgtgtctgatcagtgttcactggtcctagccttgcanatccaaaatcagcaactttagctcgcatgctntctgtcagaagaatgttggatgatttcacatctcg

SEQ ID NO: 221484 - DNA, 593 bp, Glycine max
gcggcggtccaaacactcttctctgcagcttttgcctacaactcccttcaccatggctgaacaaaccgagaaagcttttctgaagcaaccaaaagtgtttctcagcacaaagaagactgggaagggaaagagacctggaaaaggtgggaaccgcttttggaagtccattgggcttggatttaagactcccagggaagccatcgaaggaacctatattgacaagaagtgccccttcactggcaatgtttccatccgtggccgtatcttggctggaacatgtcacagtgctaagatgaacaggactattattgttagaaggaattatctccattttatcaagaagtaccagaggtacgagaagaggcactcaaatattcctgctcatatatcacctggcttccgtgtgaaggaaggggatcacgttattattggtcaatgcaggcctctctctagacagtgaggttcaatgtcttgaaagtgatcccagctggatcttctagtggtgcaaagaaggcttttactggaatgtgagcttcgatttccagtttttattgaagaaaaatgttaccttggtatttagtagatctgatttc

SEQ ID NO: 221485 - DNA, 579 bp, Glycine max
  unsure (1)..(579): unsure at all n locations
gtgatcccgaacttcatgtgccagggcggcgacttcaccgccggaaacggcaccggaggcgagtcgatctacggcgccaagttcgccgacgagaacttcttgaagaagcacactggtcccggcatcctctccatggcgaacgccggtcccggaaccaacggatctcagttcttcatctgcacgacgaagacggagtggctcgacggaaagcacgtcgtgttcggacaggtcgtcgaggggatggacgtcgtcaaggagatagagaaggtcggatccagctccggcaggaccgccaagcctgtcgtcgtcgccgactgtggtcaactctcttagatagacgacgttgaccctaggcttttatctctgtgtcggtggctctgaatgtgtcgtttctttcggtgtcgtttttgccttttttntctctttcccatgtcgtttaggggattgcggtgttatggatatcatttcgaaacccttcccctttgaatccttcctttcctttctaaaatatcagtatcatgtggttcgttcatagagtgaatggangtctgtatgagaaacatanaaaatatgatgagc

SEQ ID NO: 221486 - DNA, 289 bp, Glycine max
ggagccgaaatcaagtctcgacattagcttaaaaaatccggttcaataattcaataattagctctcagcgaaagtctaatctaccacgtgtcttaaggaggcaccaaacaatataaagctacagatggcgtccttggtttttaattttaagttgggggactccagataagccgttttcgataatcattcttcagtatattcctggaatgattctgtaaggcaccttgtcgcaatatagtttccagtacttgccatacttggatctgcaacgatcatcatctcgttttgc

SEQ ID NO: 221487 - DNA, 581 bp, Glycine max
  unsure (1)..(581): unsure at all n locations
caagattctaagagagattttgctgctctttgaagaagggtgtttgcttgattttggtgatgtcgctgctctcagatctcatcaaccttaacctctcagacactactgagaaggtgatcgcagagtacatatggatcggtggatcaggaatggacctgaggagcaaagcaaggactctcccaggaccagttagcgacccttcaaagcttcccaagtggaactatgatggttccagcacaggccaagctcctggagaagacagtgaagtgattatatacccacaagccattttcagggatccattcagaaggggcaacaatatcttggttatctgtgatgcttacactccagctggagaacccattcccactaacaagaggcacgatgctgccaaggttttcagccatcctgatgttgttgctgaagagacatggtatggtattgagcaggaatacaccttgttgcagaaagatatccaatggcctcttgggtggccctgtggtggtttccctggacccagggtccatactactggggtgttggcgctgacaggcttnttgccgtgacattgtgacgcacat

SEQ ID NO: 221488 - DNA, 366 bp, Glycine max
gacaattaatcatttcatatttcacacattcataacaaacgtatgtgggatattagagtactattattaatgggacacaattgagttcaacacaaaccgaacttattttcaagggacattattacagacccattaaacatcaaaggtcttcaaatgttttgggaacacatccaacattacacaacgagcttaaaacctgtcacggagacggaggacaaggtgaagggttgattccttctggatgttggcgacagcgagggtccttcgcattctcgagctagcttgccagcaaaaattcaggctctgctgattcgtggggatgccttacttggactgaatcttggacttcacattgtcaatggaggc

SEQ ID NO: 221489 - DNA, 570 bp, Glycine max
  unsure (1)..(570): unsure at all n locations
gcactcttcgcaacacaacaaaaaaagacaacccagagagcgcgtcttaataaacgctcttctctgaaaacccccatttcttttcttctttcttcttctctttcgcttcttcgatcttcgatcttcgtcgctgaaaatgagagagtgcatttcaatccacatcggccaggccgggattcaggttggaaacgcctgctgggagctttactgcctcgaacacggcattcagcctgatgggcagatgccaagtgacaagaccgttggtggaggtgatgatgctttcaacaccttcttcagtgaaactggggcaggaaagcacgtgccccgtgcgatttttgtagatcttgagcccactgtgattgatgaggttaggactgggacataccgccaactattccatcctgagcagctcattagtggaaaggaggatgcagcaaacaactntgcccgtggccactataccattggaaaggagattgttgagctttgcttggaccgcatcagaaagcttgctgacaactgcacaggtctccaaggttttctggatttcaatgctgtgggtgggggaac

SEQ ID NO: 221490 - DNA, 577 bp, Glycine max
  unsure (1)..(577): unsure at all n locations
gagaaacgattgctggtttaaatccaaatgtcattaagattatagaggagttcccactaagtagcaagctagatactcaagcctatggtgatcatacctgtataatagcaaaagaacatttggagcctaacttaggtgggctcactgttgagcaggctatccaaaacaagaagttgttcatcttagatcaccatgactatctcattccttatttgaggaaaataaatgcaaataccacaaagacttatgctacaagaaccatatttttcttgaaagatgatggaactttgacaccattggccattgagttaagtaagccacatcctcagggtgaagaatatggtcctgttagcgaagtctacgtgcctgccagcgaaggagtggaagcttatatttggttactggcaaaggcttatgttgntgtgaatgatgcatgctaccatcaaatcattagccattggctaagcactcatgcaattgttgagccatttgtcatagcaacaaacaggcaactgagtgtggttcaccctatttacaaacttctggttcctcactaccgtgacaccatgaatattaa

SEQ ID NO: 221491 - DNA, 522 bp, Glycine max
aaaagttaaaacatgcatgattgcatttattattttggtttccattatactaacacaactctctttattaatgacaaatacaaatacattcagccactccaaatacatgacttaagcatacacaactgattaaggaatctggttccttcaatttcacatttatttaaaaccaggaacagtacttaagcaaccatagggtccttagatagagatactgttgggaattcctctgaaagtcaatccctcctcactagaaggatagagcagagtgtaaggcattttagctggcccatagcggtttctcaatgtctcatctttgttcttctctataagcttcttttcaatctcttcaagcttctttccaaaccttttaaatgcctctaatggaccggcatcagaagtccagtagtcaccaccatctatctgtccaaggtagaactcatcagatgcgtgccttgacaagatttctataactgtaaagtcaatgagggtctccttcttgccagtcatagtcttcaaaaa

SEQ ID NO: 221492 - DNA, 580 bp, Glycine max
cggctcgagaaataattattttaattttgtaattcattgtttggttctgcttcacaggaatggtagatttgaggtgaaaaggttccacattggtcaggttccgatctcacaatggggaagtcaccaggaaaatggatcaaaactgtattgtttgggaaaaagtcatccaaatcaaatatttcaaaaggcagagagaagcttgttaatcaagaagaaggagttgtagttacctccaaggtgctagaaactggtttggctttagaaccaacctccgatactattgccagacatgaggaagacctagagctggaaaatgaagaagcagaaaatgttatacctgggaatcaagaaatagacacagtgggatcaattaatgaagatgctgcactagatccagagaaaataaggctggaggaagctgctaccaaggcacaagctgctttcaggggttatttggctcggagagcatttagggccctaaaaggcattataaggttgcaagcacttatccgtgggcacttggttaggagacaagctgttgcaacattatgctctatgtatggtattgtcaagtttcaag

SEQ ID NO: 221493 - DNA, 565 bp, Glycine max
gaaatgaaattcattggagattcattaaaaagggaagtgcccaaatgtgcgtcttgggtacaaaagtatctatatagtatatactaattaagatttggatgttgccttgcatgagatatttgctactaatcatagccttctacaagaagtgaataagaaagtatttcaaggaattgcccctcttagccaacccaccacatgcaaaagaaaaaaaaataatatctttgtttaaaaaaatgaagctattggagcagaatacatgtattccagtattcccagtattccagttcgatctaacctgcagagttgcgaggtggtgctttaccaataagcactgcttcgccatttgcagcaagttcctccaagcgtttccaagtggcttcacgccctgccatgacttcacttttctttgactcttcttcctcaaacttttgtaaacattctttggatagatcggcatcaacatcattaaaaatcttccgcacatttaaggtcaaaccatggacagcttggttccaatgacttctagcatttctctccaatgcagggaagatgatggcattat

SEQ ID NO: 221494 - DNA, 417 bp, Glycine max
cactgtccattgttctgcaaattacaaaactcctgcttcctatgagttaatgtctgcttgtaatcgttccaagcttttccccttggtttctggcaccgcaacaattataaacaatatagccagtgcattaattgctgcataaaggatgaaggtaccataggagctccagctcatgaagaagtagaaagtataggaacataaccatgcaccaaaccagttcactaatgtggccacacttcctgccagccctttaatattgacaggaaatatcttagacatcacaacccatggaatagctcccattcctattgaaaatgatcctatgtagaccagtatgccaaatactgcaagtgctgggactgccttaacaccaacctcgtgaaccttgagatagaaagcatctgctccacatgtgca

SEQ ID NO: 221495 - DNA, 568 bp, Glycine max
  unsure (1)..(568): unsure at all n locations
cttcacctctccaaaacttgtagctgaggatattattactcagcaaaaattcatggaagttccaatcaagtatccggcaaaactcacccttagggtggttcttacttgtatcatggcggccaccggtgggttgatttttggctatgaccatggtgtttcaggtggagtgacctccatggattccttcctgaagaagttcttcccatctgtatatgaaaaggagtctaacgtgaagccttcttcaaaccagtactgcaaattcaacagtcagatactgacactgtttacatcttccctttatctaagtgctcttgctgcgggtcttggggcatccagcataacccgaatgttgggaagacgtgcaactatgattatgggtggaatattctttgtggcaggtgcattactcaatggattagctgtaagcatctggatgcttattgttggcaggttgttgcttggttttggcattggttgtgccaatcagtcagttccaatctatgtgtcagagatggccccttataataccgtggagctctaaacatgtgcttncaatgtcaatcacaat

SEQ ID NO: 221496 - DNA, 472 bp, Glycine max
ccacaaagggtacatggtcatcactgttgagattgacctttattacacaaacccagggaactgactccattcacatggtggcctgtaaaggctggggaacccacataagatgttttatagtgaaaaagtgacacactgaatccttcccaggcttgattccaagttgcctaaatatgatgtgatttgggctccaatcagatgtgtccaaatgacaaatgccaagagcttcaattttgtcgtcatctccattattctcactacctagtgagaccttgaacaccttgctccctgttgctatgaagtggcaatagtaaatggcataagggtatggtaagggatggcaagctacccatttagaagcattgatatcttctgatacttccaaaatggtgaacttttgtagagggacacctgaggccgtgggaagtgtggttgtgataatattatgcttggtctctaaaccaatgatttt

SEQ ID NO: 221497 - DNA, 441 bp, Glycine max
tgtatttccctacctctcccttcaagatgcagatcttcgtcaagaccctcaccggcaagaccatcacccttgaggtggaaagctctgacaccatcgacaacgtcaaggccaagatccaggacaaggaaggaatccccccggaccagcaacgtctcattttcgccggaaagcaacttgaggacggccgtacccttgctgactacaacattcagaaggagagtactcttcacctcgtcctccgtctccgtggtggcatgcagatcttcgttaagacactcaccggcaagaccataaccctaagaggttgaaagctccgacaccatcgataacgtcaaggccaaggatccaggacaagcagtggtatccccctcgtaccagccaacgtctcatcttcggcggaaagcagctcgaggactgccgcaccctcgccgactacaacat

SEQ ID NO: 221498 - DNA, 583 bp, Glycine max
cggtgtcaagttcaagtaaacttctcattgatataataataagcaatacatatcaaatcattattcttgcacatgcaataagcagatcgcatttcacattatccaaggaacacatctagttgtagcactcgaagcacactaatataatggaaatggctggctagctagttttacttggggcaaccaggccattggacatccgggggagaaagtgttttaagaaccggattcctctcgaagaaattggttggcctgagctcgaatgcagtgctcaataatggcattatggggaagtcttcctgtgctggaacatgatgaattcccacaacgtgccacagcacaatgtccttgttgttaatgtctctattctttttggtccaaacggctaaagtatcatctccatggctgtgatcaacgtagagtccaccagcccacttctcagtcctattgtatggagtgacccacacattgaaattggtaaaagcgccacgtatttgtggataatcgtcatctgtgagaagaggatgagctgggattgctggaatcaaacggcttccacatcatttcaacagaggttttcttg

SEQ ID NO: 221499 - DNA, 457 bp, Glycine max
aggagatagtgaaagagcttcttcctctaattcgagtgtacaaggatggcagcgtggagcgtcttctaagctctgaaaacgtggcagcctcccctgaagatccccaaactggagtctcatccaaagacatagtcatcgcagacaacccctacgtctccgctcgcattttccttcccaaatcccaccacactaacaacaaactccccatcttcctctacttccacggtggcgccttttgcgtcgaatccgccttctcctttttcgtccaccgctatctcaacatcttggcctcagaagccaacataatagccatcttcgtcgacttcagactccttccacaccaccctatccctgctgcctacgaagacggttggaccacccttaaatggattgggcttccacgccaacaacaccaacaccaccaacccggaggcatggctactcaaccacgccgact

SEQ ID NO: 221500 - DNA, 570 bp, Glycine max
caaaaattaaaaggcaaatagtattcgaaaaacataatgtataacaaaatcctaaacataaagccagaacgaaacctcaaagaaaatccaaaattgataaggttttaatatgtcaccttccagaaaagaaatcagatctactaaataacaaggtaacatttttcttcaataaaaactggaaatcgaagctcacattccagtaaaagccttctttgcaccactagaagatccagctgggatcactttcaagacattgaacctcactgtcttagagagaggcctgcattgaccaataataacgtgatccccttccttcacacggaaggcaggtgatatatgagcaggaatatttgagtgcctcttctcgtacctctggtacttcttgataaaatggagataattccttctaacaataatagtcctgttcatcttagcactgtgacatgttccagccaagatacggccacggatggaaacattgccagtgaaggggcacttcttgtcaatataggttccttcgatggcttccctgggagtcttaaatccaagcccaatggacttccaaaagcg

SEQ ID NO: 221501 - DNA, 574 bp, Glycine max
attccattctctctgtgtatttccctacctctcccttcaagatgcagatcttcgtcaagaccctcaccggcaagaccatcacccttgaggtggaaagctctgacaccatcgacaacgtcaaggccaagatccaggacaaggaaggaatccccccggaccagcaacgtctcattttcgccggaaagcaacttgaggacggccgtacccttgctgactacaacattcagaaggagagtactcttcacctcgtcctccgtctccgtggtggcatgcagatcttcgttaagacactcaccggcaagaccataaccctagaggttgaaagctccgacaccatcgataacgtcaaggccaagatccaggacaaggagggtatccccccggaccagcaacgtctcatcttcgccggaaagcagctcgaggacggccgcaccctcgccgactacaacatccagaaggaatcaacccttcacctcgtcctccgtctccgtggtggcatgcagatcttcgttaagaccctcaccggcaagactattaccctagaagtcgaaagctccgacaccatcgacaacgt

SEQ ID NO: 221502 - DNA, 433 bp, Glycine max
ggactagaaatagcctgatacttaattattatctttttataccacacgttggtttccttcatgagtacaaaccgaaataaaaccaacaattaatcttgttttattacaacacacaagcttgacatttcagtacaatagtttattttcaagcaatgagattctaaaaccagaaccacaaacgaaacaccgttgagattctcaacgagttcactcctgatcaagcagagatatcagagactaaaagttggcaaagttcttttctttcaaagtttccactgtctctctaagactcacttccaaaggaataaattcaatccccaaggtctttgccttttctttggaaacctgaaatgttggtacataaggcttatcgtctgcagacttttctggaatttgatatgtcgggtactgatcacgtaaaatcctggcgagt

SEQ ID NO: 221503 - DNA, 597 bp, Glycine max
  unsure (1)..(597): unsure at all n locations
gggaacaacaatggtgaagtctataaactttctcctacttctgtctctactagcctttgctcccttatgtcactgtaaaaagaaaataggaggttacctctaccctcaattctacgacggttcatgccccagagctcaagagattgtccaatccatcgttgccaaggcagtggcaaaagaaccccgcatggctgcttcgttgctcagactacatttccatgattgttttgtcaagggctgtgatgcatcggtgctgctagatagcagtggaactattatcagtgagaagaggtcaaatcccaaccgtgattcagcccgaggatttgaagtcattgatgaaattaaatctgcactagagaaggaatgcccacatacagtgtcatgtgctgacattttggctctagctgctagagattcaactgttcttacggngggaccaagcttgggagtacctttgggcagaagggactctcttggtgcgagtattagtggctcanataacaacattcctgctcccaacaacacattccagaccattttaactaagttcaagcttaaggggcttgacattgtngatctagttgctctatctgggag

SEQ ID NO: 221504 - DNA, 512 bp, Glycine max
  unsure (1)..(512): unsure at all n locations
attggaattctattttattcaacatgaaaggtgatacaaattttatttaaacttgaatacctacataaattcgaactacttgaacaatcaattctaatttcaagcctgaccttgaaacatccaattacataaatttaattaaacacaccacaacgctatcaaaaggatattcaaggcacatcacgacactgctaatgacttgctcaactcaccacagaatagatcaatggacactcctttttttaatgcggtaaacaaagtaaagaaaagtaaactgtaggtgcaactatcacacgtgcaacatgacaatgatatcacttcatcacttgttaattcttctgcagttctttctgatctcaccccttgaccctgttaaaggagtaatgtttcccatcttaaccatggacttggcaaattgttcaaagaaaatatcgttgttttctgcatactgcttcactaaatccgcggatactttattctttgtcaagagaatntcgtcagaacttaagaga

SEQ ID NO: 221505 - DNA, 575 bp, Glycine max
attaaataaagctaaggagaaatattgagaagcaggaagaagcaagttatggcgacgaagcagcttccgcagatcgccattctgggagctggtatctttgtgaagactcagtaccttccgagactctccgagatctctcatcttttcattctgaaatccatttggagccgcactcaggaatcagctacagctgccgtagacatagctcgtaagcattttccccaagtagagactaagtggggagataacggttttgatgacatcattcacgatggatcaatcgatgctgttgccgtggtcttggctggacaaaatcaggttgacatctcactcaggttgctaaaggctggtaaacatgtccttcaagaaaaacctgcagcatcctgtacaagtgaattggaagctgcattgtctagctacaaatctatttcttctgatgctcccggtcaattaatttggtctgtggctgaaaattatcgatttgagcctggcttagtagagtgcaagaaactaattgctggcattgggaaaatgatgagtgtccaagtcattattgaaggatcaatgaacagttc

SEQ ID NO: 221506 - DNA, 513 bp, Glycine max
cattagggtacgcacagcgcggcggccaagccatctcaagccggagctgctcttcacccttcctcctactcggtacaacacaacaacatttgttgtggagtgaatgggtgcgacggaggccaacacgacacttcaagctcgtcccgaaacgacgtcggagaatatcgaagcattgcttgatgctgcaagatacgatgacatggatgatgttaagagcttagaagccagtggtgttcctcttgattccaaggatgaacaagggaggacagctcttcatatggctgcagctaatggacatattgatattgtggagtatttaatcagtagaggggtggatcttaattcaccaaatgaggaaaagaatacacctcttcattgggcatgtctcaatgggcatgtggaggctgtgaagaaattaatcatggctggagctaatgttagtgtcttaaacagtcacgagaggactccaatggatgaagcagtgagtggcggaaaagcagaagtgatggatgc

SEQ ID NO: 221507 - DNA, 496 bp, Glycine max
gctcagaaatcatgcttaaagcataaattaaatttaggtatagttgcatcatgcaaaaactagaaacctataatgtacaaatcaccctcaaagcccaaaatgcagcaaatgaagaaataacctgaattcaagcacacctatagtcccatcaattcaacaattctcatcaaagatacatataaaccacacagtttcaacctcctcatgttcctctccagaacatctgccttcctcaaattaccgcctccactctgcttgaattacctttccattcccatctctagaagatgatacagttctgtcacttctgtggccacctttgcctcctgattgaacttgtctcagtgtcctaggtgaatgcgaactaattttgcagttagttgaggatggcagagaatgtcgccgagtatggttgtttttttcacttccatcttggccaaatctcggggatccttgtgccttcaactttgcctttgcagattcagttgctgccatg

SEQ ID NO: 221508 - DNA, 559 bp, Glycine max
cgatcaaagaagatgtggaggaaggcatgcagaaaggagtcagagagccactggtggtccgtgcaagcaaagggcatccatggatggtttactttactacattcgttgcagtgtgtggttcttatgaatttggagcttgtgcgggatattcatctcccactcaagatgctatcaggaaggattttagtctgtctttggcagagtactccttgtttggatccatcttgacttttggtgcaatggttggcgcaataacaagtgggcctatagccgattttattggacggaaaggggcaatgagagtgtcaagtgctttctgtgtcgcagggtggctagttatttactttgctgagggcccagtgtatttggacattgggaggctatcaacaggatatggaatgggagttttttcatatgtggttcctgtctttgtagcagaaattgcaccaaaagaacttcgagggaccctgactaccttaaatcagttcatgatcacggctgcggtgtcagtgtcattcacaattggaaaacgtgtttcatggagggttttagctataat

SEQ ID NO: 221509 - DNA, 464 bp, Glycine max
gcaataatcagcttcgggattgaaagtttttattatgcgatacgattctgtagactgcatagcaatggcagggaagtaaagtaaagtagacgatgatggatacaatacaaagcatgtttaaaattttcttcaggtattggagggaggaagtgtaacattgttgagtcgctctaggaccaaaataagagcctgagtacccaaattaccttccccatgagccctaagcgacacataaagctgttgcgccagagccaagccaggcaaagcaatccccatattctgacactccttcaagcaaatccccaaatccttaacaaagtggtttacgaagaaccccggatccaaatccctattcaagattctctttccgtacaaatcaagcgacttggaaccggccgcgccggtggaaattgcgtccaggtacaaccccacatacagccccgccttgtgcgcgtacaccattc

SEQ ID NO: 221510 - DNA, 585 bp, Glycine max
  unsure (1)..(585): unsure at all n locations
gtgaatttcctcatatttctataagacacagaatatttaagaatggagttcaccaaaacaagttccctcctaatattcttgctagtgtttgtctcaagcttgatccatgctaaggcataccaaaatctatactgtggcagaggaaccagatgctatggaaagtacatcacatgtcctgctgaatgccctaacagtgaaacaaacaatcctaagactaaggtttgccaaatcgagtgcaacaaacctacttgcaaggcagtctgcagaagtcgcaagccaaactgcaatgcaccaggatcaggatgctatgatccccgtttcattggtggagatggtagagtcttctacttccacggaaagaccaacgaacacttctccttagtctccgattccaaccttcaaatcaatgcacgcttcattggacacaggcctgaaggaagaagccgtgactacacatggatccaagcccttggaatcctcttcaactccaaaagcttctcacttgaggccaccaagacaccccagtggaatgatgaacttgaccacttcanattcacctacaatgagaaccaagtagccctagct

SEQ ID NO: 221511 - DNA, 471 bp, Glycine max
agaataccagggacattattatgcgtgaattccgttctgggtcttcccgtgtcttgataaccactgatcttttggctcgtggtattgatgtgcaacaagtgtctctagttataaactttgatctccctacacagcctgagaactatctccaccgtattggtcgtagtgggaggttcggaaggaaaggtgttgcgatcaattttgtcacaaaggatgacgagaaaatgctgtttgacatccagaagttttacaacgtgcaagttgaggagctgccttcaaatgttgctgagctcctttgatcagattttgtcctccgtcgtagtagatgaaattagtttgcgtttggaaactgttatgtaatgtttctcactctaacctgtctcccccccctttcgtttctttggttgtacttccgctcttaaactttgtttaataggcttagtaatttaatttaaactgcgagtttgtctg

SEQ ID NO: 221512 - DNA, 466 bp, Glycine max
cagacaaactcgcagtttaaattaaattactaagcctattaaacaaagtttaagagcggaagtacaaccaaagaaacgaaaggggggggagacaggttagagtgagaaacattacataacagtttccaaacgcaaactaatttcatctactacgacggaggacaaaatctgatcaaaggagctcagcaacatttgaaggcagctcctcaacttgcacgttgtaaaacttttggatgtcaaacagcattttctcgtcatcctttgtgacaaaattgatcgcaacacctttccttccgaacctcccactacgaccaatacgggggagatagttctcaggctgtgtagggagatcaaagtttataactagagacacttgttgcacatcaataccacgagccaaaagatcagtggttattaagacacgggaagacccagaacggaattcacgcataataatgtccctggt

SEQ ID NO: 221513 - DNA, 412 bp, Glycine max
cttgtccttgcaagcagttgtgtctgtaacaccactgcattttcaacatccactagaccctttaaccaaacaagagataagtcttgtccaaaccatagtccaaaacaagtacccaagctcaagtaacaggttgagcttccactacattggactcgacgaacctgaaaaggatgccatcctcaaatgggaatccatcaaaccaactgttataactgtccctcgcaaagccttggccattgttataatcaacagccaaacccacgagatcttaattgatctaaaggcaaggcgcattgtctccgacaatattcactccgggaatggcttccctaccctttccgttgatgaacaacgtcgttgccatagagctgccactgaaatacggtccattcattgagtcagtggacaagag

SEQ ID NO: 221514 - DNA, 367 bp, Glycine max
ttttgtttttttttttttttttttttttttttttttttttttttttttttttttttggtttttgggctttttttttttttttttttctgtttttcatattttcacttgggatcatacatcattgaaaagggggaaaaaaaagatagaatgctgggggaaaaccccccccatgagcagaaaagcgggccacccaaaaacaaagaagggcggcaagcaaacgccgacgagcccaacggcgtctaatgggagcaagcagaacccagagaacacaaccggagaaggcccggactgggagaattcccgcagcagcaaggggggggaaaaagacgtagatcagggccacacgagggcttgatgcccaaagaga

SEQ ID NO: 221515 - DNA, 530 bp, Glycine max
  unsure (1)..(530): unsure at all n locations
ctgaaatctccattctccaaaactgcttcaactcttctcattttctttctctctctctctgcctcgcactggagtaccctctccaatttccttcaaatcccatcaaataagtttctcttataccctctgaatattcttcatcatcatcatcattaatcatggctcttttgatgtattttgtgctttttcttgccctcgctggccattcaagtgctctttactgtgtatgcaaagatggtgtgggtgatcaagctcttcagaaagcaatagactatgcatgtggtgctggagctgactgtacccctattctccaaaatggagcctgttttcaacccaacactgtgaaggatcactgcaactatgctgntaatagctatttccagagaaagggtcaagctcaggaaagctgtgatntttctggtgctgccacccctagtcaaacctcacctactgcagcactaacatgtgtttacccttcaagtctagcaatgctggaacaggcaacacagcaaccccacaaccactacacc

SEQ ID NO: 221516 - DNA, 579 bp, Glycine max
ctcctcctcgatcccaattccactagggattcaattccgatgcgattccgagcttgttagatccacgacaacgtttcgtttcccagattcttttgtaaaaaaaataatcttcctttgcccaacaggtaagttggaaaaaaatggaccatgacaagactgggtgccaagctcctcctgaaggtcctatattgtgcatcaacaactgtggattttttggaagtgcagctaccatgaatatgtgttctaaatgccacaaagacatgttgctgaaacaggagcaggccaagcttgcagcatcatccattgggaatattatgaatgggtcttcaagcagcactgaaaaggaacctgttgttgccgctgctgctgctaatgttgatatcccagttattccagtagagcctaaaactgtctctgtgcaacctttatttggttcaggtccagaagggagtggtgaggcaaagctgaaggatggaccaaaacgctgcagcagctgcaacaagcgagttggtttgacagggtttaattgtcgatgtggtgaccttttttgtgctgtacatcgctactcagacaagcata

SEQ ID NO: 221517 - DNA, 563 bp, Glycine max
tatgagcagcagtgcagggaagttggtgtgtgtcaccggtgctgccggttatattgcttcatggattgtcaagttcctacttgaacgtggttacactgtcagggccactgttcgaaacccaaatgatcacacgaaggtagaacatttgctaaaacttgaaggtgcaaaggagagactgcacctttttaaggcagatcttttgggtgaaaattcttttgactccattgttgagggctgtgatggcgtctttcatactgcttctccttttattatcaacgtcaaagacccacaggctgacctacttgacccagcagtgaagggaactcttaacgttcttaaatcatgtgtaaaatcgccatctgtgaaacgagtcatcttaacatcttctgtggctgcagttgcatataataaaaggcctaaaagtcctgaagttgtagttgatgaaacctggtggtctgatccagattactgtagggaattaaagctgtggtatttactttcaaagactttggctgaagatgctgcctggaaatttgccaaagaaaacgaccttgacttggttg

SEQ ID NO: 221518 - DNA, 530 bp, Glycine max
agagtaaacagacacacttgagcattaattatgtaaatcatactttgcgccatgtcttgcgaggtaaaactaagtacaaattcgagaatagaggcaagtacaacttagcaaagcctattgataaaaagaactacgactgtataagcaaaactgttataggaacccaaattcaagagggaaagtcaatcacacaatttggtagctatccgttatcagctgggttctctgagcaaatttgggaggattaccaccctttaatggtatgatgttggtaaccttcaggtcactaaacgtgtcagttgccataaagcagactgaaatgggaaagaatgttgatgaatctgctagtggaacaacaaactccattgacccactgcggttggaattatcaatcagaaggacagaccactccaaaatggaattcctagagtcatacctccattccccatcaatctgcctaacagatggtgcttctcgaagagctggaagaagtacagagatcacaacatttcgcagatcaaacattgatg

SEQ ID NO: 221519 - DNA, 555 bp, Glycine max
cttgggtggagactatcgtgcacctcaaagtggggcctgttcaaacaaggctactagactttttgttggcttcactagaggttattcgacgaggacattggaatttctacagattggagaatgagcatctaaacaacgtgggtcgttatcgggcagtgaaggcagttccactaccatttcgtgacatagactcagacagctgaggtgattttctcacacttgtacagatttgtcctgtaaaagggataggcaatatagccccaagggaataaaattttgaacgtgacatccctcaccatgcattggataccaattgaagtatcaatcgacaccaaatgtaatgcaaaagacaaatgcataaatagatggcattttgtcttgtgaattggctatcataagttttggatttcatgttctagatcaacatacttagtaacaaaagaaaaaaaaaagatgtattcttttctttttgtcttctatttctgttttgttaaatcggttttaagaaaacatatttgaagatcgtgtatcgaatattttgtaaattgcaattag

SEQ ID NO: 221520 - DNA, 550 bp, Glycine max
  unsure (1)..(550): unsure at all n locations
ctaattgcaatttacaaaatattcgatacacgatcttcaaatatgttttcttaaaaccgatttaacaaaacagaaatagaagacaaaaagaaaagaatacatcttttttttttcttttgttactaagtatgttgatctagaacatgaaatccaaaacttatgatagccaattcacaagacaaaatgccatctatttatgcatttgtcttttgcattacatttggtgtcgattgatacttcaattggtatccaatgcatggtgagggatgtcacgttcaaaattttattcccttggggctatattgcctatcccttttacaggacaaatctgtacaagtgtgagaaaatcacctcagctgtctgagtctatgtcacgaaatggtagtggaactgccttcactgcccgataacgacccacgttgtttagatgctcattctccaatctgtagaaattccaatgtcctcgtcgaataacctctagtgaagccaacanaaagtctagtagccttggttggacaggccccacttgaggtgcacgatagtctccacc

SEQ ID NO: 221521 - DNA, 562 bp, Glycine max
  unsure (1)..(562): unsure at all n locations
cccgccggcacgcacgcacgcactgactcggtgacttactcactcgctccttgcggacactatttaaattaaaaacctcttccttccacttctccatcggcttcgtcttctttctcgttcttactttgacggtttctagagagagaaagtgatggccggagttaatccaaacggcgtcgccgattttgcggcggttccgacgcatggcggacagttcattcagtacaacatatttggaaacctcttcgaggttacgacgaagtaccgtcctccgatcatgcctatcggacgcgncgcgtacggaatcgtttgctcactgttgaataccgagacgaacgagctggtggctgtgaagaagatagcgaacgctttcgacaatcacatggacgctaagcgtacgcttcgtgagattaagcttcttagggcatttggatcatgaaaatgtaattggtttgagagatgttattccttcacccttgcgtanagagtttaatgatgtctacatagccactgaactcatggatactgatcctcaccatatcattcgctccaatcaaaatct

SEQ ID NO: 221522 - DNA, 544 bp, Glycine max
atcagtgagtgaccaagtcgattttttctttagtattacatcaatagatattcaagtcttaacatcatcgtcagatcataatattgttacaaattccaatgcccttcagtatgtaaatttacatataccagagattacatttaccactgcccattacactatgaggtaatacatatatataattcaacgcagattgagatcctaccacatcacgttattcacgagcagtttgtgtcataactcacaagtcccaacaactctggaccttccaaacgaggattattctcaaagttattcaatggaatatgctcgaatggcccggaggtaggaattgtaccacataaatcattattggagacatccactactttaaggcttgaaacagcagcaagttccttggggatcgggccagatagtcggttgtcattgagtcgtaaaaagacaagattcttcaatttccccaatgaaggtgggatggtgcctgatatgttgttgttgtacaagtgcaagctaactagactcttcaggtttccaagttctggag

SEQ ID NO: 221523 - DNA, 555 bp, Glycine max
gcagactcaacactctcgctagacacttccttccgcaaatggcttctcacgacagcatctccgcttctccaacctccgcttctgattccgtcttcaatcacctcgttcgtgctcccgaagatcctatcctcggggtaactgtcgcttataacaaagatccaagtccagttaagctcaacttgggagttggtgcttaccgaactgaggaaggaaaacctcttgttttgaatgtagtgaggcgagttgaacagcaactcataaatgacgtgtcacgcaacaaggaatatattccgatcgttgggcttgctgattttaataaatcgagtgctaagcttatttttggggctgacagccctgctattcaagacaacagggttaccactgttcaatgcttgtctggaactggttctttaagagttgggggtgaattcttggctaaacactatcaccaacggactatatacttgccaacaccaacttggggcaatcacccgaaagttttcaacttagcaggcttgtctgtcaaaacataccgctactatgctcccagcacac

SEQ ID NO: 221524 - DNA, 567 bp, Glycine max
ctcatattcgagtgtatggcatttcattgattttccaggaaaaaaaataactaattaacttcaaaagtaaaactatccacttcattccaactccttcaattccattttccgaagaggaattccataatggaaacttgggagggaggaggataccaaaacactcatgatcttgttcgaactaacaaaatacccattataggaaaacatgtataaccatcacagatttctcatattacaagctagttagtgtagcataaacttcaagtttcctgtgcaaaaaccatagcaccacgaagttcaactagtgccactgcttcattaatcgcatccatcacttctggctttcccccactcactgcttcatccattggagtcctctcgtgactgtttaagacactaacattagctccagccatgattaatttcttcacagccttcacatgcccattgagacatgcccaatgaagaggtgtattcttttcctcatttggtgaattaagatccacccctctactgattaaatactccacaatatcaatatgtccattagctgcagccatatgaaga

SEQ ID NO: 221525 - DNA, 568 bp, Glycine max
  unsure (1)..(568): unsure at all n locations
ctccgctcactccaccgccgcatccacacttccatcgtacgccacttcatggctgcggcggagcccataataagctcatccaacacgcgcgtgggctggatcggcaccggcgtcatgggccagtccatgtgcgcccacctcatccgtgccggctacaccctcaccgtcttcaaccgcaccccctccaaggcccagcccctcctcgacctcggagcccacttcgccccctcccctcacgccgtcgccgccaactccgacgtcgtcttcaccatcgtcggctacccctccgatgtccgctccgtcctcctgcacccctcctccggtgccctctccgccctccgccccggcggcgttctcgtcgacatgacaacctccgagccctccctcgccaccgaaatcgccgccgtcgccgccgtcaaaggctgccactcaatcgacgccccagtatccggcggagaccgcggcgcgaagaacggaaccctagctatcttcgccggaggggaagaagcgacggtgaagcgtctgggaaccgtgttttctcattnggggaaagtgaagtacatgggag

SEQ ID NO: 221526 - DNA, 541 bp, Glycine max
cgttagaatctcagcaattttagatgtttctttctttctgccttgagcctcacctcttgtgatatgcagcattctagactttccagtaaaaaagaaagacgagaattctgcgcaatccgaggagctagcgacacttaggccaaaagacaccaacaaacaaatccagcaccgcttccacgttttcttaataaaatggttacatcggaactctctaatcaccaaaacaacaactctcccatgatggcgaagccccacagaaacaaaacctcctctgtatttctctccgatggatctctcttcctcggaggagcattctccgctctcatcctcgtctggggtttctcctccttcaccaccaccatccctaaggaaacccccaatttcgaatctcttaccaaaaacgacgctgttccgcaccacggtactcccgatttcaacttcgacccccccgacagaacattctacgacgatcccgcaatgggttacaccatggaccagaaagttcgcaactgggacgagaagcgcgaggagtggctgaagc

SEQ ID NO: 221527 - DNA, 536 bp, Glycine max
cacaactcacatgtctacaagtttattgggccatcttgatggtgggtacactagaacattggtcataacaacgtcataaaccttagcactgctattttgttatgcttctatatatgtaagatttcaagccatgagaggaaaagggagggaaaaaaacaaagggtagatgtaactagaatggccgcagggtatctttttactgtagcaagtagggtattaacatggtgggatatgctactatgtgagcatgaccccacaaccccgacgataatacaggtccatgaaagttctgtacgcatgcacatggttcatctatccatgttaaatagagggccgcagtaaaatctatccaagctcagcgggtgcttcacactgatgatcaatgacgaagtgaacggggataatcaaaagggacaggggaaatggcgtcttccaagagatccgggcgcatgtaaccaaatttacgcatgacttgattgtcggcaaaattcacagccctttgcattccggtccagcaatcattagcggaatacatg

SEQ ID NO: 221528 - DNA, 590 bp, Glycine max
caatccccagtttcttcttcaacgtcctcttacgagcagatcccaattctccttcccagtttcaaaccctaattccctcattcccatggcctcagaagagcccactgtcgcggtggaacccgctcccgaacctgccaccgccgagcctcccccggaggagaaggaggagcccaaacctgaagccaaggctaagaaaaccaaggaacccaaacctaaaaaggtttccagaccacgcaaccctcccactcatccttcctacgaggagatgattaaagacgcaattacctcgctgaaggagaaaaccggttcgagccaacacgcgattgcgaagttcatcgaggagaagcacaagcagcttccaccgaacttcaggaagcttcttctctaccatttgaagaaacttgtagccgctggaaaactcgtcaaagtcaaaggctccttcaagctcccacctacccgaccttctgcatcttcttcttcttcgccggcgaagaagaagaagcccgcacctgctaagccccaacccaagcccaagcctaagcctaagcccaagcccgctgcttaagcccaggacactaaggcaactaagt

SEQ ID NO: 221529 - DNA, 457 bp, Glycine max
taaagttctcctttgaaacttctctgggctatgttattttgaaagaagttacttcgcatcaataatgggttcaggtgattggtttaagacaataattagcttaagaaaatcaaaagaaggcagatcaaagaaagcaaagggtatcttaactcaagagaaactaaatgcatcaaagtcaaacaattatccaggaaaagaatccagtggtttaacaaatggtattaaaagtgaaaaccttgtgtcggctggggtgtcagttgaaactaatgctgcaacaaggatccagactgcattccgagcttataaggctagaaaagctttacgtcgcatgaaaggatttacaaaactgaaagatcctaacagaaggctttttctgttaaaaagcaagctagtacaggctgtaacataccttcattcatggagcacgataccagctgagattagggctcgtcaatct

SEQ ID NO: 221530 - DNA, 572 bp, Glycine max
atctgaccattgacctttctattaaagatgacaattacaatatgcgttttacaaagcaaaagcctaacaaaaataggagagagagagagagagatttcttgatcaatattaacaataacgcgatgtagcatacacatctatatcatatctacttagaccatgcaactgcatcgatctcagcttgtgcactccggtataactcaagtctctttgatagggcacttcgtctttccatgattgcaggatcctcattcagaaatgaggacagacgcttgggctcaattttgcctagctcggtgaaaaactgatcaagtaggcctcgtttggcttccctcacttgacaatagacaattgacttgggaattgaatgacgcagacttgcacagaccatattgacataagacagaacattggttcctgtttatacatacacatcactactgttagtagtttaattcattttcaacatattgacaatgtacaggctaaggttaaactattagggaaagcatgatatctcagtccaagttagaaaatgaattttggaaaacttaccagtacttctaagatat

SEQ ID NO: 221531 - DNA, 476 bp, Glycine max
  unsure (1)..(476): unsure at all n locations
cacacaacaaaaacaccaattctccaccctctcattgaaaaaaaaacaaccaaacaaaaaaaatcaatcattttattttatttttctacgaaaatggttgatttacattggaaatcaaagatgcctagttccaaaacaccaaaactctctctctccgacaacaagtccttaccctctttgcaactacccttccgcaccacagatatctctcccgccgctccttccgtttgcgccgcttacgactactatctccgtcttcctcaactcagaaagctttggaactccactgattttcctaattggaacaacgaaccgattctaaaaccaattttgcaagctctcgaaatcacgttccgctttctttccattggtctctccgatcccagaccttacttcaaccacagagaatggactcgccgatagagtctctcatcatgcatcanattgaaatcattgcctactttgtgaaagaagag

SEQ ID NO: 221532 - DNA, 544 bp, Glycine max
catatccatttgttattatcgttattatcccacaggtatccaagaaaagtcttggcggcatccaagcttggaaaatacgtcggttcaaggaaaatctgagtcaacgagtcagccgagtcgcaactcaacccaactcggttaccgttagcctctgaacttcccatcaccaccgccaacacctgcttatacgcgtagaagaatctcttcatcgccgcctcaatcgcctgcatcgcctgcaacaagtgaaccttctcgaactcgctcttcgaaacgtagagcttcatcgccgcctcttgaatcctcggtcctcccttcggatccacctccacctccaatatctccggcaccttgtgcctcagatctctgcacatcttcgtcagttccactaactcattcgatctgaagcagaacgatgccgtttcgccgctcgaggatttcaccgagagttgattctttagcctcaagaaatcgtccggatccatcatcaggtggaggtcctccaccttcgcgagaagcttccagatcctctccacggcgtagcagt

SEQ ID NO: 221533 - DNA, 574 bp, Glycine max
  unsure (1)..(574): unsure at all n locations
ctctttctccgagaacaaaaaaaaaaacgtgattcgctcttctcttcgaataaaccacaaaaccaacaaacgagaagaggagtgagagaagatggggttgtcgttcacgaagctgttcagcaggttgtttgcgaagaaggaaatgaggattctgatggtaggtctcgatgctgctggtaagacaaccatcttgtacaagctcaagcttggagaaatcgtcaccaccatccccaccatcggatttaatgttgagactgtggagtacaagaacatcagcttcactgtgtgggatgttggtggtcaggacaagatccgtcctctgtggaggcattatttccagaacactcagggtctcatttttgtggttgatagcaatgatagggatcgagtggttgaggcaagggatgagttgcacaggatgttgaatgaagatgaacttagagatgnctgnttgcttgtttttgccaacaagcaagatcttactaatgcaatgaatgctgcataaataactgacaagcttggacttcattcactccgtcaacgccactggtatatccaaagcacttgtgcaact

SEQ ID NO: 221534 - DNA, 469 bp, Glycine max
catgtaaatgtaaatgggggaagataccaatttcaatggaacaaaatggaaactgaaattttgaacattaaaattaaagaccgaagagccttctttttggaaaacttttcagccaaacttgacaaatatttgaattttctacccattctactcaggctttcaaaggaaatttttgacaaccaaatagggtgtaaggcccaattagcaagaatcctgtgtcaatggatgaatcaatgttgtgcacctcattggatttgaagtcttaaaatgtgtgatacctttcacaattcaattttttaacatcccatcacagcacacttattgacaaagttgccagaccgttttttggcgagtcgattccactgaggaggtcctttattgggaacccattaattgagtttaataaaacccttaccatgagtccttggtccaccgatgacaataagcataattttccacgccctgaatg

SEQ ID NO: 221535 - DNA, 586 bp, Glycine max
tttggaaactctgagacttctctctaaacttgtacctgaatattcttactcccttgatgaagagggtgtttgcaaacatgcctttgagttgatttttgcatttgatgaagtcatctctcttgggcacaaggaaaatgtgactgttgcacaagtgaagcaatactgtgagatggagagtcatgaagagaagctgcacaagttggttttgcagagcaagattaatgaaactaaggatgttatgaagcgaaaagctagtgagattgataaaagcaagattgaaaagatcagaggtgataaaggaggatttggtccattacagtcaatgggctctggaagaattgaaaatagctttagtgatttgagcatatctagcagtggaactggttttggaagtggctctggttttggattgacttctgatgtcgattcctttgcaaccaagcctaaaggtcgtccaacttcatcagccactgctccacctaaaggtcttggaatgaagcttggtaagtctcatagggacaaccagtttttggaatcattgaaagcagaacgtgaggtcatttcttgagatgttcagccaaaacac

SEQ ID NO: 221536 - DNA, 465 bp, Glycine max
agcgtgtccaaaagtgtcaacttgaaacttaaaacatgacatccattttatacaccatttgcgatccatgtattgtaaaatgcaaacagaaggtaaaaagcggggagaaaatacaagcatataatgttattttaacccccacccaaccccttaaaaaagaaaggaagatcaatattcaataagaaaaacaaaacgaacacactatgaagcttctcagattaatataaaatcagtgcaaccttgtcaactcttacactttctagcataactgctttactgaaacgtccactgtcttggaaatttcatccattttactggggctaagatccagaagtgattcgatcaaatttccatgtaaaaagttattggcttcaacagttctgttataattgtgaaatgatctccattgctcatgggtgactccatcaacgcctttaagtacccttctcaaatttggctgaagtt

SEQ ID NO: 221537 - DNA, 588 bp, Glycine max
gtgggtcagtaattccaaagctcttttgttattcggtgcgtgtgtctaagtttgaaacccctgtgatctcacacaattccaattcctctggatctcgtctcgatcgatcgatctcgaacatgagcactggggagcttctcaacatcgaacctctcgaactcaagttcccctttgagctgaagaagcagatctcatgttctcttcaattgtccaataagaccgatagctatgtggccttcaaggtgaaaacaaccaatccgaagaagtattgtgttcgtccgaacactggtattgtcacgccacgatctacgtgtgatgttatcgttaccatgcaagcgcaaaaagaggctcctgctgatatgcaatgcaaggataagtttcttcttcagagcgtaaaaactgttgatggtaccagtccgaaggatatcactgcagacatgttcaacaaggaggcagggcatgtggttgaagagtgcatattgagagtgctgtatgtttcttcacctcaaccaccgtctcctgtcccagaaggttctgaggaaggatcctcacctagaggttctgtttcagagaatggaaatgccaatg

SEQ ID NO: 221538 - DNA, 528 bp, Glycine max
  unsure (1)..(528): unsure at all n locations
ctctctcacagtggtttgtgccctaaacaccatcttcggctgcttaacagccctgtccccaaactactggatctacgtcctcctccgcctcctcaccggcttcagcagcggtggcgtcggcctcactgccttcgtccttgccaccgaaccaatcggcccaaccaaacgtggtgcagcgggtatgtccaccttctacttcttctccggtggcattgcacttctctcaggcatcgcctacatcttccaaacatggcgctatctatacatagcttcctccatcccctccttcctctacatcatccttgtccttccctttatctccgagtctccaagatggtacctcattcgtggcaaagttaccgaagccatgaaactcatgtccaccattgcttcttccaatggtaaacaccttcctgatggtgttctccttgcacttgacaacgaaacatcgnccacaacaaaccaaggttcaggctatgacataacagaaatcatgacttacaaaaacgaaaacaaagatgcacttat

SEQ ID NO: 221539 - DNA, 519 bp, Glycine max
gtggcaaacagggaatattgttacatgtcactttacaacaataagccgtcagggttaaaaaaaatatatggaaattaatatagttacatggcactttacaacaaaagggcgctcatgaagccgtaattgcacctacctagtcacacagattgaataaattacctaagggagtttgattggcaacaagattgaattttcattcaacttgatcgtttcctgcttgtaagcagggaacttaagtgataaaaaaattaaaaacgaattattatttttccttatatgcttgcttcaagtccttgagtcttctgctttaagcatactcaggattcagtgctaatgcttccctgtagatcatctcttttatttgctcttcatccaattgctgttgctcaaaatcaaatgagaatggctccatgcagattggttcatcagctacatcatgcagtttttaaggtatggatgggctagtgcttcttcaactgaattcttttggtgggatcaactgtcagcattttatca

SEQ ID NO: 221540 - DNA, 387 bp, Glycine max
gggggggcccccgggggcaaaaaagtttcctttaaaaatttccccttaaaaaaaggggttcattggggagggtgccaatttttaaacaaaaaaaagggaagttcttctataggggctagggggcctttttaaaactggtggaaaaaagttttaaaacaatgggggtacaaggggaaggatcgcatcccccagaaaggggaaactttgggaacttaaaccaatcatgctaaaccccccataaaatgccccggttatagggaaccttttaggcatgaaggaaacttgttccgcattaaatcccggggaaggaaaccttccaatctggttggaaatggggccccaattgccaggggggcctttggaacaaaaaccaacgaaaagtttttg

SEQ ID NO: 221541 - DNA, 572 bp, Glycine max
  unsure (1)..(572): unsure at all n locations
gagaaagggttttttggatgatcagttcagccagcttcagaaactgcaagatgagagcactccagattttgtgattgaggttatcactatgttctttgatgattctgagaatctcctaaaaaacatggcacgttgtctagaacaagtgccagctgatttcaaacaaatagatgctcatgctcatcagtacaagggaagcagtgccaggtgtcatactacattacttttttttttctagtaaattatacggagattcctgtgttatctcacgagtgaaatttacttttctttttaatcctgtggaaatttgcttatgtgtgatattgtttaatttgttcaacagtattggtgctgctagagttaaaaatgtgtgcgccaccttcagagctttttgtgaggctaagaaccaggaaggatgtatgagatgtctatcacagttgcaacaggagtactctctactgaagaacgctctacagtacttattcagtctgcagcaacaaatcaaggctgctggtggttccattcccacancatagagtagatgagtgataaaaaagtgaagcttttgatgg

SEQ ID NO: 221542 - DNA, 515 bp, Glycine max
agcataaagaaacaaataagtattatttaagagaaaacatccttcacatggaaggccatgtattgatatttgcacgcaaagctacggcaaacaaatggaattctattacattatgaattacaagttccttgcatggcatacatcaaggaaaactgggaagttgttgtatgtggattgatttgccacagccttatatagacaaaccaaatgcttaatatcaacacaaacacgtgtacagaaaagaaaccactcttcaagaaaacagaaaataagaaaaactaacatattggaagaggtgccccattccactccccaaggcattccaaaagtggatcaatgatcttcccttggcacaaagcagtgaacactttgtcacactcttcacccggtgagataaccctttcaccagttagcaatgctgtccccaactcctctctcacaaacttgtacaaggggtaagacctgcattccttgatcttgtttggaatagcacattggtcattctcatatgcaac

SEQ ID NO: 221543 - DNA, 541 bp, Glycine max
gaagaagaagaaaaagggaaaaacgcaagaaaaatagaggaagatcgatcgagatctccctcgcgtttgtctcagttgaagaaattaaaaagcagaactagagtaactcaacggtctcagaattttcagggttttcagtacttccatattttttcttccggatttgagttggaagaagatcgaagaggtttctagttgcttcaattgttcctctgggtggtggagacttgttatatttttaaaatattgacaattcgaaatgccaaaggagagaagggatagatctttgtcacatgaaagtagcagagcatcaccttacccaagtagctctagtcgtgttggaagatctgctcttaaagagtcagaggagaatgttaaagaatgggaagaagctaggtgtccagtgtgcatggaacaccctcacaatgcagttctcctcatatgttcatcccatgagaagggatgccgcccttacatgtgcaacactagttatcgccactcaaattgtcttgatcagttctgcaagtcatttgcagacacc

SEQ ID NO: 221544 - DNA, 533 bp, Glycine max
  unsure (1)..(533): unsure at all n locations
ccagtctgggttggtgggcgttgttggttcagtgttgtggtgtttgtttccctcccaagaatataacccccctctccactcccacccgtttctttcttcagagtctctctctctctctcaactcccaattactttgttgcatttcacacaccaacttcccatagaagagagaagagagaagagactcttccttccatcctgcaactcaaatcatcatgcaagactccagctcaatgaagatctcccctctggatctcatgtccgccatcttcaagggcaagctcgacccctccaacgtctcctcctccaccaacgccgccgccgccgccgccttcctcctcgagaaccgcgacttcctcatgctcctcaccacctccgtcgccgtcctcatcggctgcgtcgtcgtcttcatctggcgcagatcctnctnccccaaggccaagcctctcgagcctnctaaacgcgtcgtcgagaagcttcccgaaatcgaagtcgacgacgggcaccagaaggtcaccatcctcttcgcactc

SEQ ID NO: 221545 - DNA, 502 bp, Glycine max
  unsure (1)..(502): unsure at all n locations
acctccaaacatttttttatagttcatacagtacaaggaattgtctgcgtctctgaacctttttttgaggttcatcatacattacaaaaagaaaactgaagtaaaatagttcatagtctaggtttaaacagtatataataaattacacgaaccaaaaagaatcctttagaaaatatagtgaaaaagaatcgtaggaaatgtcgtcgtgatggcaacaagcaccccccctcaattttgagggcactaatgaaagggggcacaaataaggccctttcaaaatcctttagccacaactctatgttttattaatatcttcgacacccccacgggttgcattcagatatcatcaccatacatcgcgcaaatatttgccagtagtttgtagattctttaccatgctctcagccttggaactatcgagagaaccctgctctggcaaaattgtgtgcagggcgcggngtacatccctggccatgcccttggcatcaccacacacataaat

SEQ ID NO: 221546 - DNA, 566 bp, Glycine max
  unsure (1)..(566): unsure at all n locations
aaactgttaattattgataattgataattttacaatggactaacgagatactttccaacagactgcaagcctataaacaagaatcagaattctggcaatctacatacacaagtggtgaactgatttgacatccaagaagcagagcatttgaaacccttaggcaatccaaaaacaaattgatgctatacaaaaaatctatttcaaccaatcagcagctgcccttccagcaaaacaactaagaatttcaccaaaaagaaaacagagagcttaatggcaaactagtttaatcctacaaagtccaactggaagctggaatcccttgtttctggaaccaatcaggcatgtggaacttttcatagaggaaaggtcttacatcattctgctcagaaagttgcttgagaagtggaagaatgacatctagaagctgggtgtcatgtggttgcccagcagaaaatggaatgcacggaattccattcaccggttgcaatacaaagctgaaaggattattgtctacaataacaatgcgacaaagatcctttgagatgcanngtagatccttgacatgc

SEQ ID NO: 221547 - DNA, 384 bp, Glycine max
atgaaggcctccgtctccagcaatgccgatttcctcaagatgggactcttcttcctcttcgtggccgtcactttctttttcgtgggcaaacacttctccgacagctcctcccagcagctcatcttcttctccggcaccaccgccgccaccaccgccgccaccaccaccacgtccgccgaggtcaccatatcccccaacttcaaccaattcttcaacgtcaacgccctaatcgaagcccagacccccaaaacaaacccctcccaacaacctccccctccgccggagcttctcgacacgatcaagcgcttcgggatcctcaacgacaacggcaccatgtccgacgacttcgagatcgggcacttcgagaaggagtaccggaagact

SEQ ID NO: 221548 - DNA, 385 bp, Glycine max
  unsure (1)..(385): unsure at all n locations
ttgggttcggtttttattttgagcagccggaccgacccgacgagttgcttcggatccaagtagcgggagggcgcgtgatatattgggacggacctagagtgcttggggtgttggctatgtccagagccataggggacaattatctgaagccgtatgtaatttcggaaccggaggtaacggtaactgagcgtagtgaggaggatgagtgtttgatattagggagtgatgggctatgggacacagtgcaaaacgacatcgcatgcaaaagtggtgcgtgatgtgtctgaacgcgcagaagccgtcatcgccgccctcgtctccgaagagggagatggcngtggactgctccgactaggcttgctccaacgcctccattctgctgacc

SEQ ID NO: 221549 - DNA, 565 bp, Glycine max
gatccaagctgggtttcaattacaattatatatctaattacaacaaaaacaacggtgtttcaggaggctgatttacctcttggttgacacactaattgttttcactactcttaaaatttcccataatttgttgataatttttctgacaattacaaatttcacacacccccgttgattaaaatacctatctacaagtactattttaattacaatcacaagaaatcagtaaagcaccacgcaacaccctgcattttcttcccctttcttttgtcaaaaacaaaattccacaacatcgggtgtccacgcacagttcccattttaggttctcctcaaatcaaccaccaccacgctcacattgtcggaactctgcctaaccaacgccaatttggtcagcagaatggaggcgttggagcaagccttgtcggagcagtccaccgtcatctccctcctcggagacgagggcggcgatggcggcttctgcgcgttcagacacatccgtaccactttgcatgcgatgtcgttttgcactgtgtcccatagcccatcactccctaatatcaaacac

SEQ ID NO: 221550 - DNA, 576 bp, Glycine max
ttcacccacgtctctctcccgcttcagatcgtaaacgtctcgctgttccaagatgggtgtggctgagaacattcccgatatggaggagggtaccttggagattggaatggaatacagaactgtatctggagttgctggaccattggtcattcttgacaaagttaagggacccaaatttcaagagattgttaatattcgtttaggagatggaactactcggcgtggacaagttctagaggttgatggcgaaaaggctgttgttcaggtatttgaaggcacatctgggatcgacaataagtttacaactgtgcaatttactggagaggtgttaaaaactcctgtctcactggacatgcttggacgcatatttaatggttctggaaaaccaattgataatggtccaccaattttacctgaggcttacctggatatttctggaagttccatcaatcctagtgagagaacctatcctgaggagatgatacagacaggaatatctacaattgatgtcatgaattctattgctagaggtcaaaagatccctctattctcagcagctggtctcccccataatga

SEQ ID NO: 221551 - DNA, 531 bp, Glycine max
gaatcacaataaataattaaccaattctattaaaattaggtctgctcaactttaaaacaaacaggtcccaagtctatttgaactggaatttcgcaaagacaatatttgaacaggtgacttttggcccaagagcaaaaactggcgcaattttctaatcctcattcaactatcatcaccaacaagcactccaagaacaaaacgcacggaaatattcaaccaaaaatcaaactaacaaaatgaacacaaacaaggcacgcacaagaggatccaagagttccaattatagctaaaagtattagctaatttaagcaatcatacaaacccaagttacacaaaagaagagaatacttttagcaagcattctgctattacaacattgacaagaaaggataagcatttttctccaagaaccgccatactcagcaggaaatcaccagacaagaccaaaaattttcaaatgtctcatgccttgctggcaatgttgctagaaagccagtccaaacccttatagagacccttttcagaagttgc

SEQ ID NO: 221552 - DNA, 539 bp, Glycine max
ggagaagacgaagaagttggaggatgaacaggggcatgcgcatagaaactaagaggaagatagatcaagatctcccttgcgtttgtctcagttgaagaaattcaggagcagaacgagactaactcaacgggatcagacgtctcagggttcagcacttccattactgtgatattgcggatttgagttggaagaagatcaaagaggttcctagttgcttggattgtgcctctgggggggggagactttgagtatctttaaaatatggtcaattcaagatgccaaaggagagaagggataggtcttggtcacatgaaagtcgcagagcctcatcttaccctagcagctctagccgagttggaagagcttctcttagagagtcacatgataatgttagagaatgggaagaagctatgcgtccagtgtgcatggcacaccctcacaatgcagatgtcctcacatgttcatcccacgatgagggatgccgaccttacatgtgcaacactagttatcgtcactcgaactgtcttgatcagttctgc

SEQ ID NO: 221553 - DNA, 589 bp, Glycine max
cgagggctcgaaggaggtgcttgttgcgttgtggggcacgccctaagcggaagcggttaatcactctgaaccgaaccgaaactaaaccctattcatttcggaatcgcagaacattcgaaccagagaaacaagagaagagaacgatgactatatggaactacgtcgtcacggctcacaagcccaccaacgtcacccactcctgcgtcggcaatttcaccagtcctcaagacctcaatctcatcatcgcgaaatgcacgcgcatcgagattcacctgctttctccccaaggcttgcagcctatgttggatgtgccgatatatggaagaattgcaacacttgaactcttccgccctcatggtgaagcgcaggattatctttttattgcaactgaaagatacaaattctgtgttcttcaatgggattccgagactggtgagcttgttacacgggcaatgggggatgtttctgaccggataggacgttccacagataatggtcagattggcattattgatcctgattgtaggttgattggtactcacttgtatgatggtttgtttaaaggttattccttcgacaataaaggaca

SEQ ID NO: 221554 - DNA, 424 bp, Glycine max
aataacagaatacggtaacaacttggattcaagaactggaacaagaataagcttctccacagtcttgagaaacttggtcgacatgcaccgattgcaaaccatggtgcaataatcaaactgttcagagaggctatatcttattctgtaaacaaaaccgctatgcaactgtctagatacttactaccaacatcagggttcaacaaaattattcccaataagcaaccatgatactaaacagtcacaagggaaagttcaaagaagcctcggctacattaatcatcacaacttattgttgtaccaaaatacacctttgctctcggtactttgatctggctccacataaatacactctcttgcctctctacacattgccttgacaaatggagtctcatcaaaccgataatactctcccaaaatgggtttt

SEQ ID NO: 221555 - DNA, 592 bp, Glycine max
attaaacttcaaatttgggacactgcgggtcaggaacgtttccggacaatcactagcagctactatcgtggggctcatggcattattgttgtttatgatgtcactgaccaagagagcttcaacaatgttaagcagtggctgaatgaaattgaccgttatgcaagtgaaaatgttaacaagcttctagttggaaacaagtgtgatcttacggcaaataaagttgtgtcctctgagacagcaaaggcatttgctgatgaaattggaattcctttcatggaaactagtgctaaaaatgccaccaatgttgaacaggctttcatggccatggctgctgaaattaaaaacagaatggcaagccaaccagtgaacaatgccaggccttcaacagttcaaattcgaggacagccagtgaaccagaaggctggttgctgctcgacttagaaagagacgaagtatttgtggtctcagacgtttacatgtgtctcagtggcatgtaaaactagcttttcacatattgctatcatatgaagaatgttcgtcatgatttgctccttatcgttaagtcgttggtaaaacttccattcttttctat

SEQ ID NO: 221556 - DNA, 431 bp, Glycine max
gaagggacaaaaaacaaggcaaatactgttattcaccaatattcctaattttgtacaaatgttattttcttttaaaatcaaatccttagaaaaagaatggaagttttaacaacgacttaacgataaggagcaaattatgacgaacaattttcatatgaaagcaatttgtgaaaagctagttttacatgccactgagacacatgtaaacgtttgaaaccacaaatacttcgtctttttctaagttgagcagcaaccagccttttggttcactggctggccttgaatttgaactgttggaggcctggcattgatcactggttgccttgccattctgattttaatttcagcagccatggccatgaaagcctgtacaacattggtggcatttttagcactagtttccatgaaaggaattccaatttcatcagcaa

SEQ ID NO: 221557 - DNA, 528 bp, Glycine max
aatccttagaaaacatgtatcaatattttcccactctacaaaatttgacaaaaaacaaaacaaaggaaaggagagaagttccacgcataagcatcaatcaaatgatcaaagctaaacatgtgaaagatcagaaacaatcaataaaaagaagctaccaaactaccatcaagcaagtccagcttccagtccaccaaatgtatcatagagaggttggtttagagtctcgggaagattaaacgcaaacatccctcccactatcccacatgctgcaaacaccgcaaacggcaaataccctcccaaaacgaccacaaacggcgccaatatcgctcccatttgcgccgcttgagtagtacacccgagcgcggcgttcctcaccactgtcggaaacagcttcgccgtgtaaataaacagcaaattataagtccccggcatgccaaatatccccaaaacaccacacaccattctcaccagcttccacacccaacgttgctcaccagactccccatcaagcaaaagaacccactgaac

SEQ ID NO: 221558 - DNA, 546 bp, Glycine max
  unsure (1)..(546): unsure at all n locations
gacgacttttgggattattttgattttccatttacgaattgcgttagggtttcgtgattttgcacccttccaaacaatcgttgaggtgctattttgatcaaatttcctgcaaagttttcttctttttcgatttctgagttttgggtcgttgaattgagaatcaatttgggtgttcctttgaagaaggttgagtaagaaagagagaagggggaaaatatgatggctgcttcttcttcttcagctaccgtcgcagtggagaaggcgaccagcgaccttcttatgggccctgattggaccatgaacattgaaatttgtgattccatcaattctaatcattggcagccaaaagatgtggtaaaagctgtgaagaagagattacaacataggagctctagagttcaattactagctctcacgcttctggagacaatggtaaagaactgtggtgattatgtgcactttcaattgctgagaggaacatactgnaggagatgatcaaaatcgtagggagaaggcagatttgcaagtgagggataaattttaata

SEQ ID NO: 221559 - DNA, 560 bp, Glycine max
attattctcctcattccttcatttttaaacctagctccatctccctccactcaccataacatggcatcagaagcaaatgctgccaacaccaacttctgtgtaaatgttagcaacaatggctacattagtgctaatgaccccttgaactggggtgcggctgcggaggctatggctgggagccacctcgacgaggtcaagcgcatgctagaggagtaccggaggcccgtcgtcaagctcggtggagagaccctgaccatctcgcaggtcgcggcgatcgcggcccacgaccagggggtgaaggtggagctggcggagtcctccaggccggtgttaaggccagcagtgactgggtgatggagagcatgaacaagggcactgacagctacggcgtcaccaccgggttcggtgctacctcccaccggagaaccaaacagggcgctgccttgcagaaggagctaattaggtttttgaatgctggaatatttggcaatggtacagagtccaattgcaccctaccccacacagcaaccagagcagctatgctagtgagaatcaacaca

SEQ ID NO: 221560 - DNA, 570 bp, Glycine max
  unsure (1)..(570): unsure at all n locations
gtttgtctatctttctcctaaaacaagctaccctaactcagttcattagggcttgggttatttcgaggaaactgagtaactacgcaacggtgggtccgaccccgagtgcggcacgtgtgggaaacgacggtgacaatggttcgttgatgattcctcgtttcaacgcttaccgcgtaaacaacctcaacctgtgatcaaaagcatcatctccaaaatcccaaactcatatcataacgggatcggaggctaatctattacgcgctgttctctcgtcttctacaagattttctgttcgatctcaaccaaggttgttccttccacctccgccatgagtttcatctttggaaagcgaaaaacccccgcagagcttctgcgggaaaataagaggatgctggacaaatcaatcagagaaattgagcgtgagcggcaaggattgcaaacacaagaaaagaaattgattgcggagataaagaaaagtgccaaacagggccagatgggagctgttagagttatggcaaaagatcttgttagaacaaggcatcangttgagaagttntataagctaaaatc

SEQ ID NO: 221561 - DNA, 479 bp, Glycine max
aaaaaaccatcatttttatataattatgagttcatctaatcctggcacaacttcccaattatgctatatatggtacatatgagcatcaatttccccagtaaaactggagtccctgatatcatatagaggatagattacatttttcttaaattgtctaaccttgcctgtaaatcactatctatcccgccatcatcattcccagtcgtttcaacttgaggtacctttgtctttgaagccggggcagcaacagctgatgatggtgcatttacaagctcttggttgatgtcaattccaatctcatcaaggacttggttaactagatcttcagtttcctcttcatcttcttctccttccaaagcatcatctattgcatctcccatcatctcagatgtcaattccatcttctcattctgtctctcaaattcttgcatgattttctgcaaagatggcaagttcatttgcctattcatttgccccat

SEQ ID NO: 221562 - DNA, 558 bp, Glycine max
ctcaacccttccttcgttccgcgacaacgatgaccaactacggcacaattccaacctcctcctcgccttcgaccaacctcgacttcatctcacgcgccaagcagcgcgtcaaggagggcctcggaacccgccgtccatggaagctcatgttcaatttccgatccttcggtctccccgccggggtcggagacgccgtcgcgcgtgtgagggagaacatctcctacttccagatgaactacgcgatcgtcgtgctcatcgtgctgttcctgagtcttctatggcatccaatctcgctgatcgtgttcgtcgtgctcatggcggcgtggctcttcctctacttcctccgcgacgaaccgctaatcatcttcggaagactaatcagcgaccgcgtcgtgcttatcgttatggcggtgctgaccgtcgtgctgctgcttctcaccggcgccatcggcaacatcctggtggcgctgctcatcggagcggtgttgatagtggcgcacgcggcgttgaggaaaaccgatgatttgttcttggacgaagaagaggccactggattct

SEQ ID NO: 221563 - DNA, 566 bp, Glycine max
gacaaaaaaaagatgataaaatctctgatataataactaaattaaattaacaaagcgtaagaaaatgaatttcacttcaccaagcatctctcttcacagacacgaaatgcaaatttcccctccgaaaaagggcaaaaacatataaaccgaaagaaaccaaactgaacctaaaattatttactaaattgaccaaataacaaattcatagaaagaaagagaagattgggatcaagagagaggagcaccgggaggagagaatccagtggcctcttcttcgtccaagaacaaatcatcggttttcctcaacgccgcgtgcgccactatcaacaccgctccgatgagcagcgccaccaggatgttgccgatggcgccggtgagaagcagcagcacgacggtcagcaccgccataacgataagcacgacgcggtcgctgattagtcttccaaaatgattaacggctcgtcccgggggaagtagaggaagagccacgccgccatgagcacgacgaacacgatcagcgagattggatgccatataagactcaggaacagcacgatgagcacgac

SEQ ID NO: 221564 - DNA, 528 bp, Glycine max
  unsure (1)..(528): unsure at all n locations
gcttcatgggcaacttatcttctgacaaaggaggttaagggtgtgggggctggcttgacagcagcagttcttctggctatggtcccttcgtatatatctcgatcagtggctggcagctacgacaacgaagctgttgctatatttgctttgatattcactttctacctctatattaagacgctcaatacagggtccctcttttatgccactttgaattccatagcatacttttacatggtttgctcatggggagggtacacttttatcattaatcttattccaatggcatgttctcttgtgcatagtaactggtcgctattcttctcgactgtacattgcatatgcacctcttgttgtattgggaacattattggctgccttggtgccagtggatgcgtttaatgctgtaatgacatcagagcattttgcatcatttctggttatcattatcatccatgtagtgcgtcttgtgcactatatcaaaggaattctttcaccaaaaatgtncaaagtagctgtggcactagt

SEQ ID NO: 221565 - DNA, 556 bp, Glycine max
  unsure (1)..(556): unsure at all n locations
aactaataatgccggcaaaatccttttcatggcaattgcattagttgtatacatgtatacatgaaacgcacactaagaaataaagtcatctatcaaaagaaatgaaaaactaaactaaaaggggttcctttttaatccttttcttttcgaggcagattttgagcttgctttaaattttgattttttaatctttcctcgaatcctgttctttggtggtttcaacttgtaaatccgaaccatccaatggtgagttgtgaacacctcttcaaaatgcgtaagtttgaaatgtttcttcccaatttctgtctgcctcactctgtcaaaagccttaccatctgtctccacaaatctgtaatatgaaagtttatacatgagggagtttagcattgttggtgtggccatggaatcaatccgatattgaccgtcccttaaataatctggttcctttatgtgagggaatacaccccctncaatacgaaccatncacaggaacttattgatatcatcactgggatagccaaccagtccttcaaagacaacangaacatatttgaca

SEQ ID NO: 221566 - DNA, 433 bp, Glycine max
  unsure (1)..(433): unsure at all n locations
attccaatatattccattctctctgtgtatttccctacctctcccttcaagatgcagatcttcgtcaagaccctcaccggcaagaccatcacccttgaggtggaaagctctgacaccatcgacaacgtcaaggccaagatccaggacaaggaaggaatccccccggaccagcaacgtctcattttcgccggaaagcaacttgaggacggccgtacccttgctgactacaacattcagaaggagagtactcttcacctcgtcctccgtctccgtggtggcatgcagatcttcgttaagacactcaccggcaagaccataaccctagaggttgaaagctccgacaccatcgataacgtcaaggcctaagatccaggacaaggagggtatccnnccggaccagcaacgtctcatcttcgccggaaagcagctcgag

SEQ ID NO: 221567 - DNA, 459 bp, Glycine max
aacaaacgtaggtgggatattagagtactattattaatgggacacaattgagttcaacacaaaccgaacttattttcaagggacattattacagacccattaaacatcaaagttcttcaaatgttttgggaacacatccaacattacacaacgagcttaaaaccccccacggagacggaggacaaggtgaagggttgattccttctggatgttgtagtcagcgagggtccttccatcctcgagctgcttgccagcaaaaatcagcctttgctggtccggtgggatgccttccttgtcctgaatcttggccttcacattgtcaatggtgtcagagctctccacctcgagggtaatagtcttacccgtaagagtcttcacgaaaatctgcataccaccacgaagacgcaacaccaagtggagagttgactccttctggatgttgtagtcagcaagggtgcg

SEQ ID NO: 221568 - DNA, 556 bp, Glycine max
ctagttcgcttgcagtcacacaagaggccaatcctattcatagctcgagatgggtgaagaagtgaaggtagttgttccagaatcagtgttgaagaagcgcaagagggaggaggaatgggcgttggccaagaagcaagaactcgatgctgccaagaagaagagagccgagagccgcaaactcatctacaacagagctaagcagtacgctaaggagtacgatcaccaggagaaggaattgattcggttgaaacgcgaggccaagctgaaaggtggtttctatgtggatccagaggctaagctgttgtttattattcgcattcgtggtattaatgccatggaccccaaatcaaggaagatcctgcagttgttgcgattgagacagattttaatggtgtatttctcaaagttaacaaagccacagtgaacatgctgcacagagttgagccgtatgtgacttatggatacccaaatcttaagagtgtgagagaacttatttacaagagagggtatggaaagctaatgaagcagaggactgctctaactgacaactctatca

SEQ ID NO: 221569 - DNA, 576 bp, Glycine max
attcataaactcatgcagataaatacatcaaggatgtgtccaaaagacaactatcctgattatgaatatcctaaagtaaacaatcaaattacaagataaataaaaaaaataaaattatgaaacaagcaacatacattgggaaggcagtgtccacaaattcaaacagcagggaatatgaacatcccacaatgcaatcgacgccatcccaaactaacacaactcattttcccccaccaaaagaaaaaatggctcaggaatcatatagcatctatggggtctactttccgactaccgaccgactcaaaatatgaggcccttaaacagactcaatccttttattatatttatgctgcattagaagaaatgtggatttgggtggtgggggggaagaaagcaaagaaacaaataaattgctgatgacagtaggcattggttgagcaggagaccaaggtatatgaactttgcttgcttaatcatcaattaccagcatttctgctgtaaaactggtcaagagtcttggctggtatacgatgaagaagttcacgagggaaaaatcctgagtaaagtccatgcaag

SEQ ID NO: 221570 - DNA, 586 bp, Glycine max
gccatacattcccaaagaagaacgtggcctctctgctaaaccccttatcgtctccaaaaatggcttcttctatcataggcgtttcctccatttaccaaacaccccctctcgaactataccagaggccaagcactgcttccacttcctccgttaggttgcaatctttagactccaagtctcacttcaacaacctcctccgagcccaccgccactccactggcccgggcctcaagcctacaccgtctttcgtcccctccgccgtcgccacccccaactcctccctcctcagcgaagaagccttcaaaggacttgcccgcgaattcgaccaaaacgacgaccaattcacccgcgcctcctccgccgccgaatccgttaaccccgacgaactcgacatttccaagctcgacttgccctcgcgtctcgttgagtctctccggagccgtgggattactcaacttttccccattcagagagcggtgttagtacctgcactagaaggtagagatatcattgcgcgagcgaagaccggtatccggaagacattagcgttcgggattcaattattaaaggcctcactgaagatgag

SEQ ID NO: 221571 - DNA, 424 bp, Glycine max
aaaacccattttgggagagtattatcggtttgatgagactccatttgtcaaggcaatgtggagagaggcaagagagtgtatttatgtggagccagatcaaagtaccgagagcaaaggtgtattttggtacaacaataagttgtgatgattaatgtagccgaggcttctttgaactttcccttgtgactgtttagtatcatggttgcttattgggaataattttgttgaaccctgatgttggtagtaagtatctagacagttgcatagcggttttgtttacagaataagatatagcctctctgaacagtttgattattgcaccatggtttgcaatcggtgcatgtcgaccaagtttctcaagactgtggagaagcttattcttgttccagttcttgaatccaagttgttaccgtattctgttatt

SEQ ID NO: 221572 - DNA, 593 bp, Glycine max
gctgctgttcctgcgcgtgaacaagcctcaggtaagccaaagccatggttaagcataacaatgttatccccaacggacacttccgtaagcactggcagaactatgtgaagacctggttcaatcagccagcacggaagacaagaagacggttggctcgtcagaagaaagctgtgaagattttccccagacctacagctggacctcttagacccattgtacatggtcaaactttgaaatacaacatgaaagtgagagctggaaggggattttcccttgaagaactcaaggcagcagggattcccaaaaagcttgcaccaacaattggtattgctgttgatcatcgccgcaagaaccgttctttggaaagtctgcaagctaatgtgcagaggctgaaaacatacaaggccaaattggttgtgttcccaagacgggcacagaaggttaaggctggtgattctactcccgaggagcttgcaaatgcaacgcaagtccagggttctttcttgcctattgtgagggagaagccaactgttgaactcgaaaggttacagatgacatgaagggctttaaagcttattacaagcttcgacttg

SEQ ID NO: 221573 - DNA, 508 bp, Glycine max
gctagttaaaccaacaaacttgaataaaagttcacaataaaaatgggtgaaaatatccatgttttagaccgaacatgttctgaatagagctaatcaatctcgtgcaaaaattgtcttgcaacaactattatatggatggactacaaacgagagacttctaaggtcatcactttttgtcttccttctcagcttcggcagccttcttcagtctggcaccataatggcgtttgtttgtgcgttcaagtcgaagcttgtaataagctttaaaagccttcatgtcatctgtaacctttacaagttcaacagttggcttctccctcacaataggcaagaaagaaccctggacttgcgttgcatttgcaagctcctcgggagtagaatcaccagccttaaccttctgtgcccgtcttgggaacacaaccaatttggccttgtatgttttcagcctctgcacattagcttgcagactttccaaagaacggttcttgcggcgatgatcaacagcaat

SEQ ID NO: 221574 - DNA, 502 bp, Glycine max
  unsure (1)..(502): unsure at all n locations
ctctgcacccaccattactcagcactgccattcttcaatcacactaatggctgtcaccttctcagatcttcacaccgaagagggcatcaaatccctcgatcaattcctttctgggaaaacctatatctctggggatcaattgacaaaggatgatatcaaagtgtatgcagctgttgtggaaaagccaggagactcttttcctaatgctgctaagtggtacgatgccgtctcttctcaacttgctccaagcttccctgggcacgctcaaggggtaagattcagtggcgctgctgctccagctgaagctgcacctgccaaagcggctgccactgctgaagaagatgatgatgatcttgatctgtggtgatatgangacagaaggaggatcagaaggcagcagaggaaagggaggctgctcaaaagcctgccaagaaacaagagagtggcaagtcttttgtccttctcgatgttaagccctgggacgatgagaccgacatgaaga

SEQ ID NO: 221575 - DNA, 576 bp, Glycine max
  unsure (1)..(576): unsure at all n locations
gacgacttttgggattattttgattttccatttacgaattgcgttagggtttcgtgattttgcacccttccaaacaatcgttgaggtgctattttgatcaaatttcctgcaaagttttcttctttttcgatttctgagttttgggtcgttgaattgagaatcaatttgggtgttcctttgaagaaggttgagtaagaaagagagaagggggaaaatatgatggctgcttcttcttcttcagctaccgtcgcagtggagaaggcgaccagcgaccttcttatgggccctgattggaccatgaacattgaaatttgtgattccatcaattctaatcattggcagccaaaagatgtggtaaaagctgtgaagaagagattacaacataggagctctagagttcaattactagctctcacgcttctggagacaatggttaagaactgtggtgattatgtgcactttcaaattgctgagaggaacatactggaggagatgatcnaaatcgtaaggaagaaggcagatatgcaagtganggataaaatgttaatattgcttgattcatggcaagaggcattt

SEQ ID NO: 221576 - DNA, 253 bp, Glycine max
aactgtctgtgaggatcataaacgcaaaagggaaacaaagataacagctgagaaacataaacaggaagatctgtacggcactggaagaagatgctttcaggccagcattgtattaatatgataggcaacagtatcgaatagaactgacagattccagagactctggatctgatggacctatgtgaacaagctggtacagcagcataagcatgaatcaaacaaagaatgaatgagataatcatagctggcttag

SEQ ID NO: 221577 - DNA, 457 bp, Glycine max
  unsure (1)..(457): unsure at all n locations
ctaattaattattagtttcacttcaatgactcaaagggatcgtcgcaccctatcattcccggcggttcacccatgcgaagccatttctccgccgacacttgtcacctctctaatcactctctcccaatccatatgcaatttccaaccccaatcattccccacccaacgaaggaacgccagggaaacaatacgccaaataagcattgtcttaatgttccttcaagaaattcgactaatccccaactccactatcctctctttggcggaactccacttcaccttacaaaaaatccactttttattgcaagattgcaccctccaaggctcgcgcctnctcctgctcgccaaatcgcaacacgttagcgtccctgttccccgccctccttcgctccgtggccacctctctggacgtcttgcctcttcaccagctccacttgtgccnccgagtcagggagct

SEQ ID NO: 221578 - DNA, 537 bp, Glycine max
  unsure (1)..(537): unsure at all n locations
gttccgccaagcgcagcattttcccaccgttcaggccaccggctgagttaggtttccggcgaggatgggtgctgctctgctgtcggagcttgcgacggagatagtcgtgccagtgtgcgccgtcatcgggatcgtgttctcgctggtgcagtggttcctcgtgtcgcgcgtcaagctcactcccgaccgcaacggaacgacgtcgtcgccgcgcaacaacaaaaacggctacggcgacttcctcattgaagaggaagaaggcatcaacgaccacagcgtcgttgtgaaatgcgctgagatacagaacgctatctccgaaggtgcaacatcctttcttttcactgaatatcaatatgtggggatcttcatggttgcttttgcaatactgatcttcctttttctgggctctgtggaaggcttcagtactaagagccagccctgcacatatgataagagcaagctatgcaagccagcccttgcgactgcattgnntagcactgnatctttcttgcttggtgctataacttcagtcctatc

SEQ ID NO: 221579 - DNA, 576 bp, Glycine max
  unsure (1)..(576): unsure at all n locations
agcaaatccacattcctctccatgtccggagagccaccacggccgttggagatccacctgagggtcaactccaagagaggcggcaccaccatggtgcaccccgtggccacggcggttccggttcagtaccccagagaggaggagggagtgaagcattacagaaaatggtttgcttggctgatacctctctttgtggttgccaacgtcgctatgtttgcgatcactatgtatgtcaataactgcccgcgtaactctgtctcctgcattgcctccttcttgggtcgcttctccttccagcccttcaaagaaaaccccctcttgggcccttcttcgttgacgctgcaaaagatgggggctcttgatgtgagcagagtggttcacaaacaccaagggtggcgcctcgttacctgtatgtggctacatgctggggttttccatctgttggcaatatgttgggtattctagtcattggaattcggcttgagcaagaatttgggtttgtgcttattggactgctatttttcatatctgggattggggggagtttgctttctgctctgnttatccagtcaaaca

SEQ ID NO: 221580 - DNA, 588 bp, Glycine max
ataaaacgaaaaacattcaaccttagcaaaaagatttatcaaagtcagaagaaatgtgctattctcaaaatttcagatacgaaaatagtctgatattgatctaaaaagccaacaagaaaagattgattcaactaatcaaatgattgaacagtgctacagctcaattcattctcctgattagctcattgatgtaattctcccggtttccagcatcacctccctcaacataatggtttctcttcttctttaagccacccaaaggagccttgagcttaaatggccaaaggaagttgttagcctccttaaagtgaggtccaacagtgatgatctcatggatcagatcttcagtggatatgattccatacttgcccagagcctgctcaatgatagagttgtcagttagagcagtcctctgcttcattagctttccataccctctcttgtaaataagttctctcacactcttgagatttgggtatccataagtcacatacggttcaactctgtgcagcatgttcactgtggctatgttaactttgagaaatacaccattgaaaatctgtctcaatcgcaacaactgcaggatct

SEQ ID NO: 221581 - DNA, 550 bp, Glycine max
  unsure (1)..(550): unsure at all n locations
cttcaacttggcctttcgggtgtaacaaatgaggcctcaagtgtgcttgactgctcaggttcaactgagactgatgtgaatatgtcatgtttctcaagccaaacttcttcagaaaattattattcaaggattcctgttgttgatgagggttctacctcagcaaagaaatcaggcggctatataccatcacttcttttagctccaagaatggataacactgaaagttcggtgcaaacacaagaattaattgttggaagtaaacctcaactgtgcccagaaccatccaatgctgtaaattactcccttggtactgtatctgggccccaggatacagggataactccagagaaccgaacatgcaatcctaagagatgtagattttttggctgtacgaaaggagctcgaggtgcttcggggctttgtatcgggcatggtggtggacagagatgtcagaaacctggatgcacanaggtgctgagagccgaactgcttattgtaaggcccatggtgganggaagaggtgccaacacttgngatgtactaaaagtgc

SEQ ID NO: 221582 - DNA, 513 bp, Glycine max
ctatatctcttcagctaacgtaggagcttgctcatcatgcacataaaaactagatatacatttacaataaaacataaagacacaagggagcatacaagattgacgagacaaaataaataaatatttttcttttaggaagacgctgacattcattagtaaagcagcccaacgaaatcccctgaattatggcgagcaaacttctttcaggctaatgggtattaattacatctgtcagaaacttgagaaataattctgagaatgttggactatgggcatttccgaagatggtcggcatgagttatcgtcgttgatcaaggtcacttgtggtcttgatgcccaaagagaactaagggcacgaagacgtccatagtactctgcaataacaataaagtatagcgctgctagacgaactgtgagtcatcgatataggtgatgaacagttggctgcctcaaattatcagactggcgaacaaaaccttaatagattggcaagcttgcacatggcaacgacca

SEQ ID NO: 221583 - DNA, 552 bp, Glycine max
  unsure (1)..(552): unsure at all n locations
cagacacagatggctcgtacgaagcaaaccgctcgtaagtccacaggaggaaaggctcctaggaagcagcttgcaaccaaggctgcacgtaagtctgcaccaactactggtggtgtgaagaagccccaccgttatcgtcctggtaccgttgctcttcgtgaaattaggaaataccagaagagtaccgagcttttgatccggaagctccccttccagaggctggttcgtgaaattgctcaggacttcaagactgatctgcgtttccagagccacgccgtgcttgcattgcaagaagctgctgaggcataccttgttgggctctttgaggacactaacctgtgtgccattcacgccaagcgtgtaaccattatgcccaaggatattcagctggcaagaaggattcgtggtgagcgtgcttgagttggtggttggaaagatgaagatgattggtggctgcggttggtgtttttgtttttcagattcctttttttattcaatagatggngttgttagggaaggtagttttctgctggtagtagcattaattgggat

SEQ ID NO: 221584 - DNA, 497 bp, Glycine max
  unsure (1)..(497): unsure at all n locations
atggaggtaatccataaataatgtacagtgaacaataaataagaaacccagtaaccaaactgggatggaaatcccgagtaagaacgaggcaacccaacaaactaacttaaacgagattagatggcaactgaatgttgtccaatacagtttctaaagtggctgcaacatcccgcaggtaaaaactaaaacagaagcattctaacacatacatatgtccaaaaatcaattacaagccaattttcttaaaggaagaaaacacagtcacggacactcggcagtatttgcctatatcccaattaatgctactaccagcagaaaacctacccttcctaacaaccccatctattgaataaacaaaggaatctgaaaaacanaaacaccaaccgtagccaccaatcatcttcatctttccaaccaccaactcaagcacgctcaccacgaatccttcttgccagctgaatatccttgggcataatggttacacgcttggcgtgaat

SEQ ID NO: 221585 - DNA, 586 bp, Glycine max
  unsure (1)..(586): unsure at all n locations
cagaagctgggggcatatggctatatggtaaacttggtacagaatcagagtggatctgcgcagaaagaaaaaacttgatatataagacaccagcagcttcctattgcatttgcatcctcaatctcaatccatttattttgtataaagtgaagcgaattggtggatctgaatcagcagcagagggagatggcgatggcgagagcaacttctggtctgcaatacccagagcggttctacgctgcggcgtcttatgtggggtttgatggatcctctccaaccaaaaccctcacctccaaattcgccaagtccaccgctcttcttctctacagcttataccaacaggctagtgtaggaccttgtaacatcccagaacccagtacatggaaacttgtggagcatagcaaatgggccagttggaaccagcttggaaacatgtcctccactgaagctatgcgtctttntgtaaaaatattggaggaagaagatcctggttggtattcaagagcatctaactctgttgtagaacctgtcatagatgtgcaaatgaataattccaaagttgaaccagtaattgagaatgggaact

SEQ ID NO: 221586 - DNA, 562 bp, Glycine max
  unsure (1)..(562): unsure at all n locations
atacaacaccacggatcctaaacatgggtttgattgtgtaaaatacattgttcagcaacatccacacggtgttgctgcttggaattgctactacaaggttatctcaagattggaaaaccgagatacaagacattacaaatttgtacgtggtatgcaaggaaagtttgtggattgtgtgcctcctatcctcatttctggacatcagtttaccatatgtagccatcatcaagacgcagcaaggaaataccttgaagcttataaactattgccagagaatcctttggttaatctttgtgttggaacagccttgatcaacttagcattgggtttcagacttcaaaataagcatcaatgtgttgtacaaggtttagcattcctctacaataatatgagaatctgcgagaacagccaggaatccttgtacaacatagctcgggcattccatcatgttggacttgtaactctggcggctttntattatgagaaagctattgctatttgtgagaaagactatccaattccaaacttcccaaatgaaatccgatagcatcgaaactcacaa

SEQ ID NO: 221587 - DNA, 614 bp, Glycine max
  unsure (1)..(614): unsure at all n locations
gagaaacttatcaaaatttaaatggaagcacatcgttcagttattttaatcccatatatctaattcaagaaaaccaccataacatggatacttgatatatctataatatctctttacttctcacaattcttgcaagaaaaccaccattgaaacagaccaaacatgaacgattaaaggaagagtaacagactgatcagccgcttgaaaatggccaaactcaaaagtcaacaagaaaacttagattttgttgaatgcaacaatgtcacagctctggatatactcgttgcatggctcaactgtcaagcgttcctcaacaagagtgtccactgatacaaggtcatcaacaatagtcatcatgatctgcaacttcttgataccatatcccacgggaactagtttggatgctccccacaataaaccaggcatctcaatactacggacagcctcttccagcttcttcatgtcggtctcatcgtcccaaggcttaacatcgagaaggacagaagacttgccactctctttnttcttggcaggctttttagcagcctccctttcctctgctgccttcttatcctcctctggctcatcaccaaagagtacaagatcatcatcat

SEQ ID NO: 221588 - DNA, 567 bp, Glycine max
ctcgagccgaatcggctcgagcggctcgagagaacatgcaagcttcaactggagcaagaattcaggtgattcctcttcatcttccaccaggtgacacatctactgaaagaacattaaaaattgaagggacccctgaacaaattgagtctgcaaaacaaatggttaaccaagtcataagtggcgagaatcgtcatagaaatccagcaatgtctggtggttattctcagcaaggttaccaagctcggccacccactagctggggtccccctgctgctcctatgcaacaatctggttatggctatgtgcagccaggagcatactctggtccaccccagtataacatgcctcagcaacaatatgcaggctatcctccccagtcatctggtggatattctgccaccaactgggatcagtccactgccccacagcagcagtcaacccatgcagggtatgattactatagtcaacagcagcagcaaaatcctgcaccttcatctgatgggactgcttacaattacagccagccaccttcctctggttataaccaaccgggacagggctatgctc

SEQ ID NO: 221589 - DNA, 448 bp, Glycine max
attggcattctgaagtcctaagtccatagaaatttttatacatgcacaaactcaaaggtaaacgaatcaacggtacagaagcaacttaaacattttggtatccttttgggtatggcactgccacatgcataagaaccaacattgacagcggcacgtatattaatttaattatgcaataactgacacataatccacggtaagtattaccctggtgcagttcgaaacaatccaacactgccaatctccatagagagttgcttatcttgcaccatttttaggaccacacattatcttggattaaccacttgtatatgtgtaagcatacatacagaaaatacatactacataaacagcatggttttagcagattcctgaacctatacggtgataattttaccagttccaaatgatttagttcacgacatctagatttatacaaactttggtt

SEQ ID NO: 221590 - DNA, 530 bp, Glycine max
gacgaagtggaggaccttgaaaaggctggcatcactgttatccaaattgatgaagctgctttgagagagggtctgccactgaggaaatcagaacaagctcactacttggactgggctgtccatgccttcagaatcaccaatgttggtgtgcaggataccactcagatccacacccacatgtgctactccaacttcaacgacatcatccactccatcatcgacatggacgctgatgttatcaccattgagaactctcgctccgatgagaagctcctgtcagtcttccgtgaaggtgtgaagtatggtgctggaattggccctggtgtctatgacatccactccccaagaataccaccaactgaagaaatcgctgacagaatcaataagatgcttgcagtgctcgagaagaacatcttgtgggtcaaccctgactgtggtctcaagacccgcaagtacactgaagtgaagccagccctcacaacatggttgccgcagcaaaactcatccgtaacgaacttgccaagtgaatg

SEQ ID NO: 221591 - DNA, 407 bp, Glycine max
tcctttttttttttttttttttttttttttttttttttttttgaagagcaagtcctgatagattagaagagctacccctaaaggtggagagggtatattggtacaaagaaaaatgcctgctgcaggctccgagaaaaataggataaattgatagaaaactttaccctcaattcaaaagattttgaaaagcaggccaccgtgagtggcgaaaaatggtgcgaatactagcgactcaacggccatgagcttgatgaggatgttgagtgaaggacctgaagtatttttaaaagggtctccaatggtatctccaataacagctgccttatgtggttcaaatcctttggggcccagggtccttgcatgcttacatgcatcagcctttatgaacttcttaatactattctaag

SEQ ID NO: 221592 - DNA, 572 bp, Glycine max
  unsure (1)..(572): unsure at all n locations
gcatttgcagagagagagagagagagagagggaagacggttgtggggattcgatgggggccaccgttcactcgccgctagtcacttatgcttccgtcatatctctgcttacactctgtcctccgtttgtcatacttctatggtacaccatgactcttgctgacggatctgtttccgagacattccattatttaaggcagaatgggttgcagggtttgctacatatatggcccacccccactcccaccgcctgcaaaatcattgcagtctatgctgcatttgaggcagcacttcagcttcttcttcccgggaaaaccgtttacggccctatttctccaaccggccaccgacctgtctacaaggcaaatggtctgcaagcctattttgtcaccttgattacttattttgctctctggtggtttgggatattcaaccctacgattgtttatcatcatttgggagaaatttattcagctctcatcttcggcagctntctcttctggtgtttcttgtacatcaagggtcatttggcaccgtcttctacagattctggctcatctggaaacttaatca

SEQ ID NO: 221593 - DNA, 580 bp, Glycine max
gtggctgctaaatctgatgtcttccaccttatcaatggcatgtggacttcccaagctgaacgttgtttcctctggattggtggttttagaccctctgatctcatcatgatgctgattcagcagttggagccactagctgagcaacagataatggggatgtatggcctgaagcatttctcacagcacgcacatgaagcactctctcagggacttgagcaattgcagcagtcacttgtggacaccataactggaggcccattggttgatggtgttcaacaaatggtcgatgacatgagcaagcttgccaatcttggaggttttgctcgacaagctgataatttgaggcactgtactcttcatcagctgtgtcgattactcacaggtcgtcaagcagcacgatgctttattgggattgcagagtactatggacgtcttcgtgcccttagttctctttgggcatcaagaccactagagaccttgatcaacgacgataactcatgccaaacaactacagtaatgcaaattgtgcatcattctcagaattatggctcaagtgtctgagagatgtaattgaaaccca

SEQ ID NO: 221594 - DNA, 401 bp, Glycine max
gagactgaaaataaccatattacattattattattattattgtaacaatcggaaaacgagggaaaggaatagaaaacaatgaacaacccttggcagttggttgcaccaaccaaagtagccacaaatcgaaatcctagaaaaatcaaaaggtaaaaaataaaaaggaccaaaccctacttagaaaagcataactgttccttggtccttgttccttgatccttgttccatccaaagggagacaacatgcaagttttgctcatggcttccacagaatggttgtgtctgcaatcatggaagtaaccacatatgggtccatgttagaagctggccttctgtcctcaaaatatcccttccctgctttctctgtgtcccttccaaccctaactgaagcttcacggttt

SEQ ID NO: 221595 - DNA, 460 bp, Glycine max
ggaatggaaaggaagaggtgggggtagtaatgatggatttcttacgttgttaggtgcacgggaaatgtcaactatgggtaaagggccttttgagttagggttaacgtgaaaaaggatggtagccattaccgctgcatatggggcaaggttacgaggcctcacggcaacagtggtgttgtccgtgcaaaattcaagtcaaaccttccacccagatcgatgggagctcgagtaacagtattcatgtatccaagtaatatatgagattcacgtgataagacgctcagaattcgcagcttaatagtacgcacaaggatttttgtttcagctttgataattgaggtgtctgtcaactatttgagaattgtccttactgtttacacgttcatttgaacgaatgtttttctgcgttattatagctattgtctatgcagattatatattcattactatgaagcgtgtg

SEQ ID NO: 221596 - DNA, 468 bp, Glycine max
aaccaaatccacacgctgcatagtaatgaatgtataatcttgatagacaatagctataataacggagaaaaacattcgttcaaatgaacgtataaaccgtaaggaaaattctcaaaaagttgacagacaacaaaattatcaaagctgaaacaaaaatcctagtgcctactattaagctgcgaattctgagcgtattatcacctgaatctcagatattacttggatacatgaatactcttactcgagctcccatcgatctgggtggaaggtttgacttgaatttagcacggacaacaccactgttgtcgagaggcctcgaaaccttgccccatatgcagcggtaatggcttccaacctttatgaccttaaccctaactcacaaggccctatacccatagaatacatttcccgtgcacctaacaacgtaggatatccatgataactacccccacctcttcctatgattcc

SEQ ID NO: 221597 - DNA, 551 bp, Glycine max
  unsure (1)..(551): unsure at all n locations
gtgacttgcagcaattcccaatggcttccgtttccaagctctcaacgccaaatccagttgcttccttatcagaagcgcttcgcccccgagattctcgcttcctcaccttcaaaccttcttccatcgcttttaatcacaaaactaacctatccgcttccctccgatccattcactcgctccctcttaaaacctcctttatgagaaagaagggcagagtccatggtatgataatctctgcagacctgttacagacctgcttcctcttatagcaagtggtgtcagaggcgtcactagcaaccctgcgatctttcagaaagctatctcatcatcgaatgcttacaatgatcagttcagggaacttgtgcaaacagggaaagacattgaaagtgcatattgggaacttgtagtgaaggatatccaagatgcttgcagactatttgaaccaatctatgatcaaacagatggtggtgatgggaatgtttctggtgaagtatctnctaggctcgctgatgacactgagggaaccatagaagctgcaaaatggcttcata

SEQ ID NO: 221598 - DNA, 592 bp, Glycine max
gaaacataattgacatcaacacgaataaaaccgcacaaccattgaatagtgggaaagtaacaaaacgctttacttgaagcggacaatttcccatttatattgtatcactatcgtctaaataaatgactccataaagcacatttacagcagcacaaaatgcacagccactgccttttattaatccataaatcacttcatacatagcactgcattactaactatgacgttcacacttcaatggctgaccaacttaagagagtttgccttctcttgcagagaatccaggaggctgtcaaagctcttcttaaacgagtccactccttcaagttcaagctgggaaccaacaaagctccagtcaatacccaatttctggagagcattgtatattccttcagcttcagatgcatttgagtctattgtcctggatacggtaccatgatcgataaatgcttgaagggcttggtctggcattgttgatacagtgtcgggtccaataagaggagcaacatataaggtgtcagaataggcaggattctttacactggttgaggcccagaggagcctttgcttcttggcccccttttaactagag

SEQ ID NO: 221599 - DNA, 439 bp, Glycine max
aatcaagttgataatcaattgttaaaggtctttgcagtatacaaagtgaagatttcatcttaaaatgttatgtacattagagtatcataaagaaagctaggccaataaattcaagttgttaaagcagacgtggataaatcaaagactgaaaccaacacaactagtaatcaacatttggagttcattttgtcgttttggatggggttgtccgactccaaaaatttgccccagatggggtgtttctgccaaaccatactcatttcctcaagtgggatgccctttgtctcaggcaataacttgtagatgaataaggtcatgatcaccacaaagcacccaaagaagatgaacaaaccaaacttcatgtgacagagcattgatgtgaagaattgagctatgaagaaagtgctgatcatgttgacaccaactgtgatactctgag

SEQ ID NO: 221600 - DNA, 610 bp, Glycine max
tgatagtcaggtcggttagtacttcatcgttatgtcgcgtgcctcagccctgaactcggctcgaggctcgagactctgatacttatctctcaacatttacctgaatactctcactctctcgatgaagagggtgtgtgcaaacatgcctttgagttgatttttgcatttgatgaagtcatctctcttggtcacaaggaaaatgtgactgttgctcaagtgaagcaatactgtgagatggagagtcatgaagagaagctgcacaagttggtttcgcagagcaagattaatgaaactaaggatgttatgaagcgaaaagctagtgagattgataaaagcaagattgaaaagaacagaggtgataaaggaggatttggtccattacagtcaatgggctctggaagaattgaaaatagctttagtgatttgagcatatctagcagtggaactggttttggaagtggctctggttttggattgacttctgatgtcgattcctttgcaaccaagcctaaaggtcgtgcaacttcatcagccactgctccacctaaaggtcttggaatgaagcttggtaagtctcaaaggacataccagtttttgaaatcattggaag

SEQ ID NO: 221601 - DNA, 542 bp, Glycine max
aataataataataataataataataataataataataataataataatacatagttatgaaatttgggtcaataaattatgaccattagccatgagctcattgatgaggttgttgtagtagtttactccttcatggtttacacctgcactaagttttcctttcggtagtaccctagaccatgaaatggaaaatctataagcatccaaattcatatacttcatgattccaatatcctccttataccgatgatatgagtcgtctgctacatctccattacttacattttttattttttctgcatgccataagtggaaattatacattaaaacgggcaatttacagtcaaaccctgttgatgatgaatctttcgatgctttcgttgaccagtagcatatgcattgattgttctgtgaaacaaatggacataactcccatctttcttagcacctggaagattttccggatgtgtgtagcaaattccttggtctccttccagtgttgggatgaactcattgataaacatgtagctgaagatgagtag

SEQ ID NO: 221602 - DNA, 470 bp, Glycine max
gcgattgcgactctcttcctacgataaccgtttcctctcgccggaaaaccgacattgatctctctctccggcgatccccgcccatccctccgccatgagttccggcgagctcctccacatacagccccaggagctgcagtttccctttgaattgaggaagcagatctcgtgctctttgcagttgtctaacaagactgacaactatgtggctttcaaggtcaagacaacaaatcctaagaaatattgtgttagacctaacactggagttgtgatgcctaggtctacttgtgatgtcatagtgacaatgcaagcccaaaaggaggcacctcctgacatgcaatgcaaggataagtttctccttcaaagtgtagttgctagccctggggcaaccacaaaagatatcactccagaaatgttcaataaagaatctggtcatgatgttgaagagtgcaagttgagagttgtttatg

SEQ ID NO: 221603 - DNA, 524 bp, Glycine max
ggcgttctatatattattgaattgacaatgaggcctgctcttgctttgcttcctcttctatttgctttcttgttagctgccactacagaatcaagaaaagatacaggggaatattggaaaatgatcatgaaagatcaggaaatgccagaaggacttcaaggtcttgtttcatttcaatctgaaaataaccctaagactcaagagcagcttggtaaaggttccaaaaaccattgtgaagagtctctagttacaaatacacaagttaatagtgacttcgaacccataccaagtgttaccaaatatgatgatttggaattcaagtcaagcattatcaagaacgatgattttgaatcgagaccaagtgttaccaagcatgatgattttgaactcaagtcaagcgttaccaagaacaatgattttgaaccgagaccaagtgttacaaagtatgataactttgaacccagaccaaagtgtaccaaatatgatgatttttgactcagggtcaagcgtaccgagaatgatga

SEQ ID NO: 221604 - DNA, 590 bp, Glycine max
  unsure (1)..(590): unsure at all n locations
tgtgatttcagcttgtatgtcacaattggttagacgaagactgtgtaaagtttttaaggaattgccacaaagctttgccacaacatgggaaggtgattgttatagactatataattccagaagttccggattcaagcaaaatttctatgcaaacttgtgttgctgatagtctcatgtttttagtgacaagtggaaaggaaagaactgagaaagaatttgagagcttgtgcaggaattctggattttctagatttcatgttgcatgtagagattcaccgtcggttctttcagtgatagaattttataaataaaattaggatcaatcccataataaataaggtctaaaataaaatttgataaagttatatgttggccttttttacctacatatgtggtcatattatttttgttgatgatagacttaaaatttaagctttaattactttattcttcgttgagaataaaatttatgttatagcttagaattgggacgtgttagcaattttcatattgttgaaggaacaataactaccgaatcataaaaggaaataatgtctaatctatgaagaatctatnntatagatgatgat

SEQ ID NO: 221605 - DNA, 527 bp, Glycine max
aataaaagagatgctgtttttaatataagaaccagaatttgcactaaaatccaacaaacaaaatttccacattgtctgcataattatgatgacaaccttaacccgcaaaacaaaaaaaccaaagataaggatatttagttctgatgagcataaaaaacaaaattctaatacgaaaaaataaatcatgaagtttactgtgaaacacccaaccacttagaaaagttgtcgaattctgtataatcagaatctgacaccatagtgtgataccatgctttcccagcagccttgatggcagacgcttcctccttagagacagtcttcctcttcttgtcgagcttctccttcttgaccttaacccgctgtgcctcagcgagaagggccatcctcttagcagtcttggcataaggattcagcttcagcatcgagttgagattcttaagagggttcttcttgagagtggccctcttcacatccttcttaatgggcctcacaacagattgcaccttatcagaattaataatcctgga

SEQ ID NO: 221606 - DNA, 551 bp, Glycine max
  unsure (1)..(551): unsure at all n locations
aattaactcacatcaaagcattaacggtaacccaaaaaccaaactcaaaaccaaggcaacaacaccaccaccgtacctcccgccgttacgtctaacggcgtcgttactatcatcggcggtcacatcggcagcgtcatcgggagaatcagcaggagcatcagaatcatccgccggcgcatcagccgccttcttcttcttcttccccttcttcgccggcgcaggagcgtcggcggcagaaggctccggcgccggcgccggagcctccgcctcacccttaaataactccttaggctgaagcaccttattaatagcaaaaatcgcaagcggctgttcatcaatcaaagtgtcggtgatcttggcagttgtaagcttcgtcttcagagtaacatcttcaccgtcgttttgaacggtgaagtcaaacttgttggcgccatcagtggcgagagtgttctgaagtccgttattggatttgagagtagctntggactgggtaaaccggacagcgtggaattcaagaagcgcggncttaccagattttgtaggttttttga

SEQ ID NO: 221607 - DNA, 541 bp, Glycine max
  unsure (1)..(541): unsure at all n locations
aaaacagcatacttccttaaagcagaaaaattatggaagcccaaagagatgagcgtgtctcaaaactacttggagctcaaacccatgtttggaatcacattttcagcttcataaattccatgtccctcaaatgtgcaattgagttggacatacctgatatcatacacaagtatggtcaacccatgccactctcaaaactcactacttcactatcaatccacccttccaaagccaattgcatatatcgcttgatgcgaattttgacccattctggcttcttctctcaacacaaggtcaacgagaatgagctagaaatgggttacgtgttgaccgatgcatctactctactacttaaagacaaccccttaagtatggtacctttcttgcatgcaatgcttgatccaactttgacacagccatggcttcaattgccaacatggttcanaaatgatgatccctcgccatttcaaacagcacatgggatgaaaatttgggattatgctgaccgcgagccaaggcttaatgacctttntaatgatgc

SEQ ID NO: 221608 - DNA, 354 bp, Glycine max
aggcttaaaatagattgttcagcttcctaattcttccaaatactgatacaaattaaaagcattcagaactttttgataacgcaacaaaattatgaagtaaagggtaaaacccaaatcccaaacataaaacggttatgttgattcggtttataacatagaaacggcactagttctaaatatcattcccaaaaaaacatacaaatagaacataaacccccaattaagtagtgagttccatgatggctccaacaatgtccccgttgtgagtcttgagagccttgacggccttgcttcttgacactcctgcctgcgtcatcaccaaatcaatgtcatggggctccacaccagtttcat

SEQ ID NO: 221609 - DNA, 594 bp, Glycine max
aatcccaatacactcccaactcacaaagccatgtctccaggtcctgttgtcgacgcttcccctgaggttgaagcagagcaacaacttccctccgtcgatgacgcaacccagttgaagaaatcccaaccgcaggaggatgatgctcccgttgtcgaggacgtgagggatgatgacaaggacgacgacgatgaggacgacgacgacgatgatgaagatgacaaggaagacgatgctctaggtggtgctgagggttcaaagcagagcagaagtgagaagaagagtcgaaaagcaatgttgaagctgggactaaaacctgtcaccggtgttagtagggtcacaatcaagagaacaaaaaatattcttttcttcatctccaaacctgatgtcttcaagagtccaaattctgagacctatgtcatatttggtgaggcgaaaatagaggacttgagctctcagttgcagacacaggctgctcaacagttcaggatgccagatatgggatctgtaacggcaaaacaagaagatgctgcagctgcagcagtgcaacctgaagaagaggagagggtgatgaaactggtgtggaccccatgacat

SEQ ID NO: 221610 - DNA, 433 bp, Glycine max
ttttattatcaacgtcaaagacccacaggctgacctacttgacccagcagtgaagggaactcttaacgttcttaaatcatgtgtaaaatcgccatctgtgaaacgagtcatcttaacatcttctgtggctgcagttgcatataataaaaggcctaaaagtcctgaagttgtagttgatgaaacctggtggtctgatccagattactgtagggaattaaagctgtggtatttactttcaaagactttggctgaagatgctgcctggaaatttgccaaagaaaacgaccttgacttggttgttgttaacccagcaatggttgtagggcctcttttgcaagcagagcttaacactagtgctgctattattttaacctaataaatgttcagaaactttttaaatgatacatatggatggatcaatgtgaaagatgtt

SEQ ID NO: 221611 - DNA, 487 bp, Glycine max
cggctcgagcagattcagcaattttctattttcttctctcatggcttcagattccaaaaaggatttccctgctgatgacaaagctggaacagcagagaataaagcatccaaagatgaaacgtcatctaaagattctccagcagcacaaagagctactacagctacttctggacctgcaactggttttccaggcaacccttttgatttctctgcaatgtctggcctgctcaatgatccaagtatcaaggaattggctgaacagatagcaaaagatccatcattcaaccagatggctgagcagcttcagaaaacttttcaaggagctccacaggatgctatgcctagctttgataatcaacaatatttttcaaccatgcaacaggttatgcagaatcctaattttatgaccatggctgagcgcctgggtaatgcattgatgcaggatccatctatgtctgccatgctttgaaagtttttctaatccatc

SEQ ID NO: 221612 - DNA, 470 bp, Glycine max
gatggagctcctcaagttgtgatgaatcataatggtaaccacggcaaattctcacacctacttgcttcccaagatcgtgactatcttctctctccaactggggctcaggtgaaagtttctgatcttgaagggaaagtagtgggtctattattcgctgcgaattggtacccaccttgccgtggattcacccaagtcctagctggaatctacgaggagctaaaaagcagagtccctcaatttgagattgtgtatgtgtcctcagatgaggacttgaatgcctttaatagcttctatggaagcatgccctggattgcaattccgttctctgatttggaaacaaagaagtctttgaccagaaagtttgacgtggaagccgttccatgcttaattttgttgcaacctgacgatcgtaaagagcacgcaacagttcgtgatggggttgaacttatttaccgtatggaatccaagct

SEQ ID NO: 221613 - DNA, 552 bp, Glycine max
  unsure (1)..(552): unsure at all n locations
aacaaaacnttccttataaattaaatgcaaatttaagacatccctcctcagcagcaaaggaaatggactaaaaccctatggctgcttgtgaatttgaaaatctcagacttttaccatcaaaacaaaaaacagtactcatcaaaaacaaacagcaacgaaaatgttaccgccgatcaagaacccagttttgaaggctacggctacatgaaatcggcggacacttcaaaatataactggtaaaacaaacacctaagactctgcaaagataaactactgtaaaggaacaagtttttttgaaaccacgttgatgatcacatgtgctagcaaaattgccaaaatgcaatcacttcttcttggcggcagcctttgtgaccttggctccggtggggtctttcttctcaacactcttgatgactccaacagctacggtctgacgcatgtccctcacagcaaaacgaccaaggggaggatactcagagaaagtttcaaccaccatgggcttggttggaaccatcttaaccataccagcatcaccattcttcaaaaatttgg

SEQ ID NO: 221614 - DNA, 505 bp, Glycine max
gtcggaatgggaagggtgattcgcgcacagcgtaagggtgcggggtcggtgttcaagtcccacacccaccaccgcaagggtccggcgaggttccgcagcctcgacttcggcgagcgcaacggctacctcaaaggggtcgtcaccgatatcatccacgaccctggtcgcggtgctcctctagccaaggtggcgttccgccaccccttccgctacaagaagcagatggagctcttcgtcgccgccgagggcctctacaccggccagttcatctactgcggcaagaaggccaccctcgtcgtcggcaacgtcttgcccctccgatccatccccgaaggtgccgttatctgcaacgtcgagcaccacgttggcgaccgcggcgtcttcgccagagcctgcggtgactatgccattgttatcagccacaaccctgataacgacacctctaggatcaagcttccttctgggtcaaagaagattgtgcctagtgggtgcagggcgatgattg

SEQ ID NO: 221615 - DNA, 377 bp, Glycine max
aatcaaaaccgtcccacacttccattaagttgtcttcaccctgtcagaattacaatattgtcccagagagaaggggagatatatatattattcaacaaggataagaacaacacaaccattcctcttattatgcaaacaagtaaacaaggggctaatttgcatttaaaaatctgaatctaaatttaacagaggtggtatcatctccaagtcattgtaaaattcttggacaaaaatgataacaagaagaaagttgcaaccgtctctttagatgtgaatgggcttgtcataagtggccattgcggcttctttcacagcctcgctcattgttggatgtgcatggcacacacgtgcaatgtcctcacttgatgcataatact

SEQ ID NO: 221616 - DNA, 469 bp, Glycine max
aacgaatcgaaaaaagaaagatcatggcgatggcaaacttggctcgacggaagggttacgccgtcgttttgtcgtcgaggtcgtcgctttgtctgacaaggtggagggggttcgcgtccggatctgacgaaaacgacgtcgtggtcatcggcggcggtcccggcggctacgtggcggccattaaagcggcgcagctgggtctgaaaaccacttgcatcgaaaaacgtggcactctcggcggtacctgcctcaacgtcggatgcatcccttccaaggcacttttgcattcttcccacatgtatcatgaggctaaacatgcatttgccaaccatggggtcaagttttcatctgtcgaggttgatttgccagccatgatggcccaaaaagataaagcaagttctaatcttaccaagggtattgaaggtctattcaagaaaaacaaggtaaactatgtcaaaggttatggcaa

SEQ ID NO: 221617 - DNA, 312 bp, Glycine max
gggggaaaaaaacattttgaattttattgggtaaaaaacaaaaactcaaccaccgagtaactttccaagccgacacacattttgtttatttaaggattaggtaaaataggggaagggggggttttttccatggggggggggaagttcgtaaaaggggggggaaggggccaaatgatcctatgatgcgggggaacaaggtaatcccatcaccaacgggaagctggcaaatttcgacccttgaattaagcgcaagagctttggtgagctccataacaaaaccgcgattattcttaacataatccatgaaaggag

SEQ ID NO: 221618 - DNA, 470 bp, Glycine max
gaattccaactgataaaaagaatattcagagaattccaaagacagagatgactgtcattaaggaagagcaacaaccaaaccaaatagctggccacaaagaacttggtcacaaaagtctccttcagagcgatgcactctatcagtatatacttgaaaccagtgtgtacccaagagagcatgagagcttgaaggagctacgagagttgacggaaaaacacccttggaacctgatggctacaccacctgacgaaggacaacttctaggcatgctccttaagcttatcaatgccaagaacaccatggaaataggcgtcttcactggttactccttgctttccactgcccttgccctcccttctgacggaaagatcttagctatggatgttaaccgggaatattatgaattggggttgcccgtgattgaaaaggctggagtggctcacaagattgacttcagagaaggacccgct

SEQ ID NO: 221619 - DNA, 512 bp, Glycine max
ttaaagacttgcttccaagatggttctgctagagaagctctgggatgacgttgttgctggccctcaacctgagcgtggccttggcaagctcagaaaactcaccaccctcaaaactattgatgaaggagacagtagcaagctgcagaagacgttgtcgatgccgtcgacaccgacaaccccgatgactcccacgactccaacgacaccgggatccgcgcgtaaagctgacaacgtttggaggagcgtcttccatcctgggagcaactccgccacaaagaccatcggtgctcagatgtttgacaaaccacttcccaacactcccactgtctacgactggctgtacagtggggagaccagaagcaggcaccgctgaaaggataagctaagaaaaccgtgggttgcatgtaaatattgtcgtttttcgttaagcacctgccacgtttgaatctactactaccattatgcgtcggaaattaattgctctgttgctgactcaaatatatattactagc

SEQ ID NO: 221620 - DNA, 489 bp, Glycine max
  unsure (1)..(489): unsure at all n locations
atgttgaacaaaatttaatatttattctgtaacttgtacactttcaagatgaaaatatttcgtctggccagacaaaagaagcaaattgtatatgatacacttcactggcaaatgccaacagagaaacagttctagaagcaatttaattattaattgtttgaagtggctataaatctagttgatggcagaacatatcttgcgaatttcaccatcggtaccggttttcaactcaatgttgcccattttcaccatagacttcccaaattccacgttgaatgttaatccaagtaaccctcttattaagcccaagtacctctgaacagttgtctttgtggaagcatcactccatagtgcttgatcagattgcagaattccacgagaattcctcaaattactatagtaagataaatcaaatttggtttgactacccgtatctagcgctactcgttttgaaccgtcaccgttttgagggcatagtgatngtagttg

SEQ ID NO: 221621 - DNA, 489 bp, Glycine max
caactacaatcactatgccctcaaaacggtgacggttcaaaacgagtagcgctagatacgggtagtcaaaccaaatttgatttatcttactatagtaatttgaggaattctcgtggaattctgcaatctgatcaagcactatggagtgatgcttccacaaagacaactgttcagaggtacttgggcttaataagagggttacttggattaacattcaacgtggaatttgggaagtctatggtgaaaatgggcaacattgagttgaaaaccggtaccgatggtgaaattcgcaagatatgttctgccatcaactagatttatagccacttcaaacaattaataattaaattgcttctagaactgtttctctgttggcatttgccagtgaagtgtatcatatacaatttgcttcttttgtctggccagacgaaatattttcatcttgaaagtgtacaagttacagaataaatattaaattttgttcaacat

SEQ ID NO: 221622 - DNA, 352 bp, Glycine max
ctcgagaaaaaaatggcgaacgcagcatctggtatggccgtccatgatgagtgcaagctaaagtttctggagctcaaggcgaagaggacgtaccggtatatcgtttttaagattgaggagaaatcgaagcaagttattgtggagaagctgggtgaccctgcaaatggctatgatgaattcgctgccagtcttcctgctgatgagtgtcgatatgctgtttatgattttgattttgtcactgaagagaattgccaaaagagcagaattttcttcattgcttggtcccctgatacatctagggttaggagcaagatgatttatgcccgctccaaagatatattcaagagggagc

SEQ ID NO: 221623 - DNA, 214 bp, Glycine max
gacaggttcaaaccggagcaaaaaaacttgttacgatggtttcttccgacaaggatccacgagaggaagtccttcaagcatggtacatggatgatagtgatgaagatcaaagactcccccaccacaaagaacccaaggagtttgtctcgttggaccaacttgctgaacttggagtccttagctggaaataaaagcttgttaccatgaaaatgat

SEQ ID NO: 221624 - DNA, 515 bp, Glycine max
agagagaaaccaatttatatttgatttcgatttcttggaacgctggtatgcgttgccatgctttacaatatctcaacatttctcacacccttagactaaagaagaagaagaaaaaaaaaaccaactttactcattgcctcgcttctttctattcagagtcggagtccatgttgcccattgctttcaaccctcttggtctttttttttctcctacctttttggatatcttcttctcccttacttcatatcgttccagagtaagatcgcacagccatgtacctggactaacgagattgagggttcgttgtatgaatttggctctcttcttgggtctctggggaagctttgaacccttcaagagcagaaaatcttcttccttctccttgtttgtcaaggcaatcacgaactttggcggccacaccggcggagccgcgtcaccactgccggacggcgacccaccaccgcccttcttgctatcgtgcgcggtgtctgatgagaccacagacttgttatta

SEQ ID NO: 221625 - DNA, 521 bp, Glycine max
gttttgcgtttcgttgcgatgttggaaatcaaaaccgccaagacccgcaagggcaagcgggagctcgagaagcgcgcccccaagctcgtggaatcggggaagaagacgctgatcctgcacggaacgaagaccagcggcgtgctgaacgccgtgctcgcgcagatttatcatttgaagaaggacagcgccgtcaagtacagccgcaagaacgagaacgtcaagcctttcgaggccggcggcgagacttcgctcgagtttttctctctcaaaaccgattgcagcgtatttgtgtatggatctcactcgaagaagcggcctgataaccttgttatagggagaacttatgatcatcatatctttgatttagtggaggttggagttgaaaattttaaacccatggagtcttttagttataataagaagttggctcctaaggaagggtcaaagccttttattgtttttattggagaaggatttgaggctgtggaagagctaaagcattgaggaagtttgctcgatct

SEQ ID NO: 221626 - DNA, 512 bp, Glycine max
cgggaagactgagtagaaaccctagagtgagaaagaaagagagagagagagagcgatgaggagaactctggtgagaaatggcagtctctacactcgcaaccttcttcatcactccgccctcgcacttgccgcttcatctcgtcctcaattcagactcttttcctccaatgaaaaccccccaccggttccccaaatcgacgacgtgaacaacaaagagctgaaagcgcagatcgagacctacttcaagggcgacgagaaggtgctcccgtcgatcatggaggcgattctgaagcggaagctgtcggggaatcacgaggacaccgacgacgagctcatggaggagctccgcatgcgttccctcgacgacgtcgacgaccgggactttgagtccgacttcgagtccattcacgacaccgacgaggagatcgacgatttgtacaacgccagggacgtggtgatgaagaggatggtgaaggatgagtacttcaacatggatgataaaaagtgggatg

SEQ ID NO: 221627 - DNA, 469 bp, Glycine max
catataacaccaaaagtattcatttataagcagagattgatgattcaaattacatatttataaaagaccaacaaaacacatagcaaacactttattctaaagctccaaacgcaacttctacttcttattatttgttgatacatatattacagctatctctgcttcaaggttatacatcttgaccttacttgcagttgcatgggtcacaggtgcagcttgatccacagttgcagccaccgttctcagatgcaacacccatttcagcaccctccaattgggccttcacaggcccaacacccaaaactagagtctctgtggttgtcttctcaacgtaactcaagtcaaaagagtacttgttgcaaccgcagttgctgccacagttgcagctgcttccacacccacagctagacattctcaaaatcttagaatagaatcccacaataaattactgaagaactcaagatgatgg

SEQ ID NO: 221628 - DNA, 400 bp, Glycine max
  unsure (1)..(400): unsure at all n locations
caatcatctttagttcttcagtaatttattgtgggattctattctaagattttgagaatgtctagctgtgggtgtggaagcagctgcaactgtggcagcaactgcggttgcaacaagtactcttttgacttgagttacgttgagaagacaaccacagagactctagttttgggtgttgggcctgtgaaggcccaattggagggtgctgaaatgggtgttgcatctgagaacggcggctgcaactgtggatcaagctgcacctgtgacccatgcaactgcaagtaaggtcaagatgtataaccttgaaccagagatagctgtaatatatgtatcaacaaataatcagacgtngaagttgcgtttggagctttataataaagcgttcgctatgtgttttggt

SEQ ID NO: 221629 - DNA, 598 bp, Glycine max
gctaaagaattgatcacatgtaccacagcagataacaatacacttcccatgatacaaatttgtccacttgtctatgattgctatggctgatacaagtacctattttttgaccacacattccaaatttgtaggagcaatacatgacaataagacaacaaattggtttttccacatcatcgcacatatttcttgttgctttctacaattgatctcattttggagaacttggccatcactcaggtcacgtcctcttcaacaggaaacccaagatgagtccaatgatgccaacaagaactacgtaaatgaatggtacaccgccgcggcttctgccggcatcacgcctcaaaagctccagttcttgctgaagtcttctgttttgctcaacaatagaattcctctcctcagttaccttggaaataagagctcttgcctcaaaggaagcatcctgatgttcaccccgctcattgaaagcttttgaagcccctgtgaattccgcagcacttgaatgcccattctcagatacagatgcacgaggggatgaatcttcatcagatccttctcgaactggggatggtggtgaggaggagcacataaacac

SEQ ID NO: 221630 - DNA, 366 bp, Glycine max
gatcatcaaccatccaaggatttaagacgaaaggaacaagtacaaccctcgaaagtgaattaggaagaaaacacaaggaaggaaaaccatacacagaagaagattccagagaaattcaataatacacaatctttttttttgtattttcatttccccccctctagtagtcaggggtgggaagctgctcgtgggtgtggctgataaagacaaccttgtaaacaaggccagcgattccaccaccgatgagaggcccggcccagtagatccagtggttggtccaggtgcagcttacgacagcaggcccatatgtcacagcggggttcatggccgctccagagaaggccccacccaacagaatgttagcgc

SEQ ID NO: 221631 - DNA, 494 bp, Glycine max
  unsure (1)..(494): unsure at all n locations
cagagagtgatttcagtgagtgatcggtgttcacttgatctcatcataatcgtcagcgtcaattgaagaagatgccgatcagaaacatcgccgtcggaaggcctgaagaggcgactcaccccgacacgttgaaggcggctttggctgagttcatctcaaccttcatcttcgtgttcgccggctcaggctccggcatcgcctacaacaagctcaccgacaacggcgctgccacccctgccggcctcatctccgcctccatcgcccatgcattcgccctcttcgtcgccgtctccgtcggcgccaacatctccggcggccacgtcaaccccgccgtcaccttcggcgccttcgtcggcggcaacatcaccttcctccgcggcatcgtctacgtcatcgcccagctcctcggctccatcgtcgccttcctcctnctggccttcgtcaccgccttcactgttccagcattcggactcttcgttgagttggagttggca

SEQ ID NO: 221632 - DNA, 511 bp, Glycine max
  unsure (1)..(511): unsure at all n locations
cgcgggtgaggtagaacccttccacggtggtgactgcgcgatgggtgcctacaagtatgtttcagagctatggcgcaagaagcagtctgatgtcatgcgcttcttgcagcgggtgaggtgctgggagtataggcagcaaccttccattgttcgcttgacaaggtcgacccgccctgacaaggctcgtcgcttgggcttcaaggctaagcagggctatgtgatataccgtgttcgtgttaggaggggtggccgaaagaggccagttcccaaaggtattgtttatgggaagcccacaaaccagggtgttacccaactgaaatttcagcgtagcaagaggtcagttgctgaggagcgagctggacggaagctgggtggacttanggtcctcaattcttactgggtgaatgaggactctacttataaatactttgaggtgattctggtggatgtggctcatgctgctattagaaatgatcccagaaatcaatggctcgccaatcagtgcacaagc

SEQ ID NO: 221633 - DNA, 535 bp, Glycine max
  unsure (1)..(535): unsure at all n locations
gttattgggtggagtgtgagaatccaaatatctgtatctatctatctccctctgcaattatccattttctggggcgcattttagcaacaatggtgcacccaatagcagaggcaaacgaggaaagtccgttcgggaaactaacgccggaagagttctacgcgcatcactcagtgagtcacggttccgagttcgtgacgaaccctagaggtctcaagctcttcacacagtggtggaccccactccctccaaaaaccatcattggaaccctcgccgtcgtgcacggatacaccggcgagtccagctggctcctccagctcaccgccgtccacttcgccaaggccggtttcgccacctgcgccctcgaccaccagggccatggcttctccgacggcctcgtcgctcacatccccgacataaccccgtcgtcgacgactgcatcaccttcttcgagaatttcccgtctcgcttcgatccctcgcttncttcgtttctctacgccgaatccctcggcggcgcaatcgcgcttttaatcact

SEQ ID NO: 221634 - DNA, 469 bp, Glycine max
caaaattatcttccgtttcaggatttgggtttcaccgttacagtgaaacatgggagaaccaaaacgaatctatctgcgtatctttgcgctgctcctcttcatttccgcctcttcgtttcagcttctccgagctttcgatgacgcgatcttttacgagtcgttcgacgaggatttcgaagaccgttggattgtgtctcagaaagatgagtacaatggtgtctggaaacatgccaagagtgagggacatgatgattatgggcttcttgtcagtgagaaagtgaggaaatatgctatagtaaaagaacttgatgaggccgtgggtctcaaggatgaaacagttggtcttcagtttgaaactcggcttcagaatggccttgagtgtggtggagcatatctaaaatatctccgaccacaggaggcttgatggaaatccaaggaatctgatcatgaatctccatattctatcatg

SEQ ID NO: 221635 - DNA, 546 bp, Glycine max
  unsure (1)..(546): unsure at all n locations
ctgcaaacccaactgggctaagagggagacattattgcaactatatattatagattacactgcaagacaaattaaaatacaaaataatccgaggacctttacttatgacagagtgctgggacatttggaacattattacaactatatattattttttggtttgtgaaggggagaatgagcctttattgatgatagtgctggtccttctcctatataccacatttcataagaagttgttatgggtaaatctcaatgagagaccttaaacccaacactggagttatcttgtagtcactgaaaccagtagagaaaatcagtttggcccattctttctcagttctctcttttccaggatacagcaccatcacaaccatatcaatgaagagctgtgtttcaattgattcatcatctcccttttcattctccaccaccatgtctatgataatcacctngctctttattgcctctntgcatttcttcagtattttcacacactgctcatcattccagtcatgcaatattcacttcaagagaatggcatcagca

SEQ ID NO: 221636 - DNA, 364 bp, Glycine max
agaagatggctttaggtgttcctgctcttccgttgacatacgtggctcacgttctggcagttgttgccagcgtcttggtcgtggtctgggtcgtcaatttcaggggtggcttggcttgggattctgataacaagtccctcatcttcaacattcatccagttcttattgttattggcttactagttcatgggggtgaagctattataagttacaaagcttttcccctaaagaaggaagtgaagaaattgatacaccttgttttccatgccatcgcattaatacttggaatagttggaatttatactgccttcaagtttcacaatgaaagtgggattgccaatctctacagcttgcattcatggct

SEQ ID NO: 221637 - DNA, 473 bp, Glycine max
  unsure (1)..(473): unsure at all n locations
caaaatcatgcagtgtgacaataaatgcattacaagaacatagataacaaattctatggtgactcacatccaacaacgttaatcaatttagtttaacacacaacggttggaagaaaccaaaagataaataacaaagtcgtgccttcttcccctcagtttcccctttgcttgttggtgacagcatggcatcatgcattgcaattacagaaaagcatctttctcaagtagcttcaggacttcattttgattgtttagcttcgcaacatctattggagttttaccatccatattctggagagtaactgcagcaccattttcaaggagaagggccacacattcctttctgccataaccagctgcataatggagagcagtgttcttattcttatccaaagcatccacttttgctccagcctcaaggagaacttgagcacatttcacctcaccatatccacaggcaaaatgcanagcag

SEQ ID NO: 221638 - DNA, 400 bp, Glycine max
tctcatctcattttctcgctcctctctctctctctctctctcacacacacacacaccaaacactctcaagttttctctcagatttggtactttagggtattgttgaaggagagagtgtaaatgaataaaccaacaagcgacgcaattaatatggggaaaaggagcctggagggtggagaagatgatcagcccgaacgaaagaggcctgctcttgccagtgtaattgtggaagctctcaaggtggacagtttgcagaagctttgctcatctttagaacccattcttcgtagagttgtcagtgaagaagtgccgcgtgctttggcaaagttaggtcctgcaagacttagtggaaggtctccttctaaaatgattgaaggccctgatggtagaagcttacagc

SEQ ID NO: 221639 - DNA, 468 bp, Glycine max
gtccatggccactttcttcgcccaaacctccttcccctcccactctctctccaaaaccttcgatacccatttcgcccctgccccgaaagtcaacgtctttgtgaacttcagggcgaggaggcacgttggggtgcgagtttcgaacgcgctgatcgaaccagatggagggaagctcgtggagcttgtggtgacggattttgagagggatttgaagaagggtgaggctctttcgttgccgaggatcaagctctcaaggattgaccttgagtgggtccatgtcctcagcgaaggatgggccacacccctgaaaggcttcatgagagaagccgagttcctccaaacgcttcatttcaactcgcttcgactcgatgatgggtcgggcgtgaacatgtcagtgcccatcgtgctggctattgatgatgcgcagaagcatcggatcggggattacaaaaagggttgctctttttg

SEQ ID NO: 221640 - DNA, 530 bp, Glycine max
  unsure (1)..(530): unsure at all n locations
ggcgaagcgaaacgctgtcgttgcgccaatcgcggcgttgttgttggtggtgctactcgcggcgagtgtggtggtggaggctcaggagaactcggacgtgaagacgctggtgaagcacatgcacgggaagaagtactgcgacaaaggatgggaatgtaagggctggtcaatttactgttgtaacctcactattactgattatttccagacctaccagttcgagaatctcttctccaagcggaactcgccggtggcgcacgccgtcggattttgggactaccactcgttcatcgccgctgccgcgcttttcgagccgcaagggttcggcaccaccgggaacaagacgatgcagatgatggagattgcggcgttcctcggacacgtcggcagcaagacctcttgtggttatggagtggctaccggaggacctttggcctggggtctttgttacaaccatgaaatgagtcctatgcagtcatactgtgatgactacttcanactcacatacncctgtacacctggtgctgagt

SEQ ID NO: 221641 - DNA, 320 bp, Glycine max
  unsure (1)..(320): unsure at all n locations
tgattcaggtaatgaagagttccaacgaaaagctattaaaataatgtataatttttcatccaatggtcaaatttgtccctacatggtgtctctcgggtgcatccctaaattactgccattttttgaagacagaacccttttgagagacagtatacatatcttgaaaaacctttgtgatactgaagagggtagggttactgttgtagaaacaaaaggatgcatatcttctgttgttgaaatacttgggactggcagtgatgaggaaaaagaacctgcactgnatattcttctctctttatgctctcaacgtgtggaatact

SEQ ID NO: 221642 - DNA, 463 bp, Glycine max
ccaaacagttgcaggattgaatagatcttaaaaccaatgtaaaacaccgcctgttacaagctttcatatttatggcagaaatggggatcaaaatagaacccaaacagatgagcatagactatcagagaaacaaaatttgagaacttataaaaaaaaaaaaaaactttaacaatcttttcagggggttttatccgttttagcagcagtagcagcagcttgccccctaaaacaaccagtcctcctagcagcaatgagaccaaccttttggccaggaggagcataacccctgacggtactggcatgaccaatatgctggggattacctcctccatgaggatgctcaactgggttaatggccacaccacgcaccttaggccagcaattccttttaactctgaatttgtgataagcattaccagctttcagaagaggcttttaagtcctccttccacctgcaacctgc

SEQ ID NO: 221643 - DNA, 481 bp, Glycine max
  unsure (1)..(481): unsure at all n locations
tgtgaatttgtgcaaacacaataaacagatggatcagttcaaaggacagcctcgccttccgaaattcgtcgttccgaaacgctatgacattaggctcaagcccgacctcgtcgcgcaccgttttgcaggttccgtcgccgtcaacctcgacatcgtcgccgccacctctttcatcgttctcaatgccgccgaactcgacgttagcaacgacgccgtttcattcaccaaccaagattcctccaaggttattaaaccttctcgagttgagttgtttgaaaatgatgagattctggttttggagttcccagaggaattacctattggcttcggtgtcttgtccattcgctttgaaggaatcttgaatgatagaatgaaaggcttctaccgaagtacctatgagcacaatggtgagaagaagactatggcagttacacagtttgaaccagctgatgccaggcgatgctntccttggtgggatgaa

SEQ ID NO: 221644 - DNA, 543 bp, Glycine max
cacaaacagagccttattcttgagaaacaggtttcttcttcaaaacaaaatgtctggaaccgtgattgttttcgactttgacaagaccattgtcgatgtcgatagtgacaactgggtcatcgacgaattgggtttcaccgatttgttcaaccagcttcttcccaccatgccttggaactctctcatggacaggatgatgatggagcttcattcaaatggtaaaaccattgaggacattgaagaggttctgcgtaggattcctttgcaccccagagtgattccagctcttcaagcagctcatgctttagggtgtgatttgaggattgtgagtgatgcaaacgtgtttttcattgagactattctgaagcacttgggaataagagaatacttttcagagatcaacaccaaccctggttatgttaatgaagaaggaaggttaaggattttaccttaccatgacttcaacaaagcttcccatggctgcactttgtgccctccaacatgtgcaagggtttaatcatagatagaatccaagattcaatt

SEQ ID NO: 221645 - DNA, 492 bp, Glycine max
aagtcataagacattagtaagatggcaactggcaacattacatcaatacctggtcccaaattttcgttcaatcacacaaagaacagttacaaaattaactactaggaataggactaagattacacccaaacacgggttatatgtcacaaaccacaagatacactggaacaagagaagctttgttgaagctgcaatagacctcatgtcaaaacttggaaaattgagtccaaattagccaagttgaccatccccatcacaactcctatttatgaataatcggaatcatttaattggcacggcttttgaacacatcaagacccatctcagtaggatcagttgcttgcagctcaatctgaattccatcaagctccctcttgaatctatctttggagctggcataaatcatcttgctcctaaccctagatgtatcaggggaccaagcaatgaagaaaattctgctcttttggcaattcttttagtgacaaaatcaaa

SEQ ID NO: 221646 - DNA, 499 bp, Glycine max
  unsure (1)..(499): unsure at all n locations
gtgatggatcaatattgctagatgacacccgaaacttcactggcgagaagactgcattgccaaatcttaattcagtcagaggtttttctgtggttgatgaaatcaaagctgcggtggacaaagcctgcaaacgccatgtggtctcatgtgcagatatcttggccattgcagcccgtgattctatagccatatatgggggtccacactactggtaccaagtattgttgggcagaagagatgcaagaactgcaagcaaagctgctgcaaactccaatcttcctcctccaacattcagcttctcacagcttgtttccaacttcaaatctcacggcttaaacgtgagggaccttgtggccctctctggaggccacaccatagggtttgcaaggtgcaccaccttcagaaacagaatctacaacgtaagcaacaacataatagaccccacgtttgcagcatctgtgaggaagacatgntccgaaagcggaggagacaacaactt

SEQ ID NO: 221647 - DNA, 467 bp, Glycine max
acaaatcaactaaatatatgacatagcttaaaatgtactataacttaaatgaatatgtagttataatattatggctatctttcaaagggtcacctacacagaaacacaggcgtgggtaaaaggcttaaagggtcatctacacaaaaaccataacataaaaagctgggaccctttatttaaaggcaccattattttcatttgttcaaaccttactttagcaacacaaagtctcagtcccacgtactacgattaggcggaaccagatcttacgcggcggcatcaacagcatggttgccaacatccttttccacaaaatccttgacatattgttgtcttgcagggagatggtcatttggacgattgtgtggagtccaaactggctcaccaacaaaaaaacgcaaagccttaatgtagttgctctcatctagtgtaaagcgatgataaattccagcaggtaagatgatcat

SEQ ID NO: 221648 - DNA, 411 bp, Glycine max
gaacaaagaatagtgaattctgtttattaattacttaggattggtcaaacataattaactgccttggatgagttagtacgattcagagagaaaaacgaaagcagaatcctggtgccaatcatacaccaaaatggttatatcctacaactacaaaagagaaaaggaaaacattaatgacctttgccattcaaataataggggttccacccaaaataagtatatatgtcactgaactacatgtcctaacaagctatttgttgaaggtgagctagttccacttaaccaactatcatgcacagacacaggagagctgtccttcacctcctcaattgattgcaaaaaaacatcagtcttgtggggaacaatcaatgtctcactcccaagtcctgcagctctctcaaaactaacacc

SEQ ID NO: 221649 - DNA, 406 bp, Glycine max
ggcttcaaggaaactgtagttgctccaacaatgcgtcctgcacggaggtgaatactgatggtggaaaacgaggcttccggtgccgctgcgatgaaggtttcatcagagacggattctgagccggcgatggttgccggagagtttctgaatgcaaagcttcaacactgtggtctggcggatgtaggaaagcactcaaaattggtgtccttgttggagggatcatatttggaggtatccttgtggctgctctgtttcttgcatgttactttaataggcgtcagtcctcttggctgagaaaacaagtgacagtaaagcgcctattacgcgaagctgcaagagattgcactgttcctctatatccctacaaagaaacagagagagccaccagttttttctctgaaaacat

SEQ ID NO: 221650 - DNA, 440 bp, Glycine max
aaataataaagaaaatgtccttctttttttttttctcagattaattttgccgtgaatgatgaaattaatatactcaaggtgggttatgatcttatgcacaaatgggattattacctgaacttacattcatggcatctaaaacttaaataggtgtcggcacgtcggattatgatattatgtgcatatatgacatagaagtagccatattacaagcttaatttctacagacatatataaacactcctctcatcccaaacagctgagaatctgattggtgatcttagccttttcacttaggggtgaaagcaccaaaaatggtttcatggccaggatctgcaaggtgggcaaagaggttgtcaataggaccggtggcagtgtacatgtgctggaaccatgcacccatgaacagaagcatggcccgtctgccatttttgatctcc

SEQ ID NO: 221651 - DNA, 341 bp, Glycine max
cacaaaagagcactgaccaaaccattttattgtatttttgaatcaagggtgagggccttccatggcttccgcttgagcttcctctgcaattacagctgttgccatctctacgccgagttccgggcagaagaatggatcaggaggttgaaaccttactgcaaggaaattgaggagaaaaaaggagagagcacctattggaggacgatcgatgggcactacagtgcgcacagatgctgatcctgacacaactatatggttcccaggcagcgaccctactccatggtttgatggcactctacctggagactacggctttgaacatcttgggattggatctgacc

SEQ ID NO: 221652 - DNA, 552 bp, Glycine max
  unsure (1)..(552): unsure at all n locations
acgtatcagcatgcattcatagatacccattgaaccaaatagatagtgcctgcaactatatcaggtatcagctcagcagcctcatatacaacaatactagattttttctgtaattgaaccaagtaattaatcccccaagtaaatgttggtatcacaaattactattcatccatattccaccatttcagtttcatgtttttccctgtaagctctggtcatatatgaatctcatcattgttgcataaaatgaagaatagagatatataatttgtttttctcagttcaaaacaggtgttcattcacatgaagctctggttacttgattcccctgcaccactactcttgcgtttgcttttggagccactagaagacgaaggattagtatgccaattcctttttctttgatttatgaaccagntatttatctgctttaattgcaagcctgtttcctgcaccaaccttgccttgtcctcttctggtggatatggccatttagaatgtgactgccaccaagcttttaaaagggaagttgtgtcgccgggtagcttcccg

SEQ ID NO: 221653 - DNA, 507 bp, Glycine max
aagttccgccgcaagctccaaactccacagctccagcaactcctctccgtcgtctgccgcagccaccacgtcagcatcatcaagctcctcggcgcctccgtctccggcgaccacatctacctcgtctacgacttcgtcaacaacggcgccaccctctccgactgcctccgcaacaaaaacaacgtgcacttcaccgtcctctccacgtggatgtcgcgaatgcaggtcgccacagatctcgctcacggcctcgattacattcacaacaagaccggtttgaacatcaatttcgtccataaccatatcaagagcagcagcatcatcgtcaccgagccttccttcaacgctagggtttgccacttcggcgccgcgcagctctgctgtgaaatcgaactcgataaccagaaattaggcgaacctagtggaatcgacgagaaattaacatcgtcgccggcgagatccaagcaattctagggagtgcggaggtacatggcgccagaatttcag

SEQ ID NO: 221654 - DNA, 271 bp, Glycine max
ctcgagtcttattatcaacgtcaaagacccacaggctgacctacttgacccagcagtgaagggaactcttaacgttcttaaatcatgtgtaaaatcgccatctgtgaaacgagtcatcttaacatcttctgtggctgcagttgcatataataaaaggcctaaaagtcctgaagttgtagttgatgaaacctggtggtctgatccagattactgtagggaattaaagctgtggtatttactttcaaagactttggctgaagatgctgcctgt

SEQ ID NO: 221655 - DNA, 446 bp, Glycine max
ataaaaaaaccctttaaaattcataaatagtttggaattaattaacaacgaaactatcactactctattttttatgaaccggggaatggaacccataacaatttataggaataaacaataatattttattagagcacaagccaacctggcccaaccaacactattataatattattattattattattattattataatataaagtaaaagagttgaccctaagcaacaccgtgctcgggggcgcgttgagcgcgtgtaccaagccactccaacatgtccccaaacactagctccacgttcttttcgggttccccaaccatttgatgccacatcccgggatatattttcagcgtcttatccttactcgcggggcgtgcgtgcaactcctccacgcacgcggggtcgcacaccacgttgtcgccggcgtgcgccaccagcaggggga

SEQ ID NO: 221656 - DNA, 519 bp, Glycine max
gcgctgagtcgagggcgttcagtgttcaccacagtttacacacgagtacccattttctcttctcaatttctcagagtgtgcagagaaaatcatggtggacgcagcagaacgtaggtacttggaggatgacgattcatcactcatgaaaactattaagggggcaacaactggtttagttgctggcactatctgggggaccgtagttgccacctggtatgatgtccctcgtgtagagagaaatgttgctcttccagggctgattaggactttcaagatgatgggcaactatggtttgacctttgctgccataggaggagtctacataggtgtggagcagttggtgcaaaactataggatgaagagggatttagtcaatggagctgttggcggatttgttgctggtgcaactattctgggttacagaggaaggagcatcaaaactgcactttctgctggatcagcattggcattcacatctgcattccttgatttcggtgatcagacaataaaacatgatac

SEQ ID NO: 221657 - DNA, 352 bp, Glycine max
ggctcaaaatcaaacacgcttgtaatatatatttgagtcagcaacagagcaattaatttccgacgcataatggtagtagtagattcaaacgggggaggggcttaacgaaaaacgacaatttttacatgcaacccacgggttttttagcttatcctttcagcggggcctgcttttggtctccccactgtacagccagtcgtaaacagtgggagtgttgggaagtggtttgtcaaacatttgagcaccgatggtctttgggggggagttgctcccaggatggaagacgctcctccaaacgttggcagctttacgcgcggatcccggtgtcgttggagtcgtgggagtcatcggg

SEQ ID NO: 221658 - DNA, 530 bp, Glycine max
agttcaaataggataataataccatattggtcattatatcatattgatcagtgatcacaaactggtacataaacattattatgacatcaaacaaacaagctgaaaaatgaacgtgattatgacttcaaactatcctgcaactctggcagataaacacaaccgacatttgactgcagatgcatcccatcccgtgaatgaaaggacgctatatgggcagagtctacattttagaggaagcctgcagcaatacaacgttcactgttgaggcaggaagcgtttcttgaaaagatcaacgatctcctgaggatcgactctagtctcggtataagcatttagcttattcaactcctcaaaccatgttgcaagtttaggccttccttctgtgatgtcatgtttgaacacctcagcaaagacaatttggaatctttcaacaaatggaatataagcaatatccaccaaactgaattggccaagcaagaatggcccatcatcaaatttaccaagagcattctccaagtattcaaaagcgg

SEQ ID NO: 221659 - DNA, 527 bp, Glycine max
  unsure (1)..(527): unsure at all n locations
cttaaaaatattcagtgaagatcaacctcaatggcatctcttggcgtgcgaccagttcttccccctccattaacttccatctccgacccacctcctcttttcgatggcaccaccaggttgtacatcagttattcttgcccctatgcacaacgtgtgtggatcgctaggaactacaaggggctacaagataagatcaatttggtccctattaaccttcaagacaggccagcttggtataaggagaaagtctaccctgaaaataaggtgccatccttggagcacaatggcaaggtgttgggagaaagtcttgatttgatcaaatatgtagatgcaaactttgaagggacacctttgtttcccagtgatcctgccaagaaagagttcggtgagcaattgatatcccatgttgatacattcagcanagacctgttcgtttcattgaaaggggatgctgtacagcaagccagtcccgctttgaatactnggagaatgctcttggtaaattgatgatgggccattcttgcttg

SEQ ID NO: 221660 - DNA, 383 bp, Glycine max
agggttaatatattgaaattgatgattaaatacaagctttagatccaagaatacaaacaacaaattatttccttcctccaactcccaatacaaacttttatagcagacatgagattattccataaaataaaaatatgatacaaacttacaagtgtctatatggcttcatagtcatctgctgcaggggctgggggagcatcagctagagcagataacacaacaaaggcaccaaataagattgtgataatggcagtgaagttgacaagcaaagcctcagaaccatatttgtccaatcctgagttctcaaggaaagtgggcttctccagaaacccaagagcagcagtgcccacagccaagacaaatacaaacagcccaaatagcgc

SEQ ID NO: 221661 - DNA, 519 bp, Glycine max
acaaaacaaacagcagcaaaatgagcacacccttgttccatgaattcaaaaggcaagcttctttcttcttcaaggagaaaatcaagactgctagattagcactaacagatgtcacccctgcagaactgatgacagaagaggcaacaagtggaaatccatgggccccagatgccagaactctcagatcaatttcaagggatgcttttgagctagatgattattggaggattgtggagattctgcataaaaggtttcttaaatttgaaaagaagaattggagggtctcttacaattccctgatcgtgcttgagcacctgttgactcatggaccagagagtgttgctgaggaatttaagagtgacaaagatgtcattagccagatgaaaggttttcagtatattgatgacactgggtttaattggggcctaactgtgagaaagaaatctgagaggataacgaaactgctggaagaagggactcttctcaaggaagagagaaaaaatgctagaaggttatcta

SEQ ID NO: 221662 - DNA, 527 bp, Glycine max
gcgaaatctggaacttctgcatttgttgagaagatgcaaacaagtggagatctcaatctgattgggcagtttggagtcggcttctactctgtttatcttgtggccgactatgtcgaagttattagcaagaataacgatgataagcagtatgtatgggaatcaaaagctgatggagcattcgctatttcggaagatacatggaatgaaccactaggacgaggaactgagattagattacacctcaaggaagaggctggggaatacttggaggagtctaaactgaaagaattggtgaagagatactctgaatttattaacttccctatctatatttgggcaagcaaagaagttgatgtggaggttcccgctgatgaagatgattccagtgatgaagaggattcatctgaaagcagctccaaggaggaaagcgaagatgaagatgcttgataaagtgaagatgaagaaaaaagcctaagacaagacagtgaagggaacactatgagtgggaactttaatgatgtgaaagc

SEQ ID NO: 221663 - DNA, 410 bp, Glycine max
agcacaaccacattatattacagagagttggcatgcacaattgcaccataagtgcaagaggctgtctaaatgccatacatacagagagaggcaatgtgtccgcgcttgtgcctccccaaagttttaatttattattattattaaatggggccataggatccttgagaagtatgtcttatcctgagaatacataagcttaagggttctcccaatcatgagatatatacattatgatatgatacaagattaagctggtacagattactgcacttttccgttgcttgagagcactaagctatgataggaataaagcaggaccttccatgcaccaggggacataaatccatgaggaggactttgtttgttccttggcagtgtgcgcatctttgtgcctgatatgaacaggaagt

SEQ ID NO: 221664 - DNA, 396 bp, Glycine max
gatgaattcaaccgttgggaggctggacaagttttggcacggaagttgatgcttaacttagtggatgatttgcaacgtaacaaaccattggttttaaattccaattttgttcaagggttcaaacgtattttatgtgactcaagtctggacaaagagtttgtggcaaaggcaataactttgcctggtgagggagaaataatggatatgatgggggttgcagatcctgatgctgttcatactgttcggactttcatcaggaagcagcttgcaagtgaactgagatcagagttcctcagcacagtggaaaataacaggagctcagaagaatatgtcttcaatcactcaaacttggccaggcgtgctctgaagaatgttgctcttgcttatcttggatgc

SEQ ID NO: 221665 - DNA, 361 bp, Glycine max
attacacaatccattcagaaaaacaaaaaagaacaccctgagcaaaaggacccaatacaattatatctcctgagccaattccactactttttccaccacagacgccatagaagatctttttttatttgcaacaaagcacttatcacgaatctcccctttcccaatacgatccgttatcacatctagctggctcaccttcacaaaagcatcggaaaatttcttaaaaaacagtttctggtctgaagcgaactggttcacgatttccttggttttggggctgcccgcgatgtcctggtcagaagtgaacactccttggcggttcaggaggttgatgtaatacatgttgtccaacttcacgggg

SEQ ID NO: 221666 - DNA, 422 bp, Glycine max
atcaaacatggctagggttagtgctttgtttcactctttgctcttgatttcttcccttgtattggcttctcaaatccatgtttcctctgggaaactagtccctggactatcatggaattactatttggtgacatgtcccaagcttgagaggattataaggaagcatcttgaggatgtcttcgagaaggacagtggagtagctcctggcatacttcgactcttcttccatgactgcttttctaatggatgcgatgcgtctatattgttgaatggagacggtgacgagaagcaacaccgtgctaactttggtttaaggcaagaagccattgacgccattgaaaaccttcgggttctcatttacaagcagtgtctaccagttgtctcatgctcagacatccttgttatcgcagcacgtgaagctg

SEQ ID NO: 221667 - DNA, 475 bp, Glycine max
  unsure (1)..(475): unsure at all n locations
ctttgttcactcttcttctcttgcggctagggttttagcgcagcttcttctagatttaaggaagatgggtaaggaaaaggttcacatcagtattgtggtcattggccatgtcgactctgggaaatccactaccactggtcacctgatttacaagcttggaggcattgacaagcgtgttattgagaggtttgagaaggaagctgctgagatgaacaagaggtctttcaagtatgcctgggtgctggacaaacttaaggctgagcgtgaaagaggaatcaccattgatattgctttgtggaagtttgaaacaacaaagtattattgcacagttattgatgcgcctggacatagggatttcattaagaatatgattactgggacatcccaagctgactgtgctgttcttatcattgattcgacacttgtggttntgaagcttgtattttcaaggatggacagactcgtgaacatgctc

SEQ ID NO: 221668 - DNA, 490 bp, Glycine max
atcagaaactattcgtagtaattttaataaaataaaaagtaattgtgagatgataatggttttttattcttttgcacgagaccgtgcatagcaagctatgtcacagacatagccttaaaactaaaaacattaaagcagcacctaaataacagctgcaaccaacgagttcaacatacactggacataacaacagagaattcaactaatattggacataacagacagactcagaaaccaccacgaaggcggaggacaagatgcagggtggattccttctgaatattgtaatccgccaaggtacgaccatcttccaattgcttcccagcaaaaataagcctctgctgatctggtggaataccctccttgtcctgaatctttgctttcacattatcaatggtatcagagctttccacctccaaggttacggtcttccctgtcagagtcttcacaaatatttgcataccaccacgaagcctcaacaccaaatgca

SEQ ID NO: 221669 - DNA, 470 bp, Glycine max
  unsure (1)..(470): unsure at all n locations
gtgaaagccaagattcaggataaggagggtattcccccagaccagcagaggcttatctttgccgggaagcagcttgaagatggaagaacccttgctgattataacatccagaaggaatctactttgcacttggtgttgcgacttcgtggtggcatgcaaatcttcgtgaagactttgacgggaaagaccataactttggaggttgaaagctctgacaccattgataatgtgaaggcaaagatacaggacaaggaaggtattccaccagaccagcagaggcttatttttgcagggaagcagctggaagatgggcgtaccctggctgattataatatccagaaggaatccactctgcatttggtgttgaggcttcgtggtggtatgcaaatatttgtgaagactctgacagggaagaccgtaaccttggaggtggaaagctctgatacatngataatgtgaaagcaaagatc

SEQ ID NO: 221670 - DNA, 539 bp, Glycine max
atgttatgacattgcaaatacaaggagtctttcttttttcagatagcaaaaaaaaaatactgaaaccatagtctaactgatttcatgatgttatttatctatttgacttcataattttattcataaacaaacaaacttattttatataccagaaaaaaaaattaattttttctctgaagtggactttattgaccacttggcattttcactatgttaagccccagatccagcaagtcgcctctttgaggcgtttgatacagccaattgaccaagtttgtcagtgttacttgatgtagtcctttgattgattggtgcataatgcctcaaccactccccaacataaacctgttgagggctcataatctttgtatcaggatcatccaatgactctcgccaatgtgccaagtacccagccattcgagggatggcaaataaaacagtgaataactcaggttgaaagcccatggccctgtaaatcagtccagagtagaagtcaacatttggatatagcttcctcttgatgaaatactcatcagaca

SEQ ID NO: 221671 - DNA, 607 bp, Glycine max
  unsure (1)..(607): unsure at all n locations
ctcagtcgcttctcgaaccctactttcttccgcggtgattgcatttgaattcctgtaatggcgattgataatatttttaaaaatgaagctagtgaagaaaaaggagagcgtgccagaatggcttcttttgttggagccatggctattgctgacttagtgaagacaaccttggggccaaagggaatggataaaattttgcagtcaacaggtagaggacgtgaagttactgtcacgaatgatggcgctacaatcttgaagtccctccatattgataacccagctgctaaagtccttgttgacatatcaaaagttcaagatgatgaagttggggatggaactacctcagttgttgtgttggctggtgaactcttaagggaggcagaaaagctggttgcaaccaagattcatccgatgacaataatatcaggttttcgaatggcagcagagtgtgctcgtaatgctttgttggagaaggttgtggacaataaagcagattctgagaaattcaggtcagacttattgaacatttgcatgactactttgagctcccagattctctcacaggacaaggagcattttgcanaattagctgtggatgctgtaatga

SEQ ID NO: 221672 - DNA, 508 bp, Glycine max
gtgaaagatgccttgggtgaggctttcagagtctccaaggctcgacgttgctattgacatgggtaatccatttctcaatctcactgttgatggtttccttaagatcggagctgtcgcagccacgcgatcagctgctgaagatacttatcatattatccaaaagggtaactaagcatttcaaaaattctctaccccattatctctttatgctattttcctttttttacggagcctaaagaggtaagctttgatttttataacgttttttttttttttaaatttttattttccttgtttaaattcgggttatacaccaacgtgcaagcataaaataggttgtattgtagtaccgtattttactttgcttctgtggtggcatcggttcaatgttccttgttgttttgatttattttcatctgtgaaagcctttgtcagactaattcaacatgtctgttccagggaatatctcaagtcgtgatttcgagaaaactttgaagaagatgtgtaa

SEQ ID NO: 221673 - DNA, 385 bp, Glycine max
ggaagggaaaaaaagtcccgggacgggccttgataccttaagggtttaaaaaactttccgcagttgggatcccaattgggaccatttcaacaggatttgtttgggatttcaacaggttttaaaaccttggatgcgggactcctaccccccattttattaattaaaacaagggaggggtgaacaatttacggggccttgaaagcatgctccccctcctaaacctgataatcggcctcattcttattaggaggagcatcctgattttggtgggtctctgccaccaaatcgttcatgttgctctttgcccaagggaactccatttggtccattccttccccggtgtaccaatgcaagaaggccttgcgcccgtacattggagagaatt

SEQ ID NO: 221674 - DNA, 501 bp, Glycine max
gagatattgcacgtgcaaggtgggcaatgcgggaaccaaatcggttccaagttctgggaagtgatatgcgacgagcatggcatcgaccccaccggaaagtacaccggcgacgaggcctccgatctccaactggagaggatcaacgtctactacaatgaagcctccggcggaaggtacgttccccgggccgtcctcatggatctcgagcccggcaccatggacagcatcagatccggcccatacggcaagatcttccgccccgacaacttcgtcttcggccagtccggcgccggcaacaattgggccaagggccactacaccgaaggcgccgagttgatcgactctgtcctcgacgtcgttcgcaaagaagccgagaattgtgactgcttacaaggttttcaagtgtgtcactcacttggaggaggcacgggttctggcatgggaacactgttgatatcgaagatcagggaggagtacccggacagaatgatgctcacattc

SEQ ID NO: 221675 - DNA, 541 bp, Glycine max
aaaaatacaattgaatcttaacatagaaactcagcatctcaacccaacggcttaaactttttcggaatccaactcacttaaactcattgagtcttgataagtttccgaatccaacccacttaaacttttttatagcaaaaataaaaactgacatgactaaccttataaaacaatacaggttcttattctttccactgtatatgccattattgtaatccagaccttgcaatccaactagttgacccttctgcaattgcatctgatttctccctgcctcccagtgagaggcttcatgttccccatcttgatcattgaagctttaaaatctctagcaaaagccaaagggattctactatatagttgcaccaatttgtcactttctgtgccttttcccttgaacagctcttgatcagaatggagaagaccctttttgtgcagcaaatccgtgtagtatgtggtgtcaactcttgtgggtgtagcatcaagtggatgcaagttgttgtctccttcgcttttcggacatgttttcctcacagatgct

SEQ ID NO: 221676 - DNA, 483 bp, Glycine max
attagattcaaaccttattggcgtcgtagcagaactcaaaagttaacatccttaatctcttcaaacacggttgttcatagcatatggaaacgaggatgttgcggctttcgattcaacgagtgaggaagttgaactttctgaggcctcagatctctgctttgggaaggtcccatttgtcaactgctgctgaaccatcttccagtaagagcaatccacctagggttccaaatcttattgggggcagttttgttgactcaaaagcatcaactgtcattgatgttataaacccggcaacccaagaagttgtttcacaagtccctttgtctacgcatgaagagtttaaggcagctgtatctgcagcaaaggaagcatttccatcatggcgtaacactccaattacaacacgccaacgtgttatgttgaagcttcaagagcttatacgcagagagatggataaacttgctttgaatgtgaccactgaac

SEQ ID NO: 221677 - DNA, 393 bp, Glycine max; identical to SEQ ID NO: 208347

SEQ ID NO: 221678 - DNA, 491 bp, Glycine max
caacccgtaaaacctcttttttctcaacccgtaaaacctcttttttttcatttttctttttgacttgaccattgccattacttcccatatacagatacaagaatgactacaatgtctatgtgttcatgatgaatttttttaccgtgtcagaaacttgtatatctccttggttcagtatatcacacacaaagcaggcccggctgcggttcagtgaaatcaaggccttcttcgagaagataacgctgtacagctattgggagtctcgcaggagtgcgggagccccgagtatggtgaccagtgccaacacagatgtaaacctgcaaacgctgctcgggggctctggctgtgcttcgtagcacactcagttcgtgtttcagcacgtgaatcgcttcacttacgtgcagaccatgtaggtctatcattctttggggccctcttccattctctggagcaacaggattcctctggcgataaatagattcttgagcttt

SEQ ID NO: 221679 - DNA, 507 bp, Glycine max
gttcaaatctgggtcttctattccatctagaggtgctgttgactttgcttcagctgtcaggaaattggcttctcaggattctggtatatggaagtatgataaaaatggttctggtgatgcttccactggctctagtaggagtttaaatgctctggctagtgcctacaatggtggacaggggagagtcaacaatggtgatagattacagaatcgtggctctgctcgggcagctcctgtttggcttgaaactggtgacgcagttggtaaatgcttatgcttatatgcttcaactgtgagatgaattctttctataccgtgtctcctttaacaattttgaatggcagccaatatgtattctgagctgcgggaggaggctcgcgatcatgcacgtttgcgtaatgcatattttgagcaggtgggtctttgtttcatgcagtgatggacgagttaatggaaatttgaatgagaatacaatgtaacgatttggttagaacctacacacatcat

SEQ ID NO: 221680 - DNA, 501 bp, Glycine max
cacttaccagtatggctatccaacaatctctgttagacaggcctagaaaatctgtttccaaaactatctgcttaatcttttctatagctgctgtcatgatctcatcagcctttgttggttcttatctcatcaaatccacctccttcttcaaccaatcctctcctcaacatctctgtgatcatgcacttgatagggcaacatgtttaacccatgtctcagaagtggtacaaggtccgatcttgacccccacaaaagaccacaaattcaatttgttacagtcattcctaatgaaatacacctcacacattaagagagttatgaacacagccagttctatcaaacttaggatcaacagtcccaaagaagaagaagctttgcacgattgtgtggagttgatggacttatctatcagcagagttagggactcaatggtgaccctaacaaaacaaaccattgagtcccaacaagatgcacacacatggctaagtagcgtgcttacta

SEQ ID NO: 221681 - DNA, 537 bp, Glycine max
  unsure (1)..(537): unsure at all n locations
gacatagcagatagatgattccttagccatttgatctctctaacagcctttctacctatgatactatcttgatcttgctccctctttcctacggcattcaccccaccttgttgttctttccatttttctgacttgctccttttttctctcaaacacttcatttcttgagtttttttcactaagtttgttagggagatttacacaatggccaaacactttcttctgcttctttttgcagtatgcgttgctgctattgatgaagaaccatttataggggtgaatattggaagagacctctcagatatgcctcaccccactcaagtagtagcactacttaaagcacagcaaattcgacatgttaggttgtatgatgctgaccaagctatgctcattgcccttgcaaacacaagaattcaagttgctgtatctgtccctaatcaagagatcctagcaattggtcaatcaaataccacagcagcanaatgggtttcccataatgtgatagcacattaccctgccactaatataacaactatt

SEQ ID NO: 221682 - DNA, 405 bp, Glycine max
gaaacgaatttgatctcaattaaaaaaagatttacaatgcacgcaaggaagtttacaattacaagcaagattacgtaaaaaattgataaatgtatgcaatcaatttcatttgtcaattggaatgcaaatgaagcctatcttcaggtgatctcacaccctccattttcaacattcctagtaagaaatcgctccatgtgtctataggcccaggtaagcaccaatgcacacaatcattgtacagtgtcacattttcattaggccaatgcccatatttacttgggtgaccatctggtctcaacaatgatgcttgtgtgatatcaaataggctatattttaaacccttatttgtggcttctttgtccgaaattttgaactgctgcaattgaatcatataaaactccaaat

SEQ ID NO: 221683 - DNA, 512 bp, Glycine max
tattaatatatttctttccccacaagagagatcatggaaaaggatatcattcttctttctccaacatgggatggtgacaatggcaattccactgagaaaaggctcaggctatttggttttgagctaaacccttctaaagatggttatgccaaagaatctggtgaaggagatgaaagtgtgaactcctctaactcagtttcttctggaggagacaaaactgtgcaagagaaaccctctgccaaagactctgatgagagaaagtttgagtgccaatattgttacaaggaatttgcaaactcacaagccctaggaggccaccaaaatgctcacaagaaagagagaatgaagaagaagaggttgcagcttcaatccataaaccgctacctacaacaccctttccaatccaagcatggctttgcttacccttctgatactccttggttctatgacccctctacctataataactctgagttcacccttagtgaagaacctcagattagcttcaattc

SEQ ID NO: 221684 - DNA, 390 bp, Glycine max
caaaaaccctaggtagagagctcttcctccctttctcacagcaatggccgccgcagcacgccctctcgtcaccgtgcaggccctcgacggtgacatggcaaccgatgcctccgccaccgttcccatccctgacgtcatgaaggcctctatccgccccgacatcgtcaatttcgtacactcgaacatctccaagaacagccgccagccatacgccgtcagtcgtcgcgctggtcaccagacctccgccgaatcctggggtaccggccgagccgtctcccgtatcccccgtgttcccggcggcggaacccaccgcgccggccaaggagcctttggaaacatgtgccgcggcggacgcatgttcgccccgacaagatctggcgccgctggcat

SEQ ID NO: 221685 - DNA, 526 bp, Glycine max
ctgggatgtcaaattagtcctttaaagaatttgggtgacagcaaaacagtcttcgggtcaagtttgtatgtgacaatagcttgaaccattttgatgacacatatttgaaagaccaatttgatgtcaagtgtatctttagaggaccctaatggaagcttagtctaaattttaatatttacattctatgtacaatgtcaatgagactgcacttccgagttggcagaagactctgtggaccctccacagacattgccgcgacacagaggacatacaccatgtatttctttaagccatttatcgacacatgacatgtgatactcgtggaagcaaggaagcactcgtatttggtccccttcttcataatccgccagacatatgtagcattgttcagcatcattgcctacatcagccccatcaacctttttgtgagatttcagagggagggaatcaacaattgattcaggtgcagggagtgagaccatggatagagacagagagccaggttgccgatggatttcatctaaaa

SEQ ID NO: 221686 - DNA, 541 bp, Glycine max
gccgccagatctcagacacacactctcactctctctccctcaccttccataatgcagctcctccggccactgctcgcggcggcgctgctcctcctcgccaccctctccgacgcgcacaacatcaccagcatcctcgcaaagcaccccgagctctccaccttcaaccactacctcaccctcacccacctcgcccccgaaatcaacggcaaaaccaccatcaccgtctgcgccgtcgacaacgccgccatgtcggaccttctctcgaagcacccctccatctacaccgtcaagaacgtcctctccctccacgtcctcctcgactacttcggcgccaagaagctccaccagatcaccaacggcaccgccctcgccgccacaatgtaccaagccaccggcaccgcccccggatccgccggcttcgtcaacatcaccgacctccacggcggaaaagtcgcattcgcccctgaaaacaacgacggcacactctcctcaacgttcgtcaaatcggtggaagaaatcccttacaacatctccgtaattc

SEQ ID NO: 221687 - DNA, 487 bp, Glycine max
gtcagttgactcgtcaggatcctcatcagcaatcctgcggatcatatcaagggctttcctaataagtttcttcttgattgtcttcagactactatgttgttgaagcatttctcgtgatacattaagtggcaaagtgtcagaatcaacaagacccagcaaaaagtttaggtacttgggcaacagttcattaaattcatctgaaatgaacacacgtctaacatacaacttcaggttcgatttgtttgcgttataatagctctcatataaatcttgaggtgccttaggtggtacaaacaggactgccttgaactcaacatcaccctcagcagtgaaatgactccatgctaaaggtttctcatcactgaaatccttggcaagagagtggtagaatttggtgtattcttcttctgtaacctcttttggattcctcagccatatagctttcacatcatttaaaagttcccactcataagttgtttccttcact

SEQ ID NO: 221688 - DNA, 534 bp, Glycine max
gtgcggatcactacgaaactgctcgtggtgtacagaaagtgcttcagaactacaagaatcttcaagatatcattgctattttgggaatggatgagctcagtgaagatgataaattgactgttgcccgtgcccgtaagattcagcgattcttaagccagcctttccatgttgctgaagtcttcactggtgccccaggaaaatatgttgagttgaaggagaacgttgccagcttccagggtgtgttggatggaaaatacgatgaccttccagagcagtcgttttacatggttggcggtattgaggaggtcattgccaaggccgagaaaattgctaaggaatctgcagcgtcttaatcacacacagccctgttctcattttaatcccttttttttttgtaattgctaaatttaataatttaggaactcttggcaatgccaaacaacaaaattttccattttttggatatgaaaatgtatcaggttattcctttctttcattttaaatgtgccgactgtgagatgaactacggtcaat

SEQ ID NO: 221689 - DNA, 570 bp, Glycine max
  unsure (1)..(570): unsure at all n locations
caaattctcaaatccaaatccaattccaattccaattcccaatcttctcaaaccctaattcctcatcttgaaaatgagagaaatcttgcacatccagggagggcaatgcgggaaccagatcggagcgaagttctgggaggtgatatgcgacgagcacggcatcgaccacaccggaaagtacagtggcgactctgaactccaattggaacgcatcaatgtttattacaacgaagcgagtggcggaaggtacgttccacgcgccgtcctcatggatctagagcccggcaccatggactccgtcagatccggcccctacggccagatcttccgccccgacaacttcgtcttcggccagtccggcgccggaaacaactgggccaaaggtcactacaccgaaggcgctgagctcattgactccgttctcgacgtcgtccgcaaagaagccgagaattgcgactgcttgcaagggtttcaagtgtgtcattctcttggtggaggaacgggttctggcatggngacgcttctgatctccaagattcgngaggagtatccggatcggatgatgttgac

SEQ ID NO: 221690 - DNA, 452 bp, Glycine max
ctcgagccgaatcggctcgagcctctttgaggaaactctctaccagagcacagctgcaggcaagccctttgtggaagtcttgaaggaggctggtgttcttcctggcatcaaggttgacaagggcacagttgagcttgctggcactaatggagaaaccaccactcagggtctagatggccttggtcagcgttgcgccaagtactatgaagccggtgcacgttttgccaagtggcgtgctgtgctgaagattggtcccaacgagccatctgagctggctatccatgagaatgcctatggcttggccagatacgctgtcatatgccaggagaatggcctggttcccattgttgagcctgagatccttgttgatggatctcatgacattcacaagtgtgctgccgtcaccgagcgtgtccttgcagcatgctacaaggcttttgatgatcaccacg

SEQ ID NO: 221691 - DNA, 538 bp, Glycine max
aacgaaaaatctcgaaagatatcttcattcaagaatgaagtaaaagataatgtctttaaattcaagtagacataattaactctaattgcagggcaggaacaaatggttctaagtaaaatttctccgccacccaccccaatccactggcgtgcgactgggttccaaaacaaatcaaaatttacctaacaaatttttagcattacaaccaagtttcttccaattacaaccaccatatcaaaatatcacagcactcatattacgccaaaaaatgctggcaccccaatcatccaaagttggaccctcaggatattttacattcggtcttctctcctcctcggagcacacgtgatgatttcatcaactctaaggatcatctcagctgcctctgttgaagatagcaatacagcttgcttgactttgaatgcttcgcatatcccccgttcagccatgtctccaacagagccagaaataacatcaattccagcagtacagcccttcttctgatgctctgcacggagctgagaaatcaactcagcac

SEQ ID NO: 221692 - DNA, 557 bp, Glycine max
ctctcttctgttaccaatggctccctcatcaaactacatttctttccttttcctcaccacccttttgtttgctcttcaaatcagtgcaagagacagccagttcttcagcaaagtcacccattttgacaaaaacagtgtcaaagagacagaacttcccaacaaagaagcaccagaagtgaacaagccagagcaacaaccacctttcattccggagactgaaaacagctatggcctatatggtcatcatgatgagtataaccaagtcccttccaccaccaccaaccccacttcttaccacccctacaagaccgagtttgagaactccaacaacaagtattacaacaatgatgcctataacacaaggttctccgaaaccggttacaacaacaacaaggattcttatgagggtaaccaatatgagttaagtgacacaaagtccacagaagaagaatacaacaacaacaacaacaagtatcacaactcctatcagaacaacaaccagaagtactacaacaacgatgcttgccatggcatatacttctacaacaacccacaca

SEQ ID NO: 221693 - DNA, 528 bp, Glycine max
  unsure (1)..(528): unsure at all n locations
gtttggttttcacttttgttcatcgtttgcgagacacacaggagagaagagatggcgacgagggtggtggcggaacagaagccgaagacgaagattgtgtgcacgctggggcccgcatcgcgctctgtcccaatgatcgagaagcttctgcgggcgggcatgaacgtggctcgcttcaacttctcccatgggtcccacgagtaccaccaggaaaccctcgacaacctccgcgccgccatggagaacaccggtattctctgcgccgtcatgctcgacaccaaggggcctgagattcgaactgggtttctcaaggacagtaagcctatccaactgaaacaaggtaatgaaataaccatttccactgactatgacctaaagggtgatgagaagacgatttgtatgagctacaaaaagctgcctgaggatgtgaggcctgggatggtcatactctgcgcggatggcaccatatcatttacagttntatcatgtgacaaacaagcggggttggttcaatgccgatgcgagaac

SEQ ID NO: 221694 - DNA, 391 bp, Glycine max
  unsure (1)..(391): unsure at all n locations
tggaacgatcgagtgggtaagcattacgatctattttnctttggcttcaggataggcctaataagaaaacaaataattccaattcatatatgaacatttttgcctccttatttcttgaaaatgtggaattggaattccccgaggaattccgatctcatttcctttggcttcaggataggcctaataagaaaacaaataattccaattcatatatgaacatttttgcctccttatttcttgaaaatgcggaattggaatgtccccgaggaattgcgatctcgttaactttggcttcaggataggcctaataagaaaacagatgattgcacttcatatatgaacatccttgccttcttatttttggaagatgtggaatcggaattccccgcag

SEQ ID NO: 221695 - DNA, 449 bp, Glycine max
attgctcccaaattcttcaccacggttcctcttcggaccatttcacccttcgcatgtcgcttctcagtccgttccatcgctgactcttctcctttcaacaaaatccgcattcaaagggatgatactgcatttgatgcatatgtcgttggaaaaaacgacgctcctggaatcgttgtgcttcaggagtggtggggtgtggactttgaaattaaaaatcatgctgtgatgatttctcaacttggtcgtggatttaaagctcttattccagatctgtacagaggaaaggttggtctagatgttgcagaagcccaacatttgtttgatggtcttgattggcaaggtgctgtaaaagatatcaatgcttcagttaactggcttaaggcaaatggttcacaaaaggctggtgttactggattttgtatggggggtgctctcgcaattgcaagctc

SEQ ID NO: 221696 - DNA, 501 bp, Glycine max
ccttctggttacattgaccagattcacatagatatggattttggcccacacttagtgctagggaaccttccttagatttttcaactagtgttgagggaattgaaccggagaggttattcttctccaagttcaggatcttcaagtgttgtaattgagacagaaaatcgggaacttcatcctttaagctattatttgataaatccaaattctccagcatggtgagatttaaaattgaagggtctatctttcctgacaatccactcgaagataaattcaaagttgtgattcttggggagtcatttccgggataagtacaattcagaccatcccacaagtagtctataggggcgcatggatcaccttgccaatctattgttaccccataaactgacttgatggctgtaatggcatcaacatctccttggaatgtatctgattgctggaagtctattactcttgtaattcaatggcactgatgatgggaggcacggttgaattctt

SEQ ID NO: 221697 - DNA, 252 bp, Glycine max
gtgattagaaatgggaatgtcgaggagtttccttgttggttttataggaggtctagttcttgcagttctgattcaagctcaagaccaatcaggattcatcagcatagattgcggagctccttgcggggggagctatactgagttgaccaggacaggcataaattatatttcagatgcaaatttcattgatactggtgtgagtaggaaaatagtatctgaactcaaaagtgtctatcaacaacagctgtggga

SEQ ID NO: 221698 - DNA, 399 bp, Glycine max
cctcgctctatttctcagtctctgtgtttgcggctgaggattccgaacgagtgaccttcttcgtttctcgcaaagtttaagtaatcatgggtaaggaaaaggttcacatcaacattgtcgtcattggacatgtcgactctgggaagtcaactaccactggtcacttgatctacaagcttggaggtattgacaagcgtgtgattgagaggttcgagaaggaggctgccgagatgaacaagaggtcattcaagtatgcctgggtgctcgacaagctcaaagctgagcgtgaaagaggaattaccattgatattgctttgtggaagtttgaaaccaccaagtactactgcacggtcattgatgctcctggacatcgtgactttatcaagaacatgattactg

SEQ ID NO: 221699 - DNA, 532 bp, Glycine max
  unsure (1)..(532): unsure at all n locations
caagcttccacaacggccaaaaacacaacttgggttgtggtatgaaggaagaacgtgcgaatttgatgatgggttttgcagcagcagcaggagggggaggagttatgaacaacggctcttcttcttcgtgttgttcttctaactcctcttctgtttcttacttggatcctgaatcgtctttgcctttgaaccaagccacaattcaggttattaacaatagcaacaacaacaacatgtttctctaccaagcacagaacctgagagagtttgatcagggttataataataataacaacaataatagtgaaatcatggtgtttaagcccgagcctttgtctttgtctctgtcatcacacaacaacggtgtgaatcttcagcgatatggatctgtggtttatggtgataaggtatgtcgggttgctggcgntccntcccccaaaaaacccaaaattgcgactgcttgcaagggtttcaagtgtgtcattcttttggtggaggaacgggttctggcatggggacgcttctgatctcc

SEQ ID NO: 221700 - DNA, 519 bp, Glycine max
gttttggtttggtgtttttcttaagcttgagatcaggaattaatttcagaggttcagagaatggcaacggattcttctaatggtaatgggcatcaccaaacaacaacaaagcaacctcctttgccgtctcccctgcgcttttccaaattttttcagtccaacatgagaatcttggttactggaggagctggattcattgggtctcacttagttgacagattgatggaaaatgaaaaaaatgaggtaattgttgctgacaactacttcactggatccaaggacaacctcaaaaaatggataggtcatccaagatttgagcttatccgtcatgatgtcacggagcctttgttgatcgaggttgatcagatctaccatcttgcatgccctgcctctcctattttctacaaatacaatccagtaaagacaataaagacaaatgtgattggcacactgaacatgcttgggcttgcaagcgagtaggagcaaggattttgcttacatcaacttcagaggtatatg

SEQ ID NO: 221701 - DNA, 454 bp, Glycine max
caactcaacgaggggaataaatttcattaatattataagttcatacacggcaacaatttagttgatgtctttttaacaaaatccaaatacagcagtcttctaatgtaggattctctattataatatataagatgagcccagattgccacaagctgcagctttttgccttaggggacaactagctgctcatttaggatttcacgggagttgaatcttcttcctgctgctttgcaggaactggaagggggcctttttcctgcaggctcttcactgtttcatatagacactgactcactggagtgaattccaatcccaaatctttcagcttttgatttgaaaaagtgtagggttttgctctcggattcttttcatctgaacacttggtgggaactgggtactccgggaaatacttggcgagaatttcaactaattctccacggtggagggagctttc

SEQ ID NO: 221702 - DNA, 542 bp, Glycine max
  unsure (1)..(542): unsure at all n locations
attacataccacactctgtgaaaaagggggagtttcttattccttctagacgcttccattgatcggcgatttctgatacatggcggagcatcacgaacacgaggaagtgaagggtgagtccttgttggagaagatttctgggaagatccacgaccacgattcctcgtcttcgtcggattccgacaacgacaaaaccagcgccactgattccttcaagtctaatgttttcaggcttttcggcagagaaaagcccattcatcatgttcttggcggtggaaaaccggctgatgtttttctatggagaaacaagaagatatccgcatcgacactcggagttgcgaccgctatatgggttctgtttgaattgcttgagtaccacctcctgactttggtttgccacttcctgatccttgctctgcggngttgttcttgtggtccaatgcatccactttcatcaacaagagtccaccaaagatcccacaagtgcacattccagaggaacctgttttaaaatttgcctctgctcttagaatgagatcaat

SEQ ID NO: 221703 - DNA, 552 bp, Glycine max
aaaaaaaaaaaaaaatccgcgattcgctcttctcttggaaaagtgaaaaccagaagtacgaacgaaagagaagagcgatttagaagtgagagaagatggggttgtcgttcacgaagctgttcagcaggttgtttgcgaagaaggaaattaggattctgatggtaggtctcgatgctgctggtaagacaaccatcttgtacaagctcaagcttggagaaatcgtcaccactatccccaccatcggatttaatgttgagactgtggagtacaagaacatcagcttcactgtgtgggatgttggtggtcaggacaagatccgtccactgtggaggcattatttccagaacactcagggtctcatttttgtggttgatagcaatgatagagatcgagtggttgaggcaagggatgagctgcacagaatgttgaatgaggatgaacttagagatgctggtttgcttgtttttgccaacagcaagatcttcctaatgcaatgaatgctgcagaaataactgacaagcttggacttcattcactccgtcaacgccactg

SEQ ID NO: 221704 - DNA, 411 bp, Glycine max
ggaaaaaaggggacaacaccctgcaattacattaagggaaaccataccgttaaaagggaccatttttaatggaatgccaaatcctaaacctggttttaaaaacgttaaatccctttggcaacaaacagcttttaaactttaattattaaaccatggggtttccctaccctaaataaaacaacaaaaccgccacaccattggcgaaaacaatacataaatggttttgaaaatgcaaaatttgatttggtttttaaaggaatatccagtaacctaccaaacatgtttgggaaaacatgttcaattactggggggcaaatttgattcccttctcaattgatgatttgagttcaggcttaagggtttcgaggccttgttgctcaaaatttgagaggggccccaagcccagaaatt

SEQ ID NO: 221705 - DNA, 448 bp, Glycine max
  unsure (1)..(448): unsure at all n locations
ctcgttttttctcagaaccttctgaggttaaagcaaaaaacaaagagagagagagagagaaaatgatgaagccatcgatgctcagatctctccactccgccgccacccgcggcgcctatcatctcttccgccgtgggtacgcctccgagccggtgccggagcgcaaggtagccgctctcggcgccgccggcgggatcgggcagcctctctcccttctcatgaagctcaatcccctcgtttcgagcctctccctttacgatatcgccggaactcccggcgtcgccgccgatatcagccacataaacaccagatctgaggtagtggggtaccaaggtgatgacnagcttggaaacgctttgctgggcgccgacgttgntataattactgctggtgtgcccacaaagcctggcatgactcgtgatgatcttcttaacatcaatgctggcat

SEQ ID NO: 221706 - DNA, 588 bp, Glycine max
  unsure (1)..(588): unsure at all n locations
gcggcacccaccatgaaagccggcaagttgccaccaccaaacaaagcatcccaaggaccacttaatgtagacaccaccatctgtggcaccacaattgcaagattgaggactcccaaagataaaccttggcctgctcctgaagcgctgcagtatattgatgctagagcaaatggaacactgaaagtaatcgcaagaggaactccgagaaccccaaagaaaaccatggacccaaccaccaccccttcggaggggtgacccacggcggcgggattcatcttgcgctggtgctccgccaccttggtgatcaccaccgtcattccgaacccaattgccagaataaagttcacaatcgcccacagcctcttcactcccccaaccatcttccccaacggctccaccgccagcgacatgaagcccaaaacgacggcgtttaccatcagccctagcgacccaacgcgcactccattggcgtacgcgtnctcccccacttgaccaccgtacacctcgcgccccatccaatcggtgtcgaacaaaagtaagggaaccaccccacccagttcacagctgtcaccagcatcagcatccaca

SEQ ID NO: 221707 - DNA, 471 bp, Glycine max
tgttccttctccttgtgatcttcttcaaccttcagagtgagaaaacacattcagaaaccacgtttctctcttcttcttcttcttcttctttttcttcttcttcttcttcttctttttcttctctcgaggtcattattaagtattcaccatggaggcaccatctcccaccaaacccaacgacccaacaaaaccttccaacacttccaccacccttagtctggaggccggcccggcccaagcgagcccactccgaaaaatgtttgccgtggcgtccatcgccgccggcatacagttcgggtgggctctccagctctctcttctaaccccctacgttcagcttttaggagtgccccacgcggcggcctccttcatctggctctgcgggcccatctccgggctcgtggtacagcccattgtgggctactacagcgaccactgtacctcccgctttggtcgcaggcgcccctttat

SEQ ID NO: 221708 - DNA, 485 bp, Glycine max
actccaaaaaggaagaatatattattttggttggttacaacttacaatgagaaagaatataaagtaacgaagtggagagtggtttacaaataagaatgcttttcaaatttattaagctagtccatgattccttagtattattataagttgcattgtgagcctatagtatagtattaataaaattgatgcctactatctatgcgtatatgtgagttatttttcagcaaagaatcatgtcccatcatcgcagggggaacaagcctcttgtgcaatgtcagtaatctgaaggccagaatcatatataagtccatttttccaatcagcaggtaggaccttctttgcccaaatccacttgccatcataccctgccgttaccactaacctaaattgcaatgcgccttggggtaccctgcttgtgtcccatactgccccgtggtttctgctcatgaagctccagtttgaagacccaacctgagccacatcaa

SEQ ID NO: 221709 - DNA, 566 bp, Glycine max
aaaagattaacaataaaagtgtggagtactgttgatagcaaagatgtttgggatcttcgacaaggggcaaaagataaaggggacagtggtgttgatgccaaagaatgtgttggacttcaacgccataacctccatcggtaaaggtggtgttattgacacagccaccggcatcttaggccaaggcgtcagcttagttggtggagtaattgatactgccacttccttcttaggccgtaatatctccatgcaattgatcagtgctactcagactgatggcagtggaaatgggaaagttggaaaagaagtctatttggaaaaacatcttccgaccttgccaacgttgggagcaaggcaggatgcgttcagtattttctttgaatgggatgctagttttggaattccaggagcattttacatcaaaaactttatgactgatgagtttttcctcgtcagtgttaaactcgaggacattccaaaccatggaaccattgaattttgttgcaactcatgggtttacaacttcaggagttacaaaaagaatcgcatttctttgtcaatgatacata

SEQ ID NO: 221710 - DNA, 357 bp, Glycine max
atccctttgtgactccaaacaaagcccacacaccaacttcatttccattcacaatgtcaatttcctccacttccaactccctcattccccccaaatctttaatcccccaatcccaccccctcattcccaacatcaggcccgggctccggcccaagcctggcccatccccttccatcctcgccgtccacgccgccgagcccgccaaaaaccccgtcgtcaccgacaagcccaagccccaagcccaacaatctgcatccccggccgcggcccgtgcaaccaaatgggccgtggacagctggaagtccaagaaggccctgcagctgcccgaataccccaaccaggaagatctcgaggccg

SEQ ID NO: 221711 - DNA, 506 bp, Glycine max
gtcgacgcaggaggcagtagtagcagattgtgaagaagaacgaaactggctggaccttccgcgagacgtggtgtgcacgattttccagaagctgggcgcaatcgaaatcctgacgcgcgcccagcgcgtgtgctccgtgtggcgcggcatctcgaaggagcctctcctgtggcgcaccatcgacatgcgcaattcgggcgacattgaaaccaacttcgtgttcttggccatgtgccaccgcgcaattgactacagctccggccacttgctccatatcaacatcgagtatttcgccaccgatgatctcctccgccacatcacccattctacaagtaatctacgaagcctacgtcttgcatgttgctaccaaatttcagatgaaggattgtgtgaaattgcaaaagagcttcctcagctggaggagcttgatatatcaatcagcagctttaacccaactagggaccctctagaagctgttggccggtgttgccgacacttaaaaacat

SEQ ID NO: 221712 - DNA, 567 bp, Glycine max
actgataatttaaaatttttatttctctaggataatatacaatcaaacataacccaagtagcggggttacaaaccaaccaaaccacagactaatagcactcgaattagcaaccagatacacgcacaatttctcacttttgtttttctcactcataaatagatcacaagatagggaaaaaggaaaaagagagagagagagagagagagagagagagagagagagaaattaaggcacagccctcgctactatggtcccataaaccttttaaatatataggtgatgcagcagtttaatcactgtcactgctgctgctgctgtcatggccatgctcatggccatgctccttcttcttcttctacttcttcttcttctcgccctcggcggcgccgccctcaccatggatcttgtccttgactttgtctaggaacccctctttgtgctctggcttgtgctcaccatggtactctccagctttgtgttcaccatgatgctctcctttgtactcactactgggttcaccatggtgcttcccctttgattctccagcatggtgctcacccttatgc

SEQ ID NO: 221713 - DNA, 539 bp, Glycine max
  unsure (1)..(539): unsure at all n locations
gccaagtgaaagtgagaaaaaataaaaatcaaagagcataatgtcagggatcattcacaagattggggagacccttcatgtgggagggcacaagaaggaggaggagcataagggtgagcaccatgctggagaatacaaaggggagcaccatggtgaacacagtagtgagtacaaaggagagcatcatggtgaacacaaagctggagagtaccatggtgagcacaagccagagcacaaagaggggttcctagacaaagtcaaggacaagatccatggtgagggcggcgccgccgagggcgagaagaagaagaaggagaagaagaagaaggagcatggccatgagcatggccatgacagcagcagcagcagtgacagtgattaaactgctgcatcacctatatatttaaaaggtttatgggaccatagtagcgagggctgngccttaaatnctctctctctctctcttnnnctctctctctctctctctttttcctttntccctatcttgggatctatttatgagtgagaaaaacaaaagt

SEQ ID NO: 221714 - DNA, 423 bp, Glycine max
cgcaaagagaagagatctgcctcctttttttatcaaatctatctcttcttcaagaatagttgaaaatggggctgtctttcaccaagttgttcagccgactgtttgccaagaaagagatgcgtatactgatggtgggtctcgatgctgcgggtaagaccaccattctgtacaagctcaagcttggagagattgtcaccaccattcccaccattgggtttaatgtggaaactgtggaatataagaacatcagcttcactgtctgggatgttggaggtcaggacaagatccgtcctttgtggagacattacttccaaaatacacaaggacttatttttgtggttgatagcaatgacagggaccgagttgttgaagctagagatgagttgcatagaatgttgaatgaagatgagttgagagatgctg

SEQ ID NO: 221715 - DNA, 460 bp, Glycine max
  unsure (1)..(460): unsure at all n locations
attcaaagatttcaacaaaataaggtaaggcagagcatattacgttcacgacaggaaacagagtatttagtcgatggtttcagaacctcaccaaaactctcatttccctaagcccaaaaagcaaaccaataaatccaagagctaattgcttataatgtaaacccgaaaaaagaaaaaagaaaacgcaaagaagccacaccctagctaaccctatttctaaagggtaatattcagatttagaaaaaagaaaacaaaagaaccacagaacacaaaagcaaggccagacccccgtactattgtatcaacgagcactggaagggcagtccctggcaaaatgcccggactccccacagttgtagcagctttcggcggcacccccaccaccgncgtaccttccaccgccacccccaccttggctgcagtccctagctatgtgaccagtctcgccacacttatagca

SEQ ID NO: 221716 - DNA, 576 bp, Glycine max
  unsure (1)..(576): unsure at all n locations
ctattccacttccaccgaccaaaacgcgcaacacgttgtaattaaaacgacaccgaatctaatgggcgtgttcagcgaaaacccgaattcggacccggttgtgatccgtccggtttggtgcttagatctcgaatccgtatttcaactcatgcgtgaactcatcgaccactatccttttatctcgatggacacagaattccccggagttgctttccgaccacacctggaccccacaaaaccctacaaccaccggagcaacaatcgcaaccgccactccgaccactacgcgcctcctcaagtccaacgtcgacgctctcaacctcattcaggtcggactgactctcaccgacgccgccggtaaccttaccgatctcgccggaaaccgctccatctgggaattcaacttccgtgacttcgacgatgcgcgtgacgcctacgcgctggactccatcgatctcctgcgacgtcaaggaatcgatttngcgcgtaacgccaccgacggcgtagagtccacgcgcttcgctgaactcatgatgtcttcgggactcgtctgcatcgattccgtgagctgggtga

SEQ ID NO: 221717 - DNA, 537 bp, Glycine max
gataaaaaaaatatattatatatatcactcaaatggcaacacattaatccgaacacacaggtacatacaccaatatattacataaggtaatatgtagattctaaattaatttattctagtaactagtaacaactcagaaataaacaaccaacggcagaatatgatgttctctgggcagttaagctcatcataactagtcatctggctaccagatgttggcttattggggtcttccttctgaaatcttaacaattagaaatccttggtcacaaccaaatgcaagctgagatgatcctttcttgtatccaatactccatactctcttgagaccaaagttcaacgtggtttgaagcctgtaagtgacagcatcccatattttaacagtagaatcctctgaagctgttattattataggaagctcaggatgagcacatattgctgtaacattgttttcatgtccttcaagcgtctgtacacagtttctagaatgataatcccataccttggcagtgtaatcatcagaaccacttaaaagat

SEQ ID NO: 221718 - DNA, 542 bp, Glycine max
gatcacaacaaaattttaattaaaaattcgaactaaaatgtaagacttttaaacataaacgcacaaccattgtatagtggggaaaaaacaaaacgcttgacttgaagcggacaatttttcccatttacattgtatcactatcgtctaaataaatgactccatgaagcacatttgcagcagcacaaaatgcacagccgctgccttttattaatccatagatgccatcatacacagcactgcattactaaccatgacgttcaaacttcagtggctgaccaacttaagagagtttgccttctcttgcagagaatccaggaggctgtcaaagctcttcttaaacgagtccactccttcaagttcaagctgggaaccaacaaagctccagtcaatacccaatttctggagagcattgtatattccttcagcttcagatgcatttgagtctattgtcctggatacggtaccatgatcaataaatgcttgaagggcttggtctggcatggttgatacagtgtccggttcaataagaggagcaacatata

SEQ ID NO: 221719 - DNA, 409 bp, Glycine max
tagatcaaacagatggtggtgatggctatgtttctgttgaagactacaccaagatcactgctgacagctgaaggaaccatacaagctgtaaaatggcttcataaatggggggatcatcccaatgtgtatattaagactcctgctgcagaagcgtgtcgctgttcaatgaacgaagatattgctaatggaataagagagaatgcgactctgatattctctctggcacgatatgaagctgacatagatgcttacttggatggtcttgaggcatctgggttaaatgacctctctagagttacaagtgttgcctctttttttgtcagcagagtggacactctcattgacaaggcccttgagaaaattggcgccccaaaggctgttaatatacgtgggaaggcggcaaaagccc

SEQ ID NO: 221720 - DNA, 228 bp, Glycine max
accagctacacagcatcagtacgggtatacgaggcaactactgtgctctcatggggaagaacaccatgatgaagcgctctgacaccgacgcacgctgataaagccggagaccatgcctatctcaaccttatccgactacttgtctgacgggagggatggattttcaccagggcctacctgactgaggatagtgaggaggatgctaaagacaaaggaggagcgccagct

SEQ ID NO: 221721 - DNA, 582 bp, Glycine max
  unsure (1)..(582): unsure at all n locations
gttattattatagcaggcacctaatagatagatagatagatacgtagggatagggttaaggccatggagcgcatcatctgcgccaagtacaagctaggtcgcaagatcggaagcggatccttcggcgaaatctacctcgcgacgaatattgataccttcgagatcgtcgccgtcaagatcgagaacggtaaaacgaagcatccacaattgctttacgaggccaagctctacaatattcttcaaggaggaagtggcatcccgaacataaaatggtgcggcgtagacggggaggataatgtgcttgttatggacttgctgggacctagtcttgaggatctttttgtctactgtggaagaaagttctgcctcaaatctgtgttaatgttggccgatcaaatgatgactagaatagaatatgtgcattctaaaggattcctacacagggatataaaacctgacaactttctcatgggacttggtcggagggcaaccangtttatataatttgattttggcttgcaaaacgatatanggactactcaactaatcgccacatccctacagggagaacaaaaacttaac

SEQ ID NO: 221722 - DNA, 469 bp, Glycine max
ccccccctctagtagtcagtggtgggaagctgctcgtgggtgtggctgataaagacaacctcgtaaacaaggccagcgattccaccaccgatgagaggcccggcccagtagatccagtggttggtccaggtccagctcacgacagcaggcccaaatgtcacagcggggttcatggccgctccagagaaggccccacccaacaaaatgttagcgccgacaatgaaaccaatggcgatgggagcaataattcccaaattacccttcttggggtcaatggcagttgcgtagaccgtgtacaccagaccgaaggtcattacgatctccaacaccaaggcgttgccaactccaacttcagcggagagtccgaatgctggaacagtggaggcggtgacgaatgccaagaggagggaggcgacgatggagccgaggagctgggcgatgacgtataccatgccgcggaggaaggtga

SEQ ID NO: 221723 - DNA, 405 bp, Glycine max
gaacactgcacattatgaatgatgtaaatctatttaacgcagctcgtgctgtttcttttatgatccaactataatggttcatggtattgctccttgagctccaccctattaactccgtgacacttatattgataacaaaaaagagccgtgcattataaagatatcctctccttcctcatcatcttaccgtccttcacgtgcaacctactaatagatacttctaaggagcagcgagatccttagaagcctcacagaactccagattattgcatgcgggtcaccaacataccaatagacaagagccctcttggcgaacatcacagcaaacttggggctgctgcgacagaacccctccttatctgtggcgttgcagctgatcatgcttacaggacgctgaaccttacc

SEQ ID NO: 221724 - DNA, 302 bp, Glycine max
cttatttattttatgttacatggtttgaagtgagatcagcgagcaagtagtaggggatgatttgggagcaaagaagaaagtttttgtggctggagccactggtagcactggcaacagaatcgtcgagcagttactgtcaaagggctttgcatgttaaggctggggttagagacatccacaaggccaggacaatcctttcctctgacaacccatctcttcaaattgtcatcttgttcgcacactaagtgattgtttttaattattgagcctaaacattggaaatttggtgtatatgcactatg

SEQ ID NO: 221725 - DNA, 526 bp, Glycine max
gccgcgaatcccgaagacaaaccctccgaggacgatctcaaggcctgggacgctgaattcgtcaaggtcgaccaggccacgctcttcgatctcatcctggctgctaactacttgaacatcaagagcctgctggaccttacatgtcaaactgtagccgacatgatcaaggggaagactccagaggaaattcgcaagacctttaacattaagaatgacttcacccctgaggaggaagaggaagttcgtcgggaaaaccaatgggcatttgaatgattttgttaatctcaaaaaatctgaatcaaagatctgccatgtggatttatgctatgcttgtttgtttatcaaagatctctcttgtagatttgcctatgctatatacttgtttgttttatattcaagactatttccgttgactgtgttcactacaactagtcataagaattatcttccttcatgaacttaagagcactttgaattgtaagtaatagttatgatgagggatgcgttgattctgacacgagggtta

SEQ ID NO: 221726 - DNA, 579 bp, Glycine max
attcatcatgtaaatacaacacaataacaagtcatccataagcagcatataggatttcttgagaggtacatataaagccagaagaaaaatatataagatacttttcttccacagtctctagtaaaaggaccctaaaaaaataaaatatgacatcatagggttttaactgatgatgaatctaaatttaacatcgacgttcctgaaaccccactacaacatatttgtcagaatctagtgcccacttcaatctttctttttatctttcagaggtcctctgggtatcttgctcaataccttcgcatcaaacactgcatattgcttcttaatctcggcaattgctttctcaccaaaagagtcgacatgatcttcatatttctcataaagcacaggcacagtgtgaagcaaaacaaaagctatgtagaacaaggtcaagaagttggcccaacaacccagaatagagaaaacccataatccagcaatcactgataagaacttcttgagatccctcccagaagcaatatcccttaacaccgcaaaagcccgattgatctcaattctaagagcagaggcaaattttaa

SEQ ID NO: 221727 - DNA, 517 bp, Glycine max
aacgcacaagagggtgcaagcgttccaattatagctaaaagtattagctaatttaagcaatcatacaaacccaagttacacaaaagaagagaatacttctagcaagcattctgctattacaacattcgctagaaaagataagcatctttctccaagaaccgccagactcgcatgaaatcaccagacaagaccaaaatttttcaaatgtctcatgctttgctggcaatgttgttagaaagccagtccaaaccctcatagagaccctctccagaagttgcacaagtgctctggatataccagtggcgttgacggagtgaatgaagtccaagcttgtcagttatttctgcagcattcattgcattaggaagatcttgcttgttggcaaaaacaagcaaaacagcatctctaagttcatcctcattcaacattctgtgcagctcatcccttgcctcaaccactcgatctctatcattgctatcaaccacaaaaatgagaccctgagtgttctggaaataat

SEQ ID NO: 221728 - DNA, 533 bp, Glycine max
atagaaaagctatgcatttgaatttccacgatacaagactatcaacgtccaatcataatagtaagccatttactatataattttacaataaattcaagaaaaacatcaatttataagaaatatgggacgcctgtcctggggcctctcatctggttgttctcctctgtttcagtgaaaaatttaacttctctttccatattttcattgaaactaagaatagaagctacatttccacaacggtaacagtaattaggtgcggaccatacagttacaaggcctttatcctggaacatatacttaagaccttcttgaacgagttggtgtgcccgacaaaccagatcaagagtgtttatgttattgaactcagaagtgacccgggatccaaaaagccaaccagctccacgaggactgactgcccatgtttcgatatcttcaggatcactccacatcagatcacaaaatggtccctcatgaggaatttcacagtgcctctcaatgacccttatctgatctattgatcgaatgtctggaga

SEQ ID NO: 221729 - DNA, 474 bp, Glycine max
acggaaagggtccatgggatctacccggtgcacgatggtcatctccttcgagaaggggagctacaacttgtttgcgaatatgcaaacgagccccttattgaggaggcaaacgtgcagcctgttaaccgtccagaggctgcttgtggtgatatacatggacagcctcatgagcttgagcaacattctcacactgctgctgatgtgacacaaacacatttcgttcatatgggagacgctgttgatcggagccactataggaaagaagcctataccctccttttactattaaaagctaggtacccaactcatattacccttctacatgggaaccatgctggatcacaacttacacgagtctctggcttttataatgaatgccgacactggtatagtgatgctaatgctcggcgaacttgaccggaagatgctgactatgctactactggtgacgtaaagcataggactgtgctttgt

SEQ ID NO: 221730 - DNA, 343 bp, Glycine max
ggaaagggagaacccactttattatatgaaaaccgagagcatccaaatacaatagtgcagaagttcaggccataattaccccttgacatgcataaagtctatgtttttcagaagtcccacatagatagggaaaccacaaactctttttaattaaaaagaaaaactggggggaattcctttgaaagtcaacccttcctcacttgaacgatggaacaaagggtttgggagctgaactggcccaacccgggtttttaaacttggatcactggaccttgcattgatttttccttcaattccagacaggtgggttccaaaccttttgaaagcttttaaagccttctta

SEQ ID NO: 221731 - DNA, 415 bp, Glycine max
accagctccagaacattcgcacgggtctacgcggcgactctgttgtcctcatggggaagaacaccatgatgaagcgctctgtcaggatgcacgctgagaaaaccggaaacaatgcctatctcaaccttatccccctccttgtcggcaatgtgggattgattttcaccaagggtgacctgaatgaggtcagtgaggaggatgctaaagacaagggtggagctcctgctcgtgttggattggatgctccaattgatggcgttagttctcctggcaacacagggctcgatccctctcagacctctttcttgcaggtgcttaacattcctaccaagagtaacaaaggtactgtggaaatcattacacctgtggaactcattatgaagggagacaaggttggatcatctgaagctgcatt

SEQ ID NO: 221732 - DNA, 465 bp, Glycine max
gcgctcttttctttttttttttttttgaaacttttgtgaaagatttattatccatagaagtactcttgtgcttgccagtccaaacgcattactaggtagtatacacatacaaacacaacacaaaatcaaagtgacaaccatcgattaataataaatatgttggacaaaaaaaaaaaagaacaaaaatatctttctcttgttggttttgaaggcacttttacactcctagaggggcaagaggttgctgcgatctgatcctgctctttctcaaacgctcggcgatgatgaaagcaagctcaagagattgggaagcattgagccttgggtcacagtgtgtgtggtaacctgagctcaagttatcaaatgtgaccgttcttgacccaccaatgcacacggccacattctgacccgtcatctctagatgaacccctcctgggtggcttactttttgctcgtgcacattaa

SEQ ID NO: 221733 - DNA, 573 bp, Glycine max
catataattcaattgacttcacaaatcaaatagtaaacaatgctatttggttatacatggaaaaaaattcaaattattcttcagtagcaaaccgttgttctttttcaagagaaatacatgctcaagtaatgaaaatctaagtggggcaagaaaattagaaactggagatcataatggccgaagtaagctcaacttccttgcatttaactaacaaatctctatgccttgtttgcaatgttgtttgagagccagtcaagtccttcatagagcccttcaccagatgtggcacatgtgctctggatataccaatgacgctgccggagggaatgaagaccaagcttatcagttatctcagcagcattcatagcatttggaagatcttgcttgttggcaaaaactagaagcacagcgtctctcaactcatcctcattcaacattctatgcaactgatctctagcttcaacaactcggtccctgtcattgctatcaaccacaaaaataagtccttgtgtattttggaagtaatgtctccacaaaggacggatcttgttctgacctccaacatcccagaca

SEQ ID NO: 221734 - DNA, 328 bp, Glycine max
atttctcagtctgcggaacttgtttctaccttcactaagcacatcacgaaccctctctttccggcagctaggttaaagaacatcaatggcaggtcgtggcaaaaccctaggaaccagcaccgccaagaaggccacctcagggagcagcagagccgggctgcaattccccgacggccgtatggaccgtaaactcaaagccggaaaatacgccgagcgcgtcggcgccggtgctcccgtatacctagccgctgtcctcgaatatctcgcagccgcagcttcggagttgggtggaaacgctgcgagagacaataagaagactcgaattgtg

SEQ ID NO: 221735 - DNA, 541 bp, Glycine max
gccgcgaatcccgaagacaaaccctccgaggacgatctcaaggcctgggacgctgaattcgtcaaggtcgaccaggccacgctcttcgatctcatcctggctgctaactacttgaacatcaagagcctgctggaccttacatgtcaaactgtagccgacatgatcaaggggaagactccagaggaaattcgcaagacctttaacattaagaatgacttcacccctgaggaggaagaggaagttcgtcgggaaaaccaatgggcatttgaatgattttgttaatctcaaaaaatctgaatcaaagatctgccatgtggatttatgctatgcttgtttgtttatcaaagatctctcttgtagatttgcctatgctatatacttggttgttttatattcaagactatttccgttgactgtgttcactacaactagtcataagaattatcttccttcatgaacttaagagcactttgaattgtaagtaatagttatgatgagggatgcgttgattctgacacgagggttattgagttcataacag

SEQ ID NO: 221736 - DNA, 542 bp, Glycine max
  unsure (1)..(542): unsure at all n locations
caatgatgtcaaacatagccttcagattaactcttgtctttcttttattttctgcggtgctctctactcctccagaggatccaatcaagtgcgccacttcagagaacacaacctgcactatcacaaactcctatggcgccttccctgatcgaagcatttgcaaagctgctcaagtgttgtaccccaccaccgagcaagagcttgtgtcagtggttgcatcagcaaccagaaacaaaaccaagatgaaagtagctacccgtttttcccacagcatccccaagctggtgtgcccagaaggcgaaaatgggttgttaataagcaccaaatatctcaacaaaatattgaaggttgatgtggaaacaagaacaatgactgtggagagtggtgtgactctgcagcaacttataaatgaggctgcaaaggtagggttggccttgccatatgcaccatattggtggggtttgaccattggagggcttatggggactggtgctcatggaagcactttgcggnggaagggaagtgctgtccatgattatgtg

SEQ ID NO: 221737 - DNA, 197 bp, Glycine max
gacaaaactgttaaagctataagtaaatatgggtttcaagcacttggagcaaaggcacatgaattgaaaagagtggaaacgaaaatggtacctcaggtgaaagacaaaaaacttggtcaagggttccaaagcgcactcgacaaagatgttactctgttttttgagccatgagggaaacccatgttctccactgactg

SEQ ID NO: 221738 - DNA, 528 bp, Glycine max
  unsure (1)..(528): unsure at all n locations
cacataaccaaattctttactctgctctgcttctgcttctgcttctttgctttctctgttttttcggcacaaacagatttcggctgtttttaagtatggccataaagacaatggaactattgaaagggtgcggatcacaggaagagataatggaagtgctttctgcagtggcttcggatttgggggatgtgatcgatgatgtgaacaccttgcaggtgattccactgaatggtgcattgaccaatgaagtttttcagataaactggccaaccaaaaatgatggtgaggtcagaaaggttctgattcgtttatatgggaaggggtntgaagttttctttgacagggaagaagaaattcgaacctttgagtgcatttcaaagcatggtcagggtccacgccttcttggccgattcacctctggcagagttgaggagtttattcatgccagaactctatcagctgctgaccttcgtgacccttgagtatctgctttgatagcatctaagatgagagagttncataatcttc

SEQ ID NO: 221739 - DNA, 528 bp, Glycine max
  unsure (1)..(528): unsure at all n locations
gttgaggttttgcttttgccacttcgaaaccaaattttcttcgttcgtccttctgtgatctcttcttccaccatgagcaggtcagggcaaccaccggatttgaagaagtacatggataagaagcttcagatcaagctgaacgcaaatcgcatggttgttggtactctccgtggctttgaccagtttatgaatttagttgttgacaacactgtggaagtgaatggcaatgagaaaaatgacatagggatggtggtaattagaggaaatagntgtggtcactgttgaggcgcttgaacccgtgaataggacttgatttctgtttgttgtaaacatttatatgagtatttcctggtttaacggttgtgtatttgaacaatgtagctatggagagtcacatgtaattgtggatcttaagaagagggtcatgttggccactcatttgggttcttcgggctaaattgttcgggaaggatacctatagtgtnttagtgtgatggctgtgactagactcaatcaaatgttacgtat

SEQ ID NO: 221740 - DNA, 565 bp, Glycine max
gaataaataattaaatactctttgctacaagaagtccatctatgaaatacaggattcaagataatccacttccaccaaaaattccacctatatgaatccggaatccgattgccgcaggcacttcatgttctaaaataactttattctcctaaatacatattgaaagagcaagtttcgtttcttattttcaataaacaaactgaggatgactgaaacacatgattatagctacacatgagactagatcaaaagccaaaccagcaccaagaaaggaaataaatgtgatatgaatgaatcaaacagtcaaatataagaacactcgggacggtgtaaccctgcgatgctagactgcctcttacaattggaaataacacattatttgagcaaactaccataccaaatcttcaatcatcgggtttcgtcctcaaggttgcggaaaccattagtcaggtcctcgtgtaacttctgaaatttagcaaccaaagcagcttccccttctgctggatcctcaaatttctgagacactaatcggtagaacagatctcccatacgatgcttgataagg

SEQ ID NO: 221741 - DNA, 525 bp, Glycine max
ttcggatcttcaatctcatctccgatctcaaaatgcccgctgtttatggagctcgcttgaccaccttcgaagactccgagaaggagagtgaatacggttacgttcgcaaggtttcaggacccgtcgtcgttgcggatggcatggctggtgctgctatgtatgaactcgtgcgtgttggtcatgataatctcattggtgaaattattcgcctcgaaggggattctgctaccatccaagtttatgaggaaactgctggtttgatggttaatgatccggtcttacggacgcacaagcctttgtccgtggagttgggtcctggaatattggggaatatttttgatggaattcagaggcctttgaaaactattgctaaaagatctggtgatgtctatattcctcgcggtgtgtctgttccagcactcgacaaagatacactctgggaatcttaacctaagagaattggtgaaggtgaccttttaactggtggagatttatatgctactgtttttgagaacagtgtaatgc

SEQ ID NO: 221742 - DNA, 580 bp, Glycine max
acagaatctactctctttttttctaccttagattccttctccaacaatggctctcgccgtttccactacttcttcctcttcagcagctgctgcagcttctagctccttcttctctcgtctcggatcttcctccgacgcaaaagctcctcaaatcggttcgtttcggtttccggagaggtcgcttgtttcgtctgtagttgtcaatgtaactcaacgacgctccttggtgaggccactcaacgccgaatcgcaacggaacgattctattgttcctcttgcagcaactatcgttgctcctgaggttgagaaggaagaggaagattttgagcaaatagcgaaagaccttgaaaatgcatctcctcttgaaattatggatagggccctcgagaaatttgggaacgacatcgctattgcatttagtggtgctgaagatgttgctttgattgagtatgcacatttgacgggtcgaccctacgagtgtttagtcttgacactgggagactgaatccagaaacctacaaattttttgatgcggttgagaagcattatggaattcacattgagtacatgttccctgatg

SEQ ID NO: 221743 - DNA, 577 bp, Glycine max
cacactttctctctctctctttctctttctcactcactctcactctctgtcacggacagacagagaaaaactcagacacccacgttcacacttccctcacaccatcccttactgttccttcttcttcttcttccttttttttttttctcttaatggaatgatggaacacaacatcatcgttaacaacaacaacgtgatcgcaccgtttgtcataaaaacctacaacatggtgaacgatcccaccaccgataaactcatcatgtggggcccagccaacaacagcttcatcgtcctcgaccccctcgacttctctcactccctcctccctgctttcttcaagcacaacaacttctccagcttcgttcgacaactcaacacttatggtttcagaaaggtggatccggatcggtgggaattcgcaatgagtggttcctgcgaggacagaagcacttgttgagaaacatcgcgcggaggaagcacggtggagctgggaggagcaatttcaatttgcattcgcatcatcatcccgtgaaggtggaggaattggacgacgaaaccatggtgatggagatagcga

SEQ ID NO: 221744 - DNA, 471 bp, Glycine max
gtcaaactgttgctgtgggagtcatcaagaacgtggagaagaaggatcctactggagccaaggtcaccaaggctgcccagaagaagaagtgaatcgtgcggtttggttcatcaggggatgtcgtttcttatggttacaataaatgttggtttcttgcccttgtgtcttcgtttctaggtagcttgtttttcggacatagtttgaagtctccaccatcatctcgcaacttttgttcccagaattgggttcttgatcgacggtggcaagactccttttatcattctgttttaatgtgttgtgtttgtgagaacccctgattacatttttgttaagcgcagcgagttttagggctttgccgttgcgttgttggtttgctttttaaatgtcaactttatatttgtgttcaatttttgcttggtttgcttttaaaaaatcaaatttatgtgtcaaattttggctttggatcaaaaa

SEQ ID NO: 221745 - DNA, 220 bp, Glycine max
tgatgccccacgtgctgtgtttaccagcattgtatgttaggctaatcacactgttgtgatggttggcattgctcagacagatgcatatgtgggtgatgagggacaatctaggacgggtattgtgactataaagtacccaattgcacatggtattgcgatggagtgggatgatatggaaaagatacggcgtcataccttctgtaatgagctgatggttgcc

SEQ ID NO: 221746 - DNA, 317 bp, Glycine max
gacaaaactgtgaaagctttaattaactatgggatttaaaaactaggtgcaatgtcacctgaattgaaaagacggcgcactaaaattgttcctacagtgaatgacaaacaacttggtcaatgttaacaaaggaaactgaacaaaagttttacttaatttagtcaaacagactgaaacccatggcatggacagactcttcaggtggttgtttcttcttttcctcctacttggctgaagccgctggagcaccacatgcggcagcaggagcaagaacgggggcaacggcaaatttacttgggttcttgagagactccttg

SEQ ID NO: 221747 - DNA, 410 bp, Glycine max
  unsure (1)..(410): unsure at all n locations
gtttcaagttgcggcgtgtgggctttgtctgaactcagtgaaccacaccacacaacacagacgatttctcagtctcaatctcagtgttggagacttgatcttaagagaaatcatagtttgtttaatttcaattctgagcaaaggccaacatgcaagtttttcccagtgaaggcgaaagtgctttgtcagttgttggtccaaggccaatggaatggtctactgttccatacaatgcccctcaagctcctgggccaaatggaaagcagcggacctcaagtttagaatcaccaatcatgttgctgtcaggtcaccagagtgctatatataccatgaagttcaatccagcaggatcangtcgttgcatctggatctcatgacagggaaatttttctctggaatgtgcatgggga

SEQ ID NO: 221748 - DNA, 443 bp, Glycine max
tctttttttttttttttttttttttttttttttttttttgggcccaaatcataaatgtttgtaagatcttaactgtcaatcaaggttacaatgagctggtagtttcactacaccagcccagaaagaattaaaactattataacagtaaacaaatagggattttgagctagagaaggaagggaattttgtctcccaaaagagtgttggagtagtttccagtgaaaacttgggatgccacatattgatttgcagcctcggtgtaatgagtcccgtcccaatttacatacacactgctgtcattgcaaccttttgctgttattggggtcccattcaagatctttgttagcccacaagaaactcgactgtcaaagttcaatggtggacctccatatccacaacaagccataatgtggttgttcaaacccatattttgaatagtttgc

SEQ ID NO: 221749 - DNA, 536 bp, Glycine max
gcaaaaggaactgtttccttttggattcaattgctttcttactatcataagcaagctcttcctttgttagtgagacttcactttgaagcaaccaattctgaattctgagtgtgcaatgcaatgcatgcataaaaggcgcgcataaagctagctataattggtattcgtctgcctgtgttattggcgtttcgcacacataaagctgagagttgccatggattctaagaatgttgttgcttttcaagttgtaacattttgcatatgcttggctgtggcaaattcggttgagttcagttaccctgcagttttcaactttggtgattcaaactcagacacaggtgaacttgctgcagggatgggatttctagtcgtcccgccttatggaaaaaattacttcaaaaccccatctgggaggttctgcgatggccgtctcataattgacttcttaatggatgcgatgaaattgccattcttaaatgcctacatggattcagtgggtttgccaaattttcagcatggatgcacttttgagcagc

SEQ ID NO: 221750 - DNA, 493 bp, Glycine max
ccgccacggaaacaaatatcactttcaaattattgaacctgctcggaaacaaataccacttcaacaaaaaaaatactagtttttcttataactgctcgggataactataattattgaacctctaatcaaaaggatcaattcggggatcatgttcgcttgccatggccattccagtgcagagacatgttggacacataaccttgccagatccagagcaatttgaacatctctcagtttttgggggggaaagaggcttatctccacctttgactggggatactggttcaatcagaacaagtgctcctgtgcttgaacagcgagcacatgcaagatatccagtgccaagacagtatttgcatcttttctgctcctgctgttttacattgtttatctcaaccaccattaatgccgagattactccaactgctcctccagagaatgatgccactatgggatcaacctgactagaatacccaacagaatttagttaaga

SEQ ID NO: 221751 - DNA, 514 bp, Glycine max
  unsure (1)..(514): unsure at all n locations
gttgctccactaaaaataccttgattaaatatttatatagtgaatagcagcaaagtgccaggagcttgcgtctgcaaattctatgttgtttgatttgcgtgagtgaattgggaagatgctgtgtctgggtcgattcggcggggtctcttacggttggatttggaatcggaggagggacaacaccattaacaggcccagatggcgtttgatggcccaggaatcaccctctctcgactcagacaaaaccgccactgctggattctgcatcattgaaggccccgaaactgtacaggattttgccaagatggagcttcaagaaattcaggacaacattcgaagtcggaggaacaaaatcttcttacacatggaagaggttcgcaggcttaggatacaacaaagaattaaaaacgctgaacttggaattttaagcgaagagcangagaatgaacttcctaacttcccatcattcattccattcttgcctncattgacttctgcaaacctcaagcaatat

SEQ ID NO: 221752 - DNA, 541 bp, Glycine max
  unsure (1)..(541): unsure at all n locations
gcaaaacaagacaggttattgaccaagttattcgacgcgatatatttacatctattataatacactcatcaatccacagcacaagaacttgggtgtggataagctatttatcacagctcaatcgaaaaaattcaagagggaaaacttaagtgatgcaatgtaccatagagctagggactaaggggcataagaaaggtcatctaggactagcactgcctcctcaattgtagagttttggatgctttaactagtgagatttttgtgttttaacttcacttgttgcttggacaaaacctcagcaatgagctgacggccaaataagtgagaattcttgaggattaaattccttgttgatgaatcaaccgcgtaaccttgtcctgccatccattgtagtaagtgtagaagcaaatccttcttttcaggctgatctaaatagcgtgacacggccatcgcaaataaatcctgatcaagcttgtagccacaatcatggagggtctttagaacatcatttatatnagtgaggttacctgacttcataaat

SEQ ID NO: 221753 - DNA, 542 bp, Glycine max
cggctcgagcggctcgaggaaaagaggagtttgagaatggcaacgatcagcgcggttcaggtggagttcctggagtttccagcggtggttacttcaccagcctccggcaagacctatttcctcggcggcgcaggggagagaggattgacgattgaggggaagttcataaagttcacaggcataggagtatacttggaggataaggcggtgccatcactcgccgctaagtggaagggtaaaacttcagaggagttagttcacaccctccacttctacagggatatcatttcagggccgtttgaaaagctaattagagggtcgaagattctgccattggctggcgctgaatactcaaagaaggtgatggaaaactgcgtggcacacatgaagtctgttgggacttacggtgatgctgaagccgcagccattgaaaagtttgctgaagccttcagaatgtgaattttgcacctggtgcctctgttttctacagacaatcacctgatggaatcttggggcttagtttctctgaagatgcaacaata

SEQ ID NO: 221754 - DNA, 454 bp, Glycine max
aacctgtatcagaacactatatacaaaagatattacagtattcgaaggaacatgaaaaaaataaatcttttttggatttggggaaggggcttggaggaagagtcgaatgtcacaaaatcccattctaacattaacacctgtaaaataaacacctatccaagtagaaatacacatgacacaggaaaccattttcaagtaattctcataaaatgagttcacctgctaaaagcatcttatgatatactatgtacttttcctccttatgtgatgcaatacagcaggggatccttcaaataaatctaatagataggtctctagatcctctggtgtatacttaatgtacttcccaacatgccttccctctaactgacacctaaatcttcccacaaacgagcggtatgcaggaatcaccttttctgatatagatatccgcagctcctcccgaagctggtca

SEQ ID NO: 221755 - DNA, 567 bp, Glycine max
gaaatatccatgtaacaagtaaataaccaaaacgaacgttttaaaaataaataaaaggcctcagtgccacggtcttcaacataaaaatcaattctacagtaaagcagtaactaactttgtcccaaaactcaaaaacagattcgcatctgaaaacactaaaaagcttaacctaataacgtccaatagcccaaactctgaccacaccatcggtatagccactaaacaaagtgcttccatccgcactccagttcaaacttgtgcaataaataaccttcttcttgttggcgttaccaccaccggaggtggcatcagcctcagtcttgaggtcaaccttcaaatcctcaacgatactcttgctctccaaatcccagatcttgatgctctgctcggtggcggcgcagagccagtacctgttggggctgaagcagagtgcatggatgattgagccagcatcgagagagtaaagacgcttaccctcagccaaatcccacagaagaataaccccatctttgccaccactggcacagagagagccatcaggggaaaacagcacagtattcacatacc

SEQ ID NO: 221756 - DNA, 524 bp, Glycine max
gagaaaaaatggcagagggtctcgttctccgcggaaccatgcgcgcccacaccgacgtcgtgacggcgattgccactcccatcgacaactccgacatgatcgtgacggcgtcgcgcgacaaatccatcattctctggcacctcaccaaggaggacaagacctacggtgtcccccgccgccgcctcaccggacattctcacttcgtccaggacgtcgtcctctcatccgacggtcagttcgccctctccggctcctgggacggcgagctccgcctctgggacctcgcggctggcacctctgcccgccgcttcgttggccacaccaaggacgtgctctccgtggcgttctccatcgacaaccgtcagatcgtgtcggcctctcgtgaccgcacgatcaagctgtggaacaccctgggtgagtgcaagtacacaatccaagatggcgatgcgcattcggattgggtaagttgcgtccgtttcagccctagcactcttcagccaaccattgtttctgcttcatgggac

SEQ ID NO: 221757 - DNA, 474 bp, Glycine max
gattgcatattatttacatatatgatgctgcatattataccttaaggtgttatatatatatatatataaagagagagagagactaagactaaacttcagtaaatgcatgtttggtatcacatcctacatctccaaacaggctataagaaatctgaagcaaaatcacgtgaaggatgacagcaatccattcacagtttcatctagggaaacgatgcttggtgagtccaataaagtaggcttccttatccagtattgctgaaacctctgccttccatactccttatagtcaaagtcaattttgttcacataactcgaaataagtccccacaaaccccaaaatagatggtttgcaagagtgtatttttctgcagctttcactaactggttcactttaacattgcttggtttattgccttcagaactcagatagttgcgaataaatctttgacgttcctctagtcctggatatttctt

SEQ ID NO: 221758 - DNA, 359 bp, Glycine max
cggctcgagtacacatatagcagagttagaagctgagcagctatcagaaatatccacaacacagctgagaagttcattttcaaaatggccggtggggtggttcctgtggatgcatcaccgattggaaatggcttcgttggcaagataacgctctcagttatcatcacttgcatcgttgctgcatccagtggactccttttcggatatgacctcggaatttcaggaggtgtcacaacaatggtaccatttctggaaaaattcttcccagatatattgagaaaagttgctggtactgaagtgaacatgtactgtgtgtatgatagtcaaggtgttgacattgttcacatcttctctatacc

SEQ ID NO: 221759 - DNA, 493 bp, Glycine max
atacgtaaacatttcgattgagtctagtcacagccatcacactaaaacactataggtatccttcccgaacaatttagcccgaagaacccaaatgagtggccaacatgaccctcttcttaagatccacaattacatgtgactctccatagctacattgttcaaatacacaaccgttaaaaccaggaaatactcatataaatgtttacaacaaacagaaatcaagtcctattcacgggttcaagcgcctcaacagtgaccacactatttcctctaattaccaccatccctatgtcatttttctcattgccattcacttccacagggttggcaacaactaaattcataaactggtcaaagccacggagagtaccaacaaccatgcgatttgcgttcagcttgatctgaagcttcttatccatgtacttcttcaaatccgggggttgccctgacctgctcatggtggaagaagagatcacagaaggacgaacgaaga

SEQ ID NO: 221760 - DNA, 501 bp, Glycine max
gtactgtaaagataagtatttaaaataatcttagctgtctgctaccaatatgttttgagggtttaaaaaaatacctgagtcataatatataatcgggttcaatccaaaatttcagacattttaatacaatcttaagaacctcgcataccttacaaccaagctacaaatttaaaataatactacagtttagaggagagcaataaaatccatcctacttcaacacacagttttactaggccccgttaggaagccccttgaattgcagttgcaggttgcatggctatatcctgattctgtctcacagcaaatccatggcctccataactctgaccaccaaaatagcctccattggaatcagatctccaatgcttatttcctggactgcgaccccaagaaagtcgcactgtctgctttccaattactgtcccattcaatgcgtgaattgcttcctcagcattctttctgtctgcaaattgaacaaatccacaccctttacccact

SEQ ID NO: 221761 - DNA, 509 bp, Glycine max
ctctcaaatttttagttctgcgatttacacttaataatttcacatccgtttcgtgatgccaaattgcaagatttatatattcaagcatcaccatgccgcggagacaatttcaaacttattgtaaatttagatagaaacatactgcagaggtagaaactcttgatttgcttgataagtctgctaaaaacattttatcgatgtaaaacttaagctaggaccatggtttcaactgttgggggttgaatcttttgctgttggttgccatcttcaatctcccaaatttcaggtaacgcttctttgatattatgaatgctgttcagggcatgatcagctccagggaccaaatgtgaatggcccactaaaacagtgttaagtccagttatttttgcactctcaacatttctaacactgtcatcaaagaaaattgttttctttggatccacattagcaatccgaatagcagcttcaaaggcttccacagatgggttacagaggatttgtgggtggga

SEQ ID NO: 221762 - DNA, 526 bp, Glycine max
attctttctctgaaaaccaaaacaagaggaattaaagttcattcatttaaaaaagaaagtaaagataaaaataacatgcacaacaacatgagcactctctctttcttcatccttctttcaacactactaactgttggttacggtggtcgcgacttaggagataaaaacccgttcaccccgaaggcttacgtggcacgttactgggaccaacacgtccgcaacaacttgccaaagccatcgtttcttctctcaaaagcatccccaatgagcgcttccgacacggcgtcgttcgccaagctcgccgccgcgaacaaactctccacccgcctgccggagttctgctccgccgcgcacctcctctgcttccggaggtccgtcccagcctcgagaaacacaccgaagatgccggtttccaaacctacaacgacggccagaacttcaccaactacggcaccgacttcgccggcggaatcgacaccttcaaaaactactccaacgaaatctccaccaccccggtgaacgactt

SEQ ID NO: 221763 - DNA, 414 bp, Glycine max
ggaagtcacaaacaagtttattttacatatatgtaacgttacatagaccctacaggatacaaggccatcgccatagcaacttcctacaaacgaaaaagtccaaacctcattgggctgcctacatatcaaaaaccacccatatcagatataagcacacatcagttttccaaaggccatatttagaggccttcaatgaagttgaccccagtgttcttcaaccaaacattgccttggatgagttgtgctaccgggaacttgctggcctcaactgcagttttgatgatatggtaaccaggccaattcactctcttgctggtaccggcaccggggccattattcatgtactctccataatacaacgtttgcaaaaagtctttactttgggcatcccattcagcccatcctgttgggtca

SEQ ID NO: 221764 - DNA, 517 bp, Glycine max
ggcggcgatcgagtccatgccgacggtcgagatcggagaaacgcacgtggaaaccgaagcgcactgcgccgtgtgcaaagaagcgtttgagctgcacgcggaggcgcgtgagttaccgtgcaagcacatctaccactccgattgcatcctcccgtggctctcgatgcggaattcgtgcccggtgtgccgccacgagcttccttccgatttggaaactagggttcccagccagatcgacgaggagacgatagggttaacgatttggaggcttcccggcggcggattcgccgtggggagattctccggcggccggagaacaggcgagagtcatttcccggtggtgtacacggagatggacggtggactgaacacgaacgggggtgctcctaggagaatttctcgttctgttagaacaatagggttagggaaagtcgaaggtttggtagagttattaacaatttctttcattctttggaagaattggttctagaaactctttttctggacatgggtctgt

SEQ ID NO: 221765 - DNA, 579 bp, Glycine max
gaaggatggaaatcagtcttgccctcagtgcaagacccggtacaagaggcacaaaggaagtcctgcaattcttggagaccaggaagaggatgggggtgctgatgagggtgctagtgacttaaattacaattcagaaaatcagaatgaaaaacagaagattgagcgcatgttgggctggcaaatggcacatgggcgagcagaggaggctgttgctccaaattatgataaggaagtttctcacaatcacattcctctgctctctggtggacaagaggtttctggagaattatctgcagcctcacctgagaggctgtcaatggcatctccaggtggccgagggaagcgtgtccataatcttcaatattcctctgaccttaatcaatcaccaaatatttagggttggggatcctggattgggtaatgtggcatggaaagaaagagttgatggctggaaaatgaagcaagataagaatgttgctccaatgagcacaggccaagctacttctgaaagaggagctggagatattgatgctagtactgatgtgcttgtggacgaatcctttgtgaatgatgaagctc

SEQ ID NO: 221766 - DNA, 573 bp, Glycine max
gaaagaatacataaaaattgttattctatttctagtccagtcttactatcagagtattgtatacaatgaagggattttataatagcaaacaaggtatactacttatgtaccttgttccaaatcagtgagggtagtgtaaacaaataaaatgaattaaaggcaaaaatagtgacgggggaaagacatgatgtaggggtaaccactaaacaagcattgacccaatcgcttatacattagatcatagcaaggcacttcacttgaaattgccaagatagaaaggagatggagagggtattgtgcagagaaaatgagtgttctctgcttatgacttagttgtgaggatcattcacgtagcttacaattctgaagatagggatgattaaatttgacatatttggtccagtaagaccgatactttgtcatggctatctctaaccacggcttcatattaccattgtagtgtacgactgctgcattatcaatctccgagcgatctacacttggattgtaacccagaccgagtacgtgccatgatttattaagtggatgtgttaatccatagaatgtcatcag

SEQ ID NO: 221767 - DNA, 397 bp, Glycine max
gctttctttattctctccttcctcttccttcttcttgtttcatctgccactgcttgtgatcgctgcttgtatcaatccaaggcttcctatttctccaaagcttctgctctttcatctggggcatgtgggtatggctctttggcactagacataagtggtggacaccttgcagctggtgtggattctctcttcaaaaatggagcaggttgtggtgcctgctttcagataagatgcaagaacccaactctatgtagcaaagaaggtaccaaagtggtattgactgatcttaatcacaacaatcaaactgattttgtgctaagcagcagagcctttgcgggcatggctcaaaagggtatgggccaacaaatactgaagcttggcattgctgaaattgaat

SEQ ID NO: 221768 - DNA, 479 bp, Glycine max
cttaagcattgtggcagacctgagtgagcattttttgagtggaaaatatgagctacagtggctcctcaatgagttctggtagtggatcttctagaaggacatttgagtttggaaggacccatgtggtcagacctaaagggaaacaccaggcaactatagtttggctacatggccttggtgataatggctcaagctggtcccaactcttggaaactcttcctcttccaaatattaaatggatttgcccaactgctcctacacggcctgtagccttatttggtggatttccttgcactgcttggtttgatgctggggagatttcagaagaagctcctagtgatttggaggggttagatgcttctgcagcacacgttgccaatcttttgtcaacagagccttcaaatatcaaacttggtattgggggcttcagtaatgggtgctgcaactgcactatactcagctacatgcccatgttttgg

SEQ ID NO: 221769 - DNA, 535 bp, Glycine max
ggaaagaggtagcttttatttgcaaaatgatggcattccatcccataaaaatctacatccacacaatttataatgaacaagaatgtaatacttctttctttaaaccatgataacacagattgtcaggagaaattatagtcttctagatgttggcaatggacacgggctctcggaggatcctctccatctgttgtgccctggtcttaattgacatgtcaaagaccttctggctaaattcaagcacaagcccaccaagtatgcttggatcaatcttctgttcaagatgaaccttcgctccagaacctattatttcctgaagagtctccttcaatgccttttcctcttcagggggaagaggaacaacagtggtcacagtcgcttgcacttctcccttatatgccattgacaactgtgcaaacctctttgcaatggtgtctatgtttttaagccttccattctcagcaacaataacaaggaagttctttgtaacatccgaaaacttggcttccccacaaatatcctggataactttcac

SEQ ID NO: 221770 - DNA, 589 bp, Glycine max
gaatctaactagtacagtaaaatttataaatgtaggagctctacagattgatcaaagttaatttccggaaggactacattttattttgtgccaaaatgaagagtaccgtgagagatcacatgaactacagtgttgcatcaaatattattactaaaatataatgttccatcaatcctatagtatggccattcttgtataacttgatatctgttgttccatcattttctcttctacagctttactcaatcatgaattttgatcagtaccagcaatctaccacttccccttgctctggcaaatcccacttctttgggggtcctgaggcccttggggatgcaccaaaatcatcccaacccagtcttgcaatttccacgccgattgttcgaccataaaaatccttctgatccatggtttctagtgcaagcatggcatcatcttgacatgtatattgaatgaaagcaatacccttagatctttttgggttcatatctttaaccattttaacttcagctatcttgccgaaatttgaaaattccttcttgcaagtagtctcaccggtagaatatggtaaatttttgacacaattttg

SEQ ID NO: 221771 - DNA, 384 bp, Glycine max
gggggaagaaaacgagaccagtcattaactattacaaacatccatgacttgatctctcaagaacataagcattgtcaacaaaacccagtttatacaatgtcaacaatcaacgataagcatacacattaacgagtcaatctaatttgactgcaccacaatttaaacttacaccactcgttcaaagccaaccatatcgatatttgaaacaatttttgacaaataagagaggcgccttaagcagcaatctcttcttcctcttcctcctcctcatactcgtcctcgtcagcagtagcatcctggtactgctgatactcagcaacaagaacgttcatgttactctcggcctcggggaattccatttcatccattcctttcccggggtac

SEQ ID NO: 221772 - DNA, 489 bp, Glycine max
  unsure (1)..(489): unsure at all n locations
gtgagagtgagaagcagagagtaacggggaaggtgaagtggttcgatgaccagaagggttttggcttcataaccaccgacgacagcggcgaggaattcttcgtccaccagtcctccatccgatccgacggcttccgcagcctcgccctcggcgagtccgtcgagttccttattgactccgatcccgaaggccgcaccaaggccgtcgacgtcaccggccctgacgaatcgccagtccagggcacccgcggtggcggaggaggaggaagaggaagctatggtggaggtggcggaagaggtggctatggtggtggcggacgcggcggaagaggtggatatggaggaggcggcggaggctatgggggaaggtggctatggcggaggcggtggtatgggggaaagtggcggcggcgccggcggaggnggatgctataagtgtggcgagactggtcacatagctagggactgcaaccaaggtgggggtggcggt

SEQ ID NO: 221773 - DNA, 270 bp, Glycine max
caccaactctaacagaactcaattttattatttaataaaacagtagaaaatccttgacaggcgacaggaaggaagggggaaaaccaggatttttggaaaagggtaaggttgatccttctaatttttcaaactataaggccggggctcaataccgcaggcaatcgagaagccaaactgcgttttaagtcaggggaaacagcgtgttcaccaatcatggtctccaacaccgccgctgacacagccttgttctctatcactgcagcctccttt

SEQ ID NO: 221774 - DNA, 566 bp, Glycine max
gcaatcaaccatctttggatcaaccctccaatttgtttacaatatggaacagaccctctcctttgaatttgagcatgaatttgttcaaaacacggcaagagtgaaatctgttgatatgcatccaactgagccatggattctactgggtttgtattcaggaactatttctatttggaactatcagacaaagactgaagagaagtctttaaaaatcagcgaatctccagtgagatcagcaaagttcattgctcgggaaaactggattgttgcagctacggatgacaaaaacattcacgtctacaattatgacaaaatggaaaagatagtagaatttgcggaacataaagattatatcaggagtttagctgttcatcctgtcctgccatatgtaatatcagcttcagatgatcaggttctaaaattgtggaattggaggaaaggttggtcttgttatgagaactttgaagggcactcacattatgtgatgcaagtggcattcaaccctaaggatccatctacctttgctagtgcatcccttgatggcaccttgagatctggagccttga

SEQ ID NO: 221775 - DNA, 542 bp, Glycine max
gtgaaatccacgcgcgcgcttcggttatggatttggacgatttccgatccgtattggacaccgcgggcgtcgacgtgtggatgttcatcgacgccgcaatcgccgtcgcctccgcggattccgccggtgagctgaagcgccgccgcgacggaatcgtcgagcgcctctacgccgccacggcggctactccgaagtgccggatttgcgacgacggaggcaatgacctcaacggtcaccaaatcaagaagcagagcagccccagccctgaacggcaaccgcaccaacgccgcgccgctgccatcgcagctgccgctttcccggcgacgccgcagtctctcgaaaacgacaacgacggcgaggaggatttagatccttacggtggtttgttcgacgacgaacagaagaagattctcgagattaaagagcaactcgaagagcctgaccagtctgaagattctttggtggagttgctgcaaagcctagcggacatggatattacattccaagcgttgaaggaaactgacatcgggaggcacgtgaat

SEQ ID NO: 221776 - DNA, 327 bp, Glycine max
aatgcaaacagtataatgaaaataaaatggcaaaatccctcaaactgagataataacctatcaactgcaaggtctaatagttaccaaacactgaaatagacaacatagcaagtccaaatataaaaaccattcaaacatcaggaagtctgaccctaccaaatagcacttagatcataaaattcttcaatgactctgataagaccattcacatagactaaaagatccaacaatggcaaaacagctacaggtgcaatagtccgacgtctccagaatttttcatgaaaaacatagcttattcatccccgtttgaatttcgaggggaaggac

SEQ ID NO: 221777 - DNA, 436 bp, Glycine max
gagagagagaggtatcacagtgaaacgaagaagccctaactacgcacgcactcattcttgagaaagctcaatattcattcgtccatggcactctcttctcgtctcttttccaaatccaaattgatctatggctgtcaaatacttctgcaaaaggagcatgctattccagttcgtcactttgctaaagagtctgcccctcctgcccttaagggagatcagatgctgaagaacatttttgtggaggtgaagaacaaatttgagactgccataggaatattaaagaaggagaagatcaccattgacccagaagatccagctgctgtttctcattatgcaaaggtcatgaaaacagttagagagaaggcaagcttgttgtctgagtcccaagacatactatccaccattgaaattgagactcaggatattccagatgctc

SEQ ID NO: 221778 - DNA, 467 bp, Glycine max
  unsure (1)..(467): unsure at all n locations
gaggcacaactgacatacattaaacttcccttataggagtgccatacaaatagttataactagaagagtttattatggtagagattttctacatatactcagcaccttatatatctgtaggaagggaaagtcaataatttttagtggtttcttacaaacaaagtgatatttatagttcatggaagattttcttgctcaacatctttcacataccgacgccaaaaccagtgtttgccccatatggtgtacattgactccaaaggaattcctttagtctctggcacgaagaatataacaaagattgtcatcactataatccaacccgcgtagaacacgaaagaggcaaacttaaagtggcatagcatagacaagaatgtctgggataatataaatatgattatgaactgcacanccaacagcatgctttgtccaatggttctgatttttaggggaaaatttcacttgga

SEQ ID NO: 221779 - DNA, 511 bp, Glycine max
  unsure (1)..(511): unsure at all n locations
agggtcactattcctcatgcaccagtgcattcttccgcgacctcctcctcctcttcaccaacgccaccgtgttcttctcccatgactccctggaatcgcaggcggggcggcagctgcaccgccttgccaccgcggagatgaagaaccacggccaagcacaatcggatcctatcccccggaagaacgattcactccctccaaatgcaccattagctaaaccagattctctcctttccaagaacaaagcctctggtcctatattggtttgccgcaaacgcagttcaatgtcatccaaaccttcctctgccacctttggccaaaagggtgaccaacccgtcttcaatgacaagaaggaaaggccatcttctgatgcanagccacccatgaagccctcttcttctgatacagacgaagaggagcttcccaaagctaaggaaaagcctgttactggagcaagaagctngaggcggagcaacangaacctcaatagtaatagtagtaataataataa

SEQ ID NO: 221780 - DNA, 544 bp, Glycine max
gacacaaaccttaattaattgatcaattatcttagtacacactttaaaatgttcattattaattataattatatgatgagttaataatatattgtggttagggtatgggataaacgaccacttttcctgtggctcttgaagtttctaagtaggaaatggcttcaataacctgagaaaatggcactggagtcttggcatcgagtataggcttcaacttaccactctcaaagtaaggtcttaaattctctaagatagatccctttgaggtgagcacaaaaaacatagctggtggatgtccaggtggtactattgtcacaactttcccatcttccttaacggccttaaatgctctatcaccttgccctactacatcatacactagatcgtatttttctggaaggtcttcaaagttctcctttgtgtaatcaataggcaagtcaacgcccaacttccttaaaagttcaagtttgccggtgctagcagttgctgctatcttagacgccttataacttgtttagctagctgaataacatagtttccaact

SEQ ID NO: 221781 - DNA, 527 bp, Glycine max
gggacagtaaacaatgagctaaattagcaggggaacgacgatgatagtcaacataattcataacagggaacaacatcaaagatgtaaatctttgcatgttctttagggtacatttaagaaaatcaaatgagcaaaggcaaatggaacacggaattcctttttaatgactaatatggcagcaacgtgccatattcaaattcttccactagttgcccatttcattttgtactcccttgacagctagagcttgctgaaagcacgacaatgcatattgcacatcacttgctgatatttggtggtggagaacaactctcattcttgatgaactctcttgcatcacaaggataccacgttcttccatgtacttgcatatcttttctgccctagtctttgtaccctcttcaatgtcaataaataccatattggtctccacagaaccagcatccactctcagtcctttaacttcttttaatccatcagccaaaagtctagctttcttgtgatcactttccagcttcccaacattt

SEQ ID NO: 221782 - DNA, 526 bp, Glycine max
aggagtaatggtgattgataattcgacaatagtgtgatcacacggtaacatgaggtaacacagggaacaatgaatatatcctgtgtgatataaagacatatatccacacgcacacacaaaacaagaaacagaagtttcaaacttgaattgatactatctaaatgacacagtaactcacagtcactaatgtgcaatgaccgattccatgtaaagtttgaatactaatactaataggtatggcttatcgtactaagaagctgaaaccaagctacgattactgcctacaaaacttggaaatcgtatcaagcatgtatctactctctgaagagtagttcaccttatcagccttgaccacagtaatcttcaccttctgttcatcgccatataattcctctttgattttcagcctaaacatgaactggttgaagagtcggctcttgattatttctccaaacttttcatcatcctgctcttcatgtttaaaaagtacagatcctttgctgagtaatccataatctcttcccct

SEQ ID NO: 221783 - DNA, 420 bp, Glycine max
caaataggaaaaaaatgaaagtaacagttgtgtgttgtgtattggttgtgcttggtgcactaccattctcttcggatgcacaactagacccctccttttatagggacacatgtcccaaagtgcattctattgtacgtgaagttgttagaaacgtttcaaaatcagaccctcgaatgcttgctagtctcataaggctccactttcatgactgctttgttcaaggctgtgatgcatcaattttgttgaacaacacagccacaatagaaagtgagcaacaagctttcccaaacaacaactcaataagaggtttggatgttgtgaaccagatcaagactgcggtggaaaatgcttgtcctggtgtagattcttgtgctgatattcttgcccttgcagctgagatatcttctggtctgggtcatg

SEQ ID NO: 221784 - DNA, 487 bp, Glycine max
  unsure (1)..(487): unsure at all n locations
ctctgtttctgtctctgtgtttgcggctgaggattccgaacgagcgaccttcttcgtttctcgcaaagtttaagtcctcatgggtaaggaaaagactcacatcaacattgtcgtcattggacatgtcgactctgggaagtcaactaccactggtcatttgatctacaagcttggaggtattgacaagcgtgtgattgagaggttcgagaaggaggctgctgagatgaacaagaggtcattcaagtatgcctgggtgcttgacaagctcaaggctgagcgcgaaagaggaattaccattgatattgctttgtggaagtttgaaaccaccaagtactactgcacagtcatcgatgcccccggacatcgtgactttatcaagaacatgattactggtacctcccaggctgattgtgctgtccttatcattgactcccacactggtggttntgaagctggtatttctaaggatggacagactcgtgagcat

SEQ ID NO: 221785 - DNA, 512 bp, Glycine max
catttcctccgtaaattattcatagcatatttcaaaccacactcaaaaggcttccctccctgacttggatttgattgatttcattacattgctacactatattctttttattggtgaattgctatttgctacactatattttaaggacaattatacatagactatatggggttgatggctgcgaaccaaactcaattgttgtctaagatggccatcggagatggacatggtgaagcatccccatattttgatggatggaaggcttatgatgaaaacccctttcatcccaaagagaatcctaacggggttattcaaatgggtcttgctgagaatcagcttacttctgatttggttgaagattggatactgaataacccagaggcctccatttgcactccagaaggaataaatgatttcagggcaatagctaactttcaggattatcatggtctacccgagttcagaaatgctgtggctaaattcatgggtagaacaagaggaacagagtcacg

SEQ ID NO: 221786 - DNA, 355 bp, Glycine max
cacttatcccctttctccttctaacgagtgaggaaaaatggcgcgtaagaagatcagagagtatgactcaaagaggttgttgaaggagcactttaagagactctctggcaaggagttgccgatcaagtctgcacaaattaccgcatcaactgatttcactgagctacaagagaaggaaccctggctttcatcttctaaattggttgttaaacctgacatgttatttggaaagcgtggcaaaagtggtttggctgccttgaatttggattttgcacaagttgtttcatttgtgaaggagcgtcttggaaaagaagttgagatgagtggatgcaaaggacccataacaactttcatt

SEQ ID NO: 221787 - DNA, 455 bp, Glycine max
tttcggatggcggtgaattgccgccaccgtctggagccgaagatggacgcgttctacttcggcaatgcgattcagagcatcccgacggtcgcgaccgtcggagacattctctcgcgcgatctgcgcttctgcgcagatcttctgcaccgtaacgtcgtcgctcatgatgacgctacggtgcgccgcggaattgaggactgggagagtgcgccaaggctgtttcctctcggaaactttgacggcgcgatgatcaccatgggaagctctccgcggtttcccatgtacgaaaacgacttcggctggggcagacccgttgcgattcggagtgggaaagcgaacaagttcgacggaaagatctccgcgtttccggggagagagggaaacggcagcgtcgattggatgtcgttttggccccggcgaccatggcggcgctcgaaaacgacatggagtttatg

SEQ ID NO: 221788 - DNA, 468 bp, Glycine max
gttcgcagactcacaatggccgcaatatccaactccttatcactgaagcacagtttctctctgagtcgagctcctccttcttcctcttccatcaaattcaaattcagaagatgttacgccgcgttcgccaatgagaatcgcgagtacgtgatcgttggcggcggaaatgccgcgggatatgctgcgcgcactttcgttgagcatggaatggctgatggtcgtctctgtattgtaaccaaagagccgtatgcaccttacgagcgtcccgctctgacgaaagcgtatttgttcccgccggataagaaaccagcacgccttcctggttttcacacttgtgttggatccggtggagagaggcagactccggggtggtataaagagaatgggatagagatgttgtatgaagatccagtaaaagatattgatattgaaaagcatactttgacaacaagttctggggaaactctg

SEQ ID NO: 221789 - DNA, 571 bp, Glycine max
gcagtccctgcagaggtaatatcttctacgtctgtagtatccccaccacctaaagatatatcatcattggttgtttcactttccacagatctaatggtatctgctctagtttcatcagctgagagaacattcatatgaaaccatccaaaggtcggtttgctgattttaggattcttagctccacatttttgacatttcttatgttttttcgtcagcaatttccttagaacagacattgcctcactaaattgaagggaggtccaattttctcccagttgctcagcactataacactggctctcatctccatcacctggatgtatgaattcatctggattaaaagaatccacactttttccagggataatagattccaaacgttttgccctgataatatcccctttcattatgagctccaattgggatgtacgaatatcaacctctttgctgggggcccgaaaatgatggcaagtgaaacaagttctttgcagaatattgctaagaatattgaacatcagagggttgtagacaggggaaacgagctcaatatgaccaaatgacctgggcaatg

SEQ ID NO: 221790 - DNA, 458 bp, Glycine max
agacttaaaaaagcacactgcatattcatcaaagcatcatcaaagcacactgcatcctaacagcacacgtacgtagaaaggggaagtttcaggtcttgcacaacatacacaacacaccataatttattttatatacaatcttatggcgcccaagatgcagatgcatggactaattaaacaacaacgtttgtctgataggcagtgtccatagataaattgggtacccataaaatggccttgcttccaaggaaatggcaaacagggttagttccaggatcaactcccatgagttcatgaagcatgtgatgattcattccagaagtatctgagtggcaaacagcaagtgcctgagttttggttccatcaccagccaccaatggaaccatgaaagctgttgtttcacggactttatggcagtaaaatactggcgttctgaaatttaccccatgacacatcac

SEQ ID NO: 221791 - DNA, 387 bp, Glycine max
gcaagatgtcgaagagaggacgcggtggttcggcggggaacaagttccggatgtcgctgggtctgccggtggcggcgacggtgaactgcgccgacaatacgggggcgaagaacctctacatcatatcggtgaaagggatcaaagggcgtttgaaccgtctcccctcggcttgcgttggcgacatggtgatggccaccgtgaagaaggggaaacccgatctgaggaagaaggttttgccagctgtcattgttcgccagcgcaagccatggcgccgaaaggacggcgtctacatgtatttcgaagataatgctggtgttattgtcaatcccaaaggagaaatgaaaggttctgctatcactggtcccattgaaaagagtgtgctgatct

SEQ ID NO: 221792 - DNA, 392 bp, Glycine max
gtttcttcctcctccttcgccgccgccgccgcctccgccgctgcaaccaccaccacctccactcaccaccttctctgtggaacccttcactctgcttctttcctctcaactacccatccctttcccacaacttcgttgcggtcatcttcactgcacttcaggtgtgttcccatcagagccatggctgagattgatactatatcagtgtcaaaatctgcttcttcttctgctccaggcagcaagcaagccttgatatcattgtcagacaagaagggtcttgcatttgttgggaatgggctccaggaattaggatactctattgtttcaactggacgaacagcttctgcattagagagtgctggagtagctgatactaaagtcgaacagcttac

SEQ ID NO: 221793 - DNA, 554 bp, Glycine max
ctcgagccgaatcggctcgagcggctcgagcggctcgagaagagaggtatggcaaaaagggtcttcttgtacaaggatttggttccttttggggccatggtgaccatggaatgcctcaacgtagccttgaatactctgttcaaagcagctaccttgagagggatgagttaccatgtctttgttgtttatgcttatgctgttgctgctattgttctcattcctggaccctttatctcccaaaggtgcagatcaagagtgcttcctccgctcagtttccccctactacgcaaaattggtcttctcgggctaatagggtgtgcttctcagatcgtgggatacacaggcatcagtttcagttcccccactctctcctcggcgataagcaacttggtgcccgcttttacttttttgcttgccatcattttcaggatggaaaaggtgattgtaagaaatacaacttgtcaagccaaggtattgggtaccatagtatcaataactggagcattcgtagtgaccttctacaaggaccaccaatcatcattgttcatacacct

SEQ ID NO: 221794 - DNA, 453 bp, Glycine max
  unsure (1)..(453): unsure at all n locations
tctcgttcctggaactgttctggcgaccttggtgaagaacaaagccgtgcccgatcctttctatggactgcaaaatgaacacatcattgacattgctgattctggaagagactattacaccttctggttctttacaacctttaattgcaagctttcaagcaatgagcattgtgatcttaactttcgtggaatcaattactctgctgatgtgtatttgaatggccacgaaatcatcctaccaaaagggatgtttcgaaggcactcccttgatgtcaccaatattcttcatgcggatggcaccaacctgcttgctgttcttgttcatcctgcggatcatccagggagaattnctcccgaggggggacagggcgggtgatcatgagataggaagggatgtgactacacgtattgtgaaggttgggattggatggctcctataagggataggaatac

SEQ ID NO: 221795 - DNA, 417 bp, Glycine max
ctcgcaagcaaaaagaaagaatcccaggcgaggagaaagatggaggggaaggagcaggatgtgtcgttgggagcgaacaagttccccgagagacagccaattgggacggcggcgcatagccaagacgacggctaggactaccaggagccggcgccggcgccgctggttgacccgacggagtttacgtcatggtcgttttacagagcagggatagcagagtttgtggccacttttctgtttctctacatcactgtcttaaccgttatgggagtcgccggggctaattctaagtgtagtaccgttggggattcaaggaatcgcttgtgcctttcggtgcatgatcttccgcctcgtttactgcaccgctggcatctgagggggacacataaacccggcggtgacatttgggctgttttt

SEQ ID NO: 221796 - DNA, 489 bp, Glycine max
ctcttcataccttgcggttgtggttttcacgcacaattttctagatccaatggagatgtgtaaggaaaaggatcacactgctgtctcgggtatggcgcacttcaactctgggaagaccactaccactggccacatgaccatacatcctctgaggaatgtgacacagggagttcttactatattctgccacaggaagctgatgctatgaacaccaggccgtccaaggctttaccctagccacaccagacccaggctcggcgtgccagactataatcattaccatttgggtcccggaccgttgaaaacagcgcctactatggagcactactaggaacacctggacacagaggattaattaggaacaaggacaatgcgacatacgaagctgactgtgctgttcttatcattgattccactactggtggttttgaagctggaatttcaaaggatggacagactcgtgaacatgctctgctttcattcaccctt

SEQ ID NO: 221797 - DNA, 553 bp, Glycine max
tttttttttttttttatttttttttttttttatttttttatttttttattttttggggtttggttttatttttatatcctttaatattttcttttttttttttttaggttattttggaacaagaaaacggcgcccccaaggggctgttgttgggcccaaaaaaaaacaaaaaaaaaatttcccccccggggggggaaaaaaaaaaaaaacgggggggggggggcccccaaaaaaaaaaaaaaggggggggaaaaaaaaaaaaaagagggggttttttccccccgaaggcccctaaaaaacggggggagaaaaaaaaacaataagccaaaaacccccaaaaacccccccccccgcccccaaaaaggggggttaaaaaaaaaaaaaaacccacaaccgggtaaaaggggggaaaaaggaaaaaaaccccccccaaaaaaaaaggggccccaaaaggggccccaaggcgccccccctccggggtttttgggggcgcccccccccccggagaaaagggccccccccccaaaaaaaaaaaaaaccccccgggggaccc

SEQ ID NO: 221798 - DNA, 518 bp, Glycine max
  unsure (1)..(518): unsure at all n locations
attggtattgactttttgtcaaaaacaatgtaccttgaagatagaactgttcgcttgcagctttggtaggatgaattcctcttcaaatcatatatacaagctcagtctttttatatttgtttgtttatttttcaacaattatattagagtgcacattgctggtacgcctagtaggcattgtttatttttacaatttctgagcttagtatatgttaacttcacagggatactgcagggcaagaaagatttagaagtctcattccaagctacataagagattcttctgttgcagttatagtatatgatgttgctagtgagttttatatgttcttttatataccactttcattatctaattaacaggattttttatgggatcttttcctattttctcatgacataactnttccaaattatttgaccatgtaactcaaaaagggttttgtagcgcatgaatatgttctttaatacttatgtgtgagtgactgttcgggtcttggtttctgacaccatatgtc

SEQ ID NO: 221799 - DNA, 565 bp, Glycine max
  unsure (1)..(565): unsure at all n locations
ttggaactcaaaaaatcacaagccaaagacaattacagcaaaaaaaaataaaaatcatttgtgtacaagcagaaagagactaaaagtctcgtgaataatcctaagttatggagtctgtggtgtgtgagctagaaggcacgctcttgaacgacaaggatgcgttctcctacttcatgttggtttcgtttgaagcttcgggtttggttcgtttcgccttgttgctaacactatggcccatgattcgtttccttgacatgattggcatgaaagatgcatctctcaagctaatgatcttcgtggctgtggctggtgttcccaagtccgagcttgaatcagtggctagggcagttttgccgaagttctacatggatgatcttgacatggacacgtggaggctgttcagcaactacgacagagggttgtgctgaccaagactccaaagattatggtgaagaggttcgtgaaggagcatctacgtgctgatgaggtcattgggaccgaactctccttcaataggtttgggttcgccacgggtttcgttcgtggtgactncaaacataccatt

SEQ ID NO: 221800 - DNA, 485 bp, Glycine max
aaaatgaaaacccaaagtgcttctctcctctgtctttttctctctcttgctatccttttggctagtggcactgctgcaagtgcaactccaagaagcgcagtgccaagccaccatgtttcaacattcaacagaagcctttttccttccacttttctctttggaattggttcttctgcttaccaggcagaaggagcagcaagtgtagatgggagaggaccaagcatatgggacacctacactagacagcatactgaaaagatttgggatcatagcaccggtgacatgggagctgatttttatcatcgatacaagggtgacataaaaatagcgaaagaaattgggctggactctttcagattctctatctcatggtcaagaatattcccaaagggcaagggagcagttaacccccttggggttaaattctacaacaatgtcatcgatgagatcctagcaaatggtttaaaaccttttgtcactctttt

SEQ ID NO: 221801 - DNA, 391 bp, Glycine max
aacattgcagactaaaattaaaattgaaaagatcaaaatccaaattacaccaagttcatagtaataataactaataacaacaagttaaacccaggataataatgagaaaaaagagttccggaaagaaacaaggggggggggggggtttttgttttccaatttccaaatgaaacgaaaccctaaccagagttttgttcgtccttgtcatggggctttctgcagaggatcatgtgcatcggagagaaaatcccagagtcaccccctttggtcaaatagtcagcggtcttgaagagcattttatgaacattgacgggccccttaggcgcgattcccaaagcggggagaacagtgaccacaatatggtttcgccagtacgcgatcctacccattt

SEQ ID NO: 221802 - DNA, 362 bp, Glycine max
cgagaggccactcagccagactgcattcaggccctcatcgttgaattcatagccaccttcctctttgtctttgttggcgttggttcttccatggtcgttgacaagcttggtggggatgcactagtgggattgtttgctgtggccgtggcacatgcacttgtggtggctgtaatgatctccgccgcccacatttccggtggccacctcaaccccgccgtcacccttggcctcctcgccggtggtcacatcactatctttcgttccatgctctattggattgatcaattagtagcagccgcaacagcttcttatctcctttactacctctcaggaggacaggcaactccagttcatacgctggc

SEQ ID NO: 221803 - DNA, 563 bp, Glycine max
gtccccgatgtcaacggttctggtgacgggaggggcaggcttcatcggatcccacacggtgcttcagcttctgaagcagggcttcagggtttccatcatcgacaaccttgacaattccctcatcgaagccgttcacagggttcgccgcctggtcggtcctcatctttccaacaacctcaccttcttccacggagatctccgcaatgttcaggatttggaggcagtgttctcgaaaagcaagtttgatgcggtgatccactttgctgggctgaaaggtgtcggcgaaagcgttgcaaagccccggcgttattacgacaacaatctagtggggactataaacctttttgaagcaatggctaaatacaagtgtaaaaaaatggttatatcatcatcggcaactgtttatggggaagctgatagagtcccatgtgtggaggaggaggtgcatttgcaggccatgaatccgtatggaagaacaaagctgttcgtagaagaaatagccagagacatccagagggcggagacagaaatgaggatcattctgcttcgatacttcaaatccg

SEQ ID NO: 221804 - DNA, 441 bp, Glycine max
tgaataccctaattcggagggtttcagttttcgccctcttttctcatctccaacatcttcgtcgtcacggaggctagtcttcctgttatcacaaacaatgtctgacggtcaagaatcagacaagaatattgagatatggaagatcaagaaattgataaaggcattggaagctgctcgaggtaatggtaccagcatgatttctctgataatgcctccacgtgatcaaatatctcgggtcactaagatgttgggagatgaatttggaactgcttcaaacatcaaaagtagggtgaaccgacagtctgtgttgggagccattacttctgctcagccgaggttgaaactatataacaaggtcccttcaaatggtttggttctttacactggaaccattgtcactgaagatggcaaggaaaagaaggtgacaattgattttgagcc

SEQ ID NO: 221805 - DNA, 589 bp, Glycine max
  unsure (1)..(589): unsure at all n locations
gtgcttttactatttcagagacaaatctaggagcagtaagcaaaggtcagcacctgaactgaaagagcaagagaaactcgagttttcagggcctgaaagggtcaccaagtcttcatgctcatctacatctcctcgcggtataccagaactgtatgaggagaaaggtcacaaattgaagggacttctccttcacagagctcaagcgtgcaacgagtgatttcagcaggcttcttaaaatagaaaaaggtggattgggaagtgtgtttaaaggtacaatcaagcctgctgatgggaatgggaattctgttttagttgccatcaaaaggtctaacaagaatgcattgcagggtcataagcaatggttaactgaagttcagtttcttgggtgttgtgcaacacccaaatctagtcaagcttattggatactgtgctttggatgatgaaganggatccagagactacttgtatatgaatacatgccgaataaaagctaagagttcaccttttcaatnagcatatgatcctcttttctgaaacaagacttgaataagcactgagcagttcagggttaactattgcatgaagaata

SEQ ID NO: 221806 - DNA, 524 bp, Glycine max
ctccctttctctttccccttacccttcttctgtgtgtgatgatgtagatagagaataaaaagagaccagtgtgcagtgagaaagaggttggtcacttcttgtgtggctttgttttgttctttgtgttggaatttgttgatgggtgaagagggagaagaggtgtcaagagataaggaacagcaacacatgggagtttatggaaatgagtggttgtttagtagtttctgtgcaaattggcgccgtttaagacaccagaattcctgttctatgcctccttttgagtgaaaaaaaaaaaacatcaaaacaaaaacttgttctctctcagcttttcatcttccgatcttaatatacattgactaaaagaaaaataaagggatcaaatttaagttccttgatctaataagatccttgcttttaattgtactactcatgaagagacttggcagttcggatacactgggtgctctcatgacgatttgtccaccaacagacgaacacagtccgaggaacaccacgtgtatggg

SEQ ID NO: 221807 - DNA, 434 bp, Glycine max
  unsure (1)..(434): unsure at all n locations
attatctctctctctctctgtttcgctttcaccgaagaataacttgactttcccgaactccacctgagaaaaagatacccttaattcgcaggcgcgtcttgtgttggacaacaaccacaagatgattaacttcgaagaaaccgagttgcgactcggcctccctggcaacgactcagcactcaagggaagtgctgccaagagaggcttctctgaaactgcttctgttgatttgaagcttaatctttcttcttgcattaacgactctgcctcggattcaccctcatctgtgtctacagagaagcccaaagagaacaagactaccactgctgaacctccttcagctaatgatccagcaaaccacctgcaaggcacangtggtgggttgccaccagttaggtcatttagaaagaacatagttcaaaggacagcaatga

SEQ ID NO: 221808 - DNA, 414 bp, Glycine max
acaggctggatgttatactttatatcatagccactaaatacagagccaggtaatgagaggtttttgaaacaaattctaataagcaatctaataaaacatcatttcgcaaccgaaaaaggccaaaagtgaattccagaattttaaaagaaaaaaaaaaatccggggttaattgaaaaactgaaaattaaaaataaaatccaccagcatcatcaaagccaggattattgcccgcattatattcagcagcataagataccatgtttgcgatcaacattccacccaagggaccaccaagcaatcctgctcccaatcccattccaaatttgtttttttttggtttctgaccctgaagggggtacccatatccggattggtgtggatatccataacccgactggtgggggtatacataac

SEQ ID NO: 221809 - DNA, 476 bp, Glycine max
ccctaaaaatttgagatatctccataacatgaaacaataaagaatacacaactattcaccagatgaagatttcaaatccattgttacacgaacaaccatattattaaaccatacattgaatggtcatttaaacatacatgtattcaccacctcgaattgcattttcagcacctttcctctcttcttcagcttccttttcacgctccttccagctctcataggcatgatcatcagtttgcagctcatgccgacagatgggacaagaattgtgctcatccagccatggctttagacatggtgggtggaatgtgtgcttgcatggcaactcttgcattttgtcatttaaaaccaagttctccctgcaaatagcacactctgcatctttccccaaattagccaggatttcctctgtgagagtaatgaccggaagatttgccacaacctctttactggcaggaggtgcttttggggctaca

SEQ ID NO: 221810 - DNA, 559 bp, Glycine max
  unsure (1)..(559): unsure at all n locations
aaagacaagcgataaatgatagtgagaatgatctataaacatcgaacataatatccaattgttcaaacttcaaagcttaaacataaatagtcaatttagaggaaatgaaattgctgaatgccccataaatgaagaccttcaactggagcttgaatcatcagtttttgctgctgcagatgcataactaacactactatccctgttacttttgcactgactggattgctcatagcgaagaaatttgatttttatctttgttgagcagttccttagcatatgaagaaaaacactaattggatggcgtccacagattgtattgtcatactccaacagatattgcttgaatgaatctggatctcctgtttctatgatatccatgcccatcttgtctaaggcctcaatagatttgtatataggcccatgtttcttgtcatagtgcatgtaattgaatcgagatccccagtgacaaaagtctgatgaaatagagaagaagttattggaatcatcaacatatttggcaagaatctgcccatacatagcttcattntcagcactaaca

SEQ ID NO: 221811 - DNA, 357 bp, Glycine max
cttaggccagtccaatctaagagaaaaacatggatctagaactccctgctcatgctgcaactgtgaatgaatctcaacaacaaaagtttgctctacctgtggattctgaaaacaaggcaactgcgttcagattattgtcctttgccaaaccccacatgagagccttctacctatcatggggctctttcttcgcatgctttgggtgtagctttgctggaccaccttttatacccataattcgcgacaacctcaacctcacagccactgacattggaaatgccggcgtggcatcactctcaagtgctgactttgcaagaattgcagtggtgacagcctgtgacttggacggaccgcgcc

SEQ ID NO: 221812 - DNA, 549 bp, Glycine max
  unsure (1)..(549): unsure at all n locations
ctcgaacggctacttggtagttggagtggtagcttttgctctactttgctcattcagagtttctttgacagattcagttccattattttcgcctgttcatgacgctgcttctttgactcgcaactctttccctgctggcttcatctttggggctggatcctcagcctaccagttcgaaggagcagcaaaggaaggtggaagaggaccaagcatatgggataccttcacacataaccatccagaaaagataagagatggagccaatggagatgtcgccgttgaccaatatcaccgctacaaggaagatgttaagatcatgaaggatatgaatttggattcatacagattctcaatctcttggcctagaatactacccaaaggaaagctcagtggtgggtgtaaatcaagaaggaatcaattattacaacaacctcatcaatgagctattggctaatggtgtactggcatatgtgactctttttcattgggatcttccccaagcttggaagatgagtatgggggnttcttaagctcccatatagtagatga

SEQ ID NO: 221813 - DNA, 526 bp, Glycine max
cgttgttgttcgctctgtgtctctcactctctctatatttgcatcattcatcggaaatggctctcgaggttgctgttaaggctgctgttggggctccaaatgttctcggagattgtccattttcccaaagggtcctcttaactttggaggagaagaaaatcccttacaaactccacctcatcgatctcagtaacaaacccgaatggtttttgggtgtgaatcctgaagggaaggtgccagtggttctttttgatggcaaatgggtggctgattctgatgtaattgtggggatactagaggaaaagtacccagaaccctctctaatcactcctcctgaatttgcctccgtgggatcaaagatatttgggtcttttgtgagttttctgaagagcaaggatacaaacgatggaactgagcaagcattggttgctgaattgagtgccttggatgaacatctcaagacccatggtccatacattgctggggagaaagtcactgctgttgatctgagtttggcaccaaaact

SEQ ID NO: 221814 - DNA, 528 bp, Glycine max
  unsure (1)..(528): unsure at all n locations
gaaaatcctcacccattttcttcgtagccaaacactctgaaattctcagttatgtcgtggcaagcgtatgtggatgatcacctactgtgtgaaatcgaaggtaaccacctcactcacgccgctatcatcggccaagacggaagcgtttgggctcagagcaccaacttccctcagttcaaacctgaggaaataactgccatcaataatgactttaatgagcctggatcacttgctccaactggattgtatatcggtggcaccaaatacatggtcatccagggtgagcctggtgctgtcattcgagggaagaagggtcctggtggtgttactgtgaagaagaccggtgcggccttgatcattggcatttatgatgaaccaatgactccaggtcaatgcaacatggtagttgaaaggcttggcgattatctcattgatcagggnctctaatctttgctttatgtcttggtatcgggcatatttcattggcttctgtacaagtttttgcatcgacctggactggaatgcttt

SEQ ID NO: 221815 - DNA, 518 bp, Glycine max
gagagatgaaggaactaatcatttgtcttgccattgcaaaagaatagaactcccataattccattagagcagcaattaatatggggttaaatctaaaatccaaacaatggttgccccaaagttacacaattaaaataaaagttgcaactttaacttgcctactgtgtatatccattcctatagaagttcctagtaggacctctaacgcagatttttggggtaactactatggggacataaggaattgctgtaatttgaatttcaactttctgcttgcagaagaaaccgcataaaaaagggcaatacaagcagaacataaacaattcattgtgcgtctgagtctgttggggtagacttttccgttaatgcagcaagctgtgtctcctgctgtttcttcagatacctctgggaagttgcattcactatcttgacaaagagttcataagcatgagccacacaacagtgttccagactgaagcaaaagaaaaatcccattttttcccctgcttatttgggga

SEQ ID NO: 221816 - DNA, 329 bp, Glycine max
gttttgcttagttaaagtagccaaccagtcatggtgctctacaatgttgaacgcgtatagaccactcacttcgatggccagaagcctggaacctctggtgtacgtaagaaggtgaaagtgtttgtgccacctcattacctacataactctgatcatgcaacattcaacgcattaactgtggaaaaagttagaggtgccacgctcgtgtgatttggggatgagccttatttttcaaaggaagctattgagaatataactcaactgtcatcaacaaatggaggaagacgtgagtggattcggcaaaatggattgatgtctactcctgcaga

SEQ ID NO: 221817 - DNA, 448 bp, Glycine max
cagaagaacaaccgtttttccaaccaacaaagacaaccacaccaaatacaacaacaaaggttagcaaaaacaaggcttgtgtttaatccggcaaagaagccaccattagctatacacaagtttgaaacaattctcaagtttactcattaaactgaatcagtattcagagtttaacatcatgtgcaaggtcagcactagaaacaccatgattcgaaaacaccctctcccagagtccctttctatcagcaaccaaaactcaccagcaaaacttcttccgtaacctagctttttcttgactatcaatgtaagcaagcagctcttcttgcctcattagtgcttcataaagagcctttttagttgcaattagctctgcttccaaagcatccacccgacatacagcagcatttagcaattcctctttctcataaggcatctccgatggcttaat

SEQ ID NO: 221818 - DNA, 388 bp, Glycine max
tctatttcttccttttcttttcatcttggttcactctcacacctacaaattaataataatacaaacacatatgggcaagttgtggaccttgatcatccagcttcattctattgctgggccggttgtgacgttattgtaccctttatatgcatcggcggtagcaatagagagtcagtccaagttggatgacgagcagtggctagcttattggatcatctattcgttcctcacccttgcggaaatggttcttcaacctatattagagtggataccaatttggtacgatgtgaaactattgacggtggcatggctggtgttgccccagttcgcaggagctgcgtacttgtatgaaagggtcgtgagagagcacataaggaaatacataacg

SEQ ID NO: 221819 - DNA, 532 bp, Glycine max
gccgaggtcacgaggagcactagctagtttcacaatttccaaatggctaggggattgaagaagcatctcaagaggctcaatgctcctaagcattggatgcttgacaaactgggtggtgcatttgcgcccaaaccctcatctggaccacacaaatctagggagtgccttcccctcatactcatcctacgaaaccggctaaagtatgctctgacttaccgtgaagtcatcgctattctgatgcagagacatgttcttgttgatggaaaagtcaggactgacaagacttaccctgctggtttcatggatgttgtttcaatcccaaaaaccaatgagaacttccgcctgctctatgacactaaaggccgattccgtctccattctgtcagggatgatgaggcaaagttcacgctctgcaaggttaggtcagtgcagtttggccagaaaggtatcccatacctgaacacctatgatggtcgcaccatcccgtacccagaccctctcatcagggccaacgacaccattaagctggatc

SEQ ID NO: 221820 - DNA, 582 bp, Glycine max
ctcaatcgttctaatccacaaaaaatgaccttaaattacaacattgccctcgccttctctgcggtgctcacgctgctcctctttcccctactgaccgtaggggagctcgtggaggagcagccactagtcctcaagtaccacaacggccagctcctgaagggccgcatcaccgtcaatctcatctggtacggcaccttcaccccgatccaacggtccataatcgtggacttcataaactcgttaagcagcgcgccaaacgcgcctctcccctcgaccgccacgtggtggaaaaccacggagaagtacaaggtgggaggaggatcccctgcgctcgtcgtagggatgcagttcctacacccggcttacacgctagggaaaaatctcaaaggaagagatctcctcgcactcgcgtcaaagttcaacgagattaactcgataacgggtggttttaacggcgaaagacgttgccgttgagggcttctgcatgagccgcttgtgcacccacggctctacccggaacgttaaaagtaatgccccgaccgcatatatctgggttgaaaactcgaacacagtgccccggca

SEQ ID NO: 221821 - DNA, 399 bp, Glycine max
gaagacaacctcattaaatttcaaataatttttaccaaaagaatctcagtatatccaatatgttaaatacttctgtagagagctaacaactcctcggtagtgttgtaatccagtcaaaaagtatttcactatgcacatatgatagtaaattccaaatctcaataaataggtggatcaggattgaataacacagattctctccagatgagttccttgatatcttcttcagtgaaagatggttgctcaaaatcaaaactgaaaggtctaacgcaagcaggttcctcattaatatcatgaagaggagccaagtatgggtgacacagagcttcttcaactgtgatgcgcctatttggatcaaagacaagcatcttctctaacaaatcaacagcaccaggagac

SEQ ID NO: 221822 - DNA, 443 bp, Glycine max
aagaaaaaacatccttcacatggaaggccatgttttgatatttgcacccaaagctacggcaaacaaatggaattctattacattatgaattacaagttccttgcatggcatacatcaaggaaaactgggaagttgttgtatgtggattgatttgccacagccttatatagacaaaccaaatgcttaatatcaacacaaacacgtgtacagaaaagaaaccactcttcaagaaaaccgaaaataagaaaaactaacattttggaagaggggccccattccactccccaaggcattccaaaaggggatcaatgatcttcccttggcacaaagcagtgaacactttgtcacactcttcacccggtgagataaccctttcaccagttagcaatgctgtccccaacttctttctacaaacttgtcaaggggtaagacctgcattcctt

SEQ ID NO: 221823 - DNA, 558 bp, Glycine max
aaggtcctcagattgattctgtgcaattcgagaagatcatgaaatacataagatcaggcgttgaaagtggtgctcaactggaatctggtggtcaaagaattggctccaaaggctactacatccaacccactgttttctcaaatgttcaggacaacatgttgatagcaaaagatgagatatttggtccagtacaatctatcttgaaattcaaggatctagaggaagtgataagaagagccaatgcaacttcctatggcctggctgctggagtttttactaaaaatatggacactgccaacaccttgatgcgagcattgcaagctggaacggtatggatcaactgctatgatgtctttgatgcagcaataccttttggtggatataagatgagtggtcaagggagagtaaggggaatctacagccttagaagctaccttcaagttaaagctgttgtcactgctttgaagaatcccgcatggctgtagttttcccactacctaagtgttcatgttcataatgtcttatctagaaaaaaaactacatctttcatggaacatt

SEQ ID NO: 221824 - DNA, 531 bp, Glycine max
  unsure (1)..(531): unsure at all n locations
ggagattttactttactcgttggtgattggtacaaaaccaaccacaagacgctaaggcaaactttagaatctggaaaacctcttgcatttcctgatggcctccttattaatggtcaggctcattcaaccttcactggtaacccggggaaaacctatatgttcagaatctcaaatgtaggcttttcaacctcaattaacttcagaattcagggtcacaccctaaaattagttgaggttgaaggatcacacactgttcagaacctttacgattcacttgatgtccatgttggccaatcggttgctgtgttagtaaccttaaaccagcctccaaggactactatattgttgcctcaacatgatttacagagacacctntcactacaactgctgtactacactatgcaaactctttttcctctgcattgggacccgtgcctgcttccccttgtgataaatatgaccttgactggtccatgaagcaagctaggacctacagatggaatctgacagcaaatgctgctaggcctaacc

SEQ ID NO: 221825 - DNA, 276 bp, Glycine max
caggtttgctataaaatcccgcacgtgccgttgcagatgagctgaaatcgagacgaagaagaagaagaagaagatggagaagtatcagatctggagcacgagaatagcgttggcagcgtttgcgtttgctctgctgttccaatcggcctcagcacacgacgtcggtgtgctctctgaagataacttcgagaaggaagttggtcaagacagaggagctctcgttgagttctatgctccttggtgtggacactgcaaaaagcttgctccataatatga

SEQ ID NO: 221826 - DNA, 459 bp, Glycine max
ctctggagctgttgtacaatgttaagtttacgcctcgtaatggagctggtgttattgttatatgcccaactagagagcttgcaatacagacgcatgctgtggccaaggagctgctcaagtatcattcataaactcttggattaaatattggaggttcagctagaaaaatggaagctgaacgccttgctaaagggataaatctatagggaggaactcctggccgtcttctagatcatcttcaaaacacaaaaggattgatgtataaaaacttgaagtgtctcatgattgatgaagctgacaggattttggaagcaaactttgaggaggaaatgaagcacatcatcaagatcctttcaaagaataagcaaacagctttattttcggctacacaaacaaagaaggttgaggatcttgcccgattgtcatttcagacaactgctatctatattgacgtagatg

SEQ ID NO: 221827 - DNA, 594 bp, Glycine max
accaagtctatgaaaaaataagataaatgtatgttaatcattcataacacatgctttccggacttcagtcgttgtaagattaatttttgtcctaaaatctaacaatgtgatgtttcaagtgtaattgtggttaaatgcatgcatgttcaaaattcaacaccccaacatttgtaaaactaagaatttgcccaaagcagcaccaaaactacagacactgccagggcctcttcgaacctagaggaatggcattggaacctgacgttaaacctcgatttccatagcctcctcgtcctcttgagcgaaaacttccccctgatccaaattgaccagaaccagccgaccgaaccaatgcagacaaagcaggactcacaacctgaccagcatcttgtaaaatcttaatcagatccctagcaaacttggcattggcatgtgtaaaaaaggtgtatgcagttcctttagcccctgcacgaccagttcgaccaattctgtggacataatcttccaggcttgatggaaaatcataattgatcacacattttatgtcttttacatcaagaccccgtgcagcaacatcagtggcagtcattattggac

SEQ ID NO: 221828 - DNA, 504 bp, Glycine max
gacaaacaaaaaaatacttccaaaagcattcttatatcatactgtgaaacctttaaaatgaacagtataagcgatctgatacttttactacatacaaaatcatgcattcattcgatatcttttcctcatataataatcacaaggtaaaatgactcctcgtcggaaaacgatgccttattttccacaattgaacccacggcagacagaaaggactattatgaggatcagggctatcaaaatcgccaacacaatcagctttatcttcatgttttgcagccacatttttctacgaattttggtcccagaattcctgaagtcttgtgcctggtgatgaagattttcagttttgtcaaccagaagctctatcttttccccccggtccagaaccttttcaatgttctccatcatgacatctttaacttcagaaacctgagctttcaccttagcaagcttgcttatctcttcaggatgctcaacacagtactgcatgtgctccttcaactt

SEQ ID NO: 221829 - DNA, 521 bp, Glycine max
atcattcaaactgaacaagttaaatgtgccaatgctttttatccatcgaaaactgaacacagcaacagctaagacacaaaaagcctctatttatagggaaaagaaatgaaggaattgcatagttcaacattgcaggccagtctatataacgaattctttgctttgtttgtccgctacatactaacaacacaagcgcagttcattaaagagtacatatcttcacccaagacaggtataaccttcgatgaacttatgcagtgtgctcttcaacatctccattttcaccatcttcagcagcagcagcagcagccgccatcaactcatcaaatttttcagtcttcccaagtaatatttcaatcttggccttttggacaggtctgcctctagaatcatctttgatgtcaactgttgatgtcgtgattttcttttcaatagcaagctcattgtttttcaagatttcagcaacagtaaccactgtagcaatagccattcctagtgctgagagctcaacctcttatgct

SEQ ID NO: 221830 - DNA, 526 bp, Glycine max
  unsure (1)..(526): unsure at all n locations
gaaggaagtcccttcctttctaaatggatcagctaacaacttgctccaatttccaaagctagacaaggaaagaatgaagaacagttaagctcagaatctggaaccatcacttgccttgattttgcaccaaaatatacccatgaaggtgcagttctctattgttgcacttgttctattaggctccacactgtgtctttctggcctaattgtagctgacttgaactctgaccaacaagctctcttggagtttgcttcaagtgtcccacatgccccaaggctcaactggaagaaagattctgtttcaatttgcacctcatgggttggtgtgacatgcaactcaaacggcacacgtgtcgttggccttcaccttccaggaatgggattaatcggtaccattccagagaacagcataggaaaactagatgctcttagggtcctgagtctctattccaatggccttataggaagtcttccttctaacattctctccattccttcactccaattngcataccttcagcacaat

SEQ ID NO: 221831 - DNA, 335 bp, Glycine max
atggagttagttctaaacagcacaacaattggagttggagttgtttctctgatcctcctcttgtacttgtttttgcgtggtggttcatggaagagtggcgaagagggtcctccaacagttgccggtgcatggccaataattggtcacctgccattgttgcttggttcaaagacacctcataaaacattgggtgacttggctgacaagcatggacccatattctcgatcaagattggtgccagaaacgcagtgggtgttagcaactgggaaatggctctagaatgctacaccacacacgacatcggccgttacatccgtcccgatcttatcttcgc

SEQ ID NO: 221832 - DNA, 464 bp, Glycine max
cgaggactgttgctaactttcatgaatgcttcagaaatttgtggaaccatcaaagatagaaagatgggctgttgctaacttttctgcacgctgtgatgtacgaggacttgtacgggacctcattagaattggagatatgaaaggaattactatagaacaaccatttgacgtgtttgatgagaatccacagtttaggcgtgccccccctatggttagagtggagaaaatgttcgagcatatccaatctaaacttcctggggctcctcagttccttctctgtttgcttcctgatcggaaaaattgtgatatttatggtccatggaaaaagaagaatcttgctgattttggaatcataaatcagtgtatgtgtcctttaagggtcaatgaccagtacctgactaatgttatgttgaagatcaatgccaagcttggtgggtttgattcattgtaggcgttgaacattc

SEQ ID NO: 221833 - DNA, 418 bp, Glycine max
tgtacttctatttatcgacaatatctttcgcttcgtccaagcaggatctgaagtatctggcttatggggtcgaatgccttctgctgtgggttatcaacccactcttagtactgaaatgggttctttacaagaaagaatcacttctaccaaagaggggtccataacttctattcaagcagttaatgtacccgcagacgatttaaccgatcctgcgcctgctacgacatttgcacatttagatgctactactgtactatcaagaggattagcggccaaaggtatctatccagcagtagatcctttagattcaacctcaactatgctccaacctcgaatcgttggtgaagaacattatgagactgcgcaaagagttaaacaaactttacaacgttacaaagaacttcaagactttatagct

SEQ ID NO: 221834 - DNA, 445 bp, Glycine max
gggtattccgaattttgggccccaaaacttggtttgaaaaaacaatggggggccttacttggggcccaacttggcaaaaaaccaaaattggcccaaatggttggtttttgccttcccccttattaaaaaaagcttttggtttttaaaaaggtgggggggctttttgggggaaaaaggcacttcccttttcccggttatttactaaaaaagggggcccaatattggttattttaaaaaaaccccccaataaagcccttgttaaccattgggttttaaaaaaacgtttttttaaaaaaccttttttttccggggggggaaaagggcccagatttgggaaaactccaaattggcccgtttttggagaaaaaaagatatcctttacttccgaataccaaaaaatttggtggggggggcggcccacaaggaataaagggatttttttaaa

SEQ ID NO: 221835 - DNA, 577 bp, Glycine max
ctctctctcgcgcggacgctttgctgtagctcgctcactctcagactctcgcgcaacccccctctcgtggacgcgttgttgcagatcctcgttcgttctcgctctctcgcgtgagtttttgaatttgttggtctatgtgcaggaccagccccgaactcctgctcaatccccatcgatttatccctggaagaaagtaaacaaaatcctgtagaatagctctttgtggcttttaaattgaatcgaggatgggagacgaagcaagtgaagagcatcaaaggtcgctagcagctcctttcatatttttcgtggttctcgcatttcagtttgcttctcattggattgatcactttaagaagagtggatctgacaaagaaaaagaaactaagttgcgtggagaaataaaagagcttttgaaggaggcaagctcactgtcacagccatcaacctttgcacaagcagcgaaactcaagagactggcagctgcaaaggagagggaactggcaaagtgtcaaaatttacatcacaaggatgatgctttgtattcaaaagttctgctcatctcaaggttttaacatat

SEQ ID NO: 221836 - DNA, 559 bp, Glycine max
  unsure (1)..(559): unsure at all n locations
attaattgcaagaatggcacttcgttgcttggtgatgtccctttctgttctcttcactcttggtcttgcgagagaaagccatgccagagacgaagatttttggcatgctgtttggccaaacactcccattccaagttcattgcgagatcttctaaagcctggccctgcaagtgttgaaatcgatgatcaccctatgcaaattgaagaaacacagtacccgaaaaccttcttctataaagaagaccttcatccaggcaaaacaatgaaagtacaattcagcaagcctccctttcaacaaccatggggtgttggtacatggttaaaggaaattaaagacactactaaagaaggatatagttttgaagagctatgcatcaagaaagaagccattgagggagaagagaagttttgtgcaaaatccttgggaacagtaattggttttgccatttcaaagctgggaaagaacattcaagtactttcaagttcctttgtcaantagcaagaccaatacactgtggaaagagtgcanaatcttggagacanagcagtgatgtgtcat

SEQ ID NO: 221837 - DNA, 308 bp, Glycine max
gtcttgacatcgctgatagtcttttttagccactcaaagcggagtttcctattttgagctacgccgatttctaccagttggctggcgttgttgccgctgaggtcaccggtggacctgaagttcccttccatcctggaagagaggacaaacctgagccaccaccagagggtcgcttgcccgatgccactaagggttctgaccatttgagagatgtgtttggcaaagctatggggcttagtgaccgagatatcgttgctgtgcatgggggtcacactattggagcttgtgacaaggggcgttctggattc

SEQ ID NO: 221838 - DNA, 308 bp, Glycine max
gtggtttcagtgagtgatcggtgttcacttgatccttcataagtcgtcatcatcatcatcatcatcaccgttgattgaagaagatgccgatcagaaacatcgccatcggaaggcctgaagaggctactcaccccgacacgttgaaagcggggttggctgagttcatctccaccttgatcttcgtgttcgccggttcaggttcctgcatcggctacaacaagctcaccgacaaccggggcggcaattccggccggcttaatttcggtttcattggccatgctttcggccttttcggcggcggcttcgtc

SEQ ID NO: 221839 - DNA, 561 bp, Glycine max
gtggtttcagtgagtgatcggtgttttcttgatccttcataagtcgtcatcatcatcatcatcatcaccgttgattgaagaagatgccgatcagaaacatcgccatcggaaggcctgaagaggctactcaccccgacacgttgaaggcggggttggctgagttcatctccaccttgatcttcgtgttcgccggttcaggttccggcatcgcctacaacaagctcaccgacaacggcgccgccactcccgccggcctcatctccgcttccatcgcccatgctttcgccctcttcgtcgccgtctccgtcggcgccaacatctccggcggccacgtcaaccccgccgtcaccttcggcgccttcgtgggcggcaacatcaccttactccgcggcatcgtctacgtcatcgcccagctcctcggctccatcgtggcctccctcctcctcgccttcgtcactgcctcccctgttccagcattcgggctttccgctggagtcggagttggcaacgctttggtgttggagatcgtgatgaccttcggtttggtgtacacagtctacg

SEQ ID NO: 221840 - DNA, 139 bp, Glycine max
ctttcgataagaggagagaaagagattgaaaaaaaaagttgcttttttttttgttgttgcatgatttggatcttgattggaaaagcttcgaattggggtagttttacccatcaattcaattttaagccgtgccttcttc

SEQ ID NO: 221841 - DNA, 564 bp, Glycine max
ctcatttattctctttttcaaaatactttcactctctctaaccttccagttctcactaaacctcgtgaagctcgtgatggacaccaagataggttcactagacgcgcccaagcccaacagcaacgacgtcgtatcatgcaacctcaccagcagcgccgccatccagccctgcttgccggcgacggtgatcaacggcgccggctgtagtgactccaccttgggcggccacctggcccgccggctggtggaaatcggcgtcaccgacgtgttctccgttcccggggacttcaacctgacgctgctggaccacctcatcgcggagccggcgctgcacctggtcgggtgctgcaacgagctcaacgccgggtacgccgccgacggctacgcgcgcgccatgggagtcggcgcgtgcgtggtgacgttcaccgtcggcggcctcagcgtgctcaacgccatcgccggagcgtacagcgagaacttgccgctaatttgcatcgtcggtgggcccaactccaacgactacggcaccagtcggatccttcatcacaccatccggttacccga

SEQ ID NO: 221842 - DNA, 561 bp, Glycine max
ctcatttattctctttttcaaaatactttcactctctctaaccttccagttctcactaaacctcgtgaagctcgtgatggacaccaagataggttcactagacgcgcccaagcccaacagcaacgacgtcgtatcatgcaacctcaccagcagcgccgccatccagccctgcttgccggcgacggtgatcaacggcgccggctgtagtgactccaccttgggcggccacctggcccgccggctggtggaaatcggcgtcaccgacgtgttctccgttcccggggacttcaacctgacgctgctggaccacctcatcgcggagccggcgctgcacctggtcgggtgctgcaacgagctcaacgccgggtacgccgccgacggctacgcgcgcgccaggggagtcggcgcgtgcgtggtgacgttcaccgtcggcggactcagcgtgctcaacgccatcgacggagcgtacagcgagaacttgccgctaatttgcatcgttcgtgggcccaactccaacgactacggcaccagtcggatcctccatcacaccatcgggttacc

SEQ ID NO: 221843 - DNA, 475 bp, Glycine max
gattaagaataagcaatatctaccgtatcacacacagagagagaacaaggggaaggggaagaataacacagagagagagagagtgtgtgaaggtgatgacgatggacagagagaaggagagagagatagagctggagagtgcaatgtacacgaattgcttgttgttgggtctggatccggcgattatcggagtcggagcctccaacgcgactcctcgggtcgggcatttccgtcactcgaaccctaaattgggggaacagcttctctacttcatcctttcctctctcagaggtccaattcaatccgtgaaagatttcgataaggtctggccgattttcgattccgcgcaatcgcgtgattttcgtaaggttgtgcaagggattattagcgagcttgagtcgcatggcgcgctttcgaggagcaattcgagggtttctttacttgctacatgctgtggacctaagtttgttgagcc

SEQ ID NO: 221844 - DNA, 570 bp, Glycine max
taattgtcattaattttgagaccttttaactttgacaaccaacgaagtcctcttatgggttgggctttctactgccacggcaagtcgatggaggagctgaagcaatctctgatgtacactacccttgagctggaacaaacaagagcaactgtccaagaagagctaagaaaaagagacgatcagcttctcaccctaaaggagcttctcaacaaagtcataagagaaagagatgaagctcaagagaaatgccagagactagtgttggagaaaatggtttttcagcaccaaaccgcacctgcttctggagtttccagcattgaggacgagccaagaaggggaattaatgactcctccaacaatggcctctcttcatcagattgtgaagaaagcattgattcctctccagttatggagcatttgccaccacaacagcaacagttgacagagtcaatgattgagcttatctcaccagataaaccgttgccagaaaaaggtaagcttttgcaagcagtgatgaaagctggtgctttgcttgagacactgcttcttgcaagaacactttcttaatgg

SEQ ID NO: 221845 - DNA, 396 bp, Glycine max
gcccctgcatgacgactcgatctcgcttgacgtaaaggcaacgcccagacctcggcttccgctcgagctctagccgctgagcctattcggttttaggcgaaagggtgtgagaatggggagcaaataagaagatcaaagggtaggagcatctaaggtttcataaaggcatacatttggcacagtaactaaaggtgactatgactacacataaccatccactatacaaaagcttgagacaggaacgataaagtcatggaactcaaacacacctgtactcgctcaatatgaagccaattttatgcaattctacattaccaacaaaaccggaatggccgtcaacaggccaatctccaagtgaacctaaatagacaagcaaagcatagcttgatgccatta

SEQ ID NO: 221846 - DNA, 583 bp, Glycine max
ctcgatcaactcaacacaaaccaaatttcatttttaaatactcactctctctctcatgtcgagagcatagtatcatattcaatatcatttcataccaaacacatggctttggaagctctcaactcaccaacaacaaccgctccatcttttccctttgacgacccaactatttcatgggcgaaacgaaaacgatcaaagcgttctcgcgaccatccttctgaagaaaaatacctcgccctctgcctcatcatgctcgctcgcggcggtaccaccaccgtcaacaaccgtcacgtaagcccttcgccgccacagccacagccacagccgacaccagatccttccaccaagctcagatacaaatgctccgtttgcgacaagagcttcccctcttaccaagcgctcggtggacacaaggccagtcaccggaaactcgccggcgccgccgaagaccaaccccccagcaccaccactttcttcagcggcgtcaccagcttcgtctactgaggtaaggtccatgagtgctccatttgcacaaattcttccccaccggacaggctcttggcggacacaaacgttgtcacta

SEQ ID NO: 221847 - DNA, 460 bp, Glycine max
tggatatgtgatcccagagggagcttatatttttttcaatgtatggcaagaaggaagggaccggggattctgtgacagaccatccgagcttcctcctgagaggcaactacagacaggggctggtcgggaagcatggcctctggaccttatgggacatcattttcaactcatggccatttgggtctgggaggagatatgtgcctctggagtcaatttggctacatttggaatggcaaacactatttgcatctcttattcagtgctttaacacgcaagtgctgggttccacaaggacagatattgaagggtggtgacgcccaagtttgcatggaagagagagccggtcttactgtttcatgggcacatacttttgactgtgactaacttgcaaggatcggggttgcatctaaactcctttcttaattaaaaacataatcatatatagtaccatcttgttgtg

SEQ ID NO: 221848 - DNA, 466 bp, Glycine max
tagacccggttcattcaggctcgttctgttgcataacccactcgggtttttggctagacactggaaagcatcataagcatgcaagcgacgtcgttctgggtagccaagtttccatttggcgtaagggcgcagcagcacccaaccgtgaagagagactccatggccgagtgcaccgtccccaagtgggcccaaaaaaccgtcagcttgccccctctccggcgcggctgtcatcttgtcacttccaagatagtgaaggaaattgagcaagacctctccggcttcaagtgtggcctagctcatctcttcttgcagcacaccagtgcttctcttaccatcaatgagaattatgactcagatgttcgcgaggataccgaaaccttcctcaatcggatagttcccgaggggtcatctgcgccatggaagcatactctagaggggccagatgacatgccagctcatattaaat

SEQ ID NO: 221849 - DNA, 558 bp, Glycine max
gggtcctgcatcgcgctgttttcgttttatcagtccatcttgaattgctgcgattcggtcggaggaaaatggccgctcagttatcgaagggagaggaattcgagaaaaaggctgagaagaagctcaccgggtggggcttgcctggctccaggcatgacgatgccgccgatctcttcgattaatccgacaattgcttcaagctcgccaaatcatgggacaaggctggagcgacatacctgaagttggcaagttgtcatttgaagttggcaagcaagcatgaagctgcacaggcccatgtccatgctgcacattgctacagaaagactaatataaacgagctctgtatcttgcttagaccgagctgtaaatcttatctgcgacattggaagactctctatggctgctagatatataaaggaaattgctgaattgtcctaaggtgaacagaatattgaacaagctcttgcttactttgacaaatccacttgactctttcacaatgaaaaagtgaccacttctgcgaaccaatgcgaacaaaaagttgcccactttgcttgc

SEQ ID NO: 221850 - DNA, 539 bp, Glycine max
ctctctcgtacttcatcgttaccgttacccttcgccgcaaaaaatgcctggcaaatctgccaaatccaaggaagctccagctgagcgacccatcctcggtcgattctcttctcacctcaaaattggcattgttggcttgccaaatgttggaaaatctactctctttaatactctcaccaagttggcaatacctgctgagaacttccccttttgcaccattgagcctaatgaggcgcgggtcaatgtacccgatgaacggtttgagtggctttgccaattattcaagccaaaaagtgaggtctcggctttcttagaaatccatgacatagctggattggtccgaggtgctcatcaggggcaaggattggggaatagttttttatctcacatccgtgctgtggatggcattttccatgttttacgtgcatttgaagatccggacattattcatgttgatgatactggtgatccagtcagggatttagaggtcattactgaagaattgtcgctgaaggatattgaattcatggaagaaagat

SEQ ID NO: 221851 - DNA, 534 bp, Glycine max
agcatatcatatttaaatcataaaaatagctgagagggcaaaagccactatagatattaagcctaaataagtaaataatattgaaaatggtcccaaaattacattttcaaacttctacaaattgtgcaacatggtaggcgcctataataagacacaaaccccatgcaaaaccagctctgctatttgagatgaatctctggttttacttcttgcccccaccagaaacgttgaacttaaagaatataatgtctccatcttggaccacatatgttttcccttcctgtttatactttccagcagccttcacagctgactcactaccaagttcctttagatcctcaaacttcatcaccttagcacaaataaatcctctttcaaaatcagtatggatagcccctgcagcttgaggagcctttgtttggcgtctaatttgccaacacttaacctcatcaggtcctgctgtgaaaaagtaaatgagattaatagctgaaaatccagtctttattattttggtaagagcactttgaggtttgt

SEQ ID NO: 221852 - DNA, 418 bp, Glycine max
gtcaagctcatccaatttttagctttactccctactttggcccttcattggagctagactttgagttggaaatggctactattgttggacctggaaatgaattgggaaaacctgttgatattaacaatgctgaagatcacatctttggacttgttgtaatgaacgattggagtgctcgagatattcaggcatgggaatatattcctcttggtccttttcttggcaagagttttggaacaacaatatcaccttggattgtgaccttggaagcattagaaccttttgcttgcgaagccccaaaacaggatcctcctacacttccatacttgactgaaaaagtatccagaatctatgatatttccctagaggctcacataaaacctgcggggcatgaagattcatgtgtggtgtcacggac

SEQ ID NO: 221853 - DNA, 581 bp, Glycine max
  unsure (1)..(581): unsure at all n locations
ctctctttctgtttgttatcagaggtttcgatacgacaatggatttgagcgaggaaggtagggcagctcacaagcgagaattctccgatttcttagatcaagatgttggaaagggcatatacatggacgaaatctaaaccctaatcaaccacaagcgtcaccgactcatcgtcaacatctccgatctccacaacttccgcgacttgggtaacaggattctgaggagtccaagtgagtacatgcagccgttctgtgacgcggtcacggaggctactcgtgctatcgatcccaagtatttgaaggaaggggaacaagtgcttgttggatttgaaggcccttttgtttctcgccgtgtcacgcccagggaacttctctctgaattcataggttccatggtctgtattgagggcattgacactaaatgttctcttgtaaggccgaaggttgttaaaagtgatcatttttgccccaccacgggaagcttcacttctcgcgatatcgtgatattacatctaatttgggattgcccaaggatctgttaccctacagggatgagatggcacttactcgngactgatttg

SEQ ID NO: 221854 - DNA, 542 bp, Glycine max
gttctattcgcttactgcactatatttttcctataaagagagtgagggaaggaggagtggttgtagaagtagacagtgacgctaccaccaccaacaccaatagtgctgcggcgtcgtttcccaagaaggctcggatcgggagctttgctgcctgctcgggtgccggtgctgcggattcgccggtgaacgtcagcggccagggattcagtagcggcggcggcggcgacaacagcctcgggaactcggtcggaggaatggctttggggaattcgcacccggcggagatcgacgaagatctgcacagtcggcagctcgccgtgtatggccgggagaccatgcggaggctctttgcgtccagcgtcctcgtttcggggatgcagggtcttggtgttgagattgcgaaaaatctcattcttgctggggtgaaatctgtaaccttgcacgaagaaaaaaaagtggagttatgggatttgtctagtaattttgtgttttcagaaaatgatgttgggcagaacagggcagaggctttcgttagtaagttg

SEQ ID NO: 221855 - DNA, 579 bp, Glycine max
ctcgttcattccaacctacccttatttttcttcttcaattccacacccatcatggaccgttttccgatcctctttctcctcgccaccctcatcaccctcgcctccggtgcccgccacgatattctccggttaccctccgaagcatccacttttttcaaagcacccggtggcgatcaaaacgatgagggcacgaggtgggccgttttaattgccggttccaatggctactggaattacaggcaccagtctgatgtttgccatgcgtatcaactactgaggaaaggtggtctcaaagaagaaaatattgttgtatttatgtatgatgacattgctttcaacgaagagaacccgcgacctggagtcattattaacagtccacatggaaatgatgtttacaagggagtccctaaggattacattggtgaagatgtaactgttggcaacttttttgctgctatacttggaaataagtcagctcttactggtggcagtgggaaggttgtggatagtggtcccaatgatcatatatttatatattactctgatcatggcggtcccggagtgctagggatgcctact

SEQ ID NO: 221856 - DNA, 547 bp, Glycine max
  unsure (1)..(547): unsure at all n locations
gagcacacttcaactattgagaacttttgacctccatggctgtgacatcacctcttgtcgtagcaggttctcaacttcggtgtcacaattttagaagaaccagacactgggctcttacactgagttgggaaaaacagcagctgaagagagcacagaagtgtggtggggatgagaatccatggaagccagtgaagatagtgatgcgtgtggttgatcatcatccaagggatggtgatgtctcctatggactgcacaaggatttggtctcccttccaaagccattatccatatctgatattgtggctgcttctgatgatcatgctaaagtacggatatcatataaggggataccgggatcatacagtgaggatgctgcactcaaagcttaccctaattgtgaaacagtttcatgcaatgactntgaagaagcttttaaggctgttgagatatggtgggctgacaaagttatccttccaatagaaaatacatctggnggaagcattcatcggaactatgatttacttcttcgccataggcttcacattgt

SEQ ID NO: 221857 - DNA, 458 bp, Glycine max
  unsure (1)..(458): unsure at all n locations
ctcgagccgattcggctcgagcactcaacaagcacaatcgtctgtacatggaagcaagaccattggaggaaggtcttgccgaggccattgacgatggcaagattggaccaagggatgaccccaaagattcgctccaagatcttgtcagaagagtttggttgggacaaggatctcgccaagaaaatctggtgctttggccctgagacccttggacccaacatggtggttgatatgtgtaagggagtccagtatttgaatgaaatcaaggattctgtggttgctggattccagtgggcatcaaaagaaggtgctttggccgaagaaaacatgagagccatttgctttgaagtatgtgatgttgttctgcacgctgatgctatccacagangagngtggtcaaatcatccctactgccaggagagtcttctatgcttcccagaatactggcaaacccaggc

SEQ ID NO: 221858 - DNA, 512 bp, Glycine max
gaaaattctactttcttatctttcaagcaaaattcccaaataggtcgaaccaacaccgatgcaaaatcctatggataaaaaatacaccgatgcaaggaccaaataacagaagtacaacattcacggacaaaaccacaaacaaaactcgacaaaacttaaatctaaagtaacattgttcatatgagaaataaattcggctaagttcaaaagtaagttaaatagttcaaacaatttaaagcttgtcttcaaactcggagagaggagtcatctgttccttcaagcccttcctcttgcggatgtcggtgacaagctgtgcagcttgtgatccagtctccaatgggtcagaagacatcatgtcccagtgatcaaagacacattgtgggaaagcctggcctgatgttgcagccctcaatgtgctcgagaaaccaaaggactcaatgacagggaggtatgctttgatgttgtaaagtggggtaccaggcctctgcatttcctcgaacacatgtccacgt

SEQ ID NO: 221859 - DNA, 547 bp, Glycine max
tctgaacatagaacaacttttcacttaacacaactttttctagcattgtagcatcatgactggcaaagacatcctccatataatgaaggtgaaagcagggtttgcaccaccagacacagggaaaggaaaaggcaaaatatcaaaacacatcacacatggctttcacttgatgaagggcaaatcggcacatcctatggaagattatttactttcggaatttaagcaagaaaaggatagagaattaggcttgtttgcaatatttgatggccacttaggccatgatgttgccagctatttgcagaaccaccttttccaaaacatcttgaaagagcatgactttcggactgagacagaaagcgcggtgaagagagcttaccttgaaacagatgagaaaatattggaacaagcacttgtgttggggcgaggaaggtcaacagctgtgactgcaatacttattgatggtcagaagcttatagtagcaaatgttggtgactcaagaactgctatttgtgagaatggaaggccagacaactatctgtggatcatg

SEQ ID NO: 221860 - DNA, 535 bp, Glycine max
caagattcagcaagtgcgttttggtttcagagaccgaaatacttcgagatggcccgtacaaagcaaactgctcgtaagtcaactggaggaaaagctcccaggaagcagcttgcaaccaaggctgcacgtaagtctgcaccaacaactggtggtgtgaagaagcctcatcgatatcgccctggaactgttgctcttcgtgagattaggaaataccagaagagcactgagctcctaatcaggaagcttcctttccagaggttggttcgtgaaattgcccaggatttcaagactgatctgcgtttccagagccatgctgtgcttgcattgcaagaggctgctgaggcataccttgttgggctctttgaggacactaacttgtgtgccattcacgccaagcgtgtgactattatgcccaaggatattcagctggcaagaaggattcgtggtgagcgtgcttgaagtggtgcgttctgtgtttgagaagatggattgttggtggctgcggatggtgttttgtactaagttttctttttgt

SEQ ID NO: 221861 - DNA, 596 bp, Glycine max
ctcgagccgaatcggctcgagcttcctctccttctttctttctgcttaaggtctacacaagttctctgcttcttctccccctattgacctttggtcatcacaagcgaaaacccacttctggatcttctggtgtaaaggccattagaagctttagaaattttctaattgagttggtgtatagtgttgaagggggtgaaatctggagcccagtttgttagttgttactcacttcatctgtaagctcataggttgaaccctctttttttggagacttacctgggaaaagatgatgatgtttgaagatatggggttttgtggcgatttggatatgttatgtgtttctcttggagagggggatattgctgtgagacaaactgaaccggatcctgtagttgaggatgactacagtgatgaagaaattgatgtggatgaacttgagaagaggatgtggagggacaaaatgcgtcacaagcgattgaaagaacaaaccaagtccaaggaagggactgatgcaacaaagcaaaggcaatcccaagagccaggcaggaggaaaaagatgtcaagagctcaagatgggaatactgagtacatgctga

SEQ ID NO: 221862 - DNA, 560 bp, Glycine max
tcttaacgcaacaaacacatagccatttcttttctttctcttcccatggcattctgactcatacccaaatcattgattgtttgtctatcgaatcggtgagaaaatggcagtggagctgatggggttcccccaaatgggcgaacagaaggcaattgaagaagcagccgccgaaggcctcaagggcatggaacacctcctctgtctcctctcccatcaaccttcccacctccgcactcaccacaccgacgccaccgtttccaacttcaaaaaactcatctcccttctcaaccgccgcaccggccatgcccgtttccgccgcgcacccctcccttccacttccaactctctcgccccatcccctccactggctaacccggtcaccttcgccccttcgcagtcacagagtctaaccctcgatttctcaaaacctaacatgttcaacaccaccaacgccaaatccatggacctcgagttctctaaagaaaccttcagcgtctcctccaactcctccttcatgtcctccgctatcaccggcgacggtagcgtctccaatggcaaac

SEQ ID NO: 221863 - DNA, 580 bp, Glycine max
  unsure (1)..(580): unsure at all n locations
cctatataaccttttctctccggttttcagatccgtaagttgctgaacatgaacccgcaatcgccggttcgggcggaaccggagcctccggttccgacgttctccccacggttcgcgctcacgtccggttcgcagcggaaaatcgcgatcgcggtcgatctgagcgacgaaagcgcctacgcggtgcgctgggcggtgcagaactacctgcgaccgggcgacgccgtgatcctcctgcacgtgcgtcccacgagcgttctctacggcgcggactggggctccgtggatctgagcgcggcggaggacgccgatgacggcggaggaggcgacgaggagtcgcggcggaagctggaggacgacttcgacaacttcacgtcgacgaaagcgagcgacctggctcatccgctggtggaggcgcagataccgttcaagatccatattgtgaaggaccacgacatgaaggagaggctgtgcttggaggtggagcggctcgggctcagcgccgtcattatggngagccgcggcttcggggcgtcnaatcgagccgcgaaggggagggctcggagtgttagtgattact

SEQ ID NO: 221864 - DNA, 464 bp, Glycine max
  unsure (1)..(464): unsure at all n locations
aaatgaaattgcctctttcaagaagcatctgagtgtttactattttgtactatatttatatatagtcactcaagcttctaggatttctgcctgctgcatcaaaatgggaagcaacttgaggtttttgagtctttgcctcttggcattgattgcatcaactcatgctcaacttcagcttggtttttatgctaacagttgcccaaaagcagagcaaattgttttgaaatttgttcatgaccatatccacaatgctccatcactagcagctgcattaataagaatgcactttcatgactgttttgtaaggggatgtgatgcatcagtccttctgaactcaacaaccaatcaggctgagaagaatgctcctccaaatctcacagtaagaggctntgacttcattgacagaataaagagccttgttgaagctgaatgccctggtgtggtctcttgtgctgatatcctca

SEQ ID NO: 221865 - DNA, 532 bp, Glycine max
cggctcgagcggctcgagtccctgtcccgtctgcgtccagtcattgtccatccctcccgaacgaaaccctaattacaggtgcaatacgtctctcctaattgactacggcgccgccgccgccaacggtggcgatcgcaagtatatattgatcgatgtcggcaagacgttcagggagaccgtgcttaggtggttcgttgcccatcggattcccagaattgattctattattttaactcatgaacatgccgatgcagtccttggattggatgatatacgtgctgtgcaggcttttagtccaacaaatgatattgatcccacacccatatacttgagtcagcattcaatggatagcatagcagagaagtttccttatttggttcagaaaaagcgcaaggaaggagcagaaatacgaagggtggctcaaattgactggaacattattgcggatgactgcaatcaacaagtttttgcgtcgggattaaaattcactcctttaccagttatgcatggagaggattacatctgtttgggc

SEQ ID NO: 221866 - DNA, 568 bp, Glycine max
  unsure (1)..(568): unsure at all n locations
ctgttctgttctgattctctctctttctgactttctctttctctcccccctcatatattcttcttttcttcagaaggaccacttcactttcagaaacccagtttcgcatctgggtttttgtttgttgaagtgccaattttgaagattaaaataaaataactatgacttggaaaagcagaggagaattgccttctagaagcgttatctcgcagagatgggcactgtttctctgcttaggaagtttctgtgctggaatgctcttcactacaaggatatggactatacctgaaaacaacaaaggactagcacggccaacagcctcagaagctgaaaaattgagtttagtttcagaaggctgcaattccagaattttgcaagagatggaaatgaagcacgataaagacacttatggtgaagttttcaagagtcataattccatacaaacattggacaaggctatttcaaacttagagatggaattggctgctgcaaaggcaactcatgagtctctacgaagtggtgctcntatttcagatgatataaggttgagtgaatcttccggttagag

SEQ ID NO: 221867 - DNA, 528 bp, Glycine max
gttcctgcaacgcactgaattcgattaatcaatccatcttcaattgctttgtttcgatcggaggaaaatggccgatcagttatcgaagggagaggaattcgagaaaaaggctgagaagaagctcagcggttggggcttgtttggctccaagtatgaagatgccgccgatctcttcgataaagccgccaattgcttcaagctcgccaaatcatgggacaaggctggagcgacatacctgaagttggcaagttgtcatttgaagttggaaagcaagcatgaagctgcacaggcccatgtcgatgctgcacattgctacaaaaagactaatataaacgagtctgtatcttgcttagaccgagctgtaaatcttttctgtgacattggaagactctctatggctgctagatatttaaaggaaattgctgaattgtacgagggtgaacagaatattgagcaagctcttgtttactatgaaaaatcagctgatttttttcaaaatgaagaagtgacaacttctgcgaaccaatg

SEQ ID NO: 221868 - DNA, 582 bp, Glycine max
caaaaccaccaccttcccttgagattacaatccgccaccaacccatcaccggaaccatgttccgcctcctaaagccgcaaccttttccctccgggtaccacctcatccaacgctgcgccgtgagcggcaccgcaaagggcaaagcgaagatcaaagcaggccaagcgctaaaacgctcccgcatcaccacgaagaaacccggatccgcgaccgcaggcccacccatgtcgcgtgagcgccaagaacgcgagcgcctctacgaacaatgccttcaagccccaacccctctccgccacctcacccaaaaggagcgcgaacgcgaagcggagcgcgagaaattgggtctcatcagcaaggatcggcagcgagaaatcgacatgatgaagcgaaaagacgacaaatttaaggtttcggagaagcccacgattattgggacacctgggttggattacgtgagtttaggtttggtggatgtggacaagttgccgaagtatgatttgacggtggaagatgggaggaagttggcgaaggagtatagtagggttttgatgaggaagcatagggcgagacaagctgcggagt

SEQ ID NO: 221869 - DNA, 600 bp, Glycine max
tgagtgagttcaaatcaattttaggtttaattttgaggtgttttggtcttgtagtgataggtcgtagtggttgtgcttggagggttacccttctcttcaaatgcaggattagatcccttcttttacaagaagagttgtccccaggtgcatttcattgtatttagagtcgtagagaaagtttcaagaaccgatacacgtatgcctgccaccctcgtcaggcttttctttcatgactgctttgtgcaaggctgtgacgcatcaattttgttgaacaacacagccaccatagtgagtgagcaacaagctctgccaaacaacatctcaataacaggttaggatgttgtcaacgaaatcaatacagagttggaacaagtttgccctggtgtagcttcttgcgctgatattcttacccttgcagctgaagaatcttctgttctggctcatggaccttttttgaaattccccttgggaaggagagatagtttaacagcaaaccgaacccttgccaatgaaaacctttctgctacttttttcaacctcactcaacttaaagctgcctttgctgtgcaaggtctcgacactactgatcttgttgcactc

SEQ ID NO: 221870 - DNA, 468 bp, Glycine max
gtcgttgaagaggtgaaagtggatttttaactggtgctcttgggcatatatcgtggtgcctcggtgtttaatcaataatgatgccactgaatcgatagggaataccccaatggcttatctgtgcctcattgtgggtgggtgtgtagcccgtattgctgctaaactggagctctttcaagtcgtgctgttgcgacacatatatgaatggtctgagcatgattgaagatgctgagataaaaggccttattatcacctggaaagacttgctctggatgggtctactaatgaaaacaccggcctaggattggcctttatagcgctcattggagggttatgaactccacgtgactatgccgtcttacgtgagtctcgagagaatagaaatgctgcgagcctctgctgcgaggactatcttacaaacgctgccaaaagaattgatggcgccattctgagagcaaacgacctctt

SEQ ID NO: 221871 - DNA, 302 bp, Glycine max
gagaaactcattgacacacattgcctttctgaatcacaccacaacttcatagcggagggctgattacaaatagctgaatgctggacggtcccgaaatagacataattatatgggtactatttaccctgatcatgaacatgcttaatatcaatactttgggtacttacaaggttttattcatcaccttgaatcataattccaaatatcctgcattcgtggcagttcccctacaaaccaattctttaccccacaggtgaagcagaaaatagtctggagagacttcatcaatgatctgaaaagga

SEQ ID NO: 221872 - DNA, 568 bp, Glycine max
caggccaaaacagcttcacattctttatattttcagatgattaaggaggctttgatcgctttgaacgagaaaggaggatcgagtccttatgcgatagcgaagtacatggaggagaagcacaaggcggtgctccctgcgaatttcaagaagattctaggtctgcaactaaagaaccaagctgcgagagggaaactcgtgaagatcaaggcttcgtacaagttaaccgaagccgcgaagaaggagaacaccgccaaagtgacgaaggccaacgctgagaaaaaggaatcgcgtccaaaacgaagcaaagccgcaactgccgctgctccgaagaaaaccgaggcggttaaaagggcagcgaagaaggtagggccgaagaagacgaagaaagtgtcgacgcctgcgaagcccaagcagcccaagtccattaggtctccgaccaagagggcccggaaagcaagccgtgctgcggcttgatatttgtcttgtttagttaaaactatgacatatatatgtagatatgaaaaagtgtgggttgtggtgtatgtgtgtgccttgctgcacaatcttg

SEQ ID NO: 221873 - DNA, 478 bp, Glycine max
gaaaaatacatagaggtatagtatttcatatgccagatcgaaccaccaagacctggggtttttaattttcattcacattcccttttcacttttaattcaaaaccctaattttcttttttccaccctccagcgtcgccgtttctcaacaagtcttaccctaatcgtcaaccattcaccaataacgattcaaaaacccaaactttgtgtgaagtagttcattccccattactcactcgcttgttttgaattttatttgctgcttcgtttcccactatgaaagaaggtaaattagttaaactcaaccatcaacaaccgcaccagaacggtcacctctcgccttcaaaattcgccaaattgtttgatccagaagcatcctgtgacaaggatcaattgggaaacgtattgcattggattaaacaagtgcttggccttgcgtgtggattccttttggggtccatacctttggttggaggcatat

SEQ ID NO: 221874 - DNA, 563 bp, Glycine max
aaagaatacaacaatcccttgacctttttagcacccacaccgcttccttcactaccagaccccagccccgacatggaccggcgcacgggcagcacccgtaacatcctcttcaacaagtacgagatagggaaattgctgggacagggcaacttcgccaaggtgtaccacggcagaaacctcagcacaaatgagagcgtggccatcaaagtcataaaaaaagagaggcttcagcagaaagagaggctcgtcaaacagatcaaacgcgaggtctccgtcatgagcctggtgcgtcacccccacatcgtcgaattaaaagaggtgatggccaacaaggccaaaatcttcctggttgtcgaatacgtcaaaggaggtgaactcttcgccaaggttgcaaaggggaagatgaaggaagacgtcgccagaaagtactttcagcaactcatcagcgccgtcgaattctgccacagccgcggcgtcacccaccgcgatttgaagccggagaaactgctcctcgaccagaacgaagaccttaaagtctccgactttggcctgtccgcgctgcc

SEQ ID NO: 221875 - DNA, 596 bp, Glycine max
attacattaaggcacggcaagtgcattcagattaaaacccaaatgaccctcttgctggacaaaattttcaggttttaggtgaggcttaccaagttctgagtgacccagctcaaagacaagcttatgatgctcatggaaaatcaggaatttcaactgaagcaattattgatcctgcagcaatctttgccatgctttttggtagtgagctttttgaggaatatataggtcagttagccatggcatcaatggcttcaatggacatctttactgaaggagaacaatttgatagtaaaaagttgcaagagaaaatgagggttgttcagaaggagagagaagaaaagcttgcagagatactgaaaaatagactcaaccaatatgttcaaggaaacaaagagggttttgttaatgatgcagaagctgaagtagcccggctatctaatgcagcttatggggttgatatgttgaataccattggctacatatacgcaaggcaggcagcataagagctagggaagaaagcaatttatttgggtgtgccttttattgctgagtggttaaaaaacaagggcactctattaaatctcaagttacagcag

SEQ ID NO: 221876 - DNA, 476 bp, Glycine max
ctctctatctgtccgtaatcactatgtttttttttttacaatggatacgagccaagaagggagggcatctcacaaccgagaactctccgattttttaaatcaaaatgttgtatagggcatatacattgacgaaatcataaccctaattatccacaagcgtcaccgcctaatcgttaacatatccgatctacacaacttcgttgacttggaaacacgattcttatgagtccacgtgcgtatcatgcaccgttctgagacgcagacacggaggctacttcgtgctatccgatcccaattattttaaggaaggcgaacaagtgcttgatggatttgaagggcccttttgtatttctcagccgcggccacgctccagatgtactctctttctgaaatcataggtttcatgtgctgtattgagggcattgacactaaatgatctcttgcaaggcccaaggttgttaaaagtgttcattttt

SEQ ID NO: 221877 - DNA, 532 bp, Glycine max
  unsure (1)..(532): unsure at all n locations
ctcgagccgattcggctttaggcttttttcgcaggtggtgtcaacggaagcaagagcaatgtacaatgttggccttgctggtttgacatattggtcaccaaacattaacatattcagagatccaagatggggaagaggtcttgaaacgccaggggaagaccctgtgctcactagcaaatatgcagcaggctatgtcaaaggtcttcaacaaactgatggtggagaccctaacaagctcaaggttgcagcttgttgcaaacactatacagcctatgatgtggataattggaaaggaattcaacgttacaccttcaatgccgtggtgactaagcaagatatggaggacacattgcaaccaccattcaagagctgtgtgattgatggcaatgttgccagtgtcatgtgttcctacaacaaggttaatggaaagccaacttgtgcagaccctgacctcctacaggtgtgtgtccgtggtgaatggacactaaatggatatatagtttctgactgcgactcggtngaagtgctttac

SEQ ID NO: 221878 - DNA, 535 bp, Glycine max
tcttcttcttcaattccacacccattatggaccgttttccgatcctctttctcctcgccaccctcatcaccctcgcctccggtgcccgccacgatattctccggttaccctccgaagcatccacttttttcaaagcacccggtggcgatcaaaacgatgagggcacgaggtgggccgttttaattgccggttccaatggctactggaattacaggcaccagtctgatgtttgccatgcgtatcaactactgaggaaaggtggtctcaaagaagaaaatattgttgtatttatgtatgatgacattgctttcaacgaagagaacccgcgacctggagtcattattaacagtccacatggaaatgatgtttacaagggagtccctaaggattacattggtgaagatgtaactgttggcaacttttttgctgctatacttggaaataagtcagctcttactggtggcagtgggaaggttgtggatagtggtcccaatgatcatatatttatatattacctctgacatggcggtccggg

SEQ ID NO: 221879 - DNA, 469 bp, Glycine max
ggggttaccattaaattgaaacaaagcgttggcttacaaacacggtattgtgccctgtcgtattaattagaagttccaagggtccttatggttccactgcctctccccaagtaaaagtaaaatgtctttgttacagcatctattttgcaggaaattacaatgtaaagaggtttccccagcgtcccatttgtatttacagggttggtataagaaatcatgagcagagagtacagtccataacactcgtaacgaataatgttacaacgactatactcggtcttcaatggagcgcattctaggaattatgcactgaaacccctgtgcatagaactccaggaactagcagggatattgacacatgcttgtgctgaggcctcagccatttgctctttccgtattccagcgttgcagaagtttgcaaaggacctcatatgtttcatcccatactgagacagggatccacaatgtg

SEQ ID NO: 221880 - DNA, 480 bp, Glycine max
aaacttccttataaattaaatgcaaatttaagacatccctcctcagcagcaaaggaaatggactaaaaccctatggctgcttgtgaatttgaaaatctcagacttttaccatcaaaacaaaaaacagtactcatcaaaaacaaacagcaacgaaaatgttaccgccgatcaagaacccagttttgaaggctacggctacatgaaatcggcggacacttcaaaatataactggtaaaacaaacacctaagactctgcaaagataaactactgtaaaggaacaagtttttttgaaaccacgttgatgatcacatgtgctagcaaaattgccaaaatgcaatcacttcttcttggcggcagcctttgtgaccttggctccggtggggtctttcttctcaacactcttgatgactccaacagctatcggtctgacgcatgtccctcacagcaaaacgaccaatgggaggatactcagagaaagt

SEQ ID NO: 221881 - DNA, 596 bp, Glycine max
gaattttgagtaatttttatcatttttgagaattaatatgtatataattatatagtatacattatattaactataagctacataaaaaaattcagaatagcggcggttatcctctatcctgctatattggtttttcggtcggctgctatgtgccgctactcaagattcaaaacattctggtaattctagaacatgtaaagtttttttttccaggttttagaatgccattgtattattattattattgttgagcatgtttggtgtatagattactttttgagaaataatcataaaaaattctcttgtgaagttataaacaaatgattgtttctcccgaataaattgaaccactgtgcactaagatcatattgttaaacaatcattcttttggatagaatatagatattgcagatacagtcatgccctcagattttaggtaattttatatgaaaatgcataaaaaattaaagttctggagtgtgggttgggaaatgagaggaatgatacattgttcttaataattgcagccttgttagctacctgccctctttaagctgcaatagtaaactctaagagggaaaataagtttttattag

SEQ ID NO: 221882 - DNA, 573 bp, Glycine max
  unsure (1)..(573): unsure at all n locations
ggaaaagaaagaaatagaaaaagaataaaaaaacacagcgtcctagatttcctcttctctgcttcggaagaaagagaaaacaaacaaaacaatggcgttcgcttctttcctcggcagagtcctcttcgcttctgtcttcatactctctgcttaccaacaatttaatgaatatggagttgatgggggacctgctacaaaagcactcagacctaagtttgatgcctttacacatcgggtgcattctcaagtgggctttcaaattccagagattaatctgaaatttttaattgctggggctattgctctgaagggtcttggaggggttcttttcatatttggcagctcttttggagctttgcttctgctcctgcaccagctgattgctactccaatccattatgatttttacaattatgatagtgaggacaaagaatttactcaactgttcatcaaatttacacagaatatggctcttttcggggctgtattgtttttcattggcatgaaaaactccatccctaanagggtacccaagaaggctccaaagacaaaaacatattatttttgcagcat

SEQ ID NO: 221883 - DNA, 522 bp, Glycine max
cacaatgtgtggcatacttgttgtgtttggttgctctgattcatctcaagccaaaagggttcgcgtccttgagctttctcgcagattgaagcaccgtggtcctgactggagtgggctccaccaatatggtgataactatttggctcatcaaaggttagccatagttgatccagcgtctggtgatcaacccctcttcaatgaagacaaaactgtagtggttacggtgaatggagagatctacaatcatgaagaactcaggaaacagttgcctaatcacaccttccgtacaggaagtgactgtgatgttattgctcacctgtatgaggagcacggagaaaactttgcggacatgcttgatggtatattttcgtttgttctgctagatactcgtgacaacagttttatagtggcacgagatgcaattggggtcacttccttgtacattggttggggtctagatggctctgtctggatttcatcagaattgaaggggctgaatgatgattgcgaacattctgagtc

SEQ ID NO: 221884 - DNA, 546 bp, Glycine max
ccttgaagcttcataatgggaaactcaattgatgggaacataaaaagatcaacccaagagagacatctttgcctgttctaatcagtgaaatagtcaaatgtgatcgaagcaaaagctccagcttttactagcagttttccacggtctgcttatctagggaaaacaaaaaacactacgactgaaatataactatccggaatataacttccgctcactctttatccgttttgcaaacttcctagagttcatcatgtacaccctcttccttggtgtcttccccagcttccgtctttgattcagcatcggagtcattgccagcttcatcagcatcttcctcttcctcatcagcatcagagtcaactgggacatcctttgattcctcctcttccctcttcttctcagcctctttaaatgctggcttctcaacatccttgtgcttgccccatgtttcttcagccagatgcttggcatattcaggatcatcaacaattaagacatttgcaaacaaagtaccagattttacctgccacaattcaattgcccacg

SEQ ID NO: 221885 - DNA, 577 bp, Glycine max
aaaaaaaaaaaaaaaagaaaacccttcaaaaactctgaagaaaagttcgttgctttctgcttcactgcgaagatgaacggtggtccatctggtttcacaaatgctcccgtcacaagggccttcatcatcgcttcggcgcttttcacaatcttctttgggatccaaggccgtttcggcactctggggttgtcgtatcaggatatttttggaaagattcgcctttggaagttgatcatgtccatattttccttctcgtcaacaccagagttgatgtttggactgtatcttctatattacttcagggtctttgagcgacagataggttccaataaatactcagtctttatcgtgttctccatattaacttcactactgcttgaggtccttgctgtagcacttttaaaagatcctacagcaaacctagtcactcctggaccatatggccttatatttgcttcatttgtaccctttttctttgacattccagtttcaacacggtttcgtgtgtttagcttcctcttctcagacaagtcattcatatatctagctggtcttcagcttctttttcatcatggaa

SEQ ID NO: 221886 - DNA, 462 bp, Glycine max
cacacaccaaagagcatttaacattttagttcacaactttaaggaaaagggaaatggcccaagtgagcatagagcacaattttgctcaaagcactcaaatttttggccattctttcaactccaacaaactcaaatcggtgaattctgtttcattgaggccacacctttggggggcctcaaaatctcgcatcccgatgcataaaaatggaagctttattggaaattttaatgtggggaagggaaattccggcgtgttgaacgtttctgcatcggtcgccgccgcacagaagccgtcaacgtcacccgatatcccgttggaacccatcaaagacttctcgggtaccatcacattgccatggtccaactctttgtgacaatccaaatttgcttcttgctgctctctttgagggaacaactgtggtagacaactcgatggatagtgaggatatttattacatgctt

SEQ ID NO: 221887 - DNA, 509 bp, Glycine max
cacgcccaccgaaagggtaagcgctggaaaatgctgcgttccaccgcgttttctggtttcgggaagattaacttcaaaggcttaaaccaagcaacagagcacccagatatagagatttgactagtcatatccacgtgctgcatacacatacatacttttgttgtgctcagcttctattgtgaattgaagaacccatttgcattcaggcttagatcgcttaccacaccgcaccatatggctgttactgtggccatgttacctcgttggtcggtgtttcttctttttctgtttgtcttgtgtagctcaggagcaaaggttgtcgccattgatgtacatgcagcaaagcgtctcatccagaccggttccatttatcttgatgttaggacggtggaagagttcaagaaagggcatgtggatgcagttaatgtccttaacattccatacatgttgaatacacccaagggcaaggtaaagaatccagactttctgaggaggtttcatcagcttgc

SEQ ID NO: 221888 - DNA, 537 bp, Glycine max
attctaaatatatatattctaatgataccagaatccaaatggcagaatctacaaccttatcgatacaataaacataaaaactactgaaaagaattctttctaattaacaaatccatcaattgtgtgctaagcacgcataaatgattaaatgtaaaaggccagcagtaaatatatcttgacgtgttaccagaatttttctgttgatgctgaccgcaaattacaacaaaaaatgaaggagacaggctcatttccatatacatacagggtttgctattatgcttatttcatcccttttccttcattttcattcagaatccgatttccgaaattattaaccataagaggcaacccttctctcagtgggatttttggctcccagatcatcagatacttcgctttgctaatatctggcttcctcatgtgtggatcatcagcagtatttggtttgtattctattggagcacttgaatcaattgtttcttttacaacctgagcaagctctaacatggtaaactccccaggttacccatgttgaaa

SEQ ID NO: 221889 - DNA, 591 bp, Glycine max
ctttctctagtcctgttatttctcatcgcgtaaagcatggctttgttggtggagaaaaccacgagtggtcgcgagtacaaggtcaaggacctttcccaggccgacttcggccgcctcgagatcgagctggccgaggttgagatgcccggcctcatggcctgtcggaccgagttcggcccctcccagcccttcaagggggcccgcatcaccggctccctccacatgaccatccagaccgccgttctcattgagaccctcaccgcccttggcgccgaggtccgctggtgctcctgcaacatcttctccacccaggaccacgccgccgccgctattgcccgcgacagtgccgccgtcttcgcctggaagggtgagacccttcaggagtactggtggtgcaccgagcgcgccctcgactggggccccggtggtggacccgacctcatcgtcgacgacggtggtgacgctacccttctcatccacgaaggcgtcaaggccgaggagctctatgagaagaccggcgaactccccgaccccaactccaccgacaacgccgagtttcagatcgtgcttaccatcatcagagatgggttg

SEQ ID NO: 221890 - DNA, 608 bp, Glycine max
gctagccagcaagggagaattgaatctattggtaatagagagctcaaaaggggtaaccatatggcagcgtttggtattcaaatcatgctattgctggcagctttcttgcttccactatctgtggaagctatggttcgccactacaagttcaatgtggtgcaaaagaataccacaagattgggttcaaccaagcccattgttaccataaatggaaagttcccaggtcccaccatctatgcaagggaagatgacactgttctggttaaggtagtcaaccaggtcaagtacaatgtcagcatccattggcatggggtgagacaattgagaacaggttgggctgatgggccagcatacataacccagtgtccaattctaccgagccaggcctatgtctacaactttactcttacaggccagagaggcacactttggtggcatgcacatatcctctggcttagggccactgtccatggtgccttggtcatcttgcccaagcttggagttccttacccttttcccaaaccaaatatggaacaagttatcatattgagtgaatggtggaaatcagatactgaggctgtaataaatgaagctttgaaatctggttg

SEQ ID NO: 221891 - DNA, 581 bp, Glycine max
aagaccaaattctgatacgtatcttacaatttttaatatcggggcactttaagaatacatctatctctgcttttgcaacaaggtttactataaacaatgttcaccctcagaatgaaaatcgaagaagagaggaaaagaaaacatagtttaacttaaattaatacaaaacgatagattgcacccgcaaaaatatctgccacaatgttcacttggacttgtcatcaaagtgaattaaccgtgtcaattaaacactagccataaggaagattttatcaaaggccaattactgatttatggacccccttcctcttcagaggagcgcttcttctggccgtagtatgggcaccaagggttcttgcaaatctgagtttacgggaaacagattacactgcgcatattgtgccatcaattggtccacaagaaccaaagctaccattgcttctaccataggtacagctcttgggacaacacaaggatcatggcgaccacgggctataaacttctgttcttttttatctcgagtcacagtcttttgcttctttccaattgttgatgttggcttgaaagctattctcatatta

SEQ ID NO: 221892 - DNA, 512 bp, Glycine max
cgcacaagtatttagttctcagggctaccaacgaaacatcaaaatttcacaaaccaaacactgcctcaaaaagacatgtacaagcccgcaaccagccaatgcatgaccaaaaatgtttgcctaaaatttgttggaatataaaatgctaagatttaaataaacgctactttcagaaaaataattaaaacatttctccaaaaacaagggcattgaaaataaaatgcaaataccctttttaaatgcacaccagcacaacctgcaaaactctcccttttgtaagcactgggaagtagatgcctccttagattcagttatactttaatcctcattttgactttcatccttgacaagcttgatcatgtcatcaattcgaaggatggtaatagcagcttcagttgcaaactgaataatttttactttgctcattgcaggctcaatgactccggcctccaagttgtttctgattttcccttgcgaaaggtccaaacccatacttgataaatgtttcttat

SEQ ID NO: 221893 - DNA, 539 bp, Glycine max
gagggtttgaagttttggcgctgattaaaaatggcggaagagtacgaagaggagggcggtgagattgaacaagagttctccgtttggaagaagaacactcctctcttgtacgatttcttcatttctcaccctcttcaatggccttctctcaccgttcactggcttccttcctctccccatccccactcccacccttccttcaatctccacaaacttcttctcgccactcacacttccgacggcgaatccaacttcctcatgctcgccgacgcatacctccccaccgacacctcacaacccatcgtcgcctccgatccaaactaccccgttcttcccaaggtggagatttcccaaaggattcctgttgatggggaggtgaatcgagctcgatgcatgctgcagaaccctagtattgttgctgctaagacttgtaattctgaggtttatgtgtttgatttcaccaaggaacatgggagtgagtgtaaccctgatttgaggttaaggggtcatgataaagagggttacggtttgtcttggag

SEQ ID NO: 221894 - DNA, 443 bp, Glycine max
cgctttttagatttttcctataacatgtattacaccctctttggctttaaaaaaaagagggaaatttatataacactaaaaagaacaaaaaacgggtctaatttaaagaacattttcaaccccgagtctaaaatataatacataactccacctttagtgaatacaagacaatctcctaactgcacttggcccttccatgtgtcaaaaggaaaacgcaaacttaatcttgctttttgaccacggcacctatgacaagctactttcttaagctcccaaaaacaagctgatcaatccttcctttctctctcacattttgaggattaatggatcacttgcaaggaaggctataaaaaacctgacgtgaaaaggattattcataatgacgcttgccaatgcacatgactaaatttttaccagggcaacaaacacctagggggttaact

SEQ ID NO: 221895 - DNA, 551 bp, Glycine max
ggcacacggaaagaatttcgttgttttgttttttacacccaacaaccaagtgcaggggtcacgaaaaaagaagaaggcaaatcaaagttttgaaccttggttcaatatctagagtccctgcaagctcaacacatcagagataatcaaaatgcatcctgcgcagatcgttttgtatggatcaactttatgtgtcatgataacagtgcacttctccatgaagctactcgctgaacatgttttgaactggaagaaaccaaaggagcaaaaggccatagtaattataatccttatggccccattgtacgctgtggactcctatgttggtttgataaatttctttggaagtgaagcatttttcacattcttggactcaattaaagagtgctatgaagctctggtgattgctaagtttttgggcttgatgtacaattatctaaacatctccttaagtaagaacatagtgccggatgaaatcaaaggaagagaaattcatcattcattcccaatgactctttttagcctcacactactcgtcttgaccataaaacact

SEQ ID NO: 221896 - DNA, 513 bp, Glycine max
gtttggaatcattgcataatgcaatgttattttctaccgatagaaaaggaaggtgaggtttctgtgtctgatatggtttggggaaaggtgagaagccacccatggtggcctggacagatatttgatccctcagattcatctgagaaggcaatgaagcattataaaaaggactgccatttggtagcatattttggggatagaacatttgcatggaatgaagaatcccagctaaaaccttttaggacacatttctcctccattgaaaagcagagcacttcagaatcatttcagaatgctgtagattgtgctgtggatgaagtcacaagacgagccgaatatgggctggcatgttcttgtatacctaaagatacctatgactcaattaaattccagacggtagaaaacactgggattcgatcagaactaagtgccagacatggggtggatgaatctctaaatgccagctctttttcacctggtaatcttgtagaatacttgaaaacactgtctgca

SEQ ID NO: 221897 - DNA, 521 bp, Glycine max
gtcaagatgaatttttaagttcatggtattaagggcattaatgagtcattattgttccatatctgtataaaataagatatatcgtagtattcaatggatgacttctttacattatctgttccaaatttctttaccgccttaaaattctaatgatagcttcaattttttccaaaaatgattgaataagattaagttaaggttcaacatctaactttatgcgcatggcccgaatccatatttcattcgacaacttaggaaactcaagatattttcctaatcaatcaacattgtttccccatttgtagtctgaattgtggccttggtgctctgtaggcttaagtgtttcttcatttcctgagacctgacaaactcctcaattcttgcttttagctcatcgtcgggaatcaacatatccccggtaagatgagaacggttgaatggatcagttctatcactaagaagatgcctctgaatgacaggacgatcaaccgtgatccttgaaaaaggcaagataactggat

SEQ ID NO: 221898 - DNA, 549 bp, Glycine max
atctagagtcttcagtttctcctcgttgttcttcgctttcctgttttcaatttcgattctttcgttaatttaataagatgtttgggagggcaccgaagaagagcgataatacgaggtactacgaaatcctcggcgtctccaagaacgcttcgcaggatgatctgaagaaggcttacaagaaagccgccattaagaatcaccccgacaagggcggtgatcccgagaagtttaaagagctggcgcaagcttatgaggttctgagtgaccctgagaagcgtgagatatatgatcagtatggtgaagatgcgcttaaggaaggaatgggtggtggcggtggccatgatccatttgatatcttttcatctttctttggcggtgggagtccctttggatcaggtggaagtagtcgaggtaggaggcagaggcgcggagaaacgtggttcaccctctaaggtctctttggaggacctttatcttggaacttccaagaagctctccctctccagaaatgttatatgctccaagtgcagtggcagggttctaagtctg

SEQ ID NO: 221899 - DNA, 506 bp, Glycine max
gtttattagtattattattactagtttcctgctatcaaagcatcacaaatggcttgtacagacaagcctggcggcgaccctgaatacagaacatcttcaactccagctcctgctggtgttgattactttaaatttgatgtcatcctaaggtttctgttgtttgcagcatcactggtagctgttgtggtgatcgtcactgctaatcaaacagaggttattcgtgttccacagcctgtgccatggccagccaagttcagatactcaccagcctttgtttattttgtagctgcattgtccggtactggcctctacagtatcattacaacacttgcatcactctttgccagtaacaagccagccctcaaaaccaagttgctcctctactttatcttatgggatgcgctgatattggggataatagcctcagcaacaggcacagctggtggtgtagcatatttgggtttgaagggaaacagacacgtggtgggttggataaaatttgccat

SEQ ID NO: 221900 - DNA, 438 bp, Glycine max
atattcgacactccaattactgattgggatttgactaaatcaactataaacaaccacatattttggtcaaaaacaagaaccacggtaacacgaaaccataaagaaactcgaactcaaaccacaacaactaaaaatacggggcataatcataaaccctaattgacgacatcaagccttattttctccagcctccattaccaccatcaccaccacgagagtaaccacggtctttgccaccgccataaccaccaccacgattgtatccttctcctccgccgccgccgccgtcaccgcgggactgagcttcattgacagtgatattacggccgtccaagatctgtccattcatcggtccgatcgcatccttcatggactgctccgaggcgaaggtcacaaatccaaaacccctggatctgccagtctcacgatcgttgataa

SEQ ID NO: 221901 - DNA, 465 bp, Glycine max
  unsure (1)..(465): unsure at all n locations
aggaagaagaagaagaataagaagttgtcgtacctgttgcctcacttgcactctggatgggccgtcgatcaagcaatcctcgccgaagaggagcgtctcgtcgtcatccgtttcggccacgactgggacgaaacctgcatgcagatggacgaggtgttggcgtcagtggcggagacgataaagaactttgcggtgatatacctggtggacataacggaggtgccggatttcaacaccatgtacgagctctacgacccttccacggtgatgttcttcttcaggaacaagcacatcatgattgatctcggaaccggtaacaacaacaagatcaactgggctctcaaggacaagcaggagttcatcgacattgttgagaccgtctatcgtggagccaggaagggacggngtctcgtcatcgctcccaaagattactccaccaagtaccgntactagtttgattccttc

SEQ ID NO: 221902 - DNA, 411 bp, Glycine max
aaaaaaaaaaaaaaaagagccttttttgccccgggggttttttttgattttgaaaataacaaaataacagccggacataaaacggggggggggccctttccaacttaaaagcgggggataaatttggcccttgacccaacacatgccccccctaaaaaataaaattttacctttttccccccaaaaaacaaggccttttatttaaatttaaaaaaaaaaaagatacccccctccttttggtgaaaggaaccccaacccccaaaacctgggttgggtttttttggggggccccaactttattaaacaggaacgggtggatggaaccccttggccttgaagggaatggccctctttcccacccggggggaaagggcttcaaacccccccccaatgaaagggcccccccaaaaa

SEQ ID NO: 221903 - DNA, 598 bp, Glycine max
  unsure (1)..(598): unsure at all n locations
ctttgctctctgtgaggcttcaatttccaattagggtttcgcttagagtaaccaattaccatgggagtcttcacctttgtcgttcgcaaatccggcgccgaatggagcgccaagcaacattccggcgacatcgaggcctccgccgactccacctacgatctccaaaggaagctcgtgcaagccgctctcgccgttgattcctccggtggagtccagtcctccttctctcccgtgtctcctacctccgctgtgttccaggtgatagtgggtggtgctgtattcgttggaggtggcggtggtgctgttgcagctgcacctgcaggtggtgctgctgcagctgatgctgccccggctgctgagaaaaaggaagaaaaggtggaggaagagtccgatgatgatatgggattgggactgtttgattagagattntctgctttttattgagttttgatggaaaagtgtttttagtgtttaatcctatanattgtgtgggtatattgctttttaccagntaatggtacattgaacttcgtcagatagagttatgtgctgtgacccanatgttcttctgcatgggatttagtagtatttttatttc

SEQ ID NO: 221904 - DNA, 487 bp, Glycine max
aacataaattctcactttcgttaatgatggagatggaacatggaaaccaaattattgcaggcaacttctcttctgttggtccgtgtattcaaacacaattgcaacattaccaaaacatgaattctggtagtcgtctaactcatgcatacaacccatcaatgttacattccccaagaaaaaccttgatgctgcgtggtgaaccacagctgccttcgacaatcaatgctctgtcattggcagccatgtgtgcgataatcttgtaaatcatttcgatatcttcaggagcatggcaacggtctgctacttcttcgagggtcaatggttctacaggttctttgcagcttgcctcatttagcactgccaacactcgcttctgaagtgctagtacttcacctgctgcttttttaccagcttccacacctggttgatgataagcatttatgttgacaagggaggcataaattcctactgctcgttcatagagtgc

SEQ ID NO: 221905 - DNA, 347 bp, Glycine max
ggggaaaagaaagccctatctttttatatatacccctgcctgaaaaaaccacccagggggccaaatttttatttttgaagaataagggggcattggggactcgattaaaaaaatatttggggtctggggcaaccaccagttttgggtgggggtcaaaccacctctatatggcaacccctagggggaaaacctccctctttggggggaacttttttgggtctccagctttgacccggtttccataagcgggggcctgccctccaaggggtggtttacccaatgggtcaagggtggtagaccaaacagcatcccccttaaaaggtttgggtgggctacaagcaaaaatt

SEQ ID NO: 221906 - DNA, 487 bp, Glycine max
gaaaaacaatatattccttattcaacccaaattggtttcatggcagataaaccaacacgatgccgccttcctccttactggacccacccactctaacaaaagttctaacaaaaaaaaataggggttcacattttcaaccacaaatgtgaaaagcctaacaccaaaaatcaaaaaaaggaaaattaaacaatcaaatccgattgataaaaccgatttttgtttttccctcactcacttttcatttgatcatctcaatcacttaatacctgtagtgagcaggcttgtatggaccctaaccacgcacactgttgtaataagcctgcgacttgctaatatggaccacattaacttcaagtttgcccagcagaaatgcaatcaccttcttatcaaggtgctctgtcaaaaacacaaccttgttctcgtacttgccgggactcttctccttccacaactcaagctgaacaatgacctttttggtgaaggaaca

SEQ ID NO: 221907 - DNA, 526 bp, Glycine max
  unsure (1)..(526): unsure at all n locations
atcggaagaaaccctagccactcttctggcgtcacgatgcagatcttcgtgaaaaccctaacgggtaaaacgatcacgttggaggtggagtcttcggacaccatcgacaacgtgaaggccaagatccaggacaaggaaggcatccctccggaccagcagcgcctcatcttcgccgggaagcagctggaggacggccgcaccctcgccgactacaacatccagaaggagtccacgcttcacctcgtcctccgcctccgtggcggcgccaagaagcgcaagaagaagacctacaccaagcccaagaagatcaagcacaagcacaagaaggtcaagctcggcattcttcagttctacaaggtcgacgattctggaaaagtccagaggctccgcaaggagtgccccaacgccgagtgcggcgccggcaccttcatggccaaccacttcgaccgccactactgcggcaagtgcggcttgacctacgtctaccagaaggccgatgcttaatttgcggttttaattntatttt

SEQ ID NO: 221908 - DNA, 532 bp, Glycine max
agattctaagagagattttgctgctttttgattaagggtgtttgcttgattttggtgatgtcgctgctctcagatctcatcaaccttaacctctcagacactactgagaaggtgatcgcagagtacatatggatcggtggatcaggaatggacctgaggagcaaagcaaggactctcccaggaccagttagcgacccttcaaagcttcccaagtggaactatgatggttccagcacaggccaagctcctggagaagacagtgaagtgattatatacccacaagccattttcagggatccattcagaaggggcaacaatatcttggttatctgtgatgcttacactccagctggagaacccattcccactaacaagaggcacgatgctgccaaggttttcagccatcctgatgttgttgctgaagagacatggtatggtattgagcaggaatacaccttgttgcagaaagatatccaatggcctcttgggtggcctgttggtggtttccctgaaccacagggtccatactact

SEQ ID NO: 221909 - DNA, 476 bp, Glycine max
atatattattatacttcacaatcagcatgggttttgtttgagactgaaaataaccatattacattattattattattattgtaacaatcggaaaacgagggaaagggaatagaaaacaatgaacaacccttggcagttggttgcaccaaccaaagtagccacaaatcgaaatcctagaaaaatcaaaaggtaaaaaataaaaaggaccaaaccctacttagaaaagcataactgttccttgttccttgttccttgttccttgttccatccaaagggagacaacatgcaagttttgctcatggcttccacagaatggttgtgtctgcaatcatggaagtaaccacatatgggtccatgttagaagctggccttctgtcctcaaaatatcccttccctgctttctctgtgtccctcccaaccctaactgaagctccacggtttgcaactccccatagaaggtgttgatgtcagcggtt

SEQ ID NO: 221910 - DNA, 561 bp, Glycine max
  unsure (1)..(561): unsure at all n locations
gggacctgccgtctgttttctttgatacatttagaattncttgaaacgccccaagctcgtaattctcctcgagctctctctatactatacgtctcgctttttacctactctccgcttccaagaacacgcgggaccactattgcacttcttccctcgttcttcctctttttctttttcttccctaaacccttttttctatctcactaacaccaccaatgggagaccagaataaagccaagccttgctgcttcctccgtgtggtccaccatcaagccttctctcaatggtggagcctccggcatgctccccacctgcttcattcaacccatcgatctgatcaaggtgaggattcaacttgggcaatgatcagctgccccggtcacttccaccatgcttaaaaatgacggtcttgctctcttctataagggtctatctgctggattaactcaagcaggctacataccccactgcccctctctgggtcatataaaatccttaccgccaaagctattgaagctaatgatgggaaacccctcccactgcatcaaaaaactctatttg

SEQ ID NO: 221911 - DNA, 346 bp, Glycine max
  unsure (1)..(346): unsure at all n locations
tggcatatgggctttacgatactgtatacgccgtgnnngttatcgacgaaaacccggaattaggctcgagaacaacttctttctgtttccttctttttcgttttataaggagccggacggcgttctgggggggagttacaaccctctcctcgacatctctgccatcgtcgactactctttcttgcaaaaatactgtatcaagttgaacgatgcgattctcgctgaggataatcacaaacctatgtatgaagaattggctaacaatcctaatgtgaagtacattgctggaggtgctactcagaattcaattagaaaaatcattggtcgcttcaagcaccaggggcca

SEQ ID NO: 221912 - DNA, 498 bp, Glycine max
attgggatattttaatcctgaactatgcatcaaaaatttcaggatctgagcaacattgctacgattctgttttaagtttcagtggccttaccaagcttgttccgtctaaaactcagattaaacgaggatttttctgcaaaatacctctttgatcaacattctgaatacaaaccattttgtaattcttttgcgaagttaatggtttgcatagcaaaacttgacggagtctttatagtaactaataatcattcactcagtcctcactttcctctggtttcacaaagaattcaatatgagctattctacttggttgctgatagccaaccgaatcagcatatgggtgtgacacagatggtttggcaattgaaaccagatgctggacttttaacattccacctctcccaatgcttaacttacttcctctattttctttaataacactgctaggcatattagaagttgttgctctgaggaacttatatttgtacttgaaagaag

SEQ ID NO: 221913 - DNA, 478 bp, Glycine max
gatttcaatttcatactttgatctgtccactacactccttatccatgacgctgggctctgaggatccagtgtcgtggttccaaggaacttcagattgctggaggagcttgagaagggagaaaaaggaatcggagatggaacagttagctatggaatggatgatggtgacgacatttacatgcgctcttggactggaaccattattggcccctataatactgtacatgaaggaagaatttatcaattgaagttgttttgtgataaagactacccagaaaagcccccaagtgttcggtttcattcacgaatcaatatgacttgtgttaatcatgaaactggagtggttgaatcaaagaaatttggtcttcttgcaaattggcaacggaggtttaccatggaagatatactgacccagctgaagaaggaaatggcggcttcacataaccgcaagcttgtccaacctcctgaaggtactcac

SEQ ID NO: 221914 - DNA, 598 bp, Glycine max
ggaataacgaagcctcctcgttcttcttcttccgccctttctctctctagaaccgtgcggtcgtttctttctctctcctcaaccggagacagcgtcgccttcttttctgaatctcgcggtgttgttagttctgcggcggttgtagttccggcggcgatgggacagcaatcgttgatctacagcttcgtcgctcgcggcaccgtgatcctagcggagtacaccgagttcaccggaaacttcaccagcgtggcggcgcagtgcctccagaaactcccttcctccaacaacaagttcacttacaactgcgatggccacaccttcaactacctcgttgataacggattcacttactgtgtggttgctgttgagtctgctggacggcagattccaattgctttcctcgaacgaatcaaggaggattttaccaagaagtatgctggaggaaaagctgcaacagcggctgctcatagcctcaacagagagtttggacctaagttgaaggaagagatgcagtactgtgttgatcacccagaggaaattagcaagcttgctaaagtgaaagctcatggttcagatgtcaaaggagttttgatggaaa

SEQ ID NO: 221915 - DNA, 548 bp, Glycine max
gttctatgataagtttattttccgttataatattgctgaactcctcgagtgcttggggcaagtccctagtcatcgtaatgcttggagacagattgctaaggaggaggaaaagggtgtctatctgaatttcttaaactttttgattaatgatagtatttatcttcttgatgaaagtctgaacaaaattcttgagctaaaagaattggaggctgagatgtcaaatacagttgagtgggagagacgaccagttcaagagaggcaggagaggacccggttattccattctcaagaaaatattattcggatagatatgaagttggcaaatgaagatgtcagcatgcttgcatttacttcagagcagattactgctccattcctacttcctgagatggttgaaagagtggctagcatgctcaattactttctgctgcaattggtgggtccttaaagaaaatcgcttagtctgaaggatcctgagaagtatgaatttcgtccaaagcatttgctaaaacagaatgtgcacatatatgttcatctagccaggggtg

SEQ ID NO: 221916 - DNA, 447 bp, Glycine max
accactggaaaggggggctttcgaaatttttgacccacacaatatttcaatcaaacagtccccttcagcaccggtgacaaagacaacaaaacaactctgaagccctggggatggaaatatgaagcttttcggggcattcccctatgttcttgaattcagaagggaggatctacaaagcattacacacttttttttgcatgcagcatatgcaatacgatccgacatttataccattttgttggatgctaaaagtaggtaccttccggaggctggacaagcttccggttatgaggagcagccatttccttcttcagctgggtcagtatgtcctccatgggggactctctttgccaatttgcaagaagaccaaatttttttgggtcaaccactccagtttcatgattaacacaagtcatgttgactcgtgaatgaaaccgaacacttggg

SEQ ID NO: 221917 - DNA, 577 bp, Glycine max
tctctctctctctctgtttctgtttttgcaatggcgaagaagaaggagaagaaggtgaacgtctccggaaaacctaagcactctctcgacgtaaaccgcagcaatgacgcgaagaaggagtcgcgctccgccgccaccgtgcgccgcctcaagatgtacaacaccaggcccgtgcgcgaccggaagggaaaagtcgtatcccacgagcttcagtccaaggagcttcccagcacaagaatccaacccgatcgtcgatggttcgggaacacgcgtgttgtgaatcagaaagagcttgagtttttccgagaagagctacagagccgcatgtctagtaattacaatgtaattctgaaggagaagaaacttccgctttcgctactcaacgatcaccagaagcaagctagagttcacctgcttgatagagagcctttccaggatgcgtttggaccgaagactaagaggaagcgccccagcctcttggcggctgactacgagtcattgctgaagaaagccgatgggtctcaggatgcttttgaagagaagtatgggttcagtgtatccgcggaagctaatgatg

SEQ ID NO: 221918 - DNA, 556 bp, Glycine max
ttcttcttggatcttaccctcttgtttgctaatattctcattcttctgtctctgcttcttctgcttctgaactaagagatggggttgtctttcaccaagctttttagccggctctttgctaagaaagagatgcgtattctcatggtaggtcttgatgctgctggtaagactaccatcttgtacaagctcaagctgggagaaattgtcacaaccattcccacaattggattcaacgtggagactgtggaatataagaatattagctttactgtatgggatgtgggtggccaagataagatccgtcctttatggagacactacttccaaaacactcaggggcttatctttgttgtggatagcaatgatcgtgaccgtgtagttgaggctagagatgagctccaccggatgttgaatgaggatgagttgagagatgctgttctcctggtatttgccaacaaacaagatcttccaaatgctatgaatgctgcagaaatcacagacaagcttggtcttcattctctacgccaacgccactggtatatccagagcacatgtg

SEQ ID NO: 221919 - DNA, 541 bp, Glycine max
aatataaggtttgttagtttatagtatatgatgtgattcaagaaaaaaaaagattgccttaggtagcaaaccaatacaaatgggagatgatacaatgtgcatggaagggcttttttacttcataaaaagtggatgaacgagaccttattgaaatgatgattatcaacacacaaaaagtaaatattatatatgatgatgatcttaattaaaaaaggagtttagatgcaacgccgatccttgcaagtggaacacagacaagactatgtgcccttggaacagtgaggccggctctctcttccatgctaactttggcgtcaccacccttcaatatctgtccttgtggacccagcacttgctagtcgaagcactgaataagagatgcaagaagtgttgccattcccgaagtagccagattgacttcagggcacattttttctccaaacccaaatgggagaagttgaaaatgttgtcccctaaaataagaggccctgctttcccttcagcccctgtttttaggaaccttttacgacggaacttcgat

SEQ ID NO: 221920 - DNA, 390 bp, Glycine max
gagggaagggcccaagaacaccaccttgtgtcttttgtgaagcactacacatccaagggggagagggagctcacgcaggtctgcgccagcatcctcaacctcctcgactccaacctcgtaccctccgtcttcgccagcgagtccaaggtcttctacttgaagatgaagggcgattcccaccgctatctcgcagagtttaaggttggggatgacagaaaaaccgctgctcaggatatcatgttgtcttacaaggctgcccacgacattgcttctggggatcctccccctactcaccccatcagattgggtgtcgctctcaacttctccggctttactatgaaatcctcacccagcccgaccaaacgtgtgccctggctaaacccgcttttg

SEQ ID NO: 221921 - DNA, 516 bp, Glycine max
  unsure (1)..(516): unsure at all n locations
ctcgagccggttcagtgacaccgtgtgtaaatttagaggagagaaaccgagaaagaagaggagggctaggtttttgcaattgctgcaatggcgcatcaaggagaaccggcgaagctgcggtggggtgagctcgaggaggacgacggcgaggatctggacttcctcctgccgccgcggcaggtgataggccccgacgagaacgggataaagaaggtgatcgagtacaagttcgacgaggacgggaacaaggtgaagatcaccaccaccacgcgcacgcgcaagctcgccaacgcgcgtttcagcaaacgcgccgtcgagcgccgctcctggcccaagttcggcgacgccgtccacgaagacgttggtgcccgcctcaccatggtctncaccgaagagatcctactcgaacgccccaagcctcttggtgccaagtcagaggagccaaagaatgctggagacccattggctcaatttcagaaaggtgctgttcttatggtctgtacgacttgtgggaag

SEQ ID NO: 221922 - DNA, 451 bp, Glycine max
gcccttacaacttacaaggatgattttataaattatataatagtaatgttcgtacattagttgaaatgatattcatacctgtaaacaacatttttattcaaccaattccataatttaaatgtacaaaaggtgttacatacaaaaactagaaaacaatagacattgccaactattaatagtgactacaccttcatatccatttcatcttctaggcaacttcattctcttcattctgtacttggacgtggaataagtgagcgtggcaccaaacttttatactataatttgctctttttttaagcgcaaatgtacaggtttttggtcattacctccaaaatccttatctttaagcaaaggatgcttctttggcacgacattatgcggttttaatggcattgaattgctactaactgtgttgtggctgctgtttctaaccacaggtacatcatga

SEQ ID NO: 221923 - DNA, 466 bp, Glycine max
cttttcaacatccactgacaatatccacattttcattagttagggttattctggaagagggcaatgagtgcgtccaggttcatcaagtgtgtcactgtgggtgacggtgccgttggaagacttgcatgctcatctcctacaccagcaacacttttcctacggactacgtgccaactgtctttgacaatttcagtgcaaatgtagttgtggatggaagcactgtgaatcttgggttgtgggatactgctggccaagaagattacaatagattaagacccttaagctatcggggcgcagatgtcttcctgcttgctttttttatcataagcaggggtttatatgacaacgcagccaagaaatggttcccaaggtttaatagcattttcctggtggtgaattattttttttagaaaaaacaaaactttggctttgggatgattattattttttcataaatattgtggtg

SEQ ID NO: 221924 - DNA, 566 bp, Glycine max
  unsure (1)..(566): unsure at all n locations
ctcaagcaagttgcgcacggacatagttggattatcatcgggggatttttatatgcgcttcagagatcaatttctgcatataaaagagagttcatgtttgacaacgatactatgttgccatcactgttccagccgctaatgatcacaagacattcacatgaaaccaaaaggcgattgtagttataaatcaaatggtcaaagattacaataaaattaaaacaacaaagcaatggtagtaagagcaccatcgcctttgatcatgtgtttgtttaattaatcattggccgtccacatgttgtcatcatctccatcattgtaaatgctctctgccatttgccagacatggaaagaattgtcctcagctacgcttgtgataacccatggctgatttctgttccatgaaaaatctgatattttccctttgtgacccccatgagagaagagtagttcaggggggccaccttcaccatctccttctatctgctcatcaccaactctgttaaggtcccaaaccatcagccgtctgtcagcaccagaagatgccaacacattctncatgataggat

SEQ ID NO: 221925 - DNA, 498 bp, Glycine max
cttctttcaagtacaaatataagtttctcagagcaacaacttctaatatgcctagcagtgttattaaagaaaatagaggaagtaagttaagcattgggagaggtggaatgttaaaagtccagcatctggtttcaattgccaaaccatctgtgtcacacccatatgctgattcggttggctatcagcaaccaagtagaatagctcatattgaattctttgtgaaaccagaggaaagtgaggactgagtgaatgattattagttactataaagactccgtcaagttttgctatgcaaaccattaacttcgcaaaagaattacaaaatggtttgtattcagaatgttgatcaaagaggtattttgcagaaaaatcctcgtttaatctgagttttagacggaacaagcttggtaaggccactgaaacttaaaacagaatcgtagcaatgttgctcagattttgaaatttttgatgcatagttcaggattattttatcccaat

SEQ ID NO: 221926 - DNA, 460 bp, Glycine max
aaatgggcacttaactacagtgaatgaacggtccaaattccaagtcagcatttacataaagaaaagcaatataacaaatgttatagaatattctatagcagaagaggacttcatataactataacctgtaataagatccaatctcatatcagaaaaagtcaaatcacgacctttcagagactcttgtgactcaattttggatgaaatgaaaccccctatttttattagttaagctgcacagttacacagatgggaagcatttgttgaggttgaaaggcagtgaataaaactcttcacttcttgtgtcagtcttgaaggaacgggacttgtcccaccaatgctttcctctatctttccgaatagcagcttccttcttatgtagtgtgttgtccaagaaatatgccacacaacccgcaacaaaggcttttgattggaacgggacattgattatatcattgaa

SEQ ID NO: 221927 - DNA, 563 bp, Glycine max
cagcatcaaagcaagttttcaaaatttggtgcgtcctggattgacccttgtgcccctcctcctccactaactcgccttttttgttttttataaagcacattcccaaagggaccaactacaacacaacccttcaatggcgtccatggccactttcttcacccaaacctccttcccctcccactctctctccaaaaccttcgatacccatttcgccccatccccgaaagtcaacgtatttgcgaacttcccggcgaggaggcacgtgggggttcgagtttcgaacgcgctgatcgaaccagacggagggaagctggtggagcttgtggtgagggataattcagaaagagacttgaagaagggtgaggctctttcgttgccgaggatcaagctttcaaggattgacctggagtgggtccatgtcctcagcgaaggatgggccacacccctcagaggcttcatgagagaagccgagttcctccaaacgcttcatttcaactctctccgactcgatgatgggtcggtcgtgaacatgtcagtgcccatcgtgctggctattgatgatg

SEQ ID NO: 221928 - DNA, 487 bp, Glycine max
ggcacttggaatccaaatatgagataaatcatcagcattcacataggtcaggccgggatccaggttggcaactcctgctgggaactctactgcctggaacatggcatccagcccgatggcatgatgccaagtgactcctccttcggtgtagcccacgacgccttcaacaccttcttcagcgaaaccggatccggcaagcacgtccctcgcgccgtcttcgtcgatctcgagcccaccgtcatcgacgaagtccgttgtggcacttaccgtcaactcttccaccccgaacaactcatctccggcaaggaagatgccgccaacaactttgccagaggccactacaccgttggcaaagagatcgtagatctgtgcttggatcgcgtccgaaaactcgcagacaactgcactggtctccagggcttcctcgtcttcaacgctgtcggcggtggcaccggttcccgtctcggatctctcttgtagagcgtct

SEQ ID NO: 221929 - DNA, 520 bp, Glycine max
ctcgagccgaatcggctcaagctttatcccatttttctagggattaatacattttcggatggcttctgcatatgttgagtaccgttgctttgacggagggctctcttgggccactgacgaccatgccctcgagagagccttctctcagtacggtgaaatcgtcgaaacgaagattatcaacgatcgagagactggcagatccaggggttttggatttgtgaccttcgcctcggagcagtccatgaaggatgcgatcggagcgatgaatggacagaacttgtacggccgtaatatcactgtcaatgaagctcaaacccgctgaggcggcagtagcagcggaggaggaggatacaatcgtggtggtggttatggcggtggcaaagaccgaggttactctcatggtggtgatggtggtgatggaggctggaaaaactaaggcttgatgtcgtcaattagggtttatgattatgccccgtatttatagatggtgtggattgagttcgagtttctttatggtttc

SEQ ID NO: 221930 - DNA, 442 bp, Glycine max
attccataacataaataatagtcgaaaatcttccactatatatagttagcaatgaaaccttattattcccattaccctaaaaccaaactcaccaatatagaagaaatatcaatacccaaaagactttgcaataatagtcaaattaatttgacaatatcattgtctccaaagtcaagacaacttaggtgttaattaaccatttttaattatttggtgcaaagttcacgagcaactccaagccttgaattgggcacgtcatagagcacacggtggttttgttgctgcatgttggcaatgacattgagcactgagttcacgttatcaggagccgaagccatggccaagcatgaggtgctgccagcagtgctgtgtatgagaatgttgtcctgtggcagcgtcacgttcatgcctgagaacatgaatgtgatggtgggtgcaacta

SEQ ID NO: 221931 - DNA, 506 bp, Glycine max
aaggcttactcaactccaaaaaaagtatcggggattttgggcctagaaataaacaggcaggcaaataaattttcaagaaaatgattctgtagataccaaataagatagtttctactagtgtagccatgagaaggcatctgcaatgaactttcactcatcatcttcatcattatcagcagcagagttgagagctgccacacgtgaaatcaacttagccttcctctcctcatatgtcagcttctttaagttgtacctcttgtgctccttcggggtctgcttatcagatttcttgagagtaggatcagcccggatggcagcatgaacatttttatacagtgcctcaataccatcagcttttatcccacgcttgatgtattcactgaagtgtgactggtatttttctggttcatcttccgccaagatcttcatataggcagcaacatgtccaccaaaaacatattttcgatgaacctttgcatcaagcttcttcttttcttatcaaaccc

SEQ ID NO: 221932 - DNA, 550 bp, Glycine max
aaaaccgctctcttctccaacgctttctgtcttcttaaaaaacaaagttccacttggtcagatgcaactaaaccacaccacaccattcgcatcaacacagcacttgtttgttcccaactccgaaaaatatcatgctcctaacgtaaaatcctcggtttcaacgttcaaccgcgatctcaaaaaacaaaactatggcatcactctcaggcatttgctcctcttccccgactctcaaaaaattcccaaaccaatccccatcgttgaccgaccctctccgcaaagaccacgtgtccttccccgcacgccttgccgatcggaccctcagcctcgcgccgccccgtgcggtggctcgggaggtttccgacggagcgttggcggcggcggtgaagaaggggttggagaaggatccgcgcgcgctgtggcggagatacgtgggttggctgtaccagcacaaggaacttgggatttacttggatgtgagtcgggtcgggttcagtgatgagttcgttaaggagatggaaccccgtttccaagcggcgtttcgggcgat

SEQ ID NO: 221933 - DNA, 562 bp, Glycine max
attactaattttcatctgtttagtgtacaaacttagggacacatggatacaaagattattttttgagctttgacatcaaggtttcatatttctacataaagatcttgacataaaatctaacatggctaatcttcactcttctggaatactaccaccacctaccatgatgatgatcactccacataatatacaaaggatagcattcatactccaagtgacttattggcttcctcaattacattgttgaggtttttctaagaagctgaaaaatacaagcactcaatagtttacagagccacatttatatctaatttgcccttctgctcctgtaagtactcctacattactaagcttcaccatggatttggcaaaatcattgtagaaggaaaaccggttgttgctgtaataataaaccgtaggagcagtccttcgatccttaagtagtgcttggtcagattctagaagcgctgtgttgtatacgaattttctataatactcattgtcaaacatcataatacttgtagcatcaagaggtgcttgattgctgttgaagcatcttcat

SEQ ID NO: 221934 - DNA, 591 bp, Glycine max
gaaggtggtaccgccttcaattctttttttctctctccatttctcatcctcatcatgttattattcctcttccatctctattctccataacacccaccacaccacttgtgaaaaacctcattaatatcacacactgacatgtatctctgagctccaatccaatacaagaccacaccttgtcgtgtcggacgaaccttggtgtctgtttttttttttttttttcattattttctccgaagagatgaggaagggcagaggtggaggcgcctcggcggcggcggtggatgtgaacggatccattttaaaggagcctcggtaccggggcgtgaggaagagaccgtgggggagattcgccgcggagatcagagacccgttgaagaaagccagggtttggttgggaaccttcaattctgccgaggatgctgctcgtgcctacgacgccgccgctcggactctccgaggtcccaaggccaaaacaaatttcccccctctctcacctttttgctatccacaccccaccaccgatcctttcttctacactgggtttcacgatcaacaccaccaccacaacaacaacaaccttaacaaccc

SEQ ID NO: 221935 - DNA, 522 bp, Glycine max
cattgaatgccacagaatgaatggagggaatcaccatatacaagttgaaacgaaaaaaattataaaaataaaagtaaggtaaataattaacactgaatacaaattggttcttggggatgaggttaacttatagagaaacacagactccaacttcagtaatgacaatccaccaaagaagactgcttagagaagacaataacgtttttttctctttgctgaaacgaaaacttggattctctatgatcatcctctggtagtgctggaagattcaagtccaacttcaagggtttcttggcttcttgaaattcattgttaccaccaacaccaacaacatttccaccactcatagaagttgctaaagaagcattcacaagagttctgtggcgcctcatgtggccccccaaagcttgccctgatgagaattcagcaccacagatagaacactcgtgaaccttagcctttgttgttgttgttgttgtgctacacatattattattaaccccatttggtattttcaaggag

SEQ ID NO: 221936 - DNA, 550 bp, Glycine max
ctgtgagtgtttttgttcctcaatctttctatttctcccatttctcttccaatggcggcttctgtttccaccaaaccattctcagccgacgctctctccgccttcgcttctctcaattccgatctcggatccctctcccccgcctacctccgactctcactccgtcctcgtcttcccaagagacttcgcatacaggcggctgggagtacctatggaaatcactttcgtgttacaacatatggggaatcacatggaggaggtgttggttgtgttattgatggatgtcctcctcgccttcctctctctgaagctgatatgcaagtggatcttgacagaaggaggccaggtcagagccgaattacaactcctagaaaggagactgatacatgtaaaatattttcaggagtttccgaaggaatcactactggaactccaattcatgtatctgtacccaatactgatcaaagaggacatgactatagcgagatggcagtagcttataggccctcccatgcagatgctacctatgacatgaagtatggtgtcagat

SEQ ID NO: 221937 - DNA, 540 bp, Glycine max
agaaaagtaaaggaagggcgaagtttaaaaaaccaaaaccctttgcgagtgaagccctagactacactacacacttcgcaatggcggttgttgcgcaaacccctgacatcgccggcgagcgacagtccggccaagacgttcgcacccaaaacgttgtggcatgccaagccgttgccaacatcgtcaaaagctctttaggccccgttggcctcgacaagatgctcgtcgacgacattggcgacgtcactatcaccaacgacggcgccacgattctcaagatgcttgaagtggagcatcctgctgccaaggttttggtggaactcgccgagcttcaggaccgagaagtcggagacggcactacttcggtcgtcattgtcgctgctgagcttctcaaaagggcaaatgaccttgtcaggaacaagattcatcctacctcgattatcagtggatatagacttgctatgcgtgaggcttggtaatatgtagaagaaaaactagctgtcaaggttgaaaagctgggaaagggattcactattaact

SEQ ID NO: 221938 - DNA, 514 bp, Glycine max
  unsure (1)..(514): unsure at all n locations
nnnnaatgcacaagtttagatactagannctcttgaanatttnggcaaaacccctactagtcagggccgccttttttttttttttttttttattttaggctcacaccatacattagggagaggggatcattcataccaatcttattcttcacattgtcacacaaaaagaaccatacctaatatttctaaccatttaacccaataatctgccagatgaagagatttacccctgataccccaccacctatttaaagctcaaaagatgtgcctgcttacacttactaaataaaaataattcactattccgcatgacgccatccaatttattatcactatcacgataaaccacttattctgtatttaattcatcatcatgcactggtcactaaagcctccgcttgatcaagtataaaactcactgcattccacgaaacaatcttatccatgaacacttatatctattcaacacccccggtctaaaaatcaaggttttaaacatgcttccaaacatcat

SEQ ID NO: 221939 - DNA, 486 bp, Glycine max
cacaaataacatcctgttcatgcggtggcgtcatgataaaaacatcacaggggttgttgaacacagttattttttttatcaaattaagacacctcccttccctagcccctcataacagaaacataatcttacccagaaaacaggaagtgaaaagcaaacccacaaaagttttcatagatgcaatccatttcaatatacattatccaaacacaaatcagcccatggcatacttctgggtccagctgcgtgcagtggcctcatacttggcccggtcagttttgtacatgtgagcgatttccggaacaagtggatcatcaggatttggatcagtcagcaatgagcagatagaaagcagtaccttaaagatggtgagtgcagggctccactgctccttcaggatatcaagacaaatgctaccattgctattgatgttcgggtgaaacaccttagtcctaaaggcaaccttaggaggcttgaaaggataat

SEQ ID NO: 221940 - DNA, 367 bp, Glycine max
gggacaggggaccacaaatttttaataaaaattttttcaaaaaaaaaaaaaaaccggccaaaggggatttttcaaaatcattacctgggaaaaaagggtccaaagcccagttcaaaaaaaaaaaaagcttaaaaaacgggggctttggaaaaaaaaaacaccccccccccacggaaaaaaaatggaaaaaaaaaccttaatttttttgttcaaaaaacaccccccggaaaaaaaaaggttttttttttttaaaaaacggcccaagttaaccaaaaaccccccccaaaaggggggacttcccccccccccctaaaaaaaatttaaaacccaaaaatctcggaaaaaaaataaccctcaatcccaaaaa

SEQ ID NO: 221941 - DNA, 560 bp, Glycine max
catccatgacgcttggcttaggaggttccagtgtcgtggttcctaggaacttcagattgctggaggagcttgaacgtggagaaaaaggaattggagatggcacagttagctatggaatggatgatggtgatgacatttacatgcgctcttggactggcaccattattggcccccataatactgtacatgaaggaagaatttatcaattgaagctgttttgtgataaagactacccagaaaagcccccaagtgttcggtttcattcacgagtcaacatgacttgtgttaatcatgaaactggagtggttgaaccaaagaaatttggtcttcttgcaaattggcaaagagagtacaccatggaggacatactgacccagctgaagaaggaaatggctgctcctcataaccggaagcttgtccagcctccggaaggtacctacttttagcatccaacaagatggtatagatgtcggatcgtattgcatatgctgcatgcaatatatagtgtgtaatgctttgtagatccttccttctgaattcaagaacataggggaatgccc

SEQ ID NO: 221942 - DNA, 316 bp, Glycine max
catattaaggttctcaaattacattggcaaaaaagggggatcggtagcacacatcctgttataaattacaaagcgagattgtcttcatcacgaaggtgaggtatagcaaacagatcttagcactctcatattccattaagagtgacaacaactcttcgtgaggtaggatgatcccgatgctcgcagagccatataccctgccatgtccccatgttaagcttgccatttgtaatcggtatcgggagtgtacaaccaaacatcgatgatttaatatgagctggcatgtcatctggcccctttagagtatgcttccatg

SEQ ID NO: 221943 - DNA, 622 bp, Glycine max
  unsure (1)..(622): unsure at all n locations
cttgtttacaccgttttctccgccttcgatgtcaaacgtaacgccagagactctcacgtcccgattttggcacctttgcctattgggttcgcggtgttcttggttcacttggcaaccatccctataaccggcactggtatcaaccctgctcgtagtcttggtgctgctatcatcttcaacaaggaccttggttgggatgatcactggatcttctgggtgggacctttcattggtgctgcacttgcagcactctaccaccaggtcgtaatcagggccattcccttcaagtccaagtgattcaatcaaaccgttcatgcttaatcaagttgggaacaacaaaaaaaatcaaaacaatgtttctgggtttcggtttcatttcatcaagatgatctgtttatcttttttttttttaattttaatttaaagtctttgtattttgtatgtaaagatgtaaaattatgattattaggtggtgcatgtgttgcgtcatgggccaatgttatcctctgcttttaagttggaagaggcccagctcacgtgtgatgtacggctgtgattgtgtaattngcaaaatcaaaaataacccccgagtcatatatgcatctttttatttatttaaaaa

SEQ ID NO: 221944 - DNA, 567 bp, Glycine max
gcgttccaacgctgtttccttttttttcttccttcttcctttcttcgttgttgttgtggctgcgattctctagatcttgaacagtgttttcgtgttcggtgagatggaagaaaggaagcaatcgcgttatgtgaagttgactaaagatcagacacctctcgaagatattacccctggcgaactcaatcagccaattcaggttcctcagttggatgttcgtaagtgccctgaatgtagacagccgctacctgaaagctatgctcctcctgctgatgaaccttggatgactgggatctttggatgtgctgaagacagagaaagctgcttgaccggactgttttgtccttgtgtattattcgggcgcaatgtagaaagattgaaggaagacactccttggactggaccatgcatttgtcatgccatttgtattgaaggtggcatttctctggcaatagcaactgcagctgcaacttccatctttcctgctattaacctggggactgtatgtctcattggtgaggggtttattgttacatggtggatgtgtggcattcacactggtcaagt

SEQ ID NO: 221945 - DNA, 573 bp, Glycine max
cactcttaatttctctctgccttgtttatttttcacctctccaacctttcactttggctgggttgaatccctctctgtcctttccaaatggccagcgttgagagttgcacatcaaacaccaacaacagttccagaaaatgaaacaaccgaggtaatcaagacccaggaaacaaccccggaaccagtaccagccactgaggctcctgcaacagaacaagcagcagctgaggttcctgcccaagaagaacaacaagcaactgaggttcctgccccagaatcaaccaccgaagcaccaaaggaagaaaccaccgaagcgccaacaacagaaacagtagaaacaacaactacagaagaagccaagccagatgagcctaaagaagttgcagttgaaaccgaggaggtggtgactaaggagacagaggaagagaagccagcagcagaagagaaatcagaggagataactgaagaagtgaaagaagaagcacatgagcctacagatactactgaaacagaaacagaatcagcaccagcagcaaccacagaggaagagacaaaccagctgagacaatggaa

SEQ ID NO: 221946 - DNA, 556 bp, Glycine max
ctttctctagtcctgttatttctttttgcgttttgcatggctttgttggtggaaagggccacgagtggtctcgagtacaaggtcaaggacctttcccaggccgacttctgtcgcctatagatcgacctggccgaggttgagatgcccggcctcatggcctgtcggaccgagttcggcccctcccagcccttcaagggggcccgcattaccggctccctccacatgaccatccacaccgccgttctcattgagaccctcaccgcccttggcgccgaagtccgctggtgctcctgcaacattttctccacccaggaccacgccgacgccgatattgcccgcgacagtgccgacgtctttgcctggaagggtgagacccttcaagagtactggtggtgcaccgagcgcgccctcgactggggccccggaggaggacccgacctcatcgttgactgacgggggtgacgctacccttctcatccacgaaagcgtcaaggccgacgagctctattagaagaccggcgaactccccgaccccaacttcaccgacaacgccgag

SEQ ID NO: 221947 - DNA, 595 bp, Glycine max
  unsure (1)..(595): unsure at all n locations
acgaaagcaactactcacgcagttttttcttcttcttcttctcctgcgcttcgtctgaatctcaagcgtcaattctccatcgccaatcctctctttctgctgatttcggactcgtcacttacttgtgaaatgatgctctcagcggcaataattacttttggacgctggacataaggcgtgatgggcggttgctgttgttgttgttgttctgctaaggagactgtgttgagcgctccacctgcgtactattattatccaagagcatcagaagagcatgttcctctatcatctcaccagggtgctgcttctgctttctctgggcggctcttggttgatactaatctagatacttcatctcctgatacttatagacctccccctgctcctatccctttcaatgttaccttgggtaccactcaaactccacctgcggctcaagaaattcgtagtgacaagaataatacttccttgcattctacaaattctaatgcaattcaagaaccagttgctggagacaatcatgggacctcggctaagttggaagagctgaaggaatcagactgcanagttcanaccgatctagagctagattctg

SEQ ID NO: 221948 - DNA, 478 bp, Glycine max
aactgataaaaaaagcggggcgcatcagggcaatacaatacaatatgtcactatgaactatcaatatatgatcgttatttatgtctgtgatacacacatttcacgccatgatactcttacgtgatttacagaaacttttaacttatttaatacatcataccaacccaactaggagcagtttttattatacaatgacacttatctttaaactctgaagcatgacacggtggttgacaccagggaccatattcttatgcaatatatgccacatctggataagactcacaagttgccacaccacacatgttcttgcccaattccattttgaagtatgcattctaaccccatactttcttcccatgaattttttatgagccaatatgggacgccattttcaactccataccccacagcacggacggcatggttcacatactgtgaagtgctaccgcagatgacactatggtaaactccattc

SEQ ID NO: 221949 - DNA, 582 bp, Glycine max
gcagctcctcgccggcgctatggttttcccaatggccttctccgccgccgcagcatccgccgccgacaactccggcaaggacgacgatgggccccacaaggggttcaagcagagcagacccatgaatttggtcattgctcgttcccctgtcttcactgtcccacctgggttgagcccttctgggtttcttaactcccctggcttcttttcccctcagagcccctttgggatgtcccaccaacaggctttagcacaggttacagctcaagctgtcctagctcaatctcatatgcatatgcaagctgattaccagatgccttcagtaacagctcccactgaaccacctgtacagcagctgtcttttgctctaaatgaagcttcagagcagcaagtggtatcatgtgtatcagaacctagaaatgctcaacttgaagcaccggaactctcacaggctgataagaaatatcaaccatcttcccaggccattgacaaacctgcagatgatggctacaactggcgtaagtatgggcagaagcaggttaagggtagtgagtatccacgaagctattacaagtgcacaca

SEQ ID NO: 221950 - DNA, 469 bp, Glycine max
gattgacatttatgtgcatgagtaatgccaaaaatatcattcaagaaggagaatgatgagagtacaaacaatatacaaaagaatgatgaaaaaggaaattagaaaaatacatggcaactggtcatctgatcttattccactctgagcatcttctcctttctttactctatgaaagccttgatttctcctccctttggcatatatacttctctttatatgtttctccttcctcattgtgcatatacttagtaattttctcaacacttgggtaggtcagttggaggtggtaataaagattcatttggtcctttaccgttgtccacaacaaaagccatcttcagtccccatgttgtatgaatttccaagtggcaatgcataaaccagacacctggattgtcagccctgaatctaataacagtccaccccccagccgggactccaactgtatttttttcacacgatctacaag

SEQ ID NO: 221951 - DNA, 560 bp, Glycine max
gagagggttccccttggttgcgtgtatcttcagaaaagggttgtccttgtaataaaatagtttgtgaattggagtttgtgtttatagcaagagaatggatgagtcaaaaaacaggcataatgataatttgggtgtgaacaaaatggggaaaaacattaggaagagcccattacaccagcccaattatggcaacaacaacaacagcagcatgaatgggggtagacagcaacagcaacagcctcagcctcaggtttacaacataagcaagaatgatttcagggatattgttcagcagcttacagggtctccctctcagtctcaggatcatcctcaatccaaacctcctcagaatcagaacaattccccaaaacctcaaagtatgaggttgcagaaaattaggcctccccctttgccctatgtgaggcctccattgcacaccaccttgccagcagctagacctgctcactttagacaacaaccatcaccaaaccctaataatatagctgagtcaccaatctctgcctacatgagataccttgaacattcaattacagatccca

SEQ ID NO: 221952 - DNA, 509 bp, Glycine max
attctacaaatctaagcgcaattcatataaattaatgattgggcatgtcacagagaagcatctttgctgctacttgcctaggattaaaacatacatgcaacaatctcaattaaaaacaaatggtttttcaaataatagcaaaacaaacaacagcagttccaatcaggacagaagagagatagtgtggctcgacatcctctcatgtcgattttgaccatattttcctcaatcctttcactggtttagagggagcaggtgtaaccaggaggaggagacttgccacaagccacaagaagctgaagggcaagtgggacataaatgttgaggttgagaagcttcagcttaagagtggtgcaaagacacaccgcagcttcaagctcaaccaggccttgaagcacggggcagcactggttcgcaacagggtctcccaagccaatgtgaaccaagccaccaagaagatccacacaagcacctagtttgagcgtgtcaatggggcatgtagcctgtgc

SEQ ID NO: 221953 - DNA, 469 bp, Glycine max
ctgattcactcttcatttaaatgtgcataattttccatatgttgcagggattttgtacaggatcctaactcatttgtctatcaatgccagtactcaagatattttatctaaagattcaagttaaggtgggaaaaatgatcctcagaaagcaggagtccttgaggatgatactatataggaatgcctgaagttcacaaacatcctcacatcatgattagtgaatttctaatccttcattgattaggattccatctatcaattcagaacaatccggctctcatttatgcgctacatttatggaattagtgcgactgtgcctccagtaggatgttggtggccacattgacatcatttttggcctgcactagggcttgtctggcagaattcctgtcaaagcccatagagacaagggtagtgatcgagtcctccgttggctctactgcagcttgcattggaacagggtagtttc

SEQ ID NO: 221954 - DNA, 517 bp, Glycine max
gcttaaacactcatttttattagttttgatgctgagtgtgtgtgaaactgtgaaagagagttatggcaggaggtggtggagctccagcacctaagattgatgagccacaacctcatcccccgaaggatcagttaccgaatgtttcttactgcattacgagtcctcctccatggcctgaggccatacttcttggttttcaacattatcttgtgatgctcggtacaactgtgctaattcccactgctcttgttccccatatgggaggtggcaatgaggagaaggcaaaagttatccaaactctactttttgtagctggaattaacacattgctgcaaactctgtttggaactcgattgcctgcagtaattggagggtcttatacttacgttgcaacaacaatctctattattctttctggtcgattcagtgatgagccagatcctatagagaaattcaagaggataatgcgggcaacccaacgtgctcttattggtgcttcaactcttcaaatagtact

SEQ ID NO: 221955 - DNA, 528 bp, Glycine max
caaaacggaagttaccccttcgacaaggataaaaacgcaagtgatacactgttcactttctcacaatcatttcatcaaacactacttatctttaagccacacactacagttatggaacatcaacagtattatcatcattttcatcaattctgaatctagcttccacacaaagtcattactgctgggcgcactgtaccctttgtgcaccaccaggcatgtcatcatcctcatcatatgcctcctgagcttgttgctgcttcctcctagtctcctcctccatgttgacatcatggagtgtagtttcctcacattcatccagctccatgtctgtcaattgtgaagaaggctttggtggcagaacagcctccaaggccttaacttgatcagggtttagagaatctggaaactccacagtgaagtgaatgtaaagtttccccttcatgaatggcctctgatacatgggcattccctcatcatttatagccttgtatgaatcaggcttcacaacttccccgggatttgatttaa

SEQ ID NO: 221956 - DNA, 588 bp, Glycine max
ctttccttaactcaacccaacacatctcaacataaattaaataaataaataaaatgagaactaagctaaattcctttctctctctttctttctcttcgagggtttgggtttctcttcctccctggaagaaaaagaagagtcaccgctacgacgccgttcgtgcttttttgaggtgccacagtcatgtttgggcgtggtggaccaaggaggagtgacaactccaaatattatgatattctcggggtttccaaaaatgccagtgaagatgaaatcaagaaggcctatagaaaggctgctatgaagaaccatccagataagggaggagatcctgaaaagttcaaggagttaggtcaagcatatgaagttttaagtgatcctgagaagaaagacctgtatgaccagtatggtgaagatgcccttaaagaagaaatgggggggaggaggctcgtttcataatccatttgatatatttgaatcattttttggtggagcaagctttggtggtggtggtagttcccgaggtagaagacagaagcatggtgaagatgtggtgcattctttaaaggtttccttggaggacgtctataa

SEQ ID NO: 221957 - DNA, 562 bp, Glycine max
gcctcacaaaagcaaatatcaaactttccattttcgagaacacgatgttgcttgaaggtgcaggtggtttattggttttggctctgtttctgcacttgcgtcccacacccactgcaaaatcaaaagcacttcgccatctcccaaacccaccaagcccaaagcctcgtcttcccttcataggacaccttcatctcttaaaagacaaacttctccactacgcactcatcgacctctccaaaaaacatggccccttattctctctctactttggctccatgccaaccgttgttgcctccacaccagaattgttcaagctcttcctccaaacgcacgaggcaacttccttcaacacaaggttccaaacctcagccataagacgcctcacctatgatagctcagtggccatggttcccttcggaccttactggaagttcgtgaggaagctcatcatgaacgaccttctcaacgccaccactgtaaacaagttgaggcctttgaggacccaacagatcccgcagttccttatggttatggccccaggcgcagaggcacaaaaacccct

SEQ ID NO: 221958 - DNA, 490 bp, Glycine max
ctccctcttctctctctttatcttccccctccatttctcaccaaacaacctcaaaaaaatcctttgcgcccccccccccccccacaaaaaacaaaccaccccccgggggggcgaaaaaaaaaaccccccccccccaaaaatgccacccccccccaaaaaaaaaccccccaccccccccccaaccaaacttccaccccaccccccccccccacttttccccaccccccccccccccaaaaatactccccaaaaaaacaccccccccggaaaaaaaaaccccccaaaaaaaacaccccccccacaaaaaaccccaaaaaagccccccccaaaaccccacacccccccccccaaaaaaaaaaaaatcccccaccccccccccaaaaaaggcccccctataacaaaaaaacacccccccccattacccccccccctaaaaaaaaaacccccccccccccccccaaaaggggcccccaaaaaaaaaattcccccc

SEQ ID NO: 221959 - DNA, 504 bp, Glycine max
cattgaatgccacagaatgaatgggagtaatcactatatacaagttgaaactaaaaaaattataaaaataaaagttaggtaaataattaacactgaatacaaattgtttcttggggatgacgctaacttatagagaaacacaaactccatcttcagtaatgacaatccaccaaagaagactgcttagagaagacaataacgtttttttctctttgctgaaacgaaaacttggattctttatgatcatcctctgccagtgctggaagattcaagtccaacttcaagggtttcttggcttcttgaaattcattgttaccaccaacaccaacaacattttcaccactcatagaagttgcttaagaagcattcacaggagttttgtggcgcctcatgttgccccccaaagcttgccctgttgagaattcaccaccacagatttaacactctcgaacctttaccttttttgatgttgttgtttgctacacatattatttttaaccccat

SEQ ID NO: 221960 - DNA, 461 bp, Glycine max
ctcacacaacacaaacaccaaatcttacatggccaccacttttctttctcgtcctcgggctcatcttctctctcctcaccccagccctcattttctcttaccctgtccaagaccctgaatttgtggcccaagaagtttacaggaaaatcaatgcttccgtagctagaaggaatttggggtacttgtcctgtgcgacagggaaccccattgacgattgttggaggtgtgacccgaactgggagaagaaccgccagaggctagcggattgtgcgattggtttcgggaaaaacgccatcggaggaaagaacggaaaaatctacgtggtgaccgattccggcgacgacgatccggtgacaccgaagccgggaaccctccggtacgcagttattcaagacgagcctctctggatcatcttcgcaagagacatggcgatcaagctgaaggaggagctcatcatgaac

SEQ ID NO: 221961 - DNA, 407 bp, Glycine max
atccaacgcaaaacagtattgaataaaggggtaatcaaagcccaaacagtcataacactaattgaacaaaaacataaaccaaaacttttaaatactaaaataaaattaaaaccgcaaattaagcatcggccttctggtagacgtaggtcaagccgcacttgccgcagtagtggcggtcgaagtggttggccatgaaggtgccggcgccgcactcggcgttggggcactccttgcggagcctctggacttttccagaatcgtcgaccttgtagaactgaaaaatgccgagcttgaccttcttgtgcttgtgcttgatcttcttgggcttggtgtaagtcttcttcttgcgcttcttggcgccgccacggaggcggaggacgaagtgaagcgtggactccttctggatg

SEQ ID NO: 221962 - DNA, 550 bp, Glycine max
ctcgagccgattcggctttaggcgtggttgatcacagtggtgtggtgcgcggtggcggtgctactgtgcgccgcggcgggcgcgtcgtgggtggaggaggcggcgaacccgatacgaatggtggcgggggtggaggcggaggtggttcgggtgatagggcagtgccggcgcgcgctgaagtttgctaggttcatgagcaggttcgggaagagttaccgaagcgaggaagagatgagggagaggtacgagatattctcgcaaaacctcaggttcatccgctcccacaacaagaaccgcttgccctacactctctctgttaatcattttgctgattggacttgggaggagttcaaaagacacagactaggcgctgcccaaaattgctctgccactcttaacggcaaccacaagctcactgatgctgttcttcctcccacgaaagactggaggaaagaaggaatagtgagtgatgttaaagatcaaggcagctgcggatcatgctggacattcagcacaactggggctttagaagcagcctatgcacaagcat

SEQ ID NO: 221963 - DNA, 538 bp, Glycine max
  unsure (1)..(538): unsure at all n locations
gttatacaaattaagccttattcaacccaaattggggtcatagcacagaaaccaacaggatgccgccttcctccttactggtcccacccactcgaacaaaagttctacagaaataaaaatggctacaattcttctaccacaaatctgaaaagtctaacaccaaaaatcaaaaaaaggaaaattaaacaatcaaatccgattgataaaaccgatttttgtctttccctcactcacttttcagttgatcatctcaatcacttagtacctgtagtgagcaggcttgtatggaccctcaacaggcacactgatgtaatcagcctgggacttgctaagctgggtcagcttagctccaagtttgcccaggtgaagtgcagccaccttctcatcaaggtgcttgggcaaaacgtaaaccttcttctcgtacttgccggtactcttctccttccacaactcaagctgagcaatgacctggttggtgaaggagcaggacatcacanaactggggtgtccagtggcgcatcccaagttcatcaatcga

SEQ ID NO: 221964 - DNA, 430 bp, Glycine max
gggagcacaggaaattttggtttttattacaagagcatgatctaccagcaaagttggaaatatgaataacaatagagcccccttttttccaacacacatacaacaaccattccataaaggatcacacgtttgtagacagagaccacatgggttagcataactaatcaaaaaacatggggtagcataaataatcaaacccccaaaaataaatgatacaagattcttccctgaacaagacaagattcttagctttttataaatgcacaaggcttcctgatctttccttttgtccctgtctttacattaattcttcccattttctcgatggggggtgcaaactcagcaaagaaatttttaactgacccttcaagcaattggatgatttgtgcctttgtaactgggttagtcaataatgcagcatttgactcaa

SEQ ID NO: 221965 - DNA, 427 bp, Glycine max
cggttcgagcacccacacgcttcattatacttgttctcattgactgggttacaaaaggcgaggggcgtcattactattatcaaagagggtcctctagccattgcaaaggtcgagctgtaacagtcaccatatccactgaatgtgccgaaccctgtgatgaacccccatacacttgtgttttactgtgggaagcaccacaagacttatgtggtaaatcacaaaaaacaagtccttgggacagagcttgatgggaagccacttgaagatattattgtcacatcatacaataagggttacattctcccatctctcaacaatgcaactcaggtatggaaccatgacttattctgggagagcatgaaaccatgtggaggaggaaagccatcctgggagcttttaaaactgaatgatagagactgtggttcat

SEQ ID NO: 221966 - DNA, 530 bp, Glycine max
aacagatgcagggtttcttccatttttggagagctctgaggctggtctggttaaaggtaatctaaatggctgtgtaaatctttcagacagagtagttttgtccatggtcaactcacatggatggactctcgaggtgctaagccttgatggctgtaaaagagttggtgatgctagcttgatggcaattgcaggcagttgcccattgcttgctgatctcgatgtttccaggtgtgcaatcactgatacaggtatcgcagcccttgcacgtggaaagcagattaaccttgaggtactttctttggcaggttgtgcattggtttcagacaagagcgtgcctgccttgaaaaaaatgggctgttcccttgctggattaaatatcaagcgttgcaaaggaatcagcagccgctctgtcaacaagcttcaggaacatctctgcatgtgtgacatcctctactgaacaggaaatgcctccgcagcttttatagttagtggtgctcgttagtgtttttgggttcattcacgatggatct

SEQ ID NO: 221967 - DNA, 596 bp, Glycine max
  unsure (1)..(596): unsure at all n locations
ggagtatccttccctttatttccttttcctccaaactccaaagccgtttccaagtggaatggattcgagttccattaacagcaacagtaaggagataaccatggagattccaagcttggttcgactttacaaggatggcaccattgaacgcctccaaaactcaccaattgtgccacccacgcttcaagatccaacttcttccaaagacgtcgtcatctctggtgaccccctcatctctgctcgtcttttccttccaaaccggattcgatcccagcaagagggtcataaagtccccatcttggtctactttcatggtggaggtttcttctttgaatctgccttcaaccaactccaccataactatttcaacaagtttgtctccgtagcagatgttttagtcgtttccgtcgagtataggttggctccagagacccttcttcctgcagcttatgatgactgctgggatgctcttaaatgggtcgccaccaacaccgaaccatggcttgtcaaacacggtgatttcaacagagtcttcattggaggtgacagcgctggtgctaatatagntcataacattgccatgcgtgctggggctg

SEQ ID NO: 221968 - DNA, 589 bp, Glycine max
ccaaacagcatttgtcacttttttatatagcctccgctaaagtaaaagttagaaagcaagtgaattaagaaagaagcaaggtcaaaacgggaaaaactgttataataagaaaaagaacactactttaagagttgctttcaataattaggacaaatcaaagagcatcccttcaacacagttgaaaatgtattgcaacaaaacaactcaatggaggtaaagatgaagctcttttgagcattccccattatgttcttgaatttagaaggatcaagagtaatacatactatatattgcatactgcaaatgcaatatgatccaatatcggtatgatcttggacactaatagtgagtaccttcaggaggttggacaagcttgcggttatgtgaagccgccatttccttcttcagctgggtcagtatatcttccatggtaaacctccgttgccaatttgcaagaagaccaaatttctttgattcaaccactccagtttcatgataaacacaagtcatattgattcgtgaatgaaaccgaacacttgggggcttttctgggtaggtcttatcacaaacaacttcaattgataaattc

SEQ ID NO: 221969 - DNA, 521 bp, Glycine max
aactgtagcaacgccttgaggagcttcaacatttacctgcaaactggtgaagtgctggaagagagtcataaaattgagattgatctagatgagattctaaaactagagaaaattatttgggcccatcgtctgagagccacttggctaaaacatggggatagaaatataagttttttcaccaaaaagcctcacatagacagaaactaaactccacagacaaaatcacgaatgaagaaggaatgctgatcaaagatgaggaagacatataagttgttattttagagttttttgaagacttattcatgacgtctattcctcaagatactgacttagttgcacaactggttggagggaggataataaatgatttaagaaatgtgttgaatggtgatttcacaaaggaagaggcgtttgaagctctgaaccaaatgcatcctttgaaggcccctagtctagatgggacccctgctgttttctaccataaggtttagcccctgatcggaggagatgtcacttgaact

SEQ ID NO: 221970 - DNA, 393 bp, Glycine max
cctcggggaattccaattccacattttcaagaaatttggaggcaaaaatgttcatatatgaattggaggtatttgttttcttattaggcctatcctgaagccaaaggaaatgagatcggaattcctcggggaattccaattccacattttcaagaaataaggaggcaaaaatgttcatatatgaattggaattatttgttttcttattaggcctatcctgaagccaaaggaaatgagatcggaattcctcggggaattccaattccacattttcaagaaataaggaggcaaaaatgttcatatatgaattggaattatttgttttcttattaggcctatcctgaagccaaaggaaatgagatcggaattcctcgggggtaccgagctcgaatt

SEQ ID NO: 221971 - DNA, 508 bp, Glycine max
tcgggtttacagatcaatggtgacgtttggttataaataaaagcctacttaagagatatgggtaagttcagagaagaagagagggaaaaaccgattaccggccaggattcggtgattaatcaggacaagaacaaatataacactccgaaataccgatttgttgttcgctttagcaacaaggacattgttgcacaaataatatctgctagcattgctggcgatattgttcttgctgcagcatatgcacatgagctgccacgatatggtcttgaagtagggcttacaaattatgctgcagcttattgcactggtctcctgttgtcccgaagagtcctcaaaacacttgaaatggatgaggagtatgaaggaaatgttgaggctactggagaggattattccgtggaacctgctgagagcaggaggccattccgtgctctccttgatgttggtcttattaggactacaaccggtaaccgtgtgtttggtgcccttaaaggagctctggatg

SEQ ID NO: 221972 - DNA, 506 bp, Glycine max
gcaattcatttcacagagttggagtctaggggctgtgaataagcagaaatcagaatgatcatacaaccaccaccaccacagaagtaagaaaacagataaaattttgtttgttgtatgttacagatccgatccataggggtgggtgggcgggtgggtgagtacatgacttgaaggaatcaaactagtaacggtacttggtggagtaatctttgggagcgatgacgagaccccgtcccttcctggctccacgatagacggtctcaacaatgtcgatgaactcctgcttgtccttgagagcccagttgatcttgttgttgttaccggttccgagatcaatcatgatgtgcttgttcctgaagaagaacatcaccgtggaagggtcgtagagctcgtacatggtgttgaaatccggcaccttccgtatgtccaccaggtttatcaccgcaaagttctttattgttttcgccactgacgccaacacctcgttcatttggatgcaagttcgt

SEQ ID NO: 221973 - DNA, 522 bp, Glycine max
gacattctcaagccatgacttgtattcttgttttctacttcactttcttcttctgcgggcttggtaccttggttccttatgttcatatgtatccctcgtacccctatagtggaaattaccagcttgacctcaatttctatgatagatcatgcccaaatttgcaaaggattgttggatatggtgtttggttagccttaaaaaatgacaacagaatggccgcgtccctccttcggttgcactttcacgattgcatagtaaatggctgtgatgcttctgtacttcttgatgatacaccatattttacgggcgaaaagaatgctcttcctaatcgcaattcacttcgggggtttgaagtcattgatgacataaaagaacatcttgaaaggatatgtccatcaacagtttcctgcgctgatatattagccttagcagctagggaagctattgatcagattggagggccttcttggcagttcaattatgccgaagagatgcaacaacaacaagtaaggaagcagctga

SEQ ID NO: 221974 - DNA, 574 bp, Glycine max
  unsure (1)..(574): unsure at all n locations
aaagggctctctccttctccccatgttttcttttctttacttctttgtctgataaaactgtcatcaacctcctcctcttcccactctctctctctttcttcccccctcttttttttattcttcttttttcccttgcaaatattttataaaattgatatgtgttgaaggcatatttgcttaagagctgaaccacatcatcgtcttgaacgtttgaatctatggaacagcttgtcaacttcatcatccggccaccaagagctgaatatgaccccaaaagtgatttattggatcaggagttcatgctgaaaggaaaatggtatcaacggaaggatgtagagataaaaaacagtcggggtgatgttcttcaatgcagccattacttgcctatagtcagccctgaaggaaagcctctgccgtgtgtaatatattgtcatggaaatagcggatgtagggctgatgctagtgaagctgctataattntacttccctcaaacattacagtttttactctggatttttctggctctggaatttctggaggggagcatgtcactctatgctggaatgaaaggat

SEQ ID NO: 221975 - DNA, 551 bp, Glycine max
aatggttgaattctgaacacattaaaaaattaaggattcgggggaatttgttaggctctctatagccaaggaaagttatatgagacactcctacatataacacgtccaatgaaacagggagaaagaactctagtcaaagataaaaagaaaaaaattctctattaaaaaagcatagtattgccccctccccaccccagaatattaacaatagtatcccgccttccttatacagcctgtatctccaaatcagtatgctcaccgttgttaggtgaagacgtttcaggagtttccttgtcatcagtggttttcatctcttgaaccggaggagggtttacaacggtcatttctgaaaaaatgttatctgatagtcgtccattcatctccctgtgttcttgacacagggcgcaccagtgaaagcagcagtgcacacaacatgcattacacggtgaattcttcaagtgatatttcttctgtaaggattggcgcacttgaccagtgtgaatgccacacatccaccatgtaaacaataaaccctcaacaatgagacatac

SEQ ID NO: 221976 - DNA, 545 bp, Glycine max
gccaaaacgcggttgtatactgttttattcacggggtgtttttcttttgcctctatgacttgaaaccttttctctctcacaccaaccaccaatatattaacccctccactctctttcattcttcacacaacatcaaaagcaacaacaacatgcaagtccaagaggaattacttgtggcttccaaggatcacacccaccaaatgatgatgatcaagggcaagcgaaccaagcgtcaaagggcaccatcccctcttagtctagccatgccttataataattcaacctcaagtagcaccaacaattccattgatagtgccacaacctcaccctctcccaccaacacaattgaattgagagaagacgaagacatggcgaattgtcttattcttctcgctcaaggcagacaccacgtggcagcaccaacgtcgtatcacaacaatgacaacaacgataaccacaagtcaacaagcctatacctttaccagtgcaagacttgcaacagatatttcccttcattccaagcacttggaggacatagagccagt

SEQ ID NO: 221977 - DNA, 509 bp, Glycine max
atgggaagcaacttcatttttttgtttctttgcctcttggcattgattggatcaagccatgctcaacttcagcttggtttttatgccaagagttgcccaaacgctgagcaaatcgttttgaaatttgtccatgaccatatccacaatgctccatcactagcagctgcattgataagaatgcacttccatgactgttttgtaaggggatgtgatgcatcagtccttctgaactcaacaaccaatcaagctgaaaagaatgctcctccaaatctcacagtaagaggctttgacttcattgacagaataaagagccttgttgaggcagaatgccctggtgtggtctcttgtgctgatatcctcactttgtctgccagagacactattgtagccacaggtggaccattttggaaagttccaacaggtcgaagagatggggtcatctctaacttgacggaagccaagagataacatttctgcttcatcttctaactttaccaccctacaaacac

SEQ ID NO: 221978 - DNA, 564 bp, Glycine max
  unsure (1)..(564): unsure at all n locations
gggggatcgcctaaaccgngtcgctcnaancaatttnnnggttanagccaaaaactagtcagcggccttcctttatttttttttataaaacgaaatatgtaatatttgttaatagggcaaaacaccaaggacatggtatcttaattcttataactgataattaaagcggggcgcatcaatacaatacaatacaatatgtaactatgaactatcaatatatgaacgttatttatgtccgctgatacacacaattcaagccatgatattcttacgtgacttacagcaacttctaacttatttaatacatcataccaacccaactaggagcaatttccattatacaatgacacttatctttaaactatgaagcatgacaaggtggcagtcaccacggaccatattcttatgcaatttatgccacaactggataagacgcacaaattgcaacaccacacatgttcttccccaattccattttgaagtatcctttctcaccccaactttttccccacgacatttttatgagccaatatggtactccatttttaactccttaccccacac

SEQ ID NO: 221979 - DNA, 589 bp, Glycine max
ctactttctctctctttgtaacttgtaagcatggagtcctcaaagatctatgcttacctcttcctttgcatgctcttcctctcctccgccactcccattctcggttgtggctactgtggcaaaccccccaaaaagcacaagcctggtaaaacaccaaagacacccacagtacccgttgttaagccaccagtcacaatccctcccattgttaatccaccagtcacaatccctcccattgttaatccaccagtgacagttccacccgttgtgcttccaccaatagtgaagcccccgggttttctccctccaattcttaacccaccaagtacaccaacaccgtcgccggggaagggagggaacactccatgtccaccaccaaagtctcctgcacaggctacatgccccattgacacgctcaaactaggtgcttgtgtggatcttcttggtggcttggttcacattggcttgggagaccctgttgcgaaccagtgctgccccgtgcttcaaggccttgttgagcttgaagctgcggtgtgtctttgcaccactcttaagctgaagcttctcaacctcaacatttatgtcccac

SEQ ID NO: 221980 - DNA, 572 bp, Glycine max
  unsure (1)..(572): unsure at all n locations
gagagagcgagcagtttcagacacttagagaggggtttgggattggagggattgacgctgcgtctcttcctcttctctttcgatccatccctcattcctaatcctccaatccaaccacctcagcctcacactcacacatacacatatctgaacgcgtatcgtccctcctatggcttcaaagcgcatcctcaaggagctcaaggacttgcagaaagacccaccaacttcttgcagcgctggtccagtagctgaggacatgttccattggcaagcaacaataatgggtcctgctgatagtccttatgctggaggtgtattcctagtcactattcacttccctccggattatcctttcaagcctcctaaggttgcctttaggactaaggtgtttcacccgaacatcaatagcaatggtagcatttgtcttgatatcctgaaggagcagtggagccctgcactcaccatctctaaggtactgctttctatctgctcattgctgactgatccaaatcctgatgatccactngttccggaaatcgctcacatgtacaaaactgaccgggccaagtatg

SEQ ID NO: 221981 - DNA, 591 bp, Glycine max
ggaataacgaagcctcctcgttctttttcttccgccctttctctctctagaaccgggcggtcgtttctttctctctcctcaaccggagacagcgtcgccttcttttctgaatctcgcggtgttgttagttctgcggcggttgtagttccggcggcgatgggacagcaatcgttgatctacagcttcgtcgctcgcggcaccgtgatcctagcggagtacaccgagttcaccggaaacttcaccagcgtggcggcgcagtgcctccagaaactcccttcctccaacaacaagttcacttacaactgcgatggccacaccttcaactacctcgttgataacggattcacttactgtgtggttgctgttgagtctgctggacggcagattccaattgctttcctcgaacgaatcaaggaggattttaccaagaagtatgctggaggaaaagctgcaacagcggctgctcatagcctcaacagagagtttggacctaagttgaaggaggagatgcagtactgtgttgatcacccagaggaaattagcaagcttgctaagtgaaagctaggtttcagaagtcaaaggagtatgatg

SEQ ID NO: 221982 - DNA, 488 bp, Glycine max
aattacaaaatataatttatggcacaaatgtcttgtaaaagggtacaaattaggtccttggaggggaaaacactgatttacaaaaaacagtcaacacaactgaagcaacacattaagtcatctacacactcttaacaattactgagcacactaactttataaacaataaatgaagatgtatgcataaatatgcagaatgcatgatccatgttccttccatctacttggggactcggctatgaatgctgtaagctgaaagccaaatgagcaagactgtcacaacgcttccaaacaaagccactgctatggaggcaccaacatgcctacagaacttgtcgtaaacatggcaaattttattccaacccaccacgtgtctgtttcccttcaaacccaaatatgctacacccccagctgtgcctgttgctgacgctattatccccaatatcagcgcattccataagataaagtacaggagcaacttggttttg

SEQ ID NO: 221983 - DNA, 495 bp, Glycine max
cttttcttatctcaacccaacacaatatatcataaattaaataaataaataaaattgagctatctaaattcctttctctctctttctttctattctagggtttgggtttctcttcctccctggaagaaaaagaagagtaaccgctactacgccgttcgtgcttttttgaggtgccacagtcatgtttgggcgtgttggaccaaggaggagtgacaactccaaatattatgatattctcggggtttccaaaaatgccagtgaagatgaaatcaagaaggcctatagaaaggctgctatgaagaaccatccagataagggaggagatcctgaaaagttcaaggagttaggtcaagcataagaagttttaagtgatcctgataagaaagacctgtatgaccagtctgttgaagatgcccttaaagaaagaatggggggaggaagctcgattcataatccatttgaaatatttgaatcatttttaggtgcacaagcttt

SEQ ID NO: 221984 - DNA, 439 bp, Glycine max
gaaataaaaaatacctactgaaatccaatgcaaaaaaaccatttgggtcacagcacataactttatctgacgaagttcaatgtacccttttactggtgaaaagcaatattcccacacaatttataggattaaacactaaaaacacttttccatcaaaactcaataaaaagcagaaaatctttaatcaaacagtcccaatcccatatcatcatcggactcttcctccaccttttcttcctttttctcagcagccggggcagcatcagctgcagcagcaccacctgcaggtgcagctgcaacagcaccaccgccaccttcaacgaatacagcaccacccactattacctggaacacagcggaggtaggagacacgggaaaaaaggaggactggacttcaccggaggaatcaacggcgagagcggcttgcacgaactttctt

SEQ ID NO: 221985 - DNA, 622 bp, Glycine max
  unsure (1)..(622): unsure at all n locations
ncgtcggcaagnnggattttnatgatncttagtncatantnaaagttaagagcaacacactagtcggtggccgtcctttttttttttttttaccaaagcattttatttttttatacttgaaatctgccaagaagggtgaggtaaataacattaccagccaaaacctaaaggtaaatttatcacgcagttataactgcattatccaaacaaaagataaaccaagctgaaattatagaacctctactaccataaattgcactactgtcgagcacattgcactcagtgaccagatggctcatcatcatcttcgtcgtatgcctagcggggttgctgatgctgctttcgtctcatatcctccttaaagttgacatcatgcaaagtggtctcctcacaatcatccacctccatatctgagacgtgcttgctgctcttctgaggcaacaccttttccaataactggcattggtcaggggaaagaaaccctgattcggggaaatcaacattaaattggatgtaaaggcgacccttcatgaatggcctattgtgttgtggcattccctcatcatttaatgctttatattgacctggcttgatgactttcccaggatttgatttgatcaat

SEQ ID NO: 221986 - DNA, 344 bp, Glycine max
  unsure (1)..(344): unsure at all n locations
tcaagttgaagtttttagttcgaagacttttactctcttcactgttgttgtgttgcgcttcttctgggaaggttctggggttcaacggattccccccccccccgnacaccgacacctacgccaccgtccctatccctgacgacatgaagtcctccatccgcccggacatcgtaaacttcgtacactccaacatctccaagaacagccgacaaccctatgcagtcagccgccgcgccggccaccagacttccgccgagtcctggggaaccggacgtgccgcctaccgtatcccccgtgttcccggcggcggaacccatcgcgccggccagggagccttccgaaac

SEQ ID NO: 221987 - DNA, 524 bp, Glycine max
gaaattaattctttatttttttacgcaataataatggaaataatgccacggtaagagcaagagagcctgttacaagatagtgctgcctgatgtttaatctcacaagctgtgtggtctattaaggctgtaagcatgtcataggttgcagtttctgaatttgttgacacattatgcattagttccaccttcaaccaactgttgaaaccttgaaatgtcacatcttcacaacttttttcactttttttttctttctcaaagacttcttctatgcaatggaatggatttcttttggttagattccaaaagcaatatcagcaagctatttcctattagcttgaaataagttgaaaatgtcccactttcaagccttttaactcaattcaactcagtgagcagtgctctcctttctgcagcttttttcctgataaatatgccccaccttaaagcagctttgagcttaagccacccaacaacagccttccctgaagactttccctgatcctcgttgaatgtctgatacatct

SEQ ID NO: 221988 - DNA, 605 bp, Glycine max
  unsure (1)..(605): unsure at all n locations
atcggtttcttcttctgggtgtgttgcttttatctgtggaaagttcatttttttttccgattttggtgtgaccagggtcttttggggctaataaggtttgtggagagagaagatgatcgttgtgctgagcatgattattgatgggtagcagaagtagaacggtaaacgttaacactaaggacactaacaaggttctgaacgggatgccaagctacgctcctccattgccttcttctaattccatagccatggaagcaactaatgttcatccttcccgcatttctgaatttggaaccctggagcaatctcttggatttcgcgttgaagataccattaatcttagcagaaatccgatgtttaatcaaatgaaatcaaatagccaagctctaggtgctgatattcaatttggtgctttaaataagtcaattgcaacatcagatataaacctctctgctgctattgctgggtctcaagcattggtattacaaaaagattcacaaccaactctggcttcaacatctgctggtcgtgagaactggngagagnaccaacttgctgatgctagccctaggactgatacttcaacagatgatacagaagacaaa

SEQ ID NO: 221989 - DNA, 608 bp, Glycine max
gcagtgcagggaagttggtgtgtgtcactgtagctgctttttatattgcttcatggattgtcaggtgcctatttgaacgtggttacactgtcagggccactgttcgaaacccaaatgatcacacgaaggtagaacatttgctaaaacttgaaggtgcaaaggagagactgcacctttttaaggcagatcttttgggtgaaaattcttttgactccattgttgagggctgtgatggcgtctttcatactgcttctccttttattatcaacgtcaaagacccacaggctgacctacttgacccagcagtgaagggaactcttaacgttcttaaatcatgtgtaaaatcgccatctgtgaaacgagtcatcttaacatcttctgtggctgcagttgcatataataaaaggcctaaaagtcctgaagttgtagttgatgaaacctggtggtctgatccagattactgtagggaattaaagctgtggtatttactttcaaagactttggctgaagatgctgtctggaaatttgccaaagaaaacgaccttgacttggttgttgttaacccagcaatggttgtagggccctcttttgcaagcagagcttaacac

SEQ ID NO: 221990 - DNA, 621 bp, Glycine max
  unsure (1)..(621): unsure at all n locations
cggggccagagcggcaannnaattccattgntgatnncaagctaaagctaacgcgaggaccagcgcacgaggcggcggccgcgctaannttaaaattaaaaattttttttttttttaccannaanancccaggacgggaaaagagccatttcaaaaacaaaaccccccaaaaccacaccgggggnnccctcaagaataccaacccaaaaaaaaccacacaataatcttggtttatatacaacaccaacacaacttagacatattcaataacaaaaaggttatttccaaacaatgaaattctaaaaccaaaaccacaaaccaaacaccgctgaaaatctcaacaagttcactcctgatcaagcagaaatatcaaaaactaaaaggtggcaaagttcttttctttcaaaaattccaccgtctctctaaaactcacttccaaaagaaaaaattcaatccccaagggctttgccttttctttggaaacctgaaaagttggtacaaaaagcttaacgcctgcaaacttttctggaaattgatatgtccggtaccgaccaccaaaaaacccggccaattcaaaaaaatgtgcccccctctcaacaaaacaaaaacttccactaaccg

SEQ ID NO: 221991 - DNA, 500 bp, Glycine max
gtcttgaaagactttgataatttgtgagttcccgcctcactcataaatgtatcaaacagcaccgaataaagaacatgaagtttacaatgtgtacgtttttttttgaaagggagaagaaaaaaggttcatgaatatgaccatgctaaataatctgacacaaataataaacacaacatttgaaaatcatatcttaacattgaatgataattttgagaggtttttgatcacagagaagctactagcttttctggcctaacttcttgactattgtggccatgtaccttccttgatactcagcaagggccagttctgtttcactagcctgccttgatccatcgccagcaaaaactccagcaccatatggagatccacctctgaccgagtccatttcgaacattccagcaccgaaggtataaccaataggaacatagagcataccatggtggactaactgtgtgattgctgtccaagctgtggtttcttggcctccaccctgagtg

SEQ ID NO: 221992 - DNA, 463 bp, Glycine max
gtggtgccttatcgctgtggttttcatcgttttccttctcttatatttctttttttggtttttggcttcgccgcacgccgaaacaatggccggaaaaggagagggtcctgctatcggaatcgatctcggaaccacctactcttgtgtcggtgtgtggcaacatgaccgagttgaaatcatcgccaacgaccaagggaacagaacgacgccgtcttacgtcggcttcactgataccgagcgtctcatcggtgatgcggctaagaaccaagtcgccatgaaccccatcaacaccgtcttcgatgccaagaggttgattggtcgtagattcagtgactcctctgttcagagtgatatcaaattggggccttttaaggtcattgctggtgctgctgacaagccaatgatcgtggttaactacaagggtgaagagaagcaatttgctgcagaagagatctcttctatg

SEQ ID NO: 221993 - DNA, 489 bp, Glycine max
atgagtattctcatctaatgaaggaaaggggatgacataatgcgtcaagcaacgctcatatcacacgggcaaaacaattagtatcccatccaacaaaaatcataaaagttaaaattcaataaaaaagcatcaaataagttttaaacagataaatggatgaaagcaactacacatttagtccacttactcaatcttggggccagcaccacttccaccagaaggagcagcataatcatcctcggctgccccagcaccagcaccacccatgtcaggaccagcaccaccttggtacatcttggcaatgataggattgcagatgctttccaattccttcattttgtcctcaaattcatctgcttctgcgagctggatgctgtctagccactggatagcttgctcaattgcgtcctcaatcttcttcttgtcagtaggatcaagtttctcaccaattttgtcatgcttcacagagttcctcatgttgaatgcata

SEQ ID NO: 221994 - DNA, 573 bp, Glycine max
ccgatcttgagatcactacaacacacccatttagagccttattcttgagaaacaagtttcttcttcaaaacaacatgtctggaaccgtgattgtttttgactttgacaagaccattgtcgatgtcgacagtgacaactgggtcatcgacgaattgggtttcaccgatttgttcaaccagcttcttcccaccatgccttggaactctctcatggacaggatgatgatggagcttcattcaaaaggtaagaccatagaggacattgaagaggttctgcataggattcctttgcacccaagagtaatacccgctattcaagcagctcatgctttcgggtgtgatttgaggattgtgagtgatgcaaacatgtttttcattgagaccattctgaagcacttgggaataagggaatacttctcggagattaacactaacccaggttatgttaacgaagaaggaaggttaaggattttgccttaccatgacttcaacaaagcttcccatggctgcactttgtgtcctccaaatatgtgcaagggtttaatcattgatagaatccaagattcaatttcac

SEQ ID NO: 221995 - DNA, 571 bp, Glycine max
  unsure (1)..(571): unsure at all n locations
aacaggttgtggctgttaaacagttagacatagacggtcttcagggtaatcgggaattcctcggtgaggttctcatgctcagtcttctacaccaccctaatcttgtcaatctcattggatactgtgctgatggtgaccaacgcctcttagtttatgaatttatgccattgggatcattggaagaccatcttcatgatcttcccccggataaggaaccattagattggaacaccaggatgaaaatagctgctggggcagcaaaaggattggaataccttcatgacaaagcaaatcctcctgtcatttatagagacttcaaatcatctaatatattacttgatgaaggttatcatccaaagctttcagactttggtcttgcaaagctcggtccagttggtgacaaatcacacgtttccacccgtgtcatgggaacttatggttactgtgccccagaatatgctatgactggacagctgactgtgaagtctgatgtatatagttntggggtagtcttcttggagctgattactgctcgtanagccattgacagcactcgaccccatggagaaca

SEQ ID NO: 221996 - DNA, 552 bp, Glycine max
acccggtaaaatattatttagccgtttggtagatcctcccgataactcagactctaagatatcctcaccaaattacaaaaggagcttttctcacaatgatgctggtacaagtgataacacatctggggcagtagagttcatcaagtgggacttctactcttgatgcaggaggagtttcagagtaaaagcaaaccaattagtattgccaatgccaataagctaaaagtgtcgacctcccttggagggagcccacccgaagaattccacaagtctaccatgggtgctagagctacagattctgcaagaattatgaagttcaccaaggtgctttctgggacggtggttatattagacaagttgcgggaattagcttggagtggtgttccagacaatatgcgtcctaaagtgtggagacttctgttgggatatgcaccacctaattcagatagaagggagggagttctaagaaggaagcgccttgagtatcttgactgtatttctcagtattatgatattcctgatacagaacgttcagatgatgaggtcaacatg

SEQ ID NO: 221997 - DNA, 534 bp, Glycine max
cgcaattcagaataacaataaagggtgtatgatgatccagaggttcttggccacacgggccataactgtctccatactcttgggaaatggaaaccccgttcagtgcttcgacggcggtagccaccaaaaacagcaacacagtttgtgtgaagagctcattatcccctacggttacccctgctccgagcatacgattcaaacgaaggatggtttcttgttaggtcttcaacgtgtctcttcttcttcttctcttcggcttcggaacgatggagaacgaggccctccggttctgcttctgcatggcttattcatggcaggtgatgcatggtttctaaatactccggaccaatcacttggcttcatacttgcagatcatggttttgatgtatgggtaggaaatgtgcgtggaacacggtggagccatgggcatatatctttattagagaagaaaaagcaattttgggattggagttggcaggaattagccctgtatgatgttgcagaaatgatcaattacattaattcagtaacaaa

SEQ ID NO: 221998 - DNA, 485 bp, Glycine max
  unsure (1)..(485): unsure at all n locations
ctccattcccattccatggcttccatttaattttcccctttcaagaaaattcagatggaaagggatgacactacatttgacgcatatgtggttggaaaagaggatgctcctggaattgttgtgattcaggagtggtggcgtgtggattacgaaattaagaaccatgccgtgaagatttctcagcttggtagtgggtttaaagctcttattccagatttatacagaggaaaggttggtctggatgttgctgaagctcagcatttgatggatggtcttgattggcaaggtgctgtgaaggatattgctgcttcggttaactggcttaaagcaaatggctcaaagaaggctggtgtaactggattttgtatgggaggtgctctctctattgccagntctgtcttggttcaagaggttgacgcttctgtagcattctatggagttcctgcttctcaacttgctgaccctgcacaagccaaggcttctgt

SEQ ID NO: 221999 - DNA, 537 bp, Glycine max
  unsure (1)..(537): unsure at all n locations
ggggnnncctgtnccagtcgatggccgtacagtangcnacctcggaatgattgccccggagacgacccagctcacgtgatccggctggcgcgccactttcaattttcacttttttctagataaattttgtcagcaataaaagcatatatgatgaatttggcggggacaggtttgaattattggagacctatctgacaccggaggaaaagcgaacgggaaccctcagtgcaggcccatggcaatgtaacaagacatatagccgctatactggacacatatgcattggaaataaaaccttcattaataagtcgatcctgacttcctaagaaatgagagctgctttactcccaaacttctaatagcacatttcaagaacagaaagatgctcacgagcttataaaaacactgcatttatcatacccttaacaacataccatgcgaacaaacgccgtcttgggatacataatatctaaatggtgcccaacgcgaaagaacacctcagcgactgcagagatgctgatgatcatgcatacagcc

SEQ ID NO: 222000 - DNA, 393 bp, Glycine max
  unsure (1)..(393): unsure at all n locations
nagtgtccagggaatgnnnagatttcntagtccacnntnnnagtttacggccaaatacgcctaataagaaaacaaataattccaattcatatatgaacatttttgctttcttatttcttgaaaatgtggaattggaatggcccgaggaattccgatctcatttcctttggcttcaggataggcctaataagaaaacaaataattccaattcatatatgaacatttttgcctccttatttcttgaaaatgtggaattggaattccccgaggaattccgatctcatttcctttggcttcaggataggcctaataagaaaacaaataattccaattcatatatgaacatttttgcctccttatttcttgaaaatgtggaattggaattccccgagg

SEQ ID NO: 222001 - DNA, 540 bp, Glycine max
ctcaagtccaacctacccctttttcttcttttccaattataccggcttcttcctcgatcatgtggcacttggggggcaagtaccatgatgagcttattgccaatgctgcttacattggcactcctggaaagggtattcttgctgatgatgagtcaacagggacaattggcaagcgtttggccagcatcactgtagagaatgttgaatccaacaggcgtgctcttacggagctgcttttcaccgcttccggggctcttaaatatttcagtggtgacatcctctttgaggaaactctataccagagcacagctgcaggcaagccctttgaggaagtcttgaaagaggctggtgttcttcctggcatcaaggttgacaagggcacagatgagcttgctggcactaatggagaaaccaccactcagggtctagatggtcttggtcagcgatgcgccaagtactatgaagccggtgcacgtttagccaagtggcgtgctgtgctgaagatttggtccaaccagccatctgagcttgctatccatg

SEQ ID NO: 222002 - DNA, 588 bp, Glycine max
  unsure (1)..(588): unsure at all n locations
catgtcgnnnaggnnggattttnnanatnncttantancananctaaangtaaaagcaacacactagtcagaggccgccctttgtttttttttttttttaacagcattgtggttttggctatcaagaaaacaaagttgggtccggttccctgtttgcacaggtttgaccaatacaccgaattactaaaattgatatgaaggaacactaggaaaaacaaaaagcaaaattccaaacgattattattctgggaagagtcgaagcacaatactcattaacaagaaaattcggttgtacccataaaataccgattcctacccgcacttagattgatcagtacttgtagtcctcaacatggaggctctctgaggcaccatcagcaagctttgagttacccttgtaggttcccagagttgcctctgagttagccttggctcttaccaaaagggcttcctgagccttcttcacattctcctcttttccactccatgccttaagggtgctctgttgaagtgcccttccaaaggagaaagagagtgaccatggcttctttccattgacctggttaatggcattgaggttaacggatg

SEQ ID NO: 222003 - DNA, 519 bp, Glycine max
ctcactttcatttctacatccctggcttttttccgtctttaacgatggcgcttacggtgcgaaggcctgacgggcgctttctcaaactactctctctctcgtgcatcacttccgccaaggtctactttaatgagcgtttcgattacagatggcgaaatacgcgggttaaatcatcattggaacacatatgataacctggctggggagaggaaccactcctttggcccatggaatcgacacgctaactacaaaggtattcaaaccaaagaggattacagattctacgctatttcagctcaccaccctgaaatcagcaacaaggataaaacactagccttgcaaatatctgtcaagcatgaacagaatcttgactgcgcaggtggctacatgaatttgctcagaggtgatattgatcacaaaaacactgagggggatactccttacagtattatgtctggccccaatatctttggttacagtacagagaacgtacacgctattttacctacaatgacacaa

SEQ ID NO: 222004 - DNA, 486 bp, Glycine max
  unsure (1)..(486): unsure at all n locations
tnttttnaatttacaatttaaattttctaacaacagatattaggaagcgtctggtgggaaactcaattgatcgaaacataaaaagatcaacccaagagagacatctttgcctgttctaatcagtggaaatagtcaaatgtgatcgaagcaaaagctccagcttttactagcagttttccacggtctgcttatctagggaaaacaaaaaacactacgactgaaatataactatccggaatataacttccgctcactctttatccgttttgcaaacttcctagagttcatcatgtacaccctcttccttggtgtcttccccagcttccgtctttgattcagcatcggagtcattgccagcttcatcagcatcttcctcttcctcatcagcatcagagtcaactgggtcatcctttgattcctccttttccctcttcttctcaacctcttcaaatgctgacttcttaacatccttgtgcttgccccatg

SEQ ID NO: 222005 - DNA, 560 bp, Glycine max
agcattttcagaggaaaatggcgggtacggtttttacttgtttcttcttcgtgtttcttctttctctgcttcttcgttttcagatctccgctgaggaatcctgggagaaggagttcgtactcacattggatcactctaactttcacgacactgtcagcaagcacgatttcatcgtcgtcgagttctacgccccatggtgtggtcactgtaagaagcttgctccggagtatgagaaagctgcttctatcttgagtagtcatgatcctcctattgttttggctaaagtagatgccaatgaggagaagaacaaagaccttgcatcacaatatgatgttaagggattcccaacaattaatattctgagaaatgggggaaagaatgttcaggaatacaaaggtccccgtgaagcagatggcatcgttgactatttgaagaaacaaagtggtcctgcttcaactgaaattaaatctgctgatgaagctactgcttttattggtgaaaataaagttgctattgttggagttttcccgaaattctctggagaggagtttgacaacttt

SEQ ID NO: 222006 - DNA, 630 bp, Glycine max
  unsure (1)..(630): unsure at all n locations
nnnnnactgccnnnnagtttatcttgtatttttatntacntttaaagtttanagcnacgaacgaggcggagggcgcccnannggggnnttttangataagcaatttccatttttaanacagcaaaaatcanaagaagagaagggaacaagtnnccaaccagggacgccaaaaacgccaaaacagcaanaacaagcangacannnaaaaaanaggnngaccgaaaaggccaaacggggcttccaccaanngcngcanaggcaacccggaactncggcttcatagagtcagacagctcactctgcaattcaaataggcacactattgaattttattcctttcttcttcatttaaaacttcgaaattttacatgcgatatcacatgatttgaaaatagcgtcttcttgtattactaaaagatactggcacaagaaaacatgacacttgtttctattcctttccagtggagtacttggctgctacaaacttctcttcccctgcatttggagaatcatctatcacaatgccctctagaggatcaaaattggctcctaggttgctaagtttagcatgggcttcagcataatctttaaaaaatgcttcctgatcttcagcatatttctcaccatata

SEQ ID NO: 222007 - DNA, 539 bp, Glycine max
gcgtatgtgtgattgcagtctgagccattatgggtagacgaccgccgtagctccaatcggctcgagcatctctgaatttattttgatttttagatgaatctcgtgcgggggaacgggcagaatgttttatcaaaccgttgggccaagctaaagagtcaaacctaatatgtcatttaacaccatgggatattgctatgatgtctttgcactacatccagaaaggtctactcttcaagaagcctgcaacacttgttgatccacaagatttcatggagaatctgttagagaagctgaaacactctctttctctcaccctcttccatttctatcctttggcaggccaacttgtcacccaaaaaacccaagaccctacctcttatactatctttgtcgattgcaacaacactagtggagccagattcatttatgcaactttggatatcactatatctgacatactctccccagctgatgtcccacccattgttcactcattctttgaccatcacaaaacaatcaaccatgatggccacaccatg

SEQ ID NO: 222008 - DNA, 544 bp, Glycine max
ctgtttttgctttgcagacatccctttcacatttacattcacaacacaacatttgatggctctgttttgtcatcctcaaaatccacaatctttcctccttaatatctccgaccccaacaaaaagaaacaagcaagccatggattcccagatccatggcttgtcctcgtaaagtcaacccctttaccagtcaaacttaaccccccttctctccccctctgaaaccgcaggaagaagatcaaatcgaagaaggcttaaaaaaaatgaagggttcgaacaaccggttcttcacggtggcgctggtggcggcgtggtactcctcaaacattggggtgcttctcctgaacaagtacttgctcagcaactacggcttcaagtacccaatcttcctcaccatgtgccacatgacggcgtgctccttgctcagttacgtcgccatagcgtggatgaaggtcgtgcctttgcagagcattcgatccagggtgcaattcttcaagatctctgctctcagcctcgttttctgcgtctccgtcgtgttcgggaaca

SEQ ID NO: 222009 - DNA, 605 bp, Glycine max
  unsure (1)..(605): unsure at all n locations
ggaataacgaagcctcctcgttctttttcttccgccctttctctctctagaaccgggcggtcgtttctttctctctcctcaaccggagacagcgtcgccttcttttctgaatctcgcggtgttgttagttctgcggcggttgtagttccggcggcgatgggacagcaatcgttgatctacagcttcgtcgctcgcggcaccgtgatcctagcggagtacaccgagttcaccggaaacttcaccagcgtggcggcgcagtgcctccagaaactcccttcctccaacaacaagttcacttacaactgcgatggccacaccttcaactacctcgttgataacggattcacttactgtgtggttgctgttgagtctgctggacggcagattccaattgctttcctcgaacgaatcaaggaggattttaccaagaagtatgctggaggaaaagctgcaacagcggctgctcatagcctcaacagagagtttggacctaagttgaaggaggagatgcagtactgtgttgatcacccagaggaaattagcaagcttgctaaagtgatagctcanngttcagaagtccaaggagttatgatggaaaatattga

SEQ ID NO: 222010 - DNA, 578 bp, Glycine max
  unsure (1)..(578): unsure at all n locations
cagtggggagggaatgcccagatnnctatgccnctttaangtttagagcaactaccagtcggtggccgcccttttttttttttttttggtaataaatttctcattttcgtaatggacgatttcttaatgggtaagggtaattaaaaaacataatcctcacaccaaatgctgaaactcccacctaaactatagagaatgacagattagcattatgctatggagacaagatgattaaggctaaataactcacactatacaagcaatgccatataatattcatcatcggagaagtcggaagaatgtaaatcccaaaaagtcaaaagcactatgttgacagtagaggcaatggcaatctgctagcaacaatcttatcaagtgaggagacaaataccacagttgaagccaggatgtgggaagactcatttaccacagttgaagccaccacaaacggaaagaacaataatgagaatcaaggcaattatgatacccagaacaattagctttatcttcatgttttggaaccacatctttctcctaatcttggttccctgctgcctgaaatcttgagcctgagagcg

SEQ ID NO: 222011 - DNA, 513 bp, Glycine max
  unsure (1)..(513): unsure at all n locations
ccgtgancagnnaagtccagattctatacacgtaaagttatagcacaccacgcagggcgccttttttttttttgattgggcatttttttatcaacaacgagcananccctgggaaagctgacggacaaaaagagccaagactctaaaaacaataaatcaatagcttacaatgaagatatgccaaatataaaacacataactttatggctttctcttaatttttctttgagcctctaagtctatcacaattacaaagatgttatcttggntttttttgtctatggcaagcttaaatagatactctgcaggtgactgagcctgaggatccgctccttcactgagtcctgttgtgcccgtgacaccatactttttgtgccaaaaaaagataaccttctttgcaacccaccatgcttcttcatttgtcattacatcccaaaaaccatcacttgctataataaaacactgaacattttttttttgacgcacaaaattgacttcagggtctggaattat

SEQ ID NO: 222012 - DNA, 625 bp, Glycine max
ggatcactcaatcctaatattttatattcttattaaaattgtgagagtactagaaggtagtgagatcgcatagggaataatggaaacagaagtggttgaagatattgtgattgtgggagctggaattgctggccttacaacatccttaggacttcacaagttgggtatcagaagtttggtgttagaatcttcagacactttgagggtcactgggtttgctttgtcaatatgggaaaatgcttggaaggcattggatactgttggtgttggagacttcctccgccaccaacatctccagctcaatgggattgtcactacttcattggttacagggcaacaaacatcagttatgcctttcacagaaacaggaaatcagcaaagaaaccgtgaaattcgttgtgttaaaaggaagttactgttggaagctcttgccaatgaacttccaagtgacaccatcagatacttgtcaaaggttgttgctattgaggaatctggcttctacaagattgttcatcttgctgatggcacaaccatcaaaaccaaggtattgatcgggtgtgatggagtgaactccatagtagcaaagtggctaggcttcaagatgcctcttttacagggagatatg

SEQ ID NO: 222013 - DNA, 478 bp, Glycine max
aacaaggactgggaatggattaaaatggccaaatgaaaggcaacacaacacagacggaccgagcattttacaagataactgggtcactaaaagttactattgtttagttttccacaatcataacccgactttttgaacaattgactagctaaaaatgcagccaaaatgttgtccctcaaaaaggtaaccaatttggactcagcctgctgaatagaacccaccatataagctgtagcaatgacatcaatgcttctccatcttctctcctttgcatatttcttcaagcttccctcaatccttttgaattgggcctcttcatccttctctttgatatgttgggagaaggccgcagctaggcacctggctaaaacaatcccatcttttaaggcacagcaccctccctggccaaggtctggagtcatggggtggaaagcatctccaccaacacaaatattgcctttactaatattcccaaaca

SEQ ID NO: 222014 - DNA, 526 bp, Glycine max
ttcatttccgatccataattgtcccaattttttccactcgcgaaatccagagatatcgatcaacagattcgtgcgacacgttaaattgttttcaaggttgcgcatatccaggatgcaggcatcgcgggcaaggttgttcaaagagtacaaagaggtgcagcgggaaaaggccgttgatcctgatattcaactagtttgtgatgattcaaacatttttaaatggaccgctcttatcaagggaccctctgagactccttttgagggtggtgtgttccagcttgccttttctgttccggagcagtatcctctacagccacctcaagtccggtttttgactaaaatatttcaccctaatgtgcattttaagactggagagatttgcctagatatcttgaaaaatgcttggagcccggcttggacgcttcaatctgtctgtagggctataattgccttgatggcccatccagaacctgacagcccactgaattgtgattcaggagatcttctgcgttcaggcgatgttaga

SEQ ID NO: 222015 - DNA, 514 bp, Glycine max
ctcattctataaggattatttgaatatggggacctgagttctctcatgaatccagatatgcgaggtcacacctacactctgtacattgtacaagtcactactttaatacatataatcaaacaatcaatatcatgtcttaaaatgcatacatttcaaacaattaagattggaacaaagaacataggaagcaagttatctaaaatcattcagcctttctttggcattgctgcaagtctcgtgtacattcttgccatggattgataccctctaacatcgcctgaacgcagaagatttcctgaatcacaattcagtgggctgtcaggttctggatgggccatcaaggcaattatagccctacagacagattgaagcgtccaagccgggctccaagcatttttcaagatatctaggcaaatctctccagtcttaaaatgcacattagggtgaaatattttagtcaaaaaccggacttgaggtggctgtagaggatactgctccggaacagaaaaagcaa

SEQ ID NO: 222016 - DNA, 352 bp, Glycine max
ctggacatgctttattgcacactctctatgtccaacctttaagacataatacccacctttttgggggatagtgggcattgtatcttctaattaatcctgatggcacttgccaaggagtgaatgccttgaatatggaggatggaacactacatagtgatctaaccgcttaaacatttttggtcatagggggatatgctaaagcatacttttctgcaacctcaacacatactagtactgtagatgggaatgccatggatgcacgtgctgagatccctattgtggatttgcagtttgcacaaattcaccctacccgaatatatggagcacgttgccttatcacttaaagatctct

SEQ ID NO: 222017 - DNA, 570 bp, Glycine max
ggaaaaaaaggagaacatacacgtagagcacataacaggtgaagacaactagcaaacgcagttaagagtctactagttcttttggtgtggagctttttatagtttttacatctataacatataaccaattggggtgtaacgagatactttaagccctaaaaacgtttcacgaaaaaaaaaaagatccatttgctgagcatgataattgattcgtatcacaaggaaaaacagcaaaccgtaaccactaatgacactaacaaggttatcaacgggatgccaagctacactcctccattgccttcttctaattccataaccatggaagcaactaatgttcatccttcccacatttctgaatttggaaccctggaacaatcttttggatttcccgttgaaaaaaccattaatcttagcacaaatcccatgttaatcaaaagaaaacaaatagccaagctctaggagctgatattcaatttggagctttaaataagtcaattgcaacatcaaaaataaacctctctgctgctattggtgggactcaaactttggtattacaaaaagattcacaaa

SEQ ID NO: 222018 - DNA, 556 bp, Glycine max
gccaatcttgctgaggagatagcgaaagagctttttcctctttttcgagtgtacaaggatggcagggtggagcgtcttctaagctctgaaaacgtggcagcctcccctgaagatccccaaactggagtctcatccaaagacatagtcatcgcatacaacccctacgtctccgctcgcattttcctttccaaatcccaccacactaacaacaaactcctttttcgtccaccgctatctcaacatcttggcctcagaagccaacataatagccatctccgtcgacttcagactcctcccacaccaccctatccctgctgcctacgaagacggttggaccacccttaaatggattgcttcccacgccaacaacaccaacaccacctacccggagccatggctactcaaccacgccgacttcaccaaagtctacgtaggaggtgaaaccagcggtgctaacatcgcacacaacctgcttttgcgtgcacgtaacgaattccttcccggtgatctgaaaatattgggtggattactatgctgcccccttttctggggctcg

SEQ ID NO: 222019 - DNA, 581 bp, Glycine max
gttctacatttttttttcttctccttttatctcttgccctttttgttggtggtgaaagagaagccttgagaacaaatttcccgttttcaaaattggagcttttgggtctctgaggtttgatctctgcacaagaaccttgctttctcatctgggtgtgttgcttttgcctctgctggctcgacatggctgtggaaaaacaaagggaagatgagggctgtgaccgttttcctgtgggtatgcgtgttcttgctgtggatgacgacccaatttgcctgaaggtgttagagaatctccttcgcaaatgccagtatcatgttactacaactaatcaggcagttgaagcgctgaaaatgttgagggaaaacagaaataagtttgaccttgttatcagcgatgtgaatatgcctgacattgatggatttaagctccttgagttggtgggacttgaaatggacctacctgtcatcatgttgtcagcacatggtgatacaaagctggtgatgaagggtgtcacacatggtgcatgtgactatttgctgaaacctgttcgaattgaagagctgaagacatatggcaacatg

SEQ ID NO: 222020 - DNA, 595 bp, Glycine max
  unsure (1)..(595): unsure at all n locations
ctgtctccagggaatccagatttttatacacattaaagttaagagcnacgaacgaggcggaggncgccctttttttttttttttaactaaacacctttcaatttttttccaaacagattgactttcagaaagagtgtccttcacattaacaattcattcaagtaaacaaaacaagtataagacaactgccataatatccaaaaagataaaacattgaatgaaaccaaaaattcaatcttatcctcggattcagcaacaatctatatctgatagaaactatatgatatgcatctcaaacttcaaaagaacaatactttactattcctaccaattctccgttaactaatatcacttcaccacctaagtgtttggtgccctcgtataaatatgcttacttgcatgggcacacaccattctgattgaacctcttgccatcaattatcttataacctcccttgcaagttatccattaattctcaaaccatcataaaaaatggaaggagtgataaccttgtatttcggagcttcaaaaaagaactttgtatatttgccctgatcaaacaccaccatattgttcaccttctacttttgcccc

SEQ ID NO: 222021 - DNA, 574 bp, Glycine max
ggaagacaaagtttacctaagagccaactttatcactatattgtatgtattacgaagatatggcgggaaacgtggggtggggtgtgatagaagaggagggatggaggaagggaccttggacttctgaggaggacagattgctcattctgtatgtcaagttcccatggtgagggcagatggaactctgctgctaggcttgcaggactgaaaagaaatggcaagagctgcaaattgagatgggtgaattacctgaggccacacctcaagaagggtcaaattacacctcaagaagaaagcataattcaagagctgcatgctaggtggggaaacaggtggtcaacaattgcaagaagcttgccaggaagaactgacaatgagataaagaattattggaggactcacttcaagaaaaagatgaaaactccatttgatgctgctgagaaggcgagaattcactccttcaggagacagcattttcagcagcaacaaccgcagttgaagcaccagcagcaacaattccaattcaacttggacatgaaagggatcataaactttcttcgggaaaatgaccata

SEQ ID NO: 222022 - DNA, 555 bp, Glycine max
  unsure (1)..(555): unsure at all n locations
cggctcgaggtgaaactggagaaggtgttgatagcattatcaccttcttcagtgaaactgggggaggaaagcgggtgccccgtgcgatttttgtagatcttgagcccactgtgattgatgaggttaggactgggacataccgccaactattccatcctgagcagcttattagtggaaaggaggatgcagcaaacaactttgcccgtggccactataccattggaaaggagattgttgagctttgcttggaccgcatcagaaagcttgctgacaactgcacaggtctccaaggttttctggttttcaatgctgtgggtgggggaactggctctggacttggttcccttttgctggaacgcctttcagtggactatggcaagaagtccaagcttggtttcactgtctatccttcaccccaagtttcgacctctgttgttgagccttacaacagtgncctctacactcattctcttcttgagcacactgatgtggctgtcctgctcgacaatgaagccatttatgacatctgcaggcgttcactggacattgagaggc

SEQ ID NO: 222023 - DNA, 565 bp, Glycine max
  unsure (1)..(565): unsure at all n locations
ttcactcgtcatcactacgcagatcgcagtttaccagactaaactccgacgatgcctcccgtcggtcctcggtgccggtgatgccatattcgccaacgtcgaacgcgtcaatgcggagctgtttactttgacgtatggcgcaattgtgcgtcaattgctcacggatctggaagaggctgaggaggttaacaagcagcttgatcaaatgggttacaatattggaatccgtttgattgatgagtttttagccaagtctaatgtctccagatgcaacgatttcagagagacgactgatgttattgcaaaggttggttttaaaatgttcctcggtgttactgcatctgtgaccaattgggatgctgatggaacatgttgtagtattgttttggaggataatcctttggtagattttgttgagcttcctgacaactgccaaggtttgtactattgcaacatcttaagtggagtcatcagaggagccttagatatggtgtcaatgaanactgaggtaacttggcttctgatgtgcttcgcggtgatgatgtgtttgagttgcaaggtaaac

SEQ ID NO: 222024 - DNA, 516 bp, Glycine max
  unsure (1)..(516): unsure at all n locations
cgctggcaaagccaatatgatagggattggattaaagattttctgttgtatttagtgttttatcataatacacacaggaccagtcagaatatgataatctaataatgcagagatgatgaagtaatgaaaacctggagtatacaatactacaaaaacaaattcactcgtcatccttgtatggatactcttctgggacatgcttgagaagttttacctgcaactcaaacacatcatcaccgcgaagcacatcacgaagccaagttacctcagttttcattgacaccatatctaaggctcctctgatgactccacttaagatgttgcaatagtacaaaccttggcagttgtcaggaagctcaacaaaatctaccaaaggattatgctccaaaacaatactacaacatgttccatnagtatcccaattggtcacagatgcagtaacaccgaggaacatnttaaaaccaacccttgcaataacatcagtcgtcttttgaaatcgttgcatttggagacatt

SEQ ID NO: 222025 - DNA, 419 bp, Glycine max
ccaaaaccctaggtagagagcttttcctcattctcattcgcaatggccgcagcagcacgtcctgtcgtcaccgtgcaggccctcgacagtgacatggccaccgacgcctccgccaccgtccctatccctgacgtcatgaagtcctccatccgcccggacatcgtcaacttcgtacactccaacatctccaagaacagccgacaaccctatgcagtcagccgccgcgccggccaccagacttccgccgagtcctggggaaccggtcgtgccgtctcccgtatcccccgtgttcccggcggcggaacccatcgcgccggccagggagccttcggaaacatgtgtcgtggaggacgcatgtttgccccgaccaagatctggcgccgctggcacaggaaaatcaatgtgaaccagaagcgcta

SEQ ID NO: 222026 - DNA, 510 bp, Glycine max
cgacaaacaaaatttccaaattgggtgcaggattatgataaccttaactcgcaaaacaaaaaaaccaaagatatttagttctgatgggcatacaaaacaaaaatctaatacgaaaatatgaatcataaagtttactgtgaaacacccagccacttagaaaagttgtcgaattctgtataatcagaatctgacaccatagtgtgataccatgctttcccagcagacttgatggcagaagcttcctccttagagacagtcttcctcttcttgtcgagcttctccttcttggccttaacgcgctgagcttcagcaagaagagccatcctcttagcagtcttggcataaggattcagcttcagcatagagttcaggttcttaagagggttcttcttcaacgtggccttcttcacatccttcttaatgggcctcacaacagactgaacctcgtcagaataataatcctggcaagatcagagttaaccatcttgggcctgggaagcaagtacccct

SEQ ID NO: 222027 - DNA, 528 bp, Glycine max
atcgaattgaattaagatatttttaaagctttgctaagaagaaatgagaaaataaggaggatagggtatcatatgatatcagaagtgagtgtctcataatggaagcataacagcgaagtgatccaaagaagaagaaggatgcaggagaactactcataccaatcgtatccagattccggcgagtcctcaccacgatccagagagatagacttcgacaaccctcctccatgggacgaccaaaactacaaagccaagttcatgtgcagctacggcggcaagatcctccctcgctcccacgacaaccagctctcctacgtcgccggcgagaccaaaattctcgccgtcgaccgctccatcaagttctccgccatgctcgccaaactctccgccctctgcgacgccccagacaacaacaacctcaccttcaagtaccagcttcccggcgaagacctcgacgccctcatcttcgtcaccaacgacgaccaactcgatcacatgatgcacgaatacgaacgcctctatcgcgct

SEQ ID NO: 222028 - DNA, 424 bp, Glycine max
ggccaagtctgatgctgccattttcgatattgatgctcaaatggaagaagcttcgggcgaagggggggggcaagacctatttggataaggtcgacctaaccgtatttctctacgataatttagctcccttacctcaagatataaaacaaactattaagcttttggacaagcttgttgctttgaagtttaatggttctcaaggaagaaatatgtgtattgacggtcccaaatctgcaattgatatttgtgatggactgacatatctggatttgatcattaaccagattgagaccctcaattccaagtatggaagcacggttccattgcttcttttcaattaagatgacattcatgatagttctctaaaggttttggagaagtattctaaatcaagtgttgaagtgcacactcttaaacaaggtga

SEQ ID NO: 222029 - DNA, 438 bp, Glycine max
ctttttctcttcgcactctcttttatggctatgttgagaggctctatggtctcgcggctgttggtgaagtacttggtcaggaacgaagatggtgtctccattgctgctctcaacctcatgaaccaggacaaaatcctcatggaaagctggtactatttgaaagatgcagtccttgaagggggtattccatttaacaaagcatatggaatgacagcctttgaataccatggaaccgatccaaggtttaacaaggttttcaacaaggggatggctgatcactctaccattacaatgaagaaaattcttgagacctacacaggctttgagggacttaaatccctggttgatgttggtggaggaactggagctgtagtcaacatgattgtctcaaaggtatcccactattaagggcattaaatttcgatttgccccatgtca

SEQ ID NO: 222030 - DNA, 516 bp, Glycine max
gaaccagaactttaatatgttacttgttattattttataaaggcggtatacattgaacttgttcgttattcttttcataaagcattataagaaatttacgtttttccgggaaaacattcttaagtagcaccccaagcagagtctcaaagtcaaaatccaaatgcagcttgatatgaatccacgccaaagaacttaaacctttttgagaaatgtcatgacgtaggtattgaaagcacagcacaggacttggaaaccttggaatccagagcctttggccagagcctcaaactctatctatgatctctctttcccacctggattgtgagccaacatgagcacatcgatgtgaaccacacactttgaggccaagctagagtctggagccaccggaagaatgcattccgccacaatcactttcccatgatctggtagtgcctcatagcagttcttcaaaaactgtaagcagtgctcatcactccaatcgtggcatatcccacttataagaatagcatcagc

SEQ ID NO: 222031 - DNA, 546 bp, Glycine max
aacactagctatagtaagctacacttatttgttgttggagaaatatggctaaagatggggagggtcaagagcaaggaggagagtactctgcaaaagactaccatgaccctcctccagcacccttgttcgacccagaggagctcacacagtggtccttttatagagccctaatcgctgagttcatagcaacccttctcttcctttatgtcaccgtgctcaccattattggctacaaaaggcagactgatgccacgctaggtggcaccgagtgtgatggggttggcattttgggcatcgcttgggcctttggtggcatgatcttcatccttgtttactgcaccgccggtatttcaggaggacacataaacccggcggtgacattcgggctgttcctaggacgcaaggtttcgttgataagggcgttgttgtacatggtagcacagtgtgccggtgctatctgtggcactggattggccaaggggttccaaaaatcatactacaacaagtatggaggtggtgccaactctgttgctgatggctacaaca

SEQ ID NO: 222032 - DNA, 310 bp, Glycine max
aaaaaaaaaataccacactattatgaaaacctagaaaaaaaaatattaaaaaaaaccaaaaaattataataaaaaaaaccccaaatcaaaaaaaattttattaccatgggaaaaaaaaaaaaaaaaaacccccaatattaaaaaaaaaaaaaaaaaaaaaaaaataacccccaataaaaaaaaaacacaataaaaaaatttaaaatacccctcttaaaaaaaagttttttatttccaaaaagttttttagaaaaaaaaaaaaaaagtaaacccccacaaaaaagtaaatccccttcccaaaaaggaaaaa

SEQ ID NO: 222033 - DNA, 534 bp, Glycine max
  unsure (1)..(534): unsure at all n locations
tctcattccccatttcctcacctccttcaattgctgcttaattctagggttccgaaatggacgctggcggaaagatcaagaagggcgccggaggtagaaagggcggcggcccaaagaagaagccggtttcaaggtccgtcaaagccggtctccaattccccgtcggaagaattggccgttatttgaagaaaggaaggtacgctcagcgtgtcggtaccggtgctcccgtatacttggctgcagttctcgaatacctagctgccgaggtgcttgagttggctgggaatgccgcacgtgacaacaagaagaacaggattattccaagacacgtgcttttggcagtgaggaacgatgaagagttggggaaattgcttgctggagtgacaattgcacatggtggcgtgcttccaaacatcaaccctgttttgttgcctaagaagactgagagggcttccaaggaacctaaatctccatccaaggctaccaaatctcctaagaaagcttagattacttntttattttccatatttaatt

SEQ ID NO: 222034 - DNA, 525 bp, Glycine max
gaatacaagggttttttttttttttcattaacgaagcaaactcggtcctactagcaacaaattgggacaagaattacagtgttttcgaaacacataaaatatcctgttacaccaaaagcacctaaacaccgatatacaacactaaattaaatatggaaaataaaaaagtaatctaagctttcttaggagatttggtagccttggatggagatttaggttccttggaagccctctcagtcttcttaggcaacaaaacagggttgatgtttggaagcacgccaccatgtgcaattgtcactccagcaagcaatttccccaactcttcatcgttcctcactgccaaaagcacgtgtcttggaataatcctgttcttcttgttgtcacgtgcggcattcccagccaactcaagcacctcggcagctaggtattcgagaactgcagccaagtatacgggagcaccggtaccgacacgctgagcgtaccttcctttcttcaaataacggccaattcttccgacggggaatt

SEQ ID NO: 222035 - DNA, 598 bp, Glycine max
  unsure (1)..(598): unsure at all n locations
ccgccgcgcgccgacatctcctcctccgggttcggcttcgcccccaacacgctcactgagcccggctgggacaccgtgaagcgcgatctctcgagaatcgtgagcaatctgaagctcgttgtgttccccaaccctttccgcgaggaccccggtaaggccctcagggattgggatctgtggggccctttcttcttcattgtcttcctcggcctcaccctctcttggtctgcctctgtcaaaaagtctgaggtttttgctgttgcatttgctttacttgctgctggcgctgtaattttgacattgaacgtacttcttctgggtggacacattattttctttcagagtctgagtctgttgggttattgcttgttccctctggacgtcggtgcattaatttgtatgttgaaggacaatgtcatagtgaaagtggttgttgtgtgtgtgacattggcttggagctcttgggctgcatatcctttcatgagttctgcagtcaaccccaggagaaaagctcttgcactctacccagnttttctcatgtatgtatctgttggttttctcatcattgccattgactaaatgcatcaatgcttctgat

SEQ ID NO: 222036 - DNA, 547 bp, Glycine max
  unsure (1)..(547): unsure at all n locations
caacacttccaacagtaaaaaccactctctttctctttctcactttgtccacgtgaagtgaaaggagaagaaactcataaaccatggcaaacacaaataacttcttaacccaacttcacaattgcacccgcaaaaaaacctaacaccctattcaccaacctctaccttctcacctttgctacctttctttgtacccttttctacttcctcggcctctggcgccactaccccaccaccaccgccgctgccatcgccgctgtcgcagaatcctcctccctatgcttccaccccaacaccaccgccacaacccaatcatccaccaatctcgacttcgccgcccaccacctcctcccggacctgcctcccacggtggcgcgtgggccctacctccctccttgcgcgtnccccttctccgagcacaccccctgcgaagaccaacaacgatccctttcattcccgagacacaaactcgcgtaccgggagcggcactgtccagcaccggaggagcgtctccggtgcccgattccagcgccgtaccgatacccgc

SEQ ID NO: 222037 - DNA, 577 bp, Glycine max
ggaaaaggacaattcaattgttcccttgcttttaaatttatcaacacaaccctaccccaatgcgggcttaaaggtggtgaagaatgtgcccctcagattcttcatgtggagccaaacaagacctatagaatcaggattgccagcaccactgccctagcttcactcaacttagccatttcgaatcacaaacttgtagtggtggaagctgatggaaattacgtttcaccttttgcggttgatgatattgacatctattctggggaaagttattcagtgctccttcgcacagaccaagatccaaacaaaaattattggctatcaatcggggtgagaggaagaagggcacccaacaccccacaaggcctaaccattctaaactataagcccatttctgcctcaattttcccaatttctccaccacccatcactcccatttggaatgattttgagcgcagcatagcgttcaccaagaaaatcattgcgaaaatggggaccccacaaccttcaaaacgctctgatcgtacaatttttctcctcaacacccaaaaattgcttgatggattcaccaaatgggcca

SEQ ID NO: 222038 - DNA, 509 bp, Glycine max
atcgggcaaatattaaattaaatgggcaccgggtaagattcttttgatggtcatatgcggctagctagtttcaatagtgtctatttcctactagcttattcccagtaagcccacaagttagtgcatctcttgggatttttccaactttgtgaacaccctcagcaaaaatcacacccattcccatgtgcaaatggggttcaatgtgacaatggaaggcccaaactcctgggttatcagccttaaacctcaaagcagtccaaccatatggaaatatcacagcagtgttcctcaacggtgcatgggtcaaattgaatttcttctcatcacttggtttgaatttgccttctccataccccaaaacccaaaagtcatgttcatgcaagtgccaagggtgaatctcactaccactcccagataattggtttgcattctgcaagataacatcaacaactttctttaaggttgaacatgtttaccccattgccaatagttgtatttgggtccacaag

SEQ ID NO: 222039 - DNA, 543 bp, Glycine max
  unsure (1)..(543): unsure at all n locations
gctcggcgaacttcggagatcttcttttcgatttgtagaacaaagccaatganctggggaagcgtcaaaattaaattgcgaagaatcaccaaatcagaaagaaatacacggtccaacttggcgagaacgagctcgtccttaaggaactggatttattgaaagacgacgcaaatgtttataagttgattgggccagtacttgttaagcaagatttggccgaggccaatgcaaatgtccgcaagagaatcgaatacatctcagctgaattgaagcgtctggatgccactgttcaagatttggaagagaagcaaaatagcaagaaagatacgatactaaaattgcaacaaatgattcaatcatttcaagctgggaaaggcaaggcgtagttttccctcacatattgttccaggcattgtgatttaaccgtgctactgctaaggttggatgtggatttgtatttagtgcctctctgttttggactgaagttgactcttatgaatatgttacgggaaacagcttggaaattagactgatattaatata

SEQ ID NO: 222040 - DNA, 501 bp, Glycine max
gacggagggaatatattaatagcagactaagttccaagctgtttcccgtaacagattcctaagagtcaacttcagtccaaaacaaagaggcacaaatttcaaatccacatccaaccttagcagtagcacggttaaatcacaatgactggaacagtatgtgagggaaaactacgccttgcctttcccagcctgaaatgattgaatcctttgatgcaattttagtatcgtatctttcttgctattttgattatcttccaaatcttgaacagtggcatccagacgcttcaattgagctgagatgtattcgattctcttgcggacattagcattggcctacggcaaatcttgcttaacaagtactggcccaatcaacttataaacatttgcgtcttctttcaataaatccagtatcttaaggacgagctcgttcttgacaagctggaccgagtatttctttctcatttggtgattcttcgcaatttccttttgaagcttgctgag

SEQ ID NO: 222041 - DNA, 490 bp, Glycine max
ctcgtgttttctcaaaatgttgcattttttattgtaaaaaccaaagggagagagaaggggacggggccattgatgctcagatctcttcactctgccgacacccgcggagccttccacctctcccgccgtggctacgcctgcgagccggagccggagcgcaaggtggcccatctaggagccgccggcgggatcgggcaacccctctcccttatcatgaagctcaaccccctattatacagcctctacctctacgatatcaccggaactcccggtgtcgccgcccatgtcagccacatcaacaccgcatctgacgtactggggtaccaaggagacgaagagctcggaaaatcttcggacggtgcacatgttgatataaaacctgctggcgtgcccagaaagcccggaatgactcgtgaagatctttctaacaccaacgctggcattgtacaaacactgtctactgctattgctaagtactgtccccatgccc

SEQ ID NO: 222042 - DNA, 410 bp, Glycine max
agttaaaaggggaaacctgtcataagaaagaaagagaaacaaacacggatgaagggtacaacaccctgcaattacattacgtgaaaccatacacagttaaaagggaccattattaatggaatggccaaaacctaaacccgggtattagatcgttgaatctctttagcaacaaaaagcttttagacttaaattattaaaacatggggtatacctactcttaataaaacaacaaagtcgccacaccactggcggcaacaatacaacaatggttctgagattgcaaaatttgatttggttcttgaaggaataacattaacattatcctaccagacacgtttgtgataacatgttcaattactggttggcaaatttgattcccttttcaattgatgatttgagttcaggcttaa

SEQ ID NO: 222043 - DNA, 489 bp, Glycine max
cgggagtatggagaatttcggcgcttaatgttgctggtgtatggaaggataggaccacagtgggagatatggacttggccgtgcgagccagtctcaaaggatggaaattcttatacttgtctgacttgaaggttcgctttcttcaaactttgttattatatttcatttgatgatttgaattaaagtatcttggaaacttactttcttactttataaaatatctttaagttagaagaactaaatccttataattaaatattatcaaaacttcatggttgtgagaattcatgtttaaatcatctttttgtgatatatcacttctacttaataatactttatgtatgtgtgtgtgctatcaatttgattctgatatgggctattcaattggctacaggttaaaaatgagttgccaagtactttcaaggcctaccgctaccaacagcaccgttggtcttgaggtccagcccatctttttaggaaaatggtcat

SEQ ID NO: 222044 - DNA, 439 bp, Glycine max
aacaagatgccactcatacatttttcgactttacggcctacactggaaaaacagggggcctcggtgaaaccatcatgctcagaaatctgcaccaccctaattttgacaatctcattggatactgcgcctgtggcaaccaacgcctcttaaaacatgaatttatgccatcgcgatcacagcaagaccatcttcatgatcttgccccgcacaaggacccattcaattggaacatcaagatgaaaatcactgctgacgcagcaaaaggataggaataccttgatgacaaagcagatcctcctggaatacatggagacttccgagcactatatatattacgtgaataaagctatcatccaaaactatcaaactctgcacatgcaaagctccgaccacctttggacaaaacacacgactccacccacatcaaggaaactcaagg

SEQ ID NO: 222045 - DNA, 537 bp, Glycine max
  unsure (1)..(537): unsure at all n locations
tgttgttgtaactcgttcttcttctttagttgttctgtttttgtngtcgtattttctctcacctggaaatgtggtgctgctgaggcaactgtggttgccgaagctcctgcaagtgcggtaacggctgcctaggctgcaagatagacccacacttgagctacactgagtcaaccaccaccgagaccttgaacatgggagtggcacctgttaaggctcaatttcacggtgcatgaaatgggtgtgcccgctgagaactatggctgcaaatgtggaccaaactgctcctgcaacccctgcacttgcaagtgaggtgtttggagagcaaacttcaagcaaagatagcccttaattaggaataatgataaactattaatgcgtagctaaaaacttatgtattatgtctgcgatcgaattccagcactctggtgttgtgtggtaaacaaacatccttagataaagaggtcatgtcttgcctttcagcatgatcaagtgttttggacttgtgatgggtgtgttaagctcattgatgcttctttt

SEQ ID NO: 222046 - DNA, 445 bp, Glycine max
aaatagctagagtgataaagaaaaatggattataaaagtttaagatgtttccttgggagctaacgggttctgagagaggcaaccgattggaactgcggctcaaagccaagacgatggaaaggactacacagagccacccccggctccacttttcgagccctccgaactcacttcttggtccttctaccgagccggaatagccgagtttgtagccacttttctctttctctacataaccatcttaaccgtcatgggtgtcaataggtccagctccaagtgtgctactgttggcattcaaggcattgcttgggccttcggtggcatgaactttgctctcgttactgcactgctggcatttctgggggacacataaaccccggctgtgacattccgattgttcttggcgaggaaattgtcgttgaccaaggcgctgttctacatggtg

SEQ ID NO: 222047 - DNA, 367 bp, Glycine max
cttatttacaaacataccttttacattttcaaacccaacacaaaatattagagactcgcgtagaacattacaaaaaacggcacacacctaccacccaaatataaaacaaccccaccaaaaataaacaagcaagccatcggatacccaaacccaaggccagcacacccaaaaaacaacccctttaccaaacaaaccaaaccccaaaacctataccccgctgaaaccgcacgaagaagaacaaaacgaagaaagcccacaaaaaaagaaaggaaccaacaaccgaaaaaaaaaagagacaataaaaacagcaagaaacacaacaaacaacggagaagctgacctgaacaagaacaagcaccaacaacaa

SEQ ID NO: 222048 - DNA, 463 bp, Glycine max
gaaagattccttcaactttctgcgttcttcgcgtgttgcatctccaaaggccacttcgaaaaaagtcacaatctatcgaaagcaaacagagagcgaatcggaagaacaaaaacaagaagcagaagaaaaaatggggttgggtttgttagcttcgaaggccataagacccacctcaaggctccttctcggttcccaaaaccctaccacttttctcctccgaaccatcgtctccaagcctgagcttcggaatcccgaagccagcgccgcacagccggagcagccgccggcgcccgatctcccgccgcggactccgctcgccggcgcccgcgtccacttctcgaaccccgaggacgccatcgaagtgttcgaggatggctaccccgtgaaaatcccgaaaggaatgaccgttctttatgcctgcgatgtcgcccgcgtcgacatcccgaggttctgctaccacagc

SEQ ID NO: 222049 - DNA, 393 bp, Glycine max
gccgtttgattacggtgccggacatttcgatcctttggccgctcttgatcctggtggcgtctacgatgccaacgtggacgattacttagggtttttctgcgcactaaactactcgtcatttcaaatcaagcttgctgcgaggagggactatacgtgtgacccgaagaaggattacacagtggacgattttaattatccttcttttgcggtttctatggatacagctttggggattgagggaggttccgatactctgaagaccgtgaagtactctagggttttgactaacgtgggagctccgggaacgtacaaagcttcagggatgtccttgggggattcgaatgtgaagactgtggtggaaccgaattcgtagagtttcacggaattgtacca

SEQ ID NO: 222050 - DNA, 580 bp, Glycine max
  unsure (1)..(580): unsure at all n locations
cacaagtccaccaagttcagaggaaattcacaaattgataggttttagtttttggtagaggagcttgcttatgatggggttgttcagctctcaagagggtctcaaagagaaagatagaattgagagtcttccaggacaaccccctgtgagtttttctcactatggagggtatgtcactgtggataaagaagcaggtcgtgccttctattattacttcgttgaagctcaacgttctaaacaaacactcccacttcttctttggctcaatggaggtcctggatgttcatctcttggctatggagcaatgcaagaacttggaccttttcgagtaaacagtgatggtaaaacactccacagaaatatattttcttggaacaaagttgcaaatgttttattcctggagtcacctgctggagtaggattttcctattcaaacaaatcaaaagattatgatacgaatggagataagaaaacagctgcagacaattatttattcttggtgaattggttggagagatatccagaatattaggaaagagatttctatattgctggngaaagctatgctgggcattatgtg

SEQ ID NO: 222051 - DNA, 634 bp, Glycine max
  unsure (1)..(634): unsure at all n locations
nnnnnaagtggtggggagggnnaatccccagttttcttatgncanaatnnantttacggcaactccctaggcggcggccgccctttttttttttttttttttataatatttttgtttttatnccccttaaattaataattagtacaacgattattgaaaagtggatttgaagaaactagtcctagtcctttcttttgggaggaccgggaagaggagtgccgtctaagaaatatttgatcaaagttagggctctggctggttggtaacttggcacttgatgccctgcttccctcaccgtagctaatgttaggcctcccttgtatacttctacatagccaccaacctctccataggaaaaccaagggtgccaaacagttttaatgggaaggttcatcttcttaactgaatacttggttgatgtaataggcacccttccatctgtgtcaccactgaaaatccaaaccctgaggctattgttgaggaattcatgtaaaagtggaagaactgttgaagcttgatcaacccactttgttatgacatcgctgcagggttcccagtcatgtttgaggttggttacattggcatggagagcctcttgaacatcttttctattaagatatgcgtacacataatt

SEQ ID NO: 222052 - DNA, 392 bp, Glycine max
ctcctcactccatctcagtctcatcactctttaaccactatggctgtcttgggcggcgccgcctgggctcgcgtcattccctccgtctcactctccacctcttctcgctccttcttctccttatcatcctcttccaaactcaaatgcttgcgctcctctcctcgcatttcgcacctctttctcaatcagcaaagagcggaggttcgcgtttcgagtggaggatacggaacggtatcggcgccgaagtccgttgcgtctgatcctgatcagttgaagagcgctagagaagacatcaaggagcttctcaactccaagttctgccatcctattctcattcgtttgggatggcatgatgctggtacatataataagaatattgaggagtggccact

SEQ ID NO: 222053 - DNA, 523 bp, Glycine max
ccaattcaattatagcaaatatcagaagagcgaaaggcaactagtttccaagcagtgatgtcaaaaatgccaaaacagcaataacaatcatgatatttagaaaatagtttgactgtagaggcttatctgggcttccaccaattgcttcatattcagcccgtatcttctgcttcatagagtcagacagctcactctgcaattcaaataggcacactattgaattttattcctttcttcttcatttaaaacttcgaaattttacatgcgatatcacatgatttgaaaatagcgtcttcttgtattactaaaagatactggcacaagaaaacatgacacttgtttctattcctttccagtggagtacttggctgctacaaacttctctccccctgcatttggagaatcatctatcacaatgccctctagaggatcaaatttggctcctaggttgctaagtttagcatgggcttcagcataatctttaaagaatgcttcctgatcttcagcatatttctcagcatat

SEQ ID NO: 222054 - DNA, 501 bp, Glycine max
ttcaaagtgaactttgcaactttgagcagattatctcattttcgaaggaagaaataatcgccagtggcaattggacacgaagacgatctcaaagacgagaagaaccctcgacccctcgacgaggatgacatcgccctcctcaaaacctacggtttgggaccttattccacaagcatagaaaaggcggagaatgaaatcatagatatggccaagaaagtgaatgacttatgtggtatcaaggagtctgatactggattaccagcaccacagccagtgggatcttgtttctgataagcaaatgatgcaggaagagcaccctcttcaggcggcacgatgcacaaagatcataaatgcagactgtgaagatgccaaatatgttatcaatgtgaagcatatagcagagtttgttgatgggctaagagacaaggtttaccccactgacattgaggaatggatgcgtgtagaggtttgttaaagacaatatcttattcagatttcttt

SEQ ID NO: 222055 - DNA, 508 bp, Glycine max
caaccaacctcttcagtgatctttgattatttctaagctaaaccatttcttattccctcaaaatgagaaacctttttctttctagctatttcccttttcaaatcatgccacctaacatcaccaccgttgttgccaatgtcaccaccgagcaattacccaaggctcgtggaggaagtgggcgtgccttcgtgacctttcttgctgggaacggtgattacgtaaagggtgtcgtgggtttggccaaaggactgagaaaggccaaaagcatgtaccctttggtggttgctgtgttaccagatgttcctgaagaacatcgtgagattctcaaatcccaaggttgcattgtcagggagattgaacctgtgtaccctcctgagaaccagacccagttcgccatggcctattatgtcatcaattactccaagctacgtatttgggagttcgtggagtacaagaagacgatatccctagaccgtgacatccaagtattttggaaacatagaccact

SEQ ID NO: 222056 - DNA, 491 bp, Glycine max
  unsure (1)..(491): unsure at all n locations
tcnnntttaatttttttttttttttttttttaacaaaggactcataataaaggggccggtaattttttaataataatcaaaagctgtatcaaaacacatgtggctttgtatacaaaaaggtcatcccaattaaaaccatcaacgttgttccttcatatctaagacccaaaaaccaataaaagcaaataacaatacatatactttggcgttaattaacattaatttgtaactgtaaataataaccatattaggccgcaaaaggagctggcacaaactgaaagcccccagcatccaatagtgccaatgtaaaaccttccaccttcacaaaattgttattgtactccaaagtctcatcttcatatatgtcccaccacttcttcacaaacatcttgatatcttccctatccatgttctcttccttcccagtgaacccccaaggcttatacccacccgcacagttatgaaccacttgaactttatcaagttcaaca

SEQ ID NO: 222057 - DNA, 462 bp, Glycine max
gccgctcatgctggcgtccgtttttccatttataacccccaatcctacttcaccgggggcattgggggctacgtcaacctcctcgaggctgccaaatccgccaatccccaacccgccatagtatgggcttcatccagctccgtctacggcctcaacacccaaaaccttttctccgagctccaccgcaccgaccaacccgccagcctatacgccgtcaccaagaaagccggcgaggagatcgcccacacctacaaccacatctacggcctctccctcaccggactacgcttattcaccgcctactgcccctgggggagacccgacatggcttactttttcttaaccaaggacattctccaagggaaaaccatcaacgtgtaccatacacatgaagggaaacaggcagcccgtgacttcacctacatcgacgacatcggtaaaagctgcctgggagccctgcac

SEQ ID NO: 222058 - DNA, 453 bp, Glycine max
gctcctagcacaagttttagaactattttactagtcactaccagcatcgggcaccacgtactcttatattcctcaccctctatctcactctattcaaacatcaccatagattagcacttgagttattatatcaaccacgaatgtgcacaagttgagaagaaaccaaacgtagcaaaagatggaagctgttaagttggagtctagtgatccaagtgagagaccagacacataccgagtcgcttacataattcattacttgcttggtgctggcaacttgcttccttggaatgcctagatcactgcattggattactttgcctacctctatccaacaaaacacatagaaaaggactgctctgtggcctatatgatttcatcagtgatggtgctccttgggatgatcagttggcggggttggagcaaaacaacattgaggctgagaatgaacttggg

SEQ ID NO: 222059 - DNA, 448 bp, Glycine max
agcaaaaggggtcacttttcagattctagattttgctcctttacccatcatcatcatggggcttcgggggtactttaatcatggtcacccttctagaggaacaacacttgttattactctttcattggtgctttcgacacttgagaccttctccactttcacacatgccttctcttcttctgcgatgccggaactgaatcctataaaacctaggcactcacgtcttatcaggagtgccgtgcaacatgaaactcctacatcacagcttaatgaaatatggtcacctctggaaagccaaggatggaaaccttatgttgaatcaaataagccaacattaccacaaaagtccgagggatatatacaggtctttcttgatggaggtttgaaccaacaaaggatggtgatatgtgatgcagttgctgtggccaagatactgaatgctactctg

SEQ ID NO: 222060 - DNA, 446 bp, Glycine max
aaacggcgatatgggtcatgttattgaattataaacttataaactattaataagggtggctcctgctaaaaatgccaacatcggataaacacattttccacaaatttcacaacttactcacaagcccttttatcaagaacaacataacaaaccccatttggaaaatgatgggaaaaagctttttgattttcacttaacttaatggtaaatatttagacccccaactttaaaatacacatgctacatccgtgagcaataataataatttaagtatatcctactactaggcactactaaacttggcacatgcaatcaggaactggattcctatatattgattggtttggcttccttagccttagttccccttggctattttggtgaccttcaaccactgcttcctgaaactttgaccactctatggctttattcaggaaaagctgacc

SEQ ID NO: 222061 - DNA, 357 bp, Glycine max
gaacgtaaatttttattattttatgactattataataacctggagctatggaggatcaaattgatttcgaacactactaggacagagggaatacttgattcggctggtcatgccggtatagcggtacttgaaaatcacaacgcatgctcacaacttggcaaacatgtaaatcacagagccttacgctgcctgatcatacaaaatgccaagtaactattttaactatacaaagtcctgtaaacaataacaataatgcaccatttttacttttttgcagatttgcaaactgcgactgcaccttaatcctgcatggctctcattttcacactttctaaatacagccatgtgccggtgtga

SEQ ID NO: 222062 - DNA, 538 bp, Glycine max
  unsure (1)..(538): unsure at all n locations
cttagtttctctcttcacatatcattttacttttatagtcagatacatcacccaatagttaaatgaaatacatgctagcactttaacagtactcctttctctaatatctctctcatattttcctttctgcggatattcagctaattaaactaagtcactaagatgactgagggaaagctagttgaagctgcagaagctcataagacacttcaggatttcgatcctccaaagaagcgcaaaaggaacaagtatgcttttgcttgtgctatgctggcctccatgacttccatcttgcttggttatgatattggagtgatgagtggagcagccatatacataaaaagggacctgaaagtctcggacgagcaaatcgagatcctgctcggaatcatcaacctatactctctgataggctcatgtctcgccggcagaacctccgactggataggtcgccgttacacgattngtttcgcccgcgccatcttctttgtcggagcacttctcatgggtttctcccccattattcctttctcatgtt

SEQ ID NO: 222063 - DNA, 548 bp, Glycine max
accctgcgcccgcagcctcatcgggaatgttctcagaactatagacccacgtggggggacccgcaccgatggagaacgtggccacgtaagccaacaccatggctatgctcgatccaacggcccacattaatttcctctccgaatgatcaataacagtgaggctgatcgcaagcgtgagaagcgagagcaccatgccgccgacactagacaataacaacggacgacgacccacgcggtccaacgtaaacgtagccgccaagatgaacacggtcttaacgaatccaacggccacggttgcaagaagcttatgcgtgtcgtttgtaatcccagccttttcgaagatcctggggctgtacaaaacgacggcgtctacgcccgacgcttgttggaagaagtgaataccaagggcagcgattacgatgtgacgaattgcgggcgttggatagaggaagagctctttccatacaccttcaccgttgcttgtttatttacctgaacgaccgtcgtgttgcaactttcggggatccctgcggtttgttgatttccgc

SEQ ID NO: 222064 - DNA, 521 bp, Glycine max
  unsure (1)..(521): unsure at all n locations
tggcactaccatntgtaganccttnacaaataaccccaaaacgcctgctcggtaagtctcattcctccatttcctcaccttccatatttttcctcttataccacggtacctaaattgactcgggccaccgtggcaatattgccgccggatgtacgaaatgatcaaccccccaaagaagaatcccttttcaaggctccctaaacccagatctaattccctctcggaagaattggccgttatttgaacaaaggaaggtacgctcagcgtgtctgtaccggtgctcccctatacttacctgcagttctcgaatacctatctgccaaagtgcttgagttggctgggaatgccctacgtgacaacaagaagaacacgattattccaagacacgtgcttttcgcagtgaggaaccaataacagttggggaaattgcttgctgtagtgacaattgcacatggtggcgtgcttccaaacatcaaccctgttttgttgcctaagaagactgaaaaggcttacaaggaacc

SEQ ID NO: 222065 - DNA, 496 bp, Glycine max
  unsure (1)..(496): unsure at all n locations
ccgtccaaagnnagtcccagatacnatnncacattaaagttatagcnacgaacnccgcaggagncggcgctcgttcttttttttgaattcaaggttttttttttttttccatcaacgaancaaactcagtcctggggcaataaattgggacaagaattacagtgttttctaaacacataaaatatcctgttacaccaaaagcacctaaacaccgatatacaacactaaattaaatattgaaaataaaaaagtaatctaagctttcttaggaaaattggttgccttggatggagatttatgttccttggaagccctctcaatcttcttatgcaacaaaacacggtttatgtttggaaacaccccaccatgtgcaattgtcactccagcatgcaatttccccaactcttcatcgttcctcactgccaaaagcacgtgtcttggaataaacctgttcttcttgttgtcacgtgccgcattcccagccaactcaagcacc

SEQ ID NO: 222066 - DNA, 612 bp, Glycine max
  unsure (1)..(612): unsure at all n locations
gggtagcctagcntcantcagtangacgatttctggcgtacnaccctcacctccgaatgctatataaaaatatagaggatctcgtgctgttattttgaaaattttatattgatagagaaaatatgcggtgccatgaataaattatagaattacttcacaaaccactggacatcactctaacaatctaaatactcactctggaggctactaaacctgtccatcccttattaatccaatatatagactctgcagacccaaacatcgggaacggtcaataacgatgtctacatagacttcgcgactagcgctgaccattatcgtgttgttagcagatccggcaacatcccctctagcacgtgcctcatcggtctagtcgtccttcgacggtcaacgctagcttgactatgtcatgttagcgatgcaatggcccggcactgactgcaaacgcacccgcagttgctgacccaccaatggttgctgtagaggctccaattctctagcaatattcaccatacatggactatggcctgactataatgatgtgagctggaccgtctgtagctctggatctagcgttgatccaacagagatatcaacattgactaatgcttt

SEQ ID NO: 222067 - DNA, 520 bp, Glycine max
acccggaaaatatatttagccgtttggatatccttccgataactggggctcgaagatattctcaccaaattacaaaaggagcttttctcacaatgatgctggtacaagtgataacacatctggggcagtagagttcatcaagtgggacttctactcttgatgcaggaggagtttcagagtaaaagcaaaccaattagtattgccaatgccaataagctaaaagtgtcgacctcccttggagggagcccacccgaagaattccacaagtctaccatgggtgctagagctacagattctgcaagaattatgaagttcaccaaggtgctttctgggacggtggttatattagacaagttgcgggaattagcttggagtggtgtttcaaacaatatgcgtactaaagtgtggagacttttgttgggatatgcaccacctaattcagatagaagggaaggagttctaagaaggaagcgccttgagtatcttgactgtatttctcagtataatgatattcctgata

SEQ ID NO: 222068 - DNA, 580 bp, Glycine max
ctttttgtcatgttaagtttaacatttggcgcggggctgtgttagtttctggatccgccacttcatccgttgattgcacagaattccctaccaatcgacgccaccacatccacgatgcgcctgcgcagccgggcaatctttgccctcgttcgcaccaccgccatcaccacgtcggccgtgtgttcgccgccggcggtgctgagcgtatgccacgcgctgcgcgagcgccggcgcttcacggaagacgatgtggcggcgtacgcggcggtcagcggcgaccgcaacccggcgcacctcgacgacgccgttgcccgcgagctgagcgggttccagcgaggccgcgtggcgcacagcatgctcgcggcatctctattgccttccgtcatcgccgcaagcttccctggcgcggcgtacgcgagtcagacgctcaagtttgacgcgccggtgtatgtcggggatgaggtggttgatcgagtgaaggcactcaacatcaggatgataggtacgacgaactgcagctcgactagccgatatctcggcaagttcgcaaccaagtgcttcatggacaaagaggagggct

SEQ ID NO: 222069 - DNA, 476 bp, Glycine max
ctgtttcgtgcaaaaacttgttgtctttctacactccctcattttctctgtctagctgtttagagagagaaagatcatatcccagaagaagaagaagaagaagagtctgaaaacatggagaagaagagatttggtgtgttgatgtgcgcagaggattcagagtacgtgaagaaagtgtacggaggatattctggagttttcgtgagaatgctggcggaggagggagagacatgggacgtgtacaaggtggcgtgtggggattttcctgatgaagatgacttgggtctctatgatggttttgtgatcactgggagttgcagtgatgcacatggcaacgacacatgggtgaatgatctcctcaacttgctccgcaaactcgattccatgaacaagaaaatcctcggaatttgcttccgccaccagatacttgggcgtgcattgggagggaaggtgactcgttctcctactggatggga

SEQ ID NO: 222070 - DNA, 516 bp, Glycine max
gaaagattccttcaacgatctgcgatcttcgcgtgttgcatctccaaatgccactcgaaaaaaagtcacaatctatcgaaagcaaacagagagcgaatcggaagaacaaaaacaagaagcagaagaaaaaatggggttgggtttgttagcttcgaaggccataagacccacctcaaggctcctcctcggttcccaaaaccctaccacttttctcctccgaaccatcgtctccaagcctgagcttcggaatcccgaagccagcgccgcacagccggagcagccgccggcgcccgatctcccgccgcggactccgctcgccggcgcccgcgtccacttctcgaaccccgaggacgccatcgaggtgttcgtggatggctaccccgtgaaaatcccgaaaggaatgaccgttcttcaggcctgcgaggtcgccggcgtcgacatcccgaggttctgctaccacagcagactctccatcgccggaaactggcgcatgtgcctcgtcgaggtcgagaaatc

SEQ ID NO: 222071 - DNA, 508 bp, Glycine max
aaagtgggtcaattcaatacacagtggcaatacagccagtcaaaacatttgtttttatcacggtggatttaagtatcagctccaagactgagaatttaaataatgttttcgggattcaacataaaaaaataaaatcttgtcatataatgaaaattgaaaagactcaatatttgagcaattaactgttgggatatgattttctcatggcgcaatcctaagtgggtcacgaggaaagagtgatgttttgcgaatgttattcaggccacagaagagcatcactacacgctccaaccctactccaaagccaccatgtggtggtgcaccatatctgaaagaatcaatgtacgaagatattgttttgacatcaatgccgcaagctgctgcacgttgttccaaaaattctggcacatgaacacgctgagctcctgaaatgatctcctcacctcgaataaagacatcaaacgagttgctgtatgctggattgtcatagcaaggcattgtataaaat

SEQ ID NO: 222072 - DNA, 606 bp, Glycine max
  unsure (1)..(606): unsure at all n locations
ggcaggaaaattttcccgatttttttaaatcaaagaaagctatgtaactatagttgagattaaatcccgtgataatgtagacccataaacgaccacaaatcaaaatacaaacatccgttcacagaacaacaaaaagactgtaataaagaaagaaggccggggtaaatgatgaagatgcttcacatatacagtccttctggcaccccttctttcttcttaaacataaccttatcctttgccttcttgaagtcggcatgcgtcaccttcatccggcgttctcgtaaagcaagtaagccagcttcagtacatattgcttttatatcagctccagagaactcatccttagtcataacaaattcttctaagttgacatcatcagctaatgtcatccttgaagtatgtatctggaaaatgcgtcttcttgttttgatatcagggagaggaaattcaatcttcctgtcaattcgaccaggtcgcagcagggctggatcaaagctntcaattctgttggttgcaagaatcactttaacatcacctcttgaatcgaaaccatctaactggttcagcaactccaacatagtcctctgaaattacgttctccactga

SEQ ID NO: 222073 - DNA, 495 bp, Glycine max
cgaacaccacctaaccagctcgtgattcttcccgccgtagatctgttccttttcgccgttcctccatggccgacgacttcgaattctccgacaaagtccctccttccttcgatcgcgtgggttcaaaaagggttcaacccagcattaattgttctccttcttgttggtgggttgctgttgatattcctcgttggaaattatgtactatacacatatgcacagaagaccctccctcctagaaaaaaaaagccaatctcaaagaagaagatgaaaaaggagagactgaagcagggcgtctctgcacctggagagtagaactttttcctcactctatgttctgtgatgttaaattgtactcttttagaaaaaatttctcgttctgtggtctgtggagtatgttaatctttatcttagtcatgtgttttactgactgaaatctcgaccacatagattaagtactttgttaaaatatttgggacaaaagaaaaaaaacaa

SEQ ID NO: 222074 - DNA, 454 bp, Glycine max
atacttgtcaaccctttgagagttagtattggctgctgctattgaaatccccacaatagtgtgtccaaactcctctgcccaacagaggatgccagtgggtggaatgggatctggccctgtcttggcaatgctagatagacacaaaggaggctatcattgaggccgttaaacagggttacagacacttcgacactgatggtgcttatggctctgaacaggctcttggtgaagctcttacggaagctatccatcttggcctgctatgccgccaagacctctttggcactaccaagctttgggtcaccgaaaatcatcctcatgttgtacttcctgctttgcgcaaatcacttaaaactcttcaactagagtactcggacctgtatctcatccactggcccctgagttcttagccagggaagctctcatttacaattgaagtagaagatctcttgcc

SEQ ID NO: 222075 - DNA, 571 bp, Glycine max
cagcttctttctttgagattaagtttcagtagtaatgggtaaggaaaaggttcgcattaacatcgtggtcattggccatgtcgactctgggaagtcaaccaccaccggtcaccttatctacaagctcggaggtattgacaagcgtgtcatcgagagattcgagaaggaagctgctgagatgaataagaggtctttcaagtatgcctgggtgcttgacaagctcaaggctgagcgtgaaagaggaatcaccattgatattgctctgtggaagtttgagaccacaaagtactactgcacagtcattgatgcccctggacatagggatttcatcaagaacatgattactggaacatctcaagctgactgtgctgttcttattattgattccaccactggtggttttgaagctggtatttccaaggatggacagactcgtgagcatgctctccttgcattcactcttggtgtgaggcagatgatttgctgctgcaacaagatggatgccactacacctaagtactccaaggcaaggtacgatgaaattgtcaaggaagtttcttcctacatgaag

SEQ ID NO: 222076 - DNA, 484 bp, Glycine max
ataaaaatagtacctacaataaacaaaattttatttcgaatatgagaaggttggtgtctcgaaattagaaaacactagcataaatggaaagaaaaagaaagttcaatctgaagagagaaaccacgcggcgtacacgagcacccattccgccattattgagtattccaaaccaaaagagagataagttaataataataactaaagtgcattcagcaaataccaaggcatatcggtttgggacttgcattgattagaacatgctgtgttccgggctggaatatgcaaggaacgtggacttggctgaggagctaaacccattgaagttagtccccgacgacgtcgaatatgcacccatgttcgggaacactagccaatcgttcacttgcagtcccggcagcttggaatccctcagaaccgcattaatagaatcgcacgtgggtccaaacacggtgctagggtaagtcttcaaaatcaattccctgct

SEQ ID NO: 222077 - DNA, 480 bp, Glycine max
aataacaactcaatatatacttgaaattcaaaagccaaacgggcagcgttggactagtcctatgcagcttattgttcttacaaagacacattgttatagaaacaaatcattacaatgaaaaagaaatagtcttgccatcgtctatcaagaacccagttctgggaacaaaagttgcgagacgacggatcaaacctgacacaaaatctgataaacaagtttctctacacgaaaaaatgaagtactactaacaagaaaccatttattcgatgtcatattaatacagttttccttgataaaccatccagcacaattaatttggccttcttttgtgcaaaccttggtcacacttagctaccagtatggtgttctttctttttcgacagctttttgatgaactcccacagtcactagttgacgcatgtctcttaagaaaaagaccaattggaggatacttcgagaaagtttaaccaccaagggctt

SEQ ID NO: 222078 - DNA, 563 bp, Glycine max
gaaaggttgattggctgtctgacaattatgcgaagccgagaccacacagtgtcagcagcccatggagacatggaccaaaataccagggacattattatgcgtgaattccgttctgggtcgtcccgtgtgttaataactactgatcttttggcccgtgggattgatgtccagcaagtgtctctagttataaattatgatctcccaacacagcctgagaactatctccatcgtattgggcgaagatggaaggtttggtatgaaaggtgtcgccattaactttgtcacaagggatgatgaaaaaatgctgtttgacatgcagaaggtttacaatgtgattattgaggagctgccttcaaatgctgctgaactcctttgatgagtcaatctgttccatcatattataggaaagttggtttctgaggtacgtgttatgtaatgcttcttgatactttttgccgcctttgttgtatatctgctctgaaaccttgtatgaccttcttaataggtgtagctatataatatacatattagtcgtatgaatgttccaagtgatgagtacttgc

SEQ ID NO: 222079 - DNA, 476 bp, Glycine max
cgaacaaacacaaacatttatgcattcaaactcaatcaattgaatcatggcatcgaacagtgcaagtccaacccttacctcctctccgatccttcactctacttcttccgcgactatctcgaaagtctcggtgcgaaactccctgaatctgcttattacgaatcgactggcgtggagagcgatgaggacatagaagatgttacggaggagcatgacaaggtagaagaagaagaagaagatgatgaaataattgaatccgatgttgagctcgagggtgaaacctgtcagtctgatgatgatcctccacagaagatgggagacccctctgtcgaggtcactgaagagaatcgcgactcttcgcatatggccaaaattaaaaccatggatgctatttctgaaggcaagttggaggaagcgattgagaacttaacagtagctattctactcaatcctacctatgccataatgtatggaac

SEQ ID NO: 222080 - DNA, 531 bp, Glycine max
ctcctcgattgatgcataatttcaacataagactaagagatcttaaccatatgatgttcctacacacgctgggccagtctctcttacacacaaagcttaaaatgtacagcgtgctaactaattctattgtcagatctctcatctaaccagtaaatgtgattttcccataatccactttagaagagtcgaagagagcagagtgagtgaaacggtggcagagagcgctttgtgaattaatgaatctcatagcctctcaaaaagctttcactatctagtgtaggaaattggccacagaagcagcttccataaactcctcatctgattccagcgcgctcactgcatcaggcgaaaggcaaatttccaaatctatgcttccctctccttcatatccttggtatgctgtcacgttcccatcatttttgttggcatatccactcagaactgcaatcgctttccccatcccaaattcattcccatacatgttgaacctcggggaactcgacatggtcacagtacaaggatcaaagtgca

SEQ ID NO: 222081 - DNA, 435 bp, Glycine max
aacgcgtgcatagcagagtcagagacagagacgcagccatggggcggagacctgcgaggtgttataggcaaattaagaacaagccataccccaagtcacgtttctgccgtggtgttcctgatcccacgatcaggatttatgatgttggtatgaagaagaagggtgttgatgagtttcctttctgtgtccatctggttagatgggagaaggaaaatgttttacgtgaggccctggaagctgctcgcattgcttgcaacaagtacatggccaaatttgctggaaaggatgcttttcacttgtgagtcagggtgcacccattccatgttcttaggatcaacaagatgcttctccgtgctggtgctgataggctccaaactggaatgagaggtgcttttggaaaggcacagggtacttgtgctagagtggctattggac

SEQ ID NO: 222082 - DNA, 518 bp, Glycine max
  unsure (1)..(518): unsure at all n locations
agcaaatcaaatcaagacattttatgtaaaatgtaaccatacaataaacttataaattaacacatactatcattctcgatgataaaaaaataataataataataatactatcatcatcctaaccggtcaaaaacaaaattaataacaaatattaattaattaattaattaactaactaactaaaagcttgctctctttagggaagtaatagtaacggaagaacccaagggagaagttcccacttgaatctcgaaggaatcatagcgaagaaagaactccacaacgaaaagcctcgaaaccaaggtgacgaagtcttttccggcgcattgcttgttcccaagtgttggagactcagtctcaggcccattggaccacagcacgtgcttgaggagcttctccccttcctccccgacgaacctgtccccgacaaactcctcggccctctcgaagatcctaggatccttcgtcgcgaatgtntggtacccgaacagcatctncccttccttcacctgaaacgc

SEQ ID NO: 222083 - DNA, 383 bp, Glycine max
aacgcgtgcatagcagagtcagagacagagacgcagccatggggcggagacctgcgaggtggtataggcaaattaagaacaagccataccccagggcacgttcttgccgtggtgttcctgaatccacgatcaggatttatgatgttggtatgaagaagaagggtgtggatgagttacctttgtgtgtccatctggttagatgcgagaaggaaaatgacatacgtgaggccctggaagctgatcacattgcttgcaacaagtacatggccaaattagctggaaaggatgcttttcacttgtgagtctgggagcgctcattccatgttcttaggaacaacaagatgcttccgcgtgctggtgctgataggcttcaaactggaatg

SEQ ID NO: 222084 - DNA, 424 bp, Glycine max
gcggactagacgggcagaaagggaataacggtgaacgccttcatgatcgactacgggttcgacgccacatgcgcgaactgtgtgtagctcaccgcacagaacccctcctcggaccaggagaacaaggaccgctacaagctgaacgcgacgctgggccgccacgagttcggcactacctacctccactctggcctggggaccgaggaggaactctcgggcaaacaaggctcaagaaatacgctctttacggagatcgacatccttgatctattggagggaggaggtgattattcgcaccttgccttaaccagctaacatcactaactggactgacacttgctttgattgcgatgacagtgatcttgcaatcgacctttgggagggtcgacaggtcttggaccggattgtggcgcgagggcactac

SEQ ID NO: 222085 - DNA, 597 bp, Glycine max
aaaattcactgcactggtttctttagattgaattaaagatacaacaattataaatgaaaaataagtctcggttactttgtgttattatgaacaatagctcttctcaaaatctcaaacatacttgaatcactacagctggtagctttaagatcttaacaggtaaaaggcggaatcaatctgcttgaggagcagtgcatttgtcaacatctctatgaagcatattgctcagagttcaccatcccaaagctcttcaacggtcttaaaggcaccataggtctcgtcaacaaaaaaagtgcccttaattagtctatcctgcttaatttcagagaacttatccatcacttcttctggaatagaccagtcaaacacatcaaagtttcccttgattctggactcattagtgctcttaggcagcacactatgacctgtttgcagtccccacctaagggcaacttgtgccggtgtcttccccaatttctctgcaatctctatcacaacaggattcttaagaatgtcacttttgagaactcctggtgagcccagtggagaatatccagacagatgaactcctttagattcacagaatgcatgcagctt

SEQ ID NO: 222086 - DNA, 523 bp, Glycine max
tacttacttacttacttacttactctcatttaccaattaaaaatgccttcactaggtgcgggggcattcaaagccaagggcgcagaacccttgagcctgaagcccattttcagtgcctcaggcgtcaagggcaagcgagtaactgcactatcagcagaagcaaatgccctcactgatttcattcaagcaatcatagctgacaaaccagacatcgactctccattcagcgtcctcgatttgggcgtcgtaatgggcctcatggacaaatgggcctgcaagctccccacggtccagcccttctacgccgtcaagtgcaacccaaacctctccctcatcggcgcgctcgctgcactcggatccagcttcgactgcgccagcaaagccgagatcgaatctgtcttgtccctcggagtctcaccggacagaatcatctacgcaaacccatgcaaatccgagttccacatcagatacgccgcctccgtaggtgtcaacgtcacaacctacgactccctcgacgaggtcg

SEQ ID NO: 222087 - DNA, 550 bp, Glycine max
gctcctagcacaagtagaagaactatctcactagtcactaccagtatcaaccaccacttcctcttatattcctcaccctctgtctcactctattcaaacatcaccatagtttagcacttgagttattatatcaaccacgaatgtccacaagttgagaagaaaaaaaaagtagcaaaagatggaagctgttaagttggtgtctagtgatccaagtgagagaccagacacataccgagtcgcttacataattcatttcttgcttggtgctggcaacttgcttccttggaatgccttgatcactgcagtggattactttgcctacctctatccaacataacacatagaaaaggttttctctgtggcctatatgatttcatcagtgatggtgcttcttgggatgatcagctgggggggttggagcaaaacaacattgaggctgagaatgaacttggggttctccatgttcgttatgtctcttatggcagcaccagtcatagactggacctcaagcagcaccaagctcaatgagagaccgagtggatgctacagc

SEQ ID NO: 222088 - DNA, 601 bp, Glycine max
attagcccgaaattcaagaacaccgtgaggcatttgctacaccagaaaattcgggattcctatatgcaccctcagtttgtgtctgatgtaatgaagccactgcaaattgaacaactcatggaccaggaggttgttaatttatctggtggagagctccaaagagttgctatatgcctctgccttggaaagcctgcagatatctatctgattgatgaaccaagtgcttatcttgattcggagcagcgtattgtggcctcaaaggttatcaagagattcattcttcacgctaagaaaactgcatttattgttgagcatgatttcatcatggcaacatacttggctgacaaggtcattgtttatgaggggcgaccttctattgactgttctgccaatgcaccacagtctttagtatccgggatgaataaattcttatcgcatcttgacattacttttagaagagacccgaccaactataggccacgtataaacaagttggactctacaaaggacagggaacagaagtcggccgggtcctactactacctcgatgactaatgaggaagcacagattcttctggagagccatatggcgcatagtctt

SEQ ID NO: 222089 - DNA, 561 bp, Glycine max
acccggtaaaatattattgagccgtttggtagatcctcccgataactcagactcgaagatatcctcaccaaattacaaaaggagcttttctcacaatgatgctggtacaagtgataacacatctggggcagtagagttcatcaagtgggacttctactcttgatgcaggaggagtttcagagtaaaagcaaaccaattagtattgccaatgccaataagctaaaagtgtcgacctcccttggagggagcccacccgaagaattccacaagtctaccatgggtgctagagctacagattctgcaagaattatgaagttcaccaaggtgctttctgggacggtggttatattagacaagttgcgggaattagcttggagtggtgttccagacaatatgcgtcctaaagtgtggagacttctgttgggatatgcaccacctaattcagatagaagggagggagttctaagaaggaagcgccttgagtatcttgactgtatttctcagtattatgatattcctgatacagaacgttcagatgatgaggtcaacatgcttcatcag

SEQ ID NO: 222090 - DNA, 565 bp, Glycine max
  unsure (1)..(565): unsure at all n locations
gggctttgcaactttgattgccactatttcgcatgttgccctcttccacggggagatgattcttcaggtgtggaggaagacaacaagaacactaaaagaacaacttggagatgtccatacaagaataaaacttcgtaccccattgtccggaggctcttcgctatgcgaaggtatgagggagggatgttgtacgcagccttacccttgcatatgcaaagaggctgtttccggatttgaacccatgaccaacaagtcaccaaggcacaactttaccgctgcaccaggactcgccctcatgtccatacaagaatcatgaagaaaaactatgaataagttcctgaatggtggtttgtcaccattttgattcttatggttgttatggctttggttgcttgtgaaggctttggcaagcaactccaactgccatggtggggaattttactttctctaacaattgcattagtcttcagcttgccaattggggttattcaagccacaacanacatacaaacgggactcaatgtgattgcagagttaataattggatttatttacccaggaaagc

SEQ ID NO: 222091 - DNA, 449 bp, Glycine max
catcaaggcataggcaaagcacactgcttcctaacagcacacttactttgaagggtgaagttccaggtttttgcccaacattcccaacacaccttaatttattttatatacaatcttttggggcccaaaatgcaaatgcatggactaattaaacaacaacgtttgtctgataggccgggtccataaataaatggggtccccataaaatggccttgtttccaaggaaatggcaaacagggttagttccaggatcaactcccatgatttcatgaagcatgtgaggatttattccaaaagtctttgagtggaaaacagcaagtgcctgagttttggttccatccccagccaccaatggaaccatgaaagctgttgtttcacggactttatggcggttaaatacttgcagtctgaaatcttcccctgacacataattgtttttttttcaaaat

SEQ ID NO: 222092 - DNA, 493 bp, Glycine max
aacaacactctctcttatcgctctttgcttttcgctcttcactcactctcattcattcatttccaccgttcatggatccagtaagcgtgtggggtaacacgcccttggcgacggtggatcccaacatccatgacctcatcgagaaggagaagcgccgccaatgccgtggaatcacagctcatcgacttcgagaacttcacctgcttcgtcgtcatctaggccctcggcagcgctctcacgaacaaatactccgagggcatgccgggcaaccgctactacggcggcaatgaatacatcgaccagatcgaaaacctctgccgatcacgcgccctccaagccttgcacctcgacgcccaatactgaggcgtcaacgtccaggcctactcctgctgcccggccaacttcgccgcctacaccggcgtcctcaaacgccacgaccgcatcatggggctagatctccgctccggcggacacctgacccacggctactaca

SEQ ID NO: 222093 - DNA, 527 bp, Glycine max
cggaagtgagagaggaggcactgatcatcctacaatggccttgttctctgctacggcaaccgttcttcctcggaacctcgcattcgcttcctccaccaaactctccctctctcacagtcactctcttctacatcactttctttcattccccactcccaaatcatcaaaccctcgcaaccgggtcgcaatctctctccaaaccccacgcgctcaatccggcgcgttcgcctccgcctccttccatggcctctgctacgtcgtcggcgacaacatcgacaccgatcagatcattcccgcggagtacctcaccctcgtcccttcgaagcccgacgagtacgagaagctcggctcctacgccctcgtcggcctccccgccacctacgccgtgcgcttcgtcgaccccggcgagaccaagaccaagtactccattgtcattggcggcgccaacttcggctgctgttcctcccgcgagcacgctcccgtggcgctgggcgcttccggcccgtccgagtggtcgcggagtcgta

SEQ ID NO: 222094 - DNA, 569 bp, Glycine max
attgatggagacccttatagtcttttactacactgtcttctcacttcaaaatacacattaaagaagccatgactaatattttaccgtgttccctctttccagcaaaatttacattaattctagctaactcgtggaaatggttggttccatttcatgatccataaccttcaatctggtgtcaaaaactatggagtatagaatacaatacattacttgtcattgactcctattttcttttcactgccgtctttgctaataacaatcccaaccaatttacaaggctcagcatcctcaagtttttgaaccacagctctcatggttggtctcaaagctggaagagtccccgtgcacaaaactgcagttctcaacaccttacaagtttcctctgtatacatctccggaattctcgaatccaccgcactcctaagcccctctttgcttcgtgccttgttatgaacccagctcactatgtccttattttccccaaactccggttcaattggccttttcccagttactaactccatcaacaccaccccaagctgtacacatcactcttctcgttcacc

SEQ ID NO: 222095 - DNA, 570 bp, Glycine max
ctaatcttgaaaagttgaagctcccctctacacattctggttcaacaggggaaactactcgtcatggttctgatgatactgcccgtagaccaccttctgttaaagctgccctttcagtctcttttggtcagcgggctccacaccgggcttccacaagagattcttcacctattcgccgtacattaccttctcatgaaaaaaatggcagtgatgacataagaagatctccaagtaatcgccgcagccagagccgtgaatatcctgatagggagagggatagggaccgagaccggtcacagtccagagacagggatcgggaacgtgatagagacagggatcgggaacgtgatagggacagataccgtgaccgagataggaacagggagtgggagcgagatcgagatcgagaccgggaaagatacagggatcatgactcggaaagagatcaggatagggacagaatcaggaggaataatgagcgggaaagagagagagagaggagttacgattatgacaagaggtctaagtacacagagagagaaagcagcccggattatgacaatggtagta

SEQ ID NO: 222096 - DNA, 576 bp, Glycine max
atatgactctggtgttatttttgattttgcaaattaaattacacaatcacagccgtacatcacacatgagttgggcctcttccaacttaaaagcagaggataacattggcccatgacgcgacacatgcaccacctaataatcataattttacatctttacatacaaaatacaaagactttaaattttaaaaagaagaaaagagataaacagatcatcttaatgaaatgaaaccaaaacccacaaacattggcttgatttttgttgttgttgttgttcccaacttgattaagcatgaaccgtttgattgaatcacttggacttgaagggaatggccctgattacgacctggtggtagagtgctgcaagagctgcaccgatgaatggtcccacccagaagatccagtgttcatcccaaccaaggtccttgttgaagatgatagcagcaccaagactacgagcagggttgataccagttccggtgatggggatggttgccaagtgaaccaagaacacagcgaacccaattggcaagggtgccaaaatggggacgtgggagtctctggcgctacgtttgg

SEQ ID NO: 222097 - DNA, 472 bp, Glycine max
ataaaaaaacgggataccctctataaatggaaaatattacatatttcttgcataaaacttgggagaacatttttttttggttgacgatataaaagatatatgttctgaaagaacacatacatgttcacaaaaaaaaaggggggaatttatataataataccgaaaaaaaaaaaccgatttgcgtctgagggaagggaacatagagaaaattttagcagtctggttataagaagccggtggtggtgcaaaagtgccttgccaagaggggtgggaccccttttatttaaccaggggccttttgccccttgaggggcttgaccacttaccatgtgaaagcaggggcatttttgtcaaagcggccctttgcagccagtgttaagaacctgccatttccacccctcttgagatcaagggtgatggagatcatgccaggcctgaagccaaaactgtccttacaatggttgggattttc

SEQ ID NO: 222098 - DNA, 583 bp, Glycine max
  unsure (1)..(583): unsure at all n locations
caaactctctctcggggctcgccttttcttcacagcaccacgcgcacacggttccgatgccttcttcgcctcttctctgatccactcgccgcgcccacggcgcctcctaaatgtctgtcatcgacacccccgccgttcaccaccgcagcgggggcgccaccgatcaccgtcacccgtccaagcgcaaattcgacgatgaagacgacgaggatttctcggacttagtctgcgtgaggatgcggaaagacgaggccaaggcggtgaattcctggtccgcctcctcctcctcctcctcctccgacgccggcggctgctcctccttgcagcagcagcagcgatcgcacatccagttcttcgtgcgaatgatgtctgccggaaacacgattgtgatgcaagccttccccgaagacacggtcaaatcgattcacgagcgtatccaaagcatgaagggaatcccattgttcgagcagaggttaatttatcgcgggaaacagctccagtgggaacagactcttgccgagtgtttcattcanaacgacgccaaccttcaattagttggccgtatgcgcagtaccgaacaccc

SEQ ID NO: 222099 - DNA, 492 bp, Glycine max
ccttgatccatctagtagtgggtgtcgtatactgcctcatcagctggagtgtcggtctccccaagcgagcgcctatcaatggcacgctcctgaagcttctctttccagtcgccctgtgccatggtattggtcacatcactagcaatgtgtccttcgctgctgttgcagtctcatttgcccacactatcaaagctctggagcccttcttcagcgcagctgctactcagtttatccttggacagcaagttcccttctctctgtggctttctcttgcccctgttgtcatcggtgtttcaatggcatcccttactgagctctcattcaactggactggcttcatcaatgccatgatatcaaacatctcattcacctacaggagcatttattccaagaaagccatgactgacatggatagcaccaacgtgtatgcttacatttcaatattgctctcattgtttgcaattcgctgcagtgatcttgaggggccccgct

SEQ ID NO: 222100 - DNA, 301 bp, Glycine max
gacaatctggatcgagacatcctgcaacccggtttatccaattaacttgtcaccatcgttactggggacaagggtccactataggatgtctcttcaagacctggtacatggatgatagtgatgaagatcaacgactccgccaccacgatgaacccattgagctcgtacaattggaccaactatgcgaacctgaagcacttagcttgaaacttgatgctgctaaccattaaactgactcacatctgttgaagattcctgactagcctctttacacctacataaatggtcgtgccgtctgccc

SEQ ID NO: 222101 - DNA, 452 bp, Glycine max
cgggtggaaaatatgaaacttattacaaatcaatacaacattttgtccatgcaaccagacagaggaaacgccaagccataacacattggaactcaatttgatcttttgcctttggatgacactatggacatgttaaaacaagaaacaagaaaatgttaattgtatcagggtttttataagggattcacttaaagagagccagcatgttgggcaatcttgctttcaagggtacttttggctgccccgaccacactgtcaacctttttgccattcttaacaaagaaaaatgtcggaacactgctaatattccaacctgcaggaacgtccctggcctcatttatgtcaactttcaaaaaaaccacttttgggtacttttcagccaagcttgtttaaataggggaaatgaagcgacaagggccacaccatgttgcagtaaaaacaggatcgccagc

SEQ ID NO: 222102 - DNA, 435 bp, Glycine max
gtgaaggggggaaaaaaagaaccttgtattaaagatttgggaggttatctaacaaataataaccggagatattttaacgcatttgcgcctattgatattactgccttcatacgggctgagaccatctaataggctgctatataaactgaacgcctgggtctaagataaaaatgccaaaaagaagcagctcctttggactcccaggggtctttggaaacattgccttatccttgggcttcttgaacttggggtgcgtgacatgaattcgggcctcacataaacatagaatgtccattccacaacatatacggttcatataacctacagagaactcatacttgggtatctcaaattcttctaagatgacatgatcggctcatgtcattctagaagtatggatccggaaaatgcgtcatcttgtgttgatatcaagga

SEQ ID NO: 222103 - DNA, 561 bp, Glycine max
cgcatttgtaacgacaaagaagcagaaggtgtagtaatactgagtggtcaaattaaggatcgggattcaggaatttccattctgagacacacagaagaacagaaagaaactccttttaatttttcaatttcaagtcaagatcgatctgacatcatagaaaatgaccatggatgtcgttcagctgcagaggaagctgcgcgaacaccaagccgctatgtttcaacagggttttttggatgatcagttcagccagcttcagaaactgcaagatgagagcactccagattttgtgattgaggttatcactatgttctttgatgattctgagaatctcctaaaaaacatggcacgttgtctagaacaagtgccagctgatttcaaacaaatagatgctcatgctcatcagtacaagggaagcagtgccagtattggtgctgctagagttaataatgtgtgcgccaccttcagagctttttgtgaggctaagaaccaggaaggatgtatgagatgtctatcacagttgcgacaggagtactctctactgaagaacgctctacagta

SEQ ID NO: 222104 - DNA, 294 bp, Glycine max
gaaatgaagatggttttttcatataaaaagcacacaacacttgcaagtgggatacttctacgtcttaaatggataaatacattcgtggtttcaaaaagtaaccagagctacaattataacagcttatttacaacacgcttaacaaatttacaaagaaaatcctccagaaagcgtaattagactgcttcggcaaagccaacttggagatttccatagtcaaagacggtgtgatatgccctcatgaaaacatcgccaagaatccacaatggaccctttggaggaggaacatcaaaa

SEQ ID NO: 222105 - DNA, 411 bp, Glycine max
tttctatttctaactaattattgtgcttattattattgttgagaaagaaaagaatggcaaagttaataaaattctttgagttgaacacaggggccaagattccttctgttgggttaggcacttggcaagctgagcctggtgttgtagccaaagctgtcaccacagccattctggttggatacaggcatattgattgtgctcaagcgtataacaatcaagcagagattggttctgctcttaagaagctttttgatgatggtgtggtgaagcgtgaggacttatggatcacctccaaactctggtgttcagatcatgcttcagaagatgtgcccaaagcattggataaaacattgcaggatttgcaacttgattaccttgacctctatctgatccactggccagtgcgcatga

SEQ ID NO: 222106 - DNA, 508 bp, Glycine max
gataaataatataaagccctattattcataatttggagtacaaagcaacattttttccccccctttttccatccatgatactcttatctttgccattgcactgtaaagtgaaaacaatagcttgaattgaataagctaagagcaacccttgcaataatttgtaatctataactacattttgagcacctcttatttagcatatactcaatacacctcttgacatccttcagaaatgggtgtcatcagttggagggtactttgggtatggtggctttccatatggtggcttgtagaccggaggctttttaacaggtggtttgttaattggaggtttctccactgggggcttgtaaactggagcgttctctactggtggctcgttaactggaggcttttttactggtggtttgtacactggaggcttctaaactggaggcttgtatactggtggcttcttaactggggacttgttaactggaggattctcaactggggcttgtaaactggg

SEQ ID NO: 222107 - DNA, 534 bp, Glycine max
  unsure (1)..(534): unsure at all n locations
cgcaagcaaaaagaaagaatcccaggcgaggagaaagatggaggggaaggagcaggatgtgtcgttgggagcgaacaagttccccgagagacagccaattgggacggcggcgcagagccaagacgacggcaaggactaccaggagccggcgccggcgccgctggttgacccgacggagtttacgtcatggtcgttttacagagcagggatagcagagtttgtggccacttttctgtttctctacatcactgtcttaaccgttatgggagtcgccggggctaagtctaagtgtagtaccgttgggattcaaggaatcgcttgggccttcggtggcatgatcttcgccctcgtttactgcaccgctggcatctcagggggacacataaacccggcggtgacatttgngctgtttttggcgaggaagttgtcgttgcccagggcgattttctacatcgtgatgcaatgcttgggtgctatttgtggcgctggcgtggtgaaaggtttcgaggggaaaacaaaaatacgtgcgttgaa

SEQ ID NO: 222108 - DNA, 546 bp, Glycine max
aagtcgatctatattgaatgattgataatcttattaagatgtcacaatgaaggtgaactaaatcattgtttacaatagattaagcaccagcacaaatatgaagaagctcttacaatgatcaatttccatgtcacaaaaagttattaaacggtagtaatgcagggggacaatcagtcctggtagttccatgatggcatattgattaaaccaagggtgttaacagtggatttccaaggaaatgagcgtctaggtttccaaggacaaggtcagccatggcagttcgagtttctattgtgccacttccgacatgaggcaacaagacaacattttcaagcccaaatagctcttctggaacagtaggctcattttcaaacacatctagcccagcaccacccaaacgaccttctagcagagctggcactaactctgcctcatcaacatgcttgcctcgtccaatgttaataagataacccttgggacccagtgcattgatcacctccctgttgatgatgtgatgagttttcttcgtcagtgggcaagcaacta

SEQ ID NO: 222109 - DNA, 494 bp, Glycine max
gaatgggcagctccattttttgccttcaccttatcctttcatcattttttcttgggacttgcttgctggcagctgttaatggcagcaaaaagtgttacattgtatacatgggagctcattctcatggtcccagccctacgtctgctgacctcgaacttgccacggattctcattatgatttactaggttcaatctttggaagtcgggagaaggcgaaagaagcaattatttactcatataatagacacattaatggcttcgctgcgctacttgaggaggaagaagcagcagatattgcaaaaaacccaaatgtggtgtctgtgttcttgagcaaagaacataagttgcacactacccggtcatgggaatttcttggactacacagacgtggccagaactccgcatggcaaaagggaagatttggggaaaatacgataattggtaacattgacacaggtgtttggcctgaatcccaaactttagtgataaaggat

SEQ ID NO: 222110 - DNA, 538 bp, Glycine max
gcaaagaacaaaatactgcattcacttgcatactcacatatgtagtatgttaaaagaaagaaaataaaagttaaaccttccagagcgtacaaatttcaagacttctgattgcagtacccccactggaatcactctctctctctcctaatgtctctaatgagtagacatcccaacccctatccctccaataggagatataaactgctggaacttgttgcactctccaataatcctcacctccatttggacgcagtgctgtaataaattcttcaggcatatcaaaaagctctattgattttagttttgttaggtgctcaatgcctaatggtacctgcttcaatgaatcacagcgctggatgatgagctttttaagaccaggcattgctccctcctccacagtcatagatttcagtccatctaaataatcaagtcctaacaccttcagactaggaaaccccttagccttgaagtgcaatgtctcgccaacataaactttgagaaactcgacatgtcttagatttggcaaatcttgaagatg

SEQ ID NO: 222111 - DNA, 534 bp, Glycine max
gtttttgtgttgttcggtggtagtttttcagctaattgtgttaatatttaattttataatttaattttaaaattacgtaattttcaaaggacaacacacgaacaatcgaaaaacgcacaaaggtggagcctaaacctgtccatcccctcttaatcctatttattgcctctgcagacccaaaattcgggaacggtaaagaacgatgcctccattgacttcgtggctggtgctgcccattctcgtgttgttggcggctccggcaacaacccctccagcacgtgcctcaccggtctcgtcgtccttcgacggtcaacgggagtttgactatttcaagttagcgttgcaatggcccggcacttactgcaaacgcacccgcagttgctgtcccaccaatggttgctgcagaggctccaattctccagcagtattcaccatacatggactctggcctgactataatgatggaagctggccgtcctgttgctctggatctagttttgatccaaaagagatatcaacattgactaatgcttt

SEQ ID NO: 222112 - DNA, 399 bp, Glycine max
aattgagaaattactgacaaataatattagaaatattctcatgttacaaatttagattactccggacagcgtatatcatccacgaagaggattcttattgactaaacgtgcataaagtcaaagaactatagtaaacttcaaagatcaagaggcagattattatttacaaaacaagatgtagctgatggagaaaaataactttatgaccattatctcaggaagttgcgggttcagccccatcgtgtagggcacagcaaattgtagctttatgatgcccttgataaactttaatatcttcaccagttgacatagaccagagcctcgcagttgtatcagaggaagctgtaataagggaggcgccatccacggagaagacacagtcccacacccagcggtggg

SEQ ID NO: 222113 - DNA, 598 bp, Glycine max
  unsure (1)..(598): unsure at all n locations
gttctacatttttttttcttctccctttatctcttgccctttttgttgttggtgaaagagaagccttgagaacaaatttcccgttttcaaaattggagcttttgggtctctgaggtttgatctctgcacaagaaccttgttttctcatctgggtgtgttgcttttgcctctgctggctcgacatggctgtggaaaaacaaagggaagatgagggctgtgaccgttttcctgtgggtatgcgtgttcttgctgtggatgacgacccaatttgcctgaaggtgttagagaatctccttcgcaaatgccagtatcatgttactacaactaatcaggcagttgaagcgctgaaaatgttgagggaaaacagaaataagtttgaccttgttatcagcgatgtgaatatgcctgacattgatggatttaagctccttgagttggtgggacttgaaatggacctacctgtcatcatgttgtcagcacatggtgatacanagctggtgatgaagggtgtcacacatggtgcatgtgactatttgcttgaacctgttcgaatttgagagctgaagacatatggcacatgtagttcgaagaaagattt

SEQ ID NO: 222114 - DNA, 605 bp, Glycine max
  unsure (1)..(605): unsure at all n locations
caactctgaaatttttgtgagtatttggatgatgaattctcgtgtcgttcgaagcgtttcagaatgttttatcaaaccgttgggccaagctaaagagtcaaacctaatatgtcatttaacaccatgggatattgctatgatgtctttgcactacatccagaaaggtctactcttcaagaagcctgcaacacttgttgatccacaagatttcatggagaatctgttagagaagctgaaacactctctttctctcaccctcttccatttctatcctttggcaggccaacttgtcacccaaaaaacccaagaccctccctcttatactatttttgtcgattgcaacaacactagtggagccagattcatctatgcaactttggatatcactatatctgacatactctccccagttgatgtcccacccattgttcactcattctttgaccatcacaaagcagtcaaccatgatggccacaccatgccactgttgtccatccaagtcactgaactattggatggtgttttcataggctgttccatgaaccataccatangtgatggcacttncttatggaaattcttaacacatggtctgagatcttttt

SEQ ID NO: 222115 - DNA, 514 bp, Glycine max
ggataactcaaattgtacatgacaacagttctaaaaagtggtgcttccacaccgcatattacaaatggaacagataaatcctagttttaatttattggatacttccaacatccaataagtttttggcaagcaatcttgcatggccaggaagggaaaaacgtgaatcttctttattgaaaccaaaaaataaaaaatccatgtttcacttcttcaacagcatggcactgcattgtgccattatctttgatgcccttgtaatggcatcagtcatatagaaattctcaactacagtcccgaatgggggtggtgtccaccttctcagagaaggttggtctgagtgaagatggtaatgtggcaggctctctctcatccattttcacaaggtttggggctacagtactgattcgagcacgaacggccccaattgtatcatagggcaaacgcactcctgccaccttagatagagctcgaattatcttccaatcatctctggagtcaccaactgttggaactg

SEQ ID NO: 222116 - DNA, 535 bp, Glycine max
  unsure (1)..(535): unsure at all n locations
aggcaatgttggtacattctgataaaaatatgggtaatgagaaggctgcagaagcctttaagaaacttcaaaatgcatatgagattctaatggattcgttgaagcgaaaagcttatgatgatgagctaaggagagaggagattttgagtgtatttcgtagatttcatgatgcttctcgtaagaatggtaggcatggattctttccttcaggatttgcacgatctgatgcagatggcaaggatccatttggtgattcaaggcgaatagcctgcaaaagatgtgctggctttcatgtctggatacacaccaagaaacaaaagtctcgggcaagatggtgccaggtttcttcttaatcttttttgttctcaatgaagcctangtggcatgcttaactgacagttagttggctaagtctattaataattgcaaaatatttgccagtattctggctctcaagcatgcttttccttaggagagtatntttatatgtatcatggcatgttggactaatgtttatggtggttttttttttttt

SEQ ID NO: 222117 - DNA, 508 bp, Glycine max
gaaacacccaaaatggcatcctcagcctcgaccattctgtcttctcccttcctgcgactagaattgccctcctcaaccaaacaacgctcttcaatctccatcagagcctcggtctccgagaaacccccgctaccggctgtgtcggtgacctccccggagcccagcaagcttccgatccgcaaaatccccggcgactgcgggttcccggtgatcggtcccttcaaggaccgccaagactatttctacaagcaagggcgcgacgagttcttcaagtcccgcatccaaaagtaccagtcaacggtcttccgcaccaacatgccccctggccccttcctcgcccccgacccaaacgtcgtcgttctcctcgatgccaaaagtttccccgtcctcttcgacaactctaaggtcgagaaaaaagacgtcttcactggaaccttcatgccttccaccgaactcaccggcggttaccgagtcctttcttacctcgacccctccgaacccaaacacg

SEQ ID NO: 222118 - DNA, 500 bp, Glycine max
ggcaggaaaattttcccgatttttttaaatcaaagaaagctatgttactatagttgagattaaatcccgtgataatgtagacccataaacgaccacatatcaaaatacaaacatccgttcacagaacaacaaaaagactgtaataaagaaagaaggccggggtaaatgatgaagatgcttcacatatacagtccttctggcaccccttctttcttcttaaacataaccttatcctttgccttcttgaagtcggcatgcgtcaccttcatccggcgttctcgtaaagcaagtaagccagcttcagtacatattgcttttatatcagctccagagaactcatccttagtcataacaaattcttctaagttgacatcatcagctaatgtcatccttgaagtatgtatctggaaaatgcgtcttcttgttttgatatcagggagaggaaatttaatcttcctgtcaattcgaccagggtcgcagcagggttggatcaaggcttt

SEQ ID NO: 222119 - DNA, 512 bp, Glycine max
tcgccgccttacaactcctcctccttcttctttcactcttctcactactcaccagcgcccaatccgaggaccagcgtcaaatccttctgaacctaaaatcctccctccagaattcaaattccaaactccttcactcatggaacgccacgaattccgtttgcaccttccacggagtcacttgcaactccctcaattccgtcaccgaaatcaacctctcgaaccaaactctctccggtgttctccccttcgactcactctgcaaacttccgtccctccaaaaactcgtgttcggtttcaacaacttaaacggcaacgtttcagaggacattagaaactgcgtcaacttgcgctacttggacttgggaaacaatcttttctccggtcccttccccgatatatctcttctcaaacaattgcatacctgtttttaacaagagtggattttcaggaactttccgtggcagtcgcttgtgaacatgacgggtctgttacaatgaagtgtcggagataac

SEQ ID NO: 222120 - DNA, 536 bp, Glycine max
ctgactccgagtctgtctttgttgcgtttcgagtgtctgtggaatccctaaccctaatttattgtgtggcgaaatgggatcaattggggtactcctggtggctcaggtgataccgtacctggagcaagagctggacaagcgctacaagctgtttcgggcgtatgatcagccgcagacggcgcaggttctaagccagcacgcgagctcgatccgtgcggtggtcggaaactcgaacgccggcgccgacgcggagctgatcgaggcgctgccgaagctggagatcgtgtcgagcttcagcgtgggagtggacaggatagacctggacaggtgcaaggagaaaggaattcgcgtcaccaacacgccggacgtgctgaccgatgaagtcgccgacctcgctatcggattgatgctggcgctgctcaggaggatctgcgagtgcgatcgttatgtcaggagcggcaagtggaagaaaggggactacaaactgaccactaagttctctgggaaaactgttggcattattgggctagggagga

SEQ ID NO: 222121 - DNA, 545 bp, Glycine max
gaggagatagtgaaagagctttttcctctaattcgagtgtacaaggatggcagcgtggagcgtcttctaagctctgaaaacgtggcagcctcccctgaagatccccaaactggagtctcatccaaagacatagtcatcgcagacaacccctacgtctccgctcgcattttccttcccaaatcccaccacactaacaacaaactcctttttcgtccaccgctatctcaacatcttggcctcagaagccaacataatagccatctccgtcgacttcagactcctcccacaccaccctatccctgctgcctacgaagacggttggaccaccctcaaatggattgcttcccacgccaacaacaccaacaccaccaacccggagccatggctactcaaccacgccgacttcaccaaagtctacgtaggaggtgaaaccagcggtgctaacatcgcacacaacctgcttttgcgtgcaggtaacgaatcccttcccggggatcttgaaatattgggtggattactatgctgccccttcttctggggctcga

SEQ ID NO: 222122 - DNA, 439 bp, Glycine max
aatatgttgtgcgcttctttattcaaaatcacaactatcacatgtcttaatcataggttcgttcacataaggccaagtttttacacaagatatattttcttttttggtttctaagccttcaagagggggaacttatgtacacctgctaatagttccatctcacctttcaatagcataaaagccagtgagatttaaagtgaaacttgccatcagcagcctccacttgcaggttcaattgaactgagcaacccattgcctcttagctgcgtgcaatgatcttcagcatcagcttggtcacagatgatcacaactgacaatccattgtagtgtgcttcttgcatgatattaactgcattgtcaaaggtcattccagggatgaccttcatcagtacttggacaacgtattcccgtttattaaagttgtcgctgtgcaatatta

SEQ ID NO: 222123 - DNA, 515 bp, Glycine max
cagccattgtttacttttcattgattgagccaaagctttgtattttctgcgataattgtccattgggtggaagaaagtctcaacctttattcgaaagagcaaggatctgagttgagttgagtgatcatgtgtggtggtgcgattatctccgacttcataccggcaggtcccgccagcggcgcgcggcgcgtgaccgccgacatcctgtggccgagtttgaggaagcgcttctcgaagccgctgctggacgatgatttcgaggctgggttcagagaattcaaggatgattcggaaatcgaggatgttgatgacgaggacgatgaagacgaggaggagttgaagaagaagccctttgggttctctcgctccagcaacaaggctgcttctaagcctctctctcgtggatcagcaactgtggaatcaaaggggcaagctgagaagtgtgccaagagaaagaggaagaaccagtatcgtggaatccgtcagcgtccatggggaaagtgggctgctgagat

SEQ ID NO: 222124 - DNA, 503 bp, Glycine max
ctctatttctcagtctctgtttttgcttttgaggattccgaacgagtgaccgggttcgggggtcgcaaagtttaagtaatcatgggtaaggaaaaggttcacatcaacattgtcgtcattggacatgtcgactctgggaagtcaactaccactggtcacttgatctacaagcttggaggtattgacaagcgtgtgattgagaggttcgagaaggaggctgccgagatgaacaagaggtcattcaagtatgcctgggtgctcgacaagctcaaagctgagcgtgaaagaggaattaccattgatattgctttgtggaagtttgaaaccaccaagttctactgcacggtcattgatgctcctggacatcgtgactttatcaagaacatgattactggtaccctccacagccgactgtgctgtccttattattgactccacccttggtggtttggaagctggttttcttaaagatggaccgacccgtgagcatgctcttcttgctt

SEQ ID NO: 222125 - DNA, 537 bp, Glycine max
gatactcaagaacctaatgggtaaatcaattcgggatgacaaaaggcttacaacaataagaagcaacgaaatcaaagattcatacttatatgggctaaaaatgttatactttacaagaataatagcttatgtttttgttaattaacagtcaatagaagtaatcactaatctaaacatggctttatctgtcagtacgaaatagtagtagtaaccaatagttttgttggctttaatacgccaagaatgatccagtgccagtgtaacttgttgccaatgcctttccagctgaggttggctgagagaatgctagttgagaacgttcaagctcaagatccttgcagaaactcttcctcacggcatcaagcaatttgcttgcaattccttttcttctgttagagggagcaacccaaatggccctaatgccacaagcagcggtggttggtttgctatcacagaagattgcaccttccatcctttcagaatcactcaaggaagcaaactttttttcaaccctcctttggaaataacattcccaaa

SEQ ID NO: 222126 - DNA, 462 bp, Glycine max
gttccaaatattttaacaaagtacttaatttatgtggtcgagatttcagtcagtaaaacacatgactaagataaagattaacaaactccagagaccacagaacgagaaattttttctaaaagagtacaatttaacatcacagaatatagagtgaggaaaaagttctactctccaggtgcagagacgccctgcttcagtctctcctttttcatcttcttctttgagattggctttttttttctaggagggagggtcttctgtgcatatgtgtatagtacataatttccaacgaggaatatcaacagcaacccaccaacaagaaggagaacaattaatgctgggttgaacccttttgaacccacgcgatcgaaggaaggagggactttgtcggagaattcgaagtcgtcggccatggaggaacggcgaaaaggaacagatctacggcgggaagaatcacgagct

SEQ ID NO: 222127 - DNA, 505 bp, Glycine max
atttcatcttccactctttcacactttcctatggctgcaatctcaaaactcattggtgtgtctattcttaacaacccttttagtttccctccaagttaatgccagagacaggcaattcttcaacataagttaccccttttcaacaacaacatctaagagactgagactcccaaaaatgaaggccaagtaaacaagccagaacaacaaccaacattcattcctgaaactgaaaacaactatggcctatatggtcacgagactggtcttgaccctgccaccactacaacaactaatgctgcaccctacaccagaccaccacgaggactcctgaagatcacacacctcgagaggacactgtcattggctgaaacaacaacaactactactgcttcaggaaagatggttacaacacctaccaaaatgagttgagtgaaacatcaagactcacaggcacttattacaccaacaacaacaactacttctacagcggtaaggatgcttttgc

SEQ ID NO: 222128 - DNA, 499 bp, Glycine max
gaaaaaaaaattgaacatagtttattcatatcatgtgccgcgcgtgcctagtttattgattgtgaaatctaaaataagaagtggcatggcatgaattatttaaacgtaaaatgaaacaagaggtaaaaagatggattataaaaatagagtgggagctgcatagtagtaaatagtttatatttgatcatcccagagatcagcgagttgtggtttggtgggtccgctgatcaaacggctctggctgatttgacttattttgtgatgatcttgttcagtcaatgcccagtcaaagatgtgcagattctggttcatcctctccttatcgtagctctttggcacaaatgtcacaccttgttcgtacaaccatctcagactcacctgggctatggatttcccatgagcctctgcaatctccttcagcacatcattctccatcacttcatttgggcccctgctcgcacctttcctcagtggagagaacgcagtcactattatccca

SEQ ID NO: 222129 - DNA, 356 bp, Glycine max
ctctatccgttctgatcgcgagctccgccttttttttttttttttatattggcggggtcgggattatattaacatcccacatatactaattcatcagcttatcatatatttcagccctctaaactattgttaagttaacattgttctgttatacgctctatcattaacacctatatatacacgaactactaataacttgtgaatacattattttgctatcctacaccacaaaaactaagacactcccactcttagaatgatacgtaattacctttatccccaaatatgttatatctcattaacatccctcaaacttcttaaatttacatgacacatataaattacacttcatcatt

SEQ ID NO: 222130 - DNA, 394 bp, Glycine max
cgtcgaccttttttttttttaaaagactctggaaaggttcctttaaattgcaataaagggccagctctcattcaatgacaacaaatcaccacgctttctttgtgttcattatgaacaatagctacttgtaaaattttatacatacttgacatacttaccctggtagctttaagatcttaacacgtaaaaggcggaaccaatctgtttgaggagcagtgcatttgtcaacatcttttatgaagcatattgctcaaagatgaccattccaaagctcttcaacggtcttaaaggcaccataggtctcgtcaacaaaaaaaagtgcccttaatcagtactatactgcttaattctagagaacatatccatcacttcttctggaatagaccccgtcaaa

SEQ ID NO: 222131 - DNA, 569 bp, Glycine max
ggtaatagtcgatggtttttcagattttggtttgaagcccaaaattagtggtagtgatatggggactgcatcatctatgttaactcaatacgacatcgaggaagttcaggaacactgcaataatttattttcccagcaggaaattgtgtccttgtatcaaaggttttgtcaacttgaccgcaatgccaagggatttatttccgcagatgagttcttgtctgttcccgaatttgccatgaatccactttctcagaggctgctaaagatggccgacggcttgaattttaaagactttgtggccttcttatctgcattcagtgccaaagccagcgcacaacaaaaaattgagctgtttgctcaaggttcctaagttctctctgactttggtctcaactcaagggaagatgccgttttctgttgcttagcccaagactgaaattcacagttatggtcacattctcagtcagaaaagggttggacttctcgcacataaccacccacccgactatattgggaagtgccatataggttacccaaatttgggctgacctatctaactttatctagtc

SEQ ID NO: 222132 - DNA, 514 bp, Glycine max
acaatgaatgctactactgcctttttgctcattttattgcaacacaacttgccttcataagatccagaaccagccaagaactgaaccaccaactaagccaaacccaaggaaccctgtcatgacaatagcagataactcagattctgacaagggcactgacttgggtgttaaaatcataaggacactagtaagataaccattgctaaatcctagcagaaaagtcagaaccaccattggtacttctgttttcagccactttggtccatgaagacacactacaaagagtggatagaatagtagtcttgctgtggctgcccatattgcccttgtcatagattgcataacatagaaggcagttaaagactttcccattagatcagctaagttataaactgttatcagtaaaataggataccaatcccttagaatcttggattcaagatcttcggctataaatccagggaaaatagacaaagtcactatgtagattatgaaaattccaaacgctgccccc

SEQ ID NO: 222133 - DNA, 434 bp, Glycine max
acccaaactggatattgattgcttttctggaatatatatcgttaatacaacaaaaatagactcgctctatctaacaattgtttttggatctcctttacagaatattacaatgtaacgtacaagtaaaattggttaaaaaaattaacaaaaagcccccccctgtgcaagagcaaaagtgattgaaagccagaaaagaaacggggaaattgaaagggggctaaattcaaaaaaccccaattgcttgctcagctagctaaatggctaggagagttgttgaacatggggtgccacataaatgctcgggaaagcaccatcttaagctcccggggagtccagttttcttttggaaggggttgaaggaacattaccaattcttggaaatgaagtttctggagcttgtctgaccaccttagaaggaagctggccaatatttt

SEQ ID NO: 222134 - DNA, 495 bp, Glycine max
ctgtgttcctactatattttcttttctttattaagtaaagatataaacattatatgttatttacatagcttatcgaaaaaaaaaataggttctttacataaaaacaaggttatgtctagttactgacttaagttgcaaacaacagacaagctcaaaatttgatactctagttacttttatggaaacaatagcaactttctattttccattgctgaaaacaagctgaatgaatattcatcttttgaatccagagagcaaaaataattaatcggtattaagaggaagattgattgtgtgtcaagctgtgctcatctagccaagatattgatgtcaccaaaaacttgagttattattttatcaggctcaccctcaagaagtgcatgataggcattcttgtaaagctgaagctttttgtctgaacagcttgcattctcatacaaggctttgctcactgatggatcagtcacagtgtcagcttccccggaaggatgaatt

SEQ ID NO: 222135 - DNA, 472 bp, Glycine max
aaacattcaaattcactcgggaaaataacgttacattgttcacaaataaacatggctaccagcacgagctatagggcacctaagaaacaggactaacaaatggtaaaaagttaaataatttcgctaaaattaaaaatgcaataaacattaaatacccgatgccagagggctggaatgttgaagtctcatataacttataagcatctaaaagtattcacttgggaccacctccaagtttggtcatcattttcgcaattacaggacctacctttggatttgattggtgcttggcaaaattagcagggttcttcataacatcttgaagagcagccataacctccggatcacttaatgccgccttcagttcaaggtcactcaagattttgctaaaatcaatgtttccaggcacccctccaggaatgccaccagtttctgggaaagcctccccagggaatacccccggcccctggga

SEQ ID NO: 222136 - DNA, 294 bp, Glycine max
ttttgatgttcctcctccaaagggtccattgtggtttcttggcgatgttttcatgagggcatatcacaccgtctttgactatggaaatctccaagttggctttgccgaagcagtctaattacgctttctggaggattttctttgtaaatttgttaagcgtgttgtaaataagctgttataattgtagctctggttactttttgaaaccacgaatgtatttatccatttaagacgtagaagtatcccacttgcaagtgttgtgtgctttttatatgaaaaaaccatcttcatttc

SEQ ID NO: 222137 - DNA, 539 bp, Glycine max
accagaatataacattaaaataaccaaatcgaagaggttcgcaaacaaaatttaagtaaatggaatgtgctgacaaaataactcaaattcactcttgcaaaactaatgttatccaaaagtctagtatttccaaattaaaagacagactaagaactagtagcagtatccaaaaaggctcttccaggttcacgattggccaatggtccatggcacccaagaagctttgcattcacaccatcgggcacaattctgttctttgacttgaacttgaaataatcagaacggctaaacttggagaagccccatttcctgctaactataatcttttgacgaccagggaacttgaacttggcacggcgaagagccttctgagcatgatggctgttgctgtccttgcagcggacagaaagaaggacctgtccaatagccactctagcacaagtaccctgtggctttccaaaagcacctctcattccagtttggagcctatcagcaccagcacacgaaagcatcttgttgatcctaagaacatggaatgg

SEQ ID NO: 222138 - DNA, 559 bp, Glycine max
gggatttgcttttactgatctcagtcttccacctcactgtcctagattgtggggtttctcttttcagttctcatcgtaactaccatagttgctgctccgaaaagggttttcctaacaccgcccatgcaatcaatttccgggttgtacaattcgcgaataggttgttgcttgttctgaaaagtagtggatagtaaaaaatattgaactttttttgagagaaaaatgcagagtaaagaagctgttgtggaagatggggaaataaagagtgtgactgctgtagggtctgaaattgatgggtggaccaattttggggacgatgacataatgcagcagcagtatacaattcagtctgaagaggctaagaaagttccatttgtgggcgacaaggaaccactgagtagcttagctgctgaatataaatcaggcagtcctatcttgctggagaaaataaaggtgcttgatgagcaatacgctgccattcgtcgtactcgaggagatggaaactgcttttttcgaagctgtatgttttcatatcttgagcatgttatgaaatgtcaag

SEQ ID NO: 222139 - DNA, 530 bp, Glycine max
accagaatataacattaaaataaccaaatcgaagaggttcgcaaacaaaatttaagtaaatggaatgtgctgacaaaataactcaaattcactcttgcaaaactaatgttatccaaaagtctagtatttccaaattaaaagacagactaagaacttgtagcagtatccaaaaaggctcttccaggttcacgattggccaatggtccatggcacccaagaagctttgcattcacaccatcgggcacaattctgttctctgacttgaacttgagataatcagaacggctaaacttggtgaagccccatttcctgctaactataatcttttgacgaccagggaacttgaacttggcacggcgaagagccttctgagcatgatggctgttgctggccttgcagcggacagaaagaaagacctgtccaatagcccacttagcacaagtaccctgtggctttccaaaagaccctttattccagtttggagcctattaccaccacacaccaaagcattttgttgatcctaagaacat

SEQ ID NO: 222140 - DNA, 550 bp, Glycine max
aactcctctctcttgggaatcccagatctccaaaccagtgttcaagccccaccttcatatggttctagatggcaaaaccaagttcagctgatggtaggactagaagttctgtgcagatctttatagtagttggtctgtgctgtttcttctatattttaggtgcgtggcagagaagtggtttcggaaagggagatagcatagcattggagattactaagactaacacagaatgtaatatagttccaaatttaagttttgattcccaccatggtggagaagttaacgaatttgatgaagctgattcaaagcctaaggtatttgagccatgtgctgctcgctataccgattacactccctgtcaagatcaaaagcgtgccatgacctttcctagagaaaacatggtctatagagagagacactgccccccagaagaagagaagttgcagtgtatgatccctgcacccaaggggtatgtaacaccatttccatggccgaagagccgtgattatgttccgtatgctaatgctccctacaagagccttacagttga

SEQ ID NO: 222141 - DNA, 583 bp, Glycine max
ctcgagccgctcttttccaccgcctcctcgcccccgatcctcctcgccatctccgccgtcctcgtcctcttcgccgtagtctacctccgcgtgtcctggaccctcgcccccgtcgtcgcagtcgtcgagtccacttggggcctccaatctctttgccgaagcgccgccctcacaaaaggaatgagacccctcgccgcctcctgcttcctcttcttcgcctccatgcaggccctcctcctctggaccgcctccgtcgacggctgggcctggaaagactgggccttcgtcgtccagatcgtcctcacttctactctcctcatgctcctcatgctctacaacgccgccgccgacaccgtcctctacatgtactgcaaggccgtccacggcgagctcgcgcttgagatcgccgaggagtttgcgtggcagtacgtttgcttgccatttgatgatggcaaggtgcctcacgttgtttccgttgtccgtgtgtagtgtagcgtgctggtttggggaaactttttttgtaacatagcgagtgtaagtgttatctatcccaagcctttagtagtgtaaactagtggattaa

SEQ ID NO: 222142 - DNA, 501 bp, Glycine max
accatatatatatagagagagagaatacgaagcacactgatcacaggatgatgctctctttaagtagggaagcagatcttatcagtacacataggtaggttgaaattctagctctagcaatctagctagagaaggtagtacttgcacaacacacagcacatgataatttattttatacacaatctcattctcatggtgctcaagatgcatggactaattaagcaacaatgttggtctgataggcagtgtccacagataaattgggtacccataaaatggccttgcttccaaggaaatggcaaacagggttagttccaggatcaactcccataagttgatgaagcatttgatgattcattccagaagtatttgagtggcaaatagcaagtgcctgagttttggttccattaccagccaccaatggaaccatgaaagctgttgtttcacggacttatggcagtaaaaactgcagttctgaatttagcctttacacataactgt

SEQ ID NO: 222143 - DNA, 460 bp, Glycine max
ctcgagccgcgaaaattagggtttgttgtgtttcacgaacaagcagcaatggcgccgagggtaacacgcatggttagcagaaaccccgaattgataaggggaattggaaagtactccatgtcgcaaatgtaccacatgaggggcatttgggctatcaaggccaaaaatggtggagatctacctcgccacgaccctaaacccaaacctgaaacaccctttgaaaaaccacccaaattttaccctgctgatgatatcaagaagccccttgtgaacaagcacagacccaaacccgctaagctcagggctagcattactccgggaacagaagcgattcttcttgctggtagatttaagggaaagagggtagtctttttgaagcagcttccttctggattgcttcttgtaactggtcctttcaaggttaatggagttcctttgagacgtgtgaatcatgcctatg

SEQ ID NO: 222144 - DNA, 425 bp, Glycine max
ggtgctctagcaccaaataccaaggtttgtttggtagatagcacaaacaatggtggggcggggtgtatcacgcaaagggatcaaaagcccccaattgatattgagaatagaaaagaacttcgaggcctagatgttccgcactaggggcatgtgggctttcaaggccgaaaatggtggtcgccttaccttctcagaaccctaaaccacagacctgacacagccggtgaaaaaccaccccacttttaccctgctgaacatatcaagaagccccttgtcaacacgcacgaacgcaaacccgatcagcacagggctagcgttactccgggaacagagtagattcttctcggtggtagacttaacggaaagaagcgcagccctataaaacaccctccttctggattgtattttgacacaggaactttcaa

SEQ ID NO: 222145 - DNA, 605 bp, Glycine max
gaaaaaaaaaagaaagaaaggcagcacgtattatttcaattggtaaataagaaaaaaaatatgatatcaatcaggctaacaaaattaaacatgaaatcaaagacaaagaaacttcaaacttttgaattgaaacaccatggcgataaaccctatcactcccaggaaaggaagacacatatttcctttttctccatttctgcactttgtgtcgaacttgagtgacacaatttagtagaaagtggtatggttgaacctaatccttgtacttcatttcagataccaggaagccaggcatgtcaaacaaggcagagaacttctcaacatcagctttgagatcttcaatagccttgttgttgacgagacccttgttgaaatccttgagaagtttgccatgctccttctggatctccagtgtgagagtcacagcacggtgaaggaactcaccaatctgctcaaagtctttttcaaccaaacccctagaagtcatggcaggggcaccaattcgcactccaccaggggccaaggcactgctatcaccaaaacagcgttctggtaacagtaatgttccagagatcacagagttctccaccttatcccagtcaatc

SEQ ID NO: 222146 - DNA, 500 bp, Glycine max
agacattattcatggggcacggtttgcgtaaagatggcagattacagataaagcgtgataatttaacatatttacagccacaaatgaaaacctgttcaatgtcctctccctccaaccaaccctctcctgtctcctaacacaaccttaacaaaccaaaaaaatacatacttcaaatcacaaacaacactgctggggccaatatcctatcctttttcacccaaaaatggggtattcgggaaaagaattacaatttagagaaaagttaaaattaaaaaattgacttctttatcaaattttcctttccaaagtaaaaattgacatttctaaagtagtcatctaccgtcattgtttttcattgtttaaatgcagtgacccgtccctcatcaacgtaaggctgagactggcaaacctctctcgtgagtactgtcttgatgcttatatacaatctgtgccagccttcatcatagtagaaaaatcggcgcaacttatccttccatcct

SEQ ID NO: 222147 - DNA, 500 bp, Glycine max
  unsure (1)..(500): unsure at all n locations
caacagaactctctagaacctctctcacacaatagcaaagaagggaagactaaaactaaaaccccactctctttttccgagtcttccagtgaaagaaaggcagcgatggaagaagacttcgacatccccggcggcgaggaaatggatctcggcgaagacgaggtcggcgaggagagggagatcggctctggcggcctcaagaagaagctcctcaaggaaggtcaaggctgggaaacccccgaagtcggtgacgaagtccaagttcattacacggggactttgctcgacgggactaagttcgattcgagccgcgacagggattctcccttcagcttcacgctcggacaagggcaagtaattaaaggatgggatgaaggtattaaaaccatgaagaaaagtgaaaatgctattttcaccatcccttccgagctagctgatggtgaatctggttcccctcctactattcctnctaatgctacactccaattngatgttgagct

SEQ ID NO: 222148 - DNA, 547 bp, Glycine max
gaataaaatttgttatttccgcttagattaaacaccaatcagatttattgaagcttgcaacgcaaagtcactcaaccagcggtcttcaaccataaatggggagaacgcataacctctaattcaaagatcagtaatttgtagagcataatcccaaagaaaaccaaaataataatcaattagtttaggcaaataattcaactgctcatcttcccaatggaactgcataagtcagacaatacaaggcatagctaaaagagaccgtctgagttagcctaattgcatgaagtatttctggctcaaaagatgaacaccctagatatccatggctcagaattttataatagcctttagtctttgccaaaatcagcactgtagtgagcactggattcaagtttctttgcatcattcagttttctaacagccttcataaaatcttcatggatcacatattcgcgttctgcacgaattgctgccattccagcttccgtgcacacatttcgaagatcagcttcattaaagccctcagcaaggttcacaacagcttcgt

SEQ ID NO: 222149 - DNA, 523 bp, Glycine max
caaaggcaaaaaacaaaaatacaagatgaagagcaagttcctttttgttttcctattcttgggaattcttaactgtgaagcacaatatttcaatgccaacccatacgactatttacaactagccttaaggtggcctaattcctattgcttgacacatgaaggtggttgcaggggaaatagtaccacaatatttcactattagctaccttcatcccatgagaagaggaggccctgatctgcgaaattgcccctcaccatttaatatgccaaatagcactatggagacaaacaagaatgacctactcaaatactggcctgatctgagaactgataattttattgagagcaagtcattatggagggaccaatggagaatgtttggttcatgctatagtatgatgccagatgactatattgtttatgcactcaacagtagaaagagaaatgacctcaagaaaatcttgacaaatgcaggtattgttgcaagtggaaatccatatccaacacgtaggatactacaagc

SEQ ID NO: 222150 - DNA, 566 bp, Glycine max
  unsure (1)..(566): unsure at all n locations
aacatgaattctaatttattgcctatatcaggtagctaaatttaaatgttcaatatttttcaggaacatcataaacattgttcacaacatcagagcatcaacaaatacatttttattccttgagccactccacaaacttgttaaaattctcataggattgtcccccttctgcaatgttacttagaaccatttccttcagtttttgagaccttccccttatgttctcatctccaaggatttggtctactttcttctttatctcccaacgtgatatcagccctttgtcatccaaatcgaatcccaaacccaccttccacatatcacaaatgtaagccttgtcaactaattggtcagtataatatggccaacacaagaaaggtaccccattggacacaccttccaaggtagaattccaaccacagtgactaataaaacaagctattgcagggtggcttaacaccttttgttgaggtgcccatttaacaattttaccacaagtgccttggaattcatctgggtatgtgatnttggtgcttccactggcatcctnacgaacaacccacaga

SEQ ID NO: 222151 - DNA, 543 bp, Glycine max
aacaatagaaagtaaagaaatttattcaaggaaactgggatttatacaatattgatattgtatatgcaaatccacacccagtactacatttggccttgtggacatacgacaaatattattaattttaacatgcatagacttacacaccgaaattatgagtattagatcctcacccaaatataccaaataaaatattgttaataactttcaactttgctggcgagtgggcgggctttacacatagcctccaatggaattaaccttgacaaggtgatccaattattctctgtcatatcaagcttcttctcacttactcgtttccagtcaaaacattgaatcattaatcccaaagtatagctaacactttgcatagccatgggttctcctgggcaagcccttcttcccataccaaatgctaccaatttcttgtgctctccttcttcatcaaacctcttaggtttaaagcttgacgcatctttccatatcttaggatctctttgcatggcccaaccattaataatcacaattgtgtctcgtggaaca

SEQ ID NO: 222152 - DNA, 368 bp, Glycine max
aatagagaaatttttcactataggtcaccaaacaaattacaggaataaacttgatatcatatcttagagttccaacacttatttttgaataaaaaaactgtaggtgggattttagaataattttaatagcataagagataggcaaaaccaaaacatagttttagttcacatgtctatcctgagactgctcagcaccagatacccacttatgaaggcatatggcagcagagtaatttgaaccacatgcaatatatttcacatgtctatcctttaatgcttcaaccaaagccggtgttttacgatcttcaatatctccatgacccagactcccatttgcgacctttccccaagggttaaccttatttttg

SEQ ID NO: 222153 - DNA, 430 bp, Glycine max
aaaagatgtgggaaaatgaaaactttcaattcaactgcagcattattatttacacgaaaacggttcttccatcccctcattgatttcatgatttcattctagttgggaacctcctttatggctttatgactttatcaaccacatacttgctattcatttcctttcacaaacccgaacccgaaccggcaacccgcctctcaaagtagcggttaaaccgggctcgaaccggggctcctggcccgatggaacgacccgaatatcaaacctccgaaccaacgcaagcacaacggacttcatctccatcaaagccaagtcctttcccaaacacacccttaccccagcctgaaaaacagggttcttaaaaggacacgctggcacgaacactccattacgcagccatttttcgggcctgaactcgagacaatcgctt

SEQ ID NO: 222154 - DNA, 443 bp, Glycine max
aagagagaaacatatactatattcaatcattttggggtaatacagtataattttcttccctaaactgataatttctttagtaaagacaccaaagtaaattgcatagctatacttattgctcatcttcagttttaacttattgtgcacacatcactcgggtcgtgctcttacatacagctctcgtttgtgttctgaattacactcaggcagcaagtaacttctggatatccttctcaatttgaaaaggagacgttgttggtgggtatctttcaataactttaccatttttgtcaaccaagaatttctcaaaattccactttataagatcacccaaaaagcctccagcactcgatttcagaaactggtacactggagttgtaaatggtccattgacatcaaccttatcaaaaattggaaattctgctttatatcgagtgcaagca

SEQ ID NO: 222155 - DNA, 424 bp, Glycine max
aattgctcatcctagttatttgcacaaaactggtaatatttcatatcaataaggattgcggcaaagccgcaaagatacaacattcattacggaaaacaaggagttgggaaaaataaggggagaggggttgaggaagaatcaattgctcacagagcatgctaaaacatctaaatattccacacacggttattgaaacaacccaatatagaaaatttttctttggtgtattataaaagcagaaccaatgaacttggagattctactttcttataccattcacttggcaagttcgttacggatgagttttgctgcggcaaccatgtttgtgagggctggcttcacttcagtgtacttgcgggtcttgagaccacagtcagggttgacccacaagatgttcttctcgagcactgcaagcatcttaatg

SEQ ID NO: 222156 - DNA, 476 bp, Glycine max
ggaacaagaccaatgatatatatgaaacccgagtcatttcaataaagtcagcatcatgaaatgaacacaataataaagataagagaacgattatgagcacgtattttcattaatcgaaacccacacaatagcacagaacaacaaacctatgaatcagcttagtttggccatcaagccacaccaacattgtcaagaggttcaattgcacaagaaacaaagtccactggactaaaacaatgcagctatctattttacacatgatacatcacatggtaggtttgaatcacaatgatgaattagttccctggaggaccaccaaagaggtaattcaaggaagatccgccacctggggcagcatgaaccttggtagatggccgatcagtaagaaagttgccacagttttgcccatcagcacgatggtaattgtttttaagacttccaggaatttcagctggaagttgcttatcaattggtga

SEQ ID NO: 222157 - DNA, 425 bp, Glycine max
aaaaagaaagaggctatatatttattctttgaaatagcaaatgtcaaaaacaacctaggatttcaaagggggaaaaccctgattaccacttataagcctcattttgaaacaaaatcctaattaacagcgatatagctcaatgacaaacaaaacaaggagtccacaccacacacaattttccccaaagattctgggtctcacatacatgaatctattttgaagcaggggggctttcatagaagcctttaacaaacacataatttttagaaatactaagtctcacaccccatcatcaaatctattttgaaccaaaaaggctttcatagagacccttgaaaaaggagaaaaccggatctttagggggcagactttctttgacaattggatgggtcaaaaattcttggctccaattggggagcttagga

SEQ ID NO: 222158 - DNA, 490 bp, Glycine max
ccactgcagggttttccaagtccaatctcagttcacttctcgccagggtttaatctgaatttcttttgtgttgccactgaggttattattatttttcttccaaaatggcgacggtgatgcaaaaaatcaaagacatcgaagatgagatggcaaggacccaaaaaaacaaggctactgctcatcatttgggcttgctgaaggctaaactagcaaagctgcggagggaactccttacaccttcatcaaaaggagctggaggtgctggtgaaggttttgatgttactaaaagtggggattcaagagttggtcttgtgggcttcccttcagtcggcaaatctactctactgaataagttgaccgggacattttctgaggttgcttcctatgagtttactaccttaacttgcatcccaggtgtgatcacatatcgtggagctaaaatccagttgttggatctccccggaattatcgagggtgctaaagatggaaa

SEQ ID NO: 222159 - DNA, 412 bp, Glycine max
aaaaaaaaaaaaaccctccctttcccccaaggaaggggggggaccccgccatttttacgcgcaaaccctccccagaggggaacggaaaaccttataccaacccgaaaagccctcccggaaaaaccccccccctaaacaaaaagggggttttgaaaacccccaaaaaggaaccccccttctttaaaccacccccgggtgggaacaccgcccctttctccgggggggggcccgggaaattttttggggaaacaaaaaattttgttttggggaagacccccacccccccccccggggaaacaaagtcagaccccccccagaagcggtgtgatgtgctcccccttttgatggagctcccccccccaggcccgggccttgcgtggataaaccccctaaattcccccaaagccccccc

SEQ ID NO: 222160 - DNA, 558 bp, Glycine max
aatataaaaaaccattacactctttctaatagaaagggggagaatataaaattatacaagattaaaacatttgatattggattgtgcatgtgctataagaggcagggaaaatttgatattgcagggatgacatatttgaaattaagcacagtttgtagaacatgcatgagctaagaggcagctaaagtaaaatgtttttttttattcctacataatattgataatgcagccttttttcaagcaaacatcttccattggtccgtcagttaaaaatccttgacgtgcatcattcatcaacgactaccgtctcaagctctccactatgtagtccgcatacaagctcatggatctattaaccgcttcgaaagcagctgaggcaggcaaaaagtcgtttactgcgacttccttgttttcattcttcttgtaggcttcaaaaaaacgacgaatttcagctaaacgatgtggaggaagctccttgatatcattgaaatgtcgatactcgggatcatcagcacagacagcaattatcttatcatctttttccccctgatcaatcat

SEQ ID NO: 222161 - DNA, 453 bp, Glycine max
ggcacccatctaagattacccaataagaagcaactctcaatttctgattttcgaattcgcagacatttcttcaatcgagtgtttccagtggtatcatccaagaggaacgtaggggaagataaagagatgacgataaaacctgttgttcgtgtttcggaggggaagctggtggtgaaggagcgaacgattttgaccggaatgccggagaacgtggtggagacatcgacggtggaaggaatgtttctcggagtggatttcgagaaggaagacagtaggcaggtggtttcgttgggaacgttgaaggacgtccggttcatggcgtgcttccggttcaagctgtggtggatggcccagaaaatgggagatcgaggaagggacattccgttggagactcaatttctgttggtggaaaccaaagatgggtcccacctggagtcagataacgacaaaaac

SEQ ID NO: 222162 - DNA, 308 bp, Glycine max
gcgaaacgctcttcgttatcttttctcagactccgcggcgtagatccgaggagttcgggaaatcctaactcatcatctcaactcaagtcatggctggacttgcacctgagggatcacagttcgatgctcgtcaatatgattctaaaatgagtgacttactttcatctgatggacaggactttttcacatcctatgacgaggtttatgatagttttgacgctatgggtttgcaggaaaatcttctcaagggaatttacgcatatggttttgagaagccatctgcccatcagcaaaagggggatagtttc

SEQ ID NO: 222163 - DNA, 521 bp, Glycine max
acaccaattgtggcaattttgggtttccacatagcaagtaagaactactgggatattcagacaaactcgcagtttaaattaaattactaagcctattaaacaaagtttaagagcggaagtacaaccaaagaaacgaaaggggggggagacaggttagagtgagaaacattacataacagtttccaaacgcaaactaatttcatctactacgacggaggacaaaatctgatcaaaggagctcagcaacatttgaaggcagctcctcaacttgcacgttgtaaaacttctggatgtcaaacagcattttctcgtcatcctttgggacaaaattgatcgcaacaccttttcttccgaaccttccactacgaccaatacggtggagatagttctcaggctgtgtagggagatcaaagtttataactagagacacttgttgcacattaataccacgagccaaaagatcagtggtttttaagacacgggaagacccagaacggaattcacgcataataatgagcctg

SEQ ID NO: 222164 - DNA, 502 bp, Glycine max
gagcaataacttattttattgttcaagtagaaacggggaaaagtacattaaaaaaaaaagagaaaaataaaatcgcaataaaaacataatgacacgctgtttttttaaacttcaaaagggtctttgacaaaatcaagaacaacccatgagaatcttctgcttaatcgacttcctcaattttgggtccagcaccgcttccactgccagctgcaggaccatcctcatccatggctccacccgcattaccaccagcaccctggtacatctttgctatgatgggattacaaatgctctccaactccttcatcttatcctcaaattcgtcagcctcagcaagttggtttccatctagccattggatagcctgctcaatcgcatcttcaattttcttcttatcatcagaagacagtttggaagcaatcttgtcatccttgattgtgttcctcatgttataggcataattttccaatgcatttttggcctccactttcttcttatgctc

SEQ ID NO: 222165 - DNA, 493 bp, Glycine max
aaaataaaacaagtaatccattcagagtgtcacaaatacaatcaaggaactaatcatgtcataatttacatccatacaatggattaaaacaaaaagattcacatgaatttccaaatgaagaagactccagatacataaataacaactaatacaagcaagcacatacaaaaacaagagcctaagcccttgtcttgaaagggatggctcggatgactatctggtgatacacagcagcaagggcagctccaatgaaaggtccaacccagaaaatccattggtcatcccatgcatggtctcttgtagatgatggcagctccgagactcctagctgggttaatgccagttcctgtgatgggaatggtagccaagtggaccaagaacacagcaaattcgatgggaagtggagccaaaataggaacgtgtgagtctctagcgtttctcttggcatcagtggcagagaaaacggtgtagacaagaacaaaagtgccaacaa

SEQ ID NO: 222166 - DNA, 537 bp, Glycine max
  unsure (1)..(537): unsure at all n locations
cagagatctagcgtattctctcgctctttctttcactgtcacagagccacatccatgggcttcccagccaacggcgcctctgcggcccagcccctaaacttcctcatctacggccgcacgggctggattggcggcctcctcggctccctctgccgggcccagggcatctccttccattacggctcgggccgcctcgagaaccgggcctccctcgaaaccgacatagccctcctcaagccctcccacgtcttcaacgccgccggcgtcacgggccgccccaacgtcgactggtgcgagtcccacaaagtcgagaccatccgaaccaacgtcgtcggaaccctcactctcgccgacgtctgccgcgaccacggcctcattctcatcaactacgccaccggttgcattttcgagtacgactccgatcaccncctcggatccggtatcggcttcaaagaaaccgactctcccaatttcaccggttctttttactccaagaccaaggcaatggtagaggatctgctgaagaactatgataat

SEQ ID NO: 222167 - DNA, 518 bp, Glycine max
gtcaatcacgattcggttaaaatacaacatacaaataaaaataagggagagtgacatctacacaaaatccacacaaacttaaatcaaacgaggacaataataataataataataatgatgatgataaaaatgagaaaagcttgaacctttagacttgagctttaaccttctggtttggctcgaagacatacttaataagagaatccttaatagacaacagttctggaaattccttcttcaatttggcagcgtcaagctcattgttgctcctcggagcaacaatcaccttggcctgttcctcgagagtgaagttgttccaggtgaagttcgggtcaacataatctctgtacatctccaagatttcattgtgactaaccactcctgggttagtaaagttccagatcccagtcagattcctcttccccatctcaattgaaattggaagcagttcatccaatatagtcatcgaattcggaatatccacaaccttctcatatcgagtgatcttagtgataaaa

SEQ ID NO: 222168 - DNA, 520 bp, Glycine max
gctatgcaaaattaactgattggtcacttagtatgaaatttaataggacagtcagcggcgataaaaggaaaagaagaaaattataaataaaacactcatctagaaaagaagaatatcaattactcccctacagaatgactactacaatacaaccacgcaagatggtagtataaaaccattcaaaactgagtatcttatttgtataaacctccattcccactttcaacgagttcacagaagaatctgtaaacgaatggtatatacacgtaatagcataaagaaggaacccgctgtacgtatagtcacagtggaattgcaacccaaaaaccaagaaaatttcctgatatcctcatcttaaggcatttacaaatgccattaaggaatcaacatctttcttttctgagggatactttattgttggccgaaacgaatgctttgggaaaaataatatcctagggaagctttccaattgcagttaactctttgcaaattctttccggtctccatctgctctaaattt

SEQ ID NO: 222169 - DNA, 437 bp, Glycine max
ttcgttctttttttttttttttttttttatttttttttttttttttgagaattgatgagacgggtaaaattgttttccagtacaaaagcgcaactacatttaaaagcttctttctattagacataagtacttcctaatgtcattggcgttgctctagcacagggtgataaactattacacaactgattgatagaacatactgaaaactaagtgcacactttcaaaatggtaccacttcccttgaacgttcactgcgtacgatactggccatgttaactagaacaacatcaacgctacatagctctcattgacattagaaacacatttagaatccatcttatatgatgcgaccattttatactatatgaccacccttgtgatgtggaagggaaaatgaatatgaactcgctattattactaggagagtttccacctta

SEQ ID NO: 222170 - DNA, 392 bp, Glycine max
gggaggcttaatgacttgtgggcttttgatgttgttgagaacaagtgggtggagtttccttctcccggtgagaattgcaaggggagaggtgggccgggcttggttgtggctcgagggaaaatatgggttgtgtatggcttcgctggaatggagatggatgatgtgcattgctttgatccagcccagaaaacttgggcccaagttgagactagtgggcaaaagcccaccgcccgcagtgtgttttgcagtttcagtgatgggaaacatataattgtgtatggtggggaaattgatcctagcgaccaaggtcacatgggtgctggtcaattttctggtgaggtttatgcattggacatggagacactagcatggaagaggttggaggataaggt

SEQ ID NO: 222171 - DNA, 414 bp, Glycine max
cgcgtcgctgctccgtaccagtttcactgcataaatttgagagaaaactctgcaaacatgttggtttatcaggacctccttacaggtgatgagcttctctcggactccttccgttacaatgaaattgagaatggaatgctgtgggaagttgaggggaagtgggttgttaagggagcagttgatgttgacattggtgcaaacccttctgctgagggtggagaagatgagggagtcgatgacgcagctgttaaggttgttgacattgttgatacattcagacttcaggagcaacccgcttttgataagaaacagtttgttaccttcatgaagaggtttatcaagaatttgactcccaagctcgatgcaaagaaacaagagttgtttaagaagcacattgagggagcaactaaatac

SEQ ID NO: 222172 - DNA, 527 bp, Glycine max
gctcttgaaaccatctttaaattgcaaataccattctgatacaagaatagatgcattacaaagctaacaacaccaaccaactttcaccaaacccgcactttaaaaacaacaggggccaacatatatattttcaccaatcacatgaaagagtccttcaaattgcagagatgtccaataactcaagtcacccaccacatataacaatataataagaacaccaataaaatgtgaaggaaactcggatcatttcatgatgaaattgggcataacttcatctcagggcatggaacttcaacttcaaatcttagatcttatcaagcttttcagccttgacaactgggtttgctttagctatagcatcttgagcggcagtgcggtaatcaaatgggcaattatgcttgtctgagtagcgatgtacagcacaaaaaaggtcaccacatcgacaattaaaccctgtcaaaccaactcgcttgttgcagctgctgcaacgttttggtccatcctttcgctttgcctcaacactcccc

SEQ ID NO: 222173 - DNA, 470 bp, Glycine max
gactcgatcttcgttagactgatgttacggaacgcgaacgcggaaagcactttgaaaagcaccgaagttcccttgtcgtgtgcgaaaacaatgctcgtcttgaaaggacggtccgtgcgcggaatgataggctctctcgccagcatcacgaaccgcgtgacgttgctcggatcgtcttggattccgtccgccatcacgttcaggccgtagagctccgccgctcgtgcgctcgcgatggcggcggtgtcgcggaggttattcgtggcgacgaactcggcggcgccggcggtgtcgtccacggcctcgcgcgccacgttcaggccgagtttggtgagagtgtgctcgcactgcgcgagtgcctgcggatgcgaaatcactcgcgtgaggaactcctttcggacgccggggagcgcgaggaggcaatggtggaccgggagctggacctcgccgactatgtggaggcggtggcg

SEQ ID NO: 222174 - DNA, 511 bp, Glycine max
gaaaataacatattaacttatatatattaaatttactctaaaataacccggccacatacattttatttattacattatatagtagttatttgtagttctattgcataggggtgattgaaacattgatcaaagtcataaggattcaataactgatgtgaaatgatcttccatgttctgaaactagttcgtgttgtaccatgatttcttctgaagctcatcaattattttctgatccacttgaaaagctttggtgagaacctcaggagaaataggtggattggctttaaacaaagcatttgcaatagtgatagttcctgcattttgactgccaagagcagcaatggcaacagcattgccatatcccacattgagttggaaatgaatgagaccaattgggaacacaaacacatcacccttgttcaacactttggtaaagagacgatttccatcttgattggaagtgacaaatccaacatagagagttcctttaaggactaaaaggatttcggtg

SEQ ID NO: 222175 - DNA, 358 bp, Glycine max
aactagaacactttttgtttgatattgatattaaaagacacattggtggggcatacatacaaacagagagtacatgtttttagggggatcccgtaaaaaattccaaaagaacatgcaaataacaaaattgggggaagaggagagaaacacacagagtaagagacgtggaaagttatggattttagacatattataagggcaacgcttaaaaaacttccagcatagagcaggggaatgaattacttagggcttctcccacttgaggggtttgaccactttccatgtgaagtcagggttttcttttccaaagggttcataggcagcagtctttaaaaacctgttatttcccccccttttg

SEQ ID NO: 222176 - DNA, 538 bp, Glycine max
gcgcgaagagggtagttgtggacgcgcggcaccacatgctggggaggctggcatcgatcgtggcgaaggaacttctgaatgggcagaaggtggtggtggtgcggtgcgaggagatttgcatctccggtgggctcgtcaggcagaagatgaagtacttgcgtttcctccgcaagcgcatgaacaccaagccctctcacggccccatccatttccgtgcacccggcaagatcttctggcgcaccgttcgtgggatgataccacacaagacaaagcgcggggaagctgctcttgcacgactgaaggtgtacgagggcattcctcctccttatgacaagaccaagaggatggttgtccctgatgctctcaaggtgttgaggcttcagaagggacacaaatactgtcatctgggccaattgtcatctgaggttggatggaactactatgataccatcagggaacttgagaagaaaaggaaggagagagcacaattgtgttatgagaggaagaagcagcttgccaaattgagggtgaaagctga

SEQ ID NO: 222177 - DNA, 385 bp, Glycine max
ggggcttcacatgaaaccatatataaagaaacttaataagatgacataaaattctagagcaaaaaaattaaaacaacgttcaagattatcatatctagcgtccaaaatgaccagcaaaactgaaatgtagttcaattcgttatacacctcaaaccaaaacttgaaacactaactagatactacttaatacttaacaggagcaaggatttcaatttgggaaccaagcttctcctctgcaaccttctcagctttcaccctcaatttggcaagctgcttcttcctctcataacacaattgtgctctctccttccttttcttctcaagttccctgatggtatcatagtagttccatccaacctcagatgacaattggcccagatgacag

SEQ ID NO: 222178 - DNA, 421 bp, Glycine max
ctcgagccgctcagttttctctaaaagagatctttttctgctctttgaagaaagaagggtctttgcttgattttggagatgtctctgctctcagatctcatcaaccttaacctcttcgctaccaccgagtaggtgatcgcagagtacatatggatcggtggatcaggaatggacctgaggagcaaagcatggactctcccaggaccagttagcgacccttcagagcttcccaagtggaactatgatggttccagcacaggtcaagctcctggtgaagacagtgaagtgattttatacccacaagccattttcagggatccattcagaaggggtaacaatatcttggttatctgtgatgcctacactcctgctggagaacctattcccactaacaagaggcacgctgcttccaatgttttca

SEQ ID NO: 222179 - DNA, 461 bp, Glycine max
gaacatgactatttcatatattattattatacttcacaatcagcatttctttgttcaagactgataataaccattaaattattgtcattgtaacaatcggaaaacgagggaaaggaatagaagaaaacattgaacaacccttgccagttagttgcaccaaccaacaaggcaccaaccatagtaccaatcaaaaggtaaaaagagagagagaccaaatcctactaagaaaagcataactgttcctttccatccaaagggagaaaacatgcaggttttgctcatggcttccacagaatggttgtgtctgcaatcatggaagtaaccacgtatgggtccatgttggaagctggccttctgtcctcaaaatatcccttccctgctttctctgtgtctctcccaaccctaacagaagctccacggtttgcaactccccataagaaggtgttgatgtcagcggtttc

SEQ ID NO: 222180 - DNA, 508 bp, Glycine max
ggccgtcgacgttctcaccgccatggccgtccccgtcgagctctctgaccgcgactccctcgtgaagtccgctagcacatccctcaacagcaaggtcgtcagccagtactccacgctcctggctcccctcgccgtcgatgccgttctttccgtcgtcgatgccgccaagcccgacatggtcgacctccgcgatgtgaagatcgtgaagaagctcggcggcaccgtcgacgacaccgagctcgtgaaaggtctcgtctttgacaagaaggtcagccacgccgccgggggacccacccgcatggagaacgccaagatcgccgtcatacagttccagatttcgcctcccaaaacagacatcgaacagagcattgtggtgagtgattactctcagatggataggattctaaaggaagagcgtagttatattctcggcatgattaagaagatcaaggccactggttgtaatgtgttgttgattcaaaagagtattttgagggatgctgttact

SEQ ID NO: 222181 - DNA, 525 bp, Glycine max
agcagtggtgttcataaaaatcatcaactattgataaacccccaacacttctgaatctgatgacttgagcaagcatcacaatccatgaggacattcaaaattgtaaataacagcagcagccaaagtcaaaagaacttaaccaaagtagctagaaagaacataaactaccaacataaaattaaagcacgaagtacaaaaaaaaaaaaaaaaagataatgggtgattcagtttctctctaaattccacattgttcaatcaactctacctcacagttacaatatcatcaatcttcaaaatcatccgcacacactctgtcgccaacatgatcgcacttgtgctcacaagaaggggctgcaccacattctcctccaagatgttggtaatctgacccttcctcacatttattccagcatttatctcaccctgtgcatgacgattcctcagctcggtaacaatggcagtcgggttcaaaccagcattctcagccagagtatagggaataacttcaagcgcctcagcaaatgc

SEQ ID NO: 222182 - DNA, 547 bp, Glycine max
gagaattaggtttttagggtttacaccgagcagccacacctcccgcagcagccatggttctcaaaactgaactatgccgattcagtggtgccaagatctacccaggaaagggcatcagatttgttcgtggtgattctcaggttttcctgtttgcaaactcaaaatgtaagaggtatttccacaatcgcctgaagccttcaaagctcacctggactgcaatgtacagaaagcaacacaaaaaggacattgctcaagaagctgtgaggaagaggagacgtgctgccaaaaagccttactctaggtccattgttggtgcgaccttggaagtaatccagaaaaagagagctgagaagccagaagttcgagatgcagctagggaagctgctcttcgtgaaattaaggagaggatcaagaaaacaaaggatgagaagaaggctaagaaagcagaagttgcttccaagtcgcaaaaagcaggagggaaaggcaatgtttctaagggtgctatgcccaaaggtcccaaacttggcggtggaggcgggaaacgctg

SEQ ID NO: 222183 - DNA, 518 bp, Glycine max
agcacagattgcgaaatccattcaataaccaagtaccttctgaatatccaaacacaggtttagtaaaacagtaaaataaaagattaatctttcaaatggaaatatcagtacagcagtgtcaaaacaactatttaaattgtagccaaaattaggaacaaaactaaaagctcagcgtttcccgcctccaccgccaagtttgggacctttgggcatagcacccttagaaacattgcctttccctcctgctttttgcgacttggaagcaacttctgctttcttagccttcttctcatcctttgttttcttgatcctctccttaatttcacgaagagcagcttccctagctgcatctcgaacttctggcttctcagctctctttttctggattacttccaaggtcgcaccaacaatggacctagagtaaggctttttggcagcacgtctcctctttctcacagcttcttgagcaatggcctttttgtgttgctttctgtacattgcaggccaggtgagctttg

SEQ ID NO: 222184 - DNA, 543 bp, Glycine max
gacaaaaaatatactaagcgctgaattaattttcatcactgggaattattgacataacactgcttaaaattctgacttgataaaaaaacaattcgaactgaaaaaaatggccatttttatagtccttgaaattgaatctgtaatccgaattctaatatctaggctgagtaggtacaaaggttttcaaaccccatgtactctttatttgcaattttttggatcatgtttgatatgcccacaccacctagtgatattgcactaacaaaaatggtgccggagaggatgaaaatgatcagagatgctttccctagtatggcaaccagctttctcactaaaacttgtccaacaaaggccgcaaaagtggatacagccactaagtaaagagtttaaggaataggaaaccgttttagaaggtaatattccaccactgacatagatgctgaaaatgtcatggcaaaagtggctgtagcacttgacaccttgggggggatttctagctccaagaaaaggggtccccaaataaaacctttcccaagaccaagc

SEQ ID NO: 222185 - DNA, 568 bp, Glycine max
gataggaaaatatcattaaattgagaataacagtgaaaaagggcatcaatacaaaaaaaaaagactaaacatccattaactctgctgttggtagcacaagaaattcttgctgtttattgcaagagcatgatctaccagcaaagttggaaataagaataacaatggaacctacttattccaacacacatacaacaaccatgccataaggggtcttttattagtagacagacaccacatggcatagcataactaatcaaaaaacattggcatagcataaataatcaaacccaaaaaataaaagatacaagattcatccatgaacaagacaagattcttagctatttacgaatgcacaatgcttcctgatctctccctctgtccctgtcttcacattaattcttcccattttctctatggaggttgcaaactcagcagagaaattttcaactgtcccttcaagcaattggatgatttgagactttgtaactgagttagtcaacaatgcagcatctgattcaaatagacccctttcttaataacgtgactatagttgctaagacaaatgttt

SEQ ID NO: 222186 - DNA, 539 bp, Glycine max
ctcttccttctttctccaccaaaccttaaaccttaaactcgcatataacccaatcaaatttgcctttagattctcatttcccgtcaaactatctctctctctctctctaggaatccaaaatattccaactaaacctttcttccttttcatggcagatcctacccgtctttcattcagttcaatctcatacctgtatgtgtatctctaatgcaatcagttaatgaatgagaagaggaatccaaaacgtcaaaaaccactgcctttcagcatgcctgtgacagactcaaatgatccgcagaattttgatgataacattcttttccctgttgaagagattgtacaatacccgttgcccggatatgtgtcgccaacttcaataagttttagtcccgatgatagtttaatttcttatttatttagtcctgataactctttaaacagaaaggtttatgcatttgatctgaagaccaatacacaagaattggtattcagtccccctgatggtggactcgatgaaagtaatatttctccggaagaaa

SEQ ID NO: 222187 - DNA, 577 bp, Glycine max
  unsure (1)..(577): unsure at all n locations
ataatgttgacttgatggtgaaaaagaaagaaagcaaaccgctcataaaaaaaaaaggctatgttgtggataactcctccacatacaagatctagactatttgactnttaaaggcttattcagttatttgatacccagaagagtttcttgttagggtgtgtgaagtgggccaaaatagccatcaaagtagcttatcagctttaaggcaagaagaaacaaaaccaattcttttgggtaaaagaacttcagaaaccactttgcccattcaactaaacacaacaatgaaagatgaattaaaaagtcatgttacagattcctctgaatgaagtcccacatcctcccttccatgtaaactcggtcactatgacgccgaggcatgtgccgttcatctgggaaaactattagctcatatgattttccagctgccacaagtgcattgataagtcttgcagtgtgcctaaagtgaacattctcatcaatcatgccgtgcacaagcaacaaccgccctttcaactggtgcacttggttcttaccagaaccggtttcatatcctgacttgtttcagatgcaaccccat

SEQ ID NO: 222188 - DNA, 566 bp, Glycine max
  unsure (1)..(566): unsure at all n locations
catcaaaccacacacctcacctattagaagtaacaaaagaccctccctctcaaaagaataaacaagtataaaaaagaaggcacttccctcaaacagaaactaccctctatctctctcttttcaagccttaaatgagtaaaaaagagtgaagaaaggaaagaaaggagcaccatttttggtttgagaaacataattagcaagagagttcaaatggggaagagagagtttaatggggtggtgttgatgatgctgtgtttgtgggtttgtgcgtgtcacagcctctgtgacttatgaccacaaagccattgtggttgatggcaagagaagaattttgatctctggctccattcattatcctagaagcacacctcanatgtggccagaccttattcaaaaggccaaagatggaggccttgatgtcattcaaacctatgtgttttggaatggccatgaaccttctcctggacaatactatttcgaagataggttcgacttggttaaattcgtgaagctcgcgcaacaagcaggcctctatgttcatctccgtattgggccctacatatgtg

SEQ ID NO: 222189 - DNA, 541 bp, Glycine max
caaaggatattttattactttcaatctgttcttacttaataattataatgggaaaacacaattatttctggcagaatatagcaaatatactctccgacacattttgcgtgtctacaattctttccattgtatcatagtaaattaaataaatgtgtaagggctcaatcttcattgatacaagccctgtaatacatggggcaatattcagcacaatagcctgacttgactatgtacagtatacacagtctttgcgcatccaaattctcttatataaatctttgtttttggccaggcagtgcatgattaggccttggcaatcttttgaggtatacttgaacaaccagaagacaaggagcaccaattatgaacttcaaatattttttatatactgaacctaatatgatctaaaccacacgtatttggtaaattgctgcatcatagggtcctaaccgcataggactcacttgacagcttctttgcatttcctagacatttgttacaagatatatattgcctgtcaatgctgctccttttagagagc

SEQ ID NO: 222190 - DNA, 544 bp, Glycine max
attcaaaaagttgatttttagttattgccaagcagaaaccaaaaacgcagaaaacttcctgctgcctttgtgtcattgttgtacaagttatttaacattaacttcctcccagatatgctgagaaggggaaaaaatgtatagcatctgtgagtcctgaaaattaggacagtattatgcatacaacagaatcttttaaaccaaagcctaacataataaatgagttaaaatcagcattctttggttgcaatttcttcctgctgttttgtggcggaaaatagggaaaattttgtttctgcaaagaactaaccaggacatgaaaattttccagaacattcaagcagatgcagccaaaggcacagatctgtagcatgctctctttgcagcacgaacaatatcttcaacctgtgggacagccattctttcagatttgctgcttaatgcatgggaacattagccccagcaattttttaacgggtgcattaagattaccaaactttttttaatgacagatgtgcagatttcagcgcccacgccatgctgagga

SEQ ID NO: 222191 - DNA, 563 bp, Glycine max
caaacaaaaatatcatcaccatagataaaccacttaagtaattatatacacatatggtaggagaaaaaaaaagaaaaggatattgcagaaccctttaaaactcttcgaaactcatcttaatctaagaaaaattatgtggtatagataacaaaaagctattatcaccattcaccagaaaactatggtttgaaactatggttggaaatcagagcaactagcttgcttcgtgagaagggaaggactaaatcccaccatggaagtatcaaaatcaatctgcaccaacacatcctccaattgaaaccctccaatcacaattgaatttctgggattctcacctccatcaacaaaccctaagcacataacatcgtcgctcacctgcaccatagagtttcttccgtatatgctccacttcaccatctcgctctgcagcaccagatcaatgatcggcacgttgggccccacttgggagcttccaacgccattggattcgaagcaaagcccaaagggggaaactggatcgacccttttatgtccatagacgaagcggctttcaaataagcgct

SEQ ID NO: 222192 - DNA, 505 bp, Glycine max
agcattttcagaggaacaatggcgggtagggtttcgacgtgcttcttcttcgtgtttgctctttctctccttcttccttttcagatctccgctgaggaatcatcggagaaagagttcgtactcacattggatcactctaactttcacgacactgtcagcaagcacgatttcatcgtcgtcgagttctacgctccatggtgtggccactgtaagaagcttgctcccgagtatgagaaagctgcttctatcttgagtagtcatgatcctccggttgttttggctaaaattgatgccaatgaggagaagaacaaagaccttgcatctcaatatgatgttaggggatacccaacaattaagattctgagaaatgggggaaagaatgttcaggaatacaaaggtccccgtgaagcagatggcatcgttgactatttgaagaaacaaagtggtcctgcttcaactgaaaataaatctgctgatgaagctactgctttcattggtgaaaata

SEQ ID NO: 222193 - DNA, 423 bp, Glycine max
ctgagagtgaaggtgaagctgaggggatatgtgatgcacaagcaggaggagatggcacatctttgccattgtcagagaggttcctttcatctgtgaaacctctcacaaagcatgtatcagcagtttcatttgtcgaagaaatgaaggactcaagggtgttctatggaaatgatgacttctatgtgttttttagacttcatcaagctctttatcagaggctcttatcagcaaaaacacattcaatgagcgcagaaatgaaatggaaagcaaaagatgctagttcaccagatccttattcaagatttatcaatgcattgtacaacttgcttgatggatctgccgaaaatgcaaagtttgaagatgaatgccgggcaattattgggaaccagtcatatgtgttattcacattggaacaagttaata

SEQ ID NO: 222194 - DNA, 568 bp, Glycine max
acggaggaattcaactgtgttgcaactaataaacaattgggtaaacaatattctacaaatatataacgaagcaaactatttacaaaggaatgggcacaacgcatgagacctcataaacatattacacactcccatcaatatacccctcctccactttcatgtgaaaattcaagtactgacaacaaataaaattgtaaacccaaagggttcctaggttgctacaccaagactcaaacatatagaattatgtatgagtctcctcagctgttttagaagatgttagagaacaactcttcatgaagatacaaattacgagcatgccaacaatttgcggaatctttcctctctgtccctgcggaaccgggaggttgtggtccctgaaggcgttcgtcttttctttcttggtcggaagaaaaaatcttgtgtgtcaagaacataagaaatcttagatgagctgcaagctatcttacattccaatccattaattactttaacaccttccatggcagagcatattgcagaaagctcatctaattttccatattggcgtttgtttctatgcagtatg

SEQ ID NO: 222195 - DNA, 443 bp, Glycine max
ggctcatgcatatcccacgatcataggagattcgggtttagctataaaagtctgcatctatgtaaattttaccagttatgaacatgacataatacaaatttttcttatgatataataaacttttattaaagccaggatcttggctataagcttcacattctagacaagggcaagtccattgcgtctgctacaaagtctgcatcttttgtggggaaacacaagggaggggtaattctgaagacatttccatagtaaccacccttaccaataagtactcctagttctttcatttggtccattacatgcaatgtttcattttttgctggagttttaagttcacgatcagtgacaagttcaactcctagcattaggccttttcctctgacatcaccaattaattcatatttggccttgagggcagggagcctttctttaaatgggat

SEQ ID NO: 222196 - DNA, 519 bp, Glycine max
ttcaaatgcaagttctcgcatgatttgaatgttcagaggaaaggggagaagattgacatttacagtgataagcgtgaccaggaaacaatggaggattgggatcaagagaccttggagaaggtggtggagtcaaagaaaactgagtataatcagaataaaccaactgacatagtctgtaaatactttttggatgcagtagaaaagaagcaatatggttggttttgggtctgccccaatggtggtaagaattgccattatagacatgctcttccacctggttatgttttgaaatctcaaatgaaggctttgttagaggaagaaagtgaaaaaatatcaattgaagaggagattgaaaatcagcgtgccaaagtggcaactacaactcctatgactcctgagttattctttgagtggaagaagaagaagatagaagagagagatgccaatatagctgcacaacaggctgagagggctaagaatgatcgcatgagtggtcgggagctatttttgtcaaatgct

SEQ ID NO: 222197 - DNA, 552 bp, Glycine max
gttaacagtgtataatgcccatgggccatgatttatttatttagaaagaacaacctagctttatgagtatgaatatcataagcattgtcactgccatcataacagcactcacacgcatacataacataattaacaccatgaacatgcccttctacccaactctaagctacttgcatagtactacatatataatatccttattgaaattaaaaaaaaaacaacagtaacatcggaagattaaaaaacatagcctcttaatcctcccatccccatgaacctgcagtggtctcggttcattgaaccagcccatttaaaggaaaagaccttaattattttttgcataatatattacagattttcttcctcgatcatagacaaggggaggaaaattcaagggtcctgatcatggtgcttgttggcaacattgcactgctttctgacctcaccctttgtgccagtgagagggttgttctctgagagcaaggtaatggctctagagaactcctttgagaaatagtcttggctcttggccattttcttcacataaggctt

SEQ ID NO: 222198 - DNA, 477 bp, Glycine max
agttcaacggatgaaggattataattatgcataccaagggtacaagcgtagtttgatataatccagctaactcatactcagaatgaaccagttaaaaacttatcaaagtttaagaaaagaactggaccattttaaaaaacaactctcctcaccttctgcaaataaatgatcactccaacaagagaataaaatgaaaggataacaaaagctagaatcaaagggttacaatctgcaatgcattgcttccagacaaatcgtgatgatagtagtctttcccttcaataaccctatctatcgaaacagtttagaagcactttctgtgcacaattgatggaccagattcgtcatattctgcctttgcaatccacatctgctggaaggtgctaagagatgccaagatagaaccaccgatccagacactgtattttttctaggtggggctacaaccttgatcttcatgctgctgggtgccaatgc

SEQ ID NO: 222199 - DNA, 524 bp, Glycine max
ggaaaaccaggcagaccctgcaatgcgattagtctctgagatgatgatactttgcggtgaagctgttgccacatttggatctcggaatgacattcctttaccatacaggggacagccccaatcagatatgaatgtttctgaattttcccatctcccagaaggacctgttaggagctttgcactggtcagagtaatgcgtgctgctgaaatcgatttcaggaagccagcacgccatggtgttttggggattcctggttacgttcagtttacatcccccatccgtagatatttggatcttcttgctcattatcaggtaaaggcattccttagaggcaagcctccaccctttacagctggtaagcttgaagggatagcagctgttgtaaatgagaatgttagaacagtgaggaaactctgcagcagcagtcttcggtactggatattagaatatttacgaagacaaccaacagagagaacatatcgtgcattggtccttagatatttgaaagatcgaattgcagctc

SEQ ID NO: 222200 - DNA, 511 bp, Glycine max
attgcattgcccgaactttaagcaatgttgcagatgatttgttgagctcggtgcatctcacagtaaaaaaaattcgggatagcgtaaaatatgtgaagacttcagagtcacatgaggaaaaattcctggacctcaagctgcaacttcaggtccccagtgaaaggaagcttttaattgacgaccaaaccaagtggaatacaacatatcagatgctggtggcagcttctgaactacaggaagtgttttcttgtttggacacttctgatcctgattacaagggtgccccgtctatgcaggattggaagctggttgagaccctctgcacatacttgaagcccctatttgatgcagcaaacattcttaccacaacaactcatcccactgttattaccttcttccatgaagtttggaaattgcagttggatctgtctcgtgccattgtgaatgaggatcctttcatcagcaaccttactaaacccatgcaacaaaagattgataagtactggaaaga

SEQ ID NO: 222201 - DNA, 539 bp, Glycine max
gtgattgactttttttcttcttctattctcacacatacccatctactccttccctcatggctgaacaatcttccaactccatttacgatttcactgtcaaggacataagtggaaatgatgtgagtctgaatgattacagcgggaaggttctactgattgtgaatgtcgcctctcaatgtggtttgacacagacaaattacaaagaattgaatgtattgtacgagaggtacaagaatcaaggatttgaaatcttggcatttccgtgcaaccagtttgctggacaggaaccaggaaacaatgaagaaattcaggaagtagtttgcacaaggttcaaggctgaatttcctatctttgataaggttgaagtcaatgggaagaatgcagtgccactctacaagtttttaaaggagaagaaagggggaatatttggcgatggtatcaagtggaacttacaaagttcttagtaaacaaagaaagggaaggtgtggacagatatgcacctaccacctcacctctgaaatcgagaagacatcgagagc

SEQ ID NO: 222202 - DNA, 526 bp, Glycine max
atccaaatatattattattttatggttttggtaacagagttagaacaccaatttacacttattgagcaatccaaaatccaaatacacgagatatattaagaacttttcagggcattatattaattgatgatacatattgctacttgtccttcgaagacaccggacagattgcctatgtcctcagcacattagatatgtagaataaaatcttagtactcaagattgcaagagcttctcgatgtctttctcgattttcagaggtgaggtggtaggtgcatatctgtccacaaccttcccttctttggttactaagaactttgtgaagttccacttgataccatcgccaaatattccccctttcttctcctttaaaaacttgtaaagtggcactgcattcttcccattgacttcaaccttatcaaagataggaaattcagccttgaaccttgtgcaaactacttcctgaatttcttcattggttcctgggtcctgtccagcatactggttgcacggaaatgccaagatt

SEQ ID NO: 222203 - DNA, 557 bp, Glycine max
  unsure (1)..(557): unsure at all n locations
aaattttcttccccaaatcgtagatctacggtttaactggagtagtgtggtaagatgggaggtggatttagagtgcttcatttagttaggccgtttctatcgtttcttcctgaagttcaaactgctgacaggaaagtgccatttaaagagaaggtcatatacactgtgatctctcttttcattttcctggtttgtagtcagctccctctatatgggatacactcaacaacaggtgctgatccattctattggatgcgagttattctcgcttcaaatcgtggaactgtcatggagcttggaatcactcccattgtgacttctgggctagtaatgcaacttctggctgggtcaaagatcattgaagtggacaacaatgtacgagaggatcgagccctgttaaacggggcacagaagctacttggtattttgatagctgttggtgaggcagttgcctatgttctttcggngatgtatggcagtgtggggcaacttggagtanggaatgccatcctcatcatcatccagctatgttttgcgggtataattgtgatatgtct

SEQ ID NO: 222204 - DNA, 528 bp, Glycine max
caaaggaaacccaaaaatgttaacaacgatgtactacttgatacttcctcagttgaaagggaaaaaaagaaaagtaaatcttgacaacaaactagttatgtcctcccttacgatgttaaacgacctacaagtttaacgatccctcaaacaaggggtgtgggaaagctcgttggagtcaccaaccaacattatttgcttggcaaaacttaaaaaccgaaaaagccaagctcactagctctctccttctcaaatgtctcaaagtactgatagatgattgttactgcaagcaatattccggttcctgaaccgatggcccccatgaagtctgccaacactgtcagagcaccgatccagatgcctccaaatgctgcggccgtgggaatgtatcggttcagctttttctgcaagtttgactcacggtgtccaggcattaccatttgttggtccttaagctgcttggcaacatctttagcagatgaaccagagacttcaatccatgttttaaagaacaaggcccaggctgaaagc

SEQ ID NO: 222205 - DNA, 525 bp, Glycine max
atacaaacagtaatttctttattaacacttaacagcaaacacgagaacattcaatcaccccaaatacataacttaaccatacataggtagatgaaggaatcatattcccttctattcacttttattgaaaaccagggaaagtactgcaacaaccatagagcccctagatggagatactgttgggaattcctctgaaagtcaatccctcctcactagaaggatagagcaaagtgtaaggcattttagccggcccactgcggtttctcaacgtctcgtccttgttcttctgtataagcttttgttcaatctcttgaagcttctttccaaacctcttgaaggcctctagtggaccagcatcagaagtccaatagtcaccaccatctctctccccaaggtagaactcatcagatgtgtgccttgacaagatttctataattgtaaggtcaatgagggtctccttcttgccagtaatagtcttcaaaaactcctttttagggtttttagccaaagctgcatactcagcag

SEQ ID NO: 222206 - DNA, 527 bp, Glycine max
gagatccactgctgcagaatccaatttgtgaccctaaatccaagttactatgactgctcagacccaagaggagcttcttgcgcaacacctcgaacagcaaaagatccatgatggtgaacctgttgtcgaggatgatgatgatgaggaagaggatgatgatgatgatgatgatgaggatgatgaccatgccgaaggactagaaggtgatgcatctggtaggtcgaagcagaccagaagtgaaaagaagagtcgcaaggcaatgcttaaacttggaatgaaacctgtcacaggtgttagccgagtgacagtcaagaagagcaagaatatcctgttcgttatctcaaaaccagatgttttcaagagtccaacatctgaaacttacattatatttggggaagccaagattgaagacttgagctcacagttacaaactcaggcggcagagcaattcaaggctcctaatttgagcaatgttggattgaagcccgaatcttctgctgttgctcaagatgatgaggaagtggatg

SEQ ID NO: 222207 - DNA, 495 bp, Glycine max
gggttgtatcaatatcagataattgttaattatgactgacattcttggcattgaacatgcatttgttgcaaatgaagtctacagtcttttccttccatggggacaattacacagataattgacaaacaagtacttcaaattcaaggagcaaaaatttcgatcaacaatgaaaaatagctacactttctaaaattcaaacaaactggaccattaattagttagctccataatggcagcaacaatgtcgccactggccgccttgagagctttaacagctttaggccttgacacgccagcttgagtcatcaccaactctatgtccttgggatctacgccagcctcatccacttcctcatcatcttgagcaacagcagaagattcgggcttcaatccaacattgctcaaattaggagccttgaattgctctgccgcctgagtttgtaactgtgagcttaagtcttcaatcttggctttcccaaatataatgtaagtttc

SEQ ID NO: 222208 - DNA, 525 bp, Glycine max
acatgactcacacggttcgtattgagtatctaactccacaactcgtgcagaagtttctcatacataagagtggctagcaacagctaacctaattacaagtaaacagtaaattattcgccctactcctatcggatctttcctattgtattttcctcattttccgatatatagttggcaatgcccttaaaacagtgcatagaccaaagccaaaccccaataagataaaataaataaatcaacttattcttgtactattccttcttccccaccaacttttcttcactttctcaatcgatccatcttcactcccaagtttatgtaaaatgacctttgtttcacgtagtcttgcaccataatcctttttccaagcttcaaacatttgttttaaccttctaagctctctatctgggttcaaacttgcttcaacttgaccagattttacctctaccaagaatttagaatcatcaccaaacacttggactctttgctcaaattcttcagccaaccgacttataacactcaaac

SEQ ID NO: 222209 - DNA, 517 bp, Glycine max
gtggtgggacatttgatgtgtctttactcaccattgaggagggtatctttgaggtgaaagccactgctggtgacacccatcttggaggtgaagattttgataacaggatggtgaaccactttgttcaagagttcaagagaaagaacaagaaggacattagtggaaaccccagagcacttagaaggttgaggactgcttgtgagagggccaagagaacactttcatcgactgctcagaccaccattgaaattgattctctatacgagggaattgatttctactccactgttactcgtgccagatttgaggagctcaacatggatctcttcaggaaatgtatggagccggtggagaaatgtttgagggatgctaagatggacaaaagaagtgttgatgatgttgtccttgttggtggttctaccagaattcccaaggttcaacaactgctgcaggacttctttaatggaaaagagctttgcaagagcattaattcccgatgaggctgttgcatatggtg

SEQ ID NO: 222210 - DNA, 475 bp, Glycine max
gactaaagattagatatgtcatttaacaagacagaataattgctacaggtaaagtgcataacaattgagtataccatctaataatgaaaataacgcaaataacataattgtttaaagcaacgttcatatcagaagggaaaaatagtttgaatcccatccaacaaaaatcatgcgattaaaatccaattaaaaaagcataaagtaaaataagtttttaaaacaggtatctggaggaaagcaactacatttagtccacttcctcaatcttggggccagcaccactttcaccagaaggaggagcagcatactcatcctctgctgcaccagcaccacccacgtctggaccagcaccaccttggtacatcttggcaatgattggattgcagatgctttccaattccttcattttgtcctcaaactcatctgcttctgcaagctggttgctgtctaaccactggattgcttgctcaattgc

SEQ ID NO: 222211 - DNA, 525 bp, Glycine max
  unsure (1)..(525): unsure at all n locations
ggaattgcctctttcaagaagcatctgagtgtttattattcgtaatatatagtcactcaagcttctaggatttctgccagctacatgaaaatgggaagcaacttgaggtttttgagtctttgcctcttggcattgattgcatcaactcatgcccaacttcagcttggtttttatgcccagagctgcccaaaagctgagaaaatcattttgaaatttgttcatgagcatatccacaatgctccatcactagcagctgcattgataagaatgcatttccatgattgttttgtaaggggatgtgatggatcagtccttctgaactcaacaaccaatcaggctgagaagaatgctcctccaaatctcacagtaagaggctttgacttcattgacagaataaagagccttgttgaagctgaatgccctggtgtggtctcttgtgctgatatcctcactttggctgccagagacactattgtagccacaggtggaccctattggaaagntccaacaggtcgaagggatggg

SEQ ID NO: 222212 - DNA, 452 bp, Glycine max
aacatgaaataaatagggtaattttttttaactaagaatagggtcaatataattttattacgttttaaagaatatcaatgcaattaaccattcaaaatatcaacgatcaatagatttgttgcccaaacaaacaacacaaggggcaatgacccaatcatatctaactttgaattaatatataacttaatctaggaaagaaactattaaagaatgaccgcgtaaaatccaaagcacgaatcatcatcaatttatcatcatgcatgtattttcctccttcttggtcttggataataatgttgcctccttacccacaacaagctgacttttgtgcaacttccccaaccgttgcatgatctaattggttgttgattttaattcctgctggctttgccttagagtcagtgtcagcaagcctttggtttatatctcttgcatagagaagaaaacttcct

SEQ ID NO: 222213 - DNA, 388 bp, Glycine max
gagaatccattcaggggagcgaaagatgagcttttgggaagaaatagaatcggggggggacctagagagtattggtttggctaaacatgcagccaatgctctttccaagttatttacaacttgagacatagttggtctatctcgacctttaagcctaacacaatcagcagccaaataaccgacgtaggccactgcctttatcttaaagggcgtgggtggggccacttttttgtccaacactttgggaatctcatcttggaaaatgaatggcaccacaaaatcaacaacatttcgtggcaccccattctcgtttttatggatggccttgtaaccggagagcaacttaagcaaaaccaccccaaagctgtggacgtcactcttgggggtc

SEQ ID NO: 222214 - DNA, 571 bp, Glycine max
  unsure (1)..(571): unsure at all n locations
agtaaaaatatcaaaagaatatgatcattgatcatcatattgtaccacaaattttagagagcaacaaaattataaggtaaacacaaccataaggaccagagatatggtttggctaccacaaaattataaggatggcactagttccaaaatcatccccaaaaatcaacaactacaaatagaacataaaccgaaactaagtagtgagctccatgatggcaccaacaatgtccccgttgtgagtcttgagggccttgacagccttgcttcttgatactcctgcctgtgtcatcaccaaatcaatgtcgtggggctcgacaccagtttcatcaacctcctcctcttcttcaggctgtgctgctgcagctgcagaatcttgatcttgtttgccagttcagatttcacatctggcatcctgaactgttgagcagcctgtgtctgcaactgagagctcaagtcctctatttttgcctcccaaatatgacataggtctcaaaatttggactcttgaagacatcatgttttgagatgaanaaaagaatattctttgtctcttgattggaccctactaaca

SEQ ID NO: 222215 - DNA, 520 bp, Glycine max
gtggacagtaagctcgtttatgacacgctggagaaaatcgttcaagaggctcctcatccttcttatgctgaattcagaaacactggattggaaaggtctgcaagtttggcagaagatttggagtggttcaaggagcaaggttataccattcctgaaccttcttctcctggtcttacctatgcacaatatcttaaggagttatctgtgaaggatccccaagcattcatttgccatttttacaatatctactttgctcattcagctggtggtcgaatgattgggaaaaaggttgctgaaaagttacttaacaacaaggcgttggagttctacaaatgggatgatgaccttccacgattgttgcagaatgtgagagacaagttgaataaagttgctgaaccttggagtcgggaagaaaaggaccactgtctggaagaaacagaaaaatcattcaagctctctggagagattctccgtttgattttatcatgataatagatgccctgctatctgtgtaattatg

SEQ ID NO: 222216 - DNA, 400 bp, Glycine max
aatcaacatcttttctattattcctttgcgtattggaaataagaataattcacatatggtaatgttgttggcttccgccatgcactttaatacccataattacacagatagcagggcatctattatcatgataaaatcaaacggagaatctctccagagagcttgaatgatttttctgtttcttccagacagtggtccttttcttcccgactccaaggttcagcaactttattcaacttgtctctcacattttgcaacaatcgtggaaggtcatcatcccatttgtagaacttcaacgccttggtggtaagtaacttttcagcaacctttttcccaatcattcgaccaccaactgaatgagcaaagttgatattgtgaaaatggcaaatgaatgcttggg

SEQ ID NO: 222217 - DNA, 506 bp, Glycine max
cttgttctgtttctctcttcccccttctctccgtctctctctcactcaatattttgaggtaatttgcaatggctgaaccttccaaggtcattcacgttcgaaatgtggggcatgagatatctgaaaatgatttgcttcaactatttcagccttttggagtaataacaaagcttgtgatgttgcgtgccaaaaatcaggctcttcttcaaatgcaagatattccttctgcagttaatgctttacaattttatgcaaatgtccagccaagcataagggggagaaatgtttatgtccagttttcctcacatcaagaactaactacaatggatcaaaatcaagcacgagaagatgagccaaatcgaattctcttagttacagttcatcacatgctgtatcctataacagcggatgtgctacatcaagtgttttctccccatggatttgtggaaaagattgtaacatttcagaagtcagctggctttcaggctctcatccagtatcaatcc

SEQ ID NO: 222218 - DNA, 514 bp, Glycine max
aacataaatgttatttttttaaagaatcaatatactaccagggcatgagatgagagcaatggcatgaacataaaccttaatactacatgtaaaccctcccaaatccctttggcttcccatcatcatggtatttctattaccactacacagtatttcctactatctatgtttttagcaatgccatgctgaagctgatatcaaatttctgtccttccaccccaacaacatggctccatccttctccaccagtgtatagtgttctgaatagcacatcaaaaggcttcttatgacagaattcacataagaactcaaaggacactgacggaagccggccatcgttaacctcgacttccacttgccgaacagttcatgtctctcaaccctttccttgccttcacaagcaatgatattcacaatatccctggccagacaatggtgctccacattaatcctatccttgctatctcttgggagggtgacatcaatggactcaaagaatgccaaggagtaatcc

SEQ ID NO: 222219 - DNA, 517 bp, Glycine max
  unsure (1)..(517): unsure at all n locations
gcaatacaaaggctgcgtttgctttgctcgctcgcgcactcacaaccacaacaaggcagcagtgcgaagagaaagaaagagaagaagcgcttatcgaactcggacggaagcactgagttaactcagagcgagtgaaagtgttgctgcgtgatgtctggtggtatcgcccgtggacgcctcaccgaggagcgcaagtcgtggcggaagaaccatccccatggttttgttgcgaagccggagacgctgcccgatggaaccgtgaacttgatggtgtggcattgcactattcccgggaagactgggactgattgggagggtggctacttcccgcttacgctgcactttagtgaagactacccaagcaagcctccaaagtgtaaattcccacaaggtttcttccaccctaatgtttatccttctgggactgtttgcttgtctatacttaatgaggatagtgggtggagaccagccataacagttaagcanattcttgtgggcatncaagacttacttgatc

SEQ ID NO: 222220 - DNA, 505 bp, Glycine max
gatatgctctttagaaggtagcaatgtaattcagtatagacttatagtaatgatccattcatataaaaatgtagcagcaaacatcagaaacatgtcaccaagtattcattgggttgactttcatattttttatatattaacacttcttccagatctgggagtaatcataaatagctaacacaatcatgtctaaatgttatggcagccattaatcacaatgataaaacagttttaacacggagcaaatgaagaaacatctgccatactaaaaatagtttatagatttagctgatgtaaccctagagaagaggtgggtattgctttgcctgctgccggacccttctcttgtactctgctgcatcctggatgaatagatgatagccttctgtctgggcaggatcagcaggatttggctgatcaagtaagtcttggatgcccacaagaatttgcttaactgttatggctggtctccacccactatcctcattaagtatagacaagcaaa

SEQ ID NO: 222221 - DNA, 472 bp, Glycine max
gaatcatcaatcatgtaaccaagaaatagtataaaatccagatgccaccttcatctagaataaaacacttcgaatcatgacctcctgagagctatttctttgaagaatcagcgcacaatctggcagagttgccatatgcatacatggactaatagcaaaaatgcaaaatgtatgaagcataggaaagggaaaaagtgaatgatacacatcttatggatcaaaaaccaaagggcaaagtctaagtcttagaaccataatcaataatatccaaatcatttttgaaggccccaatcttccaaaacaaagtaagggttctgcagtaacaggaacttaatcagaatcctcatacacttctccatcatcagataactcatcaaatgatctgatgtcaagctggtaacgaagaattccaccaatgccaccaaaccctctgcagaattgggagccctctgagatttgttggtcacaaatt

SEQ ID NO: 222222 - DNA, 550 bp, Glycine max
  unsure (1)..(550): unsure at all n locations
acaatttctctctctagaataaaacagcttctaccgcctccaagtcctacaagaacccattccctctcacaccgcccccaaaatctcactcttctgccttctcttttctcttctcttcttcctccaaaacaagtaaacaaacaacactctcacattcaccacaacacaaacacaaacacaaacaaagacaacaaccttgtttgtctgcaatcaaaacctttcaagctggcgttcgagaaccaagacacccctgtccgagaaatcaagcccaagaaccggagaatcatgggtgctggaggccctgatgacgaggacaataggtggccaccatggctgaaacctcttctcaaagagagcttctttgttcaatgcaagcttcacgctgattcgcacaagagcgagtgcaacatgtattgcttagattgtatgaacggtgctctctgctctctctgcctcgcttaccacaaagatcaccgtgctattcaggttcgtgttgatgtcatcacttcttctnttcaactttttttttaagaaaataaaataaaatttt

SEQ ID NO: 222223 - DNA, 435 bp, Glycine max
gcttcaacttgctccctcagaagcgaagaagaagccacagagaactagtctcctactctcacccgcaagaaaaaaatggcatctcacatcgttggatacccccgtatgggtcccaagagagagctcaagttcgctctcgagtctttctgggatggcaagagcagcgccgaggatttgcagaaggtgtcttctgatctcagggcatccatctggaagcagatggctgatgctgggatcaagtacatccccagcaacactttctctcactatgaccaggttctcgacgccaccgccaccctcggtgccgttccaccaaggtacggctggaccggcggcgagattgggtttgatacctacttctccatggccagaggtaatgctaccgtgccagctatggagatgaccaagtggttcgacaccaactaccactttatt

SEQ ID NO: 222224 - DNA, 411 bp, Glycine max
gcacaaaactggtaaaattccagatcaataaggattgcggcgaagccgcaaagatacaacattcattagggaaaacaggagtggggaaaaataaggggggaggggttgaggaagaatcaattgctcacagagcatgctaagacacctaaatattccacacacagttattgaaacaacccaatatagagaaaatttttctttggtgtattataatataaagcagaaccaaatgacttggaagattctactttcttataccattcacttggcaagttcgttgcggatgagttttgctgcggcaaccatgtttgtgagggctggcttcaccttagtgtacttacgggggttgagcccacagattggggtcacccagacgatgttcttatagagcactgccggcaacttggtgat

SEQ ID NO: 222225 - DNA, 584 bp, Glycine max
atagaatgcccctatttataataatacactgcatatcacgctcataaatcgtcattcagttgctaattaatatgttcacttcccttccttaactgaaaataataaatcctaaaaacagacaattagcatagaaccatagacaaggcaaattcaagcaagaaagatcaatagaagctgtaagttatgtagcactttagaatttaaaattaaattggtagttcaaaggtgcaaaatggctctgcttagcatctccaagttgaaactgagatgagatccttcctttgccagcaaagaacaagggaagactgcctcttctcaacatggaaccccttactaggagtcctctgcaccaaacactctgcctgggattctgtaaagttactaaaggtcaatggtgaaaacccagatgacaagagaaggtttttccaaggaagtgctctttcctgcaaaccatgtcgacccaagacaagcttctccattgatggctgaagataatacttctcaatcatctgaaggacatctgggtgaacattaaccgcatcaagtgactcaagcagccctgaatagactgaagtgcaaaaatc

SEQ ID NO: 222226 - DNA, 574 bp, Glycine max
gacatcatattttcttccaaaataattatacaaaagtgacaagggaaaacccgatctgccagttgcctactgaataaaaacacacatcattactatgtgttggcatacacgcatgaccttgtgccttgtcatgagtgaatattccaaagcaattggtcctttatgcctccttaatccttatgccacaaaatgctatcatcccttgaaagttgtaattgcttcttcagaaatagatttatacaaaggtagttgcaatatctatttgccaaactaaaaatgtaaagacccttcttcccaatcctagtagtgtcccaattgtatttacaaaggcgggacaaaatatgtatatacaagtacaatcatatagcataatgtaacaataatcatactttggtctttactggtgcacattacaggaattattatgcactgaaacccctttgcagagaactccaaggattggaaggaatagagacacatgcttgtgcagaggcctcagccatttgctcattctttatccctacattgcagatgtttgcaaaggacctcatatgtttcatgccatactgagaca

SEQ ID NO: 222227 - DNA, 520 bp, Glycine max
gattaaggcacggcttaaaattgaattgatgggtaaaactaccccaattcgaagcttttccaatcaagatccaaatcatgcaacaacaaaaaaaaaagcaactttttttttccttctctttctctcctcttatcgaaagcttaatcacaaaactaaaatcacggacattatttataaaactcaagtgcgacaaactccaaatgagaaagaaaaagccggttcctccatttctttatccaactctttatcctcagtttactcagcagcaaggggcacagactcagccaatttgcggtacttgagagcatagaacatctcgagatagcggcggctctcacggcggtcaaggttagacacatgcttccagaagccatagacaccggtgagagtgagaagcctctgagagtaaatttgccatgtgtacttctcttcaatacgctggagaccagcctttgagatcttgtcccagtgagttgggtcaagcttgcacttttcaaagaagtcaacaaggagatcagca

SEQ ID NO: 222228 - DNA, 534 bp, Glycine max
  unsure (1)..(534): unsure at all n locations
aaagaaagaaacttcaatcctcacacaaacgaaaacaaatatctttcacttcttctgcatccgacgctagaagaggtgtcggaacaaacaagcttcgtttcgccggaacgatgaccggcggcggatcgacggggaggttgccaacatggaaggagagagaaaacaacaagaggagagagaggagacgaagagcgatcgccgctaagatctacaccggtcttcgagctcaggggaactacaagcttccgaagcactgtgacaacaacgaggtcctgaaagctctatgcgccgaagctggttggatcgtggaagaggatggcaccacttatcgaaagggatgcaagagacccagcgcgagtgagattggaggaacagtggcaaacataagcgcgtgttcttcgattcagccaagttcacaatcctcgtcatacccgagtnctgtaccatcctaccacgctagcccaacctcttcctcgttcccaagccccacgcgcattgacggaaaccacccttcttcctttctcatcccattca

SEQ ID NO: 222229 - DNA, 405 bp, Glycine max
atcgtcgtctgaacctgaaaactaacccagcgcccagaggcggagtcaacggtggaggcgtcggactcatcgcactccgggatggtggaggtggcgaggtggtggcggcgagaggggctggaaggggcggaggtggcaaaaagagggtggcggagggaggcgttatggagggagtcgaaatcagccttgcgcttagagctacgaggagaggagagaggtggggtgacgggggcgctgttggatatcctgagaggagggaggttggcggggatggaagttatgttgcggatgaatgggatgagaaaggaagagcggtggtttccgtaaatgcgcgtggggctttgggaacgaggaagaagtcgggctaccgttgtaggatggtacaggactcgtggttgactagga

SEQ ID NO: 222230 - DNA, 546 bp, Glycine max
  unsure (1)..(546): unsure at all n locations
gcttcctcgggatgaggataaaggggcttgccggaaaatataaaaaagaaagaaagaggtggtaacacgaaaggcgcgtggcagccgctggtttaaccgaaaagaaagcaactttgtcctacatcagaggcaacggaaaagaggatcctttctgcttcttctcttctcttccacacaaagacatcgtttcattgctctctctcttgtgcggacacaatttttgatggggatatacctcagcactcccaaaacagagaaggcctctgaagatggtgagaacgacaagcttcgcttcggtttgtcttccatgcagggctggcgtgctaccatggaagatgctcatgcagctcatccatgtttggacgagtccacgtcatactttggtgtttatgatggccatggaggcaaagcagtttcaaaattctgtgccaagtatctacacctgcaggtgcttaagagtgaagcttacttagctggagatttaggcacatctntacagaaatcttttctcagaatggatgagatgatgcgtggacaaagagggtg

SEQ ID NO: 222231 - DNA, 541 bp, Glycine max
ggtcctatctataatttcattaccatcatttggaatagcaagtcaacaagcagaaaatttgtgacattttacaacaatttcttccatgaccgatgtcttgcaaagaaaatatttacaagtaatcatcaattcccttaccatggttgatttccactgacaaaaaaaagacaaaacattcattaaaagtatatcttgtttcttcataaatcatgattgcgcagctacagtgagcagctaaaggaggagcatgattatcccatggcatacttctgtgtccagctacgagcagtggcttcatacttagccttgtcagccttgtacatgtgggcaatttcaggcacaagcgggtcatcagggttgggatccgtcaacaatgagcaaatggacaaaaggaccttagaaatggttagtgctgggctccattgttcttttagaatgtcaaggcatatacttccattactattgatgtttgggtggaataccttagtcctaaatgcaaccttgagtactcaaagatgctaaattcagcatttctaactat

SEQ ID NO: 222232 - DNA, 490 bp, Glycine max
aagaattgaaatttgctttgattgaaatcaggttacaagtgtaaagttgtgcgtgatttggtgacaatgatagatgattagttccaaatccctcaatggtcaggggataagagaaactagagaaagaaaaaaaaaagaaaaaagaaaaagaattacattccaccctcccagtatacacaaggaaatgacatcaatatctatgcagcaatagagggatggttttggtttttgtgctgtgagtgcatcatttaggagagacattatctccactctttgtcattgtcagtttcccttgcatccagcttcttagcatctcaagtgcagcttttggttgatccatagggaccatgtgaccagcctcgtataccttgaggaaagagagaggtccatggcttttcagcgttcctgcttctgcaccatcaactaaaaatgggactgtaccagacgccccaaattgtttttgaccagaccaattcattgcattaaccca

SEQ ID NO: 222233 - DNA, 554 bp, Glycine max
aaaaagcgcaagaaaacaaaatccccaaaatatctctcgctctgaaaccgccatggatttgcagcagagcgagttcgatcgcctcctgttcttcgagcacgctcgtaaggccgcagaagccgaatacgagaagaaccctctcgacgctgataacttaacaagatggggtggagctttattagagttgtctcagtttcagagttttcctgaatcgaagaaaatgacccaagaggctgtttcaaagctagaggaggcgcttgcggtgaatcccaagaagcatgacactctttggtgcctgggaaatgctcacacttcacaagcatttttaattccagaccaggacgaggccaaggtttattttgataaggcagctgagtactttcagcaagctgttgatgaggatccttcgaatgaactttaccgcaaatcattggaagtggctgctaaggctcctgagctgcatgtagaaatccataagcatggatttggtcagcagcagcagcagcaggcagcagcaacaggctgatcttctacttctgcttcgacaaatactc

SEQ ID NO: 222234 - DNA, 537 bp, Glycine max
gcagcaaaattcttattatattcaatacttgcctgatggcaaatggcaatgatttcgattttgcaaatactagcaaagatctaagccggacattttaactgctcaacccacggtaagataaaatttcgcatgatggataagataagccccatgacaaccattactactgtcaaaaaaaactaaataaacggcactgcccgaaatcaaatatcattctcaataatcaataatgtatgagataaaatcaaatggctccacttatcgaggaggtggaggagagagtggtggcaggttcgattttgcaaatcccacccatgcaacaatgccgactgccagaattatccatccaaatatgtcatacttcagatcactggtcttctttttcttctgagtatttgtcgaagcagaagtagaagatccagctgttgctgctgcctgctgctgctgctgctgaccaaatccatgcttatggatttctacatgcagttcaagagccttagcagccacttccaatgatttgcggaaagttcattcgaa

SEQ ID NO: 222235 - DNA, 528 bp, Glycine max
  unsure (1)..(528): unsure at all n locations
aaaaagcgcaagaaaacaaaatccccaaaatatctctcgctctgaaaccgccatggatttgcagcagagcgagttcgatcgcctcctgttcttcgagcacgctcgtaaggccgcagaagccgaatacgagaagaaccctctcgacgctgataacttaacaagatggggtggagctttattagagttgtctcagtttcagagttttcctgaatcgaagaaaatgacccaagaggctgtttcaaagctagaggaggcgcttgcggtgaatcccaagaagcatgacactctttggtgcctgggaaatgctcacacttcacaagcatttttaattccagaccaggacgaggccaaggtttattttgataaggcagctgagtactttcagcaagctgttgatgaggatccttcgaatgaactttaccgcaaatcattggaagtggctgctaaggctcctgagctgcatgtagaaatccataagcatggatntggtcagcagcagcagcagcaggcagcaagcacaagctgatc

SEQ ID NO: 222236 - DNA, 496 bp, Glycine max
gcagcaaaattcttattatattcaatacttgcctgatggcaaatggcaatgatttcgattttgcaaatactagcaaagatctaagccggacattttaactgctcaacccacggtaagataaaatttcgcatgatggataagataagccccatgacaaccattactactgtcaaaaaaaactaaataaacggcactgcccgaaatcaaatatcattctcaataatcaataatgtatgagataaaatcaaatggctccacttatcgaggaggtggagcgagaggggtggcaggttcgattttgcaaatcccacccatgcaacaatgccgactgccagaattatccatccaaatatgtcatacttcagatcactggtcttctttttcttctgagtatttgtcgaagccgaagttgaagaaccagctgttgctgctgcctgctgctgctgctgctgaccaaaaccatgcttatggaatttctacatgcagctcaggagcc

SEQ ID NO: 222237 - DNA, 504 bp, Glycine max
ggcacagaaaagatcacatatttttcatacaagttccaagataatgcttccaggagaaagaaagtaattaacaggtaaccggaagctacggggaatattaactccaaaatagtttagacaattccttcaaatttccatttcaatttgacagttatatagcatacactcccacactatagttatttgaagccaaaagtttccaccaaagcatcaagcgccgctagcatataaccgggtccattccttggccgtttcaactgcctcggcctcattagatttccaatgcttggcaatgttctcagaaagcggatcatttgggtttggtgcacttagaagagcttgaatactcaaaagtacagtgcgaatctgaagggcaggactccacttatctttcagaatggcaagacatatcctgccaagcttatcaatgtttggaagatatatttttggcagaaacctaacctttggagcagccattggatattcttctggcaaaaataattc

SEQ ID NO: 222238 - DNA, 471 bp, Glycine max
gccacagcctttatagacaaaccaaatgcttatatcaacacaaacacgtatacagaaagaaaccacttgaagaaaacagaagaaaacaaaactaacaaattggaagtggagcaccattccactctccaaggcattccaaaagtggatcaatgatcttcccttggcacatagcagtaaaaactttgtcacactcttcacccggtgagacaaccctttcaccagtaagcaatgctgtccccaactcctctctcacaaacttgtacaaggggtaagacctgcattccttgatcttgttgggaatagcacattggtcattctcatatgcaactcttgcaccttccacttccttaggcaaaagggtcttcaactcctcctcaaatgttgcgatcttttggaagattgatgtgttcgtgttcgtctcgttctccccattggccaatgcatagtccacaagcacttgcctcaggtttt

SEQ ID NO: 222239 - DNA, 526 bp, Glycine max
tttttttttttttttttttttttttttttttttatttttttttttatttgggtttgggatttattaattttttatatattatatatacttaaatatattatatataaaattcataaaaaaaaaataaaaaaaaaaaaaaaggaaaaaaaaacacccaaataaaaaaaaaaaaaaaaaaaaaaaaaggaaaaaaaaaaaaacaaaaaaaaaaaaaaaaaaaaaaaaaaaaaaaaaaaaaaaaaaaaaaagaaaagaaaaagaaaaaaaaaaaaaacaaaaaaaaaataaaaaaattagggaaaaaaaaaaaaccaaagaaaaagaaaagctaaaaaaaaaaaaagaagggaaaaaaacacaaaaaaagggggaaaagcgcaaaaatagggggaaaaaaaaacccctaccaaaaagaaaggagggaacaaaaggcacaaaaaaaaagcagaaatgaaaaaaaaagagggataaaaaaaaaaagaaaaaaaaaataaaaaaaaaaaaaggaggaaaaaattttaacaac

SEQ ID NO: 222240 - DNA, 514 bp, Glycine max
ggctttaggtgttcctgctcttccgttgacatacgtggctcacgttctggcagttgttgccagcgtcttggtcgtggtctgggtcgtcaatttcaggggtggcttggcttgggattctgataacaagtccctcatcttcaacattcatccagttcttattgttattggcttactagttcatgggggtgaagctattataagttacaaagcttttcccctaaagaaggaagtgaagaaattgatacaccttgttttccatgccatcgcattaatacttggaatagttggaatttatactgccttcaagtttcacaatgaaagtgggattgccaatctctacagcttgcattcatggcttggaattggggttattgtcctttatggcattcagtggatatatgggtttgtgatctttttcttccctggtgggactccagacattagacgcgccttacttccttggcacgcgctatttgggctggttgtatttgtcctggctgtgggcactgctgct

SEQ ID NO: 222241 - DNA, 563 bp, Glycine max
agggttaatatattgaaattgatgattaaatacaagctttagatccaagaatacaaacaacaaattatttccttcctccaactcccaatacaaacttttatagcagacatgagattattccataaaataaaaatatgatacaaacttacaagtgtctatatggcttcatagtcatctgctgcaggggctgggggagcatcagctagagcagataacacaacaaaggcaccaaataagattgtgataatggcagtgaagttgacaagcaaagcctcagaaccatatttgtccaatcctgagttctcaaggaaagtgagcttctccagaaacccaagagcagcagtgcccacagccaagacaaatacaaacagcccaaatagcgcgtgccaaggaagtgaggcgcgtctaatgtctggagtcccaccagggaagaaaaagatcacaaacccatatatccactgaatgccataaaggacaataaccccaattccaagccatgaatgcaagctgtagagattggcaatcccactttcattgtgaacttgaaggagtataaatccaac

SEQ ID NO: 222242 - DNA, 574 bp, Glycine max
  unsure (1)..(574): unsure at all n locations
tctctgtctaccttaccttacctcacctcacaagggacaaagataaaaaatgaagatcattgagaaaattcacgcagcctcggctgatccaaacagggtggtgttctcatttgagttcttcccgcccaagactgaggatggggtggacaatctgtttgagaggatggaccgcatggtggtgcacaacccctcgttttgcgacatcacttggggtgctggagggacaacggctgatcttacattggaaattgccaacaagatgcagaacattgtctgtgtggagaccatgatgcacctcacctgcaccaacatgcctgttgagaagattgaccatgctctccacaccatcaagtccaatggcctccaaaatgtgcttgcacttcgaggtgatccaccgcatggtcaggacaaattcgtccaggtcgaaggcggctttgcctgtgcacgcgacttggtgcaacatatcagagctaaatatggtgactactttggcattacagtcgctggttatccagaggcacatncggatgtaatagaagtgatgggtggctacatcagaggttatcaaatgatc

SEQ ID NO: 222243 - DNA, 585 bp, Glycine max
gtaatatacatgatttttttttctcaaatgccaatgatgacaaggttctcagagaaaagaaataaaagcaaaatataacacacaagacttcgatattctactttcacagttaagaaacatcgaattcaaaggaaggagtaacttgtccttaagtcaacgtacaggttactcatgcgactcagaagaatgaaaaaataaagatgtttgggacaaagcccagaaaaataatttggtacttcaacttagaaccacgtgtaatatgaaccatcctactgagaagaaaacaaaagaaaggaaaggaacatgacaacgaacagaagtgacataactaaagaactaataaataataagctcatgtcagaaatctgcaaagacggtgaaaagatcaccattgatgtaatcattgtcgaccaaactcaccaagaagtagctgcccccaacctttttaaccaatttcctggatgcatcacccttagggtacaagcttgcccatcctcttgaccaaatttcaaatgcctcatccttccatacattgaagctgacaggatcaacaatggttggttgaattatctccttagctgggaa

SEQ ID NO: 222244 - DNA, 294 bp, Glycine max
  unsure (1)..(294): unsure at all n locations
tctctgtctaccttaccttacctcacctcacaagggacaaagataaaaaatgaagatcattgagaaaattcacgcagcctcggctgatccaaacagggtggtgttctcatttgagttcttcccgcccaagactgaggatggngtggacaatctgtttgagaggatggaccgcatggtggtgcacaacccctcgttttgcgacatcacttggggtgctggagggacaacggctgatcttacattggaaattgccaacaagatgcagaacattgtctgtgtggagaccatgatgca

SEQ ID NO: 222245 - DNA, 536 bp, Glycine max
gtaatatacatgatttttttttctcaaatgccaatgatgacaaggttctcagagaaaagaaataaaagcaaaatataacacacaagacttcgatattctactttcacagttaagaaacatcgaattcaaaggaaggagtaacttgtccttaagtcaacgtacaggttactcatgcgactcagaagaatgaaaaaataaagatgtttgggacaaagcccagaaaaataatttggtacttcaacttagaaccacgtgtaatatgaaccatcctactgagaagaaaacaaaagaaaggaaaggaacatgacaacgaacagaagtgacataactaaagaactaataaataataagctcatgtcagaaatctgcaaagacggtgaaaagatcaccattgatgtaatcattgtcgaccaaactcaccaagaagtagctgcccccaaccttttaaccaatttcctggatgcatcaccctcagggtacaagcttgcccatcctcttgaccaaatatcaaatgccttatccttccatacattgaa

SEQ ID NO: 222246 - DNA, 488 bp, Glycine max
ctcgagccgaatcggctcgagctggtcggaacagtatgcagttcagtatcacatcacaattccttcatatcttctctcttaccatcttcattatcattacctcttcactttcacaatccagccagttttgtgatgtgggaactgaaattccatcatccaagctgttgatcaagggtggcacggttgtgaatgctcagcacccccagattgctgatgtttacgtggaagatggcatcattgttgcagttaatcctaacatcagggtaggagatgacgtcactgtcattgatgccaccggcaaatatgtcatgccaggtggcattgatcctcacacccatctagatatggatgttggttttactgcaacggttgatgacttcttcagtggtcaggcggcagcattggctggtgggacaacaatgcacattgacttcgttataccacttaatgggagtttgacagctggttttggagactatggaaagaag

SEQ ID NO: 222247 - DNA, 537 bp, Glycine max
cttccttccttccttcttccgatttcgaagatggctgaagcagaggatgccgtacgacgccgtaatgcggtcgccgagtatcgaaagaaacttctccagcacaaggaattggaatccagagtccgatccgtcagggagaatttgcgagcttcaaagaaagagttcaataaaacagaagatgatttgaagtctcttcaaagtgttgggcagatcattggcgaagttctcaggcctcttgacaacgaacgccttattgttaaagcaagcagcggtcccaggtatgtggttggttgccgcagtaaagtggataaggaaaaattgacttccgggacaagggtggttctcgatatgacaacactcaccataatgcgagctcttcctcgagaagttgatccagtggtttacaatatgttgcatgaagatcctggtaatatcagctattcagctgttggtggcttatctgatcagatcagggaattgagggagtcaattgactacctctgatgaatcctgagctctttcttcgagttggaataa

SEQ ID NO: 222248 - DNA, 488 bp, Glycine max
acttagaaattatatttattttaaaaaagctttgaacaagatgatcatgaaagtacaacagcagtgattaaaatttaaacacaagtacacaactatcacaacgattgccatatgccgcaaacagaatttccacctattcctccaagttctattctaacttaagcagaacctaattcctagtcattaaacaaagacaatacagataacaagaagttaaaaaatagcctccaagaaactatacatgcacacatggaaaagtgaagcatatgaacttgcaaggtgtagcccttcttgtacatacataactaaaattgctctacattattgaacatgcattagggttgtcatcactgaagagggaggtgagcttctcatccggtgcgttagggttggggagtgcttgttcagtgtttttcacataccctgatggtgccttcttgtcatatgcctgaactacatagggatatgccaccaaattgtactgaata

SEQ ID NO: 222249 - DNA, 344 bp, Glycine max
gactgggaaaagaattctcagcttattcatttaacatttatttaagatatcttatacattgaaactgtcatatcaaggggccatccttacagcaagcatgtcttgttaagacaacactttgaacccatgtcagccagactaacatctgggtatatatagaactctcttcagactgcaaaatcgcattattttgtgcagcctcatgtgctaggatagctttctagccaaagtttatcccctgagctaatggtagttcacttccataattgatggtacatgtagaacgccgcatgtattgcttccatgagtcacttcccgcttcacggccaccacctgtcgccttt

SEQ ID NO: 222250 - DNA, 526 bp, Glycine max
aagacaaccataatttgcactataaaatccgacaaacaaaatttccaaattgtctgcataattatgataaccttaactcgcaaaacaaaaaaaccaaagatatttagttcttgatgggcatacaaaacaaaaatctaatacgaaaatatgaatcataaagtttactgtgaaacacccagccacttagaaaagttgtcgaattctgtataatcagaatctgacaccatagtgtgataccatgctttcccagcagacttgatggcagaagcttcctccttagagacagtcttcctcttcttgtcgagctttctccttcttggccttaacgcgctgagctttagcaagaagagccatcctcttagcagtcttggcataaggattcagcttcacatagagttcaggttcttaggagggttcttcttcaacgtggccttcttcacatccttcttaatgggcctaacaacagactgaacctcgtcagaattaataatcctggcaagatcagagttaacatctttgggcctgg

SEQ ID NO: 222251 - DNA, 495 bp, Glycine max
  unsure (1)..(495): unsure at all n locations
cacaaaagaaggttgaaagctctgattctgatgatagcagctctgatgaagacaaggggaagatggatatcgatgatgatgatgatagttctgatgaaagtgaagagccacaaaagaaaaaggctgtgaaaaattcaaaagaaagcagtgacagttctgaagaagacagcgaggatgaaagtgaagagaaaccctccaaaactcctcagaaaagaggcacggacgtggagatggttgatgctgccttgtctgaaaagaaagctcctaagaccccagttacaccaagagaagaatctggcacttcaaagacactatttgttgggaacttgccatttactgttgagcgggctgacgtggaagggttcttcaaggatgccggagaagttgttgatgttcgctttgctacagatgatactgngaagtttaaaggatttggacatgttgagtttgcaacagcagaggctgcccaaaatgctcttgggttgaatggacaac

SEQ ID NO: 222252 - DNA, 509 bp, Glycine max
atattaatattggatttgattcaaataatgaaagcgtaattgtgaagagccacaaatactatatttaaataataatccatgcgataagtatcaaatcatataacaactgaattctacgaattcatactaactacggaataccaaaacaaaactggggagccaacactacaggaaagtttagaaaataaatattaaactttaagtatctgctagagttgccaccctactcatcatcagcaaatttggtctttttccctgtgccttccgcagcaaggttgggtctatttccccgaccccttccaccaccacccctttcaccaaatcgaccaccaccacttccaccaaatggaccgtcaccaccaattccaccaaatcgaacggcaccacccctagcaccaaatcgaccaccgtcaccacccctagcaccaaatcgaccaccaccaccactcctaccaccaggacctctacccccagaaccctgattatctctaggtttggcttcatccact

SEQ ID NO: 222253 - DNA, 533 bp, Glycine max
aaccaacaaagtttactcatttggaaatgaacattgttcaagaacaattagatcaaagctcaatgcaacaccaaggatgccacaaaaccctcttattttgaaacctatcctatattaagcctctacaggagcaagagctcgcagctctcattgtaccttaatccactgttggctgaaacccaaccataataataatataaagcacaaacttcaaaggaacgaatgatttttgctcaagcatcatcaagagcaaggacaccagggagttgctttccctcaagaagctctaagctggcaccaccaccagtggagatgtggctcatcttgtctgcaagtccaaccttctccacagcggcaacggagtcacctcctccaatgatggttgtcactcccttcccactcagctctgccagtttcttggctatagcctctgttcctgtggcaaacttatcaaactcaaaaacacccattggtccattccaaataatggtctgagtcgtatcaatgcttcaccaaatgtcttgatggaatca

SEQ ID NO: 222254 - DNA, 448 bp, Glycine max
ccaacaatccttgcatcatgttcgaattataatttacataattattacaggcggtgaataatagataaaggtacagttaaaaatgcaaaaagccatgaagctcgagacatcaaaacggggaacaaagatgaaacttgaagggacaggacacacaagtgaatagaacaagaagtcatatttttcaagttgaagctcaagggtaggtttcagaggctgggacagccgcatatgaaccaatgaagacgtctccataaatcaagccagccaaacctcctccaatcaatgggccaacccaatagatccagttagcagcgaagtctccactgaccacagctgggccgaatgagcgagctgggttcattgaaccgccactgaatgggcctgctgctaagatgttggcacccacaacgaacccaatagcaatgggtgcaatgatacccaatgaccc

SEQ ID NO: 222255 - DNA, 505 bp, Glycine max
  unsure (1)..(505): unsure at all n locations
atgtaactagctaatcatattaaatggtcatttgcagagaagacaattaattagtacaagctacttcaaataaatttcagtgactacagtaatcaaagttaaatccccatggttccaaaaacttnctcaagtgcaagcctgtgcagttatagagatagcatgacaccaattcatgaatagagtctaagcttctctagtttccaggtacacactatataacctaccttatgacagcaaaagaaaaaaataataacagacccttttctcttctcctaacagaaataatatgaactttaccaacaccttcaaaccccagctactcacacttgatggaccggtatatgtgacgaacaaagagcagggaggcacggaatcctacgctaccgagcatgaggaagaagccatagcagatacaggccatgtaaccaaagaagaacgaagtttgcataaaaccagacatatctgatcgtgcatagtagtaatacaagcaatagccgtagatgaa

SEQ ID NO: 222256 - DNA, 516 bp, Glycine max
  unsure (1)..(516): unsure at all n locations
aactgataattttatatcataacatacgtcacgatatgaaacttaaaattactattaagatatctagagactagagatactgggtgatctaaaaacatccattaatttaaactcggatcccagctacacctttccctgcactaaactctactacaccaagcaaaagctcccgtttttattaagtaaaccatacataaaagaaaaccgaaaagaaaagaagatcaaaggaagataggtagcacctaaggttcactaaattctgataacgagatacaaaagggtgtgcagcccacatgtaactttgtgtctatatcccatgtgaggaacagctccctttcaaagctcatcttttcctttttcttgctcatcttgtccttgttcttgctgagcaggtttatcttgtccttgttcttgctgagcaggtttgtcccggttcttttcgatgaattctatgatgtcttccttggtcctacccncttcgtattgtgataactttccacttgctgacctgaagta

SEQ ID NO: 222257 - DNA, 536 bp, Glycine max
gtcagtggactcatcaggatcctcatcagcaatcctacggatcatatcaagggctttcctaataagtttcttcttgattgtctttagactactatgttgctgaagcatttcttgcgatacattaagtggcaatgtgtcagaatcaacaagacccagcaaaaagtttaggtacttaggcaacagttcattaaattcatctgaaatgaacacacgtctaacatacaacttcaggttggatttgtttgcgttataatagctctcgtataaatcttgaggtgccttaggtggtacaaacaggactgccttgaactcgacatcgccctcagcagtgaaatgactccatgctaaaggtttctcatcactgaaatccttggcagagagtggtagaatttggtgtattcttcttctgtaacctcctttggattcctcagccatatagctttcacatcatttaaaagttcccatcataagttgtttccttcaccgtctttgtcttgggctttttttcttcgtcttcacttttatcagcatcttca

SEQ ID NO: 222258 - DNA, 443 bp, Glycine max
ataattaaaagtagtgggttacagcgatgcacttgagaaacatattaagtggactaattctccctggtcaagcaagaaaaaaacccacctttgacccaaggtagagagagattatacacagaatactagtaattaactaagactggctctgcaattgccaaaaactccattgcagtagcagccacctgagaagacactaagacctagactagaccatacataatgaagattaatacccttacataacaacataggacactaagaaaacacggcttcacagagaatcccagtcgatctcataagaggggtacttctggagattaaaattatccgaatcaccttcccactgcggctcgctgacgtcagcgaaagtcagaaccgaaagcggcgaagaacctttagaagaggaggaagcagcttcgaccttacaagagttgttgtcg

SEQ ID NO: 222259 - DNA, 301 bp, Glycine max
gtcaaaatatatattgccattgggtttgggtctgtaacagaagcagcgaagcataaaaacaatgcatccaaattaaaacccacaacggtactggtgcattttgaacatcaaacacatcaacagaaaaagaccacaagaacaagaatctgaagtagattctagtagtcttcgtcctcatcctggccctcaccagactcagcacccactttttcataatccttctcgagggctgaaagatcctcacgggtttttgaaaatttacctttttcttaccttacaccccttcccattgaccaaaggc

SEQ ID NO: 222260 - DNA, 393 bp, Glycine max
  unsure (1)..(393): unsure at all n locations
aaaaattatccttataaacttataacagccaaacagtattggattgcagtacaaggaaacacaaaacatatggcctcgtactttcccaaaatttatactcattnattgccaactactatggaaaagtgaaaaatggcaaccaaaaaattgttccaaaaaaaaaattattagtaataaaaatggacccaattgaatgcctcaatccttgaaaattttttcttatgccacagctggcatgtccttgagccatggatccagtggcttcccaattgagtacacaatgaaaccaatatcacgtagcttctccacatccacaatgttcctttcatcaaaaacaaatgctggttttctcatgttgtcatacaccttctgataatcaagagtttttgaact

SEQ ID NO: 222261 - DNA, 479 bp, Glycine max
gggggagggtgccatttgcatttttatcaaccatgtcaaaaaatgttttgagcctagtatcaaagctttggtcaaaaaatatgaccccagaaattcctttatttggatctttggtaatggaacccccctgaatacctttctgcctagcaagagtttcaaaaagcttttttgcataagcctcaaactttttgttcaaccctaagcattgggcaaagagagcccgaggaaaatagccctcaggggtagcagtaagcttgtgaaagcgctttttcaccttaacccattctgggccaccattggttttgctgataaacttgagccccgggagagcatgacccactgcagactttgtcctttcaaagggtttgggcgctggttttgaaaatgatgccaaacgctttaactgcttcatgcgaatggcagcactctgaaccacagaggcaccaaaggatgtttttttttcaaaccttttttttccc

SEQ ID NO: 222262 - DNA, 545 bp, Glycine max
aaatatcaattttgtactgtgtttttttttatagttgaccatcaagctgtagatacacaatgccgtgttgaatggtttatagacaattttagaacaccaaagtacttgatgccttaagttaaatttaacaggcaattcaaaatgatagaaacgatggaagaagatggatctaacatcgagaaggcctatcataagttggaggaagagaagggcaatactcattcatgttggcatatggctccaaggtgttatagccaggcagttccatcttgtattcaccaagaatctgacagaatggaatccggtcattctcattgttgcaccaacttggtaggcgtgtttggttgtcctcgaaaattctgagcatgtatgcatcgcgaatggtgaactcggttacttgaatggaattagcaatgggaccaaaaacttcagcctctttatacatagaaaggataaaggcaacacaagttgtcgactttccatcactgtatacccattcatcttgttctggaatggtgagtaattcatcaaaggtattccacgct

SEQ ID NO: 222263 - DNA, 443 bp, Glycine max
aagaaacgtccaaagtggccttattcaggggtaatatgaacattaaagtggattcgtcgtggcataaatacgatgatgtaaaagtaatactatccttgtaatattacattacacacaatctgcacttagtggacactggatggatgctatatcattacataacacacgaaggctgcgaataagtagctaatacccttttcacgaagaaaagtgctggccctcgcacgcggggctatcgtcgaaattcttcgatggatacttcgccgtgaccataccgacctcgaagacgatatcatcgccggaggagcggattccggtgatggaccaccacttgaagaacgcgcgaaccctaatcccctcgagttcagcgattttccccttcacgatcttccctgtgatggtgtcggaataggtggcgaccgtaattgtccggcgggagcgtg

SEQ ID NO: 222264 - DNA, 584 bp, Glycine max
  unsure (1)..(584): unsure at all n locations
caatttccattgaaggggtgcaacttttcgcttcgtatttcagccaagccaagaaactcatcctctcagcaccatctgatgacagtgaagagatttccttggagccattcaatttcgagcttataacagtttcccctgtgactgtcttgcctggcaagtcagtgaagtttgctcctattggtttggtgaatatgctaaacactggtggagcagtccagtctttagcttttgatgagggtcagaatttggttgaagttggtttaagaggcactggggagatgagagtctatgcctcagagaaaccaagaacttgtagaattgatggcaaagaagttgattttgaatatgaagggtctatggtcaacattcaagtaccatggcctggttcttcaaaattgtccactgttcagtatgtattttaagcctagaagtgatttctttttaacttttgaatggttgtccacagtgaatgatgtgaaagggctttttctcccttactaccgagtgaaatactagagtgatctaataattgtatcaagagcntagattccttttattcaatgaaagccagtttttctgagtgt

SEQ ID NO: 222265 - DNA, 559 bp, Glycine max
tctcgatctataactagcactgaggaataatcagaagatgacaagggaaattcaagaagcaccattcaactcgtaattcttgacacctccaatttggtgaacattgacacctctggaattactgcttttagaggaactgcataagagtttgtcttcacaaggaaaacagttagccattgcgaaccctaggtggcaagtgatacacaagctaaaggtgtccaactttgtcggcaaaatcggtggcagagtctttctgactgttgaagaagctgttggctgcaagagccgctgctaaattcgataaacacaccttagtttcatgatctcatgtggcaaaataaaaacagtgtttaatatctatttgtctttgtggaaaatcttaacagtagttcttgtgaattgttcctttgtatttccactcccaagtacgttatgttcgaaatgggaaattagaataagtcatctcgtaattcatgttggagatgctgtgactgtgagtttctgttcatttatcatggatgtgcttaataaaatagcagtttgaaaaaaactcgagccg

SEQ ID NO: 222266 - DNA, 535 bp, Glycine max
ccaacttcttttttctttctttgaatggcggaacaatacaacatttttttacacagcaaagctatggtcaaacaggaagtttggtatcttttgctttccacgagaatttgatatcaaatattttaatgaacggcgtgtaaccaaaacagagaaaacagagcactctttttaataaacaaacacagctttagttcaatgaaaaacttttccagactcttgatgatgatggatggatgttgcgggtgtcgtgctggtatactttcttttactaatcaacaagtttgctgcctttgacatccactacaaacctgtatctcacatcgttcttctccaacctttcaaaggctttgttaatgtaatccatgtttaccacttcaatcatcgaactcagacccttctattttcagaactccaacattttctttgtttccttcatgcttcacaataaagcttcccgtgattgaccctcctcctagcatgaccatggggctaacaaattgaaaaggggtgttgttgacacccatcaagatcaact

SEQ ID NO: 222267 - DNA, 541 bp, Glycine max
aagaagggtcaatcaagatgattcttaattcttattatgtgcaatcaacatcccaaactccagatatttattacatgctgcaataatctaaattgaattgaatagttactggggggcaattagcgtccccttgccaactccacacaatatccctgagcgaaggtctgacttggtcctcacagaaattaaggtattcaagcgtgtctccggcggacttggagaactcgaccaccgcgacctccggcgccacctcgaatacctccaccgtcatggccagcttccccttcctcccttccgtcgccccctgcatcctcaccatgaactccttcttccccgtcaccctaaagttcagcttcttggccaccccctccagcttcgccatcaccgccgaagccgaaaacttggaaatgaacattgacggcgaccgcttcctcgtctcaaacaaattcctcagatcgaacccatgcgacaaggacgagattatctaaaagcgttgtaagacggacgagcaggcttagcccccgtcaactccccatcctcg

SEQ ID NO: 222268 - DNA, 463 bp, Glycine max
ctactaccttctccagacaagagtttacggattcgaatgtgggttcgccgccaaagaagatggaggggaggactatatactaccacgttgcagaagataatggggatgtggatgatgagaatgtgcagggttattctttgaatttcaaagggaatggggttgagcagttagctcgaaagtttgaggaagagactgggcttgagggagttattgcgtgcactcgaagtcctttgaatggaaaactctacccttttcgattgcagctttctccaaacaatgtcaccatgcaggttggattggttcttccctaatctaaagtggcacgagaatttgaggagcaaggtatactatgacaagctacattattgctggagccttgaatctactgaaatgcaaggcctatgtacgttgtgatccaaggcgtgtttcagattttatgtgatagcatttaacaatatgttgc

SEQ ID NO: 222269 - DNA, 397 bp, Glycine max
atcaataatgtttaaggctttggcatataatgctatttcattttttttagggaactacagaagaataaaactactagaaagaaaaaactcttgaacaatgttcattaccctggaggaaaaaacagtacaactattgggaacaagctcgacaaaacagaatgaggaaaataattttagcactctagaaaactagctcatggggcttcactcctgccttcaaggaaaacctagcacccaagtaagacttgagctctggaacactctcaatggcctttaacaaagcagtgtccacggttttttggtcatctttcttttcttggggaagcacatttttctccttcctctctggcttaaagaattcgccttcgccctttgggttccttttgctaagcttctt

SEQ ID NO: 222270 - DNA, 477 bp, Glycine max
agcacaaaattttctggttcttattacaagagcatgatctaccagcaaagttggaaatatgaataacaatagagcccacttattccaacacacatacaacaaccatacccataagggatcacacgtatgtagacagagaccacatggcatagcataactaatcaaaaaacatggcatagcataaataatcaaaccccaaaaaataaatgatacaagattcatccatgaacaagacaagattcttagctatttataaatgcacaatgcttcctgatctctccttctgtccctgtcttcacattaattcttcccattttctcgatggaggttgcaaactcagcaaagaaattttcaactgacccttcaagcaattggatgatttgtgcctttgtaactgagttagtcaataatgcagcatctgactcaaatagaccccttctcttattaacgtgactatagtagctaagatcaaatgtc

SEQ ID NO: 222271 - DNA, 536 bp, Glycine max
ggattagaattttcctgatacttaattattatctggttataccacacgttggtttccttcatgagtacaaaccgaaataaaaccaacaattaatcttgttttattacaacacacaagcttgacatttcagtacaatagtttattttcaagcaatgagattctaaaaccagaaccacaaacgaaacaccgttgagattctcaacgagttcactcctgatcaagcagagatatcagagactaaaagttggcaaagttcttttctttcaaagtttccactgtctctctaagactcacttccaaaggaataaatttaatccccaaggtctttgccttttctttggaaacctgaaatgttggtacataaggcttatcgtctgcagacttttctggaatttgatatgtcgggtactgatcacgtaaaatcctggcgagttcaaagtattgtgcctctctttcaactaaacaatatcttgcactagctgaagcaatcttatatgcctgaatatgggcgtttgcaacatctttacattgatcca

SEQ ID NO: 222272 - DNA, 538 bp, Glycine max
acaataataaatccatatttttataattaaaagtagtagattacagcgatgcacttgagaaacatattaagtggactaattctccctggtcaagcaagaaaaaaacccagctatgacccaaggtagagagagattatacacagaatactagtaattaactaagactggctctgcaattgccaaaaactccattgcagtagcagccacctgagaagacactaagacctagactagaccatacataatgaagattaatacccttacataacaacataggacactaagaaaacacggcttcacagagaatcccagtcgatctcataagaggggtacttctggagattaaaattatccgaatcaccttcccactgcggctcgctgacgtcagcgaaagtcagaaccgaaagcggcgaagaaccttcagaagaggaggaagcagcttcgaccttacagagttgttgtcgttgttgttgtcgttctctggcggagaagcgagtttgggtcgcgttttcctcggaggcttctcggtcttcccctg

SEQ ID NO: 222273 - DNA, 486 bp, Glycine max
caaatcaagttcacatatttccaaatatacactggtacaaggatacacaaaataaccacacatacactgacaagcattatttgtgttactagaaagtagattgatccaaaagggtaaccacacactccttagatagagatactgttgggaattcctctgaaagtcaacccttcctcacttgtaggaaggagcaatgtgtatggcagctgaactggtccatagcgatttttcttatttgaatccttgtttctcgctgtgatttttccctcaatttctgccagcttgcttccaaactttttgaatgcttctaatgcctttgaatcagatgtccaattaggattgtctctctccccaaggtagatctcatcagaagcatgccttgacaatatctctatcaccgtaagatcaataatggtttggcgcttcggtgtaatggttctcaaataagccgtttggggactctccaacatctcatcatattttttg

SEQ ID NO: 222274 - DNA, 428 bp, Glycine max
actattcaaacacacaataagtcatgtaatgcatcatagtttatacataagaagccacgcatagcatctaaataaacagcaaaaaattattaatttctagagaactacacagtgcaaatacatgcatatatatagagttctgtagtgctactgaagctaagttattcaagaacaggaaagaaggacttgaaattaaagcaaatctacttgggaacccaaacaacatgatcctcaggtaggaagtggcagacaggaacggttcctggcttaactttgagcacttgaaaggccaaatgtttagggttccattccgacgtgtgagtgtggcacactgctaccgctttaaccctaaccccattagcaccctccaaaggcacagagtaagctcttgtggtctcagttttgtgacagtaaaaaacagcataagg

SEQ ID NO: 222275 - DNA, 402 bp, Glycine max
agagagggctttacacgctcttaaatgggactgcgacgagtcgactcgccctgggcgcggtgagtccgaacacgtcactcgtgtccaactcgctgggtttcattccatctggtaactcccatgtgaagcagtgaagcaagtgtgccatggccagttccagcgtgtaaagacccagttgcattccggggcaggatctccgacccgacccgaatggaatgaactcaaagttactccctttgaaatccggcacgtgcgggttcagaaaccgcgaaggcttgaacgcttccgcgtcctcccacgcgctcttgtcccgccctatggcccacgcgtttatcatcacgcgcgagcccttcggcacggggtaacaacacacggccgaatcctccgaagtttaatggagga

SEQ ID NO: 222276 - DNA, 515 bp, Glycine max
tttttttttttttttttttttttttttttttttttcacaaaaatgaaacccttacattttcatttcaattgctgcttactttgaaaattaaaaaaaaatatatatatatatatatataatataatataatataatttttcacagacatacaaaaaaatcctactacaatagcaatgaaacaagaattttctactaggggtccttagtccttacatgtcgacacaattcctaacatagctaatggatcttcattcttcacccagttgagatcatttttcttatttttaggtacctatgatctcattttttcctagggatcaatggcagtcaaattcaacaatcccaagaacagataatagtcaccacacgtgcagaccaaagccggcatgagtagtagttaggtacagtagtatagtaggtacgcttgaatgtgatttttttgttgtttttttttttaacgaattttaaaaataaatgtgagacccgtatttccttcttggggtcccattgaccct

SEQ ID NO: 222277 - DNA, 424 bp, Glycine max
aaaaaaaaacttagtgaatatttcattagccaagactacagggcacagtttgcacaccaaaaacatattacataccacactatgttaaagccacatcttgcaggtcacccttgtaaaatcaattattttcactacacacccttgaataataagcgggttgctttcggctatggagaacatgtactaatgtgtctcactcttttaactcaaaccttaaattacagacagaagcatgttgattgtagtggagcttatgcatgttcatggaatgggacagacaactatttttccagttgcttatgtttgtttccagatgggcaaacgctttaacagtctgagaaaatggaaacgggctctttgtgttcaagatttggctatagcttaccattctcaaaataagggcttagtttttctaaatacgccc

SEQ ID NO: 222278 - DNA, 597 bp, Glycine max
ctgtcgccccctttctctctctaaatccctttctctctctacctgactcaaattcgaaattgggaaagaagtggggcgagggcattttggtcatacttgctatgctaaggggaagaagggtgaactcaaagaccagcctgttgcaattaaaatcatttccaaggccaagatgaccactgcaatagcaattgaagatgttcgcagagaggtgaagatattaaaagctctatctggccataaacatctcgtcaaatttcatgatgcttttgaggatgccaacaatgtgtacatagttatggaattgtgtgaaggtggggagcttcttgacagaattttgtcaaggggaggaaagtattctgaggaggatgccaaggttatagttttgcagatcctaagcgtagttgcattttgtcatcttcaaggtgttgtgcaccgtgacttgaaacctgagaatttcctctacacttcgagaagtgaagatgctgacatgaagttgattgattttggtctttctgacttcatccgaccagatgagcgattgaatgacatttgtgggagtgcgtattatgttgcacctgaggtccttcacaggtcata

SEQ ID NO: 222279 - DNA, 420 bp, Glycine max
actatatgtaatctttaaaagcattcacaaattaatgaatattcatgggatcagacccatggcaaacatatcatttgcgaaataggccaaaggagcaaggatttggcatataattgactcgacattccctgtattgacttgctaacacattcatttatacatattctttttttgccccataaagaaaaatgatagaagaaaaaatccacaaaaaatctctaaatctatttttttttcccgcatattcaaactatatgtcaaagggcccaagactaccggtgttgtcttgggtttgaactacggagagtcacaccatgcaaaaattttgtatatccaagtaaactaagctttccatcagtatttcttatccaatctttgagaactgaataagctgaaggcccaagattcaactctctggct

SEQ ID NO: 222280 - DNA, 342 bp, Glycine max
ctcgagccgaatcggctcgagaaccatttcatcacacacacatactaagaagcaacaattcttctacaatggatctcctgcttctggaaaagacccttatttgtctcttactcgctgcggtggtcgccatcgccgtctccaccctccgcggtcggaaattcaagctcccaccgggcccactccccgtaccaatcttgtgcaactggctccaagtaagatactacctgaaccaccgcaacctcaccgatttggccaaataattaggtgacatcttactgctccgtatggggcagcgcaacctcgccgagggttcttcccctgagctcgccaaagaggttctcc

SEQ ID NO: 222281 - DNA, 557 bp, Glycine max
  unsure (1)..(557): unsure at all n locations
gtgatgtgctctctggaacatcttcaagtggagatcatcactatggtatccttgaaggatggtttggtgtgcaatggtggacaggccggacatttgttgtactttttactacacttgccatatttgtacctcttgcgagctttaagcgaattgattcattgagattcacgtccgccctttcagtcgcacttgcagttgtttttctagtcattgccgtgggaattgctgttgtcaagatatttagtggaggcattgtgatgcccagactcttccctgtcacgactgatgtggcatcattcttcagactattcactgtagttcctgtgtttgtgactgcgtatatctgccactacaatgttcacagcatagacaatgaacttgaggactcctcacagatgcaaggggttgtacaaaccgcccttgttctatgctcttcagtgtatgtaatgataagcttctttgggttcctcctatttggcgaaggaactcttgatgatgtactggccaatttcgataccgatctttgaattcctttncgttctgtgctcaatgatgct

SEQ ID NO: 222282 - DNA, 282 bp, Glycine max
  unsure (1)..(282): unsure at all n locations
tgcgctgctgatacactcagaanaccactatgccgcatcgccacctcggaatgtctggtagatggaatgagcggaacaagaaggagaccttcctgggtttggctaccatgaccctaaattctgtgaacaatccattcaaaagccaatggacatcatattgcttgtcaaggctaccgctcatgttgaccttaccatcaagaccctttcaacacgctgggataccggttagtgcatcattgttagagccgatgagacgagtcagaacattgacagaagatagaa

SEQ ID NO: 222283 - DNA, 507 bp, Glycine max
gctggttgccacactacaccgatatttccaccaaacccgtttgcgttgttgtttgcgaataaatggcgactaagaggagcgtgggaacgttgaaggagggtgatttgaaggggaagagggtattcgtgagggtcgatctgaacgtgcctttggatgacaaccttaacatcaccgatgacactagagtccgtgctgctgttcccaccatcaagtacttgactggttatggtgctaaagtgatcctttctagccatttgggacgtccaaaaggtgtaacacctaaatacagtttgaagcctcttgtgccaaggctgtctcaacttcttggaattgaggttacgatggccaatgactctattggggaggaagttgaaaagttggttacacaacttccagaaggtggtgttttgcttctagagaatgtgaggttctacaaggaggaagagaagaatgatcctgaatttgcaaagaagttggcttctctagctgatctctatgtgaatgatg

SEQ ID NO: 222284 - DNA, 544 bp, Glycine max
gttatccgaagaccataaagttgatgagaagggaagaatcagcacctataaagttgaattcattgtggactctgattttgggatccctggtgctgttaccgtggttaacggctttgacaatgagttcttcttggaaagcataaccatggcacaaaatgttcattttgcttgcaaatcttgggttcaaccaaacaagcttgacccagagaagagaattttcttcgttaacaaggtgtatctaccctgtgaaacaccaattggggtgaaagaactaagagaaaaggaactgaaacagctaaggggtgatggatggggacttagggtatcttctgatagaatctatgactatgatgtatacaatgatttgggtgattcagacaaaggagataggtttgcaaggccaacactgggtggtcaacacaacccttaccccacacgttgccgcactggacgaccaccatctaccgttgatacgaaaatggagtcacgaccgagtgatgaatcagagttaatatacgttcctagagatgaagaactgggggac

SEQ ID NO: 222285 - DNA, 505 bp, Glycine max
agttcacacattttgaacttttttttttttacattatactctggatcagggcataaacgtgtacaagttaaaacatgcaccagactagagtaaactgtgataaaacatacacaacattctttttgaccaagaaggattcttaatgctactcagtacacgatacttacagatgatttcaaacctgcattattcccttttggattttattttcttttttggttttaggagatcaaatattaaatccattttagtccagctaaggggaagaataatagaacattgattcagttgctggtttgtacacatattggactaggctgtaacactatttggcactcctcgtcctgttgccccacgttcagaacttgggataagcagttcatatggtaaaacgttaacgccacatctggttctaagttttggatcggcatttcttctcttgatctccatctcaatacttttcatctccattgaaaattgattgaatgcatcaatgatctcaggc

SEQ ID NO: 222286 - DNA, 551 bp, Glycine max
caggtgaggtgattcggctaccaaaaggggtttcaattccagtgacactaaaagttctggagtttgagcttttccacttctgtccaatccaagaaatagctccaagtatatcatttgcagcaatagggctactggatatgttcaacactggaggagcagtggagcaggttgagattcataaccgagcagcaacgaaaacaatagctcttagtgtaaggggaagaggcagatttggagtttactcctcccagagaccactgaagtgtgtggtaggtggcgctgaaaccgacttcaactatgactcagagaccgggttgacaaccttctccattccagtttctccagaggagatgtacagatggtcaatagagatccaagtttgagtcctttttaagacttggtgtttgatgcattgttgtatcaggagaagggttttgttgtaattaagcattgagggaattgttggagtcaggcagagagagaggggggaggtttgttgtaagacacctagtattagtatcatgtagtggagaaaaagggttgttgatcct

SEQ ID NO: 222287 - DNA, 559 bp, Glycine max
ctcgagccgattcggctcgagcgaaaaccaacccagtttattgcaaccaattcctttcctttgttcttgacatcatggctgaggcagttggtggtgcattcctctctgctttccttgatgttgtgttcgacaagctgtctacagatgaggttgttgacttcatccgtggaaagaagcttgacctcaatttgcttgagaccttaaagagcactctgagagtggttggagctgtgcttgatgatgctgagaagaaacaaatcaaactctccagtgtcaaccagtggctcatcgaactcaaagatgctctctatgaggccgatgacttgctggatgaaatttctaccaaatctgcaactcaaaagaaggtaagtaaagtgctttctcgctttactgataggaaaatggccagtaagttggaaaaaatagttgacaaattagataaagttttaggaggcatgaagggtcttcctttgcaagtgatggcaggggagatgaacgagtcatggaatactcagccaacgacatcactggaagatgggatatgcatgtatggtaggga

SEQ ID NO: 222288 - DNA, 497 bp, Glycine max
ggaatggaagggtcttgcgttcttctgcagttctgatagctagccatgttggcatgaagatttaagcgggaaaataataagacaacgtatataacgttttcacaaagtggcttttttttttattatcacaaggagtatgtgttgaatgatatattgagttgcagcactgatcagttcttaaaacatgaattcagcatccccgcatattgactccccgagaagtatgagtgtgtacgatccgatccaccagattagtatgtggggagaaggcttcaaaagtaatggtaatttaagtgcatccatgcctttaattgatgaggcagacatgaagtttgatagtcagtcagaggatgcttctcatggtatactgggagaacctaataagtatgacctagaagctatcaaaccttctgataagatacaaagacgtcttgcacaaaatcgagaggctgctcgtaagagccgattgaggaaaaaggcctatgtgcagcagttag

SEQ ID NO: 222289 - DNA, 559 bp, Glycine max
ctttgatcgcaactctttttttctttcaaaagggaaaacgaatctcaaacttcacaagtgtttgaggcgccatggcggatcggttgacgcgtattgccatcgacagcaactacaggtgcaagcccaaaaagtgccgtcaggagtgcaagaagagttgccccgtcgtcagaaccgggaggatgagtattgaggttacttcctcgtacaagattgctttcatttccgaggaattgtgtataggatgcggaatttgtgttaataaatgtccttttgaagctattcacattatcaacttgccgaaggacttggacagggatactactcatagatatggtcctaatacttttaagctgcataggttgccggttccgaagcccgggcaggtgcttgggttggttgggactaatgggattgggaagtccaccgctcttaaagttttggccgggaaactgaagccgaacttgggtcgattcactaatccccctgattggcaggaaatattgacctattttctaggatctgaactgcagaactatattacctcgattctagaggatga

SEQ ID NO: 222290 - DNA, 448 bp, Glycine max
gccacaggcgatgctattgcccttttgggtgcacttgtcatgccgcacaatcttttcctccattctgctctggtgctgtctagaaaagtacccagttccgtgcgtggcatcaatgatgcatgtagatactttctcatggaaagtggattcgcactgtttgtggcatttctgatcaatgttgcaatgatttctgtggctggaactgtatgctctgccgacaatctttctgcagaaaatgctgatcaatgcagcgatcttacccttaactctgcttccttccttctaaaaatgttttgggacggtccaacttaaccattttaggccttagactggttcgcctaagaacaaaattcggttctcacgggaacctatgcggggcaatacatcatgccgggtttcttggacatgaggatgaaaagatggattagaaattttgtgactaggtgca

SEQ ID NO: 222291 - DNA, 536 bp, Glycine max
cggccgatgtggatacgaattcaggtaccccgccggaagcactgcgtcgcggtcgactagctcactagttcgaggccgtcctttgcaaatttctactttctgggatttctatttgagattcgttgctccaatgagcgatcacttggtggtggtcgttgaccgtgtcgcgcgccctgtccccgatgacccggtggcgcagccggctatcgagccgtctcctcctccggcccccgtgaatgctgacgcttacgggagcttcggcaccgctccggtggaggattgcgactgaaagggcggcggcaaggtggatccgctgatccagatggcgtagtgccgcatatgcctttacgaggacggttgtttgcaacttggtgactccctgcgcctgtagcggctgtcttgagtatgcttcacagatagtgagcttcagcattgttgtgatgagagaggagacatatcttgtgagatatgttatcatccatattaacctgggtatactgcccccccacctcgagctaatcctgaagaaactacta

SEQ ID NO: 222292 - DNA, 442 bp, Glycine max
ctcgagccgtcgcaatgttcagaagactccgggtggcctcatcttccgccagagatggaacaacatgcagtttgtcacaagtgcctgatttttagccactgactactctgactaccttgcttactctggtagaaactcgaggtgcagatcaagcaatgtgccctctgctgaacttatctgccttgcaaagactgaggttgactatcttcttggtgacaacccacgagccactagctatatggtgggctatggaagcaacttcccacagagggttcatcacagaggttcatccattgtttccatcaaggctaaccatttatttgtcagctgccgtggaggttatgctacttggattagcaacggaaggagcgacccgaacctgctcactggtgctctcgtaggtggacctgatgcatatgatgactttgctgatgaaagagat

SEQ ID NO: 222293 - DNA, 442 bp, Glycine max
gccacaggcgatgctattgcccttttgggtgcacttgtcatgccgcacaatcttttcctccattctgctctggtgctgtctagaaaagtacccagttgcgtgcgtggcatcaatgatgcatgtagatactttctcatggaaagtggattcgcactgttggtggcatttctgatcaatgatgcaatgatttctgtggctggaactgtttgctctgccgacaatctgtctgcaaagaatgctgatcaatgcagcgagcttaccctgaactctgattccttgcttctcaagaatgttatgggacggtcgagctcaaccatttatgccatatcactgctcgcctcaggacaaagttcggctatcactggaacctatgcagggcaatacatcatgcagggtttcttggacatgaagatgaaaagatggattagaaattttgtgacta

SEQ ID NO: 222294 - DNA, 590 bp, Glycine max
  unsure (1)..(590): unsure at all n locations
ggaaacatttgatgctacacggtggttggatcggtttctcattcgcctctggtcaaagtttggtgactaccgcaaggatgatccatcatcttttacattaaacccatcattttcacttttccctcagtttatgttcaatctgcgacgctcgcagtttgtacaggtttttaacaacagtccagacgagactgcatatttccgtatgttgttaaacagggaaaatattagtaatgctgctgttatgattcaaccgtcattgatatcatattcatttaatgcgctgcctgcaccagcattgttagatgtggcttccattgctgcagacaagattttgttgttagattcatattttaatgtggttatttttcatgggatgacaatagctcaatggcgcaacttgtgataccagaatcaaccagaacaccaggcatttgcacaactattgcgagctccacatgatgatgcccaaatgataattagagaacgttttccggttcctagattggtagtgtgtgacccacatggttcccaagctagattcttgtnagcaaaactgaaatcttcagcaacgtataacaatgcacatgaga

SEQ ID NO: 222295 - DNA, 562 bp, Glycine max
aaaaaaaaaacatctccatcacttcaaaattaattttaaccaaatcaattttattaacactcatccaaacatactataaattattttaatttatttaaaatgatcgaccgttctgcaaatgtaatcaacagaaacccaaactggaattaatccgaaagcactcaattaatgggtccaataatacccagttctcgacagtgcatccttccataccagggtccactaatacagaatttgtcacttgctttgcaaatcctttcttgcacctactttagccacggtcacactaaccactgttattagccacaatggtaaacacaaccatgggatttacaggcaatcaccggcaataaattgcctgatcaatttgtgggggaatctgctttatttcagatccaagttcttgttcaatcctatataaattaaagcgatcctcataggtaatcaagttcactggtaaacccaggtgcccaaacctccctgaacgaccaaccctgtgcaaataagtctctgcgttcttgggaaaatcaaaattaataacaacgttgacctgctgaatatc

SEQ ID NO: 222296 - DNA, 506 bp, Glycine max
aagaagaaacaacctcaaaatcccttttttgtgttcgattagatattgccttcacaccagagtctgagtcctctgagactttccttcagtccttcacctcttttgtgtctaggcgcaaaacctcgtactgtttgtggcggctaaggatgtcagggaaaggggcgaaggggttgatcacaggcgaaacctgcgccgccaacaacaaagacaaggacaagaagaaacccatctcgcgttcttcacgtgccgggacttagttcccagttggccgtatccaccggctcttgaagtcaatgacaaccgccaacggtagagatggggccacagctgctgtgtactctgctgctatcttggagtatctcactgctgaagtattggagctggcggagaatgctaacaaggatctcaaagtcaatcgtattactcctcgggatttacagctagcaatccgtggggacgaatagctggataccctgataaaaggaacaatcgctggaggaggagtg

SEQ ID NO: 222297 - DNA, 487 bp, Glycine max
gtctccaaagccttcactgcatcattccccaattcaggagacgagtcctcccttctatgatgaacactccatcctccctcaccatctaaagacaaaaccacatcatggaatgcaactaatgctggacgatgtgatatggtaatacatgatgttcccatagccagaacattagcacaaaaacgttcttccatatcaggagtgacagcacttgtgcactcatcaagaatggccaatttaggctgatggtaaaaaagtctggccatgcccaatcgttgttgctcgcccaacgaaggttattaccccaggttacctctgtttcagacgggtaccgatccaatagatactgatgatcaaccttcaatacatgtacaagcaattcagatgaataataatgagtaaaataacatataatcatcagacactaaacattaatgtggcactgagatagaagtaggattagatgtgagtttcacatttttcaatagct

SEQ ID NO: 222298 - DNA, 566 bp, Glycine max
gacgacgtcttttggaccagccaccacctcagcgccgcttaaggaccacaaagttcagatcccaagcttccatggcttgaggtcttcctccgcctctgctctcccccgcaatgccctctcccttccttcatccactcgctctctctccctcatacgtgctgtttccacgcctgcgcagtctgaaactgccactgtcaagcgcagcaaagtcgaaatattcaaagaacaaagcaatttcataagatatcctcttaacgaggacattttgacggatgctcctaatataagtgaagccgccactcaattgatcaagtttcatggtagctatcaacagtacaatagagaggagcgtggttccagaagctactctttcatgatacgcactaagaatccatgcgggaaggtttccaaccaactttacctcaccatggatgatcttgctgaccagattgggattgggacgcttagcttgaccaccacgcagacgtttcagctccatggtgttctcaagaaggaccttaaaacagtcatgggtaccattattaggaacatgggctcgactcttg

SEQ ID NO: 222299 - DNA, 531 bp, Glycine max
aaatatccacgtttcttttcccacacactatcttaaatcttaaaaacatttttttttttcaaagcaattagaatttagaccacaaaaggaacaccgaagagatgtacggacagagtagtagtagcagtagttcttacgaatcggatttggcgctgttggattcgattcggcaccacttgctgggcgagtccgaatccatattcggcgccccgaatttcgggtcgggtcggagctccagtttcagcagcttggactcgtgtttgagcgacaattggggcgagcttccgtttaaggaggacgatacagaagacatggtgttgtacggcgttctccgtgacgccgttaacgtcgggtgggtcccatctctcgatgccgggtcgcccgagagcgtgtcgtcgggttttccggcggtgaagctggagccggacttgatgccggcgctgataagtccgtgtccgcctccggcggctgcggcggaggagaagaaggttgttccggcgaaggggaagcactactcgggcgtgcggcagc

SEQ ID NO: 222300 - DNA, 572 bp, Glycine max
  unsure (1)..(572): unsure at all n locations
ggagcatttcataatttggctcttcaagaggatggaactttatgggcatggggtaataatgaatatggacaacttggaactggagatactcagcctagatcacaacctattcgtgttcaaggactttctgatcttaccttggtagatattgcagctggtggatggcattctactgcattgacagatgaaggagaggtatatggctggggaaggggggagcatggcaggcttggatttggtgatagtgacaagagcagtaaaatggtaccccagaaggttcaacttttagctggagaagatattgttcaggtgtcctgtggaggtactcactcagttgcattaacccgggacgggcacatgttttcttttggtagaggtgaccatggacgtcttggatatggtaggaaagtcaccactggtcaaccaatggaggtacctatagacctccctcccccacaggatcccagtggcactgcaactgagggacattggatagctaaactagttgcttgtggtggccggcataccctggcaatagtagaatggaaatcaaatgaatcttanaattgact

SEQ ID NO: 222301 - DNA, 450 bp, Glycine max
ctcactcactgcatatctcaattgcatcgctgtccatggctaccatcgttagcatcaaggcccgccagatcttcgacagtcgtggcaatccaactgtcgaggtggatttgacttgctccgatggctcttttgccagagctgctgatccaagaggtgcatccactgggatttatgaggcccttgaattgagagatggaggatctgactaccttggaaagggtgtatcaaaggctgttgacaatgtgaacaccgctattggccctgctttgattggcaacgacccaactgagcagactgctattgacaacttaatggttcaacagcttgatggctctgttaactaatggggttagtgcaagcaaaagctctgagcaaatgccatattggcggggtctcttgcagactgcaaagctggtgctagcgacctgaaaattactctttacaagcata

SEQ ID NO: 222302 - DNA, 606 bp, Glycine max
cacggatttgcatcagattattaagtcttctcaagctttgtctaatgatcactgccagtatttcctctttcagttgctccggggcttgaaatatcttcactccgctaacattcttcatcgtgacttgaaacctgggaatcttctaatcaatgcaaattgtgacctaaaaatatgtgatttcgggctagctcgtactaattgcagcaagaaccagttcatgaccgagtatgttgtcactcggtggtatagggcaccagagctcctactctgctgtgacaactatgggacatctattgatgtttggtcagttggatgtatctttgcagagcttcttggccgaaaaccgattttccctggttcagagtgtctcaaccagctgaagttgattatcaatatccttggtagtcaaagggaggaggatattgaattcattgataacccaaaggcaaagaagtatatcaaatcacttccttattctcctggaacccccctttcgcaactttatcctaatgcgcatccattggcaattgatcttctggcaaagatgcttgttttcgatccaacaaagaggatcagtgtcactcaagcacttcaacacccttacat

SEQ ID NO: 222303 - DNA, 541 bp, Glycine max
  unsure (1)..(541): unsure at all n locations
ctcactcactgcagatctcaattgcatcgctgtccatggctaccatcgttagcatcaaggcccgccagatcttcgacagacgtggcaatccaactgtcgaggtggatttgacttgctccgatggtacttttgccagagctgctgttccaagtggagcatccactgggatttatgaggcccttgaattgagagatggaggatctgactaccttggaaagggtgtatcaaaggctggtgacaatgtgaacaccgtcattggacctgctttgattggcaaggacccaactgagcagactgctattgacaacttaatgggtcaacagcttgatggaactgttaacgaatggtgttggtgcaagcaaaagctaggagcaaatgccatattggcagtgtctcttgcagtctgcaaagctggtgctagcgtgctgaaaattcctctttacaagcatattgctcatttcgcgggtaacagaaagttggttttgcctgttcctgctttcaatgtaataaatggnggatcacatgctggaaacaaacttgc

SEQ ID NO: 222304 - DNA, 609 bp, Glycine max
ctctcagctgatcggtgcttatagatccagcgtcagcagattcaatttgacactggaagcaatttctcatttcaaagattaagtgaaaacatggttgtccttgctgcatccattgtgagcaaatctggcaaagttctagtttctagacagtttgtggacatgtctcgtatcagaattgagggtcttctagcagcatttcccaagttaataggcactggaaagcaacacacatatgttgagacggagaatgtgcgctatgtttaccagccaatggaagcactatacctgcttcttgtaacaaacaaacatagcaacatactggaagatttgacaactctgagacttctctccaaacttgttcctgaatattcttactcccttgatgaagaggatatttgccaaaatgcatttgagttgatttttgcatttgatgaagtcatctctcttgggcatgcggaaaatgtgtctgttgcacaagttaagcaatactgtgaaatggagagtcatgaagagaaactgcacaagctggttatgcagagcaaaatcaatgatactaaggatgttatgaagcggaaagctaatgagattgataaaagcaagattgaaaag

SEQ ID NO: 222305 - DNA, 542 bp, Glycine max
attataagagattgttgtatgaatattatattccaaaaagcaataatattatattgccttgctacactagggaacatcagcaatcacaataatgtgtcgatatggagataaaactataaaagatattagtatattacagcaaactccacagggtagatgctgatgccaccctacatacatataaaggaacatatttttcagttatgcaaggtgtggttggaggagggggggcctttgggtgggcattggtagcacttgacaaatagcccgaatgtgtcaacctgcttgatgaaatttgtcatgctggcccaccctccaaacccaaagcccactaccagaacccacaccaccacaaatgcattcaccacgtacatcaccgtccagttagggataaagaagggcaatttctccgcggcattctgtcttgctgaagcagatctgtatgtgagcatatgagcaaaagcagggatgatgtaaacggtgaagctgaccaaaagggctcccacagctgaattaatgggcccaaagatagggaaaataat

SEQ ID NO: 222306 - DNA, 508 bp, Glycine max
ctcgagccgtcgcaatgttcagaagactccgggtggcctcatcttccgccagagatggaacaacatgcagtttgtcacaagtgcctcatttttagccactgtctactctgactaccttgcttcctctggtagaaacttgaggtgcagttcaggcaatgtgccccctgctgaacttatctcccttgcaaagtctcaggttgactatcttcttggtgacaacccaagagccactagctatatggtgggctatggaagcaacttcccacatagggttcatcacagaggttcatccattgtttccatcaagggtaacccttcatttgtcagctgccgtggaggttatgctacttggtttagcagcaaaaggagcgacccgaacctgctcactggtgctcttgttggtggacctgaagcatatgatgactttgctgatgaaagagataactatgagcagacagagccagcaacctataacaatgctcctcttatcggtattctggcaagacta

SEQ ID NO: 222307 - DNA, 482 bp, Glycine max
ggaaaaaaccaaattagtattgcacagcacaaaaacataatactatatagcacaaactgtttctttgtagagaatacaaaatgctgcaaagcttacaacatcaaacacagaaaagacatccaaagctgttgaaaaatacaagagatgactcttctttgaaatattgagaagttcactttgttttttaaacttctcaacaacactgtttcactgtctgtcttgtatcactcactgtatataagttgtaaagcggagaagaaagaggatgagctctgccttttgtctcttcactcctttctgctccgggccttccatcttatataatctacctattttgatctaacctactgaaatgcaaaatacacaagggaagaagaagatttgacattaaaatatagaaggaaaaacgtaaagaccctctcctcactgcacatttgtatggctacacaatcttacacaacaaagcaggaaaccattcccat

SEQ ID NO: 222308 - DNA, 562 bp, Glycine max
  unsure (1)..(562): unsure at all n locations
gtgatgtgctctctggaacatcttcaagtggagatcatcactatggtatccttgaaggatggtttggtgtgcaatggtggacaggccggacatttgttgtactttttactacacttgccatatttgtacctcttgcgagctttaagcgaattgattcattgagattcacgtccgccctttcagtcgcacttgcagttgtttttctagtcattgccgtgggaattgctgttgtcaagatatttagtggaggcattgtgatgcccagactcttccctgtcacgactgatgtggcatcattcttcagactattcactgtagttcctgtgtttgtgactgcgtatatctgccactacaatgttcacagcatagacaatgaacttgaggactcctcacagatgcaaggggttgtacaaaccgcccttgttctatgctcttcagtgtatgtaatgataagcttctttgggttcctcctatttggcgaangaactctngatgatgtacttgccaatttcgataccgatcttggaatttctttcggttctgtgctcaatgatgctgttcg

SEQ ID NO: 222309 - DNA, 549 bp, Glycine max
gctggttgccacactacaccgatatttccaccaaacccgtttgcgttgttgtttgcgaataaatggcgactaagaggagcgtgggaacgttgaaggagggtgatttgaaggggaagagggtattcgtgagggtcgatctgaacgtgcctttggatgacaaccttaacatcaccgatgacactagagtccgtgctgctgttcccaccatcaagtacttgactggttatggtgctaaagtgatcctttctagccatttgggacgtccaaaaggtgtaacacctaaatacagtttgaagcctcttgtgccaaggctgtctcaacttcttggaattgaggttacgatggccaatgactctattggggaggaagttgaaaagttggttacacaacttccagaaggtggtgttttgcttctagagaatgtgaggttctacaaggaggaagagaagaatgatcctgaatttgcaaagaagttggcttctctagctgatctctatgtgaatgatgcatttggcactgcccacagagctcatgcttctacagaaggag

SEQ ID NO: 222310 - DNA, 457 bp, Glycine max
gaacattgttcaagaacaattagatcaaagctcaatgcaacaccaaggatgccacaaaacccttttattttgaaacctatcctatattaagcctctacaggagcaagagctcgcagctctcattgtaccttaatccactgggggctgaaacccaaccatattcataatataaagcacaaacttcaaaggacgaatgatttttgcttaagcattcttaaagagcaaggacaccagggagttgctttccctcaagaagctctaagctggcaccaccaccagtggagatggggctaattttgtctgcaagtccaaccttttcaacagggggagcggagtcacctcctgcaatgatggtgtgaactcccttcccactgagctatgccagttttttggctatagcctctgttcttgtggcaaacttatcaaactcaaaaccacccagtggtccattccaaat

SEQ ID NO: 222311 - DNA, 557 bp, Glycine max
gaatctgcgtgtgtttgtgaattgttgttgagatctgaatcaaaatcagaaacgataatggctacaccggaccacctcttcaacctccgcaacaacttctacctcggcgcttaccaagccgccatcaacagcagcgacgttgccaacctctcccaagaagataccctcgagcgcgacaccctcgtccaccgctgctacatcgccctcggccagctccagttcgtcatctccgagatccacgacgatgctcccacaccactccaagccgtcaaactcctcgccctctatttctcctctcccgacaccaaggattccgccatcgcgagtctcaaggagtggctcgccgatcccgctattggaaacaacgccacgctgaggctcgtcgccggtctcgtcttcctccacgagaatgatttcaatgaagccctcaaacacaccaacgccggtggaaccatggaactgcacgcgttgaatattcagatctttattaagatgcataggtcggattacgcagagaggcagctgcggatcatgcagcagattgatgaggatcacac

SEQ ID NO: 222312 - DNA, 514 bp, Glycine max
  unsure (1)..(514): unsure at all n locations
cgcaagcaaaaagaaagaatcccaggcgaggagaaagatggaggggaaggagcaggatgtgtcgttgggagcgaacaagttccccgagagacagccaattgggacggcggcgcagagccaagacgacggcgaggactaccaggagccggcgccggcgccgctggttgacccgacggagtttacgtcatggtcgttttacagagcagggatagcagagtttgtggccacttttctgtttctctacatcactgtcttaaccgttatgggagtcgccggggctaagtctaagtgtagtaccgttgggattcaaggaatcgcttgggccttcggtggcatgatcttcgccctcgtttactgcaccgctggcatctcagggggacacataaacccggcggtgacatttgngctgtttttggcgaggaagttgtcgttgcccagggcgattttctacatcgtgatgcaatgcttgggtgctatttgtggcngttgcgtggtgaanggtttcgaggggaaa

SEQ ID NO: 222313 - DNA, 592 bp, Glycine max
aaaaaccctaggtagagagctcttcctccctttctcacagcaatggccgccgcagcacgccctctcgtcaccgtgcaggccctcgacggtgacatggcaaccgatgcctccgccaccgttcccatccctgacgtcatgaaggcctctatccgccccgacatcgtcaatttcgtacactcgaacatctccaagaacagccgccagccatacgccgtcagtcgtcgcgctggtcaccagacctccgccgaatcctggggtaccggccgagccgtctcccgtatcccccgtgttcccggcggcggaacccaccgcgccggccaaggagcctttggaaacatgtgccgcggcggacgcatgttcgccccgaccaagatctggcgccgctggcataggaagatcaacgtgaaccagaagcgctacgccgtcgtctccgccattgctgcctccgccattccttccctcgtcctcgcccgcggccaccgcatcgagtctgtcccggagctcccccttgtcgtcagcgactccgccgaaggagtcgagaagacaaaagaagcgatcaaagtccctcagcagatcggagcattcccggacg

SEQ ID NO: 222314 - DNA, 518 bp, Glycine max
cgcaagcaaaaagaaagaatcccaggcgaggagaaagatggaggggaaggagcaggatgtgtcgttgggagcgaacaagttccccgagagacagccaattgggacggcggcgcatagccaagacgacggcaaggactaccaggagccggcgccggcgccgctggttgacccgacggagtttacgtcatggtcgttttacagagcagggatagcagagtttgtggccacttttctgtttctctacatcactgtcttaaccgttatgggagtcgccggggctaagtctaagtgtagtaccgttgggattcaaggaatcgcttgggccttcggtggcatgatcttcgccctcgtttactgcaccgctggcatctcagggggacacataaacccggcggtgacatttgggctgtttttggcgaggaagttgtcgttgcccagggcgattttctacatcgtgatgcaatgcttgggtgctatttgtggcgctggcgtggtgaacggtttcgaggggaaaacaa

SEQ ID NO: 222315 - DNA, 548 bp, Glycine max
cacggatttgcatcagattattaagtcttctcaagctttgtctaatgatcactgccagtatttcctctttcagttgctccggggcttgaaatatcttcactccgctaacattcttcatcgtgacttgaaacctgggaatcttctaatcaatgcaaattgtgacctaaaaatatgtgatttcgggctagctcgtactaattgcagcaagaaccagttcatgaccgagtatgttgtcactcggtggtatagggcaccagagctcctactctgctgtgacaactatgggacatctattgatgtttggtcagatggatgtatctttgcagagcttcttggccgaaaaccgattttccctggttcagagtgtctcaaccagctgaagttgattatcaatatccttggtagtcaaagggaggaagatattgaattcattgataacccaaaggcaaagaagtatatcaaatcacttacttattcttctggaacccccctttcgcgactttattctaatgcgcatccattggcaattgatctactggcaaagatgc

SEQ ID NO: 222316 - DNA, 505 bp, Glycine max
caaacaataacacattattgataaacattagacttaatttacaaaatggtttatgaaagacacagaaacataattatgtacaacaaaacaaggcaactacaatacaaagttcagtacaaaatcaatctctcaacatggcgtttaaagactacaatgcatcatcagcaataacacatttttttttaagatggtcatctttttgctgtttctctctgctttcaataaatagaaaacagaacatataaggagctcactgatgacaaagccctcctaattatttgaagcaggttatgatattagaactatcctggcaccaacaaaagggaacataactatgaaaggaagtaaatatcattagcacaaccctgcactctccatagcagattcaggatggtaatgaagcatttctttccacatcatgtcccttatcatctcttcccctagatcctcatcaatgtcaagatcaattggaatgacggctggagggtcacagttaggatcatac

SEQ ID NO: 222317 - DNA, 512 bp, Glycine max
ggaatagacagagggcagctatggtttattatacttggtctgttggggatagggttgatgcatgcactgaagaaagttggcaggatggagttattacatatcacaacaagaaagataaaacattaactgttcacttacctgtcagtggaaaaacaaaacttgtcatagcttggcatctacgtccatcccgtttttggaaggatgggaaatggattgagtatcccaaggttggaaccggtgacagttctacccatgagggtgatacacctcatgaaaaacgacctaagttaggtagtcctgcagtataggttaaagggaaagacacgattccaaaaggttctaatgccgtggagtcggcaaattctgtcaagttgaggctacttgacttgactgaaaatgatagagtgctcaatattggtaagtacagcaagaatgaaaataaatttgatgcccacagaatggtgaggactggtctttaaaaagaacgatcaagagtgatttttggtgttcct

SEQ ID NO: 222318 - DNA, 559 bp, Glycine max
  unsure (1)..(559): unsure at all n locations
caaaggagggcttcctagataggcaaagcaatgaggccaccaagtccttccatccactttctgctccaaattcttctagtctgtctattgcacagacccagctttgcagtgaaaaagtcatatgtggtgtacttgggagcccactcacacggcccagaattatcctcagttgacttcaatcaagtgacacagtcccaccatgactttctgggatctttcttaggaagttctaatacagccaaagactccatcttttactcgtacacaaggcacatcaatggttttgctgcaactttggacgaagaagtagctgttgagatagctaagcaccccaaagtgttgtcagtgttcgagaaccgtgggagaaagctacacaccactcgatcatgggatttcatggagctagagcataatggggtgatccaatccagctcaatctggaagaaagctagatttggtgagggtgtcatcataggaaacctggatacaggtgtttggcctgaatcaaagagctntagtgagcaaggtttgggaccaattccatcaaagtggagaggaa

SEQ ID NO: 222319 - DNA, 529 bp, Glycine max
  unsure (1)..(529): unsure at all n locations
ccataggcgaagaacggaagaagccaccatagtcgtcgtcgtgagcgaagatccataacaatacagttacaaattgcaacaacacactcctggttcgatcgtagccagaagaatgggaagtttgggagcgattctgaagaatccagatgacttttaccctctgctgaagctgaaaatggcggagagaaacgccgagaagcagatcccgccggagccacattgggcgttctgctacacaatgctacacaaggtttctcgaagtttcgccctcgacattcagcaactcggcaccgagcttcgcaacgccgtttgcatattttatttggttctgcgagctctcgacaccgttgaggatgatactagcatagaaacagatgtcaaggtgccaatactgatagcctttcaccgtcatatttatgatcgcgattggcactnttcatgtggcacacaggagtacgaagttgtaatggaccagtttcatcatgtttcaactgcttttctggaacgttgggagaactaccaggaagca

SEQ ID NO: 222320 - DNA, 596 bp, Glycine max
  unsure (1)..(596): unsure at all n locations
caaggaagcaagtgctcatggctactacagtggcatcatcaatggtagtagcatccttttgttccttttcaaaccccatcaccaccaccccatcatcactctctttcaaagccaaaaccatcaccagaacaagaccaagaacaaaaaccagaactagaacaacgaggttaacatggctgaatcctcaccctcgtggtgctttggttgaggcaacaccacaaccaacaagttcacctccttcaccgagagatggatccatcaaggtgcttgcgtttcctgagaaccgcgctgatgacattcaagctgaggccagagcactggctcgtgctgccaatgcaacttcgtacacccctcagcttgtggcctccaaatatggctcccaacccatcaaggtggtggggagggcccttcaggttctgggtgcggtgggtttgtttgggttgaagctgttgttggaccagaaaagtggagtgcttgatcagaataaaaggattcgtgctcttgagcttanggacacattcactncgctgggaccaactnttgtcaaatgggtcaggcattgtctactacgcctgatatatgcccagctgagtatc

SEQ ID NO: 222321 - DNA, 381 bp, Glycine max
ggatgcttttcaggtgaagtctggcgtctgggctgattcactaagccgaggactgattgatctcaatataactgctcctaaaaaagtatcccttgtggatgttggaattgtgggaggattgagcgatggatccgatgaaagggagaaaggtcctccaccttcatcttacatggggagagctatgggttcaagatctggccttggaaagggtaggtctggatccactccttcacagccaatagctggtgacgactagctctcaaaccttggaaacccacaatctcaatttggtgggttgcaaaagtaaaactctcagattttatactcttcccatcacattcacacccatatctttgtgtgtcggtattaccaagctcgtta

SEQ ID NO: 222322 - DNA, 522 bp, Glycine max
aaaaaccctaggtagagagctcttcctccctttctcacagcaatggccgccgcagcacgccctctcgtcaccgtgcaggccctcgacggtgacatggcaaccgatgcctccgccaccgctcccatccctgacgtcatgaaggcctctatccggcccgacatcgtcaatttcgtacactcgaacatattcaagaacagccgccagccatacgccgtcagtcgtcgcgctggtcaccagacctccgccgaatcctggggtaccggccgagccgactcccgtatcccccgtgttcccggcggcggaacccaccgcgccggccaaggagcctttggaaacatgtgccgtggtggacgcatgttcgccccgaccaagatctggcgccgctggcataggaagatcaacgtgaaccagaagcgctacgccgtcgtctgcagcattgctgcctacgccattacttccctcgtcctcgcccgcggacaccgcatagagtctgtgccggagctcccccttgtcgtcagcgac

SEQ ID NO: 222323 - DNA, 463 bp, Glycine max
aatataagaaccagaatttgcactaaaatccaacaaacaaaatttccacattggctgcataattatgatgacaaccttaacccgcaaaacaaaaaaaccaaagataaggatatttagttctgatgagcataaaaaacaaaattctaatacgaaaaaataaatcatgaagtttactgtgaaacacccaaccacttagaaaagttgtcgaattctgtataatcagaatctgacaccatagtgtgataccatgctttcccagcagccttgatggcagacgctacctccttagagacagtcttcctcttcttgtcgagcttctccttgttgaccttaacccgctgtgcctcagcgagaagggccatcctcttagcagtcttggcataaggattcagcttcagcatcgagttgagattcttaagagggttcttcttgagagtggccctcttacattcttcttaatggg

SEQ ID NO: 222324 - DNA, 554 bp, Glycine max
ctctcagctgatcggtgcttatagatccagcgtcagcagattcaatttgacactggaagcaatttctcatttcaaagattaagtgaaaacatggttgtccttgctgcatccattgcgagcaaatctggcaaagctctagtttctagacagtttgtggacatgtctcgtatcaaaattgagggtcttctagcagcatttcccaagttaataggcactgtaaagcaacacacatatgttgagacggacaatgtgcgctatgtttaccagccaatggaagcactatacctgcttcttgtcacaaacaaacatagcaacatactggaagatttgacaactctgagacttctctccaaacttgttcctgaatatgcttactcccttgatgaagaggatatttgccaaaatgcatttgagttgatttttgcatttgatgaagtcatctctcttgggcatgctgaaaatgcgtctgttgcacacgttaagcaatactgcgaaatggagagtcatgaagagaaactgcacaagctggttatgcagagcaaaatcaatgatac

SEQ ID NO: 222325 - DNA, 530 bp, Glycine max
ggagtaaaaagacactcttaagtttggtattatgaaaatcatactttgcaccatgcttgcaaaaagtaaaaccaaattatgaatttacgaatttaataaaatgatgcaacatggcaaagaaaagccctttgataaaagaatcacgaatgtaaaagcaaaactgtcataaaagctcagtgtcgagaggaaaaacgatcacacaatttggtagttttctgtgatcaactgtgttctctgagaatacttaggaggattacccccatttagcggtatgatgctggtgaccttcaggtcactaaatgtttcagttgctataaaacgaactgaaatggggaagaatgctgatgattcggcttgtggaacaacaaattccattgacccactgcggtttgaattatcaatcagaaggacagaccactccaaaaaggaattccttgagtcatacctccattccccatcaatctgtctaacagatggtgcatctcgaagagctggaagaggtactgagatcacaacattccgcaaatcaa

SEQ ID NO: 222326 - DNA, 356 bp, Glycine max
gttttgccagccacatccttaggttcctcagcaagtaaaacaattagaagctatatttttcactcagcaaaagcaccaacagcttcaatttccttcctagggacaacatatggagacactgcaccagttatggcagcattttcttctagaggaccaagttctgtgggccctgatgtgatcaagccagatgtaactgcacctggtgtgaacatcttggctgcttggcctcccacaactagtccaagcatgctcaagagtgacaaaagaagtgtactatttaacatagtctcaggtacctcaatgtcttgtcctcatgttagtggcatagctgcactcattaaatctgtgcacaagga

SEQ ID NO: 222327 - DNA, 602 bp, Glycine max
  unsure (1)..(602): unsure at all n locations
gttgagtctagttgtttcccttaaagccatggaatattctccattgtccattgttattaccttctttgtgttcttgctcttgcattggctagttaaaacttacaagcaaaaatcgagtcacaagttgccccctggcccatggaggttacccatcattggtaacctccatcagctagcattagcagcttcacttcctgatcaagctctccaaaaacttgtccgcaaatatggacctctcatgcacctccaactaggtgaaatttcaacacttgttgtgtcctcccccaagatggctatggagatgatgaaaacccatgatgttcattttgtgcagaggccccaacttctggctccacaatttatggtctatggggcaacagatattgcttttgctccatacggtgattattggaggcaaatcangaaaatatgtaccttggagcttctaagtgccaagagggtccaatctttctctcatatcagacaagatgagaacaaaaaactcatacaatcaattcactcatccgcaggctcaccaatcgatcttagtgggaaacttttctctttgttgggaaccactgttttcaaggcagcgtttggaa

SEQ ID NO: 222328 - DNA, 420 bp, Glycine max
ggataatgaaatcttataggttatagagtcaataacaaacaaaaaattacatcaaactagactccccaaagtgcggaggggttaacagaccctacaaatattatatttgcgagtgatttaagtgtatttattctccataccttctttttatcttgaggacgactggtatgcttatgaaatcgcatttggcctttaaaaaaaatacggggatgagaaagctaaacaaacagggggaattaaaaacacttgggttttttttgcaacggccattccaaagggttcatccatatcaaaatcctcaggtttcatcttattggggagtccccaataaaaatgaaagtgtaataactcttatggaagcgtagtgctagccaatccaaatgtgatgcctggacacattctccttcctggcccaaaagg

SEQ ID NO: 222329 - DNA, 584 bp, Glycine max
ggaaacatttgatgctacacggtggttggatcggtttctcattcgcctctgttcaaagtttggtgactaccgcaaggatgatccatcatcttttacattaaacccatcattttcacttttccctcagtttatgttcaatctgcgacgctcgcagtttgtacaggtttttaacaacagtccagacgagactgcatatttccgtatgttgttaaacagggaaaatattagtaatgctgctgttatgattcagccgtcattgatatcatattcatttaatgcgctgcctgcaccagcattgttagatgtggcttccattgctgcagacaagattttgttgttagattcatattttagtgtggttatttttcatgggatgacaatagctcaatggcgcaacttgggataccagaatcaaccagaacaccaggcatttgcacaactattgcgagctccacatgatgatgcccaaatgataattagagaacgtcttccggttcctagattggtagtgtgtgaccaacatggtttccaggctagattcttgtagcaaaactgaatccttcagcaacgataccatgcacatg

SEQ ID NO: 222330 - DNA, 544 bp, Glycine max
accaaatcatcacacacacatactaagaagcaacaattcttctacaatggatctcctccttctggaaaagaccctcataggtctcttcctcgctgcggtggtcgccatcgccgtctccaccctccgcggccggaaattcaagctcccaccgggcccactccccgtcccaatcttcggcaactggctccaagtcggcgacgacctcaaccaccgcaacctcaccgatttggccaaaaaattcggtgacatcttcctcctccgcatggggcagcgcaacctcgtcgtggtttcttcccctgagctcgccaaagaggttctccacacgcagggcgtggagttcggctcccgcacccgcaacgtcgtcttcgacatcttcaccggaaagggccaagacatggtcttcaccgtctacggcgagcactggcgcaaaatgcgccgcatcatgaccgtccccttcttcaccaacaaggttgtgcaacaataccgccatggatgggaatcggaggctgccgccgtcgtcgaggacgtcaagaaaaccccgacg

SEQ ID NO: 222331 - DNA, 574 bp, Glycine max
  unsure (1)..(574): unsure at all n locations
ctctgcttcactttctcgcttttgcattttcttgtgaaaaaaaaaaatcctcagaacaaaaataggtcttcttcttctctgatctaccaaagcttcaaattctccttagtttggtttgtctgtgagtttggagtgtaatgtcgccgccgacgctggtaacggaggaggaggggcggagcaccgtggcgtccgattcttcgcaatccttggactgtttctctcagaatggtgctggattgaaagaacggaattacttagggttgtctgattgctcatcagtggatagctgtgcctctactgtgccaagcttgtgtgatgagaaaaaggagaacatgaatttgaaggctacagagttgaggcttggtcttcccggattccaatcgcctgaaagggaaccggatcttttctctttaagctcaccaaagcttgatgagaagccactcttccctttgcttcctactaaagacgggatttgctcgtcggngcagaaagctgttgtttctggcaacaaaagaggttttgctgataccatggatgggttttctcangggaagtttgctggtaatacagggat

SEQ ID NO: 222332 - DNA, 523 bp, Glycine max
  unsure (1)..(523): unsure at all n locations
cccatttccgaaccaccttccaaccatccaccctacgccgagatgatatacacggcaatcgaggcgctgaaggagaaagagggttcaagcaagagggccatagcgaagtatattgagcaagtgtacaaggaacacctcccaccgaatcactccatcttgttgactcagcacttaactctcttgaagagcagcggaatgctccaaatggtcaaaaaatcctatgcgctccctagatctgtgcctcttaccggagctgcacccgcacaagcgcatgatgccgccacctctgctctgcagttgacttccccgaggcctagaggccggcctcgcaaggctcaaattccggtccaaaacttacctcaggacattaatgtgcaggttcagcagaatgccgagcccgtctgggccgcgctcggacttgcagatgagcccgtgcagacagaaggcagcagcaagaagcggngccgtccgaagaagagtgtcactcccggagcaggtccggcaaagagaggacgtcctcccg

SEQ ID NO: 222333 - DNA, 612 bp, Glycine max
ttttcattcgttgtgatcttcctcttcctcgtacacagagtttatcacaggtgagcgactgaaaggtagcaatggcgaacaggaacctggaaaagatggcatccatcgatgcacagcttaggcaattggctcctgccaaagtgagtgaggatgacaaactgattgagtatgatgctcttctgttggatcggttccttgatattcttcaagatttacatggggaggatctgaaggaaacagtccaagaagtatatgaactttcagctgagtatgaaggaaagcatgaccctaagaaactggaagaacttggaaatttgataaccagtttggatgctggggactctattcttgttgctaagtccttttcccacatgcttaatttggccaacttggctgaagaggtccagatttctcgccgccgaagaaacaagttgaagaaaggggattttgcagatgagaacaacgcaactacagaatcagacattgaagaaactctcaaaaaacttgtatttggcttgaagaagtctcctcaggaagtttttgatgcactgaaaaaccagactgttgattggttcttactgctcaccctactcaatcaattcgagatctttg

SEQ ID NO: 222334 - DNA, 585 bp, Glycine max
cccatttccgaaccaccttccaaccatccaccctacgccgagatgatatacacggcaatcgaggcgctgaaggagaaagagggttcaagcaagagggccatagcgaagtatattgagcaagtgtacaaggaacacctcccaccgaatcactccatcttgttgactcagcacttaactctcttgaagagcagcggaatgctccaaatggtcaaaaaatcctatgcgctccctagatctgtgcctcttaccggagctgcacccgcacaagcgcatgatgccggcacctctgctctgcagttgacttccccgaggcctagaggccggcctcgcaaggctcaaattccggtccaaaacttacctcaggacattaatgtgcaggttcagcagaatgccgagcccgtctgggccgcgctcggacttgcagatgagcccgtgcagacagaaggcagcagcaagaagcggggccgtccgaagaagagtgtcactcccggagcaggtccggcaaagagaggacgtactcccggctctgggaaaggttgggccgtcctcccaggagaagtctgtactgcaacaacacaacggatg

SEQ ID NO: 222335 - DNA, 605 bp, Glycine max
  unsure (1)..(605): unsure at all n locations
gagagatcgagagtttttcaaaaaataaaaaaaagcattcctttttttcccacactcacactcactccactccattgagaaagttggttgcagcagcatgatggaggaagaagaagaccagcagaagcttccagatctggtgaaggaactagtccaccgcctcctctcccaaaacctccccccaaattcccctcccctaaaccctaactcccccgaattccgcaactccctccgctacgccctccgcatcctctccagccgcctcaccccctccgtcgcccccgacgccgccgccatcgccgactccatcaagcgccgcctcgctacccacggccactcctccgaagccctctccttcgccgacctcttctccaaattctcctccaaagcccaaagcgtcaacaacaaattcgccgtcatctacctcctcaaaatcgtctccgaagatcgccacaccaccaccgnaaccaccacccctctccttcccaacctcagtttctgcgaacctacctccaacaaaaaaccctggaacgacaacggcgccctcctcatctncaggaccccgagaaccgccgcgacgtcgcgttttgcgagttcgtcgatct

SEQ ID NO: 222336 - DNA, 595 bp, Glycine max
  unsure (1)..(595): unsure at all n locations
cagaatcatcctatgcagaaaagctatttttccttagtttcctttacctgattatgagttggatttttattaaaaaaaatggaagataattgaattaagatgtttatagacttgttatgtaatttggcatcacagcaacgatattcatttgtttcagatatactgtgctgatttacctcaaagaggagaatataattttgtggttttttctaatagacttggtgaaattacaactaaaatctcagattttgaaaaaaaaaaatggctattgttaaagcattggtgttttacattagaatcaacattatctcagtcatcaatcttagaagtatgttgattaaaaaatgtgtaaatatttcttttatttactataatgaaaaatagaaatcagttgaagcactggtgctaatgtcggcatcacaattgctttgttagtaaaattttttagtagtttcttttttcttttcaatttagtatgcaagcaataaatagtttttggtgatgatatgattcatcctttctcttgtgatacatcacatcagacaagattttgtttatacagtntgtatatgtgtgaacacttgacatctcaaat

SEQ ID NO: 222337 - DNA, 425 bp, Glycine max
tagtggcttatgccttattccggcttatttttgcactcggcagggaactgacggttgctctcacaatggggtcattggtcttggccattcttattgccatgagtggtcccatcctgtcaaaacgcattcttaaccaatggctgttatcagggcttgcggtcatcacctacgatgtatggaccgaatgccgtgattaacagatgatttccccgggaagagaaggaaacatgttctacccaactcatctacaccattcggagttcaagttctaaaatctcctggggtattcacccaatctaagtactattggaaaggcgttgacgcactgactgcatatacaatagagttcaatactgcttacatcctatactttacttatttgaaccccctggtgcatcatcaagctggtaagtcacaaaaatctt

SEQ ID NO: 222338 - DNA, 515 bp, Glycine max
aatgggcaacgctcagtcaccttccaacaatgatcctcgatatgtttcagcaaccagagcttttactcaaaaggaacttgaagacttgaggtctcggttcaacaatctggctaatcaatcccagagcaacgggaaatacatccctccctccgtttttcagtcatattttggatttcatggccctcttggggagaggatgtttgatttagttactcaggagcgcaaggatcagaagctaacctttgaagacctcggggttgctaaagctacttatgagaaagggacaaaagatgaaattgaagaattcatctttcgcttattagatgtatctggagataattttgtagggaggtctgatttggaaactgttatgattgccatttttaatgatatattacgcataaaaggttctgatgatagatcaagttcacatgaggatattgtcaacatatttatgaatgctgcaaatttctctcagcaagatggagggggcacttgagagacaatgtcttttg

SEQ ID NO: 222339 - DNA, 518 bp, Glycine max
taaacgtagaagaaaacattttatcatctaatctgaaattgtgctctcaattgaagcaatggaagtaacagctgctccagtgccttatgtccaagaaattgcaaaggaggcattgaccatagtgcctgagcgttatgttcgaccagttcatgaacgtcctatattatctaactctacacctttacctgaaattcctgtcattgacttgagcaaattgttgtctcaagaccacaaggagcatgaactcgacaggcttcactatgcatgcaaagaatggggtttctttcagctaattaatcacggagtggactcttcattggtggaaaaagtgaagagaggtgctcaaggattattcgatcttccaatggaagagaagaaaaagtttgggcagagagaaggagaagctgagggatatggtcaactcttcgtggtttcagaggaacagaagttagagtgggcagatttgttttcatgttaactttgccaccaaacaagaggaaaccccacttattccccaa

SEQ ID NO: 222340 - DNA, 546 bp, Glycine max
  unsure (1)..(546): unsure at all n locations
ggggaattcttcttttacacattcagttcatttccttattttctcaacaaaacaaccgagagttcgtcatatctgtatctgtatatatacctatacctatacctatatcgtatccgcatttccgaaaggatatatcttatttagggtttttgtgactgtgctccacaaccgagtcgccatggcgtcgcaggagagtatcgaaaagatgcaggcacggcagaattaccggaatttatggcacaccgatctcatgagatccattcaggccgatactccttattgttgcctcgcgttgtggtgtgcaccatgtgtgtcttaccttcttcgcaaacgagctctctatgatgatatgtcaagggacacatgttgtgctggctacatgccttgcagtggtaggtgcggagaaagtaaatgtcctgaattttgcctttgcactgaggatttactctgctttggaaattcagtcgnctcaactcgctttctattgcaagatgaatttaacattcaaactacgcaatgtgataattgcattattggtttcatgtt

SEQ ID NO: 222341 - DNA, 517 bp, Glycine max
cagttttgccttttttgtgaaaaagtgtctacagagaacaaaacagaacggaacagagagagagaggagcttctctacttgactttctggagagacatggagggtgcaaactggaggataacagatgaagaagcagggccatcctcttcttctgggattgcttcaactaaacaacaaaacccacctgaaacttttcatcataggaaggaggcagaagaagaagaagaaaccgaggaagaggaagaagaagacgtttgtcagcataaaaatatcacctttgttcctggtcctctcctttctctcaaggatcagatcgaaaaagacaaggaggatgagagcctaaggagatggaaagagaagctgttaggatgcatggaaagtgatttggatggtcagatacatcctgaagtgaaattccattccattggaataatctctgaggattttggtgaagttattacttctttatctgtggatgaaagccaaaatggtcatattctggttactctcagggagg

SEQ ID NO: 222342 - DNA, 530 bp, Glycine max
gtttggttttctcttcctcgttcgtttcatttcgtttcgttgaagagcaacttttctctctctgtctctgtacaattctcccttttcttccctcgtagatcgaaagggaatattcttccatggcctccaagcggattctgaaggagctcaaggacctacagaaagaccctccaacctcttgcagtgccggtcccgtagcagaagatatgtttcattggcaagcaactataatgggtccccctgatagcccttatgctgggggtgtttttctagctactattcattttcctccggattatccattcaagccacccaaggttgcatttaggactaaagttttccacccaaatatcaacagcaatggtagtatttgtcttgatatcttaaaggagcagtggagcccagcattgacaatatctaaggtgttgctctccatttgctccctattgaccgatccaaacccagatgaccccttggtgcctgaaattgctcatatgtacaagacagacaggtccaagtatgaaacaact

SEQ ID NO: 222343 - DNA, 496 bp, Glycine max
gagggtttgggtttctcttcctcccttggagaaaaagaagagccaccgctgcgacgccgttcgtgcatttttgaggtgccgctgtcatgtttgggcgtggtggaccaaggaggagtgataactccaaatattatgatattctcgggatttccaaaaatgccagtgaagatgaaatcaagaaggcctatagaaaggcggctatgaagaaccatccagataagggaggagatcctgaaaagtttaaggagttaggtcaagcatatgaagttttaagtgatcctgagaagaaagaactgtatgaccagtatggtgaagatgcccttaaagaaaggatggtgggaggaggctcgtttcataatccatttgatatatttgaatcattttttggaggagcaagctttggtggtggtggtagttcccgaggtagaagacagaaacatggtgaagatgtggtgcattctttaaaggtttccttggaggacgtttataatggcac

SEQ ID NO: 222344 - DNA, 530 bp, Glycine max
atttctcagtctctgtgtttgcggctgaggattccgaacgagtgaccttcttcgtttctcgcaaagtttaagtaatcatgggtaaggaaaaggttcacatcaacattgtcgtcattggacatgtcgactctgggaagtcaactaccactggtcacttgatctacaagcttggaggtattgacaagcgtgtgattgagaggttcgagaaggaggctgccgagatgaacaagaggtcattcaagtatgcctgggtgctcgacaagctcaaagctgagcgtgaaagaggaattaccattgatattgctttgtggaagtttgaaaccaccaagtactactgcacggtcattgatgctcctggacatcgtgactttatcaagaacatgattactggtacctcccaggccgactgtgctgtccttattattgactccaccactggtggttttgaagctggtatttctaaggatggacagacccgtgagcatgctcttcttgctttcaccctaggtgtgaagcagatgatctgttgc

SEQ ID NO: 222345 - DNA, 562 bp, Glycine max
gaggatctgaaggaaacagttcaagaagtgtatgaactttcagctgagtatgaaggaaagcatgaccctaagaaactggaagaacttggaaatttgataaccagtttggatgctggggactctattcttgttgccaagtccttttcccacatgcttaatttggccaacttggctgaagaggtccagatttctcgccgccgaagaaacaagttgaagaaaggggattttgcggatgagaacaatgcaactacagaatcagacattgaagaaactctcaagaaacttgtatttgacttgaagaagtctcctcaggaagtttttgatgcactgaaaaaccagactgttgatttggttcttactgctcatcctactcaatcaattcgtagatctttgcttcaaaagcatggaaggataaggaattgtttatctcaattgtatgccaaagacattactcctgatgataagcaggagcttgatgaggctctacaaagggagattcaagctgccttccgtacagatgaaatcaggaggacccctccaacaccacaagatgagatgagag

SEQ ID NO: 222346 - DNA, 563 bp, Glycine max
gagggtttgggtttctcttcctcccttggagaaaaagaagagccaccgctgcgacgccgttcgtgcatttttgaggtgccgctgtcatgtttgggcgtggtggaccaaggaggagtgataactccaaatattatgatattctcgggatttccaaaaatgccagtgaagatgaaatcaagaaggcctatagaaaggcggctatgaagaaccatccagataagggaggagatcctgaaaagtttaaggagttaggtcaagcatatgaagttttaagtgatcctgagaagaaagaactgtatgaccagtatggtgaagatgcccttaaagaagggatggggggaggaggctcgtttcataatccatttgatatatttgaatcattttttggaggagcaagctttggtggtggtggtagttcccgaggtagaagacagaagcatggtgaagatgtggtgcattctttaaaggtttccttggaggacgtttataatggcacaacacagaaactatctctgtctagaaacatattatgcccaaaatgtaaagggaaaagttcaaaaagt

SEQ ID NO: 222347 - DNA, 580 bp, Glycine max
ttttcattcgttgtgatcttcctcttcctcgtacacagagtttatcacaggtgagcgactgaaaggtagcaatggcgaacaggaacctggaaaagatggcatccatcgatgcacagcttaggcaattggctcctgccaaagtgagtgaggatgacaaactgattgagtatgatgctcttctgttggatcggttccttgatattcttcaagatttacatggggaggatctgaaggaaacagtccaagaagtatatgaactttcagctgagtatgaaggaaagcatgaccctaagaaactggaagaacttggaaatttgataaccagtttggatgctggggactctattcttgttgctaagtccttttcccacatgcttaatttggccaacttggctgaagaggtccagatttctcgccgccgaagaaacaagttgaagaaaggggattttgcagatgagaacaacgcaactacagaatcagacattgaagaaactctcaaaaaacttgtatttggcttgaagaagtctcctcaggaagtttttgatgcactgaaaaaccagactgttgatttggtcttact

SEQ ID NO: 222348 - DNA, 548 bp, Glycine max
acttccttgttatttctcccctcatatcatgagactagtacaaaccctctgttagtatacatagagatagtactaaacactcccctgatttaatgatggcaaacaaaacaaaacaagaccttctggaacgaagatacaaagaagtacagaagagggtagtagtagcagtactaagcataatttccgtcttgaaacatagcacatcaatggcatgcctcatttgtgtggtagctgactctttcagtgcagaaagggggtgtagcataataacaaaacaaaacaaaacaaagtgtatctgagaacaaaactagagcactaactttcagggctgcaaccatattcatgctatcttgatagtaataaaaaaaaggaaaatacaggtaataaatgactcaaacaaacttaaccagtgttctgcatgccagcagcaatacccttcatagtgagaatgagggtgtcttctaaaccaggagcatattcacttgttgggttcagttttataagttcatcaactgatttgcttgcctctgcagattcctttgatatgc

SEQ ID NO: 222349 - DNA, 447 bp, Glycine max
ggatgcttttcaggtgaagtctggcgtctgggctgattcactaagccgtggactgattgatctcagtataactgctcctaaaaaagcatcccttgcggatgctggaattgagggtggattgagtgatggatccgctgaaagggagaaaggccctacaccttcattttacatggggagagctatgggttcaggatctggtcatggaatgggttggtctggattcactccttcacagccaataactggagacaactttttctcaaaccttgggaacccacaatatcgatttggtgggtttcaaaagtcaaattctcagatgttatactcttcccatcacattttcacccattctttgggtgtcggccttaccaagcttgttgagccttttggcatggatcagtacatatatatttctactaatattgtgataatactattttgaatatt

SEQ ID NO: 222350 - DNA, 423 bp, Glycine max
cttaccagtatggctatccaacaatctctgttagacaggcctagaaaatctgtttccaaaactatctgcttaatcttttctatagctgctgtcatgatctcatcagcctttgttggttcttatctcatcaaatccacctccttcttcaaccaatcctctcctcaacatctctgtgatcatgcacttgatagggcaacatgtttaacccatgtctcagaagtggtacaaggtccgatcttgacccccacaaaagaccacaaattcaatttgttacagtcattcctaatgaaatacacctcacacattaagagagttatgaacacagccagttctatcaaacttaggatcaacagtcccaaagaagaagaagctttgcacgattgtgtggagttgatggacttatctatcagcagagttagggac

SEQ ID NO: 222351 - DNA, 465 bp, Glycine max
gcatcaaatcaacccattaaattttgtgaggaaatcagagatgcattttggaagtcacaaacaagcttattttacatatatgtaacgttacatagaccctacaggatacaaggccatcggcatagcaacttcctacacacgaaaaagttcaaaccttattgcgctgcctacatatgaaaaaccacccatatcagatgtaagcacacatgagttttccaaaggccatatttagaggccttcaatgaagttgaccccagtgttcttcaaccaaacattggcttggatgagttgcgctaccgtgaacttgctggcctcaggtgcagttttgatgatatggtaaccaggccaattcactctcttgctgggaccgggaccggcgccattattcatgaactctccatagtacaacgtgagcaaaaagtctttactttgggcatcccattcagcccatcctgcagggtcaat

SEQ ID NO: 222352 - DNA, 510 bp, Glycine max
cggagagagagagagaggttttgacgcaacacactttcactgagaaaggatctctatctaccaaggagcagaataaaacccttctctctgtgaataagagaatggcttcagatcggaaacttcacactttcgaggaggtggcaaagcacgaccagaccaaggattgctggctcatcatttctggcaaggtgtatgatgtcacccctttcatggaggatcatcccggaggtgatgaggttttgttatctgcaacagggaaagatgcaaccaatgattttgaagatgttggacacagtgattctgctagagatatgatggaaaaatactacattggtgagattgattcatcaactgtaccactaaaacgtacctacattccacctcagcaagctcagtacaatcctgacaagactccagaatttgtgatcaagattttgcagttcctggtccctctcctgatcttgggcttggcctttgttgtgcgacactacaccaagaaagagtagagct

SEQ ID NO: 222353 - DNA, 571 bp, Glycine max
caaaagcaatggctaatacaccttcgaattcttcaattctcctctccctttttctattggccatcgccctctccctcgctgagtcccaatctttcatcggagtaaactacggccaggtcgccgacaaccttccggcgccggaggacacggccagcctcctcaaatccaccaccatcggaaaagtccgtctctacggcgccgatcccgccatcatcaaggccctcgccaactccggcatcggaatcgtcatcggcgcctccaacggcgacattgcgagtctcgccggcgatcccaacgcggccacccagtgggttaacgcgaacgtcttgccctactacccggcgagcaacatcactctgatcaccgtcggaaacgagattttgaccttagccgaccagggtcttaagtcgcagctcgtcccggcgatgcgaaatgtccaaaatgccctcggcgcggcctcgctcggcggcaagatcaaggtctccacagtgcactcgatggccgtgttgactcagtcggacccgccctcgtcccggttgttcaacccggcgctgcaagacacgctcaaaca

SEQ ID NO: 222354 - DNA, 554 bp, Glycine max
caaaaacaccaattctccaccctctcattgaaaaaaaaacaaccaaacaaaaaaaatcaatcattgtattttatttttctacgaaaatggttgatttacattggaaatcaaagatgcctagttccaaaacaccaaaactctctctctccgacaacaagtccttaccctctttgcaactacccttccgcaccacagatatctctcccgccgctccttccgtttgcgccgcttacgactactatctccgccttgctcaactcagaaagctttggaactccactgattttcctaattggaacaacgaaccgattctaaaaccaattttgcaagctctcgaaatcacgttccgctttctttccattgttctctccgatcccagaccttactccaaccacagagaatggactcgccggatagagtctctcatcatgcatcaaattgaaatcattgccatactttgtgaagaagaggaacaaaattccgacacacgtggcactgcaccaaccgctgatctcagcagcagcaatagcagcgtgagcagaagctacagcgag

SEQ ID NO: 222355 - DNA, 596 bp, Glycine max
gttatccgaagaccataaagttgatgagaagggaagaatcagcacctataaagttgaattcattgtggactctgattttgggatccctggtgctgttaccgtggttaacggctttgacaatgagttcttcttggaaagcataaccatggcacaaaatgttcattttgcttgcaaatcttgggttcaaccaaacaagcttgacccagagaagagaattttcttcgttaacaaggtgtatctaccttggaaacaccaattggggtgaaagaactaagagaaaaggaactgaaacagctaaggggtgatggatggggacttagggtatcttctgatagaatctatgactatgatgtatacaatgatttgggtgattcagacaaaggagataggtttgcaaggccaacactgggtggtcaacacaacccttaccccacacgttgccgcactggacgaccaccatctaccgttgatacgaaaatggagtcacgaccgagtgatgaatcagagttaatatacgttcctagagatgaagaactgggggacataaagcaagaagtcattgatcaaagaaattgatggcaatgcttaagaaatat

SEQ ID NO: 222356 - DNA, 544 bp, Glycine max
atttctcagtctctgtgtttgcggctgaggattccgaacgagtgaccttcttcgtttctcgcaaagtttaagtcatcatgggtaaggaaaaggttcacatcaacattgtcgtcattggacatgtcgactctgggaagtcaactaccactggtcacttgatctacaagctcggaggcatcgacaagcgtgtgattgacaggttcgagaaggaggctgccgagatgaacaagaggtcattcaagtatgcctgggtgctcgacaagctcaaagctgagcgtgaaagaggaattaccattgatattgctttgtggaagtctgaaaccaccaagtactactgcacggtcattgatgctcctggacatccagactatatcaagaacatgattactggtacctgccaggccgactgtgctgcccttattattgactccaccactggtggttttgaagctggtatttctaaggatggacagacccgtgagcatgctcttcttgctttcaccctacgtgtgaagcatatgatctgccgctgtaacaagatgga

SEQ ID NO: 222357 - DNA, 601 bp, Glycine max
aacaaaacttttttataaattaaatgcaaatttaagacatccctcctcagcagcaaaggaaatggactaaaaccctatggctgcttgtgaatttgaaaatctcagacttttaccatcaaaacaaaaaacagtactcatcaaaaacaaacagcaacgaaaatgttaccgccgatcaagaacccagttttgaaggctacggctacatgaaatcggcggacacttcaaaatataactggtaaaacaaacacctaagactctgcaaagataaactactgtaaaggaacaagtttttttgaaaccacgttgatgatcacatgtgctagcaaaattgccaaaatgcaatcacttcttcttggcggcagcctttgtgaccttggctccggtggggtctttcttctcaacactcttgatgactccaacagctacggtctgacgcatgtccctcacagcaaaacgaccaaggggaggatactcagagaaagtttcaaccaccatgggcttggttggaaccatcttaaccataccagcatcaccattcttgaaaaatttgggctccttctcaagctccttaccagatcgcctgtcaatcttggtcaagatt

SEQ ID NO: 222358 - DNA, 583 bp, Glycine max
gaggatctgaaggaaacagttcaagaagtgtatgaactttcagctgagtatgaaggaaagcatgaccctaagaaactggaagaacttggaaatttgataaccagttaggatgctggggactctattcttgttgccaagtcctttttccacatgcttaatttggccaacttggctgaagaggtccagatttctcgccgccgaagaaacaagttgaagaaaggggattttgcagatgagaacaatgcaactacagaatcagacattgaagaaactctcaagaaacttgtatttgacttgaagaagtctgctcaggaagtttttgatgcactgaaaaaccagactgttgatttggttcttactgctcatcctactcaatcaattcgtagatctttgcttcaaaagcatggaaggataaggaattgtttatctcaattgtatgccaaagacattactcctgatgataagcaggagcttgatgaggctctacaaagggagattcaagctgtcttgcgtacagatgaaatcaggaggacccctcaacaccacaagatgagatgagagcatggatgagctacttcatgaa

SEQ ID NO: 222359 - DNA, 439 bp, Glycine max
atagaatggtgtagtagcgggcctcagcatacgaaacataacagatcaatgtcattgatccatttgtgtgggagctagctcttgtggaattctagagcagcataccacattgtacagaaaggtggggccacataataacaaaacaaaaaaagtgtatctgagaacaaaactagagcactaactttcagttttcaaacaaacttaaccagtgttctgcatgccagcagcaatacccttcatagtgagaatgagtgtgtcttccaaaccaggggcatattgactggctgggttcaatttgacgggttcatcacctgatttgctcgcctctgcccattcctttgatatgcggcggcgcaccttcacattgcagtttggatcacggatacgtttcaatgtgtaagcttggacaatattcatggtggtaatgtgagcatgacga

SEQ ID NO: 222360 - DNA, 602 bp, Glycine max
caacaaggcagcagtgcgaagagaaagaaagagaagaagcgcttatcgaactcggacggaagcactgagttaactcagagcgagtgaaagtgttgctgcgtgatgtctggtggtatcgcccgtggacgcctcaccgaggagcgcaagtcgtggcggaagaaccatccccatggttttgttgcgaagccggagacgctgcccgatggaaccgtgaacttgatggtgtggcattgcactattcccgggaagactgggactgattgggagggtggctacttcccgcttacgctgcactttagtgaagactacccaagcaagcctccaaagtgtaaattcccacaaggtttcttccaccctaatgtttatccttctgggactgtttgcttgtctatacttaatgaggatagtgggtggagaccagccataacagttaagcaaattcttgtgggcatccaagacttacttgatcagccaaatcctgctgatcctgcccagacagaacgctatcatctattcatccaggatgcagcagagtacaagagaagggtccggcagcaggcaaagcaatacccacctcttctctagggttacatcagctaaat

SEQ ID NO: 222361 - DNA, 563 bp, Glycine max
gatatgctccatagaaggtagcaatgtaattcattatagacttatagtaatgatccattcatataaaaatgtagcagcaaacatcagaaacatgtcaccaagtattcattggctgactttcatattttttatatattaacacttcttccagatctgggagtaatcataaatagctaacacaatcatgtctaaatgttatggcagccattaatcacaatgataaaacagttttaacacggagcaaatgaagaaacatctgccatactaaaaatagtttatagatttagctgatgtaaccctagagaagaggtgggtattgctttgcctgctgccggacccttctcttgtactctgctgcatcctggatgaatagatgatagcgttctgtctgggcaggatcagcaggatttggctgatcaagtaagtcttggatgcccacaagaatttgcttaactgttatggctggtctccacccactatcctcattaagtatagacaagcaaacagtcccagaaggataaacattagggcggaagaaaccttgtgggaatctacactttgga

SEQ ID NO: 222362 - DNA, 541 bp, Glycine max
ctttctcttcgagggtttgggtttctcttcctcccttggagaaaaagaagagccaccgctgcgacgccgttcgtgcatttttgaggtgccgctgtcatgtttgggcgtggtggaccaaggaggagtgataactccaaatattatgatattctcgggatttccaaaaatgccagtgaagatgaaatcaagaaggcctatagaaaggcggctatgaagaaccatccagataagggaggagatcctgaaaagtttaaggagttaggtcaagcatatgaagttttaagtgatcctgagaagaaagaactgtatgaccagtatggtgaagatgcccttaaagaagggatggggggaggaggctcgtttcataatccatttgatatatttgaatcattttttggaggagcaagctttggtggtggtggtagttcccgaggtagaaaacagatgcatggtgaagatgtggtgcattcttaaaagtttccttggaggacgtttataatggcacaacaaagaaactatctctttctagaaacatattatt

SEQ ID NO: 222363 - DNA, 537 bp, Glycine max
  unsure (1)..(537): unsure at all n locations
gagttagcaagtactaatggaaactcctaaatttgcattcttgtctttgcttcttctccttactagtgctactataagttcagctcaactaagtagtggcttctacaagaacacatgccccaatgtggagcagttggttcgctctgctgttgcacagaagttccaacagacctttgtgactgctcctgccactcttagactcttcttccatgattgctttgtgaggggttgtgatgcttcgattttgcttgcaaatggtaggccagagaaggatcatcctgatcaaatttctctagctggtgatggttttgacacagtgattaaagccaaggcagctgttgatagagaccctaagtgccgtaacaaagtctcttgtgctgacatactcgctctggctactagggatgtcgtaaatttggctggtggaccattttataatgttgaattgggaaggcgtgacgggagaatatctactattgccagtgttcaacgccatcttcctcaccctgaattcaattnggatcagctcaattccat

SEQ ID NO: 222364 - DNA, 420 bp, Glycine max
ctcgagccgaatcggctcgacaaccatatcatcacacacacatactaagaagcaacaagacttctacaatggatctcctccttctggaaaagaccctcataggtctcttcctcgctgcggtggtcggcaatgacgccttcaccctccgcggccggaaaatcaagctcccaccgggcccactccccgtcccacccttctgcaactggctgcaagtcttgtgacgacctccaccaccggagcctgaccgattgggccaaaaaattcggcgacatcttcctcctccgcatggggcagcgcaacctagccgtggtttctaaccctgagctcgtcaaagaggttctccacacgcagggcgtggagttcggctcccgcacccgcaacgttgtcttcgacatcttcaccggaaagggccaagacatg

SEQ ID NO: 222365 - DNA, 358 bp, Glycine max
gaaagagcaaaacaagaaggaaacactttctgagtatggctaccatgaccctaaattctttgaccaatccattcaaaagccaatggtcataataatgcttggcaaggatgaagcacctgccgcccaaaccaattcagacccgtattaacacacttggaaaagggagatgagcattattgatggtggcatatgagtggcttgagaacactgatagaagaaaaatagcgccaacctaattgcgtcttctctaccttgggattggagtttcaggtggggtaaaaagtgcaagacatggctcctattagatacctggtgggacattcgaagcctacttgtacatagactacataatcctcaa

SEQ ID NO: 222366 - DNA, 571 bp, Glycine max
gctatctctcccatcctttcgcattctcaatacccttttgatttgtgaaaggaaagcaaacatggatgatcaggtccaacaccctacaatcatggacaaggttgctggtcagctccatctccgttctggactttcatctggtattagaagatatgatggagcctaccgacacccagctatgtgccaaagaccctcttttgggaattactcgaatgctgcattgcaccttcctgtgatgcccacatgcaaagctaccatggatttgtctgctactgcaacatctgcctcacccgcctttgttgctgctccagcagagaaaggccattttcttttagactttctcatgggaggtgtttcagcagctgtctccaaaactgttgctgctcccattgaacgtgttaagcttttgatccagaaccaggatgagatgatcaaaactgggacgctttctgagccctacaaaggtattggcgattgtttcaagagaacaatggcagatgatggtgctctttctctatggagaggacacactgctaatgttatacgttatatctcacccatgctttgaact

SEQ ID NO: 222367 - DNA, 393 bp, Glycine max
gggaaaaccaagggaaaattttcccctgccactcaaaaaaaaaatattttcaaaaggaaaatttccatcttggagaaaattaaaaacgggttttgggacaaattccccttttggaaatttattaaacaaaatttgggggggcaattaggctaaaaatcttggaactcaaggggtttttttatcgccctttaaaaacaaaaaataatactggctcagcattaaaacttaagcccccccagagccgttctttttggcgaacacaaaaacctggaaattggtataacccggaaggacacccgccccgggaactgcacggaggatgttggcacccggcccctttaacaagggcttgggacccctatttttgaggatctgggggaaagcaaccaaggg

SEQ ID NO: 222368 - DNA, 573 bp, Glycine max
cttctctcatttttcagtttctcagtttcttattcgttaatcgttagatctcatcttacactcaccggcgagtccatctcgcgccaccgtcgactgagctccggccatcgccgttggttccctcactttctcactcttcttcttcttcttcttcttcttcttcttcttcttcttcttctcagcggaaatatgccttctcagaaggttgaaacgggtcatcaagacacggtccatgatgttgcaatggattactatggtaagaggctggccacggcttcatcagatcacacaatcaagataattggggtgagcaactcggcctctcagcatctagcaaccttgaccggtcaccaaggacctgtatggcaagtggtgtgggctcaccctaagtttggttctctacttgcgttttgttcctatgatggccgtgtcattgattggaaggagggcaaccaaaatgaatggactcaagctcatgtgtttgacgaccacaagtcatctgtgaattcggatgcttgggcgcctcatgagttgggtctctgcttggttgtggctcgtctgatgggaatatat

SEQ ID NO: 222369 - DNA, 442 bp, Glycine max
aaaacaactcaaactaatcaacttcattctttcaagcacaaaatactcaatggatcacaaacctcaaggaacttagtgcattatgaagcacaattaatcaactgtataatatgcaaagaaacaagatgtcaactttattttcaaaacgaaaattctaaccattttcaaaaggaaaaatatcacattctaaggctccactgttgtcacctgttgccattccccatcaactgctttcttccacaatgtcacattgttgttcccatcagccacagccaatatgtttcctgtcaatgaccatgagaccctccaaacaggggtgttgaaaacattcaaaaccttgccttcccactgatccccctctttcgccaccggccatataatcactttaccgtcctgtgatgcgctagcaatgggagatttaaggagccctaaattgggtgcc

SEQ ID NO: 222370 - DNA, 399 bp, Glycine max
cttctctcatttttcagtttctcagtttcttattcgttaatcgttagatctcatcttacactcaccggcgagtccatctcgcgccaccgtcgactgagctccggccatcgccgttggttccctcactttctcactcttcttcttcttcttcttcttcttcttcttcttcttcttcttctcagcggaaatatgccttctcagaaggttgaaacgggtcatcaagacacggtccatgatgttgcaatggattactatggtaagaggctggccacggcttcatcagatcacacaatcaagatgattggggtgagcaacttggcctctcagcatctagcaaccttgaccggtcaccaaggacctgtatggcaagtggtgtgggctcaccctaagtttgggtct

SEQ ID NO: 222371 - DNA, 519 bp, Glycine max
aaaacaactcaaactaatcaacttcattcttccaagcacaaaatactcaatggatcacaaacctcaaggaacttagtgcattatgaagcacaattaatcaactgtataatatgcaaagaaacaagatgtcaactatatttcaaaacgaaaattctaaccattttcaaaaggaaaaatatcacattctaaggctccactgttgtcacctgttgccattccccatcaactgcttccttccacaatgtcacattgttgttcccatcagccacagccaatatgtttcctgtcaatgaccatgagaccctccaaacaggggtgttgaaatcattcaaaaccttgccttcccactgatccccctctttcgccacgggccatataatcactttaccgtcctgtgatgcgctagcaatggtagatttagggagccctaaattgggtgcccaagcaacatctcgaacccaatccgtgtgcatctgaagagcagggaagcagtccatcttccagagtccattgtttagc

SEQ ID NO: 222372 - DNA, 461 bp, Glycine max
gccacaaagccaataagtactcattttattcagcctttagtctaactgcgtcaggtaaaatgtaagcttagttcactacaaactgaaaaaaaaggcagatttaaattagttaaataaaataaagaaattttgaagccgataaggcaataacctccactcctacgagagtcctcaagttcgggagctttaaacagatctaactgacttccagagcttgacccactcttccatgggttcagcagccgccgaaaacataggatcaaccttccccagatgctccttgactgttttggacatcttgaccacgcaatcctctggtgtagttgctgattgaggtaacccttatgactgaaagaaaggaacaacattcttcatcaatttcacccctttccattctttattcaagctttgtttcgcatcacccctttctgtttctccaacataaggtaacccacttttac

SEQ ID NO: 222373 - DNA, 584 bp, Glycine max
ctctctctctctctctctctctgttttttttttgccctatctcatagggtttcctccttctctccctctctcccatgcatttttgctctcacgagttcttcttcttcgttgccctcttcttcgctgtctttgaagccttcttttgtgtggaacagagcagatttcacctcccggggttttttgaactgtgcccatgtctaaagtcttcagctttaccggaaatgatgatttttatcatgggggtcctatttatcctaacccgaaggaaccgtgtctcttcttgtctcttggccgtcaagttgatgtttaccttcctcttcagaagaggtctcgcttcagtgttccatttgatatcagtggagaatggtttgagcagaagcctaagacatctattgaatctttgccagatgaatgcctctttgagatccttagaaggttgcctgcaggccaagataggagtgtctgcgcttctgtatccaagcgctggcttatgcttctgagcagtatttgtaagaatgaaacttacagcaacgaaagtactggaaatgaaaatcaggaaattagtgatgaaggatacctatccc

SEQ ID NO: 222374 - DNA, 533 bp, Glycine max
gcaaacaagaacacttgttgaatttctagaaaaaggaatttacatcaatactcttctaaaaatatattcacctatactactacgaatgaacccggaatgcataaaactataacgccaaaccaaaaccaaaccccaatccaaatcatcacttcttagccttagccttagtcttcttcgctggtgatttcacgctcttaggtttcttcacgacactcttgggcttcttcacggcctttacgggtgtcttcttcttagctggcttagcagcgaccttcttggccgcgaccttagcgggcttagacttgggcttggcagtcgtggccgcagctttggccttgggcttggcaacagcctttttcttaggagtagcagctttgggcttggaagcgggcttagtggcagctttggttggctttttgggagcagcggccttaaccggagcaagcttagtcggtgcgagcttaaaggagtttttcaccttaacaagcttgccagcagcaacagatttcttgagatgaacgaggacaagcttc

SEQ ID NO: 222375 - DNA, 573 bp, Glycine max
cgcggttggctgttgctgtctacggttccaacttccaagttacaagcttcacccattttataaaagttacggttcggttccgctgcattcgtgctttctagcaacacaaaatgagcgccatctctttcagttccacccattttcacagttggaaaaatcccaaggggtttggaaaggtgagaaagcaacgagatgggaagctacttgtcaagtgttccagcatgagtgggaacccaacttcattgcaaaatggggttcgtgctggcgttcttggagctagtggctacactggttctgaggttatgcgactcttggctaatcatccacagcttgggattgcactgatgactgctgataggaaagctgggcagccaatctcttctgtattcccacatttgagcactcgggacttgccagatttgattgcaataaaggatgcaaacttttctgatgtggatgctgtattctgttgtttgcctcatggaactactcaggaaattattaaaggcctaccaaagcacttgaagattcgtgatctttctgcagatcttcgtctaaaagatctttctgagt

SEQ ID NO: 222376 - DNA, 585 bp, Glycine max
gttgaaacaaaaatctcaaaaacttgagatggggatttcatagtccactaaaatattggcattacaaataaaccaaaacccaaacttggaaaactacacgccaccaccttcagggatttctaacatttcagatcaaatcaaaggactaaaaagacagaaaacgctatagggtccctgccaaggccataatcaattcccttctaaattcttgaagaatctcgcattacaatctagagaacgaaaatacatagcttgaaaatatttcctctgctccatcaagtattttgggggaactgtgactgcagaatcggagctttatgttggacaagacaactactctatggaaaaagaggcaggtaatgaagtcccaaattttgtggaaatcccattaacaaattaaggttttgtaaagcttgacctgaagctcccttcactagattatcaataacagatgtaatgattgctcttccaggaattcgggctggaaaaacattgattaaacagcaattaggccctttaacgctgtggagttgaggaatgacttcattttccaacacaaaaacaaattcttcattttatatgaga

SEQ ID NO: 222377 - DNA, 511 bp, Glycine max
tggcaatcgaaaccaaagtacattttcttaactcatctctttaatttctctctctctctctctctctctctgctatgaagaagctctgtcccaatcttactcgcgaggatgggctctaaacggtgctggaggttcccatccctgaggagattttcaccatcaagagtggaaccagcagagcttggcataacatgaagtcatggatgaagccaaatgttgaatcttcaagatcatcatcactctttggaggccaaaacacacatatccaactattgcttggtgttgttggagcgccattgatccctctccctgtcacctgtcacaaccaacctatcaccattagatcccataacattgaggcttcgatggcgaaatacatagtgaaacaatacgtggcggccgtgggaggagagagtggctagaattcggtggaaagcatgtatgcgatgggtgaggcgagagtagggtcagagttttcagaaggggaagaatgtgtgagtagcatgaagac

SEQ ID NO: 222378 - DNA, 594 bp, Glycine max
gtgaatgtggttgatggactaaagttgtatgacgatttatttgatagcactgaagttgcaaatcttgtttcactggtcaatgatctaagggtttctggaaaaaaaggacagttacaaggaagtcaggcatatatagtttcaagaaggcccatgaaagggcatggaagggagatgattcagttgggtgttcgaattgctgatgccccaacagaaggggaaaatatgacaggagcctccaaagatatgaatgtagaatctattccttccttgtttcaagatattattgagcgtatggttacctcccaagtgatgactgcgaagcctgattgctgcattgtggatttctataatgagggtgatcactcacaaccccacaggtggccatcatggtatggaaggcctgtttatgtgctttttctgactgaatgtcaaatgactcttggaagagtgattgcctcacagcattctgtggattataggggcagcatcacgctttctctagttactgggtcccttgtggatatgcatggttaatacagtgagtttgctaagcatgctcttgcttacacactcaaacaacgcatactggttacc

SEQ ID NO: 222379 - DNA, 676 bp, Glycine max
cttatggacaaaggatgggtttcctctcaatctcttcttcctcccacacccgacaatactatgtttcctctcctcggattccccgtcaaactcagccgccccaccatggaactccaccatgataaccgcaaacttgtcgctgaagtcgacttcttctctcatactccgccacccaacatcgtcaagaaggaacttgatcaaacacctcttcacattaatactggtttacaactccttactgctaacaccaggagtgaccaatctaccgtggatgacgggctttcatcggatgcagaagataagcgagccaaaaccaccgagcttgcacagttgcaagtggagcttcaacgcatgaacgctgagaacaagaagctgaaagagatgctcagccatgtcaccggtaactacaccgccttgcagatgcatcttgtgacactaatgcaacagaaccagcagcgaacagaaagcacggaaaatggggttgctcagggaaaggttgaggataaaaaccatggtgttggtggaggaaaggtaccaaggcaattccttgatataggtcccagtggcacagcagaagtagatgatcaagtatctgattcttcttctgatgaaagaacacgatcgagcacgcctcaggacaataacactgaagctggaacaagagattgagcgagaa

SEQ ID NO: 222380 - DNA, 443 bp, Glycine max
aaaacaactcacactaatcagcttcattcttgcaagcacaaaatactcaagggggcacaaacctcacggaacttaacgctttatgaagcacaattactcaactgtgttgtctgcaaagaaacacgccgttaactatattttaaaacgcaaattgtgaccctttacacacggaaaaatctcacaggtatagcgctccactgtggggacccgttgacaatgcccagaaactggttgcttgcacagcgacccattgaaggtgccctcaaccacagacaatatgctttctgtcaatgaccatgagacctttcaaacaggggtgaagaacctggttagaaccctgccttgccgctgatcccccgctttcgccgcgggccataagatcactttaccggtctgcgatgcgctggcaatggtggacttaaggagccctaaattgagggccc

SEQ ID NO: 222381 - DNA, 358 bp, Glycine max
atacattctttctctttcaccctctttcaaggctccacttttataattccttgtaatttcttcatcaaagtatcaaacatgtgatcaatctctcttcttatactccctctgcatatatgatatattcttccaaaaacctcatctaagggttaattctgttccggacaagtgtttattataattattaatttataaaatttcaaaatgatttacttataggtttctgattcaaggttaaagatgttatagtttcccttgaattctcatctggggttcaacctgattgatggttttgactgaatcaaattgaaataagggtgaataatctgataccaaacataaaagattcagctctttt

SEQ ID NO: 222382 - DNA, 591 bp, Glycine max
  unsure (1)..(591): unsure at all n locations
gaagaaaattgctttctctttggttcctagctcgcactctctctacgcacgcctcaacatcccttctctgttcacttgctttgcaggctccattcattatgtctccgtcgttggatcttccccccaagggtggcttcagttttgatctatgccgaagaaacgcaatgcttcaaaacaagggcctcaaagccccaacctttctcaaaactggcaccactattgtcggtttagttttccaggatggtgtcattcttggggctgatactagggcaactgaaggacctatagtggctgataaaaactgtgagaaaattcattatatggcacccaacatatattgctgtggagcaggcacagctgctgatacagaggctgtaacagacatggttagctcacagctgcaactacatcgctaccatactggtcgggaatcaagagttgttacggcactgactcttcttaagaaacacctgttcaattatcaagggcatgtctcagctgctttagttcttggtggngttgatatcactggacctcatttgcatactatntatcctcatgggtcaactgacacccctcccatttgctaca

SEQ ID NO: 222383 - DNA, 273 bp, Glycine max
gaggaacaatttgcaatgatctaattgaattcaaataaattttggtaataaaagccaaagttgtgaaagtacaaaatcaaatatcacagccattgcactaatcaagtttcatactcatacaccaattttttttggaatgattggtactcttccatagcatctccttcaatcactttcaccttgtccttcaacggtgtaatctttgttaagaggacctctgtctttttggggaaatcaaagccttttggattgacataggtacgaggatttggt

SEQ ID NO: 222384 - DNA, 532 bp, Glycine max
gtaacttatatttgtatcagacaaattacaatttacattcttcatcagtgctttatgtaatagaaaattttcagttttatgcacgtctcttgcctcctttactggcagttttgtagtccacagggtagacgagcatctaaatggaagatagatgcaaatgatatgcaaaagcagaaaataaaacttatgatctttttttacatgattatgctattgctgttgaccctttgctaggacaaagcagtacgcgacttcgatattctccaagagcccatattggaaagatatttctgtatgcagagtaactgatagtacaatgcttgttgaagactcccgtgatttcctgttggggaaactccccgttttccatttgtgaattgatcaaaaccttggctgcacgatgtaatggggttggatctctttggccctgtcctgcttcaataagtgccaacatagcccatgcagggtttactacatgtgacttgtttccttccaaatttgtataaaccttttgttggcatgcaatatagct

SEQ ID NO: 222385 - DNA, 492 bp, Glycine max
ttttttttttttttttttttttttttttttttttttttttttttttttttttttttttttttttttttttttttttgggggaaacctttttttaaaaatgggggggcttaccaaaagaccccattggaaaaaaacagcaatgtttgaacttttagccccaaggaagaatttttcacatttgattaggtccaaggccaccccttttacctacaaaatttatgttttttgaaccaagcaatttttcaaaaaaaaaaaaaaaaaaacaaattggctttaccttcatttttaaaggttaactcgcccccccaattaaattaaatttaaatggccaaaaaaagccgtggccccaacctttaaaatttggtgataaaaacccacccctgaaatacccttaattgaaacaaatttttaattaaggctagagggttggccgcacatatttcttttagcagggattttcttggcaggggctggaacaaaaattttttggcc

SEQ ID NO: 222386 - DNA, 504 bp, Glycine max
  unsure (1)..(504): unsure at all n locations
cgcagattagtcgcatctgaagctcctaanatatgtagcctcatgagcaaaccagccggaggacgccctttttttttttttttttttttttttttttttagacagaaatgcaagatagattacttattccagagaatagtctacaccaaagcatatagaagtgacgatttcaaaaaaactattcccataagaaaaagtttgaccacacaaaattgcaaaagccattcctgacgagttaacaaaaaaggtccccaaactaaaccattaagggactcgagggtttcaacaactactcttccagggttggtcccttctcactaacataaagaccatccagaaatttcctggaatccttggttttaacataggcatttctgggtaatgagagcgccggacctaaaaacaaggtcaaagccgtgtccatccaaaatcaactcatgtttaactatttcagatcgaaccacggacacgccagtaagcatgtcgactttcctaaccttcttc

SEQ ID NO: 222387 - DNA, 515 bp, Glycine max
gcaagcaaaaagaaagaatcccaggcgaggagaaagatggaggggaaggagcaggatgtgtcgttgggagcgaacaagttccccgagagacagccaattgggacggcggcgcagagccaagacgacggcaaggactaccaggagccggcgccggcgccgctggttgacccgacggagtttacgtcatggtcgttttacagagcagggatagcagagtttgtggccacttttctgtttctctacatcactgtcttaaccgttatgggagtcgccggggctaagtctaagtgtagtaccgttgggattcaaggaatcgcttgggccttcggtggcatgatcttcgccctcgtttactgcaccgctggcatctcagggggacacataaacccggcggtgacatttgggctgtttttggcgaggaagttgtcgttgcccagggcgattttctacatcgtgatgcaatgcttgggtgctatttgtggcgcttgccgtgtgaaaggtttcgaggggaaaac

SEQ ID NO: 222388 - DNA, 504 bp, Glycine max
gcaaattaaattacacaatcacagccgtacatcacacatgagttgggcctcttccaacttaaaagcagaggataacattggcccatgacgcgacacatgcaccacctaataatcataattttacatctttacatacaaaatacaaagactttaaattttaaaaagaagaaaagagataaacagatcatcttaatgaaatgaaaccaaaacccacaaacattggcttgatttttgttgttgttgttgttcccaacttgattaagcatgaaccgtttgattgaatcacttggacttgaagggaatggccctgattacgacctggtggtagagtgctgcaagagctgcaccgatgaatggtcccacccagaagatccagtgttcatcccaaccaaggtccttgttgaagatgatagcagcaccaagactactagcagggttgataccagttccggtgatggggatggttgccaagtgaaccaagaacacagcgaacccaattggcaa

SEQ ID NO: 222389 - DNA, 604 bp, Glycine max
cctacctctttttcttctctctcaacaacttcaccttcttcctcctcgatcatgtctcacttcaagggcaagtaccatgatgagcttatcgccaatgctgcgtacattggcactcctggaaagggtattcttgctgctgatgagtcaacagggacaattggcaagcgtttggccagcatcagtgtagagaacattgaatccaacaggcgagctcttagggagctgcttttcactgctcctggtgttcttcaatatctcagtggtgtcatcctctttgaggaaaccctctaccagagcacagctgcaggcaagccctttgtgaatgtcttgaaggaagctggtgtgcttcctggcatcaaggttgacaagggcacagtcgagcttgctggaactaatggagaaaccaccactcagggtctagatggccttggtcagcgttgtgccaagtactacgaagctggtgcacgttttgccaaatggcgtgcagtgctgaagattggtcccaacgagccatctgagctgtctatccatgagaacgcctatggcttggctagatacgctgtcatatgccaggagaatggcctgttcccattggtgagcctga

SEQ ID NO: 222390 - DNA, 493 bp, Glycine max
aatcgcaaaaataatcacaaagcctcattcacagcacggtggtgtctttcaagaaaacaaagttacattcccttccctgttgcacaggtttgaccaaatacactgaattactaaaattgacataaaaggaacactcggaaaacaaaaagcaaaattccaaacgattattctgggaagagtcaaaccacaataatacttatcaacaagaaattcggttgttgtacccataataccgattcctactcgcactagtctgtttaaacaacaccaacttctattgatcagtagctgtagttcgaaacatggaggctctctgaggcaccatcagcaagctgagagttacccttgtaggttcccagagttgcctctgagttagccttggctcttaccaaaagggcttgctgagccttcttcacattctcttcttttccgccccatgccttaaaggtgctctgttgaagtgcccttccaaaggagaaagagagtgaccatg

SEQ ID NO: 222391 - DNA, 521 bp, Glycine max
caatatctaacgtgagttttatgttgcaagtaataccagttacaaattacagggtatacaagctagatttcaaaattttaacttgcacataataaaagacttaaataataaggcaagtgcacattcttatttcatgttactgaagctttatcgtgggtaggctgcacaaacaatttagccaatgaatgttcttagaggatctttgagatttctaccaataacttatgcagcgcttgaggcttagagaagaaaggagaatgatcagctcccttcagacggaaaaccttttctggggggtttgcatttatcatgttctcctggagtgaaatgggtatggcattgtcttcaagagtttctatataaaaccgccttacagatccatatttcaggtctgaaagggaaaccttttctaaaactggtgcaaatgggacagacctcattgagacagatgctagtgcaatatcctgcattttgaaagcaaacaacaaacattgagggttaaggtaatagattcaagctca

SEQ ID NO: 222392 - DNA, 599 bp, Glycine max
aaactttgcttcgctttttctcttcattgtttttcttcctcttctacccctttgatctcatgcaatctcccctcatggatccctttgatttgattcgcaaaggggtttaattgcttgagatctcgtaaaggttttggctttcgtaatggaagggtttggctgaagctatctggaatatttgtgttacatttttggaggtccatctatgttttagtcattttgtccatattcttgtcaataatgagcttatccaagaaaggttcccaaacagacacaaaactgagctccttaaacaaagcaacctatttgaatccaaacgcagcagagtttgttccatttgccctcagatcatcgccatctggaagcaccagctcggtagatgcagcagcgaggtttactactgctggatctcttgggaaagcagttttagatcgatcagaatcatccatttcaaataattccgatgatgaggctcaccagtactggcgttgtcagcttcctgatgatatcacccctgacttcaaggtcatgggagaggacgaatcccaaggtcttaacaacctctctttagcaggcttatctataaatgatgataatga

SEQ ID NO: 222393 - DNA, 518 bp, Glycine max
ggaaaagaaaagtcgcataacatggttacattaatacatatgtaatacatcacaacaacataatcactacattatgatgccattaagggagatcacaatttcaaacatagagaaatacattggaggctgatatagtacatcagatgcaatatggaaatgcctacttatttaaggacaccctaacaaataaagacttaagtaacctatttggcaaaccaaaaaagggggccctcagggaagatgtgacacactggagcagctccaggcttggttttaagcatttgtaaaaacacatgggtgggatcccattctgatgggtctttggggcatacagctgcagctttaactttggttccatcttctccctccaaaggcataaaatgcgcagtagtatttgatatctcatgacacataaacacaacatatgggtaatccataggatgacaaacaatgaccttatcttgtgtaacaacttcactccatttttcaccgagaattttggggacttactttccttt

SEQ ID NO: 222394 - DNA, 612 bp, Glycine max
atttcccttgaaaaggaagcgtgaagcgttttccctctgcattaatttgtatctgcagtctgcaacaacttcttcttcagttcttcacaccaatcatgtaccgctttgcaacctccctcgcctccaaagctagaattgctaggagcagcactcaacagattggaagtagggtcagatggaacaggaattatgctgccaaagacattaagtttggtgtgcaggcccgggctttgatgctgaagggtgttgaagagctcgccgatgccgtcaaagtaaccatgggccctaaggggcgtaatgtggatattgcgcaaagttttggagcacccaaagtgacaaaagatggagtaaccgttgctaagagcattgaattcaaggataaagtcaagaacatcggtgccagtctcgtaaagcatgttgccaatgctaccaatgatgtggctggtgacggaaccacttgtgctacaattctcactaaagcaatatttacggtagggtgtaaatcaagtgcagctggaatgaatgcgatggacctgagacgaggtataaatatggctgttgatactgtggtgacaaatctgaaaagcagagcacggatgattagcacttctg

SEQ ID NO: 222395 - DNA, 592 bp, Glycine max
cggctcgaggaggtgaggtgccaaaatggtgaagataactcttggtactttcgatgactcttttggtgttgcctctcttaaggcttatttggcagagttccatgcaactctgattttcgtgttcgctggtgttggttcagccatcgcttacaacgagcttacaaaagatgcagccttggatccaacggggctggtggcagtagctgtggcccatgcatttgcactgtttgtaggtgtctccgtcgcagccaacatctcgggtggccatttgaacccagctgttacttttggattggccattggaggcaacatcaccctcattactggtttcttatactggattgcccagttgttgggttccattgtggcatgcctcctcctcaatttcatcaccgccaagagcattccaagccacgcaccggcaactggtgtgaacgattttaagctgtagtgtttgagattgtaatcacatttgggttggtttacactgtgtatgcaactgcagcagacccaaagaaggggtcattgggtatcattgcacccattgctattgggttcgttgtgggtgccaacatcttagcagcaggcccca

SEQ ID NO: 222396 - DNA, 515 bp, Glycine max
ccaacaatccatgcatcaagttcgaattataatttacataattattacaagcggtgaataatagataaaggtacagttaaaaatgcaaaaagccatgaagctcgagacatcaaacggggaacaaagatgaaacttgaagggacaggacacacaagtgaatagaacacgaagtcatatttttcaagttgaagctcaagggtaggtttcagaggctgggacagccgcatatgaaccaatgaagacgtctccataaataaagccagccaaacctcctccaatcaatgggccaacccaatagatccagttagcagcgaagtctccactgaccacagctgggccgaatgagcgagctgggttcattgaaccgccactgaatgggcctgctgctaagatgttggcacccacaacgaacccaatagcaatgggtgcaatgatacccaatgaccccttctttgggtctgctgcagttgcatacacagtgtaaaccaacccaatgtgattacaatctcaaacac

SEQ ID NO: 222397 - DNA, 581 bp, Glycine max
  unsure (1)..(581): unsure at all n locations
caaggacacaaccacctttagtatatcccctcccatgtccaccaccacttcttccttcctgtcatccatcaccgccgacggcagcgtctctgacggcaagatcggccccgccatcctcgccgccggcaagcctcctctctcctcatcccaccgganaaggtgtcacgacgccactctctccgccggaaaagcctcttcctccgctcactgccattgctccaagagaaggaaatctcgtgtgaaacgaatgatacgtgtgccggcgataagttcgaagattgccgatatcccagcggacgagtactcgtggagaaagtatggtcaaaaaccaatcaagggatcaccttacccacgagggtattataagtgcagtagcgtgagagggtgtccggcgaggaagcacgtggagcgagcccaggatgaccccaacatgctcatcgttacctacgagggagagcaccgtcatccgcaaccgcgtctgccggaaacttctgccggcgccgccgcggattttgtctctcagcctgtttaagcgaggggagagatcggcaaagcatggcaccgacagagatgagtgattt

SEQ ID NO: 222398 - DNA, 574 bp, Glycine max
tgaatgtatgcgtgtactataacagcttgacgattgatgcacgctaactatagctaggaatacggctcggggcacacaccaacaacagaatcagaaaatgaaacaaccgaggtaagcaagacccaggaaacaaccccagtcactgaggctcctgcaacagaacaaccagcagctgaggttcctgcaacagaacaaccagccgctgaggctactgccacagaatcaaccaccgaagcaccaaaggaagaaaccaccgaggcaccaacagaaacaggagaaaaaacaactacagaagtagccccagaggagcctaaagaagttccagttgagaccgaggaggtggtggcaaaggacacagaggaagagaagccacccgaacagaaatcagaggagaaagctgaagaagtgaaagaagaagcagacgagcctaaagaaactactgaaacagaatcagcagcagcaccaccaccagcaaccacagaggaagagaacaaaccatgtgagtcagttgaaaccccagttgaggttcctgatgagaagactgaagcttagacctatggacagtgtgagtgag

SEQ ID NO: 222399 - DNA, 528 bp, Glycine max
gcacaaacaacaatataaattataaagtaaatatcatttattcaaacctaaagaaacacagtaacacaccatcacaaactcatgtaaccctgccaataaaccatcacccctaaactccagcaccagcagcttgctcacttcaatacacaactcccagaatttctcatgtcaccacgtggcaagcacgctgatgtggagccaagtgttgtgcttacacgtaggtgtaccctccataatacaaccaaagacttaagcatcatataataatattaataaagtaaactaaagaaataaaaagaaaaaaaaaaaagaggcttttcaacatggcatgcaaaatggtagacctgatccccacaactaggaccatttttaaacttgtttttctcactcacactgtccataggtctaagcttcagtcttctcaacaggaacctctactggggtttcaactgactcagctggtttgttctcttcctctgtggatgctggtggtggtgctgctgctgattctgtttcagtagtttcttt

SEQ ID NO: 222400 - DNA, 485 bp, Glycine max
  unsure (1)..(485): unsure at all n locations
aaactcttcaaatttccttcccttttctgtgccttattttctcttcactggtcaaaagatttctgggatttttgctaatttggtgcaaatctgattcccctttgacaaaccctcctcatctcttggcttattgacaactactataatttcaagttgctttttttttcccccttttttctagctgcttttttgggccttcaaatcttgcttggagaaggctcaattttggtggaaacctctcacacaagaaagcatagtttcttttgggttcattctacttggtgtttagagatggtgagaggaaagactcagctgaggcgcatagagaacgccacaagcaggcaagtcaccttttcaaagcggcgtaatgggttgctgaagaaggcctttgaactttctgntctttgtgatgctgaggatgctctcatcattttctctccagaggaaagctttatgaatttgcagctcaagcatgcangacacaa

SEQ ID NO: 222401 - DNA, 499 bp, Glycine max
atcaataattaaaccctaatcataaggctagaaagttctttatataatacaagcgataatattattcatctcagtattaggaaacatgtgatatttatacattgcagttgggcttcttatttgatatttgcataggcaaggattaaattatgttcaatagctagacctgagtagtccaatgaacaattcagtctccacttctgaacttggactgctttctgcatagggttgaatttctttcggatcctttgttgctggctgtggctggataccaccatactgctcacacagcctagcattttcagcatatagggctctttccttctcttttagttgatcaatttgttccttgtaaacctgattctttcttgcacgaacactgcttacactcctttccaactgttgttctatctgttgcagttcttctaaagagcatgaccccaaaccttctcccaagagcttccgttttgaagcttcaagaagctcaatcttcttcatc

SEQ ID NO: 222402 - DNA, 458 bp, Glycine max
ggcagcagcagaggggctaaacagagagcagtacgtgtacttggcgaagctgtcggagcaggcggagcggtacgaggagatggtggagttcatgcagaaggtggtggtggggtcgacgccggcgtcggagctcacggtggaggagcgcaacctcctctcggtggcctacaagaacgtcatcggctcgctgcgtgccgcgtggcgcatcgtctcctccatcgagcagaaggaggagggccgcaagaacgacgaccacgtctccctcgtcaagcactacagatccaaggtcgagaacgagctcactcaggtctgcgccagcatcctcagcctcctcgactccaacctcgtaccctccgcctccgccagcgagtccaaggtcttctacttgaagatgaagggcgattaccaccgctatctcgccgagtttaagggttggggacgaaagaaaaaccgctact

SEQ ID NO: 222403 - DNA, 447 bp, Glycine max
  unsure (1)..(447): unsure at all n locations
gattgcaacagataataattaattggatatcccattatacagtatcctttccaataccatatgacacacaaaaaaaagaagcctggtctttgttcatacaacattatatcacagattgccaatcattttataaactagggcgattcttaattagcacaaataaatgacattcaaagcccacctgcatgagaggaagaataccacccatcaacctataagggatatcagggctcatctagctggtcctgaacatcagaagtccaaagggtgagggtgtctcttaaaagctgcattatgagcgtgctgtctttgtaagattcttctaccaaggtgtgcagctcagcaattgcttcctcaaaaacctgtttagacatggcacacgctttatcagactggttgaggatttcatagtanaagacggagaagttgagagcaagacccaatctg

SEQ ID NO: 222404 - DNA, 549 bp, Glycine max
agaatttgcaagagaaacgattgctggtttaaatccaaatgtcattaagattatagaggagttcccactaagtagcaagctagatactcaagcctatggtgatcatacctgtataatagcaaaagaacatttggagcctaacttaggtgggctcactgttgagcaggctatccaaaacaagaagttgttcatcttagatcaccatgactatctcattccttatttgaggaaaataaatgcaaataccacaaagacttatgctacaagaaccatatttttcttgaaagatgatggaactttgacaccattggccattgagttaagtaagccacatcctcagggtgaagaatatggtcctgttagcgaagtctacgtgcctgccagcgaaagagtggaagcttatatttggttactggcaaaggcttatgttgttgtgaatgatgcatgctaccatcaaatcattagccattggctaagcactcatgcaattgttgagccatttgtcatagcaacaaacaggcaactgagtgggttcaccctatttacaaa

SEQ ID NO: 222405 - DNA, 434 bp, Glycine max
ccattatactaacacaactctctttattaatgacaaatacaaatacattcagccactccaaatacatgacttaagcatacacaactgattaaggaatctggttgcttcaatttcacatttatttaaaaccaggaacagtacttaagcaaccatagggtccttagatagagatactgatgggaattcctctgaaagtcaatccctcctcactagaaggatagagcagagtgtaaggcattttagctggcccatagcgggttgtcaatgtctcatctttgttcttctctataagctgcttttcaatctcttcaagcttttttccaaacctcttaaatgcctctaatggaccggcatcagaagtccagtagtcaccaccatctctctgcccaaggtagaactcatcagatgcgtgccttgacaagaattctataact

SEQ ID NO: 222406 - DNA, 557 bp, Glycine max
  unsure (1)..(557): unsure at all n locations
cacttaatatacttccttcccaccttagtcagatttacaactgttttccaaactgagtcaaacttaggattgaaaaaaacacctaagctctaagatgctggaaaagatggatgatggagaaatctcaaatgctttccctcaccagaacccttcaactgctgcatctaacaatcagcctcctactttgaagaggaagagaaacctccctggaaatccagatcccgaagctgaagtcatagtcctatcaccgaagactctaatggccacaaacagattcgtgtgtgaaatctgtctcaagggtttccaaagggaccaaaaccttcaactccatcgcagagggcacaaccttccttggaagctgaagcaaagaacaaccaaagaagtaaggaagcgagtttatgntgtgtccagagaagacatgtgtccatcaccacccttcaagggccctgggagacctaactgggataaagaagcacttctgcagaaaacacgtgagaagaagtggaagtgcgagaagtgctcaagcgttatgctgttcagtcagattggaagcacac

SEQ ID NO: 222407 - DNA, 521 bp, Glycine max
ctgaaatgttcagaatgactgtgtcactggcattgtattctcttgttgttttctaccatgtgttttctaaagagctggagccacataagcctcttgccaagtttttatgcataaaagggattgtctttttctgcttttggcagggaattgtgcttgatctcctggcagcactaggaataatccgatcccgttattcctggctagctgtggaacgcattgaggaaggctaccaaaaccttttggtttgtgttgaaatggttttcttctcaatatatcagcaatatgcatacagtgctgctccatacaaagttaacagtgcaccttcagataaaaagtcaaagtgattccaggacatggattacttggctgttaaagaacatcaatgtatgtactttcaatatgagtgttgcttctctcccacttctcttccatgagacaattagtaaacaaatgtgtggcagagtcttttgaataagatccagatacattgatgcctattctaatgatctagaaagttttgt

SEQ ID NO: 222408 - DNA, 541 bp, Glycine max
atctcctaccctgtggacctcattatagattttaatttccaaagatacagaattcaatacacaatgaaaaaacaattttctataagattattgtaaagaactttagttgcctgtgggtgttcttccaaggctaacagcaattaatcatggttgtaatcatactctacaaagtcagtatataatagagtgccatcatctgcttggtgaagtagggaaaaacattcatcacagaaataacaagggttttctggtgtccatttgtcatccaccgtgacctttgtagctctgaatattttgcaaacattgcatttctgaaaacgcaacttcaactgaaacgtgattattggataaacagctcgattatgaacgtcttcagggtgaattaacctcatatctcgtatcactaaggtatgggtgcagtcaccctgatgacaatagaggtatccagcaccaagttgaaagcttaagtcacaaaaacgtatcttatgcatctcaatggatctaaaatgaggcaattgtgatgcagatatctcacccatga

SEQ ID NO: 222409 - DNA, 585 bp, Glycine max
ctctttcctatcacactttctagatagctagcctgtaagatatatatatagatatttcatatatatcctatggtccgtgagtgcccttgttctgtaccaaccctttcttccacatgttgagtttcagcatcgtcctctcttgagtccccatatcaaatacccaccgaattcaaccccccatataacaaatctcctcccatcccatttttcagcaccaaagtttgaaacttttctcaattgggttgaggagagtttgactcaaatttttatttttctaacgaagcagtagctattagaagtgcaaaaattaaatgtccaacatcttcttgttgatgtttgagattcatgtatccgattctcagtgaaatcttcttttccgggtgtatgatcaattccactgttaggcgcaggacccatttagttcaatccttctcagatgctttcctctattggttgtactacgtttcatgatttctaaaccttccttagtctaataatcatctactactagctattattattattattattattatcatcatcatcatatataataaaatctatctgcaatattattattctgag

SEQ ID NO: 222410 - DNA, 616 bp, Glycine max
  unsure (1)..(616): unsure at all n locations
gtcaagttgtatttttggtggatgaaacgccaataagggtgcacacgaacatggagcacaagggaattccatttcctaaggaccaacccatgggtgtgtacagttcattatggaatgctgatgattgggccacgcagggtggtcgtgtgaaaacagattggagccacgcacccttcattgccacatacaagaacttcgagataaatgcgcgtgagtgtcccgtgtcagtggctgcaatggataatgctaagaagtgcaccagcagtgaggggaataagtattggtggatgagcctaatttggcttaactcaacttgcaccagagccaccagcttatgtgggttagggcaaggcacattttctatgactattgcactgacactgctaggttcccagtcacgcctgctgagtgtgttcatcaccgtcacacctgagcagacttagcgattagtctaaactttattttgctataacttatgggaagttatgagaataggattgnggcataagaaaaaaatggtgggtggtgaacaaagatgtggaacatgtccttcatgtatctgattgaagatatatcgccacaacattaatgcgaattgttggtttttctttttgac

SEQ ID NO: 222411 - DNA, 482 bp, Glycine max
gtacaagaagaaaaaccaacaattcacattaatgttgtggcaatatatattacaatcagaaacatgaaggacatgttccacaactttgttcaccacccaccatttttttcttatgccccaatcctattttcataactccccataaggtataacaaaataaagtttagactaatcactaagtctgctcaggtgtgacggtgatggacacactcagcaggcgtgactgggaacctagcagtgtcagtgcaatagtcatagaaaatgtgccttgccctaacccacataagctggtggctctggtgcaagttgagttaagccaaattaggctcatccaccaatacttattcccctcactgctggtgcacttcttagcattatccattgcagccactgtcacgggacactcacacgcatttatctggaagtacttgtatgtggcaatgaaaggtgcgtggctccaatctgttttacacgaccaccct

SEQ ID NO: 222412 - DNA, 584 bp, Glycine max
ttttcaacactcatcagatcccagtcatcaattgcgttaacaactcgtaaggcaaccatgaggggcattctttctgtaaggacagccttggttcaacatcgtagtgagaaattgggccttggtttcaggctatttagcactcagggtgcttccactgctagtaccccacagccgccgccaccaccttcaccaccagagaaaacccattttggtggccttaaggatgaggacaggatatttactaacttatatgggctgcatgatccttttctcaaaggtgccatgaaacgaggggattggcatcgaacgaaagatttggtacttaagggtactgattggattgtgagtgaaatgaagaagtctggcctccgtgggcgtggcggtgctggtttcccttcgggcctcaaatggtcattcatgccaaaagtatccgatggccgcccttcatatcttgttgttaatgctgatgaaagtgaacctggaacttgcaaagacagggaaattatgcggcatgacccacataaattgttagaaggttgcttgattgctggagtaggaatgagggctaatgctgcttacatcta

SEQ ID NO: 222413 - DNA, 562 bp, Glycine max
aagaattgaccaaagatgggtcaattgacaaggctgtgagtttggcttggaaattggataagcaattggaggaaatggtttcattgggaagttgaaacaaggaagtttgtttgagatgttgggaaagtcctatgccaattacacttagcaagacttggcagcagtggttcttgtcaacagggtctctgcaggatgaagagtcccatggaaaggtctcaacatagttgagatccatggggcatgagctggaagattcagcggctattgaaacagtgaagagggacatgatgagaaggggaagaagaaacaaaatttgcttatccattttgtgagtttgttgcacattttcaaaatggcttgtgaaaatgacaacaacaacaaaggcctattacttgccctagggctagtactttgtgtcaccctgtccttcttcccaagggtcacagaagggagggtgccctttgcatgcgaccctaggaacggtctcacgaggggtttcaagttttgcaacacgcacgtgccaatccacgtgagggtgcaggacctcattgcgaggctcaca

SEQ ID NO: 222414 - DNA, 460 bp, Glycine max
attttgtaataacattaaaggaggcgtgtttggattgttgaattgccgagtttagctgcagaaggtagagagagagagagatggagagcatagagcacagaacggtggaagtgaacggcataaagatgcatgttgcagagaaaggagaaggagcagtggtgttgttcttgcacggcttcccagaactctggtactcatggcgccaccagattctagctctgagctcccacggttaccgtgcggtggcacctgatctccgtggctacggtgacacagaggccccttctacggtgaacagctacacgtgttttcatctggtgggtgatatcattgctctcatcgactctctgggtgtggacaaagtgttcctggtggctcatgattggggtgccatcatcggttggtacctctgcttgttccgaccagacagaatcaaggcttatgtgtgcctcagtgtccc

SEQ ID NO: 222415 - DNA, 571 bp, Glycine max
gataaaaagtaatattgattgatatcatacaggataacattcattttgaccaaagattacatacttgagtcaaactccaaatttgcaatctagacgcgcactaaaacggtatgattttattcgggttgattgaaacagaaaacggcacaaagttgtggacataatggaatgattaagcactgatgagaatcagaacttcttaatgaagtcgtagatgtgattgctcacgtcctctgctgcttcttggttgttgaagtgtgcaaccccttcctgcaccaccactttctctaaagttggcacatctttcttgaaaccaccggtgtggatatactccttcatccccggagaagtgtacaccaagtcaacgccacctgtgatgaacttaaccggtacatttacgatgcctgctccagtccatggtgctggcagttcccaatttaaattgaggtttctgtagtagttcaagcctccagagaagccagtctttgtgaatttagtaacataataatcaagatcttcttgagagatccaagagggcaaggtgtctggagtccctggattaaatccagtt

SEQ ID NO: 222416 - DNA, 434 bp, Glycine max
  unsure (1)..(434): unsure at all n locations
attttgtaataacattaaaggaggcgtgtttggattgttgaattgccgagtttagctgcagaaggtagagagagagagagatggagagcatagagcacagaacggtggaagtgaacggcataaagatgcatgttgcagagaaaggagaaggagcagtggtgttgttcttgcacggcttcccagaactctggtactcatggcgccaccagattctagctctgagctcccacggttaccgtgcggtggcacctgatctccgtggctacggtgacacagaggccccttctacggtgaacagctacacgtgttttcatctggtgggtgatatcattgctctcatcgactctctgggtgtggacaaagtgttcctggtggctcatgattggggtgccatcatcgnttggtacctctgcttgttccgaccagacagaatc

SEQ ID NO: 222417 - DNA, 539 bp, Glycine max
  unsure (1)..(539): unsure at all n locations
cggctcgaggtcggaatgggaagggtgattcgcgctcagcgtaagggtgctgggtcggtgttcaagtctcacactcaccaccgcaagggtccggcgaggttccgcagcctcgacttcggcgagcgcaacggctacctcaagggcgtcgtcaccgacatcatccacgaccccggtcgcggcgcccctctcgccaaggtggcattccgccaccccttccgctacaagaagcaaacggagctcttcgtcgccgccgagggcctctacaccgggcagttcgtctactgcggcaagaaggccaccctcgtggtcggcaacgtgttgcccatccgatccatccccgaaggtgccgtcatctgcaacgtcgagcaccacgtcggcgaccgcggcgttttcgccagagcctccggtgactatgctattgttataagccacaaccctgataacgacacctctaggatcaagcttccttctggtgcgaagaagattgtgccaagtgggtgcagggcgatgattggcangttgcaggtggagggaggact

SEQ ID NO: 222418 - DNA, 498 bp, Glycine max
aaaggttaacaaacagcagaattgaatagatgtcaaactaatataaaacaccgtctgttacaaagcttttcatatttatggcggaaatgctgttcaaaatagaacccaaagagttcaacataaactatgaaagaaacaaaatttgagaacaaataacaccctaaaaatcttctcaagtagtcttatccgctttagcagcagtggcagcagcttgccccctaagacgaccagtcctcctagcagcaatgagaccaaccttctggccaggaggagcatcacgcctaacggttctcgcatgcccaatatgctgatgattacctcctccgtgaggatgctcaactgggttcatcggcacaccttgcaccttaggccatgaatgactcttcactctgaacttatggtaagcattaccagccttcagaagaggcttgtcaattctcccttcacctgcaacctggccaatgatcgccctgcacccacttggcacaatctttttcg

SEQ ID NO: 222419 - DNA, 513 bp, Glycine max
gttgtgccaccatgtcggacgatgaaagggaggagaaagagttggatctctcttctgccgaagttgtcaccaaatacaaaaccgctgctgagatcgttaacaaggccttgaagctagttatttcagaatgtaaaccaaaggcgaagattgtggatatttgtgagaaaggggattcatacattagagagcaaactggaaatgtgtacaagaatgtgaagaggaagattgagagaggtgttgctttcccaacatgtttatcaatcaacaacgttgtctgccatttctctccactagccagtgatgaggccgtgttggaagaaggtgatatattgaaaattgatatggcatgccatatagatgggttcattgctgtggtagctcacacccatgttctttaggaaggtcctgttacttggagggcagctgatgtcattgctgctgctaatactgctgctgaggtggccttgaggcttgtcaggcccggaaagaagaaacaggatgtaagtgatgcaa

SEQ ID NO: 222420 - DNA, 369 bp, Glycine max
tggggctaatagatccgtctcgtaagactaatttcagggtcgacgcgctcactcgtcagcgggcgaccttgcttgagctctttctttctctcaccacctttgttctttgtccatgtgcccaaagctctccaggccttcatatcaggatcacttattgtttttcttgccccttattcacggagctggcgcttctttatgccatccactccattgggcatcatctatacgtgtacatcgatatgaccacaaactcaccggcttttcatgcaagacgagaaaatgccgcctgagctcacgcctgatacattccaccagaccacagcggacgatcttatggtccacaaccgtaccagatcctggaatgcctgg

SEQ ID NO: 222421 - DNA, 347 bp, Glycine max
ggatgagtgaggtgaatgaatgagaacaaaagcgtcctcatcgatatcgtgaataactaaagactctggcgctctgaaggttcgctacgtgaccgtatatgggacattattgctcacgtattacgtttgaaggtggcggaagaaagtaagctgggcatttgaaagaaagaagtaatgaaactaatgcttattcgtgcatcaggctacaaaaaatagattgatggaagaagcagctagcctctaaccacctccttttgtggtacgtccgaatagaacaggtgagagttgcagattacggtgggtgaattacctacatcctggcctcaaacgtggaaagatgacccccc

SEQ ID NO: 222422 - DNA, 508 bp, Glycine max
ggacactcggggatacgcaccagatcctaaactctacttattgcttctcgatatgtgcgtgatcctattccaaaattcacgatgccagagaaatcaataccaaaggatgcagcttttcacataataaacgatgagttgatgttggatggtgcaccaaggctcaacttggcttcgtttgtgaccacttggatggagcctgagtgtgacaagctcataatggcttcacttaacaaaaactatgttgatatggatgagtatcctgtcaccactgagctccagaaccgttgtgttaatataatagcaaatctattccatgctcctataagtgaagaggagactgcagtaggtgtgggaactgtggggtcatcagaggcaataatgttggcaggtcttgcttttaaaaggaaatggcagacaaagagaaaagcagaaggcaaaccatatgataagcccaatatagctactgcggctaatgtgcagggtttgtgggaaaaatttgcaggtactt

SEQ ID NO: 222423 - DNA, 499 bp, Glycine max
acttgcattataatattatatgataatagtgccttctaaggagtaccaaactaacacctcaaaaagacaaaagagaaaatgttctcttaagcaagaacagcagtgactactggaatcccgcatgccatgccattgcttattgctacatagccattacacactcacatatatgcacatggataacatacgaccaacttaactcacaacaaggttgccataaggcaaaaatatatggtaagcctaacatgctccaagtctcttgccatccacaagtcgcttccagtacaaagcaatctctttctgagtctctattgcactcttaaccttctcactagtctcactagagatggctgtgatatgagcaactttggtagtgagggggctaggaagtgtgtccaagagcttcacaaccttctctatgtcagcagaaagtctctcggccaagccacggctgaaatcctccctgatcaccacccggaggaccgctatgtgttgcgcg

SEQ ID NO: 222424 - DNA, 541 bp, Glycine max
cttcgaccaggaaggtgatcctcgtctctcttgctttggttttatgaagaacagcacggatggcaagagttatagcaccaatcttgcttacacacctcctgaatatttaagaaacggaagggtcacgcctgaaagtgtcatttacagctttggaaccgttcttctagacctcctcagtggcaagcacatccctcccagtcatgcacttgatatgatacaggggaaaaacaatatgctcttaatggattcacatttagagggaaagttttcaacagaagaggcaacagtagtggttaatcttgcctctaaatgtttgcaatatgaacctagggagcggcctgatacaaaggatttggtcacaacacttgccccattgcatacaaaacccgatgttcgttctcacattatgcttggaattccaaagcacgaggaggttccatcaaccccacaacgtcctcttttagcaatgggtgaggcttgttcaagaatggacctaactgcaatacatcagatcttggttgcgacacactacagagacgat

SEQ ID NO: 222425 - DNA, 512 bp, Glycine max
ggcatcaaacaatcaatttcattaacaatggaaaaattaccggtattacttcccaatttagagtgcataagcacagttgttttcaagttgtaacagattcctataagatggtgaaataaagagcatgtgccatctactccaccactggtgtatttctctgacacatttaaactcagattcaaacgttagttttgcttcccagctcaacctttatacagaacttggcaccctcaaattattccactgcataaaactatgatcatcttgctcctctttgcctcttctcttccaatgcagctgcctcatttaacatatcagccgcatccttgtgcatgtgcagttttgcaagagcaactgattgtatgtagaaagccgtgggccagactggataaacacactgtgcttgcattgcatctgcgagagcaggatctggttgatcacataacagatagcacagactgcgccttgcaaaacagttggagagaacattgttccaacatcaataaaactgg

SEQ ID NO: 222426 - DNA, 505 bp, Glycine max
  unsure (1)..(505): unsure at all n locations
gctcgttgggggcacaaacccaacaaacatactgtgcattaatctgattctctaaagtcagcaatacaaagaaaataagtgaagaaaattcatttgcatacagaaaatacaaaggctataaatccaaatacgtaaaagttagaataccaaggaataaactacaaaaacataaataactcaaaactattgaaaattgtgtccttgcgggtgatcacttccctcccgcattatcagcatcagctgcaggatctgaactggcactacctgcttccgtcttggttgtttcatcaatcctcctactagaatcatcgtctaattcatcatccatcatgtcatcctctcccacatttatatcttccacatcatcatcgtcgncattattgttttcgtcagggatctttcttttcttgggaccatgctccagcctatgagtatccaactctttgtccattgtctcctggtaattctggncattgataactttccttgcgttccttgcattctg

SEQ ID NO: 222427 - DNA, 445 bp, Glycine max
  unsure (1)..(445): unsure at all n locations
caacatgcaagtggctcacgattccgtcgcagctctccgtgactccttcccttggccgaaaagtcaccggaaccctcttcgggcaccgccgtggacacatctctttcgccgtgcagctccacccccgcgccgatcccgtcctcctactcgagctcgccatgtccacctcctcgctcgtcaaggagatgtcctctggcctcgtgcgcatcgcgcttgagagccagaaactgtctgcctccactattacgcgtacaatgcgtagcaatagtggcagacagcagcagtgcaagctctttcaggagccttcgtggaccatgtattgcaacgggaggaactgtggctatgacgtgtcccgtacgtgcggngacctcgactggcacgtgctgagcaccattcagagcgtgtccgtcggtgccggggtcatccctctcctggaggacggaaa

SEQ ID NO: 222428 - DNA, 501 bp, Glycine max
gatctgaaaataaatcacatattctttcatatatcttcatatatatggacataatagaaaaacagaaaaaaaaaagaaaaagaaaaagagagcagcaaacaagaggtcatccctaaacaatacatcaatcttaattcgaatcccctattttctttttcttaagactatttcaaacaacaaagtgaaagtcttatgacaattcttttcttttgtcagcaatcttcactaattgatcataattatattctcaatagaaaaatactaagttcaggtcccccattaccatcaggattcaacatgtaaaacgcctccgagtcacggctccccacgactcgctcaaacctcgccctcatgtacatcaactcaccctccgacccaccgccggcggcggcggaggccgcctttccgtcctccaggagagggatgaccccggcaccgacggacacgctctgaatggtgctcagcacgtgccagtcgaggtccccgcacgtacgggacacg

SEQ ID NO: 222429 - DNA, 586 bp, Glycine max
  unsure (1)..(586): unsure at all n locations
tgggtgaatgcgnatggtacctcagatttactcctgcgtcgctcncgaacccacaatacgtctaggcgcacgccaaaagaacgaattccaggcgaggagaaagatggaggggaaggagcaggatgtggttttgggagcgaacaagttccccgtgagacagccaattgggacggcggcgcagagtcaagacgacggcatggactaccatgagccggcgccggcgccggtggttgacccgacggagtttacgtcatggtcgttttacagagcacggatagcagagtttgtggccacttttctgtttctctacatcactgtcttaaccgttatgggagtcgccggggctaattctaagtgtcggaccgacgggattcaaggaatcgcttgggccttcggtggcatgatcttcgccctcgtttactgcaccgctggcatctcagggggacacataaacccggcggtgacatttgggctgtttttggcgaggaagttgtcgttgcccagggcgattttctacatcgngatgcaatgcttgggtgctatttgtggcgctggcgtggtgaacggtttctaggggaaaacaaaa

SEQ ID NO: 222430 - DNA, 591 bp, Glycine max
  unsure (1)..(591): unsure at all n locations
acaaggaagaagaaaagtcctctgttttcccttttttttttttctttctctcaaaagcttctctttcacgagattcatctatgatctatggcggaaggtgctggaaggaagctcatggtggaggtttgcaacgcgaagaacctgatgccgaaggatggtcaaggaaccgcgagtgcttacgcgatcgttgacttcgatggccagcgacggcgaaccaagacgaaatcgagagatctcaatcctcaatgggacgagaaactcgagttcatcgtccacgacaaagactccatgccttccgaaacgctggaggtgaatatctacaacgacaagaggacagggaaacgaagcacttttctcggcaaagtcaagatttccggaagcacgtttgtgaaatccggttccgaagcgattgtctactatccgttagagaagaggagcgtgttctctcagatcaaaggagagctcggtctcaaggtttggtacgtcgaggacgatcccaccgaaacagaaaacgcccgtgaggagaaagcagagtcagcaccagcggcggaggagaagcccgccgaaatgganaagaatgtagatgagaat

SEQ ID NO: 222431 - DNA, 387 bp, Glycine max
tttcttttgttttttttcttttttttttttttttttttttttcttttttttttggacgctttaaaatgcaaacgccaaaaactttttttagcgaatgggccctttcagttttgcctggaaagacctggaagggacaaaaaaaagagctctcttttcaacacctcctactttatggggttggggcagaaaacacactgcagggggctttactgcctattacacacaactttagccttaagggtatattccaagtgacaaaaccggcggtggaggtggtgatgctttcttcaccctctggggggtgactggtgcacgatcgaacttgccccgggcggtttatgtagatcccgagcccactcctattgttggggactggtctggcactta

SEQ ID NO: 222432 - DNA, 563 bp, Glycine max
  unsure (1)..(563): unsure at all n locations
atacattctttctctttcaccctctttcaaggctccacttttataattccttgtaatttcttcatcaaagtatcaaacttgtcttctctctctctccttttacttcctctgcatatatgatatattcttccaaaatcctcatctaagggttaattttgttccggacaagtttttattattattatttttttttaaaatttcagaatgatttacttataggtttctgattcaaggtttaagatgttatagtttccttgaattctcatctgggttcaacctgtttgatgttttgactgaatcagtttgaaatagtggtgattatctgataccaaacataaaagattcagctctttttcttgtttctttgtcacaagacttggattttgagaatctggagacatgggttgttgtgcaagtaaagagtcagagccacaacacaatggttacagacatgctgggactggtggtgtgcacaaccagaagactcatgaacctttggcaaccaatcaagagcacctgcanatcaaccttatcatttacatgaaaagcatgctgcatccact

SEQ ID NO: 222433 - DNA, 479 bp, Glycine max
tatggattaattgcaagaatggcacttcgttgcttggtgatgtccctttctgttctcttcactcttggtcttgcgagagaaagccatgccagagacgaagatttttggcatgctgtttggccaaacactcccattccaagttcattgcgagatcttctaaagcctggccctgcaagtgttgaaatcgatgatcaccctatgcaaattgaagaaacacagtacccgaaaaccttcttctataaagaagaccttcatccaggcaaaacaatgaaagtacaattcagcaagcctccctttcaacaaccatggggtgttggtacatggttaaaggaaattaaagacactactaaagaaggatatagttttgaagagctatgcatcaagaaagaagccattgagggagaagagaagttttgtgcaaaatccttgggaacagtaattggttttgccatttcaaagctgggaaagaacattcaagt

SEQ ID NO: 222434 - DNA, 502 bp, Glycine max
accatatatatatagagagagagaatacgaagcacactgatcacaggatgatgctctctttaagtagggaagcagatcttatcagtacacataggtaggttgaaattctagctctagcaatctagctagagaaggtagtacttgcacaacacacagcacatgataatttattttatacacaatctcattctcatggtgctcaagatgcatggactaattaagcaacaatgttggtctgataggcagtgtccacagataaattgggtacccataaaatggccttgctttcaaggaaatggcaaacagggttagttccaggatcaactcccataagttgatgaagcatttgatgattcattccagaagtatttgagtggcaaatagcaagtgcctgagttttgggtccatcaccagccaccaatggaaccatgaaagctgttgtttacggacttcatggcagtaaaatactgcagttctgaaatttagcctatgacacatcact

SEQ ID NO: 222435 - DNA, 525 bp, Glycine max
tttcaaggataacctaaagcacattgatgagagaaacaaggtggtcagcaactactggcttggcttgaatgagtttgctgatttgagccaccaagagttcaagaacaagtatctggggcttaaggtggactactctcgaaggagagagtctcctgaagaattcacttacaaagatgttgaattgcctaagtcagtggattggagaaagaaaggtgctgtggccccagtcaagaaccaaggttcatgtggtagctgctgggcattttccactgttgcagcagttgagggtataaaccagatagtcacgggaaatttgacatcactgtctgagcaagagttgattgactgtgacagaacatacaacaatggttgcaatgggggtctcatggactatgcattctcctttattgtagaaaacggtggactccacaaagaggaagattatccttacattatggaggaaggtacttgcgagatgactaaggaagaaaccgaagttgtcaccattagcgggtaccatgatgt

SEQ ID NO: 222436 - DNA, 496 bp, Glycine max
gaaaagagttaatcaagtttttattattgtatggaaaacgttacattgtttttaaggaaaagctgaaataggccgacaatagagaattgatcagaagaaggaaagaaattcagaaacaacaatgtagtaagtgatagagggaatgaatcttatttctttttagtgggataagaagccatcttgtagataccgcagattccctcgggttttccaatgatcctcctcattcttatgtatcctttctctccccacttagatccccatgaatttttcactatgatataatccacacctttcgcagttccgtatccaacagctgccacaccatgatctaaggcacttccgcaatgcccgtcgaaaacacccccactgtaaaattggaaatctctgcctgaagcctctatggccacactgaggggttggtttgcaagtgccttcaataggctctgatcattgatttgtggcacattatggcaccccgctaaggtgacaactt

SEQ ID NO: 222437 - DNA, 577 bp, Glycine max
  unsure (1)..(577): unsure at all n locations
cggaagagaagaaggaagcggaagtgatagtagaagagaagaaggaagttgaagtgacggaagagaagaaggaagtggaagtgaccgaaggaaagaaagaagtggaagtgatcgaagagaagaaggaaacagaagtgacagaagaaaagaaagaagtggaagtagaagtgagggaagagaagaaggaaagtgaagtgaaagaagaagaaaaaggtcgggaggttgttccagaggaagttgagatatggggaattcccctgctgggggacgagaggagcgatgtgattctgctaaagtttcttagggcaagggatttcaaggtgaaggaggccttgaacatgataagaaacacggtgcgatggagaaaggaatttggaatagagggtctagtggaggaagatcttggaagtgattgggagaaggtgtgtgttcaaggatggatacgacaaagaaaggcacccggtgtactacaacgtcttttgggagtttgaggacaaggagttgtacagcangacgtttttggacgaggaaaagaggaacaagttcataaggtggaggattcagtccgttgagaaga

SEQ ID NO: 222438 - DNA, 430 bp, Glycine max
ccccactccaccaccaaaccctattcagcatttaccccaatttcccctcacaccatgggctcctacgcgatggtgttggacccgaaaccgtgaccagagccaccgacgttcctcgcgacgacaaaatccgactacctgcaaggcggcttcaggggtagcgacgccaccgtctacgacgaggacaagctctacagacggctcaagaccctgcagcgccagctatgagttcatcgacattcatgaagaggacgatacggacgagcagaagaatttcaagcgcgagctcctccgttcgcacgatgaggtcaagcggatccaggcggtgccgctcgcaatcggtcagttcatggagatggtcgaccagaacaatggcatcgttggatccaccagcggatccaactactacgtcagaatcctcagcaccattaac

SEQ ID NO: 222439 - DNA, 527 bp, Glycine max
aaatcaaaaacatactcattttatagacttaagtcatcttgtttttagcatcaaggcaaaatgaaggcagaagcaagtcatccatattacttttgaaatcagacatgcagttcgtactcaacattaagctgccacaattaatatatttagttaattaaataatctaaattacacaagatgaaaggccaacaggaaacagaaacattgcttcatttctcatgatcggggggatccctctagaaatgtaccctgcactgtatataaacttcgcgagcacacaccaatctaaaagctacaacatcatgacttgttaaatgcgaaggcagcatcaggcttcttcacgtttgtcctgtaacccttctagaagaccttgggcagtatgacatatctattcttgcgaacagcgtgcatttcatcttcttgacaaatagctgatatctcagcagcactgattttgtggggacgagaaacatatttcttcaggtctacctcatcactcaagtgcatattggctgtgcaaacctgaa

SEQ ID NO: 222440 - DNA, 514 bp, Glycine max
  unsure (1)..(514): unsure at all n locations
ctcgagccgattcggctcgagctcttcctcaccgattgctagaatggaatttcgatgctcagtcatctcttttaccattctcttctctcttgctcttgcaggagagagccatgtccatgcatcgctacctgaggaagattattgggaagctgtttggccaaacactcccattcccactgcactgcgagagcttctaaagcctctccctgcaggtgttgaaatcgatgaactccctaagcaaattgatgatacacagtacccaaaaacattcttctataaagaagaccttcatccaggcaaaacaatgaaagtacaattcaccaagcgtccctatgcacaaccttatggtgtatatacatggttaacggatattaaagacacctctaaagaaggatatagttttgaagagatatgcatcaagaaagaagcgtttgagggaagagaagagntttgtgcaaaatccttgggaacagtaattggntatgccatttcaagctgggaaagaacattcaag

SEQ ID NO: 222441 - DNA, 406 bp, Glycine max
agacttaaaaaagcacactgcatattcatcaaagcatcatcaaagcacactgcatcctaacagcacacgtacgtagaaaggtgaagttccaggtcttgcacaacatacacaacacaccataatttattttatatacaatcttatggcgcccaagatgcaaatgcatggactaattaaacaacaacgcttgcctgataggcagagtccatagataaattgggtacccataaaatggccttgcttccaaggaaatggcaaacactgttagttccaggatcaactcccatgagttcatgaagcatgtgatgattcattccacaagtatctgtgcggcacacagtacgtgcctgagttttggtaccatcaccagccaccaatggaaccatgaaagctgttgttttacgga

SEQ ID NO: 222442 - DNA, 565 bp, Glycine max
gagaaacatggcttccttaagctccttagtgctgctccttgcagctctaattctatcccctcaagttcttgcaaactatgagaatcccccagtgtacaagcctcccactgagaaaccaccagtttataagcccccagttgagaagcctcctgtttacaaacctccagttgaaaaccccccaatttataagcctccagtagagaagccaccagtgtacaagcccccagttgagaaacccccagtgtacaagcccccagttgaaaaaccaccagtgtacaagcccccagttgagaaaccaccagtgtacaagcccccagttgaaaaacccccagtttacaagcccccagttgaaaaacccccagtgtacaagcccccagttgaaaaaccaccagtgtacaagcccccagttgagaagcccccagtttacaagcccccagttgagaagccaccagtttacaagccctcagttgagaagccaccagtatacaagccaccagttgagaagccttcagtgtacaagccaccagtagagaagcctgcagtttacaagccaccagtagagaaa

SEQ ID NO: 222443 - DNA, 593 bp, Glycine max
  unsure (1)..(593): unsure at all n locations
gtaactatgaactatcaatatatgatcgttatttatgtctgtgatacacacaattcaggccatgatattcttacgtgatttacagcaacttctaacttatttaatacatcataccaacccaactaggagcaattttcattatacaatgacacttatctttaaactctgaagcatgacaaggtggtagtcaccagggaccatattcttatgcaatttatgccacaactggataagacgcacaagttgcaacaccacacatgttcttccccaattccattttgaagtagccattctcaccccaactttctccccatgaattttttatgagccaatatgggacgccattttcaactccataccccacagcaaggacggcatggttcacatcctgggaagtgctaccgcaaatgtcactagtgtaaactccattctcgtagaaatggaacccattcaccacctgaaaggccacactaaccggccgaacaaatgcaactgcatgttttaattcattctcagcacccaaggtgatattgaccgagtcaatgacttgaacggngcacatttcagctgagaattgcatacaccatcttttt

SEQ ID NO: 222444 - DNA, 540 bp, Glycine max
  unsure (1)..(540): unsure at all n locations
tgcataataccgccttcggaccgccnctaanattatgaggtccatgaggacacagcgggatggacgccctttctactagctactattctgtggccgccctttttttttttttttttaaaagcaaaacttgagtgaatcaatagcccagatgttattgcctgggggtgtttttttataataaaaaagcactaaattggtttctccttacaactactacaagggaaggttattgccttacatctcaggaaggtggagcctttcacacaaacgaaaaccaatttgcacatggactcaatcgaggtcgtttcaaggggcatcaggtatcttttcatcctcctccacctcagtttaacaagcccaacaccaatttttatacgcacaagttcacaatcatccccccaggctttcaaccagatggcgggttgtgtttatttgcaactttaccttggtaaagccaaattaatgcctctgggggtcaacagggggaaactttgacccaaagaccatgttttcaattgcaaaataaatcaatatggaaac

SEQ ID NO: 222445 - DNA, 488 bp, Glycine max
  unsure (1)..(488): unsure at all n locations
tccagccgctactaaggaagatgttgaccttgcggtggatgctgctaaaagagccttttcccataacaaaggcaaagattggtcttcagctcctggctctgttcgtgctcgctatcttcgagccatcgcttcaaagataacagagaaaaaggatgaactaggaaagcttgaagcaattgattgtggaaaaccactagatgaagcactggcagacctggatgatgttattggttgttttaactactatgccgagcttgcagaaggattggacgcaaagcaaaatgctcctgtatcccttcctatggaaaccttcaagagttatgttctcaaggagcccactcgagttgttgcattaattactccatggaactatcctctattgatggctacatggaaagttgctcctgctctagctgctggnatgtacagcaatattgaagccatctgaattggcatctgtgacctggttggagctggctgaaatatgc

SEQ ID NO: 222446 - DNA, 527 bp, Glycine max
agataaaatcaactcagcccgtcattaacaaggccatggaacaatttcagtgttatacatatgcacattattttctcgaattaagatcatcatcacaaattaatgtcccccacaacttattcatgccagattttagaacagcaattcatatcacagctttgaaggcgactgataccagccccacggttcatcagatatgtacttggtcacttgcttcacacttaaatagttctcgagtccccattctcctagttcacgaccaaaaccactacgtttaacgcctccccatggagcttgaatgaagcttggttgagcacaatttatccatacaattccagcctgaatagcctttgatatgcgctcgcatctttctagatcttttgacattacagcagaccctaagccgtagtgtgtgtcatttgctagttcaatagcttcttcttcggtactgaatgttttcacacatagcacaggtccaaaaacttctttctccaaatttgcatcgaggtagtcacatcagttatgat

SEQ ID NO: 222447 - DNA, 495 bp, Glycine max
caagtctttcaaagccgattatgcattccccgaatggatttcccctgcggccaaaaacttgatctccaatttactcgttgtggacccgcaaaagaggtattccattccagacatcatgaaggacccttggattcaaattggcttcttgaggcccattgcgttttccatgaaggagtctgcgcttgaagataacattgatttcagcggcgatgatgttcctagtcctggtagtgatgatggtaatagcagcagcaacaacgaggatggggagttgacgggggctaagcctgctggtccgccttacaacgcttttgagataatctcgtccttgtcgcatgggttcgatctgaggaatttgtttgatacgaggaagcggtcgccgtcaatgttcatttacaagttttcggcttatgcggtgatggcgaagctggagggggtggccacgacgctgaactttatggagactgtgaagaatgagttcatggtgaagatgca

SEQ ID NO: 222448 - DNA, 412 bp, Glycine max
ggtcaatcaagatgattcttaattcttattatgttcaatcaacatcccaaactccagatatttattacatgctgcaataatctaaattgaattgaatagttactggtggcaattagcgtccccttgccaactccacacaatatccctgagcgaaggtctgacttggccctcacagaaattaaggtattcaagcgtgtctccggcggacttggagaactcgaccaccgcgacctccggcgccaccttgaatacctccaccgtcatggccagcttccccttcctcccttccgtcgccccctgcatcctcaccatgaactccttcttccccgtcaccctaaagttcagcttcttggccaccccctccagcttcgccatcaccgtcgaagccgaaaacttggaaatgaacattgac

SEQ ID NO: 222449 - DNA, 417 bp, Glycine max
gctgacacctgccacctaccttcatactaacctatctaccatatactatccaccacagccttttttgtatctgtcatggtctaaaaggccatagatcgccaacacattactaattacctattactcagtgaactagggacactcagacttgcattgctaatcaatttattactcatgtcctcataacacagtctactccataacgcatgcaggggagttgcctgcaagacaagctctcaaccccacttggctatcttctacgcagaaataacgaccaatgacggctgtgacttcaataacaatgtgcgtgtcaactgattgaacagctggtacgtcgcaaatgatgtgcgactggatgcctacagctgcgatgtccacttgaacaatgagcagcaaacccctgatattgctcatggt

SEQ ID NO: 222450 - DNA, 428 bp, Glycine max
gaacaatccgctaaccctaccaatcggcgagccttccaacccgggtgtttcggtatgctctctactcaatacattgcgctatactctcgattcaaacattaacaccagggacttcgttacgcgttgtgttgcgatgtgcgtgagaaagtgcgcgtggagaaaaagcatggcttctcagctcctgagacgaaccttcggaagtcgtttccttgcaaaccctaaggccttctcctccgctgcttccactccgatccgcgccactctcttccccggcgacggcatcggccccgagatcgccgattccgtcaaacagatattccaagcagctgatgtcccaatagaatgggaagagcactatgtaggaactgaaattgaccctagaacgcagagctttctgacatggggaagtttagaatctgtagggaaaa

SEQ ID NO: 222451 - DNA, 452 bp, Glycine max
gttgtattgttgaacaagggtttctctgtctgcttcttcactttctctcgtttcaatcgaaaccaaaacaaaatcatgggcagaaaattcttcgttggtggcaactggaaatgcaatgggaccactgaggaggtaaagaagattgttactactttgaatgaggctaaagtccctggagaagatgtcgtacaagttgttgtgagccctccttttgtgttccttcctgttgtaaaaagtttgctgcgccctgatttccatgtttcggcacaaaactgttgggttcgcaaaggtggtgcttataccggtgaggttagtgctgaaatgcttgttaattagggaattccttgggttattattggtcactctgaacggaggcagcttttaaatgaatcaaatgagtttgtgggagataaaagatgcctatgcacttcaacaaggtctaaaagttattg

SEQ ID NO: 222452 - DNA, 534 bp, Glycine max
gatctaagtgatacgtgcataaacagtagtaaagaacgtgacgattaagtacagtcaactaggcgttcaacattatttacccaccaaatgttatggtagttacactatttttgcattcagaaatttaatcaaaatccaattgatcgcctatggatgagatctcaaaggaaagcgtgtttattcagtactaaacagagttcaaaacattggccacaaagcacagatccaaaactcaaaaacagcaatttccgaagcagcttgaaaggcagcattatatcagttcctaactacgaatttcaattcttcttcacagtggcagcatttatgatgtccacgaactccggcttcagggaggcaccaccaaccaaaaatccatcaacatcgggctgtgcggccaattctttgcagtttcctccatttacagaacctccatagataattcttacagatgcagcaacttcagcactcacattgtcatgaacccatttcctcaaatcagcatggacctcttgagcctgagcaggagtagcaacc

SEQ ID NO: 222453 - DNA, 590 bp, Glycine max
gacctttcattcatttatatcacacacaaattttcttagttatatgctctggctctctccattaggaagcaccacattcaatactcacgaaagaatcacaaaacaactcaggagatggcaagttcagttgtggttgctaatgggaacttgaatccaaatgatacaaggggaaagaccattacatgcaaagctgccgtggcatatggtcctggagagccctttgtggtggaacgtatccttgtccatcctcctcagaaaatggaggttcgaatcaagatcctcttcaccacaatctgtcacacggatctcacggcttggcaaggcgagaatgaggctcgacgtgcttatcctcggatttttggccatgaagcttccgggattgtggagagtgtgggtgaaggtgtaagtgacatgaatgaaggggacttggtggtgccaatcttcaatggggaatgtggggattgcaaatattgcaagtgcgagaagaccaacaagtgtgagagatttggggtggatgctatgaagaaggtgatggttagtgatggtgcaacaaggtttacacaatggattggaaacccatattccatttc

SEQ ID NO: 222454 - DNA, 530 bp, Glycine max
gggaacaagatatattctttcgcccaaaagcttaagacattaatatgcctatattttcgatttagcaaaataccctgacggtttttgatacactcgggttgaagaactgagaacgattatcacacaaatggggacaccgccgatgaccattttcacatcttgaaaagggcacaatgttcataagtgtaaaagacatctgagggactctccaggggtcataagatcgaaggcctggtttatctccttgacaggaagctcgtgagtgatagaaatcatataacttcaccactccattcatgcattctttggcaaaatgtggcaattgagtcttacctcagatgcctccgaaagttgaacctactattctgcgaccatggagcaacgccattgggtggatcggaagcatttttcgagagggatgaatccgtactagcacagtcaatccccaaccctcatgaacagacaagaaagcatgccttactacgttcaaatttgcagcacattgcataatatagtgcacgcccccacca

SEQ ID NO: 222455 - DNA, 469 bp, Glycine max
ggcccttgcatttcaactccttctcgcgcgatagattgctctttctcctctgctcctccctttcccattgctcctttccctctcccctgcgctcccccaatttcccccaaactttctgcctccgccgtttctccggcgaccctctcgctcgccctccgtcgccgcctccggccctggacgccatggcccagacaatctgaaagagcacgcgccgccccggctcgtgctccaaggcccgcgtctacgccgatgtcaacgacgctcgccccaaggaatattgggactacgagtccctcaacgtacagtggggggagcaagatgattatgaagaggcgaggaacgtgggtgggggcaaatacagaccagtggagctgagagatcacggtgccctcaaggtgttttgcagccttctatgactggaatgggagctgctggaattaacgagaccacctacaacttcatcatgaag

SEQ ID NO: 222456 - DNA, 407 bp, Glycine max
actgaaatggaatcaacatttaatttgcaaattttggcacacaatcaaataaaaatgttgagagctggattttccacccaaaaataattttaaaaaccagaaacaaaacgagttagatgaagatctaattgaaatgattttcacaacagaacagggtaatctactaaaagcaagtttcactagaaataacaggtcaaactgctgaaggccccctggcaagaacgaacactcctattacagcaagcactcaggaacttaatgtgcacaagttctactactttgtgactttctaactggatggaagttataatgggccatagctttttttgctgggaaacgctgttggtgatgatatcgaaaacacttgttaacaaagtctaccacctctggaacagccatgtgatgat

SEQ ID NO: 222457 - DNA, 566 bp, Glycine max
aattcctcaaccgtcacctttctgccaaactcttccacgacaaggagagcttgcacccacttttggagttcctcaggcttcacagcgtcaagggaaagactttgatgttgaatgacagaattcaaaacccagatgcactccaacatgttctgaggaaagctgaggagtatctgggcacagtgcctcctgaaactccctactcagaatttgagcacaagttccaggagattggtttggagagagggtggggtgacaacgcggagcgtgtccttgagtcaattcaacttctcttggatcttcttgaggcccctgacccgtgcacccttgagactttccttggaagaatccctatggtgttcaatgttgttattctttctccccatggttactttgcccaagataatgtcttgggataccctgacactggtggccaggttgtttacatcttggatcaagttcgtgctttggagaatgagatgctccatcgcattaagcaacaaggattggacattgttcctcgcattctcattatcacccgtcttctccccgatgcaataggaactact

SEQ ID NO: 222458 - DNA, 445 bp, Glycine max
gaatagagggggaaaactaccccaattcgaagcttttccaatcaatagccaaatcatgcaacaaccaaaaaaaaaagcacactttttttttccttccatttctctactcttatcgaaagcttactcacaaacctaaaatcacggacattatttataaaactcaggcgcgacaaactccaaggagacaaagaaaaagccggttcctccatttctttatccagctctttatcctcagatttgctcaacaggatggggcacagactcagccaattggcggtacttgaaagcatagaacatctccagataacggcggatctcacggcgggcaaggttacacacatgcttccagaagccattgacaccggtgagagtgagaagcctcatggaggaaattcgccatgcgtacttcattttaatacgctggagaccatcctttgagatcttg

SEQ ID NO: 222459 - DNA, 515 bp, Glycine max
ccatcttaactttactttacccctcccaaagaagaaaaaaaaaaggaaaaggattccaacatatttgcattatacaattcaaatggaacacacaaaaatggagatgggtttggttttggtggtaatggccatgctgtgcgcaggagctgtggcacaatcgagttgcacaaatgtgttagtgagcctgtcaccatgccttaactatatcacagggaattcttcgaccccatcttcaggatgctgctcacagcttgccagtgtggtgcgctcacaaccacaatgcctatgtcaggttcttagcggcggtggatcatcactggggctcaacatcaaccaaactcaagctctggctttgcctggtgcttgcgaggtgcagaccccacccaccagtcagtgtaacaatgctgctgcttcaccaccaacaggaacagttgcggaatctccaaattcagctccatcaggtattggatgttaattcaccacattttgagggagtattttggtttgatgcttta

SEQ ID NO: 222460 - DNA, 502 bp, Glycine max
  unsure (1)..(502): unsure at all n locations
tcgcaacacaacaaaaaaagacaacccagagagcgcgtcttaataaacgctcttctctgaaaacccccatttcttttcttctttcttcttctctttcgcttcttcgatcttcgatcttcgtcgctgaaaatgagagagtgcatttcaatccacatcggccaggccgggattcaggttggaaacgcctgctgggagctttactgcctcgaacacggcattcagcctgatgggcagatgccaagtgacaagaccgttggtggaggtgatgatgctttcaacaccttcttcagtgaaactggggcaggaaagcacgtgccccgtgcgatttttgtagatcttgagcccactgtgattgatgaggttaggactgggacataccgccaactattccatcctgagcagctcattagtggaaaggaggatgcagcaaacaactntgcccgtggccactataccattggaaaggagattgttgagctttgcttggaccgcatcagaaagc

SEQ ID NO: 222461 - DNA, 448 bp, Glycine max
cttgaacacaccgcgtttcggagagagacgtcgcaatggggaggaggcctgcaaggtgttatcggcagataaaaaacaagccataccccaaatcacgcttttgccgtggtgttcctgatcctaagatcagaatttatgatgttggtatgaagaagaaaggtgttgatgagtttcccttctgtgttcatctggttagctgggaaaaagaaaatgtttcaagtgaagcattggaagctgctagaattgcatgcaacaaatatatggcgaaatttgctggaaaagatgctttccacttgagagtccgagtacatccattccatgttcttaggatcaacaaaatgctttcatgtgctggagctgatacgcttcagactggaatgagaggtgcatttggaaagccacagggaacatgtgctagagtcgccattggtcaggttcttctttctgt

SEQ ID NO: 222462 - DNA, 387 bp, Glycine max
cctggcttggcctagcgcttattctctcgcattccgtggagatctagtgcttctgctgcaagacctcgctgaaaattagggtttcgattcggaggtagacgaagatgttcggaagggctccgaagaaaagcgacagcaccaggtactacgaaatcctcggcgtttccaagaacgcttcgccggatgacttaaagaaggcttacaagaaagccgccattaagaaccatcctgacaaaggcggggatcccgagaagtttaaagagcttgctcaagcctatgaggttctgagtgaccctgagaagcgcgagatttatgatacatatggagaagatgctcttaaggaaggaatggtggtggtggccggtggccatgatccatttgatatct

SEQ ID NO: 222463 - DNA, 532 bp, Glycine max
gccgaggtcacgaggagcactagcttttttcacaatttccaaatggctaggggattgaagaagcatctcaagaggctcaatgctcctaagcattggatgcttgacaaactgggtggtgcatttgcgcccaaaccctcatctggaccacacaaatctagggagtgccttcccctcatactcatcctacgaaaccggctaaagtatgctctgacttaccgtgaagtcatcgctattctgatgcagagacatgttcttgttgatggaaaagtcaggactgacaagacttaccctgctggtttcatggatgttgtttcaatcccaaaaaccaatgagaacttccgcctgctctatgacactaaaggccgattccgtctccattctgtcagggatgatgaggcaaagttcaagctctgcaaggttaggtcagtgcagtctggccagaaaggtatcccatacctgaacacctatgatggtcgcaccatccgttaccaaaccctctcatcagggccaacgacaccattaagctggatct

SEQ ID NO: 222464 - DNA, 358 bp, Glycine max
acacaacaacactctctcttctcgctcttggcatgacgctcttcactcactctcattcattcatttccaccgttcatggatccagtaagcgtgaggcgtaacacgcccttggcgacggcggaacccgagacccatgacctaatcctgaaggagaaagcgcacgcgatgccgcggaatcgagctcatcgtctacgagaacttcaccaccttcgtcgttatcgagggcctcggcagcgctatcacgaacaaatactccgagggcatgccgggcgaccgctactacggtggtggaggccacattgaccggatggaaaacctttgccgataacgcgccctccgagcgtttcacctcgacacc

SEQ ID NO: 222465 - DNA, 583 bp, Glycine max
  unsure (1)..(583): unsure at all n locations
gagaaaagttagggttcacaacttttccttttccttttgcttgcgaatctgaatcaaataatcaatcatccattcattattcatcatgtcgtcggcgaagaaaatcacgctgaagagttcggacggcgaggctttcgaggtggaggaggcggtggcgctggagtcgcagacgataaagcacatgatcgaggacgactgcgccgacagcggcatccctctgccgaacgtgacgagcaagatcctggcgaaggttatcgagtactgcaagaagcacgtcgaggccgcgaatcccgaagacaaaccctccgaggacgatctcaaggcctgggacgctgaattcgtcaaggtcgaccaggccacgctcttcgatctcatcctggctgctaactacttgaacatcaagagcctgctggaccttacatgtcaaactgtagccgacatgatcaaggggaagactccagaggaaattcgcaagacctttaacattaagaatgacttcacccctgaggaggaagagnngagttcgtcgggaaaaccaatgggcatttgaatgattttgttaatctcaaaaaatctgaatcaa

SEQ ID NO: 222466 - DNA, 523 bp, Glycine max
agagggtcccattggaagagtcggaagcggaggggaggggagaggaagaaggaacatgtcaggcgttagagatgggcgttgttgttgttggtgtgcccacccatccccaatccaaacactcttctcttagtaccctaatctacttattattatcacaaacacaacccaacccttccatcttcttcttcttcaatccatgccggtcaacgccagctggtgctgagggtcaatcgaggtcttcctttctcaatggggagcgggagcagaagctactcggccaaccccgccgactacaagcttctagaagaagtcggttacggcgccagcgccaccgtgtaccgcgcaatctacctcccttacaacgaataggtcgccgtgaagtgcctggatctatcgctgcaacagcaatctggacgacataagatgagaagcgcagaccatgagcctaatcgagcaccccaacgtcgtgagggctttctgctccttcgtcgtggagcggagtctgtgggttgtgatgggatta

SEQ ID NO: 222467 - DNA, 568 bp, Glycine max
caccgagggcgagtactccggcctcgaacacgaggtcgtccccggcgtggtcgaaagcctcaaggtaataacaaagttctgctcagagcgcattgctaaatatgcttttgagtatgcttacctaaataacagaaagaaggtgactgctgtgcacaaagcaaacattatgaaacttgcagatggtttattcttggaatcttgtcgagaggttgccacaaggtatcctggaatcaagtacaatgaaattattgtagacaactgctgcatgcagcttgtttcaaaaccggagcagtttgatgtcatggtaacccccaatctttatggaaatcttgttgcaaatacagcggcaggtattgctggaggcactggagtcatgccgggaggtaatgttggggctgatcacgctgtgtttgaacaaggtgcttcagcaggaaatgttggcaatgataaagtagtagaacaacagaaagcgaacccagtggcactccttctctcgtcggccatgatgcttagacatctccagtttcctgcatttgctgaccgatggaaactgccgttaaaaagtgat

SEQ ID NO: 222468 - DNA, 482 bp, Glycine max
tttgagagagagagagggaggagggagagtgttgacgctccatcaagatgggtatttctagggattccatgcacaagaggcgtgccactggtggcaagaagaaggcatggagaaagaagagaaagtatgagcttgggcgtcaggccgcaaacaccaagttatcaagcaacaaaactatccggaggattcgtgttcgaggtggcaatgttaaatggagggcattgaggttggataccggcaattactcatggggtagtgaagcagttactcgcaagactcgtattctagatgttgtttacaatgcctcaaacaatgagcttgtgcgaactcagaccctggtcaagaatgctattgttcaggttgatgctgctcctttcaagcagtggtaccttcagcactatggtgttgaaattggtagaaaaaagaaagtggcatccaagaaggactctactgaggagggtgaggctgctgctgaagaaact

SEQ ID NO: 222469 - DNA, 506 bp, Glycine max
ctcgagccgccaaaagattcataataactaacattagaaactaggtgaaagtaactgcacagacacacaacacatcttccttaatttctccgtccatttccctcccataaataaatctttcatttccatctttcttgggtgatccaatggcgacccttttccagggattgggagttgtgaacccatcattggcttcttcaaactccaacaagttccatcttccttctcgtacatccctctcagagaggaaagatggcatttttgtggtcagatctgatgcaacaagggtaagcagccaggttctgaaggctggagctcgtaagcatgaattgttagttactaatgcagttgcaacaaaggaaggccgtcctgcggcttctacatcaaaatctgggcatgaacttctcctttttgaggccctacgtgaaggtttggaagacgaaatggagagggatccttgtgtatgtgtcatgggcgaagatgtaggtcactatggaggatcctac

SEQ ID NO: 222470 - DNA, 361 bp, Glycine max
gggaaatctgattgcaagaaatggttcaggaagctattcatcatcttggtcgaagttggtggctgacttgtatcctttctcgatcagaacatggacatgcacctactgcaatatggagcagcctccacgagcaaaacattgtcatgattgtgacaagtgtgttcttcagtttgatcatcattgtgtttggcttggtaactgcattggccagggtaatcactgtaaattttggtggtacctttttgaagagacagcattgtgcctttggactggtgtcttgtatatttcatacctgaaggctcacattacaaggggttggtggcaggatgcgatcatgataattctcttgatcactctggta

SEQ ID NO: 222471 - DNA, 401 bp, Glycine max
ctgttagctcacatacctacctcacctataaagatgcaggagagcggtcaagaccgtcacggtattgaccatcacctttgaggacgacagctctgacctctttgacgacactaggacaaggaccatgacaaggaaggaatacctccggatcagcaacatgttatttggggcggacactagataaaggacggtcgaacccttgacaactacgacatccagaaggagacaacccttcaccttgtacttcgcatgggtgactgcaagcagcacatcagtatgactctcactgatggaaccattgccctccaagaagaacgctgtgacaccataggcatcgttgaagccaagatgcatgacagggcacgcactgctgcataacttgctcagctcatcaataccgg

SEQ ID NO: 222472 - DNA, 511 bp, Glycine max
gaaaaacccatcaagatggatcaagacagttctattgggaaagttttcaagttcacacatgttctggctgcctccttcgccggtttagttgccgccgccgccgcctcaagctaccggcgggcaccgtccacggtggtgggagagcagaagaaggttattcccgagctacgtaggacggaatctgggcgtctcggggagatggaaaagttctcccactatgttgcaaggcaaatggggtttgaagatgctgatgaggttccagagctatgcatattggcccaagagtattcgaagaaatccaaagggtgcgatgaaagcatctttgaatatatttgcagtggcaatgtggagaacactgattctctatatgcgaaattagttgaggagttagagagatgcatcctcagatatttagcatttcactggaaccaagctacatctgtcattagtcaggttctgggtgtggagtctcagcagaaaataaagctgaagggaattctatggcagctac

SEQ ID NO: 222473 - DNA, 396 bp, Glycine max
ttttgtttttttttttttttgttttttttttttctttttttttttatttttttttcttgggggtgaaaaaaaaatttgctcaaaactcggaagtttttttcgttgtttctggtgcaggcgcttgacttgacattcttctcccacatactccacacatgaatctatctggtgatgtaaattcatcccgtttaggatttgatactcatggctatttttttgatgaatttgctagtattggtcctgaggttgaggcgacaattttggggccatttatgggagggatttgtcttttttgatgagactatccttgcattctttctgaaccccttggctgggaggggggataactttttgattgccctcggaaccaggggcccatttggggttggggttttt

SEQ ID NO: 222474 - DNA, 481 bp, Glycine max
ccttgaaagcaagataatcatccaaagcaaaattcctcataattaaggggaggcagggatatacaaacaagctttaaaacatcccctcccggatcacatcgcactagtgttctagtatactacatgagtatacaatggttcttctaattaataggattaatacttaatacaatctgttaaaactttgaagatgaggaaaccaattatatcaacttgaagcttcttctcaaacggctttcttcaggcagcaagaaatataagaaattggaaggaggatttttctttctttgggtgagggggacacattaacagaactaggtggaaggaaccaactattaacaacctgaaacagactacatacacttctacaggctgagtacataatatttacacgaggctacactatgacgcagacatggcacactgctgtcttgcatgagagggaatcagtttcaccagcatgcctggaggcactccttta

SEQ ID NO: 222475 - DNA, 535 bp, Glycine max
ggtgcctcatgtaatcttcggtgtcatccaaaagctaccaaccaacattccttctttctcacgcacgcacaggcacgctcgcacgtgttgtcctctgatctccctgaaaaaccgcaacactaactcaaactattgatctccgtttaattccttttgaatctgaaagaagaaacagacggtggcttacggtcatcaattgcagagatctattaagattctggaatggcagcaatttacagtctttacatcatcaataaatctggtggattaatctattataaggattatgggtcagctggacgaatggataccaatgacagcttgcgggtggcaagtttatggcactcaatgcatgctatctctcagcagttatcacctgtttcaggttgtttaggaattgaacttctccaagcagatacatttgatcttcattgctttcaatcactgacagggacaaaattttttgtggtctctgagcctggagcacaacacatggagagtttattgaaatttgtctatgaaatgacaccgacta

SEQ ID NO: 222476 - DNA, 439 bp, Glycine max
ggccacaatccttgtagccaaactcatctcagctttcatagtgcccaagtccagaaagagggtacccccaattgtgaaggggtggcccttaattggagggctaatccgtttccttaaaggtccaatctttatgctccgtgaggagtaccctaagcttgggagtgtcttcaccctcaagctcttccacaagaacatcaccttcctcgttggccctgaggtctctgcatacttcttcaaggcctcagagactgatctcagccagcaagaggtgtatcagttcaatgtgccaagttttggacctggtgtggtctttgatgttgattactctgtgaggcaggaacagttcaagttcttcactgaggctcttagggtcaacaagctcaagggctatgtcaatcagatggttgcagaagctgaggactatttctcaaaatgggga

SEQ ID NO: 222477 - DNA, 616 bp, Glycine max
gaattgttgtaactttttgattcctaaattctctaaaattcgaaattctaatttcgttaggggaaagagattgtttgtgtgtgagtgagtatggctggaaaaggcgagggtcctgctctcggaatcgatttgggaacgacttactcttgcgtcggcgtgtggcaacacgatcgcgttgaaatcatagccaacgatcacggtaacagaactaccccatcctacgtggctttcaccgacacagaacggttgatcggcgatgcggcgaataaccaggttgctatgaacccaaccaacaccggttttgatgctaagcgtttgattggaaggcgtttgtccgatgcatcagtacaaggtgacatgaaattgtggccgttcaaggtgattcctggccctgctgagaaacctatgattgtggtgaactacaagggggaggagaaacagttttccgcggaagagatatcctccatggttcttatgaagatgaaggagattgcggaggcgtatctaggttccaccataaagaatgcggttgtcactgtgcctgcttacttcaacgactcacaacgtcaagccacccaaggacgcttgtgtcatttctggggctcacgtgatgcga

SEQ ID NO: 222478 - DNA, 516 bp, Glycine max
caccgagggcgagtactccggcctcgaacacgaggtcgtccccggcgtggtcgaaagcctcaaggtaataacaaagttctgctcagagcgcattgctaaatatgcttttgagtatgcttacctaaataacagaaagaaggtgactgctgtgcacaaagcaaacattatgaaacttgcagatggtttattcttggaatcttgtcgagaggttgccacaaggtatcctggaatcaagtacaatgaaattattgtagacaactgctgcatgcagcttgtttcaaaaccggagcagtttgatgtcatggtaacccccaatctttatggaaatcttgttgcaaatacagcggcaggtattgctggaggcactggagtcatgccgggaggtaatgttggggctgatcacgctgtgtttgaacaaggtgcttcagcaggaaatgttggcaatgataaagtagtagaacaacagaaagcgaacccagtggcactccttctctcgtcggccatgatgcttagaca

SEQ ID NO: 222479 - DNA, 554 bp, Glycine max
  unsure (1)..(554): unsure at all n locations
cggcgaccaattccctgaaggagaacgttactttggcctcgagaatttcggcaacacttgttactgcaacagcgtcttgcaggcactatacttttgtgttccctttcgcgaacaattactagagtattatggaaataacaaaagcatattggacggggaagaaaatcttttaacttgcttggcggacttattttcgcagataagttcccagaagaaaaaaactggtgtcattgctcccaaacgatttgtacagaggttgaaaaaacagaatgaactcttccgtagctatatgcaccaggatgcccacgagttcttgaactttttgctgaatgaacttgttgacattctggagaaagaggctcaggctgcaaaaactgatcaggagacatctccaccttctgaaaaggctgttaacgggcccaagaatggtcaagctaatggtgttcacaaagagcctttagttacttgggtacacanaaattttcagggaatactcaccaatgagacaaggtgcttgncatgtgagacagtgacagctagagatgaaaacattt

SEQ ID NO: 222480 - DNA, 564 bp, Glycine max
gtcaaaatctcattcatcatcatcttcttcttaaaagttaaaaggttaagagagagagagaaagatgagtagcgtgttggagcatggtgttgtgggatgttgcaaatcagggccaggctatgctaccccactggaagccatgtctggtccaagagagtctcttatttatgtaactgctgtctacacagggacaggaatagagaagccggactatttggccacagtggacatagatccaaactctccaacttattccaaagtcatccataggcttcgtgttccttatttaggtgacgaattgcatcacactggttggaattcatgcagctcttgccatggagacccctcggcagaccgacgatttctcatcgcacctgcactcgtttcaggtcgcatatatgtggttgatgtgaaaacaaatccaagggctccatctttgcacaaagttgttgagcctgccgatatcatacagaagactggattagcttatccacacacatctcactgccttgcttctggtgacataatgatctcatgtcttggagataaagatggaaatgctgc

SEQ ID NO: 222481 - DNA, 554 bp, Glycine max
cagtgagtgatcggtgttcacttgatccttcataagtcgtcatcatcatcatcatcatcaccgttgattgaagaagatgccgatcagaaacatcgccatcggaaggcctgaagaggctactcaccccgacacgttgaaggcggggttggctgagttcatctccaccttgatcttcgtgttcgccggttcaggttccggcatcgcctacaacaagctcaccgacaacggcgccgccactcccgccggcctcatctccgcttccatcgcccatgctttcgccctcttcgtcgccgtctccgtcggcgccaacatctccggcggccacgtcaaccccgccgtcaccttcggcgccttcgtgggcggcaacatcaccttactccgcggcatcgtctacgtcatcgcccagctcctcggctccatcgtggcctccctcctcctcgccttcgtcactgcctcccctgttccagcattcgggctttccgctggagtcggagttggcaacgctttggtgttggagatcgtgatgaccttcggtttggtgtacacagtctacg

SEQ ID NO: 222482 - DNA, 416 bp, Glycine max
ttttgggaaagttttttatcagaattttttaatttgattgtgaaatgggttaaaaacattaaaaggttttattccttggaagaaggttgtagactatgccctattgttagtgaaggacagaatgaaaagatattgaagtgtatctcaaatgctaagagtgagggtgcaacccttttgactggtgggtttcgcccagagcatctaaagaagggattctttgctgaaccaactgtcataactgatgtaactaccttcatgcaaatttggagagaagaagtatttggaccagttctctgtgtgaaaacatttatcactgaggaagaagctattgatctagcaaatgacactgtatatgggttgggttttggttgaatatcaaatgatctaaaaagatgtgagcgcattactaaagcttt

SEQ ID NO: 222483 - DNA, 527 bp, Glycine max
ctgactcctatagtttcctctgctaattccatatccccgttttccttcactcttgaaccccgattcatttccaccagcacaagaagcatggctgcaatatcaataccttctcacatgaaagcttggacatactctgagtatggaaaatccaaggaagttctcaagtttaatcagagtgtggctttgcctgaggtgaaggaagaccaggtcctcatcaaggtcgctgctgcttcccttaaccccattgatcataagagaatggaaggctatttcaagaacagcgactcccctttacctactgctccgggttatgatgttgctggagtggtggttaaagtgggaagtgaagtgaagaaatttaaggttggggatgaaggttatggtgatatcaatgtgaaagctttggaatatccaaaggtgattggctctttggctgagtacactgctgcagagagaggctattggctcacaagccacagaatctgagctttgctgaggctgctagccctcccttaacactcgagact

SEQ ID NO: 222484 - DNA, 432 bp, Glycine max
gcttatcatgttttttgttccagctgataacagagcagactttggctatgctacggatcatggcatgcaccccttatgcatagctcacactgcacatgattggagggaaggatctgaacactacagattcactgagcattgccacgaaacactcgacaagcataaacgaccctgtttgatttttgctgctcaccgtgtgctgggatattcttttgattctcggtctggcgtggacaggtccattcgaagagccaatgggaagagagagtctgcagaaactttggcaaaaatataacgtatatattgcatttcatggccatgtccataactacgaaaggacatgccccattgatcagaatcactgtgtgaatgatgaaaggtctcactattccggagctgtgaatggaacaattcatggtgttgctggaggag

SEQ ID NO: 222485 - DNA, 527 bp, Glycine max
acttgagctttccatggaagaagaacacgctgcaaaggcgccactgccggacgctttccttcagttcctggagaccaacgggctcgacccttccatttacactgctattgattccaccccacgatacattcggttgaaacccggtttcgaatcatgtattgaagaggttgaagcagaggtgaaatgcaaactcgaaaaattagagtggttaccgggattttactctcttccacctcacgttcaaattgctggttctagggcataccgagaagggaagatatatggaattgatgcagcttctggagctgcagttatggctttaaatatatcacctggggatcatgttctcgacctgtgtgctgctcctggtgccaaactttgtatgattttggaccttcttggtgattcaggctctgtggctggagtggatgttgcaaggcatcgtttggcagcgtgtaggacaatgctgcagaaatatatgattggtggtcggtgccggcttttttgtgctgatggaacagcatttt

SEQ ID NO: 222486 - DNA, 521 bp, Glycine max
ttgggtttctcttcctcccttggagaaaaagaagagccaccgctgcgacgccgttcgtgcatttttgaggtgccgctgtcatgtttgggcgtggtggaccaaggaggagtgataactccaaatattatgatattctcgggatttccaaaaatgccagtgaagatgaaatcaagaaggcctatagaaaggcggctatgaagaaccatccagataagggaggagatcctgaaaagtttaaggagttaggtcaagcatatgaagttttaagtgatcctgagaagaaagaactgtatgaccagtatggtgaagatgcccttaaagaagggatggggggaggaggctcgtttcataatccatttgatatatttgaatcattttttggaggagcaagctttggtggtggtggtagtttccgaggtagaagacagatgcatggtgaagatgtggtgcattctttaaaggtttccttggaggacgtttataatggcacaacaaagaaactatctctttctagaaacata

SEQ ID NO: 222487 - DNA, 532 bp, Glycine max
catgtatgtggccatccaagctgtcctctccctatatgcaagtggtcgcacaactggtattgttttggactctggcgatggtgttagtcacactgtgccaatctatgagggctatgcactccctcatgccattcttcgtttggatcttgctggccgtgatctgactgactctttgatgaagatcctcactgagagagggtacatgttcaccacctctgccgagcgggaaattgttcgtgacatgaaggagaagcttgcttatgttgccttggattatgagcaagaacttgagactgcaaagagcagttcttcagttgagaaaaactacgagcttcctgatgggcaagttatcaccattggagctgagagattccgttgccctgaagttcttttccagccttctatgattggaatggaagctgctggaattcacgagaccacctacaactccatcatgaagtgtgatgtggatattaggaaggatctgtatggtaacattgttcttagtggtggctcaactatgttccctggt

SEQ ID NO: 222488 - DNA, 550 bp, Glycine max
  unsure (1)..(550): unsure at all n locations
gaagaagatggctttaggtgttcctgctcttccgttgacatacgtggctcacgttctggcagttgttgccagcgtcttggtcgtggtctgggtcgtcaatttcaggggtggcttggcttgggattctgataacaagtccctcatcttcaacattcatccagttcttattgttattggcttactagttcatgggggtgaagctattataagttacaaagcttttcccctaaagaaggaagtgaagaaattgatacaccttgttttccatgccatcgcattaatacttggaatagttggaatttatactgccttcaagtttcacaatgaaagtgggattgccaatctctacagcttgcattcatggcttggaattggggttattgtcctttatggcattcagtggatatatgggtttgtgatctttttcttccctggtgggactccagacattagacgcgcctcacttncttggcacgcgctatttgngctgcttggatttgtcttggctgtgggcactgctgctctagcgtttctggagagctcactttct

SEQ ID NO: 222489 - DNA, 559 bp, Glycine max
  unsure (1)..(559): unsure at all n locations
caagatgggcaaattcaatctgtcccatagagttgttttggcaccgctgaccagacagaggtcttacgacaacgtcccacaaccccatgccatcctctactactcccagagaacttccaacggaggccttctcattactgaagccactggcgtctctgacacggctcaaggctatccgcaaacccctggcatatggactaaagaccatgttcaagcttggaaacccattgtcgatgccgtccacgccaaaggcggtgttttcttctgtcagatttggcacgttggaagagtttcagattcagtttatcagccaaatggacaagcacccatatcttctacggacaagccactcacaccccaaattcgaagtaatggcattgatcaagtacaatttacccctccaaggagattaaggactgatgaaattccgcatattggaaatgacttcaaacttgctgcnaggaatgccatcgaagctggttttgatggggttgagatccatggggctcatggctacctgcttgagcaatttatgaaagataaagtgaatgaccgaaca

SEQ ID NO: 222490 - DNA, 575 bp, Glycine max
gtatcgttgagaaataaggggaaaaaatggtgtcgctgaaactgcagaagcggctggccgcaagcgtgctcaagtgtggcagaggaaaggtgtggcttgaccccaatgaagtcaacgaaatctccatggccaattctcggcaaaacatcaggaagttggttaaggatgggtttatcatcaggaagccaaccaagattcactcacgctcgcgtgctcgtaggatgaaggaggcaaagaagaagggccggcactctggttatggtaagagaaagggtacaagggaggcgaggcttcccaccaagatactttggatgagaaggatgcgtgtgctcaggcggttgcttcgtaagtacagggaatcaaagaaaattgacaagcacatgtaccatgatatgtacatgaaggtgaaaggtaatgttttcaagaacaagagagtcttgatggagagcattcacaagtccaaggctgagaaggcaagagagaagactttgtctgatcagtttgaggctaaacgtgcaaagaacaaggctagcagggaaaggaaacttgctcggagggaggagcgcttagcccaa

SEQ ID NO: 222491 - DNA, 620 bp, Glycine max
  unsure (1)..(620): unsure at all n locations
cgaaaccctcttcatcttgttctatctgtgacgagcatcatggcctcaagagcagtgttattgttggctatgtgtgtgcttccggcgatggttgtggccattcgcccagcaaagaaccctttttgcgtgaagggtcgtgtctactgtgacccttgccgtgctggttttgagacctcagctaccacctacattgctggtgctgagattatgttgcaatgcaagagcagggttagcaacgaggttgtgtacacgaagaaggggtacaccgactcaaccggagcatacacaatgtacgtggatgaggatcacgcagatcagatctgcagtgccaagcttgtaagcagccctcaccctcaatgcaaggaagtcaccccaggccgcgacgaagccgtcgtgattctcacccgctacaacggcattgcctccgacgataggttcgccaatgccatgggcttcatgtctcaagaggttgcttctggctgtgctgagatcctcaggcaataccaggagttcgacaatgagaattaattacgntattaanttcagnatattattaatctacttnctaatgtctcttgatgtgagtgttatctcgacatttcatatatcatgtatatatg

SEQ ID NO: 222492 - DNA, 505 bp, Glycine max
ggaaaaagttggcaatcttcacagcacttgctttctctcagaagctgtctggtctcccaccagaaactgtgttccaaccacttcttaaagataaccttgtggccaaagggctagatctgtcatttatgactgacttctttaaggagtatctgattgacaacagccttgatgatcttatttcaattctaaaacggggaaaagtagaggaggatcttttggacattttcccccctacaaaaagatccattgaagctttctctgagcatttcaccaaggaaggattggtggccttggtggagtataatgaaaagaaaatttttgaggtgaaacttatggaaatgaagtcttctttaacagcacagataacagaggaggctgatacatctgaagtcattgagactgtgaagctgcgagttagagatgctaaattgccggaaattgaggtggtgcggatcttgtgggatgtttaatggatgctgttcagaggtctggaaaaaatcacaca

SEQ ID NO: 222493 - DNA, 440 bp, Glycine max
ctcatatatcatggctacctccatggtgaagcttatgcttttctctgctctcatactcttgtccttgcaagcagttgtgtctgtaacaccactgcattttcaacatccactagaccctttaaccaaacaagagataagtcttgtccaaaccatagtccaaaacaagtacccaagctcaagtaacaggttgagcttccactacattggactcgacgaacctgaaaaggatgccatcctcaaatgggaatccatcaaaccaactgttataactgtccctcgcaaagccttggccattgttataatcaacagccaaacccacgagatcttaattgatctaaaggcaaggcgcattgtctccgacaatattcactccgggaatggcttccctacccttttccgttgatgaacaaggtcgttgccatagagctgccactgaaata

SEQ ID NO: 222494 - DNA, 350 bp, Glycine max
ttttgtttttttttttggcaagttcaagtaaacttgtcattgatgtaataaggagcaaaacgtatcagatcattattcttgcacatgcgataagcagatcgcattctacattatccaaggcacacagtctgttgaagaactcgaagcacactaattttacggaaaagggtgggtagctagctttacttggggcaaccagtccattgggcatccgggggagaaagtggtttaagaaccggattcctgtcgaagaaattgcatggcctgagctctaaggcagggctcaataatggcattatggggaagtcttcctgctctggaacatgatgaactccaacaaagtgctacaa

SEQ ID NO: 222495 - DNA, 529 bp, Glycine max
  unsure (1)..(529): unsure at all n locations
gcaaaaagaaagaatcccaggcgaggagaaagatggaggggaaggagcaggatgtgtcgttgggagcgaacaagttccccgagagacagccaattgggacggcggcgcagagccaagacgacggcaaggactaccaggagccggcgccggcgccgctggttgacccgacggagtttacgtcatggtcgttttacagagcagggatagcagagtttgtggccacttttctgtttctctacatcactgtcttaaccgttatgggagtcgccggggctaagtctaagtgtagtaccgttgggattcaaggaatcgcttgggccttcggtggcatgatcttcgccctcgtttactgcaccgctggcatctcagggggacacataaacccggcggtgacatttgtgctgtttttggcaggaagttgtcgttgcccagggcgattttctacatcgtgatgcaatgcttgggtgctatntgtggcgctggcgtggtgaatggtttcgaggtgaaaacaaaatacgtgcgttgaatg

SEQ ID NO: 222496 - DNA, 398 bp, Glycine max
aaatggacaacactagattatgtgcattattggggaagaaacgtggtggcatattaagcaagagacataagtcatccacccacccacccaccaagccaaccccacttttaactgctaccggatttcaattatacatagcatgggatgacggccacaagcgtggataaaaagaaacccaacctggttatatacttgggggaagagggcgacccatctgacatataagacatggggggggccaggcaaaatatggaggtgcatgtatatgaccctggtgttagtgttgagtcagcaaactaaattgcacaatcactggcgcacatcacacatgagtggggcctcttgcaactcaaaagcagaagataacaatgtaccatgacgcgacccatgcaccacct

SEQ ID NO: 222497 - DNA, 411 bp, Glycine max
ctttcaaattaagtctctgcattattctcttcccttttctatctccctctgcaaaaacgaagtaaatgggtcggcttaatctcctacttgtgtggtcactctctttaacacttttccttaattatctacacccaacctctgcccagctcagtccaaaccactatgctaacatatgccccaaccttgaaagcatcgttagacaagccgttactaataagttccaacaaacctttgtcaccgtcccagccacccttcgcctattctttcacgattgctttgtccagggttgtgatgcttccgttttgattgcatccaccggaaataaccaggcagagaaggatcaccaagacaacctgtctttggcgggtgatgggtttgacacagtgatcaaagcaaaggctgcagtagatg

SEQ ID NO: 222498 - DNA, 404 bp, Glycine max
cataaattcaatgctctcatcgttttccctcataaaccgctttctcgtgttgtaacacactcatcactcatcatattcattcacacttcccactttccaatatggaatgctgcataatcgccaggctcaagacccaacctttatggttcgcgctgctcttcgttgtcggattgttaacgattctcaaattggctttcgttgttttcagatgggtctacgtcaatttcctccgaccaccgaagaatctcaaaaagtacggatcttgggcagtggttactggacccactgacggcattggaaagagcttcgctttcgagctcgctcgcaagggcctgaacctcgtccttgtcggaaggaaccccgacaagctcaaagacgtgtcggattcgatcgcggcgaagttc

SEQ ID NO: 222499 - DNA, 496 bp, Glycine max
  unsure (1)..(496): unsure at all n locations
tgcagctccaatggcaacctctcaaatcacttcatcattgaggaacttgcctgcatttgaaaggtttcaaccttcaacgcttcgatttccttctgctgggcacgtcagaattgggacactgacacaaacctcgtttccctctttcgttgtcaaagccgccactgttgtcgcccccaagcacaccactgttaagcctctgggtgatagagtactggggaaaattaggatgcaaaggagagactggcagtgggattttactgtccgaacttgttaaaggaaggcctcagggaggagaagtggttgctgttggggatgggaagtcgcttgggaagagcaaagtggatgttagtgtgaagacaggtttgcaggttgtgttttcaaagtatgcagggactgangtggagttcaatggttcaaaacatcttattctgaaagacgatgacatcgttggtatccttgaaacagatgaggtcaaggatcttaaaccctaaatgat

SEQ ID NO: 222500 - DNA, 468 bp, Glycine max
agagggtaccctcttgttaatttgcactgtttttgtgtctgttgctgcacttttaggagttcttctattctaacaacctctgccaaccaacacaagcctgaaaataaaataaagatgctgcctccttgctggagatcgttcgggaagaaacagtaatgctactgacatgggaaagaaggggagttggttttctgcaatcaagagagttttcacacaccactccaaggggaagcaggattcagataataacaaaggcacaaaagagaagaagaaaagtctaggaaaactaaagcatggagagaccaattcattcatccccctcttcagagagccaagcagcattgagaaaatcttcggggacttcgaaagggagcaacaattactggggttaaggcctgccactcctccggagagacctaaaacaccaccttatgtccctccaagagctccttctcctagacctccctc

SEQ ID NO: 222501 - DNA, 547 bp, Glycine max
gtcctttgtctaaggacattgaagtcaatggaaaggaagctgccgtggttaatccagaggaatccatcggtgttgttgatgtttacattcatcaggctagggacattcataacatctgcatataccacaagcaagatgtttatgctaagatttgcttgactagtaatcctgagaattctgtctctaccaagactataatggaggaggaaggaaccccgtgtttaatgagaatcttcgtctaagtgttaggactgttgattctgctgtcaaatgtgaaatttggatgctgagcagggtgaagaattatctggaagatcagttgcttggttttgctttggtgcctttgtctgaagtactggtgaaggatggaaaactagagaaagagttctctctttcttcaactgatttattccattccccggctggttttgttcaattgtctcttgcttacaccggtgcttcacctgatgttatggcgatttctgcaatgcctactgagttggccacaaatggcaccgagaaggactcagaatcatgcgagtcactg

SEQ ID NO: 222502 - DNA, 571 bp, Glycine max
gagagatctatctatctatcaagatggcgttgttggttgagaaaacaagcagtggaagggagtacaaggtgaaggacatgacgcaagccgatttcggaagattggaaatcgagctggcggaggttgaaatgcccggcctcatgtcctcccgcaccgagttcggcccctctcaacccttcaagggcgctaggatcaccggctccctccacatgaccatccaaaccgccgtcctcatcgagaccctcaccgccctcggcgccgaggtccgctggtgctcctgcaacatcttctccacccaggaccatgccgccgccgccatcgcccgcgacagcgcctccgtcttcgcctggaagggtgagaccctccaggaatactggtggtgcaccgagcgcgccctcgactggggccccggcggcggccccgatctcatcgtcgacgacggcggcgacaccactcttctcattcacgagggcgtcaaggccgaggagatctttgagaagaccggccagttccccgacccggcttccttcgacaatgcggagttccagatcgtgctgagcatcatcaggga

SEQ ID NO: 222503 - DNA, 589 bp, Glycine max
  unsure (1)..(589): unsure at all n locations
gcgcggttgatcacagtggtgtggtgcgcggtggcggtgctactgtgcgccgcggcgggcgcgtcgtgggtggaggaggcggcgaacccgatacgaatggtggcgggggtggaggcggaggtggttcgggtgatagggcagtgccggcgcgcgctgaagtttgctaggttcatgagcaggttcgggaagagttaccgaagcgaggaagagatgagggagaggtacgagatattctcgcaaaacctcaggttcatccgctcccacaacaagaaccgcttgccctacactctctctgttaatcattttgctgattggacttgggaggagttcaaaagacacagactaggcgctgcccaaaattgctctgccactcttaacggcaaccacaagctcactgatgctgttcttcctcccacgaaagactggaggaaagaaggaatagtgagtgatgttaaagatcaaggcagctgcggatcatgctggacattcagcacaactggngctttagaagcagcctatgcacaagcatttgggaagagtatctttctttttagcagcagctagtggattgtgctgcccgttcaacaac

SEQ ID NO: 222504 - DNA, 481 bp, Glycine max
tatgccgaagagctgagataacaaccagaattaattgccgggtggacgcgctcactagccgggggtcggccttgaggtatattaaatagaactttttttttttttttttgtatttgggggtcggaagagaaggctcccgttcaagtttaatcttaaagagagatgccaagtcctatcagtgggggtggtgtctcgggagcctagaacatggttcctaacgacgttgttttacagcggggacataaaatagaacggcacggtcgcgcatctctgtcacttgttcatccaattggggcgacaggaaagcgtaagggcccggagggatttgaccagtcaaaaatcgatcgggtatgggtatgtcaactttagaagccggctggacactggtagagcaccggatgttattaacgtcactattctccataacaggacgagatagtttattggtgttcatcaaggtccgcctctccggcagagtgga

SEQ ID NO: 222505 - DNA, 395 bp, Glycine max
ggggcaggacacaaagaactacaacaacatcgcatcatctcctctgttggaacctctgccttcgtcgaattcgaaacgagcttcgaagcttcaaacgttgggaaacatcatcgtcaccgtggtcggaactggggttctgggattgcccttcgcttttcggatcgctggatgggtcgctggatcgctcggggttgccatcgtcggcatatccacctactattgcatgctactgcttgttatgtgcagagaaaaattggcatcagaagaaccattaggggaatcaaacacatatggagacttgggttataggtccttcggaacccctggtcggtatttgacagaagttataattgtggtagcacaatgtgcagggtctgttgcttattttgttttta

SEQ ID NO: 222506 - DNA, 421 bp, Glycine max
  unsure (1)..(421): unsure at all n locations
tgctaaagaactggcaccacacaagcctctagcgaaattcttgtgcatcaaaggaattgttttcttctgcttttggcagggaatgttgctggaccttttagcggcaattggtgtcattcaatctcgtcatttgcggttagatgtggagcacattgaggaagcaatgcagaatattttggtatgtctagagatggttatcttttctgttcttcaacagtatgcttatcatcctgcaccatatagtggagaagttgagaaaatgcttaaacaaaacaagaaaaatgaatgatatgataaggtcaaaagaaaaaaatcagggtacagagatgtattcaagagctgtttattgtggcgctagaaatacatgaaaacactgatgcanagtggatgtgttatttttataatgttattgtactcgtac

SEQ ID NO: 222507 - DNA, 546 bp, Glycine max
ccgccttcaagacaaagttcggcaagacctacgccacgcaggaggagcacgaccaccgcttccgtatcttcaagaacaacttgctccgcgccaagtcacaccagaaattggatccctccgccgtccacggcgtcaccaggttctccgatctcactccggcggagtttcgccgccagttcctcggcctgaagccgctccgccttccctctgacgctcagaaggctccgatcctaccgaccaacgacctccctaccgatttcgattggcgcgaacatggagccgttactggagtaaaaaatcagggttcgtgcggatcgtgttggtcctttagcgccgttggagcgttggaaggtgctcattttctttctacaggtgagctcgtgagccttagcgagcaacaacttgtggattgcgatcatgagtgtgatccggaagagcgtggagcatgtgactcgggttgtaacggtgggttgatgaccactgcatttgagtacacactccaggctggtggactaatgcgagaaagggatatccttacactggaag

SEQ ID NO: 222508 - DNA, 582 bp, Glycine max
  unsure (1)..(582): unsure at all n locations
cttttgctttgcttagattctgttctgcagagagagagagagagagagagtttcagaatttagagagagaattttattttgttttttcggttatctttattggtttctcttacatcgtttttgtaggcgctgaggaagaagctttggcagcataactttgttggggagaataaaattcaggcaaggccttgaagttggagagtattagattggaatcttagaattttctctttagaccaaagaaatggaggtatatggcaattctatggttgcagctccttcaaatgttatttatctgtccagtattttgggccaaggcggtccaattcccggtcacagatgcaactggaaatgtgaaaatgaacatgtttgtggaaacatgtatcgctgcaagctaacagggctgactcacatttgtgataaaaactgtaaccagagaattctgtatgataaccatagctcactttgcctagcaagtggtcaaattttcccccttacgccgnaagaggaacaagcagtgagaggtgttcgcaggaagcttgacatgggagaatcgccctctgatagctgtggttttaagcg

SEQ ID NO: 222509 - DNA, 523 bp, Glycine max
  unsure (1)..(523): unsure at all n locations
gcaaaaagaaagaatcccaggcgaggagaaagatggaggggaaggagcaggatgtgtcgttgggagcgaacaagttccccgagagacagccaattgggacggcggcgcagagccaagacgacggcaaggactaccaggagccggcgccggcgccgctggttgacccgacggagtttacgtcatggtcgttttacagagcagggatagcagagtttgtggccacttttctgtttctctacatcactgtcttaaccgttatgggagtcgccggggctaagtctaagtgtagtaccgttgggattcaaggaatcgcttgggccttcggtggcatgatcttcgccctcgtttactgcaccgctggcatctcagggggacacataaacccggcggtgacatttgngctgtttttggcgaggaagttgtcgttgcccagggcgatnttcacatcgtgatgcaatgcttngtgctatntgtggcctggcgtggtgaaggtttcgaggtgaaacaaatacgtgcgttgaat

SEQ ID NO: 222510 - DNA, 362 bp, Glycine max
  unsure (1)..(362): unsure at all n locations
ntgccgtacgatcgatgacatcgaccagaattaattgccgggtggacgcgctcactagctgggggtcggccttgtgcttgatttgagcatatatatgactctggtgttgtttgtgattttggaaaataaattgcacacttacatttggacatcacacatgagtgggggctcttccaacttaaaagcggaggataacattgcccatgacgcgacaagtgcacactctaataatcagtaaacatacatcttatagcatacaatactacaatgacattaatattatatgcgaggatttgagctaaacagatcatcttaatgaagggaagccgacacccacaaacattggcttgatttttgttgat

SEQ ID NO: 222511 - DNA, 556 bp, Glycine max
caagaagcaagcaaagcaacagctgtttcatcaaagaaacagaagaaaccttttcttttcgattccgacaatgcgtccaccgcgtaagagggtggatttcgcgcgcgacgacaaggtggagatctgcggcaacgaggatggcttgctcggctcctactaccaagccacggtcgtgtcgcgcctcgacaacggcctctacgtcgtacgctacgacacgctcctcgaagacgacgcatcacaacaaccccttaccgaaacccttttccccaaagaactccgtccccagccgccacgtgtctccaaaaccgatttcgcgctctaccagtgcgtcgacgccttcgacaacgacggctggtggctcggccaggtcaccggaaaaaaagacgccgagcattactacgtgtatttttctaccactaatgaggagattgcgtatcatgtttctgcgattagggttcatcatgagtggagccatggggagtgggttttgtccaattgaagaatgttgagttcggaattcgtgtcgcgtctttgttttatgagacattaattcgac

SEQ ID NO: 222512 - DNA, 394 bp, Glycine max
actttctatctcattttcgttcggttcaaacactctcatggcatcagacaagaagattaggatcggcatcaacggatttggaaggattggccgtttggtggccagggttgctcttcagaggaatgacgttgaacttgttgctgtctacgatcctttcatcaccactgattacatgacatacatgttcaagtacgacaccgttcatgggcagtggaagcattttgatgtgaagctgaaggactctaagacccttctcttcggtgagaagcccgtcaccgtttttggattcaggaaccctgatgaaattccatggggtgaggttggtgctgaatatgttgttgagtcaactggcgtattcactgacaaggacaccgctgctgctcacttgaaaggt

SEQ ID NO: 222513 - DNA, 525 bp, Glycine max
cagagcgagagagaatcgtaacagaaacggtcactggaagttgtctctaccaccctctcagccatggcaacaattccccctagccgatcatcatcacacgcgtttgttgccatggcaaccttcacgactctgttgttgtgcacggcggcggcgaaggagagcgtgtacgagatactccccaagtacgggctcccgagtggtctgttaccggataccgtcaccgactacaaactcgacgaggatggccaattcgtcgtcgttttgccgaagccctgctacatacagttcgattacttggtttactacgagagcaagatctccggcaagctcagctatggctccatcaccaatctcaagggcattcaggtccagcgcctcttcatctggttcaacgtcgacgagatcagggtcgatttgccacccttcgacagcatctacttccaggtcggcatcatcaacaagaaactcgacgttgaccagttcaaaaccgttcgttcctgccgcaaatccctctcgtgcccccct

SEQ ID NO: 222514 - DNA, 568 bp, Glycine max
ctctttgcgcagttccctacctctcctttcaagatgcagatcttcgacaagaccctcaccggaaagaccatcacccttgaggtggaaagctctgacaccatcgacaacgtcaaggccaagatccaggacaaggaaggaattcccccggatcagcaacgtctcatcttcgccggaaagcagctcgaggacggccgtaccctcgccgactacaacatccagaaggagtcaacccttcaccttgtccttcgtctccgtggtggcatgcagatctttgtcaagactctcactggcaaaaccataaccctagaggtcgaaagctctgacaccattgacaactgtaaggccaagatccaggacaaggagggaatccccccagaccagcaacgtctcatcttcgccggaaagcaacttgaggacgggcgcaccctcgccgattacaacatccagaaggaatcaacccttcacctcgtgctccgtctccgtggaggcatgcagatcttgcgtaagaccctcaccggcaagactataaccctagaagtcgagagctccgacaccatcgacaacgtca

SEQ ID NO: 222515 - DNA, 517 bp, Glycine max
ctctgccactacttctacaaaaaaacaaaaaaaatctttgttttgtttcttcatttgtttttcctccaccaccttctgaggtgaccttgaaagtgatttcattggaagcaattgataccagttgacatttgaagcagcttgtacttcattcagttatgacttgttttcctttattattcagtaagtcgtcgtcttcttctgcgagacacgaaccagaaattgatgaaggcattcataatgttaaactctactcctacaaagagctaagaaatgccactgaagattttagtccagccaataaaattggagagggtggttttggttctgtctacaagggacggcttaaagatggaaaagttgctgcaataaaagttctttcagctgaatcaagacaaggggtgaaggagttcttgactgagattaatgtgatctctgagatacagcatgaaaatttggtcaagctatatggttgctgtgtggaaaaaaataacagaatattagtctacaattaccttga

SEQ ID NO: 222516 - DNA, 537 bp, Glycine max
  unsure (1)..(537): unsure at all n locations
ctctttagcagcagaagcatgtgtgaattgaagctcaaatgaattaagactaaggaaacaatgaagaattgaagaagaagaagaggaggagttaaaaaacaaccatgtcagaatcaaacgcaattgcaaatggtttagctggtgcaggtggtggaattattgctcaaatcataacttatcctcttcaagcggtaaatacgcgccagcaaactgagagaacactcaagaggaacaagcaaagttttacctccaactcaaccactgctcctggcactcttcttcagatctttcaggtcattggaactgagggttggggtggactctatagtggcctcaagccttctcttcttggaactgctgcttctcagggcatttactactatttctatcaagtttttaagaataaggcagtgaccattgcagctgcgcagaaagtgaaagggcgtggagatggtactggtgngatgtttggttggcttgttgtggctgcaattgctgggtccctgaatgtgttgttcacaaacccaatatgggttt

SEQ ID NO: 222517 - DNA, 537 bp, Glycine max
attcgtattgtcgcagagaaagaaaaccctagctcaccgtttcaagatgcaaatcttcgttaagacccgcactggtaagaccatcactctcgaagtcgagagttcagataccatagacaatgtaaaggccaaaattcaagacaaggaagggatcccaccagatcagcaacggctcatttttgctggcaagcagcttgaggatggacgtacccttgctgattataacatccaaaaggagtccactctccacttggttcttcgtctccgtggtgggatgcaaatctttgttaagaccttgacgggaaagacaatcacccttgaggtcgagagctccgataccattgacaacgttaaggctaagattcaggacaaagagggtatccctccagatcaacagaggctgatctttgctggaaagcagcttgaggatggccgtacccttgctgattacaacatccagaaggagtccactcttcatttggtactccgtctacgtggtggaatgcaaatcttttgtaagactctgaccggaaagac

SEQ ID NO: 222518 - DNA, 596 bp, Glycine max
ttggggtcgactgcggattacaacagatatattgtcgggtgcacgcgctcactagctgggggtcggccttgtgtgcttgcatagttattggctattttggtagtagtttcttcatgttgggtaggtggagctgcttaagcagcttcatagtctgtgaagtgggaagcggatgaagaagcgatgcgtttttgcccgtgttttggatccgaggaggccaagggggtggcggatcgcgacccggtcctgctggtttcgggcatgggcggctccattgtcaattccaagcccaagaaattcgggttcaccactggggtttgggtcagactcctcctcgctgacgtcgagttccgaaacaagatttggtccctttacaatccccaaacaggtccttgcttgacacttatgttactactaccacaccaccctatgcatttcaatttttcagttcaatcatgattctctagcaaaattggcacggactttcatgttacactgaaacgttggacaagaagtctgaaattgtggtccctgacgatgatcacggcctttatgcgatcgatattctggatccatggtggtttacccagtgtatacat

SEQ ID NO: 222519 - DNA, 515 bp, Glycine max
gtggatcttctgattcttcgatctcgattctggttagggtttacggttttctgaagggaagagaagtttgcccagaatggggattctggttccgcttttcttccacgtcgtcgctttcatttgcaccgttgcagctatcgctttggccgttcttcacatttacaggcaccttctcagttacaccgagcccacttatcagcgttacatcgttcggattattttcatggtcccggtttatgcactaatgtcattcttgtcccttgtaatacccgagagttcaatctattttaattccattcgggaagtctatgaagcttgggtcatttataattttctgtcactgtgtctggcatgggttggtggtcctggagcagttgtaataagtttgagtggtcgagttctgaagccatcattttgtctgatgacttgttgctttcctcctataccgctggatgggcgtttcatacgtaaatgcaagcaaggatgtctgcagtttgtgattctgaagccattta

SEQ ID NO: 222520 - DNA, 440 bp, Glycine max
cggctcgagcttcgattcctccccaaatctctaaactccgtcgcggggatttgttttcggttcaattcccctcaaaatcttgccacttttcaaacccctgattggcttttccatctgggttttcattcccgatcgatccgtgggtttgagattcggagaattaacattcatctccggtttcaataaagttgatgcatttaaaatcttaatgggtaggtttagggttattgtgatttgggaaaaaaatggagtcgagtcgaagagcggcggaatcgtactggcggtcgcggttgatcgattcagctacgtccgatgaagataaagtcacacccgtttacaaattggaggaaatctgcgaacttttgcgttcttcgcatgttagtattgtgaaggaggtttcagagtttgtcttaaaacgcttggaaaataaaagcccaatt

SEQ ID NO: 222521 - DNA, 394 bp, Glycine max
tagcgttgccattctcatcctcttctttctctctctaccattgccatggatccctacaagcaccggccatccagcgccttcaattctcccttctggactacaaattctggtgctcctatttggaacaacaactcctctttaaccgttggagctagaggtccaattctgctggaggattatcatcttgtggagaagcttgcaaattttgatagggaacgtatcccagaacgtgttgtccatgccaggggcgctagtgcaaagggtttctttgaggtcacccatgacatttctcacctgacatgtgcagatttccttcgagcccctggagttcagacgcctgtaattgttcgtttctcaactgtcattcatgagcgtggtagccctgaaaccttga

SEQ ID NO: 222522 - DNA, 501 bp, Glycine max
ctttccttaactcaacccaacacaacacaacataaattaaataaataaataaaattaaactaagctaaattcctttctctctctttctttctcttcgagggtttgggtttctcttcctccctggaagaaaaagaagagtcaccgctacgacgccgttcgtgcttttttgaggtgccacagtcatgtttgggcgtggtggaccaaggaggagtgacaactccaaatattatgatattctcggggtttccaaaaatgccagtgaagatgaaatcaagaaggcctatagaaaggctgctatgaagaaccatccagataagggaggagatcctgaaaagttcaaggagttaggtcaagcatatgaagttttaagtgatcctgagaagaaagacctgtatgaccagtatggtgaagatgcccttaaagaaggaattgggggaggaggctcgtttcataatccatttgatatatttgaatcattttttggtggagcaaagcttggtg

SEQ ID NO: 222523 - DNA, 585 bp, Glycine max
  unsure (1)..(585): unsure at all n locations
ctctctctctctctaacacggagtgatggctgtgcagctgtgggaaaccctgaaggaagccatcgtagcctacactggcttctctccttccaccttcttcacggtgctggcgcttctttttgccgtttactacgtcgtcacgggtctctttggctcctccgacgatcaccatcaccgccaccgccacgtcgaggaggaggaggagatgccgcctctgcgccccccggttcagctcggcgagatcacagcggaggagctcaaggcctacgacggcaccgatcccgagaagcccttgctcatggccatcaaggcccagatctatgatgtctcccagagcaggatgttttatggacctggtggaccttatgccctatttgctggcaaggatgctagcagagccttagcaaagatgtcttttgaagagaaagatctgactggggatatttctggtcttggcccgtttgagcttgatgccttacaagactgggaatataagtttatgagcaagtatgtgaaggttggaactgttaaaagtgaagaagtccagtaactgaaccagagtncattggtgaccattagaatcta

SEQ ID NO: 222524 - DNA, 445 bp, Glycine max
gcaactttgtggcaagtggctatccaccctcatttcagtcactgcttcatgctatcttatattttcaaggatatgggggaaacacgttttctcaaaaattgtaccttcttgatggcgattcttactttgctttctagctttctcttgaaccatgtcatggctagtgtttacactgttggtgaccaagaagaatggagtagccaaacaaattatgcttcatgggcagagagatacaattttagccaaggcgatgttcttgttttcaagtacgtgaaagggcaacataatgtttatgaagtgacagaagacacgttccgatcgtgtgatgcaagtagtggtggagtgttggccaagtatgaaagtggagaaaatcaagtggcactcagtgaggtgaagagacattggttcatttgcaacatagcagggcactgccttggaggcatga

SEQ ID NO: 222525 - DNA, 531 bp, Glycine max
tggagatgtatcagatctggagcaggagaatagcgttgggagcgttcgcgtttgttctgcttttcctatcggcctcagcagacgacgtcgttgtgctctctgaagataacttcgagaaggaagttggtcaggacagaggagctctcgttgagttctatgctccttggtgtggacactgcaaaaagcttgctccagaatatgaaaagcttggtagcagcttcaagaaagccaaatctgttttaatcggcaaggttgactgtgatgagcacaagagtttgtgcagcaaatatggagtctctgggtacccaacaattcagtggtttccaaaaggatctcttgaacccaaaaagtatgaagggccacgcactgctgattcacttgctgagtttgtaaatacggaaggaggaacaaatgtgaagattgctacagctccttccaatgtagtggtgcttacatctgaaaatttaatgaggttgtcttagatgaaaccaaagatgtcttggttgagttttatgcaccctggtgtggaca

SEQ ID NO: 222526 - DNA, 494 bp, Glycine max
gtttcttccttttctatctcttgctacttcaatcctcttgtttagttctctgtggttaatgttccacggttattaagataaaatggctgagattgagggttctcctggaagctccatgcatggagtaacaggaagagaacaaacattcgtagcctcaattgcttctccaattgtccccacagacaccacagccaaatttgctctcccagtagactcagagcacaaggccaagattttcaaactcttctccatggccaatccccacatgagaaccttccacctttcttggatctccttcttcacctgcttcgtctcgaccttcgcagcagcccctcttgtccccatcatccgcgacaaccttaacctcaccaaaagcgacattggaaacgccggggttgcttctgtctccggaagcatcttctctaggcttgcaatgggtgcggtctgtgacctattaggtccacgttatggctgtgccttcctcatcatgctct

SEQ ID NO: 222527 - DNA, 550 bp, Glycine max
cacttttgaacataagttactgtcctgcatcagaagttgatctggttcaaggaaagaatttggttattgtagtttacaactctctaggttggaggaggaatgaagtgattcggattccggttattgaggccaatgttagagttcatgactctaatggtatagaaatagaatctcaacttcttcctcaggctgagaaatatgtagacttaagaaattactacgtgaaggcatatctaggacaaactccacccaaggcacctaagtactggcttgcatttacagtttctgtaccgccacttggttttagcacatacactgtctcaactgccaaaaggacagggtccacaagatcatcagtagatatatataagagtagtgaaaagtctaaatttgatgttggtcaaggaaatttgaagcttacattttctatggatcaagagaagtgtaccaattatgttaatataagaaacctggtcgaggaacaggttgaactaagttacctatactattctggatacaatggaactaatcaaaaagatccacagaattc

SEQ ID NO: 222528 - DNA, 503 bp, Glycine max
  unsure (1)..(503): unsure at all n locations
gaatttgcgggttttggatttggacttggtcgtcaacacagtctaattaatatctttttgctccttcgcttatgaatcttcttcttcttcttcttcttgttcctgcaacgcactgaattcgatcaatcaatccatcttcaattgctttgtttcgatcggaggaaaatggccgatcagttatcgaagggagaggaattcgagaaaaaggctgagaagaagctcagcggttggggcttgtttggctccaagtatgaagatgccgccgatctcttcgataaagccgccaattgcttcaagctcgccaaatcatgggacaaggctggagcgacatacctgaagttggcaagttgtcatttgaagttggaaagcaagcatgaagctgcacaggcccatgtcgatgctgcacattgctacaaaaagactaatataaacgagtctgtatcttgcttagaccgagctgtanatcttttctgtgacattggaagactctctatggctgctag

SEQ ID NO: 222529 - DNA, 539 bp, Glycine max
cagaccaattcaattaaaaccaaagcaggtacactctgtaagtggatgtgtaagacgaacaactggacagacacacatagtagtacaatgtaaatcatcaaacaataggtccaaccaccaggaatattaaaggtacaattcaagtaataacctcatactcctcaagttctttggctttcagcttttccttcacccttaagagaagtgtggtcttccaagaatccagaggggtcatactatcaaattccttgacaacatcagtaaactttgcaacatcttcttcatcaattgcagcagcaatgtccgccaacaatctatattcacgtgttcctgaaaatgttggatccagttcctgatatcgttctaatgcattggttatagcaacaacctgctctttacagagttggcagatgccagcattaagaaggtgtcctttaactccatacttcagcaaattattgttgagggattggcgagctatctcttcataaatgtcaatcgacttctgatattgaactagctgagcagcaaactgggca

SEQ ID NO: 222530 - DNA, 426 bp, Glycine max
cacgttgttgcgattgcgactctcttcctacgataaccgtttcctctcgccggaaaaccgacattgatctctctctccggcgatccccgcccatccctccgacatgagttccggcgagctcctacacatacagccccaggagctgcagcttccctttgaattgaggaagcagatctcgtgctctttgcagttgtctaacaagactgacaactatgtggctttcaaggtcaagacaacaaatcctaagaaatattgtgttagacctaacactggagttgggaggcctaggcctacttgcgatgtcatagggacaatgcaagcccaaagggaggcacctcctgacatgcaatgcacggatgaagttctccttcaaagtgtagttgctagccctggggcaaccacaaaagatatcactccagaaatgtt

SEQ ID NO: 222531 - DNA, 456 bp, Glycine max
ctggattacattaaacgagccagtgctatatagcaatggaggttatggaagaggaggatccccacccaatagatgctccaagtggtttgctaactgcactgctggtgattctactaccgagccctatttagttacacaccacctcattcttgctcatgctgcagcagtaaaggtctacagggagaagctccaggcttctcagaagggtcaaactggggtaacactgaattctgcttgggttgcgccactttctcaatcaaaagaggacagagaagctggatatcgaggtcttgcctctatgtatgactggatcatggaaccactttactttggaacatatcctggtgtcatggctaacagagttggaggatcgcttgtcaaagtttaccaaaagggaatacttgatggctaaagggtcctatgatttctagggggtaactattacacttcaactta

SEQ ID NO: 222532 - DNA, 407 bp, Glycine max
gttgcgatagcgactctcttcctacgacaaccgtttcctctcgccggaaaaccgacattgatctctctgtacggcgatccccgcccatgcctacgtcatgagttccggagagctcctccacatacaggcacaggagctgcagttcccctttgcagtgaggaagcagatctcgggctctgtgcagttggctaacaagactgacaactatgtggctttcaaggccaggacaacaaatcctacgaaatattgtgttagacctaacactggagtagtgatgcctaggtctactagggatgtcatagtgacaatgcaagcccaaaaggaggcacctcctgacatgcaatgcaggataagattctccttcaaagtgcaggtgacagccctggggcaagcacaaaagatatcac

SEQ ID NO: 222533 - DNA, 411 bp, Glycine max
ctttctctctctctctctctctctctgaagatggcttcacgcaggctcgaatcttctctgattcgatcctcccttcgtagatctcaatcgaagccctcaatttccgcatcgacatcgaggctcacgtcatacaaccgtgcctcaccgcacggatacttgctgaaccgcgtcgccgagtacgccaccgacgcggctgctgctaccgctcctccctctcctcctgctccggggaagaaggagctcggcggcggcgggaagatcaccgatgaattcaccgggaagggcgcgatcgggcaggtctgccaggtcattggtgccgtcgtcgatgtcagattcgacgagggtttgcctccgatcatgaccgcgctggaggttctggatcactcgacgaggcttgtgtgggaggtggcg

SEQ ID NO: 222534 - DNA, 486 bp, Glycine max
acgctggccatggaccaggagggacagccgcagagtttttaacatttatgcatccaacgtttttaaccagaaagtaaaaaatgtacatcctcttgcccctttccccttattaaatcacacaacttaaaaacaggggggcagtttggccacagacattgaccgtcgttcatctcacagttggcaacattaaaatgggaggaaggaataacctggtccattttcatatccaaaaaatggaaaattttgtggtttggcattgccaagagttcctaaattatttaatttagcaattacaaaaaaaaaggggattaaaaggagaacagggctgtgggtgattaagacgctggacattccttagcaattttcttggccttggcaatgaccttcttaataccgccaaccatggtaaacgactgctctggaaggtaactggatttttcatccaacacaacctggaggcttggtacgtgtttcttcaactcaaca

SEQ ID NO: 222535 - DNA, 534 bp, Glycine max
gtggtttcagtgagtgatcggtgttcacttgatccttcataagtcgtcatcatcatcatcatcatcaccgttgattgaagaagatgccgatcagaaacatcgccatcggaaggcctgaagaggctactcaccccgacacgttgaaggcggggttggctgagttcatctccaccttgatcttcgtgttcgccggttcaggttccggcatcgcctacaacaagctcaccgacaacggcgccgccactcccgccggcctcatctccgcttccatcgcccatgctttcgccctcttcgtcgccgtctccgtcggcgccaacatctccggcggccacgtcaaccccgccgtcaccttcggcgccttcgtgggcggcaacatcaccttactccgcggcatcgtctacgtcatcgcccagctcctcggctccatcgtggcctccctcctcctcgccttcgtcactgccttccctgttccagcattcgggctttccgctggagtcggagttggcaacgctttggtgttggagatcgtgatga

SEQ ID NO: 222536 - DNA, 478 bp, Glycine max
gacccgaataatgatacatacattcaattcaattggggaccaggtgagagcgagagcatgcccaaaatgataattaaatttacttaaaagaaaactttaggatcattaaccatccaaccaaagatcaacggccaccgattcaacaggaaagaaaacacaaaggagggaaaaccttacacagaaaaagattccggagaaattcaataatacacatttttttttttttattatttcatttttcccctttagaaaacagggctgggaagctgttcgggggtggggttgatgaaaacaaccttgtaaataagcccagcaattccacctccgatgagagggccggcccaaaaaatccaggggttggtccaggtccagttaacgacagcaggcccaaatgttacaagagggtttatggttgctccggaaaaggccccacccaacaaaatgttagcgccaacaatgaaaccaatggcgatgggag

SEQ ID NO: 222537 - DNA, 539 bp, Glycine max
  unsure (1)..(539): unsure at all n locations
cttttctcttctccctttttctctctgtctctctctctcgctctcgctcttcttctcatcaagcacagagttacagactcaccgatcttccgattctctttcgtcttggtttatgagctcgaaggagagacccactcttggtggcacgcggattaagacccgcaaacgaaatattgctgcgccgctggaccctgcagcattctcggatgcagtggtccagatttatttggataatgctggtgatctggaacttattgctaagagtattgaatcttcagaccttaacttttcaagatacggtgacaccttttttgaggttgctttcactggggngtcgtacacaacctggaactaccaagcctgatgagggggaccgccacccatactctatattagagtgtgagccttagcgtgaagtcattttaccatctgtaatctacatacaaaagattttgcggcgaaggccatttctcatcaagaaccttgaaaatgttatgcggaaattccttcagtccttggaacttttcgaggaaaatgag

SEQ ID NO: 222538 - DNA, 580 bp, Glycine max
aaaacaaggattagagtaccaccaatagaattagtcaagcactgaactcaaagtttcaacagggataagagtaccacccattattgaaataatcactcaaaatacagtaatgcacccgtataacatatcaaagtggcgtgcggaaaacacacaggctccatgaatatgtcccgagagcacgatggaggaggaggagtcaaacacaacacaaatacaaattaaaagataatcagtactactaggcagaaccgaatttaagagaattcgagccaaatatcttagctaaatggtacaagagctgaaagacaaggtaatttcttcagccctgaacctccaccacacttactcctcctcttcagcctcctccagccaattaacaaagggttccagcgccttcacaaaggtttgcctgcccttggagtttgttccttttcggaaccaatgaagaatggtatcttcagccagcacatcctggtcataaagagatctaataatctcagggaacagcttcatcagtttagcatcctcgtagcattgcatctgtactttgtacatcagctccagctcaagtttcccgctg

SEQ ID NO: 222539 - DNA, 496 bp, Glycine max
attcaaacgaaaacgaaactcgctcgactatagttagttacgcatcgcaagcacactgccaaaaatggcggggcgcaagcacgcgcccttctccttcacgcgcctcgacgacgcgcgtcttgcgcattccttctcctcctccgtcgccgaggtccgcgccctcgaggagcgcgtcgaggcgcgccaccgcgagatccaggccctgctcagcgacaaccagcgcctcgccggcatccacgtggcgctcaagcaggacctcgccgccactcaggaggagctccgccgtctctccgccactgccgccgaggtcaaggccgagcgcgacgccgaggtgcgcgagatctactagaagtcactcaaggtcgacgccgaggtccgcgccgtcgtcgccatgagcttcgagctggatcgcgtgcgggcggacgtgcaggagctcgtggcggagcggaaggagctcgcggcgcaactgcatgccgtggagagcgagcttgcaaag

SEQ ID NO: 222540 - DNA, 491 bp, Glycine max
acagcccgctcatgactttgtccctgtatcttctccacttgcaactaacattgacccaacggggggacggcatggtacattcgatagcaaaatatatatcaccgttcccgttcacagtaccaagactcgacccccttttatgcgtactgggtacaaaagacatatcccccaccatgatgatacataataaactaagacactcatggttatatgagctgctgaccttgctaacctccgcactgcacctgcttacaactgcacaagaccaaatatgccagccattgaccctgtgtaagacaacatacgacaccgaggtgcaaagtcctatggctggaactgatgatcatgtagatagtgcacttgctacaactacaagaggcatctttaccctactacagtcaacgacgacccacctgggatctgctattccagagggacacattggccttctttgacaaagactgttccaaacttgccgagcacatatactc

SEQ ID NO: 222541 - DNA, 591 bp, Glycine max
  unsure (1)..(591): unsure at all n locations
cacgttgttgcgattgcgactctcttcctacgataaccgtttcctctcgccggaaaaccgacattgatctctctctccggcgatccccgcccatccctccgccatgagttccggcgagctcctccacatacagccccaggagctgcagtttccctttgaattgaggaagcagatctcgtgctctttgcagttgtctaacaagactgacaactatgtggctttcaaggtcaagacaacaaatcctaagaaatattgtgttagacctaacactggagttgtgatgcctaggtctacttgtgatgtcatagtgacaatgcaagcccaaaaggaggcacctcctgacatgcaatgcaaggataagtttctccttcaaagtgtagttgctagccctggggcaaccacaaaagatatcactccagaaatgttcaataaagaatctggtcatgatgttgaagagtgcaagtngagagatgtttatgttgctcctcctcaaccaccatccccagttcgagaaggatctgatgaagattcatcccctcgtgcatctgtatctgagaatgggcattcaagtgctgcggaattcacaggggc

SEQ ID NO: 222542 - DNA, 296 bp, Glycine max
ccaatatattccattctctctgtgtatttccctacctctcccttcaaggttagccgatgtcttctgtttttcttcttcgatctttccatgaattgtgtatgttctttgatcaatacgatgtggatttgattgtgttttgttcgggttcatcgatcttcaattttcataatcagattcagcttttattatctttacaacaacgtccttaattggatgattctttaatcgtagatttgctctaattagagctttttcatgtcagatccctttacaacaagccttaattgttgattcat

SEQ ID NO: 222543 - DNA, 552 bp, Glycine max
cataacaaacgtaggtgggatattagagtactattattaatgggacacaattgagttcaacacaaaccgaacttattttcaagggacattattacagacccattaaacatcaaagttcttcaaatgttttgggaacacatccaacattacacaacgagcttaaaaccccccacggagacggaggacaaggtgaagggttgattccttctggatgttgtagtcagcgagggtccttccatcctcgagctgcttgccagcaaaaatcagcctctgctggtccggtgggatgccttccttgtcctgaatcttggccttcacattgtcaatggtgtcagagctctccacctcgagggtaatagtcttacccgtaagagtcttcacgaaaatctgcataccaccacgaagacgcaacaccaagtggagagttgactccttctggatgttgtagtcagcaagggtgcgtccgtcctcgagctgtttcccggcgaagatcagcctctgctggtctggggggattccctccttgtccctgatcttaaccttgacgttgtc

SEQ ID NO: 222544 - DNA, 530 bp, Glycine max
  unsure (1)..(530): unsure at all n locations
cgcttctctcaccatccccatttcgcgttggtgcaaagcatccttcgtttcaatttctctctctcagcgctttctgcaatcgaacctttcatctccaaagggatccacaggccgaaggagaaatggggctgacattcacaacgcttttcagacggctcttcgcgaagaaggaaatgcgaattctgatgggtggcctagctgctaggaggttctactattctagtaacctctgccaaccaacaaaacaagcctgaaaataaaatagagatgctgcctccttgctggcgatcgttcgggaagaaacagtaatgctactgacatgggaaagaagggagttggttttctgcaatcaaagagttttcacacaccactccaaagggaaggattcagataataacaaaggcacanaagagaagaagaaaagtctaggaaaactaaagcatggagaggccaattcattcatccccctcttcagagagccaagtagcattgagaaaatctttggggactttgaaagggagcaacaacta

SEQ ID NO: 222545 - DNA, 536 bp, Glycine max
gaagttaccaaaccatcatttcctattttgtttttattagtttacaacgggtatacctgtcatcaaactatcaccaatacactgaaatcataatcataatgtaactgataacaccaccagcattgacaaaataaaatggttaaaaaaaagaataaaacaaaataaatcacacaaatcttgtaaaaggctttcttcccaccacccttgcgggcaaagacaccgttgaatccacactcacgtttcctatagattcaagtgactgaaatttatctgggattctttgatccttgtttgagaaccctttagaccacttgaaagacccaattccttgtgacaaagggaatgagagtctcctctttgaatcagtactagttggagttccaccaagcctttctcttggattactactagcacgtactttggccctggcggaaagggttggagccatgtagttaggcactgaaaatggtgggcagcttgtgaggctgtcatcatccttcaatggcacatcaaagggtgaattggaccccacaccc

SEQ ID NO: 222546 - DNA, 587 bp, Glycine max
  unsure (1)..(587): unsure at all n locations
cttatcccaataattatgctcataattctcttaatatggctctatcttcccctgagattgcactatccgattatctcatgctcgatgactatgttgatcatcaagattctcgatcatcacaaagcaccgagtcatctgaaaaagcaaccttcaatgatgccactcacggattcagtactggtgcaacctctaagaataataacataaactgcaaaaatgggattaatgaaaacaaaggtggagtgggtccaaggatcgcgtttagaaccaaatcagagcttgagatcatggatgatggatacaagtggaggaagtacggcaagaagtccgtgaagagcagtcccaatctaaggaactactacaaatgttcaagtggaggatgcagtgtgaagaaaagggtggaaagggatagagatgactacagctacgtgataacaacatatgaaggtgtgcacaatcatgagagcccatttaccacatactacagccccatctccttcgtactttctgatactactttcaaatgacaccaacttcaaacccttttgggcatntacacctncctagcttaaatatgtgccagaaaa

SEQ ID NO: 222547 - DNA, 611 bp, Glycine max
  unsure (1)..(611): unsure at all n locations
ctattttgaaagaaacgaatcctgaagcgtgtcactcccactctcactcaatcgttcagccccttctcttcaattttagggttttatcacaaactaaaatcctcaatcatgggcaccaaggttaggagaccctcccatgctggctcttggtacaccgacaatcctaagcagctttcagaggagcttgaagggtggttgcaatcgtgtggtttgaccaaatcttctgatgtgcggggagtgatagcaccacatgctggttattcctattcaggaagagctgctgcttatgccttcggaaacattgatccatcaaatattacacgtgtgttccttcttggtccttctcaccactattacactccaaaatgtgctcttacgactgcaactgtctacaagacacccataggggacctgcctattgattgggaagtaactgaggagcttaaagctacggngaaatttgagctgatggatattcgtgttgatgaagctgaacatagcatggaaatgcacctgccatatcttgccaaagtatttgaagggcaccaagtgaaaattgtacccattttagttggtgctgtagtgctgaaaatgaaactatgtatgggcag

SEQ ID NO: 222548 - DNA, 579 bp, Glycine max
agcgataaatgatagtgagaatgatctataaacatcgaacataatatccaattgttcaaacttcaaagcttaaacataaatagtcaatttagaggaaatgaaattgctgaatgccccataaatgaagaccttcaactggagcttgaatcatcagtttttgctgctgcagatgcataactaacactactatccctgttacttttgcactgactggattgctcatagcgaagaaatttgatttttatctttgttgagcagttccttagcatatgaagaaaaacactaattggatggcgtccacagattgtattgtcatactccaacagatattgcttgaatgaatctggatctcctgtttctatgatatccatgcccatcttgtctaaggccttaatagatttgtatataggcccatgtttcttgtcatagtgcatgtaattgaatcgagatccccagtgacaaaagtctgatgaaatagagaagaagttattggaatcatcaacatatttgggcaagaatctgcccatacatagcttcattttcagcactaacagcaccaactaaaatgggtacaatttt

SEQ ID NO: 222549 - DNA, 543 bp, Glycine max
ctcgagccgatttcaatgatgggtggaagatcaccaattccaatggaccccttttctctatgcctcacaacaacaacaacaacactcttgaagttggaggcttcaacaagggaggaggaatctattccaacaccaacaccaccatttcctcctaccatcctaataaccttaacaacaacgcttttggaggcttcaacaagggaatctattccaacaccacatcctcaccctatcttaacaacaaccaccaccacctcgacgacaacaacaacctcaacagaaataatctcaagggctacaagacatattttaagggtgaagatcagtttcacacacccaaaagtgccaagaagaagaacaccaccaacaacaccaacaacaagaagcatggggacaacactaataataatgatggcacaaagactggtgctgagaagaaatttaaaacacttccaccatcagagtctctgtctaagaatgaaaccattggaggctacatctttgtttgcaacaatgataccattgcagagaatttcaaagaca

SEQ ID NO: 222550 - DNA, 476 bp, Glycine max
ttttttttttttttttttattttttttttttttttttttttttttttatttttgggggggttgtttctcttttatgggggttcggagggagccgccgaagaccaacgagaacaggaaaggaagggaaaacgcaggggagacaaggagaaaccaccagggggggggaggaagaaaagaaaaacaaaaccagaggagaagaaaaaggaaacgggaaaacgaaccccccaaaagaaaaaaaggggggaggggccagggggagcgaaacaaaagggagggccaactgcagagcatggaaaccaaaaaacaccccccacaccagggggaggggggggggaaaagacaacgggcgccgcaggggaagaagagaaaaaccaacaaaggcgggggccaagggcaagggagcaaaaaaaggaggagaagggacccccccccggggggggggggggggaaggaaaaccacgcccgggggggccgag

SEQ ID NO: 222551 - DNA, 470 bp, Glycine max
atgaactggaaccagaagaagcagtggcgataatgtcagcttttgtgttccagcagaagaatacgtatgaaccttcactcacacccaagctgtctgaagcgaaacacagattataccaaacagctataagacttggagagctccaagcacactttaatctaccaataaaccctgctgagtatgcccaagaaaatctcaaatttggtctcgttgaagtggtttatgaatgggcaaagggtactccgtttgctgacatttgtgagctcactgatgttcctgaaggtctgatagtgaggaccattgtcaggttggacgagacatgtcgggagttcaaaaatgctgcagctattatgggtaattctgctctctgcaaaaaaatggaaattgcttctaatgcaataaagcgtgacattgtatttgcagctagcttgtatattactggcgtatgatcattattgaacatgctaatg

SEQ ID NO: 222552 - DNA, 356 bp, Glycine max
aattaaaaaaaaaaaatgttgataaaaaaagaaggcaaaaaacaaaaacgccacaggaaaaaaaagaaaggaaagaaagaaaaaaaaaaaaaaaaaaagaagggcaaaaaaaaaaaaaagaaaacaatcaaaaaaaaaaaaagaaaaaaaaaaagggaaaggaaaaagggggcggcaaaaaacaacggaaagaaaaaaaaataaaaaaagaacaaaaagcacaaacaaaaaacaaaaaaacaaaaggagaaaagaggccaccacaagaaaaggaaaaaacaagaccagacaaaaaaaaaaaaaactaacagctcaaacagggaaagaaagaaaacaaaagaaaaaaaaagggagaa

SEQ ID NO: 222553 - DNA, 463 bp, Glycine max
tttgttttttttttttttttttttttttttttgccagcatacagacgataattatatatcaattccacaaattgataacaaacagcagttacattaatgggacaatacagttcaacacaaaccaaacttatttttaaaggcgattacaaacccattacacatcacattttttgttaaaatgtttgggaaaatgccacattgaacatcacacaaaaatcagctgcatgattaaaaccccccactaagactcaacaccaagtgcaaagttgactccttttggatgttgtaaagagcgagggtcctttcatcctctaggtgtttgccagcaaaaataagcctctactgtaccggcgggaatccttacttgtcctggagcttcgccttcacattgacaatggggtgagagctctccacctccagggtaatagtcttacccgtaagggtcttgacgaagatctgctta

SEQ ID NO: 222554 - DNA, 580 bp, Glycine max
aattgcctctttcaagaagcatctgagtgtttattattcgtaatatatagtcactcaagcttctaggatttctgccagctacatgaaaatgggaagcaacttgaggtttttgagtctttgcctcttggcattgattgcatcaactcatgcccaacttcagcttggtttttatgcccagagctgcccaaaagctgagaaaatcattttgaaatttgttcatgagcatatccacaatgctccatcactagcagctgcattgataagaatgcatttccatgattgttttgtaaggggatgtgatggatcagtccttctgaactcaaaccaatcaggctgagaagaatgctcctccaaatctcacagtaagaggctttgacttcattgacagaataaagagccttgttgaagctgaatgccctggtgtggtctcttgtgctgatatcctcactttggctgccagagacactattgtagccacaggtggaccctattggaaagttccaacaggtcgaagggatggggtcatctctaacttggtggaagccagaaataacatttctgctccatttgacaacatcac

SEQ ID NO: 222555 - DNA, 496 bp, Glycine max
gtgagaggaaaaatgcattaaattgagaataacaatgaaaaagtacatcaatacaaaaaaaaaagactaaacatacattaactctgctgttgggagcacaagaaattctgctgcttattgcaagagcatgatctaccagcagagttggaaataagaataacaatggaacctacttattccaacacacatacaacaaccatgccataaggggtcttttataagtagacagacaccacatggcatagcataactaatcaaaaagcatgggtctcgcataaatgatgagacccaaaagataaaagatacaagattcatccatgaacaagacaagattcttagctatttacgactgcacaatgcttactgagctctgcctctgtccctgtcttcacattaattcttcccattttctctatggaggatgcaaacttagtagagaaattttcaactgtcccttcaagcaattggatgatttgagactttgtaactgagttag

SEQ ID NO: 222556 - DNA, 504 bp, Glycine max
tgcgtgcatagtaataggctaatagggtagtagtttcttcatgttgggtagttggaactccttaagcagcttcagagtctgagaagtgagaagcggaagaagaagcgatgcgtttttgcccgtgttttggatccgaggaggccaagggggtggcggatcgcgacccggtcctgctggtttcgggcatgggcggctccattgtcaattccaagcccaagaaattcgggttcaccactcgggtttgggtcagactcctcctcgctgacgtcgagttccgaaacaagatttggtccctttacaatccccaaacaggtccttgcttaacacttctgttactactaccacaccaccctatgcatttcaatttttcagttcaatcatcattctctagcaaaattggcacggcctttcaggttacactgaaacgttggacaagaagtctgaaattgtggtccctgacgatgatcacggcctctatgcgatcgatattttggatccatcatg

SEQ ID NO: 222557 - DNA, 603 bp, Glycine max
  unsure (1)..(603): unsure at all n locations
ctctgctcgtgcctctagggttatcatatctccatttccatttcctctctctcagtttccaagaatcttaagctatgggaaagtcttacccaaccgtgagcgctgattaccagaaggccgttgagaaggcgaagaagaagctcagaggcttcatcgctgagaagagatgcgctcctctaatgctccgtttggcatggcactctgctggaacttacgacgtgagctcgaagaccggtggtcccttcggaaccataaagtacccctgcgaactcgctcacggcgctaacaacggtcttgacatcgatgttaggcttttggagccactcaaagcggagtttgctattttgagctacgccgatttctaccagttggctggcgttgttgccgttgaggtcaccgtgggacctgaagttaccttccagtctggtagagaggacatacctgagccaccaccagagggtcgcttgcccgatgccactaatggttgtgaccatttgagagatgtgtttggcaaagctatggtgcttaatgaccgagatatcgttgctctgtctgggggtcacactnatggagctgcgcacaaggagcgttctggattcgagg

SEQ ID NO: 222558 - DNA, 500 bp, Glycine max
ttttttttttttttttttttttttttttttttttttttttttttttttttttttttttttttttttttttttttttttttttttttaaaaaacccaaccccggaacaagggttttaaacaaaaggggcccccccaaataaaaaccccccaaccccaaatattattcccccgccccggaaaaaccattcaaaagctttttaaaaatttggggaaccccccgggggcccttaaaacccccgcccctaaaatttttggaaaaaatttttggggccccgggcctttccaacaatccccaaaaagttgttttgggtttaacaacccccagctcaaaaagcttttgggggcccccaccggaatccgcgaaaaaggccttttcccccgaggcatttttctcaacaaggggggggaacccaggggcaaacaaaaggcccttgtcaaaagggtcctgaagggggccttttttccaacccctcaacaaccccttgaaggatgagcggccc

SEQ ID NO: 222559 - DNA, 475 bp, Glycine max
  unsure (1)..(475): unsure at all n locations
gcaaaatttctatgcaaacttgtgttgctgatagtctcatgtttttagtaacaagtggaaaggaaagaactgagaaagaatttgagagcttgtgcaggaattctggattttctggatttcatgttgcatgtagagactcaccgtcggttctatcagtggtggaattttataaataaaatttatgctattacttgtgaaggatgatgacgagcatcataaataaaatcagttcttgaaggatgatgacgagcatcataaataaaatcacttatcatatttatgctatatatcacttagaatttggatatgttagcaattttcataatgttgaaggaagaaatattgtaccaaatcataaaaggaaataatgcctaatgattctaatctatgaagaatctatcttattgatgactgatgcttgactttcttggaanagcaattcaaggctcctaatttgagcaatgatggattgaag

SEQ ID NO: 222560 - DNA, 442 bp, Glycine max
  unsure (1)..(442): unsure at all n locations
aaaaaatggcttctagttcagaatctcaatctcagtctaaaccgctccaagaccgagtggcaatcgtcaccggctcgtcccgcggaatcggccgagaaatcgcgcttcacctcgcctcactcggcgcgcgactcgtcgtcaactacacctccaactcggcccaagccgactcagtcgcggcgcagatcaacgccggttccgccaccacgacaccgcgcgccgtcgtggtccaagccgacgtgtccgatccggctcaggtgaagtcgctcttcgactcggccgagcgcgccttcgactcgccgatccacatccttgtcaactcgngcgggcgtgatcgacggcacgtatccctccgtcgccgacaccaccgtggagtccttcgaccgcactttcgcggtgaacgcgcgtggcgccttcgcgtgcgccagggaggccgcgaacc

SEQ ID NO: 222561 - DNA, 468 bp, Glycine max
caacacacatccccttttttcttttttattctcaggtattgatacaaggttgcattgaatgcgataactaatttttgccacgattatgatcgcacataaattaagtatttttctcggaaggtgatttatttcatgccaagtagggacaaagtgaaagaaaatacactaattattattattgttattatttaaaaaaaaatcatcactaaatatagccaccgttgacacgaacaatttgaccgttgacccattcagaagcatcaggggccaaaaatcccacaacgggtgccacgtttttggtctaaccgagcctccccaagggacttttttgcacgatccgattcaccacctcctccgtcttacccttgaagaacatctccgtcgcaatcggtcccggcgcaacgcaattcgccgttatctgcgtccctttcagttccttcgccaggatcttcaccattgccttcaccg

SEQ ID NO: 222562 - DNA, 317 bp, Glycine max
aacagcatggagagggaggaagatgttaaggttggagcacagaaattctcagagaggcaagcattggggacaggagctcagggtgacaaggactacaaggaggcaccaccagcacccttgtttgagccaggggagttaaagtcatggtctttttacagagctgggattgcagagtttgtggccacattcttgttcctctacatcactgtcttgactgtcatgggtgtcaacagggcacccaacaagtgctcctctgttggcattcaaggaattgcatgggctttcggtggcatgatctttgccctcgtctactgcac

SEQ ID NO: 222563 - DNA, 422 bp, Glycine max
aggcaaaaatttccacattctattgagttcacaaacaaggggggagtaatttacacacatgacatgatggatttaaacaaatagatatttccatattaattgggcaaatagacacatgattgaagataatttaaacacagatgggtgaagtattgattaaccccttgttttgaatggaattgctcggatcactatttggggatataaagctgcaagggcagcttcaatgaaagggccaacccaaaaaatccaatggtcattccaagcatgggctttgttgtatattatagcagcaccaaaacttctagctgggttaatgccaaatcctgtgattggaatggttgccaagtggaccaaaaacacaacaaaccctattggaagaggagccaaaatcgggacgtgagagattttagcgttttttt

SEQ ID NO: 222564 - DNA, 583 bp, Glycine max
gcagcattaacagaggagaaagatggtctctcaatggaatgactgctcttgtcaccggcggcactcgtgggatcgggcactccatagtgagtgacttggctgcgtttggcgctgcagtgcacacctgttccaggacccaaacagagctcaacaaatgcttacaagagtggcagagtcaggggtttcaggtaactgggtcgctctgtgacgtgtcctcaccaccccagagagagaagctcattcaggaagttgcatccaccttcaatggcaagcttaacatctacgtgaacaatgttggaataaacattagaaagccaaccattgagtacactgctgaagaatattcacagattatgacagttaatttagactcctcattccatctgtgccagcttgcatatcctcttctgaaagcatctgaaaagggaagcattgtgttcatttcatctgttgctggtgtagtgagtttaggtactggagctgtctttgcagcaagtaaagctgcaattaatcagcttacaaaaaaccttgcttgtgactgggccaaagacaacatacggagcaactgtgttgtaccatgggc

SEQ ID NO: 222565 - DNA, 523 bp, Glycine max
gctgttgatgctgcctggaagaaccaaacatcactccagaggtctcaaacttcaaaaggaacacctcccctccctgacactacaaacacccctgaagggattcaagctcggattgtggtagctctaactgtcttctttatgacgctgtttactctcttccgttcagtcgcatgccatgtgaccaagaaacttcctgccgtatcatctaatgatgatcagggcacttcagagccaactcttgatgcaacaaaaacaaactatgaagactatcgtcctccttcaccaactccagcatatgtagaggcaaatctcctttcctcaatgatgaaaaggttaggtgagcttgaagtgaaggttgacacactccaatctaagccatcggagatgccttatgagaaagaggaattgctaaatgctgctgtatgtcgggtggatgctttggaagcagagctaattgcaactaaaaaggctctttatgaagcactaatgaggcaagaagagctgcttgcttacattgatagtc

SEQ ID NO: 222566 - DNA, 538 bp, Glycine max
gagatcagaagaacaaccgcttttccaaccaacaaagacaaccacaccaaatacaacaacaaaggttagcaaaaacaaggcttgtgtttaatccggcaaagaagccaccattagctatacacaagtttgaaacaattctcaagtttactcattaaactgaatcagtattcagagtttaacatcatgtgcaaggtcagcactagaaacaccatgattcgaaaacaccctctcccagagtccctttctatcagcaaccaaaactcaccagcaaaacttcttccgtaacctagctttttcttgactatcaatgtaagcaagcagctcttcttgcctcattagtgcttcataaagagcctttttagttgcaattagctctgcttccaaagcatccacccgacatacagcagcatttagcaattcctctttctcataaggcatctccgatggcttagattggagtgtgtcaaccttcacttcaagctcacctaaccttttcatcattgaggaaaggagatttgcctctacatatgctggagtt

SEQ ID NO: 222567 - DNA, 389 bp, Glycine max
tgcacaggttcatattcaacgacattcacaattgtgaacaagtgcagctacacagtttggcccggcattttaaccggcgccggaacctcaccgctctccaccaccggcttcgtcttacaacccggcgagtccaacgtgatcaccgtgccggccgcctggtccggccgcctctgggggcggaccgtctgcacccaagacgccaccggaaaattctcctgcgtcacaggcgactgcggctcctccgccgtggaatgcaacggcgcaggagccgccccgccggccacgctcgccgagttcacactgaacggcgccggcgggcttgattttttcgacgtgagcctcgtcgacggttacaatctcccatgatcgtggagccacagggcggaagc

SEQ ID NO: 222568 - DNA, 533 bp, Glycine max
gaaaaaaaggacggacaaatatctactataacaatcaataacaagtacattagcaagtattcaagccaagtacatcagcgagtatataaaaatccaaaaactcgatccccctgcacaagagaaaacatcagaagtccaaaaaagagctaatgctcctccaacaagtaacaccactggtttcagaaaccgagttattcagacctttcattttttgctcgagcaagacactaaatcgcagctaaacataaacatacggtaataatgtgaagacaagctactttgaagtaacaccttaaagagacttcttggcaacgaatacaagaagatcaatgacacgtgagctgtatccccactcgttggcgtaccaagaaacaagcttaacaaagttcttattcaaggcaagtccagcctttgcatcaaaaatacttgatctgctatcgccgataaagtcagtggagaccacattatcttcagggtaaccaagaattcccttcaacttgccctctgaatcctccttgatagcatttttaatt

SEQ ID NO: 222569 - DNA, 605 bp, Glycine max
ctcagccatgaacatggtgaagcacccaaacatcgtgcagcttcacgaggtcatggcgagcaagtccaagatctacatcgccatggagctcgtccgcggcggcgagctcttcaacaagatcgccagaggccgtctccgggaggagatggccagactttacttgcaacaactcatctctgctgtggacttctgccacagccgcggcgtctaccaccgtgacctcaagccagagaaccttctcctcgacgacgacggcaacctcaaggtcaccgacttcggcctcagcactttctccgagcacctccggcacgacggcctgctgcactctacgtgcggcacgccggcctatgtcgcgcccgaggtgattgggaaaagaggctacgacggcgccaaggccgatatttggtcttgtggcgtaatcccctacgtacttcttgctggttttttacccttgcaggatgacaacctggtggccttgtacaagaaaatttaccgcggtgacttcaagtgtccggcgtggatctcctccgaggcgcggaggctcattaccaagctcctggaccgcaacccgtacacgcgaatcacaatttcaaaaatatggactc

SEQ ID NO: 222570 - DNA, 511 bp, Glycine max
caccgaaaaaatataaataaaacaaaattaaacgcagccatgaatgacccatgagccacaccaatcaatttgcaaacatattcacaatcacgccaacatagcaacaacatcacccacgagcacaacaacacgcagcacatgtacctgaatcatcatcgacaacaactcctcgatgtccatttcggttcattactgcattcgccttttcaacaattcccctttcggggtaaaagacgacacaccccagaggccaaaacataacaaagaagcaagcaaataactaaaatatctcagtcctgaaacaagaattaacaaaaacaactacaaaggaacgacaattagcatgggagtcttggttgttcttcaagcgagtgtaggattctctgcaggagaagtcctccacacgatatctttaagagctggacgaagctccttgctacagaactggttatactccaaggtgtcaccgttgtcctttttaacctccaccaaccaaaacgacggcgtcacg

SEQ ID NO: 222571 - DNA, 501 bp, Glycine max
aatacaataaatcaatctaaatattttcttattaagtgcaacaatatgctgttatcttacaatatataattgagtgaaaaatacaaatatacccaaatcaaacaacttttaaacatcaaataatgcaaaacataagagtaaatccacccttctagttcatgtgatccttaattaagaacttccttctagaaatggatagtcagtataacccacaactggatcaggagtgtagaaggtctccctattgtacttgttgagtggtgcatcaacctcaaacctcttaggcaaatctggattagccaaaaacaaacgaccataagcaacaagatttgccttcttctcagccacagccttgttcccttcttttctatcataacccccagcaacaatgaaagtgccattaaaggccttcttcattggtgcaagagtgtgaggggtttccttattctccccagaaatgtcccatcttggctcaaccatgtgacaataaagcacaccatg

SEQ ID NO: 222572 - DNA, 559 bp, Glycine max
  unsure (1)..(559): unsure at all n locations
cagagggaggagcggcattaaaaatgcagatcttcgtgaaaaccctaacggggaagaccataaccctcgaggtcgaaagcagcgacaccattgacaatgtcaaggctaagattcaagacaaggaaggcatccctccggatcagcagcgtttgattttcgccggaaagcaacttgaagatggaaggaccttggccgattacaacatccagaaggaatcaacccttcaccttgtcctcaggcttcgtggtggcatcatcgagccttccctcatggctttggctcgcaaatacaaccaggacaagatgatttgccgcaaatgctatgctcgtctgcaccctagggctgtgaactgccgtaagaagaagtgcggtcatagtaaccagttgaggcctaagaagaagatcaagtaaattctgggtgggatattgtntggtctctactttcgttntgtttgtcttagaacagtgacttgtttggtatttatcngttctggttttgattaatgttaattggtttgagacaatagttttgaactagtcaattatatttttatgatgcc

SEQ ID NO: 222573 - DNA, 533 bp, Glycine max
ggcatcataaaaatataattgactagttcaaaactattgtctcaaaacaattaacattaatcaaaaccagaaacgataaataccaaacaagtcactgttctaagacaaacaaaacgaaagtagagaccaacaatatcccacccagaatttacttgatcttcttcttaggcctcaactggttactatgaccgcacttcttcttacggcagttcacagccctagggtgcagacgagcatagcatttgcggcaaatcatcttgtcctggttgtatttgcgagccaaagccatgagggaaggctcgatgatgccaccacgaagcctgaggacaaggtgaagggttgattccttctggatgttgtaatcggccaaggtccttccatcttcaagttgctttccggcgaaaatcaaacgctgctgatccggagggatgccttccttgtcttgaatcttagccttgacattgacaatggtgtcgctgctttcgacctcgagggttatggtcttccccgttagggttttaacgaagatctga

SEQ ID NO: 222574 - DNA, 547 bp, Glycine max
  unsure (1)..(547): unsure at all n locations
gtatactatcacattcgcttcggtacttctctcttcattgtcgcagacacaaagcagcactaaaggaagcccttcactacgccgattaagcatgtcaggcagaaaagaaacggttttggaccttgcaaagtttgtagacaaaggcgttcaagttaagcttactggtggaagacaagtgacagggactctgaaagggtatgatcaattgcttaaccttgtcctagatgaagctgtagagtttttaagagatcctgatgatcctctcaaaactactgaccagaccagaaatcttggcttaattgtttgtagaggaactgctgtgatgcttgtgtccccaactgatggtacagatgagatcgccaacccctttatgcagccagatgggtcctaagtgtgaagtatttgtatcttaaagtctgtatgctagctgatcaatacgtcatcgcttagctactgagacattaatgcggngatactgattaacgttttgtctattttgtaggcttggatatttattatatgctnttggataatagaatatcaccca

SEQ ID NO: 222575 - DNA, 486 bp, Glycine max
atgggcaagtatgaattagcttctttcattatgatgaatattaagtcctcaaattagctgacgacacatcacagagaaataaacttcatcggaacaataacataaaatgggtgatattctattaatccaaagcatataataaatatccaagcctacaaaatagacaaaacgttaatcagtatccccgcattaatgtctcagtagctaagcgatgacgtattgatcagctagcatacagactttaagatacaaatacttcacacttaggacccatctggctgcataaaggggttggcgatctcatctgtaccatcagttggggacacaagcatcacagcagttcctctacaaacaattaagccaagatttctggtctggtcagtagttttgagaggatcatcaggatctcttaaaaactctacagcttcatctaggacaaggttaagcaattgatcataccctttcagagtccctgtcacttgtctt

SEQ ID NO: 222576 - DNA, 429 bp, Glycine max
gcctaacgtcagactactgttcgcgcttgcgctattcttcgccggagcacaatctgtgccattcatcgttttgcatggtattggagatgcatgcaaacattcgggcattagaaactttattaaggaactaagcaagtggtctggttcaccaggatactgcttagaaattggaaatggatcctgggattcttggactaagcctctattaaaacagacatctattgcctgtgagaaggtggtgaacttgcttgggaatcttctgtaccagcagctgaatcataattcgcttttgcatgagtttttgcttccatcttactgtatagggaaagaagatgaaggatctaggtcagggatacaacattgggggacttattcacgcaaacttgattggtagaggaataatctgattttgagatggagcacctgctg

SEQ ID NO: 222577 - DNA, 529 bp, Glycine max
cacagaaattaagatcatattaccataatcttcataactgatcatcaatcatatttttctttttcatttttctccgcatagttaaaataaggggggaaaaagagaaagataaaaaactgttcaagtggataataaagagtaaaaatagaaaaaaattaataattcctttccttcaacgaaccaaatacatcatttcgcgccgttttcaatttcttctcttcagaggcaaagaacggtgcagaacagatcatcggttgccacgtcagcatcgtccaacggtaacacgtttagatcaaacggcaacggttctcgccggaaagacgacgccacgttgtcgccgtctccgtcgtccacaacggatgacgacgagtcgcagtcgctgcggcagtcctcgggaacgacgggcggcgtccggggatatctccggttgacaatcaccggcgccgtcgccggcactgaggctcgtgggccgatgaaggattctacggcgctgctcataccactggaggtggaccgccggtgatcctgg

SEQ ID NO: 222578 - DNA, 516 bp, Glycine max
gcgaaccaactccttgaaaaggagcattctggatgtcatgcattactaagagatgacaaggttgaagacttgtcaaggatgttcaggctcttttctaaaatacccagaggtttagatcctgtttccagtatatttaaacagcatgtgactgctgaaggcatggcattagtgaagttggctgaagatgcagtgagtaccaagaaggcggagaaaaaggatattgttggtttacaggagcaggtttttgttcggaaggtgattgagctgcatgacaagtacctggcatatgtgaatgattgtttccaaaatcatacactttttcacaaggctcttaaggaggcttttgagatcttttgcaacaagggtgtcgctggaagctcaagtgcagaactgcttgccactttttgtgacaatattcttaagaaaggaggaagtgaaaaattgagtgatgaagcaattgaagaaactcttgaaaggttgtcaagttgcttgcctatattagtgacaaagatttgt

SEQ ID NO: 222579 - DNA, 487 bp, Glycine max
gaatgaacaaaaaaacaagcattctcattgatgattgatcggggcgcaatatctacaaccattaacacttaaatgtcttgggggaaaatacaaagcatgcaactgagatttcaagtgcatgtgaaatctctttactcaaacactattataacactggcactagacactttgccaattaagacagacagaaagaaaagagcatgctatctatctacatctattggaaatcaaaaggaaaacgggtacaccaaacaatttgtttcaccggccatcagcagaagtaaaagaatctgcaaatccagtaggccttgcagggatactactcttactgtcttcaagggccatataacttaagtcctttccttctgcctcttgccatcccttcaccatctggttaaggggaaggctataatcaatgccggaatactcctcggtgtcatcatcaaagggtttccatttttcgacaagcggtgccaacacattcacg

SEQ ID NO: 222580 - DNA, 573 bp, Glycine max
  unsure (1)..(573): unsure at all n locations
ttgacaatgaggcctgctcttgctttgcttcctcttctatttgctttcttgttagctgccactacagaatcaagaaaagatacaggggaatattggaaaatgatcatgaaagatcaggaaatgccagaaggacttcaaggtcttgtttcatttcaatctgaaaataaccctaagactcaagagcagcttggtaaaggttccaaaaaccattgtgaagagtctctagttacaaatacacaagttaatagtgacttcgaacccataccaagtgttaccaaatatgatgatttggaattcaagtcaagcattatcaagaacgatgattttgaatcgaaccaagtgttaccaagcatgatgattttgaactcaagtcaagcgttaccaagaacaatgatgttgaaccgagtccaagtgttacaaagtatgataactttgaacccaagctaagtgttaccaaatatgatgattttgaactcaggtanagcgttaccgagaatgatgattttgaaccgagaccaaaattagtaagtgtgatgactttgaactcagggtcatgcgtaccgagaatgatga

SEQ ID NO: 222581 - DNA, 545 bp, Glycine max
  unsure (1)..(545): unsure at all n locations
aaaaaatcagaatggcattgtgtcaaatggagaagcatcaaatggaaagaagccatttaccactattgatgatgttttgataggattggtaaaatggctttgtgatcagttgaagaaaccttctcatcctattcgtggagtcccgactgctatcaattgcctagcaacactacttaaggaacctgtggttaggtcttcctttgttcgggctgatggggtcaagttacttgtacccttgatttcgccagcatccactcaacagtctattcagcttctttatgaaacatgtctctgcatatggctcttatcctattatgagccagcaattgaatatttggctacttctagaacccttccgcgacttattgatgttgtcaagagttctacaaaagagaaggtggttagagtagttgtcttgactcttaagaacttgatgtcaaaagggacattgngtgctcagatggttgaccttcagctggcacaagttgtccagagtttaaaagcacaggcgtggagtgatgaggactttgttgaggccctaaatt

SEQ ID NO: 222582 - DNA, 454 bp, Glycine max
ggaagccagagcttcaggcaacgccttcttctctctactctctcctccactcccattctcatcgaggacattcgcgccgacgagacatggcccggcctccgcaaccacgaaatttctctcctccgactcttcgaaaccgtctgcgacgattgccacgtcgaaatcaacgaaaccggtaccaaattaaagtacaaaccgggaactattatgggtggcagacaacacagtccacacgattgcggcgtctcacggtccattggttactttctggagccactcattgtgttgtgtttgtttgccaaacagccccttactatcaggctcaaaggaattacaaatgattctaaagatccatctgttgataccttcaagtcaacgactttacctatattgaagcgctttggagttccatctgaaggcttggagattaaagtagagagtcgtggattacctc

SEQ ID NO: 222583 - DNA, 595 bp, Glycine max
  unsure (1)..(595): unsure at all n locations
ggaagccagagcttcaggcaacgccttcttctctctactctctcctccactcccattctcatcgaggacattcgcgccgacgagacatggcccggcctccgcaaccacgaaatttctctcctccgactcttcgaaaccgtctgcgacgattgccacgtcgaaatcaacgaaaccggtaccaaattaaagtacaaaccgggaactattatgggtggcagacaacacagtccacacgattgcggcgtctcacggtccattggttactttctggagccactcattgtgttgtgtttgtttgccaaacagccccttactatcaggctcaaaggaattacaaatgattctaaagatccatctgttgataccttcaagtcaacgactttacctatattgaagcgctttggagttccatctgaaggcttggagattaaagtagagagtcgtggattacctccaatggtggtggngaagntcttttgtctgttcctgttggtcagagtctaacggcggttagttggattgatgagggttttgtgaggaaaattaggggaacttctttttcaacaagagtgtctgtcagtttgaatatggcatg

SEQ ID NO: 222584 - DNA, 495 bp, Glycine max
agcattttcagaggaacaatggcgggtagggtttcgacgtgcttcttcttcgtgtttgctctttctctccttcttccttttcagatctccgctgaggaatcatcggagaaagagttcgtactcacattggatcactctaactttcacgacactgtcagcaagcacgatttcatcgtcgtcgagttctacgctccatggtgtggccactgtaagaagcttgctcccgagtatgagaaagctgcttctatcttgagtagtcatgatcctccggttgttttggctaaaattgatgccaatgaggagaagaacaaagaccttgcatctcaatatgatgttaggggatacccaacaattaagattctgagaaatgggggaaagaatgttcaggaatacaaaggtccccgtgaagcagatggcatcgttgactatttgaagaacaaagtggtcctgcttcaactggaattaaatctgctgatgaagctactgctttcattg

SEQ ID NO: 222585 - DNA, 514 bp, Glycine max
gatctaaaaacatccattaatttaactcggatcccagctacacctttccctgcactaaactctactacaccaagcaaaagctcccgtttttattaagtaaaccatacataaaagaaaaccgaaaagaaaagaagatcaaaggaagataggtagcacctaaggttcactaaattctgataacgagatacaaaagggtgtgcagcccacatgtaactttgtgtctatatcccatgtgaggaacagctccctttcaaagctcatcttttcctttttcttgctcatcttgtccttgttcttgctgagcaggtttatcttgtccttgttcttgctgagcaggtttgtcccgggtcttttcgatgaattctatgatgtcttccttggtcctacccccttcgtattgtgataactttccacttgctgacctgaagtacacggttggataaccttggacatcaaaggttttacttgggatatcggtggcagttgcatccagttttgcaataacaacatcagc

SEQ ID NO: 222586 - DNA, 580 bp, Glycine max
  unsure (1)..(580): unsure at all n locations
gcttacaaaggggagctcggtgactattattgcatggcagccaaagctgcaggcaaaccttgcccagactacaaacgtatgcacgagggttttaagcttgcatataaggaaatggcaaagaattatccatgttttggacatgcagccaaaatgccaaacattgtgtggtggaaaacctgtgtgcgagattcttttgtcagggctggatatgaatacgatgaagagacatttgagaaaatcttcagacgtatatatgcgtcctttggttcatctgctccatatactgtatttccagactcccaaccatttcttagatggcttcgtggagagggtctcaaagttggtattgtgagcaatgccgagtatcgatatcaagatgtgattcttccagctttgggtttaaacgaaggatctgagtgggactttggtgtgttttccggccttgaaggcgtcgagaaaccaaacccgaaaacttatgagattgcacttgagaggggccggaatatgcacctgaagaagcttgcacatcggngacagcatgcgcanagactatgagccagcttagagcatagggatgcat

SEQ ID NO: 222587 - DNA, 481 bp, Glycine max
aatggaaaaaaagagagatactttcgaatatatttgtattgccaaattaagtttgagctacatttaacttttagccatcaaatttctaagtatggctctagagagaaatatttagccacatatgtaatggtagaatgtcacaagcctcagtaatatcatttggggggggaagatgatacataaatactacttgagcaaagatagagccattctttaatctttagcaatttgacttatctgaagagagccatttttttgctgccaataaatcaggaagaacaactgcaccagatttccttcattccacagcatttggggtcttaaacctatccaacaatagggcatgcatccctatgctcttagctggctcatagtctttgcgcatgctgcccccgatgtgcaaagcttcttcaggtgcaatatttccggccctttcaagtgccatctcataagttttcgggtttgggtttttgaccccttc

SEQ ID NO: 222588 - DNA, 580 bp, Glycine max
aatttctgaagattcctcaagcattggtccattaccaacagatagagcaggtttgagcttaaatatggacaatcatgagcctaaacgttggtcatattttcagaacttggctctagaggggtttgataatgtatctctaattgatcaggataatcttggtttttcgtctgctgtgagaaaagtacaagagggggatagtaaatctcagccatctgctcctcaaccagctggtggtgttttggcaggacgcacagattcccacctaaatattggtgaagaaaatcagaaaaatgtacctgtagcaactaaaacagaagcaagtatctttcaccaaaaatatgagcattcccaactaaagggcaatgaaaataagaacatggatgccataatggaaaacatacgaccacaggagtctgaataccaggatgacaagaatgaaccgaggaatgtggttgtagcaggggaatttgacaccagtactgtgcagttcataaagaatgaagatcttgaagagttgcgagagctgggttctggtacatttgggactgtgtaccatggaaaatggagaggatcagatgtt

SEQ ID NO: 222589 - DNA, 543 bp, Glycine max
cgtccaaaatttactttggaaatagcattaagtccaaatgttaatttgcacagcctatttatgtggtttttcacatgcacacatatacatattcacaatcaaatacaaaaagagcaggggccagaaaactacaatacaaacaactattgttggcccttgtataacaataatatatatcttttttggagcataattgaatgaaccgtgtgtggaaatcaaatcaaatccgctggttttaatttagatgccttgaggccctgtcctttgatctgactagcgggtgtagacatcacacacaagcggcgagcaatttcggcaaaggatggccttactgctggattaggtgcccaacactgctccattagtgttttccactcaagatcacaatagctagggattgtcggccttaatgtgttattcacaatgcctcctatgattgcgccatagagcatattaccatatggctcatcaccagtaagaatctcctatatgacaatgctcaaagagaacacatcaaccttttctgagaccttattgctacta

SEQ ID NO: 222590 - DNA, 547 bp, Glycine max
  unsure (1)..(547): unsure at all n locations
cgagagaaagagaaccaaaccaagtactaagctcttggttggttcaccccttgtgcttatttgttgttgttgagaaagcacaaagaaaagaagaagaagaggttttgatcggatgcgatgagcacacaggggcaagtgattattgatgaggcggttctggatgacataatccggcgcttaacggaggtccgactggcccgacccggcaagcaggttcagctctccgagtctgagatcaagcaactctgcgtcgcttccagagacatcttcattaaccagcccaatttgcttgaactcgaagcccccatcaagatttgtggtgacattcatgggcagtacagtgatttgttaaggctatttgagtatgggggtttgcctcctactgcgaattatctctttttgggggactacgtggaccgtgggaagcagagcttagaaaccatatgtcttttgcttgcgtataaatcaaatatccagaaactttttnctgttaaggcggaatatgagtgtgctttcattaatggattatgggtttatgatgaatgta

SEQ ID NO: 222591 - DNA, 514 bp, Glycine max
tttttctctgaattttttgagagtagagacatggttctgagtgggaaagtggagactgaagtagagattcaagcacctgcagctaagttctaccacgtctttagaaagcaaattcatcatgttcctaacatgtctacagaaagagtacatggagctaaagtgcatgaaggtgactgggaaaatattggttcagtcaaacactgggactttaccatagaaggtagaaaaacaagtgctaaggagaaaattgaagctatagatgatgataacaagataatatcatacagcctctttgatggggaaatcagtgaaggttacaagagtttaaggggcacattacaagtgattaataaggaaaatggaggaattgtgaaatggaccttcgaatatgaaaagctgcaggagaatatcactgctgcatctcctgattcttttttggactttgctgctaaggtcactaaagatattgatgatcatcttgtcaaggcatagcaagaaaaaaaagagtgtgtga

SEQ ID NO: 222592 - DNA, 442 bp, Glycine max
cgtgctcatgttattgttattggagctactaatcgtccaaatagcattgacccagcattgagaaggtttggtagatttgatagggaaattgatattggtgttcccgatgaagttgggagacttgaagtccttcgcatacatactaaaaacatgaagctatctgatgatgttgatttagagagaattgcaaaagatactcatgggtatgttggtgctgaccttgctgccctttgcactgaagctgctttgcaatgcattagggagaagatggatgtaattgacttggaggatgagactattgatgcagaagtactgaattccatggcagttacaaatgagcatttccagactgcccttggaacaagcaacccatcagctttacgtgaaactgttgttgaagtgcctaatgtcagctgggaagacattggaggccttgaaaatg

SEQ ID NO: 222593 - DNA, 441 bp, Glycine max
ccataaaaggaagatccgatccatatatggtttttaaggttaacccggtaacaatttaggataattgagtccaaaaaaagcaaaatataagacaggcttaaaagttatccctcctgagaggggaggtaaacatgtgatttcatacatcactgggataataaagcctaactatataaatcatttttgtcagccccaccaacaaaagctgcaaaggggtcaaatccagtagtagtcctatttccagactttggaaacctaaattcacttccaaacccttttgattgctgtaaggtttgagcaaatgcctgatacttgcgaatatcagcatcactaacacttctccgggcaaactttattgactcctcaaaatgagcagccttgatctccgcaacttcttcgtcgacggtatttttatccatggcctcagggttttccctacta

SEQ ID NO: 222594 - DNA, 541 bp, Glycine max
gagagtgatttcagtgagtgatcggtgttcacttgatctcatcataatcgtcagcgtcaattgaagaagatgccgatcagaaacatcgccgtcggaaggcctgaagaggcgactcaccccgacacgttgaaggcggctttggctgagttcatctcaaccttcatcttcgtgttcgccggctcaggctccggcatcgcctacaacaagctcaccgacaacggcgctgccacccctgccggcctcatctccgcctccatcgcccatgcattcgccctcttcgtcgccgtctccgtcggcgccaacatctccggcggccacgtcaaccccgccgtcaccttcggcgccttcgtcggcggcaacatcaccttcctccgcggcatcgtctacgtcatcgcccagctcctcggctccatcgtcgcctccctccttctggccttcgtcaccgccttcactgttccagcattcggactctccgtggagttggagttggcaacgcttggtgtggagatcgtgatgcccttcgtctggtgtacacggtcta

SEQ ID NO: 222595 - DNA, 472 bp, Glycine max
ccccccctctagtagtcagtggtgggaagctgctcgtgggtgtggctgataaagacaacctcgtaaacaaggccagcgattccaccaccgatgagaggcccggcccagtagatccagtggttggtccaggtccagctcacgacagcaggcccaaatgtcacagcggggttcatggccgctccagagaaggccccacccaacaaaatgttagcgccgacaatgaaaccaatggcgatgggagcaataattcccaaattacccttcttggggtcaatggcagttgcgtagaccgtgtacaccagaccgaaggtcatcacgatctccaacaccaaggcgttgccaactccaactccagcggagagtccgaatgctggaacagtggaggcggtgacgaaggccaggaggagggaggcgacgatggagccgaggagctgggcgatgacgtaaacgatgccgcggaggaaggtgatgt

SEQ ID NO: 222596 - DNA, 559 bp, Glycine max
ctcgagccgaatcggctcgagccattatccaaacacactctctctccccatggcgttgaacaatggcgtccccgccaccggcaccggcctcatcgtcagcttcggtgagatgctcatcgacttcgtccccaccgtctctggcgtgtccctggccgaggcccctggcttcctcaaggcccccggcggcgcccccgctaacgtcgccatcgccgtgtcgcgcctcggcggcaaagccgccttcgtcggcaagctcggcgacgacgagttcggccacatgctcgccggaatcctcaaggaaaacggcgttcgcgccgacggcatcaactttgaccagggcgcacgcaccgccctggccttcgtgaccctacgcgccgacggggagcgtgagttcatgttctacagaaaccccagcgccgacatgctcctcaagcccgaagaactcaatctcgaactcatcagatctgaaaaagtttccattacggatcaatcagtttgaatcgtggagccatgcagatcagcacacttgaaggcaatggaagtagccaaggaatctgggtgc

SEQ ID NO: 222597 - DNA, 451 bp, Glycine max
ggatccaaattttcattcaatcgctaatcccaaaatttgaaagaaagcgttttttggcaaaacctgaaaacagggctttggagaaaaaacaaaagttccctcctaaactttttgcaggcaaatcccacggaaaatttaaacctttggggaagaaaacgaaatcctgctagcccttttgcattttgccaaaagattttatgacccccctttgatcagtttcagggcaccctcctttttgggaagggccggaattgctcccttttgggggggtggaatagctccccatgcctttgcaaactttaggccttctcttaaccttgggtcattttcaagtatgggctgatcattgacaattttggcccataaagcccccccaaaggaatcaccggccccagttgtatcaactgttttgacatggaaagcatctaccgcacctttgaaactcttgggg

SEQ ID NO: 222598 - DNA, 510 bp, Glycine max
caaacgttggagtcagaaatgaaagagcaaaggaaaaaccatgctgctcactgtcttgtcctaccttatccagcccaaggacacatcaatcctatgcttcagttctccaagcgtttggtgcagagaggagtgaaggtaacacttgtaactgttgtgtccaattggaagaacatgagaaacaaaaacttcacttccattgaagttgagagcatctcagatggctatgatgatggagggcttgcagcagcagagagtcttgaggcttacatagagaccttttggagggttggatcacaaacttttgctgagcttgttcagaagcttgcagggtcaagccaccctccagattgtgttatctatgatgctttcatgccttgggttcttgatgttgccaagaaatttgggctacttggtgctactttcttcactcagacatgcacaacaaacaacatatacttccatgtttataagaagttgatagagttgcctcttacacaggcagaatatttg

SEQ ID NO: 222599 - DNA, 132 bp, Glycine max
aaaaaaaaaaaaaaaaaaaaaaaaatttaaaaaaaaaaaaaaaaaaaaaaaaaaaaaaaaaaaaaaaaaaaaaaaaaaaaaaaaaaaaaaaaaaaaaaaaaaaaggggcggcccccaattattgagtttttc

SEQ ID NO: 222600 - DNA, 482 bp, Glycine max
acgggcccaaaaaccgagtttccctccgcggggagtggcaaataaatatctttataggggggccccaaaaaacaaacaacgggccggggtttaacaacgggggggggggaaaaacccgggggtaccccaaataaatggcctgggaaaacacccccctttacccggggggggaaaaaaaaaaggggccccccccaaacccccttcaaaaaaagggccccccccaaaggggaaaggggaccccccccggagcgggctataaagggggggggggggggggggtccccccagggggccccgtaactttgggcggccccaaggccccccctttttagattatttcccttttttttacaaagggtcgcgggtttcccccccaaagctaaaaaaggggggcccccttggggggcccgataaagggggtaacggccccccccccccaaaaaacttgtgtggggggggggggccaccggggggcccccccc

SEQ ID NO: 222601 - DNA, 516 bp, Glycine max
  unsure (1)..(516): unsure at all n locations
cgcttctctcaccatccccatttcgcgttggtgcaaagcatccttcgtttcaatttctctctctcagcgctttctgcaatcgaacctttcatctccaaagggatccacaggccgaaggagaaatggggctgacattcacaaagcttttcagtcggcttttcgcgaagaaggaaatgcgaattctgatggttggtcttgatgctgctggtaagaccactatcctgtacaagctcaagctcggagagatcgttaccacaattcctaccatcgggttcaatgttgagactgtggaatacaagaacattagcttcactgtttgggatgttggtggccaggacaagattcgtcccttgtggaggcactacttccagaacacccagggtcttatttttgttgtagacagcaatgatagggacagnagttgttgaggccagagatgagttgcataggatgttgaatgaggatgaactgagagatgcagtattgcttgtgtttgccaacaaacaagatcttcct

SEQ ID NO: 222602 - DNA, 528 bp, Glycine max
acaaaacaataaacaaaatctccatttcatactcaatatatgaatgatacatgaccaaaataaaactataaatcagacagaacccggtggcgcattgaattagtatctccattacagttatggacattgcatccaaacccaatagaaagatcagagtattacgcatcccaagaagtaaaatcctactacaatttagcaccgagatgtcctaaaccgcattacatgagcacaaattcgagatgtcctaaaccgcattacatgagcacaaattcgagttgtcttggaagaggaccaagaaataaaagctagataatgttcacccctgcatccagaattaccaatccgcaagactcccaaaggcattaagccttattggcaatgttgttggaaagccagtccagaccttcgtaaaggccctccccagaggttgcacaggtgctctgaatgtaccagcggcgctgtctgagagagtgtagacccaacttgtcggtaatctcagcagcattcattgcattaggaagatcttgt

SEQ ID NO: 222603 - DNA, 565 bp, Glycine max
gagatccactgctgcagaatccaatttgtgacactaaatctaagttactatgactgcgcagacccaagaggagcttcttgcgcaacacctcgaacagcaaaagatccatgatgatgaacctgtcgtcgaggatgatgatgacgaggaagtggatgatgatgatgacgatgaggatgatgaccatgacgaaggactagaaggtgatgcatctggtaggtcgaagcagaccagaagtgaaaagaagagtcgcaaggcaatgcttaaacttggaatgaaacctgtcacaggtgtcagtcgagtgacagtcaagaagagcaagaatatcctgttcgtaatctcaaaaccagacgttttcaagagtccaacatctgacacgtacattatatttggggaagccaagattgaagacttgagctcacagctacaaactcaggcggcagagcaattcaaggctcctaatttgagcaatgatggattgaagcccgaatcttctgctgttgctcaagatgatgaggaagtggatgaggctggtgtagatcccaaggactagagttggtgatgactc

SEQ ID NO: 222604 - DNA, 526 bp, Glycine max
aatagctaattatgactgacatacttggcattgaacatgcatttgttgcaaatgaagtctacagtcttttccttccatgccgacaattacacagataattgacagaccagtatttgaaattcacggagaacaaaaattaagatcaaagaacaatggctacacattctaaaatgcaaccaaaccggaccattaattaggtagctccataatggacgcaacaatgtcaccaccggctgccttcaaagctttaacggctttaggccttgaaacaccagattgagtcatcaccaactttatgtgcttgggatctacaccagcctcatccacttcctcatgatcttgagcaacagcagaagattcgggcttcactccatcattgctcaaattaggagccttgaattgctctgccgactgagtttgtagctgtgagctcaagtcttcaatgttggctaccccagatataatgtacgtgtcagatgttggactcttgaaaacgtctgtttatgagattacgaacaggatattc

SEQ ID NO: 222605 - DNA, 479 bp, Glycine max
gcatcattaacagaggagaaagatggtctttcaatggaatgactgttattgtgaccggcgtcactcgtgggatcgggcactccatagtgagtgacttggctagcgttggcgctgcaaagcacacctgtttcagtacccaaacagagctcaacatatgcttacaagagtggcatagtcatgggttgacacgtgactgggtcgctcatgtgacgtgtactcaccaccccagagagagaagctcattcaggaaggtgcattcacctttaatgtcatgcttaacattcacgtgaacaatgttggcaataacattagacagccatccattgagtacactgctgaaaaatatgcacagagtatgacagataattgagactcctcattccatctgtggccgcttgcatatactattctgaaagcatctgaaaagggaagcattgcgatcatttcatctgttgctggagaacagagactaggtactg

SEQ ID NO: 222606 - DNA, 404 bp, Glycine max
ggaaagtatagcaacagaatttttgaataggattgtgaaatgggtcaaaaacatcaaaatttctgatcccttggaagaaggttgcagactaggccctattgttagtgaaggacagtatgaaaagatattgaagtttatctcaaatgctaagagtgagggtgcaaccattttgactggtgggtctcgcccagagcatctaaagaagggattctttgttgaaccaactgtcataactgatgtaactacctccatgcaaatttggagagaagaagtatttggaccagttctctgtgtaaaaacatttagcactgaggaagaagcttattgatctagcaaatgacactgtatatggcttggagttctgctgtaatatcaaatgatctagaaagatgtgagcgcattac

SEQ ID NO: 222607 - DNA, 418 bp, Glycine max
gggggggcccaccataaacaaatcaaataaaaaccctcccaacataattttggctgcaaagtgcaaaccattgcaatggtatacatagaacttatgtttttcgcactttggggtcataatcataatttggttttacccacaacttattaatgcttgcttttggaaacctataacacccttgaaggaaactggaaccagccccacgggttatcaaaaatatatggggtgactcggttcacactcaaggaattattaaggccccatttttcttagtcacgaccaaaaccactgggtttaatgcctccccagggggcttgaggaaaatatggtctataacaattaactcaaccaatctaaggcttaaaagccttagtaatgcgctcacacttttctagagcatttgggattacgggacaac

SEQ ID NO: 222608 - DNA, 377 bp, Glycine max
gcagaacatgttttttgttccagctgaaaacagagcaaacttttggtatgcaatggattatggcatgtttcgcttctgcatagctgacactgaacatgattggagggaaggatctgaacaatacaaattcattgagcattgtcttgcaacagtagacaggcagaaacaaccctggttgatttttgctgctcaccgagtgcttggatattcctctgattcttggtatggtgtggaaggttcatttgaagagccaatgggaagagaaagctctgcaaagactttggcagaaatataagtagatattgcattttatggccatgtccataactacaaaaggacatgccccatttatcagaatcaacgtgtgaatgatgaaa

SEQ ID NO: 222609 - DNA, 350 bp, Glycine max
agttgaaaatatcttttatctcggaataatagaaaacaaaagcttacgtgatatgcacaaagggaggttactacatatcatactggtacagatggcatggcactctaaaatgcatgcaacagggaacactatcacttggtcacatacaggcccccatggagaaccataggaatcaattctggtatggaagaaggaactgtataaagggactacggctcttggtgctaatgcttagaacttgaagctaacagtcatgcaagataacttcccttcataattccaaggaactttgaaggtatcactaagggcaaatgcttaaaccatcgttgagccatgacaccaataaatgg

SEQ ID NO: 222610 - DNA, 484 bp, Glycine max
gaaaaatttgcaaggtactttgaggtagagctcaaggaagtgaaactcaaagagggatactatgtgatggaccctgcgaaagctgttgaaatggtagatgagaacaccatctgtgttgcagccattttgggatcaactatgactggagagtttgaggatgtgaagcttctcaatgaacttctcactgaaaagaacaaggagacaggttgggataccccaattcatgtagatgctgccagtggggggtttattgccccatttctatatcctgatttagagtgggacttccgtttgccgttggtgaaaagcatcaatgttagtggccacaagtatggtcttgtctacctggtgttggttgggttgtctggaggagcaaagatgacttgccagatgaacttgtttttcacataaattatcgttggatctgatcagcccactttcacattgaatttctcaaaggatctagtcaaattatagctcaata

SEQ ID NO: 222611 - DNA, 492 bp, Glycine max
acttgcattataatattatatgataatagggcctttttaggagtaccaaactaacaccttaaaaagacaaaagagaaaatgttcttttaagcaagaacagcaatgactactagaatccgccatgcattgccattggttattgctacatagccattacacactcacatatatgcacatagataacaaaccaccaacttaactcacaacagggttgccataaggcaaaaatatatgggaagcctaacatgctccaagtcttttgccatccacaagtcgtttccagtacaaagcaatttttttttgagtctctattgcactcttaaccttctcactagtctcactagtctcactagggatggctgtgatatgagcaactttggtagtgagggggctaggaagtgtgtccaagagcttcacaaccttctttatgtcagcagcaagtctttcggccaagccacgggtgaaatcctccctgaacaccacccggaggac

SEQ ID NO: 222612 - DNA, 525 bp, Glycine max
gtggaggcgtcgacgaatcaggtggcggaccagcacatgccggtttacgatctcccacccaagatcctttgtcgggtcatcaacgtgcagctgaaggccgagcccgacacggatgaggtgtttgctcaggtgactttgcttccggagccaaacgtgagtttcctctcctcgttagtgtgtgttttttagagagagacagagtaattgggtgaaaaagtggtgatgcttatgatttttttttaatgtgggtgggggatgatgatatagcaagatgagaatgccgtggagaaagagccaccaccacctccgccaccacggtttcatgttcattctttctgtaagactctgacggcgtccgatacgagtacccatggtgggttttctgtgctgagacgacatgctgatgaatgtcttcctcctctggatatgtcgaagcagccacccacacaggaattggtggctaaggatcttcatgcaaatgaatggcgatttaaacatatctttcgaggtcaaccgcgtagacac

SEQ ID NO: 222613 - DNA, 513 bp, Glycine max
ggaaaaggcgtcttcataaacgccgcccaaaacttctcatacccttttattcattccattcctttctaagggttttcttttctttgccgagaaaatgagagagtgcatttcgatccacattggccaggccggtatccaggttggaaacgcctgctgggaactctattgccttgaacacggcattcagcccgatggacagatgccgagtgacaagaccgttggcggaggagacgacgccttcaacacatttttcagcgagaccggcgccggaaagcacgtgccccgcgccgtcttcgtggatcttgaacccaccgtgatcgacgaagtccgaaccggtgcgtaccggcagctcttccacccggagcagctgatcagcggcaaggaagacgccgccaacaactctgcgcgtggccactacaccatcgggaagggagatcgtcgatctctgcctcgacaggatccgaaagctcgccgacaactgtaccggtctccagggttcctcgtcttcacgcc

SEQ ID NO: 222614 - DNA, 542 bp, Glycine max
  unsure (1)..(542): unsure at all n locations
atagaaacttctgtgctatacatagcacatatatttgataacaatcatcattcaaaaaccacacatgtccgacagaagacgaaaaagtagacatcaaacacacgatatttcagacactctaataatcatcatctccttcaccatcatcatctccatcaccagactcggcaccaacctcctcataatccttctcaagagcagcaaggtcctcacgagcctctgagaactcaccctcttccataccttcacccacataccagtgcacgaaggccctcttcgcatacatgaggtcaaacttatgatcaatcctggagaacacttcagccacactaggggagttcgaaatcatgcacacagccctctgcaccttggcaaggtcacctccaggaacaacagtaggaggctgatagtttataccgcacttgaacccagtggggcaccaatccacaaactggatggttctcttggtcttgatggtggccacagcagcattcacattcttgggcacgacatcgncccggtacattaaacaacacgccatg

SEQ ID NO: 222615 - DNA, 530 bp, Glycine max
gcaagatcgattcgggtcgaacatggatgggaaatcgccggagaaactaatactggtgaaccgcgagccaaacggcgtcgcactggtgacgattaaccgtcccggttcccttaactcgctgacccggcccatgatggtggacctggcccaggctttcaagaggctcgaccgggacgagttggtgcgggtcattatattaaccgggtcgggccggtcattctgttcgggcgtggatctcacggccgctgggacgtgttcaagggcgatgtgaaggacccggagagcgatccggtggtgcaaatggagctctgccgcaagccaattatcggagccatcagaggattcgccgtcactgctggcttcgaaattgccctcgcctgtgacatcttggttgctgccaaaggatctaagttcatggatactcatgctaggtttgggatatttccttcgtggggtttgtctcagaagctttcgcgcgtcataggggccaataaagcccgcgaggtatctctctcagccacacctttgac

SEQ ID NO: 222616 - DNA, 427 bp, Glycine max
gaattctgacaacgaggaactgctatcatttatataattcactattaaaagccaaggttgtcagattttgtatggaatagtgttcgcaaaacctcaaatttgggaagcaaacatatacacatttaccgcacgagagatcggcgaaaataaagaacctacaatttggactgtttcttggaacttcgaccagctatgaattcctgcatcttcttgaattgctccttcgtcattccattataataattatgagccctctccttttcaagggaaagtgcatggccaagatccagcttgaggccatcattgatgaccgccttgtacctcaacaccaagtcttggttatttttcacaatggcatccgcaatttccctgcttttcttcaacaattcacccttttaacaacatggttcacgaaacccaacttctt

SEQ ID NO: 222617 - DNA, 505 bp, Glycine max
gccttctcttttctcttctcttcttcctccaaaacaagtaaacaaacaacactctcacattcaccacaacacaaacacaaacacaaacaaagacaacaaccttgtttgtctgcaatcaaaacctttcaagctggcgttcgagaaccaagacacccctgtccgagaaatcaagcccaagaaccggagaatcatgggtgctggaggccctgatgacgaagacaataggtggccaccatggctgaaacctcttctcaaagagagcttctttgttcaatgcaagcttcacgctgattcgcacaagagcgagtgcaacatgtattgcttagattgtatgaacggtgctctctgctctctctgcctcgcttaccacaaagatcaccgtgctattcagaaagaaggtcttcatacatgatgtgattagggttaatgagattcaaacgtgttggacatcacaggggtccaaacctacattatcaacagcgcaagggttgttttcttgaatgag

SEQ ID NO: 222618 - DNA, 544 bp, Glycine max
ctctcatccagatcttgcaaaaaaaaaaaacacaatggcagcgagcgctcccactccacgcgaagagttcgtgtacatggcgaagctggcggagcaggccgagcgctacgaggagatggtggagttcatggagaaggtctccgcctccgccgagagcgaggagctgaccgtggaggagcgcaacctcctctccgtcgcctacaagaacgtaatcggcgctcgccgcgcctcctggcgcatcatctcctccattgagcagaaggaggagagccgcggcaacgaggaccacgtcgccgtcatccgtgactaccgctccaagatcgaggccgagctctccaacatctgcgacggaatcctcaagctcctcgacacgcgcctcgtcccctccgccgcctccggcgactccaagggtcttctacctcaagatgaagggagactaccacaggtacctcgctgagttcaagaccggcgccgaccgcaaggaagccgccgagagcacgctctccgcctacaaagccgctcaggacattgctaacaccgagct

SEQ ID NO: 222619 - DNA, 487 bp, Glycine max
ggaaaaaaaagagaaatttaagttatcgttgttgtagttgttgtttggttgagatggctcaggttcaggttccgcctcagaatgcgatgccaggtcccaacggtggtggtggtgccggtggtgctggaaaccagttcgtaacgacgtcgctttacgtcggagatctcgacccgaacgtcacggacgcgcagctctatgacttgttcaaccaattggggcaagtcgtgtccgctagggtttgcagggatttgaccagccggagatcgctcgggtatggctatgtcaactttagcagcccgcaagacgctgctagagcattggatgttctgaacttcactcctctcaataacaggcccatccgtattatgtattcgcatcgtgatcccagcatccgtagaagtggacacggaaatatatttattgagaatttggatagggcaattgaccacacggcattgcatgataccttctctacatttggaaatat

SEQ ID NO: 222620 - DNA, 538 bp, Glycine max
gcaaatcaaactcatgtaatcatagataagtcaacaaatgatttccatgtaccaaaatgcaaggcataattaaaatcagtgctgaagtatccttcaaccaaaaggtggtggtccataacataccaaaagtgtctaatctaacgaaacaaactcaacctgaaaactgtatcaaagccagtgcagaaaataacaatccatcatcactacgtaaactccaaaatataaaccttaagaaacaaggttgtcattaagagataacgaaacaaactcaacctgaaatctgtatcaaagccagtgcagaaaataacaatccatcatcactaagtaaactccaaaatataaaccttaagaaacaaggttgtcattaagagataaggaagccagctgatcagcagtaccgccagcctgctgctgagcaacattccttaggacgtccattgcctcagccacctttgctttcagggcttctggcgactcatgcaaatgcagaacttcagtctggtccatctcaagaagcatgcctgtcactttggcagca

SEQ ID NO: 222621 - DNA, 463 bp, Glycine max
gcaattttctattttcttctctcatggctgcagattccaaaaaggatttccctgctgaacaataagggggtaattgatttacacgttgcggttcctgctgattccttccatctcattagcttctggaaaaaaagtttgcatttgcgtgtaggcatgacaaagaatgacaaagctggaacagcagagaataaaacatccaaagacgaaacgtgatctatagattcttcagcagcacaaagagctactacagctacttctggacctgcaactggttatccaggcaacccttacgatttctgtgcaatgtctggcctgctcatgatccaagtataatggaattggctgtacagatagcatatgatccatcattcaaccagatggctgagcagcattagaaaactattcaaggagctccacaggatgctatgcctagctttgagtatcaacaatattttttaaccat

SEQ ID NO: 222622 - DNA, 463 bp, Glycine max
attcttggacgaaaccatttgaaccagaattttgccacgaagcaatgtagtacaagtaaaattgaagcatgaataaaatcatgacggcactaatcttcaaaatcatgcagtgggacaataaatgccttacaagaacatagataacaaattctatggggactcacatccaacaacgttaatcaatttagtttaacacacaacgggtggaagaaaccaaaagataaataacaaaggcgggccttcttcccctcagtttcccctttgcttgttggggacagcatggcatcatgcattgcaattacagaaaagcatctttctcaagtagcttcaggacttcattttgattgtttagcttcgcaacatctattggaggtttaccatccatattctggagagtaactgcagcaccattttcaaggagaagggccacacattcctttttgccataaccagctgcataatg

SEQ ID NO: 222623 - DNA, 521 bp, Glycine max
  unsure (1)..(521): unsure at all n locations
tgcgggtggccttcccttggttgattggattttggaggagttggtgcggcggcgatctagattccagggggttcgttcttccatgaatccatctcccagctcttctagtctttcttgcaccctcacatccctcaacaacctaatcactctctcaaaccatgttctctccctcacaccatcaccgccaaccctaaactccaaccttatacaatgccctttcaatccccaccacctccttccccctccctccctcttccttcaccacctacgttgcccttcctctcctcgccctctccccgatctaaacccctctccctctctcacttaccccaaaaccctgcacaattctccctccgatcaactctctttctatcttgattcactctccaacttcttctaccgcgattcccccgccgacgttgctttctaccatgccgactccctgaccagaaccgnctggctcacccttncntnggttttatctctccaatgcgccgacacatacactcactccaaccccg

SEQ ID NO: 222624 - DNA, 510 bp, Glycine max
  unsure (1)..(510): unsure at all n locations
cgcagcttcttctagatttaaggaagatgggtaaggaaaaggttcacatcagtattgtggttattggccatgttgactctgggaagtccactaccactggccacctgatctacaagcttggaggcattgacaagcgtgttattgagagatttgagaaggaagctgctgagatgaacaagaggtctttcaagtatgcctgggtgcttgataagcttaaggctgagcgtgaaagaggaatcacaattgatattgccttgtggaagtttgaaaccaccaagtactattgcacagtcattgatgcccctggacacagggatttcatcaagaacatgatcactgggacatcccaagctgactgtgctgttcttatcattgattccactactggggttttgaagctggaatttcaaaggatggacagactcgtgaacatgctctgctttcattcaaccttggtgtgaaacagatgatttgttgctgtacaagatggatgctactacancaaagtac

SEQ ID NO: 222625 - DNA, 492 bp, Glycine max
ggaacacaaatataaagttgacatttaaaaagcaaaccaacaacgcaacggcaaagccctaaaactcgctgcgcttaacaaaaatgtaatcaggggttctcacaacccccacacattaaaacagaatgataaaaggggtcttgccaccgtcgatcaagaacccaattttgggaacaaaagttgcgagatgatgggggagacttcaaactatgtccgaaaaacaagctacctagaaacgaagacacaagggcaagaaaccaacatttattggaaccataagaaacgacatcccctgatgaaccaaaccgcacgattcacttttttttctgggcagccttggggaccttggctccagtaggatccttcttctccacgttcttgatgactcccacagcaacagtttgacgcatattcctgacagcaaagcgaccaagtggggggtacttagagaaaggtttcaccaccatgggtttggtcggaatcattttaaca

SEQ ID NO: 222626 - DNA, 554 bp, Glycine max
  unsure (1)..(554): unsure at all n locations
cactactaccaagcccctatctttgcttggccatggaatcaccgacatggagattcacttcatccatgtgaaattctattcaatcggggtttatttggagccagaagtagtaggccacttggaccagttcaaaggaaaatctgcaaaggagctggaagataatgaagagttcttcaatgctctcatttctgccccggtggagaagtttattagacttgtggtgatcaaagagatcaagggtgcacagtatggggttcagattgagactgcggtgagggataggttggcagctgaggacaaatatgaggaggaagaagaagaagctttggaaaaagttattgaatttttccagtccaagtacttcaagaaactttcagtgatcacataccatttcccagcaaattctgccactgctgagattgtggtatctttggaggggaaagaagactccagtatgtgatagagaatgccaatgtggtagaggccatcaagaaatggtaccttggtggctcaagtgcggnttcttcctcaaccattcaatctctggctagcac

SEQ ID NO: 222627 - DNA, 550 bp, Glycine max
ggcaagtcacaagattaacattattccgaaaagttcaaaagcagaaatccgcaaaacattgtgtggagaaaaattccaattactgcaacttagcaacacaaaacacagaccccaagattattacaccatacaaagttatgttcacttggacaactcctgcgagaaagtgctagccagagattgaatggttgaggaagaaaccgcacttgagccaccaaggtaccatttcttgatggcctctaccacattggcattctctatcacatacttggagtcttctttcccctccaaagataccacaatctcagcagtggcagaatttgctgggaaatggtatgtgatcactgaaagtttcttgaagtacttggactggaaaaattcaataactttttccaaagcttcttcttcttcctcctcatatttgtcctcagctgccaacctatccctcaccgcagtctcaatctgaaccccatactgtgcacccttgatctctttgatcaccacaagtctaataaacttctccaccgcggcagaaatgagagcattgaag

SEQ ID NO: 222628 - DNA, 533 bp, Glycine max
gtggtttcagtgagtgatcggtgttcacttgatccttcataagtcgtcatcatcatcatcatcatcaccgttgattgaagaagatgccgatcagaaacatcgccatcggaaggcctgaagaggctactcaccccgacacgttgaaggcggggttggctgagttcatctccaccttgatcttcgtgttcgccggttcaggttccggcatcgcctacaacaagctcaccgacaacggcgccgccactcccgccggcctcatctccgcttccatcgcccatgctttcgccctcttcgtcgccgtctccgtcggcgccaacatctccggcggccacgtcaaccccgccgtcaccttcggcgccttcgtgggcggcaacatcaccttactccgcggcatcgtctacgtcatcgcccagctcctcggctccatcgtggcctccctcctcctcgccttcgtcactgcctcccctgttccagcattcgggctttccgctggagtcggagttggcaacgctttggtggttgagatcgtgatg

SEQ ID NO: 222629 - DNA, 567 bp, Glycine max
gcacaaaatgataattaaattaacttaaaagaaaacttcaggatcatcaaccatccaaccaaagatcaacggccaccgattcaacaggaaagaaaacacaaaggaaggaaaaccatacacagaagaagattccggagaaattcaataatacacattttttttttttattatttcatttttcccctctagtagtcagtgctgggaagctgctcgtgggtgtggctgatgaagacaacctcgtagataagcccagcaattccacctccgatgagagggccggcccagtagatccagtggttggtccaggtccagctcacgacagcaggcccaaatgtcacagcagggttcatggctgctccggagaaggccccacccaacaaaatgttagcgccaacaatgaaaccaatggcgatgggagcaataattcccaaattgcccttcttggggtcaacggcagtggcgtagactgtgtacaccaaaccgaaggtcattacgatctccaacaccaaagcgttgccaacttcgacttcagcggaaagccccaatgctggaacaggggaggcaatg

SEQ ID NO: 222630 - DNA, 519 bp, Glycine max
ttttttttttttttttttcaagctaaattaaagtacgattagtactagctccaagtaacaaaaaaaactgaaactagaccatttcaatgtagatacggtataaatacttcacaatcaaagactggatgctaggaagtttaactagtgcatgatagttataagctctggtaacaaaaaagtaactgctgttgacagaaaaaggatggaaatactgaaacaaacaaagggaagtttcaccaccctttctacacaagtctcaactggaaagttgaagcaaatatccactcacaaatctttcacgaagacgatcagttaatgagacgccggacgagtgacccttggcctcaccggagtctttgaaggactcacccttattggctgggtccccaagagcatcccactacagtttagtgcaataatagcacttttagccattgcaaattccacaaaagcaattcgagttgaatgcacgtggtcccccaagagcctcaggcgcataacctcgccacaagttgattc

SEQ ID NO: 222631 - DNA, 407 bp, Glycine max
gcacaacatacacgttctcctatcctagctacttactctctcttccttcaattcctcaactctctagctcttatggaaactcatcatcaacaacccaccatcaagtctaggttcagacgcatctgtgtctactgtggttgcagccctggcaaaaaccccagctaccagctcgctgctattcaactcggaaaacaactggtggtgaggaacattgactcggtttatggaggaggaagcatagggttgatgggtctaatcttacatgctgtgtatgatggtggacgccacgtgatagggtaactcacttgttcccttcttctgtctcgttcttcctgtatttaagctcatgaatcttccttgctggtacagggtgattccagagacacttaatgctatgatagataact

SEQ ID NO: 222632 - DNA, 567 bp, Glycine max
  unsure (1)..(567): unsure at all n locations
ccctctctctctctctctctttctctctcatccagatcttgcaaaaaaaaaaaacacaatggcagcgagcgctcccactccacgcgaagagttcgtgtacatggcgaagctggcggagcaggccgagcgctacgaggagatggtggagttcatggagaaggtctccgcctccgccgagagcgaggagctgaccgtggaggagcgcaacctcctctccgtcgcctacaagaacgtaatcggcgctcgccgcgcctcctggcgcatcatctcctccattgagcagaaggaggagagccgcggcaacgaggaccacgtcgccgtcatccgtgactaccgctccaagatcgaggccgagctctccaacatctgcgacggaatcctcaagctcctcgacacgcgcctcgtnccctccgccgccttcggcgactccaaggtcttctacctcaagatgaagggagactaccacaggtacctcgctgagttcaagaccggcgccgaccgcaaggaagccgccgagagcacgctctccgnctacaaagccgctcatgacattgctaacaccgagct

SEQ ID NO: 222633 - DNA, 476 bp, Glycine max
gaaaaacatcaaagctcaacagctagcgttgaaaatggagaagttgcagctgcatgtcccgagagttaagcttggaagtcaaggcttagagatatcaaggttgggctttggatgtgtaggactatctggactttataatgctcccctctcgcacgaagctggatgttcaattattaaagaagcattcaatatgggtgttaccttctttgacacatcagatttttatggacttaatcatgataatgaaattatgattggaaaggctttaaaagaacttcctcgggaaaaagtccagttggctacaaaatttggtcttgttagatctgatggggtgtttgctggggtaaaaggtactcctgaatatgtgcggcagtgctgtgaagctagtcttaagcgccttgatgttgagtacattgacctatactatcaacatcgagttgacacttcagtgcccattggagacaccatgggggagc

SEQ ID NO: 222634 - DNA, 528 bp, Glycine max
gccaccttcagctctgagtgtagaatccaaatcctgaacctcaacaacctccggcatcacgatctgctggattatcatctgtgcaaccctgtcaccaacttttacttcaaaatcagtgtcttaatggttgaacagtatcacccctacgggacccctgcaatccgcgtcgatcacgcccgctcccacatcgatcgagtgcttccatgataatccagatcgcggtgctgaaaaacaaaacaaaacggggagatttaaagttagccctcggctgggaaagaaagaagggaggggaagagattgcaaattcgaattcccccaagtcattctaacaaactaacatttgcacaaaacacaccaaaaggagtgaagatctaaacaagcaatctgtgtgtgttccgccatgaacgaagaacaacagtgtttgcttctcagctcagcttctcacttttggccccccaaggagtgaagctatcgtacggcactgcgggcttcagagccgatgcatcacttcttcaatcgacggtgtac

SEQ ID NO: 222635 - DNA, 359 bp, Glycine max
  unsure (1)..(359): unsure at all n locations
gatagctcttggtactttggatgactcttttagcgctgcctctcttaaggcttatttcgcagagttccacgcaactctgattttcgtgttcgctggtgttggatcagccatcgcttacaacgagcttacaaaagatgcagccttggatccaacggggctggtggcagtagctgtggcacatgcatttgcactgtttgtaggtgtctccgtcgccgccaacatctcangtggccatttgaacccagctgtcacttttggattggccattggaggcaacatcactctcatcactggtttcttatactggattgcccaattgttgggttctatagtcgcatgcctcctnctcaatttgatca

SEQ ID NO: 222636 - DNA, 484 bp, Glycine max
ataaattacaaaatccccctccattctctctctaaaaccatcatgtcctccaccgcgcctcccgtcctccccatctccaacccccaaacaaccgcgggaaccaccggtgcaggcggcggcgccatcgaggctccggccaacaacccggccttccgcgccttcatcaacaacctctccaactccctccgccacggcctcgaccagcgccgcccctggtcggagctcgcggaccgctccgcgttctcaaaacccgagtccttcttcgaagccaccctccgtgtccgcaaaaacttctcctacttccgcgtcaactactacgctgtcgtttcactcatcctcgcagtctctctcctcaccaatcctttctctctcatcctcctcgttggcctcctcgcctcttggaccttcctctacctcttccgtccctcggatcaacctctcgtcattctcggccgaacattctccgacttcgaaaccctagccc

SEQ ID NO: 222637 - DNA, 504 bp, Glycine max
ctttctctctctctctctctctctctgaagatggcttcacgcaggctcgtatcttctctgattcgatcctcccttcgtagatctcaatcgaagccctcaatttccgcatcgacatcgaggctcacgtcatccaaccgtgcctcaccgcacggatacttgctgaaccgcgtcgccgagtacgccaccgccgcggctgctgctaccgctcctccctctcctcctcctccggggaagaaggagctcggcggcggcgggaagatcaccgatgaattcaccgggaagggcgcgatcgggcaggtctgccaggtcattggtgccgtcgtcgatgtcagattcgacgagggtttgcctccgatcatgaccgcgctggaggttctggatcactcgtcgaggcttgtgttggaggtggcgcagcatttgggtgaaggcgttgtccgaaccattgctatggatgccacgaaggtgtcgttagaggctgccgcgttctcaacactggctccccta

SEQ ID NO: 222638 - DNA, 485 bp, Glycine max
acgctggccatggaccaggtggaacagttgcagagtttttaacattaatgcatccaacgttctcaaccagaaagtaaaaaatgtacatccttttgcccttttccccttattaaataacacaacttaaaaacaggggggcagtttggccacagacattgaccgtagttcatttcacagtcggcaacattaaaatggaaggaaggaataacctgatacattttcatatccaaaaaatggaaaattttgttgtttggcattgccaagagttcctaaattattaaatttagcaattacaaaaaaaaaagggattaaaatgagaacagggctgtgtgtgattaagacgctgcagattccttagcaattttctcggccttggcaatgaccttctcaataccgccaaccatgtaaaacgactgctctggaaggtcatcgtattttccatccacacaccctggaagctggcaacgttctccttcaactcaaca

SEQ ID NO: 222639 - DNA, 451 bp, Glycine max
  unsure (1)..(451): unsure at all n locations
ctcctaaaacatctcaatgggttcttcttctattacaacatcgcccgcaaccatgaccatgactgcgatcgtgctcctgttcacggtctttgccgtttcctccgccctagacatgtcgataatctcgtacgacagcgcccacgcggacaaggccgccacgttgcgcaccgaggaggagctgatgtccatgtacgagcagtggctcgtgaagcacgggaaggtgtacaacgcgctcggcgagaaggagaagcgcttccagatcttcaaggacaacctgcgattcatcgacgaccacaactccgcggaggaccgaacctacaagctcggactgaaccggttcgctgatctcaccaacgaggaatacagggcccagtacttgngacccaagatcgatcccaacccgaggctcggaaagaccccgagcaaccgctacgcgccacgtgtcggcgac

SEQ ID NO: 222640 - DNA, 401 bp, Glycine max
gtcacataatctacagaaccttgaaaactaacagcaatcaaatatgttcgccatttggaatttgaatacaaatacagtgcatcgataatataaccctatgtacagagccaatgtctgactgaaatttgatacagaacattatctattttgtatcataataaaatggtaaagatctttatgttacgtgcagcattatgtgaagaagggggaagtgcatccagctggggctttagtccttcgtcttcccttttacttcatcattggctccttctgcacgttcacatttccttaaactgcttaagcactgctgaccttgttcttacgtccgaaggtccaatggtggtttcgctggagtacgccttaatgccttcactcaagggggttgttcttgctcctgagac

SEQ ID NO: 222641 - DNA, 512 bp, Glycine max
ctcgagccgcgagcatccatctgatgtgcatcatgagtgcataccacaagcaattctcgggatggatgtaattcgtcaagcaaaatctggaatgggaaagactgctgtctttgttctctctactctgcaccagattgatcctgttcctggccacgtttctgcactggttctttgtcatacaagagaattggcctaccagatatgccatgagttcgagaggtttagcacttacttacccgatctcaaggttgctgtcttttatggtggagtcaacatcaaagttcacaacgatctgctgtaaaatgagtgccctcatatcgttgttggaacaccgcgaagaatactagcattgactaaggataacgacctttcttttagaatgccagacatttcatattgcatgaatgcgacaagatgctggaatcactgtatatacgaaagatgttcacgacattctcgagatgactccccatgatagccaagtatgatgctctcagcaacactcaacaagg

SEQ ID NO: 222642 - DNA, 513 bp, Glycine max
  unsure (1)..(513): unsure at all n locations
caacaaaagtttaaggcatcaaatatcaaggtcgcagtaagaccaactcaaaacatgaccgttcatgaaaacagcgtaggtgccacacaaaatacagtaagtgaaaacccataaatacataagccattacactgctgctacatctaataccgataaatatccaatggtaaaatggcctagtctgtaaacagactctggtatctatcagcacggataatcatcagctgcaccgttctgcgtcacgattactcatgccaccaagcacttaacattgttcccaaaaaattctacgatggcatataggtagaggtatcgatctgctcaggaagttgctttatatccacctgaaaccttgactgaacattgttgagaacatcaacatcagtataacaggaaacaaatgtgattgcaaggactttggtgccaaatcttgcagctcgaccaaccctgtgtangtatgtgtcagcagaatcaggcatgtcatagattataacaatgttgacacgttcaata

SEQ ID NO: 222643 - DNA, 377 bp, Glycine max
ggaaacccacattataagcaaatgaaatagccagaatttggggcaaatccaaaaaagggtgcattggcacatagtatacataacctgggaaactaacagcaatcaaatttgttcgccatttggaatgggaatttgaatacaaataccgggcataaataatataaccctatgtacacagccaatttttggctgaaatttgatacaaaatagtatcaatttgtatcataaaaaaagggcccaaaaaaatttatgtgaaggtaaaggggaagggtatcaactgggggtaaaaattttcggctttcatttacttaaacatggggtccttcctgcacgttcacattttctttatttggttaagccctgttgaccttgttttt

SEQ ID NO: 222644 - DNA, 603 bp, Glycine max
aaaaaacttgtcttttaagttttaactctaagccatggctcttcccctgttcctcctctgcttcatgctctgcatttcactcacacaccaaacgattatgttacccctaacacactcaatttcgaaaacccatttcaacagtacccaccagcttctcaaatctacctccactcgctcagcctcacgcttccaccgccaaactcatcataactccgtagtctctctcccactttcttcaggaagcgactacaccctttccttcaacttaggctcacacccttctcaatccataaccctttacatggacacaggcagcgacctcgtgtggttcccatgcgctcccttcgaatgcattctctgcgaaggcaaattcaacgccacgaagcctcttaacatcacgcgctccccccgcgtctcgtgccagtcccctgcatgttccacagcacactcctccgtctcctcccacgacctctgcgcaatcgcacgttgtcctttggacaacattgaaacctccgattgctcttctgcacgtgtcctcccttctactatgcttacggcgacggaagcttcatcgcgcaccttcaccgcgatacactcttcatg

SEQ ID NO: 222645 - DNA, 506 bp, Glycine max
tcgtgacaccatgaacattaattcacttgcccgcaaatccttggtcaatgcagacggtattatagagaaaacattcttgtggggtaggtactctttggaaatgtctgctgttatttacaaggactgggttttcactgatcaagcattgcctaatgatcttgtcaagagaggagttgcggttaaggatccatctgctccccatggagttcggcttttgattgaggactatccttatgcttctgatgggctagagatatgggatgccatcaagtcctgggtgcatgaatatgtctcattctactacaagtcagatgcagcaattcaacaagatcccgagctccaagcttggtggaaagaacttgtccaagtgggtcatggtgatttgaaagataagccatggtggcaaaagatgcaaactcgtgaagagttgattgaagcctcggctaccctcgtatggatcgcttcagcccttcatgcagcttgtaactttggacagtatccatatg

SEQ ID NO: 222646 - DNA, 572 bp, Glycine max
  unsure (1)..(572): unsure at all n locations
gctaacttcacagcccaagtcatcatcatgaaccaccctggtcagattggaaatggctatgcccctgtcctcgactgccacacttctcacattgctgtcaagtttgctgaactcatgaccaagattgacaggcgatccggcaaagagcttgagaaggagcccaagtttttgaagaacggtgatgctggttttgttaagatgattccaaccaaacccatggttgttgaaactttctccgagtatcctccacttggtaggtttgctgttagggacatgcgtcaaactgttgctgtgggagtcatcaagaacgttgagaagaaggatcctaccggagccaaggtcaccaaggctgcccagaagaagaagtgaatcgtgcgggctggttcatcagggatgttggttacaataaatgttggtttcttttctgtactctcggctcgagctctnntttgcgttcattctgttttcctgttgaagtctttccctagccaatggccaccgatcgtttgacccgggttcacagtctccgtgagaggcttgatgaaaccctcactgncaacaggaatgaaatt

SEQ ID NO: 222647 - DNA, 271 bp, Glycine max
aaagaaaaatggagggaaaagaggaagatgtttccttgggagctaacaaattctcagagaggcaaccgattggaactgcggctcagagccaagacgatggaaaggactacacagagccacccccggctccacttttcgagccctccgaactcacttcttggtccttctaccgagccggaatagccgagtttgtagccacttttctctttctctacataaccatcttaaccgtcatgggtgtcaataggtccagctccaagtgtgctactgt

SEQ ID NO: 222648 - DNA, 521 bp, Glycine max
  unsure (1)..(521): unsure at all n locations
tgtgaatcaagaaccgctctgctatggctgctctgcaatacttggaatcgctgcgcaattcgcaccctgagctctccgattggtacaattcgctggcggatctgtaccagaagaagctctggcaccagctcactctcaagctcgagcagtttgtggctctcgccgtcttccaggctggtgatgctttaatacaattatatcacaatttcatcacagactttgagacgaaaatcaaccttctcaagcttgcacattttgctgttatagtttctcggcagtattctgaaaaagaagctgctgttggttatcttggaggggtcattcagaaacttcaagacactagagagcagcgcatagaagaacctattctttacattaagatgcanatagcaatattcaagcttgagcaaggtggatcaaaaggaatgcaagacacttctagaagatgggaaagagtacactcgacagcatgacagatattgatccatctggatatgctagctattactggggtatcatct

SEQ ID NO: 222649 - DNA, 489 bp, Glycine max
  unsure (1)..(489): unsure at all n locations
ttcacgctgacacacactacacaaacccctaactttccttccttccttccattcactactactccttcacttcgcttcaaaatttcacccttccaaatccccaacttttacaattttactattagaatttaccatctctctttctcttcctcaatccaatccaatcccctctcagtcgaagcaagaaaaccatgtatttatcggagaagcctcgtcccatcgatttctacaaggaggaaggcgcgcgcgacatgatgatcgaggtcgtctccaacggcgacctccctcctcctccgccgccgccgccgatgattctcggcgagagcagcggcgaggaccccgaggtcgagatcaaggccccgaagaagcgcgccgagacctgggtccaggacgagacgcgctctctcattggccttcgccgcgagatggacgcgctcttcaacacctncaagtccaacaagcacctgtgggagcagatatcggcgaaga

SEQ ID NO: 222650 - DNA, 511 bp, Glycine max
gaacaagaaaggtgtgtgcttcataatatgcatctgtccaacttagctacatagagttaagagtgatgaaaatgatccactataaaattagacaatatgttctcactgcaaatgcatatttacagacatgttaaggccaatgattggaacggaatttgtgcaaagggactacttccttttcctatataaaactataaacagcattatcaaaacttaaaacaaatacaattccaggttagtgccgcacatacatcaaagatctgaacagtccccaccacagttctccagacattttatggtagctgaacattgaccacaccatgtacctgctttcaactcacaccacgatatatggcaccaggtcgaagatcatccatgttgtcaatatttttgtagctgtcaaattctcttagacatatccaaccccggcgggtcagaaaatcacggaaatcgtcttcagtgtaaaatatcttatcttcagtatgcacaggtatatggtcaggctcatcat

SEQ ID NO: 222651 - DNA, 481 bp, Glycine max
cagcacttactagtccaacagcgacggctgaacctctttgttctctctgtctaagaagaagaagaagaagaagaagaagaagaatcaaatatccttgagccagacatgtacaggaacgctgcttcacgtcttagggtcatcagtgcccgttcgtgcagcagcagcaggatacctgccagtgccagatttgcaagttccgttgccacacaacaatcctcttctggtttgggtggtttatttggatggctcactggagaccgatccagttctttaccatctctggatttcccgcttccgggcgttacacttcccccttcattgcctgattttgttgcgcccggaaaaactattattactacactcctaaatggactcaaagtggcctctgaaacatcaccgactcccactgcgttcggttggcttatatgtagattgggtggttcaatatacgagactttcgataagtttggggctacacatc

SEQ ID NO: 222652 - DNA, 463 bp, Glycine max
attcaaaaccagttcctgatccattgattatgatttggtttttcaaagggattcaatccaaaaaatagtctgtgagaactatcagatcaatgtttatgtaccccgaaataatgagatgtgcaaatgtggctagtgcacaatcactaatttattgactacaacaaggatagttagggaagtttaacttaattttacacctttcagccgtacaagacttgattgtatacaaagaagactcaatatgatggatggaaacaatctcattaggaacggaacttgaggctcactgattcatagcttggaacatagagaacatctccatatgatgccattgtgagaggggaagaaatgagtttttgcgaaattgaagtgatatcctttgaggttacttcatccactgccttcaagaaatcctcacaggtttcctctaccatatgtaaaatttgtcttcctatatcttctg

SEQ ID NO: 222653 - DNA, 463 bp, Glycine max
attttagcttgtgtttgagctccccaatcatttccacacttgtacattttctccttgttgcttctttgttttgtcctgtttgttcctcagatattggcaatattggcaacaccccagttgccaatcagactttcaagccgcaagaagaggctcacaagatgaacatcataagaactcgtcttcaacagatcaacaagcccgccgttaagacaattcagagtcctgatggtgatgtaatagactgtgtggtgtctcatcagcaaccagcttttgatcatccaatgttgaagggacacaaaccactggatcctccagaaaggcctaaaggccataaccaaatggacatgagtgagaattttcagttatggaccatgtcaggggagtcctgtccagaggtacaattccaattagaagaacaacagaacaagatatgttaagggctagttctgttagcagatttgga

SEQ ID NO: 222654 - DNA, 510 bp, Glycine max
gaataccaagaaccgtaatatatttactatttttcttttcagatttacataagagtctaggtggtaatggtataaccaatgggtgactactgactagttagtaaaagaaaaaaaatcttgatcaacaaacaaatttaaattaaatataagaataaatgacccatgacccaagcttcttcaatgcctttgagacggaaaaccaatgtcacccaaacccaaaaatgcccaaaaaaaacaagaagaaaaaaaaaaacttctatataattcaaccccttaattagggacatctcacatttcttccaggtccaccatagtaaaagtaattcccccaaacattattaatccctccttgtatgtcatagcaattcgggtgatccgctagaacccgaagatttgacaatggtaccaagttgttatcccaatccacaacttgcatgttcctaaaatatgaagctttcccaaaaccttcactagcaaaatgtccactacccatttgagtcgaagtgtgag

SEQ ID NO: 222655 - DNA, 567 bp, Glycine max
gtatggcacaaaccacatgagcctaggccttggtgctcaacttcagaaccaccaaatctcagccactaacagcatattgagccttggaagcgaaccaaagtttgagcacttgatctcaccaaatctgcaccactcatcatcatcatcatttggagtgcaatcaccccagtcatcatcgttcttcatgactgatccaaaccatgcatttcaagacctccaatctcagaaccaaggacacttattctcaaacaagcaacttcatggtctcatgcaactccctgatcttcaaggaaacaccaataacaactccactacttctgcttcatcattgtctgcttcagctaataacaccaatctcttcaacctaagcttcttccctaacaccaacaccagtggcagcataatcaatgatcaattcagcaacataagtggaggtaacaataaccaaggaacagcaacactctacagcactaatagccccgtgagtaataaccatgttggtaactcaagcttgtcttcactctttggaaactcatcagtgcaacaagataacatgtcccctcacat

SEQ ID NO: 222656 - DNA, 512 bp, Glycine max
ccttgctgtatatgttttgcagcttagctgatatggcggccaatcctttccatgcactgttctatcttgtgtttatgctttcagcttgtgccttgttctcaaaaacatggattgaagtctctggttcatctgctagagatgttgccaagcagctgaaggtacgaactggcattcattttgcataccatttccctattgacgatatatatttcttaagtaaagcagcagaatattagctaggcttgggttttagccatctttagaagcaagtaatactgtgtctaaacaactattattttgagcttcgacccaactctttttgtaagctttaaaccaacataaattttaattgaactttaaatgaaaggttgtgtatggggccaatggactggaatatagataactagttgcactttgtcattcttgctggatcttggacttgtatcatggtgtacttacgagtttgtaaatcttgaaatagtgattgtgaaatgctctgttctcttggaata

SEQ ID NO: 222657 - DNA, 500 bp, Glycine max
gaaaaacatatcacacaatatggcattcaagggctatttccttctcggcctcgttactcttgttcttgttaaatcttccaaagttacatgcgaagaagaatcagttaatacagtttcacccattattgacatttcactcaatcggaagagtttcccagaagggttcatatttggggcgggatcttcctcgtaccagttcgaaggggcagcaaaggaaggtggtagaggaccaagtgtatgggataccttcacccataattatccaggaaagatcatggatagaagcaacggagacatggcaattgactcatatcacaactacaagaaagatgttgggatgatgaaggatatgaatttagattcatatagattttccatatcttggtcaagaattctcccaaaaggaaagctaagtggaggtatcaatcaagaaggaatcaactattacaacaaccttatcaatgagctactagctaatggtatacaaccacttgtaactc

SEQ ID NO: 222658 - DNA, 310 bp, Glycine max
tgagtttgttaaaaagcaggattggaagaatcctttgagtgtgggaaaatgagtatgtacggtagggatccgtggggaggcccgctggagattcacgccaccgactccgccacggacgacgagcgcagccggaatctccaggagctggaccgaggcgctttagacgagacccaacagagctggctcttgggcgccggagaacagaaaaagaacaagaaaacctacgtagaccttggctgcatcatcgtcagccgcaagctcttcatctggaccctcggcaccctcgccgtcttcgccttcctctccgcct

SEQ ID NO: 222659 - DNA, 407 bp, Glycine max
ctcgagccgaatcggctcgagtcagcttccacaatcctatcgcacatctttctcagttctacgatggagttttggggtgccgaggttaaggttggagagtctgttaaggtagacccagccgaatttgaggcatgcatacacctttctcaggctgctcttggtgaggcaaagaaagataagcctgaaccggtggttctctacatgaaagttggtgaacagaaatttgtcttgggaacccttttcagggagaaaatccctcaaatatctctggaattggttttggaaaaggagtttgagctttcccacagttcaaagagtgccagtgttcatttctgtggatacaaggcatattacgatgccgataatagtgacgaggatgaatttactgatagcgatgaggatgatga

SEQ ID NO: 222660 - DNA, 475 bp, Glycine max
gttcccaaattcattttaatcctaattctgcacttcttgatcattcgatttttctcctcaagatgcagatattcgtaaaaactttgaccggcaagaccatcacccttgaggtggaatcctccgacaccattgacaacgtaaaagctaagattcaagacaaggaagggatcccacctgaccagcagagacttatctttgcgggtaaacaacttgaggatggtcgcacccttgccgattacaacatccaaaaggaatcaaccctccatctcgtgcttcgcctcaggggtggcatgcaaatctttgtcaagactttgaccgggaagaccatcacccttgaggtggaatcctcggacaccattgataatgttaaggccaagatccaggacaaagagggcatccccccagatcagcagaggctgatttttgccggtaaacaacttgaggatggaagaacccttgctgattacaacattca

SEQ ID NO: 222661 - DNA, 465 bp, Glycine max
gttggccctctttctcaggattgggaacccgtcgtcctccgcaagaaggctcccactgccgccgccaagaaggatgagaaagccgtcaacgccgcccgccgctccggcgccgaaattgaaaccctaaaaaaatataatgctgggacaaataaagcagcatctagcagcacttcattgaacactaagaggctggatgatgatactgagagtctagctcatgagaaggtaccgactgaacttaagaaggccataatgcaagctaggatggacaagaaacttactcagtctcagcttgctcaactgatcaatgagaagcctcaagtgatccaggagtacgagtcaggaaaggccattccaaaccagcagataattggcaagttggaaagagcccttggagctaaattgcgtggcaagaaataagggacttaatgtcatggtgcgcgtttattttgctatgcatgtcac

SEQ ID NO: 222662 - DNA, 497 bp, Glycine max
atactgaaaatgcaactttatttatccgaacaggagaaaggcacatgtcaacacaaccattttaactgtcttaaatatacacaattagctaacaaacacaaaacactcccatagtgacatgcatagcaaaataaacgcgcaacatgacattaagttccttatttcttgccacgcaatttagctccaagggctctttccaacttgccaattatctgctggtttggaatggcctttcctgactcgtactcctggatcacttgaggcttctcattgatcagttgagcaagctgagactgagtaagtttcttgtccatcctagcttgcattatggccttcttaagttcagtcggtaccttctcatgagctagactctcagtatcatcatccagcctcttagtgttcaatgaagtgctgctagatgctgctttatttgtcccagcattatatttttttagggtttcaatttcggcgccggagcggcgggcggcgttgacggc

SEQ ID NO: 222663 - DNA, 464 bp, Glycine max
agtcactacacttttttcactttctcgggaaaatcacagcgacgctcaggaaaaactctaaactgtgaaaaaaccactgcgatcaatggcaacgatcaaggccgtgaaagctcgccagatcttcgacagccgtggaaatccaaccgtcgaagttgacgttattctcagcgatggaagcttccacagagccgccgtgcctagcggtgcttcaacaggtgtttatgaggctttggaattaagggatggaggctcagactacctcgggaaaggtgttctcaaggctgtggagaatgttaattcaattatagcacctgctctgcttggcaaggacccaacgaagcagactgaaattgacaattttatggtacagcagcttgatggaactgttaatgatgggggggtggtgcaagcagaagcttggagccaatgctattttggcagtgtcacttgctgtctgcaaggct

SEQ ID NO: 222664 - DNA, 513 bp, Glycine max
acgaccaaaattttttaattcccaaaaattatgattctggaaaacaatttgtcgcaccaaacaccccctaaagctagatttcaaataaactaggcatcagacatacatctactgccttattttctcgcttcaaaattccacgcccggaaaacctatattctctgaagtagtagacaagtttatttttcgcaaaaaatacatgtcctatgcagtcatcaatagaatcttatttaaatgatgcttagtaatcttgggctaaacaatcagtagggctccacgggggctctgaatttggcaccagcatacacagcagcagaaccaagttcctcctcaatcctcaggagctggttgtacttggcaagcctttcagatcggcagggagctccagtcttgatctgaccagttgctaatccaactgagaggtcagcgatgaaggtatcctcagtttcaccactcctgtggctagccatgacaccccaaccagcttggttagacattctcacagcttcaata

SEQ ID NO: 222665 - DNA, 421 bp, Glycine max
gtgagaatgatttaccaggattgactgatgttgagaagccaaggatgagaggcccaaagagagcatccaaaatccgtaaactgttcaacctgtctaaggaggatgatgttaggaagtatgtcaacacctaccgtcgtacatttacgacaaaagctggtaaaatccctggtgcttttatgttgtgtttaattttgtaattgactgattgattaaagaatttgtcttaaaaagagcaaagggtcatggtaatgtgaaaactagctggacttcaacctgttcataactataaatctattgataactcaaatcaccttttctttgttttatctgttatatattgggggatgttgatacagtaccctcatttgttttgtttgttaaattttggtcgatgcgtgtatgatgaacagattttagttca

SEQ ID NO: 222666 - DNA, 533 bp, Glycine max
aacatattccaactagttaaatatgattcaatgcgtaacactgcgtaagaaatacttgaataactcaatgtaatcaaaaatagcaaaaccatagtttatcataacaacagccgtcataatatagcaaacaaaaactacatatgatgattaaacttcaccatatctctctatcgaaagcagcttatacagctgctgccttagcagcactggaaagcttggatctcctcttggccaaactctcactgcggcggtctctctgctccttcaacctggaggcaaggagtttctggtactctgctgcctcagattttgccttggcaatcctcttcttcttatcagcaattcttgcccgctttctttggagcgtaagaggagtgaccagtctttgtatcttgggagctttgctcacctttttccctgtaaccaaatatccaacactattcagaatacaatccatcacaaacaggaaccataatctaatcatgcctaaaatgactcttctttacatccaaaattaatattcaccctataag

SEQ ID NO: 222667 - DNA, 367 bp, Glycine max
aagaaaacagagaatgttaacttctgattatctgcaactgcaatgcaaggatgagcacaaggtatccaaactgtaatcgccgttttttgattttcgtgaacaaggaggtgctagatactttcttagtaaactaagcacaataatcaaaatgttttctctgtctgaggaaatttacagcagcccaaatggggaagatcatgataatgtcttcaacttgtctgaacattcgtcataatctgcgggtgctttgaagtttttcactgatttacccaagacatttaaaacagcaacacgctgcaattctttagcttcctctaatgaaagctgaattgatctcttctctaactcaacagcatgtttgctaagt

SEQ ID NO: 222668 - DNA, 464 bp, Glycine max
attattttggcgcccctccaattcttttgaatcctcacccccacacaacaccactccacacattttcgttcttccctttcacccatctcatctcaacaattgaatctttgaggggtctttcagaatcagaatgatggcagcaactatggagcagcagcagcaacgcccccaacaacaagacgaagctgaagaaatacaacatggccctttacccgtcgagcaacttcaggcatcgggcatagccgccacggacgttaagaagcttaaagacgcgggaatctgcaccgttgaatccgttgcttacactcccaggaaagatcttttgcaaatcaaaggtatcagtgaagctaaagttgacaagataattgaagcagcttctaagctggtgcctatgggtttcaccagtgctagtgaactccatgcccagcgcgatgcaatcattcagataaccacgggatcgacag

SEQ ID NO: 222669 - DNA, 568 bp, Glycine max
gttcccggatccaatcgcgttagggtttttgagagttgcagtgtgcagacttcttaggatcatctcttagcagtgatcgattgagatggcagacgaagctaacagaactgctttccttgaaattcaaagtcgcatgatcgatactactggaaaaataaaacaggtgcaaacccagatgcgttccaaagaagcagaaaagaagcgtgcttttctgaccatggaggagctgaagcaagttcctgatgatactaatgtttacaaatccattgggagaatgtttgtattggagaccaaggcaacattaatgaatgagcaggagaacaagtttaaggatggtgaagcttcaattacagctttacagagctcaaaagaatacttggaaaaacagatggcagaggtggaaaccaatttgagagaactgttacaacaagatcctggtcttgctaggcaaataatgtcaatgaatgtagtgtaaactttcattagtgaaattaactttcattggtggggtttctggtgcatttgagcaaaatagaaaattcaggacttggtgagatgtgaggatgtg

SEQ ID NO: 222670 - DNA, 431 bp, Glycine max
ggaatccaaaaatgagagaaatcatcagcattcacataggtcaggccgggatccaggttggcaactcctgctgggaactctactgcctggaacatggcatccagcccgatggcatgatgccaagtgactcctccttcggtgtagcccacgacgccttcaacaccttcttcagcgaaaccggatccggcaagcacgtccctcgcgccgtcttcgtcgatctcgagcccaccgtcatcgacgaagtccgttgtggcacttaccgtcaactcttccaccccgaacaactcatctccggcaaggaagatgccgccaacaactttgccagaggccactacaccgttggcaagagatcgtagatctgtgcttggatcgcgtccgaaaactcgcagacaactgcactggtctccagggctttctcgtcttcaacgctg

SEQ ID NO: 222671 - DNA, 479 bp, Glycine max
gaatcttcctaatcctaatcgcttattaacgtcgaggttacttgtccgtctaaccaactcaacatttcgtcatcatcctcatccaccttcgttagatttccccctcaacattttttgtttttctctccatcccaattatcgccacctcctctttcttcaaatttcaatctcagaggatgggtggtgaggaattgtgtttgatggagaactcagggaaatggaagaggctgtggaagaaggtgaagtaccagctggtggagtaccactccttgcccggttatttgagagacaacgagtacattctcggtcactatcgatccgaatggcccatcaggcaggttttgttgagcgcattcaccatccacaacgaaactctcaacgtttggacgcatttgatcggggttcttcatatttctggcattgaccatatacactgccatgaatcttaattcgctacgcagtttcctgacatgctcaag

SEQ ID NO: 222672 - DNA, 489 bp, Glycine max
aaagctataattatactttgggatttaaaaactagttgcaatgtaacatgaattgaaaagacagcacactaaaatagcacctaaaatgaaagacaaacaacttcatcaattctaacaaggcaaactcaacaaaagtattacttaatttagtcaaacagactgaaacccatgtcatcgtcagactcttcagctggctcttccttcttttcctcctccttggctgcagccgctggagcaccagatgcagcagcaggagcatcaacggcggcaacggcaaatttactcgggtccttcagatacttcatgaccttgtctgcctccgggaaagaataattctgcctcaaccgcaacagcaagaacattcttgtaggcattgacaaacatgtgtggtgctgcaccaagtgttggatatgaaatatccaatgaaagtgaagtaaccattgagacaccatcagtatactttccaatgaggtcattctcagctcgagc

SEQ ID NO: 222673 - DNA, 370 bp, Glycine max
gttacactacctacaaacttttttagcaagatcgcccctataccagtggtcaaggaaatttttctaactgatggcgaacagttcctcaagtatccaccacctaaagtgatgcaagtggatacagtctgcatggatgactgatgaagaatttgctagagaaacgattgctggtgttaatccaaatgtcattaagattcttgaggagttcccaccacgtagcatgctagattctcaagcctacggtgatcatacctgtataataacaaaacaacactttggagcctaacttgtgggggctcaccgttgagcaggctatccagagcaagaagttgttcatcttagatcaccatgactttttcattccatattt

SEQ ID NO: 222674 - DNA, 431 bp, Glycine max
aacacttaacattaatttatacaaacagaatttcttcattaacacttaacagcaaacacgagaacattcaatcaccccaaatacataacttaaccatacataggtagatgaaggaatcatattccttctattcacttttattgaaaaccagggaaagtactgcaacaaccatagagcccctagatggagatactgttgggaattcctctgaaagtcaatccctcctcactagaaggatagagcaaagtgtaaggcattttagccggcccactgcggtttctcaacgtctcgtccttgttcttctgtataagcttttgttcaatctcttgaagcttctttccaaacctcttgaaggcctctagtggaccagcatcagaagtccaatagtcaccaccatctctctccccaaggtagaactcatcagatgtgtg

SEQ ID NO: 222675 - DNA, 463 bp, Glycine max
aagtccaacaaatccttccagatcaaatattattcagttttgtttataacaaaactttttttttttcttttccagtagatacaagcatgggaaaaggaatcttaagtattgaacaacacacccctgcccctataagccagtaactattggatcagaaaaatgatttattgcaaaagttaggttgaaagagaaataacacatatcttaactatatatccaagattctaccccgtatcatggcctcggctttcctcacctccttcactggtccgatgatgaagaccttgtcaggtgggcccttgggacctcccgtgagaatttcggcattgcaagactgcttaattgacaaaattgttgcccctcttttcccaataacaagtcccatcttcccttggggaatatcaagaactgaaagaatttcttcttgggatcacttccatcagcattcaggttatctggaatc

SEQ ID NO: 222676 - DNA, 509 bp, Glycine max
  unsure (1)..(509): unsure at all n locations
tggaaatcgatgacgacctgaagcttcgagcattttgggacaagaggatctcccaggaggttcttggtgatgctctgggtgaggagtttaaaggatatgttttcaaaatcaccggtgggtgtgacaaacaaggattccctatgaagcagggagtgctgacccctggtcgtgttcgacttttgctccatagaggaactccttgtttccgtggatatggaaggcgcaatggagagcgtagaaggaagtctgttcgtggttgcattgtcagcccagatctctctgttttgaacctggtaattgtgaagaagggtgagagtgatttgccaggtctcactgatgttgagaagccaaggatgaggggtcctaagagagcatccaaaatccgtaagctgttcaacctgtccaaggaggacgatgtgagaaagtatgttaacacataccgtcgaacctttacaacanaagctgggaaaaaaagtgagcaaagctccaaagattcaacgactagtcac

SEQ ID NO: 222677 - DNA, 421 bp, Glycine max
ctcgagccgctcgagccgattcggctcgagggagaaagggtgtgagaatggagagcaaagaggaagatgtaagggttggagcaactaagttctcagaaaggcaaccaattggtacagcagctcagggtgacaaggactacaaagaaccacccccagcacctttgtttgagcctggtgagctaaagtcatggtccttctacagagctggaattgctgagtttgtggccactttcttgttcctctacattaccatcttaactgtcatgggtgtcaacaggtcaccctccaagtgtgcctctgttggcattcaaggcattgcttgggcctttggtggcatgatctttgcccttgtctactgcactgctggaatttcagggggacacattaacccagctgtgacctttggtctctttttggcaag

SEQ ID NO: 222678 - DNA, 563 bp, Glycine max
gaaaaattggccatcagtggaataatattttgaacactggggtcaggaatcatcaacctagctagtgtgtacaacaatgaggaagcccgaggtttctggaaacaacaacaacaacaacaacattaataacaagcttagaaaagggttgtggtcacctgaagaagatgacaagctcatgaactacatgctaaacagtggacaaggttgttggagcgatgtagccagaaatgctggccttcaaaggtgtggcaaaagttgtcgccttcgatggatcaactacttgaggcctgatcttaaacgaggtgcattctcacaacaagaagaggaactcatcatccacttgcattcccttctcggaaacagatggtctcaaatagcggcgcgcttaccagggagaacagacaatgaaattaagaatttttggaattcaacaataaagaaaagactcaagaacatgtcatccaacacctcaccagatggaagcgagtcctcatatgagcctaataacagagaccttaacatggcagggtttactacttctatacccaagatcaacaacatgc

SEQ ID NO: 222679 - DNA, 481 bp, Glycine max
  unsure (1)..(481): unsure at all n locations
gagactccaaaattggctggactattaccagcttaagtttgagagacatcctgaccggaggccaactgtcaagactggaattttagggctttggggtgggaaagttgatgctatcgagcactacaaacattcaattaaggaacttgataagatgatgacattggaacgccagaaaattataaaagatcccaaatctattttgccagttgcttttctttcattcaaatcccgatggggagcatcagtttgtgcgcaaacccaacaaagcaagaatcctacactctggctgactgattgggccccagagccacgtgatgtatattggcggaacttggccataccatttgtttctttaaacattcgaaagcttataatatcattgtcntgtgtttgccttggtatttttctacatgattcccattgctattgtgcaatcccttgccaatttggagggtcttgaaagagttgctcctttcctcag

SEQ ID NO: 222680 - DNA, 257 bp, Glycine max
tttctataaatcttcatacatctcctttcccacttgtcttctctgctttcgaaacaacactcacaaaacaaagccttctttttcttgtgtgatctcacaagcccctaaaagccaccatgtcttccttcaagagcaaataccaagatgagttgattgccaatgctacttatattggcaccccaggaaagggtatccttgcagctgatgagtcaaccggcacaaatgggaaacgtttggcgagcatcaacgtggagaaa

SEQ ID NO: 222681 - DNA, 415 bp, Glycine max
agaagtagtacatttttcttggtttctaatataaaaaatagattaagcagtgtaaaaatagaataacaaaataacatagtaaaagaaagaaaaaaagtaaacgccgatcaggccaatgcagcagcagcagctaaagccattattattctcacattaccacctacgaccgagaatatccataaacctacaaaacagttcaaaaaaagaaagaaagaaacaattccattccaaaaaaaaaaaacaatctcagacctctcagtacttataatccttaacatgaagtgactcagaagccccttccccaagcgtgggatcccccttataagttccgagagtagcctccgaattcgccttgcaccttacaagcaacgcgctctgcgccttggggatattctcgtcctttccaccccacgcc

SEQ ID NO: 222682 - DNA, 551 bp, Glycine max
gaacccatatggacgaactaagcttatcattgaagaaatttgccgtgatgtccactgtgcagagccagattgtaaaataattttgttaagatacttcaacccagttggtgcacaccccagtggttatattggggaggatcctcgtggaattccaaacaatctcatgccatttgttcagcaagtagcagttggccgacggcctgcactgacagtttttggaaatgattataatacaagtgatggcactggggttcgggattacattcatgttgttgatttagcagatgggcacattgctgcattgcttaaactagatgaacctaatataggttgtgaggtttataacctgggaacaggaaagggaacatcagttttggagatggttagagcttttgaaatggcatctggaaagaaaattccacttgtgatggctggccgtacacctggtgatgctgaaattgtttatgcatcaacaagaaagcggaaagagagcttaaatggaggcaaaatatggcattgatgagatgtgccgtgatcaatggaattgggct

SEQ ID NO: 222683 - DNA, 503 bp, Glycine max
caaaataaattaatctcaataatgaggtaaggatacctgttagtcacactttaaacaaacatgtgatttagatttacaaaacaggatgctgctcatgtggaacatgagagaatccgaatctaataatcaataacctgtaagaaggaacctagagaacctttaaattacagtatagtaaaccactacttacttactatgtaactatgaatagtaataatacaagtactttgtcaccttaagatcactaaagaaagaaaagcttttgggaaaactaaattcacaagacctacggactacggtgtgggtgagttcagaaaagaacccaaagagaaaactaagtggttaatcggtggagccctgatctccatagccataagggtttttgctagcccaattccattgatcacggcacatctcatcaatgccatattttgccttccatttaagctctctttccgctttctttgttgatgcataaacaatttcagcatcaccaggtctac

SEQ ID NO: 222684 - DNA, 487 bp, Glycine max
atagacaataattgaagttcccattaaaatttcaaacaaaaacttatcaaacatgcattcaccttcaacactaccacaataccacggtttactgggccgaaaaacaaggacagatgcctaacgtccttaggaaactcactctattacataagccaaaaataatacatgaatgagtcataaccaacagcaaaaatatcactgaccaccatgctttgccttgttatgttgttgcagaccactttcattggtgaaagacttgctgcaggttttgcaagagagtccaccagacttaggagtcttggctttggcttcactgttgggagtcttggctttggcttcgctgttgggagtctttccgcctttctttgcagggtgaggagttgctgtatgtccacctttcttaccatcagtcttttcaggagtagcatttttggctttcttggaagaactggagtttttgatgcagactcattgggtctcttctttc

SEQ ID NO: 222685 - DNA, 411 bp, Glycine max
aagtcaattatattgatacaaacttaaccagatttcaacaagaaaactctaaatcaaactaaaagctctacaagagataaccatcccttaactaaacagttggatttagaaatacaaataaagagaactcccttctttaaactattcacgttttggaaagacgagcaatttacggaaggaggagcagggaaatattttttggaaagagaaatatgtttataaggaaatgaccagaccacctacacggatgatcaaaatcatcagaacctacataaatgctattatcatcagtccattctctaatcgtcatcctcctcctcgccactgcctttctcgtcatcatcctcatcattcacctcagatacagacttctcagattcttcttcatccccaccagtaggaccttccgcc

SEQ ID NO: 222686 - DNA, 485 bp, Glycine max
gtacttggttggcattatatacgaaatagcacttgctctcttccacttcttgttctgtccttatgttcttgttctagttcttctaccctcttcttcactcttgttccatcactgctttcagagcttgctatttctctttgaagaagaggggcacagacccatgaagagtctcgtaactgtgcttttagttatagtattaagcactgctctggaaagcaatggagaagatgatcatgaacgatgtaaacaggaagcagtggatcctaggcctcacagcgtgtcaatcttagagttcggagcagttggagacgggaaaacgctgaacacagttgcattccaaaatgcagttttttatgccaagtcatttgctgacaaaggtggggctaaactatatgttccatctggcaagtggcttactggaagttttaaccttaccagccacctcactctctttcttgagcgaggcgcaaccatcattgcatcac

SEQ ID NO: 222687 - DNA, 521 bp, Glycine max
cttatacccaccacaccctcctacaccctccaacaccgtatccttttccccgaccaccacctcctcatcctcaccaacccccaacaacaacaacaaaagctccacgaactagagtgcgtctactacacgctccaccccaacgcttcctcttccggttcacctgaaccggttctcgaagttcaggttcgaccggtcctgtccacggaccgttatgacgaatctcgatccattgttaggtgcccacttccccaaacgaactcctctgctggcggcggccctaaagccgtcgacttgcgacggcgcggtgaggtgggtcgccggagtttgggcattttgatgaaccaaacggctcaatcttgggacagggtggcgtacgaggcgaccctcgacggagacaccgtggtggtgttcgtgaaaggactgaatctccggccacacaagatctctgatccaacccggatccggtgccatttcgggctgaaaagtttcacaggacaatgccttttacttacacgagagct

SEQ ID NO: 222688 - DNA, 397 bp, Glycine max
tgaagactccaagaaggatatcaagttatttataaactcacctggtggttctgtaactgctggaatgggaatttatgatgccatgaagttatgcaaggccgatgtgtcaactgtttgccttgggcttgctgcatccatgggtgcatttatccttgcttctggtacaaaaggcaagaggtattgtatgccaaattcaagagttatgattcatcaaccacttggaacggctggtggaaaagctacagaaatgagcattcgcataagagaaatggcatatcacaagattaagataaacaagatactatcacgaattacagggaaacctgaagagcagattgaattggacactgatcgtgataattttatgaatccttgggaagccaagaatatggtttag

SEQ ID NO: 222689 - DNA, 491 bp, Glycine max
tgggatcagtgagttttgtgattcattttgtgccacttatgtgagatacgtgaagtgcagaatggagaatgcgagaataagccagtggttgatccttctggtgtgtgcgctgctgttgctgatatcagaagcttcttatgtgccaatcactattgttcagaacgcggtagcaaaaggagctgtttgtttggatgggagtccaccagcttatcattttgataggggatttggatcagggattaacaattggttggttgcatttgagggaggaggatggtgcaacaatgtcactacttgccttgctcgcaagaccaatcgtttaggttcatctaagcaaatggccaagctaattgccttttcaggaattttgaataacagggaaatgtttaatccagatttctacaactggaacagaatcaaggttaggtattgtgacggttcatcatttactggtgatgtggaagcagtgaatccagtgactaagttgcact
